United States Patent Application Publication US 2023/0302116 A1 - sequence listing, part 4

SEQ ID NO: 4221 - DNA, 2148 bp, Artificial Sequence
  Description of Artificial Sequence: Synthetic polynucleotide
atgggcatcctgccaagcccaggaatgcccgccctgctgtctctggtgagcctgctgtccgtgctgctgatgggatgcgtggcagagacaggcacacagtgcgtgaacctgaccacaaggacccagctgccccctgcctataccaattctttcacacggggcgtgtactatcccgacaaggtgtttagaagctccgtgctgcactccacacaggatctgtttctgcctttcttttctaacgtgacctggttccacgccatccacgtgtccggcaccaatggcacaaagcggttcgacaatcccgtgctgccttttaacgatggcgtgtacttcgccagcaccgagaagtccaacatcatcagaggctggatctttggcaccacactggactctaagacacagagcctgctgatcgtgaacaatgccacccaagtggtgatcaaggtgtgcgagttccagttttgtaatgatccattcctgggcgtgtactatcacaagaacaataagtcctggatggagtctgagtttcgcgtgtattctagcgccaacaattgcacatttgagtacgtgagccagcccttcctgatggacctggagggcaagcagggcaatttcaagaacctgagggagttcgtgtttaagaatatcgatggctacttcaagatctacagcaagcacaccccaatcaacctggtgcgcgacctgccacagggattctccgccctggagccactggtggatctgcccatcggcatcaacatcacccggtttcagacactgctggccctgcacagatcctacctgacaccaggcgactcctctagcggatggaccgcaggagctgccgcctactatgtgggctatctgcagccccggaccttcctgctgaagtacaacgagaatggcaccatcacagacgcagtggattgcgccctggaccccctgtctgagacaaagtgtacactgaagagctttaccgtggagaagggcatctatcagacaagcaatttcagggtgcagcctaccgagtccatcgtgcgctttcccaatatcacaaacctgtgcccttttggcgaggtgttcaacgccaccagattcgccagcgtgtacgcctggaatcggaagagaatctccaactgcgtggccgactattctgtgctgtacaactccgcctctttcagcacctttaagtgctatggcgtgtctcccacaaagctgaatgatctgtgctttaccaacgtgtacgccgatagcttcgtgatcaggggagacgaagtgagacagatcgcaccaggacagacaggaaagatcgcagactacaattataagctgcctgacgatttcaccggctgcgtgatcgcctggaactccaacaatctggattctaaagtgggcggcaactacaattatctgtacaggctgtttcgcaagtccaatctgaagccattcgagcgggacatctccacagagatctaccaggccggctctaccccctgcaatggcgtggagggctttaactgttatttccctctgcagtcttacggcttccagccaacaaacggcgtgggctatcagccctacagagtggtggtgctgtcctttgagctgctgcacgcaccagcaacagtgtgcggcccaaagaagtctaccaatctggtgaagaacaagtgcgtgaacttcaacttcaacggactgaccggcacaggcgtgctgaccgagagcaataagaagttcctgccttttcagcagttcggcagggacatcgcagataccacagacgccgtgcgcgaccctcagaccctggagatcctggacatcacaccatgcagcttcggcggcgtgtccgtgatcacaccaggcaccaatacatccaaccaggtggccgtgctgtatcaggacgtgaattgtaccgaggtgcccgtggcaatccacgcagatcagctgacccctacatggcgggtgtactctaccggcagcaacgtgttccagacaagagccggatgcctgatcggagcagagcacgtgaacaatagctatgagtgcgacatccctatcggcgccggcatctgtgccagctaccagacccagacaaactccccatctggagcaggctcccaccatcaccatcaccatcaccatcaccactga

SEQ ID NO: 4222 - DNA, 2148 bp, Artificial Sequence
  Description of Artificial Sequence: Synthetic polynucleotide
atgggcatcctgccaagcccaggaatgcccgccctgctgtctctggtgagcctgctgtccgtgctgctgatgggatgcgtggcagagacaggcacacagtgcgtgaacctgaccacaaggacccagctgccccctgcctataccaattctttcacacggggcgtgtactatcccgacaaggtgtttagaagctccgtgctgcactccacacaggatctgtttctgcctttcttttctaacgtgacctggttccacgccatccacgtgtccggcaccaatggcacaaagcggttcgacaatcccgtgctgccttttaacgatggcgtgtacttcgccagcaccgagaagtccaacatcatcagaggctggatctttggcaccacactggactctaagacacagagcctgctgatcgtgaacaatgccaccaacgtggtgatcaaggtgtgcgagttccagttttgtaatgatccattcctgggcgtgtactatcacaagaacaataagtcctggatggagtctgagtttcgcgtgtattctagcgccaacaattgcacatttgagtacgtgagccagcccttcctgatggacctggagggcaagcagggcaatttcaagaacctgagggagttcgtgtttaagaatatcgatggctacttcaagatctacagcaagcacaccccaatcaacctggtgcgcgacctgccacagggattctccgccctggagccactggtggatctgcccatcggcatcaacatcacccggtttcagacactgctggccctgcacagatcctacctgacaccaggcgactcctctagcggatggaccgcaggagctgccgcctactatgtgggctatctgcagccccggaccttcctgctgaagtacaacgagaatggcaccatcacagacgcagtggattgcgccctggaccccctgtctgagacaaagtgtacactgaagagctttaccgtggagaagggcatctatcagacaagcaatttcagggtgcagcctaccgagtccatcgtgcgctttcccaatatcacaaacctgtgcccttttggcgaggtgttcaacgccccgagattcgccagcgtgtacgcctggaatcggaagagaatctccaactgcgtggccgactattctgtgctgtacaactccgcctctttcagcacctttaagtgctatggcgtgtctcccacaaagctgaatgatctgtgctttaccaacgtgtacgccgatagcttcgtgatcaggggagacgaagtgagacagatcgcaccaggacagacaggaaagatcgcagactacaattataagctgcctgacgatttcaccggctgcgtgatcgcctggaactccaacaatctggattctaaagtgggcggcaactacaattatctgtacaggctgtttcgcaagtccaatctgaagccattcgagcgggacatctccacagagatctaccaggccggctctaccccctgcaatggcgtggagggctttaactgttatttccctctgcagtcttacggcttccagccaacaaacggcgtgggctatcagccctacagagtggtggtgctgtcctttgagctgctgcacgcaccagcaacagtgtgcggcccaaagaagtctaccaatctggtgaagaacaagtgcgtgaacttcaacttcaacggactgaccggcacaggcgtgctgaccgagagcaataagaagttcctgccttttcagcagttcggcagggacatcgcagataccacagacgccgtgcgcgaccctcagaccctggagatcctggacatcacaccatgcagcttcggcggcgtgtccgtgatcacaccaggcaccaatacatccaaccaggtggccgtgctgtatcaggacgtgaattgtaccgaggtgcccgtggcaatccacgcagatcagctgacccctacatggcgggtgtactctaccggcagcaacgtgttccagacaagagccggatgcctgatcggagcagagcacgtgaacaatagctatgagtgcgacatccctatcggcgccggcatctgtgccagctaccagacccagacaaactccccatctggagcaggctcccaccatcaccatcaccatcaccatcaccactga

SEQ ID NO: 4223 - DNA, 2148 bp, Artificial Sequence
  Description of Artificial Sequence: Synthetic polynucleotide
atgggcatcctgccaagcccaggaatgcccgccctgctgtctctggtgagcctgctgtccgtgctgctgatgggatgcgtggcagagacaggcacacagtgcgtgaacctgaccacaaggacccagctgccccctgcctataccaattctttcacacggggcgtgtactatcccgacaaggtgtttagaagctccgtgctgcactccacacaggatctgtttctgcctttcttttctaacgtgacctggttccacgccatccacgtgtccggcaccaatggcacaaagcggttcgacaatcccgtgctgccttttaacgatggcgtgtacttcgccagcaccgagaagtccaacatcatcagaggctggatctttggcaccacactggactctaagacacagagcctgctgatcgtgaacaatgccaccaacgtggtgatcaaggtgtgcgagttccagttttgtaatgatccattcctgggcgtgtactatcacaagaacaataagtcctggatggagtctgagtttcgcgtgtattctagcgccaacaattgcacatttgagtacgtgagccagcccttcctgatggacctggagggcaagcagggcaatttcaagaacctgagggagtacgtgtttaagaatatcgatggctacttcaagatctacagcaagcacaccccaatcaacctggtgcgcgacctgccacagggattctccgccctggagccactggtggatctgcccatcggcatcaacatcacccggtttcagacactgctggccctgcacagatcctacctgacaccaggcgactcctctagcggatggaccgcaggagctgccgcctactatgtgggctatctgcagccccggaccttcctgctgaagtacaacgagaatggcaccatcacagacgcagtggattgcgccctggaccccctgtctgagacaaagtgtacactgaagagctttaccgtggagaagggcatctatcagacaagcaatttcagggtgcagcctaccgagtccatcgtgcgctttcccaatatcacaaacctgtgcccttttggcgaggtgttcaacgccaccagattcgccagcgtgtacgcctggaatcggaagagaatctccaactgcgtggccgactattctgtgctgtacaactccgcctctttcagcacctttaagtgctatggcgtgtctcccacaaagctgaatgatctgtgctttaccaacgtgtacgccgatagcttcgtgatcaggggagacgaagtgagacagatcgcaccaggacagacaggaaagatcgcagactacaattataagctgcctgacgatttcaccggctgcgtgatcgcctggaactccaacaatctggattctaaagtgggcggcaactacaattatctgtacaggctgtttcgcaagtccaatctgaagccattcgagcgggacatctccacagagatctaccaggccggctctaccccctgcaatggcgtggagggctttaactgttatttccctctgcagtcttacggcttccagccaacaaacggcgtgggctatcagccctacagagtggtggtgctgtcctttgagctgctgcacgcaccagcaacagtgtgcggcccaaagaagtctaccaatctggtgaagaacaagtgcgtgaacttcaacttcaacggactgaccggcacaggcgtgctgaccgagagcaataagaagttcctgccttttcagcagttcggcagggacatcgcagataccacagacgccgtgcgcgaccctcagaccctggagatcctggacatcacaccatgcagcttcggcggcgtgtccgtgatcacaccaggcaccaatacatccaaccaggtggccgtgctgtatcaggacgtgaattgtaccgaggtgcccgtggcaatccacgcagatcagctgacccctacatggcgggtgtactctaccggcagcaacgtgttccagacaagagccggatgcctgatcggagcagagcacgtgaacaatagctatgagtgcgacatccctatcggcgccggcatctgtgccagctaccagacccagacaaactccccatctggagcaggctcccaccatcaccatcaccatcaccatcaccactga

SEQ ID NO: 4224 - DNA, 2148 bp, Artificial Sequence
  Description of Artificial Sequence: Synthetic polynucleotide
atgggcatcctgccaagcccaggaatgcccgccctgctgtctctggtgagcctgctgtccgtgctgctgatgggatgcgtggcagagacaggcacacagtgcgtgaacctgaccacaaggacccagctgccccctgcctataccaattctttcacacggggcgtgtactatcccgacaaggtgtttagaagctccgtgctgcactccacacaggatctgtttctgcctttcttttctaacgtgacctggttccacgccatccacgtgtccggcaccaatggcacaaagcggttcgacaatcccgtgctgccttttaacgatggcgtgtacttcgccagcaccgagaagtccaacatcatcagaggctggatctttggcaccacactggactctaagacacagagcctgctgatcgtgaacaatgccaccaacgtggtgatcaaggtgtgcgagttccagttttgtaatgatccattcctgggcgtgtactatcacaagaacaataagtcctggatggagtctgagtttcgcgtgtattctagcgccaacaattgcacatttgagtacgtgagccagcccttcctgatggacctggagggcaagcagggcaatttcaagaacctgagggagttcgtgtttaagaatatcgatggctacttcaagatctacagcaagccgaccccaatcaacctggtgcgcgacctgccacagggattctccgccctggagccactggtggatctgcccatcggcatcaacatcacccggtttcagacactgctggccctgcacagatcctacctgacaccaggcgactcctctagcggatggaccgcaggagctgccgcctactatgtgggctatctgcagccccggaccttcctgctgaagtacaacgagaatggcaccatcacagacgcagtggattgcgccctggaccccctgtctgagacaaagtgtacactgaagagctttaccgtggagaagggcatctatcagacaagcaatttcagggtgcagcctaccgagtccatcgtgcgctttcccaatatcacaaacctgtgcccttttggcgaggtgttcaacgccaccagattcgccagcgtgtacgcctggaatcggaagagaatctccaactgcgtggccgactattctgtgctgtacaactccgcctctttcagcacctttaagtgctatggcgtgtctcccacaaagctgaatgatctgtgctttaccaacgtgtacgccgatagcttcgtgatcaggggagacgaagtgagacagatcgcaccaggacagacaggaaagatcgcagactacaattataagctgcctgacgatttcaccggctgcgtgatcgcctggaactccaacaatctggattctaaagtgggcggcaactacaattatctgtacaggctgtttcgcaagtccaatctgaagccattcgagcgggacatctccacagagatctaccaggccggctctaccccctgcaatggcgtggagggctttaactgttatttccctctgcagtcttacggcttccagccaacaaacggcgtgggctatcagccctacagagtggtggtgctgtcctttgagctgctgcacgcaccagcaacagtgtgcggcccaaagaagtctaccaatctggtgaagaacaagtgcgtgaacttcaacttcaacggactgaccggcacaggcgtgctgaccgagagcaataagaagttcctgccttttcagcagttcggcagggacatcgcagataccacagacgccgtgcgcgaccctcagaccctggagatcctggacatcacaccatgcagcttcggcggcgtgtccgtgatcacaccaggcaccaatacatccaaccaggtggccgtgctgtatcaggacgtgaattgtaccgaggtgcccgtggcaatccacgcagatcagctgacccctacatggcgggtgtactctaccggcagcaacgtgttccagacaagagccggatgcctgatcggagcagagcacgtgaacaatagctatgagtgcgacatccctatcggcgccggcatctgtgccagctaccagacccagacaaactccccatctggagcaggctcccaccatcaccatcaccatcaccatcaccactga

SEQ ID NO: 4225 - DNA, 2148 bp, Artificial Sequence
  Description of Artificial Sequence: Synthetic polynucleotide
atgggcatcctgccaagcccaggaatgcccgccctgctgtctctggtgagcctgctgtccgtgctgctgatgggatgcgtggcagagacaggcacacagtgcgtgaacctgaccacaaggacccagctgccccctgcctataccaattctttcacacggggcgtgtactatcccgacaaggtgtttagaagctccgtgctgcactccacacaggatctgtttctgcctttcttttctaacgtgacctggttccacgccatccacgtgtccggcaccaatggcacaaagcggttcgacaatcccgtgctgccttttaacgatggcgtgtacttcgccagcaccgagaagtccaacatcatcagaggctggatctttggcaccacactggactctaagacacagagcctgctgatcgtgaacaatgccaccaacgtggtgatcaaggtgtgcgagttccagttttgtaatgatccattcctgggcgtgtactatcacaagaacaataagtcctggatggagtctgagtttcgcgtgtattctagcgccaacaattgcacatttgagtacgtgagccagcccttcctgatggacctggagggcaagcagggcaatttcaagaacctgagggagttcgtgtttaagaatatcgatggctacttcaagatctacagcaagcacaccccaatcaacctggtgcgcgacctgccacagggattctccgccctggagccactggtggatctgcccatcggcatcaacatcacccggtttcagacactgctggccctgcacagatcctacctgacaccaggcgactcctctagcggatggaccgcaggagctgccgcctactatgtgggctatctgcagccccggaccttcctgctgaagtacaacgagaatggcaccatcacagacgcagtggattgcgccctggaccccctgtctgagacaaagtgtacactgaagagctttaccgtggagaagggcatctatcagacaagcaatttcagggtgcagcctaccgagtccatcgtgcgctttcccaatatcacaaacctgtgcccttttggcgaggtgttcaacgaaaccagattcgccagcgtgtacgcctggaatcggaagagaatctccaactgcgtggccgactattctgtgctgtacaactccgcctctttcagcacctttaagtgctatggcgtgtctcccacaaagctgaatgatctgtgctttaccaacgtgtacgccgatagcttcgtgatcaggggagacgaagtgagacagatcgcaccaggacagacaggaaagatcgcagactacaattataagctgcctgacgatttcaccggctgcgtgatcgcctggaactccaacaatctggattctaaagtgggcggcaactacaattatctgtacaggctgtttcgcaagtccaatctgaagccattcgagcgggacatctccacagagatctaccaggccggctctaccccctgcaatggcgtggagggctttaactgttatttccctctgcagtcttacggcttccagccaacaaacggcgtgggctatcagccctacagagtggtggtgctgtcctttgagctgctgcacgcaccagcaacagtgtgcggcccaaagaagtctaccaatctggtgaagaacaagtgcgtgaacttcaacttcaacggactgaccggcacaggcgtgctgaccgagagcaataagaagttcctgccttttcagcagttcggcagggacatcgcagataccacagacgccgtgcgcgaccctcagaccctggagatcctggacatcacaccatgcagcttcggcggcgtgtccgtgatcacaccaggcaccaatacatccaaccaggtggccgtgctgtatcaggacgtgaattgtaccgaggtgcccgtggcaatccacgcagatcagctgacccctacatggcgggtgtactctaccggcagcaacgtgttccagacaagagccggatgcctgatcggagcagagcacgtgaacaatagctatgagtgcgacatccctatcggcgccggcatctgtgccagctaccagacccagacaaactccccatctggagcaggctcccaccatcaccatcaccatcaccatcaccactga

SEQ ID NO: 4226 - DNA, 2148 bp, Artificial Sequence
  Description of Artificial Sequence: Synthetic polynucleotide
atgggcatcctgccaagcccaggaatgcccgccctgctgtctctggtgagcctgctgtccgtgctgctgatgggatgcgtggcagagacaggcacacagtgcgtgaacctgaccacaaggacccagctgccccctgcctataccaattctttcacacggggcgtgtactatcccgacaaggtgtttagaagctccgtgctgcactccacacaggatctgtttctgcctttcttttctaacgtgacctggttccacgccatccacgtgtccggcaccaatggcacaaagcggttcgacaatcccgtgctgccttttaacgatggcgtgtacttcgccagcaccgagaagtccaacatcatcagaggctggatctttggcaccacactggactctaagacacagagcctgctgatcgtgaacaatgccaccaacgtggtgatcaaggtgtgcgagttccagttttgtaatgatccattcctgggcgtgtactatcacaagaacaataagtcctggatggagtctgagtttcgcgtgtattctagcgccaacaattgcacatttgagtacgtgagccagcccttcctgatggacctggagggcaagcagggcaatttcaagaacctgagggagttcgtgtttaagaatatcgatggctacttcaagatctacagcaagcacaccccaatcaacctggtgcgcgacctgccacagggattctccgccctggagccactggtggatctgcccatcggcatcaacatcacccggtttcagacactgctggccctgcacagatcctacctgacaccaggcgactcctctagcggatggaccgcaggagctgccgcctactatgtgggctatctgcagccccggaccttcctgctgaagtacaacgagaatggcaccatcacagacgcagtggattgcgccctggaccccctgtctgagacaaagtgtacactgaagagctttaccgtggagaagggcatctatcagacaagcaatttcagggtgcagcctaccgagtccatcgtgcgctttcccaatatcacaaacctgtgcccttttggcgaggtgttcaacgccaccagattcgccagcgtgtacgcctggaatcggaagagaatctccaactgcgtggccgactattctgtgctgtacaactccgcctctttcagcacctttcaatgctatggcgtgtctcccacaaagctgaatgatctgtgctttaccaacgtgtacgccgatagcttcgtgatcaggggagacgaagtgagacagatcgcaccaggacagacaggaaagatcgcagactacaattataagctgcctgacgatttcaccggctgcgtgatcgcctggaactccaacaatctggattctaaagtgggcggcaactacaattatctgtacaggctgtttcgcaagtccaatctgaagccattcgagcgggacatctccacagagatctaccaggccggctctaccccctgcaatggcgtggagggctttaactgttatttccctctgcagtcttacggcttccagccaacaaacggcgtgggctatcagccctacagagtggtggtgctgtcctttgagctgctgcacgcaccagcaacagtgtgcggcccaaagaagtctaccaatctggtgaagaacaagtgcgtgaacttcaacttcaacggactgaccggcacaggcgtgctgaccgagagcaataagaagttcctgccttttcagcagttcggcagggacatcgcagataccacagacgccgtgcgcgaccctcagaccctggagatcctggacatcacaccatgcagcttcggcggcgtgtccgtgatcacaccaggcaccaatacatccaaccaggtggccgtgctgtatcaggacgtgaattgtaccgaggtgcccgtggcaatccacgcagatcagctgacccctacatggcgggtgtactctaccggcagcaacgtgttccagacaagagccggatgcctgatcggagcagagcacgtgaacaatagctatgagtgcgacatccctatcggcgccggcatctgtgccagctaccagacccagacaaactccccatctggagcaggctcccaccatcaccatcaccatcaccatcaccactga

SEQ ID NO: 4227 - DNA, 2148 bp, Artificial Sequence
  Description of Artificial Sequence: Synthetic polynucleotide
atgggcatcctgccaagcccaggaatgcccgccctgctgtctctggtgagcctgctgtccgtgctgctgatgggatgcgtggcagagacaggcacacagtgcgtgaacctgaccacaaggacccagctgccccctgcctataccaattctttcacacggggcgtgtactatcccgacaaggtgtttagaagctccgtgctgcactccacacaggatctgtttctgcctttcttttctaacgtgacctggttccacgccatccacgtgtccggcaccaatggcacaaagcggttcgacaatcccgtgctgccttttaacgatggcgtgtacttcgccagcaccgagaagtccaacatcatcagaggctggatctttggcaccacactggactctaagacacagagcctgctgatcgtgaacaatgccaccaacgtggtgatcaaggtgtgcgagttccagttttgtaatgatccattcctgggcgtgtactatcacaagaacaataagtcctggatggagtctgagtttcgcgtgtattctagcgccaacaattgcacatttgagtacgtgagccagcccttcctgatggacctggagggcaagcagggcaatttcaagaacctgagggagttcgtgtttaagaatatcgatggctacttcaagatctacagcaagcacaccccaatcaacctggtgcgcgacctgccacagggattctccgccctggagccactggtggatctgcccatcggcatcaacatcacccggtttcagacactgctggccctgcacagatcctacctgacaccaggcgactcctctagcggatggaccgcaggagctgccgcctactatgtgggctatctgcagccccggaccttcctgctgaagtacaacgagaatggcaccatcacagacgcagtggattgcgccctggaccccctgtctgagacaaagtgtacactgaagagctttaccgtggagaagggcatctatcagacaagcaatttcagggtgcagcctaccgagtccatcgtgcgctttcccaatatcacaaacctgtgcccttttggcgaggtgttcaacgccaccagattcgccagcgtgtacgcctggaatcggaagagaatctccaactgcgtggccgactattctgtgctgtacaactccgcctctttcagcacctttaagtgctatggcgtgtctcccacaaagctgaatgatctgtgctttaccaacgtgtacgccgatagcttcgtgatcaggggagacgaagtgagacagatcgcaccaggacagacaggaaagatcgcagactacaattataagctgcctgacgatttcaccggctgcgtgatcgcctggaactccaacaatctggattctaaagtgggcggcaactacaattatctgtacaggctgtttcgcaagtccaatctgaagccattcgagcgggacatctccacagagatctaccaggccggctctaccccctgcaatggcgtggagggctttaactgttatttccctctgcagtcttacggcttccagccaacaaacggcgtgggctatcagccctacagagtggtggtgctgtcctttgagctgctgcacgcaccagcaacagtgtgcggcccaaagaagtctaccaatctggtgaagaacaagtgcgtgaacttcaacttcaacggactgaccggcacaggcgtgctgaccgagagcaataagaagttcctgccttttcagcagttcggcagggacatcgcagataccacagacgccgtgcgcgaccctcagaccctggagatcctggacatcacaccatgcagcgatggcggcgtgtccgtgatcacaccaggcaccaatacatccaaccaggtggccgtgctgtatcaggacgtgaattgtaccgaggtgcccgtggcaatccacgcagatcagctgacccctacatggcgggtgtactctaccggcagcaacgtgttccagacaagagccggatgcctgatcggagcagagcacgtgaacaatagctatgagtgcgacatccctatcggcgccggcatctgtgccagctaccagacccagacaaactccccatctggagcaggctcccaccatcaccatcaccatcaccatcaccactga

SEQ ID NO: 4228 - DNA, 2148 bp, Artificial Sequence
  Description of Artificial Sequence: Synthetic polynucleotide
atgggcatcctgccaagcccaggaatgcccgccctgctgtctctggtgagcctgctgtccgtgctgctgatgggatgcgtggcagagacaggcacacagtgcgtgaacctgaccacaaggacccagctgccccctgcctataccaattctttcacacggggcgtgtactatcccgacaaggtgtttagaagctccgtgctgcactccacacaggatctgtttctgcctttcttttctaacgtgacctggttccacgccgagcacgtgtccggcaccaatggcacaaagcggttcgacaatcccgtgctgccttttaacgatggcgtgtacttcgccagcaccgagaagtccaacatcatcagaggctggatctttggcaccacactggactctaagacacagagcctgctgatcgtgaacaatgccaccaacgtggtgatcaaggtgtgcgagttccagttttgtaatgatccattcctgggcgtgtactatcacaagaacaataagtcctggatggagtctgagtttcgcgtgtattctagcgccaacaattgcacatttgagtaccatagccagcccttcctgatggacctggagggcaagcagggcaatttcaagaacctgagggagttcgtgtttaagaatatcgatggctacttcaagatctacagcaagcacaccccaatcaacctggtgcgcgacctgccacagggattctccgccctggagccactggtggatctgcccatcggcatcaacatcacccggtttcagacactgctggccctgcacagatcctacctgacaccaggcgactcctctagcggagaaaccgcaggagctgccgcctactatgtgggctatctgcagccccggaccttcctgctgaagtacaacgagaatggcaccatcacagacgcagtggattgcgccctggaccccctgtctgagacaaagtgtacactgaagagctttaccgtggagaagggcatctatcagacaagcaatttcagggtgcagcctaccgagtccatcgtgcgctttcccaatatcacaaacccgtgcccttttggcgaggtgttcaacgccaccagattcgccagcgtgtacgcctggaatcggaagagaatctccaactgcgtggccgactattctgtgctgtacaactccgcctctttcagcacctttaagtgctatggcgtgtctcccacaaagctgaatgatctgtgctttaccaacgtgtacgccgatagcttcgtgatcaggggagacgaagtgagacagatcgcaccaggacagacaggaaagatcgcagactacaattataagctgcctgacgatttcaccggctgcgtgatcgcctggaactccaacaatctggattctaaagtgggcggcaactacaattatctgtacaggctgtttcgcaagtccaatctgaagccattcgagcgggacatctccacagagatctaccaggccggctctaccccctgcaatggcgtggagggctttaactgttatttccctctgcagtcttacggcttccagccaacaaacggcccgggccaacagccctacagagtggtggtgctgtcctttgagctgctgcacgcaccagcaacagtgtgcggcccaaagaagtctaccaatctggtgaagaacaagtgcgtgaacttcaacttcaacggactgaccggcacaggcgtgctgaccgagagcaataagaagttcctgccttttcagcagttcggcagggacatcgcagataccacagacgccgtgcgcgaccctcagaccctggagatcctggacatcacaccatgcagcttcggcggcgtgtccgtgatcacaccaggcaccaatacatccaaccaggtggccgtgctgtatcaggacgtgaattgtaccgaggtgcccgatgcaatccacgcagatcagctgacccctacatggcgggtgtactctaccggcagcaacgtgttccagacaagagccggatgcctgatcggagcagagcacgtgaacaatagctatgagtgcgacatccctatcggcgccggcatctgtgccagctaccagacccagacaaactccccatctggagcaggctcccaccatcaccatcaccatcaccatcaccactga

SEQ ID NO: 4229 - DNA, 2148 bp, Artificial Sequence
  Description of Artificial Sequence: Synthetic polynucleotide
atgggcatcctgccaagcccaggaatgcccgccctgctgtctctggtgagcctgctgtccgtgctgctgatgggatgcgtggcagagacaggcacacagtgcgtgaacctgaccacaaggacccagctgccccctgcctataccaattctttcacacggggcgtgtactatcccgacaaggtgtttagaagctccgtgctgcactccacacaggatctgtttctgcctttcttttctaacgtgacctggttccacgccatccacgtgtccggcaccaatggcacaaagcggttcgacaatcccgtgctgccttttaacgatggcgtgtacttcgccagcaccgagaagtccaacatcatcagaggctggatctttggcaccacactggactctaagacacagagcctgctgatcgtgaacaatgccaccaacgtggtgatcaaggtgtgcgagttccagttttgtaatgatccattcctgggcgtgtactatcacaagaacaataagtcctggatggagtctgagtttcgcgtgtattctagcgccaacaattgcacatttgagtacgtgagccagcccttcctgatggacctggagggcaagcagggcaatttcaagaacctgagggagttcgtgtttaagaatatcgatggctacttcaagatctacagcaagcacaccccaatcaacctggtgcgcgacctgccacagggattctccgccctggagccactggtggatctgcccatcggcatcaacatcacccggtttcagacactgctggccctgcacagatcctacctgacaccaggcgactcctctagcggatggaccgcaggagctgccgcctactatgtgggctatctgcagccccggaccttcctgctgaagtacaacgagaatggcaccatcacagacgcagtggattgcgccctggaccccctgtctgagacaaagtgtacactgaagagctttaccgtggagaagggcatctatcagacaagcaatttcagggtgcagcctaccgagtccatcgtgcgctttcccaatatcacaaacctgtgcccttttggcgaggtgttcaacgccaccagattcgccagcgtgtacgcctggaatcggaagagaatctccaactgcgtggccgactattctgtgctgtacaactccgcctctttcagcacctttaagtgctatggcgtgtctcccacaaagctgaatgatctgtgctttaccaacgtgtacgccgatagcttcgtgatcaggggagacgaagtgagacagatcgcaccaggacagacaggaaagatcgcagactacaattataagctgcctgacgatttcaccggctgcgtgatcgcctggaactccaacaatctggattctaaagtgggcggcaactacaattatctgtacaggctgtttcgcaagtccaatctgaagccattcgagcgggacatctccacagagatctaccaggccggctctaccccctgcaatggcgtggagggctttaactgttatttccctctgcagtcttacggcttccagccaacaaacggcgtgggctatcagccctacagagtggtggtgctgtcctttgagctgctgcacgcaccagcaacagtgtgcggcccaaagaagtctaccaatctggtgaagaacaagtgcgtgaacttcaacttcaacggactgaccggcacaggcgtgctgaccgagagcaataagaagttcctgccttttcagcagttcggcagggacatcgcagataccacagacgccgtgcgcgaccctcagaccctggagatcctggacatcacaccatgcagcttcggcggcgtgtccgtgatcacaccaggcaccaatacatccaaccaggtggccgtgctgtatcaggacgtgaattgtaccgaggtgcccgtggcaatccacgcagatcagctgcgacctacatggcgggtgtactctaccggcagcaacgtgttccagacaagagccggatgcctgatcggagcagagcacgtgaacaatagctatgagtgcgacatccctatcggcgccggcatctgtgccagctaccagacccagacaaactccccatctggagcaggctcccaccatcaccatcaccatcaccatcaccactga

SEQ ID NO: 4230 - DNA, 2148 bp, Artificial Sequence
  Description of Artificial Sequence: Synthetic polynucleotide
atgggcatcctgccaagcccaggaatgcccgccctgctgtctctggtgagcctgctgtccgtgctgctgatgggatgcgtggcagagacaggcacacagtgcgtgaacctgaccacaaggacccagctgccccctgcctataccaattctttcacacggggcgtgtactatcccgacaaggtgtttagaagctccgtgctgcactccacacaggatctgtttctgcctttcttttctaacgtgacctggttccacgccatccacgtgtccggcaccaatggcacaaagcggttcgacaatcccgtgctgccttttaacgatggcgtgtacttcgccagcaccgagaagtccaacatcatcagaggctggatctttggcaccacactggactctaagacacagagcctgctgatcgtgaacaatgccaccaacgtggtgatcaaggtgtgcgagttccagttttgtaatgatccattcctgggcgtgtactatcacaagaacaataagtcctggatggagtctgagtttcgcgtgtattctagcgccaacaattgcacatttgagtacgtgagccagcccttcctgatggacctggagggcaagcagggcaatttcaagaacctgagggagttcgtgtttaagaatatcgatggctacttcaagatctacagcaagcacaccccaatcaacctggtgcgcgacctgccacagggattctccgccctggagccactggtggatctgcccatcggcatcaacatcacccggtttcagacactgctggccctgcacagatcctacctgacaccaggcgactcctctagcggatggaccgcaggagctgccgcctactatgtgggctatctgcagccccggaccttcctgctgaagtacaacgagaatggcaccatcacagacgcagtggattgcgccctggaccccctgtctgagacaaagtgtacactgaagagctttaccgtggagaagggcatctatcagacaagcaatttcagggtgcagcctaccgagtccatcgtgcgctttcccaatatcacaaacctgtgcccttttggcgaggtgttcaacgccaccagattcgccagcgtgtacgcctggaatcggaagagaatctccaactgcgtggccgactattctgtgctgtacaactccgcctctttcagcacctttaagtgctatggcgtgtctcccacaaagctgaatgatctgtgctttaccaacgtgtacgccgatagcttcgtgatcaggggagacgaagtgagacagatcgcaccaggacagacaggaaagatcgcagactacaattataagctgcctgacgatttcaccggctgcgtgatcgcctggaactccaacaatctggattctaaagtgggcggcaactacaattatctgtacaggctgtttcgcaagtccaatctgaagccattcgagcgggacatctccacagagatctaccaggccggctctaccccctgcaatggcgtggagggctttaactgttatttccctctgcagtcttacggcttccagccaacaaacggcgtgggctatcagccctacagagtggtggtgctgtcctttgagctgctgcacgcaccagcaacagtgtgcggcccaaagaagtctaccaatctggtgaagaacaagtgcgtgaacttcaacttcaacggactgaccggcacaggcgtgctgaccgagagcaataagaagttcctgccttttcagcagttcggcagggacatcgcagataccacagacgccgtgcgcgaccctcagaccctggagatcctggacatcacaccatgcagcttcggcggcgtgtccgtgatcacaccaggcaccaatacatccaaccaggtggccgtgctgtatcaggacgtgaattgtaccgaggtgcccgtggcaatccacgcagatcagctgacccctacatggcgggtgtactctaccggcagcaacgtgttccagacaagagccggatgcctgatcggagcagagcacgtgaacaatagctatgagtgcgacatccctatcggcgccggcatctgtgccagctaccagacccagcgaaactccccatctggagcaggctcccaccatcaccatcaccatcaccatcaccactga

SEQ ID NO: 4231 - DNA, 2148 bp, Artificial Sequence
  Description of Artificial Sequence: Synthetic polynucleotide
atgggcatcctgccaagcccaggaatgcccgccctgctgtctctggtgagcctgctgtccgtgctgctgatgggatgcgtggcagagacaggcacacagtgcgtgaacctgaccacaaggacccagctgccccctgcctataccaattctttcacacggggcgtgtactatcccgacaaggtgtttagaagctccgtgctgcactccacacaggatctgtttctgcctttcttttctaacgtgacctggttccacgccatccacgtgtccggcaccaatggcacaaagcggttcgacaatcccgtgctgccttttaacgatggcgtgtacttcgccagcaccgagaagtccaacatcatcagaggctggatctttggcaccacactggactctaagacacagagcctgctgatcgtgaacaatgccaccaacgtggtgatcaaggtgtgcgagttccagttttgtaatgatccattcctgggcgtgtactatcacaagaacaataagtcctggatggagtctgagtttcgcgtgtattctagcgccaacaattgcacatttgagtacgtgagccagcccttcctgatggacctggagggcaagcagggcaatttcaagaacctgagggagttcgtgtttaagaatatcgatggctacttcaagatctacagcaagcacaccccaatcaacctggtgcgcgacctgccacagggattctccgccctggagccactggtggatctgcccatcggcatcaacatcacccggtttcagacactgctggccctgcacagatcctacctgacaccaggcgactcctctagcggatggaccgcaggagctgccgcctactatgtgggctatctgcagccccggaccttcctgctgaagtacaacgagaatggcaccatcacagacgcagtggattgcgccctggaccccctgtctgagacaaagtgtacactgaagagctttaccgtggagaagggcatctatcagacaagcaatttcagggtgcagcctaccgagtccatcgtgcgctttcccaatatcacaaacctgtgcccttttggcgaggtgttcaacgccaccagattcgccagcgtgtacgcctggaatcggaagagaatctccaactgcgtggccgactattctgtgctgtacaactccgcctctttcagcacctttaagtgctatggcgtgtctcccacaaagctgaatgatctgtgctttaccaacgtgtacgccgatagcttcgtgatcaggggagacgaagtgagacagatcgcaccaggacagacaggaaagatcgcagactacaattataagctgcctgacgatttcaccggctgcgtgatcgcctggaactccaacaatctggattctaaagtgggcggcaactacaattatctgtacaggctgtttcgcaagtccaatctgaagccattcgagcgggacatctccacagagatctaccaggccggctctaccccctgcaatggcgtggagggctttaactgttatttccctctgcagtcttacggcttccagccaacaaacggcgtgggctatcagccctacagagtggtggtgctgtcctttgagctgctgcacgcaccagcaacagtgtgcggcccaaagaagtctaccaatctggtgaagaacaagtgcgtgaacttcaacttcaacggactgaccggcacaggcgtgctgaccgagagcaataagaagttcctgccttttcagcagttcggcagggacatcgcagggaccacagacgccgtgcgcgaccctcagaccctggagatcctggacatcacaccatgcagcttcggcggcgtgtccgtgatcacaccaggcaccaatacatccaaccaggtggccgtgctgtatcaggacgtgaattgtaccgaggtgcccgtggcaatccacgcagatcagctgacccctacatggcgggtgtactctaccggcagcaacgtgttccagacaagagccggatgcctgatcggagcagagcacgtgaacaatagctatgagtgcgacatccctatcggcgccggcatctgtgccagctaccagacccagacaaactccccatctggagcaggctcccaccatcaccatcaccatcaccatcaccactga

SEQ ID NO: 4232 - DNA, 2148 bp, Artificial Sequence
  Description of Artificial Sequence: Synthetic polynucleotide
atgggcatcctgccaagcccaggaatgcccgccctgctgtctctggtgagcctgctgtccgtgctgctgatgggatgcgtggcagagacaggcacacagtgcgtgaacctgaccacaaggacccagctgccccctgcctataccaattctttcacacggggcgtgtactatcccgacaaggtgtttagaagctccgtgctgcactccacacaggatctgtttctgcctttcttttctaacgtgacctggttccacgccatccacgtgtccggcaccaatggcacaaagcggttcgacaatcccgtgctgccttttaacgatggcgtgtacttcgccagcaccgagaagtccaacatcatcagaggctggatctttggcaccacactggactctaagacacagagcctgctgatcgtgaacaatgccaccaacgtggtgatcaaggtgtgcgagttccagttttgtaatgatccattcctgggcgtgtactatcacaagaacaataagtcctggatggagtctgagtttcgcgtgtattctagcgccaacaattgcacatttgagtacgtgagccagcccttcctgatggacctggagggcaagcagggcaatttcaagaacctgagggagttcgtgtttaagaatatcgatggctacttcaagatctacagcaagcacaccccaatcaacctggtgcgcgacctgccacagggattctccgccctggagccactggtggatctgcccatcggcatcaacatcacccggtttcagacactgctggccctgcacagatcctacctgacaccaggcgactcctctagcggatggaccgcaggagctgccgcctactatgtgggctatctgcagccccggaccttcctgctgaagtacaacgagaatggcaccatcacagacgcagtggattgcgccctggaccccctgtctgagacaaagtgtacactgaagagctttaccgtggagaagggcatctatcagacaagcaatttcagggtgcagcctaccgagtccatcgtgcgctttcccaatatcacaaacctgtgcccttttggcgaggtgttcaacgccaccagattcgccagctcatacgcctggaatcggaagagaatctccaactgcgtggccgactattctgtgctgtacaactccgcctctttcagcacctttaagtgctatggcgtgtctcccacaaagctgaatgatctgtgctttaccaacgtgtacgccgatcgtttcgtgatcaggggagacgaagtgagacagatcgcaccaggacagacaggaaagatcgcagactacaattataagctgcctgacgatttcaccggctgcgtgatcgcctggaactccaacaatctggatgctaaagtgggcggcaactacaattatctgtacaggctgtttcgcaagtccaatctgaagccattcgagcggtttatctccacagagatctaccaggccggctctacccccgcgaatggcgtggagggctttaactgttatttccctctgcagtcttacggcttccagccaacaaacggcgtgggctatcagccctacagagtggtggtgctgtcctttgagctgctgcacgcaccacatacagtgtgcggcccaaagaagtctaccaatctggtgaagaacaagtgcgtgaacttcaacttcaacggactgaccggcacaggcgtgctgaccgagagcaataagaagttcctgccttttcagcagttcggcagggacatcgcagataccacagacgccgtgcgcgaccctcagaccctggagatcctggacatcacaccatgcagcttcggcggcgtgtccgtgatcacaccaggcaccaatacatccaaccaggtggccgtgctgtatcaggacgtgaattgtaccgaggtgcccgtggcaatccacgcagatcagctgacccctacatggcgggtgtactctaccggcagcaacgtgttccagacaagagccggatgcctgatcggagcagagcacgtgaacaatagctatgagtgcgacatccctatcggcgccggcatctgtgccagctaccagacccagacaaactccccatctggagcaggctcccaccatcaccatcaccatcaccatcaccactga

SEQ ID NO: 4233 - DNA, 2148 bp, Artificial Sequence
  Description of Artificial Sequence: Synthetic polynucleotide
atgggcatcctgccaagcccaggaatgcccgccctgctgtctctggtgagcctgctgtccgtgctgctgatgggatgcgtggcagagacaggcacacagtgcgtgaacctgaccacaaggacccagctgccccctgcctataccaattctttcacacggggcgtgtactatcccgacaaggtgtttagaagctccgtgctgcactccacacaggatctgtttctgcctttcttttctaacgtgacctggttccacgccatccacgtgtgtggcaccaatggcacaaagcggttcgacaatcccgtgctgccttttaacgatggcgtgtacttcgccagcaccgagaagtccaacatcatcagaggctggatctttggcaccacactggactctaagacacagagcctgctgatcgtgaacaatgccaccaacgtggtgatcaaggtgtgcgagttccagttttgtaatgatccattcctgggcgtgtactatcacaagaacaataagtcctggatggagtctgagtttcgcgtgtattctagcgccaacaattgcacatttgagtacgtgagccagcccttcctgatggacctggagggcaagcagggcaatttcaagaacctgagggagttcgtgtttaagaatatcgatggctacttcaagatctacagcaagcacaccccaatcaacctggtgcgcgacctgccacagggattctccgccctggagccactggtggatctgcccatcggcatcaacatcacccggtttcagacactgctggccctgcacagatcctacctgacaccaggcgactcctctagcggatggaccgcaggagctgccgcctactatgtgggctatctgcagccccggaccttcctgctgaagtacaacgagaatggcaccatcacagacgcagtggattgcgccctggaccccctgtctgagacaaagtgtacactgaagagctttaccgtggagaagggcatctatcagacaagcaatttcagggtgcagcctaccgagtccatcgtgcgctttcccaatatcacaaacctgtgcccttttggcgaggtgttcaacgccaccagattcgccagcgtgtacgcctggaatcggaagagaatctccaactgcgtggccgactattctgtgctgtacaactccgcctctttcagcacctttaagtgctatggcgtgtctcccacaaagctgaatgatctgtgctttaccaacgtgtacgccgatagcttcgtgatcaggggagacgaagtgagacagatcgcaccaggacagacaggaaagatcgcagactacaattataagctgcctgacgatttcaccggctgcgtgatcgcctggaactccaacaatctggattctaaagtgggcggcaactacaattatctgtacaggctgtttcgcaagtccaatctgaagccattcgagcgggacatctccacagagatctaccaggccggctctaccccctgcaatggcgtggagggctttaactgttatttccctctgcagtcttacggcttccagccaacaaacggcgtgggctatcagccctacagagtggtggtgctgtcctttgagctgctgcacgcaccagcaacagtgtgcggcccaaagaagtctaccaatctggtgaagaacaagtgcgtgaacttcaacttcaacggactgaccggcacaggcgtgctgaccgagagcaataagaagttcctgccttttcagcagttcggcagggacatcgcagataccacagacgccgtgcgcgaccctcagaccctggagatcctggacatcacaccatgcagcttcggcggcgtgtccgtgatcacaccaggcaccaatacatccaaccaggtggccgtgctgtatcaggacgtgaattgtaccgaggtgcccgtggcaatccacgcagatcagctgacccctacatggcgggtgtactctaccggcagcaacgtgttccagacaagagccggatgcctgatcggagcagagcacgtgaacaatagctatgagtgcgacatccctatcggcgccggcatctgtgccagctaccagacccagacaaactccccatctggagcaggctcccaccatcaccatcaccatcaccatcaccactga

SEQ ID NO: 4234 - DNA, 2148 bp, Artificial Sequence
  Description of Artificial Sequence: Synthetic polynucleotide
atgggcatcctgccaagcccaggaatgcccgccctgctgtctctggtgagcctgctgtccgtgctgctgatgggatgcgtggcagagacaggcacacagtgcgtgaacctgaccacaaggacccagctgccccctgcctataccaattctttcacacggggcgtgtactatcccgacaaggtgtttagaagctccgtgctgcactccacacaggatctgtttctgcctttcttttctaacgtgacctggttccacgccatccacgtgtccggcaccaatggcacaaagcggttcgacaatcccgtgctgccttttaacgatggcgtgtacttcgccagcaccgagaagtccaacatcatcagaggctggatctttggcaccacactggactctaagacacagagcctgctgatcgtgaacaatgccaccaacgtggtgatcaaggtgtgcgagttccagttttgtaatgatccattcctgggcgtgtactatcacaagaacaataagtcctggatggagtctgagtttcgcgtgtattctagcgccaacaattgcacatttgagtacgtgagccagcccttcctgatggacctggagggcaagcagggcaatttcaagaacctgagggagttcgtgtttaagaatatcgatggctacttcaagatctacagcaagcacaccccaatcaacctggtgcgcgacctgccacagggattctccgccctggagccactggtggatctgcccatcggcatcaacatcacccggtttcagacactgctggccctgcacagatcctacctgacaccaggcgactcctctagcggatggaccgcaggagctgccgcctactatgtgggctatctgcagccccggaccttcctgctgaagtacaacgagaatggcaccatcacagacgcagtggattgcgccctggaccccctgtctgagacaaagtgtacactgaagagctttaccgtggagaagggcatctatcagacaagcaatttcagggtgcagcctaccgagtccatcgtgcgctttcccaatatcacaaacctgtgcccttttggcgaggtgttcaacgccaccagattcgccagcgtgtacgcctggaatcggaagagaatctccaactgcgtggccgactattctgtgctgtacaactccgcctctttcagcacctttaagtgctatggcgtgtctcccacaaagctgaatgatctgtgctttaccaacgtgtacgccgatagcttcgtgatcaggggagacgaagtgagacagatcgcaccaggacagacaggaaagatcgcagactacaattataagctgcctgacgatttcaccggctgcgtgatcgcctggaactccaacaatctggattctaaagtgggcggcaactacaattatctgtacaggctgtttcgcaagtccaatctgaagccattcgagcgggacatctccacagagatctaccaggccggctctaccccctgcaatggcgtggagggctttaactgttatttccctctgcagtcttacggcttccagccaacaaacggcgtgggctatcagccctacagagtggtggtgctgtcctttgagctgctgcacgcaccagcaacagtgtgcggcccaaagaagtctaccaatctggtgaagaacaagtgcgtgaacttcaacttcaacggactgaccggcacaggcgtgctgaccgagagcaataagaagttcctgccttttcagcagttcggcagggacatcgcagataccacagacgccgtgcgcgaccctcagaccctggagatcctggacatcacaccatgcagcttcggcggcgtgctagtgatcacaccacaaaccaatacatccaaccaggtggccgtgctgtatcaggacgtgaattgtaccgaggtgcccgtggcaatccacgcagatcagctgacccctacatggcgggtgtacaataccggcagcaacgtgttccagacaagagccggatgcctggttggatttgagcacgtgaacaatagctatgagtgcgacatccctgttggcgccggcatctgtgccagctaccagacccagcgtaactccccatctggagcaggctcccaccatcaccatcaccatcaccatcaccactga

SEQ ID NO: 4235 - DNA, 2148 bp, Artificial Sequence
  Description of Artificial Sequence: Synthetic polynucleotide
atgggcatcctgccaagcccaggaatgcccgccctgctgtctctggtgagcctgctgtccgtgctgctgatgggatgcgtggcagagacaggcacacagtgcgtgaacctgaccacaaggacccagctgccccctgcctataccaattctttcacacggggcgtgtactatcccgacaaggtgtttagaagctccgtgctgcactccacacaggatctgtttctgcctttcttttctaacgtgacctggttccacgccgaacacgtgtccggcaccaatggcacaaagcggttcgacaatcccgtgctgccttttaacgatggcgtgtacttcgccagcaccgagaagtccaacatcatcagaggctggatctttggcaccacactggactctaagacacagagcctgctgatcgtgaacaatgccaccaacgtggtgatcaaggtgtgcgagttccagttttgtaatgatccattcctgggcgtgtactatcacaagaacaataagtcctggatggagtctgagtttcgcgtgtattctagcgccaacaattgcacatttgagtaccatagccagcccttcctgatggacctggagggcaagcagggcaatttcaagaacctgagggagttcgtgtttaagaatatcgatggctacttcaagatctacagcaagcacaccccaatcaacctggtgcgcgacctgccacagggattctccgccctggagccactggtggatctgcccatcggcatcaacatcacccggtttcagacactgctggccctgcacagatcctacctgacaccaggcgactcctctagcggagaaaccgcaggagctgccgcctactatgtgggctatctgcagccccggaccttcctgctgaagtacaacgagaatggcaccatcacagacgcagtggattgcgccctggaccccctgtctgagacaaagtgtacactgaagagctttaccgtggagaagggcatctatcagacaagcaatttcagggtgcagcctaccgagtccatcgtgcgctttcccaatatcacaaacaaatgcccttttggcgaggtgttcaacgccaccagattcgccagcgtgtacgcctggaatcggaagagaatctccaactgcgtggccgactattctgtgctgtacaactccgcctctttcagcacctttaagtgctatggcgtgtctcccacaaagctgaatgatctgtgctttaccaacgtgtacgccgatagcttcgtgatcaggggagacgaagtgagacagatcgcaccaggacagacaggaaagatcgcagactacaattataagctgcctgacgatttcaccggctgcgtgatcgcctggaactccaacaatctggattctaaagtgggcggcaactacaattatctgtacaggctgtttcgcaagtccaatctgaagccattcgagcgggacatctccacagagatctaccaggccggctctaccccctgcaatggcgtggagggctttaactgttatttccctctgcagtcttacggcttccagccaacaaacggccctggccaacagccctacagagtggtggtgctgtcctttgagctgctgcacgcaccagcaacagtgtgcggcccaaagaagtctaccaatctggtgaagaacaagtgcgtgaacttcaacttcaacggactgaccggcacaggcgtgctgaccgagagcaataagaagttcctgccttttcagcagttcggcagggacatcgcagataccacagacgccgtgcgcgaccctcagaccctggagatcctggacatcacaccatgcagcttcggcggcgtgtccgtgatcacaccaggcaccaatacatccaaccaggtggccgtgctgtatcaggacgtgaattgtaccgaggtgcccgacgcaatccacgcagatcagctgacccctacatggcgggtgtactctaccggcagcaacgtgttccagacaagagccggatgcctgatcggagcagagcacgtgaacaatagctatgagtgcgacatccctatcggcgccggcatctgtgccagctaccagacccagacaaactccccatctggagcaggctcccaccatcaccatcaccatcaccatcaccactga

SEQ ID NO: 4236 - DNA, 2148 bp, Artificial Sequence
  Description of Artificial Sequence: Synthetic polynucleotide
atgggcatcctgccaagcccaggaatgcccgccctgctgtctctggtgagcctgctgtccgtgctgctgatgggatgcgtggcagagacaggcacacagtgcgtgaacctgaccacaaggacccagctgccccctgcctataccaattctttcacacggggcgtgtactatcccgacaaggtgtttagaagctccgtgctgcactccacacaggatctgtttctgcctttcttttctaacgtgacctggttccacgccatccacgtgtccggcaccaatggcacaaagcggttcgacaatcccgtgctgccttttaacgatggcgtgtacttcgccagcaccgagaagtccaacatcatcagaggctggatctttggcaccacactggactctaagacacagagcctgctgatcgtgaacaatgccaccaacgtggtgatcaaggtgtgcgagttccagttttgtaatgatccattcctgggcgtgtactatcacaagaacaataagtcctggatggagtctgagtttcgcgtgtattctagcgccaacaattgcacatttgagtacgtgagccagcccttcctgatggacctggagggcaagcagggcaatttcaagaacctgagggagttcgtgtttaagaatatcgatggctacttcaagatctacagcaagcacaccccaatcaacctggtgcgcgacctgccacagggattctccgccctggagccactggtggatctgcccatcggcatcaacatcacccggtttcagacactgctggccctgcacagatcctacctgacaccaggcgactcctctagcggatggaccgcaggagctgccgcctactatgtgggctatctgcagccccggaccttcctgctgaagtacaacgagaatggcaccatcacagacgcagtggattgcgccctggaccccctgtctgagacaaagtgtacactgaagagctttaccgtggagaagggcatctatcagacaagcaatttcagggtgcagcctaccgagtccatcgtgcgctttcccaatatcacaaacctgtgcccttttggcgaggtgttcaacgccaccagattcgccagcgtgtacgcctggaatcggaagagaatctccaactgcgtggccgactattctgtgctgtacaactccgcctctttcagcacctttaagtgctatggcgtgtctcccacaaagctgaatgatctgtgctttaccaacgtgtacgccgatagcttcgtgatcaggggagacgaagtgagacagatcgcaccaggacagacaggaaagatcgcagactacaattataagctgcctgacgatttcaccggctgcgtgatcgcctggaactccaacaatctggattctaaagtgggcggcaactacaattatctgtacaggctgtttcgcaagtccaatctgaagccattcgagcgggacatctccacagagatctaccaggccggctctaccccctgcaatggcgtggagggctttaactgttatttccctctgcagtcttacggcttccagccaacaaacggcgtgggctatcagccctacagagtggtggtgctgatttttgagctgctgcacgcaccagcaacagtgtgcggcccaaagaagtctaccaatctggtgaagaacaagtgcgtgaacttcaacttcaacggactgaccggcacaggcgtgctgaccgagagcaataagaagttcctgccttttcagcagttcggcagggacatcgcagataccacagacgccgtgcgcgaccctcagaccctggagatcctggacatcacaccatgcagcttcggcggcgtgtccgtgatcacaccaggcaccaatacatccaaccaggtggccgtgctgtatcaggacgtgaattgtaccgaggtgcccgtggcaatccacgcagatcagctgacccctacatggcgggtgtactctaccggcagcaacgtgttccagacaagagccggatgcctgatcggagcagagcacgtgaacaatagctatgagtgcgacatccctatcggcgccggcatctgtgccagctaccagacccagacaaactccccatctggagcaggctcccaccatcaccatcaccatcaccatcaccactga

SEQ ID NO: 4237 - DNA, 2148 bp, Artificial Sequence
  Description of Artificial Sequence: Synthetic polynucleotide
atgggcatcctgccaagcccaggaatgcccgccctgctgtctctggtgagcctgctgtccgtgctgctgatgggatgcgtggcagagacaggcacacagtgcgtgaacctgaccacaaggacccagctgccccctgcctataccaattctttcacacggggcgtgtactatcccgacaaggtgtttagaagctccgtgctgcactccacacaggatctgtttctgcctttcttttctaacgtgacctggttccacgccatccacgtgtccggcaccaatggcacaaagcggttcgacaatcccgtgctgccttttaacgatggcgtgtacttcgccagcaccgagaagtccaacatcatcagaggctggatctttggcaccacactggactctaagacacagagcctgctgatcgtgaacaatgccaccaacgtggtgatcaaggtgtgcgagttccagttttgtaatgatccattcctgggcgtgtactatcacaagaacaataagtcctggatggagtctgagtttcgcgtgtattctagcgccaacaattgcacatttgagtacgtgagccagcccttcctgatggacctggagggcaagcagggcaatttcaagaacctgagggagttcgtgtttaagaatatcgatggctacttcaagatctacagcaagcacaccccaatcaacctggtgcgcgacctgccacagggattctccgccctggagccactggtggatctgcccatcggcatcaacatcacccggtttcagacactgctggccctgcacagatcctacctgacaccaggcgactcctctagcggatggaccgcaggagctgccgcctactatgtgggctatctgcagccccggaccttcctgctgaagtacaacgagaatggcaccatcacagacgcagtggattgcgccctggaccccctgtctgagacaaagtgtacactgaagagctttaccgtggagaagggcatctatcagacaagcaatttcagggtgcagcctaccgagtccatcgtgcgctttcccaatatcacaaacctgtgcccttttggcgaggtgttcaacgccaccagattcgccagcgtgtacgcctggaatcggaagagaatctccaactgcgtggccgactattctgtgctgtacaactccgcctctttcagcacctttaagtgctatggcgtgtctcccacaaagctgaatgatctgtgctttaccaacgtgtacgccgatagcttcgtgatcaggggagacgaagtgagacagatcgcaccaggacagacaggaaagatcgcagactacaattataagctgcctgacgatttcaccggctgcgtgatcgcctggaactccaacaatctggattctaaagtgggcggcaactacaattatctgtacaggctgtttcgcaagtccaatctgaagccattcgagcgggacatctccacagagtgttaccaggccggctctaccccctgcaatggcgtggagggctttaactgttatttccctctgcagtcttacggcttccagccaacaaacggcgtgggctatcagccctacagagtggtggtgctgtcctttgagctgctgcacgcaccagcaacagtgtgcggcccaaagaagtctaccaatctggtgaagaacaagtgcgtgaacttcaacttcaacggactgaccggcacaggcgtgctgaccgagagcaataagaagttcctgccttttcagcagttcggcagggacatcgcagataccacagacgccgtgcgcgaccctcagaccctggagatcctggacatcacaccatgcagcttcggcggcgtgtccgtgatcacaccaggcaccaatacatccaaccaggtggccgtgctgtatcaggacgtgaattgtaccgaggtgcccgtggcaatccacgcagatcagctgacccctacatggcgggtgtactctaccggcagcaacgtgttccagacaagagccggatgcctgatcggagcagagcacgtgaacaatagctatgagtgcgacatccctatcggcgccggcatctgtgccagctaccagacccagacaaactccccatctggagcaggctcccaccatcaccatcaccatcaccatcaccactga

SEQ ID NO: 4238 - DNA, 2148 bp, Artificial Sequence
  Description of Artificial Sequence: Synthetic polynucleotide
atgggcatcctgccaagcccaggaatgcccgccctgctgtctctggtgagcctgctgtccgtgctgctgatgggatgcgtggcagagacaggcacacagtgcgtgaacctgaccacaaggacccagctgccccctgcctataccaattctttcacacggggcgtgtactatcccgacaaggtgtttagaagctccgtgctgcactccacacaggatctgtttctgcctttcttttctaacgtgacctggttccacgccatccacgtgtccggcaccaatggcacaaagcggttcgacaatcccgtgctgccttttaacgatggcgtgtacttcgccagcaccgagaagtccaacatcatcagaggctggatctttggcaccacactggactctaagacacagagcctgctgatcgtgaacaatgccaccaacgtggtgatcaaggtgtgcgagttccagttttgtaatgatccattcctgggcgtgtactatcacaagaacaataagtcctggatggagtctgagtttcgcgtgtattctagcgccaacaattgcacatttgagtacgtgagccagcccttcctgatggacctggagggcaagcagggcaatttcaagaacctgagggagttcgtgtttaagaatatcgatggctacttcaagatctacagcaagcacaccccaatcaacctggtgcgcgacctgccacagggattctccgccctggagccactggtggatctgcccatcggcatcaacatcacccggtttcagacactgctggccctgcacagatcctacctgacaccaggcgactcctctagcggatggaccgcaggagctgccgcctactatgtgggctatctgcagccccggaccttcctgctgaagtacaacgagaatggcaccatcacagacgcagtggattgcgccctggaccccctgtctgagacaaagtgtacactgaagagctttaccgtggagaagggcatctatcagacaagcaatttcagggtgcagcctaccgagtccatcgtgcgctttcccaatatcacaaacctgtgcccttttggcgaggtgttcaacgccaccagattcgccagcgtgtacgcctggaatcggaagagaatctccaactgcgtggccgactattctgtgctgtacaactccgcctctttcagcacctttaagtgctatggcgtgtctcccacaaagctgaatgatctgtgctttaccaacgtgtacgccgatagcttcgtgatcaggggagacgaagtgagacagatcgcaccaggacagacaggaaagatcgcagactacaattataagctgcctgacgatttcaccggctgcgtgatcgcctggaactccaacaatctggattctaaagtgggcggcaactacaattatctgtacaggctgtttcgcaagtccaatctgaagccattcgagcgggacatctccacagagtattaccaggccggctctaccccctgcaatggcgtggagggctttaactgttatttccctctgcagtcttacggcttccagccaacaaacggcgtgggctatcagccctacagagtggtggtgctgtcctttgagctgctgcacgcaccagcaacagtgtgcggcccaaagaagtctaccaatctggtgaagaacaagtgcgtgaacttcaacttcaacggactgaccggcacaggcgtgctgaccgagagcaataagaagttcctgccttttcagcagttcggcagggacatcgcagataccacagacgccgtgcgcgaccctcagaccctggagatcctggacatcacaccatgcagcttcggcggcgtgtccgtgatcacaccaggcaccaatacatccaaccaggtggccgtgctgtatcaggacgtgaattgtaccgaggtgcccgtggcaatccacgcagatcagctgacccctacatggcgggtgtactctaccggcagcaacgtgttccagacaagagccggatgcctgatcggagcagagcacgtgaacaatagctatgagtgcgacatccctatcggcgccggcatctgtgccagctaccagacccagacaaactccccatctggagcaggctcccaccatcaccatcaccatcaccatcaccactga

SEQ ID NO: 4239 - DNA, 2148 bp, Artificial Sequence
  Description of Artificial Sequence: Synthetic polynucleotide
atgggcatcctgccaagcccaggaatgcccgccctgctgtctctggtgagcctgctgtccgtgctgctgatgggatgcgtggcagagacaggcacacagtgcgtgaacctgaccacaaggacccagctgccccctgcctataccaattctttcacacggggcgtgtactatcccgacaaggtgtttagaagctccgtgctgcactccacacaggatctgtttctgcctttcttttctaacgtgacctggttccacgcctaccacgtgtccggcaccaatggcacaaagcggttcgacaatcccgtgctgccttttaacgatggcgtgtacttcgccagcaccgagaagtccaacatcatcagaggctggatctttggcaccacactggactctaagacacagagcctgctgatcgtgaacaatgccaccaacgtggtgatcaaggtgtgcgagttccagttttgtaatgatccattcctgggcgtgtactatcacaagaacaataagtcctggatggagtctgagtttcgcgtgtattctagcgccaacaattgcacatttgagtaccatagccagcccttcctgatggacctggagggcaagcagggcaatttcaagaacctgagggagttcgtgtttaagaatatcgatggctacttcaagatctacagcaagcacaccccaatcaacctggtgcgcgacctgccacagggattctccgccctggagccactggtggatctgcccatcggcatcaacatcacccggtttcagacactgctggccctgcacagatcctacctgacaccaggcgactcctctagcggagaaaccgcaggagctgccgcctactatgtgggctatctgcagccccggaccttcctgctgaagtacaacgagaatggcaccatcacagacgcagtggattgcgccctggaccccctgtctgagacaaagtgtacactgaagagctttaccgtggagaagggcatctatcagacaagcaatttcagggtgcagcctaccgagtccatcgtgcgctttcccaatatcacaaaccattgcccttttggcgaggtgttcaacgccaccagattcgccagcgtgtacgcctggaatcggaagagaatctccaactgcgtggccgactattctgtgctgtacaactccgcctctttcagcacctttaagtgctatggcgtgtctcccacaaagctgaatgatctgtgctttaccaacgtgtacgccgatagcttcgtgatcaggggagacgaagtgagacagatcgcaccaggacagacaggaaagatcgcagactacaattataagctgcctgacgatttcaccggctgcgtgatcgcctggaactccaacaatctggattctaaagtgggcggcaactacaattatctgtacaggctgtttcgcaagtccaatctgaagccattcgagcgggacatctccacagagatctaccaggccggctctaccccctgcaatggcgtggagggctttaactgttatttccctctgcagtcttacggcttccagccaacaaacggcccgggccaacagccctacagagtggtggtgctgtcctttgagctgctgcacgcaccagcaacagtgtgcggcccaaagaagtctaccaatctggtgaagaacaagtgcgtgaacttcaacttcaacggactgaccggcacaggcgtgctgaccgagagcaataagaagttcctgccttttcagcagttcggcagggacatcgcagataccacagacgccgtgcgcgaccctcagaccctggagatcctggacatcacaccatgcagcttcggcggcgtgtccgtgatcacaccaggcaccaatacatccaaccaggtggccgtgctgtatcaggacgtgaattgtaccgaggtgcccgatgcaatccacgcagatcagctgacccctacatggcgggtgtactctaccggcagcaacgtgttccagacaagagccggatgcctgatcggagcagagcacgtgaacaatagctatgagtgcgacatccctatcggcgccggcatctgtgccagctaccagacccagacaaactccccatctggagcaggctcccaccatcaccatcaccatcaccatcaccactga

SEQ ID NO: 4240 - DNA, 2148 bp, Artificial Sequence
  Description of Artificial Sequence: Synthetic polynucleotide
atgggcatcctgccaagcccaggaatgcccgccctgctgtctctggtgagcctgctgtccgtgctgctgatgggatgcgtggcagagacaggcacacagtgcgtgaacctgaccacaaggacccagctgccccctgcctataccaattctttcacacggggcgtgtactatcccgacaaggtgtttagaagctccgtgctgcactccacacaggatctgtttctgcctttcttttctaacgtgacctggttccacgccatccacgtgtccggcaccaatggcacaaagcggttcgacaatcccgtgctgccttttaacgatggcgtgtacttcgccagcaccgagaagtccaacatcatcagaggctggatctttggcaccacactggactctaagacacagagcctgctgatcgtgaacaatgccaccaacgtggtgatcaaggtgtgcgagttccagttttgtaatgatccattcctgggcgtgtactatcacaagaacaataagtcctggatggagtctgagtttcgcgtgtattctagcgccaacaattgcacatttgagtacgtgagccagcccttcctgatggacctggagggcaagcagggcaatttcaagaacctgagggagttcgtgtttaagaatatcgatggctacttcaagatctacagcaagcacaccccaatcaacctggtgcgcgacctgccacagggattctccgccctggagccactggtggatctgcccatcggcatcaacatcacccggtttcagacactgctggccctgcacagatcctacctgacaccaggcgactcctctagcggatggaccgcaggagctgccgcctactatgtgggctatctgcagccccggaccttcctgctgaagtacaacgagaatggcaccatcacagacgcagtggattgcgccctggaccccctgtctgagacaaagtgtacactgaagagctttaccgtggagaagggcatctatcagacaagcaatttcagggtgcagcctaccgagtccatcgtgcgctttcccaatatcacaaacctgtgcccttttggcgaggtgttcaacgccaccagattcgccagcgtgtacgcctggaatcggaagagaatctccaactgcgtggccgactattctgtgctgtacaactccgcctctttcagcacctttaagtgctatggcgtgtctcccacaaagctgaatgatctgtgctttaccaacgtgtacgccgatagcttcgtgatcaggggagacgaagtgagacagatcgcaccaggacagacaggaaagatcgcagactacaattataagctgcctgacgatttcaccggctgcgtgatcgcctggaactccaacaatctggattctaaagtgggcggcaactacaattatctgtacaggctgtttcgcaagtccaatctgaagccattcgagcgggacatctccacagagatctaccaggccggctctaccccctgcaatggcgtggagggctttaactgttatttccctctgcagtcttacggcttccagccaacaaacggcgtgggctatcagccctacagagtggtggtgctgtcctttgagctgctgcacgcaccagcaacagtgtgcggcccaaagaagtctaccaatctggtgaagaacaagtgcgtgaacttcaacttcaacggactgaccggcacaggcgtgctgaccgagagcaataagaagttcctgccttttcagcagttcggcagggacatcgcagataccacagacgccgtgcgcgaccctcagaccctggagatcctggacatcacaccatgcagcttcggcggcaaatccgtgatcacaccaggcaccaatacatccaaccaggtggccgtgctgtatcaggacgtgaattgtaccgaggtgcccgtggcaatccacgcagatcagctgacccctacatggcgggtgtactctaccggcagcaacgtgttccagacaagagccggatgcctgatcggagcagagcacgtgaacaatagctatgagtgcgacatccctatcggcgccggcatctgtgccagctaccagacccagacaaactccccatctggagcaggctcccaccatcaccatcaccatcaccatcaccactga

SEQ ID NO: 4241 - DNA, 2148 bp, Artificial Sequence
  Description of Artificial Sequence: Synthetic polynucleotide
atgggcatcctgccaagcccaggaatgcccgccctgctgtctctggtgagcctgctgtccgtgctgctgatgggatgcgtggcagagacaggcacacagtgcgtgaacctgaccacaaggacccagctgccccctgcctataccaattctttcacacggggcatctactatcccgacaaggtgtttagaagctccgtgctgcactccacacaggatctgtttctgcctttcttttctaacgtgacctggttccacgccatccacgggtccggcaccaatggcacaaagcggttcgacaatcccgtgctgccttttaacgatggcgtgtacagtgccgcaattgagaagtccaacatcatcagaggctggatctttggcaccacactggactctaagacacagagcctgctgatcgtgaacaatgccaccaacgtggtgatcaaggtgtgcgagttccagttttgtaatgatccattcctgggcgtgtactatcacaagaacaataagtcctggatggagtctgagtttcgcgtgtattctagcgccaacaattgcacatttgagtacgtgagccagcccttcctgatggacctggagggcaagcagggcaatttcaagaacctgagggagtacgtgtttaagaatatcgatggctacttcaagatctacagcaagcacaccccaatcaacctggtgcgcgacctgccacagggattctcccccctggagccactggtggatctgcccatcggcatcaacatcacccggtttttgacagtcctggccctgcacagatcctacctgacaccaggcgactcctctagcggatggaccgcaggagctgccgcctactatgtgggctatctgcagccccggaccttcctgctgaagtacaacgagaatggcaccatcacagacgcagtggattgcgccctggaccccctgtctgagacaaagtgtacactgaagagctttaccgtggagaagggcatctatcagacaagcaatttcagggtgcagcctaccgagtccatcgtgcgctttcccaatatcacaaacctgtgcccttttggcgaggtgttcaacgccaccagattcgccagcgtgtacgcctggaatcggaagagaatctccaactgcgtggccgactattctgtgctgtacaactccgcctctttcagcacctttaagtgctatggcgtgtctcccacaaagctgaatgatctgtgctttaccaacgtgtacgccgatagcttcgtgatcaggggagacgaagtgagacagatcgcaccaggacagacaggaaagatcgcagactacaattataagctgcctgacgatttcaccggctgcgtgatcgcctggaactccaacaatctggattctaaagtgggcggcaactacaattatctgtacaggctgtttcgcaagtccaatctgaagccattcgagcgggacatctccacagagatctaccaggccggctctaccccctgcaatggcgtggagggctttaactgttatttccctctgcagtcttacggcttccagccaacaaacggcgtgggctatcagccctacagagtggtggtgctgtcctttgagctgctgcacgcaccagcaacagtgtgcggcccaaagaagtctaccaatctggtgaagaacaagtgcgtgaacttcaacttcaacggactgaccggcacaggcgtgctgaccgagagcaataagaagttcctgccttttcagcagttcggcagggacatcgcagataccacagacgccgtgcgcgaccctcagaccctggagatcctggacatcacaccatgcagcttcggcggcgtgtccgtgatcacaccaggcaccaatacatccaaccaggtggccgtgctgtatcaggacgtgaattgtaccgaggtgcccgtggcaatccacgcagatcagctgacccctacatggcgggtgtactctaccggcagcaacgtgttccagacaagagccggatgcctgatcggagcagagcacgtgaacaatagctatgagtgcgacatccctatcggcgccggcatctgtgccagctaccagacccagacaaactccccatctggagcaggctcccaccatcaccatcaccatcaccatcaccactga

SEQ ID NO: 4242 - DNA, 2148 bp, Artificial Sequence
  Description of Artificial Sequence: Synthetic polynucleotide
atgggcatcctgccaagcccaggaatgcccgccctgctgtctctggtgagcctgctgtccgtgctgctgatgggatgcgtggcagagacaggcacacagtgcgtgaacctgaccacaaggacccagctgccccctgcctataccaattctttcacacggggcgtgtactatcccgacaaggtgtttagaagctccgtgctgcactccacacaggatctgtttctgcctttcttttctaacgtgacctggttccacgccatccacgtgtccggcaccaatggcacaaagcggttcgacaatcccgtgctgccttttaacgatggcgtgtacttcgccagcaccgagaagtccaacatcatcagaggctggatctttggcaccacactggactctaagacacagagcctgctgatcgtgaacaatgccaccaacgtggtgatcaaggtgtgcgagttccagttttgtaatgatccattcctgggcgtgtactatcacaagaacaataagtcctggatggagtctgagtttcgcgtgtattctagcgccaacaattgcacatttgagtacgtgagccagcccttcctgatggacctggagggcaagcagggcaatttcaagaacctgagggagttcgtgtttaagaatatcgatggctacttcaagatctacagcaagcacaccccaatcaacctggtgcgcgacctgccacagggattctccgccctggagccactggtggatctgcccatcggcatcaacatcacccggtttcagacactgctggccctgcacagatcctacctgacaccaggcgactcctctagcggatggaccgcaggagctgccgcctactatgtgggctatctgcagccccggaccttcctgctgaagtacaacgagaatggcaccatcacagacgcagtggattgcgccctggaccccctgtctgagacaaagtgtacactgaagagctttaccgtggagaagggcatctatcagacaagcaatttcagggtgcagcctaccgagtccatcgtgcgctttcccaatatcacaaacctgtgcccttttggcgaggtgttcaacgccaccagattcgccagcgtgtacgcctggaatcggaagagaatctccaactgcgtggccgactattctgtgctgtacaactccgcctctttcagcacctttaagtgctatggcgtgtctcccacaaagctgaatgatctgtgctttaccaacgtgtacgccgatagcttcgtgatcaggggagacgaagtgagacagatcgcaccaggacagacaggacatatcgcagactacaattataagctgcctgacgatttcaccggctgcgtgatcgcctggaactccaacaatctggattctaaagtgggcggcaactacaattatctgtacaggctgtttcgcaagtccaatctgaagccattcgagcgggacatctccacagagatctaccaggccggctctaccccctgcaatggcgtggagggctttaactgttatttccctctgcagtcttacggcttccagccaacaaacggcgtgggctatcagccctacagagtggtggtgctgtcctttgagctgctgcacgcaccagcaacagtgtgcggcccaaagaagtctaccaatctggtgaagaacaagtgcgtgaacttcaacttcaacggactgaccggcacaggcgtgctgaccgagagcaataagaagttcctgccttttcagcagttcggcagggacatcgcagataccacagacgccgtgcgcgaccctcagaccctggagatcctggacatcacaccatgcagcttcggcggcgtgtccgtgatcacaccaggcaccaatacatccaaccaggtggccgtgctgtatcaggacgtgaattgtaccgaggtgcccgtggcaatccacgcagatcagctgacccctacatggcgggtgtactctaccggcagcaacgtgttccagacaagagccggatgcctgatcggagcagagcacgtgaacaatagctatgagtgcgacatccctatcggcgccggcatctgtgccagctaccagacccagacaaactccccatctggagcaggctcccaccatcaccatcaccatcaccatcaccactga

SEQ ID NO: 4243 - DNA, 2148 bp, Artificial Sequence
  Description of Artificial Sequence: Synthetic polynucleotide
atgggcatcctgccaagcccaggaatgcccgccctgctgtctctggtgagcctgctgtccgtgctgctgatgggatgcgtggcagagacaggcacacagtgcgtgaacctgaccacaaggacccagctgccccctgcctataccaattctttcacacggggcgtgtactatcccgacaaggtgtttagaagctccgtgctgcactccacacaggatctgtttctgcctttcttttctaacgtgacctggttccacgccatccacgtgtccggcaccaatggcacaaagcggttcgacaatcccgtgctgccttttaacgatggcgtgtacttcgccagcaccgagaagtccaacatcatcagaggctggatctttggcaccacactggactctaagacacagagcctgctgatcgtgaacaatgccaccaacgtggtgatcaaggtgtgcgagttccagttttgtaatgatccattcctgggcgtgtactatcacaagaacaataagtcctggatggagtctgagtttcgcgtgtattctagcgccaacaattgcacatttgagtaccatagccagcccttcctgatggacctggagggcaagcagggcaatttcaagaacctgagggagttcgtgtttaagaatatcgatggctacttcaagatctacagcaagcacaccccaatcaacctggtgcgcgacctgccacagggattctccgccctggagccactggtggatctgcccatcggcatcaacatcacccggtttcagacactgctggccctgcacagatcctacctgacaccaggcgactcctctagcggagaaaccgcaggagctgccgcctactatgtgggctatctgcagccccggaccttcctgctgaagtacaacgagaatggcaccatcacagacgcagtggattgcgccctggaccccctgtctgagacaaagtgtacactgaagagctttaccgtggagaagggcatctatcagacaagcaatttcagggtgcagcctaccgagtccatcgtgcgctttcccaatatcacaaacccgtgcccttttggcgaggtgttcaacgccaccagattcgccagcgtgtacgcctggaatcggaagagaatctccaactgcgtggccgactattctgtgctgtacaactccgcctctttcagcacctttaagtgctatggcgtgtctcccacaaagctgaatgatctgtgctttaccaacgtgtacgccgatagcttcgtgatcaggggagacgaagtgagacagatcgcaccaggacagacaggaaagatcgcagactacaattataagctgcctgacgatttcaccggctgcgtgatcgcctggaactccaacaatctggattctaaagtgggcggcaactacaattatctgtacaggctgtttcgcaagtccaatctgaagccattcgagcgggacatctccacagagatctaccaggccggctctaccccctgcaatggcgtggagggctttaactgttatttccctctgcagtcttacggcttccagccaacaaacggcccgggccaacagccctacagagtggtggtgctgtcctttgagctgctgcacgcaccagcaacagtgtgcggcccaaagaagtctaccaatctggtgaagaacaagtgcgtgaacttcaacttcaacggactgaccggcacaggcgtgctgaccgagagcaataagaagttcctgccttttcagcagttcggcagggacatcgcagataccacagacgccgtgcgcgaccctcagaccctggagatcctggacatcacaccatgcagcttcggcggcgtgtccgtgatcacaccaggcaccaatacatccaaccaggtggccgtgctgtatcaggacgtgaattgtaccgaggtgcccgatgcaatccacgcagatcagctgacccctacatggcgggtgtactctaccggcagcaacgtgttccagacaagagccggatgcctgatcggagcagagcacgtgaacaatagctatgagtgcgacatccctatcggcgccggcatctgtgccagctaccagacccagacaaactccccatctggagcaggctcccaccatcaccatcaccatcaccatcaccactga

SEQ ID NO: 4244 - DNA, 2148 bp, Artificial Sequence
  Description of Artificial Sequence: Synthetic polynucleotide
atgggcatcctgccaagcccaggaatgcccgccctgctgtctctggtgagcctgctgtccgtgctgctgatgggatgcgtggcagagacaggcacacagtgcgtgaacctgaccacaaggacccagctgccccctgcctataccaattctttcacacggggcgtgtactatcccgacaaggtgtttagaagctccgtgctgcactccacacaggatctgtttctgcctttcttttctaacgtgacctggttccacgccatccacgtgtccggcaccaatggcacaaagcggttcgacaatcccgtgctgccttttaacgatggcgtgtacttcgccagcaccgagaagtccaacatcatcagaggctggatctttggcaccacactggactctaagacacagagcctgctgatcgtgaacaatgccaccaacgtggtgatcaaggtgtgcgagttccagttttgtaatgatccattcctgggcgtgtactatcacaagaacaataagtcctggatggagtctgagtttcgcgtgtattctagcgccaacaattgcacatttgagtacgtgagccagcccttcctgatggacctggagggcaagcagggcaatttcaagaacctgagggagttcgtgtttaagaatatcgatggctacttcaagatctacagcaagcacaccccaatcaacctggtgcgcgacctgccacagggattctccgccctggagccactggtggatctgcccatcggcatcaacatcacccggtttcagacactgctggccctgcacagatcctacctgacaccaggcgactcctctagcggatggaccgcaggagctgccgcctactatgtgggctatctgcagccccggaccttcctgctgaagtacaacgagaatggcaccatcacagacgcagtggattgcgccctggaccccctgtctgagacaaagtgtacactgaagagctttaccgtggagaagggcatctatcagacaagcaatttcagggtgcagcctaccgagtccatcgtgcgctttcccaatatcacaaacctgtgcccttttggcgaggtgttcaacgccaccagattcgccagcgtgtacgcctggaatcggaagagaatctccaactgcgtggccgactattctgtgctgtacaactccgcctctttcagcacctttaagtgctatggcgtgtctcccacaaagctgaatgatctgtgctttaccaacgtgtacgccgatagcttcgtgatcaggggagacgaagtgagacagatcgcaccaggacagacaggaaagatcgcagactacaattataagctgcctgacgatttcaccggctgcgtgatcgcctggaactccaacaatctggattctaaagtgggcggcaactacaattatctgtacaggctgtttcgcaagtccaatctgaagccattcgagcgggacatctccacagagatctaccaggccggcctcaccccctgcaatggcgtggagggctttaactgttatttccctctgcagtcttacggcttccagccaacaaacggcgtgggctatcagccctacagagtggtggtgctgtcctttgagctgctgcacgcaccagcaacagtgtgcggcccaaagaagtctaccaatctggtgaagaacaagtgcgtgaacttcaacttcaacggactgaccggcacaggcgtgctgaccgagagcaataagaagttcctgccttttcagcagttcggcagggacatcgcagataccacagacgccgtgcgcgaccctcagaccctggagatcctggacatcacaccatgcagcttcggcggcgtgtccgtgatcacaccaggcaccaatacatccaaccaggtggccgtgctgtatcaggacgtgaattgtaccgaggtgcccgtggcaatccacgcagatcagctgacccctacatggcgggtgtactctaccggcagcaacgtgttccagacaagagccggatgcctgatcggagcagagcacgtgaacaatagctatgagtgcgacatccctatcggcgccggcatctgtgccagctaccagacccagacaaactccccatctggagcaggctcccaccatcaccatcaccatcaccatcaccactga

SEQ ID NO: 4245 - DNA, 2148 bp, Artificial Sequence
  Description of Artificial Sequence: Synthetic polynucleotide
atgggcatcctgccaagcccaggaatgcccgccctgctgtctctggtgagcctgctgtccgtgctgctgatgggatgcgtggcagagacaggcacacagtgcgtgaacctgaccacaaggacccagctgccccctgcctataccaattctttcacacggggcgtgtactatcccgacaaggtgtttagaagctccgtgctgcactccacacaggatctgtttctgcctttcttttctaacgtgacctggttccacgccatccacgtgtccggcaccaatggcacaaagcggttcgacaatcccgtgctgccttttaacgatggcgtgtacttcgccagcaccgagaagtccaacatcatcagaggctggatctttggcaccacactggactctaagacacagagcctgctgatcgtgaacaatgccaccaacgtggtgatcaaggtgtgcgagttccagttttgtaatgatccattcctgggcgtgtactatcacaagaacaataagtcctggatggagtctgagtttcgcgtgtattctagcgccaacaattgcacatttgagtacgtgagccagcccttcctgatggacctggagggcaagcagggcaatttcaagaacctgagggagttcgtgtttaagaatatcgatggctacttcaagatctacagcaagcacaccccaatcaacctggtgcgcgacctgccacagggattctccgccctggagccactggtggatctgcccatcggcatcaacatcacccggtttcagacactgctggccctgcacagatcctacctgacaccaggcgactcctctagcggatggaccgcaggagctgccgcctactatgtgggctatctgcagccccggaccttcctgctgaagtacaacgagaatggcaccatcacagacgcagtggattgcgccctggaccccctgtctgagacaaagtgtacactgaagagctttaccgtggagaagggcatctatcagacaagcaatttcagggtgcagcctaccgagtccatcgtgcgctttcccaatatcacaaacctgtgcccttttggcgaggtgttcaacgccaccagattcgccagcgtgtacgcctggaatcggaagagaatctccaactgcgtggccgactattctgtgctgtacaactccgcctctttcagcacctttaagtgctatggcgtgtctcccacaaagctgaatgatctgtgctttaccaacgtgtacgccgatagcttcgtgatcaggggagacgaagtgagacagatcgcaccaggacagacaggaaagatcgcagactacaattataagctgcctgacgatttcaccggctgcgtgatcgcctggaactccaacaatctggattctaaagtgggcggcaactacaattatctgtacaggctgtttcgcaagtccaatctgaagccattcgagcgggacatctccacagagatctaccaggccggctctaccccctgcaatggcgtggagggctttaactgttatttccctctgcagtcttacggcttccagccaacaaacggcgtgggctatcagccctacagagtggtggtgctgtcctttgagctgctgcacgcaccagcaacagtgtgcggcccaaagaagtctaccaatctggtgaagaacaagtgcgtgaacttcaacttcaacggactgaccggcacaggcgtgctgaccgagagcaataagaagttcctgccttttcagcagttcggcagggacatcgcagataccacagacgccgtgcgcgaccctcagaccctggagatcctggacatcacaccatgcagcttcggcggcgtgtccgtgatcacaccaaataccaatacatccaaccaggtggccgtgctgtatcaggacgtgaattgtaccgaggtgcccgtggcaatccacgcagatcagctgacccctacatggcgggtgtactctaccggcagcaacgtgttccagacaagagccggatgcctgatcggagcagagcacgtgaacaatagctatgagtgcgacatccctatcggcgccggcatctgtgccagctaccagacccagacaaactccccatctggagcaggctcccaccatcaccatcaccatcaccatcaccactga

SEQ ID NO: 4246 - DNA, 2148 bp, Artificial Sequence
  Description of Artificial Sequence: Synthetic polynucleotide
atgggcatcctgccaagcccaggaatgcccgccctgctgtctctggtgagcctgctgtccgtgctgctgatgggatgcgtggcagagacaggcacacagtgcgtgaacctgaccacaaggacccagctgccccctgcctataccaattctttcacacggggcgtgtactatcccgacaaggtgtttagaagctccgtgctgcactccacacaggatctgtttctgcctttcttttctaacgtgacctggttccacgccatccacgtgtccggcaccaatggcacaaagcggttcgacaatcccgtgctgccttttaacgatggcgtgtacttcgccagcaccgagaagtccaacatcatcagaggctggatctttggcaccacactggactctaagacacagagcctgctgatcgtgaacaatgccaccaacgtggtgatcaaggtgtgcgagttccagttttgtaatgatccattcctgggcgtgtactatcacaagaacaataagtcctggatggagtctgagtttcgcgtgtattctagcgccaacaattgcacatttgagtacgtgagccagcccttcctgatggacctggagggcaagcagggcaatttcaagaacctgagggagttcgtgtttaagaatatcgatggctacttcaagatctacagcaagcacaccccaatcaacctggtgcgcgacctgccacagggattctccgccctggagccactggtggatctgcccatcggcatcaacatcacccggtttcagacactgctggccctgcacagatcctacctgacaccaggcgactcctctagcggatggaccgcaggagctgccgcctactatgtgggctatctgcagccccggaccttcctgctgaagtacaacgagaatggcaccatcacagacgcagtggattgcgccctggaccccctgtctgagacaaagtgtacactgaagagctttaccgtggagaagggcatctatcagacaagcaatttcagggtgcagcctaccgagtccatcgtgcgctttcccaatatcacaaacctgtgcccttttggcgaggtgttcaacgccaccagattcgccagcgtgtacgcctggaatcggaagagaatctccaactgcgtggccgactattctgtgctgtacaactccgcctctttcagcacctttaagtgctatggcgtgtctcccacaaagctgaatgatctgtgctttaccaacgtgtacgccgatagcttcgtgatcaggggagacgaagtgagacagatcgcaccaggacagacaggaaagatcgcagactacaattataagctgcctgacgatttcaccggctgcgtgatcgcctggaactccaacaatctggattctaaagtgggcggcaactacaattatctgtacaggctgtttcgcaagtccaatctgaagccattcgagcgggacatctccacagagatctaccaggccggctctaccccctgcaatatggtggagggctttaactgttatttccctctgcagtcttacggcttccagccaacaaacggcgtgggctatcagccctacagagtggtggtgctgtcctttgagctgctgcacgcaccagcaacagtgtgcggcccaaagaagtctaccaatctggtgaagaacaagtgcgtgaacttcaacttcaacggactgaccggcacaggcgtgctgaccgagagcaataagaagttcctgccttttcagcagttcggcagggacatcgcagataccacagacgccgtgcgcgaccctcagaccctggagatcctggacatcacaccatgcagcttcggcggcgtgtccgtgatcacaccaggcaccaatacatccaaccaggtggccgtgctgtatcaggacgtgaattgtaccgaggtgcccgtggcaatccacgcagatcagctgacccctacatggcgggtgtactctaccggcagcaacgtgttccagacaagagccggatgcctgatcggagcagagcacgtgaacaatagctatgagtgcgacatccctatcggcgccggcatctgtgccagctaccagacccagacaaactccccatctggagcaggctcccaccatcaccatcaccatcaccatcaccactga

SEQ ID NO: 4247 - DNA, 2148 bp, Artificial Sequence
  Description of Artificial Sequence: Synthetic polynucleotide
atgggcatcctgccaagcccaggaatgcccgccctgctgtctctggtgagcctgctgtccgtgctgctgatgggatgcgtggcagagacaggcacacagtgcgtgaacctgaccacaaggacccagctgccccctgcctataccaattctttcacacggggcgtgtactatcccgacaaggtgtttagaagctccgtgctgcactccacacaggatctgtttctgcctttcttttctaacgtgacctggttccacgccatccacgtgtccggcaccaatggcacaaagcggttcgacaatcccgtgctgccttttaacgatggcgtgtacttcgccagcaccgagaagtccaacatcatcagaggctggatctttggcaccacactggactctaagacacagagcctgctgatcgtgaacaatgccaccaacgtggtgatcaaggtgtgcgagttccagttttgtaatgatccattcctgggcgtgtactatcacaagaacaataagtcctggatggagtctgagtttcgcgtgtattctagcgccaacaattgcacatttgagtacgtgagccagcccttcctgatggacctggagggcaagcagggcaatttcaagaacctgagggagttcgtgtttaagaatatcgatggctacttcaagatctacagcaagcacaccccaatcaacctggtgcgcgacctgccacagggattctccgccctggagccactggtggatctgcccatcggcatcaacatcacccggtttcagacactgctggccctgcacagatcctacctgacaccaggcgactcctctagcggatggaccgcaggagctgccgcctactatgtgggctatctgcagccccggaccttcctgctgaagtacaacgagaatggcaccatcacagacgcagtggattgcgccctggaccccctgtctgagacaaagtgtacactgaagagctttaccgtggagaagggcatctatcagacaagcaatttcagggtgcagcctaccgagtccatcgtgcgctttcccaatatcacaaacctgtgcccttttggcgaggtgttcaacgccaccagattcgccagcgtgtacgcctggaatcggaagagaatctccaactgcgtggccgactattctgtgctgtacaactccgcctctttcagcacctttaagtgctatggcgtgtctcccacaaagctgaatgatctgtgctttaccaacgtgtacgccgatagcttcgtgatcaggggagacgaagtgagacagatcgcaccaggacagacaggaaagatcgcagactacaattataagctgcctgacgatttcaccggctgcgtgatcgcctggaactccaacaatctggattctaaagtgggcggcaactacaattatctgtacaggctgtttcgcaagatgaatctgaagccattcgagcgggacatctccacagagatctaccaggccggctctaccccctgcaatggcgtggagggctttaactgttatttccctctgcagtcttacggcttccagccaacaaacggcgtgggctatcagccctacagagtggtggtgctgtcctttgagctgctgcacgcaccagcaacagtgtgcggcccaaagaagtctaccaatctggtgaagaacaagtgcgtgaacttcaacttcaacggactgaccggcacaggcgtgctgaccgagagcaataagaagttcctgccttttcagcagttcggcagggacatcgcagataccacagacgccgtgcgcgaccctcagaccctggagatcctggacatcacaccatgcagcttcggcggcgtgtccgtgatcacaccaggcaccaatacatccaaccaggtggccgtgctgtatcaggacgtgaattgtaccgaggtgcccgtggcaatccacgcagatcagctgacccctacatggcgggtgtactctaccggcagcaacgtgttccagacaagagccggatgcctgatcggagcagagcacgtgaacaatagctatgagtgcgacatccctatcggcgccggcatctgtgccagctaccagacccagacaaactccccatctggagcaggctcccaccatcaccatcaccatcaccatcaccactga

SEQ ID NO: 4248 - DNA, 2148 bp, Artificial Sequence
  Description of Artificial Sequence: Synthetic polynucleotide
atgggcatcctgccaagcccaggaatgcccgccctgctgtctctggtgagcctgctgtccgtgctgctgatgggatgcgtggcagagacaggcacacagtgcgtgaacctgaccacaaggacccagctgccccctgcctataccaattctttcacacggggcgtgtactatcccgacaaggtgtttagaagctccgtgctgcactccacacaggatctgtttctgcctttcttttctaacgtgacctggttccacgccatccacgtgtccggcaccaatggcacaaagcggttcgacaatcccgtgctgccttttaacgatggcgtgtacttcgccagcaccgagaagtccaacatcatcagaggctggatctttggcaccacactggactctaagacacagagcctgctgatcgtgaacaatgccaccaacgtggtgatcaaggtgtgcgagttccagttttgtaatgatccattcctgggcgtgtactatcacaagaacaataagtcctggatggagtctgagtttcgcgtgtattctagcgccaacaattgcacatttgagtacgtgagccagcccttcctgatggacctggagggcaagcagggcaatttcaagaacctgagggagttcgtgtttaagaatatcgatggctacttcaagatctacagcaagcacaccccaatcaacctggtgcgcgacctgccacagggattctccgccctggagccactggtggatctgcccatcggcatcaacatcacccggtttcagacactgctggccctgcacagatcctacctgacaccaggcgactcctctagcggatggaccgcaggaatagccgcctactatgtgggctatctgcagccccggaccttcctgctgaagtacaacgagaatggcaccatcacagacgcagtggattgcgccctggaccccctgtctgagacaaagtgtacactgaagagctttaccgtggagaagggcatctatcagacaagcaatttcagggtgcagcctaccgagtccatcgtgcgctttcccaatatcacaaacctgtgcccttttggcgaggtgttcaacgccaccagattcgccagcgtgtacgcctggaatcggaagagaatctccaactgcgtggccgactattctgtgctgtacaactccgcctctttcagcacctttaagtgctatggcgtgtctcccacaaagctgaatgatctgtgctttaccaacgtgtacgccgatagcttcgtgatcaggggagacgaagtgagacagatcgcaccaggacagacaggaaagatcgcagactacaattataagctgcctgacgatttcaccggctgcgtgatcgcctggaactccaacaatctggattctaaagtgggcggcaactacaattatctgtacaggctgtttcgcaagtccaatctgaagccattcgagcgggacatctccacagagatctaccaggccggctctaccccctgcaatggcgtggagggctttaactgttatttccctctgcagtcttacggcttccagccaacaaacggcgtgggctatcagccctacagagtggtggtgctgtcctttgagctgctgcacgcaccagcaacagtgtgcggcccaaagaagtctaccaatctggtgaagaacaagtgcgtgaacttcaacttcaacggactgaccggcacaggcgtgctgaccgagagcaataagaagttcctgccttttcagcagttcggcagggacatcgcagataccacagacgccgtgcgcgaccctcagaccctggagatcctggacatcacaccatgcagcttcggcggcgtgtccgtgatcacaccaggcaccaatacatccaaccaggtggccgtgctgtatcaggacgtgaattgtaccgaggtgcccgtggcaatccacgcagatcagctgacccctacatggcgggtgtactctaccggcagcaacgtgttccagacaagagccggatgcctgatcggagcagagcacgtgaacaatagctatgagtgcgacatccctatcggcgccggcatctgtgccagctaccagacccagacaaactccccatctggagcaggctcccaccatcaccatcaccatcaccatcaccactga

SEQ ID NO: 4249 - DNA, 2148 bp, Artificial Sequence
  Description of Artificial Sequence: Synthetic polynucleotide
atgggcatcctgccaagcccaggaatgcccgccctgctgtctctggtgagcctgctgtccgtgctgctgatgggatgcgtggcagagacaggcacacagtgcgtgaacctgaccacaaggacccagctgccccctgcctataccaattctttcacacggggcgtgtactatcccgacaaggtgtttagaagctccgtgctgcactccacacaggatctgtttctgcctttcttttctaacgtgacctggttccacgccgagcacgtgtccggcaccaatggcacaaagcggttcgacaatcccgtgctgccttttaacgatggcgtgtacttcgccagcaccgagaagtccaacatcatcagaggctggatctttggcaccacactggactctaagacacagagcctgctgatcgtgaacaatgccaccaacgtggtgatcaaggtgtgcgagttccagttttgtaatgatccattcctgggcgtgtactatcacaagaacaataagtcctggatggagtctgagtttcgcgtgtattctagcgccaacaattgcacatttgagtacgtgagccagcccttcctgatggacctggagggcaagcagggcaatttcaagaacctgagggagttcgtgtttaagaatatcgatggctacttcaagatctacagcaagcacaccccaatcaacctggtgcgcgacctgccacagggattctccgccctggagccactggtggatctgcccatcggcatcaacatcacccggtttcagacactgctggccctgcacagatcctacctgacaccaggcgactcctctagcggagaaaccgcaggagctgccgcctactatgtgggctatctgcagccccggaccttcctgctgaagtacaacgagaatggcaccatcacagacgcagtggattgcgccctggaccccctgtctgagacaaagtgtacactgaagagctttaccgtggagaagggcatctatcagacaagcaatttcagggtgcagcctaccgagtccatcgtgcgctttcccaatatcacaaaccattgcccttttggcgaggtgttcaacgccaccagattcgccagcgtgtacgcctggaatcggaagagaatctccaactgcgtggccgactattctgtgctgtacaactccgcctctttcagcacctttaagtgctatggcgtgtctcccacaaagctgaatgatctgtgctttaccaacgtgtacgccgatagcttcgtgatcaggggagacgaagtgagacagatcgcaccaggacagacaggaaagatcgcagactacaattataagctgcctgacgatttcaccggctgcgtgatcgcctggaactccaacaatctggattctaaagtgggcggcaactacaattatctgtacaggctgtttcgcaagtccaatctgaagccattcgagcgggacatctccacagagatctaccaggccggctctaccccctgcaatggcgtggagggctttaactgttatttccctctgcagtcttacggcttccagccaacaaacggcccgggccaacagccctacagagtggtggtgctgtcctttgagctgctgcacgcaccagcaacagtgtgcggcccaaagaagtctaccaatctggtgaagaacaagtgcgtgaacttcaacttcaacggactgaccggcacaggcgtgctgaccgagagcaataagaagttcctgccttttcagcagttcggcagggacatcgcagataccacagacgccgtgcgcgaccctcagaccctggagatcctggacatcacaccatgcagcttcggcggcgtgtccgtgatcacaccaggcaccaatacatccaaccaggtggccgtgctgtatcaggacgtgaattgtaccgaggtgcccgatgcaatccacgcagatcagctgacccctacatggcgggtgtactctaccggcagcaacgtgttccagacaagagccggatgcctgatcggagcagagcacgtgaacaatagctatgagtgcgacatccctatcggcgccggcatctgtgccagctaccagacccagacaaactccccatctggagcaggctcccaccatcaccatcaccatcaccatcaccactga

SEQ ID NO: 4250 - DNA, 2148 bp, Artificial Sequence
  Description of Artificial Sequence: Synthetic polynucleotide
atgggcatcctgccaagcccaggaatgcccgccctgctgtctctggtgagcctgctgtccgtgctgctgatgggatgcgtggcagagacaggcacacagtgcgtgaacctgaccacaaggacccagctgccccctgcctataccaattctttcacacggggcgtgtactatcccgacaaggtgtttagaagctccgtgctgcactccacacaggatctgtttctgcctttcttttctaacgtgacctggttccacgccaaacacgtgtccggcaccaatggcacaaagcggttcgacaatcccgtgctgccttttaacgatggcgtgtacttcgccagcaccgagaagtccaacatcatcagaggctggatctttggcaccacactggactctaagacacagagcctgctgatcgtgaacaatgccaccaacgtggtgatcaaggtgtgcgagttccagttttgtaatgatccattcctgggcgtgtactatcacaagaacaataagtcctggatggagtctgagtttcgcgtgtattctagcgccaacaattgcacatttgagtaccatagccagcccttcctgatggacctggagggcaagcagggcaatttcaagaacctgagggagttcgtgtttaagaatatcgatggctacttcaagatctacagcaagcacaccccaatcaacctggtgcgcgacctgccacagggattctccgccctggagccactggtggatctgcccatcggcatcaacatcacccggtttcagacactgctggccctgcacagatcctacctgacaccaggcgactcctctagcggagaaaccgcaggagctgccgcctactatgtgggctatctgcagccccggaccttcctgctgaagtacaacgagaatggcaccatcacagacgcagtggattgcgccctggaccccctgtctgagacaaagtgtacactgaagagctttaccgtggagaagggcatctatcagacaagcaatttcagggtgcagcctaccgagtccatcgtgcgctttcccaatatcacaaacaaatgcccttttggcgaggtgttcaacgccaccagattcgccagcgtgtacgcctggaatcggaagagaatctccaactgcgtggccgactattctgtgctgtacaactccgcctctttcagcacctttaagtgctatggcgtgtctcccacaaagctgaatgatctgtgctttaccaacgtgtacgccgatagcttcgtgatcaggggagacgaagtgagacagatcgcaccaggacagacaggaaagatcgcagactacaattataagctgcctgacgatttcaccggctgcgtgatcgcctggaactccaacaatctggattctaaagtgggcggcaactacaattatctgtacaggctgtttcgcaagtccaatctgaagccattcgagcgggacatctccacagagatctaccaggccggctctaccccctgcaatggcgtggagggctttaactgttatttccctctgcagtcttacggcttccagccaacaaacggcccgggccaacagccctacagagtggtggtgctgtcctttgagctgctgcacgcaccagcaacagtgtgcggcccaaagaagtctaccaatctggtgaagaacaagtgcgtgaacttcaacttcaacggactgaccggcacaggcgtgctgaccgagagcaataagaagttcctgccttttcagcagttcggcagggacatcgcagataccacagacgccgtgcgcgaccctcagaccctggagatcctggacatcacaccatgcagcttcggcggcgtgtccgtgatcacaccaggcaccaatacatccaaccaggtggccgtgctgtatcaggacgtgaattgtaccgaggtgcccgtggcaatccacgcagatcagctgacccctacatggcgggtgtactctaccggcagcaacgtgttccagacaagagccggatgcctgatcggagcagagcacgtgaacaatagctatgagtgcgacatccctatcggcgccggcatctgtgccagctaccagacccagacaaactccccatctggagcaggctcccaccatcaccatcaccatcaccatcaccactga

SEQ ID NO: 4251 - DNA, 2148 bp, Artificial Sequence
  Description of Artificial Sequence: Synthetic polynucleotide
atgggcatcctgccaagcccaggaatgcccgccctgctgtctctggtgagcctgctgtccgtgctgctgatgggatgcgtggcagagacaggcacacagtgcgtgaacctgaccacaaggacccagctgccccctgcctataccaattctttcacacggggcgtgtactatcccgacaaggtgtttagaagctccgtgctgcactccacacaggatctgtttctgcctttcttttctaacgtgacctggttccacgccatccacgtgtccggcaccaatggcacaaagcggttcgacaatcccgtgctgccttttaacgatggcgtgtacttcgccagcaccgagaagtccaacatcatcagaggctggatctttggcaccacactggactctaagacacagagcctgctgatcgtgaacaatgccaccaacgtggtgatcaaggtgtgcgagttccagttttgtaatgatccattcctgggcgtgtactattttaagaacaataagtcctggatggagtctgagtttcgcgtgtattctagcgccaacaattgcacatttgagtacgtgagccagcccttcctgatggacctggagggcaagcagggcaatttcaagaacctgagggagttcgtgtttaagaatatcgatggctacttcaagatctacagcaagcacaccccaatcaacctggtgcgcgacctgccacagggattctccgccctggagccactggtggatctgcccatcggcatcaacatcacccggtttcagacactgctggccctgcacagatcctacctgacaccaggcgactcctctagcggatggaccgcaggagctgccgcctactatgtgggctatctgcagccccggaccttcctgctgaagtacaacgagaatggcaccatcacagacgcagtggattgcgccctggaccccctgtctgagacaaagtgtacactgaagagctttaccgtggagaagggcatctatcagacaagcaatttcagggtgcagcctaccgagtccatcgtgcgctttcccaatatcacaaacctgtgcccttttggcgaggtgttcaacgccaccagattcgccagcgtgtacgcctggaatcggaagagaatctccaactgcgtggccgactattctgtgctgtacaactccgcctctttcagcacctttaagtgctatggcgtgtctcccacaaagctgaatgatctgtgctttaccaacgtgtacgccgatagcttcgtgatcaggggagacgaagtgagacagatcgcaccaggacagacaggaaagatcgcagactacaattataagctgcctgacgatttcaccggctgcgtgatcgcctggaactccaacaatctggattctaaagtgggcggcaactacaattatctgtacaggctgtttcgcaagtccaatctgaagccattcgagcgggacatctccacagagatctaccaggccggctctaccccctgcaatggcgtggagggctttaactgttatttccctctgcagtcttacggcttccagccaacaaacggcgtgggctatcagccctacagagtggtggtgctgtcctttgagctgctgcacgcaccagcaacagtgtgcggcccaaagaagtctaccaatctggtgaagaacaagtgcgtgaacttcaacttcaacggactgaccggcacaggcgtgctgaccgagagcaataagaagttcctgccttttcagcagttcggcagggacatcgcagataccacagacgccgtgcgcgaccctcagaccctggagatcctggacatcacaccatgcagcttcggcggcgtgtccgtgatcacaccaggcaccaatacatccaaccaggtggccgtgctgtatcaggacgtgaattgtaccgaggtgcccgtggcaatccacgcagatcagctgacccctacatggcgggtgtactctaccggcagcaacgtgttccagacaagagccggatgcctgatcggagcagagcacgtgaacaatagctatgagtgcgacatccctatcggcgccggcatctgtgccagctaccagacccagacaaactccccatctggagcaggctcccaccatcaccatcaccatcaccatcaccactga

SEQ ID NO: 4252 - DNA, 2148 bp, Artificial Sequence
  Description of Artificial Sequence: Synthetic polynucleotide
atgggcatcctgccaagcccaggaatgcccgccctgctgtctctggtgagcctgctgtccgtgctgctgatgggatgcgtggcagagacaggcacacagtgcgtgaacctgaccacaaggacccagctgccccctgcctataccaattctttcacacggggcgtgtactatcccgacaaggtgtttagaagctccgtgctgcactccacacaggatctgtttctgcctttcttttctaacgtgacctggttccacgccatccacgtgtccggcaccaatggcacaaagcggttcgacaatcccgtgctgccttttaacgatggcgtgtacttcgccagcaccgagaagtccaacatcatcagaggctggatctttggcaccacactggactctaagacacagagcctgctgatcgtgaacaatgccaccaacgtggtgatcaaggtgtgcgagttccagttttgtaatgatccattcctgggcgtgtactatcacaagaacaataagtcctggatggagtctgagtttcgcgtgtattctagcgccaacaattgcacatttgagtacgtgagccagcccttcctgatggacctggagggcaagcagggcaatttcaagaacctgagggagttcgtgtttaagaatatcgatggctacttcaagatctacagcaagcacaccccaatcaacctggtgcgcgacctgccacagggattctccgccctggagccactggtggatctgcccatcggcatcaacatcacccggtttcagacactgctggccctgcacagatcctacctgacaccaggcgactcctctagcggatggaccgcaggagctgccgcctactatgtgggctatctgcagccccggaccttcctgctgaagtacaacgagaatggcaccatcacagacgcagtggattgcgccctggaccccctgtctgagacaaagtgtacactgaagagctttaccgtggagaagggcatctatcagacaagcaatttcagggtgcagcctaccgagtccatcgtgcgctttcccaatatcacaaacctgtgcccttttggcgaggtgttcaacgccaccagattcgccagcgtgtacgcctggaatcggaagagaatctccaactgcgtggccgactattctgtgctgtacaactccgcctctttcagcacctttaagtgctatggcgtgtctcccacaaagctgaatgatctgtgctttaccaacgtgtacgccgatagcttcgtgatcaggggagacgaagtgagacagatcgcaccaggacagacaggaaagatcgcagactacaattataagctgcctgacgatttcaccggctgcgtgatcgcctggaactccaacaatctggattctaaagtgggcggcaactacaattatctgtacaggctgtttcgcaagtccaatctgaagccattcgagcgggacatctccacagagatctaccaggccggctctaccccctgcaatggcgtggagggctttaactgttatttccctctgcagtcttacggcttccagccaacaaacggcgtgggctatcagccctacagagtggtggtgctgtcctttgagctgctgcacgcaccagcaacagtgtgcggcccaaagaagtctaccaatctggtgaagaacaagtgcgtgaacttcaacttcaacggactgaccggcacaggcgtgctgaccgagagcaataagaagttcctgccttttcagcagttctcgagggacatcgcagataccacagacgccgtgcgcgaccctcagaccctggagatcctggacatcacaccatgcagcttcggcggcgtgtccgtgatcacaccaggcaccaatacatccaaccaggtggccgtgctgtatcaggacgtgaattgtaccgaggtgcccgtggcaatccacgcagatcagctgacccctacatggcgggtgtactctaccggcagcaacgtgttccagacaagagccggatgcctgatcggagcagagcacgtgaacaatagctatgagtgcgacatccctatcggcgccggcatctgtgccagctaccagacccagacaaactccccatctggagcaggctcccaccatcaccatcaccatcaccatcaccactga

SEQ ID NO: 4253 - DNA, 2148 bp, Artificial Sequence
  Description of Artificial Sequence: Synthetic polynucleotide
atgggcatcctgccaagcccaggaatgcccgccctgctgtctctggtgagcctgctgtccgtgctgctgatgggatgcgtggcagagacaggcacacagtgcgtgaacctgaccacaaggacccagctgccccctgcctataccaattctttcacacggggcgtgtactatcccgacaaggtgtttagaagctccgtgctgcactccacacaggatctgtttctgcctttcttttctaacgtgacctggttccacgccatccacgtgtccggcaccaatggcacaaagcggttcgacaatcccgtgctgccttttaacgatggcgtgtacttcgccagcaccgagaagtccaacatcatcagaggctggatctttggcaccacactggactctaagacacagagcctgctgatcgtgaacaatgccaccaacgtggtgatcaaggtgtgcgagttccagttttgtaatgatccattcctgggcgtgtactatcacaagaacaataagtcctggatggagtctgagtttcgcgtgtattctagcgccaacaattgcacatttgagtacgtgagccagcccttcctgatggacctggagggcaagcagggcaatttcaagaacctgagggagttcgtgtttaagaatatcgatggctacttcaagatctacagcaagcacaccccaatcaacctggtgcgcgacctgccacagggattctccgccctggagccactggtggatctgcccatcggcatcaacatcacccggtttcagacactgctggccctgcacagatcctacctgacaccaggcgactcctctagcggatggaccgcaggagctgccgcctactatgtgggctatctgcagccccggaccttcctgctgaagtacaacgagaatggcaccatcacagacgcagtggattgcgccctggaccccctgtctgagacaaagtgtacactgaagagctttaccgtggagaagggcatctatcagacaagcaatttcagggtgcagcctaccgagtccatcgtgcgctttcccaatatcacaaacctgtgcccttttggcgaggtgttcaacgccaccagattcgccagctcatacgcctggaatcggaagagaatctccaactgcgtggccgactattctgtgctgtacaactccgcctctttcagcacctttaagtgctatggcgtgtctcccacaaagctgaatgatctgtgctttaccaacgtgtacgccgatcgtttcgtgatcaggggagacgaagtgagacagatcgcaccaggacagacaggaaagatcgcagactacaattataagctgcctgacgatttcaccggctgcgtgatcgcctggaactccaacaatctggatgctaaagtgggcggcaactacaattatctgtacaggctgtttcgcaagtccaatctgaagccattcgagcggtttatctccacagagatctaccaggccggctctacccccgctaatggcgtggagggctttaactgttatttccctctgcagtcttacgtcttccagccaacaaacggcgtgacttatcagccctacagagtggtggtgctgtcctttgagctgctgcacgcaccacatacagtgtgcggcccaaagaagtctaccaatctggtgaagaacaagtgcgtgaacttcaacttcaacggactgaccggcacaggcgtgctgaccgagagcaataagaagttcctgccttttcagcagttcggcagggacatcgcagataccacagacgccgtgcgcgaccctcagaccctggagatcctggacatcacaccatgcagcttcggcggcgtgtccgtgatcacaccaggcaccaatacatccaaccaggtggccgtgctgtatcaggacgtgaattgtaccgaggtgcccgtggcaatccacgcagatcagctgacccctacatggcgggtgtactctaccggcagcaacgtgttccagacaagagccggatgcctgatcggagcagagcacgtgaacaatagctatgagtgcgacatccctatcggcgccggcatctgtgccagctaccagacccagacaaactccccatctggagcaggctcccaccatcaccatcaccatcaccatcaccactga

SEQ ID NO: 4254 - DNA, 2148 bp, Artificial Sequence
  Description of Artificial Sequence: Synthetic polynucleotide
atgggcatcctgccaagcccaggaatgcccgccctgctgtctctggtgagcctgctgtccgtgctgctgatgggatgcgtggcagagacaggcacacagtgcgtgaacctgaccacaaggacccagctgccccctgcctataccaattctttcacacggggcgtgtactatcccgacaaggtgtttagaagctccgtgctgcactccacacaggatctgtttctgcctttcttttctaacgtgacctggttccacgccatccacgtgtccggcaccaatggcacaaagcggttcgacaatcccgtgctgccttttaacgatggcgtgtacttcgccagcaccgagaagtccaacatcatcagaggctggatctttggcaccacactggactctaagacacagagcctgctgatcgtgaacaatgccaccaacgtggtgatcaaggtgtgcgagttccagttttgtaatgatccattcctgggcgtgtactatcacaagaacaataagtcctggatggagtctgagtttcgcgtgtattctagcgccaacaattgcacatttgagtacgtgagccagcccttcctgatggacctggagggcaagcagggcaatttcaagaacctgagggagttcgtgtttaagaatatcgatggctacttcaagatctacagcaagcacaccccaatcaacctggtgcgcgacctgccacagggattctccgccctggagccactggtggatctgcccatcggcatcaacatcacccggtttcagacactgctggccctgcacagatcctacctgacaccaggcgactcctctagcggatggaccgcaggagctgccgcctactatgtgggctatctgcagccccggaccttcctgctgaagtacaacgagaatggcaccatcacagacgcagtggattgcgccctggaccccctgtctgagacaaagtgtacactgaagagctttaccgtggagaagggcatctatcagacaagcaatttcagggtgcagcctaccgagtccatcgtgcgctttcccaatatcacaaacctgtgcccttttggcgaggtgttcaacgccaccagattcgccagcgtgtacgcctggaatcggaagagaatctccaactgcgtggccgactattctgtgctgtacaactccgcctctttcagcacctttaagtgctatggcgtgtctcccacaaagctgaatgatctgtgctttaccaacgtgtacgccgatagcttcgtgatcaggggagacgaagtgagacagatcgcaccaggacagacaggaaagatcgcagactacaattataagctgcctgacgatttcaccggctgcgtgatcgcctggaactccaacaatctggattctaaagtgggcggcaactacaattatctgtacaggctgtttcgcaagtccaatctgaagccattcgagcgggacatctccacagagatgtaccaggccggctctaccccctgcaatggcgtggagggctttaactgttatttccctctgcagtcttacggcttccagccaacaaacggcgtgggctatcagccctacagagtggtggtgctgtcctttgagctgctgcacgcaccagcaacagtgtgcggcccaaagaagtctaccaatctggtgaagaacaagtgcgtgaacttcaacttcaacggactgaccggcacaggcgtgctgaccgagagcaataagaagttcctgccttttcagcagttcggcagggacatcgcagataccacagacgccgtgcgcgaccctcagaccctggagatcctggacatcacaccatgcagcttcggcggcgtgtccgtgatcacaccaggcaccaatacatccaaccaggtggccgtgctgtatcaggacgtgaattgtaccgaggtgcccgtggcaatccacgcagatcagctgacccctacatggcgggtgtactctaccggcagcaacgtgttccagacaagagccggatgcctgatcggagcagagcacgtgaacaatagctatgagtgcgacatccctatcggcgccggcatctgtgccagctaccagacccagacaaactccccatctggagcaggctcccaccatcaccatcaccatcaccatcaccactga

SEQ ID NO: 4255 - DNA, 2148 bp, Artificial Sequence
  Description of Artificial Sequence: Synthetic polynucleotide
atgggcatcctgccaagcccaggaatgcccgccctgctgtctctggtgagcctgctgtccgtgctgctgatgggatgcgtggcagagacaggcacacagtgcgtgaacctgaccacaaggacccagctgccccctgcctataccaattctttcacacggggcgtgtactatcccgacaaggtgtttagaagctccgtgctgcactccacacaggatctgtttctgcctttcttttctaacgtgacctggttccacgccatccacgtgtccggcaccaatggcacaaagcggttcgacaatcccgtgctgccttttaacgatggcgtgtacttcgccagcaccgagaagtccaacatcatcagaggctggatctttggcaccacactggactctaagacacagagcctgctgatcgtgaacaatgccaccaacgtggtgatcaaggtgtgcgagttccagttttgtaatgatccattcctgggcgtgtactatcacaagaacaataagtcctggatggagtctgagtttcgcgtgtattctagcgccaacaattgcacatttgagtacgtgagccagcccttcctgatggacctggagggcaagcagggcaatttcaagaacctgagggagttcgtgtttaagaatatcgatggctacttcaagatctacagcaagcacaccccaatcaacctggtgcgcgacctgccacagggattctccgccctggagccactggtggatctgcccatcggcatcaacatcacccggtttcagacactgctggccctgcacagatcctacctgacaccaggcgactcctctagcggatggaccgcaggagctgccgcctactatgtgggctatctgcagccccggaccttcctgctgaagtacaacgagaatggcaccatcacagacgcagtggattgcgccctggaccccctgtctgagacaaagtgtacactgaagagctttaccgtggagaagggcatctatcagacaagcaatttcagggtgcagcctaccgagtccatcgtgcgctttcccaatatcacaaacctgtgccctcttggcgaggtgttcaacgccaccagattcgccagcagttacgcctggaatcggaagagaatctccaactgcgtggccgactattctgtgctgtacaactccgcctctttcagcacctttaagtgctatggcgtgtctcccacaaagctgaatgatctgtgctttaccaacgtgtacgccgatcgattcgtgatcaggggagacgaagtgagacagatcgcaccaggacagacaggaaagatcgcagactacaattataagctgcctgacgatttcaccggctgcgtgatcgcctggaactccaacaatctggatgctaaagtgggcggcaactacaattatctgtacaggctgtttcgcaagtccaatctgaagccattcgagcggttcatctccacagagatctaccaggccggctctacccccgcaaatggcgtggagggctttaactgttatttccctctgcagtcttacgttttccagccaacaaacggcgtgggctatcagccctacagagtggtggtgctgtcctttgagctgctgcacgcaccacatacagtgtgcggcccaaagaagtctaccaatctggtgaagaacaagtgcgtgaacttcaacttcaacggactgaccggcacaggcgtgctgaccgagagcaataagaagttcctgccttttcagcagttcggcagggacatcgcagataccacagacgccgtgcgcgaccctcagaccctggagatcctggacatcacaccatgcagcttcggcggcgtgtccgtgatcacaccaggcaccaatacatccaaccaggtggccgtgctgtatcaggacgtgaattgtaccgaggtgcccgtggcaatccacgcagatcagctgacccctacatggcgggtgtactctaccggcagcaacgtgttccagacaagagccggatgcctgatcggagcagagcacgtgaacaatagctatgagtgcgacatccctatcggcgccggcatctgtgccagctaccagacccagacaaactccccatctggagcaggctcccaccatcaccatcaccatcaccatcaccactga

SEQ ID NO: 4256 - DNA, 2148 bp, Artificial Sequence
  Description of Artificial Sequence: Synthetic polynucleotide
atgggcatcctgccaagcccaggaatgcccgccctgctgtctctggtgagcctgctgtccgtgctgctgatgggatgcgtggcagagacaggcacacagtgcgtgaacctgaccacaaggacccagctgccccctgcctataccaattctttcacacggggcgtgtactatcccgacaaggtgtttagaagctccgtgctgcactccacacaggatctgtttctgcctttcttttctaacgtgacctggttccacgccaaacacgtgtccggcaccaatggcacaaagcggttcgacaatcccgtgctgccttttaacgatggcgtgtacttcgccagcaccgagaagtccaacatcatcagaggctggatctttggcaccacactggactctaagacacagagcctgctgatcgtgaacaatgccaccaacgtggtgatcaaggtgtgcgagttccagttttgtaatgatccattcctgggcgtgtactatcacaagaacaataagtcctggatggagtctgagtttcgcgtgtattctagcgccaacaattgcacatttgagtaccatagccagcccttcctgatggacctggagggcaagcagggcaatttcaagaacctgagggagttcgtgtttaagaatatcgatggctacttcaagatctacagcaagcacaccccaatcaacctggtgcgcgacctgccacagggattctccgccctggagccactggtggatctgcccatcggcatcaacatcacccggtttcagacactgctggccctgcacagatcctacctgacaccaggcgactcctctagcggagaaaccgcaggagctgccgcctactatgtgggctatctgcagccccggaccttcctgctgaagtacaacgagaatggcaccatcacagacgcagtggattgcgccctggaccccctgtctgagacaaagtgtacactgaagagctttaccgtggagaagggcatctatcagacaagcaatttcagggtgcagcctaccgagtccatcgtgcgctttcccaatatcacaaacccgtgcccttttggcgaggtgttcaacgccaccagattcgccagcgtgtacgcctggaatcggaagagaatctccaactgcgtggccgactattctgtgctgtacaactccgcctctttcagcacctttaagtgctatggcgtgtctcccacaaagctgaatgatctgtgctttaccaacgtgtacgccgatagcttcgtgatcaggggagacgaagtgagacagatcgcaccaggacagacaggaaagatcgcagactacaattataagctgcctgacgatttcaccggctgcgtgatcgcctggaactccaacaatctggattctaaagtgggcggcaactacaattatctgtacaggctgtttcgcaagtccaatctgaagccattcgagcgggacatctccacagagatctaccaggccggctctaccccctgcaatggcgtggagggctttaactgttatttccctctgcagtcttacggcttccagccaacaaacggcgtgggccaacagccctacagagtggtggtgctgtcctttgagctgctgcacgcaccagcaacagtgtgcggcccaaagaagtctaccaatctggtgaagaacaagtgcgtgaacttcaacttcaacggactgaccggcacaggcgtgctgaccgagagcaataagaagttcctgccttttcagcagttcggcagggacatcgcagataccacagacgccgtgcgcgaccctcagaccctggagatcctggacatcacaccatgcagcttcggcggcgtgtccgtgatcacaccaggcaccaatacatccaaccaggtggccgtgctgtatcaggacgtgaattgtaccgaggtgcccgatgcaatccacgcagatcagctgacccctacatggcgggtgtactctaccggcagcaacgtgttccagacaagagccggatgcctgatcggagcagagcacgtgaacaatagctatgagtgcgacatccctatcggcgccggcatctgtgccagctaccagacccagacaaactccccatctggagcaggctcccaccatcaccatcaccatcaccatcaccactga

SEQ ID NO: 4257 - DNA, 2148 bp, Artificial Sequence
  Description of Artificial Sequence: Synthetic polynucleotide
atgggcatcctgccaagcccaggaatgcccgccctgctgtctctggtgagcctgctgtccgtgctgctgatgggatgcgtggcagagacaggcacacagtgcgtgaacctgaccacaaggacccagctgccccctgcctataccaattctttcacacggggcgtgtactatcccgacaaggtgtttagaagctccgtgctgcactccacacaggatctgtttctgcctttcttttctaacgtgacctggttccacgccatccacgtgtccggcaccaatggcacaaagcggttcgacaatcccgtgctgccttttaacgatggcgtgtacttcgccagcaccgagaagtccaacatcatcagaggctggatctttggcaccacactggactctaagacacagagcctgctgatcgtgaacaatgccaccaacgtggtgatcaaggtgtgcgagttccagttttgtaatgatccattcctgggcgtgtactatcacaagaacaataagtcctggatggagtctgagtttcgcgtgtattctagcgccaacaattgcacatttgagtacgtgagccagcccttcctgatgcaactggagggcaagcagggcaatttcaagaacctgagggagttcgtgtttaagaatatcgatggctacttcaagatctacagcaagcacaccccaatcaacctggtgcgcgacctgccacagggattctccgccctggagccactggtggatctgcccatcggcatcaacatcacccggtttcagacactgctggccctgcacagatcctacctgacaccaggcgactcctctagcggatggaccgcaggagctgccgcctactatgtgggctatctgcagccccggaccttcctgctgaagtacaacgagaatggcaccatcacagacgcagtggattgcgccctggaccccctgtctgagacaaagtgtacactgaagagctttaccgtggagaagggcatctatcagacaagcaatttcagggtgcagcctaccgagtccatcgtgcgctttcccaatatcacaaacctgtgcccttttggcgaggtgttcaacgccaccagattcgccagcgtgtacgcctggaatcggaagagaatctccaactgcgtggccgactattctgtgctgtacaactccgcctctttcagcacctttaagtgctatggcgtgtctcccacaaagctgaatgatctgtgctttaccaacgtgtacgccgatagcttcgtgatcaggggagacgaagtgagacagatcgcaccaggacagacaggaaagatcgcagactacaattataagctgcctgacgatttcaccggctgcgtgatcgcctggaactccaacaatctggattctaaagtgggcggcaactacaattatctgtacaggctgtttcgcaagtccaatctgaagccattcgagcgggacatctccacagagatctaccaggccggctctaccccctgcaatggcgtggagggctttaactgttatttccctctgcagtcttacggcttccagccaacaaacggcgtgggctatcagccctacagagtggtggtgctgtcctttgagctgctgcacgcaccagcaacagtgtgcggcccaaagaagtctaccaatctggtgaagaacaagtgcgtgaacttcaacttcaacggactgaccggcacaggcgtgctgaccgagagcaataagaagttcctgccttttcagcagttcggcagggacatcgcagataccacagacgccgtgcgcgaccctcagaccctggagatcctggacatcacaccatgcagcttcggcggcgtgtccgtgatcacaccaggcaccaatacatccaaccaggtggccgtgctgtatcaggacgtgaattgtaccgaggtgcccgtggcaatccacgcagatcagctgacccctacatggcgggtgtactctaccggcagcaacgtgttccagacaagagccggatgcctgatcggagcagagcacgtgaacaatagctatgagtgcgacatccctatcggcgccggcatctgtgccagctaccagacccagacaaactccccatctggagcaggctcccaccatcaccatcaccatcaccatcaccactga

SEQ ID NO: 4258 - DNA, 2148 bp, Artificial Sequence
  Description of Artificial Sequence: Synthetic polynucleotide
atgggcatcctgccaagcccaggaatgcccgccctgctgtctctggtgagcctgctgtccgtgctgctgatgggatgcgtggcagagacaggcacacagtgcgtgaacctgaccacaaggacccagctgccccctgcctataccaattctttcacacggggcgtgtactatcccgacaaggtgtttagaagctccgtgctgcactccacacaggatctgtttctgcctttcttttctaacgtgacctggttccacgccatccacgtgtccggcaccaatggcacaaagcggttcgacaatcccgtgctgccttttaacgatggcgtgtacttcgccagcaccgagaagtccaacatcatcagaggctggatctttggcaccacactggactctaagacacagagcctgctgatcgtgaacaatgccaccaacgtggtgatcaaggtgtgcgagttccagttttgtaatgatccattcctgggcgtgtactatcacaagaacaataagtcctggatggagtctgagtttcgcgtgtattctagcgccaacaattgcacatttgagtacgtgagccagcccttcctgatggacctggagggcaagcagggcaatttcaagaacctgagggagttcgtgtttaagaatatcgatggctacttcaagatctacagcaagcacaccccaatcaacctggtgcgcgacctgccacagggattctccgccctggagccactggtggatctgcccatcggcatcaacatcacccggtttcagacactgctggccctgcacagatcctacctgacaccaggcgactcctctagcggatggaccgcaggagctgccgcctactatgtgggctatctgcagccccggaccttcctgctgaagtacaacgagaatggcaccatcacagacgcagtggattgcgccctggaccccctgtctgagacaaagtgtacactgaagagctttaccgtggagaagggcatctatcagacaagcaatttcagggtgcagcctaccgagtccatcgtgcgctttcccaatatcacaaacctgtgcccttttggcgaggtgttcaacgccaccagattcgccagcgtgtacgcctggaatcggaagagaatctccaactgcgtggccgactattctgtgctgtacaactccgcctctttcagcacctttaagtgctatggcgtgtctcccacaaagctgaatgatctgtgctttaccaacgtgtacgccgatagcttcgtgatcaggggagacgaagtgagacagatcgcaccaggacagacaggaaagatcgcagactacaattataagctgcctgacgatttcaccggctgcgtgatcgcctggaactccaacaatctggattctaaagtgggcggcaactacaattatctgtacaggctgtttcgcaagtccaatctgaagccattcgagcgggacatctccacagagatctaccaggccggctctaccccctgcaatggcgtggagggctttaactgttatttccctctgcagtcttacggcttccagccaacaaacggcgtgggctatcagccctacagagtggtggtgctgtcctttgagctgctgcacgcaccagcaacagtgtgcggcccaaagaagtctaccaatctggtgaagaacaagtgcgtgaacttcaacttcaacggactgaccggcacaggcgtgctgaccgagagcaataagaagttcctgccttttcagcagttcgctagggacatcgcagataccacagacgccgtgcgcgaccctcagaccctggagatcctggacatcacaccatgcagcttcggcggcgtgtccgtgatcacaccaggcaccaatacatccaaccaggtggccgtgctgtatcaggacgtgaattgtaccgaggtgcccgtggcaatccacgcagatcagctgacccctacatggcgggtgtactctaccggcagcaacgtgttccagacaagagccggatgcctgatcggagcagagcacgtgaacaatagctatgagtgcgacatccctatcggcgccggcatctgtgccagctaccagacccagacaaactccccatctggagcaggctcccaccatcaccatcaccatcaccatcaccactga

SEQ ID NO: 4259 - DNA, 2148 bp, Artificial Sequence
  Description of Artificial Sequence: Synthetic polynucleotide
atgggcatcctgccaagcccaggaatgcccgccctgctgtctctggtgagcctgctgtccgtgctgctgatgggatgcgtggcagagacaggcacacagtgcgtgaacctgaccacaaggacccagctgccccctgcctataccaattctttcacacggggcgtgtactatcccgacaaggtgtttagaagctccgtgctgcactccacacaggatctgtttctgcctttcttttctaacgtgacctggttccacgccaaacacgtgtccggcaccaatggcacaaagcggttcgacaatcccgtgctgccttttaacgatggcgtgtacttcgccagcaccgagaagtccaacatcatcagaggctggatctttggcaccacactggactctaagacacagagcctgctgatcgtgaacaatgccaccaacgtggtgatcaaggtgtgcgagttccagttttgtaatgatccattcctgggcgtgtactatcacaagaacaataagtcctggatggagtctgagtttcgcgtgtattctagcgccaacaattgcacatttgagtaccatagccagcccttcctgatggacctggagggcaagcagggcaatttcaagaacctgagggagttcgtgtttaagaatatcgatggctacttcaagatctacagcaagcacaccccaatcaacctggtgcgcgacctgccacagggattctccgccctggagccactggtggatctgcccatcggcatcaacatcacccggtttcagacactgctggccctgcacagatcctacctgacaccaggcgactcctctagcggagaaaccgcaggagctgccgcctactatgtgggctatctgcagccccggaccttcctgctgaagtacaacgagaatggcaccatcacagacgcagtggattgcgccctggaccccctgtctgagacaaagtgtacactgaagagctttaccgtggagaagggcatctatcagacaagcaatttcagggtgcagcctaccgagtccatcgtgcgctttcccaatatcacaaacccttgcccttttggcgaggtgttcaacgccaccagattcgccagcgtgtacgcctggaatcggaagagaatctccaactgcgtggccgactattctgtgctgtacaactccgcctctttcagcacctttaagtgctatggcgtgtctcccacaaagctgaatgatctgtgctttaccaacgtgtacgccgatagcttcgtgatcaggggagacgaagtgagacagatcgcaccaggacagacaggaaagatcgcagactacaattataagctgcctgacgatttcaccggctgcgtgatcgcctggaactccaacaatctggattctaaagtgggcggcaactacaattatctgtacaggctgtttcgcaagtccaatctgaagccattcgagcgggacatctccacagagatctaccaggccggctctaccccctgcaatggcgtggagggctttaactgttatttccctctgcagtcttacggcttccagccaacaaacggcccgggccaacagccctacagagtggtggtgctgtcctttgagctgctgcacgcaccagcaacagtgtgcggcccaaagaagtctaccaatctggtgaagaacaagtgcgtgaacttcaacttcaacggactgaccggcacaggcgtgctgaccgagagcaataagaagttcctgccttttcagcagttcggcagggacatcgcagataccacagacgccgtgcgcgaccctcagaccctggagatcctggacatcacaccatgcagcttcggcggcgtgtccgtgatcacaccaggcaccaatacatccaaccaggtggccgtgctgtatcaggacgtgaattgtaccgaggtgcccgatgcaatccacgcagatcagctgacccctacatggcgggtgtactctaccggcagcaacgtgttccagacaagagccggatgcctgatcggagcagagcacgtgaacaatagctatgagtgcgacatccctatcggcgccggcatctgtgccagctaccagacccagacaaactccccatctggagcaggctcccaccatcaccatcaccatcaccatcaccactga

SEQ ID NO: 4260 - DNA, 2148 bp, Artificial Sequence
  Description of Artificial Sequence: Synthetic polynucleotide
atgggcatcctgccaagcccaggaatgcccgccctgctgtctctggtgagcctgctgtccgtgctgctgatgggatgcgtggcagagacaggcacacagtgcgtgaacctgaccacaaggacccagctgccccctgcctataccaattctttcacacggggcgtgtactatcccgacaaggtgtttagaagctccgtgctgcactccacacaggatctgtttctgcctttcttttctaacgtgacctggttccacgccatccacgtgtccggcaccaatggcacaaagcggttcgacaatcccgtgctgccttttaacgatggcgtgtacttcgccagcaccgagaagtccaacatcatcagaggctggatctttggcaccacactggactctaagacacagagcctgctgatcgtgaacaatgccaccaacgtggtgatcaaggtgtgcgagttccagttttgtaatgatccattcctgggcgtgtactatcacaagaacaataagtcctggatggagtctgagtttcgcgtgtattctagcgccaacaattgcacatttgagtacgtgagccagcccttcctgatggacctggagggcaagcagggcaatttcaagaacctgagggagttcgtgtttaagaatatcgatggctacttcaagatctacagcaagcacaccccaatcaacctggtgcgcgacctgccacagggattctccgccctggagccactggtggatctgcccatcggcatcaacatcacccggtttcagacactgctggccctgcacagatcctacctgacaccaggcgactcctctagcggatggaccgcaggagctgccgcctactatgtgggctatctgcagccccggaccttcctgctgaagtacaacgagaatggcaccatcacagacgcagtggattgcgccctggaccccctgtctgagacaaagtgtacactgaagagctttaccgtggagaagggcatctatcagacaagcaatttcagggtgcagcctaccgagtccatcgtgcgctaccccaatatcacaaacctgtgcccttttggcgaggtgttcaacgccaccagattcgccagcgtgtacgcctggaatcggaagagaatctccaactgcgtggccgactattctgtgctgtacaactccgcctctttcagcacctttaagtgctatggcgtgtctcccacaaagctgaatgatctgtgctttaccaacgtgtacgccgatagcttcgtgatcaggggagacgaagtgagacagatcgcaccaggacagacaggaaagatcgcagactacaattataagctgcctgacgatttcaccggctgcgtgatcgcctggaactccaacaatctggattctaaagtgggcggcaactacaattatctgtacaggctgtttcgcaagtccaatctgaagccattcgagcgggacatctccacagagatctaccaggccggctctaccccctgcaatggcgtggagggctttaactgttatttccctctgcagtcttacggcttccagccaacaaacggcgtgggctatcagccctacagagtggtggtgctgtcctttgagctgctgcacgcaccagcaacagtgtgcggcccaaagaagtctaccaatctggtgaagaacaagtgcgtgaacttcaacttcaacggactgaccggcacaggcgtgctgaccgagagcaataagaagttcctgccttttcagcagttcggcagggacatcgcagataccacagacgccgtgcgcgaccctcagaccctggagatcctggacatcacaccatgcagcttcggcggcgtgtccgtgatcacaccaggcaccaatacatccaaccaggtggccgtgctgtatcaggacgtgaattgtaccgaggtgcccgtggcaatccacgcagatcagctgacccctacatggcgggtgtactctaccggcagcaacgtgttccagacaagagccggatgcctgatcggagcagagcacgtgaacaatagctatgagtgcgacatccctatcggcgccggcatctgtgccagctaccagacccagacaaactccccatctggagcaggctcccaccatcaccatcaccatcaccatcaccactga

SEQ ID NO: 4261 - DNA, 2148 bp, Artificial Sequence
  Description of Artificial Sequence: Synthetic polynucleotide
atgggcatcctgccaagcccaggaatgcccgccctgctgtctctggtgagcctgctgtccgtgctgctgatgggatgcgtggcagagacaggcacacagtgcgtgaacctgaccacaaggacccagctgccccctgcctataccaattctttcacacggggcgtgtactatcccgacaaggtgtttagaagctccgtgctgcactccacacaggatctgtttctgcctttcttttctaacgtgacctggttccacgccatccacgtgtccggcaccaatggcacaaagcggttcgacaatcccgtgctgccttttaacgatggcgtgtacttcgccagcaccgagaagtccaacatcatcagaggctggatctttggcaccacactggactctaagacacagagcctgctgatcgtgaacaatgccaccaacgtggtgatcaaggtgtgcgagttccagttttgtaatgatccattcctgggcgtgtactatcacaagaacaataagtcctggatggagtctgagtttcgcgtgtattctagcgccaacaattgcacatttgagtacgtgagccagcccttcctgatggacctggagggcaagcagggcaatttcaagtggctgagggagttcgtgtttaagaatatcgatggctacttcaagatctacagcaagcacaccccaatcaacctggtgcgcgacctgccacagggattctccgccctggagccactggtggatctgcccatcggcatcaacatcacccggtttcagacactgctggccctgcacagatcctacctgacaccaggcgactcctctagcggatggaccgcaggagctgccgcctactatgtgggctatctgcagccccggaccttcctgctgaagtacaacgagaatggcaccatcacagacgcagtggattgcgccctggaccccctgtctgagacaaagtgtacactgaagagctttaccgtggagaagggcatctatcagacaagcaatttcagggtgcagcctaccgagtccatcgtgcgctttcccaatatcacaaacctgtgcccttttggcgaggtgttcaacgccaccagattcgccagcgtgtacgcctggaatcggaagagaatctccaactgcgtggccgactattctgtgctgtacaactccgcctctttcagcacctttaagtgctatggcgtgtctcccacaaagctgaatgatctgtgctttaccaacgtgtacgccgatagcttcgtgatcaggggagacgaagtgagacagatcgcaccaggacagacaggaaagatcgcagactacaattataagctgcctgacgatttcaccggctgcgtgatcgcctggaactccaacaatctggattctaaagtgggcggcaactacaattatctgtacaggctgtttcgcaagtccaatctgaagccattcgagcgggacatctccacagagatctaccaggccggctctaccccctgcaatggcgtggagggctttaactgttatttccctctgcagtcttacggcttccagccaacaaacggcgtgggctatcagccctacagagtggtggtgctgtcctttgagctgctgcacgcaccagcaacagtgtgcggcccaaagaagtctaccaatctggtgaagaacaagtgcgtgaacttcaacttcaacggactgaccggcacaggcgtgctgaccgagagcaataagaagttcctgccttttcagcagttcggcagggacatcgcagataccacagacgccgtgcgcgaccctcagaccctggagatcctggacatcacaccatgcagcttcggcggcgtgtccgtgatcacaccaggcaccaatacatccaaccaggtggccgtgctgtatcaggacgtgaattgtaccgaggtgcccgtggcaatccacgcagatcagctgacccctacatggcgggtgtactctaccggcagcaacgtgttccagacaagagccggatgcctgatcggagcagagcacgtgaacaatagctatgagtgcgacatccctatcggcgccggcatctgtgccagctaccagacccagacaaactccccatctggagcaggctcccaccatcaccatcaccatcaccatcaccactga

SEQ ID NO: 4262 - DNA, 2148 bp, Artificial Sequence
  Description of Artificial Sequence: Synthetic polynucleotide
atgggcatcctgccaagcccaggaatgcccgccctgctgtctctggtgagcctgctgtccgtgctgctgatgggatgcgtggcagagacaggcacacagtgcgtgaacctgaccacaaggacccagctgccccctgcctataccaattctttcacacggggcgtgtactatcccgacaaggtgtttagaagctccgtgctgcactccacacaggatctgtttctgcctttcttttctaacgtgacctggttccacgccatccacgtgtccggcaccaatggcacaaagcggttcgacaatcccgtgctgccttttaacgatggcgtgtacttcgccagcaccgagaagtccaacatcatcagaggctggatctttggcaccacactggactctaagacacagagcctgctgatcgtgaacaatgccaccaacgtggtgatcaaggtgtgcgagttccagttttgtaatgatccattcctgggcgtgtactatcacaagaacaataagtcctggatggagtctgagtttcgcgtgtattctagcgccaacaattgcacatttgagtacgtgagccagcccttcctgatggacctggagggcaagcagggcaatttcaagaacctgagggagttcgtgtttaagaatatcgatggctacttcaagatctacagcaagcacaccccaatcaacctggtgcgcgacctgccacagggattctccgccctggagccactggtggatctgcccatcggcatcaacatcacccggtttcagacactgctggccctgcacagatcctacctgacaccaggcgactcctctagcggatggaccgcaggagctgccgcctactatgtgggctatctgcagccccggaccttcctgctgaagtacaacgagaatggcaccatcacagacgcagtggattgcgccctggaccccctgtctgagacaaagtgtacactgaagagctttaccgtggagaagggcatctatcagacaagcaatttcagggtgcagcctaccgagtccatcgtgcgctttcccaatatcacaaacctgtgcccttttggcgaggtgttcaacgccaccagattcgccagcgtgtacgcctggaatcggaagagaatctccaactgcgtggccgactattctgtgctgtacaactccgcctctttcagcacctttaagtgctatggcgtgtctcccacaaagctgaatgatctgtgctttaccaacgtgtacgccgatagcttcgtgatcaggggagacgaagtgagacagatcgcaccaggacagacaggagcgatcgcagactacaattataagctgcctgacgatttcaccggctgcgtgatcgcctggaactccaacaatctggattctaaagtgggcggcaactacaattatctgtacaggctgtttcgcaagtccaatctgaagccattcgagcgggacatctccacagagatctaccaggccggctctaccccctgcaatggcgtggagggctttaactgttatttccctctgcagtcttacggcttccagccaacaaacggcgtgggctatcagccctacagagtggtggtgctgtcctttgagctgctgcacgcaccagcaacagtgtgcggcccaaagaagtctaccaatctggtgaagaacaagtgcgtgaacttcaacttcaacggactgaccggcacaggcgtgctgaccgagagcaataagaagttcctgccttttcagcagttcggcagggacatcgcagataccacagacgccgtgcgcgaccctcagaccctggagatcctggacatcacaccatgcagcttcggcggcgtgtccgtgatcacaccaggcaccaatacatccaaccaggtggccgtgctgtatcaggacgtgaattgtaccgaggtgcccgtggcaatccacgcagatcagctgacccctacatggcgggtgtactctaccggcagcaacgtgttccagacaagagccggatgcctgatcggagcagagcacgtgaacaatagctatgagtgcgacatccctatcggcgccggcatctgtgccagctaccagacccagacaaactccccatctggagcaggctcccaccatcaccatcaccatcaccatcaccactga

SEQ ID NO: 4263 - DNA, 2148 bp, Artificial Sequence
  Description of Artificial Sequence: Synthetic polynucleotide
atgggcatcctgccaagcccaggaatgcccgccctgctgtctctggtgagcctgctgtccgtgctgctgatgggatgcgtggcagagacaggcacacagtgcgtgaacctgaccacaaggacccagctgccccctgcctataccaattctttcacacggggcgtgtactatcccgacaaggtgtttagaagctccgtgctgcactccacacaggatctgtttctgcctttcttttctaacgtgacctggttccacgccatccacgtgtccggcaccaatggcacaaagcggttcgacaatcccgtgctgccttttaacgatggcgtgtacttcgccagcaccgagaagtccaacatcatcagaggctggatctttggcaccacactggactctaagacacagagcctgctgatcgtgaacaatgccaccaacgtggtgatcaaggtgtgcgagttccagttttgtaatgatccattcctgggcgtgtactatcacaagaacaataagtcctggatggagtctgagtttcgcgtgtattctagcgccaacaattgcacatttgagtacgtgagccagcccttcctgatggacctggagggcaagcagggcaatttcaagaacctgagggagttcgtgtttaagaatatcgatggctacttcaagatctacagcaagcacaccccaatcaacctggtgcgcgacctgccacagggattctccgccctggagccactggtggatctgcccatcggcatcaacatcacccggtttcagacactgctggccctgcacagatcctacctgacaccaggcgactcctctagcggatggaccgcaggagctgccgcctactatgtgggctatctgcagccccggaccttcctgctgaagtacaacgagaatggcaccatcacagacgcagtggattgcgccctggaccccctgtctgagacaaagtgtacactgaagagctttaccgtggagaagggcatctatcagacaagcaatttcagggtgcagcctaccgagtccatcgtgcgctttcccaatatcacaaacctgtgcccttttggcgaggtgttcaacgccaccagattcgccagcgtgtacgcctggaatcggaagagaatctccaactgcgtggccgactattctgtgctgtacaactccgcctctttcagcacctttaagtgctatggcgtgtctcccacaaagctgaatgatctgtgctttaccaacgtgtacgccgatagcttcgtgatcaggggagacgaagtgagacagatcgcaccaggacagacaggaaagatcgcagactacaattataagctgcctgacgatttcaccggctgcgtgatcgcctggaactccaacaatctggattctaaagtgggcggcaactacaattatctgtacaggctgtttcgcaagtccaatctgaagccattcgagcgggacatctccacagagatctaccaggccggctctaccccctgcaatggcgtggagggctttaactgttatttccctctgcagtcttacggcttccagccaacaaacggcgtgggctatcagccctacagagtggtggtgctgtcctttgagctgctgcacgcaccagcaacagtgtgcggcccaaagaagtctaccaatctggtgaagaacaagtgcgtgaacttcaacttcaacggactgaccggcacaggcgtgctgaccgagagcaataagaagttcctgccttttcagcagttcggcagggacatcgcagataccacacgtgccgtgcgcgaccctcagaccctggagatcctggacatcacaccatgcagcttcggcggcgtgtccgtgatcacaccaggcaccaatacatccaaccaggtggccgtgctgtatcaggacgtgaattgtaccgaggtgcccgtggcaatccacgcagatcagctgacccctacatggcgggtgtactctaccggcagcaacgtgttccagacaagagccggatgcctgatcggagcagagcacgtgaacaatagctatgagtgcgacatccctatcggcgccggcatctgtgccagctaccagacccagacaaactccccatctggagcaggctcccaccatcaccatcaccatcaccatcaccactga

SEQ ID NO: 4264 - DNA, 2148 bp, Artificial Sequence
  Description of Artificial Sequence: Synthetic polynucleotide
atgggcatcctgccaagcccaggaatgcccgccctgctgtctctggtgagcctgctgtccgtgctgctgatgggatgcgtggcagagacaggcacacagtgcgtgaacctgaccacaaggacccagctgccccctgcctataccaattctttcacacggggcgtgtactatcccgacaaggtgtttagaagctccgtgctgcactccacacaggatctgtttctgcctttcttttctaacgtgacctggttccacgccaaacacgtgtccggcaccaatggcacaaagcggttcgacaatcccgtgctgccttttaacgatggcgtgtacttcgccagcaccgagaagtccaacatcatcagaggctggatctttggcaccacactggactctaagacacagagcctgctgatcgtgaacaatgccaccaacgtggtgatcaaggtgtgcgagttccagttttgtaatgatccattcctgggcgtgtactatcacaagaacaataagtcctggatggagtctgagtttcgcgtgtattctagcgccaacaattgcacatttgagtaccatagccagcccttcctgatggacctggagggcaagcagggcaatttcaagaacctgagggagttcgtgtttaagaatatcgatggctacttcaagatctacagcaagcacaccccaatcaacctggtgcgcgacctgccacagggattctccgccctggagccactggtggatctgcccatcggcatcaacatcacccggtttcagacactgctggccctgcacagatcctacctgacaccaggcgactcctctagcggagaaaccgcaggagctgccgcctactatgtgggctatctgcagccccggaccttcctgctgaagtacaacgagaatggcaccatcacagacgcagtggattgcgccctggaccccctgtctgagacaaagtgtacactgaagagctttaccgtggagaagggcatctatcagacaagcaatttcagggtgcagcctaccgagtccatcgtgcgctttcccaatatcacaaaccattgcccttttggcgaggtgttcaacgccaccagattcgccagcgtgtacgcctggaatcggaagagaatctccaactgcgtggccgactattctgtgctgtacaactccgcctctttcagcacctttaagtgctatggcgtgtctcccacaaagctgaatgatctgtgctttaccaacgtgtacgccgatagcttcgtgatcaggggagacgaagtgagacagatcgcaccaggacagacaggaaagatcgcagactacaattataagctgcctgacgatttcaccggctgcgtgatcgcctggaactccaacaatctggattctaaagtgggcggcaactacaattatctgtacaggctgtttcgcaagtccaatctgaagccattcgagcgggacatctccacagagatctaccaggccggctctaccccctgcaatggcgtggagggctttaactgttatttccctctgcagtcttacggcttccagccaacaaacggcccgggccaacagccctacagagtggtggtgctgtcctttgagctgctgcacgcaccagcaacagtgtgcggcccaaagaagtctaccaatctggtgaagaacaagtgcgtgaacttcaacttcaacggactgaccggcacaggcgtgctgaccgagagcaataagaagttcctgccttttcagcagttcggcagggacatcgcagataccacagacgccgtgcgcgaccctcagaccctggagatcctggacatcacaccatgcagcttcggcggcgtgtccgtgatcacaccaggcaccaatacatccaaccaggtggccgtgctgtatcaggacgtgaattgtaccgaggtgcccgtggcaatccacgcagatcagctgacccctacatggcgggtgtactctaccggcagcaacgtgttccagacaagagccggatgcctgatcggagcagagcacgtgaacaatagctatgagtgcgacatccctatcggcgccggcatctgtgccagctaccagacccagacaaactccccatctggagcaggctcccaccatcaccatcaccatcaccatcaccactga

SEQ ID NO: 4265 - DNA, 2148 bp, Artificial Sequence
  Description of Artificial Sequence: Synthetic polynucleotide
atgggcatcctgccaagcccaggaatgcccgccctgctgtctctggtgagcctgctgtccgtgctgctgatgggatgcgtggcagagacaggcacacagtgcgtgaacctgaccacaaggacccagctgccccctgcctataccaattctttcacacggggcgtgtactatcccgacaaggtgtttagaagctccgtgctgcactccacacaggatctgtttctgcctttcttttctaacgtgacctggttccacgccatccacgtgtccggcaccaatggcacaaagcggttcgacaatcccgtgctgccttttaacgatggcgtgtacttcgccagcaccgagaagtccaacatcatcagaggctggatctttggcaccacactggactctaagacacagagcctgctgatcgtgaacaatgccaccaacgtggtgatcaaggtgtgcgagttccagttttgtaatgatccattcctgggcgtgtactatcacaagaacaataagtcctggatggagtctgagtttcgcgtgtattctagcgccaacaattgcacatttgagtacgtgagccagcccttcctgatggacctggagggcaagcagggcaatttcaagaacctgagggagttcgtgtttaagaatatcgatggctacttcaagatctacagcaagcacaccccaatcaacctggtgcgcgacctgccacagggattctccgccctggagccactggtggatctgcccatcggcatcaacatcacccggtttcagacactgctggccctgcacagatcctacctgacaccaggcgactcctctagcggatggaccgcaggagctgccgcctactatgtgggctatctgcagccccggaccttcctgctgaagtacaacgagaatggcaccatcacagacgcagtggattgcgccctggaccccctgtctgagacaaagtgtacactgaagagctttaccgtggagaagggcatctatcagacaagcaatttcagggtgcagcctaccgagtccatcgtgcgctttcccaatatcacaaacctgtgcccttttggcgaggtgttcaacgccaccagattcgccagcgtgtacgcctggaatcggaagagaatctccaactgcgtggccgactattctgtgctgtacaactccgcctctttcagcacctttaagtgctatggcgtgtctcccacaaagctgaatgatctgtgctttaccaacgtgtacgccgatagcttcgtgatcaggggagacgaagtgagacagatcgcaccaggacagacaggaaagatcgcagactacaattataagctgcctgacgatttcaccggctgcgtgatcgcctggaactccaacaatctggattctaaagtgggcggcaactacaattatctgtacaggctgtttcgcaagtccaatctgaagccattcgagcgggacatctccacagagatctaccaggccggctctaccccctgcaatggcgtggagggctttaactgttatttccctctgcagtcttacggcttccagccaacaaacggcgtgggctatcagccctacagagtggtggtgctgtcctttgagctgctgcacgcaccagcaacagtgtgcggcccaaagaagtctaccaatctggtgaagaacaagtgcgtgaacttcaacttcaacggactgaccggcacaggcgtgctgaccgagagcaataagaagttcctgccttttcagcagttcggcagggacatcgcagataccacagacgccgtgcgcgaccctcagaccctggagatcctggacatcgttccatgcagcttcggcggcgtgtccgtgatcacaccaggcaccaatacatccaaccaggtggccgtgctgtatcaggacgtgaattgtaccgaggtgcccgtggcaatccacgcagatcagctgacccctacatggcgggtgtactctaccggcagcaacgtgttccagacaagagccggatgcctgatcggagcagagcacgtgaacaatagctatgagtgcgacatccctatcggcgccggcatctgtgccagctaccagacccagacaaactccccatctggagcaggctcccaccatcaccatcaccatcaccatcaccactga

SEQ ID NO: 4266 - DNA, 2148 bp, Artificial Sequence
  Description of Artificial Sequence: Synthetic polynucleotide
atgggcatcctgccaagcccaggaatgcccgccctgctgtctctggtgagcctgctgtccgtgctgctgatgggatgcgtggcagagacaggcacacagtgcgtgaacctgaccacaaggacccagctgccccctgcctataccaattctttcacacggggcgtgtactatcccgacaaggtgtttagaagctccgtgctgcactccacacaggatctgtttctgcctttcttttctaacgtgacctggttccacgccatccacgtgtccggcaccaatggcacaaagcggttcgacaatcccgtgctgccttttaacgatggcgtgtacttcgccagcaccgagaagtccaacatcatcagaggctggatctttggcaccacactggactctaagacacagagcctgctgatcgtgaacaatgccaccaacgtggtgatcaaggtgtgcgagttccagttttgtaatgatccattcctgggcgtgtactatcacaagaacaataagtcctggatggagtctgagtttcgcgtgtattctagcgccaacaattgcacatttgagtacgtgagccagcccttcctgatggacctggagggcaagcagggcaatttcaagaacctgagggagttcgtgtttaagaatatcgatggctacttcaagatctacagcaagcacaccccaatcaacctggtgcgcgacctgccacagggattctccgccctggagccactggtggatctgcccatcggcatcaacatcacccggtttcagacactgctggccctgcacagatcctacctgacaccaggcgactcctctagcggatggaccgcaggagctgccgcctactatgtgggctatctgcagccccggaccttcctgctgaagtacaacgagaatggcaccatcacagacgcagtggattgcgccctggaccccctgtctgagacaaagtgtacactgaagagctttaccgtggagaagggcatctatcagacaagcaatttcagggtgcagcctaccgagtccatcgtgcgctttcccaatatcacaaacctgtgcccttttggcgaggtgttcaacgccaccagattcgccagcgtgtacgcctggaatcggaagagaatctccaactgcgtggccgactattctgtgctgtacaactccgcctctttcagcacctttaagtgctatggcgtgtctcccacaaagctgaatgatctgtgctttaccaacgtgtacgccgatagcttcgtgatcaggggagacgaagtgagacagatcgcaccaggacagacaggaaagatcgcagactacaattataagctgcctgacgatttcaccggctgcgtgatcgcctggaactccaacaatctggattctaaagtgggcggcaactacaattatctgtacaggctgtttcgcaagtccaatctgaagccattcgagcgggacatctccacagagttttaccaggccggctctaccccctgcaatggcgtggagggctttaactgttatttccctctgcagtcttacggcttccagccaacaaacggcgtgggctatcagccctacagagtggtggtgctgtcctttgagctgctgcacgcaccagcaacagtgtgcggcccaaagaagtctaccaatctggtgaagaacaagtgcgtgaacttcaacttcaacggactgaccggcacaggcgtgctgaccgagagcaataagaagttcctgccttttcagcagttcggcagggacatcgcagataccacagacgccgtgcgcgaccctcagaccctggagatcctggacatcacaccatgcagcttcggcggcgtgtccgtgatcacaccaggcaccaatacatccaaccaggtggccgtgctgtatcaggacgtgaattgtaccgaggtgcccgtggcaatccacgcagatcagctgacccctacatggcgggtgtactctaccggcagcaacgtgttccagacaagagccggatgcctgatcggagcagagcacgtgaacaatagctatgagtgcgacatccctatcggcgccggcatctgtgccagctaccagacccagacaaactccccatctggagcaggctcccaccatcaccatcaccatcaccatcaccactga

SEQ ID NO: 4267 - DNA, 2148 bp, Artificial Sequence
  Description of Artificial Sequence: Synthetic polynucleotide
atgggcatcctgccaagcccaggaatgcccgccctgctgtctctggtgagcctgctgtccgtgctgctgatgggatgcgtggcagagacaggcacacagtgcgtgaacctgaccacaaggacccagctgccccctgcctataccaattctttcacacggggcgtgtactatcccgacaaggtgtttagaagctccgtgctgcactccacacaggatctgtttctgcctttcttttctaacgtgacctggttccacgccatccacgtgtccggcaccaatggcacaaagcggttcgacaatcccgtgctgccttttaacgatggcgtgtacttcgccagcaccgagaagtccaacatcatcagaggctggatctttggcaccacactggactctaagacacagagcctgctgatcgtgaacaatgccaccaacgtggtgatcaaggtgtgcgagttccagttttgtaatgatccattcctgggcgtgtactatcacaagaacaataagtcctggatggagtctgagtttcgcgtgtattctagcgccaacaattgcacatttgagtacgtgagccagcccttcctgatggacctggagggcaagcagggcaatttcaagaacctgagggagttcgtgtttaagaatatcgatggctacttcaagatctacagcaagcacaccccaatcaacctggtgcgcgacctgccacagggattctccgccctggagccactggtggatctgcccatcggcatcaacatcacccggtttcagacactgctggccctgcacagatcctacctgacaccaggcgactcctctagcggatggaccgcaggagctgccgcctactatgtgggctatctgcagccccggaccttcctgctgaagtacaacgagaatggcaccatcacagacgcagtggattgcgccctggaccccctgtctgagacaaagtgtacactgaagagctttaccgtggagaagggcatctatcagacaagcaatttcagggtgcagcctaccgagtccatcgtgcgctttcccaatatcacaaacctgtgcccttttggcgaggtgttcaacgccaccagattcgccagcgtgtacgcctggaatcggaagagaatctccaactgcgtggccgactattctgtgctgtacaactccgcctctttcagcacctttaagtgctatggcgtgtctcccacaaagctgaatgatctgtgctttaccaacgtgtacgccgatagcttcgtgatcaggggagacgaagtgagacagatcgcaccaggacagacaggaaagatcgcagactacaattataagctgcctgacgatttcaccggctgcgtgatcgcctggaactccaacaatctggattctaaagtgggcggcaactacaattatctgtacaggctgtttcgcaagtccaatctgaagccattcgagcgggacatctccacagagatctaccaggccggctctaccccctgcaatgaagtggagggctttaactgttatttccctctgcagtcttacggcttccagccaacaaacggcgtgggctatcagccctacagagtggtggtgctgtcctttgagctgctgcacgcaccagcaacagtgtgcggcccaaagaagtctaccaatctggtgaagaacaagtgcgtgaacttcaacttcaacggactgaccggcacaggcgtgctgaccgagagcaataagaagttcctgccttttcagcagttcggcagggacatcgcagataccacagacgccgtgcgcgaccctcagaccctggagatcctggacatcacaccatgcagcttcggcggcgtgtccgtgatcacaccaggcaccaatacatccaaccaggtggccgtgctgtatcaggacgtgaattgtaccgaggtgcccgtggcaatccacgcagatcagctgacccctacatggcgggtgtactctaccggcagcaacgtgttccagacaagagccggatgcctgatcggagcagagcacgtgaacaatagctatgagtgcgacatccctatcggcgccggcatctgtgccagctaccagacccagacaaactccccatctggagcaggctcccaccatcaccatcaccatcaccatcaccactga

SEQ ID NO: 4268 - DNA, 2148 bp, Artificial Sequence
  Description of Artificial Sequence: Synthetic polynucleotide
atgggcatcctgccaagcccaggaatgcccgccctgctgtctctggtgagcctgctgtccgtgctgctgatgggatgcgtggcagagacaggcacacagtgcgtgaacctgaccacaaggacccagctgccccctgcctataccaattctttcacacggggcgtgtactatcccgacaaggtgtttagaagctccgtgctgcactccacacaggatctgtttctgcctttcttttctaacgtgacctggttccacgccatccacgtgtccggcaccaatggcacaaagcggttcgacaatcccgtgctgccttttaacgatggcgtgtacttcgccagcaccgagaagtccaacatcatcagaggctggatctttggcaccacactggactctaagacacagagcctgctgatcgtgaacaatgccaccaacgtggtgatcaaggtgtgcgagttccagttttgtaatgatccattcctgggcgtgtactatcacaagaacaataagtcctggatggagtctgagtttcgcgtgtattctagcgccaacaattgcacatttgagtacgtgagccagcccttcctgatggacctggagggcaagcagggcaatttcaagaacctgagggagttcgtgtttaagaatatcgatggctacttcaagatctacagcaagcacaccccaatcaacctggtgcgcgacctgccacagggattctccgccctggagccactggtggatctgcccatcggcatcaacatcacccggtttcagacactgctggccctgcacagatcctacctgacaccaggcgactcctctagcggatggaccgcaggagctgccgcctactatgtgggctatctgcagccccggaccttcctgctgaagtacaacgagaatggcaccatcacagacgcagtggattgcgccctggaccccctgtctgagacaaagtgtacactgaagagctttaccgtggagaagggcatctatcagacaagcaatttcagggtgcagcctaccgagtccatcgtgcgctttcccaatatcacaaacctgtgcccttttggcgaggtgttcaacgccaccagattcgccagcgtgtacgcctggaatcggaagagaatctccaactgcgtggccgactattctgtgctgtacaactccgcctctttcagcacctttaagtgctatggcgtgtctcccacaaagctgaatgatctgtgctttaccaacgtgtacgccgatagcttcgtgatcaggggagacgaagtgagacagatcgcaccaggacagacaggaccgatcgcagactacaattataagctgcctgacgatttcaccggctgcgtgatcgcctggaactccaacaatctggattctaaagtgggcggcaactacaattatctgtacaggctgtttcgcaagtccaatctgaagccattcgagcgggacatctccacagagatctaccaggccggctctaccccctgcaatggcgtggagggctttaactgttatttccctctgcagtcttacggcttccagccaacaaacggcgtgggctatcagccctacagagtggtggtgctgtcctttgagctgctgcacgcaccagcaacagtgtgcggcccaaagaagtctaccaatctggtgaagaacaagtgcgtgaacttcaacttcaacggactgaccggcacaggcgtgctgaccgagagcaataagaagttcctgccttttcagcagttcggcagggacatcgcagataccacagacgccgtgcgcgaccctcagaccctggagatcctggacatcacaccatgcagcttcggcggcgtgtccgtgatcacaccaggcaccaatacatccaaccaggtggccgtgctgtatcaggacgtgaattgtaccgaggtgcccgtggcaatccacgcagatcagctgacccctacatggcgggtgtactctaccggcagcaacgtgttccagacaagagccggatgcctgatcggagcagagcacgtgaacaatagctatgagtgcgacatccctatcggcgccggcatctgtgccagctaccagacccagacaaactccccatctggagcaggctcccaccatcaccatcaccatcaccatcaccactga

SEQ ID NO: 4269 - DNA, 2148 bp, Artificial Sequence
  Description of Artificial Sequence: Synthetic polynucleotide
atgggcatcctgccaagcccaggaatgcccgccctgctgtctctggtgagcctgctgtccgtgctgctgatgggatgcgtggcagagacaggcacacagtgcgtgaacctgaccacaaggacccagctgccccctgcctataccaattctttcacacggggcgtgtactatcccgacaaggtgtttagaagctccgtgctgcactccacacaggatctgtttctgcctttcttttctaacgtgacctggttccacgccatccacgtgtccggcaccaatggcacaaagcggttcgacaatcccgtgctgccttttaacgatggcgtgtacttcgccagcaccgagaagtccaacatcatcagaggctggatctttggcaccacactggactctaagacacagagcctgctgatcgtgaacaatgccaccaacgtggtgatcaaggtgtgcgagttccagttttgtaatgatccattcctgggcgtgtactatcacaagaacaataagtcctggatggagtctgagtttcgcgtgtattctagcgccaacaattgcacatttgagtacgtgagccagcccttcctgatggacctggagggcaagcagggcaatttcaagaacctgagggagttcgtgtttaagaatatcgatggctacttcaagatctacagcaagcacaccccaatcaacctggtgcgcgacctgccacagggattctccgccctggagccactggtggatctgcccatcggcatcaacatcacccggtttcagacactgctggccctgcacagatcctacctgacaccaggcgactcctctagcggatggaccgcaggagctgccgcctactatgtgggctatctgcagccccggaccttcctgctgaagtacaacgagaatggcaccatcacagacgcagtggattgcgccctggaccccctgtctgagacaaagtgtacactgaagagctttaccgtggagaagggcatctatcagacaagcaatttcagggtgcagcctaccgagtccatcgtgcgctttcccaatatcacaaacctgtgcccttttggcgaggtgttcaacgccaccagattcgccagcgtgtacgcctggaatcggaagagaatctccaactgcgtggccgactattctgtgctgtacaactccgcctctttcagcacctttaagtgctatggcgtgtctcccacaaagctgaatgatctgtgctttaccaacgtgtacgccgatagcttcgtgatcaggggagacgaagtgagacagatcgcaccaggacagacaggaaagatcgcagactacaattataagctgcctgacgatttcaccggctgcgtgatcgcctggaactccaacaatctggattctaaagtgggcggcaactacaattatctgtacaggctgtttcgcaagtccaatctgaagccattcgagcgggacatctccacagagatctaccaggccggctctaccccctgcaatggcgtggagggctttaactgttatttccctctgcagtcttacggcttccagccaacaaacggcgtgggctatcagccctacagagtggtggtgctgtcctttgagctgctgcacgcaccagcaacagtgtgcggcccaaagaagtctaccaatctggtgaagaacaagtgcgtgaacttcaacttcaacggactgaccggcacaggcgtgctgaccgagagcaatcgcaagttcctgccttttcagcagttcggcagggacatcgcagataccacagacgccgtgcgcgaccctcagaccctggagatcctggacatcacaccatgcagcttcggcggcgtgtccgtgatcacaccaggcaccaatacatccaaccaggtggccgtgctgtatcaggacgtgaattgtaccgaggtgcccgtggcaatccacgcagatcagctgacccctacatggcgggtgtactctaccggcagcaacgtgttccagacaagagccggatgcctgatcggagcagagcacgtgaacaatagctatgagtgcgacatccctatcggcgccggcatctgtgccagctaccagacccagacaaactccccatctggagcaggctcccaccatcaccatcaccatcaccatcaccactga

SEQ ID NO: 4270 - DNA, 2148 bp, Artificial Sequence
  Description of Artificial Sequence: Synthetic polynucleotide
atgggcatcctgccaagcccaggaatgcccgccctgctgtctctggtgagcctgctgtccgtgctgctgatgggatgcgtggcagagacaggcacacagtgcgtgaacctgaccacaaggacccagctgccccctgcctataccaattctttcacacggggcgtgtactatcccgacaaggtgtttagaagctccgtgctgcactccacacaggatctgtttctgcctttcttttctaacgtgacctggttccacgccatccacgtgtccggcaccaatggcacaaagcggttcgacaatcccgtgctgccttttaacgatggcgtgtacttcgccagcaccgagaagtccaacatcatcagaggctggatctttggcaccacactggactctaagacacagagcctgctgatcgtgaacaatgccaccaacgtggtgatcaaggtgtgcgagttccagttttgtaatgatccattcctgggcgtgtactatcacaagaacaataagtcctggatggagtctgagtttcgcgtgtattctagcgccaacaattgcacatttgagtacgtgagccagcccttcctgatggacctggagggcaagcagggcaatttcaagaacctgagggagttcgtgtttaagaatatcgatggctacttcaagatctacagcaagcacaccccaatcaacctgtggcgcgacctgccacagggattctccgccctggagccactggtggatctgcccatcggcatcaacatcacccggtttcagacactgctggccctgcacagatcctacctgacaccaggcgactcctctagcggatggaccgcaggagctgccgcctactatgtgggctatctgcagccccggaccttcctgctgaagtacaacgagaatggcaccatcacagacgcagtggattgcgccctggaccccctgtctgagacaaagtgtacactgaagagctttaccgtggagaagggcatctatcagacaagcaatttcagggtgcagcctaccgagtccatcgtgcgctttcccaatatcacaaacctgtgcccttttggcgaggtgttcaacgccaccagattcgccagcgtgtacgcctggaatcggaagagaatctccaactgcgtggccgactattctgtgctgtacaactccgcctctttcagcacctttaagtgctatggcgtgtctcccacaaagctgaatgatctgtgctttaccaacgtgtacgccgatagcttcgtgatcaggggagacgaagtgagacagatcgcaccaggacagacaggaaagatcgcagactacaattataagctgcctgacgatttcaccggctgcgtgatcgcctggaactccaacaatctggattctaaagtgggcggcaactacaattatctgtacaggctgtttcgcaagtccaatctgaagccattcgagcgggacatctccacagagatctaccaggccggctctaccccctgcaatggcgtggagggctttaactgttatttccctctgcagtcttacggcttccagccaacaaacggcgtgggctatcagccctacagagtggtggtgctgtcctttgagctgctgcacgcaccagcaacagtgtgcggcccaaagaagtctaccaatctggtgaagaacaagtgcgtgaacttcaacttcaacggactgaccggcacaggcgtgctgaccgagagcaataagaagttcctgccttttcagcagttcggcagggacatcgcagataccacagacgccgtgcgcgaccctcagaccctggagatcctggacatcacaccatgcagcttcggcggcgtgtccgtgatcacaccaggcaccaatacatccaaccaggtggccgtgctgtatcaggacgtgaattgtaccgaggtgcccgtggcaatccacgcagatcagctgacccctacatggcgggtgtactctaccggcagcaacgtgttccagacaagagccggatgcctgatcggagcagagcacgtgaacaatagctatgagtgcgacatccctatcggcgccggcatctgtgccagctaccagacccagacaaactccccatctggagcaggctcccaccatcaccatcaccatcaccatcaccactga

SEQ ID NO: 4271 - DNA, 2148 bp, Artificial Sequence
  Description of Artificial Sequence: Synthetic polynucleotide
atgggcatcctgccaagcccaggaatgcccgccctgctgtctctggtgagcctgctgtccgtgctgctgatgggatgcgtggcagagacaggcacacagtgcgtgaacctgaccacaaggacccagctgccccctgcctataccaattctttcacacggggcgtgtactatcccgacaaggtgtttagaagctccgtgctgcactccacacaggatctgtttctgcctttcttttctaacgtgacctggttccacgccatccacgtgtccggcaccaatggcacaaagcggttcgacaatcccgtgctgccttttaacgatggcgtgtacttcgccagcaccgagaagtccaacatcatcagaggctggatctttggcaccacactggactctaagacacagagcctgctgatcgtgaacaatgccaccaacgtggtgatcattgtgtgcgagttccagttttgtaatgatccattcctgggcgtgtactatcacaagaacaataagtcctggatggagtctgagtttcgcgtgtattctagcgccaacaattgcacatttgagtacgtgagccagcccttcctgatggacctggagggcaagcagggcaatttcaagaacctgagggagttcgtgtttaagaatatcgatggctacttcaagatctacagcaagcacaccccaatcaacctggtgcgcgacctgccacagggattctccgccctggagccactggtggatctgcccatcggcatcaacatcacccggtttcagacactgctggccctgcacagatcctacctgacaccaggcgactcctctagcggatggaccgcaggagctgccgcctactatgtgggctatctgcagccccggaccttcctgctgaagtacaacgagaatggcaccatcacagacgcagtggattgcgccctggaccccctgtctgagacaaagtgtacactgaagagctttaccgtggagaagggcatctatcagacaagcaatttcagggtgcagcctaccgagtccatcgtgcgctttcccaatatcacaaacctgtgcccttttggcgaggtgttcaacgccaccagattcgccagcgtgtacgcctggaatcggaagagaatctccaactgcgtggccgactattctgtgctgtacaactccgcctctttcagcacctttaagtgctatggcgtgtctcccacaaagctgaatgatctgtgctttaccaacgtgtacgccgatagcttcgtgatcaggggagacgaagtgagacagatcgcaccaggacagacaggaaagatcgcagactacaattataagctgcctgacgatttcaccggctgcgtgatcgcctggaactccaacaatctggattctaaagtgggcggcaactacaattatctgtacaggctgtttcgcaagtccaatctgaagccattcgagcgggacatctccacagagatctaccaggccggctctaccccctgcaatggcgtggagggctttaactgttatttccctctgcagtcttacggcttccagccaacaaacggcgtgggctatcagccctacagagtggtggtgctgtcctttgagctgctgcacgcaccagcaacagtgtgcggcccaaagaagtctaccaatctggtgaagaacaagtgcgtgaacttcaacttcaacggactgaccggcacaggcgtgctgaccgagagcaataagaagttcctgccttttcagcagttcggcagggacatcgcagataccacagacgccgtgcgcgaccctcagaccctggagatcctggacatcacaccatgcagcttcggcggcgtgtccgtgatcacaccaggcaccaatacatccaaccaggtggccgtgctgtatcaggacgtgaattgtaccgaggtgcccgtggcaatccacgcagatcagctgacccctacatggcgggtgtactctaccggcagcaacgtgttccagacaagagccggatgcctgatcggagcagagcacgtgaacaatagctatgagtgcgacatccctatcggcgccggcatctgtgccagctaccagacccagacaaactccccatctggagcaggctcccaccatcaccatcaccatcaccatcaccactga

SEQ ID NO: 4272 - DNA, 2148 bp, Artificial Sequence
  Description of Artificial Sequence: Synthetic polynucleotide
atgggcatcctgccaagcccaggaatgcccgccctgctgtctctggtgagcctgctgtccgtgctgctgatgggatgcgtggcagagacaggcacacagtgcgtgaacctgaccacaaggacccagctgccccctgcctataccaattctttcacacggggcgtgtactatcccgacaaggtgtttagaagctccgtgctgcactccacacaggatctgtttctgcctttcttttctaacgtgacctggttccacgccatccacgtgtccggcaccaatggcacaaagcggttcgacaatcccgtgctgccttttaacgatggcgtgtacttcgccagcaccgagaagtccaacatcatcagaggctggatctttggcaccacactggactctaagacacagagcctgctgatcgtgaacaatgccaccaacgtggtgatcaaggtgtgcgagttccagttttgtaatgatccattcctgggcgtgtactatcacaagaacaataagtcctggatggagtctgagtttcgcgtgtattctagcgccaacaattgcacatttgagtacgtgagccagcccttcctgatggacctggagggcaagcagggcaatttcaagaacctgagggagttcgtgtttaagaatatcgatggctacttcaagatctacagcaagcacaccccaatcaacctggtgcgcgacctgccacagggattctccgccctggagccactggtggatctgcccatcggcatcaacatcacccggtttcagacactgctggccctgcacagatcctacctgacaccaggcgactcctctagcggatggaccgcaggagctgccgcctactatgtgggctatctgcagccccggaccttcctgctgaagtacaacgagaatggcaccatcacagacgcagtggattgcgccctggaccccctgtctgagacaaagtgtacactgaagagctttaccgtggagaagggcatctatcagacaagcaatttcagggtgcagcctaccgagtccatcgtgcgctttcccaatatcacaaacctgtgcccttttggcgaggtgttcaacgccaccagattcgccagctcgtacgcctggaatcggaagagaatctccaactgcgtggccgactattctgtgctgtacaactccgcctctttcagcacctttaagtgctatggcgtgtctcccacaaagctgaatgatctgtgctttaccaacgtgtacgccgatcgtttcgtgatcaggggagacgaagtgagacagatcgcaccaggacagacaggaaagatcgcagactacaattataagctgcctgacgatttcaccggctgcgtgatcgcctggaactccaacaatctggatgcgaaagtgggcggcaactacaattatctgtacaggctgtttcgcaagtccaatctgaagccattcgagcggtttatctccacagagatctaccaggccggctctacccccagtaatggcgtggagggctttaactgttatttccctctgcagtcttacggcttccagccaacaaacggcgtgggctatcagccctacagagtggtggtgctgtcctttgagctgctgcacgcaccacatacagtgtgcggcccaaagaagtctaccaatctggtgaagaacaagtgcgtgaacttcaacttcaacggactgaccggcacaggcgtgctgaccgagagcaataagaagttcctgccttttcagcagttcggcagggacatcgcagataccacagacgccgtgcgcgaccctcagaccctggagatcctggacatcacaccatgcagcttcggcggcgtgtccgtgatcacaccaggcaccaatacatccaaccaggtggccgtgctgtatcaggacgtgaattgtaccgaggtgcccgtggcaatccacgcagatcagctgacccctacatggcgggtgtactctaccggcagcaacgtgttccagacaagagccggatgcctgatcggagcagagcacgtgaacaatagctatgagtgcgacatccctatcggcgccggcatctgtgccagctaccagacccagacaaactccccatctggagcaggctcccaccatcaccatcaccatcaccatcaccactga

SEQ ID NO: 4273 - DNA, 2148 bp, Artificial Sequence
  Description of Artificial Sequence: Synthetic polynucleotide
atgggcatcctgccaagcccaggaatgcccgccctgctgtctctggtgagcctgctgtccgtgctgctgatgggatgcgtggcagagacaggcacacagtgcgtgaacctgaccacaaggacccagctgccccctgcctataccaattctttcacacggggcgtgtactatcccgacaaggtgtttagaagctccgtgctgcactccacacaggatctgtttctgcctttcttttctaacgtgacctggttccacgccatccacgtgtccggcaccaatggcacaaagcggttcgacaatcccgtgctgccttttaacgatggcgtgtacttcgccagcaccgagaagtccaacatcatcagaggctggatctttggcaccacactggactctaagacacagagcctgctgatcgtgaacaatgccaccaacgtggtgatcaaggtgtgcgagttccagttttgtaatgatccattcctgggcgtgtactatcacaagaacaataagtcctggatggagtctgagtttcgcgtgtattctagcgccaacaattgcacatttgagtacgtgagccagcccttcctgatggacctggagggcaagcagggcaatttcaagaacctgagggagttcgtgtttaagaatatcgatggctacttcaagatctacagcaagcacaccccaatcaacctggtgcgcgacctgccacagggattctccgccctggagccactggtggatctgcccatcggcatcaacatcacccggtttcagacactgctggccctgcacagatcctacctgacaccaggcgactcctctagcggatggaccgcaggagctgccgcctactatgtgggctatctgcagccccggaccttcctgctgaagtacaacgagaatggcaccatcacagacgcagtggattgcgccctggaccccctgtctgagacaaagtgtacactgaagagctttaccgtggagaagggcatctatcagacaagcaatttcagggtgcagcctaccgagtccatcgtgcgctttcccaatatcacaaacctgtgcccttttggcgaggtgttcaacgccaccagattcgccagcgtgtacgcctggaatcggaagagaatctccaactgcgtggccgactattctgtgctgtacaactccgcctctttcagcacctttaagtgctatggcgtgtctcccacaaagctgaatgatctgtgctttaccaacgtgtacgccgatagcttcgtgatcaggggagacgaagtgagacagatcgcaccaggacagacaggaaagatcgcagactacaattataagctgcctgacgatttcaccggctgcgtgatcgcctggaactccaacaatctggattctaaagtgggcggcaactacaattatctgtacaggctgtttcgcaagtccaatctgaagccattcgagcgggacatctccacagagatctaccaggccggctctaccccctgcaatggcgtggagggctttaactgttatttccctctgcagtcttacggcttccagccaacaaacggcgtgggctatcagccctacagagtggtggtgctgtcctttgagctgctgcacgcaccagcaacagtgtgcggcccaaagaagtctaccaatctggtgaagaacaagtgcgtgaacttcaacttcaacggactgaccggcacaggcgtgctgaccgagagcaataagaagttcctgccttttcagcagttcggcagggacatcgcagataccacagacgccgtgcgcgaccctcagaccctggagatcctggacatcacaccatgcagcaaaggcggcgtgtccgtgatcacaccaggcaccaatacatccaaccaggtggccgtgctgtatcaggacgtgaattgtaccgaggtgcccgtggcaatccacgcagatcagctgacccctacatggcgggtgtactctaccggcagcaacgtgttccagacaagagccggatgcctgatcggagcagagcacgtgaacaatagctatgagtgcgacatccctatcggcgccggcatctgtgccagctaccagacccagacaaactccccatctggagcaggctcccaccatcaccatcaccatcaccatcaccactga

SEQ ID NO: 4274 - DNA, 2148 bp, Artificial Sequence
  Description of Artificial Sequence: Synthetic polynucleotide
atgggcatcctgccaagcccaggaatgcccgccctgctgtctctggtgagcctgctgtccgtgctgctgatgggatgcgtggcagagacaggcacacagtgcgtgaacctgaccacaaggacccagctgccccctgcctataccaattctttcacacggggcgtgtactatcccgacaaggtgtttagaagctccgtgctgcactccacacaggatctgtttctgcctttcttttctaacgtgacctggttccacgcctaccacgtgtccggcaccaatggcacaaagcggttcgacaatcccgtgctgccttttaacgatggcgtgtacttcgccagcaccgagaagtccaacatcatcagaggctggatctttggcaccacactggactctaagacacagagcctgctgatcgtgaacaatgccaccaacgtggtgatcaaggtgtgcgagttccagttttgtaatgatccattcctgggcgtgtactatcacaagaacaataagtcctggatggagtctgagtttcgcgtgtattctagcgccaacaattgcacatttgagtaccatagccagcccttcctgatggacctggagggcaagcagggcaatttcaagaacctgagggagttcgtgtttaagaatatcgatggctacttcaagatctacagcaagcacaccccaatcaacctggtgcgcgacctgccacagggattctccgccctggagccactggtggatctgcccatcggcatcaacatcacccggtttcagacactgctggccctgcacagatcctacctgacaccaggcgactcctctagcggagaaaccgcaggagctgccgcctactatgtgggctatctgcagccccggaccttcctgctgaagtacaacgagaatggcaccatcacagacgcagtggattgcgccctggaccccctgtctgagacaaagtgtacactgaagagctttaccgtggagaagggcatctatcagacaagcaatttcagggtgcagcctaccgagtccatcgtgcgctttcccaatatcacaaacccttgcccttttggcgaggtgttcaacgccaccagattcgccagcgtgtacgcctggaatcggaagagaatctccaactgcgtggccgactattctgtgctgtacaactccgcctctttcagcacctttaagtgctatggcgtgtctcccacaaagctgaatgatctgtgctttaccaacgtgtacgccgatagcttcgtgatcaggggagacgaagtgagacagatcgcaccaggacagacaggaaagatcgcagactacaattataagctgcctgacgatttcaccggctgcgtgatcgcctggaactccaacaatctggattctaaagtgggcggcaactacaattatctgtacaggctgtttcgcaagtccaatctgaagccattcgagcgggacatctccacagagatctaccaggccggctctaccccctgcaatggcgtggagggctttaactgttatttccctctgcagtcttacggcttccagccaacaaacggcccgggccaacagccctacagagtggtggtgctgtcctttgagctgctgcacgcaccagcaacagtgtgcggcccaaagaagtctaccaatctggtgaagaacaagtgcgtgaacttcaacttcaacggactgaccggcacaggcgtgctgaccgagagcaataagaagttcctgccttttcagcagttcggcagggacatcgcagataccacagacgccgtgcgcgaccctcagaccctggagatcctggacatcacaccatgcagcttcggcggcgtgtccgtgatcacaccaggcaccaatacatccaaccaggtggccgtgctgtatcaggacgtgaattgtaccgaggtgcccgtggcaatccacgcagatcagctgacccctacatggcgggtgtactctaccggcagcaacgtgttccagacaagagccggatgcctgatcggagcagagcacgtgaacaatagctatgagtgcgacatccctatcggcgccggcatctgtgccagctaccagacccagacaaactccccatctggagcaggctcccaccatcaccatcaccatcaccatcaccactga

SEQ ID NO: 4275 - DNA, 2148 bp, Artificial Sequence
  Description of Artificial Sequence: Synthetic polynucleotide
atgggcatcctgccaagcccaggaatgcccgccctgctgtctctggtgagcctgctgtccgtgctgctgatgggatgcgtggcagagacaggcacacagtgcgtgaacctgaccacaaggacccagctgccccctgcctataccaattctttcacacggggcgtgtactatcccgacaaggtgtttagaagctccgtgctgcactccacacaggatctgtttctgcctttcttttctaacgtgacctggttccacgccatccacgtgtccggcaccaatggcacaaagcggttcgacaatcccgtgctgccttttaacgatggcgtgtacttcgccagcaccgagaagtccaacatcatcagaggctggatctttggcaatacactggactctaagacacagagcctgctgatcgtgaacaatgccaccaacgtggtgatcaaggtgtgcgagttccagttttgtaatgatccattcctgggcgtgtactatcacaagaacaataagtcctggatggagtctgagtttcgcgtgtattctagcgccaacaattgcacatttgagtacgtgagccagcccttcctgatggacctggagggcaagcagggcaatttcaagaacctgagggagttcgtgtttaagaatatcgatggctacttcaagatctacagcaagcacaccccaatcaacctggtgcgcgacctgccacagggattctccgccctggagccactggtggatctgcccatcggcatcaacatcacccggtttcagacactgctggccctgcacagatcctacctgacaccaggcgactcctctagcggatggaccgcaggagctgccgcctactatgtgggctatctgcagccccggaccttcctgctgaagtacaacgagaatggcaccatcacagacgcagtggattgcgccctggaccccctgtctgagacaaagtgtacactgaagagctttaccgtggagaagggcatctatcagacaagcaatttcagggtgcagcctaccgagtccatcgtgcgctttcccaatatcacaaacctgtgcccttttggcgaggtgttcaacgccaccagattcgccagcgtgtacgcctggaatcggaagagaatctccaactgcgtggccgactattctgtgctgtacaactccgcctctttcagcacctttaagtgctatggcgtgtctcccacaaagctgaatgatctgtgctttaccaacgtgtacgccgatagcttcgtgatcaggggagacgaagtgagacagatcgcaccaggacagacaggaaagatcgcagactacaattataagctgcctgacgatttcaccggctgcgtgatcgcctggaactccaacaatctggattctaaagtgggcggcaactacaattatctgtacaggctgtttcgcaagtccaatctgaagccattcgagcgggacatctccacagagatctaccaggccggctctaccccctgcaatggcgtggagggctttaactgttatttccctctgcagtcttacggcttccagccaacaaacggcgtgggctatcagccctacagagtggtggtgctgtcctttgagctgctgcacgcaccagcaacagtgtgcggcccaaagaagtctaccaatctggtgaagaacaagtgcgtgaacttcaacttcaacggactgaccggcacaggcgtgctgaccgagagcaataagaagttcctgccttttcagcagttcggcagggacatcgcagataccacagacgccgtgcgcgaccctcagaccctggagatcctggacatcacaccatgcagcttcggcggcgtgtccgtgatcacaccaggcaccaatacatccaaccaggtggccgtgctgtatcaggacgtgaattgtaccgaggtgcccgtggcaatccacgcagatcagctgacccctacatggcgggtgtactctaccggcagcaacgtgttccagacaagagccggatgcctgatcggagcagagcacgtgaacaatagctatgagtgcgacatccctatcggcgccggcatctgtgccagctaccagacccagacaaactccccatctggagcaggctcccaccatcaccatcaccatcaccatcaccactga

SEQ ID NO: 4276 - DNA, 2148 bp, Artificial Sequence
  Description of Artificial Sequence: Synthetic polynucleotide
atgggcatcctgccaagcccaggaatgcccgccctgctgtctctggtgagcctgctgtccgtgctgctgatgggatgcgtggcagagacaggcacacagtgcgtgaacctgaccacaaggacccagctgccccctgcctataccaattctttcacacggggcgtgtactatcccgacaaggtgtttagaagctccgtgctgcactccacacaggatctgtttctgcctttcttttctaacgtgacctggttccacgccaaacacgtgtccggcaccaatggcacaaagcggttcgacaatcccgtgctgccttttaacgatggcgtgtacttcgccagcaccgagaagtccaacatcatcagaggctggatctttggcaccacactggactctaagacacagagcctgctgatcgtgaacaatgccaccaacgtggtgatcaaggtgtgcgagttccagttttgtaatgatccattcctgggcgtgtactatcacaagaacaataagtcctggatggagtctgagtttcgcgtgtattctagcgccaacaattgcacatttgagtaccatagccagcccttcctgatggacctggagggcaagcagggcaatttcaagaacctgagggagttcgtgtttaagaatatcgatggctacttcaagatctacagcaagcacaccccaatcaacctggtgcgcgacctgccacagggattctccgccctggagccactggtggatctgcccatcggcatcaacatcacccggtttcagacactgctggccctgcacagatcctacctgacaccaggcgactcctctagcggatggaccgcaggagctgccgcctactatgtgggctatctgcagccccggaccttcctgctgaagtacaacgagaatggcaccatcacagacgcagtggattgcgccctggaccccctgtctgagacaaagtgtacactgaagagctttaccgtggagaagggcatctatcagacaagcaatttcagggtgcagcctaccgagtccatcgtgcgctttcccaatatcacaaaccattgcccttttggcgaggtgttcaacgccaccagattcgccagcgtgtacgcctggaatcggaagagaatctccaactgcgtggccgactattctgtgctgtacaactccgcctctttcagcacctttaagtgctatggcgtgtctcccacaaagctgaatgatctgtgctttaccaacgtgtacgccgatagcttcgtgatcaggggagacgaagtgagacagatcgcaccaggacagacaggaaagatcgcagactacaattataagctgcctgacgatttcaccggctgcgtgatcgcctggaactccaacaatctggattctaaagtgggcggcaactacaattatctgtacaggctgtttcgcaagtccaatctgaagccattcgagcgggacatctccacagagatctaccaggccggctctaccccctgcaatggcgtggagggctttaactgttatttccctctgcagtcttacggcttccagccaacaaacggcccaggccaacagccctacagagtggtggtgctgtcctttgagctgctgcacgcaccagcaacagtgtgcggcccaaagaagtctaccaatctggtgaagaacaagtgcgtgaacttcaacttcaacggactgaccggcacaggcgtgctgaccgagagcaataagaagttcctgccttttcagcagttcggcagggacatcgcagataccacagacgccgtgcgcgaccctcagaccctggagatcctggacatcacaccatgcagcttcggcggcgtgtccgtgatcacaccaggcaccaatacatccaaccaggtggccgtgctgtatcaggacgtgaattgtaccgaggtgcccgatgcaatccacgcagatcagctgacccctacatggcgggtgtactctaccggcagcaacgtgttccagacaagagccggatgcctgatcggagcagagcacgtgaacaatagctatgagtgcgacatccctatcggcgccggcatctgtgccagctaccagacccagacaaactccccatctggagcaggctcccaccatcaccatcaccatcaccatcaccactga

SEQ ID NO: 4277 - DNA, 2148 bp, Artificial Sequence
  Description of Artificial Sequence: Synthetic polynucleotide
atgggcatcctgccaagcccaggaatgcccgccctgctgtctctggtgagcctgctgtccgtgctgctgatgggatgcgtggcagagacaggcacacagtgcgtgaacctgaccacaaggacccagctgccccctgcctataccaattctttcacacggggcgtgtactatcccgacaaggtgtttagaagctccgtgctgcactccacacaggatctgtttctgcctttcttttctaacgtgacctggttccacgccatccacgtgtccggcaccaatggcacaaagcggttcgacaatcccgtgctgccttttaacgatggcgtgtacttcgccagcaccgagaagtccaacatcatcagaggctggatctttggcaccacactggactctaagacacagagcctgctgatcgtgaacaatgccaccaacgtggtgatcaaggtgtgcgagttccagttttgtaatgatccattcctgggcgtgtactatcacaagaacaataagtcctggatggagtctgagtttcgcgtgtattctagcgccaacaattgcacatttgagtacgtgagccagcccttcctgatggacctggagggcaagcagggcaatttcaagaacctgagggagttcgtgtttaagaatatcgatggctacttcaagatctacagcaagcacaccccaatcaacctggtgcgcgacctgccacagggattctccgccctggagccactggtggatctgcccatcggcatcaacatcacccggtttcagacactgctggccctgcacagatcctacctgacaccaatagactcctctagcggatggaccgcaggagctgccgcctactatgtgggctatctgcagccccggaccttcctgctgaagtacaacgagaatggcaccatcacagacgcagtggattgcgccctggaccccctgtctgagacaaagtgtacactgaagagctttaccgtggagaagggcatctatcagacaagcaatttcagggtgcagcctaccgagtccatcgtgcgctttcccaatatcacaaacctgtgcccttttggcgaggtgttcaacgccaccagattcgccagcgtgtacgcctggaatcggaagagaatctccaactgcgtggccgactattctgtgctgtacaactccgcctctttcagcacctttaagtgctatggcgtgtctcccacaaagctgaatgatctgtgctttaccaacgtgtacgccgatagcttcgtgatcaggggagacgaagtgagacagatcgcaccaggacagacaggaaagatcgcagactacaattataagctgcctgacgatttcaccggctgcgtgatcgcctggaactccaacaatctggattctaaagtgggcggcaactacaattatctgtacaggctgtttcgcaagtccaatctgaagccattcgagcgggacatctccacagagatctaccaggccggctctaccccctgcaatggcgtggagggctttaactgttatttccctctgcagtcttacggcttccagccaacaaacggcgtgggctatcagccctacagagtggtggtgctgtcctttgagctgctgcacgcaccagcaacagtgtgcggcccaaagaagtctaccaatctggtgaagaacaagtgcgtgaacttcaacttcaacggactgaccggcacaggcgtgctgaccgagagcaataagaagttcctgccttttcagcagttcggcagggacatcgcagataccacagacgccgtgcgcgaccctcagaccctggagatcctggacatcacaccatgcagcttcggcggcgtgtccgtgatcacaccaggcaccaatacatccaaccaggtggccgtgctgtatcaggacgtgaattgtaccgaggtgcccgtggcaatccacgcagatcagctgacccctacatggcgggtgtactctaccggcagcaacgtgttccagacaagagccggatgcctgatcggagcagagcacgtgaacaatagctatgagtgcgacatccctatcggcgccggcatctgtgccagctaccagacccagacaaactccccatctggagcaggctcccaccatcaccatcaccatcaccatcaccactga

SEQ ID NO: 4278 - DNA, 2148 bp, Artificial Sequence
  Description of Artificial Sequence: Synthetic polynucleotide
atgggcatcctgccaagcccaggaatgcccgccctgctgtctctggtgagcctgctgtccgtgctgctgatgggatgcgtggcagagacaggcacacagtgcgtgaacctgaccacaaggacccagctgccccctgcctataccaattctttcacacggggcgtgtactatcccgacaaggtgtttagaagctccgtgctgcactccacacaggatctgtttctgcctttcttttctaacgtgacctggttccacgccatccacgtgtccggcaccaatggcacaaagcggttcgacaatcccgtgctgccttttaacgatggcgtgtacttcgccagcaccgagaagtccaacatcatcagaggctggatctttggcaccacactggactctaagacacagagcctgctgatcgtgaacaatgccaccaacgtggtgatcaaggtgtgcgagttccagttttgtaatgatccattcctgggcgtgtactatcacaagaacaataagtcctggatggagtctgagtttcgcgtgtattctagcgccaacaattgcacatttgagtacgtgagccagcccttcctgatggacctggagggcaagcagggcaatttcaagaacctgagggagttcgtgtttaagaatatcgatggctacttcaagatctacagcaagcacaccccaatcaacctggtgcgcgacctgccacagggattctccgccctggagccactggtggatctgcccatcggcatcaacatcacccggtttcagacactgctggccctgcacagatcctacctgacaccaggcgactcctctagcggatggaccgcaggagctgccgcctactatgtgggctatctgcagccccggaccttcctgctgaagtacaacgagaatggcaccatcacagacgcagtggattgcgccctggaccccctgtctgagacaaagtgtacactgaagagctttaccgtggagaagggcatctatcagacaagcaatttcagggtgcagcctaccgagtccatcgtgcgctttcccaatatcacaaacctgtgcccttttggcgaggtgttcaacgccaccagattcgccagcgtgtacgcctggaatcggaagagaatctccaactgcgtggccgactattctgtgctgtacaactccgcctctttcagcacctttaagtgctatggcgtgtctcccacaaagctgaatgatctgtgctttaccaacgtgtacgccgatagcttcgtgatcaggggagacgaagtgagacagatcgcaccaggacagacaggaaagatcgcagactacaattataagctgcctgacgatttcaccggctgcgtgatcgcctggaactccaacaatctggattctaaagtgggcggcaactacaattatctgtacaggctgtttcgcaagtccaatctgaagccattcgagcgggacatctccacagagatctaccaggccggctctaccccctgcaatggcgtggagggctttaactgttatttccctctgcagtcttacggcttccagccaacaaacggcgtgggctatcagccctacagagtggtggtgctgtcctttgagctgctgcacgcaccagcaacagtgtgcggcccaaagaagtctaccaatctggtgaagaacaagtgcgtgaacttcaacttcaacggactgaccggcacaggcgtgctgaccgagagcaataagaagttcctgccttttcagcagttcggcagggacatcgcagataccacagacgccgtgcgcgaccctcagaccctggagatcctggacatcataccatgcagcttcggcggcgtgtccgtgatcacaccaggcaccaatacatccaaccaggtggccgtgctgtatcaggacgtgaattgtaccgaggtgcccgtggcaatccacgcagatcagctgacccctacatggcgggtgtactctaccggcagcaacgtgttccagacaagagccggatgcctgatcggagcagagcacgtgaacaatagctatgagtgcgacatccctatcggcgccggcatctgtgccagctaccagacccagacaaactccccatctggagcaggctcccaccatcaccatcaccatcaccatcaccactga

SEQ ID NO: 4279 - DNA, 2148 bp, Artificial Sequence
  Description of Artificial Sequence: Synthetic polynucleotide
atgggcatcctgccaagcccaggaatgcccgccctgctgtctctggtgagcctgctgtccgtgctgctgatgggatgcgtggcagagacaggcacacagtgcgtgaacctgaccacaaggacccagctgccccctgcctataccaattctttcacacggggcgtgtactatcccgacaaggtgtttagaagctccgtgctgcactccacacaggatctgtttctgcctttcttttctaacgtgacctggttccacgccatccacgtgtccggcaccaatggcacaaagcggttcgacaatcccgtgctgccttttaacgatggcgtgtacttcgccagcaccgagaagtccaacatcatcagaggctggatctttggcaccacactggactctaagacacagagcctgctgatcgtgaacaatgccaccaacgtggtgatcaaggtgtgcgagttccagttttgtaatgatccattcctgggcgtgtactatcacaagaacaataagtcctggatggagtctgagtttcgcgtgtattctagcgccaacaattgcacatttgagtacgtgagccagcccttcctgatggacctggagggcaagcagggcaatttcaagaacctgagggagttcgtgtttaagaatatcgatggctacttcaagatctacagcaagcacaccccaatcaacctggtgcgcgacctgccacagggattctccgccctggagccactggtggatctgcccatcggcatcaacatcacccggtttcagacactgctggccctgcacagatcctacctgacaccaggcgactcctctagcggatggaccgcaggagctgccgcctactatgtgggctatctgcagccccggaccttcctgctgaagtacaacgagaatggcaccatcacagacgcagtggattgcgccctggaccccctgtctgagacaaagtgtacactgaagagctttaccgtggagaagggcatctatcagacaagcaatttcagggtgcagcctaccgagtccatcgtgcgctttcccaatatcacaaacctgtgcccttttggcgaggtgttcaacgccaccagattcgccagcgtgtacgcctggaatcggaagagaatctccaactgcgtggccgactattctgtgctgtacaactccgcctctttcagcacctttaagtgctatggcgtgtctcccacaaagctgaatgatctgtgctttaccaacgtgtacgccgatctattcgtgatcaggggagacgaagtgagacagatcgcaccaggacagacaggaaagatcgcagactacaattataagctgcctgacgatttcaccggctgcgtgatcgcctggaactccaacaatctggattctaaagtgggcggcaactacaattatctgtacaggctgtttcgcaagtccaatctgaagccattcgagcgggacatctccacagagatctaccaggccggctctaccccctgcaatggcgtggagggctttaactgttatttccctctgcagtcttacggcttccagccaacaaacggcgtgggctatcagccctacagagtggtggtgctgtcctttgagctgctgcacgcaccagcaacagtgtgcggcccaaagaagtctaccaatctggtgaagaacaagtgcgtgaacttcaacttcaacggactgaccggcacaggcgtgctgaccgagagcaataagaagttcctgccttttcagcagttcggcagggacatcgcagataccacagacgccgtgcgcgaccctcagaccctggagatcctggacatcacaccatgcagcttcggcggcgtgtccgtgatcacaccaggcaccaatacatccaaccaggtggccgtgctgtatcaggacgtgaattgtaccgaggtgcccgtggcaatccacgcagatcagctgacccctacatggcgggtgtactctaccggcagcaacgtgttccagacaagagccggatgcctgatcggagcagagcacgtgaacaatagctatgagtgcgacatccctatcggcgccggcatctgtgccagctaccagacccagacaaactccccatctggagcaggctcccaccatcaccatcaccatcaccatcaccactga

SEQ ID NO: 4280 - DNA, 2148 bp, Artificial Sequence
  Description of Artificial Sequence: Synthetic polynucleotide
atgggcatcctgccaagcccaggaatgcccgccctgctgtctctggtgagcctgctgtccgtgctgctgatgggatgcgtggcagagacaggcacacagtgcgtgaacctgaccacaaggacccagctgccccctgcctataccaattctttcacacggggcgtgtactatcccgacaaggtgtttagaagctccgtgctgcactccacacaggatctgtttctgcctttcttttctaacgtgacctggttccacgccaaacacgtgtccggcaccaatggcacaaagcggttcgacaatcccgtgctgccttttaacgatggcgtgtacttcgccagcaccgagaagtccaacatcatcagaggctggatctttggcaccacactggactctaagacacagagcctgctgatcgtgaacaatgccaccaacgtggtgatcaaggtgtgcgagttccagttttgtaatgatccattcctgggcgtgtactatcacaagaacaataagtcctggatggagtctgagtttcgcgtgtattctagcgccaacaattgcacatttgagtaccatagccagcccttcctgatggacctggagggcaagcagggcaatttcaagaacctgagggagttcgtgtttaagaatatcgatggctacttcaagatctacagcaagcacaccccaatcaacctggtgcgcgacctgccacagggattctccgccctggagccactggtggatctgcccatcggcatcaacatcacccggtttcagacactgctggccctgcacagatcctacctgacaccaggcgactcctctagcggagaaaccgcaggagctgccgcctactatgtgggctatctgcagccccggaccttcctgctgaagtacaacgagaatggcaccatcacagacgcagtggattgcgccctggaccccctgtctgagacaaagtgtacactgaagagctttaccgtggagaagggcatctatcagacaagcaatttcagggtgcagcctaccgagtccatcgtgcgctttcccaatatcacaaacccgtgcccttttggcgaggtgttcaacgccaccagattcgccagcgtgtacgcctggaatcggaagagaatctccaactgcgtggccgactattctgtgctgtacaactccgcctctttcagcacctttaagtgctatggcgtgtctcccacaaagctgaatgatctgtgctttaccaacgtgtacgccgatagcttcgtgatcaggggagacgaagtgagacagatcgcaccaggacagacaggaaagatcgcagactacaattataagctgcctgacgatttcaccggctgcgtgatcgcctggaactccaacaatctggattctaaagtgggcggcaactacaattatctgtacaggctgtttcgcaagtccaatctgaagccattcgagcgggacatctccacagagatctaccaggccggctctaccccctgcaatggcgtggagggctttaactgttatttccctctgcagtcttacggcttccagccaacaaacggcccgggctatcagccctacagagtggtggtgctgtcctttgagctgctgcacgcaccagcaacagtgtgcggcccaaagaagtctaccaatctggtgaagaacaagtgcgtgaacttcaacttcaacggactgaccggcacaggcgtgctgaccgagagcaataagaagttcctgccttttcagcagttcggcagggacatcgcagataccacagacgccgtgcgcgaccctcagaccctggagatcctggacatcacaccatgcagcttcggcggcgtgtccgtgatcacaccaggcaccaatacatccaaccaggtggccgtgctgtatcaggacgtgaattgtaccgaggtgcccgatgcaatccacgcagatcagctgacccctacatggcgggtgtactctaccggcagcaacgtgttccagacaagagccggatgcctgatcggagcagagcacgtgaacaatagctatgagtgcgacatccctatcggcgccggcatctgtgccagctaccagacccagacaaactccccatctggagcaggctcccaccatcaccatcaccatcaccatcaccactga

SEQ ID NO: 4281 - DNA, 2148 bp, Artificial Sequence
  Description of Artificial Sequence: Synthetic polynucleotide
atgggcatcctgccaagcccaggaatgcccgccctgctgtctctggtgagcctgctgtccgtgctgctgatgggatgcgtggcagagacaggcacacagtgcgtgaacctgaccacaaggacccagctgccccctgcctataccaattctttcacacggggcgtgtactatcccgacaaggtgtttagaagctccgtgctgcactccacacaggatctgtttctgcctttcttttctaacgtgacctggttccacgccatccacgtgtccggcaccaatggcacaaagcggttcgacaatcccgtgctgccttttaacgatggcgtgtacttcgccagcaccgagaagtccaacatcatcagaggctggatctttggcaccacactggactctaagacacagagcctgctgatcgtgaacaatgccaccaacgtggtgatcaaggtgtgcgagttccagttttgtaatgatccattcctgggcgtgtactatcacaagaacaataagtcctggatggagtctgagtttcgcgtgtattctagcgccaacaattgcacatttgagtacgtgagccagcccttcctgatggacctggagggcaagcagggcaatttcaagaacctgagggagttcgtgtttaagaatatcgatggctacttcaagatctacagcaagcacaccccaatcaacctggtgcgcgacctgccacagggattctccgccctggagccactggtggatctgcccatcggcatcaacatcacccggtttcagacactgctggccctgcacagatcctacctgacaccaggcgactcctctagcggatggaccgcaggagctgccgcctactatgtgggctatctgcagccccggaccttcctgctgaagtacaacgagaatggcaccatcacagacgcagtggattgcgccctggaccccctgtctgagacaaagtgtacactgaagagctttaccgtggagaagggcatctatcagacaagcaatttcagggtgcagcctaccgagtccatcgtgcgctttcccaatatcacaaacctgtgcccttttggcgaggtgttcaacgccaccagattcgccagcgtgtacgcctggaatcggaagagaatctccaactgcgtggccgactattctgtgctgtacaactccgcctctttcagcacctttaagtgctatggcgtgtctcccacaaagctgaatgatctgtgctttaccaacgtgtacgccgatgaattcgtgatcaggggagacgaagtgagacagatcgcaccaggacagacaggaaagatcgcagactacaattataagctgcctgacgatttcaccggctgcgtgatcgcctggaactccaacaatctggattctaaagtgggcggcaactacaattatctgtacaggctgtttcgcaagtccaatctgaagccattcgagcgggacatctccacagagatctaccaggccggctctaccccctgcaatggcgtggagggctttaactgttatttccctctgcagtcttacggcttccagccaacaaacggcgtgggctatcagccctacagagtggtggtgctgtcctttgagctgctgcacgcaccagcaacagtgtgcggcccaaagaagtctaccaatctggtgaagaacaagtgcgtgaacttcaacttcaacggactgaccggcacaggcgtgctgaccgagagcaataagaagttcctgccttttcagcagttcggcagggacatcgcagataccacagacgccgtgcgcgaccctcagaccctggagatcctggacatcacaccatgcagcttcggcggcgtgtccgtgatcacaccaggcaccaatacatccaaccaggtggccgtgctgtatcaggacgtgaattgtaccgaggtgcccgtggcaatccacgcagatcagctgacccctacatggcgggtgtactctaccggcagcaacgtgttccagacaagagccggatgcctgatcggagcagagcacgtgaacaatagctatgagtgcgacatccctatcggcgccggcatctgtgccagctaccagacccagacaaactccccatctggagcaggctcccaccatcaccatcaccatcaccatcaccactga

SEQ ID NO: 4282 - DNA, 2148 bp, Artificial Sequence
  Description of Artificial Sequence: Synthetic polynucleotide
atgggcatcctgccaagcccaggaatgcccgccctgctgtctctggtgagcctgctgtccgtgctgctgatgggatgcgtggcagagacaggcacacagtgcgtgaacctgaccacaaggacccagctgccccctgcctataccaattctttcacacggggcgtgtactatcccgacaaggtgtttagaagctccgtgctgcactccacacaggatctgtttctgcctttcttttctaacgtgacctggttccacgccatccacgtgtccggcaccaatggcacaaagcggttcgacaatcccgtgctgccttttaacgatggcgtgtacttcgccagcaccgagaagtccaacatcatcagaggctggatctttggcaccacactggactctaagacacagagcctgctgatcgtgaacaatgccaccaacgtggtgatcaaggtgtgcgagttccagttttgtaatgatccattcctgggcgtgtactatcacaagaacaataagtcctggatggagtctgagtttcgcgtgtattctagcgccaacaattgcacatttgagtacgtgagccagcccttcctgatggacctggagggcaagcagggcaatttcaagaacctgagggagttcgtgtttaagaatatcgatggctacttcaagatctacagcaagcacaccccaatcaacctggtgcgcgacctgccacagggattctccgccctggagccactggtggatctgcccatcggcatcaacatcacccggtttcagacactgctggccctgcacagatcctacctgacaccaggcgactcctctagcggatggaccgcaggagctgccgcctactatgtgggctatctgcagccccggaccttcctgctgaagtacaacgagaatggcaccatcacagacgcagtggattgcgccctggaccccctgtctgagacaaagtgtacactgaagagctttaccgtggagaagggcatctatcagacaagcaatttcagggtgcagcctaccgagtccatcgtgcgctttcccaatatcacaaacctgtgcccttttggcgaggtgttcaacgccaccagattcgccagcgtgtacgcctggaatcggaagagaatctccaactgcgtggccgactattctgtgtggtacaactccgcctctttcagcacctttaagtgctatggcgtgtctcccacaaagctgaatgatctgtgctttaccaacgtgtacgccgatagcttcgtgatcaggggagacgaagtgagacagatcgcaccaggacagacaggaaagatcgcagactacaattataagctgcctgacgatttcaccggctgcgtgatcgcctggaactccaacaatctggattctaaagtgggcggcaactacaattatctgtacaggctgtttcgcaagtccaatctgaagccattcgagcgggacatctccacagagatctaccaggccggctctaccccctgcaatggcgtggagggctttaactgttatttccctctgcagtcttacggcttccagccaacaaacggcgtgggctatcagccctacagagtggtggtgctgtcctttgagctgctgcacgcaccagcaacagtgtgcggcccaaagaagtctaccaatctggtgaagaacaagtgcgtgaacttcaacttcaacggactgaccggcacaggcgtgctgaccgagagcaataagaagttcctgccttttcagcagttcggcagggacatcgcagataccacagacgccgtgcgcgaccctcagaccctggagatcctggacatcacaccatgcagcttcggcggcgtgtccgtgatcacaccaggcaccaatacatccaaccaggtggccgtgctgtatcaggacgtgaattgtaccgaggtgcccgtggcaatccacgcagatcagctgacccctacatggcgggtgtactctaccggcagcaacgtgttccagacaagagccggatgcctgatcggagcagagcacgtgaacaatagctatgagtgcgacatccctatcggcgccggcatctgtgccagctaccagacccagacaaactccccatctggagcaggctcccaccatcaccatcaccatcaccatcaccactga

SEQ ID NO: 4283 - DNA, 2148 bp, Artificial Sequence
  Description of Artificial Sequence: Synthetic polynucleotide
atgggcatcctgccaagcccaggaatgcccgccctgctgtctctggtgagcctgctgtccgtgctgctgatgggatgcgtggcagagacaggcacacagtgcgtgaacctgaccacaaggacccagctgccccctgcctataccaattctttcacacggggcgtgtactatcccgacaaggtgtttagaagctccgtgctgcactccacacaggatctgtttctgcctttcttttctaacgtgacctggttccacgccgagcacgtgtccggcaccaatggcacaaagcggttcgacaatcccgtgctgccttttaacgatggcgtgtacttcgccagcaccgagaagtccaacatcatcagaggctggatctttggcaccacactggactctaagacacagagcctgctgatcgtgaacaatgccaccaacgtggtgatcaaggtgtgcgagttccagttttgtaatgatccattcctgggcgtgtactatcacaagaacaataagtcctggatggagtctgagtttcgcgtgtattctagcgccaacaattgcacatttgagtaccatagccagcccttcctgatggacctggagggcaagcagggcaatttcaagaacctgagggagttcgtgtttaagaatatcgatggctacttcaagatctacagcaagcacaccccaatcaacctggtgcgcgacctgccacagggattctccgccctggagccactggtggatctgcccatcggcatcaacatcacccggtttcagacactgctggccctgcacagatcctacctgacaccaggcgactcctctagcggatggaccgcaggagctgccgcctactatgtgggctatctgcagccccggaccttcctgctgaagtacaacgagaatggcaccatcacagacgcagtggattgcgccctggaccccctgtctgagacaaagtgtacactgaagagctttaccgtggagaagggcatctatcagacaagcaatttcagggtgcagcctaccgagtccatcgtgcgctttcccaatatcacaaaccattgcccttttggcgaggtgttcaacgccaccagattcgccagcgtgtacgcctggaatcggaagagaatctccaactgcgtggccgactattctgtgctgtacaactccgcctctttcagcacctttaagtgctatggcgtgtctcccacaaagctgaatgatctgtgctttaccaacgtgtacgccgatagcttcgtgatcaggggagacgaagtgagacagatcgcaccaggacagacaggaaagatcgcagactacaattataagctgcctgacgatttcaccggctgcgtgatcgcctggaactccaacaatctggattctaaagtgggcggcaactacaattatctgtacaggctgtttcgcaagtccaatctgaagccattcgagcgggacatctccacagagatctaccaggccggctctaccccctgcaatggcgtggagggctttaactgttatttccctctgcagtcttacggcttccagccaacaaacggccctggccaacagccctacagagtggtggtgctgtcctttgagctgctgcacgcaccagcaacagtgtgcggcccaaagaagtctaccaatctggtgaagaacaagtgcgtgaacttcaacttcaacggactgaccggcacaggcgtgctgaccgagagcaataagaagttcctgccttttcagcagttcggcagggacatcgcagataccacagacgccgtgcgcgaccctcagaccctggagatcctggacatcacaccatgcagcttcggcggcgtgtccgtgatcacaccaggcaccaatacatccaaccaggtggccgtgctgtatcaggacgtgaattgtaccgaggtgcccgatgcaatccacgcagatcagctgacccctacatggcgggtgtactctaccggcagcaacgtgttccagacaagagccggatgcctgatcggagcagagcacgtgaacaatagctatgagtgcgacatccctatcggcgccggcatctgtgccagctaccagacccagacaaactccccatctggagcaggctcccaccatcaccatcaccatcaccatcaccactga

SEQ ID NO: 4284 - DNA, 2148 bp, Artificial Sequence
  Description of Artificial Sequence: Synthetic polynucleotide
atgggcatcctgccaagcccaggaatgcccgccctgctgtctctggtgagcctgctgtccgtgctgctgatgggatgcgtggcagagacaggcacacagtgcgtgaacctgaccacaaggacccagctgccccctgcctataccaattctttcacacggggcgtgtactatcccgacaaggtgtttagaagctccgtgctgcactccacacaggatctgtttctgcctttcttttctaacgtgacctggttccacgccatccacgtgtccggcaccaatggcacaaagcggttcgacaatcccgtgctgccttttaacgatggcgtgtacttcgccagcaccgagaagtccaacatcatcagaggctggatctttggcaccacactggactctaagacacagagcctgctgatcgtgaacaatgccaccaacgtggtgatcaaggtgtgcgagttccagttttgtaatgatccattcctgggcgtgtactatcacaagaacaataagtcctggatggagtctgagtttcgcgtgtattctagcgccaacaattgcacatttgagtacgtgagccagcccttcctgatggacctggagggcaagcagggcaatttcaagaacctgagggagttcgtgtttaagaatatcgatggctacttcaagatctacagcaagcacaccccaatcaacctggtgcgcgacctgccacagggattctccgccctggagccactggtggatctgcccatcggcatcaacatcacccggtttcagacactgctggccctgcacagatcctacctgacaccaggcgactcctctagcggatggaccgcaggagctgccgcctactatgtgggctatctgcagccccggaccttcctgctgaagtacaacgagaatggcaccatcacagacgcagtggattgcgccctggaccccctgtctgagacaaagtgtacactgaagagctttaccgtggagaagggcatctatcagacaagcaatttcagggtgcagcctaccgagtccatcgtgcgctatcccaatatcacaaacctgtgcccttttggcgaggtgttcaacgccaccagattcgccagcgtgtacgcctggaatcggaagagaatctccaactgcgtggccgactattctgtgctgtacaactccgcctctttcagcacctttaagtgctatggcgtgtctcccacaaagctgaatgatctgtgctttaccaacgtgtacgccgatagcttcgtgatcaggggagacgaagtgagacagatcgcaccaggacagacaggaaagatcgcagactacaattataagctgcctgacgatttcaccggctgcgtgatcgcctggaactccaacaatctggattctaaagtgggcggcaactacaattatctgtacaggctgtttcgcaagtccaatctgaagccattcgagcgggacatctccacagagatctaccaggccggctctaccccctgcaatggcgtggagggctttaactgttatttccctctgcagtcttacggcttccagccaacaaacggcgtgggctatcagccctacagagtggtggtgctgtcctttgagctgctgcacgcaccagcaacagtgtgcggcccaaagaagtctaccaatctggtgaagaacaagtgcgtgaacttcaacttcaacggactgaccggcacaggcgtgctgaccgagagcaataagaagttcctgccttttcagcagttccaaagggacatcgcagataccacagacgccgtgcgcgaccctcagaccctggagatcctggacatcacaccatgcagcttcggcggcgtgtccgtgatcacaccaggcaccaatacatccaaccaggtggccgtgctgtatcaggacgtgaattgtaccgaggtgcccgtggcaatccacgcagatcagctgacccctacatggcgggtgtactctaccggcagcaacgtgttccagacaagagccggatgcctgatcggagcagagcacgtgaacaatagctatgagtgcgacatccctatcggcgccggcatctgtgccagctaccagacccagacaaactccccatctggagcaggctcccaccatcaccatcaccatcaccatcaccactga

SEQ ID NO: 4285 - DNA, 2148 bp, Artificial Sequence
  Description of Artificial Sequence: Synthetic polynucleotide
atgggcatcctgccaagcccaggaatgcccgccctgctgtctctggtgagcctgctgtccgtgctgctgatgggatgcgtggcagagacaggcacacagtgcgtgaacctgaccacaaggacccagctgccccctgcctataccaattctttcacacggggcgtgtactatcccgacaaggtgtttagaagctccgtgctgcactccacacaggatctgtttctgcctttcttttctaacgtgacctggttccacgccatccacgtgtccggcaccaatggcacaaagcggttcgacaatcccgtgctgccttttaacgatggcgtgtacttcgccagcaccgagaagtccaacatcatcagaggctggatctttggcaccacactggactctaagacacagagcctgctgatcgtgaacaatgccaccaacgtggtgatcaaggtgtgcgagttccagttttgtaatgatccattcctgggcgtgtactatcacaagaacaataagtcctggatggagtctgagtttcgcgtgtattctagcgccaacaattgcacatttgagtacgtgagccagcccttcctgatggacctggagggcaagcagggcaatttcaagaacctgagggagttcgtgtttaagaatatcgatggctacttcaagatctacagcaagcacaccccaatcaacctggtgcgcgacctgccacagggattctccgccctggagccactggtggatctgcccatcggcatcaacatcacccggtttcagacactgctggccctgcacagatcctacctgacaccaggcgactcctctagcggatggaccgcaggagctgccgcctactatgtgggctatctgcagccccggaccttcctgctgaagtacaacgagaatggcaccatcacagacgcagtggattgcgccctggaccccctgtctgagacaaagtgtacactgaagagctttaccgtggagaagggcatctatcagacaagcaatttcagggtggaacctaccgagtccatcgtgcgctttcccaatatcacaaacctgtgcccttttggcgaggtgttcaacgccaccagattcgccagcgtgtacgcctggaatcggaagagaatctccaactgcgtggccgactattctgtgctgtacaactccgcctctttcagcacctttaagtgctatggcgtgtctcccacaaagctgaatgatctgtgctttaccaacgtgtacgccgatagcttcgtgatcaggggagacgaagtgagacagatcgcaccaggacagacaggaaagatcgcagactacaattataagctgcctgacgatttcaccggctgcgtgatcgcctggaactccaacaatctggattctaaagtgggcggcaactacaattatctgtacaggctgtttcgcaagtccaatctgaagccattcgagcgggacatctccacagagatctaccaggccggctctaccccctgcaatggcgtggagggctttaactgttatttccctctgcagtcttacggcttccagccaacaaacggcgtgggctatcagccctacagagtggtggtgctgtcctttgagctgctgcacgcaccagcaacagtgtgcggcccaaagaagtctaccaatctggtgaagaacaagtgcgtgaacttcaacttcaacggactgaccggcacaggcgtgctgaccgagagcaataagaagttcctgccttttcagcagttcggcagggacatcgcagataccacagacgccgtgcgcgaccctcagaccctggagatcctggacatcacaccatgcagcttcggcggcgtgtccgtgatcacaccaggcaccaatacatccaaccaggtggccgtgctgtatcaggacgtgaattgtaccgaggtgcccgtggcaatccacgcagatcagctgacccctacatggcgggtgtactctaccggcagcaacgtgttccagacaagagccggatgcctgatcggagcagagcacgtgaacaatagctatgagtgcgacatccctatcggcgccggcatctgtgccagctaccagacccagacaaactccccatctggagcaggctcccaccatcaccatcaccatcaccatcaccactga

SEQ ID NO: 4286 - DNA, 2148 bp, Artificial Sequence
  Description of Artificial Sequence: Synthetic polynucleotide
atgggcatcctgccaagcccaggaatgcccgccctgctgtctctggtgagcctgctgtccgtgctgctgatgggatgcgtggcagagacaggcacacagtgcgtgaacctgaccacaaggacccagctgccccctgcctataccaattctttcacacggggcgtgtactatcccgacaaggtgtttagaagctccgtgctgcactccacacaggatctgtttctgcctttcttttctaacgtgacctggttccacgccaaacacgtgtccggcaccaatggcacaaagcggttcgacaatcccgtgctgccttttaacgatggcgtgtacttcgccagcaccgagaagtccaacatcatcagaggctggatctttggcaccacactggactctaagacacagagcctgctgatcgtgaacaatgccaccaacgtggtgatcaaggtgtgcgagttccagttttgtaatgatccattcctgggcgtgtactatcacaagaacaataagtcctggatggagtctgagtttcgcgtgtattctagcgccaacaattgcacatttgagtacgtgagccagcccttcctgatggacctggagggcaagcagggcaatttcaagaacctgagggagttcgtgtttaagaatatcgatggctacttcaagatctacagcaagcacaccccaatcaacctggtgcgcgacctgccacagggattctccgccctggagccactggtggatctgcccatcggcatcaacatcacccggtttcagacactgctggccctgcacagatcctacctgacaccaggcgactcctctagcggagaaaccgcaggagctgccgcctactatgtgggctatctgcagccccggaccttcctgctgaagtacaacgagaatggcaccatcacagacgcagtggattgcgccctggaccccctgtctgagacaaagtgtacactgaagagctttaccgtggagaagggcatctatcagacaagcaatttcagggtgcagcctaccgagtccatcgtgcgctttcccaatatcacaaaccattgcccttttggcgaggtgttcaacgccaccagattcgccagcgtgtacgcctggaatcggaagagaatctccaactgcgtggccgactattctgtgctgtacaactccgcctctttcagcacctttaagtgctatggcgtgtctcccacaaagctgaatgatctgtgctttaccaacgtgtacgccgatagcttcgtgatcaggggagacgaagtgagacagatcgcaccaggacagacaggaaagatcgcagactacaattataagctgcctgacgatttcaccggctgcgtgatcgcctggaactccaacaatctggattctaaagtgggcggcaactacaattatctgtacaggctgtttcgcaagtccaatctgaagccattcgagcgggacatctccacagagatctaccaggccggctctaccccctgcaatggcgtggagggctttaactgttatttccctctgcagtcttacggcttccagccaacaaacggccctggccaacagccctacagagtggtggtgctgtcctttgagctgctgcacgcaccagcaacagtgtgcggcccaaagaagtctaccaatctggtgaagaacaagtgcgtgaacttcaacttcaacggactgaccggcacaggcgtgctgaccgagagcaataagaagttcctgccttttcagcagttcggcagggacatcgcagataccacagacgccgtgcgcgaccctcagaccctggagatcctggacatcacaccatgcagcttcggcggcgtgtccgtgatcacaccaggcaccaatacatccaaccaggtggccgtgctgtatcaggacgtgaattgtaccgaggtgcccgatgcaatccacgcagatcagctgacccctacatggcgggtgtactctaccggcagcaacgtgttccagacaagagccggatgcctgatcggagcagagcacgtgaacaatagctatgagtgcgacatccctatcggcgccggcatctgtgccagctaccagacccagacaaactccccatctggagcaggctcccaccatcaccatcaccatcaccatcaccactga

SEQ ID NO: 4287 - DNA, 2148 bp, Artificial Sequence
  Description of Artificial Sequence: Synthetic polynucleotide
atgggcatcctgccaagcccaggaatgcccgccctgctgtctctggtgagcctgctgtccgtgctgctgatgggatgcgtggcagagacaggcacacagtgcgtgaacctgaccacaaggacccagctgccccctgcctataccaattctttcacacggggcgtgtactatcccgacaaggtgtttagaagctccgtgctgcactccacacaggatctgtttctgcctttcttttctaacgtgacctggttccacgccatccacgtgtccggcaccaatggcacaaagcggttcgacaatcccgtgctgccttttaacgatggcgtgtacttcgccagcaccgagaagtccaacatcatcagaggctggatctttggcaccacactggactctaagacacagagcctgctgatcgtgaacaatgccaccaacgtggtgatcaaggtgtgcgagttccagttttgtaatgatccattcctgggcgtgtactatcacaagaacaataagtcctggatggagtctgagtttcgcgtgtattctagcgccaacaattgcacatttgagtacgtgagccagcccttcctgatggacctggagggcaagcagggcaatttcaagaacctgagggagttcgtgtttaagaatatcgatggctacttcaagatctacagcaagcacaccccaatcaacctggtgcgcgacctgccacagggattctccgccctggagccactggtggatctgcccatcggcatcaacatcacccggtttcagacactgctggccctgcacagatcctacctgacaccaggcgactcctctagcggatggaccgcaggagctgccgcctactatgtgggctatctgcagccccggaccttcctgctgaagtacaacgagaatggcaccatcacagacgcagtggattgcgccctggaccccctgtctaaaacaaagtgtacactgaagagctttaccgtggagaagggcatctatcagacaagcaatttcagggtgcagcctaccgagtccatcgtgcgctttcccaatatcacaaacctgtgcccttttggcgaggtgttcaacgccaccagattcgccagcgtgtacgcctggaatcggaagagaatctccaactgcgtggccgactattctgtgctgtacaactccgcctctttcagcacctttaagtgctatggcgtgtctcccacaaagctgaatgatctgtgctttaccaacgtgtacgccgatagcttcgtgatcaggggagacgaagtgagacagatcgcaccaggacagacaggaaagatcgcagactacaattataagctgcctgacgatttcaccggctgcgtgatcgcctggaactccaacaatctggattctaaagtgggcggcaactacaattatctgtacaggctgtttcgcaagtccaatctgaagccattcgagcgggacatctccacagagatctaccaggccggctctaccccctgcaatggcgtggagggctttaactgttatttccctctgcagtcttacggcttccagccaacaaacggcgtgggctatcagccctacagagtggtggtgctgtcctttgagctgctgcacgcaccagcaacagtgtgcggcccaaagaagtctaccaatctggtgaagaacaagtgcgtgaacttcaacttcaacggactgaccggcacaggcgtgctgaccgagagcaataagaagttcctgccttttcagcagttcggcagggacatcgcagataccacagacgccgtgcgcgaccctcagaccctggagatcctggacatcacaccatgcagcttcggcggcgtgtccgtgatcacaccaggcaccaatacatccaaccaggtggccgtgctgtatcaggacgtgaattgtaccgaggtgcccgtggcaatccacgcagatcagctgacccctacatggcgggtgtactctaccggcagcaacgtgttccagacaagagccggatgcctgatcggagcagagcacgtgaacaatagctatgagtgcgacatccctatcggcgccggcatctgtgccagctaccagacccagacaaactccccatctggagcaggctcccaccatcaccatcaccatcaccatcaccactga

SEQ ID NO: 4288 - DNA, 2148 bp, Artificial Sequence
  Description of Artificial Sequence: Synthetic polynucleotide
atgggcatcctgccaagcccaggaatgcccgccctgctgtctctggtgagcctgctgtccgtgctgctgatgggatgcgtggcagagacaggcacacagtgcgtgaacctgaccacaaggacccagctgccccctgcctataccaattctttcacacggggcgtgtactatcccgacaaggtgtttagaagctccgtgctgcactccacacaggatctgtttctgcctttcttttctaacgtgacctggttccacgccgaacacgtgtccggcaccaatggcacaaagcggttcgacaatcccgtgctgccttttaacgatggcgtgtacttcgccagcaccgagaagtccaacatcatcagaggctggatctttggcaccacactggactctaagacacagagcctgctgatcgtgaacaatgccaccaacgtggtgatcaaggtgtgcgagttccagttttgtaatgatccattcctgggcgtgtactatcacaagaacaataagtcctggatggagtctgagtttcgcgtgtattctagcgccaacaattgcacatttgagtacgtgagccagcccttcctgatggacctggagggcaagcagggcaatttcaagaacctgagggagttcgtgtttaagaatatcgatggctacttcaagatctacagcaagcacaccccaatcaacctggtgcgcgacctgccacagggattctccgccctggagccactggtggatctgcccatcggcatcaacatcacccggtttcagacactgctggccctgcacagatcctacctgacaccaggcgactcctctagcggagaaaccgcaggagctgccgcctactatgtgggctatctgcagccccggaccttcctgctgaagtacaacgagaatggcaccatcacagacgcagtggattgcgccctggaccccctgtctgagacaaagtgtacactgaagagctttaccgtggagaagggcatctatcagacaagcaatttcagggtgcagcctaccgagtccatcgtgcgctttcccaatatcacaaacaaatgcccttttggcgaggtgttcaacgccaccagattcgccagcgtgtacgcctggaatcggaagagaatctccaactgcgtggccgactattctgtgctgtacaactccgcctctttcagcacctttaagtgctatggcgtgtctcccacaaagctgaatgatctgtgctttaccaacgtgtacgccgatagcttcgtgatcaggggagacgaagtgagacagatcgcaccaggacagacaggaaagatcgcagactacaattataagctgcctgacgatttcaccggctgcgtgatcgcctggaactccaacaatctggattctaaagtgggcggcaactacaattatctgtacaggctgtttcgcaagtccaatctgaagccattcgagcgggacatctccacagagatctaccaggccggctctaccccctgcaatggcgtggagggctttaactgttatttccctctgcagtcttacggcttccagccaacaaacggcccgggccaacagccctacagagtggtggtgctgtcctttgagctgctgcacgcaccagcaacagtgtgcggcccaaagaagtctaccaatctggtgaagaacaagtgcgtgaacttcaacttcaacggactgaccggcacaggcgtgctgaccgagagcaataagaagttcctgccttttcagcagttcggcagggacatcgcagataccacagacgccgtgcgcgaccctcagaccctggagatcctggacatcacaccatgcagcttcggcggcgtgtccgtgatcacaccaggcaccaatacatccaaccaggtggccgtgctgtatcaggacgtgaattgtaccgaggtgcccgatgcaatccacgcagatcagctgacccctacatggcgggtgtactctaccggcagcaacgtgttccagacaagagccggatgcctgatcggagcagagcacgtgaacaatagctatgagtgcgacatccctatcggcgccggcatctgtgccagctaccagacccagacaaactccccatctggagcaggctcccaccatcaccatcaccatcaccatcaccactga

SEQ ID NO: 4289 - DNA, 2148 bp, Artificial Sequence
  Description of Artificial Sequence: Synthetic polynucleotide
atgggcatcctgccaagcccaggaatgcccgccctgctgtctctggtgagcctgctgtccgtgctgctgatgggatgcgtggcagagacaggcacacagtgcgtgaacctgaccacaaggacccagctgccccctgcctataccaattctttcacacggggcgtgtactatcccgacaaggtgtttagaagctccgtgctgcactccacacaggatctgtttctgcctttcttttctaacgtgacctggttccacgccatccacgtgtccggcaccaatggcacaaagcggttcgacaatcccgtgctgccttttaacgatggcgtgtacttcgccagcaccgagaagtccaacatcatcagaggctggatctttggcaccacactggactctaagacacagagcctgctgatcgtgaacaataataccaacgtggtgatcaaggtgtgcgagttccagttttgtaatgatccattcctgggcgtgtactatcacaagaacaataagtcctggatggagtctgagtttcgcgtgtattctagcgccaacaattgcacatttgagtacgtgagccagcccttcctgatggacctggagggcaagcagggcaatttcaagaacctgagggagttcgtgtttaagaatatcgatggctacttcaagatctacagcaagcacaccccaatcaacctggtgcgcgacctgccacagggattctccgccctggagccactggtggatctgcccatcggcatcaacatcacccggtttcagacactgctggccctgcacagatcctacctgacaccaggcgactcctctagcggatggaccgcaggagctgccgcctactatgtgggctatctgcagccccggaccttcctgctgaagtacaacgagaatggcaccatcacagacgcagtggattgcgccctggaccccctgtctgagacaaagtgtacactgaagagctttaccgtggagaagggcatctatcagacaagcaatttcagggtgcagcctaccgagtccatcgtgcgctttcccaatatcacaaacctgtgcccttttggcgaggtgttcaacgccaccagattcgccagcgtgtacgcctggaatcggaagagaatctccaactgcgtggccgactattctgtgctgtacaactccgcctctttcagcacctttaagtgctatggcgtgtctcccacaaagctgaatgatctgtgctttaccaacgtgtacgccgatagcttcgtgatcaggggagacgaagtgagacagatcgcaccaggacagacaggaaagatcgcagactacaattataagctgcctgacgatttcaccggctgcgtgatcgcctggaactccaacaatctggattctaaagtgggcggcaactacaattatctgtacaggctgtttcgcaagtccaatctgaagccattcgagcgggacatctccacagagatctaccaggccggctctaccccctgcaatggcgtggagggctttaactgttatttccctctgcagtcttacggcttccagccaacaaacggcgtgggctatcagccctacagagtggtggtgctgtcctttgagctgctgcacgcaccagcaacagtgtgcggcccaaagaagtctaccaatctggtgaagaacaagtgcgtgaacttcaacttcaacggactgaccggcacaggcgtgctgaccgagagcaataagaagttcctgccttttcagcagttcggcagggacatcgcagataccacagacgccgtgcgcgaccctcagaccctggagatcctggacatcacaccatgcagcttcggcggcgtgtccgtgatcacaccaggcaccaatacatccaaccaggtggccgtgctgtatcaggacgtgaattgtaccgaggtgcccgtggcaatccacgcagatcagctgacccctacatggcgggtgtactctaccggcagcaacgtgttccagacaagagccggatgcctgatcggagcagagcacgtgaacaatagctatgagtgcgacatccctatcggcgccggcatctgtgccagctaccagacccagacaaactccccatctggagcaggctcccaccatcaccatcaccatcaccatcaccactga

SEQ ID NO: 4290 - DNA, 2148 bp, Artificial Sequence
  Description of Artificial Sequence: Synthetic polynucleotide
atgggcatcctgccaagcccaggaatgcccgccctgctgtctctggtgagcctgctgtccgtgctgctgatgggatgcgtggcagagacaggcacacagtgcgtgaacctgaccacaaggacccagctgccccctgcctataccaattctttcacacggggcgtgtactatcccgacaaggtgtttagaagctccgtgctgcactccacacaggatctgtttctgcctttcttttctaacgtgacctggttccacgccatccacgtgtccggcaccaatggcacaaagcggttcgacaatcccgtgctgccttttaacgatggcgtgtacttcgccagcaccgagaagtccaacatcatcagaggctggatctttggcaccacactggactctaagacacagagcctgctgatcgtgaacaatgccaccaacgtggtgatcaaggtgtgcgagttccagttttgtaatgatccattcctgggcgtgtactatcacaagaacaataagtcctggatggagtctgagtttcgcgtgtattctagcgccaacaattgcacatttgagtacgtgagccagcccttcctgatggacctggagggcaagcagggcaatttcaagaacctgagggagttcgtgtttaagaatatcgatggctacttcaagatctacagcaagcacaccccaatcaacctggtgcgcgacctgccacagggattctccgccctggagccactggtggatctgcccatcggcatcaacatcacccggtttcagacactgctggccctgcacagatcctacctgacaccaggcgactcctctagcggatggaccgcaggagctgccgcctactatgtgggctatctgcagccccggaccttcctgctgaagtacaacgagaatggcaccatcacagacgcagtggattgcgccctggaccccctgtctgagacaaagtgtacactgaagagctttaccgtggagaagggcatctatcagacaagcaatttcagggtgcagcctaccgagtccatcgtgcgctttcccaatatcacaaacctgtgcccttttggcgaggtgttcaacgccaccagattcgccagcgtgtacgcctggaatcggaagagaatctccaactgcgtggccgactattctgtgctgtacaactccgcctctttcagcacctttaagtgctatggcgtgtctcccacaaagctgaatgatctgtgctttaccaacgtgtacgccgatagcttcgtgatcaggggagacgaagtgagacagatcgcaccaggacagacaggaaagatcgcagactacaattataagctgcctgacgatttcaccggctgcgtgatcgcctggaactccaacaatctggattctaaagtgggcggcaactacaattatctgtacaggctgtttcgcaaggataatctgaagccattcgagcgggacatctccacagagatctaccaggccggctctaccccctgcaatggcgtggagggctttaactgttatttccctctgcagtcttacggcttccagccaacaaacggcgtgggctatcagccctacagagtggtggtgctgtcctttgagctgctgcacgcaccagcaacagtgtgcggcccaaagaagtctaccaatctggtgaagaacaagtgcgtgaacttcaacttcaacggactgaccggcacaggcgtgctgaccgagagcaataagaagttcctgccttttcagcagttcggcagggacatcgcagataccacagacgccgtgcgcgaccctcagaccctggagatcctggacatcacaccatgcagcttcggcggcgtgtccgtgatcacaccaggcaccaatacatccaaccaggtggccgtgctgtatcaggacgtgaattgtaccgaggtgcccgtggcaatccacgcagatcagctgacccctacatggcgggtgtactctaccggcagcaacgtgttccagacaagagccggatgcctgatcggagcagagcacgtgaacaatagctatgagtgcgacatccctatcggcgccggcatctgtgccagctaccagacccagacaaactccccatctggagcaggctcccaccatcaccatcaccatcaccatcaccactga

SEQ ID NO: 4291 - DNA, 2148 bp, Artificial Sequence
  Description of Artificial Sequence: Synthetic polynucleotide
atgggcatcctgccaagcccaggaatgcccgccctgctgtctctggtgagcctgctgtccgtgctgctgatgggatgcgtggcagagacaggcacacagtgcgtgaacctgaccacaaggacccagctgccccctgcctataccaattctttcacacggggcgtgtactatcccgacaaggtgtttagaagctccgtgctgcactccacacaggatctgtttctgcctttcttttctaacgtgacctggttccacgcctaccacgtgtccggcaccaatggcacaaagcggttcgacaatcccgtgctgccttttaacgatggcgtgtacttcgccagcaccgagaagtccaacatcatcagaggctggatctttggcaccacactggactctaagacacagagcctgctgatcgtgaacaatgccaccaacgtggtgatcaaggtgtgcgagttccagttttgtaatgatccattcctgggcgtgtactatcacaagaacaataagtcctggatggagtctgagtttcgcgtgtattctagcgccaacaattgcacatttgagtaccatagccagcccttcctgatggacctggagggcaagcagggcaatttcaagaacctgagggagttcgtgtttaagaatatcgatggctacttcaagatctacagcaagcacaccccaatcaacctggtgcgcgacctgccacagggattctccgccctggagccactggtggatctgcccatcggcatcaacatcacccggtttcagacactgctggccctgcacagatcctacctgacaccaggcgactcctctagcggagaaaccgcaggagctgccgcctactatgtgggctatctgcagccccggaccttcctgctgaagtacaacgagaatggcaccatcacagacgcagtggattgcgccctggaccccctgtctgagacaaagtgtacactgaagagctttaccgtggagaagggcatctatcagacaagcaatttcagggtgcagcctaccgagtccatcgtgcgctttcccaatatcacaaacaaatgcccttttggcgaggtgttcaacgccaccagattcgccagcgtgtacgcctggaatcggaagagaatctccaactgcgtggccgactattctgtgctgtacaactccgcctctttcagcacctttaagtgctatggcgtgtctcccacaaagctgaatgatctgtgctttaccaacgtgtacgccgatagcttcgtgatcaggggagacgaagtgagacagatcgcaccaggacagacaggaaagatcgcagactacaattataagctgcctgacgatttcaccggctgcgtgatcgcctggaactccaacaatctggattctaaagtgggcggcaactacaattatctgtacaggctgtttcgcaagtccaatctgaagccattcgagcgggacatctccacagagatctaccaggccggctctaccccctgcaatggcgtggagggctttaactgttatttccctctgcagtcttacggcttccagccaacaaacggcgtgggccaacagccctacagagtggtggtgctgtcctttgagctgctgcacgcaccagcaacagtgtgcggcccaaagaagtctaccaatctggtgaagaacaagtgcgtgaacttcaacttcaacggactgaccggcacaggcgtgctgaccgagagcaataagaagttcctgccttttcagcagttcggcagggacatcgcagataccacagacgccgtgcgcgaccctcagaccctggagatcctggacatcacaccatgcagcttcggcggcgtgtccgtgatcacaccaggcaccaatacatccaaccaggtggccgtgctgtatcaggacgtgaattgtaccgaggtgcccgatgcaatccacgcagatcagctgacccctacatggcgggtgtactctaccggcagcaacgtgttccagacaagagccggatgcctgatcggagcagagcacgtgaacaatagctatgagtgcgacatccctatcggcgccggcatctgtgccagctaccagacccagacaaactccccatctggagcaggctcccaccatcaccatcaccatcaccatcaccactga

SEQ ID NO: 4292 - DNA, 2148 bp, Artificial Sequence
  Description of Artificial Sequence: Synthetic polynucleotide
atgggcatcctgccaagcccaggaatgcccgccctgctgtctctggtgagcctgctgtccgtgctgctgatgggatgcgtggcagagacaggcacacagtgcgtgaacctgaccacaaggacccagctgccccctgcctataccaattctttcacacggggcgtgtactatcccgacaaggtgtttagaagctccgtgctgcactccacacaggatctgtttctgcctttcttttctaacgtgacctggttccacgccatccacgtgtccggcaccaatggcacaaagcggttcgacaatcccgtgctgccttttaacgatggcgtgtacttcgccagcaccgagaagtccaacatcatcagaggctggatctttggcaccacactggactctaagacacagagcctgctgatcgtgaacaatgccaccaacgtggtgatcaaggtgtgcgagttccagttttgtaatgatccattcctgggcgtgtactatcacaagaacaataagtcctggatggagtctgagtttcgcgtgtattctagcgccaacaattgcacatttgagtacgtgagccagcccttcctgatggacctggagggcaagcagggcaatttcaagaacctgagggagttcgtgtttaagaatatcgatggctacttcaagatctacagcaagcacaccccaatcaacctggtgcgcgacctgccacagggattctccgccctggagccactggtggatctgcccatcggcatcaacatcacccggtttcagacactgctggccctgcacagatcctacctgacaccaggcgactcctctagcggatggaccgcaggagctgccgcctactatgtgggctatctgcagccccggaccttcctgctgaagtacaacgagaatggcaccatcacagacgcagtggattgcgccctggaccccctgtctgagacaaagtgtacactgaagagctttaccgtggagaagggcatctatcagacaagcaatttcagggtgcagcctaccgagtccatcgtgcgctttcccaatatcacaaacctgtgcccttttggcgaggtgttcaacgccaccagattcgccagcgtgtacgcctggaatcggaagagaatctccaactgcgtggccgactattctgtgctgtacaactccgcctctttcagcacctttaagtgctatggcgtgtctcccacaaagctgaatgatctgtgctttaccaacgtgtacgccgatagcttcgtgatcaggggagacgaagtgagacagatcgcaccaggacagacaggaaagatcgcagactacaattataagctgcctgacgatttcaccggctgcgtgatcgcctggaactccaacaatctggattctaaagtgggcggcaactacaattatctgtacaggctgtttcgcaagtccaatctgaagccattcgagcgggacatctccacagagatctaccaggccggctctaccccctgcaatggcgtggagggctttaactgttatttccctctgcagtcttacggcttccagccaacaaacggcgtgggctatcagccctacagagtggtggtgctgtcctttgagctgctgcacgcaccagcaacagtgtgcggcccaaagaagtctaccaatctggtgaagaacaagtgcgtgaacttcaacttcaacggactgaccggcacaggcgtgctgaccgagagcaataagaagttcctgccttttcagcagttcggcagggacatcgcagataccacagacgccgtgcgcgaccctcagaccctggagatcctggacatcacaccatgcagcttcggcggcaaacttgtgatcacaccacaaaccaatacatccaaccaggtggccgtgctgtatcaggacgtgaattgtaccgaggtgcccgtggcaatccacgcagatcagctgacccctacatggcgggtgtacaataccggcagcaacgtgttccagacaagagccggatgcctggtaggatttgagcacgtgaacaatagctatgagtgcgacatccctgttggcgccggcatctgtgccagctaccagacccagcgtaactccccatctggagcaggctcccaccatcaccatcaccatcaccatcaccactga

SEQ ID NO: 4293 - DNA, 2148 bp, Artificial Sequence
  Description of Artificial Sequence: Synthetic polynucleotide
atgggcatcctgccaagcccaggaatgcccgccctgctgtctctggtgagcctgctgtccgtgctgctgatgggatgcgtggcagagacaggcacacagtgcgtgaacctgaccacaaggacccagctgccccctgcctataccaattctttcacacggggcgtgtactatcccgacaaggtgtttagaagctccgtgctgcactccacacaggatctgtttctgcctttcttttctaacgtgacctggttccacgccgagcacgtgtccggcaccaatggcacaaagcggttcgacaatcccgtgctgccttttaacgatggcgtgtacttcgccagcaccgagaagtccaacatcatcagaggctggatctttggcaccacactggactctaagacacagagcctgctgatcgtgaacaatgccaccaacgtggtgatcaaggtgtgcgagttccagttttgtaatgatccattcctgggcgtgtactatcacaagaacaataagtcctggatggagtctgagtttcgcgtgtattctagcgccaacaattgcacatttgagtaccatagccagcccttcctgatggacctggagggcaagcagggcaatttcaagaacctgagggagttcgtgtttaagaatatcgatggctacttcaagatctacagcaagcacaccccaatcaacctggtgcgcgacctgccacagggattctccgccctggagccactggtggatctgcccatcggcatcaacatcacccggtttcagacactgctggccctgcacagatcctacctgacaccaggcgactcctctagcggagaaaccgcaggagctgccgcctactatgtgggctatctgcagccccggaccttcctgctgaagtacaacgagaatggcaccatcacagacgcagtggattgcgccctggaccccctgtctgagacaaagtgtacactgaagagctttaccgtggagaagggcatctatcagacaagcaatttcagggtgcagcctaccgagtccatcgtgcgctttcccaatatcacaaacaaatgcccttttggcgaggtgttcaacgccaccagattcgccagcgtgtacgcctggaatcggaagagaatctccaactgcgtggccgactattctgtgctgtacaactccgcctctttcagcacctttaagtgctatggcgtgtctcccacaaagctgaatgatctgtgctttaccaacgtgtacgccgatagcttcgtgatcaggggagacgaagtgagacagatcgcaccaggacagacaggaaagatcgcagactacaattataagctgcctgacgatttcaccggctgcgtgatcgcctggaactccaacaatctggattctaaagtgggcggcaactacaattatctgtacaggctgtttcgcaagtccaatctgaagccattcgagcgggacatctccacagagatctaccaggccggctctaccccctgcaatggcgtggagggctttaactgttatttccctctgcagtcttacggcttccagccaacaaacggcccgggccaacagccctacagagtggtggtgctgtcctttgagctgctgcacgcaccagcaacagtgtgcggcccaaagaagtctaccaatctggtgaagaacaagtgcgtgaacttcaacttcaacggactgaccggcacaggcgtgctgaccgagagcaataagaagttcctgccttttcagcagttcggcagggacatcgcagataccacagacgccgtgcgcgaccctcagaccctggagatcctggacatcacaccatgcagcttcggcggcgtgtccgtgatcacaccaggcaccaatacatccaaccaggtggccgtgctgtatcaggacgtgaattgtaccgaggtgcccgtggcaatccacgcagatcagctgacccctacatggcgggtgtactctaccggcagcaacgtgttccagacaagagccggatgcctgatcggagcagagcacgtgaacaatagctatgagtgcgacatccctatcggcgccggcatctgtgccagctaccagacccagacaaactccccatctggagcaggctcccaccatcaccatcaccatcaccatcaccactga

SEQ ID NO: 4294 - DNA, 2148 bp, Artificial Sequence
  Description of Artificial Sequence: Synthetic polynucleotide
atgggcatcctgccaagcccaggaatgcccgccctgctgtctctggtgagcctgctgtccgtgctgctgatgggatgcgtggcagagacaggcacacagtgcgtgaacctgaccacaaggacccagctgccccctgcctataccaattctttcacacggggcgtgtactatcccgacaaggtgtttagaagctccgtgctgcactccacacaggatctgtttctgcctttcttttctaacgtgacctggttccacgccatccacgtgtccggcaccaatggcacaaagcggttcgacaatcccgtgctgccttttaacgatggcgtgtacttcgccagcaccgagaagtccaacatcatcagaggctggatctttggcaccacactggactctaagacacagagcctgctgatcgtgaacaatgccaccaacgtggtgatcaaggtgtgcgagttccagttttgtaatgatccattcctgggcgtgtactatcacaagaacaataagtcctggatggagtctgagtttcgcgtgtattctagcgccaacaattgcacatttgagtacgtgagccagcccttcctgatggacctggagggcaagcagggcaatttcaagaacctgagggagttcgtgtttaagaatatcgatggctacttcaagatctacagcaagcacaccccaatcaacctggtgcgcgacctgccacagggattctccgccctggagccactggtggatctgcccatcggcatcaacatcacccggtttcagacactgctggccctgcacagatcctacctgacaccaggcgactcctctagcggatggaccgcaggagctgcccaatactatgtgggctatctgcagccccggaccttcctgctgaagtacaacgagaatggcaccatcacagacgcagtggattgcgccctggaccccctgtctgagacaaagtgtacactgaagagctttaccgtggagaagggcatctatcagacaagcaatttcagggtgcagcctaccgagtccatcgtgcgctttcccaatatcacaaacctgtgcccttttggcgaggtgttcaacgccaccagattcgccagcgtgtacgcctggaatcggaagagaatctccaactgcgtggccgactattctgtgctgtacaactccgcctctttcagcacctttaagtgctatggcgtgtctcccacaaagctgaatgatctgtgctttaccaacgtgtacgccgatagcttcgtgatcaggggagacgaagtgagacagatcgcaccaggacagacaggaaagatcgcagactacaattataagctgcctgacgatttcaccggctgcgtgatcgcctggaactccaacaatctggattctaaagtgggcggcaactacaattatctgtacaggctgtttcgcaagtccaatctgaagccattcgagcgggacatctccacagagatctaccaggccggctctaccccctgcaatggcgtggagggctttaactgttatttccctctgcagtcttacggcttccagccaacaaacggcgtgggctatcagccctacagagtggtggtgctgtcctttgagctgctgcacgcaccagcaacagtgtgcggcccaaagaagtctaccaatctggtgaagaacaagtgcgtgaacttcaacttcaacggactgaccggcacaggcgtgctgaccgagagcaataagaagttcctgccttttcagcagttcggcagggacatcgcagataccacagacgccgtgcgcgaccctcagaccctggagatcctggacatcacaccatgcagcttcggcggcgtgtccgtgatcacaccaggcaccaatacatccaaccaggtggccgtgctgtatcaggacgtgaattgtaccgaggtgcccgtggcaatccacgcagatcagctgacccctacatggcgggtgtactctaccggcagcaacgtgttccagacaagagccggatgcctgatcggagcagagcacgtgaacaatagctatgagtgcgacatccctatcggcgccggcatctgtgccagctaccagacccagacaaactccccatctggagcaggctcccaccatcaccatcaccatcaccatcaccactga

SEQ ID NO: 4295 - DNA, 2148 bp, Artificial Sequence
  Description of Artificial Sequence: Synthetic polynucleotide
atgggcatcctgccaagcccaggaatgcccgccctgctgtctctggtgagcctgctgtccgtgctgctgatgggatgcgtggcagagacaggcacacagtgcgtgaacctgaccacaaggacccagctgccccctgcctataccaattctttcacacggggcgtgtactatcccgacaaggtgtttagaagctccgtgctgcactccacacaggatctgtttctgcctttcttttctaacgtgacctggttccacgccatccacgtgtccggcaccaatggcacaaagcggttcgacaatcccgtgctgccttttaacgatggcgtgtacttcgccagcaccgagaagtccaacatcatcagaggctggatctttggcaccacactggactctaagacacagagcctgctgatcgtgaacaatgccaccaacgtggtgatcaaggtgtgcgagttccagttttgtaatgatccattcctgggcgtgtactatcacaagaacaataagtcctggatggagtctgagtttcgcgtgtattctagcgccaacaattgcacatttgagtacgtgagccagcccttcctgatggacctggagggcaagcagggcaatttcaagaacctgagggagttcgtgtttaagaatatcgatggctacttcaagatctacagcaagcacaccccaatcaacctggtgcgcgacctgccacagggattctccgccctggagccactggtggatctgcccatcggcatcaacatcacccggtttcagacactgctggccctgcacagatcctacctgacaccaggcgactcctctagcggatggaccgcaggagctgccgcctactatgtgggctatctgcagccccggaccttcctgctgaagtacaacgagaatggcaccatcacagacgcagtggattgcgccctggaccccctgtctgagacaaagtgtacactgaagagctttaccgtggagaagggcatctatcagacaagcaatttcagggtgcagcctaccgagtccatcgtgcgctttcccaatatcacaaacctgtgcccttttggcgaggtgttcaacgccaccagattcgccagctcgtacgcctggaatcggaagagaatctccaactgcgtggccgactattctgtgctgtacaactccgcctctttcagcacctttaagtgctatggcgtgtctcccacaaagctgaatgatctgtgctttaccaacgtgtacgccgatcgtttcgtgatcaggggagacgaagtgagacagatcgcaccaggacagacaggaaagatcgcagactacaattataagctgcctgacgatttcaccggctgcgtgatcgcctggaactccaacaatctggatgcgaaagtgggcggcaactacaattatctgtacaggctgtttcgcaagtccaatctgaagccattcgagcggtttatctccacagagatctaccaggccggctctaccccctcaaatggcgtggagggctttaactgttatttccctctgcagtcttacgttttccagccaacaaacggcgtgggctatcagccctacagagtggtggtgctgtcctttgagctgctgcacgcaccacatacagtgtgcggcccaaagaagtctaccaatctggtgaagaacaagtgcgtgaacttcaacttcaacggactgaccggcacaggcgtgctgaccgagagcaataagaagttcctgccttttcagcagttcggcagggacatcgcagataccacagacgccgtgcgcgaccctcagaccctggagatcctggacatcacaccatgcagcttcggcggcgtgtccgtgatcacaccaggcaccaatacatccaaccaggtggccgtgctgtatcaggacgtgaattgtaccgaggtgcccgtggcaatccacgcagatcagctgacccctacatggcgggtgtactctaccggcagcaacgtgttccagacaagagccggatgcctgatcggagcagagcacgtgaacaatagctatgagtgcgacatccctatcggcgccggcatctgtgccagctaccagacccagacaaactccccatctggagcaggctcccaccatcaccatcaccatcaccatcaccactga

SEQ ID NO: 4296 - DNA, 2148 bp, Artificial Sequence
  Description of Artificial Sequence: Synthetic polynucleotide
atgggcatcctgccaagcccaggaatgcccgccctgctgtctctggtgagcctgctgtccgtgctgctgatgggatgcgtggcagagacaggcacacagtgcgtgaacctgaccacaaggacccagctgccccctgcctataccaattctttcacacggggcgtgtactatcccgacaaggtgtttagaagctccgtgctgcactccacacaggatctgtttctgcctttcttttctaacgtgacctggttccacgccatccacgtgtccggcaccaatggcacaaagcggttcgacaatcccgtgctgccttttaacgatggcgtgtacttcgccagcaccgagaagtccaacatcatcagaggctggatctttggcaccacactggactctaagacacagagcctgctgatcgtgaacaatgccaccaacgtggtgatcaaggtgtgcgagttccagttttgtaatgatccattcctgggcgtgtactatcacaagaacaataagtcctggatggagtctgagtttcgcgtgtattctagcgccaacaattgcacatttgagtacgtgagccagcccttcctgatggacctggagggcaagcagggcaatttcaagaacctgagggagttcgtgtttaagaatatcgatggctacttcaagatctacagcaagcacaccccaatcaacctggtgcgcgacctgccacagggattctccgccctggagccactggtggatctgcccatcggcatcaacatcacccggtttcagacactgctggccctgcacagatcctacctgacaccaggcgactcctctagcggatggaccgcaggagctgccgcctactatgtgggctatctgcagccccggaccttcctgctgaagtacaacgagaatggcaccatcacagacgcagtggattgcgccctggaccccctgtctgagacaaagtgtacactgaagagctttaccgtggagaagggcatctatcagacaagcaatttcagggtgcagcctaccgagtccatcgtgcgctttcccaatatcacaaacctgtgcccttttggcgaggtgttcaacgccaccagattcgccagcagttacgcctggaatcggaagagaatctccaactgcgtggccgactattctgtgctgtacaactccgcctctttcagcacctttaagtgctatggcgtgtctcccacaaagctgaatgatctgtgctttaccaacgtgtacgccgatcgtttcgtgatcaggggagacgaagtgagacagatcgcaccaggacagacaggaaagatcgcagactacaattataagctgcctgacgatttcaccggctgcgtgatcgcctggaactccaacaatctggatgctaaagtgggcggcaactacaattatctgtacaggctgtttcgcaagtccaatctgaagccattcgagcggttcatctccacagagatctaccaggccggctctacccccgctaatggcgtggagggctttaactgttatttccctctgcagtcttacgttttccagccaacaaacggcgtgggctatcagccctacagagtggtggtgctgtcctttgagctgctgcacgcaccacatacagtgtgcggcccaaagaagtctaccaatctggtgaagaacaagtgcgtgaacttcaacttcaacggactgaccggcacaggcgtgctgaccgagagcaataagaagttcctgccttttcagcagttcggcagggacatcgcagataccacagacgccgtgcgcgaccctcagaccctggagatcctggacatcacaccatgcagcttcggcggcgtgtccgtgatcacaccaggcaccaatacatccaaccaggtggccgtgctgtatcaggacgtgaattgtaccgaggtgcccgtggcaatccacgcagatcagctgacccctacatggcgggtgtactctaccggcagcaacgtgttccagacaagagccggatgcctgatcggagcagagcacgtgaacaatagctatgagtgcgacatccctatcggcgccggcatctgtgccagctaccagacccagacaaactccccatctggagcaggctcccaccatcaccatcaccatcaccatcaccactga

SEQ ID NO: 4297 - DNA, 2148 bp, Artificial Sequence
  Description of Artificial Sequence: Synthetic polynucleotide
atgggcatcctgccaagcccaggaatgcccgccctgctgtctctggtgagcctgctgtccgtgctgctgatgggatgcgtggcagagacaggcacacagtgcgtgaacctgaccacaaggacccagctgccccctgcctataccaattctttcacacggggcgtgtactatcccgacaaggtgtttagaagctccgtgctgcactccacacaggatctgtttctgcctttcttttctaacgtgacctggttccacgccatccacgtgtccggcaccaatggcacaaagcggttcgacaatcccgtgctgccttttaacgatggcgtgtacttcgccagcaccgagaagtccaacatcatcagaggctggatctttggcaccacactggactctaagacacagagcctgctgatcgtgaacaatgccaccaacgtggtgatcaaggtgtgcgagttccagttttgtaatgatccattcctgggcgtgtactatcacaagaacaataagtcctggatggagtctgagtttcgcgtgtattctagcgccaacaattgcacatttgagtacgtgagccagcccttcctgatggacctggagggcaagcagggcaatttcaagaacctgagggagttcgtgtttaagaatatcgatggctacttcaagatctacagcaagcacaccccaatcaacctggtgcgcgacctgccacagggattctccgccctggagccactggtggatctgcccatcggcatcaacatcacccggtttcagacactgctggccctgcacagatcctacctgacaccaggcgactcctctagcggatggaccgcaggagctgccgcctactatgtgggctatctgcagccccggaccttcctgctgaagtacaacgagaatggcaccatcacagacgcagtggattgcgccctggaccccctgtctgagacaaagtgtacactgaagagctttaccgtggagaagggcatctatcagacaagcaatttcagggtgcagcctaccgagtccatcgtgcgctttcccaatatcacaaacctgtgccctttgggcgaggtgttcaacgccaccagattcgccagcagttacgcctggaatcggaagagaatctccaactgcgtggccgactattctgtgctgtacaactccgcctctttcagcacctttaagtgctatggcgtgtctcccacaaagctgaatgatctgtgctttaccaacgtgtacgccgatcaattcgtgatcaggggagacgaagtgagacagatcgcaccaggacagacaggaaagatcgcagactacaattataagctgcctgacgatttcaccggctgcgtgatcgcctggaactccaacaatctggatgcgaaagtgggcggcaactacaattatctgtacaggctgtttcgcaagtccaatctgaagccattcgagcggtttatctccacagagatctaccaggccggctctacccccgctaatggcgtggagggctttaactgttatttccctctgcagtcttacggcttccagccaacaaacggcgtgacgtatcagccctacagagtggtggtgctgtcctttgagctgctgcacgcaccacatacagtgtgcggcccaaagaagtctaccaatctggtgaagaacaagtgcgtgaacttcaacttcaacggactgaccggcacaggcgtgctgaccgagagcaataagaagttcctgccttttcagcagttcggcagggacatcgcagataccacagacgccgtgcgcgaccctcagaccctggagatcctggacatcacaccatgcagcttcggcggcgtgtccgtgatcacaccaggcaccaatacatccaaccaggtggccgtgctgtatcaggacgtgaattgtaccgaggtgcccgtggcaatccacgcagatcagctgacccctacatggcgggtgtactctaccggcagcaacgtgttccagacaagagccggatgcctgatcggagcagagcacgtgaacaatagctatgagtgcgacatccctatcggcgccggcatctgtgccagctaccagacccagacaaactccccatctggagcaggctcccaccatcaccatcaccatcaccatcaccactga

SEQ ID NO: 4298 - DNA, 2148 bp, Artificial Sequence
  Description of Artificial Sequence: Synthetic polynucleotide
atgggcatcctgccaagcccaggaatgcccgccctgctgtctctggtgagcctgctgtccgtgctgctgatgggatgcgtggcagagacaggcacacagtgcgtgaacctgaccacaaggacccagctgccccctgcctataccaattctttcacacggggcgtgtactatcccgacaaggtgtttagaagctccgtgctgcactccacacaggatctgtttctgcctttcttttctaacgtgacctggttccacgccgagcacgtgtccggcaccaatggcacaaagcggttcgacaatcccgtgctgccttttaacgatggcgtgtacttcgccagcaccgagaagtccaacatcatcagaggctggatctttggcaccacactggactctaagacacagagcctgctgatcgtgaacaatgccaccaacgtggtgatcaaggtgtgcgagttccagttttgtaatgatccattcctgggcgtgtactatcacaagaacaataagtcctggatggagtctgagtttcgcgtgtattctagcgccaacaattgcacatttgagtaccatagccagcccttcctgatggacctggagggcaagcagggcaatttcaagaacctgagggagttcgtgtttaagaatatcgatggctacttcaagatctacagcaagcacaccccaatcaacctggtgcgcgacctgccacagggattctccgccctggagccactggtggatctgcccatcggcatcaacatcacccggtttcagacactgctggccctgcacagatcctacctgacaccaggcgactcctctagcggatggaccgcaggagctgccgcctactatgtgggctatctgcagccccggaccttcctgctgaagtacaacgagaatggcaccatcacagacgcagtggattgcgccctggaccccctgtctgagacaaagtgtacactgaagagctttaccgtggagaagggcatctatcagacaagcaatttcagggtgcagcctaccgagtccatcgtgcgctttcccaatatcacaaacccttgcccttttggcgaggtgttcaacgccaccagattcgccagcgtgtacgcctggaatcggaagagaatctccaactgcgtggccgactattctgtgctgtacaactccgcctctttcagcacctttaagtgctatggcgtgtctcccacaaagctgaatgatctgtgctttaccaacgtgtacgccgatagcttcgtgatcaggggagacgaagtgagacagatcgcaccaggacagacaggaaagatcgcagactacaattataagctgcctgacgatttcaccggctgcgtgatcgcctggaactccaacaatctggattctaaagtgggcggcaactacaattatctgtacaggctgtttcgcaagtccaatctgaagccattcgagcgggacatctccacagagatctaccaggccggctctaccccctgcaatggcgtggagggctttaactgttatttccctctgcagtcttacggcttccagccaacaaacggcccgggccaacagccctacagagtggtggtgctgtcctttgagctgctgcacgcaccagcaacagtgtgcggcccaaagaagtctaccaatctggtgaagaacaagtgcgtgaacttcaacttcaacggactgaccggcacaggcgtgctgaccgagagcaataagaagttcctgccttttcagcagttcggcagggacatcgcagataccacagacgccgtgcgcgaccctcagaccctggagatcctggacatcacaccatgcagcttcggcggcgtgtccgtgatcacaccaggcaccaatacatccaaccaggtggccgtgctgtatcaggacgtgaattgtaccgaggtgcccgatgcaatccacgcagatcagctgacccctacatggcgggtgtactctaccggcagcaacgtgttccagacaagagccggatgcctgatcggagcagagcacgtgaacaatagctatgagtgcgacatccctatcggcgccggcatctgtgccagctaccagacccagacaaactccccatctggagcaggctcccaccatcaccatcaccatcaccatcaccactga

SEQ ID NO: 4299 - protein, 715 aa, Artificial Sequence
  Description of Artificial Sequence: Synthetic polypeptide
MGILPSPGMPALLSLVSLLSVLLMGCVAETGTQCVNLTTRTQLPPAYTNSFTRGVYYPDKVFRSSVLHSTQDLFLPFFSNVTWFHAIHVSGTNGTKRFDNPVLPFNDGVYFASTEKSNIIRGWIFGTTLDSKTQSLLIVNNATNVVIKVCEFQFCNDPFLGVYYHKNNKSWMESEFRVYSSANNCTFEYVSQPFLMDLEGKQGNFKNLREFVFKNIDGYFKIYSKHTPINLVRDLPQGFSALEPLVDLPIGINITRFQTLLALHRSYLTPGDSSSGWTAGAAAYYVGYLQPRTFLLKYNENGTITDAVDCALDPLSETKCTLKSFTVEKGIYQTSNFRVQPTESIVRFPNITNLCPFGEVFNATRFASVYAWNRKRISNCVADYSVLYNSASFSTFKCYGVSPTKLNDLCFTNVYADSFVIRGDEVRQIAPGQTGKIADYNYKLPDDFTGCVIAWNSNNLDSKVGGNYNYLYRLFRKSNLKPFERDISTEIYQAGSTPCNGVEGFNCYFPLQSYGFQPTNGVGYQPYRVVVLSFEELHAPATVCGPKKSTNLVKNKCVNFNFNGLTGTGVLTESNKKFLPFQQFGRDIADTTDAVRDPQTLEILDITPCSFGGVSVITPGTNTSNQVAVLYQDVNCTEVPVAIHADQLTPTWRVYSTGSNVFQTRAGCLIGAEHVNNSYECDIPIGAGICASYQTQTNSPSGAGSHHHHHHHHHH

SEQ ID NO: 4300 - protein, 715 aa, Artificial Sequence
  Description of Artificial Sequence: Synthetic polypeptide
MGILPSPGMPALLSLVSLLSVLLMGCVAETGTQCVNLTTRTQLPPAYTNSFTRGVYYPDKVFRSSVLHSTQDLFLPFFSNVTWFHAKHVSGTNGTKRFDNPVLPFNDGVYFASTEKSNIIRGWIFGTTLDSKTQSLLIVNNATNVVIKVCEFQFCNDPFLGVYYHKNNKSWMESEFRVYSSANNCTFEYVSQPFLMDLEGKQGNFKNLREFVFKNIDGYFKIYSKHTPINLVRDLPQGFSALEPLVDLPIGINITRFQTLLALHRSYLTPGDSSSGWTAGAAAYYVGYLQPRTFLLKYNENGTITDAVDCALDPLSETKCTLKSFTVEKGIYQTSNFRVQPTESIVRFPNITNLCPFGEVFNATRFASVYAWNRKRISNCVADYSVLYNSASFSTFKCYGVSPTKLNDLCFTNVYADSFVIRGDEVRQIAPGQTGKIADYNYKLPDDFTGCVIAWNSNNLDSKVGGNYNYLYRLFRKSNLKPFERDISTEIYQAGSTPCNGVEGFNCYFPLQSYGFQPTNGVGYQPYRVVVLSFELLHAPATVCGPKKSTNLVKNKCVNFNFNGLTGTGVLTESNKKFLPFQQFGRDIADTTDAVRDPQTLEILDITPCSFGGVSVITPGTNTSNQVAVLYQDVNCTEVPVAIHADQLTPTWRVYSTGSNVFQTRAGCLIGAEHVNNSYECDIPIGAGICASYQTQTNSPSGAGSHHHHHHHHHH

SEQ ID NO: 4301 - protein, 715 aa, Artificial Sequence
  Description of Artificial Sequence: Synthetic polypeptide
MGILPSPGMPALLSLVSLLSVLLMGCVAETGTQCVNLTTRTQLPPAYTNSFTRGVYYPDKVFRSSVLHSTQDLFLPFFSNVTWFHAIHVSGTNGTKRFDNPVLPFNDGVYFASTEKSNIIRGWIFGTTLDSKTQSLLIVNNATNVVIKVCEFQFCNDPFLGVYYHKNNKSWMESEFRVYSSANNCTFEYVSQPFLMDLEGKQGNFKNLREFVFKNIDGYFKIYSKHTPINLVRDLPQGFSALEPLVDLPIGINITRFQTLLALHRSYLTPGDSSSGWTAGAAAYYVGYLQPRTFLLKYNENGTITDAVDCALDPLSETKCTLKSFTVEKGIYQTSNFRVQPTESIVRFPNITNLCPFGEVFNATRFASVYAWNRKRISNCVADYSVLYNSASFSTFKCYGVSPTKLNDLCFTNVYADSFVIRGDEVRQIAPGQTGKIADYNYKLPDDFTGCVIAWNSNNLDSKVGGNYNYLYRLFRKSNLKPFERDISTEIYQAGSTPCNGVEGFNCYFPLQSYGFQPTNGVGYQPYRVVVLSFELLHAPATVCGPKKSTNLVKNKCVNFNFNGLTGTGVLTESNKKFLPFQQFGRDIADTTDAVRDPQTLEILDITPCSFGGVSVITPGTNTSNQVAVLYQDVNCTEVPTAIHADQLTPTWRVYSTGSNVFQTRAGCLIGAEHVNNSYECDIPIGAGICASYQTQTNSPSGAGSHHHHHHHHHH

SEQ ID NO: 4302 - protein, 715 aa, Artificial Sequence
  Description of Artificial Sequence: Synthetic polypeptide
MGILPSPGMPALLSLVSLLSVLLMGCVAETGTQCVNLTTRTQLPPAYTNSFTRGVYYPDKVFRSSVLHSTQDLFLPFFSNVTWFHAIHVSGTNGTKRFDNPVLPFNDGVYFASTEKSNIIRGWIFGTTLDSKTQSLLIVNNATFVVIKVCEFQFCNDPFLGVYYHKNNKSWMESEFRVYSSANNCTFEYVSQPFLMDLEGKQGNFKNLREFVFKNIDGYFKIYSKHTPINLVRDLPQGFSALEPLVDLPIGINITRFQTLLALHRSYLTPGDSSSGWTAGAAAYYVGYLQPRTFLLKYNENGTITDAVDCALDPLSETKCTLKSFTVEKGIYQTSNFRVQPTESIVRFPNITNLCPFGEVFNATRFASVYAWNRKRISNCVADYSVLYNSASFSTFKCYGVSPTKLNDLCFTNVYADSFVIRGDEVRQIAPGQTGKIADYNYKLPDDFTGCVIAWNSNNLDSKVGGNYNYLYRLFRKSNLKPFERDISTEIYQAGSTPCNGVEGFNCYFPLQSYGFQPTNGVGYQPYRVVVLSFELLHAPATVCGPKKSTNLVKNKCVNFNFNGLTGTGVLTESNKKFLPFQQFGRDIADTTDAVRDPQTLEILDITPCSFGGVSVITPGTNTSNQVAVLYQDVNCTEVPVAIHADQLTPTWRVYSTGSNVFQTRAGCLIGAEHVNNSYECDIPIGAGICASYQTQTNSPSGAGSHHHHHHHHHH

SEQ ID NO: 4303 - protein, 715 aa, Artificial Sequence
  Description of Artificial Sequence: Synthetic polypeptide
MGILPSPGMPALLSLVSLLSVLLMGCVAETGTQCVNLTTRTQLPPAYTNSFTRGVYYPDKVFRSSVLHSTQDLFLPFFSNVTWFHAEHVSGTNGTKRFDNPVLPFNDGVYFASTEKSNIIRGWIFGTTLDSKTQSLLIVNNATNVVIKVCEFQFCNDPFLGVYYHKNNKSWMESEFRVYSSANNCTFEYHSQPFLMDLEGKQGNFKNLREFVFKNIDGYFKIYSKHTPINLVRDLPQGFSALEPLVDLPIGINITRFQTLLALHRSYLTPGDSSSGETAGAAAYYVGYLQPRTFLLKYNENGTITDAVDCALDPLSETKCTLKSFTVEKGIYQTSNFRVQPTESIVRFPNITNHCPFGEVFNATRFASVYAWNRKRISNCVADYSVLYNSASFSTFKCYGVSPTKLNDLCFTNVYADSFVIRGDEVRQIAPGQTGKIADYNYKLPDDFTGCVIAWNSNNLDSKVGGNYNYLYRLFRKSNLKPFERDISTEIYQAGSTPCNGVEGFNCYFPLQSYGFQPTNGPGQQPYRVVVLSFELLHAPATVCGPKKSTNLVKNKCVNFNFNGLTGTGVLTESNKKFLPFQQFGRDIADTTDAVRDPQTLEILDITPCSFGGVSVITPGTNTSNQVAVLYQDVNCTEVPDAIHADQLTPTWRVYSTGSNVFQTRAGCLIGAEHVNNSYECDIPIGAGICASYQTQTNSPSGAGSHHHHHHHHHH

SEQ ID NO: 4304 - protein, 715 aa, Artificial Sequence
  Description of Artificial Sequence: Synthetic polypeptide
MGILPSPGMPALLSLVSLLSVLLMGCVAETGTQCVNLTTRTQLPPAYTNSFTRGVYYPDKVFRSSVLHSTQDLFLPFFSNVTWFHAIHVSGTNGTKRFDNPVLPFNDGVYFASTEKSNIIRGWIFGTTLDSKTQSLLIVNNATNVVIKVCEFQFCNDPFLGVYYHKNNKSWMESEFRVYSSANNCTFEYVSQPFLMDLEGKQGNFKNLREFVFKNIDGYFKIYSKHTPINLVRDLPQGFSALEPLVDLPIGINITRFQTLLALHRSYLTPGDSSSGWTAGAAAYYVGYLQPRTFLLKYNENGTITDAVDCALDPLSETKCTLKSFTVEKGIYQTSNFRVQPTESIVRFPNITNLCPLGEVFNATRFASSYAWNRKRISNCVADYSVLYNSASFSTFKCYGVSPTKLNDLCFTNVYADRFVIRGDEVRQIAPGQTGKIADYNYKLPDDFTGCVIAWNSNNLDAKVGGNYNYLYRLFRKSNLKPFERFISTEIYQAGSTPTNGVEGFNCYFPLQSYVFQPTNGVTYQPYRVVVLSFELLHAPHTVCGPKKSTNLVKNKCVNFNFNGLTGTGVLTESNKKFLPFQQFGRDIADTTDAVRDPQTLEILDITPCSFGGVSVITPGTNTSNQVAVLYQDVNCTEVPVAIHADQLTPTWRVYSTGSNVFQTRAGCLIGAEHVNNSYECDIPIGAGICASYQTQTNSPSGAGSHHHHHHHHHH

SEQ ID NO: 4305 - protein, 715 aa, Artificial Sequence
  Description of Artificial Sequence: Synthetic polypeptide
MGILPSPGMPALLSLVSLLSVLLMGCVAETGTQCVNLTTRTQLPPAYTNSFTRGVYYPDKVFRSSVLHSTQDLFLPFFSNVTWFHAIHVSGTNGTKRFDNPVLPFNDGVYFASTEKSNIIRGWIFGTTLDSKTQSLLIVNNATNVVIKVCEFQFCNDPFLGVYYHKNNKSWMESEFRVYSSANNCTFEYVSQPFLMDLEGKQGNFKNLREFVFKNIDGYFKIYSKHTPINLVRDLPQGFSALEPLVDLPIGINITRFQTLLALHRSYLTPVDSSSGWTAGAAAYYVGYLQPRTFLLKYNENGTITDAVDCALDPLSETKCTLKSFTVEKGIYQTSNFRVQPTESIVRFPNITNLCPFGEVFNATRFASVYAWNRKRISNCVADYSVLYNSASFSTFKCYGVSPTKLNDLCFTNVYADSFVIRGDEVRQIAPGQTGKIADYNYKLPDDFTGCVIAWNSNNLDSKVGGNYNYLYRLFRKSNLKPFERDISTEIYQAGSTPCNGVEGFNCYFPLQSYGFQPTNGVGYQPYRVVVLSFELLHAPATVCGPKKSTNLVKNKCVNFNFNGLTGTGVLTESNKKFLPFQQFGRDIADTTDAVRDPQTLEILDITPCSFGGVSVITPGTNTSNQVAVLYQDVNCTEVPVAIHADQLTPTWRVYSTGSNVFQTRAGCLIGAEHVNNSYECDIPIGAGICASYQTQTNSPSGAGSHHHHHHHHHH

SEQ ID NO: 4306 - protein, 715 aa, Artificial Sequence
  Description of Artificial Sequence: Synthetic polypeptide
MGILPSPGMPALLSLVSLLSVLLMGCVAETGTQCVNLTTRTQLPPAYTNSFTRGVYYPDKVFRSSVLHSTQDLFLPFFSNVTWFHAIHVSGTNGTKRFDNPVLPFNDGVYFASTEKSNIIRGWIFGTTLDSKTQSLLIVNNATNVVIKVCEFQFCNDPFLGVYYHKNNKSWMESEFRVYSSANNCTFEYVSQPFLMDLEGKQGNFKNLREFVFKNIDGYFKIYSKHTPINLVRDLPQGFSALEPLVDLPIGINITRFQTLLALHRSYLTPGDSSSGWTAGAAAYYVGYLQPRTFLLKYNENGTITDAVDCALDPLSETKCTLKSFTVEKGIYQTSNFRVQPTESIVRFPNITNLCPFGEVFNATRFASVYAWNRKRISNCVADYSVLYNSASFSTFKCYGVSPTKLNDLCFTNVYADSFVIRGDEVRQIAPGQTGKIADYNYKLPDDFTGCVIAWNSNNLDSKVGGNYNYLYRLFRKSNLKPFERDISTEIYQAGSTPCNGVEGFNCDFPLQSYGFQPTNGVGYQPYRVVVLSFELLHAPATVCGPKKSTNLVKNKCVNFNFNGLTGTGVLTESNKKFLPFQQFGRDIADTTDAVRDPQTLEILDITPCSFGGVSVITPGTNTSNQVAVLYQDVNCTEVPVAIHADQLTPTWRVYSTGSNVFQTRAGCLIGAEHVNNSYECDIPIGAGICASYQTQTNSPSGAGSHHHHHHHHHH

SEQ ID NO: 4307 - protein, 715 aa, Artificial Sequence
  Description of Artificial Sequence: Synthetic polypeptide
MGILPSPGMPALLSLVSLLSVLLMGCVAETGTQCVNLTTRTQLPPAYTNSFTRGVYYPDKVFRSSVLHSTQDLFLPFFSNVTWFHAIHVSGTNGTKRFDNPVLPFNDGVYFASTEKSNIIRGWIFGTTLDSKTQSLLIVNNATNVVIKVCEFQFCNDPFLGVYYHKNNKSWMESEFRVYSSANNCTFEYVSQPFLMDLEGKQGNFKNLREFVFKNIDGYFKIYSKHTPINLVRDLPQGFSALEPLVDLPIGINITRFQTLLALHRSYLTPGDSSSGWTAGAAAYYVGYLQPRTFLLKYNENGTITDAVDCALDPLSETKCTLKSFTVEKGIYQTSNFRVQPTESIVRFPNITNLCPFGEVFNATRFASVYAWIRKRISNCVADYSVLYNSASFSTFKCYGVSPTKLNDLCFTNVYADSFVIRGDEVRQIAPGQTGKIADYNYKLPDDFTGCVIAWNSNNLDSKVGGNYNYLYRLFRKSNLKPFERDISTEIYQAGSTPCNGVEGFNCYFPLQSYGFQPTNGVGYQPYRVVVLSFELLHAPATVCGPKKSTNLVKNKCVNFNFNGLTGTGVLTESNKKFLPFQQFGRDIADTTDAVRDPQTLEILDITPCSFGGVSVITPGTNTSNQVAVLYQDVNCTEVPVAIHADQLTPTWRVYSTGSNVFQTRAGCLIGAEHVNNSYECDIPIGAGICASYQTQTNSPSGAGSHHHHHHHHHH

SEQ ID NO: 4308 - protein, 715 aa, Artificial Sequence
  Description of Artificial Sequence: Synthetic polypeptide
MGILPSPGMPALLSLVSLLSVLLMGCVAETGTQCVNLTTRTQLPPAYTNSFTRGVYYPDKVFRSSVLHSTQDLFLPFFSNVTWFHAYHVSGTNGTKRFDNPVLPFNDGVYFASTEKSNIIRGWIFGTTLDSKTQSLLIVNNATNVVIKVCEFQFCNDPFLGVYYHKNNKSWMESEFRVYSSANNCTFEYHSQPFLMDLEGKQGNFKNLREFVFKNIDGYFKIYSKHTPINLVRDLPQGFSALEPLVDLPIGINITRFQTLLALHRSYLTPGDSSSGETAGAAAYYVGYLQPRTFLLKYNENGTITDAVDCALDPLSETKCTLKSFTVEKGIYQTSNFRVQPTESIVRFPNITNLCPFGEVFNATRFASVYAWNRKRISNCVADYSVLYNSASFSTFKCYGVSPTKLNDLCFTNVYADSFVIRGDEVRQIAPGQTGKIADYNYKLPDDFTGCVIAWNSNNLDSKVGGNYNYLYRLFRKSNLKPFERDISTEIYQAGSTPCNGVEGFNCYFPLQSYGFQPTNGPGQQPYRVVVLSFELLHAPATVCGPKKSTNLVKNKCVNFNFNGLTGTGVLTESNKKFLPFQQFGRDIADTTDAVRDPQTLEILDITPCSFGGVSVITPGTNTSNQVAVLYQDVNCTEVPDAIHADQLTPTWRVYSTGSNVFQTRAGCLIGAEHVNNSYECDIPIGAGICASYQTQTNSPSGAGSHHHHHHHHHH

SEQ ID NO: 4309 - protein, 715 aa, Artificial Sequence
  Description of Artificial Sequence: Synthetic polypeptide
MGILPSPGMPALLSLVSLLSVLLMGCVAETGTQCVNLTTRTQLPPAYTNSFTRGVYYPDKVFRSSVLHSTQDLFLPFFSNVTWFHAIHVSGTNGTKRFDNPVLPFNDGVYFASTEKSNIIRGWIFGTTLDSKTQSLLIVNNATNVVIKVCEFQFCNDPFLGVYYHKNNKSWMESEFRVYSSANNCTFEYVSQPFLMDLEGKQGNFKNLREFVFKNIDGYFKIYSKHTPINLVRDLPQGFSALEPLVDLPIGINITRFQTLLALHRSYLTPGDSSSGWTAGAAAYYVGYLQPRTFLLKYNENGTITDAVDCALDPLSETKCTLKSFTVEKGIYQTSNFRVQPTESIVRFPNITNLCPFGEVFNATRFASVYAWNRKRISNCVADYSVLYNSASFSTFKCYGVSPTKLNDLCFTNVYADSFVIRGDEVRQIAPGQTGKIADYNYKLPDDFTGCVIAWNSNNLDSKVGGNYNYLYRLFRKSNLKPFERDISTEIYQAGSTPCNGVEGFNCYFPLQSYGFQPTNGVGYQPYRVVVLSFELLHAPATVCGPKKSTNLVKNKCVNFNFNGLTGTGVLTESNKKFLPFQQFGRDIADTTDAVRDPQTLEILDITPCSYGGVSVITPGTNTSNQVAVLYQDVNCTEVPVAIHADQLTPTWRVYSTGSNVFQTRAGCLIGAEHVNNSYECDIPIGAGICASYQTQTNSPSGAGSHHHHHHHHHH

SEQ ID NO: 4310 - protein, 715 aa, Artificial Sequence
  Description of Artificial Sequence: Synthetic polypeptide
MGILPSPGMPALLSLVSLLSVLLMGCVAETGTQCVNLTTRTQLPPAYTNSFTRGVYYPDKVFRSSVLHSTQDLFLPFFSNVTWFHAIHVSGTNGTKRFDNPVLPFNDGVYFASTEKSNIIRGWIFGTTLDSKTQSLLIVNNATNVVIKVCEFQFCNDPFLGVYYHKNNKSWMESEFRVYSSANNCTFEYVSQPFLMDLEGKQGNFKNLREFVFKNIDGYFKIYSKHTPINLVRDLPQGFSALEPLVDLPIGINITYFQTLLALHRSYLTPGDSSSGWTAGAAAYYVGYLQPRTFLLKYNENGTITDAVDCALDPLSETKCTLKSFTVEKGIYQTSNFRVQPTESIVRFPNITNLCPFGEVFNATRFASVYAWNRKRISNCVADYSVLYNSASFSTFKCYGVSPTKLNDLCFTNVYADSFVIRGDEVRQIAPGQTGKIADYNYKLPDDFTGCVIAWNSNNLDSKVGGNYNYLYRLFRKSNLKPFERDISTEIYQAGSTPCNGVEGFNCYFPLQSYGFQPTNGVGYQPYRVVVLSFELLHAPATVCGPKKSTNLVKNKCVNFNFNGLTGTGVLTESNKKFLPFQQFGRDIADTTDAVRDPQTLEILDITPCSFGGVSVITPGTNTSNQVAVLYQDVNCTEVPVAIHADQLTPTWRVYSTGSNVFQTRAGCLIGAEHVNNSYECDIPIGAGICASYQTQTNSPSGAGSHHHHHHHHHH

SEQ ID NO: 4311 - protein, 715 aa, Artificial Sequence
  Description of Artificial Sequence: Synthetic polypeptide
MGILPSPGMPALLSLVSLLSVLLMGCVAETGTQCVNLTTRTQLPPAYTNSFTRGVYYPDKVFRSSVLHSTQDLFLPFFSNVTWFHAIHVSGTNGTKRFDNPVLPFNDGVYFASTEKSNIIRGWIFGTTLDSKTQSLLIVNNATNVVIKVCEFQFCNDPFLGVYYHKNNKSWMESEFRVYSSANNCTFEYVSQPFLMDLEGKQGNFKNLREFVFKNIDGYFKIYSKHTPINLVRDLPQGFSALEPLVDLPIGINITRFQTLLALHRSYLTPGDSSSGWTAGAAAYYVGYLQPRTFLLKYNENGTITDAVDCALDPLSETKCTLKSFTVEKGIYQTSNFRVQPTESIVRFPNITNLCPFGEVFNATRFASVYAWNRKRISNCVADYSVLYNSASFSTFKCYGVSPTKLNDLCFTNVYADSFVIRGDEVRQIAPGQTGKIADYNYKLPDDFTGCVIAWNSNNLDSKVGGNYNYLYRLFRKSNLKPFERDISTEIYQAGSTPCNGVEGFNCYFPLQSYGFQPTNGTGYQPYRVVVLSFELLHAPATVCGPKKSTNLVKNKCVNFNFNGLTGTGVLTESNKKFLPFQQFGRDIADTTDAVRDPQTLEILDITPCSFGGVSVITPGTNTSNQVAVLYQDVNCTEVPVAIHADQLTPTWRVYSTGSNVFQTRAGCLIGAEHVNNSYECDIPIGAGICASYQTQTNSPSGAGSHHHHHHHHHH

SEQ ID NO: 4312 - protein, 715 aa, Artificial Sequence
  Description of Artificial Sequence: Synthetic polypeptide
MGILPSPGMPALLSLVSLLSVLLMGCVAETGTQCVNLTTRTQLPPAYTNSFTRGVYYPDKVFRSSVLHSTQDLFLPFFSNVTWFHAIHVSGTNGTKRFDNPVLPFNDGVYFASTEKSNIIRGWIFGTTLDSKTQSLLIVNNATNVVIKVCEFQFCNDPFLGVYYHKNNKSWMESEFRVYSSANNCTFEYVSQPFLMDLEGKQGNFKNLREFVFKNIDGYFKIYSKHTPINLVRDLPQGFSALEPLVDLPIGINITRFQTLLALHRSYLTPGDSSSGWTAGAAAYYVGYLQPRTFLLKYNENGTITDAVDCALDPLSETKCTLKSFTVEKGIYQTSNFRVQPTESIVRFPNITNLCPFGEVFNATRFASVYAWNRKRISNCVADYSVLYNSASFSTFKCYGVSPTKLNDLCFTNVYADSFVIRGDEVRQIAPGQTGKIADYNYKLPDDFTGCVIAWNSNNLDSKVGGNYNYLYRLFRKSNLKPFERDISTEIYQAGSTPCNGVEGFNCYFPLQSYGFQPTNGVGYQPYRVVVLSFELLHAPATVCGPKKSTNLVKNKCVNFNFNGLTGTGVLTESNKKFLPFQQFGRDIADTTDAVRDPQTLEILDITPCSFGGVSVITPGTNTSNQVAVLYQDVNCTEVPVAIHADQLTPTWRVYATGSNVFQTRAGCLIGAEHVNNSYECDIPIGAGICASYQTQTNSPSGAGSHHHHHHHHHH

SEQ ID NO: 4313 - protein, 715 aa, Artificial Sequence
  Description of Artificial Sequence: Synthetic polypeptide
MGILPSPGMPALLSLVSLLSVLLMGCVAETGTQCVNLTTRTQLPPAYTNSFTRGVYYPDKVFRSSVLHSTQDLFLPFFSNVTWFHAIHVSGTNGTKRFDNPVLPFNDGVYFASTEKSNIIRGWIFGTTLDSKTQSLLIVNNATNVVIKVCEFQFCNDPFLGVYYHKNNKSWMESEFRVYSSANNCTFEYVSQPFLMDLEGKQGNFKNLREFVFKNIDGYFKIYSKHTPINLVRDLPQGFSALEPTVDLPIGINITRFQTLLALHRSYLTPGDSSSGWTAGAAAYYVGYLQPRTFLLKYNENGTITDAVDCALDPLSETKCTLKSFTVEKGIYQTSNFRVQPTESIVRFPNITNLCPFGEVFNATRFASVYAWNRKRISNCVADYSVLYNSASFSTFKCYGVSPTKLNDLCFTNVYADSFVIRGDEVRQIAPGQTGKIADYNYKLPDDFTGCVIAWNSNNLDSKVGGNYNYLYRLFRKSNLKPFERDISTEIYQAGSTPCNGVEGFNCYFPLQSYGFQPTNGVGYQPYRVVVLSFELLHAPATVCGPKKSTNLVKNKCVNFNFNGLTGTGVLTESNKKFLPFQQFGRDIADTTDAVRDPQTLEILDITPCSFGGVSVITPGTNTSNQVAVLYQDVNCTEVPVAIHADQLTPTWRVYSTGSNVFQTRAGCLIGAEHVNNSYECDIPIGAGICASYQTQTNSPSGAGSHHHHHHHHHH

SEQ ID NO: 4314 - protein, 715 aa, Artificial Sequence
  Description of Artificial Sequence: Synthetic polypeptide
MGILPSPGMPALLSLVSLLSVLLMGCVAETGTQCVNLTTRTQLPPAYTNSFTRGVYYPDKVFRSSVLHSTQDLFLPFFSNVTWFHAIHVSGTNGTKRFDNPVLPFNDGVYFASTEKSNIIRGWIFGTTLDSKTQSLLIVNNATNVVIKVCEFQFCNDPFLGVYYHKNNKSWMESEFRVYSSANNCTFEYVSQPFLMDLEGKQGNFKNLREFVFKNIDGYFKIYSKHTPINLVRDLPQGFSALEPLVDLPIGINITRFQTLLALHRSYLTPGDSSSGWTAGAAAYYVGYLQPRTFLLKYNENGTITDAVDCALDPLSETKCTLKSFTVEKGIYQTSNFRVQPTESIVRFPNITNLCPFGEVFNATRFASVYAWNRKRISNCVADYSVLYNSASFSTFKCYGVSPTKLNDLCFTNVYADSFVIRGDEVRQIAPGQTGKIADYNYKLPDDFTGCVIAWNSNNLDSKVGGNYNYLYRLFRKSNLKPFERDISTEIYQAGSTPCNGVEGFNCYFPLQSYGFQPTNGVGYQPYRVVVLSFELLHAPATVCGPKKSTNLVKNKCVNFNFNGLTGTGVLTESNKKFLPFQQFGRDIADTTDAVRDPQTLEILDITPCSRGGVSVITPGTNTSNQVAVLYQDVNCTEVPVAIHADQLTPTWRVYSTGSNVFQTRAGCLIGAEHVNNSYECDIPIGAGICASYQTQTNSPSGAGSHHHHHHHHHH

SEQ ID NO: 4315 - protein, 715 aa, Artificial Sequence
  Description of Artificial Sequence: Synthetic polypeptide
MGILPSPGMPALLSLVSLLSVLLMGCVAETGTQCVNLTTRTQLPPAYTNSFTRGVYYPDKVFRSSVLHSTQDLFLPFFSNVTWFHAIHVSGTNGTKRFDNPVLPFNDGVYFASTEKSNIIRGWIFGTTLDSKTQSLLIVNNATNVVIKVCEFQFCNDPFLGVYYHKNNKSWMESEFRVYSSANNCTFEYVSQPFLMDLEGKQGNFKNLREFVFKNIDGYFKIYSKHTPINLVRDLPQGFSALEPLVDLPIGINITRFQTLLALGRSYLTPGDSSSGWTAGAAAYYVGYLQPRTFLLKYNENGTITDAVDCALDPLSETKCTLKSFTVEKGIYQTSNFRVQPTESIVRFPNITNLCPFGEVFNATRFASVYAWNRKRISNCVADYSVLYNSASFSTFKCYGVSPTKLNDLCFTNVYADSFVIRGDEVRQIAPGQTGKIADYNYKLPDDFTGCVIAWNSNNLDSKVGGNYNYLYRLFRKSNLKPFERDISTEIYQAGSTPCNGVEGFNCYFPLQSYGFQPTNGVGYQPYRVVVLSFELLHAPATVCGPKKSTNLVKNKCVNFNFNGLTGTGVLTESNKKFLPFQQFGRDIADTTDAVRDPQTLEILDITPCSFGGVSVITPGTNTSNQVAVLYQDVNCTEVPVAIHADQLTPTWRVYSTGSNVFQTRAGCLIGAEHVNNSYECDIPIGAGICASYQTQTNSPSGAGSHHHHHHHHHH

SEQ ID NO: 4316 - protein, 715 aa, Artificial Sequence
  Description of Artificial Sequence: Synthetic polypeptide
MGILPSPGMPALLSLVSLLSVLLMGCVAETGTQCVNLTTRTQLPPAYTNSFTRGVYYPDKVFRSSVLHSTQDLFLPFFSNVTWFHAIHVSGTNGTKRFDNPVLPFNDGVYFASTEKSNIIRGWIFGTTLDSKTQSLLIVNNATNVVIKVCEFQFCNDPFLGVYYHKNNKSWMESEFRVYSSANNCTFEYVSQPFLMDLEGKQGNFKNLREFVFKNIDGYFKIYSKHTPINLVRDLPQGFSALEPLVDLPIGINITRFQTLLALHRSYLTPGDSSSGWTAGAAAYYVGYLQPRTFLLKYNENGTITDAVDCALDPLSETKCTLKSFTVEKGIYQTSNFRVQPTESIVRFPNITNLCPFGEVFNATRFASVYAWNRKRISNCVADYSVLYNSASFSTFKCYGVSPTKLNDLCFTNVYADSFVIRGDEVRQIAPGQTGKIADYNYKLPDDFTGCVIAWNSNNLDSKVGGNYNYLYRLFRKSNLKPFERDISTENYQAGSTPCNGVEGFNCYFPLQSYGFQPTNGVGYQPYRVVVLSFELLHAPATVCGPKKSTNLVKNKCVNFNFNGLTGTGVLTESNKKFLPFQQFGRDIADTTDAVRDPQTLEILDITPCSFGGVSVITPGTNTSNQVAVLYQDVNCTEVPVAIHADQLTPTWRVYSTGSNVFQTRAGCLIGAEHVNNSYECDIPIGAGICASYQTQTNSPSGAGSHHHHHHHHHH

SEQ ID NO: 4317 - protein, 715 aa, Artificial Sequence
  Description of Artificial Sequence: Synthetic polypeptide
MGILPSPGMPALLSLVSLLSVLLMGCVAETGTQCVNLTTRTQLPPAYTNSFTRGVYYPDKVFRSSVLHSTQDLFLPFFSNVTWFHAIHVSGTNGTKRFDNPVLPFNDGVYFASTEKSNIIRGWIFGTTLDSKTQSLLIVNNATNVVIKVCEFQFCNDPFLGVYYHKNNKSWMESEFRVYSSANNCTFEYVSQPFLMDLEGKQGNFKNLREFVFKNIDGYFYIYSKHTPINLVRDLPQGFSALEPLVDLPIGINITRFQTLLALHRSYLTPGDSSSGWTAGAAAYYVGYLQPRTFLLKYNENGTITDAVDCALDPLSETKCTLKSFTVEKGIYQTSNFRVQPTESIVRFPNITNLCPFGEVFNATRFASVYAWNRKRISNCVADYSVLYNSASFSTFKCYGVSPTKLNDLCFTNVYADSFVIRGDEVRQIAPGQTGKIADYNYKLPDDFTGCVIAWNSNNLDSKVGGNYNYLYRLFRKSNLKPFERDISTEIYQAGSTPCNGVEGFNCYFPLQSYGFQPTNGVGYQPYRVVVLSFELLHAPATVCGPKKSTNLVKNKCVNFNFNGLTGTGVLTESNKKFLPFQQFGRDIADTTDAVRDPQTLEILDITPCSFGGVSVITPGTNTSNQVAVLYQDVNCTEVPVAIHADQLTPTWRVYSTGSNVFQTRAGCLIGAEHVNNSYECDIPIGAGICASYQTQTNSPSGAGSHHHHHHHHHH

SEQ ID NO: 4318 - protein, 715 aa, Artificial Sequence
  Description of Artificial Sequence: Synthetic polypeptide
MGILPSPGMPALLSLVSLLSVLLMGCVAETGTQCVNLTTRTQLPPAYTNSFTRGVYYPDKVFRSSVLHSTQDLFLPFFSNVTWFHAIHVSGTNGTKRFDNPVLPFNDGVYFASTEKSNIIRGWIFGTTLDSKTQSLLIVNNATNVVIKVCEFQFCNDPFLGVYYHKNNKSWMESEFRVYSSANNCTFEYVSQPFLMDLEGKQGNFKNLREFVFKNIDGYFKIYSKHTPINLVRDLPQGFSALEPLVDLPIGINITRFQTLLALHRSYLTPGDSSSGWTAGAAAYYVGYLQPRTFLLKYNENGTITDAVDCALDPLSETKCTLKSFTVEKGIYQTSNFRVQPTESIVRFPNITNLCPFGEVFNATRFASVYAWNRKRISNCVADYSVLYNSASFSTFKCYGVSPTKLNDLCFTNVYADSFVIRGDEVRQIAPGQTGKIADYNYKLPDDFTGCVIAWNSNNLDSKVGGNYNYLYRLFRKSNLKPFERDISTEIYQAGSTPCNGVEGFNCYFPLQSYTFQPTNGVGYQPYRVVVLSFELLHAPATVCGPKKSTNLVKNKCVNFNFNGLTGTGVLTESNKKFLPFQQFGRDIADTTDAVRDPQTLEILDITPCSFGGVSVITPGTNTSNQVAVLYQDVNCTEVPVAIHADQLTPTWRVYSTGSNVFQTRAGCLIGAEHVNNSYECDIPIGAGICASYQTQTNSPSGAGSHHHHHHHHHH

SEQ ID NO: 4319 - protein, 715 aa, Artificial Sequence
  Description of Artificial Sequence: Synthetic polypeptide
MGILPSPGMPALLSLVSLLSVLLMGCVAETGTQCVNLTTRTQLPPAYTNSFTRGVYYPDKVFRSSVLHSTQDLFLPFFSNVTWFHAIHVSGTNGTKRFDNPVLPFNDGVYFASTEKSNIIRGWIFGTTLDSKTQSLLIVNNATNVVIKVCEFQFCNDPFLGVYYHKNNKSWMESEFRVYSSANNCTFEYVSQPFLMDLEGKQGNFKNLREFVFKNIDGYFKIYSKHTPINLVRDLPQGFSALEPLVDLPIGINITRFQTLLALHRSYLTPGDSSSGWTAGAAAYYVGYLQPRTFLLKYNENGTITDAVDCALDPLSETKCTLKSFTVEKGIYQTSNFRVQPTESIVRFPNITNLCPFGEVFNATRFASVYAWNRKRISNCVADYSVLYNSASFSTFKCYGVSPTKLNDLCFTNVYADSFVIRGDEVRQIAPGQTGKIADYNYKLPDDFTGCVIAWNSNNLDSKVGGNYNYLYRLFRKSNLKPFERDISTEIYQAGSTPCNGVEGFNCYFPLQSYGFQPTNGVGYQPYRVVVLSFELQHAPATVCGPKKSTNLVKNKCVNFNFNGLTGTGVLTESNKKFLPFQQFGRDIADTTDAVRDPQTLEILDITPCSFGGVSVITPGTNTSNQVAVLYQDVNCTEVPVAIHADQLTPTWRVYSTGSNVFQTRAGCLIGAEHVNNSYECDIPIGAGICASYQTQTNSPSGAGSHHHHHHHHHH

SEQ ID NO: 4320 - protein, 715 aa, Artificial Sequence
  Description of Artificial Sequence: Synthetic polypeptide
MGILPSPGMPALLSLVSLLSVLLMGCVAETGTQCVNLTTRTQLPPAYTNSFTRGVYYPDKVFRSSVLHSTQDLFLPFFSNVTWFHAIHVSGTNGTKRFDNPVLPFNDGVYFASTEKSNIIRGWIFGTTLDSKTQSLLIVNNATNVVIKVCEFQFCNDPFLGVYYHKNNKSWMESEFRVYSSANNCTFEYVSQPFLMDLEGKQGNFKNLREFVFKNIDGYFKIYSKHTPINLVRDLPQGFSALEPLVDLPIGINITRFQTLLALHRSYLTPGDSSSGWTAGAAAYYVGYLQPRTFLLKYNENGTITDAVDCALDPLSETKCTLKSFTVEKGIYQTSNFRVQPTESIVRFPNITNLCPFGEVFNATRFASVYAWNRKRISNCVADYSVLYNSASFSTFKCYGVSPTKLNDLCFTNVYADSFVIRGDEVRQIAPGQTGKIADYNYKLPDDFTGCVIAWNSNNLDSKVGGNYNYLYRLFRKSNLKPFERDISTEIYQAGSTPCNGVEGFNCYFPLQSYGFQPTNGVGYQPYRVVVLSFELLHAPATVCGPKKSTNLVKNKCVNFNFNGLTGTGVLTESNKKFLPFQQFLRDIADTTDAVRDPQTLEILDITPCSFGGVSVITPGTNTSNQVAVLYQDVNCTEVPVAIHADQLTPTWRVYSTGSNVFQTRAGCLIGAEHVNNSYECDIPIGAGICASYQTQTNSPSGAGSHHHHHHHHHH

SEQ ID NO: 4321 - protein, 715 aa, Artificial Sequence
  Description of Artificial Sequence: Synthetic polypeptide
MGILPSPGMPALLSLVSLLSVLLMGCVAETGTQCVNLTTRTQLPPAYTNSFTRGVYYPDKVFRSSVLHSTQDLFLPFFSNVTWFHAIHVSGTNGTKRFDNPVLPFNDGVYFASTEKSNIIRGWIFGTTLDSKTQSLLIVNNATNVVIKVCEFQFCNDPFLGVYYHKNNKSWMESEFRVYSSANNCTFEYVSQPFLMDLEGKQGNFKNLREFVFKNIDGYFKIYSKHTPINLVRDLPQGFSALEPLVDLPIGINITRFQTLLALHRSYLTPGDSSSGWTAGAAAYYVGYLQPRTFLLKYNENGTITDAVDCALDPLSETKCTLKSFTVEKGIYQTSNFRVQPTESIVRFPNITNLCPFGEVFNATRFASVYAWNRKRISNCVADYSVLYNSASFSTFKCYGVSPTKLNDLCFTNVYADSFVIRGDEVRQIAPGQTGKIADYNYKLPDDFTGCVIAWNSNNLDSKVGGNYNYLYRLFRKSNLKPFERDISTEIYQAGSTPCNGVEGFNCYTPLQSYGFQPTNGVGYQPYRVVVLSFELLHAPATVCGPKKSTNLVKNKCVNFNFNGLTGTGVLTESNKKFLPFQQFGRDIADTTDAVRDPQTLEILDITPCSFGGVSVITPGTNTSNQVAVLYQDVNCTEVPVAIHADQLTPTWRVYSTGSNVFQTRAGCLIGAEHVNNSYECDIPIGAGICASYQTQTNSPSGAGSHHHHHHHHHH

SEQ ID NO: 4322 - protein, 715 aa, Artificial Sequence
  Description of Artificial Sequence: Synthetic polypeptide
MGILPSPGMPALLSLVSLLSVLLMGCVAETGTQCVNLTTRTQLPPAYTNSFTRGVYYPDKVFRSSVLHSTQDLFLPFFSNVTWFHAIHVSGTNGTKRFDNPVLPFNDGVYFASTEKSNIIRGWIFGTTLDSKTQSLLIVNNATNVVIKVCEFQFCNDPFLGVYYHKNNKSWMESEFRVYSSANNCTFEYVSQPFLMDLEGKQGNFKNLREFVFKNIDGYFKIYSKHTPINLVRDLPQGFSALEPLVDLPIGINITRFQTLLALHRSYLTPGDSSSGWTAGAAAYYVGYLQPRTFLLKYNENGTITDAVDCALDPLSETKCTLKSFTVEKGIYQTSNFRVQPTESIVRFPNITNRCPFGEVFNATRFASVYAWNRKRISNCVADYSVLYNSASFSTFKCYGVSPTKLNDLCFTNVYADSFVIRGDEVRQIAPGQTGKIADYNYKLPDDFTGCVIAWNSNNLDSKVGGNYNYLYRLFRKSNLKPFERDISTEIYQAGSTPCNGVEGFNCYFPLQSYGFQPTNGVGYQPYRVVVLSFELLHAPATVCGPKKSTNLVKNKCVNFNFNGLTGTGVLTESNKKFLPFQQFGRDIADTTDAVRDPQTLEILDITPCSFGGVSVITPGTNTSNQVAVLYQDVNCTEVPVAIHADQLTPTWRVYSTGSNVFQTRAGCLIGAEHVNNSYECDIPIGAGICASYQTQTNSPSGAGSHHHHHHHHHH

SEQ ID NO: 4323 - protein, 715 aa, Artificial Sequence
  Description of Artificial Sequence: Synthetic polypeptide
MGILPSPGMPALLSLVSLLSVLLMGCVAETGTQCVNLTTRTQLPPAYTNSFTRGVYYPDKVFRSSVLHSTQDLFLPFFSNVTWFHAGHVSGTNGTKRFDNPVLPFNDGVYFASTEKSNIIRGWIFGTTLDSKTQSLLIVNNATNVVIKVCEFQFCNDPFLGVYYHKNNKSWMESEFRVYSSANNCTFEYVSQPFLMDLEGKQGNFKNLREFVFKNIDGYFKIYSKHTPINLVRDLPQGFSALEPLVDLPIGINITRFQTLLALHRSYLTPGDSSSGWTAGAAAYYVGYLQPRTFLLKYNENGTITDAVDCALDPLSETKCTLKSFTVEKGIYQTSNFRVQPTESIVRFPNITNLCPFGEVFNATRFASVYAWNRKRISNCVADYSVLYNSASFSTFKCYGVSPTKLNDLCFTNVYADSFVIRGDEVRQIAPGQTGKIADYNYKLPDDFTGCVIAWNSNNLDSKVGGNYNYLYRLFRKSNLKPFERDISTEIYQAGSTPCNGVEGFNCYFPLQSYGFQPTNGVGYQPYRVVVLSFELLHAPATVCGPKKSTNLVKNKCVNFNFNGLTGTGVLTESNKKFLPFQQFGRDIADTTDAVRDPQTLEILDITPCSFGGVSVITPGTNTSNQVAVLYQDVNCTEVPVAIHADQLTPTWRVYSTGSNVFQTRAGCLIGAEHVNNSYECDIPIGAGICASYQTQTNSPSGAGSHHHHHHHHHH

SEQ ID NO: 4324 - protein, 715 aa, Artificial Sequence
  Description of Artificial Sequence: Synthetic polypeptide
MGILPSPGMPALLSLVSLLSVLLMGCVAETGTQCVNLTTRTQLPPAYTNSFTRGVYYPDKVFRSSVLHSTQDLFLPFFSNVTWFHAIHVSGTNGTKRFDNPVLPFNDGVYFASTEKSNIIRGWIFGTTLDSKTQSLLIVNNATNVVIKVCEFQFCNDPFLGVYYHKNNKSWMESEFRVYSSANNCTFEYVSQPFLMDLEGKQGNFKNLREFVFKNIDGYFKIYSKHTPINLVRDLPQGFSALEPLVDLPIGINITRFQTLLALHRSYLTPGDSSSGWTAGAAAYYVGYLQPRTFLLKYNENGTITDAVDCALDPLSETKCTLKSFTVEKGIYQTSNFRVQPTESIVRFPNITNLCPFGEVFNATRFASVYAWNRKRISNCVADYSVLYNSASFSTFKCYGVSPTKLNDLCFTNVYADSFVIRGDEVRQIAPGQTGKIADYNYKLPDDFTGCVIAWNSNNLDSKVGGNYNYLYRLFRKSNLKPFERDISTEIYQAGSTPCNGVEGFNCYFPLQSYGFQPTNGVNYQPYRVVVLSFELLHAPATVCGPKKSTNLVKNKCVNFNFNGLTGTGVLTESNKKFLPFQQFGRDIADTTDAVRDPQTLEILDITPCSFGGVSVITPGTNTSNQVAVLYQDVNCTEVPVAIHADQLTPTWRVYSTGSNVFQTRAGCLIGAEHVNNSYECDIPIGAGICASYQTQTNSPSGAGSHHHHHHHHHH

SEQ ID NO: 4325 - protein, 715 aa, Artificial Sequence
  Description of Artificial Sequence: Synthetic polypeptide
MGILPSPGMPALLSLVSLLSVLLMGCVAETGTQCVNLTTRTQLPPAYTNSFTRGVYYPDKVFRSSVLHSTQDLFLPFFSNVTWFHAIHVSGTNGTKRFDNPVLPFNDGVYFASTEKSNIIRGWIFGTTLDSKTQSLLIVNNATNVVIKVCEFQFCNDPFLGVYYHKNNKSWMESEFRVYSSANNCTFEYVSQPFLMDLEGKQGNFKNLREFVFKNIDGYFKIYSKHTPINLVRDLPQGFSALEPLVDLPIGINITRFQTLLALHRSYLTPGDSSSGWTAGAAAYYVGYLQPRTFLLKYNENGTITDAVDCALDPLSETKCTLKSFTVEKGIYQTSNFRVQPTESIVRFPNITNLCPFGEVFNATRFASVYAWNRKRISNCVADYSVLYNSASFSTFKCYGVSPTKLNDLCFTNVYADSFVIRGDEVRQIAPGQTGKIADYNYKLPDDFTGCVIAWNSNNLDSKVGGNYNYLYRLFRKSNLKPFERDISTEIYQAGSTPCNGVEGFNCYFPLQSYGFQPTNGVGYQPYRVVVLSFELTHAPATVCGPKKSTNLVKNKCVNFNFNGLTGTGVLTESNKKFLPFQQFGRDIADTTDAVRDPQTLEILDITPCSFGGVSVITPGTNTSNQVAVLYQDVNCTEVPVAIHADQLTPTWRVYSTGSNVFQTRAGCLIGAEHVNNSYECDIPIGAGICASYQTQTNSPSGAGSHHHHHHHHHH

SEQ ID NO: 4326 - protein, 715 aa, Artificial Sequence
  Description of Artificial Sequence: Synthetic polypeptide
MGILPSPGMPALLSLVSLLSVLLMGCVAETGTQCVNLTTRTQLPPAYTNSFTRGVYYPDKVFRSSVLHSTQDLFLPFFSNVTWFHAIHVSGTNGTKRFDNPVLPFNDGVYFASTEKSNIIRGWIFGTTLDSKTQSLLIVNNATNVVIKVCEFQFCNDPFLGVYYHKNNKSWMESEFRVYSSANNCTFEYVSQPFLMDLEGKQGNFKNLREFVFKNIDGYFKIYSKHTPINLVRDLPQGFSALEPLVDLPIGINITRFQTLLALHRSYLTPGDSSSGWTAGAAAYYVGYLQPRTFLLKYNENGTITDAVDCALDPLSETKCTLKSFTVEKGIYQTSNFRVQPTESIVRFPNITNLCPFGEVFNATRFASVYAWNRKRISNCVADYSVLYNSASFSTFKCYGVSPTKLNDLCFTNVYADSFVIRGDEVRQIAPGQTGKIADYNYKLPDDFTGCVIAWNSNNLDSKVGGNYNYLYRLFRKSNLKPFERDISTEIYQAGSTPCNGVEGFNCYFPLQSYGFQPTNGVGYQPYRVVVLSFELLHAPATVCGPKKSTNLVKNKCVNFNFNGLTGTGVLTESNKKFLPFQQFGRDIADTTDAVRDPQTLEILDITPCSSGGVSVITPGTNTSNQVAVLYQDVNCTEVPVAIHADQLTPTWRVYSTGSNVFQTRAGCLIGAEHVNNSYECDIPIGAGICASYQTQTNSPSGAGSHHHHHHHHHH

SEQ ID NO: 4327 - protein, 715 aa, Artificial Sequence
  Description of Artificial Sequence: Synthetic polypeptide
MGILPSPGMPALLSLVSLLSVLLMGCVAETGTQCVNLTTRTQLPPAYTNSFTRGVYYPDKVFRSSVLHSTQDLFLPFFSNVTWFHAKHVSGTNGTKRFDNPVLPFNDGVYFASTEKSNIIRGWIFGTTLDSKTQSLLIVNNATNVVIKVCEFQFCNDPFLGVYYHKNNKSWMESEFRVYSSANNCTFEYVSQPFLMDLEGKQGNFKNLREFVFKNIDGYFKIYSKHTPINLVRDLPQGFSALEPLVDLPIGINITRFQTLLALHRSYLTPGDSSSGETAGAAAYYVGYLQPRTFLLKYNENGTITDAVDCALDPLSETKCTLKSFTVEKGIYQTSNFRVQPTESIVRFPNITNKCPFGEVFNATRFASVYAWNRKRISNCVADYSVLYNSASFSTFKCYGVSPTKLNDLCFTNVYADSFVIRGDEVRQIAPGQTGKIADYNYKLPDDFTGCVIAWNSNNLDSKVGGNYNYLYRLFRKSNLKPFERDISTEIYQAGSTPCNGVEGFNCYFPLQSYGFQPTNGPGQQPYRVVVLSFELLHAPATVCGPKKSTNLVKNKCVNFNFNGLTGTGVLTESNKKFLPFQQFGRDIADTTDAVRDPQTLEILDITPCSFGGVSVITPGTNTSNQVAVLYQDVNCTEVPDAIHADQLTPTWRVYSTGSNVFQTRAGCLIGAEHVNNSYECDIPIGAGICASYQTQTNSPSGAGSHHHHHHHHHH

SEQ ID NO: 4328 - protein, 715 aa, Artificial Sequence
  Description of Artificial Sequence: Synthetic polypeptide
MGILPSPGMPALLSLVSLLSVLLMGCVAETGTQCVNLTTRTQLPPAYTNSFTRGVYYPDKVFRSSVLHSTQDLFLPFFSNVTWFHAIHVSGTNGTKRFDNPVLPFNDGVYFASTEKSNIIRGWIFGTTLDSKTQSLLIVNNATNVVIKVCEFQFCNDPFLGVYYHKNNKSWMESEFRVYSSANNCTFEYVSQPFLMDLEGKQGNFKNLREFVFKNIDGYFKIYSKHTPINLVRDLPQGFSALEPLVDLPIGINITRFQTLLALHRSYLTPGDSSSGWTAGAAAYYVGYLQPRTFLLKYNENGTITDAVDCALDPLSETKCTLKSFTVEKGIYQTSNFRVQPTESIVRFPNITNLCPFGEVFNATRFASVYAWNRKRISNCVADYSVLYNSASFSTFKCYGVSPTKLNDLCFTNVYADSFVIRGDEVRQIAPGQTGKIADYNYKLPDDFTGCVIAWNSNNLDSKVGGNYNYLYRLFRKSNLKPFERDISTEIYQAGSTPCNGVEGFNCYFPLQSYGFQPTNGVGYQPYRVVVLSFELLHAPATVCGPKKSTNLVKNKCVNFNFNGLTGTGVLTESNKKFLPFQQFGRDIADTTDAVRDPQTLEILDITPCSFGGVSVITPGTNTSNQVAVLYQDVNCTEVPAAIHADQLTPTWRVYSTGSNVFQTRAGCLIGAEHVNNSYECDIPIGAGICASYQTQTNSPSGAGSHHHHHHHHHH

SEQ ID NO: 4329 - protein, 715 aa, Artificial Sequence
  Description of Artificial Sequence: Synthetic polypeptide
MGILPSPGMPALLSLVSLLSVLLMGCVAETGTQCVNLTTRTQLPPAYTNSFTRGVYYPDKVFRSSVLHSTQDLFLPFFSNVTWFHAIHVSGTNGTKRFDNPVLPFNDGVYFASTEKSNIIRGWIFGTTLDSKTDSLLIVNNATNVVIKVCEFQFCNDPFLGVYYHKNNKSWMESEFRVYSSANNCTFEYVSQPFLMDLEGKQGNFKNLREFVFKNIDGYFKIYSKHTPINLVRDLPQGFSALEPLVDLPIGINITRFQTLLALHRSYLTPGDSSSGWTAGAAAYYVGYLQPRTFLLKYNENGTITDAVDCALDPLSETKCTLKSFTVEKGIYQTSNFRVQPTESIVRFPNITNLCPFGEVFNATRFASVYAWNRKRISNCVADYSVLYNSASFSTFKCYGVSPTKLNDLCFTNVYADSFVIRGDEVRQIAPGQTGKIADYNYKLPDDFTGCVIAWNSNNLDSKVGGNYNYLYRLFRKSNLKPFERDISTEIYQAGSTPCNGVEGFNCYFPLQSYGFQPTNGVGYQPYRVVVLSFELLHAPATVCGPKKSTNLVKNKCVNFNFNGLTGTGVLTESNKKFLPFQQFGRDIADTTDAVRDPQTLEILDITPCSFGGVSVITPGTNTSNQVAVLYQDVNCTEVPVAIHADQLTPTWRVYSTGSNVFQTRAGCLIGAEHVNNSYECDIPIGAGICASYQTQTNSPSGAGSHHHHHHHHHH

SEQ ID NO: 4330 - protein, 715 aa, Artificial Sequence
  Description of Artificial Sequence: Synthetic polypeptide
MGILPSPGMPALLSLVSLLSVLLMGCVAETGTQCVNLTTRTQLPPAYTNSFTRGVYYPDKVFRSSVLHSTQDLFLPFFSNVTWFHAIHVSGTNGTKRFDNPVLPFNDGVYFASTEKSNIIRGWIFGTTLDSKTQSLLIVNNATNVVIKVCEFQFCNDPFLGVYYHKNNKSWMESEFRVYSSANNCTFEYVSQPFLMDLEGKQGNFKNLREFVFKNIDGYFKIYSKHTPINLVRDLPQGFSALEPLVDLPIGINITRFQTLLALHRSYLTPGDSSSGWTAGAAAYYVGYLQPRTFLLKYNENGTITDAVDCALDPLSETKCTLKSFTVEKGIYQTSNFRVQPTESIVRFPNITNLCPFGEVFNATRFASVYAWNRKRISNCVADYSVLYNSASFSTFKCYGVSPTKLNDLCFTNVYADSFVIRGDEVRQIAPGQTGKIADYNYKLPDDFTGCVIAWNSNNLDSKVGGNYNYLYRLFRKSNLKPFERDISTEIYQAGSTPCNGVEGFNCKFPLQSYGFQPTNGVGYQPYRVVVLSFELLHAPATVCGPKKSTNLVKNKCVNFNFNGLTGTGVLTESNKKFLPFQQFGRDIADTTDAVRDPQTLEILDITPCSFGGVSVITPGTNTSNQVAVLYQDVNCTEVPVAIHADQLTPTWRVYSTGSNVFQTRAGCLIGAEHVNNSYECDIPIGAGICASYQTQTNSPSGAGSHHHHHHHHHH

SEQ ID NO: 4331 - protein, 715 aa, Artificial Sequence
  Description of Artificial Sequence: Synthetic polypeptide
MGILPSPGMPALLSLVSLLSVLLMGCVAETGTQCVNLTTRTQLPPAYTNSFTRGVYYPDKVFRSSVLHSTQDLFLPFFSNVTWFHAIHVSGTNGTKRFDNPVLPFNDGVYFASTEKSNIIRGWIFGTTLDSKTQSLLIVNNATNVVIKVCEFQFCNDPFLGVYYHKNNKSWMESEFRVYSSANNCTFEYVSQPFLMDLEGKQGNFKNLREFVFKNIDGYFKIYSKHTPINLVRDLPQGFSALEPLVDLPIGINITRFQTLLALHRSYLTPGDSSSGWTAGAAAYYVGYLQPRTFLLKYNENGTITDAVDCALDPLSETKCTLKSFTVEKGIYQTSNFRVQPTESIVRFPNITNLCPLGEVFNATRFASSYAWNRKRISNCVADYSVLYNSASFSTFKCYGVSPTKLNDLCFTNVYADRFVIRGDEVRQIAPGQTGKIADYNYKLPDDFTGCVIAWNSNNLDAKVGGNYNYLYRLFRKSNLKPFERFISTEIYQAGSTPANGVEGFNCYFPLQSYVFQPTNGVTYQPYRVVVLSFELLHAPHTVCGPKKSTNLVKNKCVNFNFNGLTGTGVLTESNKKFLPFQQFGRDIADTTDAVRDPQTLEILDITPCSFGGVSVITPGTNTSNQVAVLYQDVNCTEVPVAIHADQLTPTWRVYSTGSNVFQTRAGCLIGAEHVNNSYECDIPIGAGICASYQTQTNSPSGAGSHHHHHHHHHH

SEQ ID NO: 4332 - protein, 715 aa, Artificial Sequence
  Description of Artificial Sequence: Synthetic polypeptide
MGILPSPGMPALLSLVSLLSVLLMGCVAETGTQCVNLTTRTQLPPAYTNSFTRGVYYPDKVFRSSVLHSTQDLFLPFFSNVTWFHAIHVSGTNGTKRFDNPVLPFNDGVYFASTEKSNIIRGWIFGTTLDSKTQSLLIVNNATNVVIKVCEFQFCNDPFLGVYYHKNNKSWMESEFRVYSSANNCTFEYVSQPFLMDLEGKQGNFKNLREFVFKNIDGYFKIYSKHTPINLVRDLPQGFSALECLVDLPIGINITRFQTLLALHRSYLTPGDSSSGWTAGAAAYYVGYLQPRTFLLKYNENGTITDAVDCALDPLSETKCTLKSFTVEKGIYQTSNFRVQPTESIVRFPNITNLCPFGEVFNATRFASVYAWNRKRISNCVADYSVLYNSASFSTFKCYGVSPTKLNDLCFTNVYADSFVIRGDEVRQIAPGQTGKIADYNYKLPDDFTGCVIAWNSNNLDSKVGGNYNYLYRLFRKSNLKPFERDISTEIYQAGSTPCNGVEGFNCYFPLQSYGFQPTNGVGYQPYRVVVLSFELLHAPATVCGPKKSTNLVKNKCVNFNFNGLTGTGVLTESNKKFLPFQQFGRDIADTTDAVRDPQTLEILDITPCSFGGVSVITPGTNTSNQVAVLYQDVNCTEVPVAIHADQLTPTWRVYSTGSNVFQTRAGCLIGAEHVNNSYECDIPIGAGICASYQTQTNSPSGAGSHHHHHHHHHH

SEQ ID NO: 4333 - protein, 715 aa, Artificial Sequence
  Description of Artificial Sequence: Synthetic polypeptide
MGILPSPGMPALLSLVSLLSVLLMGCVAETGTQCVNLTTRTQLPPAYTNSFTRGVYYPDKVFRSSVLHSTQDLFLPFFSNVTWFHAYHVSGTNGTKRFDNPVLPFNDGVYFASTEKSNIIRGWIFGTTLDSKTQSLLIVNNATNVVIKVCEFQFCNDPFLGVYYHKNNKSWMESEFRVYSSANNCTFEYHSQPFLMDLEGKQGNFKNLREFVFKNIDGYFKIYSKHTPINLVRDLPQGFSALEPLVDLPIGINITRFQTLLALHRSYLTPGDSSSGETAGAAAYYVGYLQPRTFLLKYNENGTITDAVDCALDPLSETKCTLKSFTVEKGIYQTSNFRVQPTESIVRFPNITNHCPFGEVFNATRFASVYAWNRKRISNCVADYSVLYNSASFSTFKCYGVSPTKLNDLCFTNVYADSFVIRGDEVRQIAPGQTGKIADYNYKLPDDFTGCVIAWNSNNLDSKVGGNYNYLYRLFRKSNLKPFERDISTEIYQAGSTPCNGVEGFNCYFPLQSYGFQPTNGVGQQPYRVVVLSFELLHAPATVCGPKKSTNLVKNKCVNFNFNGLTGTGVLTESNKKFLPFQQFGRDIADTTDAVRDPQTLEILDITPCSFGGVSVITPGTNTSNQVAVLYQDVNCTEVPDAIHADQLTPTWRVYSTGSNVFQTRAGCLIGAEHVNNSYECDIPIGAGICASYQTQTNSPSGAGSHHHHHHHHHH

SEQ ID NO: 4334 - protein, 715 aa, Artificial Sequence
  Description of Artificial Sequence: Synthetic polypeptide
MGILPSPGMPALLSLVSLLSVLLMGCVAETGTQCVNLTTRTQLPPAYTNSFTRGVYYPDKVFRSSVLHSTQDLFLPFFSNVTWFHAIHVSGTNGTKRFDNPVLPFNDGVYFASTEKSNIIRGWIFGTTLDSKTQSLLIVNNETNVVIKVCEFQFCNDPFLGVYYHKNNKSWMESEFRVYSSANNCTFEYVSQPFLMDLEGKQGNFKNLREFVFKNIDGYFKIYSKHTPINLVRDLPQGFSALEPLVDLPIGINITRFQTLLALHRSYLTPGDSSSGWTAGAAAYYVGYLQPRTFLLKYNENGTITDAVDCALDPLSETKCTLKSFTVEKGIYQTSNFRVQPTESIVRFPNITNLCPFGEVFNATRFASVYAWNRKRISNCVADYSVLYNSASFSTFKCYGVSPTKLNDLCFTNVYADSFVIRGDEVRQIAPGQTGKIADYNYKLPDDFTGCVIAWNSNNLDSKVGGNYNYLYRLFRKSNLKPFERDISTEIYQAGSTPCNGVEGFNCYFPLQSYGFQPTNGVGYQPYRVVVLSFELLHAPATVCGPKKSTNLVKNKCVNFNFNGLTGTGVLTESNKKFLPFQQFGRDIADTTDAVRDPQTLEILDITPCSFGGVSVITPGTNTSNQVAVLYQDVNCTEVPVAIHADQLTPTWRVYSTGSNVFQTRAGCLIGAEHVNNSYECDIPIGAGICASYQTQTNSPSGAGSHHHHHHHHHH

SEQ ID NO: 4335 - protein, 715 aa, Artificial Sequence
  Description of Artificial Sequence: Synthetic polypeptide
MGILPSPGMPALLSLVSLLSVLLMGCVAETGTQCVNLTTRTQLPPAYTNSFTRGVYYPDKVFRSSVLHSTQDLFLPFFSNVTWFHAIHVSGTNGTKRFDNPVLPFNDGVYFASTEKSNIIRGWIFGTTLDSKTQSLLIVNNATNVVIKVCEFQFCNDPFLGVYYHKNNKSWMESEFRVYSSANNCTFEYVSQPFLMDLEGKQGNFKNLREFVFKNIDGYFKIYSKHTPINLVRDLPQGFSALEPQVDLPIGINITRFQTLLALHRSYLTPGDSSSGWTAGAAAYYVGYLQPRTFLLKYNENGTITDAVDCALDPLSETKCTLKSFTVEKGIYQTSNFRVQPTESIVRFPNITNLCPFGEVFNATRFASVYAWNRKRISNCVADYSVLYNSASFSTFKCYGVSPTKLNDLCFTNVYADSFVIRGDEVRQIAPGQTGKIADYNYKLPDDFTGCVIAWNSNNLDSKVGGNYNYLYRLFRKSNLKPFERDISTEIYQAGSTPCNGVEGFNCYFPLQSYGFQPTNGVGYQPYRVVVLSFELLHAPATVCGPKKSTNLVKNKCVNFNFNGLTGTGVLTESNKKFLPFQQFGRDIADTTDAVRDPQTLEILDITPCSFGGVSVITPGTNTSNQVAVLYQDVNCTEVPVAIHADQLTPTWRVYSTGSNVFQTRAGCLIGAEHVNNSYECDIPIGAGICASYQTQTNSPSGAGSHHHHHHHHHH

SEQ ID NO: 4336 - protein, 715 aa, Artificial Sequence
  Description of Artificial Sequence: Synthetic polypeptide
MGILPSPGMPALLSLVSLLSVLLMGCVAETGTQCVNLTTRTQLPPAYTNSFTRGVYYPDKVFRSSVLHSTQDLFLPFFSNVTWFHAIHVSGTNGTKRFDNPVLPFNDGVYFASTEKSNIIRGWIFGTTLDSKTQSLLIVNNATNVVIKVCEFQFCNDPFLGVYYHKNNKSWMESEFRVYSSANNCTFEYVSQPFLMDLEGKQGNFKNLREFVFKNIDGYFKIYSKHTPINLVRDLPQGFSALEPLVDLPIGINITRFQTLLALHRSYLTPGDSSSGWTAGAAAYYVGYLQPRTFLLKYNENGTITDAVDCALDPLSETKCTLKSFTVEKGIYQTSNFRVQPTESIVRFPNITNLCPFGEVFNATRFASVYAWNRKRISNCVADYSVLYNSASFSTFKCYGVSPTKLNDLCFTNVYADSFVIRGDEVRQIAPGQTGKIADYNYKLPDDFTGCVIAWNSNNLDSKVGGNYNYLYRLFRKSNLKPFERDISTEIYQAGSTPCNGVEGFNCYFPLQSYGFQPTNGVGYQPYRVVVLSFELLHAPATVCGPKKSTNLVKNKCVNFNFNGLTGTGVLTESNKKFLPFQQFGRDIADTTDAVRDPQTLEILDITPCSFGGVSVITPGTNTSNQVAVLYQDVNCTEVPVAIHADQLTPTWRVYSTGSNVFQTRAGCLIGAEPVNNSYECDIPIGAGICASYQTQTNSPSGAGSHHHHHHHHHH

SEQ ID NO: 4337 - protein, 715 aa, Artificial Sequence
  Description of Artificial Sequence: Synthetic polypeptide
MGILPSPGMPALLSLVSLLSVLLMGCVAETGTQCVNLTTRTQLPPAYTNSFTRGVYYPDKVFRSSVLHSTQDLFLPFFSNVTWFHAIHVSGTNGTKRFDNPVLPFNDGVYFASTEKSNIIRGWIFGTTLDSKTQSLLIVNNATNVVIKVCEFQFCNDPFLGVYYHKNNKSWMESEFRVYSSANNCTFEYVSQPFLMDLEGKQGNFKNLREFVFKNIDGYFKIYSKHTPINLVRDLPQGFSALEPKVDLPIGINITRFQTLLALHRSYLTPGDSSSGWTAGAAAYYVGYLQPRTFLLKYNENGTITDAVDCALDPLSETKCTLKSFTVEKGIYQTSNFRVQPTESIVRFPNITNLCPFGEVFNATRFASVYAWNRKRISNCVADYSVLYNSASFSTFKCYGVSPTKLNDLCFTNVYADSFVIRGDEVRQIAPGQTGKIADYNYKLPDDFTGCVIAWNSNNLDSKVGGNYNYLYRLFRKSNLKPFERDISTEIYQAGSTPCNGVEGFNCYFPLQSYGFQPTNGVGYQPYRVVVLSFELLHAPATVCGPKKSTNLVKNKCVNFNFNGLTGTGVLTESNKKFLPFQQFGRDIADTTDAVRDPQTLEILDITPCSFGGVSVITPGTNTSNQVAVLYQDVNCTEVPVAIHADQLTPTWRVYSTGSNVFQTRAGCLIGAEHVNNSYECDIPIGAGICASYQTQTNSPSGAGSHHHHHHHHHH

SEQ ID NO: 4338 - protein, 715 aa, Artificial Sequence
  Description of Artificial Sequence: Synthetic polypeptide
MGILPSPGMPALLSLVSLLSVLLMGCVAETGTQCVNLTTRTQLPPAYTNSFTRGVYYPDKVFRSSVLHSTQDLFLPFFSNVTWFHAIHVSGTNGTKRFDNPVLPFNDGVYFASTEKSNIIRGWIFGTTLDSKTQSLLIVNNATNVVIKVCEFQFCNDPFLGVYYHKNNKSWMESEFRVYSSANNCTFEYVSQPFLMDLEGKQGNFKNLREFVFKNIDGYFKIYSKHTPINLVRDLPQGFSALEPLVDLPIGINITRFQTLLALHRSYLTPGDSSSGWTAGAAAYYVGYLQPRTFLLKYNENGTITDAVDCALDPLSETKCTLKSFTVEKGIYQTSNFRVQPTESIVRFPNITNLCPFGEVFNATRFASVYAWNRKRISNCVADYSVLYNSASFSTFKCYGVSPTKLNDLCFTNVYADSFVIRGDEVRQIAPGQTGKIADYNYKLPDDFTGCVIAWNSNNLDSKVGGNYNYLYRLFRKSNLKPFERDISTEIYQAGSTPCNGVEGFNCYFPLQSYGFQPTNGVGYQPYRVVVLSFECLHAPATVCGPKKSTNLVKNKCVNFNFNGLTGTGVLTESNKKFLPFQQFGRDIADTTDAVRDPQTLEILDITPCSFGGVSVITPGTNTSNQVAVLYQDVNCTEVPVAIHADQLTPTWRVYSTGSNVFQTRAGCLIGAEHVNNSYECDIPIGAGICASYQTQTNSPSGAGSHHHHHHHHHH

SEQ ID NO: 4339 - protein, 715 aa, Artificial Sequence
  Description of Artificial Sequence: Synthetic polypeptide
MGILPSPGMPALLSLVSLLSVLLMGCVAETGTQCVNLTTRTQLPPAYTNSFTRGVYYPDKVFRSSVLHSTQDLFLPFFSNVTWFHAIHVSGTNGTKRFDNPVLPFNDGVYFASTEKSNIIRGWIFGTTLDSKTQSLLIVNNATNVVIKVCEFQFCNDPFLGVYYHKNNKSWMESEFRVYSSANNCTFEYVSQPFLMDLEGKQGNFKNLREFVFKNIDGYFKIYSKHTPINLVRDLPQGFSALEPLVDLPIGINITRFQTLLALSRSYLTPGDSSSGWTAGAAAYYVGYLQPRTFLLKYNENGTITDAVDCALDPLSETKCTLKSFTVEKGIYQTSNFRVQPTESIVRFPNITNLCPFGEVFNATRFASVYAWNRKRISNCVADYSVLYNSASFSTFKCYGVSPTKLNDLCFTNVYADSFVIRGDEVRQIAPGQTGKIADYNYKLPDDFTGCVIAWNSNNLDSKVGGNYNYLYRLFRKSNLKPFERDISTEIYQAGSTPCNGVEGFNCYFPLQSYGFQPTNGVGYQPYRVVVLSFELLHAPATVCGPKKSTNLVKNKCVNFNFNGLTGTGVLTESNKKFLPFQQFGRDIADTTDAVRDPQTLEILDITPCSFGGVSVITPGTNTSNQVAVLYQDVNCTEVPVAIHADQLTPTWRVYSTGSNVFQTRAGCLIGAEHVNNSYECDIPIGAGICASYQTQTNSPSGAGSHHHHHHHHHH

SEQ ID NO: 4340 - protein, 715 aa, Artificial Sequence
  Description of Artificial Sequence: Synthetic polypeptide
MGILPSPGMPALLSLVSLLSVLLMGCVAETGTQCVNLTTRTQLPPAYTNSFTRGVYYPDKVFRSSVLHSTQDLFLPFFSNVLWFHAIHVSGTNGTKRFDNPVLPFNDGVYFASTEKSNIIRGWIFGTTLDSKTQSLLIVNNATNVVIKVCEFQFCNDPFLGVYYHKNNKSWMESEFRVYSSANNCTFEYVSQPFLMDLEGKQGNFKNLREFVFKNIDGYFKIYSKHTPINLVRDLPQGFSALEPLVDLPIGINITRFQTLLALHRSYLTPGDSSSGWTAGAAAYYVGYLQPRTFLLKYNENGTITDAVDCALDPLSETKCTLKSFTVEKGIYQTSNFRVQPTESIVRFPNITNLCPFGEVFNATRFASVYAWNRKRISNCVADYSVLYNSASFSTFKCYGVSPTKLNDLCFTNVYADSFVIRGDEVRQIAPGQTGKIADYNYKLPDDFTGCVIAWNSNNLDSKVGGNYNYLYRLFRKSNLKPFERDISTEIYQAGSTPCNGVEGFNCYFPLQSYGFQPTNGVGYQPYRVVVLSFELLHAPATVCGPKKSTNLVKNKCVNFNFNGLTGTGVLTESNKKFLPFQQFGRDIADTTDAVRDPQTLEILDITPCSFGGVSVITPGTNTSNQVAVLYQDVNCTEVPVAIHADQLTPTWRVYSTGSNVFQTRAGCLIGAEHVNNSYECDIPIGAGICASYQTQTNSPSGAGSHHHHHHHHHH

SEQ ID NO: 4341 - protein, 715 aa, Artificial Sequence
  Description of Artificial Sequence: Synthetic polypeptide
MGILPSPGMPALLSLVSLLSVLLMGCVAETGTQCVNLTTRTQLPPAYTNSFTRGVYYPDKVFRSSVLHSTQDLFLPFFSNVTWFHAIHVSGTNGTKRFDNPVLPFNDGVYFASTEKSNIIRGWIFGTTLDSKTQSLLIVNNATNVVIKVCEFQFCNDPFLGVYYHKNNKSWMESEFRVYSSANNCTFEYVSQPFLMDLEGKQGNFKNLREFVFKNIDGYFKIYSKHTPINLVRDLPQGFSALEPLVDLPIGINITRFQTLLALHRSYLTPGDSSSGWTAGAAAYYVGYLQPRTFLLKYNENGTITDAVDCALDPLSETKCTLKSFTVEKGIYQTSNFRVQPTESIVRFPNITNLCPFGEVFNATRFASVYAWNRRRISNCVADYSVLYNSASFSTFKCYGVSPTKLNDLCFTNVYADSFVIRGDEVRQIAPGQTGKIADYNYKLPDDFTGCVIAWNSNNLDSKVGGNYNYLYRLFRKSNLKPFERDISTEIYQAGSTPCNGVEGFNCYFPLQSYGFQPTNGVGYQPYRVVVLSFELLHAPATVCGPKKSTNLVKNKCVNFNFNGLTGTGVLTESNKKFLPFQQFGRDIADTTDAVRDPQTLEILDITPCSFGGVSVITPGTNTSNQVAVLYQDVNCTEVPVAIHADQLTPTWRVYSTGSNVFQTRAGCLIGAEHVNNSYECDIPIGAGICASYQTQTNSPSGAGSHHHHHHHHHH

SEQ ID NO: 4342 - protein, 715 aa, Artificial Sequence
  Description of Artificial Sequence: Synthetic polypeptide
MGILPSPGMPALLSLVSLLSVLLMGCVAETGTQCVNLTTRTQLPPAYTNSFTRGVYYPDKVFRSSVLHSTQDLFLPFFSNVTWFHAIHVSGTNGTKRFDNPVLPFNDGVYFASTEKSNIIRGWIFGTTLDSKTQSLLIVNNATNVVIKVCEFQFCNDPFLGVYYHKNNKSWMESEFRVYSSANNCTFEYVSQPFLMDLEGKQGNFKNLREFVFKNIDGYFKIYSKHTPINLVRDLPQGFSALEPLVDLPIGINITRFQTLLALHRSYLTPGDSSSGWTAGAAAYYVGYLQPRTFLLKYNENGTITDAVDCALDPLSETKCTLKSFTVEKGIYQTSNFRVQPTESIVRFPNITNLCPFGEVFNATRFASVYAWNRKRISNCVADYSVLYNSASFSTFKCYGVSPTKLNDLCFTNVYADSFVIRGDEVRQIAPGQTGKIADYNYKLPDDFTGCVIAWNSNNLDSKVGGNYNYLYRLFRKSNLKPFERDISTEIYQAGSTPCNGVEGFNAYFPLQSYGFQPTNGVGYQPYRVVVLSFELLHAPATVCGPKKSTNLVKNKCVNFNFNGLTGTGVLTESNKKFLPFQQFGRDIADTTDAVRDPQTLEILDITPCSFGGVSVITPGTNTSNQVAVLYQDVNCTEVPVAIHADQLTPTWRVYSTGSNVFQTRAGCLIGAEHVNNSYECDIPIGAGICASYQTQTNSPSGAGSHHHHHHHHHH

SEQ ID NO: 4343 - protein, 715 aa, Artificial Sequence
  Description of Artificial Sequence: Synthetic polypeptide
MGILPSPGMPALLSLVSLLSVLLMGCVAETGTQCVNLTTRTQLPPAYTNSFTRGVYYPDKVFRSSVLHSTQDLFLPFFSNVTWFHAIHVSGTNGTKRFDNPVLPFNDGVYFASTEKSNIIRGWIFGTTLDSKTQSLLIVNNATNVVIKVCEFQFCNDPFLGVYYHKNNKSWMESEFRVYSSANNCTFEYVSQPFLMDLEGKQGNFKNLREFVFKNIDGYFKIYSKHTPINLVRDLPQGFSALEPLVDLPIGINITRFQTLLALHRSYLTPGDSSSGWTAGAAAYYVGYLQPRTFLLKYNENGTITDAVDCALDPLSETKCTLKSFTVEKGIYQTSNFRVQPTESIVRFPNITNLCPFGEVFNATRFASVYAWNRKRISNCVADYSVLYNSASFSTFKCYGVSPTKLNDLCFTNVYADSFVIRGDEVRQIAPGQTGKIADYNYKLPDDFTGCVIAWNSNNLDSKVGGNYNYLYRLFRKSNLKPFERDISTEIYQAGSTPCNGVEGFNCYFPLQSYGFQPTNGVGYQPYRVVVLSFELLHAPATVCGPKKSTNLVKNKCVNFNFNGLTGTGVLTESNKKFLPFQQFGRDIADTTDAVRDPQTLEILDITPCSFGGVSVITPGTNTSNQVAVLYQDVNCTEVPVAIHADQLTPTWRVESTGSNVFQTRAGCLIGAEHVNNSYECDIPIGAGICASYQTQTNSPSGAGSHHHHHHHHHH

SEQ ID NO: 4344 - protein, 715 aa, Artificial Sequence
  Description of Artificial Sequence: Synthetic polypeptide
MGILPSPGMPALLSLVSLLSVLLMGCVAETGTQCVNLTTRTQLPPAYTNSFTRGVYYPDKVFRSSVLHSTQDLFLPFFSNVTWFHAIHVSGTNGTKRFDNPVLPFNDGVYFASTEKSNIIRGWIFGTTLDSKTQSLLIVNNATNVVIKVCEFQFCNDPFLGVYYHKNNKSWMESEFRVYSSANNCTFEYVSQPFLMDLEGKQGNFKNLREFVFKNIDGYFKIYSKHTPINLVRDLPQGFSALEPLVDLPIGINITRFQTLLALHRSYLTPGDSSSGWTAGAAAYYVGYLQPRTFLLKYNENGTITDAVDCALDPLSETKCTLKSFTVEKGIYQTSNFRVQPTESIVRFPNITNLCPLGEVFNATRFASSYAWNRKRISNCVADYSVLYNSASFSTFKCYGVSPTKLNDLCFTNVYADRFVIRGDEVRQIAPGQTGKIADYNYKLPDDFTGCVIAWNSNNLDAKVGGNYNYLYRLFRKSNLKPFERFISTEIYQAGSTPANGVEGFNCYFPLQSYGFQPTNGVGYQPYRVVVLSFELLHAPHTVCGPKKSTNLVKNKCVNFNFNGLTGTGVLTESNKKFLPFQQFGRDIADTTDAVRDPQTLEILDITPCSFGGVSVITPGTNTSNQVAVLYQDVNCTEVPVAIHADQLTPTWRVYSTGSNVFQTRAGCLIGAEHVNNSYECDIPIGAGICASYQTQTNSPSGAGSHHHHHHHHHH

SEQ ID NO: 4345 - protein, 715 aa, Artificial Sequence
  Description of Artificial Sequence: Synthetic polypeptide
MGILPSPGMPALLSLVSLLSVLLMGCVAETGTQCVNLTTRTQLPPAYTNSFTRGVYYPDKVFRSSVLHSTQDLFLPFFSNVTWFHAIHVSGTNGTKRFDNPVLPFNDGVYFASTEKSNIIRGWIFGTTLDSKTQSLLIVNNATNVVIKVCEFQFCNDPFLGVYYHKNNKSWMESEFRVYSSANNCTFEYVSQPFLMDLEGKQGNFKNLREFVFKNIDGYFKIYSKHTPINLVRDLPQGFSALEPLVDLPIGINITRFQTLLALHRSYLTPGDSSSGWTAGAAAYYVGYLQPRTFLLKYNENGTITDAVDCALDPLSETKCTLKSFTVEKGIYQTSNFRVQPTESIVRFPNITNLCPFGEVFNATRFASVYAWNRKRISNCVADYSVLYNSASFSTFKCYGVSPTKLNDLCFTNVYADSFVIRGDEVRQIAPGQTGKIADYNYKLPDDFTGCVIAWNSNNLDSKVGGNYNYLYRLFRKSNLKPFERDISTEIYQAGSTPYNGVEGFNCYFPLQSYGFQPTNGVGYQPYRVVVLSFELLHAPATVCGPKKSTNLVKNKCVNFNFNGLTGTGVLTESNKKFLPFQQFGRDIADTTDAVRDPQTLEILDITPCSFGGVSVITPGTNTSNQVAVLYQDVNCTEVPVAIHADQLTPTWRVYSTGSNVFQTRAGCLIGAEHVNNSYECDIPIGAGICASYQTQTNSPSGAGSHHHHHHHHHH

SEQ ID NO: 4346 - protein, 715 aa, Artificial Sequence
  Description of Artificial Sequence: Synthetic polypeptide
MGILPSPGMPALLSLVSLLSVLLMGCVAETGTQCVNLTTRTQLPPAYTNSFTRGVYYPDKVFRSSVLHSTQDLFLPFFSNVTWFHAIHVSGTNGTKRFDNPVLPFNDGVYFASTEKSNIIRGWIFGTTLDSKTQSLLIVNNATNVVIKVCEFQFCNDPFLGVYYHKNNKSWMESEFRVYSSANNCTFEYVSQPFLMDLEGKQGNFKNLREFVFKNIDGYFKIYSKHTPINLVRDLPQGFSALEPLVDLPIGINIIRFQTLLALHRSYLTPGDSSSGWTAGAAAYYVGYLQPRTFLLKYNENGTITDAVDCALDPLSETKCTLKSFTVEKGIYQTSNFRVQPTESIVRFPNITNLCPFGEVFNATRFASVYAWNRKRISNCVADYSVLYNSASFSTFKCYGVSPTKLNDLCFTNVYADSFVIRGDEVRQIAPGQTGKIADYNYKLPDDFTGCVIAWNSNNLDSKVGGNYNYLYRLFRKSNLKPFERDISTEIYQAGSTPCNGVEGFNCYFPLQSYGFQPTNGVGYQPYRVVVLSFELLHAPATVCGPKKSTNLVKNKCVNFNFNGLTGTGVLTESNKKFLPFQQFGRDIADTTDAVRDPQTLEILDITPCSFGGVSVITPGTNTSNQVAVLYQDVNCTEVPVAIHADQLTPTWRVYSTGSNVFQTRAGCLIGAEHVNNSYECDIPIGAGICASYQTQTNSPSGAGSHHHHHHHHHH

SEQ ID NO: 4347 - protein, 715 aa, Artificial Sequence
  Description of Artificial Sequence: Synthetic polypeptide
MGILPSPGMPALLSLVSLLSVLLMGCVAETGTQCVNLTTRTQLPPAYTNSFTRGVYYPDKVFRSSVLHSTQDLFLPFFSNVTWFHAYHVSGTNGTKRFDNPVLPFNDGVYFASTEKSNIIRGWIFGTTLDSKTQSLLIVNNATNVVIKVCEFQFCNDPFLGVYYHKNNKSWMESEFRVYSSANNCTFEYHSQPFLMDLEGKQGNFKNLREFVFKNIDGYFKIYSKHTPINLVRDLPQGFSALEPLVDLPIGINITRFQTLLALHRSYLTPGDSSSGWTAGAAAYYVGYLQPRTFLLKYNENGTITDAVDCALDPLSETKCTLKSFTVEKGIYQTSNFRVQPTESIVRFPNITNPCPFGEVFNATRFASVYAWNRKRISNCVADYSVLYNSASFSTFKCYGVSPTKLNDLCFTNVYADSFVIRGDEVRQIAPGQTGKIADYNYKLPDDFTGCVIAWNSNNLDSKVGGNYNYLYRLFRKSNLKPFERDISTEIYQAGSTPCNGVEGFNCYFPLQSYGFQPTNGPGQQPYRVVVLSFELLHAPATVCGPKKSTNLVKNKCVNFNFNGLTGTGVLTESNKKFLPFQQFGRDIADTTDAVRDPQTLEILDITPCSFGGVSVITPGTNTSNQVAVLYQDVNCTEVPDAIHADQLTPTWRVYSTGSNVFQTRAGCLIGAEHVNNSYECDIPIGAGICASYQTQTNSPSGAGSHHHHHHHHHH

SEQ ID NO: 4348 - protein, 715 aa, Artificial Sequence
  Description of Artificial Sequence: Synthetic polypeptide
MGILPSPGMPALLSLVSLLSVLLMGCVAETGTQCVNLTTRTQLPPAYTNSFTRGVYYPDKVFRSSVLHSTQDLFLPFFSNVTWFHAIHVSGTNGTKRFDNPVLPFNDGVYFASTEKSNIIRGWIFGTTLDSKTQSLLIVNNATNVVIKVCEFQFCNDPFLGVYYHKNNKSWMESEFRVYSSANNCTFEYVSQPFLMDLEGKQGNFKNLREFVFKNIDGYFKIYSKHTPINLVRDLPQGFSALEPLVDLPIGINITRFQTLLALHRSYLTPGDSSSGWTAGAAAYYVGYLQPRTFLLKYNENGTITDAVDCALDPLSETKCTLKSFTVEKGIYQTSNFRVQPTESIVRFPNITNLCPFGEVFNATRFASVYAWNRKRISNCVADYSVLYNSASFSTFKCYGVSPTKLNDLCFTNVYADSFVIRGDEVRQIAPGQTGKIADYNYKLPDDFTGCVIAWNSNNLDSKVGGNYNYLYRLFRKSNLKPFERDISTEIYQAGSTPCNGVEGFNCYFPLQSYGFQPTNGVGYQPYRVVVLSFELLHAPATVCGPKKSTNLVKNKCVNFNFNGLTGTGVLTESNKKFLPFQQFGRDIADTTDAVRDPQTLEILDITPCSFGGKLVITPDTNTSNQVAVLYQDVNCTEVPVAIHADQLTPTWRVYNTGSNVFQTRAGCLVGFEHVNNSYECDIPVGAGICASYQTQRNSPSGAGSHHHHHHHHHH

SEQ ID NO: 4349 - protein, 715 aa, Artificial Sequence
  Description of Artificial Sequence: Synthetic polypeptide
MGILPSPGMPALLSLVSLLSVLLMGCVAETGTQCVNLTTRTQLPPAYTNSFTRGVYYPDKVFRSSVLHSTQDLFLPFFSNVTWFHAIHVSGTNGTKRFDNPVLPFNDGVYFASTEKSNIIRGWIFGTTLDSKTQSLLIVNNATNVVIKVCEFQFCNDPFLGVYYHKNNKSWMESEFRVYSSANNCTFEYVSQPFLMDLEGKQGNFKNLREFVFKNIDGYFKIYSKHTPINLVRDLPQGFSALEPLVDLPIGINITRFQTLLALHRSYLTPGDSSSGWTAGAAAYYVGYLQPRTFLLKYNENGTITDAVDCALDPLSETKCTLKSFTVEKGIYQTSNFRVQPTESIVRFPNITNLCPFGEVFNATRFASVYAWNRKRISNCVADYSVLYNSASFSTFKCYGVSPTKLNDLCFTNVYADSFVIRGDEVRQIAPGQTGKIADYNYKLPDDFTGCVIAWNSNNLDSKVGGNYNYLYRLFRKSNLKPFERDISTEIYQAGSTPCNGVEGFNCYFPLQSYGFQPTNGVGYQPYRVVVLSFELLHAPATVCGPKKSTNLVKNKCVNFNFNGLTGTGVLTESNKKFLPFQQFGRDIADTTDAVRDPQTLEILDITPCSFGGVSVITPGTNTSNQVAVLYQDVNCTEVPVAIHADQLTPTWRMYSTGSNVFQTRAGCLIGAEHVNNSYECDIPIGAGICASYQTQTNSPSGAGSHHHHHHHHHH

SEQ ID NO: 4350 - protein, 715 aa, Artificial Sequence
  Description of Artificial Sequence: Synthetic polypeptide
MGILPSPGMPALLSLVSLLSVLLMGCVAETGTQCVNLTTRTQLPPAYTNSFTRGVYYPDKVFRSSVLHSTQDLFLPFFSNVTRFHAIHVSGTNGTKRFDNPVLPFNDGVYFASTEKSNIIRGWIFGTTLDSKTQSLLIVNNATNVVIKVCEFQFCNDPFLGVYYHKNNKSWMESEFRVYSSANNCTFEYVSQPFLMDLEGKQGNFKNLREFVFKNIDGYFKIYSKHTPINLVRDLPQGFSALEPLVDLPIGINITRFQTLLALHRSYLTPGDSSSGWTAGAAAYYVGYLQPRTFLLKYNENGTITDAVDCALDPLSETKCTLKSFTVEKGIYQTSNFRVQPTESIVRFPNITNLCPFGEVFNATRFASVYAWNRKRISNCVADYSVLYNSASFSTFKCYGVSPTKLNDLCFTNVYADSFVIRGDEVRQIAPGQTGKIADYNYKLPDDFTGCVIAWNSNNLDSKVGGNYNYLYRLFRKSNLKPFERDISTEIYQAGSTPCNGVEGFNCYFPLQSYGFQPTNGVGYQPYRVVVLSFELLHAPATVCGPKKSTNLVKNKCVNFNFNGLTGTGVLTESNKKFLPFQQFGRDIADTTDAVRDPQTLEILDITPCSFGGVSVITPGTNTSNQVAVLYQDVNCTEVPVAIHADQLTPTWRVYSTGSNVFQTRAGCLIGAEHVNNSYECDIPIGAGICASYQTQTNSPSGAGSHHHHHHHHHH

SEQ ID NO: 4351 - protein, 715 aa, Artificial Sequence
  Description of Artificial Sequence: Synthetic polypeptide
MGILPSPGMPALLSLVSLLSVLLMGCVAETGTQCVNLTTRTQLPPAYTNSFTRGVYYPDKVFRSSVLHSTQDLFLPFFSNVTWFHAIHVSGTNGTKRFDNPVLPFNDGVYFASTEKSNIIRGWIFGTTLDSKTQSLLIVNNATNVVIKVCEFQFCNDPFLGVYYHKNNKSWMESEFRVYSSANNCTFEYVSQPFLMDLEGKQGNFKNLREFVFKNIDGYFKIYSKHTPINLVRDLPQGFSALEPLVDLPIGINITRFQTLLALHRSYLTPGDSSSGWTAGAAAYYVGYLQPRTFLLKYNENGTITDAVDCNLDPLSETKCTLKSFTVEKGIYQTSNFRVQPTESIVRFPNITNLCPFGEVFNATRFASVYAWNRKRISNCVADYSVLYNSASFSTFKCYGVSPTKLNDLCFTNVYADSFVIRGDEVRQIAPGQTGKIADYNYKLPDDFTGCVIAWNSNNLDSKVGGNYNYLYRLFRKSNLKPFERDISTEIYQAGSTPCNGVEGFNCYFPLQSYGFQPTNGVGYQPYRVVVLSFELLHAPATVCGPKKSTNLVKNKCVNFNFNGLTGTGVLTESNKKFLPFQQFGRDIADTTDAVRDPQTLEILDITPCSFGGVSVITPGTNTSNQVAVLYQDVNCTEVPVAIHADQLTPTWRVYSTGSNVFQTRAGCLIGAEHVNNSYECDIPIGAGICASYQTQTNSPSGAGSHHHHHHHHHH

SEQ ID NO: 4352 - protein, 715 aa, Artificial Sequence
  Description of Artificial Sequence: Synthetic polypeptide
MGILPSPGMPALLSLVSLLSVLLMGCVAETGTQCVNLTTRTQLPPAYTNSFTRGVYYPDKVFRSSVLHSTQDLFLPFFSNVTWFHAIHVSGTNGTKRFDNPVLPFNDGVYFASTEKSNIIRGWIFGTTLDSKTQSLLIVNNATNVVIKVCEFQFCNDPFLGVYYHKNNKSWMESEFRVYSSANNCTFEYVSQPFLMDLEGKQGNFKNLREFVFKNIDGYFKIYSKHTPINLVRDLPQGFSALEPLVDLPIGINITRFQTLLALHRSYLTPGDSSSGWTAGAAAYYVGYLQPRTFLLKYNENGTITDAVDCALDPLSETKCTLKSFTVEKGIYQTSNFRVQPTESIVRFPNITNLCPFGEVFNATRFASVYAWNRKRISNCVADYSVLYNSASFSTFKCYGVSPTKLNDLCFTNVYADSFVIRGDEVRQIAPGQTGKIADYNYKLPDDFTGCVIAWNSNNLDSKVGGNYNYLYRLFRKSNLKPFERDISTEIYQAGSTPCNGVEGFNCYFPLQSYGFQPTNGVGYQPYRVVVLSFELLHAPATVCGPKKSTNLVKNKCVNFNFNGLTGTGVLTESNKKFLPFQQFGRDIADTTDAVRDPQTLEILDITPCSEGGVSVITPGTNTSNQVAVLYQDVNCTEVPVAIHADQLTPTWRVYSTGSNVFQTRAGCLIGAEHVNNSYECDIPIGAGICASYQTQTNSPSGAGSHHHHHHHHHH

SEQ ID NO: 4353 - protein, 715 aa, Artificial Sequence
  Description of Artificial Sequence: Synthetic polypeptide
MGILPSPGMPALLSLVSLLSVLLMGCVAETGTQCVNLTTRTQLPPAYTNSFTRGVYYPDKVFRSSVLHSTQDLFLPFFSNVTWFHAIHVSGTNGTKRFDNPVLPFNDGVYFASTEISNIIRGWIFGTTLDSKTQSLLIVNNATNVVIKVCEFQFCNDPFLGVYYHKNNKSWMESEFRVYSSANNCTFEYVSQPFLMDLEGKQGNFKNLREFVFKNIDGYFKIYSKHTPINLVRDLPQGFSALEPLVDLPIGINITRFQTLLALHRSYLTPGDSSSGWTAGAAAYYVGYLQPRTFLLKYNENGTITDAVDCALDPLSETKCTLKSFTVEKGIYQTSNFRVQPTESIVRFPNITNLCPFGEVFNATRFASVYAWNRKRISNCVADYSVLYNSASFSTFKCYGVSPTKLNDLCFTNVYADSFVIRGDEVRQIAPGQTGKIADYNYKLPDDFTGCVIAWNSNNLDSKVGGNYNYLYRLFRKSNLKPFERDISTEIYQAGSTPCNGVEGFNCYFPLQSYGFQPTNGVGYQPYRVVVLSFELLHAPATVCGPKKSTNLVKNKCVNFNFNGLTGTGVLTESNKKFLPFQQFGRDIADTTDAVRDPQTLEILDITPCSFGGVSVITPGTNTSNQVAVLYQDVNCTEVPVAIHADQLTPTWRVYSTGSNVFQTRAGCLIGAEHVNNSYECDIPIGAGICASYQTQTNSPSGAGSHHHHHHHHHH

SEQ ID NO: 4354 - protein, 715 aa, Artificial Sequence
  Description of Artificial Sequence: Synthetic polypeptide
MGILPSPGMPALLSLVSLLSVLLMGCVAETGTQCVNLTTRTQLPPAYTNSFTRGVYYPDKVFRSSVLHSTQDLFLPFFSNVTWFHAIHVSGTNGTKRFDNPVLPFNDGVYFASTEKSNIIRGWIFGTTLDSKTQSLLIVNNATNVVIKVCEFQFCNDPFLGVYYHKNNKSWMESEFRVYSSANNCTFEYVSQPFLMDLEGKQGNFKNLREFVFKNIDGYFKIYSKHTPINLVRDLPQGFSALEPLVDLPIGINITRFQTLLALHRSYLTPGDSSSGWTAGAAAYYVGYLQPRTFLLKYNENGTITDAVDCALDPLSETKCTLKSFTVEKGIYQTSNFRVQPTESIVRFPNITNLCPFGEVFNATRFASVYAWNRKRISNCVADYSVLYNSASFSTFKCYGVSPTKLNDLCFTNVYADSFVIRGDEVRQIAPGQTGKIADYNYKLPDDFTGCVIAWNSNNLDSKVGGNYNYLYRLFRKSNLKPFERDISTEIYQAGSTPCNGVEGFNCYFPLQSYGFQPTNGVGYQPYRVVVLSFELLHAPATVCGPKKSTNLVKNKCVNFNFNGLTGTGVLTESNKKFLPFQQFGRTIADTTDAVRDPQTLEILDITPCSFGGVSVITPGTNTSNQVAVLYQDVNCTEVPVAIHADQLTPTWRVYSTGSNVFQTRAGCLIGAEHVNNSYECDIPIGAGICASYQTQTNSPSGAGSHHHHHHHHHH

SEQ ID NO: 4355 - protein, 715 aa, Artificial Sequence
  Description of Artificial Sequence: Synthetic polypeptide
MGILPSPGMPALLSLVSLLSVLLMGCVAETGTQCVNLTTRTQLPPAYTNSFTRGVYYPDKVFRSSVLHITQDLFLPFFSNVTWFHAIHVSGTNGTKRFDNPVLPFNDGVYFASTEKSNIIRGWIFGTTLDSKTQSLLIVNNATNVVIKVCEFQFCNDPFLGVYYHKNNKSWMESEFRVYSSANNCTFEYVSQPFLMDLEGKQGNFKNLREFVFKNIDGYFKIYSKHTPINLVRDLPQGFSALEPLVDLPIGINITRFQTLLALHRSYLTPGDSSSGWTAGAAAYYVGYLQPRTFLLKYNENGTITDAVDCALDPLSETKCTLKSFTVEKGIYQTSNFRVQPTESIVRFPNITNLCPFGEVFNATRFASVYAWNRKRISNCVADYSVLYNSASFSTFKCYGVSPTKLNDLCFTNVYADSFVIRGDEVRQIAPGQTGKIADYNYKLPDDFTGCVIAWNSNNLDSKVGGNYNYLYRLFRKSNLKPFERDISTEIYQAGSTPCNGVEGFNCYFPLQSYGFQPTNGVGYQPYRVVVLSFELLHAPATVCGPKKSTNLVKNKCVNFNFNGLTGTGVLTESNKKFLPFQQFGRDIADTTDAVRDPQTLEILDITPCSFGGVSVITPGTNTSNQVAVLYQDVNCTEVPVAIHADQLTPTWRVYSTGSNVFQTRAGCLIGAEHVNNSYECDIPIGAGICASYQTQTNSPSGAGSHHHHHHHHHH

SEQ ID NO: 4356 - protein, 715 aa, Artificial Sequence
  Description of Artificial Sequence: Synthetic polypeptide
MGILPSPGMPALLSLVSLLSVLLMGCVAETGTQCVNLTTRTQLPPAYTNSFTRGVYYPDKVFRSSVLHSTQDLFLPFFSNVTWFHAKHVSGTNGTKRFDNPVLPFNDGVYFASTEKSNIIRGWIFGTTLDSKTQSLLIVNNATNVVIKVCEFQFCNDPFLGVYYHKNNKSWMESEFRVYSSANNCTFEYHSQPFLMDLEGKQGNFKNLREFVFKNIDGYFKIYSKHTPINLVRDLPQGFSALEPLVDLPIGINITRFQTLLALHRSYLTPGDSSSGETAGAAAYYVGYLQPRTFLLKYNENGTITDAVDCALDPLSETKCTLKSFTVEKGIYQTSNFRVQPTESIVRFPNITNLCPFGEVFNATRFASVYAWNRKRISNCVADYSVLYNSASFSTFKCYGVSPTKLNDLCFTNVYADSFVIRGDEVRQIAPGQTGKIADYNYKLPDDFTGCVIAWNSNNLDSKVGGNYNYLYRLFRKSNLKPFERDISTEIYQAGSTPCNGVEGFNCYFPLQSYGFQPTNGPGQQPYRVVVLSFELLHAPATVCGPKKSTNLVKNKCVNFNFNGLTGTGVLTESNKKFLPFQQFGRDIADTTDAVRDPQTLEILDITPCSFGGVSVITPGTNTSNQVAVLYQDVNCTEVPDAIHADQLTPTWRVYSTGSNVFQTRAGCLIGAEHVNNSYECDIPIGAGICASYQTQTNSPSGAGSHHHHHHHHHH

SEQ ID NO: 4357 - protein, 715 aa, Artificial Sequence
  Description of Artificial Sequence: Synthetic polypeptide
MGILPSPGMPALLSLVSLLSVLLMGCVAETGTQCVNLTTRTQLPPAYTNSFTRGVYYPDKVFRSSVLHSTQDLFLPFFSNVTWFHAIHVSGTNGTKRFDNPVLPFNDGVYFASTEKSNIIRGWIFGTTLDSKTQSLLIVNNATNVVIKVCEFQFCNDPFLGVYYHKNNKSWMESEFRVYSSANNCTFEYVSQPFLMDLEGKQGNFKNLREFVFKNIDGYFKIYSKHTPINLVRDLPQGFSALEPLVDLPIGINITRFQTLLALHRSYLTPGDSSSGWTAGAAAYYVGYLQPRTFLLKYNENGTITDAVDCALDPLSETKCTLKSFTVEKGIYQTSNFRVQPTESIVRFPNITNLCPFGEVFNATRFASVYAWNRKRISNCVADYSVLYNSASFSTFKCYGVSPTKLNDLCFTNVYADSFVIRGDEVRQIAPGQTGKIADYNYKLPDDFTGCVIAWNSNNLDSKVGGNYNYLYRLFRKLNLKPFERDISTEIYQAGSTPCNGVEGFNCYFPLQSYGFQPTNGVGYQPYRVVVLSFELLHAPATVCGPKKSTNLVKNKCVNFNFNGLTGTGVLTESNKKFLPFQQFGRDIADTTDAVRDPQTLEILDITPCSFGGVSVITPGTNTSNQVAVLYQDVNCTEVPVAIHADQLTPTWRVYSTGSNVFQTRAGCLIGAEHVNNSYECDIPIGAGICASYQTQTNSPSGAGSHHHHHHHHHH

SEQ ID NO: 4358 - protein, 715 aa, Artificial Sequence
  Description of Artificial Sequence: Synthetic polypeptide
MGILPSPGMPALLSLVSLLSVLLMGCVAETGTQCVNLTTRTQLPPAYTNSFTRGVYYPDKVFRSSVLHSTQDLFLPFFSNVTWFHAIHVSGTNGTKRFDNPVLPFNDGVYFASTEKSNIIRGWIFGTTLDSKTQSLLIVNNATNVVIKVCEFQFCNDPFLGVYYHKNNKSWMESEFRVYSSANNCTFEYVSQPFLMDLEGKQGNFKNLREFVFKNIDGYFKIYSKHTPINLVRDLPQGFSALEPLVDLPIGINITRFQTLLALHRSYLTPGDSSSGWTAGAAAYYVGYLQPRTFLLKYNENGTITDAVDCALDPLSETKCTLKSFTVEKGIYQTSNFRVQPTESIVRFPNITNECPFGEVFNATRFASVYAWNRKRISNCVADYSVLYNSASFSTFKCYGVSPTKLNDLCFTNVYADSFVIRGDEVRQIAPGQTGKIADYNYKLPDDFTGCVIAWNSNNLDSKVGGNYNYLYRLFRKSNLKPFERDISTEIYQAGSTPCNGVEGFNCYFPLQSYGFQPTNGVGYQPYRVVVLSFELLHAPATVCGPKKSTNLVKNKCVNFNFNGLTGTGVLTESNKKFLPFQQFGRDIADTTDAVRDPQTLEILDITPCSFGGVSVITPGTNTSNQVAVLYQDVNCTEVPVAIHADQLTPTWRVYSTGSNVFQTRAGCLIGAEHVNNSYECDIPIGAGICASYQTQTNSPSGAGSHHHHHHHHHH

SEQ ID NO: 4359 - protein, 715 aa, Artificial Sequence
  Description of Artificial Sequence: Synthetic polypeptide
MGILPSPGMPALLSLVSLLSVLLMGCVAETGTQCVNLTTRTQLPPAYTNSFTRGVYYPDKVFRSSVLHSTQDLFLPFFSNVTWFHAIHVSGTNGTKRFDNPVLPFNDGVYFASTEKSNIIRGWIFGTTLDSKTQSLLIVNNATNVVIKVCEFQFCNDPFLGVYYHKNNKSWMESEFRVYSSANNCTFEYVSQPFLMDLEGKQGNFKNLREFVFKNIDGYFKIYSKHTPINLVRDLPQGFSALEPHVDLPIGINITRFQTLLALHRSYLTPGDSSSGWTAGAAAYYVGYLQPRTFLLKYNENGTITDAVDCALDPLSETKCTLKSFTVEKGIYQTSNFRVQPTESIVRFPNITNLCPFGEVFNATRFASVYAWNRKRISNCVADYSVLYNSASFSTFKCYGVSPTKLNDLCFTNVYADSFVIRGDEVRQIAPGQTGKIADYNYKLPDDFTGCVIAWNSNNLDSKVGGNYNYLYRLFRKSNLKPFERDISTEIYQAGSTPCNGVEGFNCYFPLQSYGFQPTNGVGYQPYRVVVLSFELLHAPATVCGPKKSTNLVKNKCVNFNFNGLTGTGVLTESNKKFLPFQQFGRDIADTTDAVRDPQTLEILDITPCSFGGVSVITPGTNTSNQVAVLYQDVNCTEVPVAIHADQLTPTWRVYSTGSNVFQTRAGCLIGAEHVNNSYECDIPIGAGICASYQTQTNSPSGAGSHHHHHHHHHH

SEQ ID NO: 4360 - protein, 715 aa, Artificial Sequence
  Description of Artificial Sequence: Synthetic polypeptide
MGILPSPGMPALLSLVSLLSVLLMGCVAETGTQCVNLTTRTQLPPAYTNSFTRGVYYPDKVFRSSVLHSTQDLFLPFFSNVTWFHAIHVSGTNGTKRFDNPVLPFNDGVYFASTEKSNIIRGWIFGTTLDSKTQSLLIVNNATNVVIKVCEFQFCNDPFLGVYYHKNNKSWMESEFRVYSSANNCTFEYVSQPFLMDLEGKQGNFKNLREFVFKNIDGYFKIYSKHTPINLVRDLPQGFSALEPLVDLPIGINITRFQTLLALHRSYLTPGDSSSGWTAGAAAYYVGYLQPRTFLLKYNENGTITDAVDCALDPLSETKCTLKSFTVEKGIYQTSNFRVQPTESIVRFPNITNLCPFGEVFNATRFASVYAWNRKRISNCVADYSVLYNSASFSTFKCYGVSPTKLNDLCFTNVYADSFVIRGDEVRQIAPGQTGKIADYNYKLPDDFTGCVIAWNSNNLDSKVGGNYNYLYRLFRKSNLKPFERDISTEIYQAGSTPCNGVEGFNCYFPLQSYGFQPTNGVGNQPYRVVVLSFELLHAPATVCGPKKSTNLVKNKCVNFNFNGLTGTGVLTESNKKFLPFQQFGRDIADTTDAVRDPQTLEILDITPCSFGGVSVITPGTNTSNQVAVLYQDVNCTEVPVAIHADQLTPTWRVYSTGSNVFQTRAGCLIGAEHVNNSYECDIPIGAGICASYQTQTNSPSGAGSHHHHHHHHHH

SEQ ID NO: 4361 - protein, 715 aa, Artificial Sequence
  Description of Artificial Sequence: Synthetic polypeptide
MGILPSPGMPALLSLVSLLSVLLMGCVAETGTQCVNLTTRTQLPPAYTNSFTRGVYYPDKVFRSSVLHSTQDLFLPFFSNVTWFHAIHVSGTNGTKRFDNPVLPFNDGVYFASTEKSNIIRGWIFGTTLDSKTQSLLIVNNATNVVIKVCEFQFCNDPFLGVYYHKNNKSWMESEFRVYSSANNCTFEYVSQPFLMDLEGKQGNFKNLREFVFKNIDGYFKIYSKHTPINLVRDLPQGFSALEPLVDLPIGINITRFQTLLALHRSYLTPGDSSSGWTAGAAAYYVGYLQPRTFLLKYNENGTITDAVDCALDPLSETKCTLKSFTVEKGIYQTSNFRVQPTESIVRFPNITNHCPFGEVFNATRFASVYAWNRKRISNCVADYSVLYNSASFSTFKCYGVSPTKLNDLCFTNVYADSFVIRGDEVRQIAPGQTGKIADYNYKLPDDFTGCVIAWNSNNLDSKVGGNYNYLYRLFRKSNLKPFERDISTEIYQAGSTPCNGVEGFNCYFPLQSYGFQPTNGVGYQPYRVVVLSFELLHAPATVCGPKKSTNLVKNKCVNFNFNGLTGTGVLTESNKKFLPFQQFGRDIADTTDAVRDPQTLEILDITPCSFGGVSVITPGTNTSNQVAVLYQDVNCTEVPVAIHADQLTPTWRVYSTGSNVFQTRAGCLIGAEHVNNSYECDIPIGAGICASYQTQTNSPSGAGSHHHHHHHHHH

SEQ ID NO: 4362 - protein, 715 aa, Artificial Sequence
  Description of Artificial Sequence: Synthetic polypeptide
MGILPSPGMPALLSLVSLLSVLLMGCVAETGTQCVNLTTRTQLPPAYTNSFTRGVYYPDKVFRSSVLHSTQDLFLPFFSNVTWFHARHVSGTNGTKRFDNPVLPFNDGVYFASTEKSNIIRGWIFGTTLDSKTQSLLIVNNATNVVIKVCEFQFCNDPFLGVYYHKNNKSWMESEFRVYSSANNCTFEYVSQPFLMDLEGKQGNFKNLREFVFKNIDGYFKIYSKHTPINLVRDLPQGFSALEPLVDLPIGINITRFQTLLALHRSYLTPGDSSSGWTAGAAAYYVGYLQPRTFLLKYNENGTITDAVDCALDPLSETKCTLKSFTVEKGIYQTSNFRVQPTESIVRFPNITNLCPFGEVFNATRFASVYAWNRKRISNCVADYSVLYNSASFSTFKCYGVSPTKLNDLCFTNVYADSFVIRGDEVRQIAPGQTGKIADYNYKLPDDFTGCVIAWNSNNLDSKVGGNYNYLYRLFRKSNLKPFERDISTEIYQAGSTPCNGVEGFNCYFPLQSYGFQPTNGVGYQPYRVVVLSFELLHAPATVCGPKKSTNLVKNKCVNFNFNGLTGTGVLTESNKKFLPFQQFGRDIADTTDAVRDPQTLEILDITPCSFGGVSVITPGTNTSNQVAVLYQDVNCTEVPVAIHADQLTPTWRVYSTGSNVFQTRAGCLIGAEHVNNSYECDIPIGAGICASYQTQTNSPSGAGSHHHHHHHHHH

SEQ ID NO: 4363 - protein, 715 aa, Artificial Sequence
  Description of Artificial Sequence: Synthetic polypeptide
MGILPSPGMPALLSLVSLLSVLLMGCVAETGTQCVNLTTRTQLPPAYTNSFTRGVYYPDKVFRSSVLHSTQDLFLPFFSNVTWFHAIHVSGTNGTKRFDNPVLPFNDGVYFASTEKSNIIRGWIFGTTLDSKTQSLLIVNNATNVVIKVCEFQFCNDPFLGVYYHKNNKSWMESEFRVYSSANNCTFEYVSQPFLMDLEGKQGNFKNLREFVFKNIDGYFKIYSKHTPINLVRDLPQGFSALEPLVDLPIGINITRFQTLLALHRSYLTPGDSSSGWTAGAAAYYVGYLQPRTFLLKYNENGTITDAVDCALDPLSETKCLLKSFTVEKGIYQTSNFRVQPTESIVRFPNITNLCPFGEVFNATRFASVYAWNRKRISNCVADYSVLYNSASFSTFKCYGVSPTKLNDLCFTNVYADSFVIRGDEVRQIAPGQTGKIADYNYKLPDDFTGCVIAWNSNNLDSKVGGNYNYLYRLFRKSNLKPFERDISTEIYQAGSTPCNGVEGFNCYFPLQSYGFQPTNGVGYQPYRVVVLSFELLHAPATVCGPKKSTNLVKNKCVNFNFNGLTGTGVLTESNKKFLPFQQFGRDIADTTDAVRDPQTLEILDITPCSFGGVSVITPGTNTSNQVAVLYQDVNCTEVPVAIHADQLTPTWRVYSTGSNVFQTRAGCLIGAEHVNNSYECDIPIGAGICASYQTQTNSPSGAGSHHHHHHHHHH

SEQ ID NO: 4364 - protein, 715 aa, Artificial Sequence
  Description of Artificial Sequence: Synthetic polypeptide
MGILPSPGMPALLSLVSLLSVLLMGCVAETGTQCVNLTTRTQLPPAYTNSFTRGVYYPDKVFRSSVLHSTQDLFLPFFSNVTWFHAIHVSGTNGTKRFDNPVLPFNDGVYFASTEKSNIIRGWIFGTTLDSKTQSLLIVNNATNVVIKVCEFQFCNDPFLGVYYHKNNKSWMESEFRVYSSANNCTFEYVSQPFLMDLEGKQGNFKNLREFVFKNIDGYFKIYSKHTPINLVRDLPQGFSALEPLVDLPIGINITRFQTLLALHRSYLTPGDSSSGWTAGAAAYYVGYLQPRTFLLKYNENGTITDAVDCALDPLSETKCTLKSFTVEKGIYQTSNFRVQPTESIVRFPNITNLCPFGEVFNATRFASVYAWNRKRISNCVADYSVLYNSASFSTFKCYGVSPTKLNDLCFTNVYADVFVIRGDEVRQIAPGQTGKIADYNYKLPDDFTGCVIAWNSNNLDSKVGGNYNYLYRLFRKSNLKPFERDISTEIYQAGSTPCNGVEGFNCYFPLQSYGFQPTNGVGYQPYRVVVLSFELLHAPATVCGPKKSTNLVKNKCVNFNFNGLTGTGVLTESNKKFLPFQQFGRDIADTTDAVRDPQTLEILDITPCSFGGVSVITPGTNTSNQVAVLYQDVNCTEVPVAIHADQLTPTWRVYSTGSNVFQTRAGCLIGAEHVNNSYECDIPIGAGICASYQTQTNSPSGAGSHHHHHHHHHH

SEQ ID NO: 4365 - protein, 715 aa, Artificial Sequence
  Description of Artificial Sequence: Synthetic polypeptide
MGILPSPGMPALLSLVSLLSVLLMGCVAETGTQCVNLTTRTQLPPAYTNSFTRGVYYPDKVFRSSVLHSTQDLFLPFFSNVTWFHAIHVSGTNGTKRFDNPVLPFNDGVYFASTEKSNIIRGWIFGTTLDSKTQSLLIVNNATNVVIKVCEFQFCNDPFLGVYYHKNNKSWMESEFRVYSSANNCTFEYVSQPFLMDLEGKQGNFKNLREFVFKNIDGYFKIYSKHTPINLVRDLPQGFSALEPLVDLPIGINITRFQTLLALHRSYLTPGDSSSGWTAGAAAYYVGYLQPRTFLLKYNENGTITDAVDCALDPLSETKCTLKSFTVEKGIYQTSNFRVQPTESIVRFPNITNLCPFGEVFNATRFASVYAWNRKRISNCVADYSVLYNSASFSTFKCYGVSPTKLNDLCFTNVYADSFVIRGDEVRQIAPGQTGKIADYNYKLPDDFTGCVIAWNSNNLDSKVGGNYNYLYRLFRKSNLKPFERDISTEIYQAGSTPCNGVEGFNCYFPLQSYGFQPTNGVGYQPYRVVVLSFEPLHAPATVCGPKKSTNLVKNKCVNFNFNGLTGTGVLTESNKKFLPFQQFGRDIADTTDAVRDPQTLEILDITPCSFGGVSVITPGTNTSNQVAVLYQDVNCTEVPVAIHADQLTPTWRVYSTGSNVFQTRAGCLIGAEHVNNSYECDIPIGAGICASYQTQTNSPSGAGSHHHHHHHHHH

SEQ ID NO: 4366 - protein, 715 aa, Artificial Sequence
  Description of Artificial Sequence: Synthetic polypeptide
MGILPSPGMPALLSLVSLLSVLLMGCVAETGTQCVNLTTRTQLPPAYTNSFTRGVYYPDKVFRSSVLHSTQDLFLPFFSNVTWFHAIHVSGTNGTKRFDNPVLPFNDGVYFASVEKSNIIRGWIFGTTLDSKTQSLLIVNNATNVVIKVCEFQFCNDPFLGVYYHKNNKSWMESEFRVYSSANNCTFEYVSQPFLMDLEGKQGNFKNLREFVFKNIDGYFKIYSKHTPINLVRDLPQGFSALEPLVDLPIGINITRFQTLLALHRSYLTPGDSSSGWTAGAAAYYVGYLQPRTFLLKYNENGTITDAVDCALDPLSETKCTLKSFTVEKGIYQTSNFRVQPTESIVRFPNITNLCPFGEVFNATRFASVYAWNRKRISNCVADYSVLYNSASFSTFKCYGVSPTKLNDLCFTNVYADSFVIRGDEVRQIAPGQTGKIADYNYKLPDDFTGCVIAWNSNNLDSKVGGNYNYLYRLFRKSNLKPFERDISTEIYQAGSTPCNGVEGFNCYFPLQSYGFQPTNGVGYQPYRVVVLSFELLHAPATVCGPKKSTNLVKNKCVNFNFNGLTGTGVLTESNKKFLPFQQFGRDIADTTDAVRDPQTLEILDITPCSFGGVSVITPGTNTSNQVAVLYQDVNCTEVPVAIHADQLTPTWRVYSTGSNVFQTRAGCLIGAEHVNNSYECDIPIGAGICASYQTQTNSPSGAGSHHHHHHHHHH

SEQ ID NO: 4367 - protein, 715 aa, Artificial Sequence
  Description of Artificial Sequence: Synthetic polypeptide
MGILPSPGMPALLSLVSLLSVLLMGCVAETGTQCVNLTTRTQLPPAYTNSFTRGVYYPDKVFRSSVLHSTQDLFLPFFSNVTWFHAIHVSGTNGTKRFDNPVLPFNDGVYFASTEKSNIIRGWIFGTTLDSKTQSLLIVNNATNVVIKVCEFQFCNDPFLGVYYHKNNKSWMESEFRVYSSANNCTFEYVSQPFLMDLEGKQGNFKNLREFVFKNIDGYFKIYSKHTPINLVRDLPQGFSALEPLVDLPIGINITRFQTLLALHRSYLTPGDSSSGWTAGAAAYYVGYLQPRTFLLKYNENGTITDAVDCALDPLSETKCTLKSFTVEKGIYQTSNFRVQPTESIVRFPNITNLCPFGEVFNATRFASVYAWNRKRISNCVADYSVLYNSASFSTFKCYGVSPTKLNDLCFTNVYADSFVIRGDEVRQIAPGQTGKIADYNYKLPDDFTGCVIAWNSNNLDSKVGGNYNYLYRLFRKSNLKPFERDISTEIYQAGSTPCNGVEGFNCYFPLQSYGFQPTNGVGYQPYRVVVLSFELEHAPATVCGPKKSTNLVKNKCVNFNFNGLTGTGVLTESNKKFLPFQQFGRDIADTTDAVRDPQTLEILDITPCSFGGVSVITPGTNTSNQVAVLYQDVNCTEVPVAIHADQLTPTWRVYSTGSNVFQTRAGCLIGAEHVNNSYECDIPIGAGICASYQTQTNSPSGAGSHHHHHHHHHH

SEQ ID NO: 4368 - protein, 715 aa, Artificial Sequence
  Description of Artificial Sequence: Synthetic polypeptide
MGILPSPGMPALLSLVSLLSVLLMGCVAETGTQCVNLTTRTQLPPAYTNSFTRGVYYPDKVFRSSVLHSTQDLFLPFFSNVTWFHAIHVSGTNGTKRFDNPVLPFNDGVYFASTEKSNIIRGWIFGTTLDSKTQSLLIVNNATNVVIKVCEFQFCNDPFLGVYYHKNNKSWMESEFRVYSSANNCTFEYVSQPFLMDLEGKQGNFKNLREFVFKNIDGYFKIYSKHTPINLVRDLPQGFSALEPLVDLPIGINITRFQTLLALHRSYLTPGDSSSGWTAGAAAYYVGYLQPRTFLLKYNENGTITDAVDCALDPLSETKCTLKSFTVEKGIYQTSNFRVQPTESIVRFPNITNLCPFGEVFNATRFASVYAWNRKRISNCVADYSVLYNSASFSTFKCYGVSPTKLNDLCFTNVYADSFVIRGDEVRQIAPGQTGKIADYNYKLPDDFTGCVIAWNSNNLDSKVGGNYNYLYRLFRKSNLKPFERDISTEWYQAGSTPCNGVEGFNCYFPLQSYGFQPTNGVGYQPYRVVVLSFELLHAPATVCGPKKSTNLVKNKCVNFNFNGLTGTGVLTESNKKFLPFQQFGRDIADTTDAVRDPQTLEILDITPCSFGGVSVITPGTNTSNQVAVLYQDVNCTEVPVAIHADQLTPTWRVYSTGSNVFQTRAGCLIGAEHVNNSYECDIPIGAGICASYQTQTNSPSGAGSHHHHHHHHHH

SEQ ID NO: 4369 - protein, 715 aa, Artificial Sequence
  Description of Artificial Sequence: Synthetic polypeptide
MGILPSPGMPALLSLVSLLSVLLMGCVAETGTQCVNLTTRTQLPPAYTNSFTRGVYYPDKVFRSSVLHSTQDLFLPFFSNVTWFHAIHVSGTNGTKRFDNPVLPFNDGVYFASTEKSNIIRGWIFGTTLDSKTQSLLIVNNATNVVIKVCEFQFCNDPFLGVYYHKNNKSWMESEFRVYSSANNCTFEYVSQPFLMDLEGKQGNFKNLREFVFKNIDGYFKIYSKHTPINLVRDLPQGFSALEPLVDLPIGINITRFQTLLALHRSYLTPGDSSSGWTAGAAAYYVGYLQPRTFLLKYNENGTITDAVDCALDPLSETKCTLKSFTVEKGIYQTSNFRVQPTESIVRFPNITNSCPFGEVFNATRFASVYAWNRKRISNCVADYSVLYNSASFSTFKCYGVSPTKLNDLCFTNVYADSFVIRGDEVRQIAPGQTGKIADYNYKLPDDFTGCVIAWNSNNLDSKVGGNYNYLYRLFRKSNLKPFERDISTEIYQAGSTPCNGVEGFNCYFPLQSYGFQPTNGVGYQPYRVVVLSFELLHAPATVCGPKKSTNLVKNKCVNFNFNGLTGTGVLTESNKKFLPFQQFGRDIADTTDAVRDPQTLEILDITPCSFGGVSVITPGTNTSNQVAVLYQDVNCTEVPVAIHADQLTPTWRVYSTGSNVFQTRAGCLIGAEHVNNSYECDIPIGAGICASYQTQTNSPSGAGSHHHHHHHHHH

SEQ ID NO: 4370 - protein, 715 aa, Artificial Sequence
  Description of Artificial Sequence: Synthetic polypeptide
MGILPSPGMPALLSLVSLLSVLLMGCVAETGTQCVNLTTRTQLPPAYTNSFTRGVYYPDKVFRSSVLHSTQDLFLPFFSNVTWFHAIHVSGTNGTKRFDNPVLPFNDGVYFASTEKSNIIRGWIFGTTLDSKTQSLLIVNNATNVVIKVCEFQFCNDPFLGVYYHKNNKSWMESEFRVYSSANNCTFEYVSQPFLMDLEGKQGNFKNLREFVFKNIDGYFKIYSKHTPINLVRDLPQGFSALEPLVDLPIGINITRFQTLLALHRSYQTPGDSSSGWTAGAAAYYVGYLQPRTFLLKYNENGTITDAVDCALDPLSETKCTLKSFTVEKGIYQTSNFRVQPTESIVRFPNITNLCPFGEVFNATRFASVYAWNRKRISNCVADYSVLYNSASFSTFKCYGVSPTKLNDLCFTNVYADSFVIRGDEVRQIAPGQTGKIADYNYKLPDDFTGCVIAWNSNNLDSKVGGNYNYLYRLFRKSNLKPFERDISTEIYQAGSTPCNGVEGFNCYFPLQSYGFQPTNGVGYQPYRVVVLSFELLHAPATVCGPKKSTNLVKNKCVNFNFNGLTGTGVLTESNKKFLPFQQFGRDIADTTDAVRDPQTLEILDITPCSFGGVSVITPGTNTSNQVAVLYQDVNCTEVPVAIHADQLTPTWRVYSTGSNVFQTRAGCLIGAEHVNNSYECDIPIGAGICASYQTQTNSPSGAGSHHHHHHHHHH

SEQ ID NO: 4371 - protein, 715 aa, Artificial Sequence
  Description of Artificial Sequence: Synthetic polypeptide
MGILPSPGMPALLSLVSLLSVLLMGCVAETGTQCVNLTTRTQLPPAYTNSFTRGVYYPDKVFRSSVLHSTQDLFLPFFSNVTWFHAIHVSGTNGTKRFDNPVLPFNDGVYFASTEKSNIIRGWIFGTTLDSKTQSLLIVNNATNVVIKVCEFQFCNDPFLGVYYHKNNKSWMESEFRVYSSANNCTFEYVSQPFLMDLEGKQGNFKNLREFVFKNIDGYFKIYSKHTPINLVRDLPQGFSALEPLVDLPIGINITRFQTLLALHRSYLTPGDSSSGWTAGAAAYYVGYLQPRTFLLKYNENGTITDAVDCALDPLSETKCTLKSFTVEKGIYQTSNFRVQPTESIVRFPNITNLCPFGEVFNATRFASVYAWNRKRISNCVADYSVLYNSASFSTFKCYGVSPTKLNDLCFTNVYADSFVIRGDEVRQIAPGQTGKIADYNYKLPDDFTGCVIAWNSNNLDSKVGGNYNYLYRLFRKSNLKPFERDISTEIYQAGSTPCNGVEGFNCYFPLQSYGFQPTNGVGYQPYRVVVLSFELLHAPATVCGPKKSTNLVKNKCVNFNFNGLTGTGVLTESNKKFLPFQQFGRDIADTTDAVRDPQTLEILDITPCSFGGVSVITPGTNTSNQVAVLYQDVNCTEVPWAIHADQLTPTWRVYSTGSNVFQTRAGCLIGAEHVNNSYECDIPIGAGICASYQTQTNSPSGAGSHHHHHHHHHH

SEQ ID NO: 4372 - protein, 715 aa, Artificial Sequence
  Description of Artificial Sequence: Synthetic polypeptide
MGILPSPGMPALLSLVSLLSVLLMGCVAETGTQCVNLTTRTQLPPAYTNSFTRGVYYPDKVFRSSVLHSTQDLFLPFFSNVTWFHACHVSGTNGTKRFDNPVLPFNDGVYFASTEKSNIIRGWIFGTTLDSKTQSLLIVNNATNVVIKVCEFQFCNDPFLGVYYHKNNKSWMESEFRVYSSANNCTFEYVSQPFLMDLEGKQGNFKNLREFVFKNIDGYFKIYSKHTPINLVRDLPQGFSALEPLVDLPIGINITRFQTLLALHRSYLTPGDSSSGWTAGAAAYYVGYLQPRTFLLKYNENGTITDAVDCALDPLSETKCTLKSFTVEKGIYQTSNFRVQPTESIVRFPNITNLCPFGEVFNATRFASVYAWNRKRISNCVADYSVLYNSASFSTFKCYGVSPTKLNDLCFTNVYADSFVIRGDEVRQIAPGQTGKIADYNYKLPDDFTGCVIAWNSNNLDSKVGGNYNYLYRLFRKSNLKPFERDISTEIYQAGSTPCNGVEGFNCYFPLQSYGFQPTNGVGYQPYRVVVLSFELLHAPATVCGPKKSTNLVKNKCVNFNFNGLTGTGVLTESNKKFLPFQQFGRDIADTTDAVRDPQTLEILDITPCSFGGVSVITPGTNTSNQVAVLYQDVNCTEVPVAIHADQLTPTWRVYSTGSNVFQTRAGCLIGAEHVNNSYECDIPIGAGICASYQTQTNSPSGAGSHHHHHHHHHH

SEQ ID NO: 4373 - protein, 715 aa, Artificial Sequence
  Description of Artificial Sequence: Synthetic polypeptide
MGILPSPGMPALLSLVSLLSVLLMGCVAETGTQCVNLTTRTQLPPAYTNSFTRGVYYPDKVFRSSVLHSTQDLFLPFFSNVTWFHAQHVSGTNGTKRFDNPVLPFNDGVYFASTEKSNIIRGWIFGTTLDSKTQSLLIVNNATNVVIKVCEFQFCNDPFLGVYYHKNNKSWMESEFRVYSSANNCTFEYVSQPFLMDLEGKQGNFKNLREFVFKNIDGYFKIYSKHTPINLVRDLPQGFSALEPLVDLPIGINITRFQTLLALHRSYLTPGDSSSGWTAGAAAYYVGYLQPRTFLLKYNENGTITDAVDCALDPLSETKCTLKSFTVEKGIYQTSNFRVQPTESIVRFPNITNLCPFGEVFNATRFASVYAWNRKRISNCVADYSVLYNSASFSTFKCYGVSPTKLNDLCFTNVYADSFVIRGDEVRQIAPGQTGKIADYNYKLPDDFTGCVIAWNSNNLDSKVGGNYNYLYRLFRKSNLKPFERDISTEIYQAGSTPCNGVEGFNCYFPLQSYGFQPTNGVGYQPYRVVVLSFELLHAPATVCGPKKSTNLVKNKCVNFNFNGLTGTGVLTESNKKFLPFQQFGRDIADTTDAVRDPQTLEILDITPCSFGGVSVITPGTNTSNQVAVLYQDVNCTEVPVAIHADQLTPTWRVYSTGSNVFQTRAGCLIGAEHVNNSYECDIPIGAGICASYQTQTNSPSGAGSHHHHHHHHHH

SEQ ID NO: 4374 - protein, 715 aa, Artificial Sequence
  Description of Artificial Sequence: Synthetic polypeptide
MGILPSPGMPALLSLVSLLSVLLMGCVAETGTQCVNLTTRTQLPPAYTNSFTRGVYYPDKVFRSSVLHSTQDLFLPFFSNVTWFHAIHVSGTNGTKRFDNPVLPFNDGVYFASTEKSNIIRGWIFGTTLDSKTQSLLIVNNATNVVIKVCEFQFCNDPFLGVYYHKNNKSWMESEFRVYSSANNCTFEYVSQPFLMDLEGKQGNFKNLREFVFKNIDGYFKIYSKHTPINLVRDLPQGFSALEPLVDLPIGINITRFQTLLALHRSYLTPGDSSSGWTAGAAAYYVGYLQPRTFLLKYNENGTITDAVDCALDPLSETKCTLKSFTVEKGIYQTSNFRVQPTESIVRFPNITNLCPFGEVFNATRFASVYAWNRKRISNCVADYSVLYNSASFSTFKCYGVSPTKLNDLCFTNVYADIFVIRGDEVRQIAPGQTGKIADYNYKLPDDFTGCVIAWNSNNLDSKVGGNYNYLYRLFRKSNLKPFERDISTEIYQAGSTPCNGVEGFNCYFPLQSYGFQPTNGVGYQPYRVVVLSFELLHAPATVCGPKKSTNLVKNKCVNFNFNGLTGTGVLTESNKKFLPFQQFGRDIADTTDAVRDPQTLEILDITPCSFGGVSVITPGTNTSNQVAVLYQDVNCTEVPVAIHADQLTPTWRVYSTGSNVFQTRAGCLIGAEHVNNSYECDIPIGAGICASYQTQTNSPSGAGSHHHHHHHHHH

SEQ ID NO: 4375 - protein, 715 aa, Artificial Sequence
  Description of Artificial Sequence: Synthetic polypeptide
MGILPSPGMPALLSLVSLLSVLLMGCVAETGTQCVNLTTRTQLPPAYTNSFTRGVYYPDKVFRSSVLHSTQDLFLPFFSNVTWFHAIHVSGTNGTKRFDNPVLPFNDGVYFASTEKSNIIRGWIFGTTLDSKTQSLLIVNNATNVVIKVCEFQFCNDPFLGVYYHKNNKSWMESEFRVYSSANNCTFEYVSQPFLMDLEGKQGNFKNLREFVFKNIDGYFKIYSKHTPINLVRDLPQGFSALEPEVDLPIGINITRFQTLLALHRSYLTPGDSSSGWTAGAAAYYVGYLQPRTFLLKYNENGTITDAVDCALDPLSETKCTLKSFTVEKGIYQTSNFRVQPTESIVRFPNITNLCPFGEVFNATRFASVYAWNRKRISNCVADYSVLYNSASFSTFKCYGVSPTKLNDLCFTNVYADSFVIRGDEVRQIAPGQTGKIADYNYKLPDDFTGCVIAWNSNNLDSKVGGNYNYLYRLFRKSNLKPFERDISTEIYQAGSTPCNGVEGFNCYFPLQSYGFQPTNGVGYQPYRVVVLSFELLHAPATVCGPKKSTNLVKNKCVNFNFNGLTGTGVLTESNKKFLPFQQFGRDIADTTDAVRDPQTLEILDITPCSFGGVSVITPGTNTSNQVAVLYQDVNCTEVPVAIHADQLTPTWRVYSTGSNVFQTRAGCLIGAEHVNNSYECDIPIGAGICASYQTQTNSPSGAGSHHHHHHHHHH

SEQ ID NO: 4376 - protein, 715 aa, Artificial Sequence
  Description of Artificial Sequence: Synthetic polypeptide
MGILPSPGMPALLSLVSLLSVLLMGCVAETGTQCVNLTTRTQLPPAYTNSFTRGVYYPDKVFRSSVLHSTQDLFLPFFSNVTWFHAIHVSGTNGTKRFDNPVLPFNDGVYFASTEKSNIIRGWIFGTTLDSKTQSLLIVNNATNVVIKVCEFQFCNDPFLGVYYHKNNKSWMESEFRVYSSANNCTFEYVSQPFLMDLEGKQGNFKNLREFVFKNIDGYFKIYSKHTPINLVRDLPQGFSALEPLVDLPIGINITRFQTLLALHRSYLTPGDSSSGWTAGAAAYYVGYLQPRTFLLKYNENGTITDAVDCALDPLSETKCTLKSFTVEKGIYQTSNFRVQPTESIVRFPNITNLCPFGEVFNATRFASVYAWNRKRISNCVADYSVLYNSASFSTFKCYGVSPTKLNDLCFTNVYADSFVIRGDEVRQIAPGQTGKIADYNYKLPDDFTGCVIAWNSNNLDSKVGGNYNYLYRLFRKSNLKPFERDISTEIYQAGSTPCNGVEGFNCYFPLQSYGFQPTNGVGYQPYRVVVLSFELLHAPATVCGPKKSTNLVKNKCVNFNFNGLTGTGVLTESNKKFLPFQQFGRDIADTTDAVRDPQTLEILDITPCSFGGVSVITPDTNTSNQVAVLYQDVNCTEVPVAIHADQLTPTWRVYSTGSNVFQTRAGCLIGAEHVNNSYECDIPIGAGICASYQTQTNSPSGAGSHHHHHHHHHH

SEQ ID NO: 4377 - protein, 715 aa, Artificial Sequence
  Description of Artificial Sequence: Synthetic polypeptide
MGILPSPGMPALLSLVSLLSVLLMGCVAETGTQCVNLTTRTQLPPAYTNSFTRGVYYPDKVFRSSVLHSTQDLFLPFFSNVTWFHAIHVSGTNGTKRFDNPVLPFNDGVYFASTEKSNIIRGWIFGTTLDSKTQSLLIVNNATNVVIKVCEFQFCNDPFLGVYYHKNNKSWMESEFRVYSSANNCTFEYVSQPFLMDLEGKQGNFKNLREFVFKNIDGYFKIYSKHTPINLVRDLPQGFSALEPLVDLPIGINITRFQTLLALHRSYLTPGDSSSGWTAGAAAYYVGYLQPRTFLLKYNENGTITDAVDCALDPLSETKCTLKSFTVEKGIYQTSNFRVQPTESIVRFPNITNLCPFGEVFNATRFASVYAWNRKRISNCVADYSVLYNSASFSTFKCYGVSPTKLNDLCFTNVYADSFVIRGDEVRQIAPGQTGKIADYNYKLPDDFTGCVIAWNSNNLDSKVGGNYNYLYRLFRKSNLKPWERDISTEIYQAGSTPCNGVEGFNCYFPLQSYGFQPTNGVGYQPYRVVVLSFELLHAPATVCGPKKSTNLVKNKCVNFNFNGLTGTGVLTESNKKFLPFQQFGRDIADTTDAVRDPQTLEILDITPCSFGGVSVITPGTNTSNQVAVLYQDVNCTEVPVAIHADQLTPTWRVYSTGSNVFQTRAGCLIGAEHVNNSYECDIPIGAGICASYQTQTNSPSGAGSHHHHHHHHHH

SEQ ID NO: 4378 - protein, 715 aa, Artificial Sequence
  Description of Artificial Sequence: Synthetic polypeptide
MGILPSPGMPALLSLVSLLSVLLMGCVAETGTQCVNLTTRTQLPPAYTNSFTRGVYYPDKVFRSSVLHSTQDLFLPFFSNVTWFHAIHVSGTNGTKRFDNPVLPFNDGVYFASTEKSNIIRGWIFGTTLDSKTQSLLIVNNATNVVIKVCEFQFCNDPFLGVYYHKNNKSWMESEFRVYSSANNCTFEYVSQPFLMDLEGKQGNFKNLREFVFKNIDGYFKIYSKHTPINLVRDLPQGFSALEPLVDLPIGINITRFQTLLALHRSYLTPGDSSSGWTAGAAAYYVGYLQPRTFLLKYNENGTITDAVDCALDPLSETKCTLKSFTVEKGIYQTSNFRVQPTESIVRFPNITNPCPFGEVFNATRFASVYAWNRKRISNCVADYSVLYNSASFSTFKCYGVSPTKLNDLCFTNVYADSFVIRGDEVRQIAPGQTGKIADYNYKLPDDFTGCVIAWNSNNLDSKVGGNYNYLYRLFRKSNLKPFERDISTEIYQAGSTPCNGVEGFNCYFPLQSYGFQPTNGVGYQPYRVVVLSFELLHAPATVCGPKKSTNLVKNKCVNFNFNGLTGTGVLTESNKKFLPFQQFGRDIADTTDAVRDPQTLEILDITPCSFGGVSVITPGTNTSNQVAVLYQDVNCTEVPVAIHADQLTPTWRVYSTGSNVFQTRAGCLIGAEHVNNSYECDIPIGAGICASYQTQTNSPSGAGSHHHHHHHHHH

SEQ ID NO: 4379 - protein, 715 aa, Artificial Sequence
  Description of Artificial Sequence: Synthetic polypeptide
MGILPSPGMPALLSLVSLLSVLLMGCVAETGTQCVNLTTRTQLPPAYTNSFTRGVYYPDKVFRSSVLHSTQDLFLPFFSNVTWFHAIHVSGTNGTKRFDNPVLPFNDGVYFASTEKSNIIRGWIFGTTLDSKTQSLLIVNNATNVVIVVCEFQFCNDPFLGVYYHKNNKSWMESEFRVYSSANNCTFEYVSQPFLMDLEGKQGNFKNLREFVFKNIDGYFKIYSKHTPINLVRDLPQGFSALEPLVDLPIGINITRFQTLLALHRSYLTPGDSSSGWTAGAAAYYVGYLQPRTFLLKYNENGTITDAVDCALDPLSETKCTLKSFTVEKGIYQTSNFRVQPTESIVRFPNITNLCPFGEVFNATRFASVYAWNRKRISNCVADYSVLYNSASFSTFKCYGVSPTKLNDLCFTNVYADSFVIRGDEVRQIAPGQTGKIADYNYKLPDDFTGCVIAWNSNNLDSKVGGNYNYLYRLFRKSNLKPFERDISTEIYQAGSTPCNGVEGFNCYFPLQSYGFQPTNGVGYQPYRVVVLSFELLHAPATVCGPKKSTNLVKNKCVNFNFNGLTGTGVLTESNKKFLPFQQFGRDIADTTDAVRDPQTLEILDITPCSFGGVSVITPGTNTSNQVAVLYQDVNCTEVPVAIHADQLTPTWRVYSTGSNVFQTRAGCLIGAEHVNNSYECDIPIGAGICASYQTQTNSPSGAGSHHHHHHHHHH

SEQ ID NO: 4380 - protein, 715 aa, Artificial Sequence
  Description of Artificial Sequence: Synthetic polypeptide
MGILPSPGMPALLSLVSLLSVLLMGCVAETGTQCVNLTTRTQLPPAYTNSFTRGVYYPDKVFRSSVLHSTQDLFLPFFSNVTWFHAIHVSGTNGTKRFDNPVLPFNDGVYFASTEKSNIIRGWIFGTTLDSKTQSLLIVNNATNVVIKVCEFQFCNDPFLGVYYHKNNKSWMESEFRVYSSANNCTFEYVSQPFLMDLEGKQGNFKNLREFVFKNIDGYFKIYSKHTPINLVRDLPQGFSALEPLVDLPIGINITRFQTLLALHRSYLTPGDSSSGWTAGAAAYYVGYLQPRTFLLKYNENGTITDAVDCALDPLSETKCTLKSFTVEKGIYQTSNFRVQPTESIVRFPNITNLCPFGEVFNATRFASVYAWNRKRISNCVADYSVLYNSASFSTFKCYGVSPTKLNDLCFTNVYADSFVIRGDEVRQIAPGQTGKIADYNYKLPDDFTGCVIAWNSNNLDSKVGGNYNYLYRLFRKSNLKPFERDISTEIYQAGSTPCNGVEGFNCYFPLQSYGFQPTNGVGYQPYRVVVLSFELLHAPATVCGPKKSTNLVKNKCVNFNFNGLTGTGVLTESNKKFLPFQQFGRDPADTTDAVRDPQTLEILDITPCSFGGVSVITPGTNTSNQVAVLYQDVNCTEVPVAIHADQLTPTWRVYSTGSNVFQTRAGCLIGAEHVNNSYECDIPIGAGICASYQTQTNSPSGAGSHHHHHHHHHH

SEQ ID NO: 4381 - protein, 715 aa, Artificial Sequence
  Description of Artificial Sequence: Synthetic polypeptide
MGILPSPGMPALLSLVSLLSVLLMGCVAETGTQCVNLTTRTQLPPAYTNSFTRGVYYPDKVFRSSVLHSTQDLFLPFFSNVTWFHASHVSGTNGTKRFDNPVLPFNDGVYFASTEKSNIIRGWIFGTTLDSKTQSLLIVNNATNVVIKVCEFQFCNDPFLGVYYHKNNKSWMESEFRVYSSANNCTFEYVSQPFLMDLEGKQGNFKNLREFVFKNIDGYFKIYSKHTPINLVRDLPQGFSALEPLVDLPIGINITRFQTLLALHRSYLTPGDSSSGWTAGAAAYYVGYLQPRTFLLKYNENGTITDAVDCALDPLSETKCTLKSFTVEKGIYQTSNFRVQPTESIVRFPNITNLCPFGEVFNATRFASVYAWNRKRISNCVADYSVLYNSASFSTFKCYGVSPTKLNDLCFTNVYADSFVIRGDEVRQIAPGQTGKIADYNYKLPDDFTGCVIAWNSNNLDSKVGGNYNYLYRLFRKSNLKPFERDISTEIYQAGSTPCNGVEGFNCYFPLQSYGFQPTNGVGYQPYRVVVLSFELLHAPATVCGPKKSTNLVKNKCVNFNFNGLTGTGVLTESNKKFLPFQQFGRDIADTTDAVRDPQTLEILDITPCSFGGVSVITPGTNTSNQVAVLYQDVNCTEVPVAIHADQLTPTWRVYSTGSNVFQTRAGCLIGAEHVNNSYECDIPIGAGICASYQTQTNSPSGAGSHHHHHHHHHH

SEQ ID NO: 4382 - protein, 715 aa, Artificial Sequence
  Description of Artificial Sequence: Synthetic polypeptide
MGILPSPGMPALLSLVSLLSVLLMGCVAETGTQCVNLTTRTQLPPAYTNSFTRGVYYPDKVFRSSVLHSTQDLFLPFFSNVTWFHAIHVSGTNGTKRFDNPVLPFNDGVYFASTEKSNIIRGWIFGTTLDSKTQSLLIVNNATNVVIKVCEFQFCNDPFLGVYYHKNNKSWMESEFRVYSSANNCTFEYVSQPFLMDLEGKQGNFKNLREFVFKNIDGYFKIYSKHTPINLVRDLPQGFSALEPLVDLPIGINITRFQTLLALHRSYLTPGDSSSGWTAGAAAYYVGYLQPRTFLLKYNENGTITDAVDCALDPLSETKCTLKSFTVEKGIYQTSNFRVQPTESIVRFPNITNLCPFGEVFNATRFASVYAWNRKRISNCVADYSVLYNSASFSTFKCYGVSPTKLNDLCFTNVYADSFVIRGDEVRQIAPGQTGKIADYNYKLPDDFTGCVIAWNSNNLDSKVGGNYNYLYRLFRKSNLKPFERDISTEIYQAGSTPCNGVEGFNCNFPLQSYGFQPTNGVGYQPYRVVVLSFELLHAPATVCGPKKSTNLVKNKCVNFNFNGLTGTGVLTESNKKFLPFQQFGRDIADTTDAVRDPQTLEILDITPCSFGGVSVITPGTNTSNQVAVLYQDVNCTEVPVAIHADQLTPTWRVYSTGSNVFQTRAGCLIGAEHVNNSYECDIPIGAGICASYQTQTNSPSGAGSHHHHHHHHHH

SEQ ID NO: 4383 - protein, 715 aa, Artificial Sequence
  Description of Artificial Sequence: Synthetic polypeptide
MGILPSPGMPALLSLVSLLSVLLMGCVAETGTQCVNLTTRTQLPPAYTNSFTRGVYYPDKVFRSSVLHSTQDLFLPFFSNVTQFHAIHVSGTNGTKRFDNPVLPFNDGVYFASTEKSNIIRGWIFGTTLDSKTQSLLIVNNATNVVIKVCEFQFCNDPFLGVYYHKNNKSWMESEFRVYSSANNCTFEYVSQPFLMDLEGKQGNFKNLREFVFKNIDGYFKIYSKHTPINLVRDLPQGFSALEPLVDLPIGINITRFQTLLALHRSYLTPGDSSSGWTAGAAAYYVGYLQPRTFLLKYNENGTITDAVDCALDPLSETKCTLKSFTVEKGIYQTSNFRVQPTESIVRFPNITNLCPFGEVFNATRFASVYAWNRKRISNCVADYSVLYNSASFSTFKCYGVSPTKLNDLCFTNVYADSFVIRGDEVRQIAPGQTGKIADYNYKLPDDFTGCVIAWNSNNLDSKVGGNYNYLYRLFRKSNLKPFERDISTEIYQAGSTPCNGVEGFNCYFPLQSYGFQPTNGVGYQPYRVVVLSFELLHAPATVCGPKKSTNLVKNKCVNFNFNGLTGTGVLTESNKKFLPFQQFGRDIADTTDAVRDPQTLEILDITPCSFGGVSVITPGTNTSNQVAVLYQDVNCTEVPVAIHADQLTPTWRVYSTGSNVFQTRAGCLIGAEHVNNSYECDIPIGAGICASYQTQTNSPSGAGSHHHHHHHHHH

SEQ ID NO: 4384 - protein, 715 aa, Artificial Sequence
  Description of Artificial Sequence: Synthetic polypeptide
MGILPSPGMPALLSLVSLLSVLLMGCVAETGTQCVNLTTRTQLPPAYTNSFTRGVYYPDKVFRSSVLHSTQDLFLPFFSNVTWFHAIHVSGTNGTKRFDNPVLPFNDGVYFASTEKSNIIRGWIFGTTLDSKTQSLLIVNNATNVVIKVCEFQFCNDPFLGVYYHKNNKSWMESEFRVYSSANNCTFEYVSQPFLMDLEGKQGNFKNLREFVFKNIDGYFKIYSKHTPINLVRDLPQGFSALEPLVDLPIGINITRFQTLLALHRSYLTPGDSSSGWTAGAAAYYVGYLQPRTFLLKYNENGTITDAVDCALDPLSETKCTLKSFTVEKGIYQTSNFRVQPTESIVRFPNITNLCPFGEVFNATRFASSYAWNRKRISNCVADYSVLYNSASFSTFKCYGVSPTKLNDLCFTNVYADRFVIRGDEVRQIAPGQTGKIADYNYKLPDDFTGCVIAWNSNNLDAKVGGNYNYLYRLFRKSNLKPFERFISTEIYQAGSTPSNGVEGFNCYFPLQSYGFQPTNGVTYQPYRVVVLSFELLHAPHTVCGPKKSTNLVKNKCVNFNFNGLTGTGVLTESNKKFLPFQQFGRDIADTTDAVRDPQTLEILDITPCSFGGVSVITPGTNTSNQVAVLYQDVNCTEVPVAIHADQLTPTWRVYSTGSNVFQTRAGCLIGAEHVNNSYECDIPIGAGICASYQTQTNSPSGAGSHHHHHHHHHH

SEQ ID NO: 4385 - protein, 715 aa, Artificial Sequence
  Description of Artificial Sequence: Synthetic polypeptide
MGILPSPGMPALLSLVSLLSVLLMGCVAETGTQCVNLTTRTQLPPAYTNSFTRGVYYPDKVFRSSVLHSTQDLFLPFFSNVTWFHAIHVSGTNGTKRFDNPVLPFNDGVYFASTEKSNIIRGWIFGTTLDSKTQSLLIVNNATNVVIKVCEFQFCNDPFLGVYYHKNNKSWMESEFRVYSSANNCTFEYVSQPFLMDLEGKQGNFKNLREFVFKNIDGYFKIYSKHTPINLVRDLPQGFSALEPLVDLPIGINITRFQTLLALHRSYLTPGDSSSGWTAGAAAYYVGYLQPRTFLLKYNENGTITDAVDCALDPLSETKCTLKSFTVEKGIYQTSNFRVQPTTSIVRFPNITNLCPFGEVFNATRFASVYAWNRKRISNCVADYSVLYNSASFSTFKCYGVSPTKLNDLCFTNVYADSFVIRGDEVRQIAPGQTGKIADYNYKLPDDFTGCVIAWNSNNLDSKVGGNYNYLYRLFRKSNLKPFERDISTEIYQAGSTPCNGVEGFNCYFPLQSYGFQPTNGVGYQPYRVVVLSFELLHAPATVCGPKKSTNLVKNKCVNFNFNGLTGTGVLTESNKKFLPFQQFGRDIADTTDAVRDPQTLEILDITPCSFGGVSVITPGTNTSNQVAVLYQDVNCTEVPVAIHADQLTPTWRVYSTGSNVFQTRAGCLIGAEHVNNSYECDIPIGAGICASYQTQTNSPSGAGSHHHHHHHHHH

SEQ ID NO: 4386 - protein, 715 aa, Artificial Sequence
  Description of Artificial Sequence: Synthetic polypeptide
MGILPSPGMPALLSLVSLLSVLLMGCVAETGTQCVNLTTRTQLPPAYTNSFTRGVYYPDKVFRSSVLHSTQDLFLPFFSNVTWFHAIHVSGTNGTKRFDNPVLPFNDGVYFASTEKSNIIRGWIFGTTLDSKTQSLLIVNNATNVVIKVCEFQFCNDPFLGVYYHKNNKSWMESEFRVYSSANNCTFEYVSQPFLMDLEGKQGNFKNLREFVFKNIDGYFKIYSKHTPINLVRDLPQGFSALEPLVDLPIGINITRFQTLLALHRSYLTPGDSSSGWTAGAAAYYVGYLQPRTFLLKYNENGTITDAVDCALDPLSETKCTLKSFTVEKGIYQTSNFRVQPTESIVRFPNITNLCPFGEVFNATRFASVYAWNRKRISNCVADYSVLYNSASFSTFKCYGVSPTKLNDLCFTNVYADSFVIRGDEVRQIAPGQTGKIADYNYKLPDDFTGCVIAWNSNNLDSKVGGNYNYLYRLFRKSNLKPFERDISTEIYQAGSTPCNGVEGFNCYFPLQSYGFQPTNGVQYQPYRVVVLSFELLHAPATVCGPKKSTNLVKNKCVNFNFNGLTGTGVLTESNKKFLPFQQFGRDIADTTDAVRDPQTLEILDITPCSFGGVSVITPGTNTSNQVAVLYQDVNCTEVPVAIHADQLTPTWRVYSTGSNVFQTRAGCLIGAEHVNNSYECDIPIGAGICASYQTQTNSPSGAGSHHHHHHHHHH

SEQ ID NO: 4387 - protein, 715 aa, Artificial Sequence
  Description of Artificial Sequence: Synthetic polypeptide
MGILPSPGMPALLSLVSLLSVLLMGCVAETGTQCVNLTTRTQLPPAYTNSFTRGVYYPDKVFRSSVLHSTQDLFLPFFSNVTWFHAIHVSGTNGTKRFDNPVLPFNDGVYFASTEKSNIIRGWIFGTTLDSKTQSLLIVNNATNVVIKVCEFQFCNDPFLGVYYHKNNKSWMESEFRVYSSANNCTFEYVSQPFLMDLEGKQGNFKNLREFVFKNIDGYFKIYSKHTPINLVRDLPQGFSALEPLVDLPIGINITRFQTLLALHRSYLTPGDSSSGWTAGAAAYYVGYLQPRTFLLKYNENGTITDAVDCALDPLSETKCTLKSFTVEKGIYQTSNFRVQPTESIVRFPNITNLCPFGEVFNATRFASVYAWNRKRISNCVADYSVLYNSASFSTFKCYGVSPTKLNDLCFTNVYADSFVIRGDEVRQIAPGQTGKIADYNYKLPDDFTGCVIAWNSNNLDSKVGGNYNYLYRLFRKSNLKPFERDISTEIYQAGSTPCNGVEGFNCYFPLQSYGFQPTNGVGYQPYRVVVLSFERLHAPATVCGPKKSTNLVKNKCVNFNFNGLTGTGVLTESNKKFLPFQQFGRDIADTTDAVRDPQTLEILDITPCSFGGVSVITPGTNTSNQVAVLYQDVNCTEVPVAIHADQLTPTWRVYSTGSNVFQTRAGCLIGAEHVNNSYECDIPIGAGICASYQTQTNSPSGAGSHHHHHHHHHH

SEQ ID NO: 4388 - protein, 715 aa, Artificial Sequence
  Description of Artificial Sequence: Synthetic polypeptide
MGILPSPGMPALLSLVSLLSVLLMGCVAETGTQCVNLTTRTQLPPAYTNSFTRGVYYPDKVFRSSVLHSTQDLFLPFFSNVTWFHAIHVSGTNGTKRFDNPVLPFNDGVYFASTEKSNIIRGWIFGTTLDSKTQSLLIVNNATNVVIKVCEFQFCNDPFLGVYYHKNNKSWMESEFRVYSSANNCTFEYVSQPFLMDLEGKQGNFKNLREFVFKNIDGYFKIYSKHTPINLVRDLPQGFSALEPLVDLPIGINITRFQTLLALHRSYLTPGDSSSGWTAGAAAYYVGYLQPRTFLLKYNENGTITDAVDCALDPLSETKCTLKSFTVEKGIYQTSNFRVQPTESIVRFPNITNLCPFGEVFNATRFASVYAWNRKRISNCVADYSVLYNSASFSTFKCYGVSPTKLNDLCFTNVYADSFVIRGDEVRQIAPGQTGKIADYNYKLPDDFTGCVIAWNSNNLDSKVGGNYNYLYRLFRKSNLKPFERDISTEIYQAGSTPCNGVEGFNCYFPLQSYGFQPTNGVGQQPYRVVVLSFELLHAPATVCGPKKSTNLVKNKCVNFNFNGLTGTGVLTESNKKFLPFQQFGRDIADTTDAVRDPQTLEILDITPCSFGGVSVITPGTNTSNQVAVLYQDVNCTEVPVAIHADQLTPTWRVYSTGSNVFQTRAGCLIGAEHVNNSYECDIPIGAGICASYQTQTNSPSGAGSHHHHHHHHHH

SEQ ID NO: 4389 - protein, 715 aa, Artificial Sequence
  Description of Artificial Sequence: Synthetic polypeptide
MGILPSPGMPALLSLVSLLSVLLMGCVAETGTQCVNLTTRTQLPPAYTNSFTRGVYYPDKVFRSSVLHSTQDLFLPFFSNVTWFHAIHVSGTNGTKRFDNPVLPFNDGVYFASTEKSNIIRGWIFGTTLDSKTQSLLIVNNATNVVIKVCEFQFSNDPFLGVYYHKNNKSWMESEFRVYSSANNCTFEYVSQPFLMDLEGKQGNFKNLREFVFKNIDGYFKIYSKHTPINLVRDLPQGFSALEPLVDLPIGINITRFQTLLALHRSYLTPGDSSSGWTAGAAAYYVGYLQPRTFLLKYNENGTITDAVDCALDPLSETKCTLKSFTVEKGIYQTSNFRVQPTESIVRFPNITNLCPFGEVFNATRFASVYAWNRKRISNCVADYSVLYNSASFSTFKCYGVSPTKLNDLCFTNVYADSFVIRGDEVRQIAPGQTGKIADYNYKLPDDFTGCVIAWNSNNLDSKVGGNYNYLYRLFRKSNLKPFERDISTEIYQAGSTPCNGVEGFNCYFPLQSYGFQPTNGVGYQPYRVVVLSFELLHAPATVCGPKKSTNLVKNKCVNFNFNGLTGTGVLTESNKKFLPFQQFGRDIADTTDAVRDPQTLEILDITPCSFGGVSVITPGTNTSNQVAVLYQDVNCTEVPVAIHADQLTPTWRVYSTGSNVFQTRAGCLIGAEHVNNSYECDIPIGAGICASYQTQTNSPSGAGSHHHHHHHHHH

SEQ ID NO: 4390 - protein, 715 aa, Artificial Sequence
  Description of Artificial Sequence: Synthetic polypeptide
MGILPSPGMPALLSLVSLLSVLLMGCVAETGTQCVNLTTRTQLPPAYTNSFTRGVYYPDKVFRSSVLHSTQDLFLPFFSNVTWFHAIHVSGTNGTKRFDNPVLPFNDGVYFASTEKSNIIRGWIFGTTLDSKTQSLLIVNNATNVVIKVCEFQFCNDPFLGVYYHKNNKSWMESEFRVYSSANNCTFEYVSQPFLMDLEGKQGNFKNLREFVFKNIDGYFKIYSKHTPINLVRDLPQGFSALEPLVDLPIGINITRFQTLLALHRSYLTPGDSSSGWTAGAAAYYVGYLQPRTFLLKYNENGTITDAVDCALDPLSETKCTLKSFTVEKGIYQTSNFRVQPTESIVRFPNITNLCPFGEVFNATRFASVYAWNRKRISNCVADYSVLYNSASFSTFKCYGVSPTKLNDLCFTNVYADSFVIRGDEVRQIAPGQTGKIADYNYKLPDDFTGCVIAWNSNNLDSKVGGNYNYLYRLFRKSNLKPFERDISTEIYQAGSTPCNGVEGFNCYFPLQSYGFQPTNGAGYQPYRVVVLSFELLHAPATVCGPKKSTNLVKNKCVNFNFNGLTGTGVLTESNKKFLPFQQFGRDIADTTDAVRDPQTLEILDITPCSFGGVSVITPGTNTSNQVAVLYQDVNCTEVPVAIHADQLTPTWRVYSTGSNVFQTRAGCLIGAEHVNNSYECDIPIGAGICASYQTQTNSPSGAGSHHHHHHHHHH

SEQ ID NO: 4391 - protein, 715 aa, Artificial Sequence
  Description of Artificial Sequence: Synthetic polypeptide
MGILPSPGMPALLSLVSLLSVLLMGCVAETGTQCVNLTTRTQLPPAYTNSFTRGVYYPDKVFRSSVLHSTQDLFLPFFSNVTWFHAIHVSGTNGTKRFDNPVLPFNDGVYFASTEKSNIIRGWIFGTTLDSKTQSLLIVNNATNVVIKVCEFQFCNDPFLGVYYHKNNKSWMESEFRVYSSANNCTFEYVSQPFLMDLEGKQGNFKNLREFVFKNIDGYFKIYSKHTPINLVRDLPQGFSALEPLVDLPIGINITRFQTLLALHRSYNTPGDSSSGWTAGAAAYYVGYLQPRTFLLKYNENGTITDAVDCALDPLSETKCTLKSFTVEKGIYQTSNFRVQPTESIVRFPNITNLCPFGEVFNATRFASVYAWNRKRISNCVADYSVLYNSASFSTFKCYGVSPTKLNDLCFTNVYADSFVIRGDEVRQIAPGQTGKIADYNYKLPDDFTGCVIAWNSNNLDSKVGGNYNYLYRLFRKSNLKPFERDISTEIYQAGSTPCNGVEGFNCYFPLQSYGFQPTNGVGYQPYRVVVLSFELLHAPATVCGPKKSTNLVKNKCVNFNFNGLTGTGVLTESNKKFLPFQQFGRDIADTTDAVRDPQTLEILDITPCSFGGVSVITPGTNTSNQVAVLYQDVNCTEVPVAIHADQLTPTWRVYSTGSNVFQTRAGCLIGAEHVNNSYECDIPIGAGICASYQTQTNSPSGAGSHHHHHHHHHH

SEQ ID NO: 4392 - protein, 715 aa, Artificial Sequence
  Description of Artificial Sequence: Synthetic polypeptide
MGILPSPGMPALLSLVSLLSVLLMGCVAETGTQCVNLTTRTQLPPAYTNSFTRGVYYPDKVFRSSVLHSTQDLFLPFFSNVTWFHAIHVEGTNGTKRFDNPVLPFNDGVYFASTEKSNIIRGWIFGTTLDSKTQSLLIVNNATNVVIKVCEFQFCNDPFLGVYYHKNNKSWMESEFRVYSSANNCTFEYVSQPFLMDLEGKQGNFKNLREFVFKNIDGYFKIYSKHTPINLVRDLPQGFSALEPLVDLPIGINITRFQTLLALHRSYLTPGDSSSGWTAGAAAYYVGYLQPRTFLLKYNENGTITDAVDCALDPLSETKCTLKSFTVEKGIYQTSNFRVQPTESIVRFPNITNLCPFGEVFNATRFASVYAWNRKRISNCVADYSVLYNSASFSTFKCYGVSPTKLNDLCFTNVYADSFVIRGDEVRQIAPGQTGKIADYNYKLPDDFTGCVIAWNSNNLDSKVGGNYNYLYRLFRKSNLKPFERDISTEIYQAGSTPCNGVEGFNCYFPLQSYGFQPTNGVGYQPYRVVVLSFELLHAPATVCGPKKSTNLVKNKCVNFNFNGLTGTGVLTESNKKFLPFQQFGRDIADTTDAVRDPQTLEILDITPCSFGGVSVITPGTNTSNQVAVLYQDVNCTEVPVAIHADQLTPTWRVYSTGSNVFQTRAGCLIGAEHVNNSYECDIPIGAGICASYQTQTNSPSGAGSHHHHHHHHHH

SEQ ID NO: 4393 - protein, 715 aa, Artificial Sequence
  Description of Artificial Sequence: Synthetic polypeptide
MGILPSPGMPALLSLVSLLSVLLMGCVAETGTQCVNLTTRTQLPPAYTNSFTRGVYYPDKVFRSSVLHSTQDLFLPFFSNVTWFHAIHVSGTNGTKRFDNPVLPFNDGVYFASTEKSNIIRGWIFGTTLDSKTQSLLIVNNATNVVIKVCEFQFCNDPFLGVYYHKNNKSWMESEFRVYSSANNCTFEYVSQPFLMDLEGKQGNFKNLREFVFKNIDGYFKIYSKHTPINLVRDLPQGFSALEPLVDLPIGINITRFQTLLALHRSYLTPGDSSSGWTAGAAAYYVGYLQPRTFLLKYNENGTITDAVDCALDPLSETKCTLKSFTVEKGIYQTSNFRVQPTESIVRFPNITNLCPFGEVFNATRFASVYAWNRKRISNCVADYSVLYNSASFSTFKCYGVSPTKLNDLCFTNVYADSFVIRGDEVRQIAPGQTGKIADYNYKLPDDFTGCVIAWNSNNLDSKVGGNYNYLYRLFRKSNLKPFERDISTEIYQAGSTPCNGVEGFNCYFPLQSYGFQPTNGVGYQPYRVVVLSFELLHAPATVCGPKKSTNLVKNKCVNFNFNGLTGTGVLTESNKKFLPFQQFGRDIADTTDAVRDPQTLEILDITPCSFGGVSVITPGTNTSNQVAVLYQDVNCTEVPVAIHADQLTPTWRAYSTGSNVFQTRAGCLIGAEHVNNSYECDIPIGAGICASYQTQTNSPSGAGSHHHHHHHHHH

SEQ ID NO: 4394 - protein, 715 aa, Artificial Sequence
  Description of Artificial Sequence: Synthetic polypeptide
MGILPSPGMPALLSLVSLLSVLLMGCVAETGTQCVNLTTRTQLPPAYTNSFTRGVYYPDKVFRSSVLHSTQDLFLPFFSNVTWFHAIHVSGTNGTKRFDNPVLPFNDGVYFASTEKSNIIRGWIFGTTLDSKTQSLLIVNNATNVVIKVCEFQFCNDPFLGVYYHKNNKSWMESEFRVYSSANNCTFEYVSQPFLMDLEGKQGNFKNLREFVFKNIDGYFKIYSKHTPINLVRDLPQGFSALEPLVDLPIGINITRFQTLLALHRSYLTPGDSSSGWTAGAAAYYVGYLQPRTFLLKYNENGTITDAVDCALDPLSETKCTLKSFTVEKGIYQTSNFRVQPTESIVRFPNITNNCPFGEVFNATRFASVYAWNRKRISNCVADYSVLYNSASFSTFKCYGVSPTKLNDLCFTNVYADSFVIRGDEVRQIAPGQTGKIADYNYKLPDDFTGCVIAWNSNNLDSKVGGNYNYLYRLFRKSNLKPFERDISTEIYQAGSTPCNGVEGFNCYFPLQSYGFQPTNGVGYQPYRVVVLSFELLHAPATVCGPKKSTNLVKNKCVNFNFNGLTGTGVLTESNKKFLPFQQFGRDIADTTDAVRDPQTLEILDITPCSFGGVSVITPGTNTSNQVAVLYQDVNCTEVPVAIHADQLTPTWRVYSTGSNVFQTRAGCLIGAEHVNNSYECDIPIGAGICASYQTQTNSPSGAGSHHHHHHHHHH

SEQ ID NO: 4395 - protein, 715 aa, Artificial Sequence
  Description of Artificial Sequence: Synthetic polypeptide
MGILPSPGMPALLSLVSLLSVLLMGCVAETGTQCVNLTTRTQLPPAYTNSFTRGVYYPDKVFRSSVLHSTQDLFLPFFSNVTWFHAIHVSGTNGTKRFDNPVLPFNDGVYFASTEKSNIIRGWIFGTTLDSKTQSLLIVNNATNVVIKVCEFQFCNDPFLGVYYHKNNKSWMESEFRVYSSANNCTFEYVSQPFLMDLEGKQGNFKNLREFVFKNIDGYFKIYSKHTPINLVRDLPQGFSALEPLVDLPIGINITRFQTLLALHRSYLTPGDSSSGWTAGAAAYYVGYLQPRTFLLKYNENGTITDAVDCALDPLSETKCTLKSFTVEKGIYQTSNFRVQPTESIVRFPNITNLCPFGEVFNATRFASVYAWNRKRISNCVADYSVLYNSASFSTFKCYGVSPTKLNDLCFTNVYADSFVIRGDEVRQIAPGQTGKIADYNYKLPDDFTGCVIAWNSNNLDSKVGGNYNYLYRLFRKSNLKPFERDISTEIYQAGSTPCNGVEGFNCYFPLQSYGFQPTNGRGYQPYRVVVLSFELLHAPATVCGPKKSTNLVKNKCVNFNFNGLTGTGVLTESNKKFLPFQQFGRDIADTTDAVRDPQTLEILDITPCSFGGVSVITPGTNTSNQVAVLYQDVNCTEVPVAIHADQLTPTWRVYSTGSNVFQTRAGCLIGAEHVNNSYECDIPIGAGICASYQTQTNSPSGAGSHHHHHHHHHH

SEQ ID NO: 4396 - protein, 715 aa, Artificial Sequence
  Description of Artificial Sequence: Synthetic polypeptide
MGILPSPGMPALLSLVSLLSVLLMGCVAETGTQCVNLTTRTQLPPAYTNSFTRGVYYPDKVFRSSVLHSTQDLFLPFFSNVTWFHAIHVSGTNGTKRFDNPVLPFNDGVYFASTEKSNIIRGWIFGTTLDSKTQSLLIVNNATNVVIKVCEFQFCNDPFLGVYYHKNNKSWMESEFRVYSSANNCTFEYVSQPFLMDLEGKQGNFKNLREFVFKNIDGYFKIYSKHTPINLVRDLPQGFLALEPLVDLPIGINITRFQTLLALHRSYLTPGDSSSGWTAGAAAYYVGYLQPRTFLLKYNENGTITDAVDCALDPLSETKCTLKSFTVEKGIYQTSNFRVQPTESIVRFPNITNLCPFGEVFNATRFASVYAWNRKRISNCVADYSVLYNSASFSTFKCYGVSPTKLNDLCFTNVYADSFVIRGDEVRQIAPGQTGKIADYNYKLPDDFTGCVIAWNSNNLDSKVGGNYNYLYRLFRKSNLKPFERDISTEIYQAGSTPCNGVEGFNCYFPLQSYGFQPTNGVGYQPYRVVVLSFELLHAPATVCGPKKSTNLVKNKCVNFNFNGLTGTGVLTESNKKFLPFQQFGRDIADTTDAVRDPQTLEILDITPCSFGGVSVITPGTNTSNQVAVLYQDVNCTEVPVAIHADQLTPTWRVYSTGSNVFQTRAGCLIGAEHVNNSYECDIPIGAGICASYQTQTNSPSGAGSHHHHHHHHHH

SEQ ID NO: 4397 - protein, 715 aa, Artificial Sequence
  Description of Artificial Sequence: Synthetic polypeptide
MGILPSPGMPALLSLVSLLSVLLMGCVAETGTQCVNLTTRTQLPPAYTNSFTRGVYYPDKVFRSSVLHSTQDLFLPFFSNVTWFHAIHVSGTNGTKRFDNPVLPFNDGVYFASTEKSNIIRGWIFGTTLDSKTQSLLIVNNATNVVIKVCEFQFCNDPFLGVYYHKNNKSWMESEFRVYSSANNCTFEYVSQPFLMDLEGKQGNFKNLREFVFKNIDGYFKIYSKHTPINLVRDLPQGFSALEPLVDLPIGINITRFQTLLALHRSYLTPGDSSSGWTAGAAAYYVGYLQPRTFLLKYNENGTITDAVDCALDPLSETKCTLKSFTVEKGIYQTSNFRVQPTCSIVRFPNITNLCPFGEVFNATRFASVYAWNRKRISNCVADYSVLYNSASFSTFKCYGVSPTKLNDLCFTNVYADSFVIRGDEVRQIAPGQTGKIADYNYKLPDDFTGCVIAWNSNNLDSKVGGNYNYLYRLFRKSNLKPFERDISTEIYQAGSTPCNGVEGFNCYFPLQSYGFQPTNGVGYQPYRVVVLSFELLHAPATVCGPKKSTNLVKNKCVNFNFNGLTGTGVLTESNKKFLPFQQFGRDIADTTDAVRDPQTLEILDITPCSFGGVSVITPGTNTSNQVAVLYQDVNCTEVPVAIHADQLTPTWRVYSTGSNVFQTRAGCLIGAEHVNNSYECDIPIGAGICASYQTQTNSPSGAGSHHHHHHHHHH

SEQ ID NO: 4398 - protein, 715 aa, Artificial Sequence
  Description of Artificial Sequence: Synthetic polypeptide
MGILPSPGMPALLSLVSLLSVLLMGCVAETGTQCVNLTTRTQLPPAYTNSFTRGVYYPDKVFRSSVLHSTQDLFLPFFSNVTWFHAIHVSGTNGTKRFDNPVLPFNDGVYFASTEKSNIIRGWIFGTTLDSKTQSLLIVNNATNVVIKVCYFQFCNDPFLGVYYHKNNKSWMESEFRVYSSANNCTFEYVSQPFLMDLEGKQGNFKNLREFVFKNIDGYFKIYSKHTPINLVRDLPQGFSALEPLVDLPIGINITRFQTLLALHRSYLTPGDSSSGWTAGAAAYYVGYLQPRTFLLKYNENGTITDAVDCALDPLSETKCTLKSFTVEKGIYQTSNFRVQPTESIVRFPNITNLCPFGEVFNATRFASVYAWNRKRISNCVADYSVLYNSASFSTFKCYGVSPTKLNDLCFTNVYADSFVIRGDEVRQIAPGQTGKIADYNYKLPDDFTGCVIAWNSNNLDSKVGGNYNYLYRLFRKSNLKPFERDISTEIYQAGSTPCNGVEGFNCYFPLQSYGFQPTNGVGYQPYRVVVLSFELLHAPATVCGPKKSTNLVKNKCVNFNFNGLTGTGVLTESNKKFLPFQQFGRDIADTTDAVRDPQTLEILDITPCSFGGVSVITPGTNTSNQVAVLYQDVNCTEVPVAIHADQLTPTWRVYSTGSNVFQTRAGCLIGAEHVNNSYECDIPIGAGICASYQTQTNSPSGAGSHHHHHHHHHH

SEQ ID NO: 4399 - protein, 715 aa, Artificial Sequence
  Description of Artificial Sequence: Synthetic polypeptide
MGILPSPGMPALLSLVSLLSVLLMGCVAETGTQCVNLTTRTQLPPAYTNSFTRGVYYPDKVFRSSVLHSTQDLFLPFFSNVTWFHAMHVSGTNGTKRFDNPVLPFNDGVYFASTEKSNIIRGWIFGTTLDSKTQSLLIVNNATNVVIKVCEFQFCNDPFLGVYYHKNNKSWMESEFRVYSSANNCTFEYVSQPFLMDLEGKQGNFKNLREFVFKNIDGYFKIYSKHTPINLVRDLPQGFSALEPLVDLPIGINITRFQTLLALHRSYLTPGDSSSGWTAGAAAYYVGYLQPRTFLLKYNENGTITDAVDCALDPLSETKCTLKSFTVEKGIYQTSNFRVQPTESIVRFPNITNLCPFGEVFNATRFASVYAWNRKRISNCVADYSVLYNSASFSTFKCYGVSPTKLNDLCFTNVYADSFVIRGDEVRQIAPGQTGKIADYNYKLPDDFTGCVIAWNSNNLDSKVGGNYNYLYRLFRKSNLKPFERDISTEIYQAGSTPCNGVEGFNCYFPLQSYGFQPTNGVGYQPYRVVVLSFELLHAPATVCGPKKSTNLVKNKCVNFNFNGLTGTGVLTESNKKFLPFQQFGRDIADTTDAVRDPQTLEILDITPCSFGGVSVITPGTNTSNQVAVLYQDVNCTEVPVAIHADQLTPTWRVYSTGSNVFQTRAGCLIGAEHVNNSYECDIPIGAGICASYQTQTNSPSGAGSHHHHHHHHHH

SEQ ID NO: 4400 - protein, 715 aa, Artificial Sequence
  Description of Artificial Sequence: Synthetic polypeptide
MGILPSPGMPALLSLVSLLSVLLMGCVAETGTQCVNLTTRTQLPPAYTNSFTRGVYYPDKVFRSSVLHSTQDLFLPFFSNVTWFHAIHVSGTNGTKRFDNPVLPFNDGVYFASTEKSNIIRGWIFGTTLDSKTQSLLIVNNATNVVIKVCEFQFCNDPFLGVYYHKNNKSWMESEFRVYSSANNCTFEYVSQPFLMDLEGKQGNFKNLREFVFKNIDGYFKIYSKHTPINLVRDLPQGFSALEPLVDLPIGINITRFQTLLALHRSYLTPGDSSSGWTAGAAAYYVGYLQPRTFLLKYNENGTITDAVDCALDPLSETKCTLKSFTVEKGIYQTSNFRVQPTESIVRFPNITNLCPFGEVFNATRFASVYAWNRKRISNCVADYSVLYNSASFSTFKCYGVSPTKLNDLCFTNVYADSFVIRGDEVRQIAPGQTGKIADYNYKLPDDFTGCVIAWNSNNLDSKVGGNYNYLYRLFRKSNLKPFERDISTEIYQAGSTPCNGVEGFNCYFPLQSYGFQPTNGEGYQPYRVVVLSFELLHAPATVCGPKKSTNLVKNKCVNFNFNGLTGTGVLTESNKKFLPFQQFGRDIADTTDAVRDPQTLEILDITPCSFGGVSVITPGTNTSNQVAVLYQDVNCTEVPVAIHADQLTPTWRVYSTGSNVFQTRAGCLIGAEHVNNSYECDIPIGAGICASYQTQTNSPSGAGSHHHHHHHHHH

SEQ ID NO: 4401 - protein, 715 aa, Artificial Sequence
  Description of Artificial Sequence: Synthetic polypeptide
MGILPSPGMPALLSLVSLLSVLLMGCVAETGTQCVNLTTRTQLPPAYTNSFTRGVYYPDKVFRSSVLHSTQDLFLPFFSNVTWFHAIHVSGTNGTKRFDNPVLPFNDGVYFASTEKSNIIRGWIFGTTLDSKTQSLLIVNNATNVVIKVCEFQFCNDPFLGVYYHKNNKSWMESEFRVYSSANNCTFEYVSQPFLMDLEGKQGNFKNLREFVFKNIDGYFKIYSKHTPINLVRDLPQGFSALEPLVDLPIGINITRFQTLLALHRSYLTPGDSSSGWTAGAAAYYVGYLQPRTFLLKYNENGTITDAVDCALDPLSETKCTLKSFTVEKGIYQTSNFRVQPTESIVRFPNITNLCPFGEVFNATRFASVYAWNRKRISNCVADYSVLYNSASFSTFKCYGVSPTKLNDLCFTNVYADSFVIRGDEVRQIAPGQTGKIADYNYKLPDDFTGCVIAWNSNNLDSKVGGNYNYLYRLFRKSNLKPFERDISTEIYQAGSTPCNGVEGFNCYFPLQSYGFQPTNGVEYQPYRVVVLSFELLHAPATVCGPKKSTNLVKNKCVNFNFNGLTGTGVLTESNKKFLPFQQFGRDIADTTDAVRDPQTLEILDITPCSFGGVSVITPGTNTSNQVAVLYQDVNCTEVPVAIHADQLTPTWRVYSTGSNVFQTRAGCLIGAEHVNNSYECDIPIGAGICASYQTQTNSPSGAGSHHHHHHHHHH

SEQ ID NO: 4402 - protein, 715 aa, Artificial Sequence
  Description of Artificial Sequence: Synthetic polypeptide
MGILPSPGMPALLSLVSLLSVLLMGCVAETGTQCVNLTTRTQLPPAYTNSFTRGVYYPDKVFRSSVLHSTQDLFLPFFSNVTWFHAIHVSGTNGTKRFDNPVLPFNDGVYFASTEKSNIIRGWIFGTTLDSKTQSLLIVNNATNVVIKVCEFQFCNDPFLGVYYHKNNKSWMESEFRVYSSANNCTFEYVSQPFLMDLEGKQGNFKNLREFVFKNIDGYFKIYSKHTPINLVRDLPQGFSALEPLVDLPIGINITRFQTLLALHRSYLTPGDSSSGWTAGAAAYYVGYLQPRTFLLKYNENGTITDAVDCALDPLSETKCTLKSFTVEKGIYQTSNFRVQPTESIVRFPNITNKCPFGEVFNATRFASVYAWNRKRISNCVADYSVLYNSASFSTFKCYGVSPTKLNDLCFTNVYADSFVIRGDEVRQIAPGQTGKIADYNYKLPDDFTGCVIAWNSNNLDSKVGGNYNYLYRLFRKSNLKPFERDISTEIYQAGSTPCNGVEGFNCYFPLQSYGFQPTNGVGYQPYRVVVLSFELLHAPATVCGPKKSTNLVKNKCVNFNFNGLTGTGVLTESNKKFLPFQQFGRDIADTTDAVRDPQTLEILDITPCSFGGVSVITPGTNTSNQVAVLYQDVNCTEVPVAIHADQLTPTWRVYSTGSNVFQTRAGCLIGAEHVNNSYECDIPIGAGICASYQTQTNSPSGAGSHHHHHHHHHH

SEQ ID NO: 4403 - protein, 715 aa, Artificial Sequence
  Description of Artificial Sequence: Synthetic polypeptide
MGILPSPGMPALLSLVSLLSVLLMGCVAETGTQCVNLTTRTQLPPAYTNSFTRGVYYPDKVFRSSVLHSTQDLFLPFFSNVTWFHAIHVSGTNGTKRFDNPVLPFNDGVYFASTEKSNIIRGWIFGATLDSKTQSLLIVNNATNVVIKVCEFQFCNDPFLGVYYHKNNKSWMESEFRVYSSANNCTFEYVSQPFLMDLEGKQGNFKNLREFVFKNIDGYFKIYSKHTPINLVRDLPQGFSALEPLVDLPIGINITRFQTLLALHRSYLTPGDSSSGWTAGAAAYYVGYLQPRTFLLKYNENGTITDAVDCALDPLSETKCTLKSFTVEKGIYQTSNFRVQPTESIVRFPNITNLCPFGEVFNATRFASVYAWNRKRISNCVADYSVLYNSASFSTFKCYGVSPTKLNDLCFTNVYADSFVIRGDEVRQIAPGQTGKIADYNYKLPDDFTGCVIAWNSNNLDSKVGGNYNYLYRLFRKSNLKPFERDISTEIYQAGSTPCNGVEGFNCYFPLQSYGFQPTNGVGYQPYRVVVLSFELLHAPATVCGPKKSTNLVKNKCVNFNFNGLTGTGVLTESNKKFLPFQQFGRDIADTTDAVRDPQTLEILDITPCSFGGVSVITPGTNTSNQVAVLYQDVNCTEVPVAIHADQLTPTWRVYSTGSNVFQTRAGCLIGAEHVNNSYECDIPIGAGICASYQTQTNSPSGAGSHHHHHHHHHH

SEQ ID NO: 4404 - protein, 715 aa, Artificial Sequence
  Description of Artificial Sequence: Synthetic polypeptide
MGILPSPGMPALLSLVSLLSVLLMGCVAETGTQCVNLTTRTQLPPAYTNSFTRGVYYPDKVFRSSVLHSTQDLFLPFFSNVTWFHAYHVSGTNGTKRFDNPVLPFNDGVYFASTEKSNIIRGWIFGTTLDSKTQSLLIVNNATNVVIKVCEFQFCNDPFLGVYYHKNNKSWMESEFRVYSSANNCTFEYHSQPFLMDLEGKQGNFKNLREFVFKNIDGYFKIYSKHTPINLVRDLPQGFSALEPLVDLPIGINITRFQTLLALHRSYLTPGDSSSGETAGAAAYYVGYLQPRTFLLKYNENGTITDAVDCALDPLSETKCTLKSFTVEKGIYQTSNFRVQPTESIVRFPNITNKCPFGEVFNATRFASVYAWNRKRISNCVADYSVLYNSASFSTFKCYGVSPTKLNDLCFTNVYADSFVIRGDEVRQIAPGQTGKIADYNYKLPDDFTGCVIAWNSNNLDSKVGGNYNYLYRLFRKSNLKPFERDISTEIYQAGSTPCNGVEGFNCYFPLQSYGFQPTNGPGQQPYRVVVLSFELLHAPATVCGPKKSTNLVKNKCVNFNFNGLTGTGVLTESNKKFLPFQQFGRDIADTTDAVRDPQTLEILDITPCSFGGVSVITPGTNTSNQVAVLYQDVNCTEVPVAIHADQLTPTWRVYSTGSNVFQTRAGCLIGAEHVNNSYECDIPIGAGICASYQTQTNSPSGAGSHHHHHHHHHH

SEQ ID NO: 4405 - protein, 715 aa, Artificial Sequence
  Description of Artificial Sequence: Synthetic polypeptide
MGILPSPGMPALLSLVSLLSVLLMGCVAETGTQCVNLTTRTQLPPAYTNSFTRGVYYPDKVFRSSVLHSTQDLFLPFFSNVTWFHAIHVSGTNGTKRFDNPVLPFNDGVYFASTEKSNIIRGWIFGTTLDSKTQSLLIVNNATNVVIKVCEFQFCNDPFLGVYYHKNNKSWMESEFRVYSSANNCTFEYVSQPFLMDLEGKQGNFKNLREFVFKNIDGYFKIYSKHTPINLVRDLPQGFSALEPLVDLPIGINITRFQTLLALHRSYLTPGDSSSGWTAGAAAYYVGYLQPRTFLLKYNENGTITDAVDCALDPLSETKCTLKSFTVEKGIYQTSNFRVQPTESIVRFPNITNLCPFGEVFNATRFASVYAWNRKRISNCVADYSVLYNSASFSTFKCYGVSPTKLNDLCFTNVYADSFVIRGDEVRQIAPGQTGKIADYNYKLPDDFTGCVIAWNSNNLDSKVGGNYNYLYRLFRKSNLKPFERDISTEIYQAGSTPCNGVEGFNCYFPLQSYGFQPTNGVGYQPYRVVVLSFELLHAPATVCGPKKSTNLVKNKCVNFNFNGLTGTGVLTESNKKFLPFQQFGRDIADTTDAVRDPQTLEILDITPCSFGGVSVITPGTNTSNQVAVLYQDVNCTEVPDAIHADQLTPTWRVYSTGSNVFQTRAGCLIGAEHVNNSYECDIPIGAGICASYQTQTNSPSGAGSHHHHHHHHHH

SEQ ID NO: 4406 - protein, 715 aa, Artificial Sequence
  Description of Artificial Sequence: Synthetic polypeptide
MGILPSPGMPALLSLVSLLSVLLMGCVAETGTQCVNLTTRTQLPPAYTNSFTRGVYYPDKVFRSEVLHSTQDLFLPFFSNVTWFHAIHVSGTNGTKRFDNPVLPFNDGVYFASTEKSNIIRGWIFGTTLDSKTQSLLIVNNATNVVIKVCEFQFCNDPFLGVYYHKNNKSWMESEFRVYSSANNCTFEYVSQPFLMDLEGKQGNFKNLREFVFKNIDGYFKIYSKHTPINLVRDLPQGFSALEPLVDLPIGINITRFQTLLALHRSYLTPGDSSSGWTAGAAAYYVGYLQPRTFLLKYNENGTITDAVDCALDPLSETKCTLKSFTVEKGIYQTSNFRVQPTESIVRFPNITNLCPFGEVFNATRFASVYAWNRKRISNCVADYSVLYNSASFSTFKCYGVSPTKLNDLCFTNVYADSFVIRGDEVRQIAPGQTGKIADYNYKLPDDFTGCVIAWNSNNLDSKVGGNYNYLYRLFRKSNLKPFERDISTEIYQAGSTPCNGVEGFNCYFPLQSYGFQPTNGVGYQPYRVVVLSFELLHAPATVCGPKKSTNLVKNKCVNFNFNGLTGTGVLTESNKKFLPFQQFGRDIADTTDAVRDPQTLEILDITPCSFGGVSVITPGTNTSNQVAVLYQDVNCTEVPVAIHADQLTPTWRVYSTGSNVFQTRAGCLIGAEHVNNSYECDIPIGAGICASYQTQTNSPSGAGSHHHHHHHHHH

SEQ ID NO: 4407 - protein, 715 aa, Artificial Sequence
  Description of Artificial Sequence: Synthetic polypeptide
MGILPSPGMPALLSLVSLLSVLLMGCVAETGTQCVNLTTRTQLPPAYTNSFTRGVYYPDKVFRSSVLHSTQDLFLPFFSNVTWFHADHVSGTNGTKRFDNPVLPFNDGVYFASTEKSNIIRGWIFGTTLDSKTQSLLIVNNATNVVIKVCEFQFCNDPFLGVYYHKNNKSWMESEFRVYSSANNCTFEYVSQPFLMDLEGKQGNFKNLREFVFKNIDGYFKIYSKHTPINLVRDLPQGFSALEPLVDLPIGINITRFQTLLALHRSYLTPGDSSSGWTAGAAAYYVGYLQPRTFLLKYNENGTITDAVDCALDPLSETKCTLKSFTVEKGIYQTSNFRVQPTESIVRFPNITNLCPFGEVFNATRFASVYAWNRKRISNCVADYSVLYNSASFSTFKCYGVSPTKLNDLCFTNVYADSFVIRGDEVRQIAPGQTGKIADYNYKLPDDFTGCVIAWNSNNLDSKVGGNYNYLYRLFRKSNLKPFERDISTEIYQAGSTPCNGVEGFNCYFPLQSYGFQPTNGVGYQPYRVVVLSFELLHAPATVCGPKKSTNLVKNKCVNFNFNGLTGTGVLTESNKKFLPFQQFGRDIADTTDAVRDPQTLEILDITPCSFGGVSVITPGTNTSNQVAVLYQDVNCTEVPVAIHADQLTPTWRVYSTGSNVFQTRAGCLIGAEHVNNSYECDIPIGAGICASYQTQTNSPSGAGSHHHHHHHHHH

SEQ ID NO: 4408 - protein, 715 aa, Artificial Sequence
  Description of Artificial Sequence: Synthetic polypeptide
MGILPSPGMPALLSLVSLLSVLLMGCVAETGTQCVNLTTRTQLPPAYTNSFTRGVYYPDKVFRSSVLHSTQDLFLPFFSNVTWFHAIHVSGTNGTKRFDNPVLPFNDGVYFASTEKSNIIRGWIFGTTLDSKTQSLLIVNNATNVVIKVCEFQFCNDPFLGVYYHKNNKSWMESEFRVYSSANNCTFEYVSQPFLMDLEGKQGNFKNLREFVFKNIDGYFKIYSKHTPINLVRDLPQGFSALEPLVDLPIGINITRFQTLLALHRSYLTPGDSSSGWTAGAAAYYVGYLQPRTFLLKYNENGTITDAVDCALDPLSETKCTLKSFTVEKGIYQTSNFRVQPTESIVRFPNITNYCPFGEVFNATRFASVYAWNRKRISNCVADYSVLYNSASFSTFKCYGVSPTKLNDLCFTNVYADSFVIRGDEVRQIAPGQTGKIADYNYKLPDDFTGCVIAWNSNNLDSKVGGNYNYLYRLFRKSNLKPFERDISTEIYQAGSTPCNGVEGFNCYFPLQSYGFQPTNGVGYQPYRVVVLSFELLHAPATVCGPKKSTNLVKNKCVNFNFNGLTGTGVLTESNKKFLPFQQFGRDIADTTDAVRDPQTLEILDITPCSFGGVSVITPGTNTSNQVAVLYQDVNCTEVPVAIHADQLTPTWRVYSTGSNVFQTRAGCLIGAEHVNNSYECDIPIGAGICASYQTQTNSPSGAGSHHHHHHHHHH

SEQ ID NO: 4409 - protein, 715 aa, Artificial Sequence
  Description of Artificial Sequence: Synthetic polypeptide
MGILPSPGMPALLSLVSLLSVLLMGCVAETGTQCVNLTTRTQLPPAYTNSFTRGVYYPDKVFRSSVLHSTQDLFLPFFSNVTWFHAIHVSGTNGTKRFDNPVLPFNDGVYFASTEKSNIIRGWIFGTTLDSKTQSLLIVNNATNVVIKVCEFQFCNDPFLGVYYHKNNKSWMESEFRVYSSANNCTFEYVSQPFLMDLEGKQGNFKNLREFVFKNIDGYFKIYSKHTPINLVRDLPQGFSALEPLVDLPIGINITRFQTLLALHRSYLTPGDSSSGWTAGAAAYYVGYLQPRTFLLKYNENGTITDAVDCYLDPLSETKCTLKSFTVEKGIYQTSNFRVQPTESIVRFPNITNLCPFGEVFNATRFASVYAWNRKRISNCVADYSVLYNSASFSTFKCYGVSPTKLNDLCFTNVYADSFVIRGDEVRQIAPGQTGKIADYNYKLPDDFTGCVIAWNSNNLDSKVGGNYNYLYRLFRKSNLKPFERDISTEIYQAGSTPCNGVEGFNCYFPLQSYGFQPTNGVGYQPYRVVVLSFELLHAPATVCGPKKSTNLVKNKCVNFNFNGLTGTGVLTESNKKFLPFQQFGRDIADTTDAVRDPQTLEILDITPCSFGGVSVITPGTNTSNQVAVLYQDVNCTEVPVAIHADQLTPTWRVYSTGSNVFQTRAGCLIGAEHVNNSYECDIPIGAGICASYQTQTNSPSGAGSHHHHHHHHHH

SEQ ID NO: 4410 - protein, 715 aa, Artificial Sequence
  Description of Artificial Sequence: Synthetic polypeptide
MGILPSPGMPALLSLVSLLSVLLMGCVAETGTQCVNLTTRTQLPPAYTNSFTRGVYYPDKVFRSSVLHSTQDLFLPFFSNVTWFHAIHVSGTNGTKRFDNPVLPFNDGVYFASTEKSNIIRGWIFGTTLDSKTQSLLIVNNATNVVIKVCEFQFCNDPFLGVYYHKNNKSWMESEFRVYSSANNCTFEYVSQPFLMDLEGKQGNFKNLREFVFKNIDGYFKIYSKHTPINLVRDLPQGFSALEPLVDLPIGINITRFQTLLALHRSYLTPGDSSSGWTAGAAAYYVGYLQPRTFLLKYNENGTITDAVDCALDPLSETKCTLKSFTVEKGIYQTSNFRVQPTESIVRFPNITNLCPFGEVFNATRFASVYAWNRKRISNCVADYSVLYNSASFSTFKCYGVSPTKLNDLCFTNVYADSFVIRGDEVRQIAPGQTGKIADYNYKLPDDFTGIVIAWNSNNLDSKVGGNYNYLYRLFRKSNLKPFERDISTEIYQAGSTPCNGVEGFNCYFPLQSYGFQPTNGVGYQPYRVVVLSFELLHAPATVCGPKKSTNLVKNKCVNFNFNGLTGTGVLTESNKKFLPFQQFGRDIADTTDAVRDPQTLEILDITPCSFGGVSVITPGTNTSNQVAVLYQDVNCTEVPVAIHADQLTPTWRVYSTGSNVFQTRAGCLIGAEHVNNSYECDIPIGAGICASYQTQTNSPSGAGSHHHHHHHHHH

SEQ ID NO: 4411 - protein, 715 aa, Artificial Sequence
  Description of Artificial Sequence: Synthetic polypeptide
MGILPSPGMPALLSLVSLLSVLLMGCVAETGTQCVNLTTRTQLPPAYTNSFTRGVYYPDKVFRSSVLHSTQDLFLPFFSNVTWFHAIHVSGTNGTKRFDNPVLPFNDGVYFASTEKSNIIRGWIFGTTLDSKTQSLLIVNNATNVVIKVCEFQFCNDPFLGVYYHKNNKSWMESEFRVYSSANNCTFEYVSQPFLMDLEGKQGNFKNLREFVFKNIDGYFKIYSKHTPINLVRDLPQGFSALEPLVDLPIGINITRFQTLLALHRSYKTPGDSSSGWTAGAAAYYVGYLQPRTFLLKYNENGTITDAVDCALDPLSETKCTLKSFTVEKGIYQTSNFRVQPTESIVRFPNITNLCPFGEVFNATRFASVYAWNRKRISNCVADYSVLYNSASFSTFKCYGVSPTKLNDLCFTNVYADSFVIRGDEVRQIAPGQTGKIADYNYKLPDDFTGCVIAWNSNNLDSKVGGNYNYLYRLFRKSNLKPFERDISTEIYQAGSTPCNGVEGFNCYFPLQSYGFQPTNGVGYQPYRVVVLSFELLHAPATVCGPKKSTNLVKNKCVNFNFNGLTGTGVLTESNKKFLPFQQFGRDIADTTDAVRDPQTLEILDITPCSFGGVSVITPGTNTSNQVAVLYQDVNCTEVPVAIHADQLTPTWRVYSTGSNVFQTRAGCLIGAEHVNNSYECDIPIGAGICASYQTQTNSPSGAGSHHHHHHHHHH

SEQ ID NO: 4412 - protein, 715 aa, Artificial Sequence
  Description of Artificial Sequence: Synthetic polypeptide
MGILPSPGMPALLSLVSLLSVLLMGCVAETGTQCVNLTTRTQLPPAYTNSFTRGVYYPDKVFRSSVLHSTQDLFLPFFSNVTWFHAIHVSGTNGTKRFDNPVLPFNDGVYFASTEKSNIIRGWIFGTTLDSKTQSLLIVNNATNVVIKVCEFQFCNDPFLGVYYHKNNKSWMESEFRVYSSANNCTFEYVSQPFLMDLEGKQGNFKNLREFVFKNIDGYFKIYMKHTPINLVRDLPQGFSALEPLVDLPIGINITRFQTLLALHRSYLTPGDSSSGWTAGAAAYYVGYLQPRTFLLKYNENGTITDAVDCALDPLSETKCTLKSFTVEKGIYQTSNFRVQPTESIVRFPNITNLCPFGEVFNATRFASVYAWNRKRISNCVADYSVLYNSASFSTFKCYGVSPTKLNDLCFTNVYADSFVIRGDEVRQIAPGQTGKIADYNYKLPDDFTGCVIAWNSNNLDSKVGGNYNYLYRLFRKSNLKPFERDISTEIYQAGSTPCNGVEGFNCYFPLQSYGFQPTNGVGYQPYRVVVLSFELLHAPATVCGPKKSTNLVKNKCVNFNFNGLTGTGVLTESNKKFLPFQQFGRDIADTTDAVRDPQTLEILDITPCSFGGVSVITPGTNTSNQVAVLYQDVNCTEVPVAIHADQLTPTWRVYSTGSNVFQTRAGCLIGAEHVNNSYECDIPIGAGICASYQTQTNSPSGAGSHHHHHHHHHH

SEQ ID NO: 4413 - protein, 715 aa, Artificial Sequence
  Description of Artificial Sequence: Synthetic polypeptide
MGILPSPGMPALLSLVSLLSVLLMGCVAETGTQCVNLTTRTQLPPAYTNSFTRGVYYPDKVFRSSVLHSTQDLFLPFFSNVTWFHAIHVSGTNGTKRFDNPVLPFNDGVYFASTEKSNIIRGWIFGTTLDSKTQSLLIVNNATNVVIKVCEFQFCNDPFLGVYYHKNNKSWMESEFRVYSSANNCTFEYVSQPFLMDLEGKQGNFKNLREFVFKNIDGYFKIYSKHTPINLVRDLPQGFSALEPLVDLPIGINITRFQTLLALHRSYLTPGDSSSGWTAGAAAYYVGYLQPRTFLLKYNENGTITDAVDCALDPLSETKCTLKSFTVEKGIYQTSNFRVQPTESIVRFPNITNLCPFGEVFNATRFASVYAWNRKRISNCVADYSVLYNSASFSTFKCYGVSPTKLNDLCFTNVYADSFVIRGDEVRQIAPGQTGKIADYNYKLPDDFTGCVIAWNSNNLDSKVGGNYNYLYRLFRKSNLKPFERDISTEIYQAGSTPCNGVEGFNCYFPLQSYGFQPTNGVGYQPYRVVVLSFELLHAPATVCGPKKSTNLVKNKCVNFNFNGLTGTGVLTESNKKFLPFQQFGRDIADTTDAVRDPQTLEILDITPCSFGGVSVITPGTNTSNQVAVLYQDVNCTEVPEAIHADQLTPTWRVYSTGSNVFQTRAGCLIGAEHVNNSYECDIPIGAGICASYQTQTNSPSGAGSHHHHHHHHHH

SEQ ID NO: 4414 - protein, 715 aa, Artificial Sequence
  Description of Artificial Sequence: Synthetic polypeptide
MGILPSPGMPALLSLVSLLSVLLMGCVAETGTQCVNLTTRTQLPPAYTNSFTRGVYYPDKVFRSSVLHSTQDLFLPFFSNVTWFHAIHVSGTNGTKRFDNPVLPFNDGVYFASTEKSNIIRGWIFGTTLDSKTQSLLIVNNATYVVIKVCEFQFCNDPFLGVYYHKNNKSWMESEFRVYSSANNCTFEYVSQPFLMDLEGKQGNFKNLREFVFKNIDGYFKIYSKHTPINLVRDLPQGFSALEPLVDLPIGINITRFQTLLALHRSYLTPGDSSSGWTAGAAAYYVGYLQPRTFLLKYNENGTITDAVDCALDPLSETKCTLKSFTVEKGIYQTSNFRVQPTESIVRFPNITNLCPFGEVFNATRFASVYAWNRKRISNCVADYSVLYNSASFSTFKCYGVSPTKLNDLCFTNVYADSFVIRGDEVRQIAPGQTGKIADYNYKLPDDFTGCVIAWNSNNLDSKVGGNYNYLYRLFRKSNLKPFERDISTEIYQAGSTPCNGVEGFNCYFPLQSYGFQPTNGVGYQPYRVVVLSFELLHAPATVCGPKKSTNLVKNKCVNFNFNGLTGTGVLTESNKKFLPFQQFGRDIADTTDAVRDPQTLEILDITPCSFGGVSVITPGTNTSNQVAVLYQDVNCTEVPVAIHADQLTPTWRVYSTGSNVFQTRAGCLIGAEHVNNSYECDIPIGAGICASYQTQTNSPSGAGSHHHHHHHHHH

SEQ ID NO: 4415 - protein, 715 aa, Artificial Sequence
  Description of Artificial Sequence: Synthetic polypeptide
MGILPSPGMPALLSLVSLLSVLLMGCVAETGTQCVNLTTRTQLPPAYTNSFTRGVYYPDKVFRSSVLHSTQDLFLPFFSNVTWFHAIHVSGTNGTKRFDNPVLPFNDGVYFASTEKSNIIRGWIFGTTLDSKTQSLLIVNNATNVVIKVCEFQFCNDPFLGVYYHKNNKSWMESEFRVYSSANNCTFEYVSQPFLMDLEGKQGNFKNLREFVFKNIDGYFKIYSKHTPINLVRDLPQGFSALEPLVDLPIGINITRFQTLLALHRSYLTPGDSSSLWTAGAAAYYVGYLQPRTFLLKYNENGTITDAVDCALDPLSETKCTLKSFTVEKGIYQTSNFRVQPTESIVRFPNITNLCPFGEVFNATRFASVYAWNRKRISNCVADYSVLYNSASFSTFKCYGVSPTKLNDLCFTNVYADSFVIRGDEVRQIAPGQTGKIADYNYKLPDDFTGCVIAWNSNNLDSKVGGNYNYLYRLFRKSNLKPFERDISTEIYQAGSTPCNGVEGFNCYFPLQSYGFQPTNGVGYQPYRVVVLSFELLHAPATVCGPKKSTNLVKNKCVNFNFNGLTGTGVLTESNKKFLPFQQFGRDIADTTDAVRDPQTLEILDITPCSFGGVSVITPGTNTSNQVAVLYQDVNCTEVPVAIHADQLTPTWRVYSTGSNVFQTRAGCLIGAEHVNNSYECDIPIGAGICASYQTQTNSPSGAGSHHHHHHHHHH

SEQ ID NO: 4416 - protein, 715 aa, Artificial Sequence
  Description of Artificial Sequence: Synthetic polypeptide
MGILPSPGMPALLSLVSLLSVLLMGCVAETGTQCVNLTTRTQLPPAYTNSFTRGVYYPDKVFRSSVLHSTQDLFLPFFSNVTWFHAIHVSGTNGTKRFDVPVLPFNDGVYFASTEKSNIIRGWIFGTTLDSKTQSLLIVNNATNVVIKVCEFQFCNDPFLGVYYHKNNKSWMESEFRVYSSANNCTFEYVSQPFLMDLEGKQGNFKNLREFVFKNIDGYFKIYSKHTPINLVRDLPQGFSALEPLVDLPIGINITRFQTLLALHRSYLTPGDSSSGWTAGAAAYYVGYLQPRTFLLKYNENGTITDAVDCALDPLSETKCTLKSFTVEKGIYQTSNFRVQPTESIVRFPNITNLCPFGEVFNATRFASVYAWNRKRISNCVADYSVLYNSASFSTFKCYGVSPTKLNDLCFTNVYADSFVIRGDEVRQIAPGQTGKIADYNYKLPDDFTGCVIAWNSNNLDSKVGGNYNYLYRLFRKSNLKPFERDISTEIYQAGSTPCNGVEGFNCYFPLQSYGFQPTNGVGYQPYRVVVLSFELLHAPATVCGPKKSTNLVKNKCVNFNFNGLTGTGVLTESNKKFLPFQQFGRDIADTTDAVRDPQTLEILDITPCSFGGVSVITPGTNTSNQVAVLYQDVNCTEVPVAIHADQLTPTWRVYSTGSNVFQTRAGCLIGAEHVNNSYECDIPIGAGICASYQTQTNSPSGAGSHHHHHHHHHH

SEQ ID NO: 4417 - protein, 715 aa, Artificial Sequence
  Description of Artificial Sequence: Synthetic polypeptide
MGILPSPGMPALLSLVSLLSVLLMGCVAETGTQCVNLTTRTQLPPAYTNSFTRGVYYPDKVFRSSVLHSTQDLFLPFFSNVTWFHAIHVSGTNGTKRFDNPVLPFNDGVYFASTEKSNIIRGWIFGTTLDSKTQSLLIVNNATNVVIKVCEFQFCNDPFLGVYYHKNNKSWMESEFRVYSSANNCTFEYVSQPFLMDLEGKQGNFKNLREFVFKNIDGYFKIYSKHTPINLVRDLPQGFSALEPLVDLPIGINITRFQTLLALHRSYLTPGDSSSGWTEGAAAYYVGYLQPRTFLLKYNENGTITDAVDCALDPLSETKCTLKSFTVEKGIYQTSNFRVQPTESIVRFPNITNLCPFGEVFNATRFASVYAWNRKRISNCVADYSVLYNSASFSTFKCYGVSPTKLNDLCFTNVYADSFVIRGDEVRQIAPGQTGKIADYNYKLPDDFTGCVIAWNSNNLDSKVGGNYNYLYRLFRKSNLKPFERDISTEIYQAGSTPCNGVEGFNCYFPLQSYGFQPTNGVGYQPYRVVVLSFELLHAPATVCGPKKSTNLVKNKCVNFNFNGLTGTGVLTESNKKFLPFQQFGRDIADTTDAVRDPQTLEILDITPCSFGGVSVITPGTNTSNQVAVLYQDVNCTEVPVAIHADQLTPTWRVYSTGSNVFQTRAGCLIGAEHVNNSYECDIPIGAGICASYQTQTNSPSGAGSHHHHHHHHHH

SEQ ID NO: 4418 - protein, 715 aa, Artificial Sequence
  Description of Artificial Sequence: Synthetic polypeptide
MGILPSPGMPALLSLVSLLSVLLMGCVAETGTQCVNLTTRTQLPPAYTNSFTRGVYYPDKVFRSSVLHSTQDLFLPFFSNVTWFHAIHVSGTNGTKRFDNPVLPFNDGVYFASTEKSNIIRGWIFGTTLDSKTQSLLIVNNATNVVIKVCEFQFCNDPFLGVYYHKNNKSWMESEFRVYSSANNCTFEYVSQPFLMDLEGKQGNFKNLREFVFKNIDGYFKIYSKHTPINLVRDLPQGFSALEPLVDLPIGINITRFQTLLALHRSYLTPGDSSSGWTAGAAAYYVGYLQPRTFLLKYNENGTITDAVDCALDPLSETKCTLKSFTVEKGIYQTSNFRVQPTESIVRFPNITNLCPFGEVFNATRFASVYAWNRKRISNCVADYSVLYNSASFSTFKCYGVSPTKLNDLCFTNVYADSFVIRGDEVRQIAPGQTGKIADYNYKLPDDFTGCVIAWNSNNLDSKVGGNYNYLYRLFRKSNLKPFERDISTEIYQAGSTPCNGVEGFNCYNPLQSYGFQPTNGVGYQPYRVVVLSFELLHAPATVCGPKKSTNLVKNKCVNFNFNGLTGTGVLTESNKKFLPFQQFGRDIADTTDAVRDPQTLEILDITPCSFGGVSVITPGTNTSNQVAVLYQDVNCTEVPVAIHADQLTPTWRVYSTGSNVFQTRAGCLIGAEHVNNSYECDIPIGAGICASYQTQTNSPSGAGSHHHHHHHHHH

SEQ ID NO: 4419 - protein, 715 aa, Artificial Sequence
  Description of Artificial Sequence: Synthetic polypeptide
MGILPSPGMPALLSLVSLLSVLLMGCVAETGTQCVNLTTRTQLPPAYTNSFTRGVYYPDKVFRSSVLHSTQDLFLPFFSNVTWFHAIHVSGTNGTKRFDNPVLPFNDGVYFASTEKSNIIRGWIFGTTLDSKTQSLLIVNNATNVVIKVCEFQFCNDPFLGVYYHKNNKSWMESEFRVYSSANNCTFEYVSQPFLKDLEGKQGNFKNLREFVFKNIDGYFKIYSKHTPINLVRDLPQGFSALEPLVDLPIGINITRFQTLLALHRSYLTPGDSSSGWTAGAAAYYVGYLQPRTFLLKYNENGTITDAVDCALDPLSETKCTLKSFTVEKGIYQTSNFRVQPTESIVRFPNITNLCPFGEVFNATRFASVYAWNRKRISNCVADYSVLYNSASFSTFKCYGVSPTKLNDLCFTNVYADSFVIRGDEVRQIAPGQTGKIADYNYKLPDDFTGCVIAWNSNNLDSKVGGNYNYLYRLFRKSNLKPFERDISTEIYQAGSTPCNGVEGFNCYFPLQSYGFQPTNGVGYQPYRVVVLSFELLHAPATVCGPKKSTNLVKNKCVNFNFNGLTGTGVLTESNKKFLPFQQFGRDIADTTDAVRDPQTLEILDITPCSFGGVSVITPGTNTSNQVAVLYQDVNCTEVPVAIHADQLTPTWRVYSTGSNVFQTRAGCLIGAEHVNNSYECDIPIGAGICASYQTQTNSPSGAGSHHHHHHHHHH

SEQ ID NO: 4420 - protein, 715 aa, Artificial Sequence
  Description of Artificial Sequence: Synthetic polypeptide
MGILPSPGMPALLSLVSLLSVLLMGCVAETGTQCVNLTTRTQLPPAYTNSFTRGVYYPDKVFRSSVLHSTQDLFLPFFSNVTWFHAIHVSGTNGTKRFDNPVLPFNDGVYFASTEKSNIIRGWIFGTTLDSKTQSLLIVNNATNVVIKVCEFQFCNRPFLGVYYHKNNKSWMESEFRVYSSANNCTFEYVSQPFLMDLEGKQGNFKNLREFVFKNIDGYFKIYSKHTPINLVRDLPQGFSALEPLVDLPIGINITRFQTLLALHRSYLTPGDSSSGWTAGAAAYYVGYLQPRTFLLKYNENGTITDAVDCALDPLSETKCTLKSFTVEKGIYQTSNFRVQPTESIVRFPNITNLCPFGEVFNATRFASVYAWNRKRISNCVADYSVLYNSASFSTFKCYGVSPTKLNDLCFTNVYADSFVIRGDEVRQIAPGQTGKIADYNYKLPDDFTGCVIAWNSNNLDSKVGGNYNYLYRLFRKSNLKPFERDISTEIYQAGSTPCNGVEGFNCYFPLQSYGFQPTNGVGYQPYRVVVLSFELLHAPATVCGPKKSTNLVKNKCVNFNFNGLTGTGVLTESNKKFLPFQQFGRDIADTTDAVRDPQTLEILDITPCSFGGVSVITPGTNTSNQVAVLYQDVNCTEVPVAIHADQLTPTWRVYSTGSNVFQTRAGCLIGAEHVNNSYECDIPIGAGICASYQTQTNSPSGAGSHHHHHHHHHH

SEQ ID NO: 4421 - protein, 715 aa, Artificial Sequence
  Description of Artificial Sequence: Synthetic polypeptide
MGILPSPGMPALLSLVSLLSVLLMGCVAETGTQCVNLTTRTQLPPAYTNSFTRGVYYPDKVFRSSVLHSTQDLFLPFFSNVTWFHAIHVSGTNGTKRFDNPVLPFNDGVYFASTEKSNIIRGWIFGTTLDSKTQSLLIVNNATNVVIKVCEFQFCNDPFLGVYYHKNNKSWMESEFRVYSSANNCTFEYVSQPFLMDLEGKQGNFKNLREFVFKNIDGYFKIYSKHTPINLVRDLPQGFSALEPLVDLPIGINITRFQTLLALHRSYLTPGDSSSGWTAGAAAYYVGYLQPRTFLLKYNENGTITDAVDCALDPLSETKCTLKSFTVEKGIYQTSNFRVQPTESIVRFPNITNLCPFGEVFNATRFASVYAWNRKRISNCVADYSVLYNSASFSTFKCYGVSPTKLNDLCFTNVYADSFVIRGDEVRQIAPGQTGKIADYNYKLPDDFTGCVIAWNSNNLDSKVGGNYNYLYRLFRKSNLKPFERDISTEIYQAGSTPCNGVEGFNCYFPLQSYGFQPTNGVGYQPYRVVVLSFELKHAPATVCGPKKSTNLVKNKCVNFNFNGLTGTGVLTESNKKFLPFQQFGRDIADTTDAVRDPQTLEILDITPCSFGGVSVITPGTNTSNQVAVLYQDVNCTEVPVAIHADQLTPTWRVYSTGSNVFQTRAGCLIGAEHVNNSYECDIPIGAGICASYQTQTNSPSGAGSHHHHHHHHHH

SEQ ID NO: 4422 - protein, 715 aa, Artificial Sequence
  Description of Artificial Sequence: Synthetic polypeptide
MGILPSPGMPALLSLVSLLSVLLMGCVAETGTQCVNLTTRTQLPPAYTNSFTRGVYYPDKVFRSSVLHSTQDLFLPFFSNVTWFHAIHVSGTNGTKRFDNPVLPFNDGVYFASTEKSNIIRGWIFGTTLDSKTQSLLIVNNATNVVIKVCEFQFCNDPFLGVYYHKNNKSWMESEFRVYSSANNCTFEYVSQPFLMDLEGKQGNFKNLREFVFKNIDGYFKIYSKHTPINLVRDLPQGFSALEPLVDLPIGINITRFQTLLALHRSYLTPGDSSSGWTAGAAAYYVGYLQPRTFLLKYNENGTITDAVDCALDPLSETKCTLKSFTVEKGIYQTSNFRVQPTESIVRFPNITNLCPFGEVFNATRFASVYAWNRKRISNCVADYSVLYNSASFSTFKCYGVSPTKLNDLCFTNVYADSFVIRGDEVRQIAPGQTGKIADYNYKLPDDFTGCVIAWNSNNLDSKVGGNYNYLYRLFRKSNLKPFERDISTEIYQAGSTPCNGVEGFNCYFPLQSYGFQPTNGVGYQPYRVVVLSFELLHAPATVCGPKKSTNLVKNKCVNFNFNGLTGTGVLTESNKKFLPFQQFGRDIADTTDAVRDPQTLEILDITPCSFGGVSVITPGTRTSNQVAVLYQDVNCTEVPVAIHADQLTPTWRVYSTGSNVFQTRAGCLIGAEHVNNSYECDIPIGAGICASYQTQTNSPSGAGSHHHHHHHHHH

SEQ ID NO: 4423 - protein, 715 aa, Artificial Sequence
  Description of Artificial Sequence: Synthetic polypeptide
MGILPSPGMPALLSLVSLLSVLLMGCVAETGTQCVNLTTRTQLPPAYTNSFTRGVYYPDKVFRSSVLHSTQDLFLPFFSNVTWFHAIHVSGTNGTKRFDNPVLPFNDGVYFASTEKSNIIRGWIFGTTLDSKTQSLLIVNNATNVVIKVCEFQFCNDPFLGVYYHKNNKSWMESEFRVYSSANNCTFEYVSQPFLMDLEGKQGNFKNLREFVFKNIDGYFKIYSKHTPINLVRDLPQGFSALEPLVDLPIGINITRFQTLLALHRSYLTPGDSSSGWTAGAAAYYVGYLQPRTFLLKYNENGTITDAVDCALDPLSETKCTLKSFTVEKGIYQTSNFRVQPTESIVRFPNITNACPFGEVFNATRFASVYAWNRKRISNCVADYSVLYNSASFSTFKCYGVSPTKLNDLCFTNVYADSFVIRGDEVRQIAPGQTGKIADYNYKLPDDFTGCVIAWNSNNLDSKVGGNYNYLYRLFRKSNLKPFERDISTEIYQAGSTPCNGVEGFNCYFPLQSYGFQPTNGVGYQPYRVVVLSFELLHAPATVCGPKKSTNLVKNKCVNFNFNGLTGTGVLTESNKKFLPFQQFGRDIADTTDAVRDPQTLEILDITPCSFGGVSVITPGTNTSNQVAVLYQDVNCTEVPVAIHADQLTPTWRVYSTGSNVFQTRAGCLIGAEHVNNSYECDIPIGAGICASYQTQTNSPSGAGSHHHHHHHHHH

SEQ ID NO: 4424 - protein, 715 aa, Artificial Sequence
  Description of Artificial Sequence: Synthetic polypeptide
MGILPSPGMPALLSLVSLLSVLLMGCVAETGTQCVNLTTRTQLPPAYTNSFTRGVYYPDKVFRSSVLHSTQDLFLPFFSNVTWFHAIHVSGTNGTKRFDNPVLPFNDGVYFASTEKSNIIRGWIFGTTLDSKTQSLLIVNNATNVVIKVCEFQFCNDPFLGVYYHKNNKSWMESEFRVYSSANNCTFEYVSQPFLMDLEGKQGNFKNLREFVFKNIDGYFKIYSKHTPINLVRDLPQGFSALEPLVDLPIGINITRFQTLLALHRSYLTPGDSSSGWTAGAAAYYVGYLQPRTFLLKYNENGTITDAVDCALDPLSETKCTLKSFTVEKGIYQTSNFRVQPTESIVRFPNITNLCPFGEVFNATRFASVYAWNRKRISNCVADYSVLYNSASFSTFKCYGVSPTKLNDLCFTNVYADSFVIRGDEVRQIAPGQTGKIADYNYKLPDDFTGCVIAWNSNNLDSKVGGNYNYLYRLFRKSNLKPFERDISTEIYQAGSTPCNGVEGFNCYCPLQSYGFQPTNGVGYQPYRVVVLSFELLHAPATVCGPKKSTNLVKNKCVNFNFNGLTGTGVLTESNKKFLPFQQFGRDIADTTDAVRDPQTLEILDITPCSFGGVSVITPGTNTSNQVAVLYQDVNCTEVPVAIHADQLTPTWRVYSTGSNVFQTRAGCLIGAEHVNNSYECDIPIGAGICASYQTQTNSPSGAGSHHHHHHHHHH

SEQ ID NO: 4425 - protein, 715 aa, Artificial Sequence
  Description of Artificial Sequence: Synthetic polypeptide
MGILPSPGMPALLSLVSLLSVLLMGCVAETGTQCVNLTTRTQLPPAYTNSFTRGVYYPDKVFRSSVLHSTQDLFLPFFSNVTWFHAIHVSGTNGTKRFDNPVLPFNDGVYFASTEKSNIIRGWIFGTTLDSKTQSLLIVNNATNVVIKVCEFQFCNDPFLGVYYHKNNKSWMESEFRVYSSANNCTFEYVSQPFLMDLEGKQGNFKNLREFVFKNIDGYFKIYSKHTPINLVRDLPQGFSALEPLVDLPIGINITRFQTLLALHRSYLTPGDSSSGWTAGAAAYYVGYLQPRTFLLKYNENGTITDAVDCALDPLSETKCTLKSFTVEKGIYQTSNFRVQPTESIVRFPNITNLCPFGEVFNATRFASVYAWNRKRISNCVADYSVLYNSASFSTFKCYGVSPTKLNDLCFTNVYADSFVIRGDEVRQIAPGQTGKIADYNYKLPDDFTGCVIAWNSNNLDSKVGGNYNYLYRLFRKSNLKPFERDISTEIYQAGSTPCNGVEGFNCHFPLQSYGFQPTNGVGYQPYRVVVLSFELLHAPATVCGPKKSTNLVKNKCVNFNFNGLTGTGVLTESNKKFLPFQQFGRDIADTTDAVRDPQTLEILDITPCSFGGVSVITPGTNTSNQVAVLYQDVNCTEVPVAIHADQLTPTWRVYSTGSNVFQTRAGCLIGAEHVNNSYECDIPIGAGICASYQTQTNSPSGAGSHHHHHHHHHH

SEQ ID NO: 4426 - protein, 715 aa, Artificial Sequence
  Description of Artificial Sequence: Synthetic polypeptide
MGILPSPGMPALLSLVSLLSVLLMGCVAETGTQCVNLTTRTQLPPAYTNSFTRGVYYPDKVFRSSVLHSTQDLFLPFFSNVTWFHAKHVSGTNGTKRFDNPVLPFNDGVYFASTEKSNIIRGWIFGTTLDSKTQSLLIVNNATNVVIKVCEFQFCNDPFLGVYYHKNNKSWMESEFRVYSSANNCTFEYHSQPFLMDLEGKQGNFKNLREFVFKNIDGYFKIYSKHTPINLVRDLPQGFSALEPLVDLPIGINITRFQTLLALHRSYLTPGDSSSGETAGAAAYYVGYLQPRTFLLKYNENGTITDAVDCALDPLSETKCTLKSFTVEKGIYQTSNFRVQPTESIVRFPNITNKCPFGEVFNATRFASVYAWNRKRISNCVADYSVLYNSASFSTFKCYGVSPTKLNDLCFTNVYADSFVIRGDEVRQIAPGQTGKIADYNYKLPDDFTGCVIAWNSNNLDSKVGGNYNYLYRLFRKSNLKPFERDISTEIYQAGSTPCNGVEGFNCYFPLQSYGFQPTNGVGQQPYRVVVLSFELLHAPATVCGPKKSTNLVKNKCVNFNFNGLTGTGVLTESNKKFLPFQQFGRDIADTTDAVRDPQTLEILDITPCSFGGVSVITPGTNTSNQVAVLYQDVNCTEVPDAIHADQLTPTWRVYSTGSNVFQTRAGCLIGAEHVNNSYECDIPIGAGICASYQTQTNSPSGAGSHHHHHHHHHH

SEQ ID NO: 4427 - protein, 715 aa, Artificial Sequence
  Description of Artificial Sequence: Synthetic polypeptide
MGILPSPGMPALLSLVSLLSVLLMGCVAETGTQCVNLTTRTQLPPAYTNSFTRGVYYPDKVFRSSVLHSTQDLFLPFFSNVTWFHAIHVSGTNGTKRFDNPVLPFNDGVYFASTEKSNIIRGWIFGTTLDSKTQSLLIVNNATNVVIKVCEFQFCNDPFLGVYYHKNNKSWMESEFRVYSSANNCTFEYVSQPFLGDLEGKQGNFKNLREFVFKNIDGYFKIYSKHTPINLVRDLPQGFSALEPLVDLPIGINITRFQTLLALHRSYLTPGDSSSGWTAGAAAYYVGYLQPRTFLLKYNENGTITDAVDCALDPLSETKCTLKSFTVEKGIYQTSNFRVQPTESIVRFPNITNLCPFGEVFNATRFASVYAWNRKRISNCVADYSVLYNSASFSTFKCYGVSPTKLNDLCFTNVYADSFVIRGDEVRQIAPGQTGKIADYNYKLPDDFTGCVIAWNSNNLDSKVGGNYNYLYRLFRKSNLKPFERDISTEIYQAGSTPCNGVEGFNCYFPLQSYGFQPTNGVGYQPYRVVVLSFELLHAPATVCGPKKSTNLVKNKCVNFNFNGLTGTGVLTESNKKFLPFQQFGRDIADTTDAVRDPQTLEILDITPCSFGGVSVITPGTNTSNQVAVLYQDVNCTEVPVAIHADQLTPTWRVYSTGSNVFQTRAGCLIGAEHVNNSYECDIPIGAGICASYQTQTNSPSGAGSHHHHHHHHHH

SEQ ID NO: 4428 - protein, 715 aa, Artificial Sequence
  Description of Artificial Sequence: Synthetic polypeptide
MGILPSPGMPALLSLVSLLSVLLMGCVAETGTQCVNLTTRTQLPPAYTNSFTRGVYYPDKVFRSSVLHSTQDLFLPFFSNVTWFHAIHVSGTNGTKRFDNPVLPFNDGVYFASTEKSNIIRGWIFGTTLDSKTQSLLIVNNATNVVIKVCEFQFCNDPFLGVYYHKNNKSWMESEFRVYSSANNCTFEYVSQPFLMDLEGKQGNFKNLREFVFKNIDGYFKIYSKHTPINLVRDLPQGFSALEPLVDLPIGINITRFQTLLALHRSYLTPGDSSSGWTAGAAAYYVGYLQPRTFLLKYNENGTITDAVDCALDPLSETKCTLKSFTVEKGIYQTSNFRVQPTESIVRFPNITNTCPFGEVFNATRFASVYAWNRKRISNCVADYSVLYNSASFSTFKCYGVSPTKLNDLCFTNVYADSFVIRGDEVRQIAPGQTGKIADYNYKLPDDFTGCVIAWNSNNLDSKVGGNYNYLYRLFRKSNLKPFERDISTEIYQAGSTPCNGVEGFNCYFPLQSYGFQPTNGVGYQPYRVVVLSFELLHAPATVCGPKKSTNLVKNKCVNFNFNGLTGTGVLTESNKKFLPFQQFGRDIADTTDAVRDPQTLEILDITPCSFGGVSVITPGTNTSNQVAVLYQDVNCTEVPVAIHADQLTPTWRVYSTGSNVFQTRAGCLIGAEHVNNSYECDIPIGAGICASYQTQTNSPSGAGSHHHHHHHHHH

SEQ ID NO: 4429 - protein, 715 aa, Artificial Sequence
  Description of Artificial Sequence: Synthetic polypeptide
MGILPSPGMPALLSLVSLLSVLLMGCVAETGTQCVNLTTRTQLPPAYTNSFTRGVYYPDKVFRSSVLHSTQDLFLPFFSNVTWFHAIHVSGTNGTKRFDNPVLPFNDGVYFASTEKSNIIRGWIFGTTLDSKTQSLLIVNNATNVVIKVCEFQFCNDPFLGVYYHKNNKSWMESEFRVYSSANNCTFEYVSQPFLMDLEGKQGNFKNLREFVFKNIDGYFKIYSKHTPINLVRDLPQGFSALEPLVDLPIGINITRFQTLLALHRSYLTPGDSSSGWTAGAAAYYVGYLQPRTFLLKYNENGTITDAVDCALDPLSETKCTLKSFTVEKGIYQTSNFRVQPTESIVRFPNITNLCPFGEVFNATRFASVYAWNRKRISNCVADYSVLYNSASFSTFKCYGVSPTKLNDLCFTNVYADSFVIRGDEVRQIAPGQTGKIADYNYKLPDDFTGCVIAWNSNNLDSKVGGNYNYLYRLFRKSNLKPFERDISTEIYQAGSTPCNGVEGFNCYFPLQSYGFQPTNGVGEQPYRVVVLSFELLHAPATVCGPKKSTNLVKNKCVNFNFNGLTGTGVLTESNKKFLPFQQFGRDIADTTDAVRDPQTLEILDITPCSFGGVSVITPGTNTSNQVAVLYQDVNCTEVPVAIHADQLTPTWRVYSTGSNVFQTRAGCLIGAEHVNNSYECDIPIGAGICASYQTQTNSPSGAGSHHHHHHHHHH

SEQ ID NO: 4430 - protein, 715 aa, Artificial Sequence
  Description of Artificial Sequence: Synthetic polypeptide
MGILPSPGMPALLSLVSLLSVLLMGCVAETGTQCVNLTTRTQLPPAYTNSFTRGVYYPDKVFRSSVLHSTQDLFLPFFSNVTWFHAIHVSGTNGTKRFDNPVLPFNDGVYFASTEKSNIIRGWIFGTTLDSKTQSLLIVNNATKVVIKVCEFQFCNDPFLGVYYHKNNKSWMESEFRVYSSANNCTFEYVSQPFLMDLEGKQGNFKNLREFVFKNIDGYFKIYSKHTPINLVRDLPQGFSALEPLVDLPIGINITRFQTLLALHRSYLTPGDSSSGWTAGAAAYYVGYLQPRTFLLKYNENGTITDAVDCALDPLSETKCTLKSFTVEKGIYQTSNFRVQPTESIVRFPNITNLCPFGEVFNATRFASVYAWNRKRISNCVADYSVLYNSASFSTFKCYGVSPTKLNDLCFTNVYADSFVIRGDEVRQIAPGQTGKIADYNYKLPDDFTGCVIAWNSNNLDSKVGGNYNYLYRLFRKSNLKPFERDISTEIYQAGSTPCNGVEGFNCYFPLQSYGFQPTNGVGYQPYRVVVLSFELLHAPATVCGPKKSTNLVKNKCVNFNFNGLTGTGVLTESNKKFLPFQQFGRDIADTTDAVRDPQTLEILDITPCSFGGVSVITPGTNTSNQVAVLYQDVNCTEVPVAIHADQLTPTWRVYSTGSNVFQTRAGCLIGAEHVNNSYECDIPIGAGICASYQTQTNSPSGAGSHHHHHHHHHH

SEQ ID NO: 4431 - protein, 715 aa, Artificial Sequence
  Description of Artificial Sequence: Synthetic polypeptide
MGILPSPGMPALLSLVSLLSVLLMGCVAETGTQCVNLTTRTQLPPAYTNSFTRGVYYPDKVFRSSVLHSTQDLFLPFFSNVTWFHAIHVSGTNGTKRFDNPVLPFNDGVYFASTEKSNIIRGWIFGTTLDSKTQSLLIVNNATNVVIKVCEFQFCNDPFLGVYYHKNNKSWMESEFRVYSSANNCTFEYVSQPFLMDLEGKQGNFKNLREFVFKNIDGYFKIYSKHTPINLVRDLPQGFSALEPLVDLPIGINITRFQTLLALHRSYLTPGDSSSGWTAGAAAYYVGYLQPRTFLLKYNENGTITDAVDCALDPLSETKCTLKSFTVEKGIYQTSNFRVQPTISIVRFPNITNLCPFGEVFNATRFASVYAWNRKRISNCVADYSVLYNSASFSTFKCYGVSPTKLNDLCFTNVYADSFVIRGDEVRQIAPGQTGKIADYNYKLPDDFTGCVIAWNSNNLDSKVGGNYNYLYRLFRKSNLKPFERDISTEIYQAGSTPCNGVEGFNCYFPLQSYGFQPTNGVGYQPYRVVVLSFELLHAPATVCGPKKSTNLVKNKCVNFNFNGLTGTGVLTESNKKFLPFQQFGRDIADTTDAVRDPQTLEILDITPCSFGGVSVITPGTNTSNQVAVLYQDVNCTEVPVAIHADQLTPTWRVYSTGSNVFQTRAGCLIGAEHVNNSYECDIPIGAGICASYQTQTNSPSGAGSHHHHHHHHHH

SEQ ID NO: 4432 - protein, 715 aa, Artificial Sequence
  Description of Artificial Sequence: Synthetic polypeptide
MGILPSPGMPALLSLVSLLSVLLMGCVAETGTQCVNLTTRTQLPPAYTNSFTRGVYYPDKVFRSSVLHSTQDLFLPFFSNVTWFHAAHVSGTNGTKRFDNPVLPFNDGVYFASTEKSNIIRGWIFGTTLDSKTQSLLIVNNATNVVIKVCEFQFCNDPFLGVYYHKNNKSWMESEFRVYSSANNCTFEYVSQPFLMDLEGKQGNFKNLREFVFKNIDGYFKIYSKHTPINLVRDLPQGFSALEPLVDLPIGINITRFQTLLALHRSYLTPGDSSSGWTAGAAAYYVGYLQPRTFLLKYNENGTITDAVDCALDPLSETKCTLKSFTVEKGIYQTSNFRVQPTESIVRFPNITNLCPFGEVFNATRFASVYAWNRKRISNCVADYSVLYNSASFSTFKCYGVSPTKLNDLCFTNVYADSFVIRGDEVRQIAPGQTGKIADYNYKLPDDFTGCVIAWNSNNLDSKVGGNYNYLYRLFRKSNLKPFERDISTEIYQAGSTPCNGVEGFNCYFPLQSYGFQPTNGVGYQPYRVVVLSFELLHAPATVCGPKKSTNLVKNKCVNFNFNGLTGTGVLTESNKKFLPFQQFGRDIADTTDAVRDPQTLEILDITPCSFGGVSVITPGTNTSNQVAVLYQDVNCTEVPVAIHADQLTPTWRVYSTGSNVFQTRAGCLIGAEHVNNSYECDIPIGAGICASYQTQTNSPSGAGSHHHHHHHHHH

SEQ ID NO: 4433 - protein, 715 aa, Artificial Sequence
  Description of Artificial Sequence: Synthetic polypeptide
MGILPSPGMPALLSLVSLLSVLLMGCVAETGTQCVNLTTRTQLPPAYTNSFTRGVYYPDKVFRSSVLHSTQDLFLPFFSNVTWFHAIHVSGTNGTKRFDNPVLPFNDGVYFASTEKSNIIRGWIFGTTLDSKTQSLLIVNNATNVVIKVCEFQFCNDPFLGVYYHKNNKSWMESEFRVYSSANNCTFEYVSQPFLMDLEGKQGNFKNLREFVFKNIDGYFKIYSKHTPINLVRDLPQGFSALEPLVDLPIGINITRFQTLLALHRSYLTPGDSSSGWTAGAAAYYVGYLQPRTFLLKYNENGTITDAVDCALDPLSETKCTLKSFTVEKGIYQTSNFRVQPTESIVRFPNITNLCPFGEVFNATRFASVYAWNRKRISNCVADYSVLYNSASFSTFKCYGVSPTKLNDLCFTNVYADSFVIRGDEVRQIAPGQTGKIADYNYKLPDDFTGCVIAWNSNNLDSKVGGNYNYLYRLFRKSNLKPFERDISTEIYQAGSTPCNGVEGFNQYFPLQSYGFQPTNGVGYQPYRVVVLSFELLHAPATVCGPKKSTNLVKNKCVNFNFNGLTGTGVLTESNKKFLPFQQFGRDIADTTDAVRDPQTLEILDITPCSFGGVSVITPGTNTSNQVAVLYQDVNCTEVPVAIHADQLTPTWRVYSTGSNVFQTRAGCLIGAEHVNNSYECDIPIGAGICASYQTQTNSPSGAGSHHHHHHHHHH

SEQ ID NO: 4434 - protein, 715 aa, Artificial Sequence
  Description of Artificial Sequence: Synthetic polypeptide
MGILPSPGMPALLSLVSLLSVLLMGCVAETGTQCVNLTTRTQLPPAYTNSFTRGVYYPDKVFRSSVLHSTQDLFLPFFSNVTWFHAIHVSGTNGTKRFDNPVLPFNDGVYFASTEKSNIIRGWIFGTTLDSKTQSLLIVNNATNVVIKVCRFQFCNDPFLGVYYHKNNKSWMESEFRVYSSANNCTFEYVSQPFLMDLEGKQGNFKNLREFVFKNIDGYFKIYSKHTPINLVRDLPQGFSALEPLVDLPIGINITRFQTLLALHRSYLTPGDSSSGWTAGAAAYYVGYLQPRTFLLKYNENGTITDAVDCALDPLSETKCTLKSFTVEKGIYQTSNFRVQPTESIVRFPNITNLCPFGEVFNATRFASVYAWNRKRISNCVADYSVLYNSASFSTFKCYGVSPTKLNDLCFTNVYADSFVIRGDEVRQIAPGQTGKIADYNYKLPDDFTGCVIAWNSNNLDSKVGGNYNYLYRLFRKSNLKPFERDISTEIYQAGSTPCNGVEGFNCYFPLQSYGFQPTNGVGYQPYRVVVLSFELLHAPATVCGPKKSTNLVKNKCVNFNFNGLTGTGVLTESNKKFLPFQQFGRDIADTTDAVRDPQTLEILDITPCSFGGVSVITPGTNTSNQVAVLYQDVNCTEVPVAIHADQLTPTWRVYSTGSNVFQTRAGCLIGAEHVNNSYECDIPIGAGICASYQTQTNSPSGAGSHHHHHHHHHH

SEQ ID NO: 4435 - protein, 715 aa, Artificial Sequence
  Description of Artificial Sequence: Synthetic polypeptide
MGILPSPGMPALLSLVSLLSVLLMGCVAETGTQCVNLTTRTQLPPAYTNSFTRGVYYPDKVFRSSVLHSTQDLFLPFFSNVTWFHAIHVSGTNGTKRFDNPVLPFNDGVYFASTEKSNIIRGWIFGTTLDSKTQSLLIVNNATNVVIKVCEFQFCNDPFLGVYYHKNNKSWMESEFRVYSSANNCTFEYVSQPFLMDLEGKQGNFKNLREFVFKNIDGYFKIYSKHTPINLVRDLPQGFSALEPLVDLPIGINITRFQTLLALHRSYLTPGDSSSGWTAGAAAYYVGYLQPRTFLLKYNENGTITDAVDCALDPLSETKCTLKSFTVEKGIYQTSNFRVQPTESIVRFPNITNLCPFGEVFNATRFASSYAWNRKRISNCVADYSVLYNSASFSTFKCYGVSPTKLNDLCFTNVYADSFVIRGDEVRQIAPGQTGKIADYNYKLPDDFTGCVIAWNSNNLDSKVGGNYNYLYRLFRKSNLKPFERDISTEIYQAGSTPCNGVEGFNCYFPLQSYGFQPTNGVGYQPYRVVVLSFELLHAPATVCGPKKSTNLVKNKCVNFNFNGLTGTGVLTESNKKFLPFQQFGRDIADTTDAVRDPQTLEILDITPCSFGGVSVITPGTNTSNQVAVLYQDVNCTEVPVAIHADQLTPTWRVYSTGSNVFQTRAGCLIGAEHVNNSYECDIPIGAGICASYQTQTNSPSGAGSHHHHHHHHHH

SEQ ID NO: 4436 - protein, 715 aa, Artificial Sequence
  Description of Artificial Sequence: Synthetic polypeptide
MGILPSPGMPALLSLVSLLSVLLMGCVAETGTQCVNLTTRTQLPPAYTNSFTRGVYYPDKVFRSSVLHSTQDLFLPFFSNVTWFHAIHVSGTNGTKRFDNPVLPFNDGVYFASTEKSNIIRGWIFGTTLDSKTQSLLIVNNATNVVIKVCEFQFCNDPFLGVYYHKNNKSWMESEFRVYSSANNCTFEYVSQPFLMDLEGKQGNFKNLREFVFKNIDGYFKIYSKHTPINLVRDLPQGFSALEPLVDLPIGINITRFQTLLALHRSYLTPGDSSSGWTAGAAAYYVGYLQPRTFLLKYNENGTITDAVDCALDPLSETKCTLKSFTVEKGIYQTSNFRVQPTESIVRFPNITNLCPFGEVFNATRFASVYAWNRKRISNCVADYSVLYNSASFSTFKCYGVSPTKLNDLCFTNVYADSFVIRGDEVRQIAPGQTGKIADYNYKLPDDFTGCVIAWNSNNLDSKVGGNYNYLYRLFRKSNLKPFERDISTEIYQAGSTPCNGVEGFNCYFPLQSYGFQPTNGVGYQPYRVVVLSFELHHAPATVCGPKKSTNLVKNKCVNFNFNGLTGTGVLTESNKKFLPFQQFGRDIADTTDAVRDPQTLEILDITPCSFGGVSVITPGTNTSNQVAVLYQDVNCTEVPVAIHADQLTPTWRVYSTGSNVFQTRAGCLIGAEHVNNSYECDIPIGAGICASYQTQTNSPSGAGSHHHHHHHHHH

SEQ ID NO: 4437 - protein, 715 aa, Artificial Sequence
  Description of Artificial Sequence: Synthetic polypeptide
MGILPSPGMPALLSLVSLLSVLLMGCVAETGTQCVNLTTRTQLPPAYTNSFTRGVYYPDKVFRSSVLHSTQDLFLPFFSNVTWFHAIHVSGTNGTKRFDNPVLPFNDGVYFASTEKSNIIRGWIFGTTLDSKTQSLLIVNNATNVVIKVCEFQFCNDPFLGVYYHKNNKSWMESEFRVYSSANNCTFEYVSQPFLMDLEGKQGNFKNLREFVFKNIDGYFKIYSKHTPINLYRDLPQGFSALEPLVDLPIGINITRFQTLLALHRSYLTPGDSSSGWTAGAAAYYVGYLQPRTFLLKYNENGTITDAVDCALDPLSETKCTLKSFTVEKGIYQTSNFRVQPTESIVRFPNITNLCPFGEVFNATRFASVYAWNRKRISNCVADYSVLYNSASFSTFKCYGVSPTKLNDLCFTNVYADSFVIRGDEVRQIAPGQTGKIADYNYKLPDDFTGCVIAWNSNNLDSKVGGNYNYLYRLFRKSNLKPFERDISTEIYQAGSTPCNGVEGFNCYFPLQSYGFQPTNGVGYQPYRVVVLSFELLHAPATVCGPKKSTNLVKNKCVNFNFNGLTGTGVLTESNKKFLPFQQFGRDIADTTDAVRDPQTLEILDITPCSFGGVSVITPGTNTSNQVAVLYQDVNCTEVPVAIHADQLTPTWRVYSTGSNVFQTRAGCLIGAEHVNNSYECDIPIGAGICASYQTQTNSPSGAGSHHHHHHHHHH

SEQ ID NO: 4438 - protein, 715 aa, Artificial Sequence
  Description of Artificial Sequence: Synthetic polypeptide
MGILPSPGMPALLSLVSLLSVLLMGCVAETGTQCVNLTTRTQLPPAYTNSFTRGVYYPDKVFRSSVLHSTQDLFLPFFSNVTWFHAIHVSGTNGTKRFDNPVLPFNDGVYFAMTEKSNIIRGWIFGTTLDSKTQSLLIVNNATNVVIKVCEFQFCNDPFLGVYYHKNNKSWMESEFRVYSSANNCTFEYVSQPFLMDLEGKQGNFKNLREFVFKNIDGYFKIYSKHTPINLVRDLPQGFSALEPLVDLPIGINITRFQTLLALHRSYLTPGDSSSGWTAGAAAYYVGYLQPRTFLLKYNENGTITDAVDCALDPLSETKCTLKSFTVEKGIYQTSNFRVQPTESIVRFPNITNLCPFGEVFNATRFASVYAWNRKRISNCVADYSVLYNSASFSTFKCYGVSPTKLNDLCFTNVYADSFVIRGDEVRQIAPGQTGKIADYNYKLPDDFTGCVIAWNSNNLDSKVGGNYNYLYRLFRKSNLKPFERDISTEIYQAGSTPCNGVEGFNCYFPLQSYGFQPTNGVGYQPYRVVVLSFELLHAPATVCGPKKSTNLVKNKCVNFNFNGLTGTGVLTESNKKFLPFQQFGRDIADTTDAVRDPQTLEILDITPCSFGGVSVITPGTNTSNQVAVLYQDVNCTEVPVAIHADQLTPTWRVYSTGSNVFQTRAGCLIGAEHVNNSYECDIPIGAGICASYQTQTNSPSGAGSHHHHHHHHHH

SEQ ID NO: 4439 - protein, 715 aa, Artificial Sequence
  Description of Artificial Sequence: Synthetic polypeptide
MGILPSPGMPALLSLVSLLSVLLMGCVAETGTQCVNLTTRTQLPPAYTNSFTRGVYYPDKVFRSSVLHSTQDLFLPFFSNVTWFHANHVSGTNGTKRFDNPVLPFNDGVYFASTEKSNIIRGWIFGTTLDSKTQSLLIVNNATNVVIKVCEFQFCNDPFLGVYYHKNNKSWMESEFRVYSSANNCTFEYVSQPFLMDLEGKQGNFKNLREFVFKNIDGYFKIYSKHTPINLVRDLPQGFSALEPLVDLPIGINITRFQTLLALHRSYLTPGDSSSGWTAGAAAYYVGYLQPRTFLLKYNENGTITDAVDCALDPLSETKCTLKSFTVEKGIYQTSNFRVQPTESIVRFPNITNLCPFGEVFNATRFASVYAWNRKRISNCVADYSVLYNSASFSTFKCYGVSPTKLNDLCFTNVYADSFVIRGDEVRQIAPGQTGKIADYNYKLPDDFTGCVIAWNSNNLDSKVGGNYNYLYRLFRKSNLKPFERDISTEIYQAGSTPCNGVEGFNCYFPLQSYGFQPTNGVGYQPYRVVVLSFELLHAPATVCGPKKSTNLVKNKCVNFNFNGLTGTGVLTESNKKFLPFQQFGRDIADTTDAVRDPQTLEILDITPCSFGGVSVITPGTNTSNQVAVLYQDVNCTEVPVAIHADQLTPTWRVYSTGSNVFQTRAGCLIGAEHVNNSYECDIPIGAGICASYQTQTNSPSGAGSHHHHHHHHHH

SEQ ID NO: 4440 - protein, 715 aa, Artificial Sequence
  Description of Artificial Sequence: Synthetic polypeptide
MGILPSPGMPALLSLVSLLSVLLMGCVAETGTQCVNLTTRTQLPPAYTNSFTRGVYYPDKVFRSSVLHSTQDLFLPFFSNVTWFHAIHVSGTNGTKRFDNPVLPFNDGVYFASTEKSNIIRGWIFGTTLDSKTQSLLIVNNATNVVIKVCEFQFCNDPFLGVYYHKNNKSWMESEFRVYSSANNCTFEYVSQPFLMDLEGKQGNFKNLREFVFKNIDGYFKIYSKHTPINLVRDLPQGFSALEPLVDLPIGINITRFQTLLALHRSYLTPGDSSSGWTAGAAAYYVGYLQPRTFLLKYNENGTITDAVDCALDPLSETKCTLKSFTVEKGIYQTSNFRVQPTESIVRFPNITNLCPFGEVFNATRFASVYAWNRKRISNCVADYSVLYNSASFSTFKCYGVSPTKLNDLCFTNVYADSFVIRGDEVRQIAPGQTGKIADYNYKLPDDFTGCVIAWNSSNLDSKVGGNYNYLYRLFRKSNLKPFERDISTEIYQAGSTPCNGVEGFNCYFPLQSYGFQPTNGVGYQPYRVVVLSFELLHAPATVCGPKKSTNLVKNKCVNFNFNGLTGTGVLTESNKKFLPFQQFGRDIADTTDAVRDPQTLEILDITPCSFGGVSVITPGTNTSNQVAVLYQDVNCTEVPVAIHADQLTPTWRVYSTGSNVFQTRAGCLIGAEHVNNSYECDIPIGAGICASYQTQTNSPSGAGSHHHHHHHHHH

SEQ ID NO: 4441 - protein, 715 aa, Artificial Sequence
  Description of Artificial Sequence: Synthetic polypeptide
MGILPSPGMPALLSLVSLLSVLLMGCVAETGTQCVNLTTRTQLPPAYTNSFTRGVYYPDKVFRSSVLHSTQDLFLPFFSNVTWFHAIHVSGTNGTKRFDNPVLPFNDGVYFASTEKSNIIRGWIFGTTLDSKTQSLLIVNNATNVVIKVCEFQFCNDPFLGVYYHKNNKSWMESEFRVYSSANNCTFEYVSQPFLMDLEGKQGNFKNLREFVFKNIDGYFKIYSKHTPINLVRDLPQGFSALEPLVDLPIGINITRFQTLLALHRSYLTPGDSSSGWTAGAAAYYVGYLQPRTFLLKYNENGTITDAVDCALDPLSETKCTLKSFTVEKGIYQTSNFRVQPTESIVRFPNITNLCPFGEVFNATRFASVYAWNRKRISNCVADYSVLYNSASFSTFKCYGVSPTKLNDLCFTNVYADSFVIRGDEVRQIAPGQTGKIADYNYKLPDDFTGCVIAWNSNNLDSKVGGNYNYLYRLFRKSNLKPFERDISTEIYQAGSTPCNGVEGFNCQFPLQSYGFQPTNGVGYQPYRVVVLSFELLHAPATVCGPKKSTNLVKNKCVNFNFNGLTGTGVLTESNKKFLPFQQFGRDIADTTDAVRDPQTLEILDITPCSFGGVSVITPGTNTSNQVAVLYQDVNCTEVPVAIHADQLTPTWRVYSTGSNVFQTRAGCLIGAEHVNNSYECDIPIGAGICASYQTQTNSPSGAGSHHHHHHHHHH

SEQ ID NO: 4442 - protein, 715 aa, Artificial Sequence
  Description of Artificial Sequence: Synthetic polypeptide
MGILPSPGMPALLSLVSLLSVLLMGCVAETGTQCVNLTTRTQLPPAYTNSFTRGVYYPDKVFRSSVLHSTQDLFLPFFSNVTWFHAIHVSGTNGTKRFDNPVLPFNDGVYFASTEKSNIIRGWIFGTTLDSKTQSLLIVNNATNVVIKVCEFQFCNDPFLGVYYHKNNKSWMESEFRVYSSANNCTFEYVSQPFLMDLEGKQGNFKNLREFVFKNIDGYFKIYSKHTPINLVRDLPQGFSALEPLVDLPIGINITRFQTLLALHRSYLTPGDSSSGWTAGAAAYYVGYLQPRTFLLKYNENGTITDAVDCALDPLSEIKCTLKSFTVEKGIYQTSNFRVQPTESIVRFPNITNLCPFGEVFNATRFASVYAWNRKRISNCVADYSVLYNSASFSTFKCYGVSPTKLNDLCFTNVYADSFVIRGDEVRQIAPGQTGKIADYNYKLPDDFTGCVIAWNSNNLDSKVGGNYNYLYRLFRKSNLKPFERDISTEIYQAGSTPCNGVEGFNCYFPLQSYGFQPTNGVGYQPYRVVVLSFELLHAPATVCGPKKSTNLVKNKCVNFNFNGLTGTGVLTESNKKFLPFQQFGRDIADTTDAVRDPQTLEILDITPCSFGGVSVITPGTNTSNQVAVLYQDVNCTEVPVAIHADQLTPTWRVYSTGSNVFQTRAGCLIGAEHVNNSYECDIPIGAGICASYQTQTNSPSGAGSHHHHHHHHHH

SEQ ID NO: 4443 - protein, 715 aa, Artificial Sequence
  Description of Artificial Sequence: Synthetic polypeptide
MGILPSPGMPALLSLVSLLSVLLMGCVAETGTQCVNLTTRTQLPPAYTNSFTRGVYYPDKVFRSSVLHSTQDLFLPFFSNVTWFHAIHVSGTNGTKRFDNPVLPFNDGVYFASTEKSNIIRGWIFGTTLDSKTQSLLIVNNATNVVIKVCEFQFCNDPFLGVYYHKNNKSWMESEFRVYSSANNCTFEYVSQPFLMDLEGKQGNFKNLREFVFKNIDGYFKIYSKHTPINLVRDLPQGFSALEPLVDLPIGINITRFQTLLALHRSYLTPGDSSSGWTAGAAAYYVGYLQPRTFLLKYNENGTITDAVDCALDPLSETKCTLKSFTVEKGIYQTSNFRVQPTESIVRFPNITNLCPFGEVFNATRFASVYAWNRKRISNCVADYSVLYNSASFSTFKCYGVSPTKLNDLCFTNVYADSFVIRGDEVRQIAPGQTGKIADYNYKLPDDFTGCVIAWNSNNLDSKVGGNYNYLYRLFRKSNLKPFERDISTEIYQAGSTPCNGVEGFNCYFPLQSYGFQPTNGPGYQPYRVVVLSFELLHAPATVCGPKKSTNLVKNKCVNFNFNGLTGTGVLTESNKKFLPFQQFGRDIADTTDAVRDPQTLEILDITPCSFGGVSVITPGTNTSNQVAVLYQDVNCTEVPVAIHADQLTPTWRVYSTGSNVFQTRAGCLIGAEHVNNSYECDIPIGAGICASYQTQTNSPSGAGSHHHHHHHHHH

SEQ ID NO: 4444 - protein, 715 aa, Artificial Sequence
  Description of Artificial Sequence: Synthetic polypeptide
MGILPSPGMPALLSLVSLLSVLLMGCVAETGTQCVNLTTRTQLPPAYTNSFTRGVYYPDKVFRSSVLHSTQDLFLPFFSNVTWFHAIHVSGTNGTKRFDNPVLPFNDGVYFASTEKSNIIRGWIFGVTLDSKTQSLLIVNNATNVVIKVCEFQFCNDPFLGVYYHKNNKSWMESEFRVYSSANNCTFEYVSQPFLMDLEGKQGNFKNLREFVFKNIDGYFKIYSKHTPINLVRDLPQGFSALEPLVDLPIGINITRFQTLLALHRSYLTPGDSSSGWTAGAAAYYVGYLQPRTFLLKYNENGTITDAVDCALDPLSETKCTLKSFTVEKGIYQTSNFRVQPTESIVRFPNITNLCPFGEVFNATRFASVYAWNRKRISNCVADYSVLYNSASFSTFKCYGVSPTKLNDLCFTNVYADSFVIRGDEVRQIAPGQTGKIADYNYKLPDDFTGCVIAWNSNNLDSKVGGNYNYLYRLFRKSNLKPFERDISTEIYQAGSTPCNGVEGFNCYFPLQSYGFQPTNGVGYQPYRVVVLSFELLHAPATVCGPKKSTNLVKNKCVNFNFNGLTGTGVLTESNKKFLPFQQFGRDIADTTDAVRDPQTLEILDITPCSFGGVSVITPGTNTSNQVAVLYQDVNCTEVPVAIHADQLTPTWRVYSTGSNVFQTRAGCLIGAEHVNNSYECDIPIGAGICASYQTQTNSPSGAGSHHHHHHHHHH

SEQ ID NO: 4445 - protein, 715 aa, Artificial Sequence
  Description of Artificial Sequence: Synthetic polypeptide
MGILPSPGMPALLSLVSLLSVLLMGCVAETGTQCVNLTTRTQLPPAYTNSFTRGVYYPDKVFRSSVLHSTQDLFLPFFSNVTWFHAIHVSGTNGTKRFDNPVLPFNDGVYFASTEKSNIIRGWIFGTTLDSKTQSLLIVNNATNVVIKVCEFQFCNDPFLGVYYHKNNKSWMESEFRVYSSANNCTFEYVSQPFLMDLEGKQGNFKNLREFVFKNIDGYFKIYSKHTPINLVRDLPQGFSALEPLVDLPIGINITRFQTLLALHRSYLTPGDSSSGWTAGAAAYYVGYLQPRTFLLKYNENGTITDAVDCALDPLSETKCTLKSFTVEKGIYQTSNFRVQPTESIVRFPNITNLCPFGEVFNATRFASVYAWNRKRISNCVADYSVLYNSASFSTFKCYGVSPTKLNDLCFTNVYADSFVIRGDEVRQIAPGQTGKIADYNYKLPDDFTGCVIAWNSNNLDSKVGGNYNYLYRLFRKSNLKPFERDISTEIYQAGSTPCNGVEGFNCYFPLQSYGFQPTNGVGYQPYRVVVLSFELLDAPATVCGPKKSTNLVKNKCVNFNFNGLTGTGVLTESNKKFLPFQQFGRDIADTTDAVRDPQTLEILDITPCSFGGVSVITPGTNTSNQVAVLYQDVNCTEVPVAIHADQLTPTWRVYSTGSNVFQTRAGCLIGAEHVNNSYECDIPIGAGICASYQTQTNSPSGAGSHHHHHHHHHH

SEQ ID NO: 4446 - protein, 715 aa, Artificial Sequence
  Description of Artificial Sequence: Synthetic polypeptide
MGILPSPGMPALLSLVSLLSVLLMGCVAETGTQCVNLTTRTQLPPAYTNSFTRGVYYPDKVFRSSVLHSTQDLFLPFFSNVTWFHAIHVSGTNGTKRFDNPVLPFNDGVYFASTEKSNIIRGWIFGTTLDSKTQSLLIVNNATNVVIKVCEFQFCNDPFLGVYYHKNNKSWMESEFRVYSSANNCTFEYVSQPFLMDLEGKQGNFKNLREFVFKNIDGYFKIYSKHTPINLVRDLPQGFSALEPLVDLPIGINITRFQTLLALHRSYLTPGDSSSGWTAGAAAYYVGYLQPRTFLLKYNENGTITDAVDCALDPLSETKCTLKSFTVEKGIYQTSNFRVQPTESIVRFPNITNLCPFGEVFNATRFASVYAWNRKRISNCVADYSVLYNSASFSTFKCYGVSPTKLNDLCFTNVYADSFVIRGDEVRQIAPGQTGKIADYNYKLPDDFTGCVIAWNSNNLDSKVGGNYNYLYRLFRKSNLKPFERDISTEIYQAGSTPCNGVEGFNCYFPLQSYGFQPTNGVGYQPYRVVVLSFELLHAPATVCGPKKSTNLVKNKCVNFNFNGLTGTGVLTESNKKFLPFQQFGLDIADTTDAVRDPQTLEILDITPCSFGGVSVITPGTNTSNQVAVLYQDVNCTEVPVAIHADQLTPTWRVYSTGSNVFQTRAGCLIGAEHVNNSYECDIPIGAGICASYQTQTNSPSGAGSHHHHHHHHHH

SEQ ID NO: 4447 - protein, 715 aa, Artificial Sequence
  Description of Artificial Sequence: Synthetic polypeptide
MGILPSPGMPALLSLVSLLSVLLMGCVAETGTQCVNLTTRTQLPPAYTNSFTRGVYYPDKVFRSSVLHSTQDLFLPFFSNVTWFHAIHVSGTNGTKRFDNPVLPFNDGVYFASTEKSNIIRGWIFGTTLDSKTQSLLIVNNATNVVIKVCEFQFCNDPFLGVYYHKNNKSWMESEFRVYSSANNCTFEYVSQPFLMDLEGKQGNFKNLREFVFKNIDGYFKIYSKHTPINLVRDLPQGFSALEPLVDLPIGINITRFQTLLALHRSYLTPGDSSSGWTAGAAAYYVGYLQPRTFLLKYNENGTITDAVDCALDPLSETKCTLKSFTVEKGIYQTSNFRVQPTESIVRFPNITNLCPFGEVFNATRFASVYAWNRKRISNCVADYSVLYNSASFSTFKCYGVSPTKLNDLCFTNVYADSFVIRGDEVRQIAPGQTGEIADYNYKLPDDFTGCVIAWNSNNLDSKVGGNYNYLYRLFRKSNLKPFERDISTEIYQAGSTPCNGVEGFNCYFPLQSYGFQPTNGVGYQPYRVVVLSFELLHAPATVCGPKKSTNLVKNKCVNFNFNGLTGTGVLTESNKKFLPFQQFGRDIADTTDAVRDPQTLEILDITPCSFGGVSVITPGTNTSNQVAVLYQDVNCTEVPVAIHADQLTPTWRVYSTGSNVFQTRAGCLIGAEHVNNSYECDIPIGAGICASYQTQTNSPSGAGSHHHHHHHHHH

SEQ ID NO: 4448 - protein, 715 aa, Artificial Sequence
  Description of Artificial Sequence: Synthetic polypeptide
MGILPSPGMPALLSLVSLLSVLLMGCVAETGTQCVNLTTRTQLPPAYTNSFTRGVYYPDKVFRSSVLHSTQDLFLPFFSNVTWFHAIHVSGTNGTKRFDNPVLPFNDGVYFASTEKSNIIRGWIFGTTLDSKTQSLLIVNNATNVVIKVCEFQFFNDPFLGVYYHKNNKSWMESEFRVYSSANNCTFEYVSQPFLMDLEGKQGNFKNLREFVFKNIDGYFKIYSKHTPINLVRDLPQGFSALEPLVDLPIGINITRFQTLLALHRSYLTPGDSSSGWTAGAAAYYVGYLQPRTFLLKYNENGTITDAVDCALDPLSETKCTLKSFTVEKGIYQTSNFRVQPTESIVRFPNITNLCPFGEVFNATRFASVYAWNRKRISNCVADYSVLYNSASFSTFKCYGVSPTKLNDLCFTNVYADSFVIRGDEVRQIAPGQTGKIADYNYKLPDDFTGCVIAWNSNNLDSKVGGNYNYLYRLFRKSNLKPFERDISTEIYQAGSTPCNGVEGFNCYFPLQSYGFQPTNGVGYQPYRVVVLSFELLHAPATVCGPKKSTNLVKNKCVNFNFNGLTGTGVLTESNKKFLPFQQFGRDIADTTDAVRDPQTLEILDITPCSFGGVSVITPGTNTSNQVAVLYQDVNCTEVPVAIHADQLTPTWRVYSTGSNVFQTRAGCLIGAEHVNNSYECDIPIGAGICASYQTQTNSPSGAGSHHHHHHHHHH

SEQ ID NO: 4449 - protein, 715 aa, Artificial Sequence
  Description of Artificial Sequence: Synthetic polypeptide
MGILPSPGMPALLSLVSLLSVLLMGCVAETGTQCVNLTTRTQLPPAYTNSFTRGVYYPDKVFRSSVLHSTQDLFLPFFSNVTWFHAIHVSGTNGTKRFDNPVLPFNDGVYFASTEKSNIIRGWIFGTTLDSKTQSLLIVNNATNVVIKVCEFQFCNDPFLGVYYHKNNKSWMESEFRVYSSANNCTFEYVSQPFLMDLEGKQGNFKNLREFVFKNIDGYFKIYSKHTPINLVRDLPQGFSALEPLVDLPIGINITRFQTLLALHRSYLTPGDSSSGWTAGAAAYYVGYLQPRTFLLKYNENGTITDAVDCALDPLSETKCTLKSFTVEKGIYQTSNFRVQPTESIVRFPNITNLCPFGEVFNATRFASSYAWNRKRISNCVADYSVLYNSASFSTFKCYGVSPTKLNDLCFTNVYADRFVIRGDEVRQIAPGQTGKIADYNYKLPDDFTGCVIAWNSNNLDAKVGGNYNYLYRLFRKSNLKPFERFISTEIYQAGSTPTNGVEGFNCYFPLQSYVFQPTNGVTYQPYRVVVLSFELLHAPHTVCGPKKSTNLVKNKCVNFNFNGLTGTGVLTESNKKFLPFQQFGRDIADTTDAVRDPQTLEILDITPCSFGGVSVITPGTNTSNQVAVLYQDVNCTEVPVAIHADQLTPTWRVYSTGSNVFQTRAGCLIGAEHVNNSYECDIPIGAGICASYQTQTNSPSGAGSHHHHHHHHHH

SEQ ID NO: 4450 - protein, 715 aa, Artificial Sequence
  Description of Artificial Sequence: Synthetic polypeptide
MGILPSPGMPALLSLVSLLSVLLMGCVAETGTQCVNLTTRTQLPPAYTNSFTRGVYYPDKVFRSSVLHSTQDLFLPFFSNVTWFHAIHVSGTNGTKRFDNPVLPFNDGVYFASTEKSNIIRGWIFGTTLDGKTQSLLIVNNATNVVIKVCEFQFCNDPFLGVYYHKNNKSWMESEFRVYSSANNCTFEYVSQPFLMDLEGKQGNFKNLREFVFKNIDGYFKIYSKHTPINLVRDLPQGFSALEPLVDLPIGINITRFQTLLALHRSYLTPGDSSSGWTAGAAAYYVGYLQPRTFLLKYNENGTITDAVDCALDPLSETKCTLKSFTVEKGIYQTSNFRVQPTESIVRFPNITNLCPFGEVFNATRFASVYAWNRKRISNCVADYSVLYNSASFSTFKCYGVSPTKLNDLCFTNVYADSFVIRGDEVRQIAPGQTGKIADYNYKLPDDFTGCVIAWNSNNLDSKVGGNYNYLYRLFRKSNLKPFERDISTEIYQAGSTPCNGVEGFNCYFPLQSYGFQPTNGVGYQPYRVVVLSFELLHAPATVCGPKKSTNLVKNKCVNFNFNGLTGTGVLTESNKKFLPFQQFGRDIADTTDAVRDPQTLEILDITPCSFGGVSVITPGTNTSNQVAVLYQDVNCTEVPVAIHADQLTPTWRVYSTGSNVFQTRAGCLIGAEHVNNSYECDIPIGAGICASYQTQTNSPSGAGSHHHHHHHHHH

SEQ ID NO: 4451 - protein, 715 aa, Artificial Sequence
  Description of Artificial Sequence: Synthetic polypeptide
MGILPSPGMPALLSLVSLLSVLLMGCVAETGTQCVNLTTRTQLPPAYTNSFTRGVYYPDKVFRSSVLHSTQDLFLPFFSNVTWFHAIHVSGTNGTKRFDNPVLPFNDGVYFASTEKSNIIRGWIFGTTLDSKTQSLLIVNNATNVVIKVCEFQFCNDPFLGVYYHKNNKSWMESEFRVYSSANNCTFEYVSQPFLMDLEGKQGNFKNLREFVFKNIDGYFKIYSKHTPINLVRDLPQGFSALEPLVDLPIGINITRFQTLLALHRSYLTPGDSSSGWTAGAAAYYVGYLQPRTFLLKYNENGTITDAVDCALDPLSETKCTLKSFTVEKGIYQTSNFRVQPTESIVRFPNITNLCPFGEVFNATRFASVYAWNRKRISNCVADYSVLYNSASFSTFKCYGVSPTKLNDLCFTNVYADSFVIRGDEVRQIAPGQTGKIADYNYKLPDDFTGCVIAWNSNNLDSKVGGNYNYLYRLFRKSNLKPFERDISTEIYQAGSTPCNGVEGFNCYFPLQSYGFQPTNGVGYQPYRVVVLSFELLHAPATVCGPKKSTNLVKNKCVNFNFNGLTGTGVLTESNKKFLPFQQFGRDIADTTDAVRDPQTLEILDITPCSFGGVSVITPGTNTSNQVAVLYQDVNCTEVPVAIHADQLTPTWRDYSTGSNVFQTRAGCLIGAEHVNNSYECDIPIGAGICASYQTQTNSPSGAGSHHHHHHHHHH

SEQ ID NO: 4452 - protein, 715 aa, Artificial Sequence
  Description of Artificial Sequence: Synthetic polypeptide
MGILPSPGMPALLSLVSLLSVLLMGCVAETGTQCVNLTTRTQLPPAYTNSFTRGVYYPDKVFRSSVLHSTQDLFLPFFSNVTWFHAIHVSGTNGTKRFDNPVLPFNDGVYFASTEKSNIIRGWIFGTTLDSKTQSLLIVNNATNVVIKVCEFQFCNDPFLGVYYHKNNKSWMESEFRVYSSANNCTFEYVSQPFLMDLEGKQGNFKNLREFVFKNIDGYFKIYSKHTPINLVRDLPQGFSALEPLVDLPIGINITRFQTLLALHRSYLTPGDSSSGWTAGAAAYYVGYLQPRTFLLKYNENGTITDAVDCALDPLSETKCTLKSFTVEKGIYQTSNFRVQPTESIVRFPNITNLCPFGEVFNATRFASVYAWNRKRISNCVADYSVLYNSASFSTFKCYGVSPTKLNDLCFTNVYADSFVIRGDEVRQIAPGQTGKIADYNYKLPDDFTGCVIAWNSNNLDSKVGGNYNYLYRLFRKSNLKPFERDISTEIYQAGSTPCNGVEGFNCYFPLQSYGFQPTNGVGYQPYRVVVLSFELLHAPATVCGPKKSTNLVKNKCVNFNFNGLTGTGVLTESNKKFLPFQQFGRDDADTTDAVRDPQTLEILDITPCSFGGVSVITPGTNTSNQVAVLYQDVNCTEVPVAIHADQLTPTWRVYSTGSNVFQTRAGCLIGAEHVNNSYECDIPIGAGICASYQTQTNSPSGAGSHHHHHHHHHH

SEQ ID NO: 4453 - protein, 715 aa, Artificial Sequence
  Description of Artificial Sequence: Synthetic polypeptide
MGILPSPGMPALLSLVSLLSVLLMGCVAETGTQCVNLTTRTQLPPAYTNSFTRGVYYPDKVFRSSVLHSTQDLFLPFFSNVTWFHAIHVSGTNGTKRFDNPVLPFNDGVYFASTEKSNIIRGWIFGTTLDSKTQSLLIVNNATNVVIKVCEFQFHNDPFLGVYYHKNNKSWMESEFRVYSSANNCTFEYVSQPFLMDLEGKQGNFKNLREFVFKNIDGYFKIYSKHTPINLVRDLPQGFSALEPLVDLPIGINITRFQTLLALHRSYLTPGDSSSGWTAGAAAYYVGYLQPRTFLLKYNENGTITDAVDCALDPLSETKCTLKSFTVEKGIYQTSNFRVQPTESIVRFPNITNLCPFGEVFNATRFASVYAWNRKRISNCVADYSVLYNSASFSTFKCYGVSPTKLNDLCFTNVYADSFVIRGDEVRQIAPGQTGKIADYNYKLPDDFTGCVIAWNSNNLDSKVGGNYNYLYRLFRKSNLKPFERDISTEIYQAGSTPCNGVEGFNCYFPLQSYGFQPTNGVGYQPYRVVVLSFELLHAPATVCGPKKSTNLVKNKCVNFNFNGLTGTGVLTESNKKFLPFQQFGRDIADTTDAVRDPQTLEILDITPCSFGGVSVITPGTNTSNQVAVLYQDVNCTEVPVAIHADQLTPTWRVYSTGSNVFQTRAGCLIGAEHVNNSYECDIPIGAGICASYQTQTNSPSGAGSHHHHHHHHHH

SEQ ID NO: 4454 - protein, 715 aa, Artificial Sequence
  Description of Artificial Sequence: Synthetic polypeptide
MGILPSPGMPALLSLVSLLSVLLMGCVAETGTQCVNLTTRTQLPPAYTNSFTRGVYYPDKVFRSSVLHSTQDLFLPFFSNVTWFHAIHVSGTNGTKRFDNPVLPFNDGVYFASTEKSNIIRGWIFGTTLDSKTQSLLIVNNATNVVIKVCEFQFCNDPFLGVYYHKNNKSWMESEFRKYSSANNCTFEYVSQPFLMDLEGKQGNFKNLREFVFKNIDGYFKIYSKHTPINLVRDLPQGFSALEPLVDLPIGINITRFQTLLALHRSYLTPGDSSSGWTAGAAAYYVGYLQPRTFLLKYNENGTITDAVDCALDPLSETKCTLKSFTVEKGIYQTSNFRVQPTESIVRFPNITNLCPFGEVFNATRFASVYAWNRKRISNCVADYSVLYNSASFSTFKCYGVSPTKLNDLCFTNVYADSFVIRGDEVRQIAPGQTGKIADYNYKLPDDFTGCVIAWNSNNLDSKVGGNYNYLYRLFRKSNLKPFERDISTEIYQAGSTPCNGVEGFNCYFPLQSYGFQPTNGVGYQPYRVVVLSFELLHAPATVCGPKKSTNLVKNKCVNFNFNGLTGTGVLTESNKKFLPFQQFGRDIADTTDAVRDPQTLEILDITPCSFGGVSVITPGTNTSNQVAVLYQDVNCTEVPVAIHADQLTPTWRVYSTGSNVFQTRAGCLIGAEHVNNSYECDIPIGAGICASYQTQTNSPSGAGSHHHHHHHHHH

SEQ ID NO: 4455 - protein, 715 aa, Artificial Sequence
  Description of Artificial Sequence: Synthetic polypeptide
MGILPSPGMPALLSLVSLLSVLLMGCVAETGTQCVNLTTRTQLPPAYTNSFTRGVYYPDKVFRSSVLHSTQDLFLPFFSNVTWFHAIHVSGTNGTKRFDNPVLPFNDGVYFASTEKSNIIRGWIFGTTLDSKTQSLLIVNNATNVVIKVCEFQFCNDPFLGVYYHKNNKSWMESEFRVYSSANNCTFEYVSQPFLSDLEGKQGNFKNLREFVFKNIDGYFKIYSKHTPINLVRDLPQGFSALEPLVDLPIGINITRFQTLLALHRSYLTPGDSSSGWTAGAAAYYVGYLQPRTFLLKYNENGTITDAVDCALDPLSETKCTLKSFTVEKGIYQTSNFRVQPTESIVRFPNITNLCPFGEVFNATRFASVYAWNRKRISNCVADYSVLYNSASFSTFKCYGVSPTKLNDLCFTNVYADSFVIRGDEVRQIAPGQTGKIADYNYKLPDDFTGCVIAWNSNNLDSKVGGNYNYLYRLFRKSNLKPFERDISTEIYQAGSTPCNGVEGFNCYFPLQSYGFQPTNGVGYQPYRVVVLSFELLHAPATVCGPKKSTNLVKNKCVNFNFNGLTGTGVLTESNKKFLPFQQFGRDIADTTDAVRDPQTLEILDITPCSFGGVSVITPGTNTSNQVAVLYQDVNCTEVPVAIHADQLTPTWRVYSTGSNVFQTRAGCLIGAEHVNNSYECDIPIGAGICASYQTQTNSPSGAGSHHHHHHHHHH

SEQ ID NO: 4456 - protein, 715 aa, Artificial Sequence
  Description of Artificial Sequence: Synthetic polypeptide
MGILPSPGMPALLSLVSLLSVLLMGCVAETGTQCVNLTTRTQLPPAYTNSFTRGVYYPDKVFRSSVLHSTQDLFLPFFSNVTWFHAEHVSGTNGTKRFDNPVLPFNDGVYFASTEKSNIIRGWIFGTTLDSKTQSLLIVNNATNVVIKVCEFQFCNDPFLGVYYHKNNKSWMESEFRVYSSANNCTFEYHSQPFLMDLEGKQGNFKNLREFVFKNIDGYFKIYSKHTPINLVRDLPQGFSALEPLVDLPIGINITRFQTLLALHRSYLTPGDSSSGETAGAAAYYVGYLQPRTFLLKYNENGTITDAVDCALDPLSETKCTLKSFTVEKGIYQTSNFRVQPTESIVRFPNITNPCPFGEVFNATRFASVYAWNRKRISNCVADYSVLYNSASFSTFKCYGVSPTKLNDLCFTNVYADSFVIRGDEVRQIAPGQTGKIADYNYKLPDDFTGCVIAWNSNNLDSKVGGNYNYLYRLFRKSNLKPFERDISTEIYQAGSTPCNGVEGFNCYFPLQSYGFQPTNGPGYQPYRVVVLSFELLHAPATVCGPKKSTNLVKNKCVNFNFNGLTGTGVLTESNKKFLPFQQFGRDIADTTDAVRDPQTLEILDITPCSFGGVSVITPGTNTSNQVAVLYQDVNCTEVPDAIHADQLTPTWRVYSTGSNVFQTRAGCLIGAEHVNNSYECDIPIGAGICASYQTQTNSPSGAGSHHHHHHHHHH

SEQ ID NO: 4457 - protein, 715 aa, Artificial Sequence
  Description of Artificial Sequence: Synthetic polypeptide
MGILPSPGMPALLSLVSLLSVLLMGCVAETGTQCVNLTTRTQLPPAYTNSFTRGVYYPDKVFRSSVLHSTQDLFLPFFSNVTWFHAIHVSGTNGTKRFDNPVLPFNDGVYFASTEKSNIIRGWIFGTTLDSKTQSLLIVNNATNVVIKVCEFQFCNDPFLGVYYHKNNKSWMESEFRVYSSANNCTFEYVSQPFLMDLEGKQGNFKNLREFVFKNIDGYFKIYSKHTPINLVRDLPQGFSALEPLVDLPIGINITRFQTLLALHRSYLTPEDSSSGWTAGAAAYYVGYLQPRTFLLKYNENGTITDAVDCALDPLSETKCTLKSFTVEKGIYQTSNFRVQPTESIVRFPNITNLCPFGEVFNATRFASVYAWNRKRISNCVADYSVLYNSASFSTFKCYGVSPTKLNDLCFTNVYADSFVIRGDEVRQIAPGQTGKIADYNYKLPDDFTGCVIAWNSNNLDSKVGGNYNYLYRLFRKSNLKPFERDISTEIYQAGSTPCNGVEGFNCYFPLQSYGFQPTNGVGYQPYRVVVLSFELLHAPATVCGPKKSTNLVKNKCVNFNFNGLTGTGVLTESNKKFLPFQQFGRDIADTTDAVRDPQTLEILDITPCSFGGVSVITPGTNTSNQVAVLYQDVNCTEVPVAIHADQLTPTWRVYSTGSNVFQTRAGCLIGAEHVNNSYECDIPIGAGICASYQTQTNSPSGAGSHHHHHHHHHH

SEQ ID NO: 4458 - protein, 715 aa, Artificial Sequence
  Description of Artificial Sequence: Synthetic polypeptide
MGILPSPGMPALLSLVSLLSVLLMGCVAETGTQCVNLTTRTQLPPAYTNSFTRGVYYPDKVFRSSVLHSTQDLFLPFFSNVTWFHAIHVSGTNGTKRFDNPVLPFNDGVYFASTEKSNIIRGWIFGTTLDSKTQSLLIVNNATNVVIKVCEFQFCNDPFLGVYYHKNNKSWMESEFRVYSSANNCTFEYVSQPFLMDLEGKQGNFKNLREFVFKNIDGYFKIYSKHTPINLVRDLPQGFSALEPLVDLPIGINITRFQTLLALHRSYLTPGDSSSGWTAGAAAYYVGYLQPRTFLLKYNENGTITDAVDCALDPLSETKCTLKSFTVEKGIYQTSNFRVQPTESIVRFPNITNLCPFGEVFNATRFASVYAWNRKRISNCVADYSVLYNSASFSTFKCYGVSPTKLNDLCFTNVYADSFVIRGDEVRQIAPGQTGKIADYNYKLPDDFTGCVIAWNSNNLDSKVGGNYNYLYRLFRKSNLKPFERDISTEIYQAGSTPCNGVEGFNCYFPLQSYGFQPTNGVGDQPYRVVVLSFELLHAPATVCGPKKSTNLVKNKCVNFNFNGLTGTGVLTESNKKFLPFQQFGRDIADTTDAVRDPQTLEILDITPCSFGGVSVITPGTNTSNQVAVLYQDVNCTEVPVAIHADQLTPTWRVYSTGSNVFQTRAGCLIGAEHVNNSYECDIPIGAGICASYQTQTNSPSGAGSHHHHHHHHHH

SEQ ID NO: 4459 - protein, 715 aa, Artificial Sequence
  Description of Artificial Sequence: Synthetic polypeptide
MGILPSPGMPALLSLVSLLSVLLMGCVAETGTQCVNLTTRTQLPPAYTNSFTRGVYYPDKVFRSSVLHSTQDLFLPFFSNVTWFHAIHVSGTNGTKRFDNPVLPFNDGVYFASTEKSNIIRGWIFGTTLDSKTQSLLIVNNATNVVIKVCFFQFCNDPFLGVYYHKNNKSWMESEFRVYSSANNCTFEYVSQPFLMDLEGKQGNFKNLREFVFKNIDGYFKIYSKHTPINLVRDLPQGFSALEPLVDLPIGINITRFQTLLALHRSYLTPGDSSSGWTAGAAAYYVGYLQPRTFLLKYNENGTITDAVDCALDPLSETKCTLKSFTVEKGIYQTSNFRVQPTESIVRFPNITNLCPFGEVFNATRFASVYAWNRKRISNCVADYSVLYNSASFSTFKCYGVSPTKLNDLCFTNVYADSFVIRGDEVRQIAPGQTGKIADYNYKLPDDFTGCVIAWNSNNLDSKVGGNYNYLYRLFRKSNLKPFERDISTEIYQAGSTPCNGVEGFNCYFPLQSYGFQPTNGVGYQPYRVVVLSFELLHAPATVCGPKKSTNLVKNKCVNFNFNGLTGTGVLTESNKKFLPFQQFGRDIADTTDAVRDPQTLEILDITPCSFGGVSVITPGTNTSNQVAVLYQDVNCTEVPVAIHADQLTPTWRVYSTGSNVFQTRAGCLIGAEHVNNSYECDIPIGAGICASYQTQTNSPSGAGSHHHHHHHHHH

SEQ ID NO: 4460 - protein, 715 aa, Artificial Sequence
  Description of Artificial Sequence: Synthetic polypeptide
MGILPSPGMPALLSLVSLLSVLLMGCVAETGTQCVNLTTRTQLPPAYTNSFTRGVYYPDKVFRSSVLHSTQDLFLPFFSNVTWFHAIHVSGTNGTKRFDNPVLPFNDGVYFASTEKSNIIRGWIFGTTLDSKTQSLLIVNNATNVVIKVCEFQFCNDPFLGVYYHKNNKSWMESEFRVYSSANNCTFEYVSQPFLMDLEGKQGNFKNLREFVFKNIDGYFKIYSKHTPINLVRDLPQGFSALEPLVDLPIGINITRFQTLLALHRSYLTPGDSSSGWTAGAAAYYVGYLQPRTFLLKYNENGTITDAVDCALDPLSETKCTLKSFTVEKGIYQTSNFRVQPTESIVRFPNITNLCPFGEVFNATRFASVYAWNRKRISNCVADYSVLYNSASFSTFKCYGVSPTKLNDLCFTNVYADSFVIRGDEVRQIAPGQTGKIADYNYKLPDDFTGCVIAWNSNNLDSKVGGNYNYLYRLFRKSNLKPFERDISREIYQAGSTPCNGVEGFNCYFPLQSYGFQPTNGVGYQPYRVVVLSFELLHAPATVCGPKKSTNLVKNKCVNFNFNGLTGTGVLTESNKKFLPFQQFGRDIADTTDAVRDPQTLEILDITPCSFGGVSVITPGTNTSNQVAVLYQDVNCTEVPVAIHADQLTPTWRVYSTGSNVFQTRAGCLIGAEHVNNSYECDIPIGAGICASYQTQTNSPSGAGSHHHHHHHHHH

SEQ ID NO: 4461 - protein, 715 aa, Artificial Sequence
  Description of Artificial Sequence: Synthetic polypeptide
MGILPSPGMPALLSLVSLLSVLLMGCVAETGTQCVNLTTRTQLPPAYTNSFTRGVYYPDKVFRSSVLHSTQDLFLPFFSNVTWFHAEHVSGTNGTKRFDNPVLPFNDGVYFASTEKSNIIRGWIFGTTLDSKTQSLLIVNNATNVVIKVCEFQFCNDPFLGVYYHKNNKSWMESEFRVYSSANNCTFEYHSQPFLMDLEGKQGNFKNLREFVFKNIDGYFKIYSKHTPINLVRDLPQGFSALEPLVDLPIGINITRFQTLLALHRSYLTPGDSSSGETAGAAAYYVGYLQPRTFLLKYNENGTITDAVDCALDPLSETKCTLKSFTVEKGIYQTSNFRVQPTESIVRFPNITNHCPFGEVFNATRFASVYAWNRKRISNCVADYSVLYNSASFSTFKCYGVSPTKLNDLCFTNVYADSFVIRGDEVRQIAPGQTGKIADYNYKLPDDFTGCVIAWNSNNLDSKVGGNYNYLYRLFRKSNLKPFERDISTEIYQAGSTPCNGVEGFNCYFPLQSYGFQPTNGPGQQPYRVVVLSFELLHAPATVCGPKKSTNLVKNKCVNFNFNGLTGTGVLTESNKKFLPFQQFGRDIADTTDAVRDPQTLEILDITPCSFGGVSVITPGTNTSNQVAVLYQDVNCTEVPVAIHADQLTPTWRVYSTGSNVFQTRAGCLIGAEHVNNSYECDIPIGAGICASYQTQTNSPSGAGSHHHHHHHHHH

SEQ ID NO: 4462 - protein, 715 aa, Artificial Sequence
  Description of Artificial Sequence: Synthetic polypeptide
MGILPSPGMPALLSLVSLLSVLLMGCVAETGTQCVNLTTRTQLPPAYTNSFTRGVYYPDKVFRSSVLHSTQDLFLPFFSNVTWFHAIHVSGTNGTKRFDNPVLPFNDGVYFASTEKSNIIRGWIFGTTLDSKTQSLLIVNNATNVVIKVCEFQFCNDPFLGVYYHKNNKSWMESEFRVYSSANNCTFEYVSQPFLMDLEGKQGNFKNLREFVFKNIDGYFKIYSKHTPINLVRDLPQGFSALEPLVDLPIGINITRFQTLLALHRSYLTPGDSSSGWTAGAAAYYVGYLQPRTFLLKYNENGTITDAVDCALDPLSETKCTLKSFTVEKGIYQTSNFRVQPTESIVRFPNITNLCPFGEVFNATRFASVYAWNRKRISNCVADYSVLYNSASFSTFKCYGVSPTKLNDLCFTNVYADSFVIRGDEVRQIAPGQTGKIADYNYKLPDDFTGCVIAWNSNNLDSKVGGNYNYLYRLFRKSNLKPFERDISVEIYQAGSTPCNGVEGFNCYFPLQSYGFQPTNGVGYQPYRVVVLSFELLHAPATVCGPKKSTNLVKNKCVNFNFNGLTGTGVLTESNKKFLPFQQFGRDIADTTDAVRDPQTLEILDITPCSFGGVSVITPGTNTSNQVAVLYQDVNCTEVPVAIHADQLTPTWRVYSTGSNVFQTRAGCLIGAEHVNNSYECDIPIGAGICASYQTQTNSPSGAGSHHHHHHHHHH

SEQ ID NO: 4463 - protein, 715 aa, Artificial Sequence
  Description of Artificial Sequence: Synthetic polypeptide
MGILPSPGMPALLSLVSLLSVLLMGCVAETGTQCVNLTTRTQLPPAYTNSFTRGVYYPDKVFRSSVLHSTQDLFLPFFSNVTWFHAIHVSGTNGTKRFDNPVLPFNDGVYFASTEKSNIIRGWIFGTTLDSKTQSLLIVNNATNVVIKVCEFQFCNDPFLGVYYHKNNKSWMESEFRVYSSANNCTFEYVSQPFLMDLEGKQGNFKNLREFVFKNIDGYFKIYSKHTPINLVRDLPQGFSALEPLVDLPIGINITRFQTLLALHRSYLTPGDSSSGWTAGAAAYYVGYLQPRTFLLKYNENGTITDAVDCALDPLSETKCTLKSFTVEKGIYQTSNFRVQPTESIVRFPNITNLCPFGEVFNATRFASVYAWNRKRISNCVADYSVLYNSASFSTFKCYGVSPTKLNDLCFTNVYADSFVIRGDEVRQIAPGQTGKIADYNYKLPDDFTGCVIAWNSNNLDSKVGGNYNYLYRLFRKSNLKPFERDISTEIYQAGSTPCNGVEGFNCYFPLQSYGFQPTNGVGYQPYRVVVLSFELLHAPATVCGPRKSTNLVKNKCVNFNFNGLTGTGVLTESNKKFLPFQQFGRDIADTTDAVRDPQTLEILDITPCSFGGVSVITPGTNTSNQVAVLYQDVNCTEVPVAIHADQLTPTWRVYSTGSNVFQTRAGCLIGAEHVNNSYECDIPIGAGICASYQTQTNSPSGAGSHHHHHHHHHH

SEQ ID NO: 4464 - protein, 715 aa, Artificial Sequence
  Description of Artificial Sequence: Synthetic polypeptide
MGILPSPGMPALLSLVSLLSVLLMGCVAETGTQCVNLTTRTQLPPAYTNSFTRGVYYPDKVFRSSVLHSTQDLFLPFFSNVTWFHAWHVSGTNGTKRFDNPVLPFNDGVYFASTEKSNIIRGWIFGTTLDSKTQSLLIVNNATNVVIKVCEFQFCNDPFLGVYYHKNNKSWMESEFRVYSSANNCTFEYVSQPFLMDLEGKQGNFKNLREFVFKNIDGYFKIYSKHTPINLVRDLPQGFSALEPLVDLPIGINITRFQTLLALHRSYLTPGDSSSGWTAGAAAYYVGYLQPRTFLLKYNENGTITDAVDCALDPLSETKCTLKSFTVEKGIYQTSNFRVQPTESIVRFPNITNLCPFGEVFNATRFASVYAWNRKRISNCVADYSVLYNSASFSTFKCYGVSPTKLNDLCFTNVYADSFVIRGDEVRQIAPGQTGKIADYNYKLPDDFTGCVIAWNSNNLDSKVGGNYNYLYRLFRKSNLKPFERDISTEIYQAGSTPCNGVEGFNCYFPLQSYGFQPTNGVGYQPYRVVVLSFELLHAPATVCGPKKSTNLVKNKCVNFNFNGLTGTGVLTESNKKFLPFQQFGRDIADTTDAVRDPQTLEILDITPCSFGGVSVITPGTNTSNQVAVLYQDVNCTEVPVAIHADQLTPTWRVYSTGSNVFQTRAGCLIGAEHVNNSYECDIPIGAGICASYQTQTNSPSGAGSHHHHHHHHHH

SEQ ID NO: 4465 - protein, 715 aa, Artificial Sequence
  Description of Artificial Sequence: Synthetic polypeptide
MGILPSPGMPALLSLVSLLSVLLMGCVAETGTQCVNLTTRTQLPPAYTNSFTRGVYYPDKVFRSSVLHSTQDLFLPFFSNVTWFHAYHVSGTNGTKRFDNPVLPFNDGVYFASTEKSNIIRGWIFGTTLDSKTQSLLIVNNATNVVIKVCEFQFCNDPFLGVYYHKNNKSWMESEFRVYSSANNCTFEYHSQPFLMDLEGKQGNFKNLREFVFKNIDGYFKIYSKHTPINLVRDLPQGFSALEPLVDLPIGINITRFQTLLALHRSYLTPGDSSSGETAGAAAYYVGYLQPRTFLLKYNENGTITDAVDCALDPLSETKCTLKSFTVEKGIYQTSNFRVQPTESIVRFPNITNHCPFGEVFNATRFASVYAWNRKRISNCVADYSVLYNSASFSTFKCYGVSPTKLNDLCFTNVYADSFVIRGDEVRQIAPGQTGKIADYNYKLPDDFTGCVIAWNSNNLDSKVGGNYNYLYRLFRKSNLKPFERDISTEIYQAGSTPCNGVEGFNCYFPLQSYGFQPTNGPGYQPYRVVVLSFELLHAPATVCGPKKSTNLVKNKCVNFNFNGLTGTGVLTESNKKFLPFQQFGRDIADTTDAVRDPQTLEILDITPCSFGGVSVITPGTNTSNQVAVLYQDVNCTEVPDAIHADQLTPTWRVYSTGSNVFQTRAGCLIGAEHVNNSYECDIPIGAGICASYQTQTNSPSGAGSHHHHHHHHHH

SEQ ID NO: 4466 - protein, 715 aa, Artificial Sequence
  Description of Artificial Sequence: Synthetic polypeptide
MGILPSPGMPALLSLVSLLSVLLMGCVAETGTQCVNLTTRTQLPPAYTNSFTRGVYYPDKVFRSSVLHSTQDLFLPFFSNVTWFHAIHVSGTNGTKRFDNPVLPFNDGVYFASTEKSNIIRGWIFGTTLDSKTQSLLIVNNATNVVIKVCEFQFCNDPFLGVYYHKNNKSWMESEFRVYSSANNCTFEYVSQPFLMDLEGKQGNFKNLREFVFKNIDGYFKIYSKHTPINLVRDLPQGFSALEPLVDLPIGINITRFQTLLALHRSYLTPGDSSSGWTAGAAAYYVGYLQPRTFLLKYNENGTITDAVDCALDPLSETKCTLKSFTVEKGIYQTSNFRVQPTESIVRFPNITNLCPLGEVFNATRFASVYAWNRKRISNCVADYSVLYNSASFSTFKCYGVSPTKLNDLCFTNVYADSFVIRGDEVRQIAPGQTGKIADYNYKLPDDFTGCVIAWNSNNLDSKVGGNYNYLYRLFRKSNLKPFERDISTEIYQAGSTPCNGVEGFNCYFPLQSYGFQPTNGVGYQPYRVVVLSFELLHAPATVCGPKKSTNLVKNKCVNFNFNGLTGTGVLTESNKKFLPFQQFGRDIADTTDAVRDPQTLEILDITPCSFGGVSVITPGTNTSNQVAVLYQDVNCTEVPVAIHADQLTPTWRVYSTGSNVFQTRAGCLIGAEHVNNSYECDIPIGAGICASYQTQTNSPSGAGSHHHHHHHHHH

SEQ ID NO: 4467 - protein, 715 aa, Artificial Sequence
  Description of Artificial Sequence: Synthetic polypeptide
MGILPSPGMPALLSLVSLLSVLLMGCVAETGTQCVNLTTRTQLPPAYTNSFTRGVYYPDKVFRSSVLHSTQDLFLPFFSNVTWFHAIHVSGTNGTKRFDNPVLPFNDGVYFASTEKSNIIRGWIFGTTLDSKTQSLLIVNNATNVVIKVCEFQFCNDPFLGVYYHKNNKSWMESEFRVYSSANNCTFEYVSQPFLMDLEGKQGNFKNLREFVFKNIDGYFKIYSKHTPINLVRDLPQGFSALEPLVDLPIGINITRFQTLLALHRSYLTPGDSSSGWTAGAAAYYVGYLQPRTFLLKYNENGTITDAVDCALDPLSETKCTLKSFTVEKGIYQTSNFRVQPTESIVRFPNITNLCPFGEVFNATRFASVYAWNRKRISNCVADYSVLYNSASFSTFKCYGVSPTKLNDLCFTNVYADSFVIRGDEVRQIAPGQTGKIADYNYKLPDDFTGCVIAWNSNNLDSKVGGNYNYLYRLFRKSNLKPFERDISTEIYQAGSTPCNGVEGFNCYFPLQSYGFQPTNGVGYQPYRVVVLSFELLHAPATVCGPKKSTNLVKNKCVNFNFNGLTGTGVLTESNKKFLPFQQFGRDIADTTDAVRDPQTLEILDITPCSFGGVSVITPGTNTSNQVAVLYQDVNCTEVPVAIHADQLTPTWRVYSTGSNVFQTRAGCLIGAEFVNNSYECDIPIGAGICASYQTQTNSPSGAGSHHHHHHHHHH

SEQ ID NO: 4468 - protein, 715 aa, Artificial Sequence
  Description of Artificial Sequence: Synthetic polypeptide
MGILPSPGMPALLSLVSLLSVLLMGCVAETGTQCVNLTTRTQLPPAYTNSFTRGVYYPDKVFRSSVLHSTQDLFLPFFSNVTWFHAIHVKGTNGTKRFDNPVLPFNDGVYFASTEKSNIIRGWIFGTTLDSKTQSLLIVNNATNVVIKVCEFQFCNDPFLGVYYHKNNKSWMESEFRVYSSANNCTFEYVSQPFLMDLEGKQGNFKNLREFVFKNIDGYFKIYSKHTPINLVRDLPQGFSALEPLVDLPIGINITRFQTLLALHRSYLTPGDSSSGWTAGAAAYYVGYLQPRTFLLKYNENGTITDAVDCALDPLSETKCTLKSFTVEKGIYQTSNFRVQPTESIVRFPNITNLCPFGEVFNATRFASVYAWNRKRISNCVADYSVLYNSASFSTFKCYGVSPTKLNDLCFTNVYADSFVIRGDEVRQIAPGQTGKIADYNYKLPDDFTGCVIAWNSNNLDSKVGGNYNYLYRLFRKSNLKPFERDISTEIYQAGSTPCNGVEGFNCYFPLQSYGFQPTNGVGYQPYRVVVLSFELLHAPATVCGPKKSTNLVKNKCVNFNFNGLTGTGVLTESNKKFLPFQQFGRDIADTTDAVRDPQTLEILDITPCSFGGVSVITPGTNTSNQVAVLYQDVNCTEVPVAIHADQLTPTWRVYSTGSNVFQTRAGCLIGAEHVNNSYECDIPIGAGICASYQTQTNSPSGAGSHHHHHHHHHH

SEQ ID NO: 4469 - protein, 715 aa, Artificial Sequence
  Description of Artificial Sequence: Synthetic polypeptide
MGILPSPGMPALLSLVSLLSVLLMGCVAETGTQCVNLTTRTQLPPAYTNSFTRGVYYPDKVFRSSVLHSTQDLFLPFFSNVTWFHAEHVSGTNGTKRFDNPVLPFNDGVYFASTEKSNIIRGWIFGTTLDSKTQSLLIVNNATNVVIKVCEFQFCNDPFLGVYYHKNNKSWMESEFRVYSSANNCTFEYVSQPFLMDLEGKQGNFKNLREFVFKNIDGYFKIYSKHTPINLVRDLPQGFSALEPLVDLPIGINITRFQTLLALHRSYLTPGDSSSGWTAGAAAYYVGYLQPRTFLLKYNENGTITDAVDCALDPLSETKCTLKSFTVEKGIYQTSNFRVQPTESIVRFPNITNLCPFGEVFNATRFASVYAWNRKRISNCVADYSVLYNSASFSTFKCYGVSPTKLNDLCFTNVYADSFVIRGDEVRQIAPGQTGKIADYNYKLPDDFTGCVIAWNSNNLDSKVGGNYNYLYRLFRKSNLKPFERDISTEIYQAGSTPCNGVEGFNCYFPLQSYGFQPTNGVGYQPYRVVVLSFELLHAPATVCGPKKSTNLVKNKCVNFNFNGLTGTGVLTESNKKFLPFQQFGRDIADTTDAVRDPQTLEILDITPCSFGGVSVITPGTNTSNQVAVLYQDVNCTEVPVAIHADQLTPTWRVYSTGSNVFQTRAGCLIGAEHVNNSYECDIPIGAGICASYQTQTNSPSGAGSHHHHHHHHHH

SEQ ID NO: 4470 - protein, 715 aa, Artificial Sequence
  Description of Artificial Sequence: Synthetic polypeptide
MGILPSPGMPALLSLVSLLSVLLMGCVAETGTQCVNLTTRTQLPPAYTNSFTRGVYYPDKVFRSSVLHSTQDLFLPFFSNVTWFHAIHVSGTNGTKRFDNPVLPFNDGVYFASTEKSNIIRGWIFGTTLDSKTQSLLIVNNATNVVIKVCEFQFCNDPFLGVYYHKNNKSWMESEFRVYSSANNCTFEYVSQPFLMDLEGKQGNFKNLREFVFKNIDGYFKIYSKHTPINLVRDLPQGFSALEPLVDLPIGINITRFQTLLALHRSYLTPGDSSSGWTAGAAAYYVGYLQPRTFLLKYNENGTITDAVDCALDPLSETKCTLKSFTVEKGIYQTSNFRVQPTESIVRFPNITNLCPFGEVFNATRFASVYAWNRKRISNCVADYSVLYNSASFSTFKCYGVSPTKLNDLCFTNVYADSFVIRGDEVRQIAPGQTGKIADYNYKLPDDFTGCVIAWNSNNLDSKVGGNYNYLYRLFRKSNLKPFERDISTEIYQAGSTPCNGVEGFNCYFPLQSYGFQPTNGVGYQPYRVVVLSFELLLAPATVCGPKKSTNLVKNKCVNFNFNGLTGTGVLTESNKKFLPFQQFGRDIADTTDAVRDPQTLEILDITPCSFGGVSVITPGTNTSNQVAVLYQDVNCTEVPVAIHADQLTPTWRVYSTGSNVFQTRAGCLIGAEHVNNSYECDIPIGAGICASYQTQTNSPSGAGSHHHHHHHHHH

SEQ ID NO: 4471 - protein, 715 aa, Artificial Sequence
  Description of Artificial Sequence: Synthetic polypeptide
MGILPSPGMPALLSLVSLLSVLLMGCVAETGTQCVNLTTRTQLPPAYTNSFTRGVYYPDKVFRSSVLHSTQDLFLPFFSNVTWFHAIHVSGTNGTKRFDNPVLPFNDGVYFASTEKSNIIRGWIFGTTLDSKTQSLLIVNNATNVVIKVCEFQFCNDPFLGVYYHKNNKSWMESEFRVYSSANNCTFEYVSQPFLMDLEGKQGNFKNLREFVFKNIDGYFKIYSKHTPINLVRDLPQGFSALEPLVDLPIGINITRFQTLLALHRSYLTPGDSSSGWTAGAAAYYVGYLQPRTFLLKYNENGTITDAVDCALDPLSETKCTLKSFTVEKGIYQTSNFRVQPTESIVRFPNITNLCPFGEVFNATRFASVYAWNRKRISNCVADYSVLYNSASFSTFKCYGVSPTKLNDLCFTNVYADDFVIRGDEVRQIAPGQTGKIADYNYKLPDDFTGCVIAWNSNNLDSKVGGNYNYLYRLFRKSNLKPFERDISTEIYQAGSTPCNGVEGFNCYFPLQSYGFQPTNGVGYQPYRVVVLSFELLHAPATVCGPKKSTNLVKNKCVNFNFNGLTGTGVLTESNKKFLPFQQFGRDIADTTDAVRDPQTLEILDITPCSFGGVSVITPGTNTSNQVAVLYQDVNCTEVPVAIHADQLTPTWRVYSTGSNVFQTRAGCLIGAEHVNNSYECDIPIGAGICASYQTQTNSPSGAGSHHHHHHHHHH

SEQ ID NO: 4472 - protein, 715 aa, Artificial Sequence
  Description of Artificial Sequence: Synthetic polypeptide
MGILPSPGMPALLSLVSLLSVLLMGCVAETGTQCVNLTTRTQLPPAYTNSFTRGVYYPDKVFRSSVLHSTQDLFLPFFSNVTWFHAIHVSGTNGTKRFDNPVLPFNDGVYFASTEKSNIIRGWIFGTTLDSKTQSLLIVNNATNVVIKVCEFQFCNDPFLGVYYHKNNKSWMESEFRVYSSANNCTFEYVSQPFLMDLEGKQGNFKNLREFVFKNIDGYFKIYSKHTPINLVRDLPQGFSALEPLVDLPIGINITRFQTLLALHRSYLTPGDSSSGWTAGAAAYYVGYLQPRTFLLKYNENGTITDAVDCALDPLSETKCTLKSFTVEKGIYQTSNFRVQPTESIVRFPNITNLCPFGEVFNATRFASVYAWNRKRISNCVADYSVLYNSASFSTFKCYGVSPTKLNDLCFTNVYADSFVIRGDEVRQIAPGQTGKIADYNYKLPDDFTGCVIAWNSNNLDSKVGGNYNYLYRLFRKSNLKPFERDISTEIYQAGSTPCNGVEGFNCYFPLQSYGFQPTNGVGYQPYRVVVLSFELLHAPATVCGPKKSTNLVKNKCVNFNFNGLTGTGVLTESNKKFLPFQQFGRDIADTTDAVRDPQTLEILDITPCSFGGVSVITPGTNTSNQVAVLYQDVNCTEVPVAIHADQLTPTWRQYSTGSNVFQTRAGCLIGAEHVNNSYECDIPIGAGICASYQTQTNSPSGAGSHHHHHHHHHH

SEQ ID NO: 4473 - protein, 715 aa, Artificial Sequence
  Description of Artificial Sequence: Synthetic polypeptide
MGILPSPGMPALLSLVSLLSVLLMGCVAETGTQCVNLTTRTQLPPAYTNSFTRGVYYPDKVFRSSVLHSTQDLFLPFFSNVTWFHAIHVSGTNGTKRFDNPVLPFNDGVYFASTEKSNIIRGWIFGTTLDSKTQSLLIVNNATNVVIKVCEFQFCNDPFLGVYYHKNNKSWMESEFRVYSSANNCTFEYVSQPFLMDLEGKQGNFKNLREFVFKNIDGYFKIYSKHTPINLVRDLPQGFSALEPLVDLPIGINITRFQTLLALHRSYLTPGDSSSGWTAGAAAYYVGYLQPRTFLLKYNENGTITDAVDCALDPLSETKCTLKSFTVEKGIYQTSNFRVQPTESIVRFPNITNLCPFGEVFNATRFASVYAWNRKRISNCVADYSVLYNSASFSTFKCYGVSPTKLNDLCFTNVYADSFVIRGDEVRQIAPGQTGKIADYNYKLPDDFTGCVIAWNSNNLDSKVGGNYNYLYRLFRKSNLKPFERDISTEIYQAGSTPCNGVEGFNCYFPLQSYGFQPTNGVGYQPYRVVVLSFETLHAPATVCGPKKSTNLVKNKCVNFNFNGLTGTGVLTESNKKFLPFQQFGRDIADTTDAVRDPQTLEILDITPCSFGGVSVITPGTNTSNQVAVLYQDVNCTEVPVAIHADQLTPTWRVYSTGSNVFQTRAGCLIGAEHVNNSYECDIPIGAGICASYQTQTNSPSGAGSHHHHHHHHHH

SEQ ID NO: 4474 - protein, 715 aa, Artificial Sequence
  Description of Artificial Sequence: Synthetic polypeptide
MGILPSPGMPALLSLVSLLSVLLMGCVAETGTQCVNLTTRTQLPPAYTNSFTRGVYYPDKVFRSSVLHSTQDLFLPFFSNVTWFHAIHVSGTNGTKRFDNPVLPFNDGVYFASTEKSNIIRGWIFGTTLDSKTQSLLIVNNATNVVIKVCEFQFCNDPFLGVYYHKNNKSWMESEFRVYSSANNCTFEYVSQPFLMDLEGKQGNFKNLREFVFKNIDGYFKIYSKHTPINLVRDLPQGFSALEPLVDLPIGINITRFQTLLALHRSYLTPGDSSSGWTAGAAAYYVGYLQPRTFLLKYNENGTITDAVDCALDPLSETKCTLKSFTVEKGIYQTSNFRVQPTESIVRFPNITNLCPFGEVFNATRFASVYAWNRKRISNCVADYSVLYNSASFSTFKCYGVSPTKLNDLCFTNVYADSFVIRGDEVRQIAPGQTGKIADYNYKLPDDFTGCVIAWNSNNLDSKVGGNYNYLYRLFRKSNLKPFERDISTEIYQAGSTPCNGVEGFNCYFPLQSYGFQPTNGVGYQPYRVVVLSFELLHAPATVCGPKKSTNLVKNKCVNFNFNGLTGTGVLTESNKKFLPFQQFGRDIADTTDAVRDPQTLEILDITPCSFGGVSVITPGTNTSNQVAVLYQDVNCTEVPVQIHADQLTPTWRVYSTGSNVFQTRAGCLIGAEHVNNSYECDIPIGAGICASYQTQTNSPSGAGSHHHHHHHHHH

SEQ ID NO: 4475 - protein, 715 aa, Artificial Sequence
  Description of Artificial Sequence: Synthetic polypeptide
MGILPSPGMPALLSLVSLLSVLLMGCVAETGTQCVNLTTRTQLPPAYTNSFTRGVYYPDKVFRSSVLHSTQDLFLPFFSNVTWFHAIHVSGTNGTKRFDNPVLPFNDGVYFASTEKSNIIRGWIFGTTLDSKTQSLLIVNNATNVVIKVCEFQFCNDPFLGVYYHKNNKSWPESEFRVYSSANNCTFEYVSQPFLMDLEGKQGNFKNLREFVFKNIDGYFKIYSKHTPINLVRDLPQGFSALEPLVDLPIGINITRFQTLLALHRSYLTPGDSSSGWTAGAAAYYVGYLQPRTFLLKYNENGTITDAVDCALDPLSETKCTLKSFTVEKGIYQTSNFRVQPTESIVRFPNITNLCPFGEVFNATRFASVYAWNRKRISNCVADYSVLYNSASFSTFKCYGVSPTKLNDLCFTNVYADSFVIRGDEVRQIAPGQTGKIADYNYKLPDDFTGCVIAWNSNNLDSKVGGNYNYLYRLFRKSNLKPFERDISTEIYQAGSTPCNGVEGFNCYFPLQSYGFQPTNGVGYQPYRVVVLSFELLHAPATVCGPKKSTNLVKNKCVNFNFNGLTGTGVLTESNKKFLPFQQFGRDIADTTDAVRDPQTLEILDITPCSFGGVSVITPGTNTSNQVAVLYQDVNCTEVPVAIHADQLTPTWRVYSTGSNVFQTRAGCLIGAEHVNNSYECDIPIGAGICASYQTQTNSPSGAGSHHHHHHHHHH

SEQ ID NO: 4476 - protein, 715 aa, Artificial Sequence
  Description of Artificial Sequence: Synthetic polypeptide
MGILPSPGMPALLSLVSLLSVLLMGCVAETGTQCVNLTTRTQLPPAYTNSFTRGVYYPDKVFRSSVLHSTQDLFLPFFSNVTWFHAIHVSGTNGTKRFDNPVLPFNDGVYFASTEKSNIIRGWIFGTTLDSKTQSLLIVNNATNVVIKVCEFQFCNDPFLGVYYHKNNKSWMESEFRVYSSANNCTFEYVSQPFLMDLEGKQGNFKNLREFVFKNIDGYFKIYSKHTPINLVRDLPQGFSALEPLVDLPIGINITRFQTLLALHRSYLTPGDSSSGWTAGAAAYYVGYLQPRTFLLKYNENGTITDAVDCALDPLSETKCTLKSFTVEKGIYQTSNFRVQPTESIVRFPNITNLCPFGEVFNATRFASVYAWNRKRISNCVADYSVLYNSASFSTFKCYGVSPTKLNDLCFTNVYADSFVIRGDEVRQIAPGQTGKIADYNYKLPDDFTGCVIAWNSNNLDSKVGGNYNYLYRLFRKSNLKPFERDISTEIYQAGSTPCNGVEGFNCYFPLQSYGFQPTNGVGYQPYRVVVLSFELLHAPATVCGPKKSTNLVKNKCVNFNFNGLTGTGVLTESNKKFLPFQQFGRDIADTTDAVRDPQTLEILDITPCSFGGVSVITPGTNTSNQVAVLYQDVNCTEVPSAIHADQLTPTWRVYSTGSNVFQTRAGCLIGAEHVNNSYECDIPIGAGICASYQTQTNSPSGAGSHHHHHHHHHH

SEQ ID NO: 4477 - protein, 715 aa, Artificial Sequence
  Description of Artificial Sequence: Synthetic polypeptide
MGILPSPGMPALLSLVSLLSVLLMGCVAETGTQCVNLTTRTQLPPAYTNSFTRGVYYPDKVFRSSVLHSTQDLFLPFFSNVTWFHAIHVSGTNGTKRFDNPVLPFNDGVYFASTEKSNIIRGWIFGTTLDSKTQSLLIVNNATNVVIKVCEFQFCNDPFLGVYYHKNNKSWMESEFRVYSSANNCTFEYVSQPFLMDLEGKQGNFKNLREFVFKNIDGYFKIYSKHTPINLVRDLPQGFSALEPLVDLPIGINITRFQTLLALHRSYLTPGDSSSGWTAGAAAYYVGYLQPRTFLLKYNENGTITDAVDCALDPLSETKCTLKSFTVEKGIYQTSNFRVQPTESIVRFPNITNLCPFGEVFNATRFASVYAWNRKRISNCVADYSVLYNSASFSTFKCYGVSPTKLNDLCFTNVYADSFVIRGDEVRQIAPGQTGKIADYNYKLPDDFTGCVIAWNSNNLDSKVGGNYNYLYRLFRKSNLKPFERDISTEIYQAGSTPCNGVEGFNCYFPLQSYGFQPTNGVGRQPYRVVVLSFELLHAPATVCGPKKSTNLVKNKCVNFNFNGLTGTGVLTESNKKFLPFQQFGRDIADTTDAVRDPQTLEILDITPCSFGGVSVITPGTNTSNQVAVLYQDVNCTEVPVAIHADQLTPTWRVYSTGSNVFQTRAGCLIGAEHVNNSYECDIPIGAGICASYQTQTNSPSGAGSHHHHHHHHHH

SEQ ID NO: 4478 - protein, 715 aa, Artificial Sequence
  Description of Artificial Sequence: Synthetic polypeptide
MGILPSPGMPALLSLVSLLSVLLMGCVAETGTQCVNLTTRTQLPPAYTNSFTRGVYYPDKVFRSSVLHSTQDLFLPFFSNVTWFHAIHVSGTNGTKRFDNPVLPFNDGVYFASTEKSNIIRGWIFGTTLDSKTQSLLIVNNATNVVIKVCEFQFCNDPFLGVYYHKNNKSWMESEFRVYSSANNCTFEYVSQPFLMDLEGKQGNFKNLREFVFKNIDGYFKIYSKHTPINLVRDLPQGFSALEPLVDLPIGINITRFQTLLALHRSYLTPGDSSSGWTAGAAAYYVGYLQPRTFLLKYNENGTITDAVDCALDPLSETKCTLKSFTVEKGIYQTSNFRVQPTESIVRFPNITNLCPFGEVFNATRFASVYAWNRKRISNCVADYSVLYNSASFSTFKCYGVSPTKLNDLCFTNVYADSFVIRGDEVRQIAPGQTGKIADYNYKLPDDFTGCVIAWNSNNLDSKVGGNYNYLYRLFRKSNLKPFERDISTEIYQAGSTPCNGVEGFNCYFPLQSYGFQPTNGVGHQPYRVVVLSFELLHAPATVCGPKKSTNLVKNKCVNFNFNGLTGTGVLTESNKKFLPFQQFGRDIADTTDAVRDPQTLEILDITPCSFGGVSVITPGTNTSNQVAVLYQDVNCTEVPVAIHADQLTPTWRVYSTGSNVFQTRAGCLIGAEHVNNSYECDIPIGAGICASYQTQTNSPSGAGSHHHHHHHHHH

SEQ ID NO: 4479 - protein, 715 aa, Artificial Sequence
  Description of Artificial Sequence: Synthetic polypeptide
MGILPSPGMPALLSLVSLLSVLLMGCVAETGTQCVNLTTRTQLPPAYTNSFTRGVYYPDKVFRSSVLHSTQDLFLPFFSNVTWFHAIHVSGTNGTKRFDNPVLPFNDGVYFASTEKSNIIRGWIFGTTLDSKTQSLLIVNNATNVVIKVCEFQFCNDPFLGVYYHKNNKSWMESEFRVYSSANNCTFEYVSQPFLMDLEGKQGNFKNLREFVFKNIDGYFKIYSKHTPINLVRDLPQGFSALEPLVDLPIGINITRFQTLLALHRSYLTPGDSSSGWTAGAAAYYVGYLQPRTFLLKYNENGTITDAVDCTLDPLSETKCTLKSFTVEKGIYQTSNFRVQPTESIVRFPNITNLCPFGEVFNATRFASVYAWNRKRISNCVADYSVLYNSASFSTFKCYGVSPTKLNDLCFTNVYADSFVIRGDEVRQIAPGQTGKIADYNYKLPDDFTGCVIAWNSNNLDSKVGGNYNYLYRLFRKSNLKPFERDISTEIYQAGSTPCNGVEGFNCYFPLQSYGFQPTNGVGYQPYRVVVLSFELLHAPATVCGPKKSTNLVKNKCVNFNFNGLTGTGVLTESNKKFLPFQQFGRDIADTTDAVRDPQTLEILDITPCSFGGVSVITPGTNTSNQVAVLYQDVNCTEVPVAIHADQLTPTWRVYSTGSNVFQTRAGCLIGAEHVNNSYECDIPIGAGICASYQTQTNSPSGAGSHHHHHHHHHH

SEQ ID NO: 4480 - protein, 715 aa, Artificial Sequence
  Description of Artificial Sequence: Synthetic polypeptide
MGILPSPGMPALLSLVSLLSVLLMGCVAETGTQCVNLTTRTQLPPAYTNSFTRGVYYPDKVFRSSVLHSTQDLFLPFFSNVTWFHAIHVSGTNGTKRFDNPVLPFNDGVYFASTEKSNIIRGWIFGTTLDSKTQSLLIVNNATNVVIKVCEFQFCNDPFLGVYYHKNNKSWMEKEFRVYSSANNCTFEYVSQPFLMDLEGKQGNFKNLREFVFKNIDGYFKIYSKHTPINLVRDLPQGFSALEPLVDLPIGINITRFQTLLALHRSYLTPGDSSSGWTAGAAAYYVGYLQPRTFLLKYNENGTITDAVDCALDPLSETKCTLKSFTVEKGIYQTSNFRVQPTESIVRFPNITNLCPFGEVFNATRFASVYAWNRKRISNCVADYSVLYNSASFSTFKCYGVSPTKLNDLCFTNVYADSFVIRGDEVRQIAPGQTGKIADYNYKLPDDFTGCVIAWNSNNLDSKVGGNYNYLYRLFRKSNLKPFERDISTEIYQAGSTPCNGVEGFNCYFPLQSYGFQPTNGVGYQPYRVVVLSFELLHAPATVCGPKKSTNLVKNKCVNFNFNGLTGTGVLTESNKKFLPFQQFGRDIADTTDAVRDPQTLEILDITPCSFGGVSVITPGTNTSNQVAVLYQDVNCTEVPVAIHADQLTPTWRVYSTGSNVFQTRAGCLIGAEHVNNSYECDIPIGAGICASYQTQTNSPSGAGSHHHHHHHHHH

SEQ ID NO: 4481 - protein, 715 aa, Artificial Sequence
  Description of Artificial Sequence: Synthetic polypeptide
MGILPSPGMPALLSLVSLLSVLLMGCVAETGTQCVNLTTRTQLPPAYTNSFTRGVYYPDKVFRSSVLHSTQDLFLPFFSNVTWFHAIHVSGTNGTKRFDNPVLPFNDGVYFASTEKSNIIRGWIFGTTLDSKTQSLLIVNNATNVVIKVCEFQFCNDPFLGVYYHKNNKSWMESEFRVYSSANNCTFEYVSQPFLMDLEGKQGNFKNLREFVFKNIDGYFKIYSKHTPINLVRDLPQGFSALEPLVDLPIGINITRFQTLLALHRSYLTPGDSSSGWTAGAAAYYVGYLQPRTFLLKYNENGTITDAVDCALDPLSETKCTLKSFTVEKGIYQTSNFRVQPTESIVRFPNITNLCPFGEVFNATRFASVYAWNRKRISNCVADYSVLYNSASFSTIKCYGVSPTKLNDLCFTNVYADSFVIRGDEVRQIAPGQTGKIADYNYKLPDDFTGCVIAWNSNNLDSKVGGNYNYLYRLFRKSNLKPFERDISTEIYQAGSTPCNGVEGFNCYFPLQSYGFQPTNGVGYQPYRVVVLSFELLHAPATVCGPKKSTNLVKNKCVNFNFNGLTGTGVLTESNKKFLPFQQFGRDIADTTDAVRDPQTLEILDITPCSFGGVSVITPGTNTSNQVAVLYQDVNCTEVPVAIHADQLTPTWRVYSTGSNVFQTRAGCLIGAEHVNNSYECDIPIGAGICASYQTQTNSPSGAGSHHHHHHHHHH

SEQ ID NO: 4482 - protein, 715 aa, Artificial Sequence
  Description of Artificial Sequence: Synthetic polypeptide
MGILPSPGMPALLSLVSLLSVLLMGCVAETGTQCVNLTTRTQLPPAYTNSFTRGVYYPDKVFRSSVLHSTQDLFLPFFSNVTWFHAIHVSGTNGTKRFDNPVLPFNDGVYFASTEKSNIIRGWIFGTTLDSKTQSLLIVNNATNVVIKVCEFQFCNDPFLGVYYHKNNKSWMESEFRVYSSANNCTFEYVSQPFLMDLEGKQGNFKNLREFVFKNIDGYFKIYSKHTPINLVRDLPQGFSALEPLVDLPIGINITRFQTLLALHRSYLTPGDSSSGWTAGAAAYYVGYLQPRTFLLKYNENGTITDAVDCALDPLSETKCTLKSFTVEKGIYQTSNFRVQPTESIVRFPNITNLCPFGEVFNATRFASVYAWNRKRISNCVADYSVLYNSASFSTFKCYGVSPTKLNDLCFTNVYADSFVIRGDEVRQIAPGQTGKIADYNYKLPDDFTGCVIAWNSNNLDSKVGGNYNYLYRLFRKSNLKPFERDISTEIYQAGSTPCNGVEGFPCYFPLQSYGFQPTNGVGYQPYRVVVLSFELLHAPATVCGPKKSTNLVKNKCVNFNFNGLTGTGVLTESNKKFLPFQQFGRDIADTTDAVRDPQTLEILDITPCSFGGVSVITPGTNTSNQVAVLYQDVNCTEVPVAIHADQLTPTWRVYSTGSNVFQTRAGCLIGAEHVNNSYECDIPIGAGICASYQTQTNSPSGAGSHHHHHHHHHH

SEQ ID NO: 4483 - protein, 715 aa, Artificial Sequence
  Description of Artificial Sequence: Synthetic polypeptide
MGILPSPGMPALLSLVSLLSVLLMGCVAETGTQCVNLTTRTQLPPAYTNSFTRGVYYPDKVFRSSVLHSTQDLFLPFFSNVTWFHAIHVSGTNGTKRFDNPVLPFNDGVYFASTEKSNIIRGWIFGTTLDSKTQSLLIVNNATNVVIKVCEFQFCNDPFLGVYYHKNNKSWMESEFRVYSSANNCTFEYVSQPFLMDLEGKQGNFKNLREFVFKNIDGYFKIYSKHTPINLVRDLPQGFSALEPLVDLPIGINITRFQTLLALHRSYLTPGDSSSGWTAGAAAYYVGYLQPRTFLLKYNENGTITDAVDCALDPLSETKCTLKSFTVEKGIYQTSNFRVQPTESIVRFPNITNLCPFGEVFNATRFASVYAWNRKRISNCVADYSVLYNSASFSTFKCYGVSPTKLNDLCFTNVYADSFVIRGDEVRQIAPGQTGKIADYNYKLPDDFTGCVIAWNSNNLDSKVGGNYNYLYRLFRKSNLKPFERDISTEIYQAGSTPCNGVEGFNCYFPLQSYGFQPTNGVGYQPYRVVVLSFELLHAPATVCGPKKSTNLVKNKCVNFNFNGLTGTGVLTESNKKFLPFQQFMRDIADTTDAVRDPQTLEILDITPCSFGGVSVITPGTNTSNQVAVLYQDVNCTEVPVAIHADQLTPTWRVYSTGSNVFQTRAGCLIGAEHVNNSYECDIPIGAGICASYQTQTNSPSGAGSHHHHHHHHHH

SEQ ID NO: 4484 - protein, 715 aa, Artificial Sequence
  Description of Artificial Sequence: Synthetic polypeptide
MGILPSPGMPALLSLVSLLSVLLMGCVAETGTQCVNLTTRTQLPPAYTNSFTRGVYYPDKVFRSSVLHSTQDLFLPFFSNVTWFHAIHVSGTNGTKRFDNPVLPFNDGVYFASTEKSNIIRGWIFGTTLDSKTQSLLIVNNATNVVIKVCEFQFCNDPFLGVYYHKNNKSWMESEFRVYSSANNCTFEYVSQPFLMDLEGKQGNFKNLREFVFKNIDGYFKIYSKHTPINLVRDLPQGFSALEPLVDLPIGINITRFQTLLALHRSYLTPRDSSSGWTAGAAAYYVGYLQPRTFLLKYNENGTITDAVDCALDPLSETKCTLKSFTVEKGIYQTSNFRVQPTESIVRFPNITNLCPFGEVFNATRFASVYAWNRKRISNCVADYSVLYNSASFSTFKCYGVSPTKLNDLCFTNVYADSFVIRGDEVRQIAPGQTGKIADYNYKLPDDFTGCVIAWNSNNLDSKVGGNYNYLYRLFRKSNLKPFERDISTEIYQAGSTPCNGVEGFNCYFPLQSYGFQPTNGVGYQPYRVVVLSFELLHAPATVCGPKKSTNLVKNKCVNFNFNGLTGTGVLTESNKKFLPFQQFGRDIADTTDAVRDPQTLEILDITPCSFGGVSVITPGTNTSNQVAVLYQDVNCTEVPVAIHADQLTPTWRVYSTGSNVFQTRAGCLIGAEHVNNSYECDIPIGAGICASYQTQTNSPSGAGSHHHHHHHHHH

SEQ ID NO: 4485 - protein, 715 aa, Artificial Sequence
  Description of Artificial Sequence: Synthetic polypeptide
MGILPSPGMPALLSLVSLLSVLLMGCVAETGTQCVNLTTRTQLPPAYTNSFTRGVYYPDKVFRSSVLHSTQDLFLPFFSNVTWFHAIHVSGTNGTKRFDNPVLPFNDGVYFASTEKSNIIRGWIFGTTLDSKTQSLLIVNNATNVVIKVCEFQFCNDPFLGVYYHKNNKSWMESEFRVYSSANNCTFEYVSQPFLMDLEGKQGNFKNLREFVFKNIDGYFKIYSKHTPINLVRDLPQGFSALEPLVDLPIGINITRFQTLLALHRSYLTPGDSSSGWTAGAAAYYVGYLQPRTFLLKYNENGTITDAVDCALDPLSETKCTLKSFTVEKGIYQTSNFRVQPTESIVRFPNITNLCPFGEVFNATRFASVYAWNRKRISNCVADYSVLYNSASFSTFKCYGVSPTKLNDLCFTNVYADSFVIRGDEVRQIAPGQTGKIADYNYKLPDDFTGCVIAWNSNNLDSKVGGNYNYLYRLFRKSNLKPFERDISTEIYQAGSTPCNGVEGFNCYFPLQSYGFQPTNGVDYQPYRVVVLSFELLHAPATVCGPKKSTNLVKNKCVNFNFNGLTGTGVLTESNKKFLPFQQFGRDIADTTDAVRDPQTLEILDITPCSFGGVSVITPGTNTSNQVAVLYQDVNCTEVPVAIHADQLTPTWRVYSTGSNVFQTRAGCLIGAEHVNNSYECDIPIGAGICASYQTQTNSPSGAGSHHHHHHHHHH

SEQ ID NO: 4486 - protein, 715 aa, Artificial Sequence
  Description of Artificial Sequence: Synthetic polypeptide
MGILPSPGMPALLSLVSLLSVLLMGCVAETGTQCVNLTTRTQLPPAYTNSFTRGVYYPDKVFRSSVLHSTQDLFLPFFSNVTWFHAIHVSGTNGTKRFDNPVLPFNDGVYFASTEKSNIIRGWIFGTTLDSKTQSLLIVNNATNVVIKVCEFQFCNDPFLGVYYHKNNKSWMESEFRVYSSANNCTFEYVSQPFLMDLEGKQGNFKNLREFVFKNIDGYFKIYSKHTPINLVRDLPQGFSALEPLVDLPIGINITRFQTLLALHRSYLTPGDSSSGWTAGAAAYYVGYLQPRTFLLKYNENGTITDAVDCALDPLSETKCTLKSFTVEKGIYQTSNFRVQPTESIVRFPNITNLCPFGEVFNATRFASVYAWNRKRISNCVADYSVLYNSASFSTFKCYGVSPTKLNDLCFTNVYADSFVIRGDEVRQIAPGQTGKIADYNYKLPDDFTGCVIAWNSNNLDSKVGGNYNYLYRLFRKSNLKPFERDISTEHYQAGSTPCNGVEGFNCYFPLQSYGFQPTNGVGYQPYRVVVLSFELLHAPATVCGPKKSTNLVKNKCVNFNFNGLTGTGVLTESNKKFLPFQQFGRDIADTTDAVRDPQTLEILDITPCSFGGVSVITPGTNTSNQVAVLYQDVNCTEVPVAIHADQLTPTWRVYSTGSNVFQTRAGCLIGAEHVNNSYECDIPIGAGICASYQTQTNSPSGAGSHHHHHHHHHH

SEQ ID NO: 4487 - protein, 715 aa, Artificial Sequence
  Description of Artificial Sequence: Synthetic polypeptide
MGILPSPGMPALLSLVSLLSVLLMGCVAETGTQCVNLTTRTQLPPAYTNSFTRGVYYPDKVFRSSVLHSTQDLFLPFFSNVTWFHAIHVSGTNGTKRFDNPVLPFNDGVYFASTEKSNIIRGWIFGTTLDSKTQSLLIVNNATNVVIKVCEFQFCNDPFLGVYYHKNNKSWMESEFRVYSSANNCTFEYVSQPFLMDLEGKQGNFKNLREFVFKNIDGYFKIYSKHTPINLVRDLPQGFSALEPLVDLPIGINITRFQTLLALHRSYLTPGDSSSGWTAGAAAYYVGYLQPRTFLLKYNENGTITDAVDCALDPLSETKCTLKSFTVEKGIYQTSNFRVQPTESIVRFPNITNLCPLGEVFNATRFASSYAWNRKRISNCVADYSVLYNSASFSTFKCYGVSPTKLNDLCFTNVYADRFVIRGDEVRQIAPGQTGKIADYNYKLPDDFTGCVIAWNSNNLDAKVGGNYNYLYRLFRKSNLKPFERFISTEIYQAGSTPSNGVEGFNCYFPLQSYGFQPTNGVGYQPYRVVVLSFELLHAPHTVCGPKKSTNLVKNKCVNFNFNGLTGTGVLTESNKKFLPFQQFGRDIADTTDAVRDPQTLEILDITPCSFGGVSVITPGTNTSNQVAVLYQDVNCTEVPVAIHADQLTPTWRVYSTGSNVFQTRAGCLIGAEHVNNSYECDIPIGAGICASYQTQTNSPSGAGSHHHHHHHHHH

SEQ ID NO: 4488 - protein, 715 aa, Artificial Sequence
  Description of Artificial Sequence: Synthetic polypeptide
MGILPSPGMPALLSLVSLLSVLLMGCVAETGTQCVNLTTRTQLPPAYTNSFTRGVYYPDKVFRSSVLHSTQDLFLPFFSNVTWFHAIHVSGTNGTKRFDNPVLPFNDGVYFASTEKSNIIRGWIFGTTLDSKTQSLLIVNNATNVVIKVCEFQFCNDPFLGVYYHKNNKSWMESEFRVYSSANNCTFEYVSQPFLMDLEGKQGNFKNLREFVFKNIDGYFKIYSKHTPINLVRDLPQGFSALEPLVDLPIGINITRFQTLLALHRSYLTPGDSSSGWTMGAAAYYVGYLQPRTFLLKYNENGTITDAVDCALDPLSETKCTLKSFTVEKGIYQTSNFRVQPTESIVRFPNITNLCPFGEVFNATRFASVYAWNRKRISNCVADYSVLYNSASFSTFKCYGVSPTKLNDLCFTNVYADSFVIRGDEVRQIAPGQTGKIADYNYKLPDDFTGCVIAWNSNNLDSKVGGNYNYLYRLFRKSNLKPFERDISTEIYQAGSTPCNGVEGFNCYFPLQSYGFQPTNGVGYQPYRVVVLSFELLHAPATVCGPKKSTNLVKNKCVNFNFNGLTGTGVLTESNKKFLPFQQFGRDIADTTDAVRDPQTLEILDITPCSFGGVSVITPGTNTSNQVAVLYQDVNCTEVPVAIHADQLTPTWRVYSTGSNVFQTRAGCLIGAEHVNNSYECDIPIGAGICASYQTQTNSPSGAGSHHHHHHHHHH

SEQ ID NO: 4489 - protein, 715 aa, Artificial Sequence
  Description of Artificial Sequence: Synthetic polypeptide
MGILPSPGMPALLSLVSLLSVLLMGCVAETGTQCVNLTTRTQLPPAYTNSFTRGVYYPDKVFRSSVLHSTQDLFLPFFSNVTWFHAIHVSGTNGTKRFDNPVLPFNDGVYFASTEKSNIIRGWIFGTTLDSKTQSLLIVNNATNVVIKVCEFQFCNDPFLGVYYHKNNKSWMESEFRVYSSANNCTFEYVSQPFLMDLEGKQGNFKNLREFVFKNIDGYFKIYSKHTPINLVRDLPQGFSALEPLVDLPIGINITIFQTLLALHRSYLTPGDSSSGWTAGAAAYYVGYLQPRTFLLKYNENGTITDAVDCALDPLSETKCTLKSFTVEKGIYQTSNFRVQPTESIVRFPNITNLCPFGEVFNATRFASVYAWNRKRISNCVADYSVLYNSASFSTFKCYGVSPTKLNDLCFTNVYADSFVIRGDEVRQIAPGQTGKIADYNYKLPDDFTGCVIAWNSNNLDSKVGGNYNYLYRLFRKSNLKPFERDISTEIYQAGSTPCNGVEGFNCYFPLQSYGFQPTNGVGYQPYRVVVLSFELLHAPATVCGPKKSTNLVKNKCVNFNFNGLTGTGVLTESNKKFLPFQQFGRDIADTTDAVRDPQTLEILDITPCSFGGVSVITPGTNTSNQVAVLYQDVNCTEVPVAIHADQLTPTWRVYSTGSNVFQTRAGCLIGAEHVNNSYECDIPIGAGICASYQTQTNSPSGAGSHHHHHHHHHH

SEQ ID NO: 4490 - protein, 715 aa, Artificial Sequence
  Description of Artificial Sequence: Synthetic polypeptide
MGILPSPGMPALLSLVSLLSVLLMGCVAETGTQCVNLTTRTQLPPAYTNSFTRGVYYPDKVFRSSVLHSTQDLFLPFFSNVTWFHAIHVSGTNGTKRFDNPVLPFNDGVYFASTEKSNIIRGWIFGTTLDSKTQSLLIVNNATNVVIKVCEFQFCNDPFLGVYYHKNNKSWMESEFRVYSSANNCTFEYVSQPFLMDLEGKQGNFKNLREFVFKNIDGYFKIYSKHTPINLVRDLPQGFSALEPLVDLPIGINITRFQTLLALHRSYLTPGDSSSGWTAGAAAYYVGYLQPRTFLLKYNENGTITDAVDCALDPLSETKCTLKSFTVEKGIYQTSNFRVQPTESIVRFPNITNLCPFGEVFNATRFASVYAWNRKRISNCVADYSVLYNSASFSTFKCYGVSPTKLNDLCFTNVYADSFVIRGDEVRQIAPGQTGKIADYNYKLPDDFTGCVIAWNSNNLDSKVGGNYNYLYRLFRKSNLKPFERDISTEIYQAGSTPCNGVEGFNCYFPLQSYGFQPTNGVGYQPYRVVVLSFELLHAPHTVCGPKKSTNLVKNKCVNFNFNGLTGTGVLTESNKKFLPFQQFGRDIADTTDAVRDPQTLEILDITPCSFGGVSVITPGTNTSNQVAVLYQDVNCTEVPVAIHADQLTPTWRVYSTGSNVFQTRAGCLIGAEHVNNSYECDIPIGAGICASYQTQTNSPSGAGSHHHHHHHHHH

SEQ ID NO: 4491 - protein, 715 aa, Artificial Sequence
  Description of Artificial Sequence: Synthetic polypeptide
MGILPSPGMPALLSLVSLLSVLLMGCVAETGTQCVNLTTRTQLPPAYTNSFTRGVYYPDKVFRSSVLHSTQDLFLPFFSNVTWFHAIHVSGTNGTKRFDNPVLPFNDGVYFASTEKSNIIRGWIFGTTLDSKTQSLLIVNNATNVVIKVCEFQFCNDPFLGVYYHKNNKSWMESEFRVYSSANNCTFEYVSQPFLMDLEGKQGNFKNLREFVFKNIDGYFKIYSKHTPINLVRDLPQGFSALEPLVDLPIGINITRFQTLLALHRSYLTPGDSSSGWTAGAAAYYVGYLQPRTFLLKYNENGTITDAVDCALDPLSETKCTLKSFTVEKGIYQTSNFRVQPTESIVRYPNITNLCPFGEVFNATRFASVYAWNRKRISNCVADYSVLYNSASFSTFKCYGVSPTKLNDLCFTNVYADSFVIRGDEVRQIAPGQTGKIADYNYKLPDDFTGCVIAWNSNNLDSKVGGNYNYLYRLFRKSNLKPFERDISTEIYQAGSTPCNGVEGFNCYFPLQSYGFQPTNGVGYQPYRVVVLSFELLHAPATVCGPKKSTNLVKNKCVNFNFNGLTGTGVLTESNKKFLPFQQFMRDIADTTDAVRDPQTLEILDITPCSFGGVSVITPGTNTSNQVAVLYQDVNCTEVPVAIHADQLTPTWRVYSTGSNVFQTRAGCLIGAEHVNNSYECDIPIGAGICASYQTQTNSPSGAGSHHHHHHHHHH

SEQ ID NO: 4492 - protein, 715 aa, Artificial Sequence
  Description of Artificial Sequence: Synthetic polypeptide
MGILPSPGMPALLSLVSLLSVLLMGCVAETGTQCVNLTTRTQLPPAYTNSFTRGVYYPDKVFRSSVLHSTQDLFLPFFSNVTWFHAIHVSGTNGTKRFDNPVLPFNDGVYFASTEKSNIIRGWIFGTTLDSKTQSLLIVNNATNVVIKVCEFQFCNDPFLGVYYHKNNKSWMESEFRVYSSANNCTFEYVSQPFLMDLEGKQGNFKNLREFVFKNIDGYFKIYSKHTPINLVRDLPQGFSALEPLVDLPIGINITRFQTLLALHRSYLTPGDSSSGWTAGAAAYYVGYLQPRTFLLKYNENGTITDAVDCALDPLSETKCTLKSFTVEKGIYQTSNFRVQPTESIVRFPNITNLCPFGEVFNATRFASVYAWNRKRISNCVADYSVLYNSASFSTFKWYGVSPTKLNDLCFTNVYADSFVIRGDEVRQIAPGQTGKIADYNYKLPDDFTGCVIAWNSNNLDSKVGGNYNYLYRLFRKSNLKPFERDISTEIYQAGSTPCNGVEGFNCYFPLQSYGFQPTNGVGYQPYRVVVLSFELLHAPATVCGPKKSTNLVKNKCVNFNFNGLTGTGVLTESNKKFLPFQQFGRDIADTTDAVRDPQTLEILDITPCSFGGVSVITPGTNTSNQVAVLYQDVNCTEVPVAIHADQLTPTWRVYSTGSNVFQTRAGCLIGAEHVNNSYECDIPIGAGICASYQTQTNSPSGAGSHHHHHHHHHH

SEQ ID NO: 4493 - protein, 715 aa, Artificial Sequence
  Description of Artificial Sequence: Synthetic polypeptide
MGILPSPGMPALLSLVSLLSVLLMGCVAETGTQCVNLTTRTQLPPAYTNSFTRGVYYPDKVFRSSVLHSTQDLFLPFFSNVTWFHAIHVSGTNGTKRFDNPVLPFNDGVYFASTEKSNIIRGWIFGTTLDSKTQSLLIVNNATNVVIKVCEFQFCNDPFLGVYYHKNNKSWMESEFRVYSSANNCTFEYVSQPFLMDLEGKQGNFKNLREFVFKNIDGYFKIYSKHTPINLVRDLPQGFSALEPLVDLPIGINITRFQTLLALHRSYLTPGDSSSGWTAGAAAYYVGYLQPRTFLLKYNENGTITDAVDCALDPLSETKCTLKSFTVEKGIYQTSNFRVQPTESIVRFPNITNLCPFGEVFNATRFASVYAWNRKRISNCVADYSVLYNSASFSTFKCYGVSPTKLNDLCFTNVYADSFVIRGDEVRQIAPGQTGKIADYNYKLPDDFTGCVIAWNSNNLDSKVGGNYNYLYRLFRKSNLKPFERDISTEQYQAGSTPCNGVEGFNCYFPLQSYGFQPTNGVGYQPYRVVVLSFELLHAPATVCGPKKSTNLVKNKCVNFNFNGLTGTGVLTESNKKFLPFQQFGRDIADTTDAVRDPQTLEILDITPCSFGGVSVITPGTNTSNQVAVLYQDVNCTEVPVAIHADQLTPTWRVYSTGSNVFQTRAGCLIGAEHVNNSYECDIPIGAGICASYQTQTNSPSGAGSHHHHHHHHHH

SEQ ID NO: 4494 - protein, 715 aa, Artificial Sequence
  Description of Artificial Sequence: Synthetic polypeptide
MGILPSPGMPALLSLVSLLSVLLMGCVAETGTQCVNLTTRTQLPPAYTNSFTRGVYYPDKVFRSSVLHSTQDLFLPFFSNVTWFHAIHVSGTNGTKRFDNPVLPFNDGVYFASTEKSNIIRGWIFGTTLDSKTQSLLIVNNATNVVIKVCEFQFCNDPFLGVYYHKNNKSWMESEFRVYSSANNCTFEYVSQPFLMDLEGKQGNFKNLREFVFKNIDGYFKIYSKHTPINLVRDLPQGFSALEPLVDLPIGINITRFQTLLALHRSYLTPGDSSSGWTAGAAAYYVGYLQPRTFLLKYNENGTITDAVDCALDPLSETKCTLKSFTVEKGIYQTSNFRVQPTESIVRFPNITNLCPFGEVFNATRFASVYAWNRKRISNCVADYSVLYNSASFSTFKCYGVSPTKLNDLCFTNVYADSFVIRGDEVRQIAPGQTGNIADYNYKLPDDFTGCVIAWNSNNLDSKVGGNYNYLYRLFRKSNLKPFERDISTEIYQAGSTPCNGVEGFNCYFPLQSYGFQPTNGVGYQPYRVVVLSFELLHAPATVCGPKKSTNLVKNKCVNFNFNGLTGTGVLTESNKKFLPFQQFGRDIADTTDAVRDPQTLEILDITPCSFGGVSVITPGTNTSNQVAVLYQDVNCTEVPVAIHADQLTPTWRVYSTGSNVFQTRAGCLIGAEHVNNSYECDIPIGAGICASYQTQTNSPSGAGSHHHHHHHHHH

SEQ ID NO: 4495 - protein, 715 aa, Artificial Sequence
  Description of Artificial Sequence: Synthetic polypeptide
MGILPSPGMPALLSLVSLLSVLLMGCVAETGTQCVNLTTRTQLPPAYTNSFTRGVYYPDKVFRSSVLHSTQDLFLPFFSNVTWFHAIHVSGTNGTKRFDNPVLPFNDGVYFASTEKSNIIRGWIFGTTLDSKTQSLLIVNNATNVVIKVCEFQFCNDPFLGVYYHKNNKSWMESEFRVYSSANNCTFEYVSQPFLMDLEGKQGNFKNLREFVFKNIDGYFKIYSKHTPINLVRDLPQGFSALEPLVDLPIGINITRFQYLLALHRSYLTPGDSSSGWTAGAAAYYVGYLQPRTFLLKYNENGTITDAVDCALDPLSETKCTLKSFTVEKGIYQTSNFRVQPTESIVRFPNITNLCPFGEVFNATRFASVYAWNRKRISNCVADYSVLYNSASFSTFKCYGVSPTKLNDLCFTNVYADSFVIRGDEVRQIAPGQTGKIADYNYKLPDDFTGCVIAWNSNNLDSKVGGNYNYLYRLFRKSNLKPFERDISTEIYQAGSTPCNGVEGFNCYFPLQSYGFQPTNGVGYQPYRVVVLSFELLHAPATVCGPKKSTNLVKNKCVNFNFNGLTGTGVLTESNKKFLPFQQFGRDIADTTDAVRDPQTLEILDITPCSFGGVSVITPGTNTSNQVAVLYQDVNCTEVPVAIHADQLTPTWRVYSTGSNVFQTRAGCLIGAEHVNNSYECDIPIGAGICASYQTQTNSPSGAGSHHHHHHHHHH

SEQ ID NO: 4496 - protein, 715 aa, Artificial Sequence
  Description of Artificial Sequence: Synthetic polypeptide
MGILPSPGMPALLSLVSLLSVLLMGCVAETGTQCVNLTTRTQLPPAYTNSFTRGVYYPDKVFRSSVLHSTQDLFLPFFSNVTWFHAYHVSGTNGTKRFDNPVLPFNDGVYFASTEKSNIIRGWIFGTTLDSKTQSLLIVNNATNVVIKVCEFQFCNDPFLGVYYHKNNKSWMESEFRVYSSANNCTFEYHSQPFLMDLEGKQGNFKNLREFVFKNIDGYFKIYSKHTPINLVRDLPQGFSALEPLVDLPIGINITRFQTLLALHRSYLTPGDSSSGWTAGAAAYYVGYLQPRTFLLKYNENGTITDAVDCALDPLSETKCTLKSFTVEKGIYQTSNFRVQPTESIVRFPNITNKCPFGEVFNATRFASVYAWNRKRISNCVADYSVLYNSASFSTFKCYGVSPTKLNDLCFTNVYADSFVIRGDEVRQIAPGQTGKIADYNYKLPDDFTGCVIAWNSNNLDSKVGGNYNYLYRLFRKSNLKPFERDISTEIYQAGSTPCNGVEGFNCYFPLQSYGFQPTNGPGQQPYRVVVLSFELLHAPATVCGPKKSTNLVKNKCVNFNFNGLTGTGVLTESNKKFLPFQQFGRDIADTTDAVRDPQTLEILDITPCSFGGVSVITPGTNTSNQVAVLYQDVNCTEVPDAIHADQLTPTWRVYSTGSNVFQTRAGCLIGAEHVNNSYECDIPIGAGICASYQTQTNSPSGAGSHHHHHHHHHH

SEQ ID NO: 4497 - protein, 715 aa, Artificial Sequence
  Description of Artificial Sequence: Synthetic polypeptide
MGILPSPGMPALLSLVSLLSVLLMGCVAETGTQCVNLTTRTQLPPAYTNSFTRGVYYPDKVFRSSVLHSTQDLFLPFFSNVTWFHAIHVSGTNGTKRFDNPVLPFNDGVYFASTEKSNIIRGWIFGTTLDSKTQSLLIVNNATNVVIKVCEFQFCNDPFLGVYYHKNNKSWMESEFRVYSSANNCTFEYVSQPFLMDLEGKQGNFKNLREFVFKNIDGYFKIYSKHTPINLVRDLPQGFSALEPLVDLPIGINITRFQTLLALHRSYLTPGDSSSGWTAGAAAYYVGYLQPRTFLLKYNENGTITDAVDCALDPLSETKCTLKSFTVEKGIYQTSNFRVQPTESIVRFPNITNLCPFGEVFNATRFASVYAWNRKRISNCVADYSVLYNSASFSTFKCYGVSPTKLNDLCFTNVYADSFVIRGDEVRQIAPGQTGKIADYNYKLPDDFTGCVIAWNSNNLDSKPGGNYNYLYRLFRKSNLKPFERDISTEIYQAGSTPCNGVEGFNCYFPLQSYGFQPTNGVGYQPYRVVVLSFELLHAPATVCGPKKSTNLVKNKCVNFNFNGLTGTGVLTESNKKFLPFQQFGRDIADTTDAVRDPQTLEILDITPCSFGGVSVITPGTNTSNQVAVLYQDVNCTEVPVAIHADQLTPTWRVYSTGSNVFQTRAGCLIGAEHVNNSYECDIPIGAGICASYQTQTNSPSGAGSHHHHHHHHHH

SEQ ID NO: 4498 - protein, 715 aa, Artificial Sequence
  Description of Artificial Sequence: Synthetic polypeptide
MGILPSPGMPALLSLVSLLSVLLMGCVAETGTQCVNLTTRTQLPPAYTNSFTRGVYYPDKVFRSNVLHSTQDLFLPFFSNVTWFHAIHVSGTNGTKRFDNPVLPFNDGVYFASTEKSNIIRGWIFGTTLDSKTQSLLIVNNATNVVIKVCEFQFCNDPFLGVYYHKNNKSWMESEFRVYSSANNCTFEYVSQPFLMDLEGKQGNFKNLREFVFKNIDGYFKIYSKHTPINLVRDLPQGFSALEPLVDLPIGINITRFQTLLALHRSYLTPGDSSSGWTAGAAAYYVGYLQPRTFLLKYNENGTITDAVDCALDPLSETKCTLKSFTVEKGIYQTSNFRVQPTESIVRFPNITNLCPFGEVFNATRFASVYAWNRKRISNCVADYSVLYNSASFSTFKCYGVSPTKLNDLCFTNVYADSFVIRGDEVRQIAPGQTGKIADYNYKLPDDFTGCVIAWNSNNLDSKVGGNYNYLYRLFRKSNLKPFERDISTEIYQAGSTPCNGVEGFNCYFPLQSYGFQPTNGVGYQPYRVVVLSFELLHAPATVCGPKKSTNLVKNKCVNFNFNGLTGTGVLTESNKKFLPFQQFGRDIADTTDAVRDPQTLEILDITPCSFGGVSVITPGTNTSNQVAVLYQDVNCTEVPVAIHADQLTPTWRVYSTGSNVFQTRAGCLIGAEHVNNSYECDIPIGAGICASYQTQTNSPSGAGSHHHHHHHHHH

SEQ ID NO: 4499 - protein, 715 aa, Artificial Sequence
  Description of Artificial Sequence: Synthetic polypeptide
MGILPSPGMPALLSLVSLLSVLLMGCVAETGTQCVNLTTRTQLPPAYTNSFTRGVYYPDKVFRSSVLHSTQDLFLPFFSNVTWFHAIHVSGTNGTKRFDNPVLPFNDGVYFASTEKSNIIRGWIFGTTLDSKTQSLLIVNNATNVVIKVCEFQFCNDPFLGVYYHKNNKSWMESEFRVYSSANNCTFEYVSQPFLMDLEGKQGNFKNLREFVFKNIDGYFKIYSKHTPINLVRDLPQGFSALEPLVDLPIGINITRFQTLLALHRSYLTPGDSSSGWTAGAAAYYVGYLQPRTFLLKYNENGTITDAVDCALDPLSETKCTLKSFTVEKGIYQTSNFRVQPTESIVRFPNITNLCPFGEVFNATRFASVYAWNRKRISNCVADYSVLYNSASFSTFKCYGVSPTKLNDLCFTNVYADSFVIRGDEVRQIAPGQTGKIALYNYKLPDDFTGCVIAWNSNNLDSKVGGNYNYLYRLFRKSNLKPFERDISTEIYQAGSTPCNGVEGFNCYFPLQSYGFQPTNGVGYQPYRVVVLSFELLHAPATVCGPKKSTNLVKNKCVNFNFNGLTGTGVLTESNKKFLPFQQFGRDIADTTDAVRDPQTLEILDITPCSFGGVSVITPGTNTSNQVAVLYQDVNCTEVPVAIHADQLTPTWRVYSTGSNVFQTRAGCLIGAEHVNNSYECDIPIGAGICASYQTQTNSPSGAGSHHHHHHHHHH

SEQ ID NO: 4500 - protein, 715 aa, Artificial Sequence
  Description of Artificial Sequence: Synthetic polypeptide
MGILPSPGMPALLSLVSLLSVLLMGCVAETGTQCVNLTTRTQLPPAYTNSFTRGVYYPDKVFRSSVLHSTQDLFLPFFSNVTWFHAIHVSGTNGTKRFDNPVLPFNDGVYFASTEKSNIIRGWIFGTTLDSKTQSLLIVNNATNVVIKVCEFQFCNDPFLGVYYHKNNKSWMESEFRVYSSANNCTFEYVSQPFLMDLEGKQGNFKNLREFVFKNIDGYFKIYSKHTPINLVRDLPQGFSALEPLVDLPIGINITRFQTLLALHRSYLTPGDSSSGWTAGAAAYYVGYLQPRTFLLKYNENGTITDAVDCALDPLSETKCTLKSFTVEKGIYQTSNFRVQPTESIVRFPNITNLCPFGEVFNATRFASVYAWNRKRISNCVADYSVLYNSASFSTFKCYGVSPTKLNDLCFTNVYADSFVIRGDEVRQIAPGQTGKIADYNYKLPDDFTGCVIAWNSNNLDSKVGGNYNYLYRLFRKSNLKPFERDISTEIYQAGSTPCNGVEGFNCYFPLQSYGFQPTNGVGKQPYRVVVLSFELLHAPATVCGPKKSTNLVKNKCVNFNFNGLTGTGVLTESNKKFLPFQQFGRDIADTTDAVRDPQTLEILDITPCSFGGVSVITPGTNTSNQVAVLYQDVNCTEVPVAIHADQLTPTWRVYSTGSNVFQTRAGCLIGAEHVNNSYECDIPIGAGICASYQTQTNSPSGAGSHHHHHHHHHH

SEQ ID NO: 4501 - protein, 715 aa, Artificial Sequence
  Description of Artificial Sequence: Synthetic polypeptide
MGILPSPGMPALLSLVSLLSVLLMGCVAETGTQCVNLTTRTQLPPAYTNSFTRGVYYPDKVFRSSVLHSTQDLFLPFFSNVTWFHAIHVSGTNGTKRFDFPVLPFNDGVYFASTEKSNIIRGWIFGTTLDSKTQSLLIVNNATNVVIKVCEFQFCNDPFLGVYYHKNNKSWMESEFRVYSSANNCTFEYVSQPFLMDLEGKQGNFKNLREFVFKNIDGYFKIYSKHTPINLVRDLPQGFSALEPLVDLPIGINITRFQTLLALHRSYLTPGDSSSGWTAGAAAYYVGYLQPRTFLLKYNENGTITDAVDCALDPLSETKCTLKSFTVEKGIYQTSNFRVQPTESIVRFPNITNLCPFGEVFNATRFASVYAWNRKRISNCVADYSVLYNSASFSTFKCYGVSPTKLNDLCFTNVYADSFVIRGDEVRQIAPGQTGKIADYNYKLPDDFTGCVIAWNSNNLDSKVGGNYNYLYRLFRKSNLKPFERDISTEIYQAGSTPCNGVEGFNCYFPLQSYGFQPTNGVGYQPYRVVVLSFELLHAPATVCGPKKSTNLVKNKCVNFNFNGLTGTGVLTESNKKFLPFQQFGRDIADTTDAVRDPQTLEILDITPCSFGGVSVITPGTNTSNQVAVLYQDVNCTEVPVAIHADQLTPTWRVYSTGSNVFQTRAGCLIGAEHVNNSYECDIPIGAGICASYQTQTNSPSGAGSHHHHHHHHHH

SEQ ID NO: 4502 - protein, 715 aa, Artificial Sequence
  Description of Artificial Sequence: Synthetic polypeptide
MGILPSPGMPALLSLVSLLSVLLMGCVAETGTQCVNLTTRTQLPPAYTNSFTRGVYYPDKVFRSSVLHSTQDLFLPFFSNVTWFHAIHVSGTNGTKRFDYPVLPFNDGVYFASTEKSNIIRGWIFGTTLDSKTQSLLIVNNATNVVIKVCEFQFCNDPFLGVYYHKNNKSWMESEFRVYSSANNCTFEYVSQPFLMDLEGKQGNFKNLREFVFKNIDGYFKIYSKHTPINLVRDLPQGFSALEPLVDLPIGINITRFQTLLALHRSYLTPGDSSSGWTAGAAAYYVGYLQPRTFLLKYNENGTITDAVDCALDPLSETKCTLKSFTVEKGIYQTSNFRVQPTESIVRFPNITNLCPFGEVFNATRFASVYAWNRKRISNCVADYSVLYNSASFSTFKCYGVSPTKLNDLCFTNVYADSFVIRGDEVRQIAPGQTGKIADYNYKLPDDFTGCVIAWNSNNLDSKVGGNYNYLYRLFRKSNLKPFERDISTEIYQAGSTPCNGVEGFNCYFPLQSYGFQPTNGVGYQPYRVVVLSFELLHAPATVCGPKKSTNLVKNKCVNFNFNGLTGTGVLTESNKKFLPFQQFGRDIADTTDAVRDPQTLEILDITPCSFGGVSVITPGTNTSNQVAVLYQDVNCTEVPVAIHADQLTPTWRVYSTGSNVFQTRAGCLIGAEHVNNSYECDIPIGAGICASYQTQTNSPSGAGSHHHHHHHHHH

SEQ ID NO: 4503 - protein, 715 aa, Artificial Sequence
  Description of Artificial Sequence: Synthetic polypeptide
MGILPSPGMPALLSLVSLLSVLLMGCVAETGTQCVNLTTRTQLPPAYTNSFTRGVYYPDKVFRSSVLHLTQDLFLPFFSNVTWFHAIHVSGTNGTKRFDNPVLPFNDGVYFASTEKSNIIRGWIFGTTLDSKTQSLLIVNNATNVVIKVCEFQFCNDPFLGVYYHKNNKSWMESEFRVYSSANNCTFEYVSQPFLMDLEGKQGNFKNLREFVFKNIDGYFKIYSKHTPINLVRDLPQGFSALEPLVDLPIGINITRFQTLLALHRSYLTPGDSSSGWTAGAAAYYVGYLQPRTFLLKYNENGTITDAVDCALDPLSETKCTLKSFTVEKGIYQTSNFRVQPTESIVRFPNITNLCPFGEVFNATRFASVYAWNRKRISNCVADYSVLYNSASFSTFKCYGVSPTKLNDLCFTNVYADSFVIRGDEVRQIAPGQTGKIADYNYKLPDDFTGCVIAWNSNNLDSKVGGNYNYLYRLFRKSNLKPFERDISTEIYQAGSTPCNGVEGFNCYFPLQSYGFQPTNGVGYQPYRVVVLSFELLHAPATVCGPKKSTNLVKNKCVNFNFNGLTGTGVLTESNKKFLPFQQFGRDIADTTDAVRDPQTLEILDITPCSFGGVSVITPGTNTSNQVAVLYQDVNCTEVPVAIHADQLTPTWRVYSTGSNVFQTRAGCLIGAEHVNNSYECDIPIGAGICASYQTQTNSPSGAGSHHHHHHHHHH

SEQ ID NO: 4504 - protein, 715 aa, Artificial Sequence
  Description of Artificial Sequence: Synthetic polypeptide
MGILPSPGMPALLSLVSLLSVLLMGCVAETGTQCVNLTTRTQLPPAYTNSFTRGVYYPDKVFRSSVLHSTQDLFLPFFSNVTWFHAKHVSGTNGTKRFDNPVLPFNDGVYFASTEKSNIIRGWIFGTTLDSKTQSLLIVNNATNVVIKVCEFQFCNDPFLGVYYHKNNKSWMESEFRVYSSANNCTFEYHSQPFLMDLEGKQGNFKNLREFVFKNIDGYFKIYSKHTPINLVRDLPQGFSALEPLVDLPIGINITRFQTLLALHRSYLTPGDSSSGETAGAAAYYVGYLQPRTFLLKYNENGTITDAVDCALDPLSETKCTLKSFTVEKGIYQTSNFRVQPTESIVRFPNITNHCPFGEVFNATRFASVYAWNRKRISNCVADYSVLYNSASFSTFKCYGVSPTKLNDLCFTNVYADSFVIRGDEVRQIAPGQTGKIADYNYKLPDDFTGCVIAWNSNNLDSKVGGNYNYLYRLFRKSNLKPFERDISTEIYQAGSTPCNGVEGFNCYFPLQSYGFQPTNGPGQQPYRVVVLSFELLHAPATVCGPKKSTNLVKNKCVNFNFNGLTGTGVLTESNKKFLPFQQFGRDIADTTDAVRDPQTLEILDITPCSFGGVSVITPGTNTSNQVAVLYQDVNCTEVPDAIHADQLTPTWRVYSTGSNVFQTRAGCLIGAEHVNNSYECDIPIGAGICASYQTQTNSPSGAGSHHHHHHHHHH

SEQ ID NO: 4505 - protein, 715 aa, Artificial Sequence
  Description of Artificial Sequence: Synthetic polypeptide
MGILPSPGMPALLSLVSLLSVLLMGCVAETGTQCVNLTTRTQLPPAYTNSFTRGVYYPDKVFRSSVLHSTQDLFLPFFSNVTWFHAIHVSGTNGTKRFDNPVLPFNDGVYFASTEKSNIIRGWIFGTTLDSKTQSLLIVNNATNVVIKVCEFQFCNDPFLGVYYHKNNKSWMESEFRVYSSANNCTFEYVSQPFLMDLEGKQGNFKNLREFVFKNIDGYFKIYSKHTPINLVRDLPQGFSALEPLVDLPIGINITRFQTLLALHRSYLTPGDSSSGWTAGAAAYYVGYLQPRTFLLKYNENGTITDAVDCALDPLSETKCTLKSFTVEKGIYQTSNFRVQPTESIVRFPNITNLCPFGEVFNATRFASVYAWNRKRISNCVADYSVLYNSASFSTFKCYGVSPTKLNDLCFTNVYADSFVIRGDEVRQIAPGQTGKIADYNYKLPDDFTGCVIAWNSNNLDSKVGGNYNYLYRLFRKSNLKPFERDISTEIYQAGSTPCNGVEGFNCYFPLQSYGFQPTNGDGYQPYRVVVLSFELLHAPATVCGPKKSTNLVKNKCVNFNFNGLTGTGVLTESNKKFLPFQQFGRDIADTTDAVRDPQTLEILDITPCSFGGVSVITPGTNTSNQVAVLYQDVNCTEVPVAIHADQLTPTWRVYSTGSNVFQTRAGCLIGAEHVNNSYECDIPIGAGICASYQTQTNSPSGAGSHHHHHHHHHH

SEQ ID NO: 4506 - protein, 715 aa, Artificial Sequence
  Description of Artificial Sequence: Synthetic polypeptide
MGILPSPGMPALLSLVSLLSVLLMGCVAETGTQCVNLTTRTQLPPAYTNSFTRGVYYPDKVFRSSVLHSTQDLFLPFFSNVTWFHAIHVSGTNGTKRFDNPVLPFNDGVYFASTEKSNIIRGWIFGTTLDSKTQSLLIVNNATNVVIKVCEFQFCNDPFLGVYYHKNNKSWMESEFRVYSSANNCTFEYVSQPFLMDLEGKQGNFKNLREFVFKNIDGYFKIYSKHTPINLVRDLPQGFSALEPLVDLPIGINITRFQTLLALHRSYLTPGDSSSGWTAGAAAYYVGYLQPRTFLLKYNENGTITDAVDCALDPLSETKCTLKSFTVEKGIYQTSNFRVQPTESIVRFPNITNLCPFGEVFNATRFASVYAWNRKRISNCVADYSVLYNSASFSTFKCYGVSPTKLNDLCFTNVYADSFVIRGDEVRQIAPGQTGKIADYNYKLPDDFTGCVIAWNSNNLDSKVGGNYNYLYRLFRKSNLKPFERDISTEIYQAGSTPCNGVEGFNCYFPLQSYGFQPTNGKGYQPYRVVVLSFELLHAPATVCGPKKSTNLVKNKCVNFNFNGLTGTGVLTESNKKFLPFQQFGRDIADTTDAVRDPQTLEILDITPCSFGGVSVITPGTNTSNQVAVLYQDVNCTEVPVAIHADQLTPTWRVYSTGSNVFQTRAGCLIGAEHVNNSYECDIPIGAGICASYQTQTNSPSGAGSHHHHHHHHHH

SEQ ID NO: 4507 - protein, 715 aa, Artificial Sequence
  Description of Artificial Sequence: Synthetic polypeptide
MGILPSPGMPALLSLVSLLSVLLMGCVAETGTQCVNLTTRTQLPPAYTNSFTRGVYYPDKVFRSSVLHSTQDLFLPFFSNVTWFHAIHVSGTNGTKRFDNPVLPFNDGVYFASTEKSNIIRGWIFGTTLDSKTQSLLIVNNATNVVIKVCEFQFCNDPFLGVYYHKNNKSWMESEFRVYSSANNCTFEYVSQPFLMDLEGKQGNFKNLREFVFKNIDGYFKIYSKHTPINLVRDLPQGFSALEPLVDLPIGINITRFQTLLALHRSYLTPGDSSSGWTAGAAAYYVGYLQPRTFLLKYNENGTITDAVDCALDPLSETKCTLKSFTVEKGIYQTSNFRVQPTESIVRFPNITNLCPFGEVFNATRFASVYAWNRKRISNCVADYSVLYNSASFSTFKCYGVSPTKLNDLCFTNVYADSFVIRGDEVRQIAPGQTGKIADYNYKLPDDFTGCVIAWNSNNLDSKVGGNYNYLYRLFRKSNLKPFERDISTEIYQAGSTPCNGVEGFLCYFPLQSYGFQPTNGVGYQPYRVVVLSFELLHAPATVCGPKKSTNLVKNKCVNFNFNGLTGTGVLTESNKKFLPFQQFGRDIADTTDAVRDPQTLEILDITPCSFGGVSVITPGTNTSNQVAVLYQDVNCTEVPVAIHADQLTPTWRVYSTGSNVFQTRAGCLIGAEHVNNSYECDIPIGAGICASYQTQTNSPSGAGSHHHHHHHHHH

SEQ ID NO: 4508 - protein, 715 aa, Artificial Sequence
  Description of Artificial Sequence: Synthetic polypeptide
MGILPSPGMPALLSLVSLLSVLLMGCVAETGTQCVNLTTRTQLPPAYTNSFTRGVYYPDKVFRSSVLHSTQDLFLPFFSNVTWFHAIHVSGTNGTKRFDNPVLPFNDGVYFASTEKSNIIRGWIFGTTLDSKTQSLLIVNNATNVVIKVCEFQFCNDPFLGVYYHKNNKSWMESEFRVYSSANNCTFEYVSQPFLMDLEGKQGNFKNLREFVFKNIDGYFKIYSKHTPINLVRDLPQGFSALEPLVDLPIGINITRFQTLLALHRSYLTPGDSSSGWTAGAAAYYVGYLQPRTFLLKYNENGTITDAVDCALDPLSETKCTLKSFTVEKGIYQTSNFRVQPTESIVRFPNITNLCPFGEVFNATRFASVYAWNRKRISNCVADYSVLYNSASFSTFKCYGVSPTKLNDLCFTNVYADSFVIRGDEVRQIAPGQTGKIADYNYKLPDDFTGCVIAWNSNNLDSKVGGNYNYLYRLFRKSNLKPFERDISTEIYQAGSTPCNGVEGFNCYFPLQSYGFQPTNGVGYQPYRVVVLSFELLHAPATVCGPKKSTNLVKNKCVNFNFNGLTGTGVLTESNKKFLPFQQFGRDIADTTDAVRDPQTLEILDITPCSFGGVYVITPGTNTSNQVAVLYQDVNCTEVPVAIHADQLTPTWRVYSTGSNVFQTRAGCLIGAEHVNNSYECDIPIGAGICASYQTQTNSPSGAGSHHHHHHHHHH

SEQ ID NO: 4509 - protein, 715 aa, Artificial Sequence
  Description of Artificial Sequence: Synthetic polypeptide
MGILPSPGMPALLSLVSLLSVLLMGCVAETGTQCVNLTTRTQLPPAYTNSFTRGVYYPDKVFRSSVLHSTQDLFLPFFSNVTWFHAIHVSGTNGTKRFDNPVLPFNDGVYFASTEKSNIIRGWIFGTTLDSKTQSLLIVNNATNVVIKVCEFQFCNDPFLGVYYHKNNKSWMESEFRVYSSANNCTFEYVSQPFLMDLEGKQGNFKNLREFVFKNIDGYFKIYSKHTPINLVRDLPQGFSALEPLVDLPIGINITRFQTLLALHRSYLTPGDSSSGWTAGAAAYYVGYLQPRTFLLKYNENGTITDAVDCALDPLSETKCTLKSFTVEKGIYQTSNFRVQPTESIVRFPNITNLCPFGEVFNATRFASVYAWNRKRISNCVADYSVLYNSASFSTFKCYGVSPTKLNDLCFTNVYADSFVIRGDEVRQIAPGQTGKIHDYNYKLPDDFTGCVIAWNSNNLDSKVGGNYNYLYRLFRKSNLKPFERDISTEIYQAGSTPCNGVEGFNCYFPLQSYGFQPTNGVGYQPYRVVVLSFELLHAPATVCGPKKSTNLVKNKCVNFNFNGLTGTGVLTESNKKFLPFQQFGRDIADTTDAVRDPQTLEILDITPCSFGGVSVITPGTNTSNQVAVLYQDVNCTEVPVAIHADQLTPTWRVYSTGSNVFQTRAGCLIGAEHVNNSYECDIPIGAGICASYQTQTNSPSGAGSHHHHHHHHHH

SEQ ID NO: 4510 - protein, 715 aa, Artificial Sequence
  Description of Artificial Sequence: Synthetic polypeptide
MGILPSPGMPALLSLVSLLSVLLMGCVAETGTQCVNLTTRTQLPPAYTNSFTRGVYYPDKVFRSSVLHSTQDLFLPFFSNVTWFHAIHVSGTNGTKRFDNPVLPFNDGVYFASTEKSNIIRGWIFGTTLDSKTQSLLIVNNATNVVIKVCEFQFCNDPFLGVYYHKNNKSWMESEFRVYSSANNCTFEYVSQPFLMDLEGKQGNFKNLREFVFKNIDGYFKIYSKHTPINLVRDLPQGFSALEPLVDLPIGINITRFQTLLALHRSYLTPGDSSSGWTAGAAAYYVGYLQPRTFLLKYNENGTITDAVDCALDPLSETKCTLKSFTVEKGIYQTSNFRVQPTESIVRFPNITNLCPFGEVFNATRFASVYAWNRKRISNCVADYSVLYNSASFSTFKCYGVSPTKLNDLCFTNVYADSFVIRGDEVRQIAPGQTGKIADYNYKLPDDFTGCVIAWNSNNLDSKVGGNYNYLYRLFRKSNLKPFERDISTEEYQAGSTPCNGVEGFNCYFPLQSYGFQPTNGVGYQPYRVVVLSFELLHAPATVCGPKKSTNLVKNKCVNFNFNGLTGTGVLTESNKKFLPFQQFGRDIADTTDAVRDPQTLEILDITPCSFGGVSVITPGTNTSNQVAVLYQDVNCTEVPVAIHADQLTPTWRVYSTGSNVFQTRAGCLIGAEHVNNSYECDIPIGAGICASYQTQTNSPSGAGSHHHHHHHHHH

SEQ ID NO: 4511 - protein, 715 aa, Artificial Sequence
  Description of Artificial Sequence: Synthetic polypeptide
MGILPSPGMPALLSLVSLLSVLLMGCVAETGTQCVNLTTRTQLPPAYTNSFTRGVYYPDKVFRSSVLHSTQDLFLPFFSNVTWFHAIHVSGTNGTKRFDNPVLPFNDGVYFASTEKSNIIRGWIFGTTLDSKTQSLLIVNNATNVVIKVCEFQFCNDPFLGVYYEKNNKSWMESEFRVYSSANNCTFEYVSQPFLMDLEGKQGNFKNLREFVFKNIDGYFKIYSKHTPINLVRDLPQGFSALEPLVDLPIGINITRFQTLLALHRSYLTPGDSSSGWTAGAAAYYVGYLQPRTFLLKYNENGTITDAVDCALDPLSETKCTLKSFTVEKGIYQTSNFRVQPTESIVRFPNITNLCPFGEVFNATRFASVYAWNRKRISNCVADYSVLYNSASFSTFKCYGVSPTKLNDLCFTNVYADSFVIRGDEVRQIAPGQTGKIADYNYKLPDDFTGCVIAWNSNNLDSKVGGNYNYLYRLFRKSNLKPFERDISTEIYQAGSTPCNGVEGFNCYFPLQSYGFQPTNGVGYQPYRVVVLSFELLHAPATVCGPKKSTNLVKNKCVNFNFNGLTGTGVLTESNKKFLPFQQFGRDIADTTDAVRDPQTLEILDITPCSFGGVSVITPGTNTSNQVAVLYQDVNCTEVPVAIHADQLTPTWRVYSTGSNVFQTRAGCLIGAEHVNNSYECDIPIGAGICASYQTQTNSPSGAGSHHHHHHHHHH

SEQ ID NO: 4512 - protein, 715 aa, Artificial Sequence
  Description of Artificial Sequence: Synthetic polypeptide
MGILPSPGMPALLSLVSLLSVLLMGCVAETGTQCVNLTTRTQLPPAYTNSFTRGVYYPDKVFRSSVLHSTQDLFLPFFSNVTWFHAIHVSGTNGTKRFDNPVLPFNDGVYFASTEKSNIIRGWIFGTTLDSKTQSLLIVNNATNVVIKVCEFQFCNDPFLGVYYHKNNKSWMESEFRVYSSANNCTFEYVSQPFLMDLEGKQGNFKNLREFVFKNIDGYFKIYSKHTPINLVRDLPQGFSALEPLVDLPIGINITRFQTLLALHRSYLTPGDSSSGWTAGAAAYYVGYLQPRTFLLKYNENGTITDAVDCALDPLSETKCTLKSFTVEKGIYQTSNFRVQPTESIVRFPNITNLCPFGEVFNATRFASVYAWNRKRISNCVADYSVLYNSASFSTFKCYGVSPTKLNDLCFTNVYADSFVIRGDEVRQIAPGQTGVIADYNYKLPDDFTGCVIAWNSNNLDSKVGGNYNYLYRLFRKSNLKPFERDISTEIYQAGSTPCNGVEGFNCYFPLQSYGFQPTNGVGYQPYRVVVLSFELLHAPATVCGPKKSTNLVKNKCVNFNFNGLTGTGVLTESNKKFLPFQQFGRDIADTTDAVRDPQTLEILDITPCSFGGVSVITPGTNTSNQVAVLYQDVNCTEVPVAIHADQLTPTWRVYSTGSNVFQTRAGCLIGAEHVNNSYECDIPIGAGICASYQTQTNSPSGAGSHHHHHHHHHH

SEQ ID NO: 4513 - protein, 715 aa, Artificial Sequence
  Description of Artificial Sequence: Synthetic polypeptide
MGILPSPGMPALLSLVSLLSVLLMGCVAETGTQCVNLTTRTQLPPAYTNSFTRGVYYPDKVFRSSVLHSTQDLFLPFFSNVTWFHAIHVSGTNGTKRFDNPVLPFNDGVYFASTEKSNIIRGWIFGTTLDSKTQSLLIVNNATNVVIKVCEFQFCNDPFLGVYYHKNNKSWMESEFRVYSSANNCTFEYVSQPFLMDLEGKQGNFKNLREFVFKNIDGYFKIYSKHTPINLVRDLPQGFSALEPLVDLPIGINITRFQTLLALHRSYLTPGDSSSGWTAGAAAYYVGYLQPRTFLLKYNENGWITDAVDCALDPLSETKCTLKSFTVEKGIYQTSNFRVQPTESIVRFPNITNLCPFGEVFNATRFASVYAWNRKRISNCVADYSVLYNSASFSTFKCYGVSPTKLNDLCFTNVYADSFVIRGDEVRQIAPGQTGKIADYNYKLPDDFTGCVIAWNSNNLDSKVGGNYNYLYRLFRKSNLKPFERDISTEIYQAGSTPCNGVEGFNCYFPLQSYGFQPTNGVGYQPYRVVVLSFELLHAPATVCGPKKSTNLVKNKCVNFNFNGLTGTGVLTESNKKFLPFQQFGRDIADTTDAVRDPQTLEILDITPCSFGGVSVITPGTNTSNQVAVLYQDVNCTEVPVAIHADQLTPTWRVYSTGSNVFQTRAGCLIGAEHVNNSYECDIPIGAGICASYQTQTNSPSGAGSHHHHHHHHHH

SEQ ID NO: 4514 - protein, 715 aa, Artificial Sequence
  Description of Artificial Sequence: Synthetic polypeptide
MGILPSPGMPALLSLVSLLSVLLMGCVAETGTQCVNLTTRTQLPPAYTNSFTRGVYYPDKVFRSSVLHSTQDLFLPFFSNVTWFHAIHVSGTNGTKRFDNPVLPFNDGVYFASTEKSNIIRGWIFGTTLDSKTQSLLIVNNATNVVIKVCEFQFCNDPFLGVYYHKNNKSWMESEFRVYSSANNCTFEYVSQPFLMDLEGKQGNFKNLREFVFKNIDGYFKIYSKHTPINLVRDLPQGFSALEPLVDLPIGINITRFATLLALHRSYLTPGDSSSGWTAGAAAYYVGYLQPRTFLLKYNENGTITDAVDCALDPLSETKCTLKSFTVEKGIYQTSNFRVQPTESIVRFPNITNLCPFGEVFNATRFASVYAWNRKRISNCVADYSVLYNSASFSTFKCYGVSPTKLNDLCFTNVYADSFVIRGDEVRQIAPGQTGKIADYNYKLPDDFTGCVIAWNSNNLDSKVGGNYNYLYRLFRKSNLKPFERDISTEIYQAGSTPCNGVEGFNCYFPLQSYGFQPTNGVGYQPYRVVVLSFELLHAPATVCGPKKSTNLVKNKCVNFNFNGLTGTGVLTESNKKFLPFQQFGRDIADTTDAVRDPQTLEILDITPCSFGGVSVITPGTNTSNQVAVLYQDVNCTEVPVAIHADQLTPTWRVYSTGSNVFQTRAGCLIGAEHVNNSYECDIPIGAGICASYQTQTNSPSGAGSHHHHHHHHHH

SEQ ID NO: 4515 - protein, 715 aa, Artificial Sequence
  Description of Artificial Sequence: Synthetic polypeptide
MGILPSPGMPALLSLVSLLSVLLMGCVAETGTQCVNLTTRTQLPPAYTNSFTRGVYYPDKVFRSSVLHSTQDLFLPFFSNVTWFHAIHVSGTNGTKRFDNPVLPFNDGVYFASIEKSNIIRGWIFGTTLDSKTQSLLIVNNATNVVIKVCEFQFCNDPFLGVYYHKNNKSWMESEFRVYSSANNCTFEYVSQPFLMDLEGKQGNFKNLREFVFKNIDGYFKIYSKHTPINLVRDLPQGFSALEPLVDLPIGINITRFQTLLALHRSYLTPGDSSSGWTAGAAAYYVGYLQPRTFLLKYNENGTITDAVDCALDPLSETKCTLKSFTVEKGIYQTSNFRVQPTESIVRFPNITNLCPFGEVFNATRFASVYAWNRKRISNCVADYSVLYNSASFSTFKCYGVSPTKLNDLCFTNVYADSFVIRGDEVRQIAPGQTGKIADYNYKLPDDFTGCVIAWNSNNLDSKVGGNYNYLYRLFRKSNLKPFERDISTEIYQAGSTPCNGVEGFNCYFPLQSYGFQPTNGVGYQPYRVVVLSFELLHAPATVCGPKKSTNLVKNKCVNFNFNGLTGTGVLTESNKKFLPFQQFGRDIADTTDAVRDPQTLEILDITPCSFGGVSVITPGTNTSNQVAVLYQDVNCTEVPVAIHADQLTPTWRVYSTGSNVFQTRAGCLIGAEHVNNSYECDIPIGAGICASYQTQTNSPSGAGSHHHHHHHHHH

SEQ ID NO: 4516 - protein, 715 aa, Artificial Sequence
  Description of Artificial Sequence: Synthetic polypeptide
MGILPSPGMPALLSLVSLLSVLLMGCVAETGTQCVNLTTRTQLPPAYTNSFTRGVYYPDKVFRSSVLHSTQDLFLPFFSNVTWFHAIHVQGTNGTKRFDNPVLPFNDGVYFASTEKSNIIRGWIFGTTLDSKTQSLLIVNNATNVVIKVCEFQFCNDPFLGVYYHKNNKSWMESEFRVYSSANNCTFEYVSQPFLMDLEGKQGNFKNLREFVFKNIDGYFKIYSKHTPINLVRDLPQGFSALEPLVDLPIGINITRFQTLLALHRSYLTPGDSSSGWTAGAAAYYVGYLQPRTFLLKYNENGTITDAVDCALDPLSETKCTLKSFTVEKGIYQTSNFRVQPTESIVRFPNITNLCPFGEVFNATRFASVYAWNRKRISNCVADYSVLYNSASFSTFKCYGVSPTKLNDLCFTNVYADSFVIRGDEVRQIAPGQTGKIADYNYKLPDDFTGCVIAWNSNNLDSKVGGNYNYLYRLFRKSNLKPFERDISTEIYQAGSTPCNGVEGFNCYFPLQSYGFQPTNGVGYQPYRVVVLSFELLHAPATVCGPKKSTNLVKNKCVNFNFNGLTGTGVLTESNKKFLPFQQFGRDIADTTDAVRDPQTLEILDITPCSFGGVSVITPGTNTSNQVAVLYQDVNCTEVPVAIHADQLTPTWRVYSTGSNVFQTRAGCLIGAEHVNNSYECDIPIGAGICASYQTQTNSPSGAGSHHHHHHHHHH

SEQ ID NO: 4517 - protein, 715 aa, Artificial Sequence
  Description of Artificial Sequence: Synthetic polypeptide
MGILPSPGMPALLSLVSLLSVLLMGCVAETGTQCVNLTTRTQLPPAYTNSFTRGVYYPDKVFRSSVLHSTQDLFLPFFSNVTWFHAIHVSGTNGTKRFDNPVLPFNDGVYFASTEKSNIIRGWIFGTTLDSKTQSLLIVNNATNVVIKVCEFQFCNDPFLGVYYHKNNKSWMESEFRVYSSANNCKFEYVSQPFLMDLEGKQGNFKNLREFVFKNIDGYFKIYSKHTPINLVRDLPQGFSALEPLVDLPIGINITRFQTLLALHRSYLTPGDSSSGWTAGAAAYYVGYLQPRTFLLKYNENGTITDAVDCALDPLSETKCTLKSFTVEKGIYQTSNFRVQPTESIVRFPNITNLCPFGEVFNATRFASVYAWNRKRISNCVADYSVLYNSASFSTFKCYGVSPTKLNDLCFTNVYADSFVIRGDEVRQIAPGQTGKIADYNYKLPDDFTGCVIAWNSNNLDSKVGGNYNYLYRLFRKSNLKPFERDISTEIYQAGSTPCNGVEGFNCYFPLQSYGFQPTNGVGYQPYRVVVLSFELLHAPATVCGPKKSTNLVKNKCVNFNFNGLTGTGVLTESNKKFLPFQQFGRDIADTTDAVRDPQTLEILDITPCSFGGVSVITPGTNTSNQVAVLYQDVNCTEVPVAIHADQLTPTWRVYSTGSNVFQTRAGCLIGAEHVNNSYECDIPIGAGICASYQTQTNSPSGAGSHHHHHHHHHH

SEQ ID NO: 4518 - protein, 715 aa, Artificial Sequence
  Description of Artificial Sequence: Synthetic polypeptide
MGILPSPGMPALLSLVSLLSVLLMGCVAETGTQCVNLTTRTQLPPAYTNSFTRGVYYPDKVFRSSVLHSTQDLFLPFFSNVTWFHAIHVSGTNGTKRFDNPVLPFNDGVYFASTEKSNIIRGWIFGTTLDSKTQSLLIVNNATNVVIKVCEFQFCNDPFLGVYYHKNNKSWMESEFRVYSSANNCTFEYVSQPFLMDLEGKQGNFKNLREFVFKNIDGYFKIYSKHTPINLVRDLPQGFSALEPLVDLPIGINITRFQTLLALHRSYLTPGDSSSGWTAGAAAYYVGYLQPRTFLLKYNENGTITDAVDCALDPLSETKCTLKSFTVEKGIYQTSNFRVQPTESIVRFPNITNLCPFGEVFNATRFASVYAWNRKRISNCVADYSVLYNSASFSTFKCYGVSPTKLNDLCFTNVYADSFVIRGDEVRQIAPGQTGKIADYNYKLPDDFTGCVIAWNSNNLDSKVGGNYNYLYRLFRKSNLKPFERDISTEIYQAGSTPCNGVEGFNCYFPLQSYGFQPTNGVGYQPYRVVVLSFELLHAPATVCGPKKSTNLVKNKCVNFNFNGLTGTGVLTESNKKFLPFQQFGRDIADTTDAVRDPQTLEILDITPCSFGGVSVITPGTNTSNQVAVLYQDVNCTEVPVAIHADQLTPTWRNYSTGSNVFQTRAGCLIGAEHVNNSYECDIPIGAGICASYQTQTNSPSGAGSHHHHHHHHHH

SEQ ID NO: 4519 - protein, 715 aa, Artificial Sequence
  Description of Artificial Sequence: Synthetic polypeptide
MGILPSPGMPALLSLVSLLSVLLMGCVAETGTQCVNLTTRTQLPPAYTNSFTRGVYYPDKVFRSSVLHSTQDLFLPFFSNVTWFHAIHVSGTNGTKRFDNPVLPFNDGVYFASTEKSNIIRGWIFGTTLDSKTQSLLIVNNATNVVIKVCEFQFCNDPFLGVYYHKNNKSWMESEFRVYSSANNCTFEYVSQPFLMDLEGKQGNFKNLREFVFKNIDGYFKIYSKHTPINLVRDLPQGFSALEPLVDLPIGINITRFQTILALHRSYLTPGDSSSGWTAGAAAYYVGYLQPRTFLLKYNENGTITDAVDCALDPLSETKCTLKSFTVEKGIYQTSNFRVQPTESIVRFPNITNLCPFGEVFNATRFASVYAWNRKRISNCVADYSVLYNSASFSTFKCYGVSPTKLNDLCFTNVYADSFVIRGDEVRQIAPGQTGKIADYNYKLPDDFTGCVIAWNSNNLDSKVGGNYNYLYRLFRKSNLKPFERDISTEIYQAGSTPCNGVEGFNCYFPLQSYGFQPTNGVGYQPYRVVVLSFELLHAPATVCGPKKSTNLVKNKCVNFNFNGLTGTGVLTESNKKFLPFQQFGRDIADTTDAVRDPQTLEILDITPCSFGGVSVITPGTNTSNQVAVLYQDVNCTEVPVAIHADQLTPTWRVYSTGSNVFQTRAGCLIGAEHVNNSYECDIPIGAGICASYQTQTNSPSGAGSHHHHHHHHHH

SEQ ID NO: 4520 - protein, 715 aa, Artificial Sequence
  Description of Artificial Sequence: Synthetic polypeptide
MGILPSPGMPALLSLVSLLSVLLMGCVAETGTQCVNLTTRTQLPPAYTNSFTRGVYYPDKVFRSSWLHSTQDLFLPFFSNVTWFHAIHVSGTNGTKRFDNPVLPFNDGVYFASTEKSNIIRGWIFGTTLDSKTQSLLIVNNATNVVIKVCEFQFCNDPFLGVYYHKNNKSWMESEFRVYSSANNCTFEYVSQPFLMDLEGKQGNFKNLREFVFKNIDGYFKIYSKHTPINLVRDLPQGFSALEPLVDLPIGINITRFQTLLALHRSYLTPGDSSSGWTAGAAAYYVGYLQPRTFLLKYNENGTITDAVDCALDPLSETKCTLKSFTVEKGIYQTSNFRVQPTESIVRFPNITNLCPFGEVFNATRFASVYAWNRKRISNCVADYSVLYNSASFSTFKCYGVSPTKLNDLCFTNVYADSFVIRGDEVRQIAPGQTGKIADYNYKLPDDFTGCVIAWNSNNLDSKVGGNYNYLYRLFRKSNLKPFERDISTEIYQAGSTPCNGVEGFNCYFPLQSYGFQPTNGVGYQPYRVVVLSFELLHAPATVCGPKKSTNLVKNKCVNFNFNGLTGTGVLTESNKKFLPFQQFGRDIADTTDAVRDPQTLEILDITPCSFGGVSVITPGTNTSNQVAVLYQDVNCTEVPVAIHADQLTPTWRVYSTGSNVFQTRAGCLIGAEHVNNSYECDIPIGAGICASYQTQTNSPSGAGSHHHHHHHHHH

SEQ ID NO: 4521 - protein, 715 aa, Artificial Sequence
  Description of Artificial Sequence: Synthetic polypeptide
MGILPSPGMPALLSLVSLLSVLLMGCVAETGTQCVNLTTRTQLPPAYTNSFTRGVYYPDKVFRSSVLHSTQDLFLPFFSNVTWFHAIHVSGTNGTKRFDNPVLPFNDGVYFASTEKDNIIRGWIFGTTLDSKTQSLLIVNNATNVVIKVCEFQFCNDPFLGVYYHKNNKSWMESEFRVYSSANNCTFEYVSQPFLMDLEGKQGNFKNLREFVFKNIDGYFKIYSKHTPINLVRDLPQGFSALEPLVDLPIGINITRFQTLLALHRSYLTPGDSSSGWTAGAAAYYVGYLQPRTFLLKYNENGTITDAVDCALDPLSETKCTLKSFTVEKGIYQTSNFRVQPTESIVRFPNITNLCPFGEVFNATRFASVYAWNRKRISNCVADYSVLYNSASFSTFKCYGVSPTKLNDLCFTNVYADSFVIRGDEVRQIAPGQTGKIADYNYKLPDDFTGCVIAWNSNNLDSKVGGNYNYLYRLFRKSNLKPFERDISTEIYQAGSTPCNGVEGFNCYFPLQSYGFQPTNGVGYQPYRVVVLSFELLHAPATVCGPKKSTNLVKNKCVNFNFNGLTGTGVLTESNKKFLPFQQFGRDIADTTDAVRDPQTLEILDITPCSFGGVSVITPGTNTSNQVAVLYQDVNCTEVPVAIHADQLTPTWRVYSTGSNVFQTRAGCLIGAEHVNNSYECDIPIGAGICASYQTQTNSPSGAGSHHHHHHHHHH

SEQ ID NO: 4522 - protein, 715 aa, Artificial Sequence
  Description of Artificial Sequence: Synthetic polypeptide
MGILPSPGMPALLSLVSLLSVLLMGCVAETGTQCVNLTTRTQLPPAYTNSFTRGVYYPDKVFRSSVLHSTQDLFLPFFSNVTWFHAIHVSGTNGTKRFDNPVLPFNDGVYFASTEKSNIIRGWIFGTTLDSKTQSLLIVNNATNVVIKVCEFQFCNDPFLGVYYHKNNKSWMESEFRVYSSANNCTFEYVSQPFLMDLEGKQGNFKNLREFVFKNIDGYFKIYSKHTPINLVRDLPQGFSALEPLVDLPIGINITRFQTLLALHRSYLTPGDSSSGWTAGAAAYYVGYLQPRTFLLKYNENGTITDAVDCALDPLSETKCTLKSFTVEKGIYQTSNFRVQPTESIVRFPNITNLCPFGEVFNATRFASVYAWNRKRISNCVADYSVLYNSASFSTFKCYGVSPTKLNDLCFTNVYADSFVIRGDEVRQIAPGQTGKIADYNYKLPDDFTGCVIAWNSNNLDSKVGGNYNYLYRLFRKSNLKPFERDISTEIYQAGSTPCNGVEGFNCYFPLQSYGFQPTNGVGYQPYRVVVLSFELLHAPATVCGPKKSTNLVKNKCVNFNFNGLTGTGVLTESNKKFLPFQQFGRDIADTTDAVRDPQTLEILDITPCSFGGVSVITPQTNTSNQVAVLYQDVNCTEVPVAIHADQLTPTWRVYNTGSNVFQTRAGCLVGFEHVNNSYECDIPVGAGICASYQTQRNSPSGAGSHHHHHHHHHH

SEQ ID NO: 4523 - protein, 715 aa, Artificial Sequence
  Description of Artificial Sequence: Synthetic polypeptide
MGILPSPGMPALLSLVSLLSVLLMGCVAETGTQCVNLTTRTQLPPAYTNSFTRGVYYPDKVFRSSVLHSTQDLFLPFFSNVTWFHAIHVSGTNGTKRFDNPVLPFNDGVYFASTEKSNIIRGWIFGTTLDSKTQSLLIVNNATNVVIKVCEFQFCNDPFLGVYYHKNNKSWMESEFRVYSSANNCTFEYVSQPFLMDLEGKQGNFKNLREFVFKNIDGYFKIYSKHTPINLVRDLPQGFSALEPLVDLPIGINITRFQTLLALHRSYLTPGDSSSGWTAGAAAYYVGYLQPRTFLLKYNENGTITDAVDCALDPLSETKCTLKSFTVEKGIYQTSNFRVQPTESIVRFPNITNLCPFGEVFNATRFASVYAWNRKRISNCVADYSVLYNSASFATFKCYGVSPTKLNDLCFTNVYADSFVIRGDEVRQIAPGQTGKIADYNYKLPDDFTGCVIAWNSNNLDSKVGGNYNYLYRLFRKSNLKPFERDISTEIYQAGSTPCNGVEGFNCYFPLQSYGFQPTNGVGYQPYRVVVLSFELLHAPATVCGPKKSTNLVKNKCVNFNFNGLTGTGVLTESNKKFLPFQQFGRDIADTTDAVRDPQTLEILDITPCSFGGVSVITPGTNTSNQVAVLYQDVNCTEVPVAIHADQLTPTWRVYSTGSNVFQTRAGCLIGAEHVNNSYECDIPIGAGICASYQTQTNSPSGAGSHHHHHHHHHH

SEQ ID NO: 4524 - protein, 715 aa, Artificial Sequence
  Description of Artificial Sequence: Synthetic polypeptide
MGILPSPGMPALLSLVSLLSVLLMGCVAETGTQCVNLTTRTQLPPAYTNSFTRGVYYPDKVFRSSVLHSTQDLFLPFFSNVTWFHAIHVSGTNGTKRFDNPVLPFNDGVYFASTEKSNIIRGWIFGTTLDSKTQSLLIVNNATNVVIKVCEFQFCNDPFLGVYYHKNNKSWMESEFRVYSSANNCTFEYVSQPFLTDLEGKQGNFKNLREFVFKNIDGYFKIYSKHTPINLVRDLPQGFSALEPLVDLPIGINITRFQTLLALHRSYLTPGDSSSGWTAGAAAYYVGYLQPRTFLLKYNENGTITDAVDCALDPLSETKCTLKSFTVEKGIYQTSNFRVQPTESIVRFPNITNLCPFGEVFNATRFASVYAWNRKRISNCVADYSVLYNSASFSTFKCYGVSPTKLNDLCFTNVYADSFVIRGDEVRQIAPGQTGKIADYNYKLPDDFTGCVIAWNSNNLDSKVGGNYNYLYRLFRKSNLKPFERDISTEIYQAGSTPCNGVEGFNCYFPLQSYGFQPTNGVGYQPYRVVVLSFELLHAPATVCGPKKSTNLVKNKCVNFNFNGLTGTGVLTESNKKFLPFQQFGRDIADTTDAVRDPQTLEILDITPCSFGGVSVITPGTNTSNQVAVLYQDVNCTEVPVAIHADQLTPTWRVYSTGSNVFQTRAGCLIGAEHVNNSYECDIPIGAGICASYQTQTNSPSGAGSHHHHHHHHHH

SEQ ID NO: 4525 - protein, 715 aa, Artificial Sequence
  Description of Artificial Sequence: Synthetic polypeptide
MGILPSPGMPALLSLVSLLSVLLMGCVAETGTQCVNLTTRTQLPPAYTNSFTRGVYYPDKVFRSSVLHSTQDLFLPFFSNVTWFHAIHVSGTNGTKRFDNPVLPFNDGVYFASTEKSNIIRGWIFGTTLDSKTQSLLIVNNATNVVIKVCEFQFCNDPFLGVYYHKNNKSWMESEFRVYSSANNCTFEYVSQPFLMDLEGKQGNFKNLREFVFKNIDGYFKIYSKHTPINLVRDLPQGFSALEPLVDLPIGINITRFQTLLALHRSYLTPGDSSSGWTAGAAAYYVGYLQPRTFLLKYNENGTITDAVDCALDPLSETKCTLKSFTVEKGIYQTSNFRVQPTESIVRFPNITNLCPFGEVFNATRFASVYAWNRKRISNCVADYSVLYNSASFSTFKCYGVSPTKLNDLCFTNVYADSFVIRGDEVRQIAPGQTGKIADYNYKLPDDFTGCVIAWNSNNLDSKVGGNYNYLYRLFRKSNLKPFERDISTEIYQAGSTPCNGVEGFNCYFPLQSYGFQPTNGVGYQPYRVVVLSFELLHAPATVCGPKKSTNLVKNKCVNFNFNGETGTGVLTESNKKFLPFQQFGRDIADTTDAVRDPQTLEILDITPCSFGGVSVITPGTNTSNQVAVLYQDVNCTEVPVAIHADQLTPTWRVYSTGSNVFQTRAGCLIGAEHVNNSYECDIPIGAGICASYQTQTNSPSGAGSHHHHHHHHHH

SEQ ID NO: 4526 - protein, 715 aa, Artificial Sequence
  Description of Artificial Sequence: Synthetic polypeptide
MGILPSPGMPALLSLVSLLSVLLMGCVAETGTQCVNLTTRTQLPPAYTNSFTRGVYYPDKVFRSSVLHSTQDLFLPFFSNVTWFHAIHVSGTNGTKRFDNPVLPFNDGVYFASTEKSNIIRGWIFGTTLDSKTQSLLIVNNATNVVIKVCEFQFCNDPFLGVYYHKNNKSWMESEFRVYSSANNCTFEYVSQPFLMDLEGKQGNFKNLREFVFKNIDGYFKIYSKHTPINLVRDLPQGFSALEPLVDLPIGINITRFQTLLALHRSYLTPGDSSSGWTAGAAAYYVGYLQPRTFLLKYNENGTITDAVDCALDPLSETKCTLKSFTVEKGIYQTSNFRVQPTESIVRFPNITNLCPFGEVFNATRFASVYAWNRKRISNCVADYSVLYNSASFSTFKCYGVSPTKLNDLCFTNVYADSFVIRGDEVRQIAPGQTGKIADYNYKLPDDFTGCVIAWNSNNLDSKVGGNYNYLYRLFRKSNLKPFERDISTEIYQAGSTPCNGVEGFNCYFPLQSYGFQPTNGVGYQPYRVVVLSFELLHAPATVCGPKKSTNLVKNKCVNFNFNGLTGTGVLTESNKKFLPFQQFGRDIADTTDAVRDPQTLEILDITPCSFGGVSVITPGTNTSNQVAVLYQDVNCTEVPVAIHADQLTPTWRVYSTGSNVFQTRAGCLIGFEHVNNSYECDIPIGAGICASYQTQTNSPSGAGSHHHHHHHHHH

SEQ ID NO: 4527 - protein, 715 aa, Artificial Sequence
  Description of Artificial Sequence: Synthetic polypeptide
MGILPSPGMPALLSLVSLLSVLLMGCVAETGTQCVNLTTRTQLPPAYTNSFTRGVYYPDKVFRSSVLHSTQDLFLPFFSNVTWFHAIHVSGTNGTKRFDNPVLPFNDGVYFASTEKSNIIRGWIFGTTLDSKTQSLLIVNNATNVVIKVCEFQFCNDPFLGVYYHKNNKSWMEEEFRVYSSANNCTFEYVSQPFLMDLEGKQGNFKNLREFVFKNIDGYFKIYSKHTPINLVRDLPQGFSALEPLVDLPIGINITRFQTLLALHRSYLTPGDSSSGWTAGAAAYYVGYLQPRTFLLKYNENGTITDAVDCALDPLSETKCTLKSFTVEKGIYQTSNFRVQPTESIVRFPNITNLCPFGEVFNATRFASVYAWNRKRISNCVADYSVLYNSASFSTFKCYGVSPTKLNDLCFTNVYADSFVIRGDEVRQIAPGQTGKIADYNYKLPDDFTGCVIAWNSNNLDSKVGGNYNYLYRLFRKSNLKPFERDISTEIYQAGSTPCNGVEGFNCYFPLQSYGFQPTNGVGYQPYRVVVLSFELLHAPATVCGPKKSTNLVKNKCVNFNFNGLTGTGVLTESNKKFLPFQQFGRDIADTTDAVRDPQTLEILDITPCSFGGVSVITPGTNTSNQVAVLYQDVNCTEVPVAIHADQLTPTWRVYSTGSNVFQTRAGCLIGAEHVNNSYECDIPIGAGICASYQTQTNSPSGAGSHHHHHHHHHH

SEQ ID NO: 4528 - protein, 715 aa, Artificial Sequence
  Description of Artificial Sequence: Synthetic polypeptide
MGILPSPGMPALLSLVSLLSVLLMGCVAETGTQCVNLTTRTQLPPAYTNSFTRGVYYPDKVFRSSVLHSTQDLFLPFFSNVTWFHAIHVSGTNGTKRFDNPVLPFNDGVYFASTEKSNIIRGWIFGTTLDSKTQSLLIVNNATNVVIKVCEFQFCNDPFLGVYYHKNNKSWMESEFRVYSSANNCTFEYVWQPFLMDLEGKQGNFKNLREFVFKNIDGYFKIYSKHTPINLVRDLPQGFSALEPLVDLPIGINITRFQTLLALHRSYLTPGDSSSGWTAGAAAYYVGYLQPRTFLLKYNENGTITDAVDCALDPLSETKCTLKSFTVEKGIYQTSNFRVQPTESIVRFPNITNLCPFGEVFNATRFASVYAWNRKRISNCVADYSVLYNSASFSTFKCYGVSPTKLNDLCFTNVYADSFVIRGDEVRQIAPGQTGKIADYNYKLPDDFTGCVIAWNSNNLDSKVGGNYNYLYRLFRKSNLKPFERDISTEIYQAGSTPCNGVEGFNCYFPLQSYGFQPTNGVGYQPYRVVVLSFELLHAPATVCGPKKSTNLVKNKCVNFNFNGLTGTGVLTESNKKFLPFQQFGRDIADTTDAVRDPQTLEILDITPCSFGGVSVITPGTNTSNQVAVLYQDVNCTEVPVAIHADQLTPTWRVYSTGSNVFQTRAGCLIGAEHVNNSYECDIPIGAGICASYQTQTNSPSGAGSHHHHHHHHHH

SEQ ID NO: 4529 - protein, 715 aa, Artificial Sequence
  Description of Artificial Sequence: Synthetic polypeptide
MGILPSPGMPALLSLVSLLSVLLMGCVAETGTQCVNLTTRTQLPPAYTNSFTRGVYYPDKVFRSSVLHSTQDLFLPFFSNVTWFHAIHVSGTNGTKRFDNPVLPFNDGVYFASTEKSNIIRGWIFGTTLDSKTQSLLIVNNATNVVIKVCEFQFCNDPFLGVYYHKNNKSWMESEFRVYSSANNCTFEYVSQPFLMDLEGKQGNFKNLREFVFKNIDGYFKIYSKHTPINLVRDLPQGFSPLEPLVDLPIGINITRFQTLLALHRSYLTPGDSSSGWTAGAAAYYVGYLQPRTFLLKYNENGTITDAVDCALDPLSETKCTLKSFTVEKGIYQTSNFRVQPTESIVRFPNITNLCPFGEVFNATRFASVYAWNRKRISNCVADYSVLYNSASFSTFKCYGVSPTKLNDLCFTNVYADSFVIRGDEVRQIAPGQTGKIADYNYKLPDDFTGCVIAWNSNNLDSKVGGNYNYLYRLFRKSNLKPFERDISTEIYQAGSTPCNGVEGFNCYFPLQSYGFQPTNGVGYQPYRVVVLSFELLHAPATVCGPKKSTNLVKNKCVNFNFNGLTGTGVLTESNKKFLPFQQFGRDIADTTDAVRDPQTLEILDITPCSFGGVSVITPGTNTSNQVAVLYQDVNCTEVPVAIHADQLTPTWRVYSTGSNVFQTRAGCLIGAEHVNNSYECDIPIGAGICASYQTQTNSPSGAGSHHHHHHHHHH

SEQ ID NO: 4530 - protein, 715 aa, Artificial Sequence
  Description of Artificial Sequence: Synthetic polypeptide
MGILPSPGMPALLSLVSLLSVLLMGCVAETGTQCVNLTTRTQLPPAYTNSFTRGVYYPDKVFRSSVLHSTQDLFLPFFSNVTWFHAIHVSGTNGTKRFDNPVLPFNDGVYFASTEKSNIIRGWIFGTTLDSKTQSLLIVNNATNVVIKVCEFQFCNDPFLGVYYHKNNKSWMESEFRVYSSANNCTFEYVSQPFLMDLEGKQGNFKNLREFVFKNIDGYFKIYSKHTPINLVRDLPQGFSALEPLVDLPIGINITRFQTLLALHRSYLTPGDSSSGETAGAAAYYVGYLQPRTFLLKYNENGTITDAVDCALDPLSETKCTLKSFTVEKGIYQTSNFRVQPTESIVRFPNITNLCPFGEVFNATRFASVYAWNRKRISNCVADYSVLYNSASFSTFKCYGVSPTKLNDLCFTNVYADSFVIRGDEVRQIAPGQTGKIADYNYKLPDDFTGCVIAWNSNNLDSKVGGNYNYLYRLFRKSNLKPFERDISTEIYQAGSTPCNGVEGFNCYFPLQSYGFQPTNGVGYQPYRVVVLSFELLHAPATVCGPKKSTNLVKNKCVNFNFNGLTGTGVLTESNKKFLPFQQFGRDIADTTDAVRDPQTLEILDITPCSFGGVSVITPGTNTSNQVAVLYQDVNCTEVPVAIHADQLTPTWRVYSTGSNVFQTRAGCLIGAEHVNNSYECDIPIGAGICASYQTQTNSPSGAGSHHHHHHHHHH

SEQ ID NO: 4531 - protein, 715 aa, Artificial Sequence
  Description of Artificial Sequence: Synthetic polypeptide
MGILPSPGMPALLSLVSLLSVLLMGCVAETGTQCVNLTTRTQLPPAYTNSFTRGVYYPDKVFRSSVLHSTQDLFLPFFSNVTWFHAIHVSGTNGTKRFDNPVLPFNDGVYFASTEKSNIIRGWIFGTTLDSKTQSLLIVNNATNVVIKVCEFQFCNDPFLGVYYHKNNKSWMESEFRVYSSANNCTFEYVSQPFLMDLEGKQGNFKNLREFVFKNIDGYFKIYSKHTPINLVRDLPQGFSALEPLVDLPIGINITRFQTLLALHRSYLTPGDSSSGWTAGAAAYYVGYLQPRTFLLKYNENGTITDAVDCALDPLSETKCTLKSFTVEKGIYQTSNFRVQPTESIVRFPNITNLCPFGEVFNATRFASVYAWNRKRISNCVADYSVLYNSASFSTFKCYGVSPTKLNDLCFTNVYADSFVIRGDEVRQIAPGQTGKIADYNYKLPDDFTGCVIAWNSNNLDSKVGGNYNYLYRLFRKSNLKPFERDISTEIYQAGSTPCNGVEGFNCYFPLQSYGFQPTNGVGYQPYRVVVLSFELLHAPATVCGPKKSTNLVKNKCVNFNFNGLTGTGVLTESNKKFLPFQQFGRDIADTLDAVRDPQTLEILDITPCSFGGVSVITPGTNTSNQVAVLYQDVNCTEVPVAIHADQLTPTWRVYSTGSNVFQTRAGCLIGAEHVNNSYECDIPIGAGICASYQTQTNSPSGAGSHHHHHHHHHH

SEQ ID NO: 4532 - protein, 715 aa, Artificial Sequence
  Description of Artificial Sequence: Synthetic polypeptide
MGILPSPGMPALLSLVSLLSVLLMGCVAETGTQCVNLTTRTQLPPAYTNSFTRGVYYPDKVFRSSVLHSTQDLFLPFFSNVTWFHAIHVSGTNGTKRFDNPVLPFNDGVYFASTEKSNIIRGWIFGTTLDSKTQSLLIVNNATNVVIKVCEFQFCNDPFLGVYYHKNNKSWMESEFRVYSSANNCTFEYVSQPFLMDLEGKQGNFKNLREFVFKNIDGYFKIYSKHTPINLVRDLPQGFSALEPLVDLPIGINITRFQTLLALHRSYLTPGDSSSGWTAGAAAYYVGYLQPRTFLLKYNENGTITDAVDCALDPLSETKCTLKSFTVEKGIYQTSNFRVQPTESIVRFPNITNLCPFGEVFNATRFASVYAWNRKRISNCVADYSVLYNSASFSTFKCYGVSPTKLNDLCFTNVYADSFVIRGDEVRQIAPGQTGKIADYNYKLPDDFTGCVIAWNSNNLDSKVGGNYNYLYRLFRKSNLKPFERDISTEIYQAGSTPCNGVEGFNCYFPLQSYGFQPTNGVGYQPYRVVVLSFELLHAPATVCGPKKSTNLVKNKCVNFNFNGLTGTGVLTESNKKFLPFQQFGRDIADTTDAVRDPQTLEIIDITPCSFGGVSVITPGTNTSNQVAVLYQDVNCTEVPVAIHADQLTPTWRVYSTGSNVFQTRAGCLIGAEHVNNSYECDIPIGAGICASYQTQTNSPSGAGSHHHHHHHHHH

SEQ ID NO: 4533 - protein, 715 aa, Artificial Sequence
  Description of Artificial Sequence: Synthetic polypeptide
MGILPSPGMPALLSLVSLLSVLLMGCVAETGTQCVNLTTRTQLPPAYTNSFTRGVYYPDKVFRSSVLHSTQDLFLPFFSNVTWFHAYHVSGTNGTKRFDNPVLPFNDGVYFASTEKSNIIRGWIFGTTLDSKTQSLLIVNNATNVVIKVCEFQFCNDPFLGVYYHKNNKSWMESEFRVYSSANNCTFEYVSQPFLMDLEGKQGNFKNLREFVFKNIDGYFKIYSKHTPINLVRDLPQGFSALEPLVDLPIGINITRFQTLLALHRSYLTPGDSSSGETAGAAAYYVGYLQPRTFLLKYNENGTITDAVDCALDPLSETKCTLKSFTVEKGIYQTSNFRVQPTESIVRFPNITNKCPFGEVFNATRFASVYAWNRKRISNCVADYSVLYNSASFSTFKCYGVSPTKLNDLCFTNVYADSFVIRGDEVRQIAPGQTGKIADYNYKLPDDFTGCVIAWNSNNLDSKVGGNYNYLYRLFRKSNLKPFERDISTEIYQAGSTPCNGVEGFNCYFPLQSYGFQPTNGPGQQPYRVVVLSFELLHAPATVCGPKKSTNLVKNKCVNFNFNGLTGTGVLTESNKKFLPFQQFGRDIADTTDAVRDPQTLEILDITPCSFGGVSVITPGTNTSNQVAVLYQDVNCTEVPDAIHADQLTPTWRVYSTGSNVFQTRAGCLIGAEHVNNSYECDIPIGAGICASYQTQTNSPSGAGSHHHHHHHHHH

SEQ ID NO: 4534 - protein, 715 aa, Artificial Sequence
  Description of Artificial Sequence: Synthetic polypeptide
MGILPSPGMPALLSLVSLLSVLLMGCVAETGTQCVNLTTRTQLPPAYTNSFTRGVYYPDKVFRSSVLHSTQDLFLPFFSNVTWFHAEHVSGTNGTKRFDNPVLPFNDGVYFASTEKSNIIRGWIFGTTLDSKTQSLLIVNNATNVVIKVCEFQFCNDPFLGVYYHKNNKSWMESEFRVYSSANNCTFEYHSQPFLMDLEGKQGNFKNLREFVFKNIDGYFKIYSKHTPINLVRDLPQGFSALEPLVDLPIGINITRFQTLLALHRSYLTPGDSSSGETAGAAAYYVGYLQPRTFLLKYNENGTITDAVDCALDPLSETKCTLKSFTVEKGIYQTSNFRVQPTESIVRFPNITNKCPFGEVFNATRFASVYAWNRKRISNCVADYSVLYNSASFSTFKCYGVSPTKLNDLCFTNVYADSFVIRGDEVRQIAPGQTGKIADYNYKLPDDFTGCVIAWNSNNLDSKVGGNYNYLYRLFRKSNLKPFERDISTEIYQAGSTPCNGVEGFNCYFPLQSYGFQPTNGVGQQPYRVVVLSFELLHAPATVCGPKKSTNLVKNKCVNFNFNGLTGTGVLTESNKKFLPFQQFGRDIADTTDAVRDPQTLEILDITPCSFGGVSVITPGTNTSNQVAVLYQDVNCTEVPDAIHADQLTPTWRVYSTGSNVFQTRAGCLIGAEHVNNSYECDIPIGAGICASYQTQTNSPSGAGSHHHHHHHHHH

SEQ ID NO: 4535 - protein, 715 aa, Artificial Sequence
  Description of Artificial Sequence: Synthetic polypeptide
MGILPSPGMPALLSLVSLLSVLLMGCVAETGTQCVNLTTRTQLPPAYTNSFTRGVYYPDKVFRSSVLHSTQDLFLPFFSNVTWFHAIHVSGTNGTKRFDNPVLPFNDGVYFASTEKSNIIRGWIFGTTLDSKTQSLLIVNNATNVVIKVCEFQFCNDPFLGVYYHKNNKSWMESEFRVYSSANNCTFEYVSQPFLMDLEGKQGNFKNLREFVFKNIDGYFKIYSKHTPINLVRDLPQGFSALEPLVDLPIGINITRFQTLLALHRSYLTPGDSSSGWTAGAAAYYVGYLQPRTFLLKYNENGTITDAVDCALDPLSETKCTLKSFTVEKGIYQTSNFRVQPTFSIVRFPNITNLCPFGEVFNATRFASVYAWNRKRISNCVADYSVLYNSASFSTFKCYGVSPTKLNDLCFTNVYADSFVIRGDEVRQIAPGQTGKIADYNYKLPDDFTGCVIAWNSNNLDSKVGGNYNYLYRLFRKSNLKPFERDISTEIYQAGSTPCNGVEGFNCYFPLQSYGFQPTNGVGYQPYRVVVLSFELLHAPATVCGPKKSTNLVKNKCVNFNFNGLTGTGVLTESNKKFLPFQQFGRDIADTTDAVRDPQTLEILDITPCSFGGVSVITPGTNTSNQVAVLYQDVNCTEVPVAIHADQLTPTWRVYSTGSNVFQTRAGCLIGAEHVNNSYECDIPIGAGICASYQTQTNSPSGAGSHHHHHHHHHH

SEQ ID NO: 4536 - protein, 715 aa, Artificial Sequence
  Description of Artificial Sequence: Synthetic polypeptide
MGILPSPGMPALLSLVSLLSVLLMGCVAETGTQCVNLTTRTQLPPAYTNSFTRGVYYPDKVFRSSVLHSTQDLFLPFFSNVTWFHAKHVSGTNGTKRFDNPVLPFNDGVYFASTEKSNIIRGWIFGTTLDSKTQSLLIVNNATNVVIKVCEFQFCNDPFLGVYYHKNNKSWMESEFRVYSSANNCTFEYHSQPFLMDLEGKQGNFKNLREFVFKNIDGYFKIYSKHTPINLVRDLPQGFSALEPLVDLPIGINITRFQTLLALHRSYLTPGDSSSGETAGAAAYYVGYLQPRTFLLKYNENGTITDAVDCALDPLSETKCTLKSFTVEKGIYQTSNFRVQPTESIVRFPNITNKCPFGEVFNATRFASVYAWNRKRISNCVADYSVLYNSASFSTFKCYGVSPTKLNDLCFTNVYADSFVIRGDEVRQIAPGQTGKIADYNYKLPDDFTGCVIAWNSNNLDSKVGGNYNYLYRLFRKSNLKPFERDISTEIYQAGSTPCNGVEGFNCYFPLQSYGFQPTNGPGYQPYRVVVLSFELLHAPATVCGPKKSTNLVKNKCVNFNFNGLTGTGVLTESNKKFLPFQQFGRDIADTTDAVRDPQTLEILDITPCSFGGVSVITPGTNTSNQVAVLYQDVNCTEVPDAIHADQLTPTWRVYSTGSNVFQTRAGCLIGAEHVNNSYECDIPIGAGICASYQTQTNSPSGAGSHHHHHHHHHH

SEQ ID NO: 4537 - protein, 715 aa, Artificial Sequence
  Description of Artificial Sequence: Synthetic polypeptide
MGILPSPGMPALLSLVSLLSVLLMGCVAETGTQCVNLTTRTQLPPAYTNSFTRGVYYPDKVFRSSVLHSTQDLFLPFFSNVTWFHAIHVSGTNGTKRFDNPVLPFNDGVYFASTEKSNIIRGWIFGTTLDSKTQSLLIVNNATNVVIKVCEFQFCNDPFLGVYYHKNNKSWMESEFRVYSSANNCTFEYVSQPFLMDLEGKQGNFKNLREFVFKNIDGYFKIYSKHTPINLVRDLPQGFSALEPLVDLPIGINITRFQTLLALHRSYLTPGDSSSGWTAGAAAYYVGYLQPRTFLLKYNENGTITDAVDCALDPLSETKCTLKSFTVEKGIYQTSNFRVQPTESIVRFPNITNLCPFGEVFNATRFASVYAWNRKRISNCVADYSVLYNSASFSTFKCYGVSPTKLNDLCFTNVYADSFVIRGDEVRQIAPGQTGKIADYNYKLPDDFTGCVIAWNSNNLDSKVGGNYNYLYRLFRKSNLKPFERDISTEIYQAGSTPCNGVEGFNCYFPLQSYGFQPTNGVGYQPYRVVVLEFELLHAPATVCGPKKSTNLVKNKCVNFNFNGLTGTGVLTESNKKFLPFQQFGRDIADTTDAVRDPQTLEILDITPCSFGGVSVITPGTNTSNQVAVLYQDVNCTEVPVAIHADQLTPTWRVYSTGSNVFQTRAGCLIGAEHVNNSYECDIPIGAGICASYQTQTNSPSGAGSHHHHHHHHHH

SEQ ID NO: 4538 - protein, 715 aa, Artificial Sequence
  Description of Artificial Sequence: Synthetic polypeptide
MGILPSPGMPALLSLVSLLSVLLMGCVAETGTQCVNLTTRTQLPPAYTNSFTRGVYYPDKVFRSSVLHSTQDLFLPFFSNVTWFHAEHVSGTNGTKRFDNPVLPFNDGVYFASTEKSNIIRGWIFGTTLDSKTQSLLIVNNATNVVIKVCEFQFCNDPFLGVYYHKNNKSWMESEFRVYSSANNCTFEYHSQPFLMDLEGKQGNFKNLREFVFKNIDGYFKIYSKHTPINLVRDLPQGFSALEPLVDLPIGINITRFQTLLALHRSYLTPGDSSSGETAGAAAYYVGYLQPRTFLLKYNENGTITDAVDCALDPLSETKCTLKSFTVEKGIYQTSNFRVQPTESIVRFPNITNPCPFGEVFNATRFASVYAWNRKRISNCVADYSVLYNSASFSTFKCYGVSPTKLNDLCFTNVYADSFVIRGDEVRQIAPGQTGKIADYNYKLPDDFTGCVIAWNSNNLDSKVGGNYNYLYRLFRKSNLKPFERDISTEIYQAGSTPCNGVEGFNCYFPLQSYGFQPTNGVGQQPYRVVVLSFELLHAPATVCGPKKSTNLVKNKCVNFNFNGLTGTGVLTESNKKFLPFQQFGRDIADTTDAVRDPQTLEILDITPCSFGGVSVITPGTNTSNQVAVLYQDVNCTEVPDAIHADQLTPTWRVYSTGSNVFQTRAGCLIGAEHVNNSYECDIPIGAGICASYQTQTNSPSGAGSHHHHHHHHHH

SEQ ID NO: 4539 - protein, 715 aa, Artificial Sequence
  Description of Artificial Sequence: Synthetic polypeptide
MGILPSPGMPALLSLVSLLSVLLMGCVAETGTQCVNLTTRTQLPPAYTNSFTRGVYYPDKVFRSSVLHSTQDLFLPFFSNVTWFHAIHVSGTNGTKRFDNPVLPFNDGVYFASTEKSNIIRGWIFGTTLDSKTQSLLIVNNATNVVIKVCEFQFCNDPFLGVYYHKNNKSWMESEFRVYSSANNCTFEYVSQPFLMDLEGKQGNFKNLREFVFKNIDGYFKIYSKHTPINLVRDLPQGFSALEPLVDLPIGINITRFQTLLALHRSYLTPGDSSSGWTAGAAAYYVGYLQPRTFLLKYNENGTITDAVDCALDPLSETKCTLKSFTVEKGIYQTSNFRVQPTESIVRFPNITNLCPFGEVFNATRFASVYAWRRKRISNCVADYSVLYNSASFSTFKCYGVSPTKLNDLCFTNVYADSFVIRGDEVRQIAPGQTGKIADYNYKLPDDFTGCVIAWNSNNLDSKVGGNYNYLYRLFRKSNLKPFERDISTEIYQAGSTPCNGVEGFNCYFPLQSYGFQPTNGVGYQPYRVVVLSFELLHAPATVCGPKKSTNLVKNKCVNFNFNGLTGTGVLTESNKKFLPFQQFGRDIADTTDAVRDPQTLEILDITPCSFGGVSVITPGTNTSNQVAVLYQDVNCTEVPVAIHADQLTPTWRVYSTGSNVFQTRAGCLIGAEHVNNSYECDIPIGAGICASYQTQTNSPSGAGSHHHHHHHHHH

SEQ ID NO: 4540 - protein, 715 aa, Artificial Sequence
  Description of Artificial Sequence: Synthetic polypeptide
MGILPSPGMPALLSLVSLLSVLLMGCVAETGTQCVNLTTRTQLPPAYTNSFTRGVYYPDKVFRSSVLHSTQDLFLPFFSNVTWFHAYHVSGTNGTKRFDNPVLPFNDGVYFASTEKSNIIRGWIFGTTLDSKTQSLLIVNNATNVVIKVCEFQFCNDPFLGVYYHKNNKSWMESEFRVYSSANNCTFEYVSQPFLMDLEGKQGNFKNLREFVFKNIDGYFKIYSKHTPINLVRDLPQGFSALEPLVDLPIGINITRFQTLLALHRSYLTPGDSSSGETAGAAAYYVGYLQPRTFLLKYNENGTITDAVDCALDPLSETKCTLKSFTVEKGIYQTSNFRVQPTESIVRFPNITNHCPFGEVFNATRFASVYAWNRKRISNCVADYSVLYNSASFSTFKCYGVSPTKLNDLCFTNVYADSFVIRGDEVRQIAPGQTGKIADYNYKLPDDFTGCVIAWNSNNLDSKVGGNYNYLYRLFRKSNLKPFERDISTEIYQAGSTPCNGVEGFNCYFPLQSYGFQPTNGPGQQPYRVVVLSFELLHAPATVCGPKKSTNLVKNKCVNFNFNGLTGTGVLTESNKKFLPFQQFGRDIADTTDAVRDPQTLEILDITPCSFGGVSVITPGTNTSNQVAVLYQDVNCTEVPDAIHADQLTPTWRVYSTGSNVFQTRAGCLIGAEHVNNSYECDIPIGAGICASYQTQTNSPSGAGSHHHHHHHHHH

SEQ ID NO: 4541 - protein, 715 aa, Artificial Sequence
  Description of Artificial Sequence: Synthetic polypeptide
MGILPSPGMPALLSLVSLLSVLLMGCVAETGTQCVNLTTRTQLPPAYTNSFTRGVYYPDKVFRSSVLHSTQDLFLPFFSNVTWFHALHVSGTNGTKRFDNPVLPFNDGVYFASTEKSNIIRGWIFGTTLDSKTQSLLIVNNATNVVIKVCEFQFCNDPFLGVYYHKNNKSWMESEFRVYSSANNCTFEYVSQPFLMDLEGKQGNFKNLREFVFKNIDGYFKIYSKHTPINLVRDLPQGFSALEPLVDLPIGINITRFQTLLALHRSYLTPGDSSSGWTAGAAAYYVGYLQPRTFLLKYNENGTITDAVDCALDPLSETKCTLKSFTVEKGIYQTSNFRVQPTESIVRFPNITNLCPFGEVFNATRFASVYAWNRKRISNCVADYSVLYNSASFSTFKCYGVSPTKLNDLCFTNVYADSFVIRGDEVRQIAPGQTGKIADYNYKLPDDFTGCVIAWNSNNLDSKVGGNYNYLYRLFRKSNLKPFERDISTEIYQAGSTPCNGVEGFNCYFPLQSYGFQPTNGVGYQPYRVVVLSFELLHAPATVCGPKKSTNLVKNKCVNFNFNGLTGTGVLTESNKKFLPFQQFGRDIADTTDAVRDPQTLEILDITPCSFGGVSVITPGTNTSNQVAVLYQDVNCTEVPVAIHADQLTPTWRVYSTGSNVFQTRAGCLIGAEHVNNSYECDIPIGAGICASYQTQTNSPSGAGSHHHHHHHHHH

SEQ ID NO: 4542 - protein, 715 aa, Artificial Sequence
  Description of Artificial Sequence: Synthetic polypeptide
MGILPSPGMPALLSLVSLLSVLLMGCVAETGTQCVNLTTRTQLPPAYTNSFTRGVYYPDKVFRSSVLHSTQDLFLPFFSNVTWFHAIHVSGTNGTKRFDNPVLPFNDGVYFASTEKSNIIRGWIFGITLDSKTQSLLIVNNATNVVIKVCEFQFCNDPFLGVYYHKNNKSWMESEFRVYSSANNCTFEYVSQPFLMDLEGKQGNFKNLREFVFKNIDGYFKIYSKHTPINLVRDLPQGFSALEPLVDLPIGINITRFQTLLALHRSYLTPGDSSSGWTAGAAAYYVGYLQPRTFLLKYNENGTITDAVDCALDPLSETKCTLKSFTVEKGIYQTSNFRVQPTESIVRFPNITNLCPFGEVFNATRFASVYAWNRKRISNCVADYSVLYNSASFSTFKCYGVSPTKLNDLCFTNVYADSFVIRGDEVRQIAPGQTGKIADYNYKLPDDFTGCVIAWNSNNLDSKVGGNYNYLYRLFRKSNLKPFERDISTEIYQAGSTPCNGVEGFNCYFPLQSYGFQPTNGVGYQPYRVVVLSFELLHAPATVCGPKKSTNLVKNKCVNFNFNGLTGTGVLTESNKKFLPFQQFGRDIADTTDAVRDPQTLEILDITPCSFGGVSVITPGTNTSNQVAVLYQDVNCTEVPVAIHADQLTPTWRVYSTGSNVFQTRAGCLIGAEHVNNSYECDIPIGAGICASYQTQTNSPSGAGSHHHHHHHHHH

SEQ ID NO: 4543 - protein, 715 aa, Artificial Sequence
  Description of Artificial Sequence: Synthetic polypeptide
MGILPSPGMPALLSLVSLLSVLLMGCVAETGTQCVNLTTRTQLPPAYTNSFTRGVYYPDKVFRSSVLHSTQDLFLPFFSNVTWFHAIHVSGTNGTKRFDNPVLPFNDGVYFASTEKSNIIRGWIFGTTLDSKTQSLLIVNNATNVVIKVCEFQFCNDPFLGVYYHKNNKSWMESEFRVYSSANNCTFEYVSQPFLMDLEGKQGNFKNLREFVFKNIDGYFKIYSKHTPINLVRDLPQGFSALEPLVDLPIGINITRFQTLLALHRSYLTPGDSSSGWTAGAAAYYVGYLQPRTFLLKYNENGTITDAVDCALDPLSETKCTLKSFTVEKGIYQTSNFRVQPTESIVRFPNITNLCPLGEVFNATRFASSYAWNRKRISNCVADYSVLYNSASFSTFKCYGVSPTKLNDLCFTNVYADRFVIRGDEVRQIAPGQTGKIADYNYKLPDDFTGCVIAWNSNNLDAKVGGNYNYLYRLFRKSNLKPFERFISTEIYQAGSTPSNGVEGFNCYFPLQSYGFQPTNGVTYQPYRVVVLSFELLHAPHTVCGPKKSTNLVKNKCVNFNFNGLTGTGVLTESNKKFLPFQQFGRDIADTTDAVRDPQTLEILDITPCSFGGVSVITPGTNTSNQVAVLYQDVNCTEVPVAIHADQLTPTWRVYSTGSNVFQTRAGCLIGAEHVNNSYECDIPIGAGICASYQTQTNSPSGAGSHHHHHHHHHH

SEQ ID NO: 4544 - protein, 715 aa, Artificial Sequence
  Description of Artificial Sequence: Synthetic polypeptide
MGILPSPGMPALLSLVSLLSVLLMGCVAETGTQCVNLTTRTQLPPAYTNSFTRGVYYPDKVFRSSVLHSTQDLFLPFFSNVTWFHAIHVSGTNGTKRFDNPVLPFNDGVYFASTEKSNIIRGWIFGTTLDSKTQSLLIVNNATNVVIKVCEFQFCNDPFLGVYYHKNNKSWMESEFRVYSSANNCTFEYVSQPFLMDLEGKQGNFKNLREFVFKNIDGYFKIYSKHTPINLVRDLPQGFSALEPLVDLPIGINITRFQTLLALHRSYLTPGDSSSGWTAGAAAYYVGYLQPRTFLLKYNENGTITDAVDCALDPLSETKCTLKSFTVEKGIYQTSNFRVQPTESIVRFPNITNLCPFGEVFNATRFASVYAWNRKRISNCVADYSVLYNSASFTTFKCYGVSPTKLNDLCFTNVYADSFVIRGDEVRQIAPGQTGKIADYNYKLPDDFTGCVIAWNSNNLDSKVGGNYNYLYRLFRKSNLKPFERDISTEIYQAGSTPCNGVEGFNCYFPLQSYGFQPTNGVGYQPYRVVVLSFELLHAPATVCGPKKSTNLVKNKCVNFNFNGLTGTGVLTESNKKFLPFQQFGRDIADTTDAVRDPQTLEILDITPCSFGGVSVITPGTNTSNQVAVLYQDVNCTEVPVAIHADQLTPTWRVYSTGSNVFQTRAGCLIGAEHVNNSYECDIPIGAGICASYQTQTNSPSGAGSHHHHHHHHHH

SEQ ID NO: 4545 - protein, 715 aa, Artificial Sequence
  Description of Artificial Sequence: Synthetic polypeptide
MGILPSPGMPALLSLVSLLSVLLMGCVAETGTQCVNLTTRTQLPPAYTNSFTRGVYYPDKVFRSSVLHSTQDLFLPFFSNVTWFHAIHVSGTNGTKRFDNPVLPFNDGVYFASTEKSNIIRGWIFGTTLDSKTQSLLIVNNATNVVIKVCEFQFCNDPFLGVYYHKNNKSWMESEFRVYSSANNCTFEYVSQPFLMDLEGKQGNFKNLREFVFKNIDGYFKIYSKHTPINLVRDLPQGFSALEPRVDLPIGINITRFQTLLALHRSYLTPGDSSSGWTAGAAAYYVGYLQPRTFLLKYNENGTITDAVDCALDPLSETKCTLKSFTVEKGIYQTSNFRVQPTESIVRFPNITNLCPFGEVFNATRFASVYAWNRKRISNCVADYSVLYNSASFSTFKCYGVSPTKLNDLCFTNVYADSFVIRGDEVRQIAPGQTGKIADYNYKLPDDFTGCVIAWNSNNLDSKVGGNYNYLYRLFRKSNLKPFERDISTEIYQAGSTPCNGVEGFNCYFPLQSYGFQPTNGVGYQPYRVVVLSFELLHAPATVCGPKKSTNLVKNKCVNFNFNGLTGTGVLTESNKKFLPFQQFGRDIADTTDAVRDPQTLEILDITPCSFGGVSVITPGTNTSNQVAVLYQDVNCTEVPVAIHADQLTPTWRVYSTGSNVFQTRAGCLIGAEHVNNSYECDIPIGAGICASYQTQTNSPSGAGSHHHHHHHHHH

SEQ ID NO: 4546 - protein, 715 aa, Artificial Sequence
  Description of Artificial Sequence: Synthetic polypeptide
MGILPSPGMPALLSLVSLLSVLLMGCVAETGTQCVNLTTRTQLPPAYTNSFTRGVYYPDKVFRSSVLHSTQDLFLPFFSNVTWFHAIHVSGTNGTKRFDNPVLPFNDGVYFASTEKSNIIRGWIFGTTLDSKTQSLLIVNNATNVVIKVCEFQFCNDPFLGVYYHKNNKSWMESEFRVYSSANNCTFEYVSQPFLMDLEGKQGNFKNLREFVFKNIDGYFKIYSKHTPINLVRDLPQGFSALEPLVDLPIGINITRFQTLLALHRSYLTPGDSSSGWTAGAAAYYVGYLQPRTFLLKYNENGTITDAVDCALDPLSETKCTLKSFTVEKGIYQTSNFRVQPTESIVRFPNITNLCPFGEVFNATRFASVYAWNRKRISNCVADYSVLYNSASFSTFKCYGVSPTKLNDLCFTNVYADSFVIRGDEVRQIAPGQTGKIADYNYKLPDDFTGCVIAWNSNNLDSKVGGNYNYLYRLFRKSNLKPFERDISTEIYQAGKTPCNGVEGFNCYFPLQSYGFQPTNGVGYQPYRVVVLSFELLHAPATVCGPKKSTNLVKNKCVNFNFNGLTGTGVLTESNKKFLPFQQFGRDIADTTDAVRDPQTLEILDITPCSFGGVSVITPGTNTSNQVAVLYQDVNCTEVPVAIHADQLTPTWRVYSTGSNVFQTRAGCLIGAEHVNNSYECDIPIGAGICASYQTQTNSPSGAGSHHHHHHHHHH

SEQ ID NO: 4547 - protein, 715 aa, Artificial Sequence
  Description of Artificial Sequence: Synthetic polypeptide
MGILPSPGMPALLSLVSLLSVLLMGCVAETGTQCVNLTTRTQLPPAYTNSFTRGVYYPDKVFRSSVLHSTQDLFLPFFSNVTWFHAIHVSGTNGTKRFDNPVLPFNDGVYFASTEKSNIIRGWIFGTTLDSKTQSLLIVNNATNVVIKVCEFQFCNDPFLGVYYLKNNKSWMESEFRVYSSANNCTFEYVSQPFLMDLEGKQGNFKNLREFVFKNIDGYFKIYSKHTPINLVRDLPQGFSALEPLVDLPIGINITRFQTLLALHRSYLTPGDSSSGWTAGAAAYYVGYLQPRTFLLKYNENGTITDAVDCALDPLSETKCTLKSFTVEKGIYQTSNFRVQPTESIVRFPNITNLCPFGEVFNATRFASVYAWNRKRISNCVADYSVLYNSASFSTFKCYGVSPTKLNDLCFTNVYADSFVIRGDEVRQIAPGQTGKIADYNYKLPDDFTGCVIAWNSNNLDSKVGGNYNYLYRLFRKSNLKPFERDISTEIYQAGSTPCNGVEGFNCYFPLQSYGFQPTNGVGYQPYRVVVLSFELLHAPATVCGPKKSTNLVKNKCVNFNFNGLTGTGVLTESNKKFLPFQQFGRDIADTTDAVRDPQTLEILDITPCSFGGVSVITPGTNTSNQVAVLYQDVNCTEVPVAIHADQLTPTWRVYSTGSNVFQTRAGCLIGAEHVNNSYECDIPIGAGICASYQTQTNSPSGAGSHHHHHHHHHH

SEQ ID NO: 4548 - protein, 715 aa, Artificial Sequence
  Description of Artificial Sequence: Synthetic polypeptide
MGILPSPGMPALLSLVSLLSVLLMGCVAETGTQCVNLTTRTQLPPAYTNSFTRGVYYPDKVFRSSVLHSTQDLFLPFFSNVTWFHAEHVSGTNGTKRFDNPVLPFNDGVYFASTEKSNIIRGWIFGTTLDSKTQSLLIVNNATNVVIKVCEFQFCNDPFLGVYYHKNNKSWMESEFRVYSSANNCTFEYHSQPFLMDLEGKQGNFKNLREFVFKNIDGYFKIYSKHTPINLVRDLPQGFSALEPLVDLPIGINITRFQTLLALHRSYLTPGDSSSGETAGAAAYYVGYLQPRTFLLKYNENGTITDAVDCALDPLSETKCTLKSFTVEKGIYQTSNFRVQPTESIVRFPNITNLCPFGEVFNATRFASVYAWNRKRISNCVADYSVLYNSASFSTFKCYGVSPTKLNDLCFTNVYADSFVIRGDEVRQIAPGQTGKIADYNYKLPDDFTGCVIAWNSNNLDSKVGGNYNYLYRLFRKSNLKPFERDISTEIYQAGSTPCNGVEGFNCYFPLQSYGFQPTNGPGQQPYRVVVLSFELLHAPATVCGPKKSTNLVKNKCVNFNFNGLTGTGVLTESNKKFLPFQQFGRDIADTTDAVRDPQTLEILDITPCSFGGVSVITPGTNTSNQVAVLYQDVNCTEVPDAIHADQLTPTWRVYSTGSNVFQTRAGCLIGAEHVNNSYECDIPIGAGICASYQTQTNSPSGAGSHHHHHHHHHH

SEQ ID NO: 4549 - protein, 715 aa, Artificial Sequence
  Description of Artificial Sequence: Synthetic polypeptide
MGILPSPGMPALLSLVSLLSVLLMGCVAETGTQCVNLTTRTQLPPAYTNSFTRGVYYPDKVFRSSVLHSTQDLFLPFFSNVTWFHAIHVSGTNGTKRFDNPVLPFNDGVYFASTEKSNIIRGWIFGTTLDSKTQSLLIVNNATNVVIKVCEFQFCNDPFLGVYYHKNNKSWMESEFRVYSSANNCTFEYVSQPFLMDLEGKQGNFKNLREFVFKNIDGYFKIYSKHTPINLVRDLPQGFSALEPLVDLPIGINITRFQTLLALHRSYLTPGDSSSGWTAGAAAYYVGYLQPRTFLLKYNENGTITDAVDCALDPLSETKCTLKSFTVEKGIYQTSNFRVQPTESIVRFPNITNLCPFGEVFNATRFASSYAWNRKRISNCVADYSVLYNSASFSTFKCYGVSPTKLNDLCFTNVYADRFVIRGDEVRQIAPGQTGKIADYNYKLPDDFTGCVIAWNSNNLDAKVGGNYNYLYRLFRKSNLKPFERFISTEIYQAGSTPANGVEGFNCYFPLQSYGFQPTNGVTYQPYRVVVLSFELLHAPHTVCGPKKSTNLVKNKCVNFNFNGLTGTGVLTESNKKFLPFQQFGRDIADTTDAVRDPQTLEILDITPCSFGGVSVITPGTNTSNQVAVLYQDVNCTEVPVAIHADQLTPTWRVYSTGSNVFQTRAGCLIGAEHVNNSYECDIPIGAGICASYQTQTNSPSGAGSHHHHHHHHHH

SEQ ID NO: 4550 - protein, 715 aa, Artificial Sequence
  Description of Artificial Sequence: Synthetic polypeptide
MGILPSPGMPALLSLVSLLSVLLMGCVAETGTQCVNLTTRTQLPPAYTNSFTRGVYYPDKVFRSSVLHSTQDLFLPFFSNVTWFHAIHVSGTNGTKRFDNPVLPFNDGVYFASTEKSNIIRGWIFGTTLDSKTQSLLIVNNATNVVIKVCEFQFCNDPFLGVYYHKNNKSWMESEFRVYSSANNCTFEYVSQPFLMDLEGKQGNFKNLREFVFKNIDGYFKIYSKHTPINLVRDLPQGFSALEPLVDLPIGINITRFQTLLALHRSYLTPGDSSSGWTAGAAAYYVGYLQPRTFLLKYNENGTITDAVDCALDPLSETKCTLKSFTVEKGIYQTSNFRVQPTESIVRFPNITNLCPFGEVFNATRFASSYAWNRKRISNCVADYSVLYNSASFSTFKCYGVSPTKLNDLCFTNVYADRFVIRGDEVRQIAPGQTGKIADYNYKLPDDFTGCVIAWNSNNLDAKVGGNYNYLYRLFRKSNLKPFERFISTEIYQAGSTPTNGVEGFNCYFPLQSYGFQPTNGVTYQPYRVVVLSFELLHAPHTVCGPKKSTNLVKNKCVNFNFNGLTGTGVLTESNKKFLPFQQFGRDIADTTDAVRDPQTLEILDITPCSFGGVSVITPGTNTSNQVAVLYQDVNCTEVPVAIHADQLTPTWRVYSTGSNVFQTRAGCLIGAEHVNNSYECDIPIGAGICASYQTQTNSPSGAGSHHHHHHHHHH

SEQ ID NO: 4551 - protein, 715 aa, Artificial Sequence
  Description of Artificial Sequence: Synthetic polypeptide
MGILPSPGMPALLSLVSLLSVLLMGCVAETGTQCVNLTTRTQLPPAYTNSFTRGVYYPDKVFRSSVLHSTQDLFLPFFSNVTWFHAIHVSGTNGTKRFDNPVLPFNDGVYFASTEKSNIIRGWIFGTTLDSKTQSLLIVNNATNVVIKVCEFQFCNDPFLGVYYHKNNKSWMESEFRVYSSANNCTFEYVSQPFLMDLEGKQGNFKNLREFVFKNIDGYFKIYSKHTPINLVRDLPQGFSALEPLVDLPIGINITRFQTLLALHRSYLTPGDSSSGDTAGAAAYYVGYLQPRTFLLKYNENGTITDAVDCALDPLSETKCTLKSFTVEKGIYQTSNFRVQPTESIVRFPNITNLCPFGEVFNATRFASVYAWNRKRISNCVADYSVLYNSASFSTFKCYGVSPTKLNDLCFTNVYADSFVIRGDEVRQIAPGQTGKIADYNYKLPDDFTGCVIAWNSNNLDSKVGGNYNYLYRLFRKSNLKPFERDISTEIYQAGSTPCNGVEGFNCYFPLQSYGFQPTNGVGYQPYRVVVLSFELLHAPATVCGPKKSTNLVKNKCVNFNFNGLTGTGVLTESNKKFLPFQQFGRDIADTTDAVRDPQTLEILDITPCSFGGVSVITPGTNTSNQVAVLYQDVNCTEVPVAIHADQLTPTWRVYSTGSNVFQTRAGCLIGAEHVNNSYECDIPIGAGICASYQTQTNSPSGAGSHHHHHHHHHH

SEQ ID NO: 4552 - protein, 715 aa, Artificial Sequence
  Description of Artificial Sequence: Synthetic polypeptide
MGILPSPGMPALLSLVSLLSVLLMGCVAETGTQCVNLTTRTQLPPAYTNSFTRGVYYPDKVFRSSVLHSTQDLFLPFFSNVTWFHAIHVSGTNGTKRFDNPVLPFNDGVYFASTEKSNIIRGWIFGTTLDSKTQSLLIVNNATNVVIKVCEFQFTNDPFLGVYYHKNNKSWMESEFRVYSSANNCTFEYVSQPFLMDLEGKQGNFKNLREFVFKNIDGYFKIYSKHTPINLVRDLPQGFSALEPLVDLPIGINITRFQTLLALHRSYLTPGDSSSGWTAGAAAYYVGYLQPRTFLLKYNENGTITDAVDCALDPLSETKCTLKSFTVEKGIYQTSNFRVQPTESIVRFPNITNLCPFGEVFNATRFASVYAWNRKRISNCVADYSVLYNSASFSTFKCYGVSPTKLNDLCFTNVYADSFVIRGDEVRQIAPGQTGKIADYNYKLPDDFTGCVIAWNSNNLDSKVGGNYNYLYRLFRKSNLKPFERDISTEIYQAGSTPCNGVEGFNCYFPLQSYGFQPTNGVGYQPYRVVVLSFELLHAPATVCGPKKSTNLVKNKCVNFNFNGLTGTGVLTESNKKFLPFQQFGRDIADTTDAVRDPQTLEILDITPCSFGGVSVITPGTNTSNQVAVLYQDVNCTEVPVAIHADQLTPTWRVYSTGSNVFQTRAGCLIGAEHVNNSYECDIPIGAGICASYQTQTNSPSGAGSHHHHHHHHHH

SEQ ID NO: 4553 - protein, 715 aa, Artificial Sequence
  Description of Artificial Sequence: Synthetic polypeptide
MGILPSPGMPALLSLVSLLSVLLMGCVAETGTQCVNLTTRTQLPPAYTNSFTRGVYYPDKVFRSSVLHSTQDLFLPFFSNVTWFHAIHVSGTNGTKRFDNPVLPFNDGVYFASTEKSNIIRGWIFGTTLDSKTQSLLIVNNATNVVIKVCEFQFCNDPFLGVYYHKNNKSWMESEFRVYSSANNCTFEYVSQPFLMDLEGKQGNFKNLREFVFKNIDGYFKIYSKHTPINLVRDLPQGFSALEPLVDLPIGINITRFQTLLALHRSYLTPGDSSSGWTAGAAAYYVGYLQPRTFLLKYNENGTITDAVDCALDPLSETKCTLKSFTVEKGIYQTSNFRVQPTESIVRFPNITNLCPFGEVFNATRFASVYAWNRKRISNCVADYSVLYNSASFSTFKCYGVSPTKLNDLCFTNVYADSFVIRGDEVRQIAPGQTGKIADYNYKLPDDFTGCVIAWNSNNLDSKVGGNYNYLYRLFRKSNLKPFERDISTEIYQAGSTPCNGVEGFNCYFPLQSYGFQPTNGVGYQPYRVVVLSFELLHAPATVCGPKKSTNLVKNKCVNFNFNGLTGTGVLTESNKKFLPFQQFGRDIADTTDAVRDPQTLEILDITPCSFGGVSVITPGTNTSNQVAVLYQDVNCTEVPVAIHADQLTPTWRVYSTGSNVFQTRAGCLIGAEHVNNSYECDIPIGNGICASYQTQTNSPSGAGSHHHHHHHHHH

SEQ ID NO: 4554 - protein, 715 aa, Artificial Sequence
  Description of Artificial Sequence: Synthetic polypeptide
MGILPSPGMPALLSLVSLLSVLLMGCVAETGTQCVNLTTRTQLPPAYTNSFTRGVYYPDKVFRSSVLHSTQDLFLPFFSNVTWFHAIHVSGTNGTKRFDNPVLPFNDGVYFASTEKSNIIRGWIFGTTLDSKTQSLLIVNNATNVVIKVCEFQFCNDPFLGVYYHKNNKSWMESEFRVYSSANNCTFEYVSQPFLMDLEGKQGNFKNLREFVFKNIDGYFKIYSKHTPINLVRDLPQGFSALEPLVDLPIGINITRFQTLLALHRSYLTPGDSSSGWTAGAAAYYVGYLQPRTFLLKYNENGTITDAVDCALDPLSETKCTLKSFTVEKGIYQTSNFRVQPTESIVRFPNITNLCPFGEVFNATRFASVYAWNRKRISNCVADYSVLYNSASFSTFKCYGVSPTKLNDLCFTNVYADSFVIRGDEVRQIAPGQTGKIADYNYKLPDDFTGCVIAWNSNNLDSKVGGNYNYLYRLFRKSNLKPFERDISTEIYQAGSTPCNGVEGFNCYFPLQSYGFQPTNGVGYQPYRVVVLSFELLHAPATVCGPKKSTNLVKNKCVNFNFNGLTGTGVLTESNKKFLPFQQFGRDIADTTDAVRDPQTLEILDITPCSFGGVSVITPGTNTSNQVAVLYQDVNCTEVPVAIHADQLTPTWRTYSTGSNVFQTRAGCLIGAEHVNNSYECDIPIGAGICASYQTQTNSPSGAGSHHHHHHHHHH

SEQ ID NO: 4555 - protein, 715 aa, Artificial Sequence
  Description of Artificial Sequence: Synthetic polypeptide
MGILPSPGMPALLSLVSLLSVLLMGCVAETGTQCVNLTTRTQLPPAYTNSFTRGVYYPDKVFRSSVLHSTQDLFLPFFSNVTWFHAIHVSGTNGTKRFDNPVLPFNDGVYFASTEKSNIIRGWIFGTTLDSKTQSLLIVNNATNVVIKVCEFQFCNDPFLGVYYHKNNKSWMESEFRVYSSANNCTFEYVSQPFLMDLEGKQGNFKNLREFVFKNIDGYFKIYSKHTPINLVRDLPQGFSALEPLVDLPIGINITRFQTLLALHRSYLTPGDSSSGWTAGAAAYYVGYLQPRTFLLKYNENGTITDAVDCALDPLSETKCTLKSFTVEKGIYQTSNFRVQPTESIVRFPNITNLCPFGEVFNATRFASVYAWNRKRISNCVADYSVLYNSASFSTFKCYGVSPTKLNDLCFTNVYADSFVIRGDEVRQIAPGQTGKIADYNYKLPDDFTGCVIAWNSNNLDSKVGGNYNYLYRLFRKSNLKPFERDISTEIYQAGSTPCNGVEGFNCYFPLQSYGFQPTNGVGYQPYRVVVLSFELLHAPATVCGPKKSTNLVKNKCVNFNFNGLTGTGVLTESNKKFLPFQQFGRDIADTTDAVRDPQTLEILDITPCSFGGVFVITPGTNTSNQVAVLYQDVNCTEVPVAIHADQLTPTWRVYSTGSNVFQTRAGCLIGAEHVNNSYECDIPIGAGICASYQTQTNSPSGAGSHHHHHHHHHH

SEQ ID NO: 4556 - protein, 715 aa, Artificial Sequence
  Description of Artificial Sequence: Synthetic polypeptide
MGILPSPGMPALLSLVSLLSVLLMGCVAETGTQCVNLTTRTQLPPAYTNSFTRGVYYPDKVFRSSVLHSTQDLFLPFFSNVTWFHAIHVSGTNGTKRFDNPVLPFNDGVYFASTEKSNIIRGWIFGTTLDSKTQSLLIVNNATNVVIKVCEFQFCNDPFLGVYYHKNNKSWMESEFRVYSSANNCTFEYVSQPFLMDLEGKQGNFKNLREFVFKNIDGYFKIYSKHTPINLVRDLPQGFSALEPLVDLPIGINITRFQTLLALHRSYLTPGDSSSGWTAGAAAYYVGYLQPRTFLLKYNENGTITDAVDCALDPLSETKCTLKSFTVEKGIYQTSNFRVQPTESIVRFPNITNLCPFGEVFNATRFASVYAWNRKRISNCVADYSVLYNSASFSTFKCYGVSPTKLNDLCFTNVYADSFVIRGDEVRQIAPGQTGKIADYNYKLPDDFTGCVIAWNSNNLDSKVGGNYNYLYRLFRKSNLKPFERDISIEIYQAGSTPCNGVEGFNCYFPLQSYGFQPTNGVGYQPYRVVVLSFELLHAPATVCGPKKSTNLVKNKCVNFNFNGLTGTGVLTESNKKFLPFQQFGRDIADTTDAVRDPQTLEILDITPCSFGGVSVITPGTNTSNQVAVLYQDVNCTEVPVAIHADQLTPTWRVYSTGSNVFQTRAGCLIGAEHVNNSYECDIPIGAGICASYQTQTNSPSGAGSHHHHHHHHHH

SEQ ID NO: 4557 - protein, 715 aa, Artificial Sequence
  Description of Artificial Sequence: Synthetic polypeptide
MGILPSPGMPALLSLVSLLSVLLMGCVAETGTQCVNLTTRTQLPPAYTNSFTRGVYYPDKVFRSSVLHSTQDLFLPFFSNVTWFHAIHVSGTNGTKRFDNPVLPFNDGVYFASTEKSNIIRGWIFGTTLDSKTQSLLIVNNATMVVIKVCEFQFCNDPFLGVYYHKNNKSWMESEFRVYSSANNCTFEYVSQPFLMDLEGKQGNFKNLREFVFKNIDGYFKIYSKHTPINLVRDLPQGFSALEPLVDLPIGINITRFQTLLALHRSYLTPGDSSSGWTAGAAAYYVGYLQPRTFLLKYNENGTITDAVDCALDPLSETKCTLKSFTVEKGIYQTSNFRVQPTESIVRFPNITNLCPFGEVFNATRFASVYAWNRKRISNCVADYSVLYNSASFSTFKCYGVSPTKLNDLCFTNVYADSFVIRGDEVRQIAPGQTGKIADYNYKLPDDFTGCVIAWNSNNLDSKVGGNYNYLYRLFRKSNLKPFERDISTEIYQAGSTPCNGVEGFNCYFPLQSYGFQPTNGVGYQPYRVVVLSFELLHAPATVCGPKKSTNLVKNKCVNFNFNGLTGTGVLTESNKKFLPFQQFGRDIADTTDAVRDPQTLEILDITPCSFGGVSVITPGTNTSNQVAVLYQDVNCTEVPVAIHADQLTPTWRVYSTGSNVFQTRAGCLIGAEHVNNSYECDIPIGAGICASYQTQTNSPSGAGSHHHHHHHHHH

SEQ ID NO: 4558 - protein, 715 aa, Artificial Sequence
  Description of Artificial Sequence: Synthetic polypeptide
MGILPSPGMPALLSLVSLLSVLLMGCVAETGTQCVNLTTRTQLPPAYTNSFTRGVYYPDKVFRSSVLHSTQDLFLPFFSNVTWFHAIHVSGTNGTKRFDNPVLPFNDGVYFASTEKSNIIRGWIFGTTLDSKTQSLLIVNNATNVVIKVCEFQFCNDPFLGVYYHKNNKSWMESEFRVYSSANNCTFEYVSQPFLMDLEGKQGNFKNLREFVFKNIDGYFKIYSKHTPINLVRDLPQGFSALEPLVDLPIGINITRFQTLLALHRSYLTPGDSSSGWTAGAAAYYVGYLQPRTFLLKYNENGTITDAVDCALDPLSETKCTLKSFTVEKGIYQTSNFRVQPTESIVRFPNITNLCPFGEVFNATRFASVYAWNRKRISNCVADYSVLYNSASFSTFKCYGVSPTKLNDLCFTNVYADSFVIRGDEVRQIAPGQTGKIADYNYKLPDDFTGCVIAWNSNNLDSKVGGNYNYLYRLFRKSNLKPFERDISTEIYQAGSTPCNGVEGFNCYFPLQSYGFQPTNGVGYQPYRVVVLSFELLHAPATVCGPKKSTNLVKNKCVNFNFNGLTGTGVLTESNKKFLPFQQFGRDIADTTDAVRDPQTLEILDITPCSFGGVSVITPGTNTSNQVAVLYQDVNCTEVPVAQHADQLTPTWRVYSTGSNVFQTRAGCLIGAEHVNNSYECDIPIGAGICASYQTQTNSPSGAGSHHHHHHHHHH

SEQ ID NO: 4559 - protein, 715 aa, Artificial Sequence
  Description of Artificial Sequence: Synthetic polypeptide
MGILPSPGMPALLSLVSLLSVLLMGCVAETGTQCVNLTTRTQLPPAYTNSFTRGVYYPDKVFRSSVLHSTQDLFLPFFSNVTWFHAKHVSGTNGTKRFDNPVLPFNDGVYFASTEKSNIIRGWIFGTTLDSKTQSLLIVNNATNVVIKVCEFQFCNDPFLGVYYHKNNKSWMESEFRVYSSANNCTFEYHSQPFLMDLEGKQGNFKNLREFVFKNIDGYFKIYSKHTPINLVRDLPQGFSALEPLVDLPIGINITRFQTLLALHRSYLTPGDSSSGWTAGAAAYYVGYLQPRTFLLKYNENGTITDAVDCALDPLSETKCTLKSFTVEKGIYQTSNFRVQPTESIVRFPNITNPCPFGEVFNATRFASVYAWNRKRISNCVADYSVLYNSASFSTFKCYGVSPTKLNDLCFTNVYADSFVIRGDEVRQIAPGQTGKIADYNYKLPDDFTGCVIAWNSNNLDSKVGGNYNYLYRLFRKSNLKPFERDISTEIYQAGSTPCNGVEGFNCYFPLQSYGFQPTNGPGQQPYRVVVLSFELLHAPATVCGPKKSTNLVKNKCVNFNFNGLTGTGVLTESNKKFLPFQQFGRDIADTTDAVRDPQTLEILDITPCSFGGVSVITPGTNTSNQVAVLYQDVNCTEVPDAIHADQLTPTWRVYSTGSNVFQTRAGCLIGAEHVNNSYECDIPIGAGICASYQTQTNSPSGAGSHHHHHHHHHH

SEQ ID NO: 4560 - protein, 715 aa, Artificial Sequence
  Description of Artificial Sequence: Synthetic polypeptide
MGILPSPGMPALLSLVSLLSVLLMGCVAETGTQCVNLTTRTQLPPAYTNSFTRGVYYPDKVFRSSVLHSTQDLFLPFFSNVTWFHAIHVSGTNGTKRFDNPVLPFNDGVYFASTEKSNIIRGWIFGTTLDSKTQSLLIVNNATNVVIKVCEFQFCNDPFLGVYYHKNNKSWMESEFRVYSSANNCTFEYVSQPFLMDLEGKQGNFKNLREFVFKNIDGYFKIYSKHTPINLVRDLPQGFSALEPLVDLPIGINITRFQTLLALHRSYLTPGDSSSGWTAGAAAYYVGYLQPRTFLLKYNENGTITDAVDCALDPLSETKCTLKSFTVEKGIYQTSNFRVQPTESIVRFPNITNLCPFGEVFNATRFASVYAWNRKRISNCVADYSVLYNSASFSTFKCYGVSPTKLNDLCFTNVYADSFVIRGDEVRQIAPGQTGKIADYNYKLPDDFTGCVIAWNSNNLDSKVGGNYNYLYRLFRKSNLKPFERDISTEIYQAGSTPCNGVEGFNCYFPLQSYGFQPTNGVGYQPYRVVVLSFELLHAPATVCGPKKSTNLVKNKCVNFNFNGLTGTGVLTESNKKFLPFQQFTRDIADTTDAVRDPQTLEILDITPCSFGGVSVITPGTNTSNQVAVLYQDVNCTEVPVAIHADQLTPTWRVYSTGSNVFQTRAGCLIGAEHVNNSYECDIPIGAGICASYQTQTNSPSGAGSHHHHHHHHHH

SEQ ID NO: 4561 - protein, 715 aa, Artificial Sequence
  Description of Artificial Sequence: Synthetic polypeptide
MGILPSPGMPALLSLVSLLSVLLMGCVAETGTQCVNLTTRTQLPPAYTNSFTRGVYYPDKVFRSSVLHSTQDLFLPFFSNVTWFHAIHVSGTNGTKRFDNPVLPFNDGVYFASTEKSNIIRGWIFGTTLDSKTQSLLIVNNATNVVIKVCEFQFCNDPFLGVYYHKNNKSWMESEFRVYSSANNCTFEYVSQPFLMDLEGKQGNFKNLREFVFKNIDGYFKIYSKHTPINLVRDLPQGFSALEPLVDLPIGINITRFQTLLALHRSYLTPGDSSSGWTAGAAAYYVGYLQPRTFLLKYNENGTITDAVDCALDPLSETKCTLKSFTVEKGIYQTSNFRVQPTESIVRFPNITNLCPFGEVFNATRFASVYAWNRKRISNCVADYSVLYNSASFSTFKCYGVSPTKLNDLCFTNVYADSFVIRGDEVRQIAPGQTGKIADYNYKLPDDFTGCVIAWNSNNLDSKVGGNYNYLYRLFRKSNLKPFERDISTEIYQAGSTPCNGVEGFNCYFPLQSYGFQPTNGVRYQPYRVVVLSFELLHAPATVCGPKKSTNLVKNKCVNFNFNGLTGTGVLTESNKKFLPFQQFGRDIADTTDAVRDPQTLEILDITPCSFGGVSVITPGTNTSNQVAVLYQDVNCTEVPVAIHADQLTPTWRVYSTGSNVFQTRAGCLIGAEHVNNSYECDIPIGAGICASYQTQTNSPSGAGSHHHHHHHHHH

SEQ ID NO: 4562 - protein, 715 aa, Artificial Sequence
  Description of Artificial Sequence: Synthetic polypeptide
MGILPSPGMPALLSLVSLLSVLLMGCVAETGTQCVNLTTRTQLPPAYTNSFTRGVYYPDKVFRSSVLHSTQDLFLPFFSNVTWFHAIHVSGTNGTKRFDNPVLPFNDGVYFASTEKSNIIRGWIFGTTLDSKTQSLLIVNNATNVVIKVCEFQFCNDPFLGVYYHKNNKSWMESEFRVYSSANNCTFEYVSQPFLMDLEGKQGNFKNLREFVFKNIDGYFKIYSKHTPINLVRDLPQGFSALEPLVDLPIGINITRFQTLLALHRSYLTPGDSSSGWTAGAAAYYVGYLQPRTFLLKYNENGTITDAVDCALDPLSETKCTLKSFTVEKGIYQTSNFRVQPTESIVRFPNITNCCPFGEVFNATRFASVYAWNRKRISNCVADYSVLYNSASFSTFKCYGVSPTKLNDLCFTNVYADSFVIRGDEVRQIAPGQTGKIADYNYKLPDDFTGCVIAWNSNNLDSKVGGNYNYLYRLFRKSNLKPFERDISTEIYQAGSTPCNGVEGFNCYFPLQSYGFQPTNGVGYQPYRVVVLSFELLHAPATVCGPKKSTNLVKNKCVNFNFNGLTGTGVLTESNKKFLPFQQFGRDIADTTDAVRDPQTLEILDITPCSFGGVSVITPGTNTSNQVAVLYQDVNCTEVPVAIHADQLTPTWRVYSTGSNVFQTRAGCLIGAEHVNNSYECDIPIGAGICASYQTQTNSPSGAGSHHHHHHHHHH

SEQ ID NO: 4563 - protein, 715 aa, Artificial Sequence
  Description of Artificial Sequence: Synthetic polypeptide
MGILPSPGMPALLSLVSLLSVLLMGCVAETGTQCVNLTTRTQLPPAYTNSFTRGVYYPDKVFRSSVLHSTQDLFLPFFSNVTWFHAIHVSGTNGTKRFDNPVLPFNDGVYFASTEKSNIIRGWIFGTTLDSKTQSLLIVNNATNVVIKVCEFQFCNDPFLGVYYHKNNKSWMESEFRVYSSANNCTFEYVSQPFLMDLEGKQGNFKNLREFVFKNIDGYFKIYSKHTPINLVRDLPQGFSALEPLVDLPIGINITRFQTLLALHRSYLTPGDSSSGWTAGAAAYYVGYLQPRTFLLKYNENGTITDAVDCALDPLSETKCTLKSFTVEKGIYQTSNFRVQPTESIVRFPNITNLCPFGEVFNATRFASVYAWNRKRISNCVADYSVLYNSASFSTFKCYGVSPTKLNDLCFTNVYADSFVIRGDEVRQIAPGQTGKIADYNYKLPDDFTGCVIAWNSNNLDSKVGGNYNYLYRLFRKSNLKPFERYISTEIYQAGSTPCNGVEGFNCYFPLQSYGFQPTNGVGYQPYRVVVLSFELLHAPATVCGPKKSTNLVKNKCVNFNFNGLTGTGVLTESNKKFLPFQQFGRDIADTTDAVRDPQTLEILDITPCSFGGVSVITPGTNTSNQVAVLYQDVNCTEVPVAIHADQLTPTWRVYSTGSNVFQTRAGCLIGAEHVNNSYECDIPIGAGICASYQTQTNSPSGAGSHHHHHHHHHH

SEQ ID NO: 4564 - protein, 715 aa, Artificial Sequence
  Description of Artificial Sequence: Synthetic polypeptide
MGILPSPGMPALLSLVSLLSVLLMGCVAETGTQCVNLTTRTQLPPAYTNSFTRGVYYPDKVFRSSVLHSTQDLFLPFFSNVTWFHAIHVSGTNGTKRFDNPVLPFNDGVYFASTEKSNIIRGWIFGTTLDSKTQSLLIVNNATNVVIKVCEFQFCNDPFLGVYYHKNNKSWMESEFRVYSSANNCTFEYVSQPFLMDLEGKQGNFKNLREFVFKNIDGYFKIYSKHTPINLVRDLPQGFSALEPLVDLPIGINITRFQTLLALHRSYLTPGDSSSGWTAGAAAYYVGYLQPRTFLLKYNENGTITDAVDCALDPLSETKCTLKSFTVEKGIYQTSNFRVQPTESIVRFPNITNLCPFGEVFNATRFASVYAWNRKRISNCVADYSVLYNSASFSTFKCYGVSPTKLNDLCFTNVYADSFVIRGDEVRQIAPGQTGKIADYNYKLPDDFTGCVIAWNSNNLDSKVGGNYNYLYRLFRKSNLKPFERDISTEIYQAGSTPCNGVEGFNCYFPLQSYGFQPTNGVGYQPYRVVVLSFELLHAPATVCGPKKSTNLVKNKCVNFNFNGLTGTGVLTESNKKFLPFQQFGRDIADTTDAVRDPQTLEILDITPCSFGGVSVITPATNTSNQVAVLYQDVNCTEVPVAIHADQLTPTWRVYSTGSNVFQTRAGCLIGAEHVNNSYECDIPIGAGICASYQTQTNSPSGAGSHHHHHHHHHH

SEQ ID NO: 4565 - protein, 715 aa, Artificial Sequence
  Description of Artificial Sequence: Synthetic polypeptide
MGILPSPGMPALLSLVSLLSVLLMGCVAETGTQCVNLTTRTQLPPAYTNSFTRGVYYPDKVFRSSVLHSTQDLFLPFFSNVTWFHAIHVSGTNGTKRFDNPVLPFNDGVYFASTEKSNIIRGWIFGTTLDSKTQSLLIVNNATNVVIKVCEFQFCNDPFLGVYYHKNNKSWMESEFRVYSSANNCTFEYVSQPFLMDLEGKQGNFKNLREFVFKNIDGYFKIYSKHTPINLVRDLPQGFSALEPLVDLPIGINITRFQTLLALHRSYLTPGDSSSGWTAGAAAYYVGYLQPRTFLLKYNENGTITDAVDCALDPLSETKCTLKSFTVEKGIYQTSNFRVQPTESIVRFPNITNLCPFGEVFNATRFASVYAWNRKRISNCVADYSVLYNSASFSTFKCYGVSPTKLNDLCFTNVYADSFVIRGDEVRQIAPGQTGKIADYNYKLPDDFTGCVIAWNSNNLDSKVGGNYNYLYRLFRKSNLKPFERDISTEIYQAGSTPCNGVEGFNCYFPLQSYGFQPTNGVGYQPYRVVVLSFELLHAPATVCGPKKSTNLVKNKCVNFNFNGLTGTGVLTESNKKFLPFQQFGRDIADTTDAVRDPQTLEILDITPCSQGGVSVITPGTNTSNQVAVLYQDVNCTEVPVAIHADQLTPTWRVYSTGSNVFQTRAGCLIGAEHVNNSYECDIPIGAGICASYQTQTNSPSGAGSHHHHHHHHHH

SEQ ID NO: 4566 - protein, 715 aa, Artificial Sequence
  Description of Artificial Sequence: Synthetic polypeptide
MGILPSPGMPALLSLVSLLSVLLMGCVAETGTQCVNLTTRTQLPPAYTNSFTRGVYYPDKVFRSSVLHSTQDLFLPFFSNVTWFHAIHVSGTNGTKRFDNPVLPFNDGVYFASTEKSNIIRGWIFGTTLDSKTQSLLIVNNATNVVIKVCEFQFCNDPFLGVYYHKNNKSWMESEFRVYSSANNCTFEYVSQPFLMDLEGKQGNWKNLREFVFKNIDGYFKIYSKHTPINLVRDLPQGFSALEPLVDLPIGINITRFQTLLALHRSYLTPGDSSSGWTAGAAAYYVGYLQPRTFLLKYNENGTITDAVDCALDPLSETKCTLKSFTVEKGIYQTSNFRVQPTESIVRFPNITNLCPFGEVFNATRFASVYAWNRKRISNCVADYSVLYNSASFSTFKCYGVSPTKLNDLCFTNVYADSFVIRGDEVRQIAPGQTGKIADYNYKLPDDFTGCVIAWNSNNLDSKVGGNYNYLYRLFRKSNLKPFERDISTEIYQAGSTPCNGVEGFNCYFPLQSYGFQPTNGVGYQPYRVVVLSFELLHAPATVCGPKKSTNLVKNKCVNFNFNGLTGTGVLTESNKKFLPFQQFGRDIADTTDAVRDPQTLEILDITPCSFGGVSVITPGTNTSNQVAVLYQDVNCTEVPVAIHADQLTPTWRVYSTGSNVFQTRAGCLIGAEHVNNSYECDIPIGAGICASYQTQTNSPSGAGSHHHHHHHHHH

SEQ ID NO: 4567 - protein, 715 aa, Artificial Sequence
  Description of Artificial Sequence: Synthetic polypeptide
MGILPSPGMPALLSLVSLLSVLLMGCVAETGTQCVNLTTRTQLPPAYTNSFTRGVYYPDKVFRSSVLHSTQDLFLPFFSNVTWFHAIHVSGTNGTKRFDNPVLPFNDGVYFASTEKSNIIRGWIFGTTLDSKTQSLLIVNNATNVVIKVCEFQFCNDPFLGVYYHKNNKSWMESEFRVYSSANNCTFEYVSQPFLMDLEGKQGNFKNLREFVFKNIDGYFKIYSKHTPINLVRDLPQGFSALEPLVDLPIGINITRFQTLLALHRSYLTPGDSSSGWTAGAAAYYVGYLQPRTFLLKYNENGTITDAVDCALDPLSETKCTLKSFTVEKGIYQTSNFRVQPTESIVRFPNITNLCPFGEVFNATRFASVYAWNRKRISNCVADYSVLYNSASFSTFKCYGVSPTKLNDLCFTNVYADSFVIRGDEVRQIAPGQTGKIADYNYKLPDDFTGCVIAWNSNNLDSKVGGNYNYLYRLFRKSNLKPFERDISTEIYQAGSTPCNGVEGFNCYFPLQSYGFQPTNGVGYQPYRVVVLSFELLHAPATVCGPKKSTNLRKNKCVNFNFNGLTGTGVLTESNKKFLPFQQFGRDIADTTDAVRDPQTLEILDITPCSFGGVSVITPGTNTSNQVAVLYQDVNCTEVPVAIHADQLTPTWRVYSTGSNVFQTRAGCLIGAEHVNNSYECDIPIGAGICASYQTQTNSPSGAGSHHHHHHHHHH

SEQ ID NO: 4568 - protein, 715 aa, Artificial Sequence
  Description of Artificial Sequence: Synthetic polypeptide
MGILPSPGMPALLSLVSLLSVLLMGCVAETGTQCVNLTTRTQLPPAYTNSFTRGVYYPDKVFRSSVLHSTQDLFLPFFSNVTWFHAYHVSGTNGTKRFDNPVLPFNDGVYFASTEKSNIIRGWIFGTTLDSKTQSLLIVNNATNVVIKVCEFQFCNDPFLGVYYHKNNKSWMESEFRVYSSANNCTFEYVSQPFLMDLEGKQGNFKNLREFVFKNIDGYFKIYSKHTPINLVRDLPQGFSALEPLVDLPIGINITRFQTLLALHRSYLTPGDSSSGWTAGAAAYYVGYLQPRTFLLKYNENGTITDAVDCALDPLSETKCTLKSFTVEKGIYQTSNFRVQPTESIVRFPNITNLCPFGEVFNATRFASVYAWNRKRISNCVADYSVLYNSASFSTFKCYGVSPTKLNDLCFTNVYADSFVIRGDEVRQIAPGQTGKIADYNYKLPDDFTGCVIAWNSNNLDSKVGGNYNYLYRLFRKSNLKPFERDISTEIYQAGSTPCNGVEGFNCYFPLQSYGFQPTNGVGYQPYRVVVLSFELLHAPATVCGPKKSTNLVKNKCVNFNFNGLTGTGVLTESNKKFLPFQQFGRDIADTTDAVRDPQTLEILDITPCSFGGVSVITPGTNTSNQVAVLYQDVNCTEVPVAIHADQLTPTWRVYSTGSNVFQTRAGCLIGAEHVNNSYECDIPIGAGICASYQTQTNSPSGAGSHHHHHHHHHH

SEQ ID NO: 4569 - protein, 715 aa, Artificial Sequence
  Description of Artificial Sequence: Synthetic polypeptide
MGILPSPGMPALLSLVSLLSVLLMGCVAETGTQCVNLTTRTQLPPAYTNSFTRGVYYPDKVFRSSVLHSTQDLFLPFFSNVTWFHAIHVSGTNGTKRFDNPVLPFNDGVYFASTEKSNIIRGWIFGTTLDSKTQSLLIVNNATNVVIKVCEFQFCNDPFLGVYYHKNNKSWMESEFRVYSSANNCTFEYVSQPFLMDLEGKQGNFKNLREFVFKNIDGYFKIYSKHTPINLVRDLPQGFSALEPLVDLPIGINITRFQTLLALHRSYLTPGDSSSGWTAGAAAYYVGYLQPRTFLLKYNENGTITDAVDCALDPLSETKCTLKSFTVEKGIYQTSNFRVQPTESIVRFPNITNLCPFGEVFNATRFASVYAWNRKRISNCVADYSVLYNSASFSTFKCYGVSPTKLNDLCFTNVYADSFVIRGDEVRQIAPGQTGKIADYNYKLPDDFTGCVIAWNSNNLDSKVGGNYNYLYRLFRKSNLKPFERDISTEKYQAGSTPCNGVEGFNCYFPLQSYGFQPTNGVGYQPYRVVVLSFELLHAPATVCGPKKSTNLVKNKCVNFNFNGLTGTGVLTESNKKFLPFQQFGRDIADTTDAVRDPQTLEILDITPCSFGGVSVITPGTNTSNQVAVLYQDVNCTEVPVAIHADQLTPTWRVYSTGSNVFQTRAGCLIGAEHVNNSYECDIPIGAGICASYQTQTNSPSGAGSHHHHHHHHHH

SEQ ID NO: 4570 - protein, 715 aa, Artificial Sequence
  Description of Artificial Sequence: Synthetic polypeptide
MGILPSPGMPALLSLVSLLSVLLMGCVAETGTQCVNLTTRTQLPPAYTNSFTRGIYYPDKVFRSSVLHSTQDLFLPFFSNVTWFHAIHGSGTNGTKRFDNPVLPFNDGVYSAAIEKSNIIRGWIFGTTLDSKTQSLLIVNNATNVVIKVCEFQFCNDPFLGVYYHKNNKSWMESEFRVYSSANNCTFEYVSQPFLMDLEGKQGNFKWLREFVFKNIDGYFKIYSKHTPINLVRDLPQGFSPLEPLVDLPIGINITRFLTVLALHRSYLTPGDSSSGWTAGAAAYYVGYLQPRTFLLKYNENGTITDAVDCALDPLSETKCTLKSFTVEKGIYQTSNFRVQPTESIVRFPNITNLCPFGEVFNATRFASVYAWNRKRISNCVADYSVLYNSASFSTFKCYGVSPTKLNDLCFTNVYADSFVIRGDEVRQIAPGQTGKIADYNYKLPDDFTGCVIAWNSNNLDSKVGGNYNYLYRLFRKSNLKPFERDISTEIYQAGSTPCNGVEGFNCYFPLQSYGFQPTNGVGYQPYRVVVLSFELLHAPATVCGPKKSTNLVKNKCVNFNFNGLTGTGVLTESNKKFLPFQQFGRDIADTTDAVRDPQTLEILDITPCSFGGVSVITPGTNTSNQVAVLYQDVNCTEVPVAIHADQLTPTWRVYSTGSNVFQTRAGCLIGAEHVNNSYECDIPIGAGICASYQTQTNSPSGAGSHHHHHHHHHH

SEQ ID NO: 4571 - protein, 715 aa, Artificial Sequence
  Description of Artificial Sequence: Synthetic polypeptide
MGILPSPGMPALLSLVSLLSVLLMGCVAETGTQCVNLTTRTQLPPAYTNSFTRGVYYPDKVFRSSVLHSTQDLFLPFFSNVTWFHAIHVSGTNGTKRFDNPVLPFNDGVYFASTEKSNIIRGWIFGTTLDSKTQSLLIVNNATNVVIKVCEFQFCNDPFLGVYYHKNNKSWMESEFRVYSSANNCTFEYVSQPFLMDLEGKQGNFKNLREFVFKNIDGYFKIYSKHTPINLVRDLPQGFSALEPLVDLPIGINITRFQTLLALHRSYLTPGDSSSGWTAGAAAYYVGYLQPRTFLLKYNENGTITDAVDCALDPLSETKCTLKSFTVEKGIYQTSNFRVQPTESIVRFPNITNLCPFGEVFNATRFASVYAWNRKRISNCVADYSVLYNSASFSTFKCYGVSPTKLNDLCFTNVYADSFVIRGDEVRQIAPGQTGKIADYNYKLPDDFTGCVIAWNSNNLDSKVGGNYNYLYRLFRKSNLKPFERDISTEIYQAGSTPCNGVEGFNCYFPLQSYGFQPTNGVGYQPYRVVVLSFELLHAPATVCGPKKSTNLVKNKCVNFNFNGLTGTGVLTESNKKFLPFQQFGRDIADTTDAVRDPQTLEILDITPCSFGGVSVITPGTNTSNQFAVLYQDVNCTEVPVAIHADQLTPTWRVYSTGSNVFQTRAGCLIGAEHVNNSYECDIPIGAGICASYQTQTNSPSGAGSHHHHHHHHHH

SEQ ID NO: 4572 - protein, 715 aa, Artificial Sequence
  Description of Artificial Sequence: Synthetic polypeptide
MGILPSPGMPALLSLVSLLSVLLMGCVAETGTQCVNLTTRTQLPPAYTNSFTRGVYYPDKVFRSSVLHSTQDLFLPFFSNVTWFHAKHVSGTNGTKRFDNPVLPFNDGVYFASTEKSNIIRGWIFGTTLDSKTQSLLIVNNATNVVIKVCEFQFCNDPFLGVYYHKNNKSWMESEFRVYSSANNCTFEYHSQPFLMDLEGKQGNFKNLREFVFKNIDGYFKIYSKHTPINLVRDLPQGFSALEPLVDLPIGINITRFQTLLALHRSYLTPGDSSSGWTAGAAAYYVGYLQPRTFLLKYNENGTITDAVDCALDPLSETKCTLKSFTVEKGIYQTSNFRVQPTESIVRFPNITNKCPFGEVFNATRFASVYAWNRKRISNCVADYSVLYNSASFSTFKCYGVSPTKLNDLCFTNVYADSFVIRGDEVRQIAPGQTGKIADYNYKLPDDFTGCVIAWNSNNLDSKVGGNYNYLYRLFRKSNLKPFERDISTEIYQAGSTPCNGVEGFNCYFPLQSYGFQPTNGPGQQPYRVVVLSFELLHAPATVCGPKKSTNLVKNKCVNFNFNGLTGTGVLTESNKKFLPFQQFGRDIADTTDAVRDPQTLEILDITPCSFGGVSVITPGTNTSNQVAVLYQDVNCTEVPDAIHADQLTPTWRVYSTGSNVFQTRAGCLIGAEHVNNSYECDIPIGAGICASYQTQTNSPSGAGSHHHHHHHHHH

SEQ ID NO: 4573 - protein, 715 aa, Artificial Sequence
  Description of Artificial Sequence: Synthetic polypeptide
MGILPSPGMPALLSLVSLLSVLLMGCVAETGTQCVNLTTRTQLPPAYTNSFTRGVYYPDKVFRSSVLHSTQDLFLPFFSNVTWFHAIHVSGTNGTKRFDNPVLPFNDGVYFASTEKSNIIRGWIFGTTLDSKTQSLLIVNNATNVVIKVCEFQFCNDPFLGVYYHKNNKSWMESEFRVYSSANNCTFEYVSQPFLMDLEGKQGNFKNLREFVFKNIDGYFKIYSKHTPINLVRDLPQGFSALEPLVDLPIGINITRFQTLLALHRSYLTPGDSSSGWTAGAAAYYVGYLQPRTFLLKYNENGTITDAVDCALDPLSETKCTLKSFTVEKGIYQTSNFRVQPTESIVRFPNITNQCPFGEVFNATRFASVYAWNRKRISNCVADYSVLYNSASFSTFKCYGVSPTKLNDLCFTNVYADSFVIRGDEVRQIAPGQTGKIADYNYKLPDDFTGCVIAWNSNNLDSKVGGNYNYLYRLFRKSNLKPFERDISTEIYQAGSTPCNGVEGFNCYFPLQSYGFQPTNGVGYQPYRVVVLSFELLHAPATVCGPKKSTNLVKNKCVNFNFNGLTGTGVLTESNKKFLPFQQFGRDIADTTDAVRDPQTLEILDITPCSFGGVSVITPGTNTSNQVAVLYQDVNCTEVPVAIHADQLTPTWRVYSTGSNVFQTRAGCLIGAEHVNNSYECDIPIGAGICASYQTQTNSPSGAGSHHHHHHHHHH

SEQ ID NO: 4574 - protein, 715 aa, Artificial Sequence
  Description of Artificial Sequence: Synthetic polypeptide
MGILPSPGMPALLSLVSLLSVLLMGCVAETGTQCVNLTTRTQLPPAYTNSFTRGVYYPDKVFRSSVLHSTQDLFLPFFSNVTWFHAIHVSGTNGTKRFDNPVLPFNDGVYFASTEKSNIIRGWIFGTTLDSKTQSLLIVNNATNVVIKVCEFQFCNDPFLGVYYHKNNKSWMESEFRVYSSANNCTFEYVSQPFLMDLEGKQGNFKNLREFVFKNIDGYFKIYSKHTPINLVRDLPQGFSALEPLVDLPIGINITRFQTLLALHRSYLTPGDSSSGWTAGAAAYYVGYLQPRTFLLKYNENGTITDAVDCALDPLSETKCTLKSFTVEKGIYQTSNFRVQPTESIVRFPNITNLCPFGEVFNATRFASVYAWNRKRISNCVADYSVLYNSASFSTFKCYGVSPTKLNDLCFTNVYADSFVIRGDEVRQIAPGQTGKIADYNYKLPDDFTGCVIAWNSNNLDSKVGGNYNYLYRLFRKSNLKPFERDISTEIYQAGSTPCNGVEGFNCYFPLQSYGFQPTNGVGYQPYRVVVLSFELLHAPATVCGPKKSTNLVKNKCVNFNFNGLTGTGVLTESNKKFLPFQQFGRDIADTTDAVRDPQTLEILDITPCSFGGVSVITPGTNTSNQVAVLYQDVNCTEVPVAIHADQLTPTWRVYSTGSNVFQTRAGCLIGIEHVNNSYECDIPIGAGICASYQTQTNSPSGAGSHHHHHHHHHH

SEQ ID NO: 4575 - protein, 715 aa, Artificial Sequence
  Description of Artificial Sequence: Synthetic polypeptide
MGILPSPGMPALLSLVSLLSVLLMGCVAETGTQCVNLTTRTQLPPAYTNSFTRGVYYPDKVFRSSVLHSTQDLFLPFFSNVTWFHAIHVSGTNGTKRFDNPVLPFNDGVYFASTEKSNIIRGWIFGTTLDSKTQSLLIVNNATNVVIKVCEFQFCNDPFLGVYYHKNNKSWMESEFRVYSSANNCTFEYVSQPFLMDLEGKQGNFKNLREFVFKNIDGYFKIYSKHTPINLVRDLPQGFSALEPLVDLPIGINITRFQTLLALHRSYLTPGDSSSGWTAGAAAYYVGYLQPRTFLLKYNENGTITDAVDCALDPLSETKCTLKSFTVEKGIYQTSNFRVQPTESIVRFPNITNLCPFGEVFNATRFASVYAWNRKRISNCVADYSVLYNSASFSTFKCYGVSPTKLNDLCFTNVYADSFVIRGDEVRQIAPGQTGKIADYNYKLPDDFTGCVIAWNSNNLDSKVGGNYNYLYRLFRKSNLKPFERDISTEIYQAGSTPCNGVEGFNCYFPLQSYGFQPTNGVGYQPYRVVVLSFELLHAPATVCGPKKSTNLVKNKCVNFNFNGLTGTGVLTESNKKFLPFQQFGRDIADTTDAVRDPQTLEILDITPCSFGGVSVITPGTNTSNQVAVLYQDVNCTEVPVAIHADQLTPTWRVYSTGSNYFQTRAGCLIGAEHVNNSYECDIPIGAGICASYQTQTNSPSGAGSHHHHHHHHHH

SEQ ID NO: 4576 - protein, 715 aa, Artificial Sequence
  Description of Artificial Sequence: Synthetic polypeptide
MGILPSPGMPALLSLVSLLSVLLMGCVAETGTQCVNLTTRTQLPPAYTNSFTRGVYYPDKVFRSSVLHSTQDLFLPFFSNVTWFHAIHVSGTNGTKRFDNPVLPFNDGVYFASTEKSNIIRGWIFGTTLDSKTQSLLIVNNATNVVIKVCEFQFCNDPFLGVYYHKNNKSWMESEFRVYSSANNCTFEYVSQPFLMDLEGKQGNFKNLREFVFKNIDGYFKIYSKHTPINLVRDLPQGFSALEPLVDLPIGINITRFQTLLALHRSYLTPGDSSSGWTAGAAAYYVGYLQPRTFLLKYNENGTITDAVDCALDPLSETKCTLKSFTVEKGIYQTSNFRVQPTESIVRFPNITNLCPLGEVFNATRFASSYAWNRKRISNCVADYSVLYNSASFSTFKCYGVSPTKLNDLCFTNVYADRFVIRGDEVRQIAPGQTGKIADYNYKLPDDFTGCVIAWNSNNLDAKVGGNYNYLYRLFRKSNLKPFERFISTEIYQAGSTPSNGVEGFNCYFPLQSYVFQPTNGVTYQPYRVVVLSFELLHAPHTVCGPKKSTNLVKNKCVNFNFNGLTGTGVLTESNKKFLPFQQFGRDIADTTDAVRDPQTLEILDITPCSFGGVSVITPGTNTSNQVAVLYQDVNCTEVPVAIHADQLTPTWRVYSTGSNVFQTRAGCLIGAEHVNNSYECDIPIGAGICASYQTQTNSPSGAGSHHHHHHHHHH

SEQ ID NO: 4577 - protein, 715 aa, Artificial Sequence
  Description of Artificial Sequence: Synthetic polypeptide
MGILPSPGMPALLSLVSLLSVLLMGCVAETGTQCVNLTTRTQLPPAYTNSFTRGVYYPDKVFRSSVLHSTQDLFLPFFSNVTWFHAIHVSGTNGTKRFDNPVLPFNDGVYFASTEKSNIIRGWIFGTTLDSKTQSLLIVNNATNVVIKVCEFQFCNDPFLGVYYHKNNKSWMESEFRVYSSANNCTFEYVSQPFLMDLEGKQGNFKNLREFVFKNIDGYFKIYSKHTPINLVRDLPQGFSALEPLVDLPIGINITRFQTLLALHRSYLTPTDSSSGWTAGAAAYYVGYLQPRTFLLKYNENGTITDAVDCALDPLSETKCTLKSFTVEKGIYQTSNFRVQPTESIVRFPNITNLCPFGEVFNATRFASVYAWNRKRISNCVADYSVLYNSASFSTFKCYGVSPTKLNDLCFTNVYADSFVIRGDEVRQIAPGQTGKIADYNYKLPDDFTGCVIAWNSNNLDSKVGGNYNYLYRLFRKSNLKPFERDISTEIYQAGSTPCNGVEGFNCYFPLQSYGFQPTNGVGYQPYRVVVLSFELLHAPATVCGPKKSTNLVKNKCVNFNFNGLTGTGVLTESNKKFLPFQQFGRDIADTTDAVRDPQTLEILDITPCSFGGVSVITPGTNTSNQVAVLYQDVNCTEVPVAIHADQLTPTWRVYSTGSNVFQTRAGCLIGAEHVNNSYECDIPIGAGICASYQTQTNSPSGAGSHHHHHHHHHH

SEQ ID NO: 4578 - protein, 715 aa, Artificial Sequence
  Description of Artificial Sequence: Synthetic polypeptide
MGILPSPGMPALLSLVSLLSVLLMGCVAETGTQCVNLTTRTQLPPAYTNSFTRGVYYPDKVFRSSVLHSTQDLFLPFFSNVTWFHAIHVSGTNGTKRFDNPVLPFNDGVYVASTEKSNIIRGWIFGTTLDSKTQSLLIVNNATNVVIKVCEFQFCNDPFLGVYYHKNNKSWMESEFRVYSSANNCTFEYVSQPFLMDLEGKQGNFKNLREFVFKNIDGYFKIYSKHTPINLVRDLPQGFSALEPLVDLPIGINITRFQTLLALHRSYLTPGDSSSGWTAGAAAYYVGYLQPRTFLLKYNENGTITDAVDCALDPLSETKCTLKSFTVEKGIYQTSNFRVQPTESIVRFPNITNLCPFGEVFNATRFASVYAWNRKRISNCVADYSVLYNSASFSTFKCYGVSPTKLNDLCFTNVYADSFVIRGDEVRQIAPGQTGKIADYNYKLPDDFTGCVIAWNSNNLDSKVGGNYNYLYRLFRKSNLKPFERDISTEIYQAGSTPCNGVEGFNCYFPLQSYGFQPTNGVGYQPYRVVVLSFELLHAPATVCGPKKSTNLVKNKCVNFNFNGLTGTGVLTESNKKFLPFQQFGRDIADTTDAVRDPQTLEILDITPCSFGGVSVITPGTNTSNQVAVLYQDVNCTEVPVAIHADQLTPTWRVYSTGSNVFQTRAGCLIGAEHVNNSYECDIPIGAGICASYQTQTNSPSGAGSHHHHHHHHHH

SEQ ID NO: 4579 - protein, 715 aa, Artificial Sequence
  Description of Artificial Sequence: Synthetic polypeptide
MGILPSPGMPALLSLVSLLSVLLMGCVAETGTQCVNLTTRTQLPPAYTNSFTRGVYYPDKVFRSSVLHSTQDLFLPFFSNVTWFHAIHVSGTNGTKRFDNPVLPFNDGVYFASTEKSNIIRGWIFGTTLDSKTQSLLIVNNATNVVIKVCEFQFCNDPFLGVYYHKNNKSWMESEFRVYSSANNCTFEYVSQPFLMDLEGKQGNFKNLREFVFKNIDGYFKIYSKHTPINLVRDLPQGFSALEPLVDLPIGINITRFQTLLALHRSYLTPGDSSSGWTAGAAAYYVGYLQPRTFLLKYNENGTITDAVDCALDPLSETKCTLKSFTVEKGIYQTSNFRVQPTESIVRFPNITNLCPFGEVFNATRFASVYAWNRKRISNCVADYSVLYNSASFSTFKCYGVSPTKLNDLCFTNVYADSFVIRGDEVRQIAPGQTGKIADYNYKLPDDFTGCVIAWNSNNLDSKVGGNYNYLYRLFRKSNLKPFERDISTEDYQAGSTPCNGVEGFNCYFPLQSYGFQPTNGVGYQPYRVVVLSFELLHAPATVCGPKKSTNLVKNKCVNFNFNGLTGTGVLTESNKKFLPFQQFGRDIADTTDAVRDPQTLEILDITPCSFGGVSVITPGTNTSNQVAVLYQDVNCTEVPVAIHADQLTPTWRVYSTGSNVFQTRAGCLIGAEHVNNSYECDIPIGAGICASYQTQTNSPSGAGSHHHHHHHHHH

SEQ ID NO: 4580 - protein, 715 aa, Artificial Sequence
  Description of Artificial Sequence: Synthetic polypeptide
MGILPSPGMPALLSLVSLLSVLLMGCVAETGTQCVNLTTRTQLPPAYTNSFTRGVYYPDKVFRSSVLHSTQDLFLPFFSNVTWFHAYHVSGTNGTKRFDNPVLPFNDGVYFASTEKSNIIRGWIFGTTLDSKTQSLLIVNNATNVVIKVCEFQFCNDPFLGVYYHKNNKSWMESEFRVYSSANNCTFEYHSQPFLMDLEGKQGNFKNLREFVFKNIDGYFKIYSKHTPINLVRDLPQGFSALEPLVDLPIGINITRFQTLLALHRSYLTPGDSSSGETAGAAAYYVGYLQPRTFLLKYNENGTITDAVDCALDPLSETKCTLKSFTVEKGIYQTSNFRVQPTESIVRFPNITNPCPFGEVFNATRFASVYAWNRKRISNCVADYSVLYNSASFSTFKCYGVSPTKLNDLCFTNVYADSFVIRGDEVRQIAPGQTGKIADYNYKLPDDFTGCVIAWNSNNLDSKVGGNYNYLYRLFRKSNLKPFERDISTEIYQAGSTPCNGVEGFNCYFPLQSYGFQPTNGPGYQPYRVVVLSFELLHAPATVCGPKKSTNLVKNKCVNFNFNGLTGTGVLTESNKKFLPFQQFGRDIADTTDAVRDPQTLEILDITPCSFGGVSVITPGTNTSNQVAVLYQDVNCTEVPDAIHADQLTPTWRVYSTGSNVFQTRAGCLIGAEHVNNSYECDIPIGAGICASYQTQTNSPSGAGSHHHHHHHHHH

SEQ ID NO: 4581 - protein, 715 aa, Artificial Sequence
  Description of Artificial Sequence: Synthetic polypeptide
MGILPSPGMPALLSLVSLLSVLLMGCVAETGTQCVNLTTRTQLPPAYTNSFTRGVYYPDKVFRSSVLHSTQDLFLPFFSNVTWFHAIHVSGTNGTKRFDNPVLPFNDGVYFASTEKSNIIRGWIFGTTLDSKTQSLLIVNNATNVVIKVCEFQFCNDPFLGVYYHKNNKSWMESEFRVYSSANNCTFEYVSQPFLMDLEGKQGNFKNLREFVFKNIDGYFKIYSKHTPINLVRDLPQGFSALEPLVDLPIGINITRFQTLLALHRSYLTPGDSSSGWTAGAAAYYVGYLQPRTFLLKYNENGTITDAVDCALDPLSETKCTLKSFTVEKGIYQTSNFRVQPTESIVRFPNITNLCPFGEVFNATRFASVYAWNRKRISNCVADYSVLYNSASFSTFKCYGVSPTKLNDLCFTNVYADRFVIRGDEVRQIAPGQTGKIADYNYKLPDDFTGCVIAWNSNNLDSKVGGNYNYLYRLFRKSNLKPFERDISTEIYQAGSTPCNGVEGFNCYFPLQSYGFQPTNGVGYQPYRVVVLSFELLHAPATVCGPKKSTNLVKNKCVNFNFNGLTGTGVLTESNKKFLPFQQFGRDIADTTDAVRDPQTLEILDITPCSFGGVSVITPGTNTSNQVAVLYQDVNCTEVPVAIHADQLTPTWRVYSTGSNVFQTRAGCLIGAEHVNNSYECDIPIGAGICASYQTQTNSPSGAGSHHHHHHHHHH

SEQ ID NO: 4582 - protein, 715 aa, Artificial Sequence
  Description of Artificial Sequence: Synthetic polypeptide
MGILPSPGMPALLSLVSLLSVLLMGCVAETGTQCVNLTTRTQLPPAYTNSFTRGVYYPDKVFRSSVLHSTQDLFLPFFSNVTWFHAIHVSGTNGTKRFDNPVLPFNDGVYFASTEKSNIIRGWIFGTTLDSKTQSLLIVNNATNVVIKVCEFQFCNDPFLGVYYHKNNKSWMESEFRVYSSANNCTFEYVSQPFLMDLEGKQGNFKNLREFVFKNIDGYFKIYSKHTPINLVRDLPQGFSALEPLVDLPIGINITRFQTLLALHRSYLTPGDSSSGWTAGAAAYYVGYLQPRTFLLKYNENGTITDAVDCALDPLSETKCTLKSFTVEKGIYQTSNFRVQPTESIVRFPNITNLCPFGEVFNATRFASVYAWNRKRISNCVADYSVLYNSASFSTFKCYGVSPTKLNDLCFTNVYADSFVIRGDEVRQIAPGQTGKIADYNYKLPDDFTGCVIAWNSNNLDSKVGGNYNYLYRLFRKSNIKPFERDISTEIYQAGSTPCNGVEGFNCYFPLQSYGFQPTNGVGYQPYRVVVLSFELLHAPATVCGPKKSTNLVKNKCVNFNFNGLTGTGVLTESNKKFLPFQQFGRDIADTTDAVRDPQTLEILDITPCSFGGVSVITPGTNTSNQVAVLYQDVNCTEVPVAIHADQLTPTWRVYSTGSNVFQTRAGCLIGAEHVNNSYECDIPIGAGICASYQTQTNSPSGAGSHHHHHHHHHH

SEQ ID NO: 4583 - protein, 715 aa, Artificial Sequence
  Description of Artificial Sequence: Synthetic polypeptide
MGILPSPGMPALLSLVSLLSVLLMGCVAETGTQCVNLTTRTQLPPAYTNSFTRGVYYPDKVFRSSVLHSTQDLFLPFFSNVTWFHAIHVSGTNGTKRFDNPVLPFNDGVYFASTEKSNIIRGWIFGTTLDSKTQSLLIVNNATNVVIKVCEFQFMNDPFLGVYYHKNNKSWMESEFRVYSSANNCTFEYVSQPFLMDLEGKQGNFKNLREFVFKNIDGYFKIYSKHTPINLVRDLPQGFSALEPLVDLPIGINITRFQTLLALHRSYLTPGDSSSGWTAGAAAYYVGYLQPRTFLLKYNENGTITDAVDCALDPLSETKCTLKSFTVEKGIYQTSNFRVQPTESIVRFPNITNLCPFGEVFNATRFASVYAWNRKRISNCVADYSVLYNSASFSTFKCYGVSPTKLNDLCFTNVYADSFVIRGDEVRQIAPGQTGKIADYNYKLPDDFTGCVIAWNSNNLDSKVGGNYNYLYRLFRKSNLKPFERDISTEIYQAGSTPCNGVEGFNCYFPLQSYGFQPTNGVGYQPYRVVVLSFELLHAPATVCGPKKSTNLVKNKCVNFNFNGLTGTGVLTESNKKFLPFQQFGRDIADTTDAVRDPQTLEILDITPCSFGGVSVITPGTNTSNQVAVLYQDVNCTEVPVAIHADQLTPTWRVYSTGSNVFQTRAGCLIGAEHVNNSYECDIPIGAGICASYQTQTNSPSGAGSHHHHHHHHHH

SEQ ID NO: 4584 - protein, 715 aa, Artificial Sequence
  Description of Artificial Sequence: Synthetic polypeptide
MGILPSPGMPALLSLVSLLSVLLMGCVAETGTQCVNLTTRTQLPPAYTNSFTRGVYYPDKVFRSSVLHSTQDLFLPFFSNVTWFHAIHVSGTNGTKRFDNPVLPFNDGVYFASTEKSNIIRGWIFGTTLDSKTQSLLIVNNATNVVIKVCEFQFCNDPFLGVYYHKNNKSWMESEFRVYSSANNCTFEYVSQPFLMDLEGKQGNFKNLREFVFKNIDGYFKIYSKHTPINLVRDLPQGFSALEPLVDLPIGINITRFQTLLALHRSYLTPGDSSSGWTAGAAAYYVGYLQPRTFLLKYNENGTITDAVDCALDPLSETKCTLKSFTVEKGIYQTSNFRVQPTESIVRFPNITNLCPFGEVFNATRFASVYAWNRKRISNCVADYSVLYNSASFSTFKCYGVSPTKLNDLCFTNVYADSFVIRGDEVRQIAPGQTGKIADYNYKLPDDFTGCVIAWNSNNLDSKVGGNYNYLYRLFRKSNLKPFERDISTEIYQAGSTPCNGVEGFNCYFPLQSYGFQPTNGVGYQPYRVVVLSFELLHAPATVCGPKKSTNLVKNKCVNFNFNGLTGTGVLTESNKKFLPFQQFGRDIADTTDAVRDPQTLEILDITPCSFGGVSVITPGTNTSNQVAVLYQDVNCTEVPVAIHADQLTPTWRKYSTGSNVFQTRAGCLIGAEHVNNSYECDIPIGAGICASYQTQTNSPSGAGSHHHHHHHHHH

SEQ ID NO: 4585 - protein, 715 aa, Artificial Sequence
  Description of Artificial Sequence: Synthetic polypeptide
MGILPSPGMPALLSLVSLLSVLLMGCVAETGTQCVNLTTRTQLPPAYTNSFTRGVYYPDKVFRSSVLHSTQDLFLPFFSNVTWFHAIHVSGTNGTKRFDNPVLPFNDGVYFASTEKSNIIRGWIFGTTLDSKTQSLLIVNNATNVVIKVCEFQFCNDPFLGVYYHKNNKSWMESEFRVYSSANNCTFEYVSQPFLMDLEGKQGNFKNLREFVFKNIDGYFKIYSKHTPINLVRDLPQGFSALEPLVDLPIGINITRFQTLLALHRSYLTPGDSSSGWTAGAAAYYVGYLQPRTFLLKYNENGTITDAVDCALDPLSETKCTLKSFTVEKGIYQTSNFRVQPTESIVRFPNITNLCPFGEVFNATRFASVYAWNRKRISNCVADYSVLYNSASFSTFKCYGVSPTKLNDLCFTNVYADSFVIRGDEVRQIAPGQTGKIADYNYKLPDDFTGCVIAWNSNNLDSKVGGNYNYLYRLFRKSNLKPFERDISTEIYQAGSTPCNGVEGFNCYFPLQSYGFQPTNGVGYQPYRVVVLSFELLHAPATVCGPKKTTNLVKNKCVNFNFNGLTGTGVLTESNKKFLPFQQFGRDIADTTDAVRDPQTLEILDITPCSFGGVSVITPGTNTSNQVAVLYQDVNCTEVPVAIHADQLTPTWRVYSTGSNVFQTRAGCLIGAEHVNNSYECDIPIGAGICASYQTQTNSPSGAGSHHHHHHHHHH

SEQ ID NO: 4586 - protein, 715 aa, Artificial Sequence
  Description of Artificial Sequence: Synthetic polypeptide
MGILPSPGMPALLSLVSLLSVLLMGCVAETGTQCVNLTTRTQLPPAYTNSFTRGVYYPDKVFRSSVLHSTQDLFLPFFSNVTWFHAIHVSGTNGTKRFDNPVLPFNDGVYFASTEKSNIIRGWIFGTTLDSKTQSLLIVNNATNVVIKVCEFQFCNDPFLGVYYHKNNKSWMESEFRVYSSANNCTFEYVSQPFLMDLEGKQGNFKNLREFVFKNIDGYFKIYSKHTPINLVRDLPQGFSALEPAVDLPIGINITRFQTLLALHRSYLTPGDSSSGWTAGAAAYYVGYLQPRTFLLKYNENGTITDAVDCALDPLSETKCTLKSFTVEKGIYQTSNFRVQPTESIVRFPNITNLCPFGEVFNATRFASVYAWNRKRISNCVADYSVLYNSASFSTFKCYGVSPTKLNDLCFTNVYADSFVIRGDEVRQIAPGQTGKIADYNYKLPDDFTGCVIAWNSNNLDSKVGGNYNYLYRLFRKSNLKPFERDISTEIYQAGSTPCNGVEGFNCYFPLQSYGFQPTNGVGYQPYRVVVLSFELLHAPATVCGPKKSTNLVKNKCVNFNFNGLTGTGVLTESNKKFLPFQQFGRDIADTTDAVRDPQTLEILDITPCSFGGVSVITPGTNTSNQVAVLYQDVNCTEVPVAIHADQLTPTWRVYSTGSNVFQTRAGCLIGAEHVNNSYECDIPIGAGICASYQTQTNSPSGAGSHHHHHHHHHH

SEQ ID NO: 4587 - protein, 715 aa, Artificial Sequence
  Description of Artificial Sequence: Synthetic polypeptide
MGILPSPGMPALLSLVSLLSVLLMGCVAETGTQCVNLTTRTQLPPAYTNSFTRGVYYPDKVFRSSVLHSTQDLFLPFFSNVTWFHAYHVSGTNGTKRFDNPVLPFNDGVYFASTEKSNIIRGWIFGTTLDSKTQSLLIVNNATNVVIKVCEFQFCNDPFLGVYYHKNNKSWMESEFRVYSSANNCTFEYHSQPFLMDLEGKQGNFKNLREFVFKNIDGYFKIYSKHTPINLVRDLPQGFSALEPLVDLPIGINITRFQTLLALHRSYLTPGDSSSGETAGAAAYYVGYLQPRTFLLKYNENGTITDAVDCALDPLSETKCTLKSFTVEKGIYQTSNFRVQPTESIVRFPNITNKCPFGEVFNATRFASVYAWNRKRISNCVADYSVLYNSASFSTFKCYGVSPTKLNDLCFTNVYADSFVIRGDEVRQIAPGQTGKIADYNYKLPDDFTGCVIAWNSNNLDSKVGGNYNYLYRLFRKSNLKPFERDISTEIYQAGSTPCNGVEGFNCYFPLQSYGFQPTNGPGYQPYRVVVLSFELLHAPATVCGPKKSTNLVKNKCVNFNFNGLTGTGVLTESNKKFLPFQQFGRDIADTTDAVRDPQTLEILDITPCSFGGVSVITPGTNTSNQVAVLYQDVNCTEVPDAIHADQLTPTWRVYSTGSNVFQTRAGCLIGAEHVNNSYECDIPIGAGICASYQTQTNSPSGAGSHHHHHHHHHH

SEQ ID NO: 4588 - protein, 715 aa, Artificial Sequence
  Description of Artificial Sequence: Synthetic polypeptide
MGILPSPGMPALLSLVSLLSVLLMGCVAETGTQCVNLTTRTQLPPAYTNSFTRGVYYPDKVFRSKVLHSTQDLFLPFFSNVTWFHAIHVSGTNGTKRFDNPVLPFNDGVYFASTEKSNIIRGWIFGTTLDSKTQSLLIVNNATNVVIKVCEFQFCNDPFLGVYYHKNNKSWMESEFRVYSSANNCTFEYVSQPFLMDLEGKQGNFKNLREFVFKNIDGYFKIYSKHTPINLVRDLPQGFSALEPLVDLPIGINITRFQTLLALHRSYLTPGDSSSGWTAGAAAYYVGYLQPRTFLLKYNENGTITDAVDCALDPLSETKCTLKSFTVEKGIYQTSNFRVQPTESIVRFPNITNLCPFGEVFNATRFASVYAWNRKRISNCVADYSVLYNSASFSTFKCYGVSPTKLNDLCFTNVYADSFVIRGDEVRQIAPGQTGKIADYNYKLPDDFTGCVIAWNSNNLDSKVGGNYNYLYRLFRKSNLKPFERDISTEIYQAGSTPCNGVEGFNCYFPLQSYGFQPTNGVGYQPYRVVVLSFELLHAPATVCGPKKSTNLVKNKCVNFNFNGLTGTGVLTESNKKFLPFQQFGRDIADTTDAVRDPQTLEILDITPCSFGGVSVITPGTNTSNQVAVLYQDVNCTEVPVAIHADQLTPTWRVYSTGSNVFQTRAGCLIGAEHVNNSYECDIPIGAGICASYQTQTNSPSGAGSHHHHHHHHHH

SEQ ID NO: 4589 - protein, 715 aa, Artificial Sequence
  Description of Artificial Sequence: Synthetic polypeptide
MGILPSPGMPALLSLVSLLSVLLMGCVAETGTQCVNLTTRTQLPPAYTNSFTRGVYYPDKVFRSSVLHSTQDLFLPFFSNVTWFHAIHVSGTNGTKRFDNPVLPFNDGVYFASTEKSNIIRGWIFGTTLDSKTQSLLIVNNATNVVIKVCEFQFCNDPFLGVYYHKNNKSWMESEFRVYDSANNCTFEYVSQPFLMDLEGKQGNFKNLREFVFKNIDGYFKIYSKHTPINLVRDLPQGFSALEPLVDLPIGINITRFQTLLALHRSYLTPGDSSSGWTAGAAAYYVGYLQPRTFLLKYNENGTITDAVDCALDPLSETKCTLKSFTVEKGIYQTSNFRVQPTESIVRFPNITNLCPFGEVFNATRFASVYAWNRKRISNCVADYSVLYNSASFSTFKCYGVSPTKLNDLCFTNVYADSFVIRGDEVRQIAPGQTGKIADYNYKLPDDFTGCVIAWNSNNLDSKVGGNYNYLYRLFRKSNLKPFERDISTEIYQAGSTPCNGVEGFNCYFPLQSYGFQPTNGVGYQPYRVVVLSFELLHAPATVCGPKKSTNLVKNKCVNFNFNGLTGTGVLTESNKKFLPFQQFGRDIADTTDAVRDPQTLEILDITPCSFGGVSVITPGTNTSNQVAVLYQDVNCTEVPVAIHADQLTPTWRVYSTGSNVFQTRAGCLIGAEHVNNSYECDIPIGAGICASYQTQTNSPSGAGSHHHHHHHHHH

SEQ ID NO: 4590 - protein, 715 aa, Artificial Sequence
  Description of Artificial Sequence: Synthetic polypeptide
MGILPSPGMPALLSLVSLLSVLLMGCVAETGTQCVNLTTRTQLPPAYTNSFTRGVYYPDKVFRSSVLHSTQDLFLPFFSNVTWFHAIHVSGTNGTKRFDNPVLPFNDGVYFASTEKSNIIRGWIFGTTLDSKTQSLLIVNNATNVVIKVCEFQFCNDPFLGVYYHKNNKSWMESEFRVYSSANNCTFEYVSQPFLMDLEGKQGNFKNLREFVFKNIDGYFKIYSKHTPINLVRDLPQGFSALEPLVDLPIGINITRFQTLLALHRSYLTPGDSSSGWTAGAAAYYVGYLQPRTFLLKYNENGTITDAVDCALDPLSETKCTLKSFTVEKGIYQTSNFRVQPTESIVRFPNITNLCPFGEVFNATRFASVYAWNRKRISNCVADYSVLYNSASFSTFKCYGVSPTKLNDLCFTNVYADSFVIRGDEVRQIAPGQTGKIADYNYKLPDDFTGCVIAWNSNNLDSKVGGNYNYLYRLFRKSNLKPFERDISTEIYQAGSTPCNGVEGFNCYFPLQSYGFQPTNGVGYQPYRVVVLSFELLHAPATVCGPKKSTNLVKNECVNFNFNGLTGTGVLTESNKKFLPFQQFGRDIADTTDAVRDPQTLEILDITPCSFGGVSVITPGTNTSNQVAVLYQDVNCTEVPVAIHADQLTPTWRVYSTGSNVFQTRAGCLIGAEHVNNSYECDIPIGAGICASYQTQTNSPSGAGSHHHHHHHHHH

SEQ ID NO: 4591 - protein, 715 aa, Artificial Sequence
  Description of Artificial Sequence: Synthetic polypeptide
MGILPSPGMPALLSLVSLLSVLLMGCVAETGTQCVNLTTRTQLPPAYTNSFTRGVYYPDKVFRSSVLHSTQDLFLPFFSNVTWFHAIHVSGTNGTKRFDNPVLPFNDGVYFASTEKSNIIRGWIFGTTLDSKTQSLLIVNNATNVVIKVCEFQFCNDPFLGVYYHKNNKSWMESEFRVYSSANNCTFEYVSQPFLMDLEGKQGNFKNLREFVFKNIDGYFKIYSKHTPINLVRDLPQGFSALEPLVDLPIGINITRFQTLLALHRSYLTPGDSSSGWTAGAAAYYVGYLQPRTFLLKYNENGTITDAVDCALDPLSETKCTLKSFTVEKGIYQTSNFRVQPTESIVRFPNITNLCPFGEVFNATRFASVYAWNRKRISNCVADYSVLYNSASFSTFKCYGVSPTKLNDLCFTNVYADSFVIRGDEVRQIAPGQTGKIADYNYKLPDDFTGCVIAWNSNNLDSKVGGNYNYLYRLFRKSNLKPFERDISTEIYQAGSTPCNGVEGFNCYFPLQSYGFQPTNGVGYQPYRVVVLSFELLHAPATVCGPKKSTNLVKNKCVNFNFNGLTGTGVLTESNKKFLPFQQFGRDIADTTDAVRDPQTLEILDITPCSTGGVSVITPGTNTSNQVAVLYQDVNCTEVPVAIHADQLTPTWRVYSTGSNVFQTRAGCLIGAEHVNNSYECDIPIGAGICASYQTQTNSPSGAGSHHHHHHHHHH

SEQ ID NO: 4592 - protein, 715 aa, Artificial Sequence
  Description of Artificial Sequence: Synthetic polypeptide
MGILPSPGMPALLSLVSLLSVLLMGCVAETGTQCVNLTTRTQLPPAYTNSFTRGVYYPDKVFRSSVLHSTQDLFLPFFSNVTWFHAKHVSGTNGTKRFDNPVLPFNDGVYFASTEKSNIIRGWIFGTTLDSKTQSLLIVNNATNVVIKVCEFQFCNDPFLGVYYHKNNKSWMESEFRVYSSANNCTFEYHSQPFLMDLEGKQGNFKNLREFVFKNIDGYFKIYSKHTPINLVRDLPQGFSALEPLVDLPIGINITRFQTLLALHRSYLTPGDSSSGETAGAAAYYVGYLQPRTFLLKYNENGTITDAVDCALDPLSETKCTLKSFTVEKGIYQTSNFRVQPTESIVRFPNITNKCPFGEVFNATRFASVYAWNRKRISNCVADYSVLYNSASFSTFKCYGVSPTKLNDLCFTNVYADSFVIRGDEVRQIAPGQTGKIADYNYKLPDDFTGCVIAWNSNNLDSKVGGNYNYLYRLFRKSNLKPFERDISTEIYQAGSTPCNGVEGFNCYFPLQSYGFQPTNGPGQQPYRVVVLSFELLHAPATVCGPKKSTNLVKNKCVNFNFNGLTGTGVLTESNKKFLPFQQFGRDIADTTDAVRDPQTLEILDITPCSFGGVSVITPGTNTSNQVAVLYQDVNCTEVPDAIHADQLTPTWRVYSTGSNVFQTRAGCLIGAEHVNNSYECDIPIGAGICASYQTQTNSPSGAGSHHHHHHHHHH

SEQ ID NO: 4593 - protein, 715 aa, Artificial Sequence
  Description of Artificial Sequence: Synthetic polypeptide
MGILPSPGMPALLSLVSLLSVLLMGCVAETGTQCVNLTTRTQLPPAYTNSFTRGVYYPDKVFRSSVLHSTQDLFLPFFSNVTWFHAYHVSGTNGTKRFDNPVLPFNDGVYFASTEKSNIIRGWIFGTTLDSKTQSLLIVNNATNVVIKVCEFQFCNDPFLGVYYHKNNKSWMESEFRVYSSANNCTFEYHSQPFLMDLEGKQGNFKNLREFVFKNIDGYFKIYSKHTPINLVRDLPQGFSALEPLVDLPIGINITRFQTLLALHRSYLTPGDSSSGETAGAAAYYVGYLQPRTFLLKYNENGTITDAVDCALDPLSETKCTLKSFTVEKGIYQTSNFRVQPTESIVRFPNITNKCPFGEVFNATRFASVYAWNRKRISNCVADYSVLYNSASFSTFKCYGVSPTKLNDLCFTNVYADSFVIRGDEVRQIAPGQTGKIADYNYKLPDDFTGCVIAWNSNNLDSKVGGNYNYLYRLFRKSNLKPFERDISTEIYQAGSTPCNGVEGFNCYFPLQSYGFQPTNGPGQQPYRVVVLSFELLHAPATVCGPKKSTNLVKNKCVNFNFNGLTGTGVLTESNKKFLPFQQFGRDIADTTDAVRDPQTLEILDITPCSFGGVSVITPGTNTSNQVAVLYQDVNCTEVPDAIHADQLTPTWRVYSTGSNVFQTRAGCLIGAEHVNNSYECDIPIGAGICASYQTQTNSPSGAGSHHHHHHHHHH

SEQ ID NO: 4594 - protein, 715 aa, Artificial Sequence
  Description of Artificial Sequence: Synthetic polypeptide
MGILPSPGMPALLSLVSLLSVLLMGCVAETGTQCVNLTTRTQLPPAYTNSFTRGVYYPDKVFRSSVLHSTQDLFLPFFSNVTWFHAIHVSGTNGTKRFDNPVVPFNDGVYFASTEKSNIIRGWIFGTTLDSKTQSLLIVNNATNVVIKVCEFQFCNDPFLGVYYHKNNKSWMESEFRVYSSANNCTFEYVSQPFLMDLEGKQGNFKNLREFVFKNIDGYFKIYSKHTPINLVRDLPQGFSALEPLVDLPIGINITRFQTLLALHRSYLTPGDSSSGWTAGAAAYYVGYLQPRTFLLKYNENGTITDAVDCALDPLSETKCTLKSFTVEKGIYQTSNFRVQPTESIVRFPNITNLCPFGEVFNATRFASVYAWNRKRISNCVADYSVLYNSASFSTFKCYGVSPTKLNDLCFTNVYADSFVIRGDEVRQIAPGQTGKIADYNYKLPDDFTGCVIAWNSNNLDSKVGGNYNYLYRLFRKSNLKPFERDISTEIYQAGSTPCNGVEGFNCYFPLQSYGFQPTNGVGYQPYRVVVLSFELLHAPATVCGPKKSTNLVKNKCVNFNFNGLTGTGVLTESNKKFLPFQQFGRDIADTTDAVRDPQTLEILDITPCSFGGVSVITPGTNTSNQVAVLYQDVNCTEVPVAIHADQLTPTWRVYSTGSNVFQTRAGCLIGAEHVNNSYECDIPIGAGICASYQTQTNSPSGAGSHHHHHHHHHH

SEQ ID NO: 4595 - protein, 715 aa, Artificial Sequence
  Description of Artificial Sequence: Synthetic polypeptide
MGILPSPGMPALLSLVSLLSVLLMGCVAETGTQCVNLTTRTQLPPAYTNSFTRGVYYPDKVFRSSVLHSTQDLFLPFFSNVTWFHAIHVSGTNGTKRFDNPVLPFNDGVYFASTEKSNIIRGWIFGTTLDSKTQSLLIVNNATNVVIKVCEFQFCNDPFLGVYYHKNNKSWMESEFRVYSSANNCTFEYVSQPFLMDLEGKQGNFKNLREFVFKNIDGYFKIYSKHTPINLVRDLPQGFSALEPLVDLPIGINITRFQTLLALHRSYLTPGDSSSGWTAGAAAYYVGYLQPRTFLLKYNENGTITDAVDCSLDPLSETKCTLKSFTVEKGIYQTSNFRVQPTESIVRFPNITNLCPFGEVFNATRFASVYAWNRKRISNCVADYSVLYNSASFSTFKCYGVSPTKLNDLCFTNVYADSFVIRGDEVRQIAPGQTGKIADYNYKLPDDFTGCVIAWNSNNLDSKVGGNYNYLYRLFRKSNLKPFERDISTEIYQAGSTPCNGVEGFNCYFPLQSYGFQPTNGVGYQPYRVVVLSFELLHAPATVCGPKKSTNLVKNKCVNFNFNGLTGTGVLTESNKKFLPFQQFGRDIADTTDAVRDPQTLEILDITPCSFGGVSVITPGTNTSNQVAVLYQDVNCTEVPVAIHADQLTPTWRVYSTGSNVFQTRAGCLIGAEHVNNSYECDIPIGAGICASYQTQTNSPSGAGSHHHHHHHHHH

SEQ ID NO: 4596 - protein, 715 aa, Artificial Sequence
  Description of Artificial Sequence: Synthetic polypeptide
MGILPSPGMPALLSLVSLLSVLLMGCVAETGTQCVNLTTRTQLPPAYTNSFTRGVYYPDKVFRSSVLHSTQDLFLPFFSNVTWFHAIHVSGTNGTKRFDNPVLPFNDGVYFASTEKSNIIRGWIFGTTLDSKTQSLLIVNNATNVVIKVCEFQFCNDPFLGVYYHKNNKSWMESEFRVYSSANNCTFEYVSQPFLMDLEGKQGNFKNLREFVFKNIDGYFKIYSKHTPINLVRDLPQGFSALEPLVDLPIGINITRFQTLLALHRSYLTPGDSSSGWTAGAAAYYVGYLQPRTFLLKYNENGTITDAVDCALDPLSETKCTLKSFTVEKGIYQTSNFRVQPTESIVRFPNITNLCPFGEVFNATRFASVYAWNRKRISNCVADYSVLYNSASFSTFKCYGVSPTKLNDLCFTNVYADSFVIRGDEVRQIAPGQTGKIADYNYKLPDDFTGCVIAWNSNNLDSKVGGNYNYLYRLFRKSNLKPFERDISTEIYQAGSTPCNGVEGFNCYFPLQSYGFQPTFGVGYQPYRVVVLSFELLHAPATVCGPKKSTNLVKNKCVNFNFNGLTGTGVLTESNKKFLPFQQFGRDIADTTDAVRDPQTLEILDITPCSFGGVSVITPGTNTSNQVAVLYQDVNCTEVPVAIHADQLTPTWRVYSTGSNVFQTRAGCLIGAEHVNNSYECDIPIGAGICASYQTQTNSPSGAGSHHHHHHHHHH

SEQ ID NO: 4597 - protein, 715 aa, Artificial Sequence
  Description of Artificial Sequence: Synthetic polypeptide
MGILPSPGMPALLSLVSLLSVLLMGCVAETGTQCVNLTTRTQLPPAYTNSFTRGVYYPDKVFRSSVLHSTQDLFLPFFSNVTWFHAIHVSGTNGTKRFDNPVLPFNDGVYFASTEKSNIIRGWIFGTTLDSKTQSLLIVNNATNVVIKVCEFQFYNDPFLGVYYHKNNKSWMESEFRVYSSANNCTFEYVSQPFLMDLEGKQGNFKNLREFVFKNIDGYFKIYSKHTPINLVRDLPQGFSALEPLVDLPIGINITRFQTLLALHRSYLTPGDSSSGWTAGAAAYYVGYLQPRTFLLKYNENGTITDAVDCALDPLSETKCTLKSFTVEKGIYQTSNFRVQPTESIVRFPNITNLCPFGEVFNATRFASVYAWNRKRISNCVADYSVLYNSASFSTFKCYGVSPTKLNDLCFTNVYADSFVIRGDEVRQIAPGQTGKIADYNYKLPDDFTGCVIAWNSNNLDSKVGGNYNYLYRLFRKSNLKPFERDISTEIYQAGSTPCNGVEGFNCYFPLQSYGFQPTNGVGYQPYRVVVLSFELLHAPATVCGPKKSTNLVKNKCVNFNFNGLTGTGVLTESNKKFLPFQQFGRDIADTTDAVRDPQTLEILDITPCSFGGVSVITPGTNTSNQVAVLYQDVNCTEVPVAIHADQLTPTWRVYSTGSNVFQTRAGCLIGAEHVNNSYECDIPIGAGICASYQTQTNSPSGAGSHHHHHHHHHH

SEQ ID NO: 4598 - protein, 715 aa, Artificial Sequence
  Description of Artificial Sequence: Synthetic polypeptide
MGILPSPGMPALLSLVSLLSVLLMGCVAETGTQCVNLTTRTQLPPAYTNSFTRGVYYPDKVFRSSVLHSTQDLFLPFFSNVTWFHAIHVSGTNGTKRFDNPVLPFNDGVYFASTEKSNIIRGWIFGTTLDSKTQSLLIVNNATNVVIKVCEFQFCNDPFLGVYYHKNNKSWMESEFRVYSSANNCTFEYVSQPFLMDLEGKQGNFKNLREFVFKNIDGYFKIYSKHTPINLVRDLPQGFSALEPLVDLPIGINITRFQTLLALHRSYLTPGDSSSGWTAGAAAYYVGYLQPRTFLLKYNENGTITDAVDCALDPLSETKCTLKSFTVEKGIYQTSNFRVQPTESIVRFPNITNLCPFGEVFNATRFASVYAWNRKRISNCVADYSVLYNSASFSTFKCYGVSPTKLNDLCFTNVYADSFVIRGDEVRQIAPGQTGKIADYNYKLPDDFTGCVIAWNSNNLDSKVGGNYNYLYRLFRKSNLKPFERDISTEIYQAGSTPCNGVEGFNCYFPLQSYGFQPTNGVGYQPYRVVVLSFELLHAPATVCGPKKSTNLVKNKCVNFNFNGLTGTGVLTESNKKFLPFQQFGRDIADTTDAVRDPQTLEILDITPCSFGGVSVITPGTNTSNQVAVLYQDVNCTEVPVAIHADQLTPTWRVYSTGSNVFQTRAGCLIGAEHVNNSYECDIPIGAGICATYQTQTNSPSGAGSHHHHHHHHHH

SEQ ID NO: 4599 - protein, 715 aa, Artificial Sequence
  Description of Artificial Sequence: Synthetic polypeptide
MGILPSPGMPALLSLVSLLSVLLMGCVAETGTQCVNLTTRTQLPPAYTNSFTRGVYYPDKVFRSSVLHSTQDLFLPFFSNVTWFHAIHVSGTNGTKRFDNPVLPFNDGVYFASTEKSNIIRGWIFGTTLDSKTQSLLIVNNATNVVIKVCEFQFCNDPFLGVYYHKNNKSWMESEFRVYSSANNCTFEYVSQPFLMDLEGKQGNFKNLREFVFKNIDGYFKIYSKHTPINLVRDLPQGFSALEPLVDLPIGINITRFQTLLALHRSYLTPGDSSSGWTAGAAAYYVGYLQPRTFLLKYNENGTITDAVDCALDPLSETKCTLKSFTVEKGIYQTSNFRVQPTESIVRFPNITNLCPFGEVFNATRFASVYAWNRKRISNCVADYSVLYNSASFSTFKCYGVSPTKLNDLCFTNVYADSFVIRGDEVRQIAPGQTGKIADYNYKLPDDFTGCVIAWNSNNLDSKVGGNYNYLYRLFRKSNLKPFERDISTEIYQAGSTPCNGVEGFNCYFPLQSYGFQPTNGVGYQPYRVVVLSFELLHAPATVCGPKKSTNLVKNKCVNFNFNGLTGTGFLTESNKKFLPFQQFGRDIADTTDAVRDPQTLEILDITPCSFGGVSVITPGTNTSNQVAVLYQDVNCTEVPVAIHADQLTPTWRVYSTGSNVFQTRAGCLIGAEHVNNSYECDIPIGAGICASYQTQTNSPSGAGSHHHHHHHHHH

SEQ ID NO: 4600 - protein, 715 aa, Artificial Sequence
  Description of Artificial Sequence: Synthetic polypeptide
MGILPSPGMPALLSLVSLLSVLLMGCVAETGTQCVNLTTRTQLPPAYTNSFTRGVYYPDKVFRSSVLHSTQDLFLPFFSNVTWFHAIHVSGTNGTKRFDNPVLPFNDGVYFASTEKSNIIRGWIFGTTLDSKTQSLLIVNNATNVVIKVCEFQFCNDPFLGVYYHKNNKSWMESEFRVYSSANNCTFEYVSQPFLMDLEGKQGNFKNLREFVFKNIDGYFKIYSRHTPINLVRDLPQGFSALEPLVDLPIGINITRFQTLLALHRSYLTPGDSSSGWTAGAAAYYVGYLQPRTFLLKYNENGTITDAVDCALDPLSETKCTLKSFTVEKGIYQTSNFRVQPTESIVRFPNITNLCPFGEVFNATRFASVYAWNRKRISNCVADYSVLYNSASFSTFKCYGVSPTKLNDLCFTNVYADSFVIRGDEVRQIAPGQTGKIADYNYKLPDDFTGCVIAWNSNNLDSKVGGNYNYLYRLFRKSNLKPFERDISTEIYQAGSTPCNGVEGFNCYFPLQSYGFQPTNGVGYQPYRVVVLSFELLHAPATVCGPKKSTNLVKNKCVNFNFNGLTGTGVLTESNKKFLPFQQFGRDIADTTDAVRDPQTLEILDITPCSFGGVSVITPGTNTSNQVAVLYQDVNCTEVPVAIHADQLTPTWRVYSTGSNVFQTRAGCLIGAEHVNNSYECDIPIGAGICASYQTQTNSPSGAGSHHHHHHHHHH

SEQ ID NO: 4601 - protein, 715 aa, Artificial Sequence
  Description of Artificial Sequence: Synthetic polypeptide
MGILPSPGMPALLSLVSLLSVLLMGCVAETGTQCVNLTTRTQLPPAYTNSFTRGVYYPDKVFRSSVLHSTQDLFLPFFSNVTWFHAIHVSGTNGTKRFDNPVLPFNDGVYFASTEKSNIIRGWIFGTTLDSKTQSLLIVNNATNVVIKVCEFQFCNDPFLGVYYHKNNKSWMESEFRVYSSANNCTFEYHSQPFLMDLEGKQGNFKNLREFVFKNIDGYFKIYSKHTPINLVRDLPQGFSALEPLVDLPIGINITRFQTLLALHRSYLTPGDSSSGWTAGAAAYYVGYLQPRTFLLKYNENGTITDAVDCALDPLSETKCTLKSFTVEKGIYQTSNFRVQPTESIVRFPNITNLCPFGEVFNATRFASVYAWNRKRISNCVADYSVLYNSASFSTFKCYGVSPTKLNDLCFTNVYADSFVIRGDEVRQIAPGQTGKIADYNYKLPDDFTGCVIAWNSNNLDSKVGGNYNYLYRLFRKSNLKPFERDISTEIYQAGSTPCNGVEGFNCYFPLQSYGFQPTNGVGYQPYRVVVLSFELLHAPATVCGPKKSTNLVKNKCVNFNFNGLTGTGVLTESNKKFLPFQQFGRDIADTTDAVRDPQTLEILDITPCSFGGVSVITPGTNTSNQVAVLYQDVNCTEVPVAIHADQLTPTWRVYSTGSNVFQTRAGCLIGAEHVNNSYECDIPIGAGICASYQTQTNSPSGAGSHHHHHHHHHH

SEQ ID NO: 4602 - protein, 715 aa, Artificial Sequence
  Description of Artificial Sequence: Synthetic polypeptide
MGILPSPGMPALLSLVSLLSVLLMGCVAETGTQCVNLTTRTQLPPAYTNSFTRGIYYPDKVFRSSVLHSTQDLFLPFFSNVTWFHAIHGSGTNGTKRFDNPVLPFNDGVYSAAIEKSNIIRGWIFGTTLDSKTQSLLIVNNATNVVIKVCEFQFCNDPFLGVYYHKNNKSWMESEFRVYSSANNCTFEYVSQPFLMDLEGKQGNFKNLREFVFKNIDGYFKIYSKHTPINLVRDLPQGFSPLEPLVDLPIGINITRFLTVLALHRSYLTPGDSSSGWTAGAAAYYVGYLQPRTFLLKYNENGTITDAVDCALDPLSETKCTLKSFTVEKGIYQTSNFRVQPTESIVRFPNITNLCPFGEVFNATRFASVYAWNRKRISNCVADYSVLYNSASFSTFKCYGVSPTKLNDLCFTNVYADSFVIRGDEVRQIAPGQTGKIADYNYKLPDDFTGCVIAWNSNNLDSKVGGNYNYLYRLFRKSNLKPFERDISTEIYQAGSTPCNGVEGFNCYFPLQSYGFQPTNGVGYQPYRVVVLSFELLHAPATVCGPKKSTNLVKNKCVNFNFNGLTGTGVLTESNKKFLPFQQFGRDIADTTDAVRDPQTLEILDITPCSFGGVSVITPGTNTSNQVAVLYQDVNCTEVPVAIHADQLTPTWRVYSTGSNVFQTRAGCLIGAEHVNNSYECDIPIGAGICASYQTQTNSPSGAGSHHHHHHHHHH

SEQ ID NO: 4603 - protein, 715 aa, Artificial Sequence
  Description of Artificial Sequence: Synthetic polypeptide
MGILPSPGMPALLSLVSLLSVLLMGCVAETGTQCVNLTTRTQLPPAYTNSFTRGVYYPDKVFRSSVLHSTQDLFLPFFSNVTWFHAIHVSGTNGTKRFDNPVLPFNDGVYFASTEKSNIIRGWIFGTTLDSKTQSLLIVNNATNVVIKVCEFQFCNDPFLGVYYHKNNKSWMESEFRVYSSANNCTFEYVSQPFLMDLEGKQGNFKNLREFVFKNIDGYFKIYSKHTPINLVRDLPQGFSALEPLVDLPIGINITRFQTLLALHRSYLTPGDSSSGWTAGAAAYYVGYLQPRTFLLKYNENGTITDAVDCALDPLSETKCTLKSFTVEKGIYQTSNFRVQPTESIVRFPNITNLCPFGEVFNATRFASVYAWNRKRISNCVADYSVLYNSASFSTFKCYGVSPTKLNDLCFTNVYADSFVIRGDEVRQIAPGQTGKIADYNYKLPDDFTGCVIAWNSNNLDSKVGGNYNYLYRLFRKSNLKPFERDISTEIYQAGSTPCNGVEGFNCYFPLQSYGFQPTNGVGYQPYRVVVLSFELLHAPATVCGPKKSTNLVKNKCVNFNFNGLTGTGVLTESNKKFLPFQQFGRDIADTTDAVRDPQTPEILDITPCSFGGVSVITPGTNTSNQVAVLYQDVNCTEVPVAIHADQLTPTWRVYSTGSNVFQTRAGCLIGAEHVNNSYECDIPIGAGICASYQTQTNSPSGAGSHHHHHHHHHH

SEQ ID NO: 4604 - protein, 715 aa, Artificial Sequence
  Description of Artificial Sequence: Synthetic polypeptide
MGILPSPGMPALLSLVSLLSVLLMGCVAETGTQCVNLTTRTQLPPAYTNSFTRGVYYPDKVFRSSVLHSTQDLFLPFFSNVTWFHAIHVSGTNGTKRFDNPVLPFNDGVYFASTEKSNIIRGWIFGTTLDSKTQSLLIVNNATNVVIKVCEFQFCNDPFLGVYYHKNNKSWMESEFRVYSSANNCTFEYVSQPFLMDLEGKQGNFKNLREFVFKNIDGYFKIYSKHTPINLVRDLPQGFSALEPLVDLPIGINITRFQTLLALHRSYLTPGDSSSGWTAGAAAYYVGYLQPRTFLLKYNENGTITDAVDCALDPLSETKCTLKSFTVEKGIYQTSNFRVQPTESIVRFPNITNLCPFGEVFNATRFASVYAWNRKRISNCVADYSVLYNSASFSTFKCYGVSPTKLNDLCFTNVYADSFVIRGDEVRQIAPGQTGKIADYNYKLPDDFTGCVIAWNSNNLDSKVGGNYNYLYRLFRKSNLKPFERDISTEIYQAGSTPCNGVEGFNCYFPLQSYGFQPTNGVGYQPYRVVVLSFEDLHAPATVCGPKKSTNLVKNKCVNFNFNGLTGTGVLTESNKKFLPFQQFGRDIADTTDAVRDPQTLEILDITPCSFGGVSVITPGTNTSNQVAVLYQDVNCTEVPVAIHADQLTPTWRVYSTGSNVFQTRAGCLIGAEHVNNSYECDIPIGAGICASYQTQTNSPSGAGSHHHHHHHHHH

SEQ ID NO: 4605 - protein, 715 aa, Artificial Sequence
  Description of Artificial Sequence: Synthetic polypeptide
MGILPSPGMPALLSLVSLLSVLLMGCVAETGTQCVNLTTRTQLPPAYTNSFTRGVYYPDKVFRSSVLHSTQDLFLPFFSNVTWFHAIHVSGTNGTKRFDNPVLPFNDGVYFASTEKSNIIRGWIFGTTLDSKTQSLLIVNNATNVVIKVCEFQFCNDPFLGVYYHKNNKSWMESEFRVYSSANNCTFEYVSQPFLMDLEGKQGNFKNLREFVFKNIDGYFKIYSKHTPINLVRDLPQGFSALEPLVDLPIGINITRFQTLLALHRSYLTPGDSSSGWTAGAAAYYVGYLQPRTFLLKYNENGTITDAVDCALDPLSETKCTLKSFTVEKGIYQTSNFRVQPTESIVRFPNITNLCPFGEVFNATRFASVYAWNRKRISNCVADYSVLYNSASFSTFKCYGVSPTKLNDLCFTNVYADSFVIRGDEVRQIAPGQTGKIADYNYKLPDDFTGCVIAWNSNNLDSKVGGNYNYLYRLFRKSNLKPFERDISTEIYQAGSTPCNGVEGFNCYFPLQSYGFQPTNGVGYQPYRVVVLSFELLHAPATVCGPKKSTNLVKNKCVNFNFNGLTGTGVLTESNKKFLPFQQFGRDIADTTDAVRDPQTLEILDITPCSFGGVSVITPGTNTSNQVAVLYQDVNCTEVQVAIHADQLTPTWRVYSTGSNVFQTRAGCLIGAEHVNNSYECDIPIGAGICASYQTQTNSPSGAGSHHHHHHHHHH

SEQ ID NO: 4606 - protein, 715 aa, Artificial Sequence
  Description of Artificial Sequence: Synthetic polypeptide
MGILPSPGMPALLSLVSLLSVLLMGCVAETGTQCVNLTTRTQLPPAYTNSFTRGVYYPDKVFRSSVLHSTQDLFLPFFSNVTWFHAIHVSGTNGTKRFDNPVLPFNDGVYFASTEKSNIIRGWIFGTTLDSKTQSLLIVNNATNVVIKVCEFQFCNDPFLGVYYHKNNKSWMESEFRVYSSANNCTFEYVSQPFLMDLEGKQGNFKNLREFVFKNIDGYFKIYSKHTPINLVRDLPQGFSALEPLVDLPIGINITRFQTLLALHRSYLTPGDSSSGWTAGAAAYYVGYLQPRTFLLKYNENGTITDAVDCALDPLSETKCTLKSFTVEKGIYQTTNFRVQPTESIVRFPNITNLCPFGEVFNATRFASVYAWNRKRISNCVADYSVLYNSASFSTFKCYGVSPTKLNDLCFTNVYADSFVIRGDEVRQIAPGQTGKIADYNYKLPDDFTGCVIAWNSNNLDSKVGGNYNYLYRLFRKSNLKPFERDISTEIYQAGSTPCNGVEGFNCYFPLQSYGFQPTNGVGYQPYRVVVLSFELLHAPATVCGPKKSTNLVKNKCVNFNFNGLTGTGVLTESNKKFLPFQQFGRDIADTTDAVRDPQTLEILDITPCSFGGVSVITPGTNTSNQVAVLYQDVNCTEVPVAIHADQLTPTWRVYSTGSNVFQTRAGCLIGAEHVNNSYECDIPIGAGICASYQTQTNSPSGAGSHHHHHHHHHH

SEQ ID NO: 4607 - protein, 715 aa, Artificial Sequence
  Description of Artificial Sequence: Synthetic polypeptide
MGILPSPGMPALLSLVSLLSVLLMGCVAETGTQCVNLTTRTQLPPAYTNSFTRGVYYPDKVFRSSVLHSTQDLFLPFFSNVTWFHAYHVSGTNGTKRFDNPVLPFNDGVYFASTEKSNIIRGWIFGTTLDSKTQSLLIVNNATNVVIKVCEFQFCNDPFLGVYYHKNNKSWMESEFRVYSSANNCTFEYHSQPFLMDLEGKQGNFKNLREFVFKNIDGYFKIYSKHTPINLVRDLPQGFSALEPLVDLPIGINITRFQTLLALHRSYLTPGDSSSGWTAGAAAYYVGYLQPRTFLLKYNENGTITDAVDCALDPLSETKCTLKSFTVEKGIYQTSNFRVQPTESIVRFPNITNHCPFGEVFNATRFASVYAWNRKRISNCVADYSVLYNSASFSTFKCYGVSPTKLNDLCFTNVYADSFVIRGDEVRQIAPGQTGKIADYNYKLPDDFTGCVIAWNSNNLDSKVGGNYNYLYRLFRKSNLKPFERDISTEIYQAGSTPCNGVEGFNCYFPLQSYGFQPTNGPGQQPYRVVVLSFELLHAPATVCGPKKSTNLVKNKCVNFNFNGLTGTGVLTESNKKFLPFQQFGRDIADTTDAVRDPQTLEILDITPCSFGGVSVITPGTNTSNQVAVLYQDVNCTEVPDAIHADQLTPTWRVYSTGSNVFQTRAGCLIGAEHVNNSYECDIPIGAGICASYQTQTNSPSGAGSHHHHHHHHHH

SEQ ID NO: 4608 - protein, 715 aa, Artificial Sequence
  Description of Artificial Sequence: Synthetic polypeptide
MGILPSPGMPALLSLVSLLSVLLMGCVAETGTQCVNLTTRTQLPPAYTNSFTRGVYYPDKVFRSSVLHSTQDLFLPFFSNVTWFHAIHVSGTNGTKRFDNPVLPFNDGVYFASTEKSNIIRGWIFGTTLDSKTQSLLIVNNATNVVIKVCEFQFCNDPFLGVYYHKNNKSWMESEFRVYSSANNCTFEYVSQPFLMDLEGKQGNFKNLREFVFKNIDGYFKIYSKHTPINLVRDLPQGFSALEPLVDLPIGINITRFQPLLALHRSYLTPGDSSSGWTAGAAAYYVGYLQPRTFLLKYNENGTITDAVDCALDPLSETKCTLKSFTVEKGIYQTSNFRVQPTESIVRFPNITNLCPFGEVFNATRFASVYAWNRKRISNCVADYSVLYNSASFSTFKCYGVSPTKLNDLCFTNVYADSFVIRGDEVRQIAPGQTGKIADYNYKLPDDFTGCVIAWNSNNLDSKVGGNYNYLYRLFRKSNLKPFERDISTEIYQAGSTPCNGVEGFNCYFPLQSYGFQPTNGVGYQPYRVVVLSFELLHAPATVCGPKKSTNLVKNKCVNFNFNGLTGTGVLTESNKKFLPFQQFGRDIADTTDAVRDPQTLEILDITPCSFGGVSVITPGTNTSNQVAVLYQDVNCTEVPVAIHADQLTPTWRVYSTGSNVFQTRAGCLIGAEHVNNSYECDIPIGAGICASYQTQTNSPSGAGSHHHHHHHHHH

SEQ ID NO: 4609 - protein, 715 aa, Artificial Sequence
  Description of Artificial Sequence: Synthetic polypeptide
MGILPSPGMPALLSLVSLLSVLLMGCVAETGTQCVNLTTRTQLPPAYTNSFTRGVYYPDKVFRSSVLHSTQDLFLPFFSNVTWFHAIHVSGTNGTKRFDNPVLPFNDGVYFASTEKSNIIRGWIFGTTLDSKTQSLLIVNNATNVVIKVCEFQFCNDPFLGVYYHKNNKSWMESEFRVYSSANNCTFEYVSQPFLMDLEGKQGNFKNLREFVFKNIDGYFKIYSKHTPINLVRDLPQGFSALEPLVDLPIGINITRFQTLLALHRSYLTPGDSSSGWTAGAAAYYVGYLQPRTFLLKYNENGTITDAVDCALDPLSETKCTLKSFTVEKGIYQTSNFRVQPTESIVRFPNITNLCPFGEVFNATRFASVYAWNRKRISNCVADYSVLYNSASFSTFKCYGVSPTKLNDLCFTNVYADSFVIRGDEVRQIAPGQTGKIADYNYKLPDDFTGCVIAWNSNNLDSKVGGNYNYLYRLFRKSNLKPFERDISTEIYQAGSTPCNGVEGFNCYFPLQSYGFQPTNGVGYQPYRVVVLSFELLHAPATVCGPKKSTNLVKNKCVNFNFNGLTGTGVLTESNKKFLPFQQFGRDIADTTDAVRDPQTLEILDITPCSFGGVSVITPGTNTSNQVAVLYQDVNCTEVPKAIHADQLTPTWRVYSTGSNVFQTRAGCLIGAEHVNNSYECDIPIGAGICASYQTQTNSPSGAGSHHHHHHHHHH

SEQ ID NO: 4610 - protein, 715 aa, Artificial Sequence
  Description of Artificial Sequence: Synthetic polypeptide
MGILPSPGMPALLSLVSLLSVLLMGCVAETGTQCVNLTTRTQLPPAYTNSFTRGVYYPDKVFRSSVLHSTQDLFLPFFSNVTWFHAIHVSGTNGTKRFDNPVLPFNDGVYFASTEKSNIIRGWIFGTTLDSKTQSLLIVNNATNVVIKVCEFQFCNDPFLGVYYHKNNKSWMESEFRVYSSANNCTFEYVSQPFLMDLEGKQGNFKNLREFVFKNIDGYFKIYSKHTPINLVRDLPQGFSALEPLVDLPIGINITRFQTLLALHRSYLTPGDSSSGWTAGAAAYYVGYLQPRTFLLKYNENGTITDAVDCALDPLSETKCTLKSFTVEKGIYQTSNFRVQPTESIVRFPNITNLCPFGEVFNATRFASVYAWNRKRISNCVADYSVLYNSASFSTFKCYGVSPTKLNDLCFTNVYADSFVIRGDEVRQIAPGQTGKIADYNYKLPDDFTGCVIAWNSNNLDSKVGGNYNYLYRLFRKSNLKPFERDISTEIYQAGSTPCNGVEGFNCYFPLQSYGFQPTNGVGYQPYRVVVLSFELLHAPATVCGPKKSTNLVKNKCVNFNFNGLTGTGVLTESNKKFLPFQQFGRDIADTTDAVRDPQTLEILDITPCSAGGVSVITPGTNTSNQVAVLYQDVNCTEVPVAIHADQLTPTWRVYSTGSNVFQTRAGCLIGAEHVNNSYECDIPIGAGICASYQTQTNSPSGAGSHHHHHHHHHH

SEQ ID NO: 4611 - protein, 715 aa, Artificial Sequence
  Description of Artificial Sequence: Synthetic polypeptide
MGILPSPGMPALLSLVSLLSVLLMGCVAETGTQCVNLTTRTQLPPAYTNSFTRGVYYPDKVFRSSVLHSTQDLFLPFFSNVTWFHAHHVSGTNGTKRFDNPVLPFNDGVYFASTEKSNIIRGWIFGTTLDSKTQSLLIVNNATNVVIKVCEFQFCNDPFLGVYYHKNNKSWMESEFRVYSSANNCTFEYVSQPFLMDLEGKQGNFKNLREFVFKNIDGYFKIYSKHTPINLVRDLPQGFSALEPLVDLPIGINITRFQTLLALHRSYLTPGDSSSGWTAGAAAYYVGYLQPRTFLLKYNENGTITDAVDCALDPLSETKCTLKSFTVEKGIYQTSNFRVQPTESIVRFPNITNLCPFGEVFNATRFASVYAWNRKRISNCVADYSVLYNSASFSTFKCYGVSPTKLNDLCFTNVYADSFVIRGDEVRQIAPGQTGKIADYNYKLPDDFTGCVIAWNSNNLDSKVGGNYNYLYRLFRKSNLKPFERDISTEIYQAGSTPCNGVEGFNCYFPLQSYGFQPTNGVGYQPYRVVVLSFELLHAPATVCGPKKSTNLVKNKCVNFNFNGLTGTGVLTESNKKFLPFQQFGRDIADTTDAVRDPQTLEILDITPCSFGGVSVITPGTNTSNQVAVLYQDVNCTEVPVAIHADQLTPTWRVYSTGSNVFQTRAGCLIGAEHVNNSYECDIPIGAGICASYQTQTNSPSGAGSHHHHHHHHHH

SEQ ID NO: 4612 - protein, 715 aa, Artificial Sequence
  Description of Artificial Sequence: Synthetic polypeptide
MGILPSPGMPALLSLVSLLSVLLMGCVAETGTQCVNLTTRTQLPPAYTNSFTRGIYYPDKVFRSSVLHSTQDLFLPFFSNVTWFHAIHGSGTNGTKRFDNPVLPFNDGVYSAAIEKSNIIRGWIFGTTLDSKTQSLLIVNNATNVVIKVCEFQFCNDPFLGVYYHKNNKSWMESEFRVYSSANNCTFEYVSQPFLMDLEGKQGNFKLLREFVFKNIDGYFKIYSKHTPINLVRDLPQGFSPLEPLVDLPIGINITRFLTVLALHRSYLTPGDSSSGWTAGAAAYYVGYLQPRTFLLKYNENGTITDAVDCALDPLSETKCTLKSFTVEKGIYQTSNFRVQPTESIVRFPNITNLCPFGEVFNATRFASVYAWNRKRISNCVADYSVLYNSASFSTFKCYGVSPTKLNDLCFTNVYADSFVIRGDEVRQIAPGQTGKIADYNYKLPDDFTGCVIAWNSNNLDSKVGGNYNYLYRLFRKSNLKPFERDISTEIYQAGSTPCNGVEGFNCYFPLQSYGFQPTNGVGYQPYRVVVLSFELLHAPATVCGPKKSTNLVKNKCVNFNFNGLTGTGVLTESNKKFLPFQQFGRDIADTTDAVRDPQTLEILDITPCSFGGVSVITPGTNTSNQVAVLYQDVNCTEVPVAIHADQLTPTWRVYSTGSNVFQTRAGCLIGAEHVNNSYECDIPIGAGICASYQTQTNSPSGAGSHHHHHHHHHH

SEQ ID NO: 4613 - protein, 715 aa, Artificial Sequence
  Description of Artificial Sequence: Synthetic polypeptide
MGILPSPGMPALLSLVSLLSVLLMGCVAETGTQCVNLTTRTQLPPAYTNSFTRGVYYPDKVFRSSVLHSTQDLFLPFFSNVTWFHAIHVSGTNGTKRFDNPVLPFNDGVYFASTEKSNIIRGWIFGTTLDSKTQSLLIVNNATNVVIKVCEFQFCNDPFLGVYYHKNNKSWMESEFRVYSSANNCTFEYVSQPFLMDLEGKQGNFKNLREFVFKNIDGYFKIYSKHTPINLVRDLPQGFSALEPLVDLPIGINITRFQTLLALHRSYLTPGDSSSGWTAGAAAYYVGYLQPRTFLLKYNENGTITDAVDCALDPLSETKCTLKSFTVEKGIYQTSNFRVQPTESIVRFPNITNLCPFGEVFNATRFASVYAWNRKRISNCVADYSVLYNSASFSTFKCYGVSPTKLNDLCFTNVYADSFVIRGDEVRQIAPGQTGKIADYNYKLPDDFTGCVIAWNSNNLDSKVGGNYNYLYRLFRKSNLKPFERDISTEIYQAGSTPCNGVEGFNCYFPLQSYGFQPTNGVGYQPYRVVVLSFELLHAPATVCGPKKSTNLVKNKCVNFNFNGLTGTGVLTESNKKFLPFQQFGRDIADTTDAVRDPQTLEILDITPCSFGGVSVITPGTNTSNQVAVLYQDVNCTEVPVAIHADQLTPTWRVYSTGSNVFQTRAGCLIGAEYVNNSYECDIPIGAGICASYQTQTNSPSGAGSHHHHHHHHHH

SEQ ID NO: 4614 - protein, 715 aa, Artificial Sequence
  Description of Artificial Sequence: Synthetic polypeptide
MGILPSPGMPALLSLVSLLSVLLMGCVAETGTQCVNLTTRTQLPPAYTNSFTRGVYYPDKVFRSSVLHSTQDLFLPFFSNVTWFHAIHVSGTNGTKRFDNPVLPFNDGVYFASTEKSNIIRGWIFGTTLDSKTQSLLIVNNATNVVIKVCEFQFCNDPFLGVYYHKNNKSWMESEFRVYSSANNCTFEYVSQPFLMDLEGKQGNFKNLREFVFKNIDGYFKIYSKHTPINLVRDLPQGFSALEPLVDLPIGINITRFSTLLALHRSYLTPGDSSSGWTAGAAAYYVGYLQPRTFLLKYNENGTITDAVDCALDPLSETKCTLKSFTVEKGIYQTSNFRVQPTESIVRFPNITNLCPFGEVFNATRFASVYAWNRKRISNCVADYSVLYNSASFSTFKCYGVSPTKLNDLCFTNVYADSFVIRGDEVRQIAPGQTGKIADYNYKLPDDFTGCVIAWNSNNLDSKVGGNYNYLYRLFRKSNLKPFERDISTEIYQAGSTPCNGVEGFNCYFPLQSYGFQPTNGVGYQPYRVVVLSFELLHAPATVCGPKKSTNLVKNKCVNFNFNGLTGTGVLTESNKKFLPFQQFGRDIADTTDAVRDPQTLEILDITPCSFGGVSVITPGTNTSNQVAVLYQDVNCTEVPVAIHADQLTPTWRVYSTGSNVFQTRAGCLIGAEHVNNSYECDIPIGAGICASYQTQTNSPSGAGSHHHHHHHHHH

SEQ ID NO: 4615 - protein, 715 aa, Artificial Sequence
  Description of Artificial Sequence: Synthetic polypeptide
MGILPSPGMPALLSLVSLLSVLLMGCVAETGTQCVNLTTRTQLPPAYTNSFTRGVYYPDKVFRSSVLHSTQDLFLPFFSNVTWFHAIHVSGTNGTKRFDNPVLPFNDGVYFASTEKSNIIRGWIFGTTLDSKTQSLLIVNNATNVVIKVCEFQFCNDPFLGVYYHKNNKSWMESEFRVYSSANNCTFEYVSQPFLMDLEGKQGNFKNLREFVFKNIDGYFKIYSKHTPINLVRDLPQGFSALEPLVDLPIGINITRFQTLLALHRSYLTPGDSSSGWTAGAAAYYVGYLQPRTFLLKYNENGTITDAVDCALDPLSETKCTLKSFTVEKGIYQTSNFRVQPTESIVRFPNITNLCPFGEVFNATRFASVYAWNRKRISNCVADYSVLYNSASFSTFKCYGVSPTKLNDLCFTNVYADSFVIRGDEVRQIAPGQTGKIADYNYKLPDDFTGCVIAWNSNNLDSKVGGNYNYLYRLFRKSNLKPFERDISTEIYQAGSTPCNGVEGFNCYFPLQSYGFQPTNGVGYQPYRVVVLSFELLHAPATVCGPKKSTNLVKNKCVNFNFNGLTGTGVLTESNKKFLPFQQFGRDIADTTDAVRDPQTLEILDITPCSFGGVSVITPGTNTSNQVAVLYQDVNCTEVPVAIFADQLTPTWRVYSTGSNVFQTRAGCLIGAEHVNNSYECDIPIGAGICASYQTQTNSPSGAGSHHHHHHHHHH

SEQ ID NO: 4616 - protein, 715 aa, Artificial Sequence
  Description of Artificial Sequence: Synthetic polypeptide
MGILPSPGMPALLSLVSLLSVLLMGCVAETGTQCVNLTTRTQLPPAYTNSFTRGVYYPDKVFRSSVLHSTQDLFLPFFSNVTWFHAYHVSGTNGTKRFDNPVLPFNDGVYFASTEKSNIIRGWIFGTTLDSKTQSLLIVNNATNVVIKVCEFQFCNDPFLGVYYHKNNKSWMESEFRVYSSANNCTFEYHSQPFLMDLEGKQGNFKNLREFVFKNIDGYFKIYSKHTPINLVRDLPQGFSALEPLVDLPIGINITRFQTLLALHRSYLTPGDSSSGETAGAAAYYVGYLQPRTFLLKYNENGTITDAVDCALDPLSETKCTLKSFTVEKGIYQTSNFRVQPTESIVRFPNITNHCPFGEVFNATRFASVYAWNRKRISNCVADYSVLYNSASFSTFKCYGVSPTKLNDLCFTNVYADSFVIRGDEVRQIAPGQTGKIADYNYKLPDDFTGCVIAWNSNNLDSKVGGNYNYLYRLFRKSNLKPFERDISTEIYQAGSTPCNGVEGFNCYFPLQSYGFQPTNGPGQQPYRVVVLSFELLHAPATVCGPKKSTNLVKNKCVNFNFNGLTGTGVLTESNKKFLPFQQFGRDIADTTDAVRDPQTLEILDITPCSFGGVSVITPGTNTSNQVAVLYQDVNCTEVPVAIHADQLTPTWRVYSTGSNVFQTRAGCLIGAEHVNNSYECDIPIGAGICASYQTQTNSPSGAGSHHHHHHHHHH

SEQ ID NO: 4617 - protein, 715 aa, Artificial Sequence
  Description of Artificial Sequence: Synthetic polypeptide
MGILPSPGMPALLSLVSLLSVLLMGCVAETGTQCVNLTTRTQLPPAYTNSFTRGVYYPDKVFRSSVLHSTQDLFLPFFSNVTWFHAIHVSGTNGTKRFDNPVLPFNDGVYFASTEKSNIIRGWIFGTTLDSKTQSLLIVNNATNVVIKVCEFQFCNDPFLGVYYHKNNKSWMESEFRVYSSANNCTFEYVSQPFLMDLEGKQGNFKNLREFVFKNIDGYFKIYSKHTPINLVRDLPQGFSALEPLVDLPIGINITRFQTLLALHRSYLTPGDSSSGWTAGAAAYYVGYLQPRTFLLKYNENGTITDAVDCALDPLSETKCTLKSFTVEKGIYQTSNFRVQPTESIVRFPNITNLCPFGEVFNATRFASVYAWNRKRISNCVADYSVLYNSASFSTFKCYGVSPTKLNDLCFTNVYADSFVIRGDEVRQIAPGQTGKIADYNYKLPDDFTGCVIAWNSNNLDSKVGGNYNYLYRLFRKSNLKPFERDISTEIYQAGSTPCNGVEGFNCYFPLQSYGFQPTNGVGYQPYRVVVLSFELLHAPATVCGPKKSTNLVKNKCVNFNFNGLTGTGVLTESNKKFLPFQQFGRDIADTTDAVRDPQTLEILDITPCSCGGVSVITPGTNTSNQVAVLYQDVNCTEVPVAIHADQLTPTWRVYSTGSNVFQTRAGCLIGAEHVNNSYECDIPIGAGICASYQTQTNSPSGAGSHHHHHHHHHH

SEQ ID NO: 4618 - protein, 715 aa, Artificial Sequence
  Description of Artificial Sequence: Synthetic polypeptide
MGILPSPGMPALLSLVSLLSVLLMGCVAETGTQCVNLTTRTQLPPAYTNSFTRGVYYPDKVFRSSVLHSTQDLFLPFFSNVTWFHAIHVSGTNGTKRFDNPVLPFNDGVYFASTEKSNIIRGWIFGTTLDSKTQSLLIVNNATNVVIKVCEFQFCNDPFLGVYYHKNNKSWMESEFRVYSSANNCTFEYVSQPFLMDLEGKQGNFKNLREFVFKNIDGYFKIYSKHTPINLVRDLPQGFSALEPLVDLPIGINITRFQTLLALHRSYLTPGDSSSGWTAGAAAYYVGYLQPRTFLLKYNENGTITDAVDCALDPLSETKCTLKSFTVEKGIYQTSNFRVQPTESIVRFPNITNLCPFGEVFNATRFASSYAWNRKRISNCVADYSVLYNSASFSTFKCYGVSPTKLNDLCFTNVYADRFVIRGDEVRQIAPGQTGKIADYNYKLPDDFTGCVIAWNSNNLDAKVGGNYNYLYRLFRKSNLKPFERFISTEIYQAGSTPTNGVEGFNCYFPLQSYGFQPTNGVGYQPYRVVVLSFELLHAPHTVCGPKKSTNLVKNKCVNFNFNGLTGTGVLTESNKKFLPFQQFGRDIADTTDAVRDPQTLEILDITPCSFGGVSVITPGTNTSNQVAVLYQDVNCTEVPVAIHADQLTPTWRVYSTGSNVFQTRAGCLIGAEHVNNSYECDIPIGAGICASYQTQTNSPSGAGSHHHHHHHHHH

SEQ ID NO: 4619 - protein, 715 aa, Artificial Sequence
  Description of Artificial Sequence: Synthetic polypeptide
MGILPSPGMPALLSLVSLLSVLLMGCVAETGTQCVNLTTRTQLPPAYTNSFTRGVYYPDKVFRSSVLHSTQDLFLPFFSNVTWFHAIHVSGTNGTKRFDNPVLPFNDGVYFASTEKSNIIRGWIFGTTLDSKTQSLLIVNNATNVVIKVCEFQFCNDPFLGVYYHKNNKSWMESEFRVYSSANNCTFEYVSQPFLMDLEGKQGNFKNLREFVFKNIDGYFKIYSKHTPINLVRDLPQGFSALEPLVDLPIGINITRFQTLLALHRSYLTPGDSSSGWTAGAAAYYVGYLQPRTFLLKYNENGTITDAVDCALDPLSETKCTLKSFTVEKGIYQTSNFRVQPTESIVRFPNITNLCPFGEVFNATRFASVYAWNRKRISNCVADYSVLYNSASFSTFKCYGVSPTKLNDLCFTNVYADSFVIRGDEVRQIAPGQTGKIADYNYKLPDDFTGCVIAWNSNNLDSKVGGNYNYLYRLFRKSNLKPFERDISTEIYQAGSTPCNGVEGFNCYFPLQSYGFQPTNGVGYQPYRVVVLSFELLHAPATVCGPKKSTNLVKNKCVNFNFNGLTGTGVLTESNKKFLPFQQFGRDIADTTDAVRDPQTLEILDITPCSFGGVSVITPGTNTSNQVAVLYQDVNCTEVPNAIHADQLTPTWRVYSTGSNVFQTRAGCLIGAEHVNNSYECDIPIGAGICASYQTQTNSPSGAGSHHHHHHHHHH

SEQ ID NO: 4620 - protein, 715 aa, Artificial Sequence
  Description of Artificial Sequence: Synthetic polypeptide
MGILPSPGMPALLSLVSLLSVLLMGCVAETGTQCVNLTTRTQLPPAYTNSFTRGVYYPDKVFRSSVLHSTQDLFLPFFSNVTWFHAIHVSGTNGTKRFDNPVLPFNDGVYFASTEKSNIIRGWIFGTTLDSKTQSLLIVNNATNVVIKVCEFQFCNDPFLGVYYHKNNKSWMESEFRVYSSANNCTFEYVSQPFLMDLEGKQGNFKNLREFVFKNIDGYFKIYSKHTPINLVRDLPQGFSALEPLVDLPIGINITRFQTLLALHRSYLTPGDSSSGWTAGAAAYYVGYLQPRTFLLKYNENGTITDAVDCALDPLSETKCTLKSFTVEKGIYQTSNFRVQPTESIVRFPNITNLCPFGEVFNATRFASVYAWNRKRISNCVADYSVLYNSASFSTFKCYGVSPTKLNDLCFTNVYADSFVIRGDEVRQIAPGQTGKIADYNYKLPDDFTGCVIAWNSNNLDSKVGGNYNYLYRLFRKSNLKPFERDISTEIYQAGSTPCNGVEGFNCYFPLQSYGFQPTNGVGYQPYRVVVLSFELLHAPATVCGPKKSTNLVKNKCVNFNFNGLTGTGVLTESNKKFLPFQQFGRDIADTTDAVRDPQTLEILDITPCSFGGVSVITPGTNTSNQVAVLYQDVNCTEVPVAIHADQLTPTWRVYSTGSNVFQTRAGCLIGVEHVNNSYECDIPIGAGICASYQTQTNSPSGAGSHHHHHHHHHH

SEQ ID NO: 4621 - protein, 715 aa, Artificial Sequence
  Description of Artificial Sequence: Synthetic polypeptide
MGILPSPGMPALLSLVSLLSVLLMGCVAETGTQCVNLTTRTQLPPAYTNSFTRGVYYPDKVFRSSVLHSTQDLFLPFFSNVTWFHAIHVSGTNGTKRFDNPVLPFNDGVYFASTEKSNIIRGWIFGTTLDSKTQSLLIVNNATNVVIKVCEFQFCNDPFLGVYYHKNNKSWMESEFRVYSSANNCTFEYVSQPFLMDLEGKQGNFKNLREFVFKNIDGYFKIYSKHTPINLVRDLPQGFSALEPLVDLPIGINITRFETLLALHRSYLTPGDSSSGWTAGAAAYYVGYLQPRTFLLKYNENGTITDAVDCALDPLSETKCTLKSFTVEKGIYQTSNFRVQPTESIVRFPNITNLCPFGEVFNATRFASVYAWNRKRISNCVADYSVLYNSASFSTFKCYGVSPTKLNDLCFTNVYADSFVIRGDEVRQIAPGQTGKIADYNYKLPDDFTGCVIAWNSNNLDSKVGGNYNYLYRLFRKSNLKPFERDISTEIYQAGSTPCNGVEGFNCYFPLQSYGFQPTNGVGYQPYRVVVLSFELLHAPATVCGPKKSTNLVKNKCVNFNFNGLTGTGVLTESNKKFLPFQQFGRDIADTTDAVRDPQTLEILDITPCSFGGVSVITPGTNTSNQVAVLYQDVNCTEVPVAIHADQLTPTWRVYSTGSNVFQTRAGCLIGAEHVNNSYECDIPIGAGICASYQTQTNSPSGAGSHHHHHHHHHH

SEQ ID NO: 4622 - protein, 715 aa, Artificial Sequence
  Description of Artificial Sequence: Synthetic polypeptide
MGILPSPGMPALLSLVSLLSVLLMGCVAETGTQCVNLTTRTQLPPAYTNSFTRGVYYPDKVFRSSVLHSTQDLFLPFFSNVTWFHAIHVSGTNGTKRFDNPVLPFNDGVYFASTEKSNIIRGWIFGTTLDSKTQSLLIVNNATNVVIKVCEFQFCNDPFLGVYYHKNNKSWMESEFRVYSSANNCTFEYVSQPFLMDLEGKQGNFKNLREFVFKNIDGYFKIYSKHTPINLVRDLPQGFSALEPLVDLPIGINITRFQTLLALHRSYLTPGDSSSGWTAGAAAYYVGYLQPRTFLLKYNENGTITDAVDCALDPLSETKCTLKSFTVEKGIYQTSNFRVQPTESIVRFPNITNLCPFWEVFNATRFASVYAWNRKRISNCVADYSVLYNSASFSTFKCYGVSPTKLNDLCFTNVYADSFVIRGDEVRQIAPGQTGKIADYNYKLPDDFTGCVIAWNSNNLDSKVGGNYNYLYRLFRKSNLKPFERDISTEIYQAGSTPCNGVEGFNCYFPLQSYGFQPTNGVGYQPYRVVVLSFELLHAPATVCGPKKSTNLVKNKCVNFNFNGLTGTGVLTESNKKFLPFQQFGRDIADTTDAVRDPQTLEILDITPCSFGGVSVITPGTNTSNQVAVLYQDVNCTEVPVAIHADQLTPTWRVYSTGSNVFQTRAGCLIGAEHVNNSYECDIPIGAGICASYQTQTNSPSGAGSHHHHHHHHHH

SEQ ID NO: 4623 - protein, 715 aa, Artificial Sequence
  Description of Artificial Sequence: Synthetic polypeptide
MGILPSPGMPALLSLVSLLSVLLMGCVAETGTQCVNLTTRTQLPPAYTNSFTRGVYYPDKVFRSSVLHSTQDLFLPFFSNVTWFHAIHVRGTNGTKRFDNPVLPFNDGVYFASTEKSNIIRGWIFGTTLDSKTQSLLIVNNATNVVIKVCEFQFCNDPFLGVYYHKNNKSWMESEFRVYSSANNCTFEYVSQPFLMDLEGKQGNFKNLREFVFKNIDGYFKIYSKHTPINLVRDLPQGFSALEPLVDLPIGINITRFQTLLALHRSYLTPGDSSSGWTAGAAAYYVGYLQPRTFLLKYNENGTITDAVDCALDPLSETKCTLKSFTVEKGIYQTSNFRVQPTESIVRFPNITNLCPFGEVFNATRFASVYAWNRKRISNCVADYSVLYNSASFSTFKCYGVSPTKLNDLCFTNVYADSFVIRGDEVRQIAPGQTGKIADYNYKLPDDFTGCVIAWNSNNLDSKVGGNYNYLYRLFRKSNLKPFERDISTEIYQAGSTPCNGVEGFNCYFPLQSYGFQPTNGVGYQPYRVVVLSFELLHAPATVCGPKKSTNLVKNKCVNFNFNGLTGTGVLTESNKKFLPFQQFGRDIADTTDAVRDPQTLEILDITPCSFGGVSVITPGTNTSNQVAVLYQDVNCTEVPVAIHADQLTPTWRVYSTGSNVFQTRAGCLIGAEHVNNSYECDIPIGAGICASYQTQTNSPSGAGSHHHHHHHHHH

SEQ ID NO: 4624 - protein, 715 aa, Artificial Sequence
  Description of Artificial Sequence: Synthetic polypeptide
MGILPSPGMPALLSLVSLLSVLLMGCVAETGTQCVNLTTRTQLPPAYTNSFTRGVYYPDKVFRSSVLHSTQDLFLPFFSNVTWFHAIHVSGTNGTKRFDNPVLPFNDGVYFASTEKSNIIRGWIFGTTLDSKTQSLLIVNNATNVVIKVCEFQFCNDPFLGVYYHKNNKSWMESEFRVYSSANNCTFEYYSQPFLMDLEGKQGNFKNLREFVFKNIDGYFKIYSKHTPINLVRDLPQGFSALEPLVDLPIGINITRFQTLLALHRSYLTPGDSSSGWTAGAAAYYVGYLQPRTFLLKYNENGTITDAVDCALDPLSETKCTLKSFTVEKGIYQTSNFRVQPTESIVRFPNITNLCPFGEVFNATRFASVYAWNRKRISNCVADYSVLYNSASFSTFKCYGVSPTKLNDLCFTNVYADSFVIRGDEVRQIAPGQTGKIADYNYKLPDDFTGCVIAWNSNNLDSKVGGNYNYLYRLFRKSNLKPFERDISTEIYQAGSTPCNGVEGFNCYFPLQSYGFQPTNGVGYQPYRVVVLSFELLHAPATVCGPKKSTNLVKNKCVNFNFNGLTGTGVLTESNKKFLPFQQFGRDIADTTDAVRDPQTLEILDITPCSFGGVSVITPGTNTSNQVAVLYQDVNCTEVPVAIHADQLTPTWRVYSTGSNVFQTRAGCLIGAEHVNNSYECDIPIGAGICASYQTQTNSPSGAGSHHHHHHHHHH

SEQ ID NO: 4625 - protein, 715 aa, Artificial Sequence
  Description of Artificial Sequence: Synthetic polypeptide
MGILPSPGMPALLSLVSLLSVLLMGCVAETGTQCVNLTTRTQLPPAYTNSFTRGVYYPDKVFRSSVLHSTQDLFLPFFSNVTWFHAIHVSGTNGTKRFDNPVLPFNDGVYFASTEKSNIIRGWIFGTTLDSKTQSLLIVNNATNVVIKVCEFQFCNDPFLGVYYHKNNKSWMESEFRVYSSANNCTFEYVSQPFLMDLEGKQGNFKNLREFVFKNIDGYFKIYSKHTPINLVRDLPQGFSALEPLVDLPIGINITRFQTLLALHRSYLTPGDSSSGWTAGAAAYYVGYLQPRTFLLKYNENGTITDAVDCALDPLSETKCTLKSFTVEKGIYQTSNFRVQPTESIVRFPNITNLCPLGEVFNATRFASSYAWNRKRISNCVADYSVLYNSASFSTFKCYGVSPTKLNDLCFTNVYADRFVIRGDEVRQIAPGQTGKIADYNYKLPDDFTGCVIAWNSNNLDAKVGGNYNYLYRLFRKSNLKPFERFISTEIYQAGSTPANGVEGFNCYFPLQSYGFQPTNGVTYQPYRVVVLSFELLHAPHTVCGPKKSTNLVKNKCVNFNFNGLTGTGVLTESNKKFLPFQQFGRDIADTTDAVRDPQTLEILDITPCSFGGVSVITPGTNTSNQVAVLYQDVNCTEVPVAIHADQLTPTWRVYSTGSNVFQTRAGCLIGAEHVNNSYECDIPIGAGICASYQTQTNSPSGAGSHHHHHHHHHH

SEQ ID NO: 4626 - protein, 715 aa, Artificial Sequence
  Description of Artificial Sequence: Synthetic polypeptide
MGILPSPGMPALLSLVSLLSVLLMGCVAETGTQCVNLTTRTQLPPAYTNSFTRGVYYPDKVFRSSVLHSTQDLFLPFFSNVTWFHAYHVSGTNGTKRFDNPVLPFNDGVYFASTEKSNIIRGWIFGTTLDSKTQSLLIVNNATNVVIKVCEFQFCNDPFLGVYYHKNNKSWMESEFRVYSSANNCTFEYHSQPFLMDLEGKQGNFKNLREFVFKNIDGYFKIYSKHTPINLVRDLPQGFSALEPLVDLPIGINITRFQTLLALHRSYLTPGDSSSGETAGAAAYYVGYLQPRTFLLKYNENGTITDAVDCALDPLSETKCTLKSFTVEKGIYQTSNFRVQPTESIVRFPNITNPCPFGEVFNATRFASVYAWNRKRISNCVADYSVLYNSASFSTFKCYGVSPTKLNDLCFTNVYADSFVIRGDEVRQIAPGQTGKIADYNYKLPDDFTGCVIAWNSNNLDSKVGGNYNYLYRLFRKSNLKPFERDISTEIYQAGSTPCNGVEGFNCYFPLQSYGFQPTNGPGQQPYRVVVLSFELLHAPATVCGPKKSTNLVKNKCVNFNFNGLTGTGVLTESNKKFLPFQQFGRDIADTTDAVRDPQTLEILDITPCSFGGVSVITPGTNTSNQVAVLYQDVNCTEVPDAIHADQLTPTWRVYSTGSNVFQTRAGCLIGAEHVNNSYECDIPIGAGICASYQTQTNSPSGAGSHHHHHHHHHH

SEQ ID NO: 4627 - protein, 715 aa, Artificial Sequence
  Description of Artificial Sequence: Synthetic polypeptide
MGILPSPGMPALLSLVSLLSVLLMGCVAETGTQCVNLTTRTQLPPAYTNSFTRGVYYPDKVFRSSVLHSTQDLFLPFFSNVTWFHAIHVSGTNGTKRFDNPVLPFNDGVYFASTEKSNIIRGWIFGTTLDSKTQSLLIVNNATNVVIKVCEFQFCNDPFLGVYYHKNNKSWMESEFRVYSSANNCTFEYVSQPFLMDLEGKQGNFKNLREFVFKNIDGYFKIYSKHTPINLVRDLPQGFSALEPLVILPIGINITRFQTLLALHRSYLTPGDSSSGWTAGAAAYYVGYLQPRTFLLKYNENGTITDAVDCALDPLSETKCTLKSFTVEKGIYQTSNFRVQPTESIVRFPNITNLCPFGEVFNATRFASVYAWNRKRISNCVADYSVLYNSASFSTFKCYGVSPTKLNDLCFTNVYADSFVIRGDEVRQIAPGQTGKIADYNYKLPDDFTGCVIAWNSNNLDSKVGGNYNYLYRLFRKSNLKPFERDISTEIYQAGSTPCNGVEGFNCYFPLQSYGFQPTNGVGYQPYRVVVLSFELLHAPATVCGPKKSTNLVKNKCVNFNFNGLTGTGVLTESNKKFLPFQQFGRDIADTTDAVRDPQTLEILDITPCSFGGVSVITPGTNTSNQVAVLYQDVNCTEVPVAIHADQLTPTWRVYSTGSNVFQTRAGCLIGAEHVNNSYECDIPIGAGICASYQTQTNSPSGAGSHHHHHHHHHH

SEQ ID NO: 4628 - protein, 715 aa, Artificial Sequence
  Description of Artificial Sequence: Synthetic polypeptide
MGILPSPGMPALLSLVSLLSVLLMGCVAETGTQCVNLTTRTQLPPAYTNSFTRGVYYPDKVFRSSVLHSTQDLFLPFFSNVTWFHAKHVSGTNGTKRFDNPVLPFNDGVYFASTEKSNIIRGWIFGTTLDSKTQSLLIVNNATNVVIKVCEFQFCNDPFLGVYYHKNNKSWMESEFRVYSSANNCTFEYHSQPFLMDLEGKQGNFKNLREFVFKNIDGYFKIYSKHTPINLVRDLPQGFSALEPLVDLPIGINITRFQTLLALHRSYLTPGDSSSGETAGAAAYYVGYLQPRTFLLKYNENGTITDAVDCALDPLSETKCTLKSFTVEKGIYQTSNFRVQPTESIVRFPNITNHCPFGEVFNATRFASVYAWNRKRISNCVADYSVLYNSASFSTFKCYGVSPTKLNDLCFTNVYADSFVIRGDEVRQIAPGQTGKIADYNYKLPDDFTGCVIAWNSNNLDSKVGGNYNYLYRLFRKSNLKPFERDISTEIYQAGSTPCNGVEGFNCYFPLQSYGFQPTNGPGYQPYRVVVLSFELLHAPATVCGPKKSTNLVKNKCVNFNFNGLTGTGVLTESNKKFLPFQQFGRDIADTTDAVRDPQTLEILDITPCSFGGVSVITPGTNTSNQVAVLYQDVNCTEVPDAIHADQLTPTWRVYSTGSNVFQTRAGCLIGAEHVNNSYECDIPIGAGICASYQTQTNSPSGAGSHHHHHHHHHH

SEQ ID NO: 4629 - protein, 715 aa, Artificial Sequence
  Description of Artificial Sequence: Synthetic polypeptide
MGILPSPGMPALLSLVSLLSVLLMGCVAETGTQCVNLTTRTQLPPAYTNSFTRGVYYPDKVFRSSVLHSTQDLFLPFFSNVKWFHAIHVSGTNGTKRFDNPVLPFNDGVYFASTEKSNIIRGWIFGTTLDSKTQSLLIVNNATNVVIKVCEFQFCNDPFLGVYYHKNNKSWMESEFRVYSSANNCTFEYVSQPFLMDLEGKQGNFKNLREFVFKNIDGYFKIYSKHTPINLVRDLPQGFSALEPLVDLPIGINITRFQTLLALHRSYLTPGDSSSGWTAGAAAYYVGYLQPRTFLLKYNENGTITDAVDCALDPLSETKCTLKSFTVEKGIYQTSNFRVQPTESIVRFPNITNLCPFGEVFNATRFASVYAWNRKRISNCVADYSVLYNSASFSTFKCYGVSPTKLNDLCFTNVYADSFVIRGDEVRQIAPGQTGKIADYNYKLPDDFTGCVIAWNSNNLDSKVGGNYNYLYRLFRKSNLKPFERDISTEIYQAGSTPCNGVEGFNCYFPLQSYGFQPTNGVGYQPYRVVVLSFELLHAPATVCGPKKSTNLVKNKCVNFNFNGLTGTGVLTESNKKFLPFQQFGRDIADTTDAVRDPQTLEILDITPCSFGGVSVITPGTNTSNQVAVLYQDVNCTEVPVAIHADQLTPTWRVYSTGSNVFQTRAGCLIGAEHVNNSYECDIPIGAGICASYQTQTNSPSGAGSHHHHHHHHHH

SEQ ID NO: 4630 - protein, 715 aa, Artificial Sequence
  Description of Artificial Sequence: Synthetic polypeptide
MGILPSPGMPALLSLVSLLSVLLMGCVAETGTQCVNLTTRTQLPPAYTNSFTRGVYYPDKVFRSSVLVSTQDLFLPFFSNVTWFHAIHVSGTNGTKRFDNPVLPFNDGVYFASTEKSNIIRGWIFGTTLDSKTQSLLIVNNATNVVIKVCEFQFCNDPFLGVYYHKNNKSWMESEFRVYSSANNCTFEYVSQPFLMDLEGKQGNFKNLREFVFKNIDGYFKIYSKHTPINLVRDLPQGFSALEPLVDLPIGINITRFQTLLALHRSYLTPGDSSSGWTAGAAAYYVGYLQPRTFLLKYNENGTITDAVDCALDPLSETKCTLKSFTVEKGIYQTSNFRVQPTESIVRFPNITNLCPFGEVFNATRFASVYAWNRKRISNCVADYSVLYNSASFSTFKCYGVSPTKLNDLCFTNVYADSFVIRGDEVRQIAPGQTGKIADYNYKLPDDFTGCVIAWNSNNLDSKVGGNYNYLYRLFRKSNLKPFERDISTEIYQAGSTPCNGVEGFNCYFPLQSYGFQPTNGVGYQPYRVVVLSFELLHAPATVCGPKKSTNLVKNKCVNFNFNGLTGTGVLTESNKKFLPFQQFGRDIADTTDAVRDPQTLEILDITPCSFGGVSVITPGTNTSNQVAVLYQDVNCTEVPVAIHADQLTPTWRVYSTGSNVFQTRAGCLIGAEHVNNSYECDIPIGAGICASYQTQTNSPSGAGSHHHHHHHHHH

SEQ ID NO: 4631 - protein, 715 aa, Artificial Sequence
  Description of Artificial Sequence: Synthetic polypeptide
MGILPSPGMPALLSLVSLLSVLLMGCVAETGTQCVNLTTRTQLPPAYTNSFTRGVYYPDKVFRSSVLHSTQDLFLPFFSNVTWFHAIHVSGTNGTKRFDNPVLPFNDGVYFASTEKSNIIRGWIFGTTLDSKTQSLLIVNNATNVVIKVCEFQFCNDPFLGVYYHKNNKSWMESEFRVYSSANNCTFEYVQQPFLMDLEGKQGNFKNLREFVFKNIDGYFKIYSKHTPINLVRDLPQGFSALEPLVDLPIGINITRFQTLLALHRSYLTPGDSSSGWTAGAAAYYVGYLQPRTFLLKYNENGTITDAVDCALDPLSETKCTLKSFTVEKGIYQTSNFRVQPTESIVRFPNITNLCPFGEVFNATRFASVYAWNRKRISNCVADYSVLYNSASFSTFKCYGVSPTKLNDLCFTNVYADSFVIRGDEVRQIAPGQTGKIADYNYKLPDDFTGCVIAWNSNNLDSKVGGNYNYLYRLFRKSNLKPFERDISTEIYQAGSTPCNGVEGFNCYFPLQSYGFQPTNGVGYQPYRVVVLSFELLHAPATVCGPKKSTNLVKNKCVNFNFNGLTGTGVLTESNKKFLPFQQFGRDIADTTDAVRDPQTLEILDITPCSFGGVSVITPGTNTSNQVAVLYQDVNCTEVPVAIHADQLTPTWRVYSTGSNVFQTRAGCLIGAEHVNNSYECDIPIGAGICASYQTQTNSPSGAGSHHHHHHHHHH

SEQ ID NO: 4632 - protein, 715 aa, Artificial Sequence
  Description of Artificial Sequence: Synthetic polypeptide
MGILPSPGMPALLSLVSLLSVLLMGCVAETGTQCVNLTTRTQLPPAYTNSFTRGVYYPDKVFRSSVLHSTQDLFLPFFSNVTWFHAKHVSGTNGTKRFDNPVLPFNDGVYFASTEKSNIIRGWIFGTTLDSKTQSLLIVNNATNVVIKVCEFQFCNDPFLGVYYHKNNKSWMESEFRVYSSANNCTFEYHSQPFLMDLEGKQGNFKNLREFVFKNIDGYFKIYSKHTPINLVRDLPQGFSALEPLVDLPIGINITRFQTLLALHRSYLTPGDSSSGETAGAAAYYVGYLQPRTFLLKYNENGTITDAVDCALDPLSETKCTLKSFTVEKGIYQTSNFRVQPTESIVRFPNITNPCPFGEVFNATRFASVYAWNRKRISNCVADYSVLYNSASFSTFKCYGVSPTKLNDLCFTNVYADSFVIRGDEVRQIAPGQTGKIADYNYKLPDDFTGCVIAWNSNNLDSKVGGNYNYLYRLFRKSNLKPFERDISTEIYQAGSTPCNGVEGFNCYFPLQSYGFQPTNGPGQQPYRVVVLSFELLHAPATVCGPKKSTNLVKNKCVNFNFNGLTGTGVLTESNKKFLPFQQFGRDIADTTDAVRDPQTLEILDITPCSFGGVSVITPGTNTSNQVAVLYQDVNCTEVPVAIHADQLTPTWRVYSTGSNVFQTRAGCLIGAEHVNNSYECDIPIGAGICASYQTQTNSPSGAGSHHHHHHHHHH

SEQ ID NO: 4633 - protein, 715 aa, Artificial Sequence
  Description of Artificial Sequence: Synthetic polypeptide
MGILPSPGMPALLSLVSLLSVLLMGCVAETGTQCVNLTTRTQLPPAYTNSFTRGVYYPDKVFRSSVLHSTQDLFLPFFSNVTWFHAIHVSGTNGTKRFDNPVLPFNDGVYFASTEKSNIFRGWIFGTTLDSKTQSLLIVNNATNVVIKVCEFQFCNDPFLGVYYHKNNKSWMESEFRVYSSANNCTFEYVSQPFLMDLEGKQGNFKNLREFVFKNIDGYFKIYSKHTPINLVRDLPQGFSALEPLVDLPIGINITRFQTLLALHRSYLTPGDSSSGWTAGAAAYYVGYLQPRTFLLKYNENGTITDAVDCALDPLSETKCTLKSFTVEKGIYQTSNFRVQPTESIVRFPNITNLCPFGEVFNATRFASVYAWNRKRISNCVADYSVLYNSASFSTFKCYGVSPTKLNDLCFTNVYADSFVIRGDEVRQIAPGQTGKIADYNYKLPDDFTGCVIAWNSNNLDSKVGGNYNYLYRLFRKSNLKPFERDISTEIYQAGSTPCNGVEGFNCYFPLQSYGFQPTNGVGYQPYRVVVLSFELLHAPATVCGPKKSTNLVKNKCVNFNFNGLTGTGVLTESNKKFLPFQQFGRDIADTTDAVRDPQTLEILDITPCSFGGVSVITPGTNTSNQVAVLYQDVNCTEVPVAIHADQLTPTWRVYSTGSNVFQTRAGCLIGAEHVNNSYECDIPIGAGICASYQTQTNSPSGAGSHHHHHHHHHH

SEQ ID NO: 4634 - protein, 715 aa, Artificial Sequence
  Description of Artificial Sequence: Synthetic polypeptide
MGILPSPGMPALLSLVSLLSVLLMGCVAETGTQCVNLTTRTQLPPAYTNSFTRGVYYPDKVFRSSVLHSTQDLFLPFFSNVTWFHAIHVSGTNGTKRFDNPVLPFNDGVYFASTEKSNIIRGWIFGTTLDSKTQSLLIVNNATNVVIKVCEFQFCNDPFLGVYYHKNNKSWMESEFRVYSSANNCTFEYVSQPFLMDLEGKQGNFKNLREFVFKNIDGYFKIYSKHTPINLVRDLPQGFSALEPLVDLPIGINITRFQTLLALHRSYLTPGDSSSGWTAGAAAYYVGYLQPRTFLLKYNENGTITDAVDCALDPLSETKCTLKSFTVEKGIYQTSNFRVQPTESIVRFPNITNLCPFGEVFNATRFASVYAWNRKRISNCVADYSVLYNSASFSTFKCYGVSPTKLNDLCFTNVYADSFVIRGDEVRQIAPGQTGKIADYNYKLPDDFTGCVIAWNSNNLDSKVGGNYNYLYRLFRKSNLKPFERDISTEIYQAGSTPCNGVEGFNCYFPLQSYGFQPTNGVGYQPYRVVVLSFELLHAPATVCGPKKSTNLVKNKCVNFNFNGLTGTGVLTESNKKFLPFQQFGRDIADTTDAVRDPQTLEILDITPCSMGGVSVITPGTNTSNQVAVLYQDVNCTEVPVAIHADQLTPTWRVYSTGSNVFQTRAGCLIGAEHVNNSYECDIPIGAGICASYQTQTNSPSGAGSHHHHHHHHHH

SEQ ID NO: 4635 - protein, 715 aa, Artificial Sequence
  Description of Artificial Sequence: Synthetic polypeptide
MGILPSPGMPALLSLVSLLSVLLMGCVAETGTQCVNLTTRTQLPPAYTNSFTRGVYYPDKVFRSSVLHSTQDLFLPFFSNVTWFHAIHVSGTNGTKRFDNPVLPFNDGVYFASTEKSNIIRGWIFGTTLDSKTQSLLIVNNATNVVIKVCEFQFCNDPFLGVYYHKNNKSWMESEFRVYSSANNCTFEYVSQPFLMDLEGKQGNFKNLREFVFKNIDGYFKIYSKHTPINLVRDLPQGFSALEPLVDLPIGINITRFQTLLALHRSYLTPGDSSSGWTAGAAAYYVGYLQPRTFLLKYNENGTITDAVDCALDPLSETKCTLKSFTVEKGIYQTSNFRVQPTESIVRFPNITNLCPFGEVFNATRFASVYAWNRKRISNCVADYSVLYNSASFSTFKCYGVSPTKLNDLCFTNVYADSFVIRGDEVRQIAPGQTGKIADYNYKLPDDFTGCVIAWNSNNLDSKVGGNYNYLYRLFRKSNLKPFERDISTEIYQAGSTPCNGVEGFNCYFPLQSYGFQPTNGVGYQPYRVVVLSFELLHAPATVCGPKKSTNLVKNKCVNFNFNGLTGTGVLTESNKKFLPFQQFGRDIADTTDAVRDPQTLEILDITPCSFGGVSVITPGTNTSNQVAVLYQDVNCTEVPCAIHADQLTPTWRVYSTGSNVFQTRAGCLIGAEHVNNSYECDIPIGAGICASYQTQTNSPSGAGSHHHHHHHHHH

SEQ ID NO: 4636 - protein, 715 aa, Artificial Sequence
  Description of Artificial Sequence: Synthetic polypeptide
MGILPSPGMPALLSLVSLLSVLLMGCVAETGTQCVNLTTRTQLPPAYTNSFTRGVYYPDKVFRSSVLHSTQDLFLPFFSNVTWFHAIHVSGTNGTKRFDNPVLPFNDGVYFASTEKSNIIRGWIFGTTLDSKTQSLLIVNNATNVVIKVCEFQFCNDPFLGVYYHKNNKSWMESEFRVYSSANNCTFEYVSQPFLMDLEGKQGNFKNLREFVFKNIDGYFKIYSKHTPINLVRDLPQGFSALEPLVDLPIGINITRFQTLLALHRSYLTPGDSSSGWTAGAAAYYVGYLQPRTFLLKYNENGTITDAVDCALDPLSETKCTLKSFTVEKGIYQTSNFRVQPTESIVRFPNITNLCPFGEVFNATRFASVYAWNRKRISNCVADYSVLYNSASFSTFKCYGVSPTKLNDLCFTNVYADSFVIRGDEVRQIAPGQTGKIADYNYKLPDDFTGCVIAWNSNNLDSKVGGNYNYLYRLFRKSNLKPFERDISTEIYQAGSTPCNGVEGFNCYFPLQSYGFQPTNGVGYQPYRVVVLSFELLHAPATVCGPKKSTNLVKNKCVNFNFNGLTGTGVLTESNKKFLPFQQFGRSIADTTDAVRDPQTLEILDITPCSFGGVSVITPGTNTSNQVAVLYQDVNCTEVPVAIHADQLTPTWRVYSTGSNVFQTRAGCLIGAEHVNNSYECDIPIGAGICASYQTQTNSPSGAGSHHHHHHHHHH

SEQ ID NO: 4637 - protein, 715 aa, Artificial Sequence
  Description of Artificial Sequence: Synthetic polypeptide
MGILPSPGMPALLSLVSLLSVLLMGCVAETGTQCVNLTTRTQLPPAYTNSFTRGVYYPDKVFRSSVLHSTQDLFLPFFSNVTWFHAIHVSGTNGTKRFDNPVLPFNDGVYFASTEKSNIIRGWIFGTTLDSKTQSLLIVNNATNVVIKVCEFQFCNDPFLGVYYHKNNKSWMESEFRVYSSANNCTFEYVSQPFLMDLEGKQGNFKNLREFVFKNIDGYFKIYSKHTPINLVRDLPQGFSALEPLVDLPIGINITRFQTLLALHRSYLTPGDSSSGWTAGAAAYYVGYLQPRTFLLKYNENGTITDAVDCALDPLSETKCTLKSFTVEKGIYQTSNFRVQPTESIVRFPNITNLCPFGEVFNATRFASSYAWNRKRISNCVADYSVLYNSASFSTFKCYGVSPTKLNDLCFTNVYADLFVIRGDEVRQIAPGQTGKIADYNYKLPDDFTGCVIAWNSNNLDAKVGGNYNYLYRLFRKSNLKPFERFISTEIYQAGSTPANGVEGFNCYFPLQSYVFQPTNGVTYQPYRVVVLSFELLHAPHTVCGPKKSTNLVKNKCVNFNFNGLTGTGVLTESNKKFLPFQQFGRDIADTTDAVRDPQTLEILDITPCSFGGVSVITPGTNTSNQVAVLYQDVNCTEVPVAIHADQLTPTWRVYSTGSNVFQTRAGCLIGAEHVNNSYECDIPIGAGICASYQTQTNSPSGAGSHHHHHHHHHH

SEQ ID NO: 4638 - protein, 715 aa, Artificial Sequence
  Description of Artificial Sequence: Synthetic polypeptide
MGILPSPGMPALLSLVSLLSVLLMGCVAETGTQCVNLTTRTQLPPAYTNSFTRGVYYPDKVFRSSVLHSTQDLFLPFFSNVTWFHAIHVSGTNGTKRFDNPVLPFNDGVYFASTEKSNIIRGWIFGTTLDSKTQSLLIVNNATNVVIKVCEFQFCNDPFLGVYYHKNNKSWMESEFRVYSSANNCTFEYVSQPFLMDLEGKQGNFKNLREFVFKNIDGYFKIYSKHTPINLVRDLPQGFSALEPLVDLPIGINITRFQTLLALHRSYLTPGDSSSGWTAGAAAYYVGYLQPRTFLLKYNENGTITDAVDCALDPLSETKCTLKSFTVEKGIYQTSNFRVQPTEVIVRFPNITNLCPFGEVFNATRFASVYAWNRKRISNCVADYSVLYNSASFSTFKCYGVSPTKLNDLCFTNVYADSFVIRGDEVRQIAPGQTGKIADYNYKLPDDFTGCVIAWNSNNLDSKVGGNYNYLYRLFRKSNLKPFERDISTEIYQAGSTPCNGVEGFNCYFPLQSYGFQPTNGVGYQPYRVVVLSFELLHAPATVCGPKKSTNLVKNKCVNFNFNGLTGTGVLTESNKKFLPFQQFGRDIADTTDAVRDPQTLEILDITPCSFGGVSVITPGTNTSNQVAVLYQDVNCTEVPVAIHADQLTPTWRVYSTGSNVFQTRAGCLIGAEHVNNSYECDIPIGAGICASYQTQTNSPSGAGSHHHHHHHHHH

SEQ ID NO: 4639 - protein, 715 aa, Artificial Sequence
  Description of Artificial Sequence: Synthetic polypeptide
MGILPSPGMPALLSLVSLLSVLLMGCVAETGTQCVNLTTRTQLPPAYTNSFTRGVYYPDKVFRSSVLHSTQDLFLPFFSNVTWFHAIHVSGTNGTKRFDNPVLPFNDGVYFASTEKSNIIRGWIFGTTLDSKTQSLLIVNNATNVVIKVCEFQFCNDPFLGVYYHKNNKSWMESEFRVYSSANNCTFEYHSQPFLMDLEGKQGNFKNLREFVFKNIDGYFKIYSKHTPINLVRDLPQGFSALEPLVDLPIGINITRFQTLLALHRSYLTPGDSSSGETAGAAAYYVGYLQPRTFLLKYNENGTITDAVDCALDPLSETKCTLKSFTVEKGIYQTSNFRVQPTESIVRFPNITNHCPFGEVFNATRFASVYAWNRKRISNCVADYSVLYNSASFSTFKCYGVSPTKLNDLCFTNVYADSFVIRGDEVRQIAPGQTGKIADYNYKLPDDFTGCVIAWNSNNLDSKVGGNYNYLYRLFRKSNLKPFERDISTEIYQAGSTPCNGVEGFNCYFPLQSYGFQPTNGPGQQPYRVVVLSFELLHAPATVCGPKKSTNLVKNKCVNFNFNGLTGTGVLTESNKKFLPFQQFGRDIADTTDAVRDPQTLEILDITPCSFGGVSVITPGTNTSNQVAVLYQDVNCTEVPDAIHADQLTPTWRVYSTGSNVFQTRAGCLIGAEHVNNSYECDIPIGAGICASYQTQTNSPSGAGSHHHHHHHHHH

SEQ ID NO: 4640 - protein, 715 aa, Artificial Sequence
  Description of Artificial Sequence: Synthetic polypeptide
MGILPSPGMPALLSLVSLLSVLLMGCVAETGTQCVNLTTRTQLPPAYTNSFTRGVYYPDKVFRSSVLHSTQDLFLPFFSNVTWFHAIHVSGTNGTKRFDNPVLPFNDGVYFASTEKSNIIRGWIFGTTLDSKTQSLLIVNNATNVVIKVCEFQFCNDPFLGVYYHKNNKSWMESEFRVYSSANNCTFEYVSQPFLMDLEGKQGNFKNLREFVFKNIDGYFKIYSKHTPINLVRDLPQGFSALEPLVDLPIGINITRFQTLLALHRSYLTPGDSSSGWTAGAAAYYVGYLQPRTFLLKYNENGTITDAVDCALDPLSETKCTLKSFTVEKGIYQTSNFRVQPTESIVRFPNITNLCPFGEVFNATRFASVYAWNRKRISNCVADYSVLYNSASFSTFKCYGVSPTKLNDLCFTNVYADSFVIRGDEVRQIAPGQTGKIADYNYKLPDDFTGCVIAWNSNNLDSKVGGNYNYLYRLFRKSNLKPFERDISTEIYQAGSTPCNGVEGFNCYFPLQSYGFQPTNGVGYQPYRVVVLSFELLHAPATVCGPKKSTNLVKNKCVNFNFNGLTGTGVLTESNKKFLPFQQFGRDIADTTDAVRDPQTLEILDITPCSFGGVSVITPGTNTSNQVAVLYQDVNCTEVPVAIHADQLTPTWREYSTGSNVFQTRAGCLIGAEHVNNSYECDIPIGAGICASYQTQTNSPSGAGSHHHHHHHHHH

SEQ ID NO: 4641 - protein, 715 aa, Artificial Sequence
  Description of Artificial Sequence: Synthetic polypeptide
MGILPSPGMPALLSLVSLLSVLLMGCVAETGTQCVNLTTRTQLPPAYTNSFTRGVYYPDKVFRSSVLHSTQDLFLPFFSNVTWFHAIHVSGTNGTKRFDNPVLPFNDGVYFASTEKSNIIRGWIFGTTLDSKTQSLLIVNNATNVVIKVCEFQFCNDPFLGVYYHKNNKSWMESEFRVYSSANNCTFEYVSQPFLMDLEGKQGNFKNLREFVFKNIDGYFKIYSKHTPINLVRDLPQGFSALEPLVDLPIGINITRFQTLLALHRSYLTPGDSSSGWTAGAAAYYVGYLQPRTFLLKYNENGTITDAVDCALDPLSETKCTLKSFTVEKGIYQTSNFRVQPTESIVRFPNITNLCPFGEVFNATRFASVYAWNRKRISNCVADYSVLYNSASFSTFKCYGVSPTKLNDLCFTNVYADSFVIRGDEVRQIAPGQTGKIADYNYKLPDDFTGCVIAWNSNNLDSKVGGNYNYLYRLFRKSNLKPFERDISTEIYQAGSTPCNGVEGFNCYFPLQSYGFQPTNGVGYQPYRVVVLSFELLHAPATVCGPKKSTNLVKNKCVNFNFNGLTGTGVLTESNKKFLPFQQFGRDIADTTDAVRDPQTLEILDITPCSFGGVSVITPGTNTSNQVAVLYQDVNCTEVPVAIHADQLTPTWRVYSTGSNVFQTRAGCLVGAEHVNNSYECDIPIGAGICASYQTQTNSPSGAGSHHHHHHHHHH

SEQ ID NO: 4642 - protein, 715 aa, Artificial Sequence
  Description of Artificial Sequence: Synthetic polypeptide
MGILPSPGMPALLSLVSLLSVLLMGCVAETGTQCVNLTTRTQLPPAYTNSFTRGVYYPDKVFRSSVLHSTQDLFLPFFSNVTWFHAIHVSGTNGTKRFDNPVLPFNDGVYFASTEKSNIIRGWIFGTTLDSKTQSLLIVNNATNVVIKVCEFQFCNDPFLGVYYHKNNKSWMESEFRVYSSANNCTFEYVSQPFLMDLEGKQGNFKNLREFVFKNIDGYFKIYSKHTPINLVRDLPQGFSALEPLVDLPIGINITRFQTLLALHRSYLTPGDSSSGWTAGAAAYYVGYLQPRTFLLKYNENGTITDAVDCALDPLSETKCTLKSFTVEKGIYQTSNFRVQPTESIVRFPNITNLCPFGEVFNATRFASVYAWNRKRISNCVADYSVLYNSASFSTFKCYGVSPTKLNDLCFTNVYADSFVIRGDEVRQIAPGQTGKIADYNYKLPDDFTGCVIAWNSNNLDSKVGGNYNYLYRLFRKSNLKPFERDISTEIYQAGSTPCNGVEGFNCYFPLQSYGFQPTNGVGYQPYRVVVLSFELLHAPATVCGPKKSTNLVKNKCVNFNFNGLTGTGVLTESNKKFLPFQQFGRWIADTTDAVRDPQTLEILDITPCSFGGVSVITPGTNTSNQVAVLYQDVNCTEVPVAIHADQLTPTWRVYSTGSNVFQTRAGCLIGAEHVNNSYECDIPIGAGICASYQTQTNSPSGAGSHHHHHHHHHH

SEQ ID NO: 4643 - protein, 715 aa, Artificial Sequence
  Description of Artificial Sequence: Synthetic polypeptide
MGILPSPGMPALLSLVSLLSVLLMGCVAETGTQCVNLTTRTQLPPAYTNSFTRGVYYPDKVFRSSVLHSTQDLFLPFFSNVTWFHAIHVSGTNGTKRFDNPVLPFNDGVYFASTEKSNIIRGWIFGTTLDSKTQSLLIVNNATNVVIKVCEFQFCNDPFLGVYYHKNNKSWMESEFRVYSSANNCTFEYVSQPFLMDLEGKQGNFKNLREFVFKNIDGYFKIYSKHTPINLVRDLPQGFSALEPLVDLPIGINITRFQTLLALHRSYLTPGDSSSGWTAGAAAYYVGYLQPRTFLLKYNENGTITDAVDCALDPLSETKCTLKSFTVEKGIYQTSNFRVQPTESIVRFPNITNLCPFGEVFNATRFASVYAWNRKRISNCVADYSVLYNSASFSTFKCYGVSPTKLNDLCFTNVYADSFVIRGDEVRQIAPGQTGKIADYNYKLPDDFTGCVIAWNSNNLDSKVGGNYNYLYRLFRKSNLKPFERDISKEIYQAGSTPCNGVEGFNCYFPLQSYGFQPTNGVGYQPYRVVVLSFELLHAPATVCGPKKSTNLVKNKCVNFNFNGLTGTGVLTESNKKFLPFQQFGRDIADTTDAVRDPQTLEILDITPCSFGGVSVITPGTNTSNQVAVLYQDVNCTEVPVAIHADQLTPTWRVYSTGSNVFQTRAGCLIGAEHVNNSYECDIPIGAGICASYQTQTNSPSGAGSHHHHHHHHHH

SEQ ID NO: 4644 - protein, 715 aa, Artificial Sequence
  Description of Artificial Sequence: Synthetic polypeptide
MGILPSPGMPALLSLVSLLSVLLMGCVAETGTQCVNLTTRTQLPPAYTNSFTRGVYYPDKVFRSSVLHSTQDLFLPFFSNVTWFHAIHVSGTNGTKRFDNPVLPFNDGVYFASTEKSNIIRGWIFGTTLDSKTQSLLIVNNATNVVIKVCEFQFCNDPFLGVYYHKNNKSWMESEFRVYSSANNCTFEYVSQPFLMDLEGKQGNFKNLREFVFKNIDGYFKIYSKHTPINLVRDLPQGFSALEPLVDLPIGINITRFQTLLALHRSYLTPGDSSSGWTAGAAAYYVGYLQPRTFLLKYNENGTITDAVDCALDPLSETKCTLKSFTVEKGIYQTSNFRVQPTESIVRFPNITNLCPFGEVFNATRFASVYAWNRKRISNCVADYSVLYNSASFSTFKCYGVSPTKLNDLCFTNVYADSFVIRGDEVRQIAPGQTGKIADYNYKLPDDFTGCVIAWNSNNLDSKVGGNYNYLYRLFRKSNLKPFERDISTEIYQAGSTPCNGVEGFNCYFPLQSYGFQPTYGVGYQPYRVVVLSFELLHAPATVCGPKKSTNLVKNKCVNFNFNGLTGTGVLTESNKKFLPFQQFGRDIADTTDAVRDPQTLEILDITPCSFGGVSVITPGTNTSNQVAVLYQDVNCTEVPVAIHADQLTPTWRVYSTGSNVFQTRAGCLIGAEHVNNSYECDIPIGAGICASYQTQTNSPSGAGSHHHHHHHHHH

SEQ ID NO: 4645 - protein, 715 aa, Artificial Sequence
  Description of Artificial Sequence: Synthetic polypeptide
MGILPSPGMPALLSLVSLLSVLLMGCVAETGTQCVNLTTRTQLPPAYTNSFTRGVYYPDKVFRSSVLHSTQDLFLPFFSNVTWFHAIHVSGTNGTKRFDNPVLPFNDGVYFASTEKSNIIRGWIFGTTLDSKTESLLIVNNATNVVIKVCEFQFCNDPFLGVYYHKNNKSWMESEFRVYSSANNCTFEYVSQPFLMDLEGKQGNFKNLREFVFKNIDGYFKIYSKHTPINLVRDLPQGFSALEPLVDLPIGINITRFQTLLALHRSYLTPGDSSSGWTAGAAAYYVGYLQPRTFLLKYNENGTITDAVDCALDPLSETKCTLKSFTVEKGIYQTSNFRVQPTESIVRFPNITNLCPFGEVFNATRFASVYAWNRKRISNCVADYSVLYNSASFSTFKCYGVSPTKLNDLCFTNVYADSFVIRGDEVRQIAPGQTGKIADYNYKLPDDFTGCVIAWNSNNLDSKVGGNYNYLYRLFRKSNLKPFERDISTEIYQAGSTPCNGVEGFNCYFPLQSYGFQPTNGVGYQPYRVVVLSFELLHAPATVCGPKKSTNLVKNKCVNFNFNGLTGTGVLTESNKKFLPFQQFGRDIADTTDAVRDPQTLEILDITPCSFGGVSVITPGTNTSNQVAVLYQDVNCTEVPVAIHADQLTPTWRVYSTGSNVFQTRAGCLIGAEHVNNSYECDIPIGAGICASYQTQTNSPSGAGSHHHHHHHHHH

SEQ ID NO: 4646 - protein, 715 aa, Artificial Sequence
  Description of Artificial Sequence: Synthetic polypeptide
MGILPSPGMPALLSLVSLLSVLLMGCVAETGTQCVNLTTRTQLPPAYTNSFTRGVYYPDKVFRSSVLHSTQDLFLPFFSNVTWFHAIHVSGTNGTKRFDNPVLPFNDGVYFASTEKSNIIRGWIFGTTLDSKTQSLLIVNNATNVVIKVCEFQFCNDPFLGVYYHKNNKSWMESEFRVYSSANNCTFEYVSQPFLMDLEGKQGNFKNLREFVFKNIDGYFKIYSKHTPINLVRDLPQGFSALEPLVDLPIGINITRFQTLLALHRSYLTPGDSSSGWTAGAAAYYVGYLQPRTFLLKYNENGTITDAVDCALDPLSETKCTLKSFTVEKGIYQTSNFRVQPTESIVRFPNITNLCPFGEVFNATRFASVYAWNRKRISNCVADYSVLYNSASFSTFKCYGVSPTKLNDLCFTNVYADSFVIRGDEVRQIAPGQTGKIADYNYVLPDDFTGCVIAWNSNNLDSKVGGNYNYLYRLFRKSNLKPFERDISTEIYQAGSTPCNGVEGFNCYFPLQSYGFQPTNGVGYQPYRVVVLSFELLHAPATVCGPKKSTNLVKNKCVNFNFNGLTGTGVLTESNKKFLPFQQFGRDIADTTDAVRDPQTLEILDITPCSFGGVSVITPGTNTSNQVAVLYQDVNCTEVPVAIHADQLTPTWRVYSTGSNVFQTRAGCLIGAEHVNNSYECDIPIGAGICASYQTQTNSPSGAGSHHHHHHHHHH

SEQ ID NO: 4647 - protein, 715 aa, Artificial Sequence
  Description of Artificial Sequence: Synthetic polypeptide
MGILPSPGMPALLSLVSLLSVLLMGCVAETGTQCVNLTTRTQLPPAYTNSFTRGVYYPDKVFRSSVLHSTQDLFLPFFSNVTWFHAKHVSGTNGTKRFDNPVLPFNDGVYFASTEKSNIIRGWIFGTTLDSKTQSLLIVNNATNVVIKVCEFQFCNDPFLGVYYHKNNKSWMESEFRVYSSANNCTFEYVSQPFLMDLEGKQGNFKNLREFVFKNIDGYFKIYSKHTPINLVRDLPQGFSALEPLVDLPIGINITRFQTLLALHRSYLTPGDSSSGETAGAAAYYVGYLQPRTFLLKYNENGTITDAVDCALDPLSETKCTLKSFTVEKGIYQTSNFRVQPTESIVRFPNITNPCPFGEVFNATRFASVYAWNRKRISNCVADYSVLYNSASFSTFKCYGVSPTKLNDLCFTNVYADSFVIRGDEVRQIAPGQTGKIADYNYKLPDDFTGCVIAWNSNNLDSKVGGNYNYLYRLFRKSNLKPFERDISTEIYQAGSTPCNGVEGFNCYFPLQSYGFQPTNGPGQQPYRVVVLSFELLHAPATVCGPKKSTNLVKNKCVNFNFNGLTGTGVLTESNKKFLPFQQFGRDIADTTDAVRDPQTLEILDITPCSFGGVSVITPGTNTSNQVAVLYQDVNCTEVPDAIHADQLTPTWRVYSTGSNVFQTRAGCLIGAEHVNNSYECDIPIGAGICASYQTQTNSPSGAGSHHHHHHHHHH

SEQ ID NO: 4648 - protein, 715 aa, Artificial Sequence
  Description of Artificial Sequence: Synthetic polypeptide
MGILPSPGMPALLSLVSLLSVLLMGCVAETGTQCVNLTTRTQLPPAYTNSFTRGVYYPDKVFRSSVLHSTQDLFLPFFSNVTWFHAIHVSGTNGTKRFDNPVLPFNDGVYFASTEKSNIIRGWIFGTTLDSKTQSLLIVNNATNVVIKVCEFQFCNDPFLGVYYHKNNKSWMESEFRVYSSANNCTFEYVSQPFLMDLEGKQGNFKNLREFVFKNIDGYFKIYSKHTPINLVRDLPQGFSALEPLVDLPIGINITRFQTLLALHRSYLTPGDSSSGWTAGAAAYYVGYLQPRTFLLKYNENGTITDAVDCALDPLSETKCTLKSFTVEKGIYQTSNFRVQPTESIVRFPNITNLCPFGEVFNATRFASVYAWNRKRISNCVADYSVLYNSASFSTFKCYGVSPTKLNDLCFTNVYADSFVIRGDEVRQIAPGQTGKIADYNYKLPDDFTGCVIAWNSNNLDSKVGGNYNYLYRLFRKSNLKPFERDISTEIYQSGSTPCNGVEGFNCYFPLQSYGFQPTNGVGYQPYRVVVLSFELLHAPATVCGPKKSTNLVKNKCVNFNFNGLTGTGVLTESNKKFLPFQQFGRDIADTTDAVRDPQTLEILDITPCSFGGVSVITPGTNTSNQVAVLYQDVNCTEVPVAIHADQLTPTWRVYSTGSNVFQTRAGCLIGAEHVNNSYECDIPIGAGICASYQTQTNSPSGAGSHHHHHHHHHH

SEQ ID NO: 4649 - protein, 715 aa, Artificial Sequence
  Description of Artificial Sequence: Synthetic polypeptide
MGILPSPGMPALLSLVSLLSVLLMGCVAETGTQCVNLTTRTQLPPAYTNSFTRGVYYPDKVFRSSVLHSTQDLFLPFFSNVTWFHAIHVSGTNGTKRFDNPVLPFNDGVYFASTEKSNIIRGWIFGTTLDSKTQSLLIVNNATNVVIKVCEFQFCNDPFLGVYYHKNNKSWMESEFRVYSSANNCTFEYVSQPFLMDLEGKQGNFKNLREFVFKNIDGYFKIYSKHTPINLVRDLPQGFSALEPLVDLPIGINITRFQTLLALHRSYLTPGDSSSGWTAGAAAYYVGYLQPRTFLLKYNENGTITDAVDCALDPLSETKCTLKSFTVEKGIYQTSNFRVQPTESIVRFPNITNLCPFGEVFNATRFASVYAWNRKRISNCVADYSVLYNSASFSTFKCYGVSPTKLNDLCFTNVYADSFVIRGDEVRQIAPGQTGKIADYNYKLPDDFTGCVIAWNSNNLDSKVGGNYNYLYRLFRKSNLKPFERDISTEIYQAGSTPCNGVEGFNCYFPLQSYGFQPTNGVGYQPYRVVVLSFELLHAPATVCGPKKSTNLVKNKCVNFNFNGLTGTGVLTESNKKFLPFQQFGRDIADTTDAVRDPQTLEILDITPCSFGGVSVITPSTNTSNQVAVLYQDVNCTEVPVAIHADQLTPTWRVYSTGSNVFQTRAGCLIGAEHVNNSYECDIPIGAGICASYQTQTNSPSGAGSHHHHHHHHHH

SEQ ID NO: 4650 - protein, 715 aa, Artificial Sequence
  Description of Artificial Sequence: Synthetic polypeptide
MGILPSPGMPALLSLVSLLSVLLMGCVAETGTQCVNLTTRTQLPPAYTNSFTRGVYYPDKVFRSSVLHSTQDLFLPFFSNVTWFHAIHVSGTNGTKRFDNPVLPFNDGVYFASTEKSNIIRGWIFGTTLDSKTQSLLIVNNATNVVIKVCEFQFCNDPFLGVYYHKNNKSWMESEFRVYSSANNCTFEYVSQPFLMDLEGKQGNFKNLREFVFKNIDGYFKIYSKHTPINLVRDLPQGFSALEPLVDLPIGINITRFQTLLALHRSYLTPGDSSSGWTAGAAAYYVGYLQPRTFLLKYNENGTITDAVDCALDPLSETKCTLKSFTVEKGIYQTSNFRVQPTESIVRFPNITNLCPFGEVFNATRFASVYAWNRKRISNCVADYSVLYNSASFSTFKCYGVSPTKLNDLCFTNVYADSFVIRGDEVRQIAPGQTGKIADYNYKLPDDFTGCVIAWNSNNLDSKVGGNYNYLYRLFRKSNLKPFERDISTEIYQAGSTPCNGVEGFNCYFPLQSYGFQPTNGVGYQPYRVVVLSFELLHAPATVCGPKKSTNLVKNKCVNFNFNGLTGTGVLTESNKKFLPFQQFGRDIADTTDAVRDPQTLEILDITPCSHGGVSVITPGTNTSNQVAVLYQDVNCTEVPVAIHADQLTPTWRVYSTGSNVFQTRAGCLIGAEHVNNSYECDIPIGAGICASYQTQTNSPSGAGSHHHHHHHHHH

SEQ ID NO: 4651 - protein, 715 aa, Artificial Sequence
  Description of Artificial Sequence: Synthetic polypeptide
MGILPSPGMPALLSLVSLLSVLLMGCVAETGTQCVNLTTRTQLPPAYTNSFTRGVYYPDKVFRSSVLHSTQDLFLPFFSNVTWFHAIHVSGTNGTKRFDNPVLPFNDGVYFASTEKSNIIRGWIFGTTLDSKTQSLLIVNNATNVVIKVCEFQFCNDPFLGVYYHKNNKSWMESEFRVYSSANNCTFEYVSQPFLMDLEGKQGNFKNLREFVFKNIDGYFKIYSKHTPINLVRDLPQGFSALEPLVDLPIGINITRFQTLLALHRSYLTPGDSSSGWTAGAAAYYVGYLQPRTFLLKYNENGTITDAVDCALDPLSETKCTLKSFTVEKGIYQTSNFRVQPTESIVRFPNITNLCPFGEVFNATRFASSYAWNRKRISNCVADYSVLYNSASFSTFKCYGVSPTKLNDLCFTNVYADRFVIRGDEVRQIAPGQTGKIADYNYKLPDDFTGCVIAWNSNNLDAKVGGNYNYLYRLFRKSNLKPFERFISTEIYQAGSTPSNGVEGFNCYFPLQSYVFQPTNGVTYQPYRVVVLSFELLHAPHTVCGPKKSTNLVKNKCVNFNFNGLTGTGVLTESNKKFLPFQQFGRDIADTTDAVRDPQTLEILDITPCSFGGVSVITPGTNTSNQVAVLYQDVNCTEVPVAIHADQLTPTWRVYSTGSNVFQTRAGCLIGAEHVNNSYECDIPIGAGICASYQTQTNSPSGAGSHHHHHHHHHH

SEQ ID NO: 4652 - protein, 715 aa, Artificial Sequence
  Description of Artificial Sequence: Synthetic polypeptide
MGILPSPGMPALLSLVSLLSVLLMGCVAETGTQCVNLTTRTQLPPAYTNSFTRGVYYPDKVFRSSVLHSTQDLFLPFFSNVTWFHAIHVSGTNGTKRFDNPVLPFNDGVYFASTEKSNIIRGWIFGTTLDSKTQSLLIVNNATNVVIKVCEFQFCNDPFLGVYYHKNNKSWMESEFRVYSSANNCTFEYVSQPFLMDLEGKQGNFKNLREFVFKNIDGYFKIYSKHTPINLVRDLPQGFSALEPLVDLPIGINITRFQTLLALHRSYLTPGDSSSGWTAGAAAYYVGYLQPRTFLLKYNENGTITDAVDCALDPLSETKCTLKSFTVEKGIYQTSNFRVQPTESIVRFPNITNLCPFGEVFNATRFASVYAWNRKRISNCVADYSVLYNSASFSTFKCYGVSPTKLNDLCFTNVYADSFVIRGDEVRQIAPGQTGKIADYNYKLPDDFTGCVIAWNSNNLDSKVGGNYNYLYRLFRKSNLKPFERDISTEIYQAGSTPCNGVEGFNCYFPLQSYGFQPTNGVGYQPYRVVVLSFELLHAPATVCGPKKSTNLVKNKCVNFNFNGLTGTGVLTESNKKFLPFQQFGRDIADTTDAVRDPQTLEILDITPCSFGGVSVITPGTNTSNQVAVLYQDVNCTEVPVAIHADQLTPTWRVYNTGSNVFQTRAGCLIGAEHVNNSYECDIPIGAGICASYQTQTNSPSGAGSHHHHHHHHHH

SEQ ID NO: 4653 - protein, 715 aa, Artificial Sequence
  Description of Artificial Sequence: Synthetic polypeptide
MGILPSPGMPALLSLVSLLSVLLMGCVAETGTQCVNLTTRTQLPPAYTNSFTRGVYYPDKVFRSSVLHSTQDLFLPFFSNVTWFHAIHVSGTNGTKRFDNPVLPFNDGVYFASTEKSNIIRGWIFGTTLDSKTQSLLIVNNATNVVIKVCEFQFCNDPFLGVYYHKNNKSWMESEFRVYSSANNCTFEYVSQPFLMDLEGKQGNFKNLREFVFKNIDGYFKIYSKHTPINLVRDLPQGFSALEPLVDLPIGINITRFQTLLALHRSYLTPGDSSSGWTAGAAAYYVGYLQPRTFLLKYNENGTITDAVDCALDPLSETKCTLKSFTVEKGIYQTSNFRVQPTESIVRFPNITNLCPFDEVFNATRFASVYAWNRKRISNCVADYSVLYNSASFSTFKCYGVSPTKLNDLCFTNVYADSFVIRGDEVRQIAPGQTGKIADYNYKLPDDFTGCVIAWNSNNLDSKVGGNYNYLYRLFRKSNLKPFERDISTEIYQAGSTPCNGVEGFNCYFPLQSYGFQPTNGVGYQPYRVVVLSFELLHAPATVCGPKKSTNLVKNKCVNFNFNGLTGTGVLTESNKKFLPFQQFGRDIADTTDAVRDPQTLEILDITPCSFGGVSVITPGTNTSNQVAVLYQDVNCTEVPVAIHADQLTPTWRVYSTGSNVFQTRAGCLIGAEHVNNSYECDIPIGAGICASYQTQTNSPSGAGSHHHHHHHHHH

SEQ ID NO: 4654 - protein, 715 aa, Artificial Sequence
  Description of Artificial Sequence: Synthetic polypeptide
MGILPSPGMPALLSLVSLLSVLLMGCVAETGTQCVNLTTRTQLPPAYTNSFTRGVYYPDKVFRSQVLHSTQDLFLPFFSNVTWFHAIHVSGTNGTKRFDNPVLPFNDGVYFASTEKSNIIRGWIFGTTLDSKTQSLLIVNNATNVVIKVCEFQFCNDPFLGVYYHKNNKSWMESEFRVYSSANNCTFEYVSQPFLMDLEGKQGNFKNLREFVFKNIDGYFKIYSKHTPINLVRDLPQGFSALEPLVDLPIGINITRFQTLLALHRSYLTPGDSSSGWTAGAAAYYVGYLQPRTFLLKYNENGTITDAVDCALDPLSETKCTLKSFTVEKGIYQTSNFRVQPTESIVRFPNITNLCPFGEVFNATRFASVYAWNRKRISNCVADYSVLYNSASFSTFKCYGVSPTKLNDLCFTNVYADSFVIRGDEVRQIAPGQTGKIADYNYKLPDDFTGCVIAWNSNNLDSKVGGNYNYLYRLFRKSNLKPFERDISTEIYQAGSTPCNGVEGFNCYFPLQSYGFQPTNGVGYQPYRVVVLSFELLHAPATVCGPKKSTNLVKNKCVNFNFNGLTGTGVLTESNKKFLPFQQFGRDIADTTDAVRDPQTLEILDITPCSFGGVSVITPGTNTSNQVAVLYQDVNCTEVPVAIHADQLTPTWRVYSTGSNVFQTRAGCLIGAEHVNNSYECDIPIGAGICASYQTQTNSPSGAGSHHHHHHHHHH

SEQ ID NO: 4655 - protein, 715 aa, Artificial Sequence
  Description of Artificial Sequence: Synthetic polypeptide
MGILPSPGMPALLSLVSLLSVLLMGCVAETGTQCVNLTTRTQLPPAYTNSFTRGVYYPDKVFRSSVLHSTQDLFLPFFSNVTWFHAIHVSGTNGTKRFDNPVLPFNDGVYFASTEKSNIIRGWIFGTTLDSKTQSLLIVNNATNVVIKVCEFQFCNDPFLGVYYHKNNKSWMESEFRVYSSANNCTFEYVSQPFLMDLEGKQGNFKNLREFVFKNIDGYFKIYSKHTPINLVRDLPQGFSALEPLVDLPIGINITRFQTLLALHRSYLTPGDSSSGWTAGAAAYYVGYLQPRTFLLKYNENGTITDAVDCALDPLSETKCTLKSFTVEKGIYQTSNFRVQPTESIVRFPNITNLCPFGEVFNATRFASVYAWNRKRISNCVADYSVLYNSASFSTFKCYGVSPTKLNDLCFTNVYADSFVIRGDEVRQIAPGQTGKIADYNYKLPDDFTGCVIAWNSNNLDSKVGGNYNYLYRLFRKSNLKPFERDISTEIYQAGSTPCNGVEGFNCYFPLQSYGFQPTNGVGYQPYRVVVLSFELLHAPATVCGPKKSTNLVKNKCVNFNFNGLTGTGVLTESNKKFLPFQQFGRDIADTTDAVRDPQTLEILDITPCSFGGVLVITPDTNTSNQVAVLYQDVNCTEVPVAIHADQLTPTWRVYNTGSNVFQTRAGCLVGFEHVNNSYECDIPVGAGICASYQTQRNSPSGAGSHHHHHHHHHH

SEQ ID NO: 4656 - protein, 715 aa, Artificial Sequence
  Description of Artificial Sequence: Synthetic polypeptide
MGILPSPGMPALLSLVSLLSVLLMGCVAETGTQCVNLTTRTQLPPAYTNSFTRGVYYPDKVFRSSVLHSTQDLFLPFFSNVTWFHAIHVSGTNGTKRFDNPVLPFNDGVYFASTEKSNIIRGWIFGTTLDSKTQSLLIVNNATNVVIKVCEFQFCNDPFLGVYYHKNNKSWMESEFRVYSSANNCTFEYVSQPFLMDLEGKQGNFKNLREFVFKNIDGYFKIYSKHTPINLVRDLPQGFSALEPLVDLPIGINITRFQTLLALHRSYLTPGDSSSGWTAGAAAYYVGYLQPRTFLLKYNENGTITDAVDCALDPLSETKCTLKSFTVEKGIYQTSNFRVQPTESIVRFPNITNLCPFGEVFNATRFASVYAWNRKRISNCVADYSVLYNSASFSTFKCYGVSPTKLNDLCFTNVYADSFVIRGDEVRQIAPGQTGKIADYNYKLPDDFTGCVIAWNSNNLDSKVGGNYNYLYRLFRKSNLKPFERDISEEIYQAGSTPCNGVEGFNCYFPLQSYGFQPTNGVGYQPYRVVVLSFELLHAPATVCGPKKSTNLVKNKCVNFNFNGLTGTGVLTESNKKFLPFQQFGRDIADTTDAVRDPQTLEILDITPCSFGGVSVITPGTNTSNQVAVLYQDVNCTEVPVAIHADQLTPTWRVYSTGSNVFQTRAGCLIGAEHVNNSYECDIPIGAGICASYQTQTNSPSGAGSHHHHHHHHHH

SEQ ID NO: 4657 - protein, 715 aa, Artificial Sequence
  Description of Artificial Sequence: Synthetic polypeptide
MGILPSPGMPALLSLVSLLSVLLMGCVAETGTQCVNLTTRTQLPPAYTNSFTRGVYYPDKVFRSSVLHSTQDLFLPFFSNVTWFHAIHVSGTNGTKRFDNPVLPFNDGVYFASTEKSNIIRGWIFGTTLDSKTQSLLIVNNATNVVIKVCEFQFCNDPFLGVYYHKNNKSWMESEFRVYSSANNCTFEYVSQPFLMDLEGKQGNFKNLREFVFKNIDGYFKIYSKHTPINLVRDLPQGFSALEPLVDLPIGINITRFQTLLALHRSYLTPGDSSSGWTAGAAAYYVGYLQPRTFLLKYNENGTITDAVDCALDPLSETKCTLKSFTVEKGIYQTSNFRVQPTESIVRFPNITNLCPFGEVFNATRFASVYAWNRKRISNCVADYSVLYNSASFSTFKCYGVSPTKLNDLCFTNVYADSFVIRGDEVRQIAPGQTGKIADYNYKLPDDFTGCVIAWNSNNLDSKVGGNYNYLYRLFRKSNLKPFERDISTEIYQAGSTPCNGVEGFNCYFPLQSYGFQPTNGVGYQPYRVVVLSFELLHAPATVCGPKKSTNLVKNKCVNFNFNGLTGTGVLTESNKKFLPFQQFGRDIADTTDAVRDPQTLEILDITPCSFGGVSVITPGTNTSNQVAVLYQDVNCTEVPVAIHARQLTPTWRVYSTGSNVFQTRAGCLIGAEHVNNSYECDIPIGAGICASYQTQTNSPSGAGSHHHHHHHHHH

SEQ ID NO: 4658 - protein, 715 aa, Artificial Sequence
  Description of Artificial Sequence: Synthetic polypeptide
MGILPSPGMPALLSLVSLLSVLLMGCVAETGTQCVNLTTRTQLPPAYTNSFTRGVYYPDKVFRSSVLHSTQDLFLPFFSNVTWFHAIHVSGTNGTKRFDNPVLPFNDGVYFASTEKSNIIRGWIFGTTLDSKTQSLLIVNNATNVVIKVCEFQFCNDPFLGVYYHKNNKSWMESEFRVYSSANNCTFEYHSQPFLMDLEGKQGNFKNLREFVFKNIDGYFKIYSKHTPINLVRDLPQGFSALEPLVDLPIGINITRFQTLLALHRSYLTPGDSSSGETAGAAAYYVGYLQPRTFLLKYNENGTITDAVDCALDPLSETKCTLKSFTVEKGIYQTSNFRVQPTESIVRFPNITNKCPFGEVFNATRFASVYAWNRKRISNCVADYSVLYNSASFSTFKCYGVSPTKLNDLCFTNVYADSFVIRGDEVRQIAPGQTGKIADYNYKLPDDFTGCVIAWNSNNLDSKVGGNYNYLYRLFRKSNLKPFERDISTEIYQAGSTPCNGVEGFNCYFPLQSYGFQPTNGPGQQPYRVVVLSFELLHAPATVCGPKKSTNLVKNKCVNFNFNGLTGTGVLTESNKKFLPFQQFGRDIADTTDAVRDPQTLEILDITPCSFGGVSVITPGTNTSNQVAVLYQDVNCTEVPDAIHADQLTPTWRVYSTGSNVFQTRAGCLIGAEHVNNSYECDIPIGAGICASYQTQTNSPSGAGSHHHHHHHHHH

SEQ ID NO: 4659 - protein, 715 aa, Artificial Sequence
  Description of Artificial Sequence: Synthetic polypeptide
MGILPSPGMPALLSLVSLLSVLLMGCVAETGTQCVNLTTRTQLPPAYTNSFTRGVYYPDKVFRSSVLHSTQDLFLPFFSNVTWFHAIHVSGTNGTKRFDNPVLPFNDGVYFASTEKSNIIRGWIFGTTLDSKTQSLLIVNNATNVVIKVCEFQFCNDPFLGVYYHKNNKSWMESEFRVYSSANNCTFEYVSQPFLMDLEGKQGNFKNLREFVFKNIDGYFKIYSKHTPINLVRDLPQGFSALEPLVDLPIGINITRFQTLLALHRSYLTPGDSSSGWTAGAAAYYVGYLQPRTFLLKYNENGTITDAVDCALDPLSETKCTLKSFTVEKGIYQTSNFRVQPTESIVRFPNITNLCPLGEVFNATRFASSYAWNRKRISNCVADYSVLYNSASFSTFKCYGVSPTKLNDLCFTNVYADRFVIRGDEVRQIAPGQTGKIADYNYKLPDDFTGCVIAWNSNNLDAKVGGNYNYLYRLFRKSNLKPFERFISTEIYQAGSTPTNGVEGFNCYFPLQSYGFQPTNGVTYQPYRVVVLSFELLHAPHTVCGPKKSTNLVKNKCVNFNFNGLTGTGVLTESNKKFLPFQQFGRDIADTTDAVRDPQTLEILDITPCSFGGVSVITPGTNTSNQVAVLYQDVNCTEVPVAIHADQLTPTWRVYSTGSNVFQTRAGCLIGAEHVNNSYECDIPIGAGICASYQTQTNSPSGAGSHHHHHHHHHH

SEQ ID NO: 4660 - protein, 715 aa, Artificial Sequence
  Description of Artificial Sequence: Synthetic polypeptide
MGILPSPGMPALLSLVSLLSVLLMGCVAETGTQCVNLTTRTQLPPAYTNSFTRGVYYPDKVFRSSVLHSTQDLFLPFFSNVTWFHAEHVSGTNGTKRFDNPVLPFNDGVYFASTEKSNIIRGWIFGTTLDSKTQSLLIVNNATNVVIKVCEFQFCNDPFLGVYYHKNNKSWMESEFRVYSSANNCTFEYHSQPFLMDLEGKQGNFKNLREFVFKNIDGYFKIYSKHTPINLVRDLPQGFSALEPLVDLPIGINITRFQTLLALHRSYLTPGDSSSGETAGAAAYYVGYLQPRTFLLKYNENGTITDAVDCALDPLSETKCTLKSFTVEKGIYQTSNFRVQPTESIVRFPNITNPCPFGEVFNATRFASVYAWNRKRISNCVADYSVLYNSASFSTFKCYGVSPTKLNDLCFTNVYADSFVIRGDEVRQIAPGQTGKIADYNYKLPDDFTGCVIAWNSNNLDSKVGGNYNYLYRLFRKSNLKPFERDISTEIYQAGSTPCNGVEGFNCYFPLQSYGFQPTNGPGQQPYRVVVLSFELLHAPATVCGPKKSTNLVKNKCVNFNFNGLTGTGVLTESNKKFLPFQQFGRDIADTTDAVRDPQTLEILDITPCSFGGVSVITPGTNTSNQVAVLYQDVNCTEVPVAIHADQLTPTWRVYSTGSNVFQTRAGCLIGAEHVNNSYECDIPIGAGICASYQTQTNSPSGAGSHHHHHHHHHH

SEQ ID NO: 4661 - protein, 715 aa, Artificial Sequence
  Description of Artificial Sequence: Synthetic polypeptide
MGILPSPGMPALLSLVSLLSVLLMGCVAETGTQCVNLTTRTQLPPAYTNSFTRGVYYPDKVFRSSVLHSTQDLFLPFFSNVTWFHAIHVSGTNGTKRFDNPVLPFNDGVYFASTEKSNIIRGWIFGTTLDSKTQSLLIVNNATNVVIKVCEFQFCNDPFLGVYYHKNNKSWMESEFRVYSSANNCTFEYVSQPFLMDLEGKQGNFKNLREFVFKNIDGYFKIYSKHTPINLVRDLPQGFSALEPLVDLPIGINITRFQTLLALHRSYLTPGDSSSGWTAGAAAYYVGYLQPRTFLLKYNENGTITDAVDCALDPLSETKCTLKSFTVEKGIYQTSNFRVQPTESIVRFPNITNLCPFGEVFNATRFASVYAWNRKRISNCVADYSVLYNSASFSTFKCYGVSPTKLNDLCFTNVYADSFVIRGDEVRQIAPGQTGKIADYNYKLPDDFTGCVIAWNSNNLDSKVGGNYNYLYRLFRKSHLKPFERDISTEIYQAGSTPCNGVEGFNCYFPLQSYGFQPTNGVGYQPYRVVVLSFELLHAPATVCGPKKSTNLVKNKCVNFNFNGLTGTGVLTESNKKFLPFQQFGRDIADTTDAVRDPQTLEILDITPCSFGGVSVITPGTNTSNQVAVLYQDVNCTEVPVAIHADQLTPTWRVYSTGSNVFQTRAGCLIGAEHVNNSYECDIPIGAGICASYQTQTNSPSGAGSHHHHHHHHHH

SEQ ID NO: 4662 - protein, 715 aa, Artificial Sequence
  Description of Artificial Sequence: Synthetic polypeptide
MGILPSPGMPALLSLVSLLSVLLMGCVAETGTQCVNLTTRTQLPPAYTNSFTRGVYYPDKVFRSSVLHSTQDLFLPFFSNVTWFHAIHVSGTNGTKRFDNPVLPFNDGVYFASTEKSNIIRGWIFGTTLDSKTQSLLIVNNATNVVIKVCEFQFCNDPFLGVYYHKNNKSWMESEFRVYSSANNCTFEYVSQPFLMDLEGKQGNFKNLREFVFKNIDGYFKIYSKHTPINLVRDLPQGFSALEPLVDLPIGINITRFQTLLALHRSYLTPGDSSSGWTAGAAAYYVGYLQPRTFLLKYNENGTITDAVDCALDPLSETKCTLKSFTVEKGIYQTSNFRVQPTESIVRFPNITNLCPFGEVFNATRFASVYAWNRKRISNCVADYSVLYNSASFSTFKCYGVSPTKLNDLCFTNVYADSFVIRGDEVRQIAPGQTGKIADYNYKLPDDFTGCVIAWNSNNLDSKVGGNYNYLYRLFRKSNLKPFERDISTEIYQAGSTPCNQVEGFNCYFPLQSYGFQPTNGVGYQPYRVVVLSFELLHAPATVCGPKKSTNLVKNKCVNFNFNGLTGTGVLTESNKKFLPFQQFGRDIADTTDAVRDPQTLEILDITPCSFGGVSVITPGTNTSNQVAVLYQDVNCTEVPVAIHADQLTPTWRVYSTGSNVFQTRAGCLIGAEHVNNSYECDIPIGAGICASYQTQTNSPSGAGSHHHHHHHHHH

SEQ ID NO: 4663 - protein, 715 aa, Artificial Sequence
  Description of Artificial Sequence: Synthetic polypeptide
MGILPSPGMPALLSLVSLLSVLLMGCVAETGTQCVNLTTRTQLPPAYTNSFTRGVYYPDKVFRSSVLHSTQDLFLPFFSNVTWFHAIHVSGTNGTKRFDNPVLPFNDGVYFASTEKSNIIRGWIFGTTLDSKTQSLLIVNNATNVVIKVCEFQFCNDPFLGVYYHKNNKSWMESEFRVYSSANNCTFEYVSQPFLMDLEGKQGNFKNLREFVFKNIDGYFKIYSKHTPINLVRDLPQGFSALEPLVDLPIGINITRFQTLLALHRSYLTPGDSSSGWTAGAAAYYVGYLQPRTFLLKYNENGTITDAVDCALDPLSETKCTLKSFTVEKGIYQTSNFRVQPTESIVRFPNITNLCPFGEVFNATRFASVYAWNRKRISNCVADYSVLYNSASFSTFKCYGVSPTKLNDLCFTNVYADSFVIRGDEVRQIAPGQTGKIADYNYKLPDDFTGCVIAWNSNNLDSKVGGNYNYLYRLFRKSNLKPFERDISTEIYQAGSTPCNGVEGFNCYFPLQSYGFQPTNGVGYQPYRVVVLSFENLHAPATVCGPKKSTNLVKNKCVNFNFNGLTGTGVLTESNKKFLPFQQFGRDIADTTDAVRDPQTLEILDITPCSFGGVSVITPGTNTSNQVAVLYQDVNCTEVPVAIHADQLTPTWRVYSTGSNVFQTRAGCLIGAEHVNNSYECDIPIGAGICASYQTQTNSPSGAGSHHHHHHHHHH

SEQ ID NO: 4664 - protein, 715 aa, Artificial Sequence
  Description of Artificial Sequence: Synthetic polypeptide
MGILPSPGMPALLSLVSLLSVLLMGCVAETGTQCVNLTTRTQLPPAYTNSFTRGVYYPDKVFRSSVLHSTQDLFLPFFSNVTWFHAIHVSGTNGTKRFDNPVLPFNDGVYFASTEKSNIIRGWIFGTTLDSKTQSLLIVNNATNVVIKVCEFQFCNDPFLGVYYHKNNKSWMESEFRVYSSANNCTFEYVSQPFLMDLEGKQGNFKNLREFVFKNIDGYFKIYSKHTPINLVRDLPQGFSALEPLVDLPIGINITRFQTLLALHRSYLTPGDSSSGWTAGAAAYYVGYLQPRTFLLKYNENGTITDAVDCALDPLSETKCTLKSFTVEKGIYQTSNFRVQPTESIVRFPNITNLCPFGEVFNATRFASVYAWNRKRISNCVADYSVLYNSASFSTFKCYGVSPTKLNDLCFTNVYADSFVIRGDEVRQIAPGQTGKIADYNYKLPDDFTGCVIAWNSNNLDAKVGGNYNYLYRLFRKSNLKPFERDISTEIYQAGSTPCNGVEGFNCYFPLQSYGFQPTNGVGYQPYRVVVLSFELLHAPATVCGPKKSTNLVKNKCVNFNFNGLTGTGVLTESNKKFLPFQQFGRDIADTTDAVRDPQTLEILDITPCSFGGVSVITPGTNTSNQVAVLYQDVNCTEVPVAIHADQLTPTWRVYSTGSNVFQTRAGCLIGAEHVNNSYECDIPIGAGICASYQTQTNSPSGAGSHHHHHHHHHH

SEQ ID NO: 4665 - protein, 715 aa, Artificial Sequence
  Description of Artificial Sequence: Synthetic polypeptide
MGILPSPGMPALLSLVSLLSVLLMGCVAETGTQCVNLTTRTQLPPAYTNSFTRGIYYPDKVFRSSVLHSTQDLFLPFFSNVTWFHAIHGSGTNGTKRFDNPVLPFNDGVYSAAIEKSNIIRGWIFGTTLDSKTQSLLIVNNATNVVIKVCEFQFCNDPHLGVYYHKNNKSWMESEFRVYSSANNCTFEYVSQPFLMDLEGKQGNFKLLREFVFKNIDGYFKIYSKHTPINLVRDLPQGFSPLEPLVDLPIGINITRFLTVLALHRSYLTPGDSSSGWTAGAAAYYVGYLQPRTFLLKYNENGTITDAVDCALDPLSETKCTLKSFTVEKGIYQTSNFRVQPTESIVRFPNITNLCPFGEVFNATRFASVYAWNRKRISNCVADYSVLYNSASFSTFKCYGVSPTKLNDLCFTNVYADSFVIRGDEVRQIAPGQTGKIADYNYKLPDDFTGCVIAWNSNNLDSKVGGNYNYLYRLFRKSNLKPFERDISTEIYQAGSTPCNGVEGFNCYFPLQSYGFQPTNGVGYQPYRVVVLSFELLHAPATVCGPKKSTNLVKNKCVNFNFNGLTGTGVLTESNKKFLPFQQFGRDIADTTDAVRDPQTLEILDITPCSFGGVSVITPGTNTSNQVAVLYQDVNCTEVPVAIHADQLTPTWRVYSTGSNVFQTRAGCLIGAEHVNNSYECDIPIGAGICASYQTQTNSPSGAGSHHHHHHHHHH

SEQ ID NO: 4666 - protein, 715 aa, Artificial Sequence
  Description of Artificial Sequence: Synthetic polypeptide
MGILPSPGMPALLSLVSLLSVLLMGCVAETGTQCVNLTTRTQLPPAYTNSFTRGVYYPDKVFRSSVLHSTQDLFLPFFSNVTWFHAIHVSGTNGTKRFDNPVLPFNDGVYFASTEKSNIIRGWIFGTTLDSKTQSLLIVNNATNVVIKVCEFQFCNDPFLGVYYHKNNKSWMESEFRVYSSANNCTFEYVSQPFLMDLEGKQGNFKNLREFVFKNIDGYFKIYSKHTPINLVRDLPQGFSALEPLVDLPIGINITRFQTLLALHRSYLTPGDSSSGWTAGAAAYYVGYLQPRTFLLKYNENGTITDAVDCALDPLSETKCTLKSFTVEKGIYQTSNFRVQPTESIVRFPNITNLCPFGEVFNATRFASVYAWNRKRISNCVADYSVLYNSASFSTFKCYGVSPTKLNDLCFTNVYADSFVIRGDEVRQIAPGQTGKIADYNYKLPDDFTGCVIAWNSNNLDSKVGGNYNYLYRLFRKSNLKPFERDISTEIYQAGSTPANGVEGFNCYFPLQSYGFQPTNGVGYQPYRVVVLSFELLHAPATVCGPKKSTNLVKNKCVNFNFNGLTGTGVLTESNKKFLPFQQFGRDIADTTDAVRDPQTLEILDITPCSFGGVSVITPGTNTSNQVAVLYQDVNCTEVPVAIHADQLTPTWRVYSTGSNVFQTRAGCLIGAEHVNNSYECDIPIGAGICASYQTQTNSPSGAGSHHHHHHHHHH

SEQ ID NO: 4667 - protein, 715 aa, Artificial Sequence
  Description of Artificial Sequence: Synthetic polypeptide
MGILPSPGMPALLSLVSLLSVLLMGCVAETGTQCVNLTTRTQLPPAYTNSFTRGVYYPDKVFRSSVLHSTQDLFLPFFSNVTWFHAIHVSGTNGTKRFDNPVLPFNDGVYFASTEKSNIIRGWIFGTTLDSKTQSLLIVNNATNVVIKVCEFQFVNDPFLGVYYHKNNKSWMESEFRVYSSANNCTFEYVSQPFLMDLEGKQGNFKNLREFVFKNIDGYFKIYSKHTPINLVRDLPQGFSALEPLVDLPIGINITRFQTLLALHRSYLTPGDSSSGWTAGAAAYYVGYLQPRTFLLKYNENGTITDAVDCALDPLSETKCTLKSFTVEKGIYQTSNFRVQPTESIVRFPNITNLCPFGEVFNATRFASVYAWNRKRISNCVADYSVLYNSASFSTFKCYGVSPTKLNDLCFTNVYADSFVIRGDEVRQIAPGQTGKIADYNYKLPDDFTGCVIAWNSNNLDSKVGGNYNYLYRLFRKSNLKPFERDISTEIYQAGSTPCNGVEGFNCYFPLQSYGFQPTNGVGYQPYRVVVLSFELLHAPATVCGPKKSTNLVKNKCVNFNFNGLTGTGVLTESNKKFLPFQQFGRDIADTTDAVRDPQTLEILDITPCSFGGVSVITPGTNTSNQVAVLYQDVNCTEVPVAIHADQLTPTWRVYSTGSNVFQTRAGCLIGAEHVNNSYECDIPIGAGICASYQTQTNSPSGAGSHHHHHHHHHH

SEQ ID NO: 4668 - protein, 715 aa, Artificial Sequence
  Description of Artificial Sequence: Synthetic polypeptide
MGILPSPGMPALLSLVSLLSVLLMGCVAETGTQCVNLTTRTQLPPAYTNSFTRGVYYPDKVFRSSVLHSTQDLFLPFFSNVTWFHAIHVSGTNGTKRFDNPVLPFNDGVYFASTEKSNIIRGWIFGTTLDSKTQSLLIVNNATNVVIKVCEFQFCNDPFLGVYYHKNNKSWMESEFRVYSSANNCTFEYVSQPFLMDLEGKQGNFKNLREFVFKNIDGYFKIYSKHTPINLVRDLPQGFSALEPLVDLPIGINITRFQTLLALHRSYLTPGDSSSGWTAGAAAYYVGYLQPRTFLLKYNENGTITDAVDCALDPLSETKCTLKSFTVEKGIYQTSNFRVQPTESIVRFPNITNLCPFGEVFNATRFASVYAWNRKRISNCVADYSVLYNSASFSTFKCYGVSPTKLNDLCFTNVYADSFVIRGDEVRQIAPGQTGKIADYNYKLPDDFTGCVIAWNSNNLDSKVGGNYNYLYRLFRKSNLKPVERDISTEIYQAGSTPCNGVEGFNCYFPLQSYGFQPTNGVGYQPYRVVVLSFELLHAPATVCGPKKSTNLVKNKCVNFNFNGLTGTGVLTESNKKFLPFQQFGRDIADTTDAVRDPQTLEILDITPCSFGGVSVITPGTNTSNQVAVLYQDVNCTEVPVAIHADQLTPTWRVYSTGSNVFQTRAGCLIGAEHVNNSYECDIPIGAGICASYQTQTNSPSGAGSHHHHHHHHHH

SEQ ID NO: 4669 - protein, 715 aa, Artificial Sequence
  Description of Artificial Sequence: Synthetic polypeptide
MGILPSPGMPALLSLVSLLSVLLMGCVAETGTQCVNLTTRTQLPPAYTNSFTRGVYYPDKVFRSSVLHSTQDLFLPFFSNVTWFHAEHVSGTNGTKRFDNPVLPFNDGVYFASTEKSNIIRGWIFGTTLDSKTQSLLIVNNATNVVIKVCEFQFCNDPFLGVYYHKNNKSWMESEFRVYSSANNCTFEYHSQPFLMDLEGKQGNFKNLREFVFKNIDGYFKIYSKHTPINLVRDLPQGFSALEPLVDLPIGINITRFQTLLALHRSYLTPGDSSSGWTAGAAAYYVGYLQPRTFLLKYNENGTITDAVDCALDPLSETKCTLKSFTVEKGIYQTSNFRVQPTESIVRFPNITNKCPFGEVFNATRFASVYAWNRKRISNCVADYSVLYNSASFSTFKCYGVSPTKLNDLCFTNVYADSFVIRGDEVRQIAPGQTGKIADYNYKLPDDFTGCVIAWNSNNLDSKVGGNYNYLYRLFRKSNLKPFERDISTEIYQAGSTPCNGVEGFNCYFPLQSYGFQPTNGPGQQPYRVVVLSFELLHAPATVCGPKKSTNLVKNKCVNFNFNGLTGTGVLTESNKKFLPFQQFGRDIADTTDAVRDPQTLEILDITPCSFGGVSVITPGTNTSNQVAVLYQDVNCTEVPDAIHADQLTPTWRVYSTGSNVFQTRAGCLIGAEHVNNSYECDIPIGAGICASYQTQTNSPSGAGSHHHHHHHHHH

SEQ ID NO: 4670 - protein, 715 aa, Artificial Sequence
  Description of Artificial Sequence: Synthetic polypeptide
MGILPSPGMPALLSLVSLLSVLLMGCVAETGTQCVNLTTRTQLPPAYTNSFTRGVYYPDKVFRSSVLHSTQDLFLPFFSNVTWFHAIHVSGTNGTKRFDNPVLPFNDGVYFASTEKSNIIRGWIFGTTLDSKTQSLLIVNNATNVVIKVCEFQFCNDPFLGVYYHKNNKSWMESEFRVYSSANNCTFEYVSQPFLMDLEGKQGNFKNLREFVFKNIDGYFKIYSKHTPINLVRDLPQGFSALEPLVDLPIGINITRFQTLLALHRSYLTPGDSSSGWTAGAAAYYVGYLQPRTFLLKYNENGTITDAVDCALDPLSETKCTLKSFTVEKGIYQTSNFRVQPTESIVRFPNITNLCPFGEVFNATRFASVYAWNRKRISNCVADYSVLYNSASFSTFKCYGVSPTKLNDLCFTNVYADSFVIRGDEVRQIAPGQTGTIADYNYKLPDDFTGCVIAWNSNNLDSKVGGNYNYLYRLFRKSNLKPFERDISTEIYQAGSTPCNGVEGFNCYFPLQSYGFQPTNGVGYQPYRVVVLSFELLHAPATVCGPKKSTNLVKNKCVNFNFNGLTGTGVLTESNKKFLPFQQFGRDIADTTDAVRDPQTLEILDITPCSFGGVSVITPGTNTSNQVAVLYQDVNCTEVPVAIHADQLTPTWRVYSTGSNVFQTRAGCLIGAEHVNNSYECDIPIGAGICASYQTQTNSPSGAGSHHHHHHHHHH

SEQ ID NO: 4671 - protein, 715 aa, Artificial Sequence
  Description of Artificial Sequence: Synthetic polypeptide
MGILPSPGMPALLSLVSLLSVLLMGCVAETGTQCVNLTTRTQLPPAYTNSFTRGVYYPDKVFRSSVLHSTQDLFLPFFSNVTWFHAIHVSGTNGTKRFDNPVLPFNDGVYFASTEKSNIIRGWIFGTTLDSKTQSLLIVNNATNVVIKVCEFQFCNDPFLGVYYHKNNKSWMESEFRVYSSANNCTFEYVSQPFLMDLEGKQGNFHNLREFVFKNIDGYFKIYSKHTPINLVRDLPQGFSALEPLVDLPIGINITRFQTLLALHRSYLTPGDSSSGWTAGAAAYYVGYLQPRTFLLKYNENGTITDAVDCALDPLSETKCTLKSFTVEKGIYQTSNFRVQPTESIVRFPNITNLCPFGEVFNATRFASVYAWNRKRISNCVADYSVLYNSASFSTFKCYGVSPTKLNDLCFTNVYADSFVIRGDEVRQIAPGQTGKIADYNYKLPDDFTGCVIAWNSNNLDSKVGGNYNYLYRLFRKSNLKPFERDISTEIYQAGSTPCNGVEGFNCYFPLQSYGFQPTNGVGYQPYRVVVLSFELLHAPATVCGPKKSTNLVKNKCVNFNFNGLTGTGVLTESNKKFLPFQQFGRDIADTTDAVRDPQTLEILDITPCSFGGVSVITPGTNTSNQVAVLYQDVNCTEVPVAIHADQLTPTWRVYSTGSNVFQTRAGCLIGAEHVNNSYECDIPIGAGICASYQTQTNSPSGAGSHHHHHHHHHH

SEQ ID NO: 4672 - protein, 715 aa, Artificial Sequence
  Description of Artificial Sequence: Synthetic polypeptide
MGILPSPGMPALLSLVSLLSVLLMGCVAETGTQCVNLTTRTQLPPAYTNSFTRGVYYPDKVFRSSVLHSTQDLFLPFFSNVTWFHAEHVSGTNGTKRFDNPVLPFNDGVYFASTEKSNIIRGWIFGTTLDSKTQSLLIVNNATNVVIKVCEFQFCNDPFLGVYYHKNNKSWMESEFRVYSSANNCTFEYHSQPFLMDLEGKQGNFKNLREFVFKNIDGYFKIYSKHTPINLVRDLPQGFSALEPLVDLPIGINITRFQTLLALHRSYLTPGDSSSGETAGAAAYYVGYLQPRTFLLKYNENGTITDAVDCALDPLSETKCTLKSFTVEKGIYQTSNFRVQPTESIVRFPNITNHCPFGEVFNATRFASVYAWNRKRISNCVADYSVLYNSASFSTFKCYGVSPTKLNDLCFTNVYADSFVIRGDEVRQIAPGQTGKIADYNYKLPDDFTGCVIAWNSNNLDSKVGGNYNYLYRLFRKSNLKPFERDISTEIYQAGSTPCNGVEGFNCYFPLQSYGFQPTNGVGQQPYRVVVLSFELLHAPATVCGPKKSTNLVKNKCVNFNFNGLTGTGVLTESNKKFLPFQQFGRDIADTTDAVRDPQTLEILDITPCSFGGVSVITPGTNTSNQVAVLYQDVNCTEVPDAIHADQLTPTWRVYSTGSNVFQTRAGCLIGAEHVNNSYECDIPIGAGICASYQTQTNSPSGAGSHHHHHHHHHH

SEQ ID NO: 4673 - protein, 715 aa, Artificial Sequence
  Description of Artificial Sequence: Synthetic polypeptide
MGILPSPGMPALLSLVSLLSVLLMGCVAETGTQCVNLTTRTQLPPAYTNSFTRGVYYPDKVFRSSVLHSTQDLFLPFFSNVTWFHAIHVSGTNGTKRFDNPVLPFNDGVYFASTEKSNIIRGWIFGTTLDSKTQSLLIVNNATNVVIKVCEFQFCNDPFLGVYYHKNNKSWMESEFRVYSSANNCTFEYVSQPFLMDLEGKQGNFKNLREFVFKNIDGYFKIYSKHTPINLVRDLPQGFSALEPLVDLPIGINITRFQTLLALHRSYLTPGDSSSGWTAGAAAYYVGYLQPRTFLLKYNENGTITDAVDCALDPLSETKCTLKSFTVEKGIYQTSNFRVQPTESIVRFPNITNLCPFGEVFNATRFASVYAWNRKRISNCVADYSVLYNSASFSTFKCYGVSPTKLNDLCFTNVYADSFVIRGDEVRQIAPGQTGKIADYNYKLPDDFTGCVIAWNSNNLDSKVGGNYNYLYRLFRKSNLKPFERDISTEIYQAGSTPCNGVEGFNCYFPLQSYGFQPTNGVGYQPYRVVVLSFELLHAPATVCGPKKSTNLVKNKCVNFNFNGLTGTGVLTESNKKFLPFQQFGRDIADTTDAVRDPQTLEILDITPCSFGGVLVITPGTNTSNQVAVLYQDVNCTEVPVAIHADQLTPTWRVYSTGSNVFQTRAGCLIGAEHVNNSYECDIPIGAGICASYQTQTNSPSGAGSHHHHHHHHHH

SEQ ID NO: 4674 - protein, 715 aa, Artificial Sequence
  Description of Artificial Sequence: Synthetic polypeptide
MGILPSPGMPALLSLVSLLSVLLMGCVAETGTQCVNLTTRTQLPPAYTNSFTRGVYYPDKVFRSSVLHSTQDLFLPFFSNVTWFHAIHVSGTNGTKRFDNPVLPFNDGVYFASTEKSNIIRGWIFGTTLDSKTQSLLIVNNATNVVIKVCEFQFCNDPFLGVYYHKNNKSWMESEFRVYSSANNCTFEYVSQPFLMDLEGKQGNFKNLREFVFKNIDGYFKIYSKHTEINLVRDLPQGFSALEPLVDLPIGINITRFQTLLALHRSYLTPGDSSSGWTAGAAAYYVGYLQPRTFLLKYNENGTITDAVDCALDPLSETKCTLKSFTVEKGIYQTSNFRVQPTESIVRFPNITNLCPFGEVFNATRFASVYAWNRKRISNCVADYSVLYNSASFSTFKCYGVSPTKLNDLCFTNVYADSFVIRGDEVRQIAPGQTGKIADYNYKLPDDFTGCVIAWNSNNLDSKVGGNYNYLYRLFRKSNLKPFERDISTEIYQAGSTPCNGVEGFNCYFPLQSYGFQPTNGVGYQPYRVVVLSFELLHAPATVCGPKKSTNLVKNKCVNFNFNGLTGTGVLTESNKKFLPFQQFGRDIADTTDAVRDPQTLEILDITPCSFGGVSVITPGTNTSNQVAVLYQDVNCTEVPVAIHADQLTPTWRVYSTGSNVFQTRAGCLIGAEHVNNSYECDIPIGAGICASYQTQTNSPSGAGSHHHHHHHHHH

SEQ ID NO: 4675 - protein, 715 aa, Artificial Sequence
  Description of Artificial Sequence: Synthetic polypeptide
MGILPSPGMPALLSLVSLLSVLLMGCVAETGTQCVNLTTRTQLPPAYTNSFTRGVYYPDKVFRSSVLHSTQDLFLPFFSNVTWFHAIHVSGTNGTKRFDNPVLPFNDGVYFASTEKSNIIRGWIFGTTLDSKTQSLLIVNNATNVVIKVCEFQFCNDPFLGVYYHKNNKSWMESEFRVYSSANNCTFEYVSQPFLMDLEGKQGNFKNLREFVFKNIDGYFKIYSKHTPINLVRDLPQGFSALEPLVDLPIGINITRFQTLLALHRSYLTPGDSSSGWTAGAAAYYVGYLQPRTFLLKYNENGTITDAVDCALDPLSETKCTLKSFTVEKGIYQTSNFRVQPTESIVRFPNITNLCPFGEVFNATRFASVYAWNRKRISNCVADYSVLYNSASFSTFKCYGVSPTKLNDLCFTNVYADSFVIRGDEVRQIAPGQTGKIADYNYKLPDDFTGCVIAWNSNNLDSKVGGNYNYLYRLFRKSNLKPFERDISTEIYQAGSTPCNGVEGFNCYFPLQSYGFQPTNGVGYQPYRVVVLSFELLHAPATVCGPKKSTNLVKNKCVNFNFNGLTGTGVLTESNKKFLPFQQFGRDIADTTDAVRDPQTLEILDITPCSNGGVSVITPGTNTSNQVAVLYQDVNCTEVPVAIHADQLTPTWRVYSTGSNVFQTRAGCLIGAEHVNNSYECDIPIGAGICASYQTQTNSPSGAGSHHHHHHHHHH

SEQ ID NO: 4676 - protein, 715 aa, Artificial Sequence
  Description of Artificial Sequence: Synthetic polypeptide
MGILPSPGMPALLSLVSLLSVLLMGCVAETGTQCVNLTTRTQLPPAYTNSFTRGVYYPDKVFRSSVLHSTQDLFLPFFSNVTWFHAIHVSGTNGTKRFDNPVLPFNDGVYFASTEKSNIIRGWIFGTTLDSKTQSLLIVNNATNVVIKVCEFQFCNDPFLGVYYHKNNKSWMESEFRVYSSANNCTFEYVSQPFLMDLEGKQGNFKNLREFVFKNIDGYFKIYSKHTPINLVRDLPQGFSALEPLVDLPIGINITRFQTLLALHRSYLTPGDSSSGWTAGAAAYYVGYLQPRTFLLKYNENGTITDAVDCALDPLSETKCTLKSFTVEKGIYQTSNFRVQPTESIVRFPNITNLCPFGEVFNATRFASVYAWNRKRISNCVADYSVLYNSASFSTFKCYGVSPTKLNDLCFTNVYADSFVIRGDEVRQIAPGQTGKIADYNYKLPDDFTGCVIAWNSNNLDSKVGGNYNYLYRLFRKSNLKPFERDISTEIYQAGSTPCNGVEGFNCYFPLQSYGFQPTNGVGYQPYRVVVLSFELLHAPATVCGPKKSTNLVKNKCVNFNFNGLTGTGVLTESNKKFLPFQQFGRKIADTTDAVRDPQTLEILDITPCSFGGVSVITPGTNTSNQVAVLYQDVNCTEVPVAIHADQLTPTWRVYSTGSNVFQTRAGCLIGAEHVNNSYECDIPIGAGICASYQTQTNSPSGAGSHHHHHHHHHH

SEQ ID NO: 4677 - protein, 715 aa, Artificial Sequence
  Description of Artificial Sequence: Synthetic polypeptide
MGILPSPGMPALLSLVSLLSVLLMGCVAETGTQCVNLTTRTQLPPAYTNSFTRGVYYPDKVFRSSVLHSTQDLFLPFFSNVTWFHAIHVSGTNGTKRFDNPVLPFNDGVYFASTEKSNIIRGWIFGTTLDSKTQSLLIVNNATNVVIKVCEFQFCNDPFLGVYYHKNNKSWMESEFRVYSSANNCTFEYVSQPFLMDLEGKQGNFKNLREFVFKNIDGYFKIYSKHTPINLVRDLPQGFSALEPLVDLPIGINITRFQTLLALHRSYLTPGDSSSGWTAGAAAYYVGYLQPRTFLLKYNENGTITDAVDCALDPLSETKCTLKSFTVEKGIYQTSNFRVQPTESIVRFPNITNLCPFGEVFNATRFASVYAWNRKRISNCVADYSELYNSASFSTFKCYGVSPTKLNDLCFTNVYADSFVIRGDEVRQIAPGQTGKIADYNYKLPDDFTGCVIAWNSNNLDSKVGGNYNYLYRLFRKSNLKPFERDISTEIYQAGSTPCNGVEGFNCYFPLQSYGFQPTNGVGYQPYRVVVLSFELLHAPATVCGPKKSTNLVKNKCVNFNFNGLTGTGVLTESNKKFLPFQQFGRDIADTTDAVRDPQTLEILDITPCSFGGVSVITPGTNTSNQVAVLYQDVNCTEVPVAIHADQLTPTWRVYSTGSNVFQTRAGCLIGAEHVNNSYECDIPIGAGICASYQTQTNSPSGAGSHHHHHHHHHH

SEQ ID NO: 4678 - protein, 715 aa, Artificial Sequence
  Description of Artificial Sequence: Synthetic polypeptide
MGILPSPGMPALLSLVSLLSVLLMGCVAETGTQCVNLTTRTQLPPAYTNSFTRGVYYPDKVFRSSVLHSTQDLFLPFFSNVTWFHAEHVSGTNGTKRFDNPVLPFNDGVYFASTEKSNIIRGWIFGTTLDSKTQSLLIVNNATNVVIKVCEFQFCNDPFLGVYYHKNNKSWMESEFRVYSSANNCTFEYVSQPFLMDLEGKQGNFKNLREFVFKNIDGYFKIYSKHTPINLVRDLPQGFSALEPLVDLPIGINITRFQTLLALHRSYLTPGDSSSGETAGAAAYYVGYLQPRTFLLKYNENGTITDAVDCALDPLSETKCTLKSFTVEKGIYQTSNFRVQPTESIVRFPNITNPCPFGEVFNATRFASVYAWNRKRISNCVADYSVLYNSASFSTFKCYGVSPTKLNDLCFTNVYADSFVIRGDEVRQIAPGQTGKIADYNYKLPDDFTGCVIAWNSNNLDSKVGGNYNYLYRLFRKSNLKPFERDISTEIYQAGSTPCNGVEGFNCYFPLQSYGFQPTNGPGQQPYRVVVLSFELLHAPATVCGPKKSTNLVKNKCVNFNFNGLTGTGVLTESNKKFLPFQQFGRDIADTTDAVRDPQTLEILDITPCSFGGVSVITPGTNTSNQVAVLYQDVNCTEVPDAIHADQLTPTWRVYSTGSNVFQTRAGCLIGAEHVNNSYECDIPIGAGICASYQTQTNSPSGAGSHHHHHHHHHH

SEQ ID NO: 4679 - protein, 715 aa, Artificial Sequence
  Description of Artificial Sequence: Synthetic polypeptide
MGILPSPGMPALLSLVSLLSVLLMGCVAETGTQCVNLTTRTQLPPAYTNSFTRGVYYPDKVFRSSVLHSTQDLFLPFFSNVTWFHAIHVSGTNGTKRFDNPVLPFNDGVYFASTEKSNIIRGWIFGTTLDSKTQSLLIVNNATNVVIKVCEFQFCNDPFLGVYYHKNNKSWMESEFRVYSSANNCTFEYVSQPFLMDLEGKQGNFKNLREFVFKNIDGYFKIYSKHTPINLVRDLPQGFSALEPLVDLPIGINITRFQTLLALHRSYLTPGDSSSGWTAGAAAYYVGYLQPRTFLLKYNENGTITDAVDCALDPLSETKCTLKSFTVEKGIYQTSNFRVQPTVSIVRFPNITNLCPFGEVFNATRFASVYAWNRKRISNCVADYSVLYNSASFSTFKCYGVSPTKLNDLCFTNVYADSFVIRGDEVRQIAPGQTGKIADYNYKLPDDFTGCVIAWNSNNLDSKVGGNYNYLYRLFRKSNLKPFERDISTEIYQAGSTPCNGVEGFNCYFPLQSYGFQPTNGVGYQPYRVVVLSFELLHAPATVCGPKKSTNLVKNKCVNFNFNGLTGTGVLTESNKKFLPFQQFGRDIADTTDAVRDPQTLEILDITPCSFGGVSVITPGTNTSNQVAVLYQDVNCTEVPVAIHADQLTPTWRVYSTGSNVFQTRAGCLIGAEHVNNSYECDIPIGAGICASYQTQTNSPSGAGSHHHHHHHHHH

SEQ ID NO: 4680 - protein, 715 aa, Artificial Sequence
  Description of Artificial Sequence: Synthetic polypeptide
MGILPSPGMPALLSLVSLLSVLLMGCVAETGTQCVNLTTRTQLPPAYTNSFTRGVYYPDKVFRSSVLHSTQDLFLPFFSNVTWFHAIHVSGTNGTKRFDNPVLPFNDGVYFASTEKSNIIRGWIFGTTLDSKTQSLLIVNNATNVVIKVCEFQFCNDPFLGVYYHKNNKSWMESEFRVYSSANNCTFEYVSQPFLMDLEGKQGNFKNLREFVFKNIDGYFKIYSKHTPINLVRDLPQGFSALEPLVDLPIGINITRFQTLLALHRSYLTPGDSSSGWTAGAAAYYVGYLQPRTFLLKYNENGTITDAVDCALDPLSETKCTLKSFTVEKGIYQTSNFRVQPTESIVRFPNITNFCPFGEVFNATRFASVYAWNRKRISNCVADYSVLYNSASFSTFKCYGVSPTKLNDLCFTNVYADSFVIRGDEVRQIAPGQTGKIADYNYKLPDDFTGCVIAWNSNNLDSKVGGNYNYLYRLFRKSNLKPFERDISTEIYQAGSTPCNGVEGFNCYFPLQSYGFQPTNGVGYQPYRVVVLSFELLHAPATVCGPKKSTNLVKNKCVNFNFNGLTGTGVLTESNKKFLPFQQFGRDIADTTDAVRDPQTLEILDITPCSFGGVSVITPGTNTSNQVAVLYQDVNCTEVPVAIHADQLTPTWRVYSTGSNVFQTRAGCLIGAEHVNNSYECDIPIGAGICASYQTQTNSPSGAGSHHHHHHHHHH

SEQ ID NO: 4681 - protein, 715 aa, Artificial Sequence
  Description of Artificial Sequence: Synthetic polypeptide
MGILPSPGMPALLSLVSLLSVLLMGCVAETGTQCVNLTTRTQLPPAYTNSFTRGVYYPDKVFRSSVLHSTQDLFLPFFSNVTWFHAIHVSGTNGTKRFDNPVLPFNDGVYFASTEKSNIIRGWIFGTTLDSKTQSLLIVNNATNVVIKVCEFQFCNDPFLGVYYHKNNKSWMESEFRVYSSANNCTFEYVSQPFLMDLEGKQGNFKNLREFVFKNIDGYFKIYSKHTPINLVRDLPQGFSALEPLVDLPIGINITRFQTLLALHRSYLTPGDSSSGWTAGAAAYYVGYLQPRTFLLKYNENGTITDAVDCALDPLSETKCTLKSFTVEKGIYQTSNFRVQPTESIVRFPNITNLCPFGEVFNATRFASVYAWVRKRISNCVADYSVLYNSASFSTFKCYGVSPTKLNDLCFTNVYADSFVIRGDEVRQIAPGQTGKIADYNYKLPDDFTGCVIAWNSNNLDSKVGGNYNYLYRLFRKSNLKPFERDISTEIYQAGSTPCNGVEGFNCYFPLQSYGFQPTNGVGYQPYRVVVLSFELLHAPATVCGPKKSTNLVKNKCVNFNFNGLTGTGVLTESNKKFLPFQQFGRDIADTTDAVRDPQTLEILDITPCSFGGVSVITPGTNTSNQVAVLYQDVNCTEVPVAIHADQLTPTWRVYSTGSNVFQTRAGCLIGAEHVNNSYECDIPIGAGICASYQTQTNSPSGAGSHHHHHHHHHH

SEQ ID NO: 4682 - protein, 715 aa, Artificial Sequence
  Description of Artificial Sequence: Synthetic polypeptide
MGILPSPGMPALLSLVSLLSVLLMGCVAETGTQCVNLTTRTQLPPAYTNSFTRGVYYPDKVFRSSVLHSTQDLFLPFFSNVTWFHAIHVSGTNGTKRFDNPVLPFNDGVYFANTEKSNIIRGWIFGTTLDSKTQSLLIVNNATNVVIKVCEFQFCNDPFLGVYYHKNNKSWMESEFRVYSSANNCTFEYVSQPFLMDLEGKQGNFKNLREFVFKNIDGYFKIYSKHTPINLVRDLPQGFSALEPLVDLPIGINITRFQTLLALHRSYLTPGDSSSGWTAGAAAYYVGYLQPRTFLLKYNENGTITDAVDCALDPLSETKCTLKSFTVEKGIYQTSNFRVQPTESIVRFPNITNLCPFGEVFNATRFASVYAWNRKRISNCVADYSVLYNSASFSTFKCYGVSPTKLNDLCFTNVYADSFVIRGDEVRQIAPGQTGKIADYNYKLPDDFTGCVIAWNSNNLDSKVGGNYNYLYRLFRKSNLKPFERDISTEIYQAGSTPCNGVEGFNCYFPLQSYGFQPTNGVGYQPYRVVVLSFELLHAPATVCGPKKSTNLVKNKCVNFNFNGLTGTGVLTESNKKFLPFQQFGRDIADTTDAVRDPQTLEILDITPCSFGGVSVITPGTNTSNQVAVLYQDVNCTEVPVAIHADQLTPTWRVYSTGSNVFQTRAGCLIGAEHVNNSYECDIPIGAGICASYQTQTNSPSGAGSHHHHHHHHHH

SEQ ID NO: 4683 - protein, 715 aa, Artificial Sequence
  Description of Artificial Sequence: Synthetic polypeptide
MGILPSPGMPALLSLVSLLSVLLMGCVAETGTQCVNLTTRTQLPPAYTNSFTRGVYYPDKVFRSSVLHSTQDLFLPFFSNVTWFHAIHVSGTNGTKRFDNPVLPFNDGVYFASTEKSNIIRGWIFGTTLDSKTQSLLIVNNATNVVIKVCEFQFCNDPFLGVYYHKNNKSWMESEFRVYSSANNCTFEYVSQPFLMDLEGKQGNFKNLREFVFKNIDGYFKIYSKHTPINLVRDLPQGFSALEPLVDLPIGINITRFQTYLALHRSYLTPGDSSSGWTAGAAAYYVGYLQPRTFLLKYNENGTITDAVDCALDPLSETKCTLKSFTVEKGIYQTSNFRVQPTESIVRFPNITNLCPFGEVFNATRFASVYAWNRKRISNCVADYSVLYNSASFSTFKCYGVSPTKLNDLCFTNVYADSFVIRGDEVRQIAPGQTGKIADYNYKLPDDFTGCVIAWNSNNLDSKVGGNYNYLYRLFRKSNLKPFERDISTEIYQAGSTPCNGVEGFNCYFPLQSYGFQPTNGVGYQPYRVVVLSFELLHAPATVCGPKKSTNLVKNKCVNFNFNGLTGTGVLTESNKKFLPFQQFGRDIADTTDAVRDPQTLEILDITPCSFGGVSVITPGTNTSNQVAVLYQDVNCTEVPVAIHADQLTPTWRVYSTGSNVFQTRAGCLIGAEHVNNSYECDIPIGAGICASYQTQTNSPSGAGSHHHHHHHHHH

SEQ ID NO: 4684 - protein, 715 aa, Artificial Sequence
  Description of Artificial Sequence: Synthetic polypeptide
MGILPSPGMPALLSLVSLLSVLLMGCVAETGTQCVNLTTRTQLPPAYTNSFTRGVYYPDKVFRSSVLHSTQDLFLPFFSNVTWFHAIHVSGTNGTKRFDNPVLPFNDGVYFASTEKSNIIRGWIFGTTLDSKTQSLLIVNNATNVVIKVCEFQFCNDPFLGVYYHKNNKSWMESEFRVYSSANNCTFEYVSQPFLMDLEGKQGNFKNLREFVFKNIDGYFKIYSKHTPINLVRDLPQGFSALEPLVDLPIGINITRFQTLLALHRSYLTPGDSSSGWTAGAAAYYVGYLQPRTFLLKYNENGTITDAVDCALDPLSETKCTLKSFTVEKGIYQTSNFRVQPTESIVRFPNITNLCPFGEVFNATRFASVYAWNRKRISNCVADYSVLYNSASFSTFKCYGVSPTKLNDLCFTNVYADSFVIRGDEVRQIAPGQTGKIADYNYKLPDDFTGCVIAWNSNNLDSKVGGNYNYLYRLFRKSNLKPFERDISTEIYQAGSTPCNGVPGFNCYFPLQSYGFQPTNGVGYQPYRVVVLSFELLHAPATVCGPKKSTNLVKNKCVNFNFNGLTGTGVLTESNKKFLPFQQFGRDIADTTDAVRDPQTLEILDITPCSFGGVSVITPGTNTSNQVAVLYQDVNCTEVPVAIHADQLTPTWRVYSTGSNVFQTRAGCLIGAEHVNNSYECDIPIGAGICASYQTQTNSPSGAGSHHHHHHHHHH

SEQ ID NO: 4685 - protein, 715 aa, Artificial Sequence
  Description of Artificial Sequence: Synthetic polypeptide
MGILPSPGMPALLSLVSLLSVLLMGCVAETGTQCVNLTTRTQLPPAYTNSFTRGVYYPDKVFRSSVLHSTQDLFLPFFSNVTWFHAIHGSGTNGTKRFDNPVLPFNDGVYFASTEKSNIIRGWIFGTTLDSKTQSLLIVNNATNVVIKVCEFQFCNDPFLGVYYHKNNKSWMESEFRVYSSANNCTFEYVSQPFLMDLEGKQGNFKNLREFVFKNIDGYFKIYSKHTPINLVRDLPQGFSALEPLVDLPIGINITRFQTLLALHRSYLTPGDSSSGWTAGAAAYYVGYLQPRTFLLKYNENGTITDAVDCALDPLSETKCTLKSFTVEKGIYQTSNFRVQPTESIVRFPNITNLCPFGEVFNATRFASVYAWNRKRISNCVADYSVLYNSASFSTFKCYGVSPTKLNDLCFTNVYADSFVIRGDEVRQIAPGQTGKIADYNYKLPDDFTGCVIAWNSNNLDSKVGGNYNYLYRLFRKSNLKPFERDISTEIYQAGSTPCNGVEGFNCYFPLQSYGFQPTNGVGYQPYRVVVLSFELLHAPATVCGPKKSTNLVKNKCVNFNFNGLTGTGVLTESNKKFLPFQQFGRDIADTTDAVRDPQTLEILDITPCSFGGVSVITPGTNTSNQVAVLYQDVNCTEVPVAIHADQLTPTWRVYSTGSNVFQTRAGCLIGAEHVNNSYECDIPIGAGICASYQTQTNSPSGAGSHHHHHHHHHH

SEQ ID NO: 4686 - protein, 715 aa, Artificial Sequence
  Description of Artificial Sequence: Synthetic polypeptide
MGILPSPGMPALLSLVSLLSVLLMGCVAETGTQCVNLTTRTQLPPAYTNSFTRGVYYPDKVFRSSVLHSTQDLFLPFFSNVTWFHAIHVSGTNGTKRFDNPVLPFNDGVYFASTEKSNIIRGWIFGTTLDSKTQSLLIVNNATNVVIKVCEFQFCNDPFLGVYYHKNNKSWMESEFRVYSSANNCTFEYVVQPFLMDLEGKQGNFKNLREFVFKNIDGYFKIYSKHTPINLVRDLPQGFSALEPLVDLPIGINITRFQTLLALHRSYLTPGDSSSGWTAGAAAYYVGYLQPRTFLLKYNENGTITDAVDCALDPLSETKCTLKSFTVEKGIYQTSNFRVQPTESIVRFPNITNLCPFGEVFNATRFASVYAWNRKRISNCVADYSVLYNSASFSTFKCYGVSPTKLNDLCFTNVYADSFVIRGDEVRQIAPGQTGKIADYNYKLPDDFTGCVIAWNSNNLDSKVGGNYNYLYRLFRKSNLKPFERDISTEIYQAGSTPCNGVEGFNCYFPLQSYGFQPTNGVGYQPYRVVVLSFELLHAPATVCGPKKSTNLVKNKCVNFNFNGLTGTGVLTESNKKFLPFQQFGRDIADTTDAVRDPQTLEILDITPCSFGGVSVITPGTNTSNQVAVLYQDVNCTEVPVAIHADQLTPTWRVYSTGSNVFQTRAGCLIGAEHVNNSYECDIPIGAGICASYQTQTNSPSGAGSHHHHHHHHHH

SEQ ID NO: 4687 - protein, 715 aa, Artificial Sequence
  Description of Artificial Sequence: Synthetic polypeptide
MGILPSPGMPALLSLVSLLSVLLMGCVAETGTQCVNLTTRTQLPPAYTNSFTRGVYYPDKVFRSSVLHSTQDLFLPFFSNVTWFHAIHVSGTNGTKRFDNPVLPFNDGVYFASTEKSNIIRGWIFGTTLDSKTQSLLIVNNATNVVIKVCEFQFCNDPFLGVYYHKNNKSWMESEFRVYSSANNCTFEYVSQPFLMDLEGKQGNFKNLREFVFKNIDGYFKIYSKHTPINLVRDLPQGFSALEPLVDLPIGINITRFQTLLALHRSYLTPGDSSSGWTAGAAAYYVGYLQPRTFLLKYNENGTITDAVDCALDPLSETKCTLKSFTVEKGIYQTSNFRVQPTESIVRFPNITNLCPFGEVFNATRFASVYAWNRKRISNCVADYSVLYNSASFSTFKCYGVSPTKLNDLCFTNVYADSFVIRGDEVRQIAPGQTGKIADYNYKLPDDFTGCVIAWNSNNLDSKVGGNYNYLYRLFRKSNLKPFERDISTEIYQAGSTPCNGVEGFNCYFPLQSYGFQPTNGVGYQPYRVVVLSFELLHAPATVCGPKKSTNLTKNKCVNFNFNGLTGTGVLTESNKKFLPFQQFGRDIADTTDAVRDPQTLEILDITPCSFGGVSVITPGTNTSNQVAVLYQDVNCTEVPVAIHADQLTPTWRVYSTGSNVFQTRAGCLIGAEHVNNSYECDIPIGAGICASYQTQTNSPSGAGSHHHHHHHHHH

SEQ ID NO: 4688 - protein, 715 aa, Artificial Sequence
  Description of Artificial Sequence: Synthetic polypeptide
MGILPSPGMPALLSLVSLLSVLLMGCVAETGTQCVNLTTRTQLPPAYTNSFTRGVYYPDKVFRSSVLHSTQDLFLPFFSNVTWFHAIHVSGTNGTKRFDNPVLPFNDGVYFASTEKSNIIRGWIFGTTLDSKTQSLLIVNNATNVVIKVCEFQFCNDPFLGVYYHKNNKSWMESEFRVYSSANNCTFEYVSQPFLMDLEGKQGNFKNLREFVFKNIDGYFKIYSKHTPINLVRDLPQGFSALEPLVDLPIGINITRFQTLLALHRSYLTPGDSSSGWTAGAAAYYVGYLQPRTFLLKYNENGFITDAVDCALDPLSETKCTLKSFTVEKGIYQTSNFRVQPTESIVRFPNITNLCPFGEVFNATRFASVYAWNRKRISNCVADYSVLYNSASFSTFKCYGVSPTKLNDLCFTNVYADSFVIRGDEVRQIAPGQTGKIADYNYKLPDDFTGCVIAWNSNNLDSKVGGNYNYLYRLFRKSNLKPFERDISTEIYQAGSTPCNGVEGFNCYFPLQSYGFQPTNGVGYQPYRVVVLSFELLHAPATVCGPKKSTNLVKNKCVNFNFNGLTGTGVLTESNKKFLPFQQFGRDIADTTDAVRDPQTLEILDITPCSFGGVSVITPGTNTSNQVAVLYQDVNCTEVPVAIHADQLTPTWRVYSTGSNVFQTRAGCLIGAEHVNNSYECDIPIGAGICASYQTQTNSPSGAGSHHHHHHHHHH

SEQ ID NO: 4689 - protein, 715 aa, Artificial Sequence
  Description of Artificial Sequence: Synthetic polypeptide
MGILPSPGMPALLSLVSLLSVLLMGCVAETGTQCVNLTTRTQLPPAYTNSFTRGVYYPDKVFRSSVLHSTQDLFLPFFSNVTWFHAIHVSGTNGTKRFDNPVLPFNDGVYFASTEKSNIIRGWIFGTTLDSKTQSLLIVNNATNVVIKVCEFQFCNDPFLGVYYHKNNKSWMESEFRVYSSANNCTFEYVSQPFLMDLEGKQGNFKNLREFVFKNIDGYFKIYSKHTPINLVRDLPQGFSALEPLVDLPIGINITRFQTLLALHRSYLTPGDSSSGWTAGAAAYYVGYLQPRTFLLKYNENGTITDAVDCALDPLSETKCTLKSFTVEKGIYQTSNFRVQPTESIVRFPNITNLCPFGEVFNATRFASVYAWNRKRISNCVADYSVLYNSASFSTFKCYGVSPTKLNDLCFTNVYADSFVIRGDEVRQIAPGQTGKIADYNYKLPDDFTGCVIAWNSNNLDSKVGGNYNYLYRLFRKSNLKPFERDISTEIYQAGGTPCNGVEGFNCYFPLQSYGFQPTNGVGYQPYRVVVLSFELLHAPATVCGPKKSTNLVKNKCVNFNFNGLTGTGVLTESNKKFLPFQQFGRDIADTTDAVRDPQTLEILDITPCSFGGVSVITPGTNTSNQVAVLYQDVNCTEVPVAIHADQLTPTWRVYSTGSNVFQTRAGCLIGAEHVNNSYECDIPIGAGICASYQTQTNSPSGAGSHHHHHHHHHH

SEQ ID NO: 4690 - protein, 715 aa, Artificial Sequence
  Description of Artificial Sequence: Synthetic polypeptide
MGILPSPGMPALLSLVSLLSVLLMGCVAETGTQCVNLTTRTQLPPAYTNSFTRGVYYPDKVFRSSVLHSTQDLFLPFFSNVTWFHAIHVSGTNGTKRFDNPVLPFNDGVYFASTEKSNIIRGWIFGTTLDSKTQSLLIVNNATNVVIKVCEFQFCNDPFLGVYYHKNNKSWMESEFRVYSSANNCTFEYVSQPFLMDLEGKQGNFKNLREFVFKNIDGYFKIYSKHTPINLVRDLPQGFSALEPLVDLPIGINITRFQTLLALHRSYLTPGDSSSGWTAGAAAYYVGYLQPRTFLLKYNENGTITDAVDCALDPLSETKCTLKSFTVEKGIYQTSNFRVQPTESIVRFPNITNLCPFGEVFNATRFASVYAWNRKRISNCVADYSVLYNSASFSTFKCYGVSPTKLNDLCFTNVYADSFVIRGDEVRQIAPGQTGIIADYNYKLPDDFTGCVIAWNSNNLDSKVGGNYNYLYRLFRKSNLKPFERDISTEIYQAGSTPCNGVEGFNCYFPLQSYGFQPTNGVGYQPYRVVVLSFELLHAPATVCGPKKSTNLVKNKCVNFNFNGLTGTGVLTESNKKFLPFQQFGRDIADTTDAVRDPQTLEILDITPCSFGGVSVITPGTNTSNQVAVLYQDVNCTEVPVAIHADQLTPTWRVYSTGSNVFQTRAGCLIGAEHVNNSYECDIPIGAGICASYQTQTNSPSGAGSHHHHHHHHHH

SEQ ID NO: 4691 - protein, 715 aa, Artificial Sequence
  Description of Artificial Sequence: Synthetic polypeptide
MGILPSPGMPALLSLVSLLSVLLMGCVAETGTQCVNLTTRTQLPPAYTNSFTRGVYYPDKVFRSSVLHSTQDLFLPFFSNVTWFHAIHVSGTNGTKRFDNPVLPFNDGVYFASTEKSNIIRGWIFGTTLDSKTQSLLIVNNATNVVIKVCEFQFCNDPFLGVYYQKNNKSWMESEFRVYSSANNCTFEYVSQPFLMDLEGKQGNFKNLREFVFKNIDGYFKIYSKHTPINLVRDLPQGFSALEPLVDLPIGINITRFQTLLALHRSYLTPGDSSSGWTAGAAAYYVGYLQPRTFLLKYNENGTITDAVDCALDPLSETKCTLKSFTVEKGIYQTSNFRVQPTESIVRFPNITNLCPFGEVFNATRFASVYAWNRKRISNCVADYSVLYNSASFSTFKCYGVSPTKLNDLCFTNVYADSFVIRGDEVRQIAPGQTGKIADYNYKLPDDFTGCVIAWNSNNLDSKVGGNYNYLYRLFRKSNLKPFERDISTEIYQAGSTPCNGVEGFNCYFPLQSYGFQPTNGVGYQPYRVVVLSFELLHAPATVCGPKKSTNLVKNKCVNFNFNGLTGTGVLTESNKKFLPFQQFGRDIADTTDAVRDPQTLEILDITPCSFGGVSVITPGTNTSNQVAVLYQDVNCTEVPVAIHADQLTPTWRVYSTGSNVFQTRAGCLIGAEHVNNSYECDIPIGAGICASYQTQTNSPSGAGSHHHHHHHHHH

SEQ ID NO: 4692 - protein, 715 aa, Artificial Sequence
  Description of Artificial Sequence: Synthetic polypeptide
MGILPSPGMPALLSLVSLLSVLLMGCVAETGTQCVNLTTRTQLPPAYTNSFTRGVYYPDKVFRSSVLHSTQDLFLPFFSNVTWFHAIHVSGTNGTKRFDNPVLPFNDGVYFASTEKSNIIRGWIFGTTLDSKTQSLLIVNNATNVVIKVCEFQFCNDPFLGVYYHKNNKSWMESEFRVYSSANNCTFEYVSQPFLMDLEGKQGNFKNLREFVFKNIDGYFKIYSKHTPINLVRDLPQGFSALEPLVDLPIGINITRFQTLLALHRSYLTPGDSSSGWTAGAAAYYVGYLQPRTFLLKYNENGTITDAVDCALDPLSETKCTLKSFTVEKGIYQTSNFRVQPTESIVRFPNITNLCPFGEVFNATRFASVYAWNRKRISNCVADYSVLYNSASFSTFKCYGVSPTKLNDLCFTNVYADSFVIRGDEVRQIAPGQTGKIADYNYKLPDDFTGCVIAWNSNNLDSKVGGNYNYLYRLFRKSNLKPFERDISTEIYQAGSTPCNGVEGFNCYPPLQSYGFQPTNGVGYQPYRVVVLSFELLHAPATVCGPKKSTNLVKNKCVNFNFNGLTGTGVLTESNKKFLPFQQFGRDIADTTDAVRDPQTLEILDITPCSFGGVSVITPGTNTSNQVAVLYQDVNCTEVPVAIHADQLTPTWRVYSTGSNVFQTRAGCLIGAEHVNNSYECDIPIGAGICASYQTQTNSPSGAGSHHHHHHHHHH

SEQ ID NO: 4693 - protein, 715 aa, Artificial Sequence
  Description of Artificial Sequence: Synthetic polypeptide
MGILPSPGMPALLSLVSLLSVLLMGCVAETGTQCVNLTTRTQLPPAYTNSFTRGVYYPDKVFRSSVLHSTQDLFLPFFSNVTWFHAYHVSGTNGTKRFDNPVLPFNDGVYFASTEKSNIIRGWIFGTTLDSKTQSLLIVNNATNVVIKVCEFQFCNDPFLGVYYHKNNKSWMESEFRVYSSANNCTFEYVSQPFLMDLEGKQGNFKNLREFVFKNIDGYFKIYSKHTPINLVRDLPQGFSALEPLVDLPIGINITRFQTLLALHRSYLTPGDSSSGETAGAAAYYVGYLQPRTFLLKYNENGTITDAVDCALDPLSETKCTLKSFTVEKGIYQTSNFRVQPTESIVRFPNITNPCPFGEVFNATRFASVYAWNRKRISNCVADYSVLYNSASFSTFKCYGVSPTKLNDLCFTNVYADSFVIRGDEVRQIAPGQTGKIADYNYKLPDDFTGCVIAWNSNNLDSKVGGNYNYLYRLFRKSNLKPFERDISTEIYQAGSTPCNGVEGFNCYFPLQSYGFQPTNGPGQQPYRVVVLSFELLHAPATVCGPKKSTNLVKNKCVNFNFNGLTGTGVLTESNKKFLPFQQFGRDIADTTDAVRDPQTLEILDITPCSFGGVSVITPGTNTSNQVAVLYQDVNCTEVPDAIHADQLTPTWRVYSTGSNVFQTRAGCLIGAEHVNNSYECDIPIGAGICASYQTQTNSPSGAGSHHHHHHHHHH

SEQ ID NO: 4694 - protein, 715 aa, Artificial Sequence
  Description of Artificial Sequence: Synthetic polypeptide
MGILPSPGMPALLSLVSLLSVLLMGCVAETGTQCVNLTTRTQLPPAYTNSFTRGVYYPDKVFRSSVLHSTQDLFLPFFSNVTWFHAIHVSGTNGTKRFDNPVLPFNDGVYFASTEKSNIIRGWIFGTTLDSKTQSLLIVNNATNVVIKVCEFQFCNDPFLGVYYHKNNKSWMESEFRVYSSANNCTFEYVSQPFLMDLEGKQGNFKNLREFVFKNIDGYFKIYSKHTPINLVRDLPQGFSALEPLVDLPIGINITRFQTLLALHRSYLTPGDSSSGWTAGAAAYYVGYLQPRTFLLKYNENGTITDAVDCALDPLSETKCTLKSFTVEKGIYQTSNFRVQPTESIVRFPNITNLCPFGEVFNATRFASVYAWNRKRISNCVADYSVLYNSASFSTFKCYGVSPTKLNDLCFTNVYADSFVIRGDEVRQIAPGQTGKIADYNYKLPDDFTGCVIAWNSNNLDSKVGGNYNYLYRLFRKSNLKPFERDISTEAYQAGSTPCNGVEGFNCYFPLQSYGFQPTNGVGYQPYRVVVLSFELLHAPATVCGPKKSTNLVKNKCVNFNFNGLTGTGVLTESNKKFLPFQQFGRDIADTTDAVRDPQTLEILDITPCSFGGVSVITPGTNTSNQVAVLYQDVNCTEVPVAIHADQLTPTWRVYSTGSNVFQTRAGCLIGAEHVNNSYECDIPIGAGICASYQTQTNSPSGAGSHHHHHHHHHH

SEQ ID NO: 4695 - protein, 715 aa, Artificial Sequence
  Description of Artificial Sequence: Synthetic polypeptide
MGILPSPGMPALLSLVSLLSVLLMGCVAETGTQCVNLTTRTQLPPAYTNSFTRGVYYPDKVFRSSVLHSTQDLFLPFFSNVTWFHAIHVSGTNGTKRFDNPVLPFNDGVYFASTEKSNIIRGWIFGTTLDSKTQSLLIVNNATNVVIKVCEFQFCNDPFLGVYYHKNNKSWMESEFRVYSSANNCTFEYVSQPFLMDLEGKQGNFKNLREFVFKNIDGYFKIYSKHTPINLVRDLPQGFSALEPLVDLPIGINITRFQTLLALHRSYLTPGDSSSGWTAGAAAYYVGYLQPRTFLLKYNENGTITDAVDCALDPLSETKCTLKSFTVEKGIYQTSNFRVQPTESIVRFPNITNLCPFGEVFNATRFASVYAWNRKRISNCVADYSVLYNSASFSTFKCYGVSPTKLNDLCFVNVYADSFVIRGDEVRQIAPGQTGKIADYNYKLPDDFTGCVIAWNSNNLDSKVGGNYNYLYRLFRKSNLKPFERDISTEIYQAGSTPCNGVEGFNCYFPLQSYGFQPTNGVGYQPYRVVVLSFELLHAPATVCGPKKSTNLVKNKCVNFNFNGLTGTGVLTESNKKFLPFQQFGRDIADTTDAVRDPQTLEILDITPCSFGGVSVITPGTNTSNQVAVLYQDVNCTEVPVAIHADQLTPTWRVYSTGSNVFQTRAGCLIGAEHVNNSYECDIPIGAGICASYQTQTNSPSGAGSHHHHHHHHHH

SEQ ID NO: 4696 - protein, 715 aa, Artificial Sequence
  Description of Artificial Sequence: Synthetic polypeptide
MGILPSPGMPALLSLVSLLSVLLMGCVAETGTQCVNLTTRTQLPPAYTNSFTRGIYYPDKVFRSSVLHSTQDLFLPFFSNVTWFHAIHGSGTNGTKRFDNPVLPFNDGVYSAAIEKSNIIRGWIFGTTLDSKTQSLLIVNNATNVVIKVCEFQFCNDPHLGVYYHKNNKSWMESEFRVYSSANNCTFEYVSQPFLMDLEGKQGNFKWLREFVFKNIDGYFKIYSKHTPINLVRDLPQGFSPLEPLVDLPIGINITRFLTVLALHRSYLTPGDSSSGWTAGAAAYYVGYLQPRTFLLKYNENGTITDAVDCALDPLSETKCTLKSFTVEKGIYQTSNFRVQPTESIVRFPNITNLCPFGEVFNATRFASVYAWNRKRISNCVADYSVLYNSASFSTFKCYGVSPTKLNDLCFTNVYADSFVIRGDEVRQIAPGQTGKIADYNYKLPDDFTGCVIAWNSNNLDSKVGGNYNYLYRLFRKSNLKPFERDISTEIYQAGSTPCNGVEGFNCYFPLQSYGFQPTNGVGYQPYRVVVLSFELLHAPATVCGPKKSTNLVKNKCVNFNFNGLTGTGVLTESNKKFLPFQQFGRDIADTTDAVRDPQTLEILDITPCSFGGVSVITPGTNTSNQVAVLYQDVNCTEVPVAIHADQLTPTWRVYSTGSNVFQTRAGCLIGAEHVNNSYECDIPIGAGICASYQTQTNSPSGAGSHHHHHHHHHH

SEQ ID NO: 4697 - protein, 715 aa, Artificial Sequence
  Description of Artificial Sequence: Synthetic polypeptide
MGILPSPGMPALLSLVSLLSVLLMGCVAETGTQCVNLTTRTQLPPAYTNSFTRGVYYPDKVFRSSVLHSTQDLFLPFFSNVTWFHAIHVSGTNGTKRFDNPVLPFNDGVYFASTEKSNIIRGWIFGTTLDSKTQSLLIVNNATNVVIKVCEFQFCNDPFLGVYYHKNNKSWMESEFRVYSSANNCTFEYVSQPFLMDLEGKQDNFKNLREFVFKNIDGYFKIYSKHTPINLVRDLPQGFSALEPLVDLPIGINITRFQTLLALHRSYLTPGDSSSGWTAGAAAYYVGYLQPRTFLLKYNENGTITDAVDCALDPLSETKCTLKSFTVEKGIYQTSNFRVQPTESIVRFPNITNLCPFGEVFNATRFASVYAWNRKRISNCVADYSVLYNSASFSTFKCYGVSPTKLNDLCFTNVYADSFVIRGDEVRQIAPGQTGKIADYNYKLPDDFTGCVIAWNSNNLDSKVGGNYNYLYRLFRKSNLKPFERDISTEIYQAGSTPCNGVEGFNCYFPLQSYGFQPTNGVGYQPYRVVVLSFELLHAPATVCGPKKSTNLVKNKCVNFNFNGLTGTGVLTESNKKFLPFQQFGRDIADTTDAVRDPQTLEILDITPCSFGGVSVITPGTNTSNQVAVLYQDVNCTEVPVAIHADQLTPTWRVYSTGSNVFQTRAGCLIGAEHVNNSYECDIPIGAGICASYQTQTNSPSGAGSHHHHHHHHHH

SEQ ID NO: 4698 - protein, 715 aa, Artificial Sequence
  Description of Artificial Sequence: Synthetic polypeptide
MGILPSPGMPALLSLVSLLSVLLMGCVAETGTQCVNLTTRTQLPPAYTNSFTRGVYYPDKVFRSSVLHSTQDLFLPFFSNVTWFHAIHVSGTNGTKRFDNPVLPFNDGVYFASTEKSNIIRGWIFGTTLDSKTQSLLIVNNATNVVIKVCEFQFCNDPFLGVYYHKNNKSWMESEFRVYSSANNCTFEYVSQPFLMDLEGKQGNFKNLREFVFKNIDGYFKIYSKHTPINLVRDLPQGFSALEPLVDLPIGINITRFQTLLALHRSYLTPGDSSSGWTAGAAAYYVGYLQPRTFLLKYNENGTITDAVDCALDPLSETKCTLKSFTVEKGIYQTSNFRVQPTESIVRFPNITNLCPFGEVFNATRFASVYAWNRKRISNCVADYSVLYNSASFSTFKCYGVSPTKLNDLCFTNVYADSFVIRGDEVRQIAPGQTGKIADYNYKLPDDFTGCVIAWNSNNLDSKVGGNYNYLYRLFRKSNLKPFERDISTEIYQAGSTPCNGVEGFNCYFPLQSYGFQPTNGVGYQPYRVVVLSFELLHAPATVCGPKKSTNLVKNKCVNFNFNGLTGTGVLTESNKKFLPFQQFQRDIADTTDAVRDPQTLEILDITPCSFGGVSVITPGTNTSNQVAVLYQDVNCTEVPVAIHADQLTPTWRVYSTGSNVFQTRAGCLIGAEHVNNSYECDIPIGAGICASYQTQTNSPSGAGSHHHHHHHHHH

SEQ ID NO: 4699 - protein, 715 aa, Artificial Sequence
  Description of Artificial Sequence: Synthetic polypeptide
MGILPSPGMPALLSLVSLLSVLLMGCVAETGTQCVNLTTRTQLPPAYTNSFTRGVYYPDKVFRSSVLHSTQDLFLPFFSNVTWFHAYHVSGTNGTKRFDNPVLPFNDGVYFASTEKSNIIRGWIFGTTLDSKTQSLLIVNNATNVVIKVCEFQFCNDPFLGVYYHKNNKSWMESEFRVYSSANNCTFEYHSQPFLMDLEGKQGNFKNLREFVFKNIDGYFKIYSKHTPINLVRDLPQGFSALEPLVDLPIGINITRFQTLLALHRSYLTPGDSSSGETAGAAAYYVGYLQPRTFLLKYNENGTITDAVDCALDPLSETKCTLKSFTVEKGIYQTSNFRVQPTESIVRFPNITNPCPFGEVFNATRFASVYAWNRKRISNCVADYSVLYNSASFSTFKCYGVSPTKLNDLCFTNVYADSFVIRGDEVRQIAPGQTGKIADYNYKLPDDFTGCVIAWNSNNLDSKVGGNYNYLYRLFRKSNLKPFERDISTEIYQAGSTPCNGVEGFNCYFPLQSYGFQPTNGVGQQPYRVVVLSFELLHAPATVCGPKKSTNLVKNKCVNFNFNGLTGTGVLTESNKKFLPFQQFGRDIADTTDAVRDPQTLEILDITPCSFGGVSVITPGTNTSNQVAVLYQDVNCTEVPDAIHADQLTPTWRVYSTGSNVFQTRAGCLIGAEHVNNSYECDIPIGAGICASYQTQTNSPSGAGSHHHHHHHHHH

SEQ ID NO: 4700 - protein, 715 aa, Artificial Sequence
  Description of Artificial Sequence: Synthetic polypeptide
MGILPSPGMPALLSLVSLLSVLLMGCVAETGTQCVNLTTRTQLPPAYTNSFTRGVYYPDKVFRSSVLHSTQDLFLPFFSNVTWFHAIHVSGTNGTKRFDNPVLPFNDGVYFASTEKSNIIRGWIFGTTLDSKTQSLLIVNNATNVVIKVCEFQFCNDPFLGVYYHKNNKSWMESEFRVYSSANNCTFEYVSQPFLMDLEGKQGNFKNLREFVFKNIDGYFKIYSKHTPINLVRDLPQGFSALEPLVDLPIGINITRFQFLLALHRSYLTPGDSSSGWTAGAAAYYVGYLQPRTFLLKYNENGTITDAVDCALDPLSETKCTLKSFTVEKGIYQTSNFRVQPTESIVRFPNITNLCPFGEVFNATRFASVYAWNRKRISNCVADYSVLYNSASFSTFKCYGVSPTKLNDLCFTNVYADSFVIRGDEVRQIAPGQTGKIADYNYKLPDDFTGCVIAWNSNNLDSKVGGNYNYLYRLFRKSNLKPFERDISTEIYQAGSTPCNGVEGFNCYFPLQSYGFQPTNGVGYQPYRVVVLSFELLHAPATVCGPKKSTNLVKNKCVNFNFNGLTGTGVLTESNKKFLPFQQFGRDIADTTDAVRDPQTLEILDITPCSFGGVSVITPGTNTSNQVAVLYQDVNCTEVPVAIHADQLTPTWRVYSTGSNVFQTRAGCLIGAEHVNNSYECDIPIGAGICASYQTQTNSPSGAGSHHHHHHHHHH

SEQ ID NO: 4701 - protein, 715 aa, Artificial Sequence
  Description of Artificial Sequence: Synthetic polypeptide
MGILPSPGMPALLSLVSLLSVLLMGCVAETGTQCVNLTTRTQLPPAYTNSFTRGVYYPDKVFRSSVLHSTQDLFLPFFSNVTWFHAKHVSGTNGTKRFDNPVLPFNDGVYFASTEKSNIIRGWIFGTTLDSKTQSLLIVNNATNVVIKVCEFQFCNDPFLGVYYHKNNKSWMESEFRVYSSANNCTFEYHSQPFLMDLEGKQGNFKNLREFVFKNIDGYFKIYSKHTPINLVRDLPQGFSALEPLVDLPIGINITRFQTLLALHRSYLTPGDSSSGETAGAAAYYVGYLQPRTFLLKYNENGTITDAVDCALDPLSETKCTLKSFTVEKGIYQTSNFRVQPTESIVRFPNITNHCPFGEVFNATRFASVYAWNRKRISNCVADYSVLYNSASFSTFKCYGVSPTKLNDLCFTNVYADSFVIRGDEVRQIAPGQTGKIADYNYKLPDDFTGCVIAWNSNNLDSKVGGNYNYLYRLFRKSNLKPFERDISTEIYQAGSTPCNGVEGFNCYFPLQSYGFQPTNGVGQQPYRVVVLSFELLHAPATVCGPKKSTNLVKNKCVNFNFNGLTGTGVLTESNKKFLPFQQFGRDIADTTDAVRDPQTLEILDITPCSFGGVSVITPGTNTSNQVAVLYQDVNCTEVPDAIHADQLTPTWRVYSTGSNVFQTRAGCLIGAEHVNNSYECDIPIGAGICASYQTQTNSPSGAGSHHHHHHHHHH

SEQ ID NO: 4702 - protein, 715 aa, Artificial Sequence
  Description of Artificial Sequence: Synthetic polypeptide
MGILPSPGMPALLSLVSLLSVLLMGCVAETGTQCVNLTTRTQLPPAYTNSFTRGVYYPDKVFRSSVLHSTQDLFLPFFSNVTWFHAIHVSGTNGTKRFDNPVLPFNDGVYFASTEKSNIIRGWIFGTTLDSKTQSLLIVNNATNVVIKVCEFQFCNDPFLGVYYHKNNKSWMESEFRVYSSANNCTFEYVSQPFLMDLEGKQGNFKNLREFVFKNIDGYFKIYSKHTPINLVRDLPQGFSALEPLVDLPIGINITRFQTVLALHRSYLTPGDSSSGWTAGAAAYYVGYLQPRTFLLKYNENGTITDAVDCALDPLSETKCTLKSFTVEKGIYQTSNFRVQPTESIVRFPNITNLCPFGEVFNATRFASVYAWNRKRISNCVADYSVLYNSASFSTFKCYGVSPTKLNDLCFTNVYADSFVIRGDEVRQIAPGQTGKIADYNYKLPDDFTGCVIAWNSNNLDSKVGGNYNYLYRLFRKSNLKPFERDISTEIYQAGSTPCNGVEGFNCYFPLQSYGFQPTNGVGYQPYRVVVLSFELLHAPATVCGPKKSTNLVKNKCVNFNFNGLTGTGVLTESNKKFLPFQQFGRDIADTTDAVRDPQTLEILDITPCSFGGVSVITPGTNTSNQVAVLYQDVNCTEVPVAIHADQLTPTWRVYSTGSNVFQTRAGCLIGAEHVNNSYECDIPIGAGICASYQTQTNSPSGAGSHHHHHHHHHH

SEQ ID NO: 4703 - protein, 715 aa, Artificial Sequence
  Description of Artificial Sequence: Synthetic polypeptide
MGILPSPGMPALLSLVSLLSVLLMGCVAETGTQCVNLTTRTQLPPAYTNSFTRGVYYPDKVFRSSVLHSTQDLFLPFFSNVTWFHAIHVSGTNGTKRFDNPVLPFNDGVYFASTEKSNIIRGWIFGTTLDSKTQSLLIVNNATNVVIKVCEFQFCNDPFLGVYYHKNNKSWMESEFRVYSSANNCTFEYVSQPFLMDLEGKQGNFKNLREFVFKNIDGYFKIYSKHTPINLVRDLPQGFSALEPLVDLPIGINITRFQTLLALHRSYLTPGDSSSGWTAGAAAYYVGYLQPRTFLLKYNENGTITDAVDCALDPLSETKCTLKSFTVEKGIYQTSNFRVQPTESIVRFPNITNLCPFGEVFNATRFASVYAWNRKRISNCVADYSVLYNSASFSTFKCYGVSPTKLNDLCFTNVYADSFVIRGDEVRQIAPGQTGKIADYNYKLPDDFTGCVIAWNSNNLDSKVGGNYNYLYRLFRKSNLKPFERDISTEIYQAGSTPCNGVEGFNCYFPLQSYGFQPTNGVGYQPYRVVVLSFELLHAPATVCGPKKSTNLVKNKCVNFNFNGLTGTGVLTESNKKFLPFQQFGRDIADTTDAVRDPQTLEILDITPCSFGGVSVITPGTNTSNQVAVLYQDVNCTEVPVAIHAQQLTPTWRVYSTGSNVFQTRAGCLIGAEHVNNSYECDIPIGAGICASYQTQTNSPSGAGSHHHHHHHHHH

SEQ ID NO: 4704 - protein, 715 aa, Artificial Sequence
  Description of Artificial Sequence: Synthetic polypeptide
MGILPSPGMPALLSLVSLLSVLLMGCVAETGTQCVNLTTRTQLPPAYTNSFTRGVYYPDKVFRSSVLHSTQDLFLPFFSNVTWFHAEHVSGTNGTKRFDNPVLPFNDGVYFASTEKSNIIRGWIFGTTLDSKTQSLLIVNNATNVVIKVCEFQFCNDPFLGVYYHKNNKSWMESEFRVYSSANNCTFEYHSQPFLMDLEGKQGNFKNLREFVFKNIDGYFKIYSKHTPINLVRDLPQGFSALEPLVDLPIGINITRFQTLLALHRSYLTPGDSSSGETAGAAAYYVGYLQPRTFLLKYNENGTITDAVDCALDPLSETKCTLKSFTVEKGIYQTSNFRVQPTESIVRFPNITNHCPFGEVFNATRFASVYAWNRKRISNCVADYSVLYNSASFSTFKCYGVSPTKLNDLCFTNVYADSFVIRGDEVRQIAPGQTGKIADYNYKLPDDFTGCVIAWNSNNLDSKVGGNYNYLYRLFRKSNLKPFERDISTEIYQAGSTPCNGVEGFNCYFPLQSYGFQPTNGPGYQPYRVVVLSFELLHAPATVCGPKKSTNLVKNKCVNFNFNGLTGTGVLTESNKKFLPFQQFGRDIADTTDAVRDPQTLEILDITPCSFGGVSVITPGTNTSNQVAVLYQDVNCTEVPDAIHADQLTPTWRVYSTGSNVFQTRAGCLIGAEHVNNSYECDIPIGAGICASYQTQTNSPSGAGSHHHHHHHHHH

SEQ ID NO: 4705 - protein, 715 aa, Artificial Sequence
  Description of Artificial Sequence: Synthetic polypeptide
MGILPSPGMPALLSLVSLLSVLLMGCVAETGTQCVNLTTRTQLPPAYTNSFTRGVYYPDKVFRSSVLHSTQDLFLPFFSNVTWFHAIHVSGTNGTKRFDNPVLPFNDGVYFASTEKSNIIRGWIFGTTLDSKTQSLLIVNNATNVVIKVCEFQFCNDPFLGVYYHKNNKSWMESEFRVYSSANNCTFEYVSQPFLMDLEGKQGNFKNLREFVFKNIDGYFKIYSKHTPINLVRDLPQGFSALEPLVDLPIGINITRFQTLLALHRSYLTPGDSSSGWTAGAAAYYVGYLQPRTFLLKYNENGTITDAVDCALDPLSETKCTLKSFTVEKGIYQTSNFRVQPTESIVRFPNITNLCPFGEVFNATRFASVYAWNRKRISNCVADYSVLYNSASFSTFKCYGVSPTKLNDLCFTNVYADSFVIRGDEVRQIAPGQTGKIADYNYKLPDDFTGCVIAWNSNNLDSKVGGNYNYLYRLFRKSNLKPFERDISTEIYQAGSTPCNGVEGFNCYFPLQSYGFQPTNGVGYQPYRVVVLSFELLFAPATVCGPKKSTNLVKNKCVNFNFNGLTGTGVLTESNKKFLPFQQFGRDIADTTDAVRDPQTLEILDITPCSFGGVSVITPGTNTSNQVAVLYQDVNCTEVPVAIHADQLTPTWRVYSTGSNVFQTRAGCLIGAEHVNNSYECDIPIGAGICASYQTQTNSPSGAGSHHHHHHHHHH

SEQ ID NO: 4706 - protein, 715 aa, Artificial Sequence
  Description of Artificial Sequence: Synthetic polypeptide
MGILPSPGMPALLSLVSLLSVLLMGCVAETGTQCVNLTTRTQLPPAYTNSFTRGVYYPDKVFRSSVLHSTQDLFLPFFSNVTWFHAIHVSGTNGTKRFDNPVLPFNDGVYFASTEKSNIIRGWIFGTTLDSKTQSLLIVNNATNVVIKVCEFQFCNDPFLGVYYHKNNKSWMESEFRVYSSANNCTFEYVSQPFLMDLEGKQGNFKNLREFVFKNIDGYFKIYSKHTPINLVRDLPQGFSALEPLVDLPIGINITRFQTFLALHRSYLTPGDSSSGWTAGAAAYYVGYLQPRTFLLKYNENGTITDAVDCALDPLSETKCTLKSFTVEKGIYQTSNFRVQPTESIVRFPNITNLCPFGEVFNATRFASVYAWNRKRISNCVADYSVLYNSASFSTFKCYGVSPTKLNDLCFTNVYADSFVIRGDEVRQIAPGQTGKIADYNYKLPDDFTGCVIAWNSNNLDSKVGGNYNYLYRLFRKSNLKPFERDISTEIYQAGSTPCNGVEGFNCYFPLQSYGFQPTNGVGYQPYRVVVLSFELLHAPATVCGPKKSTNLVKNKCVNFNFNGLTGTGVLTESNKKFLPFQQFGRDIADTTDAVRDPQTLEILDITPCSFGGVSVITPGTNTSNQVAVLYQDVNCTEVPVAIHADQLTPTWRVYSTGSNVFQTRAGCLIGAEHVNNSYECDIPIGAGICASYQTQTNSPSGAGSHHHHHHHHHH

SEQ ID NO: 4707 - protein, 715 aa, Artificial Sequence
  Description of Artificial Sequence: Synthetic polypeptide
MGILPSPGMPALLSLVSLLSVLLMGCVAETGTQCVNLTTRTQLPPAYTNSFTRGVYYPDKVFRSSVLHSTQDLFLPFFSNVTWFHAIHVSGTNGTKRFDNPVLPFNDGVYFASTEKSNIIRGWIFGTTLDSKTQSLLIVNNATNVVIKVCEFQFCNDPFLGVYYHKNNKSWMESEFRVYSSANNCTFEYVSQPFLMDLEGKQGNFKNLREFVFKNIDGYFKIYSKHTPINLVRDLPQGFSALEPLVDLPIGINITRFQTLLALHRSYLTPGDSSSGWTAGAAAYYVGYLQPRTFLLKYNENGTITDAVDCALDPLSETKCTLKSFTVEKGIYQTSNFRVQPTESIVRFPNITNLCPFGEVFNATRFASVYAWNRKRISNCVADYSVLYNSASFSTFKCYGVSPTKLNDLCFTNVYADSFVIRGDEVRQIAPGQTGKIADYNYKLPDDFTGCVIAWNSNNLDSKVGGNYNYLYRLFRKSNLKPFERDISTEIYQAGNTPCNGVEGFNCYFPLQSYGFQPTNGVGYQPYRVVVLSFELLHAPATVCGPKKSTNLVKNKCVNFNFNGLTGTGVLTESNKKFLPFQQFGRDIADTTDAVRDPQTLEILDITPCSFGGVSVITPGTNTSNQVAVLYQDVNCTEVPVAIHADQLTPTWRVYSTGSNVFQTRAGCLIGAEHVNNSYECDIPIGAGICASYQTQTNSPSGAGSHHHHHHHHHH

SEQ ID NO: 4708 - protein, 715 aa, Artificial Sequence
  Description of Artificial Sequence: Synthetic polypeptide
MGILPSPGMPALLSLVSLLSVLLMGCVAETGTQCVNLTTRTQLPPAYTNSFTRGVYYPDKVFRSSVLHSTQDLFLPFFSNVTWFHAIHVSGTNGTKRFDNPVLPFNDGVYFASTEKSNIIRGWIFGTTLDSKTQSLLIVNNATNVVIKVCEFQFCNDPFLGVYYHKNNKSWMESEFRVYSSANNCTFEYVSQPFLMDLEGKQGNFKNLREFVFKNIDGYFKIYSKHTPINLVRDLPQGFSALEPLVDLPIGINITRFQTLLALHRSYLTPGDSSSGWTAGAAAYYVGYLQPRTFLLKYNENGTITDAVDCALDPLSETKCTLKSFTVEKGIYQTSNFRVQPTESIVRFPNITNLCPFGEVFNATRFASVYAWNRKRISNCVADYSVLYNSASFSTFKCYGVSPTKLNDLCFTNVYADSFVIRGDEVRQIAPGQTGKIADYNYKLPDDFTGCVIAWNSNNLDSKVGGNYNYLYRLFRKSNLKPFERDISTEIYQAGSTPCNGVEGFNCYFPLQSYGFQPTNGVGYQPYRVVVLSFELLHAPATVCPPKKSTNLVKNKCVNFNFNGLTGTGVLTESNKKFLPFQQFGRDIADTTDAVRDPQTLEILDITPCSFGGVSVITPGTNTSNQVAVLYQDVNCTEVPVAIHADQLTPTWRVYSTGSNVFQTRAGCLIGAEHVNNSYECDIPIGAGICASYQTQTNSPSGAGSHHHHHHHHHH

SEQ ID NO: 4709 - protein, 715 aa, Artificial Sequence
  Description of Artificial Sequence: Synthetic polypeptide
MGILPSPGMPALLSLVSLLSVLLMGCVAETGTQCVNLTTRTQLPPAYTNSFTRGVYYPDKVFRSSVLHSTQDLFLPFFSNVTWFHAIHVSGTNGTKRFDNPVLPFNDGVYFASTEKSNIIRGWIFGTTLDSKTQSLLIVNNATNVVIKVCEFQFCNDPFLGVYYHKNNKSWMESEFRVYSSANNCTFEYVSQPFLMDLEGKQGNFKNLREFVFKNIDGYFKIYSKHTPINLVRDLPQGFSALEPLVDLPIGINITRFQTLLALHRSYLTPGDSSSGWTAGAAAYYVGYLQPRTFLLKYNENGTITDAVDCALDPLSETKCTLKSFTVEKGIYQTSNFRVQPTESIVRFPNITNLCPFGEVFNATRFASVYAWNRKRISNCVADYSVLYNSASFSTFKCYGVSPTKLNDLCFTNVYADSFVIRGDEVRQIAPGQTGKIADYNYKLPDDFTGCVIAWNSNNLDSKVGGNYNYLYRLFRKSNLKPFERDISTEIYQAGSTPCNGVEGFNCYFPLQSYGFQPTNGVGYQPYRVVVLSFELLHAPATVCGPKKSTNLVKNKCVNFNFNGLTGTGVLTESNKKFLPFQQFGRDIADTTDAVRDPQTLEILDITPCSFGGVSVITPQTNTSNQVAVLYQDVNCTEVPVAIHADQLTPTWRVYSTGSNVFQTRAGCLIGAEHVNNSYECDIPIGAGICASYQTQTNSPSGAGSHHHHHHHHHH

SEQ ID NO: 4710 - protein, 715 aa, Artificial Sequence
  Description of Artificial Sequence: Synthetic polypeptide
MGILPSPGMPALLSLVSLLSVLLMGCVAETGTQCVNLTTRTQLPPAYTNSFTRGVYYPDKVFRSSVLHSTQDLFLPFFSNVTWFHAIHVSGTNGTKRFDNPVLPFNDGVYFASTEKSNIIRGWIFGTTLDSKTQSLLIVNNATNVVIKVCEFQFCNDPFLGVYYHKNNKSWMESEFRVYSSANNCTFEYVSQPFLMDLEGKQGNFKNLREFVFKNIDGYFKIYSKHTPINLVRDLPQGFSALEPLVDLPIGINITRFQTLLALHRSYLTPGDSSSGWTAGAAAYYVGYLQPRTFLLKYNENGTITDAVDCALDPLSETKCTLKSFTVEKGIYQTSNFRVQPTESIVRFPNITNLCPFGEVFNATRFASVYAWNRKRISNCVADYSVLYNSASFSTFKCYGVSPTKLNDLCFTNVYADSFVIRGDEVRQIAPGQTGKIADYNYKLPDDFTGCVIAWNSNNLDSKVGGNYNYLYRLFRKSNLKPFERDISTEIYQAGSTPCNGVEGFNCYFPLQSYGFQPTNGVGYQPYRVVVLLFELLHAPATVCGPKKSTNLVKNKCVNFNFNGLTGTGVLTESNKKFLPFQQFGRDIADTTDAVRDPQTLEILDITPCSFGGVSVITPGTNTSNQVAVLYQDVNCTEVPVAIHADQLTPTWRVYSTGSNVFQTRAGCLIGAEHVNNSYECDIPIGAGICASYQTQTNSPSGAGSHHHHHHHHHH

SEQ ID NO: 4711 - protein, 715 aa, Artificial Sequence
  Description of Artificial Sequence: Synthetic polypeptide
MGILPSPGMPALLSLVSLLSVLLMGCVAETGTQCVNLTTRTQLPPAYTNSFTRGVYYPDKVFRSSVLHSTQDLFLPFFSNVTWFHAIHVSGTNGTKRFDNPVLPFNDGVYFASTEKSNIIRGWIFGTTLDSKTQSLLIVNNATNVVIKVCEFQFCNDPFLGVYYHKNNKSWMESEFRVYSSANNCTFEYVSQPFLMDLEGKQGNFKNLREFVFKNIDGYFKIYSKHTPINLVRDLPQGFSALEPLVDLPIGINITRFQTLLALHRSYLTPGDSSSGWTAGAAAYYVGYLQPRTFLLKYNENGTITDAVDCALDPLSETKCTLKSFTVEKGIYQTSNFRVQPTESIVRFPNITNLCPFGEVFNATRFASVYAWNRKRISNCVADYSVLYNSASFSTFKCYGVSPTKLNDLCFTNVYADSFVIRGDEVRQIAPGQTGKIADYNYKLPDDFTGCVIAWNSNNLDSKVGGNYNYLYRLFRKSNTKPFERDISTEIYQAGSTPCNGVEGFNCYFPLQSYGFQPTNGVGYQPYRVVVLSFELLHAPATVCGPKKSTNLVKNKCVNFNFNGLTGTGVLTESNKKFLPFQQFGRDIADTTDAVRDPQTLEILDITPCSFGGVSVITPGTNTSNQVAVLYQDVNCTEVPVAIHADQLTPTWRVYSTGSNVFQTRAGCLIGAEHVNNSYECDIPIGAGICASYQTQTNSPSGAGSHHHHHHHHHH

SEQ ID NO: 4712 - protein, 715 aa, Artificial Sequence
  Description of Artificial Sequence: Synthetic polypeptide
MGILPSPGMPALLSLVSLLSVLLMGCVAETGTQCVNLTTRTQLPPAYTNSFTRGVYYPDKVFRSSVLHSTQDLFLPFFSNVTWFHAEHVSGTNGTKRFDNPVLPFNDGVYFASTEKSNIIRGWIFGTTLDSKTQSLLIVNNATNVVIKVCEFQFCNDPFLGVYYHKNNKSWMESEFRVYSSANNCTFEYHSQPFLMDLEGKQGNFKNLREFVFKNIDGYFKIYSKHTPINLVRDLPQGFSALEPLVDLPIGINITRFQTLLALHRSYLTPGDSSSGETAGAAAYYVGYLQPRTFLLKYNENGTITDAVDCALDPLSETKCTLKSFTVEKGIYQTSNFRVQPTESIVRFPNITNKCPFGEVFNATRFASVYAWNRKRISNCVADYSVLYNSASFSTFKCYGVSPTKLNDLCFTNVYADSFVIRGDEVRQIAPGQTGKIADYNYKLPDDFTGCVIAWNSNNLDSKVGGNYNYLYRLFRKSNLKPFERDISTEIYQAGSTPCNGVEGFNCYFPLQSYGFQPTNGPGYQPYRVVVLSFELLHAPATVCGPKKSTNLVKNKCVNFNFNGLTGTGVLTESNKKFLPFQQFGRDIADTTDAVRDPQTLEILDITPCSFGGVSVITPGTNTSNQVAVLYQDVNCTEVPDAIHADQLTPTWRVYSTGSNVFQTRAGCLIGAEHVNNSYECDIPIGAGICASYQTQTNSPSGAGSHHHHHHHHHH

SEQ ID NO: 4713 - protein, 715 aa, Artificial Sequence
  Description of Artificial Sequence: Synthetic polypeptide
MGILPSPGMPALLSLVSLLSVLLMGCVAETGTQCVNLTTRTQLPPAYTNSFTRGVYYPDKVFRSSVLHSTQDLFLPFFSNVTWFHAIHVSGTNGTKRFDNPVLPFNDGVYFASTEKSNIIRGWIFGTTLDSKTQSLLIVNNATNVVIKVCEFQFCNDPFLGVYYHKNNKSWMESEFRVYSSANNCTFEYVSQPFLMDLEGKQGNFKNLREFVFKNIDGYFKIYSKHTPINLVRDLPQGFSALEPLVDLPIGINITRFQTLLALHRSYLTPGDSSSGWTAGAAAYYVGYLQPRTFLLKYNENGTITDAVDCALDPLSETKCTLKSFTVEKGIYQTSNFRVQPTESIVRFPNITNLCPFGEVFNATRFASVYAWNRKRISNCVADYSVLYNSASFSTFKCYGVSPTKLNDLCFTNVYADSFVIRGDEVRQIAPGQTGKIADYNYKLPDDFTGCVIAWNSNNLDSKVGGNYNYLYRLFRKSNLKPFERFISTEIYQAGSTPCNGVEGFNCYFPLQSYGFQPTNGVGYQPYRVVVLSFELLHAPATVCGPKKSTNLVKNKCVNFNFNGLTGTGVLTESNKKFLPFQQFGRDIADTTDAVRDPQTLEILDITPCSFGGVSVITPGTNTSNQVAVLYQDVNCTEVPVAIHADQLTPTWRVYSTGSNVFQTRAGCLIGAEHVNNSYECDIPIGAGICASYQTQTNSPSGAGSHHHHHHHHHH

SEQ ID NO: 4714 - protein, 715 aa, Artificial Sequence
  Description of Artificial Sequence: Synthetic polypeptide
MGILPSPGMPALLSLVSLLSVLLMGCVAETGTQCVNLTTRTQLPPAYTNSFTRGVYYPDKVFRSSVLHSTQDLFLPFFSNVTWFHAIHVSGTNGTKRFDNPVLPFNDGVYFASTEKSNIIRGWIFGTTLDSKTQSLLIVNNATQVVIKVCEFQFCNDPFLGVYYHKNNKSWMESEFRVYSSANNCTFEYVSQPFLMDLEGKQGNFKNLREFVFKNIDGYFKIYSKHTPINLVRDLPQGFSALEPLVDLPIGINITRFQTLLALHRSYLTPGDSSSGWTAGAAAYYVGYLQPRTFLLKYNENGTITDAVDCALDPLSETKCTLKSFTVEKGIYQTSNFRVQPTESIVRFPNITNLCPFGEVFNATRFASVYAWNRKRISNCVADYSVLYNSASFSTFKCYGVSPTKLNDLCFTNVYADSFVIRGDEVRQIAPGQTGKIADYNYKLPDDFTGCVIAWNSNNLDSKVGGNYNYLYRLFRKSNLKPFERDISTEIYQAGSTPCNGVEGFNCYFPLQSYGFQPTNGVGYQPYRVVVLSFELLHAPATVCGPKKSTNLVKNKCVNFNFNGLTGTGVLTESNKKFLPFQQFGRDIADTTDAVRDPQTLEILDITPCSFGGVSVITPGTNTSNQVAVLYQDVNCTEVPVAIHADQLTPTWRVYSTGSNVFQTRAGCLIGAEHVNNSYECDIPIGAGICASYQTQTNSPSGAGSHHHHHHHHHH

SEQ ID NO: 4715 - protein, 715 aa, Artificial Sequence
  Description of Artificial Sequence: Synthetic polypeptide
MGILPSPGMPALLSLVSLLSVLLMGCVAETGTQCVNLTTRTQLPPAYTNSFTRGVYYPDKVFRSSVLHSTQDLFLPFFSNVTWFHAIHVSGTNGTKRFDNPVLPFNDGVYFASTEKSNIIRGWIFGTTLDSKTQSLLIVNNATNVVIKVCEFQFCNDPFLGVYYHKNNKSWMESEFRVYSSANNCTFEYVSQPFLMDLEGKQGNFKNLREFVFKNIDGYFKIYSKHTPINLVRDLPQGFSALEPLVDLPIGINITRFQTLLALHRSYLTPGDSSSGWTAGAAAYYVGYLQPRTFLLKYNENGTITDAVDCALDPLSETKCTLKSFTVEKGIYQTSNFRVQPTESIVRFPNITNLCPFGEVFNAPRFASVYAWNRKRISNCVADYSVLYNSASFSTFKCYGVSPTKLNDLCFTNVYADSFVIRGDEVRQIAPGQTGKIADYNYKLPDDFTGCVIAWNSNNLDSKVGGNYNYLYRLFRKSNLKPFERDISTEIYQAGSTPCNGVEGFNCYFPLQSYGFQPTNGVGYQPYRVVVLSFELLHAPATVCGPKKSTNLVKNKCVNFNFNGLTGTGVLTESNKKFLPFQQFGRDIADTTDAVRDPQTLEILDITPCSFGGVSVITPGTNTSNQVAVLYQDVNCTEVPVAIHADQLTPTWRVYSTGSNVFQTRAGCLIGAEHVNNSYECDIPIGAGICASYQTQTNSPSGAGSHHHHHHHHHH

SEQ ID NO: 4716 - protein, 715 aa, Artificial Sequence
  Description of Artificial Sequence: Synthetic polypeptide
MGILPSPGMPALLSLVSLLSVLLMGCVAETGTQCVNLTTRTQLPPAYTNSFTRGVYYPDKVFRSSVLHSTQDLFLPFFSNVTWFHAIHVSGTNGTKRFDNPVLPFNDGVYFASTEKSNIIRGWIFGTTLDSKTQSLLIVNNATNVVIKVCEFQFCNDPFLGVYYHKNNKSWMESEFRVYSSANNCTFEYVSQPFLMDLEGKQGNFKNLREYVFKNIDGYFKIYSKHTPINLVRDLPQGFSALEPLVDLPIGINITRFQTLLALHRSYLTPGDSSSGWTAGAAAYYVGYLQPRTFLLKYNENGTITDAVDCALDPLSETKCTLKSFTVEKGIYQTSNFRVQPTESIVRFPNITNLCPFGEVFNATRFASVYAWNRKRISNCVADYSVLYNSASFSTFKCYGVSPTKLNDLCFTNVYADSFVIRGDEVRQIAPGQTGKIADYNYKLPDDFTGCVIAWNSNNLDSKVGGNYNYLYRLFRKSNLKPFERDISTEIYQAGSTPCNGVEGFNCYFPLQSYGFQPTNGVGYQPYRVVVLSFELLHAPATVCGPKKSTNLVKNKCVNFNFNGLTGTGVLTESNKKFLPFQQFGRDIADTTDAVRDPQTLEILDITPCSFGGVSVITPGTNTSNQVAVLYQDVNCTEVPVAIHADQLTPTWRVYSTGSNVFQTRAGCLIGAEHVNNSYECDIPIGAGICASYQTQTNSPSGAGSHHHHHHHHHH

SEQ ID NO: 4717 - protein, 715 aa, Artificial Sequence
  Description of Artificial Sequence: Synthetic polypeptide
MGILPSPGMPALLSLVSLLSVLLMGCVAETGTQCVNLTTRTQLPPAYTNSFTRGVYYPDKVFRSSVLHSTQDLFLPFFSNVTWFHAIHVSGTNGTKRFDNPVLPFNDGVYFASTEKSNIIRGWIFGTTLDSKTQSLLIVNNATNVVIKVCEFQFCNDPFLGVYYHKNNKSWMESEFRVYSSANNCTFEYVSQPFLMDLEGKQGNFKNLREFVFKNIDGYFKIYSKPTPINLVRDLPQGFSALEPLVDLPIGINITRFQTLLALHRSYLTPGDSSSGWTAGAAAYYVGYLQPRTFLLKYNENGTITDAVDCALDPLSETKCTLKSFTVEKGIYQTSNFRVQPTESIVRFPNITNLCPFGEVFNATRFASVYAWNRKRISNCVADYSVLYNSASFSTFKCYGVSPTKLNDLCFTNVYADSFVIRGDEVRQIAPGQTGKIADYNYKLPDDFTGCVIAWNSNNLDSKVGGNYNYLYRLFRKSNLKPFERDISTEIYQAGSTPCNGVEGFNCYFPLQSYGFQPTNGVGYQPYRVVVLSFELLHAPATVCGPKKSTNLVKNKCVNFNFNGLTGTGVLTESNKKFLPFQQFGRDIADTTDAVRDPQTLEILDITPCSFGGVSVITPGTNTSNQVAVLYQDVNCTEVPVAIHADQLTPTWRVYSTGSNVFQTRAGCLIGAEHVNNSYECDIPIGAGICASYQTQTNSPSGAGSHHHHHHHHHH

SEQ ID NO: 4718 - protein, 715 aa, Artificial Sequence
  Description of Artificial Sequence: Synthetic polypeptide
MGILPSPGMPALLSLVSLLSVLLMGCVAETGTQCVNLTTRTQLPPAYTNSFTRGVYYPDKVFRSSVLHSTQDLFLPFFSNVTWFHAIHVSGTNGTKRFDNPVLPFNDGVYFASTEKSNIIRGWIFGTTLDSKTQSLLIVNNATNVVIKVCEFQFCNDPFLGVYYHKNNKSWMESEFRVYSSANNCTFEYVSQPFLMDLEGKQGNFKNLREFVFKNIDGYFKIYSKHTPINLVRDLPQGFSALEPLVDLPIGINITRFQTLLALHRSYLTPGDSSSGWTAGAAAYYVGYLQPRTFLLKYNENGTITDAVDCALDPLSETKCTLKSFTVEKGIYQTSNFRVQPTESIVRFPNITNLCPFGEVFNETRFASVYAWNRKRISNCVADYSVLYNSASFSTFKCYGVSPTKLNDLCFTNVYADSFVIRGDEVRQIAPGQTGKIADYNYKLPDDFTGCVIAWNSNNLDSKVGGNYNYLYRLFRKSNLKPFERDISTEIYQAGSTPCNGVEGFNCYFPLQSYGFQPTNGVGYQPYRVVVLSFELLHAPATVCGPKKSTNLVKNKCVNFNFNGLTGTGVLTESNKKFLPFQQFGRDIADTTDAVRDPQTLEILDITPCSFGGVSVITPGTNTSNQVAVLYQDVNCTEVPVAIHADQLTPTWRVYSTGSNVFQTRAGCLIGAEHVNNSYECDIPIGAGICASYQTQTNSPSGAGSHHHHHHHHHH

SEQ ID NO: 4719 - protein, 715 aa, Artificial Sequence
  Description of Artificial Sequence: Synthetic polypeptide
MGILPSPGMPALLSLVSLLSVLLMGCVAETGTQCVNLTTRTQLPPAYTNSFTRGVYYPDKVFRSSVLHSTQDLFLPFFSNVTWFHAIHVSGTNGTKRFDNPVLPFNDGVYFASTEKSNIIRGWIFGTTLDSKTQSLLIVNNATNVVIKVCEFQFCNDPFLGVYYHKNNKSWMESEFRVYSSANNCTFEYVSQPFLMDLEGKQGNFKNLREFVFKNIDGYFKIYSKHTPINLVRDLPQGFSALEPLVDLPIGINITRFQTLLALHRSYLTPGDSSSGWTAGAAAYYVGYLQPRTFLLKYNENGTITDAVDCALDPLSETKCTLKSFTVEKGIYQTSNFRVQPTESIVRFPNITNLCPFGEVFNATRFASVYAWNRKRISNCVADYSVLYNSASFSTFQCYGVSPTKLNDLCFTNVYADSFVIRGDEVRQIAPGQTGKIADYNYKLPDDFTGCVIAWNSNNLDSKVGGNYNYLYRLFRKSNLKPFERDISTEIYQAGSTPCNGVEGFNCYFPLQSYGFQPTNGVGYQPYRVVVLSFELLHAPATVCGPKKSTNLVKNKCVNFNFNGLTGTGVLTESNKKFLPFQQFGRDIADTTDAVRDPQTLEILDITPCSFGGVSVITPGTNTSNQVAVLYQDVNCTEVPVAIHADQLTPTWRVYSTGSNVFQTRAGCLIGAEHVNNSYECDIPIGAGICASYQTQTNSPSGAGSHHHHHHHHHH

SEQ ID NO: 4720 - protein, 715 aa, Artificial Sequence
  Description of Artificial Sequence: Synthetic polypeptide
MGILPSPGMPALLSLVSLLSVLLMGCVAETGTQCVNLTTRTQLPPAYTNSFTRGVYYPDKVFRSSVLHSTQDLFLPFFSNVTWFHAIHVSGTNGTKRFDNPVLPFNDGVYFASTEKSNIIRGWIFGTTLDSKTQSLLIVNNATNVVIKVCEFQFCNDPFLGVYYHKNNKSWMESEFRVYSSANNCTFEYVSQPFLMDLEGKQGNFKNLREFVFKNIDGYFKIYSKHTPINLVRDLPQGFSALEPLVDLPIGINITRFQTLLALHRSYLTPGDSSSGWTAGAAAYYVGYLQPRTFLLKYNENGTITDAVDCALDPLSETKCTLKSFTVEKGIYQTSNFRVQPTESIVRFPNITNLCPFGEVFNATRFASVYAWNRKRISNCVADYSVLYNSASFSTFKCYGVSPTKLNDLCFTNVYADSFVIRGDEVRQIAPGQTGKIADYNYKLPDDFTGCVIAWNSNNLDSKVGGNYNYLYRLFRKSNLKPFERDISTEIYQAGSTPCNGVEGFNCYFPLQSYGFQPTNGVGYQPYRVVVLSFELLHAPATVCGPKKSTNLVKNKCVNFNFNGLTGTGVLTESNKKFLPFQQFGRDIADTTDAVRDPQTLEILDITPCSDGGVSVITPGTNTSNQVAVLYQDVNCTEVPVAIHADQLTPTWRVYSTGSNVFQTRAGCLIGAEHVNNSYECDIPIGAGICASYQTQTNSPSGAGSHHHHHHHHHH

SEQ ID NO: 4721 - protein, 715 aa, Artificial Sequence
  Description of Artificial Sequence: Synthetic polypeptide
MGILPSPGMPALLSLVSLLSVLLMGCVAETGTQCVNLTTRTQLPPAYTNSFTRGVYYPDKVFRSSVLHSTQDLFLPFFSNVTWFHAEHVSGTNGTKRFDNPVLPFNDGVYFASTEKSNIIRGWIFGTTLDSKTQSLLIVNNATNVVIKVCEFQFCNDPFLGVYYHKNNKSWMESEFRVYSSANNCTFEYHSQPFLMDLEGKQGNFKNLREFVFKNIDGYFKIYSKHTPINLVRDLPQGFSALEPLVDLPIGINITRFQTLLALHRSYLTPGDSSSGETAGAAAYYVGYLQPRTFLLKYNENGTITDAVDCALDPLSETKCTLKSFTVEKGIYQTSNFRVQPTESIVRFPNITNPCPFGEVFNATRFASVYAWNRKRISNCVADYSVLYNSASFSTFKCYGVSPTKLNDLCFTNVYADSFVIRGDEVRQIAPGQTGKIADYNYKLPDDFTGCVIAWNSNNLDSKVGGNYNYLYRLFRKSNLKPFERDISTEIYQAGSTPCNGVEGFNCYFPLQSYGFQPTNGPGQQPYRVVVLSFELLHAPATVCGPKKSTNLVKNKCVNFNFNGLTGTGVLTESNKKFLPFQQFGRDIADTTDAVRDPQTLEILDITPCSFGGVSVITPGTNTSNQVAVLYQDVNCTEVPDAIHADQLTPTWRVYSTGSNVFQTRAGCLIGAEHVNNSYECDIPIGAGICASYQTQTNSPSGAGSHHHHHHHHHH

SEQ ID NO: 4722 - protein, 715 aa, Artificial Sequence
  Description of Artificial Sequence: Synthetic polypeptide
MGILPSPGMPALLSLVSLLSVLLMGCVAETGTQCVNLTTRTQLPPAYTNSFTRGVYYPDKVFRSSVLHSTQDLFLPFFSNVTWFHAIHVSGTNGTKRFDNPVLPFNDGVYFASTEKSNIIRGWIFGTTLDSKTQSLLIVNNATNVVIKVCEFQFCNDPFLGVYYHKNNKSWMESEFRVYSSANNCTFEYVSQPFLMDLEGKQGNFKNLREFVFKNIDGYFKIYSKHTPINLVRDLPQGFSALEPLVDLPIGINITRFQTLLALHRSYLTPGDSSSGWTAGAAAYYVGYLQPRTFLLKYNENGTITDAVDCALDPLSETKCTLKSFTVEKGIYQTSNFRVQPTESIVRFPNITNLCPFGEVFNATRFASVYAWNRKRISNCVADYSVLYNSASFSTFKCYGVSPTKLNDLCFTNVYADSFVIRGDEVRQIAPGQTGKIADYNYKLPDDFTGCVIAWNSNNLDSKVGGNYNYLYRLFRKSNLKPFERDISTEIYQAGSTPCNGVEGFNCYFPLQSYGFQPTNGVGYQPYRVVVLSFELLHAPATVCGPKKSTNLVKNKCVNFNFNGLTGTGVLTESNKKFLPFQQFGRDIADTTDAVRDPQTLEILDITPCSFGGVSVITPGTNTSNQVAVLYQDVNCTEVPVAIHADQLRPTWRVYSTGSNVFQTRAGCLIGAEHVNNSYECDIPIGAGICASYQTQTNSPSGAGSHHHHHHHHHH

SEQ ID NO: 4723 - protein, 715 aa, Artificial Sequence
  Description of Artificial Sequence: Synthetic polypeptide
MGILPSPGMPALLSLVSLLSVLLMGCVAETGTQCVNLTTRTQLPPAYTNSFTRGVYYPDKVFRSSVLHSTQDLFLPFFSNVTWFHAIHVSGTNGTKRFDNPVLPFNDGVYFASTEKSNIIRGWIFGTTLDSKTQSLLIVNNATNVVIKVCEFQFCNDPFLGVYYHKNNKSWMESEFRVYSSANNCTFEYVSQPFLMDLEGKQGNFKNLREFVFKNIDGYFKIYSKHTPINLVRDLPQGFSALEPLVDLPIGINITRFQTLLALHRSYLTPGDSSSGWTAGAAAYYVGYLQPRTFLLKYNENGTITDAVDCALDPLSETKCTLKSFTVEKGIYQTSNFRVQPTESIVRFPNITNLCPFGEVFNATRFASVYAWNRKRISNCVADYSVLYNSASFSTFKCYGVSPTKLNDLCFTNVYADSFVIRGDEVRQIAPGQTGKIADYNYKLPDDFTGCVIAWNSNNLDSKVGGNYNYLYRLFRKSNLKPFERDISTEIYQAGSTPCNGVEGFNCYFPLQSYGFQPTNGVGYQPYRVVVLSFELLHAPATVCGPKKSTNLVKNKCVNFNFNGLTGTGVLTESNKKFLPFQQFGRDIADTTDAVRDPQTLEILDITPCSFGGVSVITPGTNTSNQVAVLYQDVNCTEVPVAIHADQLTPTWRVYSTGSNVFQTRAGCLIGAEHVNNSYECDIPIGAGICASYQTQRNSPSGAGSHHHHHHHHHH

SEQ ID NO: 4724 - protein, 715 aa, Artificial Sequence
  Description of Artificial Sequence: Synthetic polypeptide
MGILPSPGMPALLSLVSLLSVLLMGCVAETGTQCVNLTTRTQLPPAYTNSFTRGVYYPDKVFRSSVLHSTQDLFLPFFSNVTWFHAIHVSGTNGTKRFDNPVLPFNDGVYFASTEKSNIIRGWIFGTTLDSKTQSLLIVNNATNVVIKVCEFQFCNDPFLGVYYHKNNKSWMESEFRVYSSANNCTFEYVSQPFLMDLEGKQGNFKNLREFVFKNIDGYFKIYSKHTPINLVRDLPQGFSALEPLVDLPIGINITRFQTLLALHRSYLTPGDSSSGWTAGAAAYYVGYLQPRTFLLKYNENGTITDAVDCALDPLSETKCTLKSFTVEKGIYQTSNFRVQPTESIVRFPNITNLCPFGEVFNATRFASVYAWNRKRISNCVADYSVLYNSASFSTFKCYGVSPTKLNDLCFTNVYADSFVIRGDEVRQIAPGQTGKIADYNYKLPDDFTGCVIAWNSNNLDSKVGGNYNYLYRLFRKSNLKPFERDISTEIYQAGSTPCNGVEGFNCYFPLQSYGFQPTNGVGYQPYRVVVLSFELLHAPATVCGPKKSTNLVKNKCVNFNFNGLTGTGVLTESNKKFLPFQQFGRDIAGTTDAVRDPQTLEILDITPCSFGGVSVITPGTNTSNQVAVLYQDVNCTEVPVAIHADQLTPTWRVYSTGSNVFQTRAGCLIGAEHVNNSYECDIPIGAGICASYQTQTNSPSGAGSHHHHHHHHHH

SEQ ID NO: 4725 - protein, 715 aa, Artificial Sequence
  Description of Artificial Sequence: Synthetic polypeptide
MGILPSPGMPALLSLVSLLSVLLMGCVAETGTQCVNLTTRTQLPPAYTNSFTRGVYYPDKVFRSSVLHSTQDLFLPFFSNVTWFHAIHVSGTNGTKRFDNPVLPFNDGVYFASTEKSNIIRGWIFGTTLDSKTQSLLIVNNATNVVIKVCEFQFCNDPFLGVYYHKNNKSWMESEFRVYSSANNCTFEYVSQPFLMDLEGKQGNFKNLREFVFKNIDGYFKIYSKHTPINLVRDLPQGFSALEPLVDLPIGINITRFQTLLALHRSYLTPGDSSSGWTAGAAAYYVGYLQPRTFLLKYNENGTITDAVDCALDPLSETKCTLKSFTVEKGIYQTSNFRVQPTESIVRFPNITNLCPFGEVFNATRFASSYAWNRKRISNCVADYSVLYNSASFSTFKCYGVSPTKLNDLCFTNVYADRFVIRGDEVRQIAPGQTGKIADYNYKLPDDFTGCVIAWNSNNLDAKVGGNYNYLYRLFRKSNLKPFERFISTEIYQAGSTPANGVEGFNCYFPLQSYGFQPTNGVGYQPYRVVVLSFELLHAPHTVCGPKKSTNLVKNKCVNFNFNGLTGTGVLTESNKKFLPFQQFGRDIADTTDAVRDPQTLEILDITPCSFGGVSVITPGTNTSNQVAVLYQDVNCTEVPVAIHADQLTPTWRVYSTGSNVFQTRAGCLIGAEHVNNSYECDIPIGAGICASYQTQTNSPSGAGSHHHHHHHHHH

SEQ ID NO: 4726 - protein, 715 aa, Artificial Sequence
  Description of Artificial Sequence: Synthetic polypeptide
MGILPSPGMPALLSLVSLLSVLLMGCVAETGTQCVNLTTRTQLPPAYTNSFTRGVYYPDKVFRSSVLHSTQDLFLPFFSNVTWFHAIHVCGTNGTKRFDNPVLPFNDGVYFASTEKSNIIRGWIFGTTLDSKTQSLLIVNNATNVVIKVCEFQFCNDPFLGVYYHKNNKSWMESEFRVYSSANNCTFEYVSQPFLMDLEGKQGNFKNLREFVFKNIDGYFKIYSKHTPINLVRDLPQGFSALEPLVDLPIGINITRFQTLLALHRSYLTPGDSSSGWTAGAAAYYVGYLQPRTFLLKYNENGTITDAVDCALDPLSETKCTLKSFTVEKGIYQTSNFRVQPTESIVRFPNITNLCPFGEVFNATRFASVYAWNRKRISNCVADYSVLYNSASFSTFKCYGVSPTKLNDLCFTNVYADSFVIRGDEVRQIAPGQTGKIADYNYKLPDDFTGCVIAWNSNNLDSKVGGNYNYLYRLFRKSNLKPFERDISTEIYQAGSTPCNGVEGFNCYFPLQSYGFQPTNGVGYQPYRVVVLSFELLHAPATVCGPKKSTNLVKNKCVNFNFNGLTGTGVLTESNKKFLPFQQFGRDIADTTDAVRDPQTLEILDITPCSFGGVSVITPGTNTSNQVAVLYQDVNCTEVPVAIHADQLTPTWRVYSTGSNVFQTRAGCLIGAEHVNNSYECDIPIGAGICASYQTQTNSPSGAGSHHHHHHHHHH

SEQ ID NO: 4727 - protein, 715 aa, Artificial Sequence
  Description of Artificial Sequence: Synthetic polypeptide
MGILPSPGMPALLSLVSLLSVLLMGCVAETGTQCVNLTTRTQLPPAYTNSFTRGVYYPDKVFRSSVLHSTQDLFLPFFSNVTWFHAIHVSGTNGTKRFDNPVLPFNDGVYFASTEKSNIIRGWIFGTTLDSKTQSLLIVNNATNVVIKVCEFQFCNDPFLGVYYHKNNKSWMESEFRVYSSANNCTFEYVSQPFLMDLEGKQGNFKNLREFVFKNIDGYFKIYSKHTPINLVRDLPQGFSALEPLVDLPIGINITRFQTLLALHRSYLTPGDSSSGWTAGAAAYYVGYLQPRTFLLKYNENGTITDAVDCALDPLSETKCTLKSFTVEKGIYQTSNFRVQPTESIVRFPNITNLCPFGEVFNATRFASVYAWNRKRISNCVADYSVLYNSASFSTFKCYGVSPTKLNDLCFTNVYADSFVIRGDEVRQIAPGQTGKIADYNYKLPDDFTGCVIAWNSNNLDSKVGGNYNYLYRLFRKSNLKPFERDISTEIYQAGSTPCNGVEGFNCYFPLQSYGFQPTNGVGYQPYRVVVLSFELLHAPATVCGPKKSTNLVKNKCVNFNFNGLTGTGVLTESNKKFLPFQQFGRDIADTTDAVRDPQTLEILDITPCSFGGVLVITPQTNTSNQVAVLYQDVNCTEVPVAIHADQLTPTWRVYNTGSNVFQTRAGCLVGFEHVNNSYECDIPVGAGICASYQTQRNSPSGAGSHHHHHHHHHH

SEQ ID NO: 4728 - protein, 715 aa, Artificial Sequence
  Description of Artificial Sequence: Synthetic polypeptide
MGILPSPGMPALLSLVSLLSVLLMGCVAETGTQCVNLTTRTQLPPAYTNSFTRGVYYPDKVFRSSVLHSTQDLFLPFFSNVTWFHAEHVSGTNGTKRFDNPVLPFNDGVYFASTEKSNIIRGWIFGTTLDSKTQSLLIVNNATNVVIKVCEFQFCNDPFLGVYYHKNNKSWMESEFRVYSSANNCTFEYHSQPFLMDLEGKQGNFKNLREFVFKNIDGYFKIYSKHTPINLVRDLPQGFSALEPLVDLPIGINITRFQTLLALHRSYLTPGDSSSGETAGAAAYYVGYLQPRTFLLKYNENGTITDAVDCALDPLSETKCTLKSFTVEKGIYQTSNFRVQPTESIVRFPNITNKCPFGEVFNATRFASVYAWNRKRISNCVADYSVLYNSASFSTFKCYGVSPTKLNDLCFTNVYADSFVIRGDEVRQIAPGQTGKIADYNYKLPDDFTGCVIAWNSNNLDSKVGGNYNYLYRLFRKSNLKPFERDISTEIYQAGSTPCNGVEGFNCYFPLQSYGFQPTNGPGQQPYRVVVLSFELLHAPATVCGPKKSTNLVKNKCVNFNFNGLTGTGVLTESNKKFLPFQQFGRDIADTTDAVRDPQTLEILDITPCSFGGVSVITPGTNTSNQVAVLYQDVNCTEVPDAIHADQLTPTWRVYSTGSNVFQTRAGCLIGAEHVNNSYECDIPIGAGICASYQTQTNSPSGAGSHHHHHHHHHH

SEQ ID NO: 4729 - protein, 715 aa, Artificial Sequence
  Description of Artificial Sequence: Synthetic polypeptide
MGILPSPGMPALLSLVSLLSVLLMGCVAETGTQCVNLTTRTQLPPAYTNSFTRGVYYPDKVFRSSVLHSTQDLFLPFFSNVTWFHAIHVSGTNGTKRFDNPVLPFNDGVYFASTEKSNIIRGWIFGTTLDSKTQSLLIVNNATNVVIKVCEFQFCNDPFLGVYYHKNNKSWMESEFRVYSSANNCTFEYVSQPFLMDLEGKQGNFKNLREFVFKNIDGYFKIYSKHTPINLVRDLPQGFSALEPLVDLPIGINITRFQTLLALHRSYLTPGDSSSGWTAGAAAYYVGYLQPRTFLLKYNENGTITDAVDCALDPLSETKCTLKSFTVEKGIYQTSNFRVQPTESIVRFPNITNLCPFGEVFNATRFASVYAWNRKRISNCVADYSVLYNSASFSTFKCYGVSPTKLNDLCFTNVYADSFVIRGDEVRQIAPGQTGKIADYNYKLPDDFTGCVIAWNSNNLDSKVGGNYNYLYRLFRKSNLKPFERDISTEIYQAGSTPCNGVEGFNCYFPLQSYGFQPTNGVGYQPYRVVVLIFELLHAPATVCGPKKSTNLVKNKCVNFNFNGLTGTGVLTESNKKFLPFQQFGRDIADTTDAVRDPQTLEILDITPCSFGGVSVITPGTNTSNQVAVLYQDVNCTEVPVAIHADQLTPTWRVYSTGSNVFQTRAGCLIGAEHVNNSYECDIPIGAGICASYQTQTNSPSGAGSHHHHHHHHHH

SEQ ID NO: 4730 - protein, 715 aa, Artificial Sequence
  Description of Artificial Sequence: Synthetic polypeptide
MGILPSPGMPALLSLVSLLSVLLMGCVAETGTQCVNLTTRTQLPPAYTNSFTRGVYYPDKVFRSSVLHSTQDLFLPFFSNVTWFHAIHVSGTNGTKRFDNPVLPFNDGVYFASTEKSNIIRGWIFGTTLDSKTQSLLIVNNATNVVIKVCEFQFCNDPFLGVYYHKNNKSWMESEFRVYSSANNCTFEYVSQPFLMDLEGKQGNFKNLREFVFKNIDGYFKIYSKHTPINLVRDLPQGFSALEPLVDLPIGINITRFQTLLALHRSYLTPGDSSSGWTAGAAAYYVGYLQPRTFLLKYNENGTITDAVDCALDPLSETKCTLKSFTVEKGIYQTSNFRVQPTESIVRFPNITNLCPFGEVFNATRFASVYAWNRKRISNCVADYSVLYNSASFSTFKCYGVSPTKLNDLCFTNVYADSFVIRGDEVRQIAPGQTGKIADYNYKLPDDFTGCVIAWNSNNLDSKVGGNYNYLYRLFRKSNLKPFERDISTECYQAGSTPCNGVEGFNCYFPLQSYGFQPTNGVGYQPYRVVVLSFELLHAPATVCGPKKSTNLVKNKCVNFNFNGLTGTGVLTESNKKFLPFQQFGRDIADTTDAVRDPQTLEILDITPCSFGGVSVITPGTNTSNQVAVLYQDVNCTEVPVAIHADQLTPTWRVYSTGSNVFQTRAGCLIGAEHVNNSYECDIPIGAGICASYQTQTNSPSGAGSHHHHHHHHHH

SEQ ID NO: 4731 - protein, 715 aa, Artificial Sequence
  Description of Artificial Sequence: Synthetic polypeptide
MGILPSPGMPALLSLVSLLSVLLMGCVAETGTQCVNLTTRTQLPPAYTNSFTRGVYYPDKVFRSSVLHSTQDLFLPFFSNVTWFHAIHVSGTNGTKRFDNPVLPFNDGVYFASTEKSNIIRGWIFGTTLDSKTQSLLIVNNATNVVIKVCEFQFCNDPFLGVYYHKNNKSWMESEFRVYSSANNCTFEYVSQPFLMDLEGKQGNFKNLREFVFKNIDGYFKIYSKHTPINLVRDLPQGFSALEPLVDLPIGINITRFQTLLALHRSYLTPGDSSSGWTAGAAAYYVGYLQPRTFLLKYNENGTITDAVDCALDPLSETKCTLKSFTVEKGIYQTSNFRVQPTESIVRFPNITNLCPFGEVFNATRFASVYAWNRKRISNCVADYSVLYNSASFSTFKCYGVSPTKLNDLCFTNVYADSFVIRGDEVRQIAPGQTGKIADYNYKLPDDFTGCVIAWNSNNLDSKVGGNYNYLYRLFRKSNLKPFERDISTEYYQAGSTPCNGVEGFNCYFPLQSYGFQPTNGVGYQPYRVVVLSFELLHAPATVCGPKKSTNLVKNKCVNFNFNGLTGTGVLTESNKKFLPFQQFGRDIADTTDAVRDPQTLEILDITPCSFGGVSVITPGTNTSNQVAVLYQDVNCTEVPVAIHADQLTPTWRVYSTGSNVFQTRAGCLIGAEHVNNSYECDIPIGAGICASYQTQTNSPSGAGSHHHHHHHHHH

SEQ ID NO: 4732 - protein, 715 aa, Artificial Sequence
  Description of Artificial Sequence: Synthetic polypeptide
MGILPSPGMPALLSLVSLLSVLLMGCVAETGTQCVNLTTRTQLPPAYTNSFTRGVYYPDKVFRSSVLHSTQDLFLPFFSNVTWFHAYHVSGTNGTKRFDNPVLPFNDGVYFASTEKSNIIRGWIFGTTLDSKTQSLLIVNNATNVVIKVCEFQFCNDPFLGVYYHKNNKSWMESEFRVYSSANNCTFEYHSQPFLMDLEGKQGNFKNLREFVFKNIDGYFKIYSKHTPINLVRDLPQGFSALEPLVDLPIGINITRFQTLLALHRSYLTPGDSSSGETAGAAAYYVGYLQPRTFLLKYNENGTITDAVDCALDPLSETKCTLKSFTVEKGIYQTSNFRVQPTESIVRFPNITNHCPFGEVFNATRFASVYAWNRKRISNCVADYSVLYNSASFSTFKCYGVSPTKLNDLCFTNVYADSFVIRGDEVRQIAPGQTGKIADYNYKLPDDFTGCVIAWNSNNLDSKVGGNYNYLYRLFRKSNLKPFERDISTEIYQAGSTPCNGVEGFNCYFPLQSYGFQPTNGPGQQPYRVVVLSFELLHAPATVCGPKKSTNLVKNKCVNFNFNGLTGTGVLTESNKKFLPFQQFGRDIADTTDAVRDPQTLEILDITPCSFGGVSVITPGTNTSNQVAVLYQDVNCTEVPDAIHADQLTPTWRVYSTGSNVFQTRAGCLIGAEHVNNSYECDIPIGAGICASYQTQTNSPSGAGSHHHHHHHHHH

SEQ ID NO: 4733 - protein, 715 aa, Artificial Sequence
  Description of Artificial Sequence: Synthetic polypeptide
MGILPSPGMPALLSLVSLLSVLLMGCVAETGTQCVNLTTRTQLPPAYTNSFTRGVYYPDKVFRSSVLHSTQDLFLPFFSNVTWFHAIHVSGTNGTKRFDNPVLPFNDGVYFASTEKSNIIRGWIFGTTLDSKTQSLLIVNNATNVVIKVCEFQFCNDPFLGVYYHKNNKSWMESEFRVYSSANNCTFEYVSQPFLMDLEGKQGNFKNLREFVFKNIDGYFKIYSKHTPINLVRDLPQGFSALEPLVDLPIGINITRFQTLLALHRSYLTPGDSSSGWTAGAAAYYVGYLQPRTFLLKYNENGTITDAVDCALDPLSETKCTLKSFTVEKGIYQTSNFRVQPTESIVRFPNITNLCPFGEVFNATRFASVYAWNRKRISNCVADYSVLYNSASFSTFKCYGVSPTKLNDLCFTNVYADSFVIRGDEVRQIAPGQTGKIADYNYKLPDDFTGCVIAWNSNNLDSKVGGNYNYLYRLFRKSNLKPFERDISTEIYQAGSTPCNGVEGFNCYFPLQSYGFQPTNGVGYQPYRVVVLSFELLHAPATVCGPKKSTNLVKNKCVNFNFNGLTGTGVLTESNKKFLPFQQFGRDIADTTDAVRDPQTLEILDITPCSFGGKSVITPGTNTSNQVAVLYQDVNCTEVPVAIHADQLTPTWRVYSTGSNVFQTRAGCLIGAEHVNNSYECDIPIGAGICASYQTQTNSPSGAGSHHHHHHHHHH

SEQ ID NO: 4734 - protein, 715 aa, Artificial Sequence
  Description of Artificial Sequence: Synthetic polypeptide
MGILPSPGMPALLSLVSLLSVLLMGCVAETGTQCVNLTTRTQLPPAYTNSFTRGIYYPDKVFRSSVLHSTQDLFLPFFSNVTWFHAIHGSGTNGTKRFDNPVLPFNDGVYSAAIEKSNIIRGWIFGTTLDSKTQSLLIVNNATNVVIKVCEFQFCNDPFLGVYYHKNNKSWMESEFRVYSSANNCTFEYVSQPFLMDLEGKQGNFKNLREYVFKNIDGYFKIYSKHTPINLVRDLPQGFSPLEPLVDLPIGINITRFLTVLALHRSYLTPGDSSSGWTAGAAAYYVGYLQPRTFLLKYNENGTITDAVDCALDPLSETKCTLKSFTVEKGIYQTSNFRVQPTESIVRFPNITNLCPFGEVFNATRFASVYAWNRKRISNCVADYSVLYNSASFSTFKCYGVSPTKLNDLCFTNVYADSFVIRGDEVRQIAPGQTGKIADYNYKLPDDFTGCVIAWNSNNLDSKVGGNYNYLYRLFRKSNLKPFERDISTEIYQAGSTPCNGVEGFNCYFPLQSYGFQPTNGVGYQPYRVVVLSFELLHAPATVCGPKKSTNLVKNKCVNFNFNGLTGTGVLTESNKKFLPFQQFGRDIADTTDAVRDPQTLEILDITPCSFGGVSVITPGTNTSNQVAVLYQDVNCTEVPVAIHADQLTPTWRVYSTGSNVFQTRAGCLIGAEHVNNSYECDIPIGAGICASYQTQTNSPSGAGSHHHHHHHHHH

SEQ ID NO: 4735 - protein, 715 aa, Artificial Sequence
  Description of Artificial Sequence: Synthetic polypeptide
MGILPSPGMPALLSLVSLLSVLLMGCVAETGTQCVNLTTRTQLPPAYTNSFTRGVYYPDKVFRSSVLHSTQDLFLPFFSNVTWFHAIHVSGTNGTKRFDNPVLPFNDGVYFASTEKSNIIRGWIFGTTLDSKTQSLLIVNNATNVVIKVCEFQFCNDPFLGVYYHKNNKSWMESEFRVYSSANNCTFEYVSQPFLMDLEGKQGNFKNLREFVFKNIDGYFKIYSKHTPINLVRDLPQGFSALEPLVDLPIGINITRFQTLLALHRSYLTPGDSSSGWTAGAAAYYVGYLQPRTFLLKYNENGTITDAVDCALDPLSETKCTLKSFTVEKGIYQTSNFRVQPTESIVRFPNITNLCPFGEVFNATRFASVYAWNRKRISNCVADYSVLYNSASFSTFKCYGVSPTKLNDLCFTNVYADSFVIRGDEVRQIAPGQTGHIADYNYKLPDDFTGCVIAWNSNNLDSKVGGNYNYLYRLFRKSNLKPFERDISTEIYQAGSTPCNGVEGFNCYFPLQSYGFQPTNGVGYQPYRVVVLSFELLHAPATVCGPKKSTNLVKNKCVNFNFNGLTGTGVLTESNKKFLPFQQFGRDIADTTDAVRDPQTLEILDITPCSFGGVSVITPGTNTSNQVAVLYQDVNCTEVPVAIHADQLTPTWRVYSTGSNVFQTRAGCLIGAEHVNNSYECDIPIGAGICASYQTQTNSPSGAGSHHHHHHHHHH

SEQ ID NO: 4736 - protein, 715 aa, Artificial Sequence
  Description of Artificial Sequence: Synthetic polypeptide
MGILPSPGMPALLSLVSLLSVLLMGCVAETGTQCVNLTTRTQLPPAYTNSFTRGVYYPDKVFRSSVLHSTQDLFLPFFSNVTWFHAIHVSGTNGTKRFDNPVLPFNDGVYFASTEKSNIIRGWIFGTTLDSKTQSLLIVNNATNVVIKVCEFQFCNDPFLGVYYHKNNKSWMESEFRVYSSANNCTFEYHSQPFLMDLEGKQGNFKNLREFVFKNIDGYFKIYSKHTPINLVRDLPQGFSALEPLVDLPIGINITRFQTLLALHRSYLTPGDSSSGETAGAAAYYVGYLQPRTFLLKYNENGTITDAVDCALDPLSETKCTLKSFTVEKGIYQTSNFRVQPTESIVRFPNITNPCPFGEVFNATRFASVYAWNRKRISNCVADYSVLYNSASFSTFKCYGVSPTKLNDLCFTNVYADSFVIRGDEVRQIAPGQTGKIADYNYKLPDDFTGCVIAWNSNNLDSKVGGNYNYLYRLFRKSNLKPFERDISTEIYQAGSTPCNGVEGFNCYFPLQSYGFQPTNGPGQQPYRVVVLSFELLHAPATVCGPKKSTNLVKNKCVNFNFNGLTGTGVLTESNKKFLPFQQFGRDIADTTDAVRDPQTLEILDITPCSFGGVSVITPGTNTSNQVAVLYQDVNCTEVPDAIHADQLTPTWRVYSTGSNVFQTRAGCLIGAEHVNNSYECDIPIGAGICASYQTQTNSPSGAGSHHHHHHHHHH

SEQ ID NO: 4737 - protein, 715 aa, Artificial Sequence
  Description of Artificial Sequence: Synthetic polypeptide
MGILPSPGMPALLSLVSLLSVLLMGCVAETGTQCVNLTTRTQLPPAYTNSFTRGVYYPDKVFRSSVLHSTQDLFLPFFSNVTWFHAIHVSGTNGTKRFDNPVLPFNDGVYFASTEKSNIIRGWIFGTTLDSKTQSLLIVNNATNVVIKVCEFQFCNDPFLGVYYHKNNKSWMESEFRVYSSANNCTFEYVSQPFLMDLEGKQGNFKNLREFVFKNIDGYFKIYSKHTPINLVRDLPQGFSALEPLVDLPIGINITRFQTLLALHRSYLTPGDSSSGWTAGAAAYYVGYLQPRTFLLKYNENGTITDAVDCALDPLSETKCTLKSFTVEKGIYQTSNFRVQPTESIVRFPNITNLCPFGEVFNATRFASVYAWNRKRISNCVADYSVLYNSASFSTFKCYGVSPTKLNDLCFTNVYADSFVIRGDEVRQIAPGQTGKIADYNYKLPDDFTGCVIAWNSNNLDSKVGGNYNYLYRLFRKSNLKPFERDISTEIYQAGLTPCNGVEGFNCYFPLQSYGFQPTNGVGYQPYRVVVLSFELLHAPATVCGPKKSTNLVKNKCVNFNFNGLTGTGVLTESNKKFLPFQQFGRDIADTTDAVRDPQTLEILDITPCSFGGVSVITPGTNTSNQVAVLYQDVNCTEVPVAIHADQLTPTWRVYSTGSNVFQTRAGCLIGAEHVNNSYECDIPIGAGICASYQTQTNSPSGAGSHHHHHHHHHH

SEQ ID NO: 4738 - protein, 715 aa, Artificial Sequence
  Description of Artificial Sequence: Synthetic polypeptide
MGILPSPGMPALLSLVSLLSVLLMGCVAETGTQCVNLTTRTQLPPAYTNSFTRGVYYPDKVFRSSVLHSTQDLFLPFFSNVTWFHAIHVSGTNGTKRFDNPVLPFNDGVYFASTEKSNIIRGWIFGTTLDSKTQSLLIVNNATNVVIKVCEFQFCNDPFLGVYYHKNNKSWMESEFRVYSSANNCTFEYVSQPFLMDLEGKQGNFKNLREFVFKNIDGYFKIYSKHTPINLVRDLPQGFSALEPLVDLPIGINITRFQTLLALHRSYLTPGDSSSGWTAGAAAYYVGYLQPRTFLLKYNENGTITDAVDCALDPLSETKCTLKSFTVEKGIYQTSNFRVQPTESIVRFPNITNLCPFGEVFNATRFASVYAWNRKRISNCVADYSVLYNSASFSTFKCYGVSPTKLNDLCFTNVYADSFVIRGDEVRQIAPGQTGKIADYNYKLPDDFTGCVIAWNSNNLDSKVGGNYNYLYRLFRKSNLKPFERDISTEIYQAGSTPCNGVEGFNCYFPLQSYGFQPTNGVGYQPYRVVVLSFELLHAPATVCGPKKSTNLVKNKCVNFNFNGLTGTGVLTESNKKFLPFQQFGRDIADTTDAVRDPQTLEILDITPCSFGGVSVITPNTNTSNQVAVLYQDVNCTEVPVAIHADQLTPTWRVYSTGSNVFQTRAGCLIGAEHVNNSYECDIPIGAGICASYQTQTNSPSGAGSHHHHHHHHHH

SEQ ID NO: 4739 - protein, 715 aa, Artificial Sequence
  Description of Artificial Sequence: Synthetic polypeptide
MGILPSPGMPALLSLVSLLSVLLMGCVAETGTQCVNLTTRTQLPPAYTNSFTRGVYYPDKVFRSSVLHSTQDLFLPFFSNVTWFHAIHVSGTNGTKRFDNPVLPFNDGVYFASTEKSNIIRGWIFGTTLDSKTQSLLIVNNATNVVIKVCEFQFCNDPFLGVYYHKNNKSWMESEFRVYSSANNCTFEYVSQPFLMDLEGKQGNFKNLREFVFKNIDGYFKIYSKHTPINLVRDLPQGFSALEPLVDLPIGINITRFQTLLALHRSYLTPGDSSSGWTAGAAAYYVGYLQPRTFLLKYNENGTITDAVDCALDPLSETKCTLKSFTVEKGIYQTSNFRVQPTESIVRFPNITNLCPFGEVFNATRFASVYAWNRKRISNCVADYSVLYNSASFSTFKCYGVSPTKLNDLCFTNVYADSFVIRGDEVRQIAPGQTGKIADYNYKLPDDFTGCVIAWNSNNLDSKVGGNYNYLYRLFRKSNLKPFERDISTEIYQAGSTPCNMVEGFNCYFPLQSYGFQPTNGVGYQPYRVVVLSFELLHAPATVCGPKKSTNLVKNKCVNFNFNGLTGTGVLTESNKKFLPFQQFGRDIADTTDAVRDPQTLEILDITPCSFGGVSVITPGTNTSNQVAVLYQDVNCTEVPVAIHADQLTPTWRVYSTGSNVFQTRAGCLIGAEHVNNSYECDIPIGAGICASYQTQTNSPSGAGSHHHHHHHHHH

SEQ ID NO: 4740 - protein, 715 aa, Artificial Sequence
  Description of Artificial Sequence: Synthetic polypeptide
MGILPSPGMPALLSLVSLLSVLLMGCVAETGTQCVNLTTRTQLPPAYTNSFTRGVYYPDKVFRSSVLHSTQDLFLPFFSNVTWFHAIHVSGTNGTKRFDNPVLPFNDGVYFASTEKSNIIRGWIFGTTLDSKTQSLLIVNNATNVVIKVCEFQFCNDPFLGVYYHKNNKSWMESEFRVYSSANNCTFEYVSQPFLMDLEGKQGNFKNLREFVFKNIDGYFKIYSKHTPINLVRDLPQGFSALEPLVDLPIGINITRFQTLLALHRSYLTPGDSSSGWTAGAAAYYVGYLQPRTFLLKYNENGTITDAVDCALDPLSETKCTLKSFTVEKGIYQTSNFRVQPTESIVRFPNITNLCPFGEVFNATRFASVYAWNRKRISNCVADYSVLYNSASFSTFKCYGVSPTKLNDLCFTNVYADSFVIRGDEVRQIAPGQTGKIADYNYKLPDDFTGCVIAWNSNNLDSKVGGNYNYLYRLFRKMNLKPFERDISTEIYQAGSTPCNGVEGFNCYFPLQSYGFQPTNGVGYQPYRVVVLSFELLHAPATVCGPKKSTNLVKNKCVNFNFNGLTGTGVLTESNKKFLPFQQFGRDIADTTDAVRDPQTLEILDITPCSFGGVSVITPGTNTSNQVAVLYQDVNCTEVPVAIHADQLTPTWRVYSTGSNVFQTRAGCLIGAEHVNNSYECDIPIGAGICASYQTQTNSPSGAGSHHHHHHHHHH

SEQ ID NO: 4741 - protein, 715 aa, Artificial Sequence
  Description of Artificial Sequence: Synthetic polypeptide
MGILPSPGMPALLSLVSLLSVLLMGCVAETGTQCVNLTTRTQLPPAYTNSFTRGVYYPDKVFRSSVLHSTQDLFLPFFSNVTWFHAIHVSGTNGTKRFDNPVLPFNDGVYFASTEKSNIIRGWIFGTTLDSKTQSLLIVNNATNVVIKVCEFQFCNDPFLGVYYHKNNKSWMESEFRVYSSANNCTFEYVSQPFLMDLEGKQGNFKNLREFVFKNIDGYFKIYSKHTPINLVRDLPQGFSALEPLVDLPIGINITRFQTLLALHRSYLTPGDSSSGWTAGIAAYYVGYLQPRTFLLKYNENGTITDAVDCALDPLSETKCTLKSFTVEKGIYQTSNFRVQPTESIVRFPNITNLCPFGEVFNATRFASVYAWNRKRISNCVADYSVLYNSASFSTFKCYGVSPTKLNDLCFTNVYADSFVIRGDEVRQIAPGQTGKIADYNYKLPDDFTGCVIAWNSNNLDSKVGGNYNYLYRLFRKSNLKPFERDISTEIYQAGSTPCNGVEGFNCYFPLQSYGFQPTNGVGYQPYRVVVLSFELLHAPATVCGPKKSTNLVKNKCVNFNFNGLTGTGVLTESNKKFLPFQQFGRDIADTTDAVRDPQTLEILDITPCSFGGVSVITPGTNTSNQVAVLYQDVNCTEVPVAIHADQLTPTWRVYSTGSNVFQTRAGCLIGAEHVNNSYECDIPIGAGICASYQTQTNSPSGAGSHHHHHHHHHH

SEQ ID NO: 4742 - protein, 715 aa, Artificial Sequence
  Description of Artificial Sequence: Synthetic polypeptide
MGILPSPGMPALLSLVSLLSVLLMGCVAETGTQCVNLTTRTQLPPAYTNSFTRGVYYPDKVFRSSVLHSTQDLFLPFFSNVTWFHAEHVSGTNGTKRFDNPVLPFNDGVYFASTEKSNIIRGWIFGTTLDSKTQSLLIVNNATNVVIKVCEFQFCNDPFLGVYYHKNNKSWMESEFRVYSSANNCTFEYVSQPFLMDLEGKQGNFKNLREFVFKNIDGYFKIYSKHTPINLVRDLPQGFSALEPLVDLPIGINITRFQTLLALHRSYLTPGDSSSGETAGAAAYYVGYLQPRTFLLKYNENGTITDAVDCALDPLSETKCTLKSFTVEKGIYQTSNFRVQPTESIVRFPNITNHCPFGEVFNATRFASVYAWNRKRISNCVADYSVLYNSASFSTFKCYGVSPTKLNDLCFTNVYADSFVIRGDEVRQIAPGQTGKIADYNYKLPDDFTGCVIAWNSNNLDSKVGGNYNYLYRLFRKSNLKPFERDISTEIYQAGSTPCNGVEGFNCYFPLQSYGFQPTNGPGQQPYRVVVLSFELLHAPATVCGPKKSTNLVKNKCVNFNFNGLTGTGVLTESNKKFLPFQQFGRDIADTTDAVRDPQTLEILDITPCSFGGVSVITPGTNTSNQVAVLYQDVNCTEVPDAIHADQLTPTWRVYSTGSNVFQTRAGCLIGAEHVNNSYECDIPIGAGICASYQTQTNSPSGAGSHHHHHHHHHH

SEQ ID NO: 4743 - protein, 715 aa, Artificial Sequence
  Description of Artificial Sequence: Synthetic polypeptide
MGILPSPGMPALLSLVSLLSVLLMGCVAETGTQCVNLTTRTQLPPAYTNSFTRGVYYPDKVFRSSVLHSTQDLFLPFFSNVTWFHAKHVSGTNGTKRFDNPVLPFNDGVYFASTEKSNIIRGWIFGTTLDSKTQSLLIVNNATNVVIKVCEFQFCNDPFLGVYYHKNNKSWMESEFRVYSSANNCTFEYHSQPFLMDLEGKQGNFKNLREFVFKNIDGYFKIYSKHTPINLVRDLPQGFSALEPLVDLPIGINITRFQTLLALHRSYLTPGDSSSGETAGAAAYYVGYLQPRTFLLKYNENGTITDAVDCALDPLSETKCTLKSFTVEKGIYQTSNFRVQPTESIVRFPNITNKCPFGEVFNATRFASVYAWNRKRISNCVADYSVLYNSASFSTFKCYGVSPTKLNDLCFTNVYADSFVIRGDEVRQIAPGQTGKIADYNYKLPDDFTGCVIAWNSNNLDSKVGGNYNYLYRLFRKSNLKPFERDISTEIYQAGSTPCNGVEGFNCYFPLQSYGFQPTNGPGQQPYRVVVLSFELLHAPATVCGPKKSTNLVKNKCVNFNFNGLTGTGVLTESNKKFLPFQQFGRDIADTTDAVRDPQTLEILDITPCSFGGVSVITPGTNTSNQVAVLYQDVNCTEVPVAIHADQLTPTWRVYSTGSNVFQTRAGCLIGAEHVNNSYECDIPIGAGICASYQTQTNSPSGAGSHHHHHHHHHH

SEQ ID NO: 4744 - protein, 715 aa, Artificial Sequence
  Description of Artificial Sequence: Synthetic polypeptide
MGILPSPGMPALLSLVSLLSVLLMGCVAETGTQCVNLTTRTQLPPAYTNSFTRGVYYPDKVFRSSVLHSTQDLFLPFFSNVTWFHAIHVSGTNGTKRFDNPVLPFNDGVYFASTEKSNIIRGWIFGTTLDSKTQSLLIVNNATNVVIKVCEFQFCNDPFLGVYYFKNNKSWMESEFRVYSSANNCTFEYVSQPFLMDLEGKQGNFKNLREFVFKNIDGYFKIYSKHTPINLVRDLPQGFSALEPLVDLPIGINITRFQTLLALHRSYLTPGDSSSGWTAGAAAYYVGYLQPRTFLLKYNENGTITDAVDCALDPLSETKCTLKSFTVEKGIYQTSNFRVQPTESIVRFPNITNLCPFGEVFNATRFASVYAWNRKRISNCVADYSVLYNSASFSTFKCYGVSPTKLNDLCFTNVYADSFVIRGDEVRQIAPGQTGKIADYNYKLPDDFTGCVIAWNSNNLDSKVGGNYNYLYRLFRKSNLKPFERDISTEIYQAGSTPCNGVEGFNCYFPLQSYGFQPTNGVGYQPYRVVVLSFELLHAPATVCGPKKSTNLVKNKCVNFNFNGLTGTGVLTESNKKFLPFQQFGRDIADTTDAVRDPQTLEILDITPCSFGGVSVITPGTNTSNQVAVLYQDVNCTEVPVAIHADQLTPTWRVYSTGSNVFQTRAGCLIGAEHVNNSYECDIPIGAGICASYQTQTNSPSGAGSHHHHHHHHHH

SEQ ID NO: 4745 - protein, 715 aa, Artificial Sequence
  Description of Artificial Sequence: Synthetic polypeptide
MGILPSPGMPALLSLVSLLSVLLMGCVAETGTQCVNLTTRTQLPPAYTNSFTRGVYYPDKVFRSSVLHSTQDLFLPFFSNVTWFHAIHVSGTNGTKRFDNPVLPFNDGVYFASTEKSNIIRGWIFGTTLDSKTQSLLIVNNATNVVIKVCEFQFCNDPFLGVYYHKNNKSWMESEFRVYSSANNCTFEYVSQPFLMDLEGKQGNFKNLREFVFKNIDGYFKIYSKHTPINLVRDLPQGFSALEPLVDLPIGINITRFQTLLALHRSYLTPGDSSSGWTAGAAAYYVGYLQPRTFLLKYNENGTITDAVDCALDPLSETKCTLKSFTVEKGIYQTSNFRVQPTESIVRFPNITNLCPFGEVFNATRFASVYAWNRKRISNCVADYSVLYNSASFSTFKCYGVSPTKLNDLCFTNVYADSFVIRGDEVRQIAPGQTGKIADYNYKLPDDFTGCVIAWNSNNLDSKVGGNYNYLYRLFRKSNLKPFERDISTEIYQAGSTPCNGVEGFNCYFPLQSYGFQPTNGVGYQPYRVVVLSFELLHAPATVCGPKKSTNLVKNKCVNFNFNGLTGTGVLTESNKKFLPFQQFSRDIADTTDAVRDPQTLEILDITPCSFGGVSVITPGTNTSNQVAVLYQDVNCTEVPVAIHADQLTPTWRVYSTGSNVFQTRAGCLIGAEHVNNSYECDIPIGAGICASYQTQTNSPSGAGSHHHHHHHHHH

SEQ ID NO: 4746 - protein, 715 aa, Artificial Sequence
  Description of Artificial Sequence: Synthetic polypeptide
MGILPSPGMPALLSLVSLLSVLLMGCVAETGTQCVNLTTRTQLPPAYTNSFTRGVYYPDKVFRSSVLHSTQDLFLPFFSNVTWFHAIHVSGTNGTKRFDNPVLPFNDGVYFASTEKSNIIRGWIFGTTLDSKTQSLLIVNNATNVVIKVCEFQFCNDPFLGVYYHKNNKSWMESEFRVYSSANNCTFEYVSQPFLMDLEGKQGNFKNLREFVFKNIDGYFKIYSKHTPINLVRDLPQGFSALEPLVDLPIGINITRFQTLLALHRSYLTPGDSSSGWTAGAAAYYVGYLQPRTFLLKYNENGTITDAVDCALDPLSETKCTLKSFTVEKGIYQTSNFRVQPTESIVRFPNITNLCPFGEVFNATRFASSYAWNRKRISNCVADYSVLYNSASFSTFKCYGVSPTKLNDLCFTNVYADRFVIRGDEVRQIAPGQTGKIADYNYKLPDDFTGCVIAWNSNNLDAKVGGNYNYLYRLFRKSNLKPFERFISTEIYQAGSTPANGVEGFNCYFPLQSYVFQPTNGVTYQPYRVVVLSFELLHAPHTVCGPKKSTNLVKNKCVNFNFNGLTGTGVLTESNKKFLPFQQFGRDIADTTDAVRDPQTLEILDITPCSFGGVSVITPGTNTSNQVAVLYQDVNCTEVPVAIHADQLTPTWRVYSTGSNVFQTRAGCLIGAEHVNNSYECDIPIGAGICASYQTQTNSPSGAGSHHHHHHHHHH

SEQ ID NO: 4747 - protein, 715 aa, Artificial Sequence
  Description of Artificial Sequence: Synthetic polypeptide
MGILPSPGMPALLSLVSLLSVLLMGCVAETGTQCVNLTTRTQLPPAYTNSFTRGVYYPDKVFRSSVLHSTQDLFLPFFSNVTWFHAIHVSGTNGTKRFDNPVLPFNDGVYFASTEKSNIIRGWIFGTTLDSKTQSLLIVNNATNVVIKVCEFQFCNDPFLGVYYHKNNKSWMESEFRVYSSANNCTFEYVSQPFLMDLEGKQGNFKNLREFVFKNIDGYFKIYSKHTPINLVRDLPQGFSALEPLVDLPIGINITRFQTLLALHRSYLTPGDSSSGWTAGAAAYYVGYLQPRTFLLKYNENGTITDAVDCALDPLSETKCTLKSFTVEKGIYQTSNFRVQPTESIVRFPNITNLCPFGEVFNATRFASVYAWNRKRISNCVADYSVLYNSASFSTFKCYGVSPTKLNDLCFTNVYADSFVIRGDEVRQIAPGQTGKIADYNYKLPDDFTGCVIAWNSNNLDSKVGGNYNYLYRLFRKSNLKPFERDISTEMYQAGSTPCNGVEGFNCYFPLQSYGFQPTNGVGYQPYRVVVLSFELLHAPATVCGPKKSTNLVKNKCVNFNFNGLTGTGVLTESNKKFLPFQQFGRDIADTTDAVRDPQTLEILDITPCSFGGVSVITPGTNTSNQVAVLYQDVNCTEVPVAIHADQLTPTWRVYSTGSNVFQTRAGCLIGAEHVNNSYECDIPIGAGICASYQTQTNSPSGAGSHHHHHHHHHH

SEQ ID NO: 4748 - protein, 715 aa, Artificial Sequence
  Description of Artificial Sequence: Synthetic polypeptide
MGILPSPGMPALLSLVSLLSVLLMGCVAETGTQCVNLTTRTQLPPAYTNSFTRGVYYPDKVFRSSVLHSTQDLFLPFFSNVTWFHAIHVSGTNGTKRFDNPVLPFNDGVYFASTEKSNIIRGWIFGTTLDSKTQSLLIVNNATNVVIKVCEFQFCNDPFLGVYYHKNNKSWMESEFRVYSSANNCTFEYVSQPFLMDLEGKQGNFKNLREFVFKNIDGYFKIYSKHTPINLVRDLPQGFSALEPLVDLPIGINITRFQTLLALHRSYLTPGDSSSGWTAGAAAYYVGYLQPRTFLLKYNENGTITDAVDCALDPLSETKCTLKSFTVEKGIYQTSNFRVQPTESIVRFPNITNLCPLGEVFNATRFASSYAWNRKRISNCVADYSVLYNSASFSTFKCYGVSPTKLNDLCFTNVYADRFVIRGDEVRQIAPGQTGKIADYNYKLPDDFTGCVIAWNSNNLDAKVGGNYNYLYRLFRKSNLKPFERFISTEIYQAGSTPANGVEGFNCYFPLQSYVFQPTNGVGYQPYRVVVLSFELLHAPHTVCGPKKSTNLVKNKCVNFNFNGLTGTGVLTESNKKFLPFQQFGRDIADTTDAVRDPQTLEILDITPCSFGGVSVITPGTNTSNQVAVLYQDVNCTEVPVAIHADQLTPTWRVYSTGSNVFQTRAGCLIGAEHVNNSYECDIPIGAGICASYQTQTNSPSGAGSHHHHHHHHHH

SEQ ID NO: 4749 - protein, 715 aa, Artificial Sequence
  Description of Artificial Sequence: Synthetic polypeptide
MGILPSPGMPALLSLVSLLSVLLMGCVAETGTQCVNLTTRTQLPPAYTNSFTRGVYYPDKVFRSSVLHSTQDLFLPFFSNVTWFHAKHVSGTNGTKRFDNPVLPFNDGVYFASTEKSNIIRGWIFGTTLDSKTQSLLIVNNATNVVIKVCEFQFCNDPFLGVYYHKNNKSWMESEFRVYSSANNCTFEYHSQPFLMDLEGKQGNFKNLREFVFKNIDGYFKIYSKHTPINLVRDLPQGFSALEPLVDLPIGINITRFQTLLALHRSYLTPGDSSSGETAGAAAYYVGYLQPRTFLLKYNENGTITDAVDCALDPLSETKCTLKSFTVEKGIYQTSNFRVQPTESIVRFPNITNPCPFGEVFNATRFASVYAWNRKRISNCVADYSVLYNSASFSTFKCYGVSPTKLNDLCFTNVYADSFVIRGDEVRQIAPGQTGKIADYNYKLPDDFTGCVIAWNSNNLDSKVGGNYNYLYRLFRKSNLKPFERDISTEIYQAGSTPCNGVEGFNCYFPLQSYGFQPTNGVGQQPYRVVVLSFELLHAPATVCGPKKSTNLVKNKCVNFNFNGLTGTGVLTESNKKFLPFQQFGRDIADTTDAVRDPQTLEILDITPCSFGGVSVITPGTNTSNQVAVLYQDVNCTEVPDAIHADQLTPTWRVYSTGSNVFQTRAGCLIGAEHVNNSYECDIPIGAGICASYQTQTNSPSGAGSHHHHHHHHHH

SEQ ID NO: 4750 - protein, 715 aa, Artificial Sequence
  Description of Artificial Sequence: Synthetic polypeptide
MGILPSPGMPALLSLVSLLSVLLMGCVAETGTQCVNLTTRTQLPPAYTNSFTRGVYYPDKVFRSSVLHSTQDLFLPFFSNVTWFHAIHVSGTNGTKRFDNPVLPFNDGVYFASTEKSNIIRGWIFGTTLDSKTQSLLIVNNATNVVIKVCEFQFCNDPFLGVYYHKNNKSWMESEFRVYSSANNCTFEYVSQPFLMQLEGKQGNFKNLREFVFKNIDGYFKIYSKHTPINLVRDLPQGFSALEPLVDLPIGINITRFQTLLALHRSYLTPGDSSSGWTAGAAAYYVGYLQPRTFLLKYNENGTITDAVDCALDPLSETKCTLKSFTVEKGIYQTSNFRVQPTESIVRFPNITNLCPFGEVFNATRFASVYAWNRKRISNCVADYSVLYNSASFSTFKCYGVSPTKLNDLCFTNVYADSFVIRGDEVRQIAPGQTGKIADYNYKLPDDFTGCVIAWNSNNLDSKVGGNYNYLYRLFRKSNLKPFERDISTEIYQAGSTPCNGVEGFNCYFPLQSYGFQPTNGVGYQPYRVVVLSFELLHAPATVCGPKKSTNLVKNKCVNFNFNGLTGTGVLTESNKKFLPFQQFGRDIADTTDAVRDPQTLEILDITPCSFGGVSVITPGTNTSNQVAVLYQDVNCTEVPVAIHADQLTPTWRVYSTGSNVFQTRAGCLIGAEHVNNSYECDIPIGAGICASYQTQTNSPSGAGSHHHHHHHHHH

SEQ ID NO: 4751 - protein, 715 aa, Artificial Sequence
  Description of Artificial Sequence: Synthetic polypeptide
MGILPSPGMPALLSLVSLLSVLLMGCVAETGTQCVNLTTRTQLPPAYTNSFTRGVYYPDKVFRSSVLHSTQDLFLPFFSNVTWFHAIHVSGTNGTKRFDNPVLPFNDGVYFASTEKSNIIRGWIFGTTLDSKTQSLLIVNNATNVVIKVCEFQFCNDPFLGVYYHKNNKSWMESEFRVYSSANNCTFEYVSQPFLMDLEGKQGNFKNLREFVFKNIDGYFKIYSKHTPINLVRDLPQGFSALEPLVDLPIGINITRFQTLLALHRSYLTPGDSSSGWTAGAAAYYVGYLQPRTFLLKYNENGTITDAVDCALDPLSETKCTLKSFTVEKGIYQTSNFRVQPTESIVRFPNITNLCPFGEVFNATRFASVYAWNRKRISNCVADYSVLYNSASFSTFKCYGVSPTKLNDLCFTNVYADSFVIRGDEVRQIAPGQTGKIADYNYKLPDDFTGCVIAWNSNNLDSKVGGNYNYLYRLFRKSNLKPFERDISTEIYQAGSTPCNGVEGFNCYFPLQSYGFQPTNGVGYQPYRVVVLSFELLHAPATVCGPKKSTNLVKNKCVNFNFNGLTGTGVLTESNKKFLPFQQFARDIADTTDAVRDPQTLEILDITPCSFGGVSVITPGTNTSNQVAVLYQDVNCTEVPVAIHADQLTPTWRVYSTGSNVFQTRAGCLIGAEHVNNSYECDIPIGAGICASYQTQTNSPSGAGSHHHHHHHHHH

SEQ ID NO: 4752 - protein, 715 aa, Artificial Sequence
  Description of Artificial Sequence: Synthetic polypeptide
MGILPSPGMPALLSLVSLLSVLLMGCVAETGTQCVNLTTRTQLPPAYTNSFTRGVYYPDKVFRSSVLHSTQDLFLPFFSNVTWFHAKHVSGTNGTKRFDNPVLPFNDGVYFASTEKSNIIRGWIFGTTLDSKTQSLLIVNNATNVVIKVCEFQFCNDPFLGVYYHKNNKSWMESEFRVYSSANNCTFEYHSQPFLMDLEGKQGNFKNLREFVFKNIDGYFKIYSKHTPINLVRDLPQGFSALEPLVDLPIGINITRFQTLLALHRSYLTPGDSSSGETAGAAAYYVGYLQPRTFLLKYNENGTITDAVDCALDPLSETKCTLKSFTVEKGIYQTSNFRVQPTESIVRFPNITNPCPFGEVFNATRFASVYAWNRKRISNCVADYSVLYNSASFSTFKCYGVSPTKLNDLCFTNVYADSFVIRGDEVRQIAPGQTGKIADYNYKLPDDFTGCVIAWNSNNLDSKVGGNYNYLYRLFRKSNLKPFERDISTEIYQAGSTPCNGVEGFNCYFPLQSYGFQPTNGPGQQPYRVVVLSFELLHAPATVCGPKKSTNLVKNKCVNFNFNGLTGTGVLTESNKKFLPFQQFGRDIADTTDAVRDPQTLEILDITPCSFGGVSVITPGTNTSNQVAVLYQDVNCTEVPDAIHADQLTPTWRVYSTGSNVFQTRAGCLIGAEHVNNSYECDIPIGAGICASYQTQTNSPSGAGSHHHHHHHHHH

SEQ ID NO: 4753 - protein, 715 aa, Artificial Sequence
  Description of Artificial Sequence: Synthetic polypeptide
MGILPSPGMPALLSLVSLLSVLLMGCVAETGTQCVNLTTRTQLPPAYTNSFTRGVYYPDKVFRSSVLHSTQDLFLPFFSNVTWFHAIHVSGTNGTKRFDNPVLPFNDGVYFASTEKSNIIRGWIFGTTLDSKTQSLLIVNNATNVVIKVCEFQFCNDPFLGVYYHKNNKSWMESEFRVYSSANNCTFEYVSQPFLMDLEGKQGNFKNLREFVFKNIDGYFKIYSKHTPINLVRDLPQGFSALEPLVDLPIGINITRFQTLLALHRSYLTPGDSSSGWTAGAAAYYVGYLQPRTFLLKYNENGTITDAVDCALDPLSETKCTLKSFTVEKGIYQTSNFRVQPTESIVRYPNITNLCPFGEVFNATRFASVYAWNRKRISNCVADYSVLYNSASFSTFKCYGVSPTKLNDLCFTNVYADSFVIRGDEVRQIAPGQTGKIADYNYKLPDDFTGCVIAWNSNNLDSKVGGNYNYLYRLFRKSNLKPFERDISTEIYQAGSTPCNGVEGFNCYFPLQSYGFQPTNGVGYQPYRVVVLSFELLHAPATVCGPKKSTNLVKNKCVNFNFNGLTGTGVLTESNKKFLPFQQFGRDIADTTDAVRDPQTLEILDITPCSFGGVSVITPGTNTSNQVAVLYQDVNCTEVPVAIHADQLTPTWRVYSTGSNVFQTRAGCLIGAEHVNNSYECDIPIGAGICASYQTQTNSPSGAGSHHHHHHHHHH

SEQ ID NO: 4754 - protein, 715 aa, Artificial Sequence
  Description of Artificial Sequence: Synthetic polypeptide
MGILPSPGMPALLSLVSLLSVLLMGCVAETGTQCVNLTTRTQLPPAYTNSFTRGVYYPDKVFRSSVLHSTQDLFLPFFSNVTWFHAIHVSGTNGTKRFDNPVLPFNDGVYFASTEKSNIIRGWIFGTTLDSKTQSLLIVNNATNVVIKVCEFQFCNDPFLGVYYHKNNKSWMESEFRVYSSANNCTFEYVSQPFLMDLEGKQGNFKWLREFVFKNIDGYFKIYSKHTPINLVRDLPQGFSALEPLVDLPIGINITRFQTLLALHRSYLTPGDSSSGWTAGAAAYYVGYLQPRTFLLKYNENGTITDAVDCALDPLSETKCTLKSFTVEKGIYQTSNFRVQPTESIVRFPNITNLCPFGEVFNATRFASVYAWNRKRISNCVADYSVLYNSASFSTFKCYGVSPTKLNDLCFTNVYADSFVIRGDEVRQIAPGQTGKIADYNYKLPDDFTGCVIAWNSNNLDSKVGGNYNYLYRLFRKSNLKPFERDISTEIYQAGSTPCNGVEGFNCYFPLQSYGFQPTNGVGYQPYRVVVLSFELLHAPATVCGPKKSTNLVKNKCVNFNFNGLTGTGVLTESNKKFLPFQQFGRDIADTTDAVRDPQTLEILDITPCSFGGVSVITPGTNTSNQVAVLYQDVNCTEVPVAIHADQLTPTWRVYSTGSNVFQTRAGCLIGAEHVNNSYECDIPIGAGICASYQTQTNSPSGAGSHHHHHHHHHH

SEQ ID NO: 4755 - protein, 715 aa, Artificial Sequence
  Description of Artificial Sequence: Synthetic polypeptide
MGILPSPGMPALLSLVSLLSVLLMGCVAETGTQCVNLTTRTQLPPAYTNSFTRGVYYPDKVFRSSVLHSTQDLFLPFFSNVTWFHAIHVSGTNGTKRFDNPVLPFNDGVYFASTEKSNIIRGWIFGTTLDSKTQSLLIVNNATNVVIKVCEFQFCNDPFLGVYYHKNNKSWMESEFRVYSSANNCTFEYVSQPFLMDLEGKQGNFKNLREFVFKNIDGYFKIYSKHTPINLVRDLPQGFSALEPLVDLPIGINITRFQTLLALHRSYLTPGDSSSGWTAGAAAYYVGYLQPRTFLLKYNENGTITDAVDCALDPLSETKCTLKSFTVEKGIYQTSNFRVQPTESIVRFPNITNLCPFGEVFNATRFASVYAWNRKRISNCVADYSVLYNSASFSTFKCYGVSPTKLNDLCFTNVYADSFVIRGDEVRQIAPGQTGAIADYNYKLPDDFTGCVIAWNSNNLDSKVGGNYNYLYRLFRKSNLKPFERDISTEIYQAGSTPCNGVEGFNCYFPLQSYGFQPTNGVGYQPYRVVVLSFELLHAPATVCGPKKSTNLVKNKCVNFNFNGLTGTGVLTESNKKFLPFQQFGRDIADTTDAVRDPQTLEILDITPCSFGGVSVITPGTNTSNQVAVLYQDVNCTEVPVAIHADQLTPTWRVYSTGSNVFQTRAGCLIGAEHVNNSYECDIPIGAGICASYQTQTNSPSGAGSHHHHHHHHHH

SEQ ID NO: 4756 - protein, 715 aa, Artificial Sequence
  Description of Artificial Sequence: Synthetic polypeptide
MGILPSPGMPALLSLVSLLSVLLMGCVAETGTQCVNLTTRTQLPPAYTNSFTRGVYYPDKVFRSSVLHSTQDLFLPFFSNVTWFHAIHVSGTNGTKRFDNPVLPFNDGVYFASTEKSNIIRGWIFGTTLDSKTQSLLIVNNATNVVIKVCEFQFCNDPFLGVYYHKNNKSWMESEFRVYSSANNCTFEYVSQPFLMDLEGKQGNFKNLREFVFKNIDGYFKIYSKHTPINLVRDLPQGFSALEPLVDLPIGINITRFQTLLALHRSYLTPGDSSSGWTAGAAAYYVGYLQPRTFLLKYNENGTITDAVDCALDPLSETKCTLKSFTVEKGIYQTSNFRVQPTESIVRFPNITNLCPFGEVFNATRFASVYAWNRKRISNCVADYSVLYNSASFSTFKCYGVSPTKLNDLCFTNVYADSFVIRGDEVRQIAPGQTGKIADYNYKLPDDFTGCVIAWNSNNLDSKVGGNYNYLYRLFRKSNLKPFERDISTEIYQAGSTPCNGVEGFNCYFPLQSYGFQPTNGVGYQPYRVVVLSFELLHAPATVCGPKKSTNLVKNKCVNFNFNGLTGTGVLTESNKKFLPFQQFGRDIADTTRAVRDPQTLEILDITPCSFGGVSVITPGTNTSNQVAVLYQDVNCTEVPVAIHADQLTPTWRVYSTGSNVFQTRAGCLIGAEHVNNSYECDIPIGAGICASYQTQTNSPSGAGSHHHHHHHHHH

SEQ ID NO: 4757 - protein, 715 aa, Artificial Sequence
  Description of Artificial Sequence: Synthetic polypeptide
MGILPSPGMPALLSLVSLLSVLLMGCVAETGTQCVNLTTRTQLPPAYTNSFTRGVYYPDKVFRSSVLHSTQDLFLPFFSNVTWFHAKHVSGTNGTKRFDNPVLPFNDGVYFASTEKSNIIRGWIFGTTLDSKTQSLLIVNNATNVVIKVCEFQFCNDPFLGVYYHKNNKSWMESEFRVYSSANNCTFEYHSQPFLMDLEGKQGNFKNLREFVFKNIDGYFKIYSKHTPINLVRDLPQGFSALEPLVDLPIGINITRFQTLLALHRSYLTPGDSSSGETAGAAAYYVGYLQPRTFLLKYNENGTITDAVDCALDPLSETKCTLKSFTVEKGIYQTSNFRVQPTESIVRFPNITNHCPFGEVFNATRFASVYAWNRKRISNCVADYSVLYNSASFSTFKCYGVSPTKLNDLCFTNVYADSFVIRGDEVRQIAPGQTGKIADYNYKLPDDFTGCVIAWNSNNLDSKVGGNYNYLYRLFRKSNLKPFERDISTEIYQAGSTPCNGVEGFNCYFPLQSYGFQPTNGPGQQPYRVVVLSFELLHAPATVCGPKKSTNLVKNKCVNFNFNGLTGTGVLTESNKKFLPFQQFGRDIADTTDAVRDPQTLEILDITPCSFGGVSVITPGTNTSNQVAVLYQDVNCTEVPVAIHADQLTPTWRVYSTGSNVFQTRAGCLIGAEHVNNSYECDIPIGAGICASYQTQTNSPSGAGSHHHHHHHHHH

SEQ ID NO: 4758 - protein, 715 aa, Artificial Sequence
  Description of Artificial Sequence: Synthetic polypeptide
MGILPSPGMPALLSLVSLLSVLLMGCVAETGTQCVNLTTRTQLPPAYTNSFTRGVYYPDKVFRSSVLHSTQDLFLPFFSNVTWFHAIHVSGTNGTKRFDNPVLPFNDGVYFASTEKSNIIRGWIFGTTLDSKTQSLLIVNNATNVVIKVCEFQFCNDPFLGVYYHKNNKSWMESEFRVYSSANNCTFEYVSQPFLMDLEGKQGNFKNLREFVFKNIDGYFKIYSKHTPINLVRDLPQGFSALEPLVDLPIGINITRFQTLLALHRSYLTPGDSSSGWTAGAAAYYVGYLQPRTFLLKYNENGTITDAVDCALDPLSETKCTLKSFTVEKGIYQTSNFRVQPTESIVRFPNITNLCPFGEVFNATRFASVYAWNRKRISNCVADYSVLYNSASFSTFKCYGVSPTKLNDLCFTNVYADSFVIRGDEVRQIAPGQTGKIADYNYKLPDDFTGCVIAWNSNNLDSKVGGNYNYLYRLFRKSNLKPFERDISTEIYQAGSTPCNGVEGFNCYFPLQSYGFQPTNGVGYQPYRVVVLSFELLHAPATVCGPKKSTNLVKNKCVNFNFNGLTGTGVLTESNKKFLPFQQFGRDIADTTDAVRDPQTLEILDIVPCSFGGVSVITPGTNTSNQVAVLYQDVNCTEVPVAIHADQLTPTWRVYSTGSNVFQTRAGCLIGAEHVNNSYECDIPIGAGICASYQTQTNSPSGAGSHHHHHHHHHH

SEQ ID NO: 4759 - protein, 715 aa, Artificial Sequence
  Description of Artificial Sequence: Synthetic polypeptide
MGILPSPGMPALLSLVSLLSVLLMGCVAETGTQCVNLTTRTQLPPAYTNSFTRGVYYPDKVFRSSVLHSTQDLFLPFFSNVTWFHAIHVSGTNGTKRFDNPVLPFNDGVYFASTEKSNIIRGWIFGTTLDSKTQSLLIVNNATNVVIKVCEFQFCNDPFLGVYYHKNNKSWMESEFRVYSSANNCTFEYVSQPFLMDLEGKQGNFKNLREFVFKNIDGYFKIYSKHTPINLVRDLPQGFSALEPLVDLPIGINITRFQTLLALHRSYLTPGDSSSGWTAGAAAYYVGYLQPRTFLLKYNENGTITDAVDCALDPLSETKCTLKSFTVEKGIYQTSNFRVQPTESIVRFPNITNLCPFGEVFNATRFASVYAWNRKRISNCVADYSVLYNSASFSTFKCYGVSPTKLNDLCFTNVYADSFVIRGDEVRQIAPGQTGKIADYNYKLPDDFTGCVIAWNSNNLDSKVGGNYNYLYRLFRKSNLKPFERDISTEFYQAGSTPCNGVEGFNCYFPLQSYGFQPTNGVGYQPYRVVVLSFELLHAPATVCGPKKSTNLVKNKCVNFNFNGLTGTGVLTESNKKFLPFQQFGRDIADTTDAVRDPQTLEILDITPCSFGGVSVITPGTNTSNQVAVLYQDVNCTEVPVAIHADQLTPTWRVYSTGSNVFQTRAGCLIGAEHVNNSYECDIPIGAGICASYQTQTNSPSGAGSHHHHHHHHHH

SEQ ID NO: 4760 - protein, 715 aa, Artificial Sequence
  Description of Artificial Sequence: Synthetic polypeptide
MGILPSPGMPALLSLVSLLSVLLMGCVAETGTQCVNLTTRTQLPPAYTNSFTRGVYYPDKVFRSSVLHSTQDLFLPFFSNVTWFHAIHVSGTNGTKRFDNPVLPFNDGVYFASTEKSNIIRGWIFGTTLDSKTQSLLIVNNATNVVIKVCEFQFCNDPFLGVYYHKNNKSWMESEFRVYSSANNCTFEYVSQPFLMDLEGKQGNFKNLREFVFKNIDGYFKIYSKHTPINLVRDLPQGFSALEPLVDLPIGINITRFQTLLALHRSYLTPGDSSSGWTAGAAAYYVGYLQPRTFLLKYNENGTITDAVDCALDPLSETKCTLKSFTVEKGIYQTSNFRVQPTESIVRFPNITNLCPFGEVFNATRFASVYAWNRKRISNCVADYSVLYNSASFSTFKCYGVSPTKLNDLCFTNVYADSFVIRGDEVRQIAPGQTGKIADYNYKLPDDFTGCVIAWNSNNLDSKVGGNYNYLYRLFRKSNLKPFERDISTEIYQAGSTPCNEVEGFNCYFPLQSYGFQPTNGVGYQPYRVVVLSFELLHAPATVCGPKKSTNLVKNKCVNFNFNGLTGTGVLTESNKKFLPFQQFGRDIADTTDAVRDPQTLEILDITPCSFGGVSVITPGTNTSNQVAVLYQDVNCTEVPVAIHADQLTPTWRVYSTGSNVFQTRAGCLIGAEHVNNSYECDIPIGAGICASYQTQTNSPSGAGSHHHHHHHHHH

SEQ ID NO: 4761 - protein, 715 aa, Artificial Sequence
  Description of Artificial Sequence: Synthetic polypeptide
MGILPSPGMPALLSLVSLLSVLLMGCVAETGTQCVNLTTRTQLPPAYTNSFTRGVYYPDKVFRSSVLHSTQDLFLPFFSNVTWFHAIHVSGTNGTKRFDNPVLPFNDGVYFASTEKSNIIRGWIFGTTLDSKTQSLLIVNNATNVVIKVCEFQFCNDPFLGVYYHKNNKSWMESEFRVYSSANNCTFEYVSQPFLMDLEGKQGNFKNLREFVFKNIDGYFKIYSKHTPINLVRDLPQGFSALEPLVDLPIGINITRFQTLLALHRSYLTPGDSSSGWTAGAAAYYVGYLQPRTFLLKYNENGTITDAVDCALDPLSETKCTLKSFTVEKGIYQTSNFRVQPTESIVRFPNITNLCPFGEVFNATRFASVYAWNRKRISNCVADYSVLYNSASFSTFKCYGVSPTKLNDLCFTNVYADSFVIRGDEVRQIAPGQTGPIADYNYKLPDDFTGCVIAWNSNNLDSKVGGNYNYLYRLFRKSNLKPFERDISTEIYQAGSTPCNGVEGFNCYFPLQSYGFQPTNGVGYQPYRVVVLSFELLHAPATVCGPKKSTNLVKNKCVNFNFNGLTGTGVLTESNKKFLPFQQFGRDIADTTDAVRDPQTLEILDITPCSFGGVSVITPGTNTSNQVAVLYQDVNCTEVPVAIHADQLTPTWRVYSTGSNVFQTRAGCLIGAEHVNNSYECDIPIGAGICASYQTQTNSPSGAGSHHHHHHHHHH

SEQ ID NO: 4762 - protein, 715 aa, Artificial Sequence
  Description of Artificial Sequence: Synthetic polypeptide
MGILPSPGMPALLSLVSLLSVLLMGCVAETGTQCVNLTTRTQLPPAYTNSFTRGVYYPDKVFRSSVLHSTQDLFLPFFSNVTWFHAIHVSGTNGTKRFDNPVLPFNDGVYFASTEKSNIIRGWIFGTTLDSKTQSLLIVNNATNVVIKVCEFQFCNDPFLGVYYHKNNKSWMESEFRVYSSANNCTFEYVSQPFLMDLEGKQGNFKNLREFVFKNIDGYFKIYSKHTPINLVRDLPQGFSALEPLVDLPIGINITRFQTLLALHRSYLTPGDSSSGWTAGAAAYYVGYLQPRTFLLKYNENGTITDAVDCALDPLSETKCTLKSFTVEKGIYQTSNFRVQPTESIVRFPNITNLCPFGEVFNATRFASVYAWNRKRISNCVADYSVLYNSASFSTFKCYGVSPTKLNDLCFTNVYADSFVIRGDEVRQIAPGQTGKIADYNYKLPDDFTGCVIAWNSNNLDSKVGGNYNYLYRLFRKSNLKPFERDISTEIYQAGSTPCNGVEGFNCYFPLQSYGFQPTNGVGYQPYRVVVLSFELLHAPATVCGPKKSTNLVKNKCVNFNFNGLTGTGVLTESNRKFLPFQQFGRDIADTTDAVRDPQTLEILDITPCSFGGVSVITPGTNTSNQVAVLYQDVNCTEVPVAIHADQLTPTWRVYSTGSNVFQTRAGCLIGAEHVNNSYECDIPIGAGICASYQTQTNSPSGAGSHHHHHHHHHH

SEQ ID NO: 4763 - protein, 715 aa, Artificial Sequence
  Description of Artificial Sequence: Synthetic polypeptide
MGILPSPGMPALLSLVSLLSVLLMGCVAETGTQCVNLTTRTQLPPAYTNSFTRGVYYPDKVFRSSVLHSTQDLFLPFFSNVTWFHAIHVSGTNGTKRFDNPVLPFNDGVYFASTEKSNIIRGWIFGTTLDSKTQSLLIVNNATNVVIKVCEFQFCNDPFLGVYYHKNNKSWMESEFRVYSSANNCTFEYVSQPFLMDLEGKQGNFKNLREFVFKNIDGYFKIYSKHTPINLWRDLPQGFSALEPLVDLPIGINITRFQTLLALHRSYLTPGDSSSGWTAGAAAYYVGYLQPRTFLLKYNENGTITDAVDCALDPLSETKCTLKSFTVEKGIYQTSNFRVQPTESIVRFPNITNLCPFGEVFNATRFASVYAWNRKRISNCVADYSVLYNSASFSTFKCYGVSPTKLNDLCFTNVYADSFVIRGDEVRQIAPGQTGKIADYNYKLPDDFTGCVIAWNSNNLDSKVGGNYNYLYRLFRKSNLKPFERDISTEIYQAGSTPCNGVEGFNCYFPLQSYGFQPTNGVGYQPYRVVVLSFELLHAPATVCGPKKSTNLVKNKCVNFNFNGLTGTGVLTESNKKFLPFQQFGRDIADTTDAVRDPQTLEILDITPCSFGGVSVITPGTNTSNQVAVLYQDVNCTEVPVAIHADQLTPTWRVYSTGSNVFQTRAGCLIGAEHVNNSYECDIPIGAGICASYQTQTNSPSGAGSHHHHHHHHHH

SEQ ID NO: 4764 - protein, 715 aa, Artificial Sequence
  Description of Artificial Sequence: Synthetic polypeptide
MGILPSPGMPALLSLVSLLSVLLMGCVAETGTQCVNLTTRTQLPPAYTNSFTRGVYYPDKVFRSSVLHSTQDLFLPFFSNVTWFHAIHVSGTNGTKRFDNPVLPFNDGVYFASTEKSNIIRGWIFGTTLDSKTQSLLIVNNATNVVIIVCEFQFCNDPFLGVYYHKNNKSWMESEFRVYSSANNCTFEYVSQPFLMDLEGKQGNFKNLREFVFKNIDGYFKIYSKHTPINLVRDLPQGFSALEPLVDLPIGINITRFQTLLALHRSYLTPGDSSSGWTAGAAAYYVGYLQPRTFLLKYNENGTITDAVDCALDPLSETKCTLKSFTVEKGIYQTSNFRVQPTESIVRFPNITNLCPFGEVFNATRFASVYAWNRKRISNCVADYSVLYNSASFSTFKCYGVSPTKLNDLCFTNVYADSFVIRGDEVRQIAPGQTGKIADYNYKLPDDFTGCVIAWNSNNLDSKVGGNYNYLYRLFRKSNLKPFERDISTEIYQAGSTPCNGVEGFNCYFPLQSYGFQPTNGVGYQPYRVVVLSFELLHAPATVCGPKKSTNLVKNKCVNFNFNGLTGTGVLTESNKKFLPFQQFGRDIADTTDAVRDPQTLEILDITPCSFGGVSVITPGTNTSNQVAVLYQDVNCTEVPVAIHADQLTPTWRVYSTGSNVFQTRAGCLIGAEHVNNSYECDIPIGAGICASYQTQTNSPSGAGSHHHHHHHHHH

SEQ ID NO: 4765 - protein, 715 aa, Artificial Sequence
  Description of Artificial Sequence: Synthetic polypeptide
MGILPSPGMPALLSLVSLLSVLLMGCVAETGTQCVNLTTRTQLPPAYTNSFTRGVYYPDKVFRSSVLHSTQDLFLPFFSNVTWFHAIHVSGTNGTKRFDNPVLPFNDGVYFASTEKSNIIRGWIFGTTLDSKTQSLLIVNNATNVVIKVCEFQFCNDPFLGVYYHKNNKSWMESEFRVYSSANNCTFEYVSQPFLMDLEGKQGNFKNLREFVFKNIDGYFKIYSKHTPINLVRDLPQGFSALEPLVDLPIGINITRFQTLLALHRSYLTPGDSSSGWTAGAAAYYVGYLQPRTFLLKYNENGTITDAVDCALDPLSETKCTLKSFTVEKGIYQTSNFRVQPTESIVRFPNITNLCPFGEVFNATRFASSYAWNRKRISNCVADYSVLYNSASFSTFKCYGVSPTKLNDLCFTNVYADRFVIRGDEVRQIAPGQTGKIADYNYKLPDDFTGCVIAWNSNNLDAKVGGNYNYLYRLFRKSNLKPFERFISTEIYQAGSTPSNGVEGFNCYFPLQSYGFQPTNGVGYQPYRVVVLSFELLHAPHTVCGPKKSTNLVKNKCVNFNFNGLTGTGVLTESNKKFLPFQQFGRDIADTTDAVRDPQTLEILDITPCSFGGVSVITPGTNTSNQVAVLYQDVNCTEVPVAIHADQLTPTWRVYSTGSNVFQTRAGCLIGAEHVNNSYECDIPIGAGICASYQTQTNSPSGAGSHHHHHHHHHH

SEQ ID NO: 4766 - protein, 715 aa, Artificial Sequence
  Description of Artificial Sequence: Synthetic polypeptide
MGILPSPGMPALLSLVSLLSVLLMGCVAETGTQCVNLTTRTQLPPAYTNSFTRGVYYPDKVFRSSVLHSTQDLFLPFFSNVTWFHAIHVSGTNGTKRFDNPVLPFNDGVYFASTEKSNIIRGWIFGTTLDSKTQSLLIVNNATNVVIKVCEFQFCNDPFLGVYYHKNNKSWMESEFRVYSSANNCTFEYVSQPFLMDLEGKQGNFKNLREFVFKNIDGYFKIYSKHTPINLVRDLPQGFSALEPLVDLPIGINITRFQTLLALHRSYLTPGDSSSGWTAGAAAYYVGYLQPRTFLLKYNENGTITDAVDCALDPLSETKCTLKSFTVEKGIYQTSNFRVQPTESIVRFPNITNLCPFGEVFNATRFASVYAWNRKRISNCVADYSVLYNSASFSTFKCYGVSPTKLNDLCFTNVYADSFVIRGDEVRQIAPGQTGKIADYNYKLPDDFTGCVIAWNSNNLDSKVGGNYNYLYRLFRKSNLKPFERDISTEIYQAGSTPCNGVEGFNCYFPLQSYGFQPTNGVGYQPYRVVVLSFELLHAPATVCGPKKSTNLVKNKCVNFNFNGLTGTGVLTESNKKFLPFQQFGRDIADTTDAVRDPQTLEILDITPCSKGGVSVITPGTNTSNQVAVLYQDVNCTEVPVAIHADQLTPTWRVYSTGSNVFQTRAGCLIGAEHVNNSYECDIPIGAGICASYQTQTNSPSGAGSHHHHHHHHHH

SEQ ID NO: 4767 - protein, 715 aa, Artificial Sequence
  Description of Artificial Sequence: Synthetic polypeptide
MGILPSPGMPALLSLVSLLSVLLMGCVAETGTQCVNLTTRTQLPPAYTNSFTRGVYYPDKVFRSSVLHSTQDLFLPFFSNVTWFHAYHVSGTNGTKRFDNPVLPFNDGVYFASTEKSNIIRGWIFGTTLDSKTQSLLIVNNATNVVIKVCEFQFCNDPFLGVYYHKNNKSWMESEFRVYSSANNCTFEYHSQPFLMDLEGKQGNFKNLREFVFKNIDGYFKIYSKHTPINLVRDLPQGFSALEPLVDLPIGINITRFQTLLALHRSYLTPGDSSSGETAGAAAYYVGYLQPRTFLLKYNENGTITDAVDCALDPLSETKCTLKSFTVEKGIYQTSNFRVQPTESIVRFPNITNPCPFGEVFNATRFASVYAWNRKRISNCVADYSVLYNSASFSTFKCYGVSPTKLNDLCFTNVYADSFVIRGDEVRQIAPGQTGKIADYNYKLPDDFTGCVIAWNSNNLDSKVGGNYNYLYRLFRKSNLKPFERDISTEIYQAGSTPCNGVEGFNCYFPLQSYGFQPTNGPGQQPYRVVVLSFELLHAPATVCGPKKSTNLVKNKCVNFNFNGLTGTGVLTESNKKFLPFQQFGRDIADTTDAVRDPQTLEILDITPCSFGGVSVITPGTNTSNQVAVLYQDVNCTEVPVAIHADQLTPTWRVYSTGSNVFQTRAGCLIGAEHVNNSYECDIPIGAGICASYQTQTNSPSGAGSHHHHHHHHHH

SEQ ID NO: 4768 - protein, 715 aa, Artificial Sequence
  Description of Artificial Sequence: Synthetic polypeptide
MGILPSPGMPALLSLVSLLSVLLMGCVAETGTQCVNLTTRTQLPPAYTNSFTRGVYYPDKVFRSSVLHSTQDLFLPFFSNVTWFHAIHVSGTNGTKRFDNPVLPFNDGVYFASTEKSNIIRGWIFGNTLDSKTQSLLIVNNATNVVIKVCEFQFCNDPFLGVYYHKNNKSWMESEFRVYSSANNCTFEYVSQPFLMDLEGKQGNFKNLREFVFKNIDGYFKIYSKHTPINLVRDLPQGFSALEPLVDLPIGINITRFQTLLALHRSYLTPGDSSSGWTAGAAAYYVGYLQPRTFLLKYNENGTITDAVDCALDPLSETKCTLKSFTVEKGIYQTSNFRVQPTESIVRFPNITNLCPFGEVFNATRFASVYAWNRKRISNCVADYSVLYNSASFSTFKCYGVSPTKLNDLCFTNVYADSFVIRGDEVRQIAPGQTGKIADYNYKLPDDFTGCVIAWNSNNLDSKVGGNYNYLYRLFRKSNLKPFERDISTEIYQAGSTPCNGVEGFNCYFPLQSYGFQPTNGVGYQPYRVVVLSFELLHAPATVCGPKKSTNLVKNKCVNFNFNGLTGTGVLTESNKKFLPFQQFGRDIADTTDAVRDPQTLEILDITPCSFGGVSVITPGTNTSNQVAVLYQDVNCTEVPVAIHADQLTPTWRVYSTGSNVFQTRAGCLIGAEHVNNSYECDIPIGAGICASYQTQTNSPSGAGSHHHHHHHHHH

SEQ ID NO: 4769 - protein, 715 aa, Artificial Sequence
  Description of Artificial Sequence: Synthetic polypeptide
MGILPSPGMPALLSLVSLLSVLLMGCVAETGTQCVNLTTRTQLPPAYTNSFTRGVYYPDKVFRSSVLHSTQDLFLPFFSNVTWFHAKHVSGTNGTKRFDNPVLPFNDGVYFASTEKSNIIRGWIFGTTLDSKTQSLLIVNNATNVVIKVCEFQFCNDPFLGVYYHKNNKSWMESEFRVYSSANNCTFEYHSQPFLMDLEGKQGNFKNLREFVFKNIDGYFKIYSKHTPINLVRDLPQGFSALEPLVDLPIGINITRFQTLLALHRSYLTPGDSSSGWTAGAAAYYVGYLQPRTFLLKYNENGTITDAVDCALDPLSETKCTLKSFTVEKGIYQTSNFRVQPTESIVRFPNITNHCPFGEVFNATRFASVYAWNRKRISNCVADYSVLYNSASFSTFKCYGVSPTKLNDLCFTNVYADSFVIRGDEVRQIAPGQTGKIADYNYKLPDDFTGCVIAWNSNNLDSKVGGNYNYLYRLFRKSNLKPFERDISTEIYQAGSTPCNGVEGFNCYFPLQSYGFQPTNGPGQQPYRVVVLSFELLHAPATVCGPKKSTNLVKNKCVNFNFNGLTGTGVLTESNKKFLPFQQFGRDIADTTDAVRDPQTLEILDITPCSFGGVSVITPGTNTSNQVAVLYQDVNCTEVPDAIHADQLTPTWRVYSTGSNVFQTRAGCLIGAEHVNNSYECDIPIGAGICASYQTQTNSPSGAGSHHHHHHHHHH

SEQ ID NO: 4770 - protein, 715 aa, Artificial Sequence
  Description of Artificial Sequence: Synthetic polypeptide
MGILPSPGMPALLSLVSLLSVLLMGCVAETGTQCVNLTTRTQLPPAYTNSFTRGVYYPDKVFRSSVLHSTQDLFLPFFSNVTWFHAIHVSGTNGTKRFDNPVLPFNDGVYFASTEKSNIIRGWIFGTTLDSKTQSLLIVNNATNVVIKVCEFQFCNDPFLGVYYHKNNKSWMESEFRVYSSANNCTFEYVSQPFLMDLEGKQGNFKNLREFVFKNIDGYFKIYSKHTPINLVRDLPQGFSALEPLVDLPIGINITRFQTLLALHRSYLTPIDSSSGWTAGAAAYYVGYLQPRTFLLKYNENGTITDAVDCALDPLSETKCTLKSFTVEKGIYQTSNFRVQPTESIVRFPNITNLCPFGEVFNATRFASVYAWNRKRISNCVADYSVLYNSASFSTFKCYGVSPTKLNDLCFTNVYADSFVIRGDEVRQIAPGQTGKIADYNYKLPDDFTGCVIAWNSNNLDSKVGGNYNYLYRLFRKSNLKPFERDISTEIYQAGSTPCNGVEGFNCYFPLQSYGFQPTNGVGYQPYRVVVLSFELLHAPATVCGPKKSTNLVKNKCVNFNFNGLTGTGVLTESNKKFLPFQQFGRDIADTTDAVRDPQTLEILDITPCSFGGVSVITPGTNTSNQVAVLYQDVNCTEVPVAIHADQLTPTWRVYSTGSNVFQTRAGCLIGAEHVNNSYECDIPIGAGICASYQTQTNSPSGAGSHHHHHHHHHH

SEQ ID NO: 4771 - protein, 715 aa, Artificial Sequence
  Description of Artificial Sequence: Synthetic polypeptide
MGILPSPGMPALLSLVSLLSVLLMGCVAETGTQCVNLTTRTQLPPAYTNSFTRGVYYPDKVFRSSVLHSTQDLFLPFFSNVTWFHAIHVSGTNGTKRFDNPVLPFNDGVYFASTEKSNIIRGWIFGTTLDSKTQSLLIVNNATNVVIKVCEFQFCNDPFLGVYYHKNNKSWMESEFRVYSSANNCTFEYVSQPFLMDLEGKQGNFKNLREFVFKNIDGYFKIYSKHTPINLVRDLPQGFSALEPLVDLPIGINITRFQTLLALHRSYLTPGDSSSGWTAGAAAYYVGYLQPRTFLLKYNENGTITDAVDCALDPLSETKCTLKSFTVEKGIYQTSNFRVQPTESIVRFPNITNLCPFGEVFNATRFASVYAWNRKRISNCVADYSVLYNSASFSTFKCYGVSPTKLNDLCFTNVYADSFVIRGDEVRQIAPGQTGKIADYNYKLPDDFTGCVIAWNSNNLDSKVGGNYNYLYRLFRKSNLKPFERDISTEIYQAGSTPCNGVEGFNCYFPLQSYGFQPTNGVGYQPYRVVVLSFELLHAPATVCGPKKSTNLVKNKCVNFNFNGLTGTGVLTESNKKFLPFQQFGRDIADTTDAVRDPQTLEILDIIPCSFGGVSVITPGTNTSNQVAVLYQDVNCTEVPVAIHADQLTPTWRVYSTGSNVFQTRAGCLIGAEHVNNSYECDIPIGAGICASYQTQTNSPSGAGSHHHHHHHHHH

SEQ ID NO: 4772 - protein, 715 aa, Artificial Sequence
  Description of Artificial Sequence: Synthetic polypeptide
MGILPSPGMPALLSLVSLLSVLLMGCVAETGTQCVNLTTRTQLPPAYTNSFTRGVYYPDKVFRSSVLHSTQDLFLPFFSNVTWFHAIHVSGTNGTKRFDNPVLPFNDGVYFASTEKSNIIRGWIFGTTLDSKTQSLLIVNNATNVVIKVCEFQFCNDPFLGVYYHKNNKSWMESEFRVYSSANNCTFEYVSQPFLMDLEGKQGNFKNLREFVFKNIDGYFKIYSKHTPINLVRDLPQGFSALEPLVDLPIGINITRFQTLLALHRSYLTPGDSSSGWTAGAAAYYVGYLQPRTFLLKYNENGTITDAVDCALDPLSETKCTLKSFTVEKGIYQTSNFRVQPTESIVRFPNITNLCPFGEVFNATRFASVYAWNRKRISNCVADYSVLYNSASFSTFKCYGVSPTKLNDLCFTNVYADLFVIRGDEVRQIAPGQTGKIADYNYKLPDDFTGCVIAWNSNNLDSKVGGNYNYLYRLFRKSNLKPFERDISTEIYQAGSTPCNGVEGFNCYFPLQSYGFQPTNGVGYQPYRVVVLSFELLHAPATVCGPKKSTNLVKNKCVNFNFNGLTGTGVLTESNKKFLPFQQFGRDIADTTDAVRDPQTLEILDITPCSFGGVSVITPGTNTSNQVAVLYQDVNCTEVPVAIHADQLTPTWRVYSTGSNVFQTRAGCLIGAEHVNNSYECDIPIGAGICASYQTQTNSPSGAGSHHHHHHHHHH

SEQ ID NO: 4773 - protein, 715 aa, Artificial Sequence
  Description of Artificial Sequence: Synthetic polypeptide
MGILPSPGMPALLSLVSLLSVLLMGCVAETGTQCVNLTTRTQLPPAYTNSFTRGVYYPDKVFRSSVLHSTQDLFLPFFSNVTWFHAKHVSGTNGTKRFDNPVLPFNDGVYFASTEKSNIIRGWIFGTTLDSKTQSLLIVNNATNVVIKVCEFQFCNDPFLGVYYHKNNKSWMESEFRVYSSANNCTFEYHSQPFLMDLEGKQGNFKNLREFVFKNIDGYFKIYSKHTPINLVRDLPQGFSALEPLVDLPIGINITRFQTLLALHRSYLTPGDSSSGETAGAAAYYVGYLQPRTFLLKYNENGTITDAVDCALDPLSETKCTLKSFTVEKGIYQTSNFRVQPTESIVRFPNITNPCPFGEVFNATRFASVYAWNRKRISNCVADYSVLYNSASFSTFKCYGVSPTKLNDLCFTNVYADSFVIRGDEVRQIAPGQTGKIADYNYKLPDDFTGCVIAWNSNNLDSKVGGNYNYLYRLFRKSNLKPFERDISTEIYQAGSTPCNGVEGFNCYFPLQSYGFQPTNGPGYQPYRVVVLSFELLHAPATVCGPKKSTNLVKNKCVNFNFNGLTGTGVLTESNKKFLPFQQFGRDIADTTDAVRDPQTLEILDITPCSFGGVSVITPGTNTSNQVAVLYQDVNCTEVPDAIHADQLTPTWRVYSTGSNVFQTRAGCLIGAEHVNNSYECDIPIGAGICASYQTQTNSPSGAGSHHHHHHHHHH

SEQ ID NO: 4774 - protein, 715 aa, Artificial Sequence
  Description of Artificial Sequence: Synthetic polypeptide
MGILPSPGMPALLSLVSLLSVLLMGCVAETGTQCVNLTTRTQLPPAYTNSFTRGVYYPDKVFRSSVLHSTQDLFLPFFSNVTWFHAIHVSGTNGTKRFDNPVLPFNDGVYFASTEKSNIIRGWIFGTTLDSKTQSLLIVNNATNVVIKVCEFQFCNDPFLGVYYHKNNKSWMESEFRVYSSANNCTFEYVSQPFLMDLEGKQGNFKNLREFVFKNIDGYFKIYSKHTPINLVRDLPQGFSALEPLVDLPIGINITRFQTLLALHRSYLTPGDSSSGWTAGAAAYYVGYLQPRTFLLKYNENGTITDAVDCALDPLSETKCTLKSFTVEKGIYQTSNFRVQPTESIVRFPNITNLCPFGEVFNATRFASVYAWNRKRISNCVADYSVLYNSASFSTFKCYGVSPTKLNDLCFTNVYADEFVIRGDEVRQIAPGQTGKIADYNYKLPDDFTGCVIAWNSNNLDSKVGGNYNYLYRLFRKSNLKPFERDISTEIYQAGSTPCNGVEGFNCYFPLQSYGFQPTNGVGYQPYRVVVLSFELLHAPATVCGPKKSTNLVKNKCVNFNFNGLTGTGVLTESNKKFLPFQQFGRDIADTTDAVRDPQTLEILDITPCSFGGVSVITPGTNTSNQVAVLYQDVNCTEVPVAIHADQLTPTWRVYSTGSNVFQTRAGCLIGAEHVNNSYECDIPIGAGICASYQTQTNSPSGAGSHHHHHHHHHH

SEQ ID NO: 4775 - protein, 715 aa, Artificial Sequence
  Description of Artificial Sequence: Synthetic polypeptide
MGILPSPGMPALLSLVSLLSVLLMGCVAETGTQCVNLTTRTQLPPAYTNSFTRGVYYPDKVFRSSVLHSTQDLFLPFFSNVTWFHAIHVSGTNGTKRFDNPVLPFNDGVYFASTEKSNIIRGWIFGTTLDSKTQSLLIVNNATNVVIKVCEFQFCNDPFLGVYYHKNNKSWMESEFRVYSSANNCTFEYVSQPFLMDLEGKQGNFKNLREFVFKNIDGYFKIYSKHTPINLVRDLPQGFSALEPLVDLPIGINITRFQTLLALHRSYLTPGDSSSGWTAGAAAYYVGYLQPRTFLLKYNENGTITDAVDCALDPLSETKCTLKSFTVEKGIYQTSNFRVQPTESIVRFPNITNLCPFGEVFNATRFASVYAWNRKRISNCVADYSVWYNSASFSTFKCYGVSPTKLNDLCFTNVYADSFVIRGDEVRQIAPGQTGKIADYNYKLPDDFTGCVIAWNSNNLDSKVGGNYNYLYRLFRKSNLKPFERDISTEIYQAGSTPCNGVEGFNCYFPLQSYGFQPTNGVGYQPYRVVVLSFELLHAPATVCGPKKSTNLVKNKCVNFNFNGLTGTGVLTESNKKFLPFQQFGRDIADTTDAVRDPQTLEILDITPCSFGGVSVITPGTNTSNQVAVLYQDVNCTEVPVAIHADQLTPTWRVYSTGSNVFQTRAGCLIGAEHVNNSYECDIPIGAGICASYQTQTNSPSGAGSHHHHHHHHHH

SEQ ID NO: 4776 - protein, 715 aa, Artificial Sequence
  Description of Artificial Sequence: Synthetic polypeptide
MGILPSPGMPALLSLVSLLSVLLMGCVAETGTQCVNLTTRTQLPPAYTNSFTRGVYYPDKVFRSSVLHSTQDLFLPFFSNVTWFHAEHVSGTNGTKRFDNPVLPFNDGVYFASTEKSNIIRGWIFGTTLDSKTQSLLIVNNATNVVIKVCEFQFCNDPFLGVYYHKNNKSWMESEFRVYSSANNCTFEYHSQPFLMDLEGKQGNFKNLREFVFKNIDGYFKIYSKHTPINLVRDLPQGFSALEPLVDLPIGINITRFQTLLALHRSYLTPGDSSSGWTAGAAAYYVGYLQPRTFLLKYNENGTITDAVDCALDPLSETKCTLKSFTVEKGIYQTSNFRVQPTESIVRFPNITNHCPFGEVFNATRFASVYAWNRKRISNCVADYSVLYNSASFSTFKCYGVSPTKLNDLCFTNVYADSFVIRGDEVRQIAPGQTGKIADYNYKLPDDFTGCVIAWNSNNLDSKVGGNYNYLYRLFRKSNLKPFERDISTEIYQAGSTPCNGVEGFNCYFPLQSYGFQPTNGPGQQPYRVVVLSFELLHAPATVCGPKKSTNLVKNKCVNFNFNGLTGTGVLTESNKKFLPFQQFGRDIADTTDAVRDPQTLEILDITPCSFGGVSVITPGTNTSNQVAVLYQDVNCTEVPDAIHADQLTPTWRVYSTGSNVFQTRAGCLIGAEHVNNSYECDIPIGAGICASYQTQTNSPSGAGSHHHHHHHHHH

SEQ ID NO: 4777 - protein, 715 aa, Artificial Sequence
  Description of Artificial Sequence: Synthetic polypeptide
MGILPSPGMPALLSLVSLLSVLLMGCVAETGTQCVNLTTRTQLPPAYTNSFTRGVYYPDKVFRSSVLHSTQDLFLPFFSNVTWFHAIHVSGTNGTKRFDNPVLPFNDGVYFASTEKSNIIRGWIFGTTLDSKTQSLLIVNNATNVVIKVCEFQFCNDPFLGVYYHKNNKSWMESEFRVYSSANNCTFEYVSQPFLMDLEGKQGNFKNLREFVFKNIDGYFKIYSKHTPINLVRDLPQGFSALEPLVDLPIGINITRFQTLLALHRSYLTPGDSSSGWTAGAAAYYVGYLQPRTFLLKYNENGTITDAVDCALDPLSETKCTLKSFTVEKGIYQTSNFRVQPTESIVRYPNITNLCPFGEVFNATRFASVYAWNRKRISNCVADYSVLYNSASFSTFKCYGVSPTKLNDLCFTNVYADSFVIRGDEVRQIAPGQTGKIADYNYKLPDDFTGCVIAWNSNNLDSKVGGNYNYLYRLFRKSNLKPFERDISTEIYQAGSTPCNGVEGFNCYFPLQSYGFQPTNGVGYQPYRVVVLSFELLHAPATVCGPKKSTNLVKNKCVNFNFNGLTGTGVLTESNKKFLPFQQFQRDIADTTDAVRDPQTLEILDITPCSFGGVSVITPGTNTSNQVAVLYQDVNCTEVPVAIHADQLTPTWRVYSTGSNVFQTRAGCLIGAEHVNNSYECDIPIGAGICASYQTQTNSPSGAGSHHHHHHHHHH

SEQ ID NO: 4778 - protein, 715 aa, Artificial Sequence
  Description of Artificial Sequence: Synthetic polypeptide
MGILPSPGMPALLSLVSLLSVLLMGCVAETGTQCVNLTTRTQLPPAYTNSFTRGVYYPDKVFRSSVLHSTQDLFLPFFSNVTWFHAIHVSGTNGTKRFDNPVLPFNDGVYFASTEKSNIIRGWIFGTTLDSKTQSLLIVNNATNVVIKVCEFQFCNDPFLGVYYHKNNKSWMESEFRVYSSANNCTFEYVSQPFLMDLEGKQGNFKNLREFVFKNIDGYFKIYSKHTPINLVRDLPQGFSALEPLVDLPIGINITRFQTLLALHRSYLTPGDSSSGWTAGAAAYYVGYLQPRTFLLKYNENGTITDAVDCALDPLSETKCTLKSFTVEKGIYQTSNFRVEPTESIVRFPNITNLCPFGEVFNATRFASVYAWNRKRISNCVADYSVLYNSASFSTFKCYGVSPTKLNDLCFTNVYADSFVIRGDEVRQIAPGQTGKIADYNYKLPDDFTGCVIAWNSNNLDSKVGGNYNYLYRLFRKSNLKPFERDISTEIYQAGSTPCNGVEGFNCYFPLQSYGFQPTNGVGYQPYRVVVLSFELLHAPATVCGPKKSTNLVKNKCVNFNFNGLTGTGVLTESNKKFLPFQQFGRDIADTTDAVRDPQTLEILDITPCSFGGVSVITPGTNTSNQVAVLYQDVNCTEVPVAIHADQLTPTWRVYSTGSNVFQTRAGCLIGAEHVNNSYECDIPIGAGICASYQTQTNSPSGAGSHHHHHHHHHH

SEQ ID NO: 4779 - protein, 715 aa, Artificial Sequence
  Description of Artificial Sequence: Synthetic polypeptide
MGILPSPGMPALLSLVSLLSVLLMGCVAETGTQCVNLTTRTQLPPAYTNSFTRGVYYPDKVFRSSVLHSTQDLFLPFFSNVTWFHAKHVSGTNGTKRFDNPVLPFNDGVYFASTEKSNIIRGWIFGTTLDSKTQSLLIVNNATNVVIKVCEFQFCNDPFLGVYYHKNNKSWMESEFRVYSSANNCTFEYVSQPFLMDLEGKQGNFKNLREFVFKNIDGYFKIYSKHTPINLVRDLPQGFSALEPLVDLPIGINITRFQTLLALHRSYLTPGDSSSGETAGAAAYYVGYLQPRTFLLKYNENGTITDAVDCALDPLSETKCTLKSFTVEKGIYQTSNFRVQPTESIVRFPNITNHCPFGEVFNATRFASVYAWNRKRISNCVADYSVLYNSASFSTFKCYGVSPTKLNDLCFTNVYADSFVIRGDEVRQIAPGQTGKIADYNYKLPDDFTGCVIAWNSNNLDSKVGGNYNYLYRLFRKSNLKPFERDISTEIYQAGSTPCNGVEGFNCYFPLQSYGFQPTNGPGQQPYRVVVLSFELLHAPATVCGPKKSTNLVKNKCVNFNFNGLTGTGVLTESNKKFLPFQQFGRDIADTTDAVRDPQTLEILDITPCSFGGVSVITPGTNTSNQVAVLYQDVNCTEVPDAIHADQLTPTWRVYSTGSNVFQTRAGCLIGAEHVNNSYECDIPIGAGICASYQTQTNSPSGAGSHHHHHHHHHH

SEQ ID NO: 4780 - protein, 715 aa, Artificial Sequence
  Description of Artificial Sequence: Synthetic polypeptide
MGILPSPGMPALLSLVSLLSVLLMGCVAETGTQCVNLTTRTQLPPAYTNSFTRGVYYPDKVFRSSVLHSTQDLFLPFFSNVTWFHAIHVSGTNGTKRFDNPVLPFNDGVYFASTEKSNIIRGWIFGTTLDSKTQSLLIVNNATNVVIKVCEFQFCNDPFLGVYYHKNNKSWMESEFRVYSSANNCTFEYVSQPFLMDLEGKQGNFKNLREFVFKNIDGYFKIYSKHTPINLVRDLPQGFSALEPLVDLPIGINITRFQTLLALHRSYLTPGDSSSGWTAGAAAYYVGYLQPRTFLLKYNENGTITDAVDCALDPLSKTKCTLKSFTVEKGIYQTSNFRVQPTESIVRFPNITNLCPFGEVFNATRFASVYAWNRKRISNCVADYSVLYNSASFSTFKCYGVSPTKLNDLCFTNVYADSFVIRGDEVRQIAPGQTGKIADYNYKLPDDFTGCVIAWNSNNLDSKVGGNYNYLYRLFRKSNLKPFERDISTEIYQAGSTPCNGVEGFNCYFPLQSYGFQPTNGVGYQPYRVVVLSFELLHAPATVCGPKKSTNLVKNKCVNFNFNGLTGTGVLTESNKKFLPFQQFGRDIADTTDAVRDPQTLEILDITPCSFGGVSVITPGTNTSNQVAVLYQDVNCTEVPVAIHADQLTPTWRVYSTGSNVFQTRAGCLIGAEHVNNSYECDIPIGAGICASYQTQTNSPSGAGSHHHHHHHHHH

SEQ ID NO: 4781 - protein, 715 aa, Artificial Sequence
  Description of Artificial Sequence: Synthetic polypeptide
MGILPSPGMPALLSLVSLLSVLLMGCVAETGTQCVNLTTRTQLPPAYTNSFTRGVYYPDKVFRSSVLHSTQDLFLPFFSNVTWFHAEHVSGTNGTKRFDNPVLPFNDGVYFASTEKSNIIRGWIFGTTLDSKTQSLLIVNNATNVVIKVCEFQFCNDPFLGVYYHKNNKSWMESEFRVYSSANNCTFEYVSQPFLMDLEGKQGNFKNLREFVFKNIDGYFKIYSKHTPINLVRDLPQGFSALEPLVDLPIGINITRFQTLLALHRSYLTPGDSSSGETAGAAAYYVGYLQPRTFLLKYNENGTITDAVDCALDPLSETKCTLKSFTVEKGIYQTSNFRVQPTESIVRFPNITNKCPFGEVFNATRFASVYAWNRKRISNCVADYSVLYNSASFSTFKCYGVSPTKLNDLCFTNVYADSFVIRGDEVRQIAPGQTGKIADYNYKLPDDFTGCVIAWNSNNLDSKVGGNYNYLYRLFRKSNLKPFERDISTEIYQAGSTPCNGVEGFNCYFPLQSYGFQPTNGPGQQPYRVVVLSFELLHAPATVCGPKKSTNLVKNKCVNFNFNGLTGTGVLTESNKKFLPFQQFGRDIADTTDAVRDPQTLEILDITPCSFGGVSVITPGTNTSNQVAVLYQDVNCTEVPDAIHADQLTPTWRVYSTGSNVFQTRAGCLIGAEHVNNSYECDIPIGAGICASYQTQTNSPSGAGSHHHHHHHHHH

SEQ ID NO: 4782 - protein, 715 aa, Artificial Sequence
  Description of Artificial Sequence: Synthetic polypeptide
MGILPSPGMPALLSLVSLLSVLLMGCVAETGTQCVNLTTRTQLPPAYTNSFTRGVYYPDKVFRSSVLHSTQDLFLPFFSNVTWFHAIHVSGTNGTKRFDNPVLPFNDGVYFASTEKSNIIRGWIFGTTLDSKTQSLLIVNNNTNVVIKVCEFQFCNDPFLGVYYHKNNKSWMESEFRVYSSANNCTFEYVSQPFLMDLEGKQGNFKNLREFVFKNIDGYFKIYSKHTPINLVRDLPQGFSALEPLVDLPIGINITRFQTLLALHRSYLTPGDSSSGWTAGAAAYYVGYLQPRTFLLKYNENGTITDAVDCALDPLSETKCTLKSFTVEKGIYQTSNFRVQPTESIVRFPNITNLCPFGEVFNATRFASVYAWNRKRISNCVADYSVLYNSASFSTFKCYGVSPTKLNDLCFTNVYADSFVIRGDEVRQIAPGQTGKIADYNYKLPDDFTGCVIAWNSNNLDSKVGGNYNYLYRLFRKSNLKPFERDISTEIYQAGSTPCNGVEGFNCYFPLQSYGFQPTNGVGYQPYRVVVLSFELLHAPATVCGPKKSTNLVKNKCVNFNFNGLTGTGVLTESNKKFLPFQQFGRDIADTTDAVRDPQTLEILDITPCSFGGVSVITPGTNTSNQVAVLYQDVNCTEVPVAIHADQLTPTWRVYSTGSNVFQTRAGCLIGAEHVNNSYECDIPIGAGICASYQTQTNSPSGAGSHHHHHHHHHH

SEQ ID NO: 4783 - protein, 715 aa, Artificial Sequence
  Description of Artificial Sequence: Synthetic polypeptide
MGILPSPGMPALLSLVSLLSVLLMGCVAETGTQCVNLTTRTQLPPAYTNSFTRGVYYPDKVFRSSVLHSTQDLFLPFFSNVTWFHAIHVSGTNGTKRFDNPVLPFNDGVYFASTEKSNIIRGWIFGTTLDSKTQSLLIVNNATNVVIKVCEFQFCNDPFLGVYYHKNNKSWMESEFRVYSSANNCTFEYVSQPFLMDLEGKQGNFKNLREFVFKNIDGYFKIYSKHTPINLVRDLPQGFSALEPLVDLPIGINITRFQTLLALHRSYLTPGDSSSGWTAGAAAYYVGYLQPRTFLLKYNENGTITDAVDCALDPLSETKCTLKSFTVEKGIYQTSNFRVQPTESIVRFPNITNLCPFGEVFNATRFASVYAWNRKRISNCVADYSVLYNSASFSTFKCYGVSPTKLNDLCFTNVYADSFVIRGDEVRQIAPGQTGKIADYNYKLPDDFTGCVIAWNSNNLDSKVGGNYNYLYRLFRKDNLKPFERDISTEIYQAGSTPCNGVEGFNCYFPLQSYGFQPTNGVGYQPYRVVVLSFELLHAPATVCGPKKSTNLVKNKCVNFNFNGLTGTGVLTESNKKFLPFQQFGRDIADTTDAVRDPQTLEILDITPCSFGGVSVITPGTNTSNQVAVLYQDVNCTEVPVAIHADQLTPTWRVYSTGSNVFQTRAGCLIGAEHVNNSYECDIPIGAGICASYQTQTNSPSGAGSHHHHHHHHHH

SEQ ID NO: 4784 - protein, 715 aa, Artificial Sequence
  Description of Artificial Sequence: Synthetic polypeptide
MGILPSPGMPALLSLVSLLSVLLMGCVAETGTQCVNLTTRTQLPPAYTNSFTRGVYYPDKVFRSSVLHSTQDLFLPFFSNVTWFHAYHVSGTNGTKRFDNPVLPFNDGVYFASTEKSNIIRGWIFGTTLDSKTQSLLIVNNATNVVIKVCEFQFCNDPFLGVYYHKNNKSWMESEFRVYSSANNCTFEYHSQPFLMDLEGKQGNFKNLREFVFKNIDGYFKIYSKHTPINLVRDLPQGFSALEPLVDLPIGINITRFQTLLALHRSYLTPGDSSSGETAGAAAYYVGYLQPRTFLLKYNENGTITDAVDCALDPLSETKCTLKSFTVEKGIYQTSNFRVQPTESIVRFPNITNKCPFGEVFNATRFASVYAWNRKRISNCVADYSVLYNSASFSTFKCYGVSPTKLNDLCFTNVYADSFVIRGDEVRQIAPGQTGKIADYNYKLPDDFTGCVIAWNSNNLDSKVGGNYNYLYRLFRKSNLKPFERDISTEIYQAGSTPCNGVEGFNCYFPLQSYGFQPTNGVGQQPYRVVVLSFELLHAPATVCGPKKSTNLVKNKCVNFNFNGLTGTGVLTESNKKFLPFQQFGRDIADTTDAVRDPQTLEILDITPCSFGGVSVITPGTNTSNQVAVLYQDVNCTEVPDAIHADQLTPTWRVYSTGSNVFQTRAGCLIGAEHVNNSYECDIPIGAGICASYQTQTNSPSGAGSHHHHHHHHHH

SEQ ID NO: 4785 - protein, 715 aa, Artificial Sequence
  Description of Artificial Sequence: Synthetic polypeptide
MGILPSPGMPALLSLVSLLSVLLMGCVAETGTQCVNLTTRTQLPPAYTNSFTRGVYYPDKVFRSSVLHSTQDLFLPFFSNVTWFHAIHVSGTNGTKRFDNPVLPFNDGVYFASTEKSNIIRGWIFGTTLDSKTQSLLIVNNATNVVIKVCEFQFCNDPFLGVYYHKNNKSWMESEFRVYSSANNCTFEYVSQPFLMDLEGKQGNFKNLREFVFKNIDGYFKIYSKHTPINLVRDLPQGFSALEPLVDLPIGINITRFQTLLALHRSYLTPGDSSSGWTAGAAAYYVGYLQPRTFLLKYNENGTITDAVDCALDPLSETKCTLKSFTVEKGIYQTSNFRVQPTESIVRFPNITNLCPFGEVFNATRFASVYAWNRKRISNCVADYSVLYNSASFSTFKCYGVSPTKLNDLCFTNVYADSFVIRGDEVRQIAPGQTGKIADYNYKLPDDFTGCVIAWNSNNLDSKVGGNYNYLYRLFRKSNLKPFERDISTEIYQAGSTPCNGVEGFNCYFPLQSYGFQPTNGVGYQPYRVVVLSFELLHAPATVCGPKKSTNLVKNKCVNFNFNGLTGTGVLTESNKKFLPFQQFGRDIADTTDAVRDPQTLEILDITPCSFGGKLVITPQTNTSNQVAVLYQDVNCTEVPVAIHADQLTPTWRVYNTGSNVFQTRAGCLVGFEHVNNSYECDIPVGAGICASYQTQRNSPSGAGSHHHHHHHHHH

SEQ ID NO: 4786 - protein, 715 aa, Artificial Sequence
  Description of Artificial Sequence: Synthetic polypeptide
MGILPSPGMPALLSLVSLLSVLLMGCVAETGTQCVNLTTRTQLPPAYTNSFTRGVYYPDKVFRSSVLHSTQDLFLPFFSNVTWFHAEHVSGTNGTKRFDNPVLPFNDGVYFASTEKSNIIRGWIFGTTLDSKTQSLLIVNNATNVVIKVCEFQFCNDPFLGVYYHKNNKSWMESEFRVYSSANNCTFEYHSQPFLMDLEGKQGNFKNLREFVFKNIDGYFKIYSKHTPINLVRDLPQGFSALEPLVDLPIGINITRFQTLLALHRSYLTPGDSSSGETAGAAAYYVGYLQPRTFLLKYNENGTITDAVDCALDPLSETKCTLKSFTVEKGIYQTSNFRVQPTESIVRFPNITNKCPFGEVFNATRFASVYAWNRKRISNCVADYSVLYNSASFSTFKCYGVSPTKLNDLCFTNVYADSFVIRGDEVRQIAPGQTGKIADYNYKLPDDFTGCVIAWNSNNLDSKVGGNYNYLYRLFRKSNLKPFERDISTEIYQAGSTPCNGVEGFNCYFPLQSYGFQPTNGPGQQPYRVVVLSFELLHAPATVCGPKKSTNLVKNKCVNFNFNGLTGTGVLTESNKKFLPFQQFGRDIADTTDAVRDPQTLEILDITPCSFGGVSVITPGTNTSNQVAVLYQDVNCTEVPVAIHADQLTPTWRVYSTGSNVFQTRAGCLIGAEHVNNSYECDIPIGAGICASYQTQTNSPSGAGSHHHHHHHHHH

SEQ ID NO: 4787 - protein, 715 aa, Artificial Sequence
  Description of Artificial Sequence: Synthetic polypeptide
MGILPSPGMPALLSLVSLLSVLLMGCVAETGTQCVNLTTRTQLPPAYTNSFTRGVYYPDKVFRSSVLHSTQDLFLPFFSNVTWFHAIHVSGTNGTKRFDNPVLPFNDGVYFASTEKSNIIRGWIFGTTLDSKTQSLLIVNNATNVVIKVCEFQFCNDPFLGVYYHKNNKSWMESEFRVYSSANNCTFEYVSQPFLMDLEGKQGNFKNLREFVFKNIDGYFKIYSKHTPINLVRDLPQGFSALEPLVDLPIGINITRFQTLLALHRSYLTPGDSSSGWTAGAAQYYVGYLQPRTFLLKYNENGTITDAVDCALDPLSETKCTLKSFTVEKGIYQTSNFRVQPTESIVRFPNITNLCPFGEVFNATRFASVYAWNRKRISNCVADYSVLYNSASFSTFKCYGVSPTKLNDLCFTNVYADSFVIRGDEVRQIAPGQTGKIADYNYKLPDDFTGCVIAWNSNNLDSKVGGNYNYLYRLFRKSNLKPFERDISTEIYQAGSTPCNGVEGFNCYFPLQSYGFQPTNGVGYQPYRVVVLSFELLHAPATVCGPKKSTNLVKNKCVNFNFNGLTGTGVLTESNKKFLPFQQFGRDIADTTDAVRDPQTLEILDITPCSFGGVSVITPGTNTSNQVAVLYQDVNCTEVPVAIHADQLTPTWRVYSTGSNVFQTRAGCLIGAEHVNNSYECDIPIGAGICASYQTQTNSPSGAGSHHHHHHHHHH

SEQ ID NO: 4788 - protein, 715 aa, Artificial Sequence
  Description of Artificial Sequence: Synthetic polypeptide
MGILPSPGMPALLSLVSLLSVLLMGCVAETGTQCVNLTTRTQLPPAYTNSFTRGVYYPDKVFRSSVLHSTQDLFLPFFSNVTWFHAIHVSGTNGTKRFDNPVLPFNDGVYFASTEKSNIIRGWIFGTTLDSKTQSLLIVNNATNVVIKVCEFQFCNDPFLGVYYHKNNKSWMESEFRVYSSANNCTFEYVSQPFLMDLEGKQGNFKNLREFVFKNIDGYFKIYSKHTPINLVRDLPQGFSALEPLVDLPIGINITRFQTLLALHRSYLTPGDSSSGWTAGAAAYYVGYLQPRTFLLKYNENGTITDAVDCALDPLSETKCTLKSFTVEKGIYQTSNFRVQPTESIVRFPNITNLCPFGEVFNATRFASSYAWNRKRISNCVADYSVLYNSASFSTFKCYGVSPTKLNDLCFTNVYADRFVIRGDEVRQIAPGQTGKIADYNYKLPDDFTGCVIAWNSNNLDAKVGGNYNYLYRLFRKSNLKPFERFISTEIYQAGSTPSNGVEGFNCYFPLQSYVFQPTNGVGYQPYRVVVLSFELLHAPHTVCGPKKSTNLVKNKCVNFNFNGLTGTGVLTESNKKFLPFQQFGRDIADTTDAVRDPQTLEILDITPCSFGGVSVITPGTNTSNQVAVLYQDVNCTEVPVAIHADQLTPTWRVYSTGSNVFQTRAGCLIGAEHVNNSYECDIPIGAGICASYQTQTNSPSGAGSHHHHHHHHHH

SEQ ID NO: 4789 - protein, 715 aa, Artificial Sequence
  Description of Artificial Sequence: Synthetic polypeptide
MGILPSPGMPALLSLVSLLSVLLMGCVAETGTQCVNLTTRTQLPPAYTNSFTRGVYYPDKVFRSSVLHSTQDLFLPFFSNVTWFHAIHVSGTNGTKRFDNPVLPFNDGVYFASTEKSNIIRGWIFGTTLDSKTQSLLIVNNATNVVIKVCEFQFCNDPFLGVYYHKNNKSWMESEFRVYSSANNCTFEYVSQPFLMDLEGKQGNFKNLREFVFKNIDGYFKIYSKHTPINLVRDLPQGFSALEPLVDLPIGINITRFQTLLALHRSYLTPGDSSSGWTAGAAAYYVGYLQPRTFLLKYNENGTITDAVDCALDPLSETKCTLKSFTVEKGIYQTSNFRVQPTESIVRFPNITNLCPFGEVFNATRFASSYAWNRKRISNCVADYSVLYNSASFSTFKCYGVSPTKLNDLCFTNVYADRFVIRGDEVRQIAPGQTGKIADYNYKLPDDFTGCVIAWNSNNLDAKVGGNYNYLYRLFRKSNLKPFERFISTEIYQAGSTPANGVEGFNCYFPLQSYVFQPTNGVGYQPYRVVVLSFELLHAPHTVCGPKKSTNLVKNKCVNFNFNGLTGTGVLTESNKKFLPFQQFGRDIADTTDAVRDPQTLEILDITPCSFGGVSVITPGTNTSNQVAVLYQDVNCTEVPVAIHADQLTPTWRVYSTGSNVFQTRAGCLIGAEHVNNSYECDIPIGAGICASYQTQTNSPSGAGSHHHHHHHHHH

SEQ ID NO: 4790 - protein, 715 aa, Artificial Sequence
  Description of Artificial Sequence: Synthetic polypeptide
MGILPSPGMPALLSLVSLLSVLLMGCVAETGTQCVNLTTRTQLPPAYTNSFTRGVYYPDKVFRSSVLHSTQDLFLPFFSNVTWFHAIHVSGTNGTKRFDNPVLPFNDGVYFASTEKSNIIRGWIFGTTLDSKTQSLLIVNNATNVVIKVCEFQFCNDPFLGVYYHKNNKSWMESEFRVYSSANNCTFEYVSQPFLMDLEGKQGNFKNLREFVFKNIDGYFKIYSKHTPINLVRDLPQGFSALEPLVDLPIGINITRFQTLLALHRSYLTPGDSSSGWTAGAAAYYVGYLQPRTFLLKYNENGTITDAVDCALDPLSETKCTLKSFTVEKGIYQTSNFRVQPTESIVRFPNITNLCPLGEVFNATRFASSYAWNRKRISNCVADYSVLYNSASFSTFKCYGVSPTKLNDLCFTNVYADQFVIRGDEVRQIAPGQTGKIADYNYKLPDDFTGCVIAWNSNNLDAKVGGNYNYLYRLFRKSNLKPFERFISTEIYQAGSTPANGVEGFNCYFPLQSYGFQPTNGVTYQPYRVVVLSFELLHAPHTVCGPKKSTNLVKNKCVNFNFNGLTGTGVLTESNKKFLPFQQFGRDIADTTDAVRDPQTLEILDITPCSFGGVSVITPGTNTSNQVAVLYQDVNCTEVPVAIHADQLTPTWRVYSTGSNVFQTRAGCLIGAEHVNNSYECDIPIGAGICASYQTQTNSPSGAGSHHHHHHHHHH

SEQ ID NO: 4791 - protein, 715 aa, Artificial Sequence
  Description of Artificial Sequence: Synthetic polypeptide
MGILPSPGMPALLSLVSLLSVLLMGCVAETGTQCVNLTTRTQLPPAYTNSFTRGVYYPDKVFRSSVLHSTQDLFLPFFSNVTWFHAEHVSGTNGTKRFDNPVLPFNDGVYFASTEKSNIIRGWIFGTTLDSKTQSLLIVNNATNVVIKVCEFQFCNDPFLGVYYHKNNKSWMESEFRVYSSANNCTFEYHSQPFLMDLEGKQGNFKNLREFVFKNIDGYFKIYSKHTPINLVRDLPQGFSALEPLVDLPIGINITRFQTLLALHRSYLTPGDSSSGWTAGAAAYYVGYLQPRTFLLKYNENGTITDAVDCALDPLSETKCTLKSFTVEKGIYQTSNFRVQPTESIVRFPNITNPCPFGEVFNATRFASVYAWNRKRISNCVADYSVLYNSASFSTFKCYGVSPTKLNDLCFTNVYADSFVIRGDEVRQIAPGQTGKIADYNYKLPDDFTGCVIAWNSNNLDSKVGGNYNYLYRLFRKSNLKPFERDISTEIYQAGSTPCNGVEGFNCYFPLQSYGFQPTNGPGQQPYRVVVLSFELLHAPATVCGPKKSTNLVKNKCVNFNFNGLTGTGVLTESNKKFLPFQQFGRDIADTTDAVRDPQTLEILDITPCSFGGVSVITPGTNTSNQVAVLYQDVNCTEVPDAIHADQLTPTWRVYSTGSNVFQTRAGCLIGAEHVNNSYECDIPIGAGICASYQTQTNSPSGAGSHHHHHHHHHH

SEQ ID NO: 4792 - protein, 20 aa, Artificial Sequence
  Description of Artificial Sequence: Synthetic peptide
  MOD_RES (10)..(10): Val or Ile
DITWEKDAEXTGNSPRLDVA

SEQ ID NO: 4793 - DNA, 2148 bp, Artificial Sequence
  Description of Artificial Sequence: Synthetic polynucleotide
atgggcatcctgccaagcccaggaatgcccgccctgctgtctctggtgagcctgctgtccgtgctgctgatgggatgcgtggcagagacaggcacacagtgcgtgaacctgaccacaaggacccagctgccccctgcctataccaattctttcacacggggcgtgtactatcccgacaaggtgtttagaagctccgtgctgcactccacacaggatctgtttctgcctttcttttctaacgtgacctggttccacgccatccacgtgtccggcaccaatggcacaaagcggttcgacaatcccgtgctgccttttaacgatggcgtgtacttcgccagcaccgagaagtccaacatcatcagaggctggatctttggcaccacactggactctaagacacagagcctgctgatcgtgaacaatgccaccaacgtggtgatcaaggtgtgcgagttccagttttgtaatgatccattcctgggcgtgtactatcacaagaacaataagtcctggatggagtctgagtttcgcgtgtattctagcgccaacaattgcacatttgagtacgtgagccagcccttcctgatggacctggagggcaagcagggcaatttcaagaacctgagggagttcgtgtttaagaatatcgatggcgttttcaagatctacagcaagcacaccccaatcaacctggtgcgcgacctgccacagggattctccgccctggagccactggtggatctgcccatcggcatcaacatcacccggtttcagacactgctggccctgcacagatcctacctgacaccaggcgactcctctagcggatggaccgcaggagctgccgcctactatgtgggctatctgcagccccggaccttcctgctgaagtacaacgagaatggcaccatcacagacgcagtggattgcgccctggaccccctgtctgagacaaagtgtacactgaagagctttaccgtggagaagggcatctatcagacaagcaatttcagggtgcagcctaccgagtccatcgtgcgctttcccaatatcacaaacctgtgcccttttggcgaggtgttcaacgccaccagattcgccagcgtgtacgcctggaatcggaagagaatctccaactgcgtggccgactattctgtgctgtacaactccgcctctttcagcacctttaagtgctatggcgtgtctcccacaaagctgaatgatctgtgctttaccaacgtgtacgccgatagcttcgtgatcaggggagacgaagtgagacagatcgcaccaggacagacaggaaagatcgcagactacaattataagctgcctgacgatttcaccggctgcgtgatcgcctggaactccaacaatctggattctaaagtgggcggcaactacaattatctgtacaggctgtttcgcaagtccaatctgaagccattcgagcgggacatctccacagagatctaccaggccggctctaccccctgcaatggcgtggagggctttaactgttatttccctctgcagtcttacggcttccagccaacaaacggcgtgggctatcagccctacagagtggtggtgctgtcctttgagctgctgcacgcaccagcaacagtgtgcggcccaaagaagtctaccaatctggtgaagaacaagtgcgtgaacttcaacttcaacggactgaccggcacaggcgtgctgaccgagagcaataagaagttcctgccttttcagcagttcggcagggacatcgcagataccacagacgccgtgcgcgaccctcagaccctggagatcctggacatcacaccatgcagcttcggcggcgtgtccgtgatcacaccaggcaccaatacatccaaccaggtggccgtgctgtatcaggacgtgaattgtaccgaggtgcccgtggcaatccacgcagatcagctgacccctacatggcgggtgtactctaccggcagcaacgtgttccagacaagagccggatgcctgatcggagcagagcacgtgaacaatagctatgagtgcgacatccctatcggcgccggcatctgtgccagctaccagacccagacaaactccccatctggagcaggctcccaccatcaccatcaccatcaccatcaccactga

SEQ ID NO: 4794 - DNA, 2148 bp, Artificial Sequence
  Description of Artificial Sequence: Synthetic polynucleotide
atgggcatcctgccaagcccaggaatgcccgccctgctgtctctggtgagcctgctgtccgtgctgctgatgggatgcgtggcagagacaggcacacagtgcgtgaacctgaccacaaggacccagctgccccctgcctataccaattctttcacacggggcgtgtactatcccgacaaggtgtttagaagctccgtgctgcactccacacaggatctgtttctgcctttcttttctaacgtgacctggttccacgccatccacgtgtccggcaccaatggcacaaagcggttcgacaatcccgtgctgccttttaacgatggcgtgtacttcgccagcaccgagaagtccaacatcatcagaggctggatctttggcaccacactggactctaagacagttagcctgctgatcgtgaacaatgccaccaacgtggtgatcaaggtgtgcgagttccagttttgtaatgatccattcctgggcgtgtactatcacaagaacaataagtcctggatggagtctgagtttcgcgtgtattctagcgccaacaattgcacatttgagtacgtgagccagcccttcctgatggacctggagggcaagcagggcaatttcaagaacctgagggagttcgtgtttaagaatatcgatggctacttcaagatctacagcaagcacaccccaatcaacctggtgcgcgacctgccacagggattctccgccctggagccactggtggatctgcccatcggcatcaacatcacccggtttcagacactgctggccctgcacagatcctacctgacaccaggcgactcctctagcggatggaccgcaggagctgccgcctactatgtgggctatctgcagccccggaccttcctgctgaagtacaacgagaatggcaccatcacagacgcagtggattgcgccctggaccccctgtctgagacaaagtgtacactgaagagctttaccgtggagaagggcatctatcagacaagcaatttcagggtgcagcctaccgagtccatcgtgcgctttcccaatatcacaaacctgtgcccttttggcgaggtgttcaacgccaccagattcgccagcgtgtacgcctggaatcggaagagaatctccaactgcgtggccgactattctgtgctgtacaactccgcctctttcagcacctttaagtgctatggcgtgtctcccacaaagctgaatgatctgtgctttaccaacgtgtacgccgatagcttcgtgatcaggggagacgaagtgagacagatcgcaccaggacagacaggaaagatcgcagactacaattataagctgcctgacgatttcaccggctgcgtgatcgcctggaactccaacaatctggattctaaagtgggcggcaactacaattatctgtacaggctgtttcgcaagtccaatctgaagccattcgagcgggacatctccacagagatctaccaggccggctctaccccctgcaatggcgtggagggctttaactgttatttccctctgcagtcttacggcttccagccaacaaacggcgtgggctatcagccctacagagtggtggtgctgtcctttgagctgctgcacgcaccagcaacagtgtgcggcccaaagaagtctaccaatctggtgaagaacaagtgcgtgaacttcaacttcaacggactgaccggcacaggcgtgctgaccgagagcaataagaagttcctgccttttcagcagttcggcagggacatcgcagataccacagacgccgtgcgcgaccctcagaccctggagatcctggacatcacaccatgcagcttcggcggcgtgtccgtgatcacaccaggcaccaatacatccaaccaggtggccgtgctgtatcaggacgtgaattgtaccgaggtgcccgtggcaatccacgcagatcagctgacccctacatggcgggtgtactctaccggcagcaacgtgttccagacaagagccggatgcctgatcggagcagagcacgtgaacaatagctatgagtgcgacatccctatcggcgccggcatctgtgccagctaccagacccagacaaactccccatctggagcaggctcccaccatcaccatcaccatcaccatcaccactga

SEQ ID NO: 4795 - DNA, 2148 bp, Artificial Sequence
  Description of Artificial Sequence: Synthetic polynucleotide
atgggcatcctgccaagcccaggaatgcccgccctgctgtctctggtgagcctgctgtccgtgctgctgatgggatgcgtggcagagacaggcacacagtgcgtgaacctgaccacaaggacccagctgccccctgcctataccaattctttcacacggggcgtgtactatcccgacaaggtgtttagaagctccgtgctgcactccacacaggatctgtttctgcctttcttttctaacgtgacctggttccacgccatccacgtgtccggcaccaatggcacaaagcggttcgacaatcccgtgctgccttttaacgatggcgtgtacttcgccagcaccgagaagtccaacatcatcagaggctggatctttggcaccacactggactctaagacacagagcctgctgatcgtgaacaatgccaccaacgtggtgatcaaggtgtgcgagttccagttttgtaatgatccattcctgggcgtgtactatcacaagaacaataagtcctggatggagtctgagtttcgcgtgtattctagcgccaacaattgcacatttgagtacgtgagccagcccttcctgatggacctggagggcaagcagggcaatttcaagaacctgagggagttcgtgtttaagaatatcgatggcattttcaagatctacagcaagcacaccccaatcaacctggtgcgcgacctgccacagggattctccgccctggagccactggtggatctgcccatcggcatcaacatcacccggtttcagacactgctggccctgcacagatcctacctgacaccaggcgactcctctagcggatggaccgcaggagctgccgcctactatgtgggctatctgcagccccggaccttcctgctgaagtacaacgagaatggcaccatcacagacgcagtggattgcgccctggaccccctgtctgagacaaagtgtacactgaagagctttaccgtggagaagggcatctatcagacaagcaatttcagggtgcagcctaccgagtccatcgtgcgctttcccaatatcacaaacctgtgcccttttggcgaggtgttcaacgccaccagattcgccagcgtgtacgcctggaatcggaagagaatctccaactgcgtggccgactattctgtgctgtacaactccgcctctttcagcacctttaagtgctatggcgtgtctcccacaaagctgaatgatctgtgctttaccaacgtgtacgccgatagcttcgtgatcaggggagacgaagtgagacagatcgcaccaggacagacaggaaagatcgcagactacaattataagctgcctgacgatttcaccggctgcgtgatcgcctggaactccaacaatctggattctaaagtgggcggcaactacaattatctgtacaggctgtttcgcaagtccaatctgaagccattcgagcgggacatctccacagagatctaccaggccggctctaccccctgcaatggcgtggagggctttaactgttatttccctctgcagtcttacggcttccagccaacaaacggcgtgggctatcagccctacagagtggtggtgctgtcctttgagctgctgcacgcaccagcaacagtgtgcggcccaaagaagtctaccaatctggtgaagaacaagtgcgtgaacttcaacttcaacggactgaccggcacaggcgtgctgaccgagagcaataagaagttcctgccttttcagcagttcggcagggacatcgcagataccacagacgccgtgcgcgaccctcagaccctggagatcctggacatcacaccatgcagcttcggcggcgtgtccgtgatcacaccaggcaccaatacatccaaccaggtggccgtgctgtatcaggacgtgaattgtaccgaggtgcccgtggcaatccacgcagatcagctgacccctacatggcgggtgtactctaccggcagcaacgtgttccagacaagagccggatgcctgatcggagcagagcacgtgaacaatagctatgagtgcgacatccctatcggcgccggcatctgtgccagctaccagacccagacaaactccccatctggagcaggctcccaccatcaccatcaccatcaccatcaccactga

SEQ ID NO: 4796 - DNA, 2148 bp, Artificial Sequence
  Description of Artificial Sequence: Synthetic polynucleotide
atgggcatcctgccaagcccaggaatgcccgccctgctgtctctggtgagcctgctgtccgtgctgctgatgggatgcgtggcagagacaggcacacagtgcgtgaacctgaccacaaggacccagctgccccctgcctataccaattctttcacacggggcgtgtactatcccgacaaggtgtttagaagctccgtgctgcactccacacaggatctgtttctgcctttcttttctaacgtgacctggttccacgccatccacgtgtccggcaccaatggcacaaagcggttcgacaatcccgtgctgccttttaacgatggcgtgtacttcgccagcaccgagaagtccaacatcatcagaggctggatctttggcaccacactggactctaagacacagagcctgctgatcgtgaacaatgccaccaacgtggtgatcaaggtgtgcgagttccagttttgtaatgatccattcctgggcgtgtactatcacaagaacaataagtcctggatggagtctgagtttcgcgtgtattctagcgccaacaattgcacatttgagtacgtgagccagcccttcctgatggacctggagggcaagcagggcaatttcaagaacctgagggagttcgtgtttaagaatatcgatggctacttcaagatctacagcaagcacaccccaatcaacctggtgcgcgacctgccacagggattctccgccctggagccactggtggatctgcccatcggcatcaacatcacccggtttcagacactgctggccctgcacagatcctacctgacaccaggcgactcctctagcggatggaccgcaggagctgccgcctactatgtgggctatctgcagccccggaccttcctgctgaagtacaacgagaatggcaccatcacagacgcagtggattgcgccctggaccccctgtctgagacaaagtgtacactgaagagctttaccgtggagaagggcatctatcagacaagcaatttcagggtgcagcctaccgagtccatcgtgcgctttcccaatatcacaaacctgtgcccttttggcgaggtgttcaacgccaccagattcgccagcgtgtacgcctggaatcggaagagaatctccaactgcgtggccgactattctgtgctgtacaactccgcctctttcagcacctttaagtgctatggcgtgtctcccacaaagctgaatgatctgtgctttaccaacgtgtacgccgatagcttcgtgatcaggggagacgaagtgagacagatcgcaccaggacagagtggaaagatcgcagactacaattataagctgcctgacgatttcaccggctgcgtgatcgcctggaactccaacaatctggattctaaagtgggcggcaactacaattatctgtacaggctgtttcgcaagtccaatctgaagccattcgagcgggacatctccacagagatctaccaggccggctctaccccctgcaatggcgtggagggctttaactgttatttccctctgcagtcttacggcttccagccaacaaacggcgtgggctatcagccctacagagtggtggtgctgtcctttgagctgctgcacgcaccagcaacagtgtgcggcccaaagaagtctaccaatctggtgaagaacaagtgcgtgaacttcaacttcaacggactgaccggcacaggcgtgctgaccgagagcaataagaagttcctgccttttcagcagttcggcagggacatcgcagataccacagacgccgtgcgcgaccctcagaccctggagatcctggacatcacaccatgcagcttcggcggcgtgtccgtgatcacaccaggcaccaatacatccaaccaggtggccgtgctgtatcaggacgtgaattgtaccgaggtgcccgtggcaatccacgcagatcagctgacccctacatggcgggtgtactctaccggcagcaacgtgttccagacaagagccggatgcctgatcggagcagagcacgtgaacaatagctatgagtgcgacatccctatcggcgccggcatctgtgccagctaccagacccagacaaactccccatctggagcaggctcccaccatcaccatcaccatcaccatcaccactga

SEQ ID NO: 4797 - DNA, 2148 bp, Artificial Sequence
  Description of Artificial Sequence: Synthetic polynucleotide
atgggcatcctgccaagcccaggaatgcccgccctgctgtctctggtgagcctgctgtccgtgctgctgatgggatgcgtggcagagacaggcacacagtgcgtgaacctgaccacaaggacccagctgccccctgcctataccaattctttcacacggggcgtgtactatcccgacaaggtgtttagaagctccgtgctgcactccacacaggatctgtttctgcctttcttttctaacgtgacctggttccacgccatccacgtgtccggcaccaatggcacaaagcggttcgacaatcccgtgctgccttttaacgatggcgtgtacttcgccagcaccgagaagtccaacatcatcagaggctggatctttggcaccacactggactctaagacacagagcctgctgatcgtgaacaatgccaccaacgtggtgatcaaggtgtgcgagttccagttttgtaatgatccattcctgggcgtgtactatcacaagaacaataagtcctggatggagtctgagtttcgcgtgtattctagcgccaacaattgcacatttgagtacgtgagccagcccttcctgatggacctggagggcaagcagggcaatttcaagaacctgagggagttcgtgtttaagaatatcgatggctacttcaagatctacagcaagcacaccccaatcaacctggtgcgcgacctgccacagggattctccgccctggagccactggtggatctgcccatcggcatcaacatcacccggtttcagacactgctggccctgcacagatcctacctgacaccaggcgactcctctagcggatggaccgcaggagctgccgcctactatgtgggctatctgcagccccggaccttcctgctgaagtacaacgagaatggcaccatcacagacgcagtggattgcgccctggaccccctgtctgagacaaagtgtacactgaagagctttaccgtggagaagggcatctatcagacaagcaatttcagggtgcagcctaccgagtccatcgtgcgctttcccaatatcacaaacctgtgcccttttggcgaggtgttcaacgccaccagattcgccagcgtgtacgcctggaatcggaagagaatctccaactgcgtggccgactattctgtgctgtacaactccgcctctttcagcgaatttaagtgctatggcgtgtctcccacaaagctgaatgatctgtgctttaccaacgtgtacgccgatagcttcgtgatcaggggagacgaagtgagacagatcgcaccaggacagacaggaaagatcgcagactacaattataagctgcctgacgatttcaccggctgcgtgatcgcctggaactccaacaatctggattctaaagtgggcggcaactacaattatctgtacaggctgtttcgcaagtccaatctgaagccattcgagcgggacatctccacagagatctaccaggccggctctaccccctgcaatggcgtggagggctttaactgttatttccctctgcagtcttacggcttccagccaacaaacggcgtgggctatcagccctacagagtggtggtgctgtcctttgagctgctgcacgcaccagcaacagtgtgcggcccaaagaagtctaccaatctggtgaagaacaagtgcgtgaacttcaacttcaacggactgaccggcacaggcgtgctgaccgagagcaataagaagttcctgccttttcagcagttcggcagggacatcgcagataccacagacgccgtgcgcgaccctcagaccctggagatcctggacatcacaccatgcagcttcggcggcgtgtccgtgatcacaccaggcaccaatacatccaaccaggtggccgtgctgtatcaggacgtgaattgtaccgaggtgcccgtggcaatccacgcagatcagctgacccctacatggcgggtgtactctaccggcagcaacgtgttccagacaagagccggatgcctgatcggagcagagcacgtgaacaatagctatgagtgcgacatccctatcggcgccggcatctgtgccagctaccagacccagacaaactccccatctggagcaggctcccaccatcaccatcaccatcaccatcaccactga

SEQ ID NO: 4798 - DNA, 2148 bp, Artificial Sequence
  Description of Artificial Sequence: Synthetic polynucleotide
atgggcatcctgccaagcccaggaatgcccgccctgctgtctctggtgagcctgctgtccgtgctgctgatgggatgcgtggcagagacaggcacacagtgcgtgaacctgaccacaaggacccagctgccccctgcctataccaattctttcacacggggcgtgtactatcccgacaaggtgtttagaagctccgtgctgcactccacacaggatctgtttctgcctttcttttctaacgtgacctggttccacgccatccacgtgtccggcaccaatggcacaaagcggttcgacaatcccgtgctgccttttaacgatggcgtgtacttcgccagcaccgagaagtccaacatcatcagaggctggatctttggcaccacactggactctaagacacagagcctgctgatcgtgaacaatgccaccaacgtggtgatcaaggtgtgcgagttccagttttgtaatgatccattcctgggcgtgtactatcacaagaacaataagtcctggatggagtctgagtttcgcgtgtattctagcgccaacaattgcacatttgagtacgtgagccagcccttcctgatggacctggagggcaagcagggcaatttcaagaacctgagggagttcgtgtttaagaatatcgatggctacttcaagatctacagcaagcacaccccaatcaacctggtgcgcgacctgccacagggattctccgccctggagccactggtggatctgcccatcggcatcaacatcacccggtttcagacactgctggccctgcacagatcctacctgacaccaggcgactcctctagcggatggaccgcaggagctgccgcctactatgtgggctatctgcagccccggaccttcctgctgaagtacaacgagaatggcaccatcacagacgcagtggattgcgccctggaccccctgtctgagacaaagtgtacactgaagagctttaccgtggagaagggcatctatcagacaagcaatttcagggtgcagcctaccgagtccatcgtgcgctttcccaatatcacaaacctgtgcccttttggcgaggtgttcaacgccaccagattcgccagcgtgtacgcctggaatcggaagagaatctccaactgcgtggccgactattctgtgctgtacaactccgcctctttccgaacctttaagtgctatggcgtgtctcccacaaagctgaatgatctgtgctttaccaacgtgtacgccgatagcttcgtgatcaggggagacgaagtgagacagatcgcaccaggacagacaggaaagatcgcagactacaattataagctgcctgacgatttcaccggctgcgtgatcgcctggaactccaacaatctggattctaaagtgggcggcaactacaattatctgtacaggctgtttcgcaagtccaatctgaagccattcgagcgggacatctccacagagatctaccaggccggctctaccccctgcaatggcgtggagggctttaactgttatttccctctgcagtcttacggcttccagccaacaaacggcgtgggctatcagccctacagagtggtggtgctgtcctttgagctgctgcacgcaccagcaacagtgtgcggcccaaagaagtctaccaatctggtgaagaacaagtgcgtgaacttcaacttcaacggactgaccggcacaggcgtgctgaccgagagcaataagaagttcctgccttttcagcagttcggcagggacatcgcagataccacagacgccgtgcgcgaccctcagaccctggagatcctggacatcacaccatgcagcttcggcggcgtgtccgtgatcacaccaggcaccaatacatccaaccaggtggccgtgctgtatcaggacgtgaattgtaccgaggtgcccgtggcaatccacgcagatcagctgacccctacatggcgggtgtactctaccggcagcaacgtgttccagacaagagccggatgcctgatcggagcagagcacgtgaacaatagctatgagtgcgacatccctatcggcgccggcatctgtgccagctaccagacccagacaaactccccatctggagcaggctcccaccatcaccatcaccatcaccatcaccactga

SEQ ID NO: 4799 - DNA, 2148 bp, Artificial Sequence
  Description of Artificial Sequence: Synthetic polynucleotide
atgggcatcctgccaagcccaggaatgcccgccctgctgtctctggtgagcctgctgtccgtgctgctgatgggatgcgtggcagagacaggcacacagtgcgtgaacctgaccacaaggacccagctgccccctgcctataccaattctttcacacggggcgtgtactatcccgacaaggtgtttagaagctccgtgctgcactccacacaggatctgtttctgcctttcttttctaacgtgacctggttccacgccatccacgtgtccggcaccaatggcacaaagcggttcgacaatcccgtgctgccttttaacgatggcgtgtacttcgccagcaccgagaagtccaacatcatcagaggctggatctttggcaccacactggactctaagacacagagcctgctgatcgtgaacaatgccaccaacgtggtgatcaaggtgtgcgagttccagttttgtaatgatccattcctgggcgtgtactatcacaagaacaataagtcctggatggagtctgagtttcgcgtgtattctagcgccaacaattgcacatttgagtacgtgagccagcccttcctgatggacctggagggcaagcagggcaatttcaagaacctgagggagttcgtgtttaagaatatcgatggctacttcaagatctacagcaagcacaccccaatcaacctggtgcgcgacctgccacagggattctccgccctggagccactggtggatctgcccatcggcatcaacatcacccggtttcagacactgctggccctgcacagatcctacctgacaccaggcgactcctctagcggatggaccgcaggagctgccgcctactatgtgggctatctgcagccccggaccttcctgctgaagtacaacgagaatggcaccatcacagacgcagtggattgcgccctggaccccctgtctgagacaaagtgtacactgaagagctttaccgtggagaagggcatctatcagacaagcaatttcagggtgcagcctaccgagtccatcgtgcgctttcccaatatcacaaacctgtgcccttttggcgaggtgttcaacgccaccagattcgccagcgtgtacgcctggaatcggaagagaatctccaactgcgtggccgactattctgtgctgtacaactccgcctctttcagcgcatttaagtgctatggcgtgtctcccacaaagctgaatgatctgtgctttaccaacgtgtacgccgatagcttcgtgatcaggggagacgaagtgagacagatcgcaccaggacagacaggaaagatcgcagactacaattataagctgcctgacgatttcaccggctgcgtgatcgcctggaactccaacaatctggattctaaagtgggcggcaactacaattatctgtacaggctgtttcgcaagtccaatctgaagccattcgagcgggacatctccacagagatctaccaggccggctctaccccctgcaatggcgtggagggctttaactgttatttccctctgcagtcttacggcttccagccaacaaacggcgtgggctatcagccctacagagtggtggtgctgtcctttgagctgctgcacgcaccagcaacagtgtgcggcccaaagaagtctaccaatctggtgaagaacaagtgcgtgaacttcaacttcaacggactgaccggcacaggcgtgctgaccgagagcaataagaagttcctgccttttcagcagttcggcagggacatcgcagataccacagacgccgtgcgcgaccctcagaccctggagatcctggacatcacaccatgcagcttcggcggcgtgtccgtgatcacaccaggcaccaatacatccaaccaggtggccgtgctgtatcaggacgtgaattgtaccgaggtgcccgtggcaatccacgcagatcagctgacccctacatggcgggtgtactctaccggcagcaacgtgttccagacaagagccggatgcctgatcggagcagagcacgtgaacaatagctatgagtgcgacatccctatcggcgccggcatctgtgccagctaccagacccagacaaactccccatctggagcaggctcccaccatcaccatcaccatcaccatcaccactga

SEQ ID NO: 4800 - DNA, 2148 bp, Artificial Sequence
  Description of Artificial Sequence: Synthetic polynucleotide
atgggcatcctgccaagcccaggaatgcccgccctgctgtctctggtgagcctgctgtccgtgctgctgatgggatgcgtggcagagacaggcacacagtgcgtgaacctgaccacaaggacccagctgccccctgcctataccaattctttcacacggggcgtgtactatcccgacaaggtgtttagaagctccgtgctgcactccacacaggatctgtttctgcctttcttttctaacgtgacctggttccacgccatccacgtgtccggcaccaatggcacaaagcggttcgacaatcccgtgctgccttttaacgatggcgtgtacttcgccagcaccgagaagtccaacatcatcagaggctggatctttggcaccacactggactctaagacacagagcctgctgatcgtgaacaatgccaccaacgtggtgatcaaggtgtgcgagttccagttttgtaatgatccattcctgggcgtgtactatcacaagaacaataagtcctggatggagtctgagtttcgcgtgtattctagcgccaacaattgcacatttgagtacgtgagccagcccttcctgatggacctggagggcaagcagggcaatttcaagaacctgagggagttcgtgtttaagaatatcgatggctacttcaagatctacagcaagcacaccccaatcaacctggtgcgcgacctgccacagggattctccgccctggagccactggtggatctgcccatcggcatcaacatcacccggtttcagacactgctggccctgcacagatcctacctgacaccaggcgactcctctagcggatggaccgcaggagctgccgcctactatgtgggctatctgcagccccggaccttcctgctgaagtacaacgagaatggcaccatcacagacgcagtggattgcgccctggaccccctgtctgagacaaagtgtacactgaagagctttaccgtggagaagggcatctatcagacaagcaatttcagggtgcagcctaccgagtccatcgtgcgctttcccaatatcacaaacctgtgcccttttggcgaggtgttcaacgccaccagattcgccagcgtgtacgcctggaatcggaagagaatctccaactgcgtggccgactattctgtgctgtacaactccgcctctttcagcttgtttaagtgctatggcgtgtctcccacaaagctgaatgatctgtgctttaccaacgtgtacgccgatagcttcgtgatcaggggagacgaagtgagacagatcgcaccaggacagacaggaaagatcgcagactacaattataagctgcctgacgatttcaccggctgcgtgatcgcctggaactccaacaatctggattctaaagtgggcggcaactacaattatctgtacaggctgtttcgcaagtccaatctgaagccattcgagcgggacatctccacagagatctaccaggccggctctaccccctgcaatggcgtggagggctttaactgttatttccctctgcagtcttacggcttccagccaacaaacggcgtgggctatcagccctacagagtggtggtgctgtcctttgagctgctgcacgcaccagcaacagtgtgcggcccaaagaagtctaccaatctggtgaagaacaagtgcgtgaacttcaacttcaacggactgaccggcacaggcgtgctgaccgagagcaataagaagttcctgccttttcagcagttcggcagggacatcgcagataccacagacgccgtgcgcgaccctcagaccctggagatcctggacatcacaccatgcagcttcggcggcgtgtccgtgatcacaccaggcaccaatacatccaaccaggtggccgtgctgtatcaggacgtgaattgtaccgaggtgcccgtggcaatccacgcagatcagctgacccctacatggcgggtgtactctaccggcagcaacgtgttccagacaagagccggatgcctgatcggagcagagcacgtgaacaatagctatgagtgcgacatccctatcggcgccggcatctgtgccagctaccagacccagacaaactccccatctggagcaggctcccaccatcaccatcaccatcaccatcaccactga

SEQ ID NO: 4801 - DNA, 2148 bp, Artificial Sequence
  Description of Artificial Sequence: Synthetic polynucleotide
atgggcatcctgccaagcccaggaatgcccgccctgctgtctctggtgagcctgctgtccgtgctgctgatgggatgcgtggcagagacaggcacacagtgcgtgaacctgaccacaaggacccagctgccccctgcctataccaattctttcacacggggcgtgtactatcccgacaaggtgtttagaagctccgtgctgcactccacacaggatctgtttctgcctttcttttctaacgtgacctggttccacgccatccacgtgtccggcaccaatggcacaaagcggttcgacaatcccgtgctgccttttaacgatggcgtgtacttcgccagcaccgagaagtccaacatcatcagaggctggatctttggcaccacactggactctaagacacagagcctgctgatcgtgaacaatgccaccaacgtggtgatcaaggtgtgcgagttccagttttgtaatgatccattcctgggcgtgtactatcacaagaacaataagtcctggatggagtctgagtttcgcgtgtattctagcgccaacaattgcacatttgagtacgtgagccagcccttcctgatggacctggagggcaagcagggcaatttcaagaacctgagggagttcgtgtttaagaatatcgatggctacttcaagatctacagcaagcacaccccaatcaacctggtgcgcgacctgccacagggattctccgccctggagccactggtggatctgcccatcggcatcaacatcacccggtttcagacactgctggccctgcacagatcctacctgacaccaggcgactcctctagcggatggaccgcaggagctgccgcctactatgtgggctatctgcagccccggaccttcctgctgaagtacaacgagaatggcaccatcacagacgcagtggattgcgccctggaccccctgtctgagacaaagtgtacactgaagagctttaccgtggagaagggcatctatcagacaagcaatttcagggtgcagcctaccgagtccatcgtgcgctttcccaatatcacaaacctgtgcccttttggcgaggtgttcaacgccaccagattcgccagcgtgtacgcctggaatcggaagagaatctccaactgcgtggccgactattctgtgctgtacaactccgcctctttcagcatgtttaagtgctatggcgtgtctcccacaaagctgaatgatctgtgctttaccaacgtgtacgccgatagcttcgtgatcaggggagacgaagtgagacagatcgcaccaggacagacaggaaagatcgcagactacaattataagctgcctgacgatttcaccggctgcgtgatcgcctggaactccaacaatctggattctaaagtgggcggcaactacaattatctgtacaggctgtttcgcaagtccaatctgaagccattcgagcgggacatctccacagagatctaccaggccggctctaccccctgcaatggcgtggagggctttaactgttatttccctctgcagtcttacggcttccagccaacaaacggcgtgggctatcagccctacagagtggtggtgctgtcctttgagctgctgcacgcaccagcaacagtgtgcggcccaaagaagtctaccaatctggtgaagaacaagtgcgtgaacttcaacttcaacggactgaccggcacaggcgtgctgaccgagagcaataagaagttcctgccttttcagcagttcggcagggacatcgcagataccacagacgccgtgcgcgaccctcagaccctggagatcctggacatcacaccatgcagcttcggcggcgtgtccgtgatcacaccaggcaccaatacatccaaccaggtggccgtgctgtatcaggacgtgaattgtaccgaggtgcccgtggcaatccacgcagatcagctgacccctacatggcgggtgtactctaccggcagcaacgtgttccagacaagagccggatgcctgatcggagcagagcacgtgaacaatagctatgagtgcgacatccctatcggcgccggcatctgtgccagctaccagacccagacaaactccccatctggagcaggctcccaccatcaccatcaccatcaccatcaccactga

SEQ ID NO: 4802 - DNA, 2148 bp, Artificial Sequence
  Description of Artificial Sequence: Synthetic polynucleotide
atgggcatcctgccaagcccaggaatgcccgccctgctgtctctggtgagcctgctgtccgtgctgctgatgggatgcgtggcagagacaggcacacagtgcgtgaacctgaccacaaggacccagctgccccctgcctataccaattctttcacacggggcgtgtactatcccgacaaggtgtttagaagctccgtgctgcactccacacaggatctgtttctgcctttcttttctaacgtgacctggttccacgccatccacgtgtccggcaccaatggcacaaagcggttcgacaatcccgtgctgccttttaacgatggcgtgtacttcgccagcaccgagaagtccaacatcatcagaggctggatctttggcaccacactggactctaagacacagagcctgctgatcgtgaacaatgccaccaacgtggtgatcaaggtgtgcgagttccagttttgtaatgatccattcctgggcgtgtactatcacaagaacaataagtcctggatggagtctgagtttcgcgtgtattctagcgccaacaattgcacatttgagtacgtgagccagcccttcctgatggacctggagggcaagcagggcaatttcaagaacctgagggagttcgtgtttaagaatatcgatggctacttcaagatctacagcaagcacaccccaatcaacctggtgcgcgacctgccacagggattctccgccctggagccactggtggatctgcccatcggcatcaacatcacccggtttcagacactgctggccctgcacagatcctacctgacaccaggcgactcctctagcggatggaccgcaggagctgccgcctactatgtgggctatctgcagccccggaccttcctgctgaagtacaacgagaatggcaccatcacagacgcagtggattgcgccctggaccccctgtctgagacaaagtgtacactgaagagctttaccgtggagaagggcatctatcagacaagcaatttcagggtgcagcctaccgagtccatcgtgcgctttcccaatatcacaaacctgtgcccttttggcgaggtgttcaacgccaccagattcgccagcgtgtacgcctggaatcggaagagaatctccaactgcgtggccgactattctgtgctgtacaactccgcctctttcagcacctttaagtgctatggcgtgtctcccacaaagctgaatgatctgtgctttaccaacgtgtacgccgatagcttcgtgatcaggggagacgaagtgagacagatcgcaccaggacagccgggaaagatcgcagactacaattataagctgcctgacgatttcaccggctgcgtgatcgcctggaactccaacaatctggattctaaagtgggcggcaactacaattatctgtacaggctgtttcgcaagtccaatctgaagccattcgagcgggacatctccacagagatctaccaggccggctctaccccctgcaatggcgtggagggctttaactgttatttccctctgcagtcttacggcttccagccaacaaacggcgtgggctatcagccctacagagtggtggtgctgtcctttgagctgctgcacgcaccagcaacagtgtgcggcccaaagaagtctaccaatctggtgaagaacaagtgcgtgaacttcaacttcaacggactgaccggcacaggcgtgctgaccgagagcaataagaagttcctgccttttcagcagttcggcagggacatcgcagataccacagacgccgtgcgcgaccctcagaccctggagatcctggacatcacaccatgcagcttcggcggcgtgtccgtgatcacaccaggcaccaatacatccaaccaggtggccgtgctgtatcaggacgtgaattgtaccgaggtgcccgtggcaatccacgcagatcagctgacccctacatggcgggtgtactctaccggcagcaacgtgttccagacaagagccggatgcctgatcggagcagagcacgtgaacaatagctatgagtgcgacatccctatcggcgccggcatctgtgccagctaccagacccagacaaactccccatctggagcaggctcccaccatcaccatcaccatcaccatcaccactga

SEQ ID NO: 4803 - DNA, 2148 bp, Artificial Sequence
  Description of Artificial Sequence: Synthetic polynucleotide
atgggcatcctgccaagcccaggaatgcccgccctgctgtctctggtgagcctgctgtccgtgctgctgatgggatgcgtggcagagacaggcacacagtgcgtgaacctgaccacaaggacccagctgccccctgcctataccaattctttcacacggggcgtgtactatcccgacaaggtgtttagaagctccgtgctgcactccacacaggatctgtttctgcctttcttttctaacgtgacctggttccacgccatccacgtgtccggcaccaatggcacaaagcggttcgacaatcccgtgctgccttttaacgatggcgtgtacttcgccagcaccgagaagtccaacatcatcagaggctggatctttggcaccacactggactctaagacacagagcctgctgatcgtgaacaatgccaccaacgtggtgatcaaggtgtgcgagttccagttttgtaatgatccattcctgggcgtgtactatcacaagaacaataagtcctggatggagtctgagtttcgcgtgtattctagcgccaacaattgcacatttgagtacgtgagccagcccttcctgatggacctggagggcaagcagggcaatttcaagaacctgagggagttcgtgtttaagaatatcgatggctacttcaagatctacagcaagcacaccccaatcaacctggtgcgcgacctgccacagggattctccgccctggagccactggtggatctgcccatcggcatcaacatcacccggtttcagacactgctggccctgcacagatcctacctgacaccaggcgactcctctagcggatggaccgcaggagctgccgcctactatgtgggctatctgcagccccggaccttcctgctgaagtacaacgagaatggcaccatcacagacgcagtggattgcgccctggaccccctgtctgagacaaagtgtacactgaagagctttaccgtggagaagggcatctatcagacaagcaatttcagggtgcagcctaccgagtccatcgtgcgctttcccaatatcacaaacctgtgcccttttggcgaggtgttcaacgccaccagattcgccagcgtgtacgcctggaatcggaagagaatctccaactgcgtggccgactattctgtgctgtaccgttccgcctctttcagcacctttaagtgctatggcgtgtctcccacaaagctgaatgatctgtgctttaccaacgtgtacgccgatagcttcgtgatcaggggagacgaagtgagacagatcgcaccaggacagacaggaaagatcgcagactacaattataagctgcctgacgatttcaccggctgcgtgatcgcctggaactccaacaatctggattctaaagtgggcggcaactacaattatctgtacaggctgtttcgcaagtccaatctgaagccattcgagcgggacatctccacagagatctaccaggccggctctaccccctgcaatggcgtggagggctttaactgttatttccctctgcagtcttacggcttccagccaacaaacggcgtgggctatcagccctacagagtggtggtgctgtcctttgagctgctgcacgcaccagcaacagtgtgcggcccaaagaagtctaccaatctggtgaagaacaagtgcgtgaacttcaacttcaacggactgaccggcacaggcgtgctgaccgagagcaataagaagttcctgccttttcagcagttcggcagggacatcgcagataccacagacgccgtgcgcgaccctcagaccctggagatcctggacatcacaccatgcagcttcggcggcgtgtccgtgatcacaccaggcaccaatacatccaaccaggtggccgtgctgtatcaggacgtgaattgtaccgaggtgcccgtggcaatccacgcagatcagctgacccctacatggcgggtgtactctaccggcagcaacgtgttccagacaagagccggatgcctgatcggagcagagcacgtgaacaatagctatgagtgcgacatccctatcggcgccggcatctgtgccagctaccagacccagacaaactccccatctggagcaggctcccaccatcaccatcaccatcaccatcaccactga

SEQ ID NO: 4804 - DNA, 2148 bp, Artificial Sequence
  Description of Artificial Sequence: Synthetic polynucleotide
atgggcatcctgccaagcccaggaatgcccgccctgctgtctctggtgagcctgctgtccgtgctgctgatgggatgcgtggcagagacaggcacacagtgcgtgaacctgaccacaaggacccagctgccccctgcctataccaattctttcacacggggcgtgtactatcccgacaaggtgtttagaagctccgtgctgcactccacacaggatctgtttctgcctttcttttctaacgtgacctggttccacgccatccacgtgtccggcaccaatggcacaaagcggttcgacaatcccgtgctgccttttaacgatggcgtgtacttcgccagcaccgagaagtccaacatcatcagaggctggatctttggcaccacactggactctaagacacagagcctgctgatcgtgaacaatgccaccaacgtggtgatcaaggtgtgcgagttccagttttgtaatgatccattcctgggcgtgtactatcacaagaacaataagtcctggatggagtctgagtttcgcgtgtattctagcgccaacaattgcacatttgagtacgtgagccagcccttcctgatggacctggagggcaagcagggcaatttcaagaacctgagggagttcgtgtttaagaatatcgatggctacttcaagatctacagcaagcacaccccaatcaacctggtgcgcgacctgccacagggattctccgccctggagccactggtggatctgcccatcggcatcaacatcacccggtttcagacactgctggccctgcacagatcctacctgacaccaggcgactcctctagcggatggaccgcaggagctgccgcctactatgtgggctatctgcagccccggaccttcctgctgaagtacaacgagaatggcaccatcacagacgcagtggattgcgccctggaccccctgtctgagacaaagtgtacactgaagagctttaccgtggagaagggcatctatcagacaagcaatttcagggtgcagcctaccgagtccatcgtgcgctttcccaatatcacaaacctgtgcccttttggcgaggtgttcaacgccaccagattcgccagcgtgtacgcctggaatcggaagagaatctccaactgcgtggccgactattctgtgctgtacaactccgcctctttcagcacctttaagtgctatggcgtgtctcccacaaagctgaatgatctgtgctttaccaacgtgtacgccgatagcttcgtgatcaggggagacgaagtgagacagatcgcaccaggacagtggggaaagatcgcagactacaattataagctgcctgacgatttcaccggctgcgtgatcgcctggaactccaacaatctggattctaaagtgggcggcaactacaattatctgtacaggctgtttcgcaagtccaatctgaagccattcgagcgggacatctccacagagatctaccaggccggctctaccccctgcaatggcgtggagggctttaactgttatttccctctgcagtcttacggcttccagccaacaaacggcgtgggctatcagccctacagagtggtggtgctgtcctttgagctgctgcacgcaccagcaacagtgtgcggcccaaagaagtctaccaatctggtgaagaacaagtgcgtgaacttcaacttcaacggactgaccggcacaggcgtgctgaccgagagcaataagaagttcctgccttttcagcagttcggcagggacatcgcagataccacagacgccgtgcgcgaccctcagaccctggagatcctggacatcacaccatgcagcttcggcggcgtgtccgtgatcacaccaggcaccaatacatccaaccaggtggccgtgctgtatcaggacgtgaattgtaccgaggtgcccgtggcaatccacgcagatcagctgacccctacatggcgggtgtactctaccggcagcaacgtgttccagacaagagccggatgcctgatcggagcagagcacgtgaacaatagctatgagtgcgacatccctatcggcgccggcatctgtgccagctaccagacccagacaaactccccatctggagcaggctcccaccatcaccatcaccatcaccatcaccactga

SEQ ID NO: 4805 - DNA, 2148 bp, Artificial Sequence
  Description of Artificial Sequence: Synthetic polynucleotide
atgggcatcctgccaagcccaggaatgcccgccctgctgtctctggtgagcctgctgtccgtgctgctgatgggatgcgtggcagagacaggcacacagtgcgtgaacctgaccacaaggacccagctgccccctgcctataccaattctttcacacggggcgtgtactatcccgacaaggtgtttagaagctccgtgctgcactccacacaggatctgtttctgcctttcttttctaacgtgacctggttccacgccatccacgtgtccggcaccaatggcacaaagcggttcgacaatcccgtgctgccttttaacgatggcgtgtacttcgccagcaccgagaagtccaacatcatcagaggctggatctttggcaccacactggactctaagacacagagcctgctgatcgtgaacaatgccaccaacgtggtgatcaaggtgtgcgagttccagttttgtaatgatccattcctgggcgtgtactatcacaagaacaataagtcctggatggagtctgagtttcgcgtgtattctagcgccaacaattgcacatttgagtacgtgagccagcccttcctgatggacctggagggcaagcagggcaatttcaagaacctgagggagttcgtgtttaagaatatcgatggctacttcaagatctacagcaagcacaccccaatcaacctggtgcgcgacctgccacagggattctccgccctggagccactggtggatctgcccatcggcatcaacatcacccggtttcagacactgctggccctgcacagatcctacctgacaccaggcgactcctctagcggatggaccgcaggagctgccgcctactatgtgggctatctgcagccccggaccttcctgctgaagtacaacgagaatggcaccatcacagacgcagtggattgcgccctggaccccctgtctgagacaaagtgtacactgaagagctttaccgtggagaagggcatctatcagacaagcaatttcagggtgcagcctaccgagtccatcgtgcgctttcccaatatcacaaacctgtgcccttttggcgaggtgttcaacgccaccagattcgccagcgtgtacgcctggaatcggaagagaatctccaactgcgtggccgactattctgtgctgtacaactccgcctctttcaatacctttaagtgctatggcgtgtctcccacaaagctgaatgatctgtgctttaccaacgtgtacgccgatagcttcgtgatcaggggagacgaagtgagacagatcgcaccaggacagacaggaaagatcgcagactacaattataagctgcctgacgatttcaccggctgcgtgatcgcctggaactccaacaatctggattctaaagtgggcggcaactacaattatctgtacaggctgtttcgcaagtccaatctgaagccattcgagcgggacatctccacagagatctaccaggccggctctaccccctgcaatggcgtggagggctttaactgttatttccctctgcagtcttacggcttccagccaacaaacggcgtgggctatcagccctacagagtggtggtgctgtcctttgagctgctgcacgcaccagcaacagtgtgcggcccaaagaagtctaccaatctggtgaagaacaagtgcgtgaacttcaacttcaacggactgaccggcacaggcgtgctgaccgagagcaataagaagttcctgccttttcagcagttcggcagggacatcgcagataccacagacgccgtgcgcgaccctcagaccctggagatcctggacatcacaccatgcagcttcggcggcgtgtccgtgatcacaccaggcaccaatacatccaaccaggtggccgtgctgtatcaggacgtgaattgtaccgaggtgcccgtggcaatccacgcagatcagctgacccctacatggcgggtgtactctaccggcagcaacgtgttccagacaagagccggatgcctgatcggagcagagcacgtgaacaatagctatgagtgcgacatccctatcggcgccggcatctgtgccagctaccagacccagacaaactccccatctggagcaggctcccaccatcaccatcaccatcaccatcaccactga

SEQ ID NO: 4806 - DNA, 2148 bp, Artificial Sequence
  Description of Artificial Sequence: Synthetic polynucleotide
atgggcatcctgccaagcccaggaatgcccgccctgctgtctctggtgagcctgctgtccgtgctgctgatgggatgcgtggcagagacaggcacacagtgcgtgaacctgaccacaaggacccagctgccccctgcctataccaattctttcacacggggcgtgtactatcccgacaaggtgtttagaagctccgtgctgcactccacacaggatctgtttctgcctttcttttctaacgtgacctggttccacgccatccacgtgtccggcaccaatggcacaaagcggttcgacaatcccgtgctgccttttaacgatggcgtgtacttcgccagcaccgagaagtccaacatcatcagaggctggatctttggcaccacactggactctaagacacagagcctgctgatcgtgaacaatgccaccaacgtggtgatcaaggtgtgcgagttccagttttgtaatgatccattcctgggcgtgtactatcacaagaacaataagtcctggatggagtctgagtttcgcgtgtattctagcgccaacaattgcacatttgagtacgtgagccagcccttcctgatggacctggagggcaagcagggcaatttcaagaacctgagggagttcgtgtttaagaatatcgatggctacttcaagatctacagcaagcacaccccaatcaacctggtgcgcgacctgccacagggattctccgccctggagccactggtggatctgcccatcggcatcaacatcacccggtttcagacactgctggccctgcacagatcctacctgacaccaggcgactcctctagcggatggaccgcaggagctgccgcctactatgtgggctatctgcagccccggaccttcctgctgaagtacaacgagaatggcaccatcacagacgcagtggattgcgccctggaccccctgtctgagacaaagtgtacactgaagagctttaccgtggagaagggcatctatcagacaagcaatttcagggtgcagcctaccgagtccatcgtgcgctttcccaatatcacaaacctgtgcccttttggcgaggtgttcaacgccaccagattcgccagcgtgtacgcctggaatcggaagagaatctccaactgcgtggccgactattctgtgctgtacaactccgcctctttcagcacctttaagtgctatggcgtgtctcccacaaagctgaatgatctgtgctttaccaacgtgtacgccgatagcttcgtgatcaggggagacgaagtgagacagatcgcaccaggacagcatggaaagatcgcagactacaattataagctgcctgacgatttcaccggctgcgtgatcgcctggaactccaacaatctggattctaaagtgggcggcaactacaattatctgtacaggctgtttcgcaagtccaatctgaagccattcgagcgggacatctccacagagatctaccaggccggctctaccccctgcaatggcgtggagggctttaactgttatttccctctgcagtcttacggcttccagccaacaaacggcgtgggctatcagccctacagagtggtggtgctgtcctttgagctgctgcacgcaccagcaacagtgtgcggcccaaagaagtctaccaatctggtgaagaacaagtgcgtgaacttcaacttcaacggactgaccggcacaggcgtgctgaccgagagcaataagaagttcctgccttttcagcagttcggcagggacatcgcagataccacagacgccgtgcgcgaccctcagaccctggagatcctggacatcacaccatgcagcttcggcggcgtgtccgtgatcacaccaggcaccaatacatccaaccaggtggccgtgctgtatcaggacgtgaattgtaccgaggtgcccgtggcaatccacgcagatcagctgacccctacatggcgggtgtactctaccggcagcaacgtgttccagacaagagccggatgcctgatcggagcagagcacgtgaacaatagctatgagtgcgacatccctatcggcgccggcatctgtgccagctaccagacccagacaaactccccatctggagcaggctcccaccatcaccatcaccatcaccatcaccactga

SEQ ID NO: 4807 - DNA, 2148 bp, Artificial Sequence
  Description of Artificial Sequence: Synthetic polynucleotide
atgggcatcctgccaagcccaggaatgcccgccctgctgtctctggtgagcctgctgtccgtgctgctgatgggatgcgtggcagagacaggcacacagtgcgtgaacctgaccacaaggacccagctgccccctgcctataccaattctttcacacggggcgtgtactatcccgacaaggtgtttagaagctccgtgctgcactccacacaggatctgtttctgcctttcttttctaacgtgacctggttccacgccatccacgtgtccggcaccaatggcacaaagcggttcgacaatcccgtgctgccttttaacgatggcgtgtacttcgccagcaccgagaagtccaacatcatcagaggctggatctttggcaccacactggactctaagacacagagcctgctgatcgtgaacaatgccaccaacgtggtgatcaaggtgtgcgagttccagttttgtaatgatccattcctgggcgtgtactatcacaagaacaataagtcctggatggagtctgagtttcgcgtgtattctagcgccaacaattgcacatttgagtacgtgagccagcccttcctgatggacctggagggcaagcagggcaatttcaagaacctgagggagttcgtgtttaagaatatcgatggctacttcaagatctacagcaagcacaccccaatcaacctggtgcgcgacctgccacagggattctccgccctggagccactggtggatctgcccatcggcatcaacatcacccggtttcagacactgctggccctgcacagatcctacctgacaccaggcgactcctctagcggatggaccgcaggagctgccgcctactatgtgggctatctgcagccccggaccttcctgctgaagtacaacgagaatggcaccatcacagacgcagtggattgcgccctggaccccctgtctgagacaaagtgtacactgaagagctttaccgtggagaagggcatctatcagacaagcaatttcagggtgcagcctaccgagtccatcgtgcgctttcccaatatcacaaacctgtgcccttttggcgaggtgttcaacgccaccagattcgccagcgtgtacgcctggaatcggaagagaatctccaactgcgtggccgactattctgtgctgtacaactccgcctctttcgtcacctttaagtgctatggcgtgtctcccacaaagctgaatgatctgtgctttaccaacgtgtacgccgatagcttcgtgatcaggggagacgaagtgagacagatcgcaccaggacagacaggaaagatcgcagactacaattataagctgcctgacgatttcaccggctgcgtgatcgcctggaactccaacaatctggattctaaagtgggcggcaactacaattatctgtacaggctgtttcgcaagtccaatctgaagccattcgagcgggacatctccacagagatctaccaggccggctctaccccctgcaatggcgtggagggctttaactgttatttccctctgcagtcttacggcttccagccaacaaacggcgtgggctatcagccctacagagtggtggtgctgtcctttgagctgctgcacgcaccagcaacagtgtgcggcccaaagaagtctaccaatctggtgaagaacaagtgcgtgaacttcaacttcaacggactgaccggcacaggcgtgctgaccgagagcaataagaagttcctgccttttcagcagttcggcagggacatcgcagataccacagacgccgtgcgcgaccctcagaccctggagatcctggacatcacaccatgcagcttcggcggcgtgtccgtgatcacaccaggcaccaatacatccaaccaggtggccgtgctgtatcaggacgtgaattgtaccgaggtgcccgtggcaatccacgcagatcagctgacccctacatggcgggtgtactctaccggcagcaacgtgttccagacaagagccggatgcctgatcggagcagagcacgtgaacaatagctatgagtgcgacatccctatcggcgccggcatctgtgccagctaccagacccagacaaactccccatctggagcaggctcccaccatcaccatcaccatcaccatcaccactga

SEQ ID NO: 4808 - DNA, 2148 bp, Artificial Sequence
  Description of Artificial Sequence: Synthetic polynucleotide
atgggcatcctgccaagcccaggaatgcccgccctgctgtctctggtgagcctgctgtccgtgctgctgatgggatgcgtggcagagacaggcacacagtgcgtgaacctgaccacaaggacccagctgccccctgcctataccaattctttcacacggggcgtgtactatcccgacaaggtgtttagaagctccgtgctgcactccacacaggatctgtttctgcctttcttttctaacgtgacctggttccacgccatccacgtgtccggcaccaatggcacaaagcggttcgacaatcccgtgctgccttttaacgatggcgtgtacttcgccagcaccgagaagtccaacatcatcagaggctggatctttggcaccacactggactctaagacacagagcctgctgatcgtgaacaatgccaccaacgtggtgatcaaggtgtgcgagttccagttttgtaatgatccattcctgggcgtgtactatcacaagaacaataagtcctggatggagtctgagtttcgcgtgtattctagcgccaacaattgcacatttgagtacgtgagccagcccttcctgatggacctggagggcaagcagggcaatttcaagaacctgagggagttcgtgtttaagaatatcgatggctttttcaagatctacagcaagcacaccccaatcaacctggtgcgcgacctgccacagggattctccgccctggagccactggtggatctgcccatcggcatcaacatcacccggtttcagacactgctggccctgcacagatcctacctgacaccaggcgactcctctagcggatggaccgcaggagctgccgcctactatgtgggctatctgcagccccggaccttcctgctgaagtacaacgagaatggcaccatcacagacgcagtggattgcgccctggaccccctgtctgagacaaagtgtacactgaagagctttaccgtggagaagggcatctatcagacaagcaatttcagggtgcagcctaccgagtccatcgtgcgctttcccaatatcacaaacctgtgcccttttggcgaggtgttcaacgccaccagattcgccagcgtgtacgcctggaatcggaagagaatctccaactgcgtggccgactattctgtgctgtacaactccgcctctttcagcacctttaagtgctatggcgtgtctcccacaaagctgaatgatctgtgctttaccaacgtgtacgccgatagcttcgtgatcaggggagacgaagtgagacagatcgcaccaggacagacaggaaagatcgcagactacaattataagctgcctgacgatttcaccggctgcgtgatcgcctggaactccaacaatctggattctaaagtgggcggcaactacaattatctgtacaggctgtttcgcaagtccaatctgaagccattcgagcgggacatctccacagagatctaccaggccggctctaccccctgcaatggcgtggagggctttaactgttatttccctctgcagtcttacggcttccagccaacaaacggcgtgggctatcagccctacagagtggtggtgctgtcctttgagctgctgcacgcaccagcaacagtgtgcggcccaaagaagtctaccaatctggtgaagaacaagtgcgtgaacttcaacttcaacggactgaccggcacaggcgtgctgaccgagagcaataagaagttcctgccttttcagcagttcggcagggacatcgcagataccacagacgccgtgcgcgaccctcagaccctggagatcctggacatcacaccatgcagcttcggcggcgtgtccgtgatcacaccaggcaccaatacatccaaccaggtggccgtgctgtatcaggacgtgaattgtaccgaggtgcccgtggcaatccacgcagatcagctgacccctacatggcgggtgtactctaccggcagcaacgtgttccagacaagagccggatgcctgatcggagcagagcacgtgaacaatagctatgagtgcgacatccctatcggcgccggcatctgtgccagctaccagacccagacaaactccccatctggagcaggctcccaccatcaccatcaccatcaccatcaccactga

SEQ ID NO: 4809 - DNA, 2148 bp, Artificial Sequence
  Description of Artificial Sequence: Synthetic polynucleotide
atgggcatcctgccaagcccaggaatgcccgccctgctgtctctggtgagcctgctgtccgtgctgctgatgggatgcgtggcagagacaggcacacagtgcgtgaacctgaccacaaggacccagctgccccctgcctataccaattctttcacacggggcgtgtactatcccgacaaggtgtttagaagctccgtgctgcactccacacaggatctgtttctgcctttcttttctaacgtgacctggttccacgccatccacgtgtccggcaccaatggcacaaagcggttcgacaatcccgtgctgccttttaacgatggcgtgtacttcgccagcaccgagaagtccaacatcatcagaggctggatctttggcaccacactggactctaagacacagagcctgctgatcgtgaacaatgccaccaacgtggtgatcaaggtgtgcgagttccagttttgtaatgatccattcctgggcgtgtactatcacaagaacaataagtcctggatggagtctgagtttcgcgtgtattctagcgccaacaattgcacatttgagtacgtgagccagcccttcctgatggacctggagggcaagcagggcaatttcaagaacctgagggagttcgtgtttaagaatatcgatggctacttcaagatctacagcaagcacaccccaatcaacctggtgcgcgacctgccacagggattctccgccctggagccactggtggatctgcccatcggcatcaacatcacccggtttcagacactgctggccctgcacagatcctacctgacaccaggcgactcctctagcggatggaccgcaggagctgccgcctactatgtgggctatctgcagccccggaccttcctgctgaagtacaacgagaatggcaccatcacagacgcagtggattgcgccctggaccccctgtctgagacaaagtgtacactgaagagctttaccgtggagaagggcatctatcagacaagcaatttcagggtgcagcctaccgagtccatcgtgcgctttcccaatatcacaaacctgtgcccttttggcgaggtgttcaacgccaccagattcgccagcgtgtacgcctggaatcggaagagaatctccaactgcgtggccgactattctgtgctgtacaactccgcctctttcagcacctttaagtgctatggcgtgtctcccacaaagctgaatgatctgtgctttaccaacgtgtacgccgatagcttcgtgatcaggggagacgaagtgagacagatcgcaccaggacagtatggaaagatcgcagactacaattataagctgcctgacgatttcaccggctgcgtgatcgcctggaactccaacaatctggattctaaagtgggcggcaactacaattatctgtacaggctgtttcgcaagtccaatctgaagccattcgagcgggacatctccacagagatctaccaggccggctctaccccctgcaatggcgtggagggctttaactgttatttccctctgcagtcttacggcttccagccaacaaacggcgtgggctatcagccctacagagtggtggtgctgtcctttgagctgctgcacgcaccagcaacagtgtgcggcccaaagaagtctaccaatctggtgaagaacaagtgcgtgaacttcaacttcaacggactgaccggcacaggcgtgctgaccgagagcaataagaagttcctgccttttcagcagttcggcagggacatcgcagataccacagacgccgtgcgcgaccctcagaccctggagatcctggacatcacaccatgcagcttcggcggcgtgtccgtgatcacaccaggcaccaatacatccaaccaggtggccgtgctgtatcaggacgtgaattgtaccgaggtgcccgtggcaatccacgcagatcagctgacccctacatggcgggtgtactctaccggcagcaacgtgttccagacaagagccggatgcctgatcggagcagagcacgtgaacaatagctatgagtgcgacatccctatcggcgccggcatctgtgccagctaccagacccagacaaactccccatctggagcaggctcccaccatcaccatcaccatcaccatcaccactga

SEQ ID NO: 4810 - DNA, 2148 bp, Artificial Sequence
  Description of Artificial Sequence: Synthetic polynucleotide
atgggcatcctgccaagcccaggaatgcccgccctgctgtctctggtgagcctgctgtccgtgctgctgatgggatgcgtggcagagacaggcacacagtgcgtgaacctgaccacaaggacccagctgccccctgcctataccaattctttcacacggggcgtgtactatcccgacaaggtgtttagaagctccgtgctgcactccacacaggatctgtttctgcctttcttttctaacgtgacctggttccacgccatccacgtgtccggcaccaatggcacaaagcggttcgacaatcccgtgctgccttttaacgatggcgtgtacttcgccagcaccgagaagtccaacatcatcagaggctggatctttggcaccacactggactctaagacacagagcctgctgatcgtgaacaatgccaccaacgtggtgatcaaggtgtgcgagttccagttttgtaatgatccattcctgggcgtgtactatcacaagaacaataagtcctggatggagtctgagtttcgcgtgtattctagcgccaacaattgcacatttgagtacgtgagccagcccttcctgatggacctggagggcaagcagggcaatttcaagaacctgagggagttcgtgtttaagaatatcgatggctacttcaagatctacagcaagcacaccccaatcaacctggtgcgcgacctgccacagggattctccgccctggagccactggtggatctgcccatcggcatcaacatcacccggtttcagacactgctggccctgcacagatcctacctgacaccaggcgactcctctagcggatggaccgcaggagctgccgcctactatgtgggctatctgcagccccggaccttcctgctgaagtacaacgagaatggcaccatcacagacgcagtggattgcgccctggaccccctgtctgagacaaagtgtacactgaagagctttaccgtggagaagggcatctatcagacaagcaatttcagggtgcagcctaccgagtccatcgtgcgctttcccaatatcacaaacctgtgcccttttggcgaggtgttcaacgccaccagattcgccagcgtgtacgcctggaatcggaagagaatctccaactgcgtggccgactattctgtgctgtacaactccgcctctttctggacctttaagtgctatggcgtgtctcccacaaagctgaatgatctgtgctttaccaacgtgtacgccgatagcttcgtgatcaggggagacgaagtgagacagatcgcaccaggacagacaggaaagatcgcagactacaattataagctgcctgacgatttcaccggctgcgtgatcgcctggaactccaacaatctggattctaaagtgggcggcaactacaattatctgtacaggctgtttcgcaagtccaatctgaagccattcgagcgggacatctccacagagatctaccaggccggctctaccccctgcaatggcgtggagggctttaactgttatttccctctgcagtcttacggcttccagccaacaaacggcgtgggctatcagccctacagagtggtggtgctgtcctttgagctgctgcacgcaccagcaacagtgtgcggcccaaagaagtctaccaatctggtgaagaacaagtgcgtgaacttcaacttcaacggactgaccggcacaggcgtgctgaccgagagcaataagaagttcctgccttttcagcagttcggcagggacatcgcagataccacagacgccgtgcgcgaccctcagaccctggagatcctggacatcacaccatgcagcttcggcggcgtgtccgtgatcacaccaggcaccaatacatccaaccaggtggccgtgctgtatcaggacgtgaattgtaccgaggtgcccgtggcaatccacgcagatcagctgacccctacatggcgggtgtactctaccggcagcaacgtgttccagacaagagccggatgcctgatcggagcagagcacgtgaacaatagctatgagtgcgacatccctatcggcgccggcatctgtgccagctaccagacccagacaaactccccatctggagcaggctcccaccatcaccatcaccatcaccatcaccactga

SEQ ID NO: 4811 - DNA, 2148 bp, Artificial Sequence
  Description of Artificial Sequence: Synthetic polynucleotide
atgggcatcctgccaagcccaggaatgcccgccctgctgtctctggtgagcctgctgtccgtgctgctgatgggatgcgtggcagagacaggcacacagtgcgtgaacctgaccacaaggacccagctgccccctgcctataccaattctttcacacggggcgtgtactatcccgacaaggtgtttagaagctccgtgctgcactccacacaggatctgtttctgcctttcttttctaacgtgacctggttccacgccatccacgtgtccggcaccaatggcacaaagcggttcgacaatcccgtgctgccttttaacgatggcgtgtacttcgccagcaccgagaagtccaacatcatcagaggctggatctttggcaccacactggactctaagacacagagcctgctgatcgtgaacaatgccaccaacgtggtgatcaaggtgtgcgagttccagttttgtaatgatccattcctgggcgtgtactatcacaagaacaataagtcctggatggagtctgagtttcgcgtgtattctagcgccaacaattgcacatttgagtacgtgagccagcccttcctgatggacctggagggcaagcagggcaatttcaagaacctgagggagttcgtgtttaagaatatcgatggctacttcaagatctacagcaagcacaccccaatcaacctggtgcgcgacctgccacagggattctccgccctggagccactggtggatctgcccatcggcatcaacatcacccggtttcagacactgctggccctgcacagatcctacctgacaccaggcgactcctctagcggatggaccgcaggagctgccgcctactatgtgggctatctgcagccccggaccttcctgctgaagtacaacgagaatggcaccatcacagacgcagtggattgcgccctggaccccctgtctgagacaaagtgtacactgaagagctttaccgtggagaagggcatctatcagacaagcaatttcagggtgcagcctaccgagtccatcgtgcgctttcccaatatcacaaacctgtgcccttttggcgaggtgttcaacgccaccagattcgccagcgtgtacgcctggaatcggaagagaatctccaactgcgtggccgactattctgtgctgtacaactccgcctctttcagccaatttaagtgctatggcgtgtctcccacaaagctgaatgatctgtgctttaccaacgtgtacgccgatagcttcgtgatcaggggagacgaagtgagacagatcgcaccaggacagacaggaaagatcgcagactacaattataagctgcctgacgatttcaccggctgcgtgatcgcctggaactccaacaatctggattctaaagtgggcggcaactacaattatctgtacaggctgtttcgcaagtccaatctgaagccattcgagcgggacatctccacagagatctaccaggccggctctaccccctgcaatggcgtggagggctttaactgttatttccctctgcagtcttacggcttccagccaacaaacggcgtgggctatcagccctacagagtggtggtgctgtcctttgagctgctgcacgcaccagcaacagtgtgcggcccaaagaagtctaccaatctggtgaagaacaagtgcgtgaacttcaacttcaacggactgaccggcacaggcgtgctgaccgagagcaataagaagttcctgccttttcagcagttcggcagggacatcgcagataccacagacgccgtgcgcgaccctcagaccctggagatcctggacatcacaccatgcagcttcggcggcgtgtccgtgatcacaccaggcaccaatacatccaaccaggtggccgtgctgtatcaggacgtgaattgtaccgaggtgcccgtggcaatccacgcagatcagctgacccctacatggcgggtgtactctaccggcagcaacgtgttccagacaagagccggatgcctgatcggagcagagcacgtgaacaatagctatgagtgcgacatccctatcggcgccggcatctgtgccagctaccagacccagacaaactccccatctggagcaggctcccaccatcaccatcaccatcaccatcaccactga

SEQ ID NO: 4812 - DNA, 2148 bp, Artificial Sequence
  Description of Artificial Sequence: Synthetic polynucleotide
atgggcatcctgccaagcccaggaatgcccgccctgctgtctctggtgagcctgctgtccgtgctgctgatgggatgcgtggcagagacaggcacacagtgcgtgaacctgaccacaaggacccagctgccccctgcctataccaattctttcacacggggcgtgtactatcccgacaaggtgtttagaagctccgtgctgcactccacacaggatctgtttctgcctttcttttctaacgtgacctggttccacgccatccacgtgtccggcaccaatggcacaaagcggttcgacaatcccgtgctgccttttaacgatggcgtgtacttcgccagcaccgagaagtccaacatcatcagaggctggatctttggcaccacactggactctaagacacttagcctgctgatcgtgaacaatgccaccaacgtggtgatcaaggtgtgcgagttccagttttgtaatgatccattcctgggcgtgtactatcacaagaacaataagtcctggatggagtctgagtttcgcgtgtattctagcgccaacaattgcacatttgagtacgtgagccagcccttcctgatggacctggagggcaagcagggcaatttcaagaacctgagggagttcgtgtttaagaatatcgatggctacttcaagatctacagcaagcacaccccaatcaacctggtgcgcgacctgccacagggattctccgccctggagccactggtggatctgcccatcggcatcaacatcacccggtttcagacactgctggccctgcacagatcctacctgacaccaggcgactcctctagcggatggaccgcaggagctgccgcctactatgtgggctatctgcagccccggaccttcctgctgaagtacaacgagaatggcaccatcacagacgcagtggattgcgccctggaccccctgtctgagacaaagtgtacactgaagagctttaccgtggagaagggcatctatcagacaagcaatttcagggtgcagcctaccgagtccatcgtgcgctttcccaatatcacaaacctgtgcccttttggcgaggtgttcaacgccaccagattcgccagcgtgtacgcctggaatcggaagagaatctccaactgcgtggccgactattctgtgctgtacaactccgcctctttcagcacctttaagtgctatggcgtgtctcccacaaagctgaatgatctgtgctttaccaacgtgtacgccgatagcttcgtgatcaggggagacgaagtgagacagatcgcaccaggacagacaggaaagatcgcagactacaattataagctgcctgacgatttcaccggctgcgtgatcgcctggaactccaacaatctggattctaaagtgggcggcaactacaattatctgtacaggctgtttcgcaagtccaatctgaagccattcgagcgggacatctccacagagatctaccaggccggctctaccccctgcaatggcgtggagggctttaactgttatttccctctgcagtcttacggcttccagccaacaaacggcgtgggctatcagccctacagagtggtggtgctgtcctttgagctgctgcacgcaccagcaacagtgtgcggcccaaagaagtctaccaatctggtgaagaacaagtgcgtgaacttcaacttcaacggactgaccggcacaggcgtgctgaccgagagcaataagaagttcctgccttttcagcagttcggcagggacatcgcagataccacagacgccgtgcgcgaccctcagaccctggagatcctggacatcacaccatgcagcttcggcggcgtgtccgtgatcacaccaggcaccaatacatccaaccaggtggccgtgctgtatcaggacgtgaattgtaccgaggtgcccgtggcaatccacgcagatcagctgacccctacatggcgggtgtactctaccggcagcaacgtgttccagacaagagccggatgcctgatcggagcagagcacgtgaacaatagctatgagtgcgacatccctatcggcgccggcatctgtgccagctaccagacccagacaaactccccatctggagcaggctcccaccatcaccatcaccatcaccatcaccactga

SEQ ID NO: 4813 - DNA, 2148 bp, Artificial Sequence
  Description of Artificial Sequence: Synthetic polynucleotide
atgggcatcctgccaagcccaggaatgcccgccctgctgtctctggtgagcctgctgtccgtgctgctgatgggatgcgtggcagagacaggcacacagtgcgtgaacctgaccacaaggacccagctgccccctgcctataccaattctttcacacggggcgtgtactatcccgacaaggtgtttagaagctccgtgctgcactccacacaggatctgtttctgcctttcttttctaacgtgacctggttccacgccatccacgtgtccggcaccaatggcacaaagcggttcgacaatcccgtgctgccttttaacgatggcgtgtacttcgccagcaccgagaagtccaacatcatcagaggctggatctttggcaccacactggactctaagacacagagcctgctgatcgtgaacaatgccaccaacgtggtgatcaaggtgtgcgagttccagttttgtaatgatccattcctgggcgtgtactatcacaagaacaataagtcctggatggagtctgagtttcgcgtgtattctagcgccaacaattgcacatttgagtacgtgagccagcccttcctgatggacctggagggcaagcagggcaatttcaagaacctgagggagttcgtgtttaagaatatcgatggctacttcaagatctacagcaagcacaccccaatcaacctggtgcgcgacctgccacagggattctccgccctggagccactggtggatctgcccatcggcatcaacatcacccggtttcagacactgctggccctgcacagatcctacctgacaccaggcgactcctctagcggatggaccgcaggagctgccgcctactatgtgggctatctgcagccccggaccttcctgctgaagtacaacgagaatggcaccatcacagacgcagtggattgcgccctggaccccctgtctgagacaaagtgtacactgaagagctttaccgtggagaagggcatctatcagacaagcaatttcagggtgcagcctaccgagtccatcgtgcgctttcccaatatcacaaacctgtgcccttttggcgaggtgttcaacgccaccagattcgccagcgtgtacgcctggaatcggaagagaatctccaactgcgtggccgactattctgtgctgtacaactccgcctctttcagctcatttaagtgctatggcgtgtctcccacaaagctgaatgatctgtgctttaccaacgtgtacgccgatagcttcgtgatcaggggagacgaagtgagacagatcgcaccaggacagacaggaaagatcgcagactacaattataagctgcctgacgatttcaccggctgcgtgatcgcctggaactccaacaatctggattctaaagtgggcggcaactacaattatctgtacaggctgtttcgcaagtccaatctgaagccattcgagcgggacatctccacagagatctaccaggccggctctaccccctgcaatggcgtggagggctttaactgttatttccctctgcagtcttacggcttccagccaacaaacggcgtgggctatcagccctacagagtggtggtgctgtcctttgagctgctgcacgcaccagcaacagtgtgcggcccaaagaagtctaccaatctggtgaagaacaagtgcgtgaacttcaacttcaacggactgaccggcacaggcgtgctgaccgagagcaataagaagttcctgccttttcagcagttcggcagggacatcgcagataccacagacgccgtgcgcgaccctcagaccctggagatcctggacatcacaccatgcagcttcggcggcgtgtccgtgatcacaccaggcaccaatacatccaaccaggtggccgtgctgtatcaggacgtgaattgtaccgaggtgcccgtggcaatccacgcagatcagctgacccctacatggcgggtgtactctaccggcagcaacgtgttccagacaagagccggatgcctgatcggagcagagcacgtgaacaatagctatgagtgcgacatccctatcggcgccggcatctgtgccagctaccagacccagacaaactccccatctggagcaggctcccaccatcaccatcaccatcaccatcaccactga

SEQ ID NO: 4814 - DNA, 2148 bp, Artificial Sequence
  Description of Artificial Sequence: Synthetic polynucleotide
atgggcatcctgccaagcccaggaatgcccgccctgctgtctctggtgagcctgctgtccgtgctgctgatgggatgcgtggcagagacaggcacacagtgcgtgaacctgaccacaaggacccagctgccccctgcctataccaattctttcacacggggcgtgtactatcccgacaaggtgtttagaagctccgtgctgcactccacacaggatctgtttctgcctttcttttctaacgtgacctggttccacgccatccacgtgtccggcaccaatggcacaaagcggttcgacaatcccgtgctgccttttaacgatggcgtgtacttcgccagcaccgagaagtccaacatcatcagaggctggatctttggcaccacactggactctaagacacagagcctgctgatcgtgaacaatgccaccaacgtggtgatcaaggtgtgcgagttccagttttgtaatgatccattcctgggcgtgtactatcacaagaacaataagtcctggatggagtctgagtttcgcgtgtattctagcgccaacaattgcacatttgagtacgtgagccagcccttcctgatggacctggagggcaagcagggcaatttcaagaacctgagggagttcgtgtttaagaatatcgatggctacttcaagatctacagcaagcacaccccaatcaacctggtgcgcgacctgccacagggattctccgccctggagccactggtggatctgcccatcggcatcaacatcacccggtttcagacactgctggccctgcacagatcctacctgacaccaggcgactcctctagcggatggaccgcaggagctgccgcctactatgtgggctatctgcagccccggaccttcctgctgaagtacaacgagaatggcaccatcacagacgcagtggattgcgccctggaccccctgtctgagacaaagtgtacactgaagagctttaccgtggagaagggcatctatcagacaagcaatttcagggtgcagcctaccgagtccatcgtgcgctttcccaatatcacaaacctgtgcccttttggcgaggtgttcaacgccaccagattcgccagcgtgtacgcctggaatcggaagagaatctccaactgcgtggccgactattctgtgctgtacaactccccgtctttcagcacctttaagtgctatggcgtgtctcccacaaagctgaatgatctgtgctttaccaacgtgtacgccgatagcttcgtgatcaggggagacgaagtgagacagatcgcaccaggacagacaggaaagatcgcagactacaattataagctgcctgacgatttcaccggctgcgtgatcgcctggaactccaacaatctggattctaaagtgggcggcaactacaattatctgtacaggctgtttcgcaagtccaatctgaagccattcgagcgggacatctccacagagatctaccaggccggctctaccccctgcaatggcgtggagggctttaactgttatttccctctgcagtcttacggcttccagccaacaaacggcgtgggctatcagccctacagagtggtggtgctgtcctttgagctgctgcacgcaccagcaacagtgtgcggcccaaagaagtctaccaatctggtgaagaacaagtgcgtgaacttcaacttcaacggactgaccggcacaggcgtgctgaccgagagcaataagaagttcctgccttttcagcagttcggcagggacatcgcagataccacagacgccgtgcgcgaccctcagaccctggagatcctggacatcacaccatgcagcttcggcggcgtgtccgtgatcacaccaggcaccaatacatccaaccaggtggccgtgctgtatcaggacgtgaattgtaccgaggtgcccgtggcaatccacgcagatcagctgacccctacatggcgggtgtactctaccggcagcaacgtgttccagacaagagccggatgcctgatcggagcagagcacgtgaacaatagctatgagtgcgacatccctatcggcgccggcatctgtgccagctaccagacccagacaaactccccatctggagcaggctcccaccatcaccatcaccatcaccatcaccactga

SEQ ID NO: 4815 - DNA, 2148 bp, Artificial Sequence
  Description of Artificial Sequence: Synthetic polynucleotide
atgggcatcctgccaagcccaggaatgcccgccctgctgtctctggtgagcctgctgtccgtgctgctgatgggatgcgtggcagagacaggcacacagtgcgtgaacctgaccacaaggacccagctgccccctgcctataccaattctttcacacggggcgtgtactatcccgacaaggtgtttagaagctccgtgctgcactccacacaggatctgtttctgcctttcttttctaacgtgacctggttccacgccatccacgtgtccggcaccaatggcacaaagcggttcgacaatcccgtgctgccttttaacgatggcgtgtacttcgccagcaccgagaagtccaacatcatcagaggctggatctttggcaccacactggactctaagacacagagcctgctgatcgtgaacaatgccaccaacgtggtgatcaaggtgtgcgagttccagttttgtaatgatccattcctgggcgtgtactatcacaagaacaataagtcctggatggagtctgagtttcgcgtgtattctagcgccaacaattgcacatttgagtacgtgagccagcccttcctgatggacctggagggcaagcagggcaatttcaagaacctgagggagttcgtgtttaagaatatcgatggctacttcaagatctacagcaagcacaccccaatcaacctggtgcgcgacctgccacagggattctccgccctggagccactggtggatctgcccatcggcatcaacatcacccggtttcagacactgctggccctgcacagatcctacctgacaccaggcgactcctctagcggatggaccgcaggagctgccgcctactatgtgggctatctgcagccccggaccttcctgctgaagtacaacgagaatggcaccatcacagacgcagtggattgcgccctggaccccctgtctgagacaaagtgtacactgaagagctttaccgtggagaagggcatctatcagacaagcaatttcagggtgcagcctaccgagtccatcgtgcgctttcccaatatcacaaacctgtgcccttttggcgaggtgttcaacgccaccagattcgccagcgtgtacgcctggaatcggaagagaatctccaactgcgtggccgactattctgtgctgtacaactccgcctctttcagctgttttaagtgctatggcgtgtctcccacaaagctgaatgatctgtgctttaccaacgtgtacgccgatagcttcgtgatcaggggagacgaagtgagacagatcgcaccaggacagacaggaaagatcgcagactacaattataagctgcctgacgatttcaccggctgcgtgatcgcctggaactccaacaatctggattctaaagtgggcggcaactacaattatctgtacaggctgtttcgcaagtccaatctgaagccattcgagcgggacatctccacagagatctaccaggccggctctaccccctgcaatggcgtggagggctttaactgttatttccctctgcagtcttacggcttccagccaacaaacggcgtgggctatcagccctacagagtggtggtgctgtcctttgagctgctgcacgcaccagcaacagtgtgcggcccaaagaagtctaccaatctggtgaagaacaagtgcgtgaacttcaacttcaacggactgaccggcacaggcgtgctgaccgagagcaataagaagttcctgccttttcagcagttcggcagggacatcgcagataccacagacgccgtgcgcgaccctcagaccctggagatcctggacatcacaccatgcagcttcggcggcgtgtccgtgatcacaccaggcaccaatacatccaaccaggtggccgtgctgtatcaggacgtgaattgtaccgaggtgcccgtggcaatccacgcagatcagctgacccctacatggcgggtgtactctaccggcagcaacgtgttccagacaagagccggatgcctgatcggagcagagcacgtgaacaatagctatgagtgcgacatccctatcggcgccggcatctgtgccagctaccagacccagacaaactccccatctggagcaggctcccaccatcaccatcaccatcaccatcaccactga

SEQ ID NO: 4816 - protein, 715 aa, Artificial Sequence
  Description of Artificial Sequence: Synthetic polypeptide
MGILPSPGMPALLSLVSLLSVLLMGCVAETGTQCVNLTTRTQLPPAYTNSFTRGVYYPDKVFRSSVLHSTQDLFLPFFSNVTWFHAIHVSGTNGTKRFDNPVLPFNDGVYFASTEKSNIIRGWIFGTTLDSKTQSLLIVNNATNVVIKVCEFQFCNDPFLGVYYHKNNKSWMESEFRVYSSANNCTFEYVSQPFLMDLEGKQGNFKNLREFVFKNIDGVFKIYSKHTPINLVRDLPQGFSALEPLVDLPIGINITRFQTLLALHRSYLTPGDSSSGWTAGAAAYYVGYLQPRTFLLKYNENGTITDAVDCALDPLSETKCTLKSFTVEKGIYQTSNFRVQPTESIVRFPNITNLCPFGEVFNATRFASVYAWNRKRISNCVADYSVLYNSASFSTFKCYGVSPTKLNDLCFTNVYADSFVIRGDEVRQIAPGQTGKIADYNYKLPDDFTGCVIAWNSNNLDSKVGGNYNYLYRLFRKSNLKPFERDISTEIYQAGSTPCNGVEGFNCYFPLQSYGFQPTNGVGYQPYRVVVLSFELLHAPATVCGPKKSTNLVKNKCVNFNFNGLTGTGVLTESNKKFLPFQQFGRDIADTTDAVRDPQTLEILDITPCSFGGVSVITPGTNTSNQVAVLYQDVNCTEVPVAIHADQLTPTWRVYSTGSNVFQTRAGCLIGAEHVNNSYECDIPIGAGICASYQTQTNSPSGAGSHHHHHHHHHH

SEQ ID NO: 4817 - protein, 715 aa, Artificial Sequence
  Description of Artificial Sequence: Synthetic polypeptide
MGILPSPGMPALLSLVSLLSVLLMGCVAETGTQCVNLTTRTQLPPAYTNSFTRGVYYPDKVFRSSVLHSTQDLFLPFFSNVTWFHAIHVSGTNGTKRFDNPVLPFNDGVYFASTEKSNIIRGWIFGTTLDSKTVSLLIVNNATNVVIKVCEFQFCNDPFLGVYYHKNNKSWMESEFRVYSSANNCTFEYVSQPFLMDLEGKQGNFKNLREFVFKNIDGYFKIYSKHTPINLVRDLPQGFSALEPLVDLPIGINITRFQTLLALHRSYLTPGDSSSGWTAGAAAYYVGYLQPRTFLLKYNENGTITDAVDCALDPLSETKCTLKSFTVEKGIYQTSNFRVQPTESIVRFPNITNLCPFGEVFNATRFASVYAWNRKRISNCVADYSVLYNSASFSTFKCYGVSPTKLNDLCFTNVYADSFVIRGDEVRQIAPGQTGKIADYNYKLPDDFTGCVIAWNSNNLDSKVGGNYNYLYRLFRKSNLKPFERDISTEIYQAGSTPCNGVEGFNCYFPLQSYGFQPTNGVGYQPYRVVVLSFELLHAPATVCGPKKSTNLVKNKCVNFNFNGLTGTGVLTESNKKFLPFQQFGRDIADTTDAVRDPQTLEILDITPCSFGGVSVITPGTNTSNQVAVLYQDVNCTEVPVAIHADQLTPTWRVYSTGSNVFQTRAGCLIGAEHVNNSYECDIPIGAGICASYQTQTNSPSGAGSHHHHHHHHHH

SEQ ID NO: 4818 - protein, 715 aa, Artificial Sequence
  Description of Artificial Sequence: Synthetic polypeptide
MGILPSPGMPALLSLVSLLSVLLMGCVAETGTQCVNLTTRTQLPPAYTNSFTRGVYYPDKVFRSSVLHSTQDLFLPFFSNVTWFHAIHVSGTNGTKRFDNPVLPFNDGVYFASTEKSNIIRGWIFGTTLDSKTQSLLIVNNATNVVIKVCEFQFCNDPFLGVYYHKNNKSWMESEFRVYSSANNCTFEYVSQPFLMDLEGKQGNFKNLREFVFKNIDGIFKIYSKHTPINLVRDLPQGFSALEPLVDLPIGINITRFQTLLALHRSYLTPGDSSSGWTAGAAAYYVGYLQPRTFLLKYNENGTITDAVDCALDPLSETKCTLKSFTVEKGIYQTSNFRVQPTESIVRFPNITNLCPFGEVFNATRFASVYAWNRKRISNCVADYSVLYNSASFSTFKCYGVSPTKLNDLCFTNVYADSFVIRGDEVRQIAPGQTGKIADYNYKLPDDFTGCVIAWNSNNLDSKVGGNYNYLYRLFRKSNLKPFERDISTEIYQAGSTPCNGVEGFNCYFPLQSYGFQPTNGVGYQPYRVVVLSFELLHAPATVCGPKKSTNLVKNKCVNFNFNGLTGTGVLTESNKKFLPFQQFGRDIADTTDAVRDPQTLEILDITPCSFGGVSVITPGTNTSNQVAVLYQDVNCTEVPVAIHADQLTPTWRVYSTGSNVFQTRAGCLIGAEHVNNSYECDIPIGAGICASYQTQTNSPSGAGSHHHHHHHHHH

SEQ ID NO: 4819 - protein, 715 aa, Artificial Sequence
  Description of Artificial Sequence: Synthetic polypeptide
MGILPSPGMPALLSLVSLLSVLLMGCVAETGTQCVNLTTRTQLPPAYTNSFTRGVYYPDKVFRSSVLHSTQDLFLPFFSNVTWFHAIHVSGTNGTKRFDNPVLPFNDGVYFASTEKSNIIRGWIFGTTLDSKTQSLLIVNNATNVVIKVCEFQFCNDPFLGVYYHKNNKSWMESEFRVYSSANNCTFEYVSQPFLMDLEGKQGNFKNLREFVFKNIDGYFKIYSKHTPINLVRDLPQGFSALEPLVDLPIGINITRFQTLLALHRSYLTPGDSSSGWTAGAAAYYVGYLQPRTFLLKYNENGTITDAVDCALDPLSETKCTLKSFTVEKGIYQTSNFRVQPTESIVRFPNITNLCPFGEVFNATRFASVYAWNRKRISNCVADYSVLYNSASFSTFKCYGVSPTKLNDLCFTNVYADSFVIRGDEVRQIAPGQSGKIADYNYKLPDDFTGCVIAWNSNNLDSKVGGNYNYLYRLFRKSNLKPFERDISTEIYQAGSTPCNGVEGFNCYFPLQSYGFQPTNGVGYQPYRVVVLSFELLHAPATVCGPKKSTNLVKNKCVNFNFNGLTGTGVLTESNKKFLPFQQFGRDIADTTDAVRDPQTLEILDITPCSFGGVSVITPGTNTSNQVAVLYQDVNCTEVPVAIHADQLTPTWRVYSTGSNVFQTRAGCLIGAEHVNNSYECDIPIGAGICASYQTQTNSPSGAGSHHHHHHHHHH

SEQ ID NO: 4820 - protein, 715 aa, Artificial Sequence
  Description of Artificial Sequence: Synthetic polypeptide
MGILPSPGMPALLSLVSLLSVLLMGCVAETGTQCVNLTTRTQLPPAYTNSFTRGVYYPDKVFRSSVLHSTQDLFLPFFSNVTWFHAIHVSGTNGTKRFDNPVLPFNDGVYFASTEKSNIIRGWIFGTTLDSKTQSLLIVNNATNVVIKVCEFQFCNDPFLGVYYHKNNKSWMESEFRVYSSANNCTFEYVSQPFLMDLEGKQGNFKNLREFVFKNIDGYFKIYSKHTPINLVRDLPQGFSALEPLVDLPIGINITRFQTLLALHRSYLTPGDSSSGWTAGAAAYYVGYLQPRTFLLKYNENGTITDAVDCALDPLSETKCTLKSFTVEKGIYQTSNFRVQPTESIVRFPNITNLCPFGEVFNATRFASVYAWNRKRISNCVADYSVLYNSASFSEFKCYGVSPTKLNDLCFTNVYADSFVIRGDEVRQIAPGQTGKIADYNYKLPDDFTGCVIAWNSNNLDSKVGGNYNYLYRLFRKSNLKPFERDISTEIYQAGSTPCNGVEGFNCYFPLQSYGFQPTNGVGYQPYRVVVLSFELLHAPATVCGPKKSTNLVKNKCVNFNFNGLTGTGVLTESNKKFLPFQQFGRDIADTTDAVRDPQTLEILDITPCSFGGVSVITPGTNTSNQVAVLYQDVNCTEVPVAIHADQLTPTWRVYSTGSNVFQTRAGCLIGAEHVNNSYECDIPIGAGICASYQTQTNSPSGAGSHHHHHHHHHH

SEQ ID NO: 4821 - protein, 715 aa, Artificial Sequence
  Description of Artificial Sequence: Synthetic polypeptide
MGILPSPGMPALLSLVSLLSVLLMGCVAETGTQCVNLTTRTQLPPAYTNSFTRGVYYPDKVFRSSVLHSTQDLFLPFFSNVTWFHAIHVSGTNGTKRFDNPVLPFNDGVYFASTEKSNIIRGWIFGTTLDSKTQSLLIVNNATNVVIKVCEFQFCNDPFLGVYYHKNNKSWMESEFRVYSSANNCTFEYVSQPFLMDLEGKQGNFKNLREFVFKNIDGYFKIYSKHTPINLVRDLPQGFSALEPLVDLPIGINITRFQTLLALHRSYLTPGDSSSGWTAGAAAYYVGYLQPRTFLLKYNENGTITDAVDCALDPLSETKCTLKSFTVEKGIYQTSNFRVQPTESIVRFPNITNLCPFGEVFNATRFASVYAWNRKRISNCVADYSVLYNSASFRTFKCYGVSPTKLNDLCFTNVYADSFVIRGDEVRQIAPGQTGKIADYNYKLPDDFTGCVIAWNSNNLDSKVGGNYNYLYRLFRKSNLKPFERDISTEIYQAGSTPCNGVEGFNCYFPLQSYGFQPTNGVGYQPYRVVVLSFELLHAPATVCGPKKSTNLVKNKCVNFNFNGLTGTGVLTESNKKFLPFQQFGRDIADTTDAVRDPQTLEILDITPCSFGGVSVITPGTNTSNQVAVLYQDVNCTEVPVAIHADQLTPTWRVYSTGSNVFQTRAGCLIGAEHVNNSYECDIPIGAGICASYQTQTNSPSGAGSHHHHHHHHHH

SEQ ID NO: 4822 - protein, 715 aa, Artificial Sequence
  Description of Artificial Sequence: Synthetic polypeptide
MGILPSPGMPALLSLVSLLSVLLMGCVAETGTQCVNLTTRTQLPPAYTNSFTRGVYYPDKVFRSSVLHSTQDLFLPFFSNVTWFHAIHVSGTNGTKRFDNPVLPFNDGVYFASTEKSNIIRGWIFGTTLDSKTQSLLIVNNATNVVIKVCEFQFCNDPFLGVYYHKNNKSWMESEFRVYSSANNCTFEYVSQPFLMDLEGKQGNFKNLREFVFKNIDGYFKIYSKHTPINLVRDLPQGFSALEPLVDLPIGINITRFQTLLALHRSYLTPGDSSSGWTAGAAAYYVGYLQPRTFLLKYNENGTITDAVDCALDPLSETKCTLKSFTVEKGIYQTSNFRVQPTESIVRFPNITNLCPFGEVFNATRFASVYAWNRKRISNCVADYSVLYNSASFSAFKCYGVSPTKLNDLCFTNVYADSFVIRGDEVRQIAPGQTGKIADYNYKLPDDFTGCVIAWNSNNLDSKVGGNYNYLYRLFRKSNLKPFERDISTEIYQAGSTPCNGVEGFNCYFPLQSYGFQPTNGVGYQPYRVVVLSFELLHAPATVCGPKKSTNLVKNKCVNFNFNGLTGTGVLTESNKKFLPFQQFGRDIADTTDAVRDPQTLEILDITPCSFGGVSVITPGTNTSNQVAVLYQDVNCTEVPVAIHADQLTPTWRVYSTGSNVFQTRAGCLIGAEHVNNSYECDIPIGAGICASYQTQTNSPSGAGSHHHHHHHHHH

SEQ ID NO: 4823 - protein, 715 aa, Artificial Sequence
  Description of Artificial Sequence: Synthetic polypeptide
MGILPSPGMPALLSLVSLLSVLLMGCVAETGTQCVNLTTRTQLPPAYTNSFTRGVYYPDKVFRSSVLHSTQDLFLPFFSNVTWFHAIHVSGTNGTKRFDNPVLPFNDGVYFASTEKSNIIRGWIFGTTLDSKTQSLLIVNNATNVVIKVCEFQFCNDPFLGVYYHKNNKSWMESEFRVYSSANNCTFEYVSQPFLMDLEGKQGNFKNLREFVFKNIDGYFKIYSKHTPINLVRDLPQGFSALEPLVDLPIGINITRFQTLLALHRSYLTPGDSSSGWTAGAAAYYVGYLQPRTFLLKYNENGTITDAVDCALDPLSETKCTLKSFTVEKGIYQTSNFRVQPTESIVRFPNITNLCPFGEVFNATRFASVYAWNRKRISNCVADYSVLYNSASFSLFKCYGVSPTKLNDLCFTNVYADSFVIRGDEVRQIAPGQTGKIADYNYKLPDDFTGCVIAWNSNNLDSKVGGNYNYLYRLFRKSNLKPFERDISTEIYQAGSTPCNGVEGFNCYFPLQSYGFQPTNGVGYQPYRVVVLSFELLHAPATVCGPKKSTNLVKNKCVNFNFNGLTGTGVLTESNKKFLPFQQFGRDIADTTDAVRDPQTLEILDITPCSFGGVSVITPGTNTSNQVAVLYQDVNCTEVPVAIHADQLTPTWRVYSTGSNVFQTRAGCLIGAEHVNNSYECDIPIGAGICASYQTQTNSPSGAGSHHHHHHHHHH

SEQ ID NO: 4824 - protein, 715 aa, Artificial Sequence
  Description of Artificial Sequence: Synthetic polypeptide
MGILPSPGMPALLSLVSLLSVLLMGCVAETGTQCVNLTTRTQLPPAYTNSFTRGVYYPDKVFRSSVLHSTQDLFLPFFSNVTWFHAIHVSGTNGTKRFDNPVLPFNDGVYFASTEKSNIIRGWIFGTTLDSKTQSLLIVNNATNVVIKVCEFQFCNDPFLGVYYHKNNKSWMESEFRVYSSANNCTFEYVSQPFLMDLEGKQGNFKNLREFVFKNIDGYFKIYSKHTPINLVRDLPQGFSALEPLVDLPIGINITRFQTLLALHRSYLTPGDSSSGWTAGAAAYYVGYLQPRTFLLKYNENGTITDAVDCALDPLSETKCTLKSFTVEKGIYQTSNFRVQPTESIVRFPNITNLCPFGEVFNATRFASVYAWNRKRISNCVADYSVLYNSASFSMFKCYGVSPTKLNDLCFTNVYADSFVIRGDEVRQIAPGQTGKIADYNYKLPDDFTGCVIAWNSNNLDSKVGGNYNYLYRLFRKSNLKPFERDISTEIYQAGSTPCNGVEGFNCYFPLQSYGFQPTNGVGYQPYRVVVLSFELLHAPATVCGPKKSTNLVKNKCVNFNFNGLTGTGVLTESNKKFLPFQQFGRDIADTTDAVRDPQTLEILDITPCSFGGVSVITPGTNTSNQVAVLYQDVNCTEVPVAIHADQLTPTWRVYSTGSNVFQTRAGCLIGAEHVNNSYECDIPIGAGICASYQTQTNSPSGAGSHHHHHHHHHH

SEQ ID NO: 4825 - protein, 715 aa, Artificial Sequence
  Description of Artificial Sequence: Synthetic polypeptide
MGILPSPGMPALLSLVSLLSVLLMGCVAETGTQCVNLTTRTQLPPAYTNSFTRGVYYPDKVFRSSVLHSTQDLFLPFFSNVTWFHAIHVSGTNGTKRFDNPVLPFNDGVYFASTEKSNIIRGWIFGTTLDSKTQSLLIVNNATNVVIKVCEFQFCNDPFLGVYYHKNNKSWMESEFRVYSSANNCTFEYVSQPFLMDLEGKQGNFKNLREFVFKNIDGYFKIYSKHTPINLVRDLPQGFSALEPLVDLPIGINITRFQTLLALHRSYLTPGDSSSGWTAGAAAYYVGYLQPRTFLLKYNENGTITDAVDCALDPLSETKCTLKSFTVEKGIYQTSNFRVQPTESIVRFPNITNLCPFGEVFNATRFASVYAWNRKRISNCVADYSVLYNSASFSTFKCYGVSPTKLNDLCFTNVYADSFVIRGDEVRQIAPGQPGKIADYNYKLPDDFTGCVIAWNSNNLDSKVGGNYNYLYRLFRKSNLKPFERDISTEIYQAGSTPCNGVEGFNCYFPLQSYGFQPTNGVGYQPYRVVVLSFELLHAPATVCGPKKSTNLVKNKCVNFNFNGLTGTGVLTESNKKFLPFQQFGRDIADTTDAVRDPQTLEILDITPCSFGGVSVITPGTNTSNQVAVLYQDVNCTEVPVAIHADQLTPTWRVYSTGSNVFQTRAGCLIGAEHVNNSYECDIPIGAGICASYQTQTNSPSGAGSHHHHHHHHHH

SEQ ID NO: 4826 - protein, 715 aa, Artificial Sequence
  Description of Artificial Sequence: Synthetic polypeptide
MGILPSPGMPALLSLVSLLSVLLMGCVAETGTQCVNLTTRTQLPPAYTNSFTRGVYYPDKVFRSSVLHSTQDLFLPFFSNVTWFHAIHVSGTNGTKRFDNPVLPFNDGVYFASTEKSNIIRGWIFGTTLDSKTQSLLIVNNATNVVIKVCEFQFCNDPFLGVYYHKNNKSWMESEFRVYSSANNCTFEYVSQPFLMDLEGKQGNFKNLREFVFKNIDGYFKIYSKHTPINLVRDLPQGFSALEPLVDLPIGINITRFQTLLALHRSYLTPGDSSSGWTAGAAAYYVGYLQPRTFLLKYNENGTITDAVDCALDPLSETKCTLKSFTVEKGIYQTSNFRVQPTESIVRFPNITNLCPFGEVFNATRFASVYAWNRKRISNCVADYSVLYRSASFSTFKCYGVSPTKLNDLCFTNVYADSFVIRGDEVRQIAPGQTGKIADYNYKLPDDFTGCVIAWNSNNLDSKVGGNYNYLYRLFRKSNLKPFERDISTEIYQAGSTPCNGVEGFNCYFPLQSYGFQPTNGVGYQPYRVVVLSFELLHAPATVCGPKKSTNLVKNKCVNFNFNGLTGTGVLTESNKKFLPFQQFGRDIADTTDAVRDPQTLEILDITPCSFGGVSVITPGTNTSNQVAVLYQDVNCTEVPVAIHADQLTPTWRVYSTGSNVFQTRAGCLIGAEHVNNSYECDIPIGAGICASYQTQTNSPSGAGSHHHHHHHHHH

SEQ ID NO: 4827 - protein, 715 aa, Artificial Sequence
  Description of Artificial Sequence: Synthetic polypeptide
MGILPSPGMPALLSLVSLLSVLLMGCVAETGTQCVNLTTRTQLPPAYTNSFTRGVYYPDKVFRSSVLHSTQDLFLPFFSNVTWFHAIHVSGTNGTKRFDNPVLPFNDGVYFASTEKSNIIRGWIFGTTLDSKTQSLLIVNNATNVVIKVCEFQFCNDPFLGVYYHKNNKSWMESEFRVYSSANNCTFEYVSQPFLMDLEGKQGNFKNLREFVFKNIDGYFKIYSKHTPINLVRDLPQGFSALEPLVDLPIGINITRFQTLLALHRSYLTPGDSSSGWTAGAAAYYVGYLQPRTFLLKYNENGTITDAVDCALDPLSETKCTLKSFTVEKGIYQTSNFRVQPTESIVRFPNITNLCPFGEVFNATRFASVYAWNRKRISNCVADYSVLYNSASFSTFKCYGVSPTKLNDLCFTNVYADSFVIRGDEVRQIAPGQWGKIADYNYKLPDDFTGCVIAWNSNNLDSKVGGNYNYLYRLFRKSNLKPFERDISTEIYQAGSTPCNGVEGFNCYFPLQSYGFQPTNGVGYQPYRVVVLSFELLHAPATVCGPKKSTNLVKNKCVNFNFNGLTGTGVLTESNKKFLPFQQFGRDIADTTDAVRDPQTLEILDITPCSFGGVSVITPGTNTSNQVAVLYQDVNCTEVPVAIHADQLTPTWRVYSTGSNVFQTRAGCLIGAEHVNNSYECDIPIGAGICASYQTQTNSPSGAGSHHHHHHHHHH

SEQ ID NO: 4828 - protein, 715 aa, Artificial Sequence
  Description of Artificial Sequence: Synthetic polypeptide
MGILPSPGMPALLSLVSLLSVLLMGCVAETGTQCVNLTTRTQLPPAYTNSFTRGVYYPDKVFRSSVLHSTQDLFLPFFSNVTWFHAIHVSGTNGTKRFDNPVLPFNDGVYFASTEKSNIIRGWIFGTTLDSKTQSLLIVNNATNVVIKVCEFQFCNDPFLGVYYHKNNKSWMESEFRVYSSANNCTFEYVSQPFLMDLEGKQGNFKNLREFVFKNIDGYFKIYSKHTPINLVRDLPQGFSALEPLVDLPIGINITRFQTLLALHRSYLTPGDSSSGWTAGAAAYYVGYLQPRTFLLKYNENGTITDAVDCALDPLSETKCTLKSFTVEKGIYQTSNFRVQPTESIVRFPNITNLCPFGEVFNATRFASVYAWNRKRISNCVADYSVLYNSASFNTFKCYGVSPTKLNDLCFTNVYADSFVIRGDEVRQIAPGQTGKIADYNYKLPDDFTGCVIAWNSNNLDSKVGGNYNYLYRLFRKSNLKPFERDISTEIYQAGSTPCNGVEGFNCYFPLQSYGFQPTNGVGYQPYRVVVLSFELLHAPATVCGPKKSTNLVKNKCVNFNFNGLTGTGVLTESNKKFLPFQQFGRDIADTTDAVRDPQTLEILDITPCSFGGVSVITPGTNTSNQVAVLYQDVNCTEVPVAIHADQLTPTWRVYSTGSNVFQTRAGCLIGAEHVNNSYECDIPIGAGICASYQTQTNSPSGAGSHHHHHHHHHH

SEQ ID NO: 4829 - protein, 715 aa, Artificial Sequence
  Description of Artificial Sequence: Synthetic polypeptide
MGILPSPGMPALLSLVSLLSVLLMGCVAETGTQCVNLTTRTQLPPAYTNSFTRGVYYPDKVFRSSVLHSTQDLFLPFFSNVTWFHAIHVSGTNGTKRFDNPVLPFNDGVYFASTEKSNIIRGWIFGTTLDSKTQSLLIVNNATNVVIKVCEFQFCNDPFLGVYYHKNNKSWMESEFRVYSSANNCTFEYVSQPFLMDLEGKQGNFKNLREFVFKNIDGYFKIYSKHTPINLVRDLPQGFSALEPLVDLPIGINITRFQTLLALHRSYLTPGDSSSGWTAGAAAYYVGYLQPRTFLLKYNENGTITDAVDCALDPLSETKCTLKSFTVEKGIYQTSNFRVQPTESIVRFPNITNLCPFGEVFNATRFASVYAWNRKRISNCVADYSVLYNSASFSTFKCYGVSPTKLNDLCFTNVYADSFVIRGDEVRQIAPGQHGKIADYNYKLPDDFTGCVIAWNSNNLDSKVGGNYNYLYRLFRKSNLKPFERDISTEIYQAGSTPCNGVEGFNCYFPLQSYGFQPTNGVGYQPYRVVVLSFELLHAPATVCGPKKSTNLVKNKCVNFNFNGLTGTGVLTESNKKFLPFQQFGRDIADTTDAVRDPQTLEILDITPCSFGGVSVITPGTNTSNQVAVLYQDVNCTEVPVAIHADQLTPTWRVYSTGSNVFQTRAGCLIGAEHVNNSYECDIPIGAGICASYQTQTNSPSGAGSHHHHHHHHHH

SEQ ID NO: 4830 - protein, 715 aa, Artificial Sequence
  Description of Artificial Sequence: Synthetic polypeptide
MGILPSPGMPALLSLVSLLSVLLMGCVAETGTQCVNLTTRTQLPPAYTNSFTRGVYYPDKVFRSSVLHSTQDLFLPFFSNVTWFHAIHVSGTNGTKRFDNPVLPFNDGVYFASTEKSNIIRGWIFGTTLDSKTQSLLIVNNATNVVIKVCEFQFCNDPFLGVYYHKNNKSWMESEFRVYSSANNCTFEYVSQPFLMDLEGKQGNFKNLREFVFKNIDGYFKIYSKHTPINLVRDLPQGFSALEPLVDLPIGINITRFQTLLALHRSYLTPGDSSSGWTAGAAAYYVGYLQPRTFLLKYNENGTITDAVDCALDPLSETKCTLKSFTVEKGIYQTSNFRVQPTESIVRFPNITNLCPFGEVFNATRFASVYAWNRKRISNCVADYSVLYNSASFVTFKCYGVSPTKLNDLCFTNVYADSFVIRGDEVRQIAPGQTGKIADYNYKLPDDFTGCVIAWNSNNLDSKVGGNYNYLYRLFRKSNLKPFERDISTEIYQAGSTPCNGVEGFNCYFPLQSYGFQPTNGVGYQPYRVVVLSFELLHAPATVCGPKKSTNLVKNKCVNFNFNGLTGTGVLTESNKKFLPFQQFGRDIADTTDAVRDPQTLEILDITPCSFGGVSVITPGTNTSNQVAVLYQDVNCTEVPVAIHADQLTPTWRVYSTGSNVFQTRAGCLIGAEHVNNSYECDIPIGAGICASYQTQTNSPSGAGSHHHHHHHHHH

SEQ ID NO: 4831 - protein, 715 aa, Artificial Sequence
  Description of Artificial Sequence: Synthetic polypeptide
MGILPSPGMPALLSLVSLLSVLLMGCVAETGTQCVNLTTRTQLPPAYTNSFTRGVYYPDKVFRSSVLHSTQDLFLPFFSNVTWFHAIHVSGTNGTKRFDNPVLPFNDGVYFASTEKSNIIRGWIFGTTLDSKTQSLLIVNNATNVVIKVCEFQFCNDPFLGVYYHKNNKSWMESEFRVYSSANNCTFEYVSQPFLMDLEGKQGNFKNLREFVFKNIDGFFKIYSKHTPINLVRDLPQGFSALEPLVDLPIGINITRFQTLLALHRSYLTPGDSSSGWTAGAAAYYVGYLQPRTFLLKYNENGTITDAVDCALDPLSETKCTLKSFTVEKGIYQTSNFRVQPTESIVRFPNITNLCPFGEVFNATRFASVYAWNRKRISNCVADYSVLYNSASFSTFKCYGVSPTKLNDLCFTNVYADSFVIRGDEVRQIAPGQTGKIADYNYKLPDDFTGCVIAWNSNNLDSKVGGNYNYLYRLFRKSNLKPFERDISTEIYQAGSTPCNGVEGFNCYFPLQSYGFQPTNGVGYQPYRVVVLSFELLHAPATVCGPKKSTNLVKNKCVNFNFNGLTGTGVLTESNKKFLPFQQFGRDIADTTDAVRDPQTLEILDITPCSFGGVSVITPGTNTSNQVAVLYQDVNCTEVPVAIHADQLTPTWRVYSTGSNVFQTRAGCLIGAEHVNNSYECDIPIGAGICASYQTQTNSPSGAGSHHHHHHHHHH

SEQ ID NO: 4832 - protein, 715 aa, Artificial Sequence
  Description of Artificial Sequence: Synthetic polypeptide
MGILPSPGMPALLSLVSLLSVLLMGCVAETGTQCVNLTTRTQLPPAYTNSFTRGVYYPDKVFRSSVLHSTQDLFLPFFSNVTWFHAIHVSGTNGTKRFDNPVLPFNDGVYFASTEKSNIIRGWIFGTTLDSKTQSLLIVNNATNVVIKVCEFQFCNDPFLGVYYHKNNKSWMESEFRVYSSANNCTFEYVSQPFLMDLEGKQGNFKNLREFVFKNIDGYFKIYSKHTPINLVRDLPQGFSALEPLVDLPIGINITRFQTLLALHRSYLTPGDSSSGWTAGAAAYYVGYLQPRTFLLKYNENGTITDAVDCALDPLSETKCTLKSFTVEKGIYQTSNFRVQPTESIVRFPNITNLCPFGEVFNATRFASVYAWNRKRISNCVADYSVLYNSASFSTFKCYGVSPTKLNDLCFTNVYADSFVIRGDEVRQIAPGQYGKIADYNYKLPDDFTGCVIAWNSNNLDSKVGGNYNYLYRLFRKSNLKPFERDISTEIYQAGSTPCNGVEGFNCYFPLQSYGFQPTNGVGYQPYRVVVLSFELLHAPATVCGPKKSTNLVKNKCVNFNFNGLTGTGVLTESNKKFLPFQQFGRDIADTTDAVRDPQTLEILDITPCSFGGVSVITPGTNTSNQVAVLYQDVNCTEVPVAIHADQLTPTWRVYSTGSNVFQTRAGCLIGAEHVNNSYECDIPIGAGICASYQTQTNSPSGAGSHHHHHHHHHH

SEQ ID NO: 4833 - protein, 715 aa, Artificial Sequence
  Description of Artificial Sequence: Synthetic polypeptide
MGILPSPGMPALLSLVSLLSVLLMGCVAETGTQCVNLTTRTQLPPAYTNSFTRGVYYPDKVFRSSVLHSTQDLFLPFFSNVTWFHAIHVSGTNGTKRFDNPVLPFNDGVYFASTEKSNIIRGWIFGTTLDSKTQSLLIVNNATNVVIKVCEFQFCNDPFLGVYYHKNNKSWMESEFRVYSSANNCTFEYVSQPFLMDLEGKQGNFKNLREFVFKNIDGYFKIYSKHTPINLVRDLPQGFSALEPLVDLPIGINITRFQTLLALHRSYLTPGDSSSGWTAGAAAYYVGYLQPRTFLLKYNENGTITDAVDCALDPLSETKCTLKSFTVEKGIYQTSNFRVQPTESIVRFPNITNLCPFGEVFNATRFASVYAWNRKRISNCVADYSVLYNSASFWTFKCYGVSPTKLNDLCFTNVYADSFVIRGDEVRQIAPGQTGKIADYNYKLPDDFTGCVIAWNSNNLDSKVGGNYNYLYRLFRKSNLKPFERDISTEIYQAGSTPCNGVEGFNCYFPLQSYGFQPTNGVGYQPYRVVVLSFELLHAPATVCGPKKSTNLVKNKCVNFNFNGLTGTGVLTESNKKFLPFQQFGRDIADTTDAVRDPQTLEILDITPCSFGGVSVITPGTNTSNQVAVLYQDVNCTEVPVAIHADQLTPTWRVYSTGSNVFQTRAGCLIGAEHVNNSYECDIPIGAGICASYQTQTNSPSGAGSHHHHHHHHHH

SEQ ID NO: 4834 - protein, 715 aa, Artificial Sequence
  Description of Artificial Sequence: Synthetic polypeptide
MGILPSPGMPALLSLVSLLSVLLMGCVAETGTQCVNLTTRTQLPPAYTNSFTRGVYYPDKVFRSSVLHSTQDLFLPFFSNVTWFHAIHVSGTNGTKRFDNPVLPFNDGVYFASTEKSNIIRGWIFGTTLDSKTQSLLIVNNATNVVIKVCEFQFCNDPFLGVYYHKNNKSWMESEFRVYSSANNCTFEYVSQPFLMDLEGKQGNFKNLREFVFKNIDGYFKIYSKHTPINLVRDLPQGFSALEPLVDLPIGINITRFQTLLALHRSYLTPGDSSSGWTAGAAAYYVGYLQPRTFLLKYNENGTITDAVDCALDPLSETKCTLKSFTVEKGIYQTSNFRVQPTESIVRFPNITNLCPFGEVFNATRFASVYAWNRKRISNCVADYSVLYNSASFSQFKCYGVSPTKLNDLCFTNVYADSFVIRGDEVRQIAPGQTGKIADYNYKLPDDFTGCVIAWNSNNLDSKVGGNYNYLYRLFRKSNLKPFERDISTEIYQAGSTPCNGVEGFNCYFPLQSYGFQPTNGVGYQPYRVVVLSFELLHAPATVCGPKKSTNLVKNKCVNFNFNGLTGTGVLTESNKKFLPFQQFGRDIADTTDAVRDPQTLEILDITPCSFGGVSVITPGTNTSNQVAVLYQDVNCTEVPVAIHADQLTPTWRVYSTGSNVFQTRAGCLIGAEHVNNSYECDIPIGAGICASYQTQTNSPSGAGSHHHHHHHHHH

SEQ ID NO: 4835 - protein, 715 aa, Artificial Sequence
  Description of Artificial Sequence: Synthetic polypeptide
MGILPSPGMPALLSLVSLLSVLLMGCVAETGTQCVNLTTRTQLPPAYTNSFTRGVYYPDKVFRSSVLHSTQDLFLPFFSNVTWFHAIHVSGTNGTKRFDNPVLPFNDGVYFASTEKSNIIRGWIFGTTLDSKTLSLLIVNNATNVVIKVCEFQFCNDPFLGVYYHKNNKSWMESEFRVYSSANNCTFEYVSQPFLMDLEGKQGNFKNLREFVFKNIDGYFKIYSKHTPINLVRDLPQGFSALEPLVDLPIGINITRFQTLLALHRSYLTPGDSSSGWTAGAAAYYVGYLQPRTFLLKYNENGTITDAVDCALDPLSETKCTLKSFTVEKGIYQTSNFRVQPTESIVRFPNITNLCPFGEVFNATRFASVYAWNRKRISNCVADYSVLYNSASFSTFKCYGVSPTKLNDLCFTNVYADSFVIRGDEVRQIAPGQTGKIADYNYKLPDDFTGCVIAWNSNNLDSKVGGNYNYLYRLFRKSNLKPFERDISTEIYQAGSTPCNGVEGFNCYFPLQSYGFQPTNGVGYQPYRVVVLSFELLHAPATVCGPKKSTNLVKNKCVNFNFNGLTGTGVLTESNKKFLPFQQFGRDIADTTDAVRDPQTLEILDITPCSFGGVSVITPGTNTSNQVAVLYQDVNCTEVPVAIHADQLTPTWRVYSTGSNVFQTRAGCLIGAEHVNNSYECDIPIGAGICASYQTQTNSPSGAGSHHHHHHHHHH

SEQ ID NO: 4836 - protein, 715 aa, Artificial Sequence
  Description of Artificial Sequence: Synthetic polypeptide
MGILPSPGMPALLSLVSLLSVLLMGCVAETGTQCVNLTTRTQLPPAYTNSFTRGVYYPDKVFRSSVLHSTQDLFLPFFSNVTWFHAIHVSGTNGTKRFDNPVLPFNDGVYFASTEKSNIIRGWIFGTTLDSKTQSLLIVNNATNVVIKVCEFQFCNDPFLGVYYHKNNKSWMESEFRVYSSANNCTFEYVSQPFLMDLEGKQGNFKNLREFVFKNIDGYFKIYSKHTPINLVRDLPQGFSALEPLVDLPIGINITRFQTLLALHRSYLTPGDSSSGWTAGAAAYYVGYLQPRTFLLKYNENGTITDAVDCALDPLSETKCTLKSFTVEKGIYQTSNFRVQPTESIVRFPNITNLCPFGEVFNATRFASVYAWNRKRISNCVADYSVLYNSASFSSFKCYGVSPTKLNDLCFTNVYADSFVIRGDEVRQIAPGQTGKIADYNYKLPDDFTGCVIAWNSNNLDSKVGGNYNYLYRLFRKSNLKPFERDISTEIYQAGSTPCNGVEGFNCYFPLQSYGFQPTNGVGYQPYRVVVLSFELLHAPATVCGPKKSTNLVKNKCVNFNFNGLTGTGVLTESNKKFLPFQQFGRDIADTTDAVRDPQTLEILDITPCSFGGVSVITPGTNTSNQVAVLYQDVNCTEVPVAIHADQLTPTWRVYSTGSNVFQTRAGCLIGAEHVNNSYECDIPIGAGICASYQTQTNSPSGAGSHHHHHHHHHH

SEQ ID NO: 4837 - protein, 715 aa, Artificial Sequence
  Description of Artificial Sequence: Synthetic polypeptide
MGILPSPGMPALLSLVSLLSVLLMGCVAETGTQCVNLTTRTQLPPAYTNSFTRGVYYPDKVFRSSVLHSTQDLFLPFFSNVTWFHAIHVSGTNGTKRFDNPVLPFNDGVYFASTEKSNIIRGWIFGTTLDSKTQSLLIVNNATNVVIKVCEFQFCNDPFLGVYYHKNNKSWMESEFRVYSSANNCTFEYVSQPFLMDLEGKQGNFKNLREFVFKNIDGYFKIYSKHTPINLVRDLPQGFSALEPLVDLPIGINITRFQTLLALHRSYLTPGDSSSGWTAGAAAYYVGYLQPRTFLLKYNENGTITDAVDCALDPLSETKCTLKSFTVEKGIYQTSNFRVQPTESIVRFPNITNLCPFGEVFNATRFASVYAWNRKRISNCVADYSVLYNSPSFSTFKCYGVSPTKLNDLCFTNVYADSFVIRGDEVRQIAPGQTGKIADYNYKLPDDFTGCVIAWNSNNLDSKVGGNYNYLYRLFRKSNLKPFERDISTEIYQAGSTPCNGVEGFNCYFPLQSYGFQPTNGVGYQPYRVVVLSFELLHAPATVCGPKKSTNLVKNKCVNFNFNGLTGTGVLTESNKKFLPFQQFGRDIADTTDAVRDPQTLEILDITPCSFGGVSVITPGTNTSNQVAVLYQDVNCTEVPVAIHADQLTPTWRVYSTGSNVFQTRAGCLIGAEHVNNSYECDIPIGAGICASYQTQTNSPSGAGSHHHHHHHHHH

SEQ ID NO: 4838 - protein, 715 aa, Artificial Sequence
  Description of Artificial Sequence: Synthetic polypeptide
MGILPSPGMPALLSLVSLLSVLLMGCVAETGTQCVNLTTRTQLPPAYTNSFTRGVYYPDKVFRSSVLHSTQDLFLPFFSNVTWFHAIHVSGTNGTKRFDNPVLPFNDGVYFASTEKSNIIRGWIFGTTLDSKTQSLLIVNNATNVVIKVCEFQFCNDPFLGVYYHKNNKSWMESEFRVYSSANNCTFEYVSQPFLMDLEGKQGNFKNLREFVFKNIDGYFKIYSKHTPINLVRDLPQGFSALEPLVDLPIGINITRFQTLLALHRSYLTPGDSSSGWTAGAAAYYVGYLQPRTFLLKYNENGTITDAVDCALDPLSETKCTLKSFTVEKGIYQTSNFRVQPTESIVRFPNITNLCPFGEVFNATRFASVYAWNRKRISNCVADYSVLYNSASFSCFKCYGVSPTKLNDLCFTNVYADSFVIRGDEVRQIAPGQTGKIADYNYKLPDDFTGCVIAWNSNNLDSKVGGNYNYLYRLFRKSNLKPFERDISTEIYQAGSTPCNGVEGFNCYFPLQSYGFQPTNGVGYQPYRVVVLSFELLHAPATVCGPKKSTNLVKNKCVNFNFNGLTGTGVLTESNKKFLPFQQFGRDIADTTDAVRDPQTLEILDITPCSFGGVSVITPGTNTSNQVAVLYQDVNCTEVPVAIHADQLTPTWRVYSTGSNVFQTRAGCLIGAEHVNNSYECDIPIGAGICASYQTQTNSPSGAGSHHHHHHHHHH

SEQ ID NO: 4839 - DNA, 3846 bp, Artificial Sequence
  Description of Artificial Sequence: Synthetic polynucleotide
atgggcatcctgccaagcccaggaatgcccgccctgctgtctctggtgagcctgctgtccgtgctgctgatgggatgcgtggcagagacaggcacacagtgcgtgaacctgaccacaaggacccagctgccccctgcctataccaattctttcacacggggcgtgtactatcccgacaaggtgtttagaagctccgtgctgcactccacacaggatctgtttctgcctttcttttctaacgtgacctggttccacgccatccacgtgtccggcaccaatggcacaaagcggttcgacaatcccgtgctgccttttaacgatggcgtgtacttcgccagcaccgagaagtccaacatcatcagaggctggatctttggcaccacactggactctaagacacagagcctgctgatcgtgaacaatgccaccaacgtggtgatcaaggtgtgcgagttccagttttgtaatgatccattcctgggcgtgtactatcacaagaacaataagtcctggatggagtctgagtttcgcgtgtattctagcgccaacaattgcacatttgagtacgtgagccagcccttcctgatggacctggagggcaagcagggcaatttcaagaacctgagggagttcgtgtttaagaatatcgatggctacttcaagatctacagcaagcacaccccaatcaacctggtgcgcgacctgccacagggattctccgccctggagccactggtggatctgcccatcggcatcaacatcacccggtttcagacactgctggccctgcacagatcctacctgacaccaggcgactcctctagcggatggaccgcaggagctgccgcctactatgtgggctatctgcagccccggaccttcctgctgaagtacaacgagaatggcaccatcacagacgcagtggattgcgccctggaccccctgtctgagacaaagtgtacactgaagagctttaccgtggagaagggcatctatcagacaagcaatttcagggtgcagcctaccgagtccatcgtgcgctttcccaatatcacaaacctgtgcccttttggcgaggtgttcaacgccaccagattcgccagcgtgtacgcctggaatcggaagagaatctccaactgcgtggccgactattctgtgctgtacaactccgcctctttcagcacctttaagtgctatggcgtgtctcccacaaagctgaatgatctgtgctttaccaacgtgtacgccgatagcttcgtgatcaggggagacgaagtgagacagatcgcaccaggacagacaggaaagatcgcagactacgtctataagctgcctgacgatttcaccggctgcgtgatcgcctggaactccaacaatctggattctaaagtgggcggcaactacaattatctgtacaggctgtttcgcaagtccaatctgaagccattcgagcgggacatctccacagagatctaccaggccggctctaccccctgcaatggcgtggagggctttaactgttatttccctctgcagtcttacggcttccagccaacaaacggcgtgggctatcagccctacagagtggtggtgctgtcctttgagctgctgcacgcaccagcaacagtgtgcggcccaaagaagtctaccaatctggtgaagaacaagtgcgtgaacttcaacttcaacggactgaccggcacaggcgtgctgaccgagagcaataagaagttcctgccttttcagcagttcggcagggacatcgcagataccacagacgccgtgcgcgaccctcagaccctggagatcctggacatcacaccatgcagcttcggcggcgtgtccgtgatcacaccaggcaccaatacatccaaccaggtggccgtgctgtatcaggacgtgaattgtaccgaggtgcccgtggcaatccacgcagatcagctgacccctacatggcgggtgtactctaccggcagcaacgtgttccagacaagagccggatgcctgatcggagcagagcacgtgaacaatagctatgagtgcgacatccctatcggcgccggcatctgtgccagctaccagacccagacaaactccccatctggagcaggctccgtggccagccagtccatcatcgcctataccatgagcctgggcgccgagaacagcgtggcctactccaacaattctatcgccatccctaccaacttcacaatcagcgtgaccacagagatcctgccagtgtctatgaccaagacaagcgtggactgcacaatgtatatctgtggcgatagcaccgagtgctccaacctgctgctgcagtacggctccttttgtacccagctgaatagagccctgacaggcatcgccgtggagcaggataagaacacacaggaggtgttcgcccaggtgaagcagatctacaagaccccacccatcaaggactttggcggcttcaacttcagccagatcctgcctgatccaagcaagccctccaagaggtcttttatcgaggacctgctgttcaacaaggtgaccctggccgatgccggcttcatcaagcagtatggagattgcctgggagacatcgcagcccgcgacctgatctgtgcccagaagtttaatggcctgaccgtgctgcctccactgctgacagatgagatgatcgcccagtacacatctgccctgctggccggcaccatcacaagcggatggaccttcggcgcaggagccgccctgcagatcccttttgccatgcagatggcctataggttcaacggcatcggcgtgacccagaatgtgctgtacgagaaccagaagctgatcgccaatcagtttaacagcgccatcggcaagatccaggactctctgtcctctacagccagcgccctgggcaagctgcaggatgtggtgaatcagaacgcccaggccctgaataccctggtgaagcagctgagctccaacttcggcgccatctctagcgtgctgaatgacatcctgagccggctggacccccctgaggcagaggtgcagatcgacaggctgatcacaggccgcctgcagagcctgcagacctacgtgacacagcagctgatcagggcagcagagatcagagcctccgccaatctggccgccaccaagatgagcgagtgcgtgctgggacagtccaagagggtggacttttgtggcaagggctatcacctgatgtctttcccacagagcgcccctcacggcgtggtgtttctgcacgtgacctacgtgccagcccaggagaagaacttcaccacagcaccagccatctgccacgatggaaaggcacactttcctagggagggcgtgttcgtgtctaacggcacccactggtttgtgacacagcgcaatttctacgagccacagatcatcaccacagacaatacattcgtgagcggcaactgtgatgtggtgatcggcatcgtgaacaataccgtgtatgatccactgcagcccgagctggactcctttaaggaggagctggataagtacttcaagaatcacacctctcccgacgtggatctgggcgacatctccggcatcaatgcctctgtggtgaacatccagaaggagatcgaccggctgaacgaggtggccaagaatctgaacgagagcctgatcgatctgcaggagctgggcaagtatgagcagtacatcaagggctctggcagagagaacctgtatttccagggaggaggaggcagcggatacatccctgaggcaccaagggacggacaggcctacgtgcgcaaggatggcgagtgggtgctgctgtccacctttctgggccatcatcaccaccaccaccaccactga

SEQ ID NO: 4840 - DNA, 3846 bp, Artificial Sequence
  Description of Artificial Sequence: Synthetic polynucleotide
atgggcatcctgccaagcccaggaatgcccgccctgctgtctctggtgagcctgctgtccgtgctgctgatgggatgcgtggcagagacaggcacacagtgcgtgaacctgaccacaaggacccagctgccccctgcctataccaattctttcacacggggcgtgtactatcccgacaaggtgtttagaagctccgtgctgcactccacacaggatctgtttctgcctttcttttctaacgtgacctggttccacgccatccacgtgtccggcaccaatggcacaaagcggttcgacaatcccgtgctgccttttaacgatggcgtgtacttcgccagcaccgagaagtccaacatcatcagaggctggatctttggcaccacactggactctaagacacagagcctgctgatcgtgaacaatgccaccaacgtggtgatcaaggtgtgcgagttccagttttgtaatgatccattcctgggcgtgtactatcacaagaacaataagtcctggatggagtctgagtttcgcgtgtattctagcgccaacaattgcacatttgagtacgtgagccagcccttcctgatggacctggagggcaagcagggcaatttcaagaacctgagggagttcgtgtttaagaatatcgatggctacttcaagatctacagcaagcacaccccaatcaacctggtgcgcgacctgccacagggattctccgccctggagccactggtggatctgcccatcggcatcaacatcacccggtttcagacactgctggccctgcacagatcctacctgacaccaggcgactcctctagcggatggaccgcaggagctgccgcctactatgtgggctatctgcagccccggaccttcctgctgaagtacaacgagaatggcaccatcacagacgcagtggattgcgccctggaccccctgtctgagacaaagtgtacactgaagagctttaccgtggagaagggcatctatcagacaagcaatttcagggtgcagcctaccgagtccatcgtgcgctttcccaatatcacaaacctgtgcccttttggcgaggtgttcaacgccaccagattcgccagcgtgtacgcctggaatcggaagagaatctccaactgcgtggccgactattctgtgctgtacaactccgcctctttcagcacctttaagtgctatggcgtgtctcccacaaagctgaatgatctgtgctttaccaacgtgtacgccgatagcttcgtgatcaggggagacgaagtgagacagatcgcaccaggacagacaggaaagatcgcagactacaattataagctgcctgacgatttcaccggctgcgtgatcgcctggaactccaacaatctggattctaaaaaaggcggcaactacaattatctgtacaggctgtttcgcaagtccaatctgaagccattcgagcgggacatctccacagagatctaccaggccggctctaccccctgcaatggcgtggagggctttaactgttatttccctctgcagtcttacggcttccagccaacaaacggcgtgggctatcagccctacagagtggtggtgctgtcctttgagctgctgcacgcaccagcaacagtgtgcggcccaaagaagtctaccaatctggtgaagaacaagtgcgtgaacttcaacttcaacggactgaccggcacaggcgtgctgaccgagagcaataagaagttcctgccttttcagcagttcggcagggacatcgcagataccacagacgccgtgcgcgaccctcagaccctggagatcctggacatcacaccatgcagcttcggcggcgtgtccgtgatcacaccaggcaccaatacatccaaccaggtggccgtgctgtatcaggacgtgaattgtaccgaggtgcccgtggcaatccacgcagatcagctgacccctacatggcgggtgtactctaccggcagcaacgtgttccagacaagagccggatgcctgatcggagcagagcacgtgaacaatagctatgagtgcgacatccctatcggcgccggcatctgtgccagctaccagacccagacaaactccccatctggagcaggctccgtggccagccagtccatcatcgcctataccatgagcctgggcgccgagaacagcgtggcctactccaacaattctatcgccatccctaccaacttcacaatcagcgtgaccacagagatcctgccagtgtctatgaccaagacaagcgtggactgcacaatgtatatctgtggcgatagcaccgagtgctccaacctgctgctgcagtacggctccttttgtacccagctgaatagagccctgacaggcatcgccgtggagcaggataagaacacacaggaggtgttcgcccaggtgaagcagatctacaagaccccacccatcaaggactttggcggcttcaacttcagccagatcctgcctgatccaagcaagccctccaagaggtcttttatcgaggacctgctgttcaacaaggtgaccctggccgatgccggcttcatcaagcagtatggagattgcctgggagacatcgcagcccgcgacctgatctgtgcccagaagtttaatggcctgaccgtgctgcctccactgctgacagatgagatgatcgcccagtacacatctgccctgctggccggcaccatcacaagcggatggaccttcggcgcaggagccgccctgcagatcccttttgccatgcagatggcctataggttcaacggcatcggcgtgacccagaatgtgctgtacgagaaccagaagctgatcgccaatcagtttaacagcgccatcggcaagatccaggactctctgtcctctacagccagcgccctgggcaagctgcaggatgtggtgaatcagaacgcccaggccctgaataccctggtgaagcagctgagctccaacttcggcgccatctctagcgtgctgaatgacatcctgagccggctggacccccctgaggcagaggtgcagatcgacaggctgatcacaggccgcctgcagagcctgcagacctacgtgacacagcagctgatcagggcagcagagatcagagcctccgccaatctggccgccaccaagatgagcgagtgcgtgctgggacagtccaagagggtggacttttgtggcaagggctatcacctgatgtctttcccacagagcgcccctcacggcgtggtgtttctgcacgtgacctacgtgccagcccaggagaagaacttcaccacagcaccagccatctgccacgatggaaaggcacactttcctagggagggcgtgttcgtgtctaacggcacccactggtttgtgacacagcgcaatttctacgagccacagatcatcaccacagacaatacattcgtgagcggcaactgtgatgtggtgatcggcatcgtgaacaataccgtgtatgatccactgcagcccgagctggactcctttaaggaggagctggataagtacttcaagaatcacacctctcccgacgtggatctgggcgacatctccggcatcaatgcctctgtggtgaacatccagaaggagatcgaccggctgaacgaggtggccaagaatctgaacgagagcctgatcgatctgcaggagctgggcaagtatgagcagtacatcaagggctctggcagagagaacctgtatttccagggaggaggaggcagcggatacatccctgaggcaccaagggacggacaggcctacgtgcgcaaggatggcgagtgggtgctgctgtccacctttctgggccatcatcaccaccaccaccaccactga

SEQ ID NO: 4841 - DNA, 3846 bp, Artificial Sequence
  Description of Artificial Sequence: Synthetic polynucleotide
atgggcatcctgccaagcccaggaatgcccgccctgctgtctctggtgagcctgctgtccgtgctgctgatgggatgcgtggcagagacaggcacacagtgcgtgaacctgaccacaaggacccagctgccccctgcctataccaattctttcacacggggcgtgtactatcccgacaaggtgtttagaagctccgtgctgcactccacacaggatctgtttctgcctttcttttctaacgtgacctggttccacgccatccacgtgtccggcaccaatggcacaaagcggttcgacaatcccgtgctgccttttaacgatggcgtgtacttcgccagcaccgagaagtccaacatcatcagaggctggatctttggcaccacactggactctaagacacagagcctgctgatcgtgaacaatgccaccaacgtggtgatcaaggtgtgcgagttccagttttgtaatgatccattcctgggcgtgtactatcacaagaacaataagtcctggatggagtctgagtttcgcgtgtattctagcgccaacaattgcacatttgagtacgtgagccagcccttcctgatggacctggagggcaagcagggcaatttcaagaacctgagggagttcgtgtttaagaatatcgatggctacttcaagatctacagcaagcacaccccaatcaacctggtgcgcgacctgccacagggattctccgccctggagccactggtggatctgcccatcggcatcaacatcacccggtttcagacactgctggccctgcacagatcctacctgacaccaggcgactcctctagcggatggaccgcaggagctgccgcctactatgtgggctatctgcagccccggaccttcctgctgaagtacaacgagaatggcaccatcacagacgcagtggattgcgccctggaccccctgtctgagacaaagtgtacactgaagagctttaccgtggagaagggcatctatcagacaagcaatttcagggtgcagcctaccgagtccatcgtgcgctttcccaatatcacaaacctgtgcccttttggcgaggtgttcaacgccaccagattcgccagcgtgtacgcctggaatcggaagagaatctccaactgcgtggccgactattctgtgctgtacaactccgcctctttcagcacctttaagtgctatggcgtgtctcccacaaagctgaatgatctgtgctttaccaacgtgtacgccgatagcttcgtgatcaggggagacgaagtgagacagatcgcaccaggacagacaggaaagatcgcagactacaattataagctgcctgacgatttcaccggctgcgtgatcgcctggaactccaacaatctggattctaaagtgggcggcaactacaattatctgtacaggctgtttcgcaagtccaatctgaagccattcgagcgggacatctccacagagatctaccaggccggctctaccccctgcaatggcgtggagggctttaactgttatttccctctgcagtcttacggcttccagccaacaaacggcgtgggctatcagccctacagagtggtggtgctgtcctttgagctgctgcacgcaccagcaacagtgtgcggcccaaagaagtctaccaatctggtgaagaacaagtgcgtgaacttcaacttcaacggactgaccggcacaggcgtgctgaccgagagcaataagaagttcctgccttttcagcagttcggcagggacatcgcagataccacagacgccgtgcgcgaccctcagaccctggagatcctggacatcacaccatgcagcttcggcggcgtgtccgtgatcacaccaggcaccaatacatccaaccaggtggccgtgctgtatcaggacgtgaattgtaccgaggtgcccgtggcaatccacgcagatcagctgacccctacatggcgggtgtactctaccggcagcaacgtgttccagacaagagccggatgcctgatcggagcagagcacgtgaacaatagctatgagtgcgacatccctatcggcgccggcatctgtgccagctaccagacccagacaaactccccatctggagcaggctccgtggccagccagtccatcatcgcctatacccgaagcctgggcgccgagaacagcgtggcctactccaacaattctatcgccatccctaccaacttcacaatcagcgtgaccacagagatcctgccagtgtctatgaccaagacaagcgtggactgcacaatgtatatctgtggcgatagcaccgagtgctccaacctgctgctgcagtacggctccttttgtacccagctgaatagagccctgacaggcatcgccgtggagcaggataagaacacacaggaggtgttcgcccaggtgaagcagatctacaagaccccacccatcaaggactttggcggcttcaacttcagccagatcctgcctgatccaagcaagccctccaagaggtcttttatcgaggacctgctgttcaacaaggtgaccctggccgatgccggcttcatcaagcagtatggagattgcctgggagacatcgcagcccgcgacctgatctgtgcccagaagtttaatggcctgaccgtgctgcctccactgctgacagatgagatgatcgcccagtacacatctgccctgctggccggcaccatcacaagcggatggaccttcggcgcaggagccgccctgcagatcccttttgccatgcagatggcctataggttcaacggcatcggcgtgacccagaatgtgctgtacgagaaccagaagctgatcgccaatcagtttaacagcgccatcggcaagatccaggactctctgtcctctacagccagcgccctgggcaagctgcaggatgtggtgaatcagaacgcccaggccctgaataccctggtgaagcagctgagctccaacttcggcgccatctctagcgtgctgaatgacatcctgagccggctggacccccctgaggcagaggtgcagatcgacaggctgatcacaggccgcctgcagagcctgcagacctacgtgacacagcagctgatcagggcagcagagatcagagcctccgccaatctggccgccaccaagatgagcgagtgcgtgctgggacagtccaagagggtggacttttgtggcaagggctatcacctgatgtctttcccacagagcgcccctcacggcgtggtgtttctgcacgtgacctacgtgccagcccaggagaagaacttcaccacagcaccagccatctgccacgatggaaaggcacactttcctagggagggcgtgttcgtgtctaacggcacccactggtttgtgacacagcgcaatttctacgagccacagatcatcaccacagacaatacattcgtgagcggcaactgtgatgtggtgatcggcatcgtgaacaataccgtgtatgatccactgcagcccgagctggactcctttaaggaggagctggataagtacttcaagaatcacacctctcccgacgtggatctgggcgacatctccggcatcaatgcctctgtggtgaacatccagaaggagatcgaccggctgaacgaggtggccaagaatctgaacgagagcctgatcgatctgcaggagctgggcaagtatgagcagtacatcaagggctctggcagagagaacctgtatttccagggaggaggaggcagcggatacatccctgaggcaccaagggacggacaggcctacgtgcgcaaggatggcgagtgggtgctgctgtccacctttctgggccatcatcaccaccaccaccaccactga

SEQ ID NO: 4842 - DNA, 3846 bp, Artificial Sequence
  Description of Artificial Sequence: Synthetic polynucleotide
atgggcatcctgccaagcccaggaatgcccgccctgctgtctctggtgagcctgctgtccgtgctgctgatgggatgcgtggcagagacaggcacacagtgcgtgaacctgaccacaaggacccagctgccccctgcctataccaattctttcacacggggcgtgtactatcccgacaaggtgtttagaagctccgtgctgcactccacacaggatctgtttctgcctttcttttctaacgtgacctggttccacgccatccacgtgtccggcaccaatggcacaaagcggttcgacaatcccgtgctgccttttaacgatggcgtgtacttcgccagcaccgagaagtccaacatcatcagaggctggatctttggcaccacactggactctaagacacagagcctgctgatcgtgaacaatgccaccaacgtggtgatcaaggtgtgcgagttccagttttgtaatgatccattcctgggcgtgtactatcacaagaacaataagtcctggatggagtctgagtttcgcgtgtattctagcgccaacaattgcacatttgagtacgtgagccagcccttcctgatggacctggagggcaagcagggcaatttcaagaacctgagggagttcgtgtttaagaatatcgatggctacttcaagatctacagcaagcacaccccaatcaacctggtgcgcgacctgccacagggattctccgccctggagccactggtggatctgcccatcggcatcaacatcacccggtttcagacactgctggccctgcacagatcctacctgacaccaggcgactcctctagcggatggaccgcaggagctgccgcctactatgtgggctatctgcagccccggaccttcctgctgaagtacaacgagaatggcaccatcacagacgcagtggattgcgccctggaccccctgtctgagacaaagtgtacactgaagagctttaccgtggagaagggcatctatcagacaagcaatttcagggtgcagcctaccgagtccatcgtgcgctttcccaatatcacaaacctgtgcccttttggcgaggtgttcaacgccaccagattcgccagcgtgtacgcctggaatcggaagagaatctccaactgcgtggccgactattctgtgctgtacaactccgcctctttcagcacctttaagtgctatggcgtgtctcccacaaagctgaatgatctgtgctttaccaacgtgtacgccgatagcttcgtgatcaggggagacgaagtgagacagatcgcaccaggacagacaggaaagatcgcagactacaattataagctgcctgacgatttcaccggctgcgtgatcgcctggaactccaacaatctggattctaaagtgggcggcaactacaattatctgtacaggctgtttcgcaagtccaatctgaagccattcgagcgggacatctccacagagatctaccaggccggctctaccccctgcaatggcgtggagggctttaactgttatttccctctgcagtcttacggcttccagccaacaaacggcgtgggctatcagccctacagagtggtggtgctgtcctttgagctgctgcacgcaccagcaacagtgtgcggcccaaagaagtctaccaatctggtgaagaacaagtgcgtgaacttcaacttcaacggactgaccggcacaggcgtgctgaccgagagcaataagaagttcctgccttttcagcagttcggcagggacatcgcagataccacagacgccgtgcgcgaccctcagaccctggagatcctggacatcacaccatgcagcttcggcggcgtgtccgtgatcacaccaggcaccaatacatccaaccaggtggccgtgctgtatcaggacgtgaattgtaccgaggtgcccgtggcaatccacgcagatcagctgacccctacatggcgggtgtactctaccggcagcaacgtgttccagacaagagccggatgcctgatcggagcagagcacgtgaacaatagctatgagtgcgacatccctatcggcgccggcatctgtgccagctaccagacccagacaaactccccatctggagcaggctccgtggccagccagtccatcatcgcctataccatgagcctgggcgccgagaacagcgtggcctactccaacaattctatcgccatccctaccaacttcacaatcagcgtgaccacagagatcctgccagtgtctatgaccaagacaagcgtggactgcacaatgtatatctgtggcgatagcaccgagtgctccaacctgctgctgcagtacggctccttttgtacccagctgaatagagccctgacaggcatcgccgtggagcaggataagaacacacaggaggtgttcgcccaggtgaagcagatctacaagaccccacccatcaaggactttggcggcttcaacttcagccagatcctgcctgatccaagcaagccctccaagaggtcttttatcgaggacctgctgttcaacaaggtgaccctggccgatgccggcttcatcaagcagtatggagattgcctgggagacatcgcagcccgcgacctgatctgtgcccagaagtttaatggcctgaccgtgctgcctccactgctgacagatgagatgatcgcccagtacacatctgccctgctggccggcaccatcacaagcggatggaccttcggcgcaggagccgccctgcagatcccttttgccatgcagatggcctataggttcaacggcatcggcgtgacccagaatgtgctgtacgagaaccagaagctgatcgccaatcagtttaacagcgccatcggcaagatccaggactctctgtcctctacagccagcgccctgggcaagctgcaggatgtggtgaatcagaacgcccaggccctgaataccctggtgaagcagctgagctccaacttcggcgccatctctagcgtgctgaatgacatcctgagccggctggaccccccttcagcagaggtgcagatcgacaggctgatcacaggccgcctgcagagcctgcagacctacgtgacacagcagctgatcagggcagcagagatcagagcctccgccaatctggccgccaccaagatgagcgagtgcgtgctgggacagtccaagagggtggacttttgtggcaagggctatcacctgatgtctttcccacagagcgcccctcacggcgtggtgtttctgcacgtgacctacgtgccagcccaggagaagaacttcaccacagcaccagccatctgccacgatggaaaggcacactttcctagggagggcgtgttcgtgtctaacggcacccactggtttgtgacacagcgcaatttctacgagccacagatcatcaccacagacaatacattcgtgagcggcaactgtgatgtggtgatcggcatcgtgaacaataccgtgtatgatccactgcagcccgagctggactcctttaaggaggagctggataagtacttcaagaatcacacctctcccgacgtggatctgggcgacatctccggcatcaatgcctctgtggtgaacatccagaaggagatcgaccggctgaacgaggtggccaagaatctgaacgagagcctgatcgatctgcaggagctgggcaagtatgagcagtacatcaagggctctggcagagagaacctgtatttccagggaggaggaggcagcggatacatccctgaggcaccaagggacggacaggcctacgtgcgcaaggatggcgagtgggtgctgctgtccacctttctgggccatcatcaccaccaccaccaccactga

SEQ ID NO: 4843 - DNA, 3846 bp, Artificial Sequence
  Description of Artificial Sequence: Synthetic polynucleotide
atgggcatcctgccaagcccaggaatgcccgccctgctgtctctggtgagcctgctgtccgtgctgctgatgggatgcgtggcagagacaggcacacagtgcgtgaacctgaccacaaggacccagctgccccctgcctataccaattctttcacacggggcgtgtactatcccgacaaggtgtttagaagctccgtgctgcactccacacaggatctgtttctgcctttcttttctaacgtgacctggttccacgccatccacgtgtccggcaccaatggcacaaagcggttcgacaatcccgtgctgccttttaacgatggcgtgtacttcgccagcaccgagaagtccaacatcatcagaggctggatctttggcaccacactggactctaagacacagagcctgctgatcgtgaacaatgccaccaacgtggtgatcaaggtgtgcgagttccagttttgtaatgatccattcctgggcgtgtactatcacaagaacaataagtcctggatggagtctgagtttcgcgtgtattctagcgccaacaattgcacatttgagtacgtgagccagcccttcctgatggacctggagggcaagcagggcaatttcaagaacctgagggagttcgtgtttaagaatatcgatggctacttcaagatctacagcaagcacaccccaatcaacctggtgcgcgacctgccacagggattctccgccctggagccactggtggatctgcccatcggcatcaacatcacccggtttcagacactgctggccctgcacagatcctacctgacaccaggcgactcctctagcggatggaccgcaggagctgccgcctactatgtgggctatctgcagccccggaccttcctgctgaagtacaacgagaatggcaccatcacagacgcagtggattgcgccctggaccccctgtctgagacaaagtgtacactgaagagctttaccgtggagaagggcatctatcagacaagcaatttcagggtgcagcctaccgagtccatcgtgcgctttcccaatatcacaaacctgtgcccttttggcgaggtgttcaacgccaccagattcgccagcgtgtacgcctggaatcggaagagaatctccaactgcgtggccgactattctgtgctgtacaactccgcctctttcagcacctttaagtgctatggcgtgtctcccacaaagctgaatgatctgtgctttaccaacgtgtacgccgatagcttcgtgatcaggggagacgaagtgagacagatcgcaccaggacagacaggaaaggtcgcagactacaattataagctgcctgacgatttcaccggctgcgtgatcgcctggaactccaacaatctggattctaaagtgggcggcaactacaattatctgtacaggctgtttcgcaagtccaatctgaagccattcgagcgggacatctccacagagatctaccaggccggctctaccccctgcaatggcgtggagggctttaactgttatttccctctgcagtcttacggcttccagccaacaaacggcgtgggctatcagccctacagagtggtggtgctgtcctttgagctgctgcacgcaccagcaacagtgtgcggcccaaagaagtctaccaatctggtgaagaacaagtgcgtgaacttcaacttcaacggactgaccggcacaggcgtgctgaccgagagcaataagaagttcctgccttttcagcagttcggcagggacatcgcagataccacagacgccgtgcgcgaccctcagaccctggagatcctggacatcacaccatgcagcttcggcggcgtgtccgtgatcacaccaggcaccaatacatccaaccaggtggccgtgctgtatcaggacgtgaattgtaccgaggtgcccgtggcaatccacgcagatcagctgacccctacatggcgggtgtactctaccggcagcaacgtgttccagacaagagccggatgcctgatcggagcagagcacgtgaacaatagctatgagtgcgacatccctatcggcgccggcatctgtgccagctaccagacccagacaaactccccatctggagcaggctccgtggccagccagtccatcatcgcctataccatgagcctgggcgccgagaacagcgtggcctactccaacaattctatcgccatccctaccaacttcacaatcagcgtgaccacagagatcctgccagtgtctatgaccaagacaagcgtggactgcacaatgtatatctgtggcgatagcaccgagtgctccaacctgctgctgcagtacggctccttttgtacccagctgaatagagccctgacaggcatcgccgtggagcaggataagaacacacaggaggtgttcgcccaggtgaagcagatctacaagaccccacccatcaaggactttggcggcttcaacttcagccagatcctgcctgatccaagcaagccctccaagaggtcttttatcgaggacctgctgttcaacaaggtgaccctggccgatgccggcttcatcaagcagtatggagattgcctgggagacatcgcagcccgcgacctgatctgtgcccagaagtttaatggcctgaccgtgctgcctccactgctgacagatgagatgatcgcccagtacacatctgccctgctggccggcaccatcacaagcggatggaccttcggcgcaggagccgccctgcagatcccttttgccatgcagatggcctataggttcaacggcatcggcgtgacccagaatgtgctgtacgagaaccagaagctgatcgccaatcagtttaacagcgccatcggcaagatccaggactctctgtcctctacagccagcgccctgggcaagctgcaggatgtggtgaatcagaacgcccaggccctgaataccctggtgaagcagctgagctccaacttcggcgccatctctagcgtgctgaatgacatcctgagccggctggacccccctgaggcagaggtgcagatcgacaggctgatcacaggccgcctgcagagcctgcagacctacgtgacacagcagctgatcagggcagcagagatcagagcctccgccaatctggccgccaccaagatgagcgagtgcgtgctgggacagtccaagagggtggacttttgtggcaagggctatcacctgatgtctttcccacagagcgcccctcacggcgtggtgtttctgcacgtgacctacgtgccagcccaggagaagaacttcaccacagcaccagccatctgccacgatggaaaggcacactttcctagggagggcgtgttcgtgtctaacggcacccactggtttgtgacacagcgcaatttctacgagccacagatcatcaccacagacaatacattcgtgagcggcaactgtgatgtggtgatcggcatcgtgaacaataccgtgtatgatccactgcagcccgagctggactcctttaaggaggagctggataagtacttcaagaatcacacctctcccgacgtggatctgggcgacatctccggcatcaatgcctctgtggtgaacatccagaaggagatcgaccggctgaacgaggtggccaagaatctgaacgagagcctgatcgatctgcaggagctgggcaagtatgagcagtacatcaagggctctggcagagagaacctgtatttccagggaggaggaggcagcggatacatccctgaggcaccaagggacggacaggcctacgtgcgcaaggatggcgagtgggtgctgctgtccacctttctgggccatcatcaccaccaccaccaccactga

SEQ ID NO: 4844 - DNA, 3846 bp, Artificial Sequence
  Description of Artificial Sequence: Synthetic polynucleotide
atgggcatcctgccaagcccaggaatgcccgccctgctgtctctggtgagcctgctgtccgtgctgctgatgggatgcgtggcagagacaggcacacagtgcgtgaacctgaccacaaggacccagctgccccctgcctataccaattctttcacacggggcgtgtactatcccgacaaggtgtttagaagctccgtgctgcactccacacaggatctgtttctgcctttcttttctaacgtgacctggttccacgccatccacgtgtccggcaccaatggcacaaagcggttcgacaatcccgtgctgccttttaacgatggcgtgtacttcgccagcaccgagaagtccaacatcatcagaggctggatctttggcaccacactggactctaagacacagagcctgctgatcgtgaacaatgccaccaacgtggtgatcaaggtgtgcgagttccagttttgtaatgatccattcctgggcgtgtactatcacaagaacaataagtcctggatggagtctgagtttcgcgtgtattctagcgccaacaattgcacatttgagtacgtgagccagcccttcctgatggacctggagggcaagcagggcaatttcaagaacctgagggagttcgtgtttaagaatatcgatggctacttcaagatctacagcaagcacaccccaatcaacctggtgcgcgacctgccacagggattctccgccctggagccactggtggatctgcccatcggcatcaacatcacccggtttcagacactgctggccctgcacagatcctacctgacaccaggcgactcctctagcggatggaccgcaggagctgccgcctactatgtgggctatctgcagccccggaccttcctgctgaagtacaacgagaatggcaccatcacagacgcagtggattgcgccctggaccccctgtctgagacaaagtgtacactgaagagctttaccgtggagaagggcatctatcagacaagcaatttcagggtgcagcctaccgagtccatcgtgcgctttcccaatatcacaaacctgtgcccttttggcgaggtgttcaacgccaccagattcgccagcgtgtacgcctggaatcggaagagaatctccaactgcgtggccgactattctgtgctgtacaactccggatctttcagcacctttaagtgctatggcgtgtctcccacaaagctgaatgatctgtgctttaccaacgtgtacgccgatagcttcgtgatcaggggagacgaagtgagacagatcgcaccaggacagacaggaaagatcgcagactacaattataagctgcctgacgatttcaccggctgcgtgatcgcctggaactccaacaatctggattctaaagtgggcggcaactacaattatctgtacaggctgtttcgcaagtccaatctgaagccattcgagcgggacatctccacagagatctaccaggccggctctaccccctgcaatggcgtggagggctttaactgttatttccctctgcagtcttacggcttccagccaacaaacggcgtgggctatcagccctacagagtggtggtgctgtcctttgagctgctgcacgcaccagcaacagtgtgcggcccaaagaagtctaccaatctggtgaagaacaagtgcgtgaacttcaacttcaacggactgaccggcacaggcgtgctgaccgagagcaataagaagttcctgccttttcagcagttcggcagggacatcgcagataccacagacgccgtgcgcgaccctcagaccctggagatcctggacatcacaccatgcagcttcggcggcgtgtccgtgatcacaccaggcaccaatacatccaaccaggtggccgtgctgtatcaggacgtgaattgtaccgaggtgcccgtggcaatccacgcagatcagctgacccctacatggcgggtgtactctaccggcagcaacgtgttccagacaagagccggatgcctgatcggagcagagcacgtgaacaatagctatgagtgcgacatccctatcggcgccggcatctgtgccagctaccagacccagacaaactccccatctggagcaggctccgtggccagccagtccatcatcgcctataccatgagcctgggcgccgagaacagcgtggcctactccaacaattctatcgccatccctaccaacttcacaatcagcgtgaccacagagatcctgccagtgtctatgaccaagacaagcgtggactgcacaatgtatatctgtggcgatagcaccgagtgctccaacctgctgctgcagtacggctccttttgtacccagctgaatagagccctgacaggcatcgccgtggagcaggataagaacacacaggaggtgttcgcccaggtgaagcagatctacaagaccccacccatcaaggactttggcggcttcaacttcagccagatcctgcctgatccaagcaagccctccaagaggtcttttatcgaggacctgctgttcaacaaggtgaccctggccgatgccggcttcatcaagcagtatggagattgcctgggagacatcgcagcccgcgacctgatctgtgcccagaagtttaatggcctgaccgtgctgcctccactgctgacagatgagatgatcgcccagtacacatctgccctgctggccggcaccatcacaagcggatggaccttcggcgcaggagccgccctgcagatcccttttgccatgcagatggcctataggttcaacggcatcggcgtgacccagaatgtgctgtacgagaaccagaagctgatcgccaatcagtttaacagcgccatcggcaagatccaggactctctgtcctctacagccagcgccctgggcaagctgcaggatgtggtgaatcagaacgcccaggccctgaataccctggtgaagcagctgagctccaacttcggcgccatctctagcgtgctgaatgacatcctgagccggctggacccccctgaggcagaggtgcagatcgacaggctgatcacaggccgcctgcagagcctgcagacctacgtgacacagcagctgatcagggcagcagagatcagagcctccgccaatctggccgccaccaagatgagcgagtgcgtgctgggacagtccaagagggtggacttttgtggcaagggctatcacctgatgtctttcccacagagcgcccctcacggcgtggtgtttctgcacgtgacctacgtgccagcccaggagaagaacttcaccacagcaccagccatctgccacgatggaaaggcacactttcctagggagggcgtgttcgtgtctaacggcacccactggtttgtgacacagcgcaatttctacgagccacagatcatcaccacagacaatacattcgtgagcggcaactgtgatgtggtgatcggcatcgtgaacaataccgtgtatgatccactgcagcccgagctggactcctttaaggaggagctggataagtacttcaagaatcacacctctcccgacgtggatctgggcgacatctccggcatcaatgcctctgtggtgaacatccagaaggagatcgaccggctgaacgaggtggccaagaatctgaacgagagcctgatcgatctgcaggagctgggcaagtatgagcagtacatcaagggctctggcagagagaacctgtatttccagggaggaggaggcagcggatacatccctgaggcaccaagggacggacaggcctacgtgcgcaaggatggcgagtgggtgctgctgtccacctttctgggccatcatcaccaccaccaccaccactga

SEQ ID NO: 4845 - DNA, 3846 bp, Artificial Sequence
  Description of Artificial Sequence: Synthetic polynucleotide
atgggcatcctgccaagcccaggaatgcccgccctgctgtctctggtgagcctgctgtccgtgctgctgatgggatgcgtggcagagacaggcacacagtgcgtgaacctgaccacaaggacccagctgccccctgcctataccaattctttcacacggggcgtgtactatcccgacaaggtgtttagaagctccgtgctgcactccacacaggatctgtttctgcctttcttttctaacgtgacctggttccacgccatccacgtgtccggcaccaatggcacaaagcggttcgacaatcccgtgctgccttttaacgatggcgtgtacttcgccagcaccgagaagtccaacatcatcagaggctggatctttggcaccacactggactctaagacacagagcctgctgatcgtgaacaatgccaccaacgtggtgatcaaggtgtgcgagttccagttttgtaatgatccattcctgggcgtgtactatcacaagaacaataagtcctggatggagtctgagtttcgcgtgtattctagcgccaacaattgcacatttgagtacgtgagccagcccttcctgatggacctggagggcaagcagggcaatttcaagaacctgagggagttcgtgtttaagaatatcgatggctacttcaagatctacagcaagcacaccccaatcaacctggtgcgcgacctgccacagggattctccgccctggagccactggtggatctgcccatcggcatcaacatcacccggtttcagacactgctggccctgcacagatcctacctgacaccaggcgactcctctagcggatggaccgcaggagctgccgcctactatgtgggctatctgcagccccggaccttcctgctgaagtacaacgagaatggcaccatcacagacgcagtggattgcgccctggaccccctgtctgagacaaagtgtacactgaagagctttaccgtggagaagggcatctatcagacaagcaatttcagggtgcagcctaccgagtccatcgtgcgctttcccaatatcacaaacctgtgcccttttggcgaggtgttcaacgccaccagattcgccagcgtgtacgcctggaatcggaagagaatctccaactgcgtggccgactattctgtgctgtacaactccgcctctttcagcacctttaagtgctatggcgtgtctcccacaaagctgaatgatctgtgctttaccaacgtgtacgccgatagcttcgtgatcaggggagacgaagtgagacagatcgcaccaggacagacaggaaagatcgcagactacaattataagctgcctgacgatttcaccggctgcgtgatcgcctggaactccaacaatctggattctaaagtgggcggcaactacaattatctgtacaggctgtttcgcaagtccaatctgaagccattcgagcgggacatctcctgtgagatctaccaggccggctctaccccctgcaatggcgtggagggctttaactgttatttccctctgcagtcttacggcttccagccaacaaacggcgtgggctatcagccctacagagtggtggtgctgtcctttgagctgctgcacgcaccagcaacagtgtgcggcccaaagaagtctaccaatctggtgaagaacaagtgcgtgaacttcaacttcaacggactgaccggcacaggcgtgctgaccgagagcaataagaagttcctgccttttcagcagttcggcagggacatcgcagataccacagacgccgtgcgcgaccctcagaccctggagatcctggacatcacaccatgcagcttcggcggcgtgtccgtgatcacaccaggcaccaatacatccaaccaggtggccgtgctgtatcaggacgtgaattgtaccgaggtgcccgtggcaatccacgcagatcagctgacccctacatggcgggtgtactctaccggcagcaacgtgttccagacaagagccggatgcctgatcggagcagagcacgtgaacaatagctatgagtgcgacatccctatcggcgccggcatctgtgccagctaccagacccagacaaactccccatctggagcaggctccgtggccagccagtccatcatcgcctataccatgagcctgggcgccgagaacagcgtggcctactccaacaattctatcgccatccctaccaacttcacaatcagcgtgaccacagagatcctgccagtgtctatgaccaagacaagcgtggactgcacaatgtatatctgtggcgatagcaccgagtgctccaacctgctgctgcagtacggctccttttgtacccagctgaatagagccctgacaggcatcgccgtggagcaggataagaacacacaggaggtgttcgcccaggtgaagcagatctacaagaccccacccatcaaggactttggcggcttcaacttcagccagatcctgcctgatccaagcaagccctccaagaggtcttttatcgaggacctgctgttcaacaaggtgaccctggccgatgccggcttcatcaagcagtatggagattgcctgggagacatcgcagcccgcgacctgatctgtgcccagaagtttaatggcctgaccgtgctgcctccactgctgacagatgagatgatcgcccagtacacatctgccctgctggccggcaccatcacaagcggatggaccttcggcgcaggagccgccctgcagatcccttttgccatgcagatggcctataggttcaacggcatcggcgtgacccagaatgtgctgtacgagaaccagaagctgatcgccaatcagtttaacagcgccatcggcaagatccaggactctctgtcctctacagccagcgccctgggcaagctgcaggatgtggtgaatcagaacgcccaggccctgaataccctggtgaagcagctgagctccaacttcggcgccatctctagcgtgctgaatgacatcctgagccggctggacccccctgaggcagaggtgcagatcgacaggctgatcacaggccgcctgcagagcctgcagacctacgtgacacagcagctgatcagggcagcagagatcagagcctccgccaatctggccgccaccaagatgagcgagtgcgtgctgggacagtccaagagggtggacttttgtggcaagggctatcacctgatgtctttcccacagagcgcccctcacggcgtggtgtttctgcacgtgacctacgtgccagcccaggagaagaacttcaccacagcaccagccatctgccacgatggaaaggcacactttcctagggagggcgtgttcgtgtctaacggcacccactggtttgtgacacagcgcaatttctacgagccacagatcatcaccacagacaatacattcgtgagcggcaactgtgatgtggtgatcggcatcgtgaacaataccgtgtatgatccactgcagcccgagctggactcctttaaggaggagctggataagtacttcaagaatcacacctctcccgacgtggatctgggcgacatctccggcatcaatgcctctgtggtgaacatccagaaggagatcgaccggctgaacgaggtggccaagaatctgaacgagagcctgatcgatctgcaggagctgggcaagtatgagcagtacatcaagggctctggcagagagaacctgtatttccagggaggaggaggcagcggatacatccctgaggcaccaagggacggacaggcctacgtgcgcaaggatggcgagtgggtgctgctgtccacctttctgggccatcatcaccaccaccaccaccactga

SEQ ID NO: 4846 - DNA, 3846 bp, Artificial Sequence
  Description of Artificial Sequence: Synthetic polynucleotide
atgggcatcctgccaagcccaggaatgcccgccctgctgtctctggtgagcctgctgtccgtgctgctgatgggatgcgtggcagagacaggcacacagtgcgtgaacctgaccacaaggacccagctgccccctgcctataccaattctttcacacggggcgtgtactatcccgacaaggtgtttagaagctccgtgctgcactccacacaggatctgtttctgcctttcttttctaacgtgacctggttccacgccatccacgtgtccggcaccaatggcacaaagcggttcgacaatcccgtgctgccttttaacgatggcgtgtacttcgccagcaccgagaagtccaacatcatcagaggctggatctttggcaccacactggactctaagacacagagcctgctgatcgtgaacaatgccaccaacgtggtgatcaaggtgtgcgagttccagttttgtaatgatccattcctgggcgtgtactatcacaagaacaataagtcctggatggagtctgagtttcgcgtgtattctagcgccaacaattgcacatttgagtacgtgagccagcccttcctgatggacctggagggcaagcagggcaatttcaagaacctgagggagttcgtgtttaagaatatcgatggctacttcaagatctacagcaagcacaccccaatcaacctggtgcgcgacctgccacagggattctccgccctggagccactggtggatctgcccatcggcatcaacatcacccggtttcagacactgctggccctgcacagatcctacctgacaccaggcgactcctctagcggatggaccgcaggagctgccgcctactatgtgggctatctgcagccccggaccttcctgctgaagtacaacgagaatggcaccatcacagacgcagtggattgcgccctggaccccctgtctgagacaaagtgtacactgaagagctttaccgtggagaagggcatctatcagacaagcaatttcagggtgcagcctaccgagtccatcgtgcgctttcccaatatcacaaacctgtgcccttttggcgaggtgttcaacgccaccagattcgccagcgtgtacgcctggaatcggaagagaatctccaactgcgtggccgactattctgtgctgtacaactccgcctctttcagcacctttaagtgctatggcgtgtctcccacaaagctgaatgatctgtgctttaccaacgtgtacgccgatagcttcgtgatcaggggagacgaagtgagacagatcgcaccaggacagacaggatcaatcgcagactacaattataagctgcctgacgatttcaccggctgcgtgatcgcctggaactccaacaatctggattctaaagtgggcggcaactacaattatctgtacaggctgtttcgcaagtccaatctgaagccattcgagcgggacatctccacagagatctaccaggccggctctaccccctgcaatggcgtggagggctttaactgttatttccctctgcagtcttacggcttccagccaacaaacggcgtgggctatcagccctacagagtggtggtgctgtcctttgagctgctgcacgcaccagcaacagtgtgcggcccaaagaagtctaccaatctggtgaagaacaagtgcgtgaacttcaacttcaacggactgaccggcacaggcgtgctgaccgagagcaataagaagttcctgccttttcagcagttcggcagggacatcgcagataccacagacgccgtgcgcgaccctcagaccctggagatcctggacatcacaccatgcagcttcggcggcgtgtccgtgatcacaccaggcaccaatacatccaaccaggtggccgtgctgtatcaggacgtgaattgtaccgaggtgcccgtggcaatccacgcagatcagctgacccctacatggcgggtgtactctaccggcagcaacgtgttccagacaagagccggatgcctgatcggagcagagcacgtgaacaatagctatgagtgcgacatccctatcggcgccggcatctgtgccagctaccagacccagacaaactccccatctggagcaggctccgtggccagccagtccatcatcgcctataccatgagcctgggcgccgagaacagcgtggcctactccaacaattctatcgccatccctaccaacttcacaatcagcgtgaccacagagatcctgccagtgtctatgaccaagacaagcgtggactgcacaatgtatatctgtggcgatagcaccgagtgctccaacctgctgctgcagtacggctccttttgtacccagctgaatagagccctgacaggcatcgccgtggagcaggataagaacacacaggaggtgttcgcccaggtgaagcagatctacaagaccccacccatcaaggactttggcggcttcaacttcagccagatcctgcctgatccaagcaagccctccaagaggtcttttatcgaggacctgctgttcaacaaggtgaccctggccgatgccggcttcatcaagcagtatggagattgcctgggagacatcgcagcccgcgacctgatctgtgcccagaagtttaatggcctgaccgtgctgcctccactgctgacagatgagatgatcgcccagtacacatctgccctgctggccggcaccatcacaagcggatggaccttcggcgcaggagccgccctgcagatcccttttgccatgcagatggcctataggttcaacggcatcggcgtgacccagaatgtgctgtacgagaaccagaagctgatcgccaatcagtttaacagcgccatcggcaagatccaggactctctgtcctctacagccagcgccctgggcaagctgcaggatgtggtgaatcagaacgcccaggccctgaataccctggtgaagcagctgagctccaacttcggcgccatctctagcgtgctgaatgacatcctgagccggctggacccccctgaggcagaggtgcagatcgacaggctgatcacaggccgcctgcagagcctgcagacctacgtgacacagcagctgatcagggcagcagagatcagagcctccgccaatctggccgccaccaagatgagcgagtgcgtgctgggacagtccaagagggtggacttttgtggcaagggctatcacctgatgtctttcccacagagcgcccctcacggcgtggtgtttctgcacgtgacctacgtgccagcccaggagaagaacttcaccacagcaccagccatctgccacgatggaaaggcacactttcctagggagggcgtgttcgtgtctaacggcacccactggtttgtgacacagcgcaatttctacgagccacagatcatcaccacagacaatacattcgtgagcggcaactgtgatgtggtgatcggcatcgtgaacaataccgtgtatgatccactgcagcccgagctggactcctttaaggaggagctggataagtacttcaagaatcacacctctcccgacgtggatctgggcgacatctccggcatcaatgcctctgtggtgaacatccagaaggagatcgaccggctgaacgaggtggccaagaatctgaacgagagcctgatcgatctgcaggagctgggcaagtatgagcagtacatcaagggctctggcagagagaacctgtatttccagggaggaggaggcagcggatacatccctgaggcaccaagggacggacaggcctacgtgcgcaaggatggcgagtgggtgctgctgtccacctttctgggccatcatcaccaccaccaccaccactga

SEQ ID NO: 4847 - DNA, 3846 bp, Artificial Sequence
  Description of Artificial Sequence: Synthetic polynucleotide
atgggcatcctgccaagcccaggaatgcccgccctgctgtctctggtgagcctgctgtccgtgctgctgatgggatgcgtggcagagacaggcacacagtgcgtgaacctgaccacaaggacccagctgccccctgcctataccaattctttcacacggggcgtgtactatcccgacaaggtgtttagaagctccgtgctgcactccacacaggatctgtttctgcctttcttttctaacgtgacctggttccacgccatccacgtgtccggcaccaatggcacaaagcggttcgacaatcccgtgctgccttttaacgatggcgtgtacttcgccagcaccgagaagtccaacatcatcagaggctggatctttggcaccacactggactctaagacacagagcctgctgatcgtgaacaatgccaccaacgtggtgatcaaggtgtgcgagttccagttttgtaatgatccattcctgggcgtgtactatcacaagaacaataagtcctggatggagtctgagtttcgcgtgtattctagcgccaacaattgcacatttgagtacgtgagccagcccttcctgatggacctggagggcaagcagggcaatttcaagaacctgagggagttcgtgtttaagaatatcgatggctacttcaagatctacagcaagcacaccccaatcaacctggtgcgcgacctgccacagggattctccgccctggagccactggtggatctgcccatcggcatcaacatcacccggtttcagacactgctggccctgcacagatcctacctgacaccaggcgactcctctagcggatggaccgcaggagctgccgcctactatgtgggctatctgcagccccggaccttcctgctgaagtacaacgagaatggcaccatcacagacgcagtggattgcgccctggaccccctgtctgagacaaagtgtacactgaagagctttaccgtggagaagggcatctatcagacaagcaatttcagggtgcagcctaccgagtccatcgtgcgctttcccaatatcacaaacctgtgcccttttggcgaggtgttcaacgccaccagattcgccagcgtgtacgcctggaatcggaagagaatctccaactgcgtggccgactattctgtgctgtacaactccgcctctttcagcacctttaagtgctatggcgtgtctcccacaaagctgaatgatctgtgctttaccaacgtgtacgccgatagcttcgtgatcaggggagacgaagtgagacagatcgcaccaggacagacaggaaagatcgcagactacaattataagctgcctgacgatttcaccggctgcgtgatcgcctggaactccaacaatctggattctaaagtgggcggcaactacaattatctgtacaggctgtttcgcaagtccaatctgaagccattcgagcgggacatctccacagagatctaccaggccggctctaccccctgcaatggcgtggagggctttaaccattatttccctctgcagtcttacggcttccagccaacaaacggcgtgggctatcagccctacagagtggtggtgctgtcctttgagctgctgcacgcaccagcaacagtgtgcggcccaaagaagtctaccaatctggtgaagaacaagtgcgtgaacttcaacttcaacggactgaccggcacaggcgtgctgaccgagagcaataagaagttcctgccttttcagcagttcggcagggacatcgcagataccacagacgccgtgcgcgaccctcagaccctggagatcctggacatcacaccatgcagcttcggcggcgtgtccgtgatcacaccaggcaccaatacatccaaccaggtggccgtgctgtatcaggacgtgaattgtaccgaggtgcccgtggcaatccacgcagatcagctgacccctacatggcgggtgtactctaccggcagcaacgtgttccagacaagagccggatgcctgatcggagcagagcacgtgaacaatagctatgagtgcgacatccctatcggcgccggcatctgtgccagctaccagacccagacaaactccccatctggagcaggctccgtggccagccagtccatcatcgcctataccatgagcctgggcgccgagaacagcgtggcctactccaacaattctatcgccatccctaccaacttcacaatcagcgtgaccacagagatcctgccagtgtctatgaccaagacaagcgtggactgcacaatgtatatctgtggcgatagcaccgagtgctccaacctgctgctgcagtacggctccttttgtacccagctgaatagagccctgacaggcatcgccgtggagcaggataagaacacacaggaggtgttcgcccaggtgaagcagatctacaagaccccacccatcaaggactttggcggcttcaacttcagccagatcctgcctgatccaagcaagccctccaagaggtcttttatcgaggacctgctgttcaacaaggtgaccctggccgatgccggcttcatcaagcagtatggagattgcctgggagacatcgcagcccgcgacctgatctgtgcccagaagtttaatggcctgaccgtgctgcctccactgctgacagatgagatgatcgcccagtacacatctgccctgctggccggcaccatcacaagcggatggaccttcggcgcaggagccgccctgcagatcccttttgccatgcagatggcctataggttcaacggcatcggcgtgacccagaatgtgctgtacgagaaccagaagctgatcgccaatcagtttaacagcgccatcggcaagatccaggactctctgtcctctacagccagcgccctgggcaagctgcaggatgtggtgaatcagaacgcccaggccctgaataccctggtgaagcagctgagctccaacttcggcgccatctctagcgtgctgaatgacatcctgagccggctggacccccctgaggcagaggtgcagatcgacaggctgatcacaggccgcctgcagagcctgcagacctacgtgacacagcagctgatcagggcagcagagatcagagcctccgccaatctggccgccaccaagatgagcgagtgcgtgctgggacagtccaagagggtggacttttgtggcaagggctatcacctgatgtctttcccacagagcgcccctcacggcgtggtgtttctgcacgtgacctacgtgccagcccaggagaagaacttcaccacagcaccagccatctgccacgatggaaaggcacactttcctagggagggcgtgttcgtgtctaacggcacccactggtttgtgacacagcgcaatttctacgagccacagatcatcaccacagacaatacattcgtgagcggcaactgtgatgtggtgatcggcatcgtgaacaataccgtgtatgatccactgcagcccgagctggactcctttaaggaggagctggataagtacttcaagaatcacacctctcccgacgtggatctgggcgacatctccggcatcaatgcctctgtggtgaacatccagaaggagatcgaccggctgaacgaggtggccaagaatctgaacgagagcctgatcgatctgcaggagctgggcaagtatgagcagtacatcaagggctctggcagagagaacctgtatttccagggaggaggaggcagcggatacatccctgaggcaccaagggacggacaggcctacgtgcgcaaggatggcgagtgggtgctgctgtccacctttctgggccatcatcaccaccaccaccaccactga

SEQ ID NO: 4848 - DNA, 3846 bp, Artificial Sequence
  Description of Artificial Sequence: Synthetic polynucleotide
atgggcatcctgccaagcccaggaatgcccgccctgctgtctctggtgagcctgctgtccgtgctgctgatgggatgcgtggcagagacaggcacacagtgcgtgaacctgaccacaaggacccagctgccccctgcctataccaattctttcacacggggcgtgtactatcccgacaaggtgtttagaagctccgtgctgcactccacacaggatctgtttctgcctttcttttctaacgtgacctggttccacgccatccacgtgtccggcaccaatggcacaaagcggttcgacaatcccgtgctgccttttaacgatggcgtgtacttcgccagcaccgagaagtccaacatcatcagaggctggatctttggcaccacactggactctaagacacagagcctgctgatcgtgaacaatgccaccaacgtggtgatcaaggtgtgcgagttccagttttgtaatgatccattcctgggcgtgtactatcacaagaacaataagtcctggatggagtctgagtttcgcgtgtattctagcgccaacaattgcacatttgagtacgtgagccagcccttcctgatggacctggagggcaagcagggcaatttcaagaacctgagggagttcgtgtttaagaatatcgatggctacttcaagatctacagcaagcacaccccaatcaacctggtgcgcgacctgccacagggattctccgccctggagccactggtggatctgcccatcggcatcaacatcacccggtttcagacactgctggccctgcacagatcctacctgacaccaggcgactcctctagcggatggaccgcaggagctgccgcctactatgtgggctatctgcagccccggaccttcctgctgaagtacaacgagaatggcaccatcacagacgcagtggattgcgccctggaccccctgtctgagacaaagtgtacactgaagagctttaccgtggagaagggcatctatcagacaagcaatttcagggtgcagcctaccgagtccatcgtgcgctttcccaatatcacaaacctgtgcccttttggcgaggtgttcaacgccaccagattcgccagcgtgtacgcctggaatcggaagagaatctccaactgcgtggccgactattctgtgctgtacaactccgcctctttcagcacctttaagtgctatggcgtgtctcccacaaagctgaatgatctgtgctttaccaacgtgtacgccgatagcttcgtgatcaggggagacgaagtgagacagatcgcaccaggacagacaggaaagatcgcagactacaattataagctgcctgacgatttcaccggctgcgtgatcgcctggaactccaacaatctggattctaaagtgggcggcaactacaattatctgtacaggctgtttcgcaagtccaatctgaagccattcgagcgggacatctccacagagatctaccaggccggctctaccccctgcaatggcgtggagggctttaactgttatttccctctgcagtcttacggcttccagccaacaaacggcgtgggctatcagccctacagagtggtggtgctgtcctttgagctgctgcacgcaccagcaacagtgtgcggcccaaagaagtctaccaatctggtgaagaacaagtgcgtgaacttcaacttcaacggactgaccggcacaggcgtgctgaccgagagcaataagaagttcctgccttttcagcagttcggcagggacatcgcagataccacagacgccgtgcgcgaccctcagaccctggagatcctggacatcacaccatgcagcttcggcggcgtgtccgtgatcacaccaggcaccaatacatccaaccaggtggccgtgctgtatcaggacgtgaattgtaccgaggtgcccgtggcaatccacgcagatcagctgacccctacatggcgggtgtactctaccggcagcaacgtgttccagacaagagccggatgcctgatcggagcagagcacgtgaacaatagctatgagtgcgacatccctatcggcgccggcatctgtgccagctaccagacccagacaaactccccatctggagcaggctccgtggccagccagtccatcatcgcctataccatgagcctgggcgccgagaacagcgtggcctactccaacaattctatcgccatccctaccaacttcacaatcagcgtgaccacagagatcctgccagtgtctatgaccaagacaagcgtggactgcacaatgtatatctgtggcgatagcaccgagtgctccaacctgctgctgcagtacggctccttttgtacccagctgaatagagccctgacaggcatcgccgtggagcaggataagaacacacaggaggtgttcgcccaggtgaagcagatctacaagaccccacccatcaaggactttggcggcttcaacttcagccagatcctgcctgatccaagcaagccctccaagaggtcttttatcgaggacctgctgttcaacaaggtgaccctggccgatgccggcttcatcaagcagtatggagattgcctgggagacatcgcagcccgcgacctgatctgtgcccagaagtttaatggcctgaccgtgctgcctccactgctgacagatgagatgatcgcccagtacacatctgccctgctggccggcaccatcacaagcggatggaccttcggcgcaggagccgccctgcagatcccttttgccatgcagatggcctggaggttcaacggcatcggcgtgacccagaatgtgctgtacgagaaccagaagctgatcgccaatcagtttaacagcgccatcggcaagatccaggactctctgtcctctacagccagcgccctgggcaagctgcaggatgtggtgaatcagaacgcccaggccctgaataccctggtgaagcagctgagctccaacttcggcgccatctctagcgtgctgaatgacatcctgagccggctggacccccctgaggcagaggtgcagatcgacaggctgatcacaggccgcctgcagagcctgcagacctacgtgacacagcagctgatcagggcagcagagatcagagcctccgccaatctggccgccaccaagatgagcgagtgcgtgctgggacagtccaagagggtggacttttgtggcaagggctatcacctgatgtctttcccacagagcgcccctcacggcgtggtgtttctgcacgtgacctacgtgccagcccaggagaagaacttcaccacagcaccagccatctgccacgatggaaaggcacactttcctagggagggcgtgttcgtgtctaacggcacccactggtttgtgacacagcgcaatttctacgagccacagatcatcaccacagacaatacattcgtgagcggcaactgtgatgtggtgatcggcatcgtgaacaataccgtgtatgatccactgcagcccgagctggactcctttaaggaggagctggataagtacttcaagaatcacacctctcccgacgtggatctgggcgacatctccggcatcaatgcctctgtggtgaacatccagaaggagatcgaccggctgaacgaggtggccaagaatctgaacgagagcctgatcgatctgcaggagctgggcaagtatgagcagtacatcaagggctctggcagagagaacctgtatttccagggaggaggaggcagcggatacatccctgaggcaccaagggacggacaggcctacgtgcgcaaggatggcgagtgggtgctgctgtccacctttctgggccatcatcaccaccaccaccaccactga

SEQ ID NO: 4849 - DNA, 3846 bp, Artificial Sequence
  Description of Artificial Sequence: Synthetic polynucleotide
atgggcatcctgccaagcccaggaatgcccgccctgctgtctctggtgagcctgctgtccgtgctgctgatgggatgcgtggcagagacaggcacacagtgcgtgaacctgaccacaaggacccagctgccccctgcctataccaattctttcacacggggcgtgtactatcccgacaaggtgtttagaagctccgtgctgcactccacacaggatctgtttctgcctttcttttctaacgtgacctggttccacgccatccacgtgtccggcaccaatggcacaaagcggttcgacaatcccgtgctgccttttaacgatggcgtgtacttcgccagcaccgagaagtccaacatcatcagaggctggatctttggcaccacactggactctaagacacagagcctgctgatcgtgaacaatgccaccaacgtggtgatcaaggtgtgcgagttccagttttgtaatgatccattcctgggcgtgtactatcacaagaacaataagtcctggatggagtctgagtttcgcgtgtattctagcgccaacaattgcacatttgagtacgtgagccagcccttcctgatggacctggagggcaagcagggcaatttcaagaacctgagggagttcgtgtttaagaatatcgatggctacttcaagatctacagcaagcacaccccaatcaacctggtgcgcgacctgccacagggattctccgccctggagccactggtggatctgcccatcggcatcaacatcacccggtttcagacactgctggccctgcacagatcctacctgacaccaggcgactcctctagcggatggaccgcaggagctgccgcctactatgtgggctatctgcagccccggaccttcctgctgaagtacaacgagaatggcaccatcacagacgcagtggattgcgccctggaccccctgtctgagacaaagtgtacactgaagagctttaccgtggagaagggcatctatcagacaagcaatttcagggtgcagcctaccgagtccatcgtgcgctttcccaatatcacaaacctgtgcccttttggcgaggtgttcaacgccaccagattcgccagcgtgtacgcctggaatcggaagagaatctccaactgcgtggccgactattctgtgctgtacaactccgcctctttcagcacctttaagtgctatggcgtgtctcccacaaagctgaatgatctgtgctttaccaacgtgtacgccgatagcttcgtgatcaggggagacgaagtgagacagatcgcaccaggacagacaggaaagatcgcagactacaattataagctgcctgacgatttcaccggctgcgtgatcgcctggaactccaacaatctggattctaaagtgggcggcaactacaattatctgtacaggctgtttcgcaagtccaatctgaagccattcgagcgggacatcaacacagagatctaccaggccggctctaccccctgcaatggcgtggagggctttaactgttatttccctctgcagtcttacggcttccagccaacaaacggcgtgggctatcagccctacagagtggtggtgctgtcctttgagctgctgcacgcaccagcaacagtgtgcggcccaaagaagtctaccaatctggtgaagaacaagtgcgtgaacttcaacttcaacggactgaccggcacaggcgtgctgaccgagagcaataagaagttcctgccttttcagcagttcggcagggacatcgcagataccacagacgccgtgcgcgaccctcagaccctggagatcctggacatcacaccatgcagcttcggcggcgtgtccgtgatcacaccaggcaccaatacatccaaccaggtggccgtgctgtatcaggacgtgaattgtaccgaggtgcccgtggcaatccacgcagatcagctgacccctacatggcgggtgtactctaccggcagcaacgtgttccagacaagagccggatgcctgatcggagcagagcacgtgaacaatagctatgagtgcgacatccctatcggcgccggcatctgtgccagctaccagacccagacaaactccccatctggagcaggctccgtggccagccagtccatcatcgcctataccatgagcctgggcgccgagaacagcgtggcctactccaacaattctatcgccatccctaccaacttcacaatcagcgtgaccacagagatcctgccagtgtctatgaccaagacaagcgtggactgcacaatgtatatctgtggcgatagcaccgagtgctccaacctgctgctgcagtacggctccttttgtacccagctgaatagagccctgacaggcatcgccgtggagcaggataagaacacacaggaggtgttcgcccaggtgaagcagatctacaagaccccacccatcaaggactttggcggcttcaacttcagccagatcctgcctgatccaagcaagccctccaagaggtcttttatcgaggacctgctgttcaacaaggtgaccctggccgatgccggcttcatcaagcagtatggagattgcctgggagacatcgcagcccgcgacctgatctgtgcccagaagtttaatggcctgaccgtgctgcctccactgctgacagatgagatgatcgcccagtacacatctgccctgctggccggcaccatcacaagcggatggaccttcggcgcaggagccgccctgcagatcccttttgccatgcagatggcctataggttcaacggcatcggcgtgacccagaatgtgctgtacgagaaccagaagctgatcgccaatcagtttaacagcgccatcggcaagatccaggactctctgtcctctacagccagcgccctgggcaagctgcaggatgtggtgaatcagaacgcccaggccctgaataccctggtgaagcagctgagctccaacttcggcgccatctctagcgtgctgaatgacatcctgagccggctggacccccctgaggcagaggtgcagatcgacaggctgatcacaggccgcctgcagagcctgcagacctacgtgacacagcagctgatcagggcagcagagatcagagcctccgccaatctggccgccaccaagatgagcgagtgcgtgctgggacagtccaagagggtggacttttgtggcaagggctatcacctgatgtctttcccacagagcgcccctcacggcgtggtgtttctgcacgtgacctacgtgccagcccaggagaagaacttcaccacagcaccagccatctgccacgatggaaaggcacactttcctagggagggcgtgttcgtgtctaacggcacccactggtttgtgacacagcgcaatttctacgagccacagatcatcaccacagacaatacattcgtgagcggcaactgtgatgtggtgatcggcatcgtgaacaataccgtgtatgatccactgcagcccgagctggactcctttaaggaggagctggataagtacttcaagaatcacacctctcccgacgtggatctgggcgacatctccggcatcaatgcctctgtggtgaacatccagaaggagatcgaccggctgaacgaggtggccaagaatctgaacgagagcctgatcgatctgcaggagctgggcaagtatgagcagtacatcaagggctctggcagagagaacctgtatttccagggaggaggaggcagcggatacatccctgaggcaccaagggacggacaggcctacgtgcgcaaggatggcgagtgggtgctgctgtccacctttctgggccatcatcaccaccaccaccaccactga

SEQ ID NO: 4850 - DNA, 3846 bp, Artificial Sequence
  Description of Artificial Sequence: Synthetic polynucleotide
atgggcatcctgccaagcccaggaatgcccgccctgctgtctctggtgagcctgctgtccgtgctgctgatgggatgcgtggcagagacaggcacacagtgcgtgaacctgaccacaaggacccagctgccccctgcctataccaattctttcacacggggcgtgtactatcccgacaaggtgtttagaagctccgtgctgcactccacacaggatctgtttctgcctttcttttctaacgtgacctggttccacgccatccacgtgtccggcaccaatggcacaaagcggttcgacaatcccgtgctgccttttaacgatggcgtgtacttcgccagcaccgagaagtccaacatcatcagaggctggatctttggcaccacactggactctaagacacagagcctgctgatcgtgaacaatgccaccaacgtggtgatcaaggtgtgcgagttccagttttgtaatgatccattcctgggcgtgtactatcacaagaacaataagtcctggatggagtctgagtttcgcgtgtattctagcgccaacaattgcacatttgagtacgtgagccagcccttcctgatggacctggagggcaagcagggcaatttcaagaacctgagggagttcgtgtttaagaatatcgatggctacttcaagatctacagcaagcacaccccaatcaacctggtgcgcgacctgccacagggattctccgccctggagccactggtggatctgcccatcggcatcaacatcacccggtttcagacactgctggccctgcacagatcctacctgacaccaggcgactcctctagcggatggaccgcaggagctgccgcctactatgtgggctatctgcagccccggaccttcctgctgaagtacaacgagaatggcaccatcacagacgcagtggattgcgccctggaccccctgtctgagacaaagtgtacactgaagagctttaccgtggagaagggcatctatcagacaagcaatttcagggtgcagcctaccgagtccatcgtgcgctttcccaatatcacaaacctgtgcccttttggcgaggtgttcaacgccaccagattcgccagcgtgtacgcctggaatcggaagagaatctccaactgcgtggccgactattctgtgctgtacaactccgcctctttcagcacctttaagtgctatggcgtgtctcccacaaagctgaatgatctgtgctttaccaacgtgtacgccgatagcttcgtgatcaggggagacgaagtgagacagatcgcaccaggacagacaggaaagatcgcagactacaattataagctgcctgacgatttcaccggctgcgtgatcgcctggaactccaacaatctggattctaaagtgggcggcaactacaattatctgtacaggctgtttcgcaagtccaatctgaagccattcgagcgggacatctccacagagatctaccaggccggctctaccccctgcaatggcgtggagggctttaactgttatttccctctgcagtcttacggcttccagccaacaaacggcgtgggctatcagccctacagagtggtggtgctgtcctttgagctgctgcacgcaccagcaacagtgtgcggcccaaagaagtctaccaatctggtgaagaacaagtgcgtgaacttcaacttcaacggactgaccggcacaggcgtgctgaccgagagcaataagaagttcctgccttttcagcagttcggcagggacatcgcagataccacagacgccgtgcgcgaccctcagaccctggagatcctggacatcacaccatgcagcttcggcggcgtgtccgtgatcacaccaggcaccaatacatccaaccaggtggccgtgctgtatcaggacgtgaattgtaccgaggtgcccgtggcaatccacgcagatcagctgacccctacatggcgggtgtactctaccggcagcaacgtgttccagacaagagccggatgcctgatcggagcagagcacgtgaacaatagctatgagtgcgacatccctatcggcgccggcatctgtgccagctaccagacccagacaaactccccatctggagcaggctccgtggccagccagtccatcatcgcctataccatgagcctgggcgccgagaacagcgtggcctactccaacaattctatcgccatccctaccaacttcacaatcagcgtgaccacagagatcctgccagtgtctatgaccaagacaagcgtggactgcacaatgtatatctgtggcgatagcaccgagtgctccaacctgctgctgcagtacggctccttttgtacccagctgaatagagccctgacaggcatcgccgtggagcaggataagaacacacaggaggtgttcgcccaggtgaagcagatctacaagaccccacccatcaaggactttggcggcttcaacttcagccagatcctgcctgatccaagcaagccctccaagaggtcttttatcgaggacctgctgttcaacaaggtgaccctggccgatgccggcttcatcaagcagtatggagattgcctgggagacatcgcagcccgcgacctgatctgtgcccagaagtttaatggcctgaccgtgctgcctccactgctgacagatgagatgatcgcccagtacacatctgccctgctggccggcaccatcacaagcggatggaccttcggcgcaggagccgccctgcagatcccttttgccatgcagatggcctataggttcaacggcatcggcgtgacccagaatgtgctgtacgagaaccagaagctgatcgccaatcagtttaacagcgccatcggcaagatccaggactctctgtcctctacagccagcgccctgggcaagctgcaggatgtggtgaatcagaacgcccaggccctgaataccctggtgaagcagctgagctccaacttcggcgccatctctagcgtgctgaatgacatcctgagccggctggacccccctgaggcagaggtgcagatcgacaggctgatcacaggccgcctgcagagcctgcagacctacgtgacacagcagctgatcagggcagcagagatcagagcctccgccaatctggccgccaccaagatgagcgagtgcgtgctgggacagtccaagagggtggacttttgtggcaagggctatcacctgatgtctttcccacagagcgcccctcacggcgtggtgtttctgcacgtgacctacgtgccagcccagtataagaacttcaccacagcaccagccatctgccacgatggaaaggcacactttcctagggagggcgtgttcgtgtctaacggcacccactggtttgtgacacagcgcaatttctacgagccacagatcatcaccacagacaatacattcgtgagcggcaactgtgatgtggtgatcggcatcgtgaacaataccgtgtatgatccactgcagcccgagctggactcctttaaggaggagctggataagtacttcaagaatcacacctctcccgacgtggatctgggcgacatctccggcatcaatgcctctgtggtgaacatccagaaggagatcgaccggctgaacgaggtggccaagaatctgaacgagagcctgatcgatctgcaggagctgggcaagtatgagcagtacatcaagggctctggcagagagaacctgtatttccagggaggaggaggcagcggatacatccctgaggcaccaagggacggacaggcctacgtgcgcaaggatggcgagtgggtgctgctgtccacctttctgggccatcatcaccaccaccaccaccactga

SEQ ID NO: 4851 - DNA, 3846 bp, Artificial Sequence
  Description of Artificial Sequence: Synthetic polynucleotide
atgggcatcctgccaagcccaggaatgcccgccctgctgtctctggtgagcctgctgtccgtgctgctgatgggatgcgtggcagagacaggcacacagtgcgtgaacctgaccacaaggacccagctgccccctgcctataccaattctttcacacggggcgtgtactatcccgacaaggtgtttagaagctccgtgctgcactccacacaggatctgtttctgcctttcttttctaacgtgacctggttccacgccatccacgtgtccggcaccaatggcacaaagcggttcgacaatcccgtgctgccttttaacgatggcgtgtacttcgccagcaccgagaagtccaacatcatcagaggctggatctttggcaccacactggactctaagacacagagcctgctgatcgtgaacaatgccaccaacgtggtgatcaaggtgtgcgagttccagttttgtaatgatccattcctgggcgtgtactatcacaagaacaataagtcctggatggagtctgagtttcgcgtgtattctagcgccaacaattgcacatttgagtacgtgagccagcccttcctgatggacctggagggcaagcagggcaatttcaagaacctgagggagttcgtgtttaagaatatcgatggctacttcaagatctacagcaagcacaccccaatcaacctggtgcgcgacctgccacagggattctccgccctggagccactggtggatctgcccatcggcatcaacatcacccggtttcagacactgctggccctgcacagatcctacctgacaccaggcgactcctctagcggatggaccgcaggagctgccgcctactatgtgggctatctgcagccccggaccttcctgctgaagtacaacgagaatggcaccatcacagacgcagtggattgcgccctggaccccctgtctgagacaaagtgtacactgaagagctttaccgtggagaagggcatctatcagacaagcaatttcagggtgcagcctaccgagtccatcgtgcgctttcccaatatcacaaacctgtgcccttttggcgaggtgttcaacgccaccagattcgccagcgtgtacgcctggaatcggaagagaatctccaactgcgtggccgactattctgtgctgtacaactccgcctctttcagcacctttaagtgctatggcgtgtctcccacaaagctgaatgatctgtgctttaccaacgtgtacgccgatagcttcgtgatcaggggagacgaagtgagacagatcgcaccaggacagacaggaaagatcgcagactacaattataagctgcctgacgatttcaccggctgcgtgatcgcctggaactccaacaatctggattctaaagtgggcggcaactacaattatctgtacaggctgtttcgcaagtccaatctgaagccattcgagcgggacatctccacagagatctaccaggccggctctaccccctgcaatggcgtggagggctttaactgttatttccctctgcagtcttacggcttccagccaacaaacggcgtgggctatcagccctacagagtggtggtgctgcaatttgagctgctgcacgcaccagcaacagtgtgcggcccaaagaagtctaccaatctggtgaagaacaagtgcgtgaacttcaacttcaacggactgaccggcacaggcgtgctgaccgagagcaataagaagttcctgccttttcagcagttcggcagggacatcgcagataccacagacgccgtgcgcgaccctcagaccctggagatcctggacatcacaccatgcagcttcggcggcgtgtccgtgatcacaccaggcaccaatacatccaaccaggtggccgtgctgtatcaggacgtgaattgtaccgaggtgcccgtggcaatccacgcagatcagctgacccctacatggcgggtgtactctaccggcagcaacgtgttccagacaagagccggatgcctgatcggagcagagcacgtgaacaatagctatgagtgcgacatccctatcggcgccggcatctgtgccagctaccagacccagacaaactccccatctggagcaggctccgtggccagccagtccatcatcgcctataccatgagcctgggcgccgagaacagcgtggcctactccaacaattctatcgccatccctaccaacttcacaatcagcgtgaccacagagatcctgccagtgtctatgaccaagacaagcgtggactgcacaatgtatatctgtggcgatagcaccgagtgctccaacctgctgctgcagtacggctccttttgtacccagctgaatagagccctgacaggcatcgccgtggagcaggataagaacacacaggaggtgttcgcccaggtgaagcagatctacaagaccccacccatcaaggactttggcggcttcaacttcagccagatcctgcctgatccaagcaagccctccaagaggtcttttatcgaggacctgctgttcaacaaggtgaccctggccgatgccggcttcatcaagcagtatggagattgcctgggagacatcgcagcccgcgacctgatctgtgcccagaagtttaatggcctgaccgtgctgcctccactgctgacagatgagatgatcgcccagtacacatctgccctgctggccggcaccatcacaagcggatggaccttcggcgcaggagccgccctgcagatcccttttgccatgcagatggcctataggttcaacggcatcggcgtgacccagaatgtgctgtacgagaaccagaagctgatcgccaatcagtttaacagcgccatcggcaagatccaggactctctgtcctctacagccagcgccctgggcaagctgcaggatgtggtgaatcagaacgcccaggccctgaataccctggtgaagcagctgagctccaacttcggcgccatctctagcgtgctgaatgacatcctgagccggctggacccccctgaggcagaggtgcagatcgacaggctgatcacaggccgcctgcagagcctgcagacctacgtgacacagcagctgatcagggcagcagagatcagagcctccgccaatctggccgccaccaagatgagcgagtgcgtgctgggacagtccaagagggtggacttttgtggcaagggctatcacctgatgtctttcccacagagcgcccctcacggcgtggtgtttctgcacgtgacctacgtgccagcccaggagaagaacttcaccacagcaccagccatctgccacgatggaaaggcacactttcctagggagggcgtgttcgtgtctaacggcacccactggtttgtgacacagcgcaatttctacgagccacagatcatcaccacagacaatacattcgtgagcggcaactgtgatgtggtgatcggcatcgtgaacaataccgtgtatgatccactgcagcccgagctggactcctttaaggaggagctggataagtacttcaagaatcacacctctcccgacgtggatctgggcgacatctccggcatcaatgcctctgtggtgaacatccagaaggagatcgaccggctgaacgaggtggccaagaatctgaacgagagcctgatcgatctgcaggagctgggcaagtatgagcagtacatcaagggctctggcagagagaacctgtatttccagggaggaggaggcagcggatacatccctgaggcaccaagggacggacaggcctacgtgcgcaaggatggcgagtgggtgctgctgtccacctttctgggccatcatcaccaccaccaccaccactga

SEQ ID NO: 4852 - DNA, 3846 bp, Artificial Sequence
  Description of Artificial Sequence: Synthetic polynucleotide
atgggcatcctgccaagcccaggaatgcccgccctgctgtctctggtgagcctgctgtccgtgctgctgatgggatgcgtggcagagacaggcacacagtgcgtgaacctgaccacaaggacccagctgccccctgcctataccaattctttcacacggggcgtgtactatcccgacaaggtgtttagaagctccgtgctgcactccacacaggatctgtttctgcctttcttttctaacgtgacctggttccacgccatccacgtgtccggcaccaatggcacaaagcggttcgacaatcccgtgctgccttttaacgatggcgtgtacttcgccagcaccgagaagtccaacatcatcagaggctggatctttggcaccacactggactctaagacacagagcctgctgatcgtgaacaatgccaccaacgtggtgatcaaggtgtgcgagttccagttttgtaatgatccattcctgggcgtgtactatcacaagaacaataagtcctggatggagtctgagtttcgcgtgtattctagcgccaacaattgcacatttgagtacgtgagccagcccttcctgatggacctggagggcaagcagggcaatttcaagaacctgagggagttcgtgtttaagaatatcgatggctacttcaagatctacagcaagcacaccccaatcaacctggtgcgcgacctgccacagggattctccgccctggagccactggtggatctgcccatcggcatcaacatcacccggtttcagacactgctggccctgcacagatcctacctgacaccaggcgactcctctagcggatggaccgcaggagctgccgcctactatgtgggctatctgcagccccggaccttcctgctgaagtacaacgagaatggcaccatcacagacgcagtggattgcgccctggaccccctgtctgagacaaagtgtacactgaagagctttaccgtggagaagggcatctatcagacaagcaatttcagggtgcagcctaccgagtccatcgtgcgctttcccccgatcacaaacctgtgcccttttggcgaggtgttcaacgccaccagattcgccagcgtgtacgcctggaatcggaagagaatctccaactgcgtggccgactattctgtgctgtacaactccgcctctttcagcacctttaagtgctatggcgtgtctcccacaaagctgaatgatctgtgctttaccaacgtgtacgccgatagcttcgtgatcaggggagacgaagtgagacagatcgcaccaggacagacaggaaagatcgcagactacaattataagctgcctgacgatttcaccggctgcgtgatcgcctggaactccaacaatctggattctaaagtgggcggcaactacaattatctgtacaggctgtttcgcaagtccaatctgaagccattcgagcgggacatctccacagagatctaccaggccggctctaccccctgcaatggcgtggagggctttaactgttatttccctctgcagtcttacggcttccagccaacaaacggcgtgggctatcagccctacagagtggtggtgctgtcctttgagctgctgcacgcaccagcaacagtgtgcggcccaaagaagtctaccaatctggtgaagaacaagtgcgtgaacttcaacttcaacggactgaccggcacaggcgtgctgaccgagagcaataagaagttcctgccttttcagcagttcggcagggacatcgcagataccacagacgccgtgcgcgaccctcagaccctggagatcctggacatcacaccatgcagcttcggcggcgtgtccgtgatcacaccaggcaccaatacatccaaccaggtggccgtgctgtatcaggacgtgaattgtaccgaggtgcccgtggcaatccacgcagatcagctgacccctacatggcgggtgtactctaccggcagcaacgtgttccagacaagagccggatgcctgatcggagcagagcacgtgaacaatagctatgagtgcgacatccctatcggcgccggcatctgtgccagctaccagacccagacaaactccccatctggagcaggctccgtggccagccagtccatcatcgcctataccatgagcctgggcgccgagaacagcgtggcctactccaacaattctatcgccatccctaccaacttcacaatcagcgtgaccacagagatcctgccagtgtctatgaccaagacaagcgtggactgcacaatgtatatctgtggcgatagcaccgagtgctccaacctgctgctgcagtacggctccttttgtacccagctgaatagagccctgacaggcatcgccgtggagcaggataagaacacacaggaggtgttcgcccaggtgaagcagatctacaagaccccacccatcaaggactttggcggcttcaacttcagccagatcctgcctgatccaagcaagccctccaagaggtcttttatcgaggacctgctgttcaacaaggtgaccctggccgatgccggcttcatcaagcagtatggagattgcctgggagacatcgcagcccgcgacctgatctgtgcccagaagtttaatggcctgaccgtgctgcctccactgctgacagatgagatgatcgcccagtacacatctgccctgctggccggcaccatcacaagcggatggaccttcggcgcaggagccgccctgcagatcccttttgccatgcagatggcctataggttcaacggcatcggcgtgacccagaatgtgctgtacgagaaccagaagctgatcgccaatcagtttaacagcgccatcggcaagatccaggactctctgtcctctacagccagcgccctgggcaagctgcaggatgtggtgaatcagaacgcccaggccctgaataccctggtgaagcagctgagctccaacttcggcgccatctctagcgtgctgaatgacatcctgagccggctggacccccctgaggcagaggtgcagatcgacaggctgatcacaggccgcctgcagagcctgcagacctacgtgacacagcagctgatcagggcagcagagatcagagcctccgccaatctggccgccaccaagatgagcgagtgcgtgctgggacagtccaagagggtggacttttgtggcaagggctatcacctgatgtctttcccacagagcgcccctcacggcgtggtgtttctgcacgtgacctacgtgccagcccaggagaagaacttcaccacagcaccagccatctgccacgatggaaaggcacactttcctagggagggcgtgttcgtgtctaacggcacccactggtttgtgacacagcgcaatttctacgagccacagatcatcaccacagacaatacattcgtgagcggcaactgtgatgtggtgatcggcatcgtgaacaataccgtgtatgatccactgcagcccgagctggactcctttaaggaggagctggataagtacttcaagaatcacacctctcccgacgtggatctgggcgacatctccggcatcaatgcctctgtggtgaacatccagaaggagatcgaccggctgaacgaggtggccaagaatctgaacgagagcctgatcgatctgcaggagctgggcaagtatgagcagtacatcaagggctctggcagagagaacctgtatttccagggaggaggaggcagcggatacatccctgaggcaccaagggacggacaggcctacgtgcgcaaggatggcgagtgggtgctgctgtccacctttctgggccatcatcaccaccaccaccaccactga

SEQ ID NO: 4853 - DNA, 3846 bp, Artificial Sequence
  Description of Artificial Sequence: Synthetic polynucleotide
atgggcatcctgccaagcccaggaatgcccgccctgctgtctctggtgagcctgctgtccgtgctgctgatgggatgcgtggcagagacaggcacacagtgcgtgaacctgaccacaaggacccagctgccccctgcctataccaattctttcacacggggcgtgtactatcccgacaaggtgtttagaagctccgtgctgcactccacacaggatctgtttctgcctttcttttctaacgtgacctggttccacgccatccacgtgtccggcaccaatggcacaaagcggttcgacaatcccgtgctgccttttaacgatggcgtgtacttcgccagcaccgagaagtccaacatcatcagaggctggatctttggcaccacactggactctaagacacagagcctgctgatcgtgaacaatgccaccaacgtggtgatcaaggtgtgcgagttccagttttgtaatgatccattcctgggcgtgtactatcacaagaacaataagtcctggatggagtctgagtttcgcgtgtattctagcgccaacaattgcacatttgagtacgtgagccagcccttcctgatggacctggagggcaagcagggcaatttcaagaacctgagggagttcgtgtttaagaatatcgatggctacttcaagatctacagcaagcacaccccaatcaacctggtgcgcgacctgccacagggattctccgccctggagccactggtggatctgcccatcggcatcaacatcacccggtttcagacactgctggccctgcacagatcctacctgacaccaggcgactcctctagcggatggaccgcaggagctgccgcctactatgtgggctatctgcagccccggaccttcctgctgaagtacaacgagaatggcaccatcacagacgcagtggattgcgccctggaccccctgtctgagacaaagtgtacactgaagagctttaccgtggagaagggcatctatcagacaagcaatttcagggtgcagcctaccgagtccatcgtgcgctttcccaatatcacaaacctgtgcccttttggcgaggtgttcaacgccaccagattcgccagcgtgtacgcctggaatcggaagagaatctccaactgcgtggccgactattctgtgctgtacaactccgcctctttcagcacctttaagtgctatggcgtgtctcccacaaagctgaatgatctgtgctttaccaacgtgtacgccgatagcttcgtgatcaggggagacgaagtgagacagatcgcaccaggacagacaggaaagatcgcagactacaattataagctgcctgacgatttcaccggctgcgtgatcgcctggaactccaacaatctggattctaaagtgggcggcaactacaattatctgtacaggctgtttcgcaagtccaatctgaagccattcgagcgggacatctccacagagatctaccaggccggctctaccccctgcaatggcgtggagggctttaactgttatttccctctgcagtcttacggcttccagccaacaaacggcgtgggctatcagccctacagagtggtggtgctgtcctttgagctgctgcacgcaccagcaacagtgtgcggcccaaagaagtctaccaatctggtgaagaacaagtgcgtgaacttcaacttcaacggactgaccggcacaggcgtgctgaccgagagcaataagaagttcctgccttttcagcagttcggcagggacatcgcagataccacagacgccgtgcgcgaccctcagaccctggagatcctggacatcacaccatgcagcttcggcggcgtgtccgtgatcacaccaggcaccaatacatccaaccaggtggccgtgctgtatcaggacgtgaattgtaccgaggtgcccgtggcaatccacgcagatcagctgacccctacatggcgggtgtactctaccggcagcaacgtgttccagacaagagccggatgcctgatcggagcagagcacgtgaacaatagctatgagtgcgacatccctatcggcgccggcatctgtgccagctaccagacccagacaaactccccatctggagcaggctccgtggccagccagtccatcatcgcctataccatgagcctgggcgccgagaacaatgtggcctactccaacaattctatcgccatccctaccaacttcacaatcagcgtgaccacagagatcctgccagtgtctatgaccaagacaagcgtggactgcacaatgtatatctgtggcgatagcaccgagtgctccaacctgctgctgcagtacggctccttttgtacccagctgaatagagccctgacaggcatcgccgtggagcaggataagaacacacaggaggtgttcgcccaggtgaagcagatctacaagaccccacccatcaaggactttggcggcttcaacttcagccagatcctgcctgatccaagcaagccctccaagaggtcttttatcgaggacctgctgttcaacaaggtgaccctggccgatgccggcttcatcaagcagtatggagattgcctgggagacatcgcagcccgcgacctgatctgtgcccagaagtttaatggcctgaccgtgctgcctccactgctgacagatgagatgatcgcccagtacacatctgccctgctggccggcaccatcacaagcggatggaccttcggcgcaggagccgccctgcagatcccttttgccatgcagatggcctataggttcaacggcatcggcgtgacccagaatgtgctgtacgagaaccagaagctgatcgccaatcagtttaacagcgccatcggcaagatccaggactctctgtcctctacagccagcgccctgggcaagctgcaggatgtggtgaatcagaacgcccaggccctgaataccctggtgaagcagctgagctccaacttcggcgccatctctagcgtgctgaatgacatcctgagccggctggacccccctgaggcagaggtgcagatcgacaggctgatcacaggccgcctgcagagcctgcagacctacgtgacacagcagctgatcagggcagcagagatcagagcctccgccaatctggccgccaccaagatgagcgagtgcgtgctgggacagtccaagagggtggacttttgtggcaagggctatcacctgatgtctttcccacagagcgcccctcacggcgtggtgtttctgcacgtgacctacgtgccagcccaggagaagaacttcaccacagcaccagccatctgccacgatggaaaggcacactttcctagggagggcgtgttcgtgtctaacggcacccactggtttgtgacacagcgcaatttctacgagccacagatcatcaccacagacaatacattcgtgagcggcaactgtgatgtggtgatcggcatcgtgaacaataccgtgtatgatccactgcagcccgagctggactcctttaaggaggagctggataagtacttcaagaatcacacctctcccgacgtggatctgggcgacatctccggcatcaatgcctctgtggtgaacatccagaaggagatcgaccggctgaacgaggtggccaagaatctgaacgagagcctgatcgatctgcaggagctgggcaagtatgagcagtacatcaagggctctggcagagagaacctgtatttccagggaggaggaggcagcggatacatccctgaggcaccaagggacggacaggcctacgtgcgcaaggatggcgagtgggtgctgctgtccacctttctgggccatcatcaccaccaccaccaccactga

SEQ ID NO: 4854 - DNA, 3846 bp, Artificial Sequence
  Description of Artificial Sequence: Synthetic polynucleotide
atgggcatcctgccaagcccaggaatgcccgccctgctgtctctggtgagcctgctgtccgtgctgctgatgggatgcgtggcagagacaggcacacagtgcgtgaacctgaccacaaggacccagctgccccctgcctataccaattctttcacacggggcgtgtactatcccgacaaggtgtttagaagctccgtgctgcactccacacaggatctgtttctgcctttcttttctaacgtgacctggttccacgccatccacgtgtccggcaccaatggcacaaagcggttcgacaatcccgtgctgccttttaacgatggcgtgtacttcgccagcaccgagaagtccaacatcatcagaggctggatctttggcaccacactggactctaagacacagagcctgctgatcgtgaacaatgccaccaacgtggtgatcaaggtgtgcgagttccagttttgtaatgatccattcctgggcgtgtactatcacaagaacaataagtcctggatggagtctgagtttcgcgtgtattctagcgccaacaattgcacatttgagtacgtgagccagcccttcctgatggacctggagggcaagcagggcaatttcaagaacctgagggagttcgtgtttaagaatatcgatggctacttcaagatctacagcaagcacaccccaatcaacctggtgcgcgacctgccacagggattctccgccctggagccactggtggatctgcccatcggcatcaacatcacccggtttcagacactgctggccctgcacagatcctacctgacaccaggcgactcctctagcggatggaccgcaggagctgccgcctactatgtgggctatctgcagccccggaccttcctgctgaagtacaacgagaatggcaccatcacagacgcagtggattgcgccctggaccccctgtctgagacaaagtgtacactgaagagctttaccgtggagaagggcatctatcagacaagcaatttcagggtgcagcctaccgagtccatcgtgcgctttcccaatatcacaaacctgtgcccttttggcgaggtgttcaacgccaccagattcgccagcgtgtacgcctggaatcggaagagaatctccaactgcgtggccgactattctgtgctgtacaactccgcctctttcagcacctttaagtgctatggcgtgtctcccacaaagctgaatgatctgtgctttaccaacgtgtacgccgatagcttcgtgatcaggggagacgaagtgagacagatcgcaccaggacagacaggaaagatcgcagactacaattataagctgcctgacgatttcaccggctgcgtgatcgcctggaactccaacacgctggattctaaagtgggcggcaactacaattatctgtacaggctgtttcgcaagtccaatctgaagccattcgagcgggacatctccacagagatctaccaggccggctctaccccctgcaatggcgtggagggctttaactgttatttccctctgcagtcttacggcttccagccaacaaacggcgtgggctatcagccctacagagtggtggtgctgtcctttgagctgctgcacgcaccagcaacagtgtgcggcccaaagaagtctaccaatctggtgaagaacaagtgcgtgaacttcaacttcaacggactgaccggcacaggcgtgctgaccgagagcaataagaagttcctgccttttcagcagttcggcagggacatcgcagataccacagacgccgtgcgcgaccctcagaccctggagatcctggacatcacaccatgcagcttcggcggcgtgtccgtgatcacaccaggcaccaatacatccaaccaggtggccgtgctgtatcaggacgtgaattgtaccgaggtgcccgtggcaatccacgcagatcagctgacccctacatggcgggtgtactctaccggcagcaacgtgttccagacaagagccggatgcctgatcggagcagagcacgtgaacaatagctatgagtgcgacatccctatcggcgccggcatctgtgccagctaccagacccagacaaactccccatctggagcaggctccgtggccagccagtccatcatcgcctataccatgagcctgggcgccgagaacagcgtggcctactccaacaattctatcgccatccctaccaacttcacaatcagcgtgaccacagagatcctgccagtgtctatgaccaagacaagcgtggactgcacaatgtatatctgtggcgatagcaccgagtgctccaacctgctgctgcagtacggctccttttgtacccagctgaatagagccctgacaggcatcgccgtggagcaggataagaacacacaggaggtgttcgcccaggtgaagcagatctacaagaccccacccatcaaggactttggcggcttcaacttcagccagatcctgcctgatccaagcaagccctccaagaggtcttttatcgaggacctgctgttcaacaaggtgaccctggccgatgccggcttcatcaagcagtatggagattgcctgggagacatcgcagcccgcgacctgatctgtgcccagaagtttaatggcctgaccgtgctgcctccactgctgacagatgagatgatcgcccagtacacatctgccctgctggccggcaccatcacaagcggatggaccttcggcgcaggagccgccctgcagatcccttttgccatgcagatggcctataggttcaacggcatcggcgtgacccagaatgtgctgtacgagaaccagaagctgatcgccaatcagtttaacagcgccatcggcaagatccaggactctctgtcctctacagccagcgccctgggcaagctgcaggatgtggtgaatcagaacgcccaggccctgaataccctggtgaagcagctgagctccaacttcggcgccatctctagcgtgctgaatgacatcctgagccggctggacccccctgaggcagaggtgcagatcgacaggctgatcacaggccgcctgcagagcctgcagacctacgtgacacagcagctgatcagggcagcagagatcagagcctccgccaatctggccgccaccaagatgagcgagtgcgtgctgggacagtccaagagggtggacttttgtggcaagggctatcacctgatgtctttcccacagagcgcccctcacggcgtggtgtttctgcacgtgacctacgtgccagcccaggagaagaacttcaccacagcaccagccatctgccacgatggaaaggcacactttcctagggagggcgtgttcgtgtctaacggcacccactggtttgtgacacagcgcaatttctacgagccacagatcatcaccacagacaatacattcgtgagcggcaactgtgatgtggtgatcggcatcgtgaacaataccgtgtatgatccactgcagcccgagctggactcctttaaggaggagctggataagtacttcaagaatcacacctctcccgacgtggatctgggcgacatctccggcatcaatgcctctgtggtgaacatccagaaggagatcgaccggctgaacgaggtggccaagaatctgaacgagagcctgatcgatctgcaggagctgggcaagtatgagcagtacatcaagggctctggcagagagaacctgtatttccagggaggaggaggcagcggatacatccctgaggcaccaagggacggacaggcctacgtgcgcaaggatggcgagtgggtgctgctgtccacctttctgggccatcatcaccaccaccaccaccactga

SEQ ID NO: 4855 - DNA, 3846 bp, Artificial Sequence
  Description of Artificial Sequence: Synthetic polynucleotide
atgggcatcctgccaagcccaggaatgcccgccctgctgtctctggtgagcctgctgtccgtgctgctgatgggatgcgtggcagagacaggcacacagtgcgtgaacctgaccacaaggacccagctgccccctgcctataccaattctttcacacggggcgtgtactatcccgacaaggtgtttagaagctccgtgctgcactccacacaggatctgtttctgcctttcttttctaacgtgacctggttccacgccatccacgtgtccggcaccaatggcacaaagcggttcgacaatcccgtgctgccttttaacgatggcgtgtacttcgccagcaccgagaagtccaacatcatcagaggctggatctttggcaccacactggactctaagacacagagcctgctgatcgtgaacaatgccaccaacgtggtgatcaaggtgtgcgagttccagttttgtaatgatccattcctgggcgtgtactatcacaagaacaataagtcctggatggagtctgagtttcgcgtgtattctagcgccaacaattgcacatttgagtacgtgagccagcccttcctgatggacctggagggcaagcagggcaatttcaagaacctgagggagttcgtgtttaagaatatcgatggctacttcaagatctacagcaagcacaccccaatcaacctggtgcgcgacctgccacagggattctccgccctggagccactggtggatctgcccatcggcatcaacatcacccggtttcagacactgctggccctgcacagatcctacctgacaccaggcgactcctctagcggatggaccgcaggagctgccgcctactatgtgggctatctgcagccccggaccttcctgctgaagtacaacgagaatggcaccatcacagacgcagtggattgcgccctggaccccctgtctgagacaaagtgtacactgaagagctttaccgtggagaagggcatctatcagacaagcaatttcagggtgcagcctaccgagtccatcgtgcgctttcccgacatcacaaacctgtgcccttttggcgaggtgttcaacgccaccagattcgccagcgtgtacgcctggaatcggaagagaatctccaactgcgtggccgactattctgtgctgtacaactccgcctctttcagcacctttaagtgctatggcgtgtctcccacaaagctgaatgatctgtgctttaccaacgtgtacgccgatagcttcgtgatcaggggagacgaagtgagacagatcgcaccaggacagacaggaaagatcgcagactacaattataagctgcctgacgatttcaccggctgcgtgatcgcctggaactccaacaatctggattctaaagtgggcggcaactacaattatctgtacaggctgtttcgcaagtccaatctgaagccattcgagcgggacatctccacagagatctaccaggccggctctaccccctgcaatggcgtggagggctttaactgttatttccctctgcagtcttacggcttccagccaacaaacggcgtgggctatcagccctacagagtggtggtgctgtcctttgagctgctgcacgcaccagcaacagtgtgcggcccaaagaagtctaccaatctggtgaagaacaagtgcgtgaacttcaacttcaacggactgaccggcacaggcgtgctgaccgagagcaataagaagttcctgccttttcagcagttcggcagggacatcgcagataccacagacgccgtgcgcgaccctcagaccctggagatcctggacatcacaccatgcagcttcggcggcgtgtccgtgatcacaccaggcaccaatacatccaaccaggtggccgtgctgtatcaggacgtgaattgtaccgaggtgcccgtggcaatccacgcagatcagctgacccctacatggcgggtgtactctaccggcagcaacgtgttccagacaagagccggatgcctgatcggagcagagcacgtgaacaatagctatgagtgcgacatccctatcggcgccggcatctgtgccagctaccagacccagacaaactccccatctggagcaggctccgtggccagccagtccatcatcgcctataccatgagcctgggcgccgagaacagcgtggcctactccaacaattctatcgccatccctaccaacttcacaatcagcgtgaccacagagatcctgccagtgtctatgaccaagacaagcgtggactgcacaatgtatatctgtggcgatagcaccgagtgctccaacctgctgctgcagtacggctccttttgtacccagctgaatagagccctgacaggcatcgccgtggagcaggataagaacacacaggaggtgttcgcccaggtgaagcagatctacaagaccccacccatcaaggactttggcggcttcaacttcagccagatcctgcctgatccaagcaagccctccaagaggtcttttatcgaggacctgctgttcaacaaggtgaccctggccgatgccggcttcatcaagcagtatggagattgcctgggagacatcgcagcccgcgacctgatctgtgcccagaagtttaatggcctgaccgtgctgcctccactgctgacagatgagatgatcgcccagtacacatctgccctgctggccggcaccatcacaagcggatggaccttcggcgcaggagccgccctgcagatcccttttgccatgcagatggcctataggttcaacggcatcggcgtgacccagaatgtgctgtacgagaaccagaagctgatcgccaatcagtttaacagcgccatcggcaagatccaggactctctgtcctctacagccagcgccctgggcaagctgcaggatgtggtgaatcagaacgcccaggccctgaataccctggtgaagcagctgagctccaacttcggcgccatctctagcgtgctgaatgacatcctgagccggctggacccccctgaggcagaggtgcagatcgacaggctgatcacaggccgcctgcagagcctgcagacctacgtgacacagcagctgatcagggcagcagagatcagagcctccgccaatctggccgccaccaagatgagcgagtgcgtgctgggacagtccaagagggtggacttttgtggcaagggctatcacctgatgtctttcccacagagcgcccctcacggcgtggtgtttctgcacgtgacctacgtgccagcccaggagaagaacttcaccacagcaccagccatctgccacgatggaaaggcacactttcctagggagggcgtgttcgtgtctaacggcacccactggtttgtgacacagcgcaatttctacgagccacagatcatcaccacagacaatacattcgtgagcggcaactgtgatgtggtgatcggcatcgtgaacaataccgtgtatgatccactgcagcccgagctggactcctttaaggaggagctggataagtacttcaagaatcacacctctcccgacgtggatctgggcgacatctccggcatcaatgcctctgtggtgaacatccagaaggagatcgaccggctgaacgaggtggccaagaatctgaacgagagcctgatcgatctgcaggagctgggcaagtatgagcagtacatcaagggctctggcagagagaacctgtatttccagggaggaggaggcagcggatacatccctgaggcaccaagggacggacaggcctacgtgcgcaaggatggcgagtgggtgctgctgtccacctttctgggccatcatcaccaccaccaccaccactga

SEQ ID NO: 4856 - DNA, 3846 bp, Artificial Sequence
  Description of Artificial Sequence: Synthetic polynucleotide
atgggcatcctgccaagcccaggaatgcccgccctgctgtctctggtgagcctgctgtccgtgctgctgatgggatgcgtggcagagacaggcacacagtgcgtgaacctgaccacaaggacccagctgccccctgcctataccaattctttcacacggggcgtgtactatcccgacaaggtgtttagaagctccgtgctgcactccacacaggatctgtttctgcctttcttttctaacgtgacctggttccacgccatccacgtgtccggcaccaatggcacaaagcggttcgacaatcccgtgctgccttttaacgatggcgtgtacttcgccagcaccgagaagtccaacatcatcagaggctggatctttggcaccacactggactctaagacacagagcctgctgatcgtgaacaatgccaccaacgtggtgatcaaggtgtgcgagttccagttttgtaatgatccattcctgggcgtgtactatcacaagaacaataagtcctggatggagtctgagtttcgcgtgtattctagcgccaacaattgcacatttgagtacgtgagccagcccttcctgatggacctggagggcaagcagggcaatttcaagaacctgagggagttcgtgtttaagaatatcgatggctacttcaagatctacagcaagcacaccccaatcaacctggtgcgcgacctgccacagggattctccgccctggagccactggtggatctgcccatcggcatcaacatcacccggtttcagacactgctggccctgcacagatcctacctgacaccaggcgactcctctagcggatggaccgcaggagctgccgcctactatgtgggctatctgcagccccggaccttcctgctgaagtacaacgagaatggcaccatcacagacgcagtggattgcgccctggaccccctgtctgagacaaagtgtacactgaagagctttaccgtggagaagggcatctatcagacaagcaatttcagggtgcagcctaccgagtccatcgtgcgctttcccaatatcacaaacctgtgcccttttggcgaggtgttcaacgccaccagattcgccagcgtgtacgcctggaatcggaagagaatctccaactgcgtggccgactattctgtgctgtacaactccgcctctttcagcacctttaagtgctatggcgtgtctcccacaaagctgaatgatctgtgctttaccaacgtgtacgccgatagcttcgtgatcaggggagacgaagtgagacagatcgcaccaggacagacaggaaagatcgcagactacaattataagctgcctgacgatttcaccggctgcgtgatcgcctggaacgctaacaatctggattctaaagtgggcggcaactacaattatctgtacaggctgtttcgcaagtccaatctgaagccattcgagcgggacatctccacagagatctaccaggccggctctaccccctgcaatggcgtggagggctttaactgttatttccctctgcagtcttacggcttccagccaacaaacggcgtgggctatcagccctacagagtggtggtgctgtcctttgagctgctgcacgcaccagcaacagtgtgcggcccaaagaagtctaccaatctggtgaagaacaagtgcgtgaacttcaacttcaacggactgaccggcacaggcgtgctgaccgagagcaataagaagttcctgccttttcagcagttcggcagggacatcgcagataccacagacgccgtgcgcgaccctcagaccctggagatcctggacatcacaccatgcagcttcggcggcgtgtccgtgatcacaccaggcaccaatacatccaaccaggtggccgtgctgtatcaggacgtgaattgtaccgaggtgcccgtggcaatccacgcagatcagctgacccctacatggcgggtgtactctaccggcagcaacgtgttccagacaagagccggatgcctgatcggagcagagcacgtgaacaatagctatgagtgcgacatccctatcggcgccggcatctgtgccagctaccagacccagacaaactccccatctggagcaggctccgtggccagccagtccatcatcgcctataccatgagcctgggcgccgagaacagcgtggcctactccaacaattctatcgccatccctaccaacttcacaatcagcgtgaccacagagatcctgccagtgtctatgaccaagacaagcgtggactgcacaatgtatatctgtggcgatagcaccgagtgctccaacctgctgctgcagtacggctccttttgtacccagctgaatagagccctgacaggcatcgccgtggagcaggataagaacacacaggaggtgttcgcccaggtgaagcagatctacaagaccccacccatcaaggactttggcggcttcaacttcagccagatcctgcctgatccaagcaagccctccaagaggtcttttatcgaggacctgctgttcaacaaggtgaccctggccgatgccggcttcatcaagcagtatggagattgcctgggagacatcgcagcccgcgacctgatctgtgcccagaagtttaatggcctgaccgtgctgcctccactgctgacagatgagatgatcgcccagtacacatctgccctgctggccggcaccatcacaagcggatggaccttcggcgcaggagccgccctgcagatcccttttgccatgcagatggcctataggttcaacggcatcggcgtgacccagaatgtgctgtacgagaaccagaagctgatcgccaatcagtttaacagcgccatcggcaagatccaggactctctgtcctctacagccagcgccctgggcaagctgcaggatgtggtgaatcagaacgcccaggccctgaataccctggtgaagcagctgagctccaacttcggcgccatctctagcgtgctgaatgacatcctgagccggctggacccccctgaggcagaggtgcagatcgacaggctgatcacaggccgcctgcagagcctgcagacctacgtgacacagcagctgatcagggcagcagagatcagagcctccgccaatctggccgccaccaagatgagcgagtgcgtgctgggacagtccaagagggtggacttttgtggcaagggctatcacctgatgtctttcccacagagcgcccctcacggcgtggtgtttctgcacgtgacctacgtgccagcccaggagaagaacttcaccacagcaccagccatctgccacgatggaaaggcacactttcctagggagggcgtgttcgtgtctaacggcacccactggtttgtgacacagcgcaatttctacgagccacagatcatcaccacagacaatacattcgtgagcggcaactgtgatgtggtgatcggcatcgtgaacaataccgtgtatgatccactgcagcccgagctggactcctttaaggaggagctggataagtacttcaagaatcacacctctcccgacgtggatctgggcgacatctccggcatcaatgcctctgtggtgaacatccagaaggagatcgaccggctgaacgaggtggccaagaatctgaacgagagcctgatcgatctgcaggagctgggcaagtatgagcagtacatcaagggctctggcagagagaacctgtatttccagggaggaggaggcagcggatacatccctgaggcaccaagggacggacaggcctacgtgcgcaaggatggcgagtgggtgctgctgtccacctttctgggccatcatcaccaccaccaccaccactga

SEQ ID NO: 4857 - DNA, 3846 bp, Artificial Sequence
  Description of Artificial Sequence: Synthetic polynucleotide
atgggcatcctgccaagcccaggaatgcccgccctgctgtctctggtgagcctgctgtccgtgctgctgatgggatgcgtggcagagacaggcacacagtgcgtgaacctgaccacaaggacccagctgccccctgcctataccaattctttcacacggggcgtgtactatcccgacaaggtgtttagaagctccgtgctgcactccacacaggatctgtttctgcctttcttttctaacgtgacctggttccacgccatccacgtgtccggcaccaatggcacaaagcggttcgacaatcccgtgctgccttttaacgatggcgtgtacttcgccagcaccgagaagtccaacatcatcagaggctggatctttggcaccacactggactctaagacacagagcctgctgatcgtgaacaatgccaccaacgtggtgatcaaggtgtgcgagttccagttttgtaatgatccattcctgggcgtgtactatcacaagaacaataagtcctggatggagtctgagtttcgcgtgtattctagcgccaacaattgcacatttgagtacgtgagccagcccttcctgatggacctggagggcaagcagggcaatttcaagaacctgagggagttcgtgtttaagaatatcgatggctacttcaagatctacagcaagcacaccccaatcaacctggtgcgcgacctgccacagggattctccgccctggagccactggtggatctgcccatcggcatcaacatcacccggtttcagacactgctggccctgcacagatcctacctgacaccaggcgactcctctagcggatggaccgcaggagctgccgcctactatgtgggctatctgcagccccggaccttcctgctgaagtacaacgagaatggcaccatcacagacgcagtggattgcgccctggaccccctgtctgagacaaagtgtacactgaagagctttaccgtggagaagggcatctatcagacaagcaatttcagggtgcagcctaccgagtccatcgtgcgctttcccaatatcacaaacctgtgcccttttggcgaggtgttcaacgccaccagattcgccagcgtgtacgcctggaatcggaagagaatctccaactgcgtggccgactattctgtgctgtacacttccgcctctttcagcacctttaagtgctatggcgtgtctcccacaaagctgaatgatctgtgctttaccaacgtgtacgccgatagcttcgtgatcaggggagacgaagtgagacagatcgcaccaggacagacaggaaagatcgcagactacaattataagctgcctgacgatttcaccggctgcgtgatcgcctggaactccaacaatctggattctaaagtgggcggcaactacaattatctgtacaggctgtttcgcaagtccaatctgaagccattcgagcgggacatctccacagagatctaccaggccggctctaccccctgcaatggcgtggagggctttaactgttatttccctctgcagtcttacggcttccagccaacaaacggcgtgggctatcagccctacagagtggtggtgctgtcctttgagctgctgcacgcaccagcaacagtgtgcggcccaaagaagtctaccaatctggtgaagaacaagtgcgtgaacttcaacttcaacggactgaccggcacaggcgtgctgaccgagagcaataagaagttcctgccttttcagcagttcggcagggacatcgcagataccacagacgccgtgcgcgaccctcagaccctggagatcctggacatcacaccatgcagcttcggcggcgtgtccgtgatcacaccaggcaccaatacatccaaccaggtggccgtgctgtatcaggacgtgaattgtaccgaggtgcccgtggcaatccacgcagatcagctgacccctacatggcgggtgtactctaccggcagcaacgtgttccagacaagagccggatgcctgatcggagcagagcacgtgaacaatagctatgagtgcgacatccctatcggcgccggcatctgtgccagctaccagacccagacaaactccccatctggagcaggctccgtggccagccagtccatcatcgcctataccatgagcctgggcgccgagaacagcgtggcctactccaacaattctatcgccatccctaccaacttcacaatcagcgtgaccacagagatcctgccagtgtctatgaccaagacaagcgtggactgcacaatgtatatctgtggcgatagcaccgagtgctccaacctgctgctgcagtacggctccttttgtacccagctgaatagagccctgacaggcatcgccgtggagcaggataagaacacacaggaggtgttcgcccaggtgaagcagatctacaagaccccacccatcaaggactttggcggcttcaacttcagccagatcctgcctgatccaagcaagccctccaagaggtcttttatcgaggacctgctgttcaacaaggtgaccctggccgatgccggcttcatcaagcagtatggagattgcctgggagacatcgcagcccgcgacctgatctgtgcccagaagtttaatggcctgaccgtgctgcctccactgctgacagatgagatgatcgcccagtacacatctgccctgctggccggcaccatcacaagcggatggaccttcggcgcaggagccgccctgcagatcccttttgccatgcagatggcctataggttcaacggcatcggcgtgacccagaatgtgctgtacgagaaccagaagctgatcgccaatcagtttaacagcgccatcggcaagatccaggactctctgtcctctacagccagcgccctgggcaagctgcaggatgtggtgaatcagaacgcccaggccctgaataccctggtgaagcagctgagctccaacttcggcgccatctctagcgtgctgaatgacatcctgagccggctggacccccctgaggcagaggtgcagatcgacaggctgatcacaggccgcctgcagagcctgcagacctacgtgacacagcagctgatcagggcagcagagatcagagcctccgccaatctggccgccaccaagatgagcgagtgcgtgctgggacagtccaagagggtggacttttgtggcaagggctatcacctgatgtctttcccacagagcgcccctcacggcgtggtgtttctgcacgtgacctacgtgccagcccaggagaagaacttcaccacagcaccagccatctgccacgatggaaaggcacactttcctagggagggcgtgttcgtgtctaacggcacccactggtttgtgacacagcgcaatttctacgagccacagatcatcaccacagacaatacattcgtgagcggcaactgtgatgtggtgatcggcatcgtgaacaataccgtgtatgatccactgcagcccgagctggactcctttaaggaggagctggataagtacttcaagaatcacacctctcccgacgtggatctgggcgacatctccggcatcaatgcctctgtggtgaacatccagaaggagatcgaccggctgaacgaggtggccaagaatctgaacgagagcctgatcgatctgcaggagctgggcaagtatgagcagtacatcaagggctctggcagagagaacctgtatttccagggaggaggaggcagcggatacatccctgaggcaccaagggacggacaggcctacgtgcgcaaggatggcgagtgggtgctgctgtccacctttctgggccatcatcaccaccaccaccaccactga

SEQ ID NO: 4858 - DNA, 3846 bp, Artificial Sequence
  Description of Artificial Sequence: Synthetic polynucleotide
atgggcatcctgccaagcccaggaatgcccgccctgctgtctctggtgagcctgctgtccgtgctgctgatgggatgcgtggcagagacaggcacacagtgcgtgaacctgaccacaaggacccagctgccccctgcctataccaattctttcacacggggcgtgtactatcccgacaaggtgtttagaagctccgtgctgcactccacacaggatctgtttctgcctttcttttctaacgtgacctggttccacgccatccacgtgtccggcaccaatggcacaaagcggttcgacaatcccgtgctgccttttaacgatggcgtgtacttcgccagcaccgagaagtccaacatcatcagaggctggatctttggcaccacactggactctaagacacagagcctgctgatcgtgaacaatgccaccaacgtggtgatcaaggtgtgcgagttccagttttgtaatgatccattcctgggcgtgtactatcacaagaacaataagtcctggatggagtctgagtttcgcgtgtattctagcgccaacaattgcacatttgagtacgtgagccagcccttcctgatggacctggagggcaagcagggcaatttcaagaacctgagggagttcgtgtttaagaatatcgatggctacttcaagatctacagcaagcacaccccaatcaacctggtgcgcgacctgccacagggattctccgccctggagccactggtggatctgcccatcggcatcaacatcacccggtttcagacactgctggccctgcacagatcctacctgacaccaggcgactcctctagcggatggaccgcaggagctgccgcctactatgtgggctatctgcagccccggaccttcctgctgaagtacaacgagaatggcaccatcacagacgcagtggattgcgccctggaccccctgtctgagacaaagtgtacactgaagagctttaccgtggagaagggcatctatcagacaagcaatttcagggtgcagcctaccgagtccatcgtgcgctttcccaatatcacaaacctgtgcccttttggcgaggtgttcaacgccaccagattcgccagcgtgtacgcctggaatcggaagagaatctccaactgcgtggccgactattctgtgctgtacaactccgcctctttcagcacctttaagtgctatggcgtgtctcccacaaagctgaatgatctgtgctttaccaacgtgtacgccgatagcttcgtgatcaggggagacgaagtgagacagatcgcaccaggacagacaggaaagatcgcagactacaattataagctgcctgacgatttcaccggctgcgtgatcgcctggaactccaacaatctggattctaaagtgggcggcaactacaattatctgtacaggctgtttcgcaagtccaatctgaagccattcgagcgggacatctccacagagatctaccaggccggctctaccccctgcaatggcgtggagggctttaaccgatatttccctctgcagtcttacggcttccagccaacaaacggcgtgggctatcagccctacagagtggtggtgctgtcctttgagctgctgcacgcaccagcaacagtgtgcggcccaaagaagtctaccaatctggtgaagaacaagtgcgtgaacttcaacttcaacggactgaccggcacaggcgtgctgaccgagagcaataagaagttcctgccttttcagcagttcggcagggacatcgcagataccacagacgccgtgcgcgaccctcagaccctggagatcctggacatcacaccatgcagcttcggcggcgtgtccgtgatcacaccaggcaccaatacatccaaccaggtggccgtgctgtatcaggacgtgaattgtaccgaggtgcccgtggcaatccacgcagatcagctgacccctacatggcgggtgtactctaccggcagcaacgtgttccagacaagagccggatgcctgatcggagcagagcacgtgaacaatagctatgagtgcgacatccctatcggcgccggcatctgtgccagctaccagacccagacaaactccccatctggagcaggctccgtggccagccagtccatcatcgcctataccatgagcctgggcgccgagaacagcgtggcctactccaacaattctatcgccatccctaccaacttcacaatcagcgtgaccacagagatcctgccagtgtctatgaccaagacaagcgtggactgcacaatgtatatctgtggcgatagcaccgagtgctccaacctgctgctgcagtacggctccttttgtacccagctgaatagagccctgacaggcatcgccgtggagcaggataagaacacacaggaggtgttcgcccaggtgaagcagatctacaagaccccacccatcaaggactttggcggcttcaacttcagccagatcctgcctgatccaagcaagccctccaagaggtcttttatcgaggacctgctgttcaacaaggtgaccctggccgatgccggcttcatcaagcagtatggagattgcctgggagacatcgcagcccgcgacctgatctgtgcccagaagtttaatggcctgaccgtgctgcctccactgctgacagatgagatgatcgcccagtacacatctgccctgctggccggcaccatcacaagcggatggaccttcggcgcaggagccgccctgcagatcccttttgccatgcagatggcctataggttcaacggcatcggcgtgacccagaatgtgctgtacgagaaccagaagctgatcgccaatcagtttaacagcgccatcggcaagatccaggactctctgtcctctacagccagcgccctgggcaagctgcaggatgtggtgaatcagaacgcccaggccctgaataccctggtgaagcagctgagctccaacttcggcgccatctctagcgtgctgaatgacatcctgagccggctggacccccctgaggcagaggtgcagatcgacaggctgatcacaggccgcctgcagagcctgcagacctacgtgacacagcagctgatcagggcagcagagatcagagcctccgccaatctggccgccaccaagatgagcgagtgcgtgctgggacagtccaagagggtggacttttgtggcaagggctatcacctgatgtctttcccacagagcgcccctcacggcgtggtgtttctgcacgtgacctacgtgccagcccaggagaagaacttcaccacagcaccagccatctgccacgatggaaaggcacactttcctagggagggcgtgttcgtgtctaacggcacccactggtttgtgacacagcgcaatttctacgagccacagatcatcaccacagacaatacattcgtgagcggcaactgtgatgtggtgatcggcatcgtgaacaataccgtgtatgatccactgcagcccgagctggactcctttaaggaggagctggataagtacttcaagaatcacacctctcccgacgtggatctgggcgacatctccggcatcaatgcctctgtggtgaacatccagaaggagatcgaccggctgaacgaggtggccaagaatctgaacgagagcctgatcgatctgcaggagctgggcaagtatgagcagtacatcaagggctctggcagagagaacctgtatttccagggaggaggaggcagcggatacatccctgaggcaccaagggacggacaggcctacgtgcgcaaggatggcgagtgggtgctgctgtccacctttctgggccatcatcaccaccaccaccaccactga

SEQ ID NO: 4859 - DNA, 3846 bp, Artificial Sequence
  Description of Artificial Sequence: Synthetic polynucleotide
atgggcatcctgccaagcccaggaatgcccgccctgctgtctctggtgagcctgctgtccgtgctgctgatgggatgcgtggcagagacaggcacacagtgcgtgaacctgaccacaaggacccagctgccccctgcctataccaattctttcacacggggcgtgtactatcccgacaaggtgtttagaagctccgtgctgcactccacacaggatctgtttctgcctttcttttctaacgtgacctggttccacgccatccacgtgtccggcaccaatggcacaaagcggttcgacaatcccgtgctgccttttaacgatggcgtgtacttcgccagcaccgagaagtccaacatcatcagaggctggatctttggcaccacactggactctaagacacagagcctgctgatcgtgaacaatgccaccaacgtggtgatcaaggtgtgcgagttccagttttgtaatgatccattcctgggcgtgtactatcacaagaacaataagtcctggatggagtctgagtttcgcgtgtattctagcgccaacaattgcacatttgagtacgtgagccagcccttcctgatggacctggagggcaagcagggcaatttcaagaacctgagggagttcgtgtttaagaatatcgatggctacttcaagatctacagcaagcacaccccaatcaacctggtgcgcgacctgccacagggattctccgccctggagccactggtggatctgcccatcggcatcaacatcacccggtttcagacactgctggccctgcacagatcctacctgacaccaggcgactcctctagcggatggaccgcaggagctgccgcctactatgtgggctatctgcagccccggaccttcctgctgaagtacaacgagaatggcaccatcacagacgcagtggattgcgccctggaccccctgtctgagacaaagtgtacactgaagagctttaccgtggagaagggcatctatcagacaagcaatttcagggtgcagcctaccgagtccatcgtgcgctttcccaatatcacaaacctgtgcccttttggcgaggtgttcaacgccaccagattcgccagcgtgtacgcctggaatcggaagagaatctccaactgcgtggccgactattctgtgctgtacaactccgcctctttcagcacctttaagtgctatggcgtgtctcccacaaagctgaatgatctgtgctttaccaacgtgtacgccgatagcttcgtgatcaggggagacgaagtgagacagatcgcaccaggacagacaggaaagatcgcagactacaattatttgctgcctgacgatttcaccggctgcgtgatcgcctggaactccaacaatctggattctaaagtgggcggcaactacaattatctgtacaggctgtttcgcaagtccaatctgaagccattcgagcgggacatctccacagagatctaccaggccggctctaccccctgcaatggcgtggagggctttaactgttatttccctctgcagtcttacggcttccagccaacaaacggcgtgggctatcagccctacagagtggtggtgctgtcctttgagctgctgcacgcaccagcaacagtgtgcggcccaaagaagtctaccaatctggtgaagaacaagtgcgtgaacttcaacttcaacggactgaccggcacaggcgtgctgaccgagagcaataagaagttcctgccttttcagcagttcggcagggacatcgcagataccacagacgccgtgcgcgaccctcagaccctggagatcctggacatcacaccatgcagcttcggcggcgtgtccgtgatcacaccaggcaccaatacatccaaccaggtggccgtgctgtatcaggacgtgaattgtaccgaggtgcccgtggcaatccacgcagatcagctgacccctacatggcgggtgtactctaccggcagcaacgtgttccagacaagagccggatgcctgatcggagcagagcacgtgaacaatagctatgagtgcgacatccctatcggcgccggcatctgtgccagctaccagacccagacaaactccccatctggagcaggctccgtggccagccagtccatcatcgcctataccatgagcctgggcgccgagaacagcgtggcctactccaacaattctatcgccatccctaccaacttcacaatcagcgtgaccacagagatcctgccagtgtctatgaccaagacaagcgtggactgcacaatgtatatctgtggcgatagcaccgagtgctccaacctgctgctgcagtacggctccttttgtacccagctgaatagagccctgacaggcatcgccgtggagcaggataagaacacacaggaggtgttcgcccaggtgaagcagatctacaagaccccacccatcaaggactttggcggcttcaacttcagccagatcctgcctgatccaagcaagccctccaagaggtcttttatcgaggacctgctgttcaacaaggtgaccctggccgatgccggcttcatcaagcagtatggagattgcctgggagacatcgcagcccgcgacctgatctgtgcccagaagtttaatggcctgaccgtgctgcctccactgctgacagatgagatgatcgcccagtacacatctgccctgctggccggcaccatcacaagcggatggaccttcggcgcaggagccgccctgcagatcccttttgccatgcagatggcctataggttcaacggcatcggcgtgacccagaatgtgctgtacgagaaccagaagctgatcgccaatcagtttaacagcgccatcggcaagatccaggactctctgtcctctacagccagcgccctgggcaagctgcaggatgtggtgaatcagaacgcccaggccctgaataccctggtgaagcagctgagctccaacttcggcgccatctctagcgtgctgaatgacatcctgagccggctggacccccctgaggcagaggtgcagatcgacaggctgatcacaggccgcctgcagagcctgcagacctacgtgacacagcagctgatcagggcagcagagatcagagcctccgccaatctggccgccaccaagatgagcgagtgcgtgctgggacagtccaagagggtggacttttgtggcaagggctatcacctgatgtctttcccacagagcgcccctcacggcgtggtgtttctgcacgtgacctacgtgccagcccaggagaagaacttcaccacagcaccagccatctgccacgatggaaaggcacactttcctagggagggcgtgttcgtgtctaacggcacccactggtttgtgacacagcgcaatttctacgagccacagatcatcaccacagacaatacattcgtgagcggcaactgtgatgtggtgatcggcatcgtgaacaataccgtgtatgatccactgcagcccgagctggactcctttaaggaggagctggataagtacttcaagaatcacacctctcccgacgtggatctgggcgacatctccggcatcaatgcctctgtggtgaacatccagaaggagatcgaccggctgaacgaggtggccaagaatctgaacgagagcctgatcgatctgcaggagctgggcaagtatgagcagtacatcaagggctctggcagagagaacctgtatttccagggaggaggaggcagcggatacatccctgaggcaccaagggacggacaggcctacgtgcgcaaggatggcgagtgggtgctgctgtccacctttctgggccatcatcaccaccaccaccaccactga

SEQ ID NO: 4860 - DNA, 3846 bp, Artificial Sequence
  Description of Artificial Sequence: Synthetic polynucleotide
atgggcatcctgccaagcccaggaatgcccgccctgctgtctctggtgagcctgctgtccgtgctgctgatgggatgcgtggcagagacaggcacacagtgcgtgaacctgaccacaaggacccagctgccccctgcctataccaattctttcacacggggcgtgtactatcccgacaaggtgtttagaagctccgtgctgcactccacacaggatctgtttctgcctttcttttctaacgtgacctggttccacgccatccacgtgtccggcaccaatggcacaaagcggttcgacaatcccgtgctgccttttaacgatggcgtgtacttcgccagcaccgagaagtccaacatcatcagaggctggatctttggcaccacactggactctaagacacagagcctgctgatcgtgaacaatgccaccaacgtggtgatcaaggtgtgcgagttccagttttgtaatgatccattcctgggcgtgtactatcacaagaacaataagtcctggatggagtctgagtttcgcgtgtattctagcgccaacaattgcacatttgagtacgtgagccagcccttcctgatggacctggagggcaagcagggcaatttcaagaacctgagggagttcgtgtttaagaatatcgatggctacttcaagatctacagcaagcacaccccaatcaacctggtgcgcgacctgccacagggattctccgccctggagccactggtggatctgcccatcggcatcaacatcacccggtttcagacactgctggccctgcacagatcctacctgacaccaggcgactcctctagcggatggaccgcaggagctgccgcctactatgtgggctatctgcagccccggaccttcctgctgaagtacaacgagaatggcaccatcacagacgcagtggattgcgccctggaccccctgtctgagacaaagtgtacactgaagagctttaccgtggagaagggcatctatcagacaagcaatttcagggtgcagcctaccgagtccatcgtgcgctttcccaatatcacaaacctgtgcccttttggcgaggtgttcaacgccaccagattcgccagcgtgtacgcctggaatcggaagagaatctccaactgcgtggccgactattctgtgctgtacaactccgcctctttcagcacctttaagtgctatggcgtgtctcccacaaagctgaatgatctgtgctttaccaacgtgtacgccgatagcttcgtgatcaggggagacgaagtgagacagatcgcaccaggacagacaggaaagatcgcagactacaattataagctgcctgacgatttcaccggctgcgtgatcgcctggaactccaacaatctggattctaaagtgggcggcaactacaattatctgtacaggctgtttcgcaagtccaatctgaagccattcgagcgggacatctccacagagatctaccaggccggctctaccccctgcaatggcgtggagggctttaactgttatttccctctgcagtcttacggcttccagccaacaaacggcgtgggctatcagccctacagagtggtggtgctgaattttgagctgctgcacgcaccagcaacagtgtgcggcccaaagaagtctaccaatctggtgaagaacaagtgcgtgaacttcaacttcaacggactgaccggcacaggcgtgctgaccgagagcaataagaagttcctgccttttcagcagttcggcagggacatcgcagataccacagacgccgtgcgcgaccctcagaccctggagatcctggacatcacaccatgcagcttcggcggcgtgtccgtgatcacaccaggcaccaatacatccaaccaggtggccgtgctgtatcaggacgtgaattgtaccgaggtgcccgtggcaatccacgcagatcagctgacccctacatggcgggtgtactctaccggcagcaacgtgttccagacaagagccggatgcctgatcggagcagagcacgtgaacaatagctatgagtgcgacatccctatcggcgccggcatctgtgccagctaccagacccagacaaactccccatctggagcaggctccgtggccagccagtccatcatcgcctataccatgagcctgggcgccgagaacagcgtggcctactccaacaattctatcgccatccctaccaacttcacaatcagcgtgaccacagagatcctgccagtgtctatgaccaagacaagcgtggactgcacaatgtatatctgtggcgatagcaccgagtgctccaacctgctgctgcagtacggctccttttgtacccagctgaatagagccctgacaggcatcgccgtggagcaggataagaacacacaggaggtgttcgcccaggtgaagcagatctacaagaccccacccatcaaggactttggcggcttcaacttcagccagatcctgcctgatccaagcaagccctccaagaggtcttttatcgaggacctgctgttcaacaaggtgaccctggccgatgccggcttcatcaagcagtatggagattgcctgggagacatcgcagcccgcgacctgatctgtgcccagaagtttaatggcctgaccgtgctgcctccactgctgacagatgagatgatcgcccagtacacatctgccctgctggccggcaccatcacaagcggatggaccttcggcgcaggagccgccctgcagatcccttttgccatgcagatggcctataggttcaacggcatcggcgtgacccagaatgtgctgtacgagaaccagaagctgatcgccaatcagtttaacagcgccatcggcaagatccaggactctctgtcctctacagccagcgccctgggcaagctgcaggatgtggtgaatcagaacgcccaggccctgaataccctggtgaagcagctgagctccaacttcggcgccatctctagcgtgctgaatgacatcctgagccggctggacccccctgaggcagaggtgcagatcgacaggctgatcacaggccgcctgcagagcctgcagacctacgtgacacagcagctgatcagggcagcagagatcagagcctccgccaatctggccgccaccaagatgagcgagtgcgtgctgggacagtccaagagggtggacttttgtggcaagggctatcacctgatgtctttcccacagagcgcccctcacggcgtggtgtttctgcacgtgacctacgtgccagcccaggagaagaacttcaccacagcaccagccatctgccacgatggaaaggcacactttcctagggagggcgtgttcgtgtctaacggcacccactggtttgtgacacagcgcaatttctacgagccacagatcatcaccacagacaatacattcgtgagcggcaactgtgatgtggtgatcggcatcgtgaacaataccgtgtatgatccactgcagcccgagctggactcctttaaggaggagctggataagtacttcaagaatcacacctctcccgacgtggatctgggcgacatctccggcatcaatgcctctgtggtgaacatccagaaggagatcgaccggctgaacgaggtggccaagaatctgaacgagagcctgatcgatctgcaggagctgggcaagtatgagcagtacatcaagggctctggcagagagaacctgtatttccagggaggaggaggcagcggatacatccctgaggcaccaagggacggacaggcctacgtgcgcaaggatggcgagtgggtgctgctgtccacctttctgggccatcatcaccaccaccaccaccactga

SEQ ID NO: 4861 - DNA, 3846 bp, Artificial Sequence
  Description of Artificial Sequence: Synthetic polynucleotide
atgggcatcctgccaagcccaggaatgcccgccctgctgtctctggtgagcctgctgtccgtgctgctgatgggatgcgtggcagagacaggcacacagtgcgtgaacctgaccacaaggacccagctgccccctgcctataccaattctttcacacggggcgtgtactatcccgacaaggtgtttagaagctccgtgctgcactccacacaggatctgtttctgcctttcttttctaacgtgacctggttccacgccatccacgtgtccggcaccaatggcacaaagcggttcgacaatcccgtgctgccttttaacgatggcgtgtacttcgccagcaccgagaagtccaacatcatcagaggctggatctttggcaccacactggactctaagacacagagcctgctgatcgtgaacaatgccaccaacgtggtgatcaaggtgtgcgagttccagttttgtaatgatccattcctgggcgtgtactatcacaagaacaataagtcctggatggagtctgagtttcgcgtgtattctagcgccaacaattgcacatttgagtacgtgagccagcccttcctgatggacctggagggcaagcagggcaatttcaagaacctgagggagttcgtgtttaagaatatcgatggctacttcaagatctacagcaagcacaccccaatcaacctggtgcgcgacctgccacagggattctccgccctggagccactggtggatctgcccatcggcatcaacatcacccggtttcagacactgctggccctgcacagatcctacctgacaccaggcgactcctctagcggatggaccgcaggagctgccgcctactatgtgggctatctgcagccccggaccttcctgctgaagtacaacgagaatggcaccatcacagacgcagtggattgcgccctggaccccctgtctgagacaaagtgtacactgaagagctttaccgtggagaagggcatctatcagacaagcaatttcagggtgcagcctaccgagtccatcgtgcgctttcccaatatcacaaacctgtgcccttttggcgaggtgttcaacgccaccagattcgccagcgtgtacgcctggaatcggaagagaatctccaactgcattgccgactattctgtgctgtacaactccgcctctttcagcacctttaagtgctatggcgtgtctcccacaaagctgaatgatctgtgctttaccaacgtgtacgccgatagcttcgtgatcaggggagacgaagtgagacagatcgcaccaggacagacaggaaagatcgcagactacaattataagctgcctgacgatttcaccggctgcgtgatcgcctggaactccaacaatctggattctaaagtgggcggcaactacaattatctgtacaggctgtttcgcaagtccaatctgaagccattcgagcgggacatctccacagagatctaccaggccggctctaccccctgcaatggcgtggagggctttaactgttatttccctctgcagtcttacggcttccagccaacaaacggcgtgggctatcagccctacagagtggtggtgctgtcctttgagctgctgcacgcaccagcaacagtgtgcggcccaaagaagtctaccaatctggtgaagaacaagtgcgtgaacttcaacttcaacggactgaccggcacaggcgtgctgaccgagagcaataagaagttcctgccttttcagcagttcggcagggacatcgcagataccacagacgccgtgcgcgaccctcagaccctggagatcctggacatcacaccatgcagcttcggcggcgtgtccgtgatcacaccaggcaccaatacatccaaccaggtggccgtgctgtatcaggacgtgaattgtaccgaggtgcccgtggcaatccacgcagatcagctgacccctacatggcgggtgtactctaccggcagcaacgtgttccagacaagagccggatgcctgatcggagcagagcacgtgaacaatagctatgagtgcgacatccctatcggcgccggcatctgtgccagctaccagacccagacaaactccccatctggagcaggctccgtggccagccagtccatcatcgcctataccatgagcctgggcgccgagaacagcgtggcctactccaacaattctatcgccatccctaccaacttcacaatcagcgtgaccacagagatcctgccagtgtctatgaccaagacaagcgtggactgcacaatgtatatctgtggcgatagcaccgagtgctccaacctgctgctgcagtacggctccttttgtacccagctgaatagagccctgacaggcatcgccgtggagcaggataagaacacacaggaggtgttcgcccaggtgaagcagatctacaagaccccacccatcaaggactttggcggcttcaacttcagccagatcctgcctgatccaagcaagccctccaagaggtcttttatcgaggacctgctgttcaacaaggtgaccctggccgatgccggcttcatcaagcagtatggagattgcctgggagacatcgcagcccgcgacctgatctgtgcccagaagtttaatggcctgaccgtgctgcctccactgctgacagatgagatgatcgcccagtacacatctgccctgctggccggcaccatcacaagcggatggaccttcggcgcaggagccgccctgcagatcccttttgccatgcagatggcctataggttcaacggcatcggcgtgacccagaatgtgctgtacgagaaccagaagctgatcgccaatcagtttaacagcgccatcggcaagatccaggactctctgtcctctacagccagcgccctgggcaagctgcaggatgtggtgaatcagaacgcccaggccctgaataccctggtgaagcagctgagctccaacttcggcgccatctctagcgtgctgaatgacatcctgagccggctggacccccctgaggcagaggtgcagatcgacaggctgatcacaggccgcctgcagagcctgcagacctacgtgacacagcagctgatcagggcagcagagatcagagcctccgccaatctggccgccaccaagatgagcgagtgcgtgctgggacagtccaagagggtggacttttgtggcaagggctatcacctgatgtctttcccacagagcgcccctcacggcgtggtgtttctgcacgtgacctacgtgccagcccaggagaagaacttcaccacagcaccagccatctgccacgatggaaaggcacactttcctagggagggcgtgttcgtgtctaacggcacccactggtttgtgacacagcgcaatttctacgagccacagatcatcaccacagacaatacattcgtgagcggcaactgtgatgtggtgatcggcatcgtgaacaataccgtgtatgatccactgcagcccgagctggactcctttaaggaggagctggataagtacttcaagaatcacacctctcccgacgtggatctgggcgacatctccggcatcaatgcctctgtggtgaacatccagaaggagatcgaccggctgaacgaggtggccaagaatctgaacgagagcctgatcgatctgcaggagctgggcaagtatgagcagtacatcaagggctctggcagagagaacctgtatttccagggaggaggaggcagcggatacatccctgaggcaccaagggacggacaggcctacgtgcgcaaggatggcgagtgggtgctgctgtccacctttctgggccatcatcaccaccaccaccaccactga

SEQ ID NO: 4862 - DNA, 3846 bp, Artificial Sequence
  Description of Artificial Sequence: Synthetic polynucleotide
atgggcatcctgccaagcccaggaatgcccgccctgctgtctctggtgagcctgctgtccgtgctgctgatgggatgcgtggcagagacaggcacacagtgcgtgaacctgaccacaaggacccagctgccccctgcctataccaattctttcacacggggcgtgtactatcccgacaaggtgtttagaagctccgtgctgcactccacacaggatctgtttctgcctttcttttctaacgtgacctggttccacgccatccacgtgtccggcaccaatggcacaaagcggttcgacaatcccgtgctgccttttaacgatggcgtgtacttcgccagcaccgagaagtccaacatcatcagaggctggatctttggcaccacactggactctaagacacagagcctgctgatcgtgaacaatgccaccaacgtggtgatcaaggtgtgcgagttccagttttgtaatgatccattcctgggcgtgtactatcacaagaacaataagtcctggatggagtctgagtttcgcgtgtattctagcgccaacaattgcacatttgagtacgtgagccagcccttcctgatggacctggagggcaagcagggcaatttcaagaacctgagggagttcgtgtttaagaatatcgatggctacttcaagatctacagcaagcacaccccaatcaacctggtgcgcgacctgccacagggattctccgccctggagccactggtggatctgcccatcggcatcaacatcacccggtttcagacactgctggccctgcacagatcctacctgacaccaggcgactcctctagcggatggaccgcaggagctgccgcctactatgtgggctatctgcagccccggaccttcctgctgaagtacaacgagaatggcaccatcacagacgcagtggattgcgccctggaccccctgtctgagacaaagtgtacactgaagagctttaccgtggagaagggcatctatcagacaagcaatttcagggtgcagcctaccgagtccatcgtgcgctttcccaatatcacaaacctgtgcccttttggcgaggtgttcaacgccaccagattcgccagcgtgtacgcctggaatcggaagagaatctccaactgcgtggccgactattctgtgctgtacaactccgcctctttcagcacctttaagtgctatggcgtgtctcccacaaagctgaatgatctgtgctttaccaacgtgtacgccgatagcttcgtgatcaggggagacgaagtgagacagatcgcaccaggacagacaggaaagatcgcagactacaattataagctgcctgacgatttcaccggctgcgtgatcgcctggaactccaacaatctggattctaaagtgggcggcaactacaattatctgtacaggctgtttcgcaagtccaatctgaagccattcgagcgggacatctccacagagatctaccaggccggctctaccccctgcaatggcgtggagggctttaactgttatttccctctgcagtcttacggcttccagccaacaaacggcgtgggctatcagccctacagagtggtggtgctgtcctttgagctgctgcacgcaccagcaacagtgtgcggcccaaagaagtctaccaatctggtgaagaacaagtgcgtgaacttcaacttcaacggactgaccggcacaggcgtgctgaccgagagcaataagaagttcctgccttttcagcagttcggcagggacatggcagataccacagacgccgtgcgcgaccctcagaccctggagatcctggacatcacaccatgcagcttcggcggcgtgtccgtgatcacaccaggcaccaatacatccaaccaggtggccgtgctgtatcaggacgtgaattgtaccgaggtgcccgtggcaatccacgcagatcagctgacccctacatggcgggtgtactctaccggcagcaacgtgttccagacaagagccggatgcctgatcggagcagagcacgtgaacaatagctatgagtgcgacatccctatcggcgccggcatctgtgccagctaccagacccagacaaactccccatctggagcaggctccgtggccagccagtccatcatcgcctataccatgagcctgggcgccgagaacagcgtggcctactccaacaattctatcgccatccctaccaacttcacaatcagcgtgaccacagagatcctgccagtgtctatgaccaagacaagcgtggactgcacaatgtatatctgtggcgatagcaccgagtgctccaacctgctgctgcagtacggctccttttgtacccagctgaatagagccctgacaggcatcgccgtggagcaggataagaacacacaggaggtgttcgcccaggtgaagcagatctacaagaccccacccatcaaggactttggcggcttcaacttcagccagatcctgcctgatccaagcaagccctccaagaggtcttttatcgaggacctgctgttcaacaaggtgaccctggccgatgccggcttcatcaagcagtatggagattgcctgggagacatcgcagcccgcgacctgatctgtgcccagaagtttaatggcctgaccgtgctgcctccactgctgacagatgagatgatcgcccagtacacatctgccctgctggccggcaccatcacaagcggatggaccttcggcgcaggagccgccctgcagatcccttttgccatgcagatggcctataggttcaacggcatcggcgtgacccagaatgtgctgtacgagaaccagaagctgatcgccaatcagtttaacagcgccatcggcaagatccaggactctctgtcctctacagccagcgccctgggcaagctgcaggatgtggtgaatcagaacgcccaggccctgaataccctggtgaagcagctgagctccaacttcggcgccatctctagcgtgctgaatgacatcctgagccggctggacccccctgaggcagaggtgcagatcgacaggctgatcacaggccgcctgcagagcctgcagacctacgtgacacagcagctgatcagggcagcagagatcagagcctccgccaatctggccgccaccaagatgagcgagtgcgtgctgggacagtccaagagggtggacttttgtggcaagggctatcacctgatgtctttcccacagagcgcccctcacggcgtggtgtttctgcacgtgacctacgtgccagcccaggagaagaacttcaccacagcaccagccatctgccacgatggaaaggcacactttcctagggagggcgtgttcgtgtctaacggcacccactggtttgtgacacagcgcaatttctacgagccacagatcatcaccacagacaatacattcgtgagcggcaactgtgatgtggtgatcggcatcgtgaacaataccgtgtatgatccactgcagcccgagctggactcctttaaggaggagctggataagtacttcaagaatcacacctctcccgacgtggatctgggcgacatctccggcatcaatgcctctgtggtgaacatccagaaggagatcgaccggctgaacgaggtggccaagaatctgaacgagagcctgatcgatctgcaggagctgggcaagtatgagcagtacatcaagggctctggcagagagaacctgtatttccagggaggaggaggcagcggatacatccctgaggcaccaagggacggacaggcctacgtgcgcaaggatggcgagtgggtgctgctgtccacctttctgggccatcatcaccaccaccaccaccactga

SEQ ID NO: 4863 - DNA, 3846 bp, Artificial Sequence
  Description of Artificial Sequence: Synthetic polynucleotide
atgggcatcctgccaagcccaggaatgcccgccctgctgtctctggtgagcctgctgtccgtgctgctgatgggatgcgtggcagagacaggcacacagtgcgtgaacctgaccacaaggacccagctgccccctgcctataccaattctttcacacggggcgtgtactatcccgacaaggtgtttagaagctccgtgctgcactccacacaggatctgtttctgcctttcttttctaacgtgacctggttccacgccatccacgtgtccggcaccaatggcacaaagcggttcgacaatcccgtgctgccttttaacgatggcgtgtacttcgccagcaccgagaagtccaacatcatcagaggctggatctttggcaccacactggactctaagacacagagcctgctgatcgtgaacaatgccaccaacgtggtgatcaaggtgtgcgagttccagttttgtaatgatccattcctgggcgtgtactatcacaagaacaataagtcctggatggagtctgagtttcgcgtgtattctagcgccaacaattgcacatttgagtacgtgagccagcccttcctgatggacctggagggcaagcagggcaatttcaagaacctgagggagttcgtgtttaagaatatcgatggctacttcaagatctacagcaagcacaccccaatcaacctggtgcgcgacctgccacagggattctccgccctggagccactggtggatctgcccatcggcatcaacatcacccggtttcagacactgctggccctgcacagatcctacctgacaccaggcgactcctctagcggatggaccgcaggagctgccgcctactatgtgggctatctgcagccccggaccttcctgctgaagtacaacgagaatggcaccatcacagacgcagtggattgcgccctggaccccctgtctgagacaaagtgtacactgaagagctttaccgtggagaagggcatctatcagacaagcaatttcagggtgcagcctaccgagtccatcgtgcgctttcccaatatcacaaacctgtgcccttttggcgaggtgttcaacgccaccagattcgccagcgtgtacgcctggaatcggaagagaatctccaactgcgtggccgactattctgtgctgtacaactccgcctctttcagcacctttaagtgctatggcgtgtctcccacaaagctgaatgatctgtgctttaccaacgtgtacgccgatagcttcgtgatcaggggagacgaagtgagacagatcgcaccaggacagacaggaaagatcgcagactacaattataagctgcctgacgatttcaccggctgcgtgatcgcctggaactccaacaatctggattctaaagtgggcggcaactacaattatctgtacaggctgtttcgcaagtccaatctggctccattcgagcgggacatctccacagagatctaccaggccggctctaccccctgcaatggcgtggagggctttaactgttatttccctctgcagtcttacggcttccagccaacaaacggcgtgggctatcagccctacagagtggtggtgctgtcctttgagctgctgcacgcaccagcaacagtgtgcggcccaaagaagtctaccaatctggtgaagaacaagtgcgtgaacttcaacttcaacggactgaccggcacaggcgtgctgaccgagagcaataagaagttcctgccttttcagcagttcggcagggacatcgcagataccacagacgccgtgcgcgaccctcagaccctggagatcctggacatcacaccatgcagcttcggcggcgtgtccgtgatcacaccaggcaccaatacatccaaccaggtggccgtgctgtatcaggacgtgaattgtaccgaggtgcccgtggcaatccacgcagatcagctgacccctacatggcgggtgtactctaccggcagcaacgtgttccagacaagagccggatgcctgatcggagcagagcacgtgaacaatagctatgagtgcgacatccctatcggcgccggcatctgtgccagctaccagacccagacaaactccccatctggagcaggctccgtggccagccagtccatcatcgcctataccatgagcctgggcgccgagaacagcgtggcctactccaacaattctatcgccatccctaccaacttcacaatcagcgtgaccacagagatcctgccagtgtctatgaccaagacaagcgtggactgcacaatgtatatctgtggcgatagcaccgagtgctccaacctgctgctgcagtacggctccttttgtacccagctgaatagagccctgacaggcatcgccgtggagcaggataagaacacacaggaggtgttcgcccaggtgaagcagatctacaagaccccacccatcaaggactttggcggcttcaacttcagccagatcctgcctgatccaagcaagccctccaagaggtcttttatcgaggacctgctgttcaacaaggtgaccctggccgatgccggcttcatcaagcagtatggagattgcctgggagacatcgcagcccgcgacctgatctgtgcccagaagtttaatggcctgaccgtgctgcctccactgctgacagatgagatgatcgcccagtacacatctgccctgctggccggcaccatcacaagcggatggaccttcggcgcaggagccgccctgcagatcccttttgccatgcagatggcctataggttcaacggcatcggcgtgacccagaatgtgctgtacgagaaccagaagctgatcgccaatcagtttaacagcgccatcggcaagatccaggactctctgtcctctacagccagcgccctgggcaagctgcaggatgtggtgaatcagaacgcccaggccctgaataccctggtgaagcagctgagctccaacttcggcgccatctctagcgtgctgaatgacatcctgagccggctggacccccctgaggcagaggtgcagatcgacaggctgatcacaggccgcctgcagagcctgcagacctacgtgacacagcagctgatcagggcagcagagatcagagcctccgccaatctggccgccaccaagatgagcgagtgcgtgctgggacagtccaagagggtggacttttgtggcaagggctatcacctgatgtctttcccacagagcgcccctcacggcgtggtgtttctgcacgtgacctacgtgccagcccaggagaagaacttcaccacagcaccagccatctgccacgatggaaaggcacactttcctagggagggcgtgttcgtgtctaacggcacccactggtttgtgacacagcgcaatttctacgagccacagatcatcaccacagacaatacattcgtgagcggcaactgtgatgtggtgatcggcatcgtgaacaataccgtgtatgatccactgcagcccgagctggactcctttaaggaggagctggataagtacttcaagaatcacacctctcccgacgtggatctgggcgacatctccggcatcaatgcctctgtggtgaacatccagaaggagatcgaccggctgaacgaggtggccaagaatctgaacgagagcctgatcgatctgcaggagctgggcaagtatgagcagtacatcaagggctctggcagagagaacctgtatttccagggaggaggaggcagcggatacatccctgaggcaccaagggacggacaggcctacgtgcgcaaggatggcgagtgggtgctgctgtccacctttctgggccatcatcaccaccaccaccaccactga

SEQ ID NO: 4864 - DNA, 3846 bp, Artificial Sequence
  Description of Artificial Sequence: Synthetic polynucleotide
atgggcatcctgccaagcccaggaatgcccgccctgctgtctctggtgagcctgctgtccgtgctgctgatgggatgcgtggcagagacaggcacacagtgcgtgaacctgaccacaaggacccagctgccccctgcctataccaattctttcacacggggcgtgtactatcccgacaaggtgtttagaagctccgtgctgcactccacacaggatctgtttctgcctttcttttctaacgtgacctggttccacgccatccacgtgtccggcaccaatggcacaaagcggttcgacaatcccgtgctgccttttaacgatggcgtgtacttcgccagcaccgagaagtccaacatcatcagaggctggatctttggcaccacactggactctaagacacagagcctgctgatcgtgaacaatgccaccaacgtggtgatcaaggtgtgcgagttccagttttgtaatgatccattcctgggcgtgtactatcacaagaacaataagtcctggatggagtctgagtttcgcgtgtattctagcgccaacaattgcacatttgagtacgtgagccagcccttcctgatggacctggagggcaagcagggcaatttcaagaacctgagggagttcgtgtttaagaatatcgatggctacttcaagatctacagcaagcacaccccaatcaacctggtgcgcgacctgccacagggattctccgccctggagccactggtggatctgcccatcggcatcaacatcacccggtttcagacactgctggccctgcacagatcctacctgacaccaggcgactcctctagcggatggaccgcaggagctgccgcctactatgtgggctatctgcagccccggaccttcctgctgaagtacaacgagaatggcaccatcacagacgcagtggattgcgccctggaccccctgtctgagacaaagtgtacactgaagagctttaccgtggagaagggcatctatcagacaagcaatttcagggtgcagcctaccgagtccatcgtgcgctttcccaatatcacaaacctgtgcccttttggcgaggtgttcaacgccaccagattcgccagcgtgtacgccccgaatcggaagagaatctccaactgcgtggccgactattctgtgctgtacaactccgcctctttcagcacctttaagtgctatggcgtgtctcccacaaagctgaatgatctgtgctttaccaacgtgtacgccgatagcttcgtgatcaggggagacgaagtgagacagatcgcaccaggacagacaggaaagatcgcagactacaattataagctgcctgacgatttcaccggctgcgtgatcgcctggaactccaacaatctggattctaaagtgggcggcaactacaattatctgtacaggctgtttcgcaagtccaatctgaagccattcgagcgggacatctccacagagatctaccaggccggctctaccccctgcaatggcgtggagggctttaactgttatttccctctgcagtcttacggcttccagccaacaaacggcgtgggctatcagccctacagagtggtggtgctgtcctttgagctgctgcacgcaccagcaacagtgtgcggcccaaagaagtctaccaatctggtgaagaacaagtgcgtgaacttcaacttcaacggactgaccggcacaggcgtgctgaccgagagcaataagaagttcctgccttttcagcagttcggcagggacatcgcagataccacagacgccgtgcgcgaccctcagaccctggagatcctggacatcacaccatgcagcttcggcggcgtgtccgtgatcacaccaggcaccaatacatccaaccaggtggccgtgctgtatcaggacgtgaattgtaccgaggtgcccgtggcaatccacgcagatcagctgacccctacatggcgggtgtactctaccggcagcaacgtgttccagacaagagccggatgcctgatcggagcagagcacgtgaacaatagctatgagtgcgacatccctatcggcgccggcatctgtgccagctaccagacccagacaaactccccatctggagcaggctccgtggccagccagtccatcatcgcctataccatgagcctgggcgccgagaacagcgtggcctactccaacaattctatcgccatccctaccaacttcacaatcagcgtgaccacagagatcctgccagtgtctatgaccaagacaagcgtggactgcacaatgtatatctgtggcgatagcaccgagtgctccaacctgctgctgcagtacggctccttttgtacccagctgaatagagccctgacaggcatcgccgtggagcaggataagaacacacaggaggtgttcgcccaggtgaagcagatctacaagaccccacccatcaaggactttggcggcttcaacttcagccagatcctgcctgatccaagcaagccctccaagaggtcttttatcgaggacctgctgttcaacaaggtgaccctggccgatgccggcttcatcaagcagtatggagattgcctgggagacatcgcagcccgcgacctgatctgtgcccagaagtttaatggcctgaccgtgctgcctccactgctgacagatgagatgatcgcccagtacacatctgccctgctggccggcaccatcacaagcggatggaccttcggcgcaggagccgccctgcagatcccttttgccatgcagatggcctataggttcaacggcatcggcgtgacccagaatgtgctgtacgagaaccagaagctgatcgccaatcagtttaacagcgccatcggcaagatccaggactctctgtcctctacagccagcgccctgggcaagctgcaggatgtggtgaatcagaacgcccaggccctgaataccctggtgaagcagctgagctccaacttcggcgccatctctagcgtgctgaatgacatcctgagccggctggacccccctgaggcagaggtgcagatcgacaggctgatcacaggccgcctgcagagcctgcagacctacgtgacacagcagctgatcagggcagcagagatcagagcctccgccaatctggccgccaccaagatgagcgagtgcgtgctgggacagtccaagagggtggacttttgtggcaagggctatcacctgatgtctttcccacagagcgcccctcacggcgtggtgtttctgcacgtgacctacgtgccagcccaggagaagaacttcaccacagcaccagccatctgccacgatggaaaggcacactttcctagggagggcgtgttcgtgtctaacggcacccactggtttgtgacacagcgcaatttctacgagccacagatcatcaccacagacaatacattcgtgagcggcaactgtgatgtggtgatcggcatcgtgaacaataccgtgtatgatccactgcagcccgagctggactcctttaaggaggagctggataagtacttcaagaatcacacctctcccgacgtggatctgggcgacatctccggcatcaatgcctctgtggtgaacatccagaaggagatcgaccggctgaacgaggtggccaagaatctgaacgagagcctgatcgatctgcaggagctgggcaagtatgagcagtacatcaagggctctggcagagagaacctgtatttccagggaggaggaggcagcggatacatccctgaggcaccaagggacggacaggcctacgtgcgcaaggatggcgagtgggtgctgctgtccacctttctgggccatcatcaccaccaccaccaccactga

SEQ ID NO: 4865 - DNA, 3846 bp, Artificial Sequence
  Description of Artificial Sequence: Synthetic polynucleotide
atgggcatcctgccaagcccaggaatgcccgccctgctgtctctggtgagcctgctgtccgtgctgctgatgggatgcgtggcagagacaggcacacagtgcgtgaacctgaccacaaggacccagctgccccctgcctataccaattctttcacacggggcgtgtactatcccgacaaggtgtttagaagctccgtgctgcactccacacaggatctgtttctgcctttcttttctaacgtgacctggttccacgccatccacgtgtccggcaccaatggcacaaagcggttcgacaatcccgtgctgccttttaacgatggcgtgtacttcgccagcaccgagaagtccaacatcatcagaggctggatctttggcaccacactggactctaagacacagagcctgctgatcgtgaacaatgccaccaacgtggtgatcaaggtgtgcgagttccagttttgtaatgatccattcctgggcgtgtactatcacaagaacaataagtcctggatggagtctgagtttcgcgtgtattctagcgccaacaattgcacatttgagtacgtgagccagcccttcctgatggacctggagggcaagcagggcaatttcaagaacctgagggagttcgtgtttaagaatatcgatggctacttcaagatctacagcaagcacaccccaatcaacctggtgcgcgacctgccacagggattctccgccctggagccactggtggatctgcccatcggcatcaacatcacccggtttcagacactgctggccctgcacagatcctacctgacaccaggcgactcctctagcggatggaccgcaggagctgccgcctactatgtgggctatctgcagccccggaccttcctgctgaagtacaacgagaatggcaccatcacagacgcagtggattgcgccctggaccccctgtctgagacaaagtgtacactgaagagctttaccgtggagaagggcatctatcagacaagcaatttcagggtgcagcctaccgagtccatcgtgcgctttcccaatatcacaaacctgtgcccttttggcgaggtgttcaacgccaccagattcgccagcgtgtacgcctggaatcggaagagaatctccaactgcgtggccgactattctgtgctgtacaactccgcctctttcagcacctttaagtgctatggcgtgtctcccacaaagctgaatgatctgtgctttaccaacgtgtacgccgatagcttcgtgatcaggggagacgaagtgagacagatcgcaccaggacagacaggaaagatcgcagactacaattataagctgcctgacgatttcaccggctgcgtgatcgcctggaactccaacaatctggattctaaagtgggcggcaactacaattatctgtacaggctgtttcgcaagtccaatctgaagccattcgagcgggacatctccacagagatctaccaggccggctctaccccctgcaatggcgtggagggctttaactgttatttccctctgcagtcttacggcttccagccaacaaacggcgtgggctatcagccctacagagtggtggtgctgtcctttgagctgctgcacgcaccagcaacagtgtgcggcccaaagaagtctaccaatctggtgaagaacaagtgcgtgaacttcaacttcaacggactgaccggcacaggcgtgctgaccgagagcaataagaagttcctgccttttcagcagttcggcagggacatcgcagataccacagacgccgtgcgcgaccctcagaccctggagatcctggacatcacaccatgcagcttcggcggcgtgtccgtgatcacaccaggcaccaatacatccaaccaggtggccgtgctgtatcaggacgtgaattgtaccgaggtgcccgtggcaatccacgcagatcagctgacccctacatggcgggtgtactctaccggcagcaacgtgttccagacaagagccggatgcctgatcggagcagagcacgtgaacaatagctatgagtgcgacatccctatcggcgccggcatctgtgccagctaccagacccagacaaactccccatctggagcaggctccgtggccagccagtccatcatcgcctataccatgagcctgggcgccgagaacagcgtggcctactccaacaattctatcgccatccctaccaacttcacaatcagcgtgaccacagagatcctgccagtgtctatgaccaagacaagcgtggactgcacaatgtatatctgtggcgatagcaccgagtgctccaacctgctgctgcagtacggctccttttgtacccagctgaatagagccctgacaggcatcgccgtggagcaggataagaacacacaggaggtgttcgcccaggtgaagcagatctacaagaccccacccatcaaggactttggcggcttcaacttcagccagatcctgcctgatccaagcaagccctccaagaggtcttttatcgaggacctgctgttcaacaaggtgaccctggccgatgccggcttcatcaagcagtatggagattgcctgggagacatcgcagcccgcgacctgatctgtgcccagaagtttaatggcctgaccgtgctgcctccactgctgacagatgagatgatcgcccagtacacatctgccctgctggccggcaccatcacaagcggatggaccttcggcgcaggagccgccctgcagatcccttttgccatgcagatggcctataggttcaacggcatcggcgtgacccagaatgtgctgtacgagaaccagaagctgatcgccaatcagtttaacagcgccatcggcaagatccaggactctctgtcctctacagccagcgccctgggcaagctgcaggatgtggtgaatcagaacgcccaggccctgaataccctggtgaagcagctgagctccaacttcggcgccatctctagcgtgctgaatgacatcctgagccggctggacccccctcaagcagaggtgcagatcgacaggctgatcacaggccgcctgcagagcctgcagacctacgtgacacagcagctgatcagggcagcagagatcagagcctccgccaatctggccgccaccaagatgagcgagtgcgtgctgggacagtccaagagggtggacttttgtggcaagggctatcacctgatgtctttcccacagagcgcccctcacggcgtggtgtttctgcacgtgacctacgtgccagcccaggagaagaacttcaccacagcaccagccatctgccacgatggaaaggcacactttcctagggagggcgtgttcgtgtctaacggcacccactggtttgtgacacagcgcaatttctacgagccacagatcatcaccacagacaatacattcgtgagcggcaactgtgatgtggtgatcggcatcgtgaacaataccgtgtatgatccactgcagcccgagctggactcctttaaggaggagctggataagtacttcaagaatcacacctctcccgacgtggatctgggcgacatctccggcatcaatgcctctgtggtgaacatccagaaggagatcgaccggctgaacgaggtggccaagaatctgaacgagagcctgatcgatctgcaggagctgggcaagtatgagcagtacatcaagggctctggcagagagaacctgtatttccagggaggaggaggcagcggatacatccctgaggcaccaagggacggacaggcctacgtgcgcaaggatggcgagtgggtgctgctgtccacctttctgggccatcatcaccaccaccaccaccactga

SEQ ID NO: 4866 - DNA, 3846 bp, Artificial Sequence
  Description of Artificial Sequence: Synthetic polynucleotide
atgggcatcctgccaagcccaggaatgcccgccctgctgtctctggtgagcctgctgtccgtgctgctgatgggatgcgtggcagagacaggcacacagtgcgtgaacctgaccacaaggacccagctgccccctgcctataccaattctttcacacggggcgtgtactatcccgacaaggtgtttagaagctccgtgctgcactccacacaggatctgtttctgcctttcttttctaacgtgacctggttccacgccatccacgtgtccggcaccaatggcacaaagcggttcgacaatcccgtgctgccttttaacgatggcgtgtacttcgccagcaccgagaagtccaacatcatcagaggctggatctttggcaccacactggactctaagacacagagcctgctgatcgtgaacaatgccaccaacgtggtgatcaaggtgtgcgagttccagttttgtaatgatccattcctgggcgtgtactatcacaagaacaataagtcctggatggagtctgagtttcgcgtgtattctagcgccaacaattgcacatttgagtacgtgagccagcccttcctgatggacctggagggcaagcagggcaatttcaagaacctgagggagttcgtgtttaagaatatcgatggctacttcaagatctacagcaagcacaccccaatcaacctggtgcgcgacctgccacagggattctccgccctggagccactggtggatctgcccatcggcatcaacatcacccggtttcagacactgctggccctgcacagatcctacctgacaccaggcgactcctctagcggatggaccgcaggagctgccgcctactatgtgggctatctgcagccccggaccttcctgctgaagtacaacgagaatggcaccatcacagacgcagtggattgcgccctggaccccctgtctgagacaaagtgtacactgaagagctttaccgtggagaagggcatctatcagacaagcaatttcagggtgcagcctaccgagtccatcgtgcgctttcccaatatcacaaacctgtgcccttttggcgaggtgttcaacgccaccagattcgccccggtgtacgcctggaatcggaagagaatctccaactgcgtggccgactattctgtgctgtacaactccgcctctttcagcacctttaagtgctatggcgtgtctcccacaaagctgaatgatctgtgctttaccaacgtgtacgccgatagcttcgtgatcaggggagacgaagtgagacagatcgcaccaggacagacaggaaagatcgcagactacaattataagctgcctgacgatttcaccggctgcgtgatcgcctggaactccaacaatctggattctaaagtgggcggcaactacaattatctgtacaggctgtttcgcaagtccaatctgaagccattcgagcgggacatctccacagagatctaccaggccggctctaccccctgcaatggcgtggagggctttaactgttatttccctctgcagtcttacggcttccagccaacaaacggcgtgggctatcagccctacagagtggtggtgctgtcctttgagctgctgcacgcaccagcaacagtgtgcggcccaaagaagtctaccaatctggtgaagaacaagtgcgtgaacttcaacttcaacggactgaccggcacaggcgtgctgaccgagagcaataagaagttcctgccttttcagcagttcggcagggacatcgcagataccacagacgccgtgcgcgaccctcagaccctggagatcctggacatcacaccatgcagcttcggcggcgtgtccgtgatcacaccaggcaccaatacatccaaccaggtggccgtgctgtatcaggacgtgaattgtaccgaggtgcccgtggcaatccacgcagatcagctgacccctacatggcgggtgtactctaccggcagcaacgtgttccagacaagagccggatgcctgatcggagcagagcacgtgaacaatagctatgagtgcgacatccctatcggcgccggcatctgtgccagctaccagacccagacaaactccccatctggagcaggctccgtggccagccagtccatcatcgcctataccatgagcctgggcgccgagaacagcgtggcctactccaacaattctatcgccatccctaccaacttcacaatcagcgtgaccacagagatcctgccagtgtctatgaccaagacaagcgtggactgcacaatgtatatctgtggcgatagcaccgagtgctccaacctgctgctgcagtacggctccttttgtacccagctgaatagagccctgacaggcatcgccgtggagcaggataagaacacacaggaggtgttcgcccaggtgaagcagatctacaagaccccacccatcaaggactttggcggcttcaacttcagccagatcctgcctgatccaagcaagccctccaagaggtcttttatcgaggacctgctgttcaacaaggtgaccctggccgatgccggcttcatcaagcagtatggagattgcctgggagacatcgcagcccgcgacctgatctgtgcccagaagtttaatggcctgaccgtgctgcctccactgctgacagatgagatgatcgcccagtacacatctgccctgctggccggcaccatcacaagcggatggaccttcggcgcaggagccgccctgcagatcccttttgccatgcagatggcctataggttcaacggcatcggcgtgacccagaatgtgctgtacgagaaccagaagctgatcgccaatcagtttaacagcgccatcggcaagatccaggactctctgtcctctacagccagcgccctgggcaagctgcaggatgtggtgaatcagaacgcccaggccctgaataccctggtgaagcagctgagctccaacttcggcgccatctctagcgtgctgaatgacatcctgagccggctggacccccctgaggcagaggtgcagatcgacaggctgatcacaggccgcctgcagagcctgcagacctacgtgacacagcagctgatcagggcagcagagatcagagcctccgccaatctggccgccaccaagatgagcgagtgcgtgctgggacagtccaagagggtggacttttgtggcaagggctatcacctgatgtctttcccacagagcgcccctcacggcgtggtgtttctgcacgtgacctacgtgccagcccaggagaagaacttcaccacagcaccagccatctgccacgatggaaaggcacactttcctagggagggcgtgttcgtgtctaacggcacccactggtttgtgacacagcgcaatttctacgagccacagatcatcaccacagacaatacattcgtgagcggcaactgtgatgtggtgatcggcatcgtgaacaataccgtgtatgatccactgcagcccgagctggactcctttaaggaggagctggataagtacttcaagaatcacacctctcccgacgtggatctgggcgacatctccggcatcaatgcctctgtggtgaacatccagaaggagatcgaccggctgaacgaggtggccaagaatctgaacgagagcctgatcgatctgcaggagctgggcaagtatgagcagtacatcaagggctctggcagagagaacctgtatttccagggaggaggaggcagcggatacatccctgaggcaccaagggacggacaggcctacgtgcgcaaggatggcgagtgggtgctgctgtccacctttctgggccatcatcaccaccaccaccaccactga

SEQ ID NO: 4867 - DNA, 3846 bp, Artificial Sequence
  Description of Artificial Sequence: Synthetic polynucleotide
atgggcatcctgccaagcccaggaatgcccgccctgctgtctctggtgagcctgctgtccgtgctgctgatgggatgcgtggcagagacaggcacacagtgcgtgaacctgaccacaaggacccagctgccccctgcctataccaattctttcacacggggcgtgtactatcccgacaaggtgtttagaagctccgtgctgcactccacacaggatctgtttctgcctttcttttctaacgtgacctggttccacgccatccacgtgtccggcaccaatggcacaaagcggttcgacaatcccgtgctgccttttaacgatggcgtgtacttcgccagcaccgagaagtccaacatcatcagaggctggatctttggcaccacactggactctaagacacagagcctgctgatcgtgaacaatgccaccaacgtggtgatcaaggtgtgcgagttccagttttgtaatgatccattcctgggcgtgtactatcacaagaacaataagtcctggatggagtctgagtttcgcgtgtattctagcgccaacaattgcacatttgagtacgtgagccagcccttcctgatggacctggagggcaagcagggcaatttcaagaacctgagggagttcgtgtttaagaatatcgatggctacttcaagatctacagcaagcacaccccaatcaacctggtgcgcgacctgccacagggattctccgccctggagccactggtggatctgcccatcggcatcaacatcacccggtttcagacactgctggccctgcacagatcctacctgacaccaggcgactcctctagcggatggaccgcaggagctgccgcctactatgtgggctatctgcagccccggaccttcctgctgaagtacaacgagaatggcaccatcacagacgcagtggattgcgccctggaccccctgtctgagacaaagtgtacactgaagagctttaccgtggagaagggcatctatcagacaagcaatttcagggtgcagcctaccgagtccatcgtgcgctttcccaatatcacaaacctgtgcccttttggcgaggtgttcaacgccaccagattcgccagcgtgtacgcctggaatcggaagagaatctccaactgcgtggccgactattctgtgctgtacaactccgcctctttcagcacctttaagtgctatggcgtgtctcccacaaagctgaatgatctgtgctttaccaacgtgtacgccgatagcttcgtgatcaggggagacgaagtgagacagatcgcaccaggacagacaggaaagatcgcagactacaattataagctgcctgacgatttcaccggctgcgtgatcgcctggaactccaacaatctggattctaaagtgggcggcaactacaattatctgtacaggctgtttcgcaagtccaatctgaagccattcgagcgggacatctccaaagagatctaccaggccggctctaccccctgcaatggcgtggagggctttaactgttatttccctctgcagtcttacggcttccagccaacaaacggcgtgggctatcagccctacagagtggtggtgctgtcctttgagctgctgcacgcaccagcaacagtgtgcggcccaaagaagtctaccaatctggtgaagaacaagtgcgtgaacttcaacttcaacggactgaccggcacaggcgtgctgaccgagagcaataagaagttcctgccttttcagcagttcggcagggacatcgcagataccacagacgccgtgcgcgaccctcagaccctggagatcctggacatcacaccatgcagcttcggcggcgtgtccgtgatcacaccaggcaccaatacatccaaccaggtggccgtgctgtatcaggacgtgaattgtaccgaggtgcccgtggcaatccacgcagatcagctgacccctacatggcgggtgtactctaccggcagcaacgtgttccagacaagagccggatgcctgatcggagcagagcacgtgaacaatagctatgagtgcgacatccctatcggcgccggcatctgtgccagctaccagacccagacaaactccccatctggagcaggctccgtggccagccagtccatcatcgcctataccatgagcctgggcgccgagaacagcgtggcctactccaacaattctatcgccatccctaccaacttcacaatcagcgtgaccacagagatcctgccagtgtctatgaccaagacaagcgtggactgcacaatgtatatctgtggcgatagcaccgagtgctccaacctgctgctgcagtacggctccttttgtacccagctgaatagagccctgacaggcatcgccgtggagcaggataagaacacacaggaggtgttcgcccaggtgaagcagatctacaagaccccacccatcaaggactttggcggcttcaacttcagccagatcctgcctgatccaagcaagccctccaagaggtcttttatcgaggacctgctgttcaacaaggtgaccctggccgatgccggcttcatcaagcagtatggagattgcctgggagacatcgcagcccgcgacctgatctgtgcccagaagtttaatggcctgaccgtgctgcctccactgctgacagatgagatgatcgcccagtacacatctgccctgctggccggcaccatcacaagcggatggaccttcggcgcaggagccgccctgcagatcccttttgccatgcagatggcctataggttcaacggcatcggcgtgacccagaatgtgctgtacgagaaccagaagctgatcgccaatcagtttaacagcgccatcggcaagatccaggactctctgtcctctacagccagcgccctgggcaagctgcaggatgtggtgaatcagaacgcccaggccctgaataccctggtgaagcagctgagctccaacttcggcgccatctctagcgtgctgaatgacatcctgagccggctggacccccctgaggcagaggtgcagatcgacaggctgatcacaggccgcctgcagagcctgcagacctacgtgacacagcagctgatcagggcagcagagatcagagcctccgccaatctggccgccaccaagatgagcgagtgcgtgctgggacagtccaagagggtggacttttgtggcaagggctatcacctgatgtctttcccacagagcgcccctcacggcgtggtgtttctgcacgtgacctacgtgccagcccaggagaagaacttcaccacagcaccagccatctgccacgatggaaaggcacactttcctagggagggcgtgttcgtgtctaacggcacccactggtttgtgacacagcgcaatttctacgagccacagatcatcaccacagacaatacattcgtgagcggcaactgtgatgtggtgatcggcatcgtgaacaataccgtgtatgatccactgcagcccgagctggactcctttaaggaggagctggataagtacttcaagaatcacacctctcccgacgtggatctgggcgacatctccggcatcaatgcctctgtggtgaacatccagaaggagatcgaccggctgaacgaggtggccaagaatctgaacgagagcctgatcgatctgcaggagctgggcaagtatgagcagtacatcaagggctctggcagagagaacctgtatttccagggaggaggaggcagcggatacatccctgaggcaccaagggacggacaggcctacgtgcgcaaggatggcgagtgggtgctgctgtccacctttctgggccatcatcaccaccaccaccaccactga

SEQ ID NO: 4868 - DNA, 3846 bp, Artificial Sequence
  Description of Artificial Sequence: Synthetic polynucleotide
atgggcatcctgccaagcccaggaatgcccgccctgctgtctctggtgagcctgctgtccgtgctgctgatgggatgcgtggcagagacaggcacacagtgcgtgaacctgaccacaaggacccagctgccccctgcctataccaattctttcacacggggcgtgtactatcccgacaaggtgtttagaagctccgtgctgcactccacacaggatctgtttctgcctttcttttctaacgtgacctggttccacgccatccacgtgtccggcaccaatggcacaaagcggttcgacaatcccgtgctgccttttaacgatggcgtgtacttcgccagcaccgagaagtccaacatcatcagaggctggatctttggcaccacactggactctaagacacagagcctgctgatcgtgaacaatgccaccaacgtggtgatcaaggtgtgcgagttccagttttgtaatgatccattcctgggcgtgtactatcacaagaacaataagtcctggatggagtctgagtttcgcgtgtattctagcgccaacaattgcacatttgagtacgtgagccagcccttcctgatggacctggagggcaagcagggcaatttcaagaacctgagggagttcgtgtttaagaatatcgatggctacttcaagatctacagcaagcacaccccaatcaacctggtgcgcgacctgccacagggattctccgccctggagccactggtggatctgcccatcggcatcaacatcacccggtttcagacactgctggccctgcacagatcctacctgacaccaggcgactcctctagcggatggaccgcaggagctgccgcctactatgtgggctatctgcagccccggaccttcctgctgaagtacaacgagaatggcaccatcacagacgcagtggattgcgccctggaccccctgtctgagacaaagtgtacactgaagagctttaccgtggagaagggcatctatcagacaagcaatttcagggtgcagcctaccgagtccatcgtgcgctttcccaatatcacaaacctgtgcccttttggcgaggtgttcaacgccaccagattcgccagcgtgtacgcctggaatcggaagagaatctccaactgcgtggccgactattctgtgctgtacaactccgcctctttcagcacctttaagtgctatggcgtgtctcccacaaagctgaatgatctgtgctttaccaacgtgtacgccgatagcttcgtgatcaggggagacgaagtgagacagatcgcaccaggacagacaggaaagatcgcagactacaattataagctgcctgacgatttcaccggctgcgtgatcgcctggaactccaacaatctggattctaaagtgggcggcaactacaattatctgtacaggctgtttcgcaagtccaatctgaagccattcgagcgggacatctccacagagatctaccaggccggctctacccccgcgaatggcgtggagggctttaactgttatttccctctgcagtcttacggcttccagccaacaaacggcgtgggctatcagccctacagagtggtggtgctgtcctttgagctgctgcacgcaccagcaacagtgtgcggcccaaagaagtctaccaatctggtgaagaacaagtgcgtgaacttcaacttcaacggactgaccggcacaggcgtgctgaccgagagcaataagaagttcctgccttttcagcagttcggcagggacatcgcagataccacagacgccgtgcgcgaccctcagaccctggagatcctggacatcacaccatgcagcttcggcggcgtgtccgtgatcacaccaggcaccaatacatccaaccaggtggccgtgctgtatcaggacgtgaattgtaccgaggtgcccgtggcaatccacgcagatcagctgacccctacatggcgggtgtactctaccggcagcaacgtgttccagacaagagccggatgcctgatcggagcagagcacgtgaacaatagctatgagtgcgacatccctatcggcgccggcatctgtgccagctaccagacccagacaaactccccatctggagcaggctccgtggccagccagtccatcatcgcctataccatgagcctgggcgccgagaacagcgtggcctactccaacaattctatcgccatccctaccaacttcacaatcagcgtgaccacagagatcctgccagtgtctatgaccaagacaagcgtggactgcacaatgtatatctgtggcgatagcaccgagtgctccaacctgctgctgcagtacggctccttttgtacccagctgaatagagccctgacaggcatcgccgtggagcaggataagaacacacaggaggtgttcgcccaggtgaagcagatctacaagaccccacccatcaaggactttggcggcttcaacttcagccagatcctgcctgatccaagcaagccctccaagaggtcttttatcgaggacctgctgttcaacaaggtgaccctggccgatgccggcttcatcaagcagtatggagattgcctgggagacatcgcagcccgcgacctgatctgtgcccagaagtttaatggcctgaccgtgctgcctccactgctgacagatgagatgatcgcccagtacacatctgccctgctggccggcaccatcacaagcggatggaccttcggcgcaggagccgccctgcagatcccttttgccatgcagatggcctataggttcaacggcatcggcgtgacccagaatgtgctgtacgagaaccagaagctgatcgccaatcagtttaacagcgccatcggcaagatccaggactctctgtcctctacagccagcgccctgggcaagctgcaggatgtggtgaatcagaacgcccaggccctgaataccctggtgaagcagctgagctccaacttcggcgccatctctagcgtgctgaatgacatcctgagccggctggacccccctgaggcagaggtgcagatcgacaggctgatcacaggccgcctgcagagcctgcagacctacgtgacacagcagctgatcagggcagcagagatcagagcctccgccaatctggccgccaccaagatgagcgagtgcgtgctgggacagtccaagagggtggacttttgtggcaagggctatcacctgatgtctttcccacagagcgcccctcacggcgtggtgtttctgcacgtgacctacgtgccagcccaggagaagaacttcaccacagcaccagccatctgccacgatggaaaggcacactttcctagggagggcgtgttcgtgtctaacggcacccactggtttgtgacacagcgcaatttctacgagccacagatcatcaccacagacaatacattcgtgagcggcaactgtgatgtggtgatcggcatcgtgaacaataccgtgtatgatccactgcagcccgagctggactcctttaaggaggagctggataagtacttcaagaatcacacctctcccgacgtggatctgggcgacatctccggcatcaatgcctctgtggtgaacatccagaaggagatcgaccggctgaacgaggtggccaagaatctgaacgagagcctgatcgatctgcaggagctgggcaagtatgagcagtacatcaagggctctggcagagagaacctgtatttccagggaggaggaggcagcggatacatccctgaggcaccaagggacggacaggcctacgtgcgcaaggatggcgagtgggtgctgctgtccacctttctgggccatcatcaccaccaccaccaccactga

SEQ ID NO: 4869 - DNA, 3846 bp, Artificial Sequence
  Description of Artificial Sequence: Synthetic polynucleotide
atgggcatcctgccaagcccaggaatgcccgccctgctgtctctggtgagcctgctgtccgtgctgctgatgggatgcgtggcagagacaggcacacagtgcgtgaacctgaccacaaggacccagctgccccctgcctataccaattctttcacacggggcgtgtactatcccgacaaggtgtttagaagctccgtgctgcactccacacaggatctgtttctgcctttcttttctaacgtgacctggttccacgccatccacgtgtccggcaccaatggcacaaagcggttcgacaatcccgtgctgccttttaacgatggcgtgtacttcgccagcaccgagaagtccaacatcatcagaggctggatctttggcaccacactggactctaagacacagagcctgctgatcgtgaacaatgccaccaacgtggtgatcaaggtgtgcgagttccagttttgtaatgatccattcctgggcgtgtactatcacaagaacaataagtcctggatggagtctgagtttcgcgtgtattctagcgccaacaattgcacatttgagtacgtgagccagcccttcctgatggacctggagggcaagcagggcaatttcaagaacctgagggagttcgtgtttaagaatatcgatggctacttcaagatctacagcaagcacaccccaatcaacctggtgcgcgacctgccacagggattctccgccctggagccactggtggatctgcccatcggcatcaacatcacccggtttcagacactgctggccctgcacagatcctacctgacaccaggcgactcctctagcggatggaccgcaggagctgccgcctactatgtgggctatctgcagccccggaccttcctgctgaagtacaacgagaatggcaccatcacagacgcagtggattgcgccctggaccccctgtctgagacaaagtgtacactgaagagctttaccgtggagaagggcatctatcagacaagcaatttcagggtgcagcctaccgagtccatcgtgcgctttcccaatatcacaaacctgtgcccttttggcgaggtgttcaacgccaccagattcgccagcgtgtacgcctggaatcggaagagaatctccaactgcgtggccgactattctgtgctgtacaactccgcctctttcagcacctttaagtgctatggcgtgtctcccacaaagctgaatgatctgtgctttaccaacgtgtacgccgatagcttcgtgatcaggggagacgaagtgagacagatcgcaccaggacagacaggaaagatcgcagactacaattataagctgcctgacgatttcaccggctgcgtgatcgcctggaactccgataatctggattctaaagtgggcggcaactacaattatctgtacaggctgtttcgcaagtccaatctgaagccattcgagcgggacatctccacagagatctaccaggccggctctaccccctgcaatggcgtggagggctttaactgttatttccctctgcagtcttacggcttccagccaacaaacggcgtgggctatcagccctacagagtggtggtgctgtcctttgagctgctgcacgcaccagcaacagtgtgcggcccaaagaagtctaccaatctggtgaagaacaagtgcgtgaacttcaacttcaacggactgaccggcacaggcgtgctgaccgagagcaataagaagttcctgccttttcagcagttcggcagggacatcgcagataccacagacgccgtgcgcgaccctcagaccctggagatcctggacatcacaccatgcagcttcggcggcgtgtccgtgatcacaccaggcaccaatacatccaaccaggtggccgtgctgtatcaggacgtgaattgtaccgaggtgcccgtggcaatccacgcagatcagctgacccctacatggcgggtgtactctaccggcagcaacgtgttccagacaagagccggatgcctgatcggagcagagcacgtgaacaatagctatgagtgcgacatccctatcggcgccggcatctgtgccagctaccagacccagacaaactccccatctggagcaggctccgtggccagccagtccatcatcgcctataccatgagcctgggcgccgagaacagcgtggcctactccaacaattctatcgccatccctaccaacttcacaatcagcgtgaccacagagatcctgccagtgtctatgaccaagacaagcgtggactgcacaatgtatatctgtggcgatagcaccgagtgctccaacctgctgctgcagtacggctccttttgtacccagctgaatagagccctgacaggcatcgccgtggagcaggataagaacacacaggaggtgttcgcccaggtgaagcagatctacaagaccccacccatcaaggactttggcggcttcaacttcagccagatcctgcctgatccaagcaagccctccaagaggtcttttatcgaggacctgctgttcaacaaggtgaccctggccgatgccggcttcatcaagcagtatggagattgcctgggagacatcgcagcccgcgacctgatctgtgcccagaagtttaatggcctgaccgtgctgcctccactgctgacagatgagatgatcgcccagtacacatctgccctgctggccggcaccatcacaagcggatggaccttcggcgcaggagccgccctgcagatcccttttgccatgcagatggcctataggttcaacggcatcggcgtgacccagaatgtgctgtacgagaaccagaagctgatcgccaatcagtttaacagcgccatcggcaagatccaggactctctgtcctctacagccagcgccctgggcaagctgcaggatgtggtgaatcagaacgcccaggccctgaataccctggtgaagcagctgagctccaacttcggcgccatctctagcgtgctgaatgacatcctgagccggctggacccccctgaggcagaggtgcagatcgacaggctgatcacaggccgcctgcagagcctgcagacctacgtgacacagcagctgatcagggcagcagagatcagagcctccgccaatctggccgccaccaagatgagcgagtgcgtgctgggacagtccaagagggtggacttttgtggcaagggctatcacctgatgtctttcccacagagcgcccctcacggcgtggtgtttctgcacgtgacctacgtgccagcccaggagaagaacttcaccacagcaccagccatctgccacgatggaaaggcacactttcctagggagggcgtgttcgtgtctaacggcacccactggtttgtgacacagcgcaatttctacgagccacagatcatcaccacagacaatacattcgtgagcggcaactgtgatgtggtgatcggcatcgtgaacaataccgtgtatgatccactgcagcccgagctggactcctttaaggaggagctggataagtacttcaagaatcacacctctcccgacgtggatctgggcgacatctccggcatcaatgcctctgtggtgaacatccagaaggagatcgaccggctgaacgaggtggccaagaatctgaacgagagcctgatcgatctgcaggagctgggcaagtatgagcagtacatcaagggctctggcagagagaacctgtatttccagggaggaggaggcagcggatacatccctgaggcaccaagggacggacaggcctacgtgcgcaaggatggcgagtgggtgctgctgtccacctttctgggccatcatcaccaccaccaccaccactga

SEQ ID NO: 4870 - DNA, 3846 bp, Artificial Sequence
  Description of Artificial Sequence: Synthetic polynucleotide
atgggcatcctgccaagcccaggaatgcccgccctgctgtctctggtgagcctgctgtccgtgctgctgatgggatgcgtggcagagacaggcacacagtgcgtgaacctgaccacaaggacccagctgccccctgcctataccaattctttcacacggggcgtgtactatcccgacaaggtgtttagaagctccgtgctgcactccacacaggatctgtttctgcctttcttttctaacgtgacctggttccacgccatccacgtgtccggcaccaatggcacaaagcggttcgacaatcccgtgctgccttttaacgatggcgtgtacttcgccagcaccgagaagtccaacatcatcagaggctggatctttggcaccacactggactctaagacacagagcctgctgatcgtgaacaatgccaccaacgtggtgatcaaggtgtgcgagttccagttttgtaatgatccattcctgggcgtgtactatcacaagaacaataagtcctggatggagtctgagtttcgcgtgtattctagcgccaacaattgcacatttgagtacgtgagccagcccttcctgatggacctggagggcaagcagggcaatttcaagaacctgagggagttcgtgtttaagaatatcgatggctacttcaagatctacagcaagcacaccccaatcaacctggtgcgcgacctgccacagggattctccgccctggagccactggtggatctgcccatcggcatcaacatcacccggtttcagacactgctggccctgcacagatcctacctgacaccaggcgactcctctagcggatggaccgcaggagctgccgcctactatgtgggctatctgcagccccggaccttcctgctgaagtacaacgagaatggcaccatcacagacgcagtggattgcgccctggaccccctgtctgagacaaagtgtacactgaagagctttaccgtggagaagggcatctatcagacaagcaatttcagggtgcagcctaccgagtccatcgtgcgctttcccaatatcacaaacctgtgcccttttggcgaggtgttcaacgccaccagattcgccagcgtgtacgcctggaatcggaagagaatctccaactgcgtggccgactattctgtgctgtacaactccgcctctttcagcacctttaagtgctatggcgtgtctcccacaaagctgaatgatctgtgctttaccaacgtgtacgccgatagcttcgtgatcaggggagacgaagtgagacagatcgcaccaggacagacaggaaagatcgcagactacaattataagctgcctgacgatttcaccggctgcgtgatcgcctggaactccaacaatctggattctaaagtgggcggcaactacaattatctgtacaggctgtttcgcaagtccaatctgaagccattcgagcgggacatctccacagagatctaccaggccggctctaccccctgcaatggcgtggagggctttaactgttatttccctctgcagtcttacggcttccagccaacaaacggcgtgggctatcagccctacagagtggtggtgctgtcctttgagctgctgcacgcaccagcaacagtgtgcggcccaaagaagtctaccaatctggtgaagaacaagtgcgtgaacttcaacttcaacggactgaccggcacaggcgtgctgaccgagagcaataagaagttcctgccttttcagcagttcggcagggacatcgcagataccacagacgccgtgcgcgaccctcagaccctggagatcctggacatcacaccatgcagcttcggcggcgtgtccgtgatcacaccaggcaccaatacatccaaccaggtggccgtgctgtatcaggacgtgaattgtaccgaggtgcccgtggcaatccacgcagatcagctgacccctacatggcgggtgtactctaccggcagcaacgtgttccagacaagagccggatgcctgatcggagcagagcacgtgaacaatagctatgagtgcgacatccctatcggcgccggcatctgtgccagctaccagacccagacaaactccccatctggagcaggctccgtggccagccagtccatcatcgcctataccatgagcctgggcgccgagaacagcgtggcctactccaacaattctatcgccatccctaccaacttcacaatcagcgtgaccacagagatcctgccagtgtctatgaccaagacaagcgtggactgcacaatgtatatctgtggcgatagcaccgagtgctccaacctgctgctgcagtacggctccttttgtacccagctgaatagagccctgacaggcatcgccgtggagcaggataagaacacacaggaggtgttcgcccaggtgaagcagatctacaagaccccacccatcaaggactttggcggcttcaacttcagccagatcctgcctgatccaagcaagccctccaagaggtcttttatcgaggacctgctgttcaacaaggtgaccctggccgatgccggcttcatcaagcagtatggagattgcctgggagacatcgcagcccgcgacctgatctgtgcccagaagtttaatggcctgaccgtgctgcctccactgctgacagatgagatgatcgcccagtacacatctgccctgctggccggcaccatcacaagcggatggaccttcggcgcaggagccgccctgcagatcccttttgccatgcagatggcctataggttcaacggcatcggcgtgacccagaatgtgctgtacgagaaccagaagctgatcgccaatcagtttaacagcgccatcggcaagatccaggactctctgtcctctacagccagcgccctgggcaagctgcaggatgtggtgaatcagaacgcccaggccctgaataccctggtgaagcagctgagctccaacttcggcgccatctctagcgtgctgaatgacatcctgagccggctggacccccctgaggcagaggtgcagatcgacaggctgatcacaggccgcctgcagagcctgcagacctacgtgacacagcagctgatcagggcagcagagatcagagcctccgccaatctggccgccaccaagatgagcgagtgcgtgctgggacagtccaagagggtggacttttgtggcaagggctatcacctgatgtctttcccacagagcgcccctcacggcgtggtgtttctgcacgtgacctacgtgccagcccagcataagaacttcaccacagcaccagccatctgccacgatggaaaggcacactttcctagggagggcgtgttcgtgtctaacggcacccactggtttgtgacacagcgcaatttctacgagccacagatcatcaccacagacaatacattcgtgagcggcaactgtgatgtggtgatcggcatcgtgaacaataccgtgtatgatccactgcagcccgagctggactcctttaaggaggagctggataagtacttcaagaatcacacctctcccgacgtggatctgggcgacatctccggcatcaatgcctctgtggtgaacatccagaaggagatcgaccggctgaacgaggtggccaagaatctgaacgagagcctgatcgatctgcaggagctgggcaagtatgagcagtacatcaagggctctggcagagagaacctgtatttccagggaggaggaggcagcggatacatccctgaggcaccaagggacggacaggcctacgtgcgcaaggatggcgagtgggtgctgctgtccacctttctgggccatcatcaccaccaccaccaccactga

SEQ ID NO: 4871 - DNA, 3846 bp, Artificial Sequence
  Description of Artificial Sequence: Synthetic polynucleotide
atgggcatcctgccaagcccaggaatgcccgccctgctgtctctggtgagcctgctgtccgtgctgctgatgggatgcgtggcagagacaggcacacagtgcgtgaacctgaccacaaggacccagctgccccctgcctataccaattctttcacacggggcgtgtactatcccgacaaggtgtttagaagctccgtgctgcactccacacaggatctgtttctgcctttcttttctaacgtgacctggttccacgccatccacgtgtccggcaccaatggcacaaagcggttcgacaatcccgtgctgccttttaacgatggcgtgtacttcgccagcaccgagaagtccaacatcatcagaggctggatctttggcaccacactggactctaagacacagagcctgctgatcgtgaacaatgccaccaacgtggtgatcaaggtgtgcgagttccagttttgtaatgatccattcctgggcgtgtactatcacaagaacaataagtcctggatggagtctgagtttcgcgtgtattctagcgccaacaattgcacatttgagtacgtgagccagcccttcctgatggacctggagggcaagcagggcaatttcaagaacctgagggagttcgtgtttaagaatatcgatggctacttcaagatctacagcaagcacaccccaatcaacctggtgcgcgacctgccacagggattctccgccctggagccactggtggatctgcccatcggcatcaacatcacccggtttcagacactgctggccctgcacagatcctacctgacaccaggcgactcctctagcggatggaccgcaggagctgccgcctactatgtgggctatctgcagccccggaccttcctgctgaagtacaacgagaatggcaccatcacagacgcagtggattgcgccctggaccccctgtctgagacaaagtgtacactgaagagctttaccgtggagaagggcatctatcagacaagcaatttcagggtgcagcctaccgagtccatcgtgcgctttcccaatatcacaaacctgtgcccttttggcgaggtgttcaacgccaccagattcgccagcgtgtacgcctggaatcggaagagaatctccaactgcgtggccgactattctgtgctgtacaactccgcctctttcagcacctttaagtgctatggcgtgtctcccacaaagctgaatgatctgtgctttaccaacgtgtacgccgatagcttcgtgatcaggggagacgaagtgagacagatcgcaccaggacagacaggaaagatcgcagactacaattataagctgcctgacgatttcaccggctgcgtgatcgcctggaactccaacaatctggattctaaagtgggcggcaactacaattatctgtacaggctgtttcgcaagtccaatctgaagccattcgagcgggacatctccacagagatctaccaggccggctctaccccctgcaatggcgtggagggctttaactgttatttccctctgcagtcttacggcttccagccaacaaacggcgtgggctatcagccctacagagtggtggtgctgtcctttgagctgctgcacgcaccagcaacagtgtgcggcccaaagaagtctaccaatctggtgaagaacaagtgcgtgaacttcaacttcaacggactgaccggcacaggcgtgctgaccgagagcaataagaagttcctgccttttcagcagttcggcagggacatcgcagataccacagacgccgtgcgcgaccctcagaccctggagatcctggacatcacaccatgcagcttcggcggcgtgtccgtgatcacaccaggcaccaatacatccaaccaggtggccgtgctgtatcaggacgtgaattgtaccgaggtgcccgtggcaatccacgcagatcagctgacccctacatggcgggtgtactctaccggcagcaacgtgttccagacaagagccggatgcctgatcggagcagagcacgtgaacaatagctatgagtgcgacatccctatcggcgccggcatctgtgccagctaccagacccagacaaactccccatctggagcaggctccgtggccagccagtccatcatcgcctataccatgagcctgggcgccgagaaccaagtggcctactccaacaattctatcgccatccctaccaacttcacaatcagcgtgaccacagagatcctgccagtgtctatgaccaagacaagcgtggactgcacaatgtatatctgtggcgatagcaccgagtgctccaacctgctgctgcagtacggctccttttgtacccagctgaatagagccctgacaggcatcgccgtggagcaggataagaacacacaggaggtgttcgcccaggtgaagcagatctacaagaccccacccatcaaggactttggcggcttcaacttcagccagatcctgcctgatccaagcaagccctccaagaggtcttttatcgaggacctgctgttcaacaaggtgaccctggccgatgccggcttcatcaagcagtatggagattgcctgggagacatcgcagcccgcgacctgatctgtgcccagaagtttaatggcctgaccgtgctgcctccactgctgacagatgagatgatcgcccagtacacatctgccctgctggccggcaccatcacaagcggatggaccttcggcgcaggagccgccctgcagatcccttttgccatgcagatggcctataggttcaacggcatcggcgtgacccagaatgtgctgtacgagaaccagaagctgatcgccaatcagtttaacagcgccatcggcaagatccaggactctctgtcctctacagccagcgccctgggcaagctgcaggatgtggtgaatcagaacgcccaggccctgaataccctggtgaagcagctgagctccaacttcggcgccatctctagcgtgctgaatgacatcctgagccggctggacccccctgaggcagaggtgcagatcgacaggctgatcacaggccgcctgcagagcctgcagacctacgtgacacagcagctgatcagggcagcagagatcagagcctccgccaatctggccgccaccaagatgagcgagtgcgtgctgggacagtccaagagggtggacttttgtggcaagggctatcacctgatgtctttcccacagagcgcccctcacggcgtggtgtttctgcacgtgacctacgtgccagcccaggagaagaacttcaccacagcaccagccatctgccacgatggaaaggcacactttcctagggagggcgtgttcgtgtctaacggcacccactggtttgtgacacagcgcaatttctacgagccacagatcatcaccacagacaatacattcgtgagcggcaactgtgatgtggtgatcggcatcgtgaacaataccgtgtatgatccactgcagcccgagctggactcctttaaggaggagctggataagtacttcaagaatcacacctctcccgacgtggatctgggcgacatctccggcatcaatgcctctgtggtgaacatccagaaggagatcgaccggctgaacgaggtggccaagaatctgaacgagagcctgatcgatctgcaggagctgggcaagtatgagcagtacatcaagggctctggcagagagaacctgtatttccagggaggaggaggcagcggatacatccctgaggcaccaagggacggacaggcctacgtgcgcaaggatggcgagtgggtgctgctgtccacctttctgggccatcatcaccaccaccaccaccactga

SEQ ID NO: 4872 - DNA, 3846 bp, Artificial Sequence
  Description of Artificial Sequence: Synthetic polynucleotide
atgggcatcctgccaagcccaggaatgcccgccctgctgtctctggtgagcctgctgtccgtgctgctgatgggatgcgtggcagagacaggcacacagtgcgtgaacctgaccacaaggacccagctgccccctgcctataccaattctttcacacggggcgtgtactatcccgacaaggtgtttagaagctccgtgctgcactccacacaggatctgtttctgcctttcttttctaacgtgacctggttccacgccatccacgtgtccggcaccaatggcacaaagcggttcgacaatcccgtgctgccttttaacgatggcgtgtacttcgccagcaccgagaagtccaacatcatcagaggctggatctttggcaccacactggactctaagacacagagcctgctgatcgtgaacaatgccaccaacgtggtgatcaaggtgtgcgagttccagttttgtaatgatccattcctgggcgtgtactatcacaagaacaataagtcctggatggagtctgagtttcgcgtgtattctagcgccaacaattgcacatttgagtacgtgagccagcccttcctgatggacctggagggcaagcagggcaatttcaagaacctgagggagttcgtgtttaagaatatcgatggctacttcaagatctacagcaagcacaccccaatcaacctggtgcgcgacctgccacagggattctccgccctggagccactggtggatctgcccatcggcatcaacatcacccggtttcagacactgctggccctgcacagatcctacctgacaccaggcgactcctctagcggatggaccgcaggagctgccgcctactatgtgggctatctgcagccccggaccttcctgctgaagtacaacgagaatggcaccatcacagacgcagtggattgcgccctggaccccctgtctgagacaaagtgtacactgaagagctttaccgtggagaagggcatctatcagacaagcaatttcagggtgcagcctaccgagtccatcgtgcgctttcccaatatcacaaacctgtgcccttttggcgaggtgttcaacgccaccagattcgccagcgtggcagcctggaatcggaagagaatctccaactgcgtggccgactattctgtgctgtacaactccgcctctttcagcacctttaagtgctatggcgtgtctcccacaaagctgaatgatctgtgctttaccaacgtgtacgccgatagcttcgtgatcaggggagacgaagtgagacagatcgcaccaggacagacaggaaagatcgcagactacaattataagctgcctgacgatttcaccggctgcgtgatcgcctggaactccaacaatctggattctaaagtgggcggcaactacaattatctgtacaggctgtttcgcaagtccaatctgaagccattcgagcgggacatctccacagagatctaccaggccggctctaccccctgcaatggcgtggagggctttaactgttatttccctctgcagtcttacggcttccagccaacaaacggcgtgggctatcagccctacagagtggtggtgctgtcctttgagctgctgcacgcaccagcaacagtgtgcggcccaaagaagtctaccaatctggtgaagaacaagtgcgtgaacttcaacttcaacggactgaccggcacaggcgtgctgaccgagagcaataagaagttcctgccttttcagcagttcggcagggacatcgcagataccacagacgccgtgcgcgaccctcagaccctggagatcctggacatcacaccatgcagcttcggcggcgtgtccgtgatcacaccaggcaccaatacatccaaccaggtggccgtgctgtatcaggacgtgaattgtaccgaggtgcccgtggcaatccacgcagatcagctgacccctacatggcgggtgtactctaccggcagcaacgtgttccagacaagagccggatgcctgatcggagcagagcacgtgaacaatagctatgagtgcgacatccctatcggcgccggcatctgtgccagctaccagacccagacaaactccccatctggagcaggctccgtggccagccagtccatcatcgcctataccatgagcctgggcgccgagaacagcgtggcctactccaacaattctatcgccatccctaccaacttcacaatcagcgtgaccacagagatcctgccagtgtctatgaccaagacaagcgtggactgcacaatgtatatctgtggcgatagcaccgagtgctccaacctgctgctgcagtacggctccttttgtacccagctgaatagagccctgacaggcatcgccgtggagcaggataagaacacacaggaggtgttcgcccaggtgaagcagatctacaagaccccacccatcaaggactttggcggcttcaacttcagccagatcctgcctgatccaagcaagccctccaagaggtcttttatcgaggacctgctgttcaacaaggtgaccctggccgatgccggcttcatcaagcagtatggagattgcctgggagacatcgcagcccgcgacctgatctgtgcccagaagtttaatggcctgaccgtgctgcctccactgctgacagatgagatgatcgcccagtacacatctgccctgctggccggcaccatcacaagcggatggaccttcggcgcaggagccgccctgcagatcccttttgccatgcagatggcctataggttcaacggcatcggcgtgacccagaatgtgctgtacgagaaccagaagctgatcgccaatcagtttaacagcgccatcggcaagatccaggactctctgtcctctacagccagcgccctgggcaagctgcaggatgtggtgaatcagaacgcccaggccctgaataccctggtgaagcagctgagctccaacttcggcgccatctctagcgtgctgaatgacatcctgagccggctggacccccctgaggcagaggtgcagatcgacaggctgatcacaggccgcctgcagagcctgcagacctacgtgacacagcagctgatcagggcagcagagatcagagcctccgccaatctggccgccaccaagatgagcgagtgcgtgctgggacagtccaagagggtggacttttgtggcaagggctatcacctgatgtctttcccacagagcgcccctcacggcgtggtgtttctgcacgtgacctacgtgccagcccaggagaagaacttcaccacagcaccagccatctgccacgatggaaaggcacactttcctagggagggcgtgttcgtgtctaacggcacccactggtttgtgacacagcgcaatttctacgagccacagatcatcaccacagacaatacattcgtgagcggcaactgtgatgtggtgatcggcatcgtgaacaataccgtgtatgatccactgcagcccgagctggactcctttaaggaggagctggataagtacttcaagaatcacacctctcccgacgtggatctgggcgacatctccggcatcaatgcctctgtggtgaacatccagaaggagatcgaccggctgaacgaggtggccaagaatctgaacgagagcctgatcgatctgcaggagctgggcaagtatgagcagtacatcaagggctctggcagagagaacctgtatttccagggaggaggaggcagcggatacatccctgaggcaccaagggacggacaggcctacgtgcgcaaggatggcgagtgggtgctgctgtccacctttctgggccatcatcaccaccaccaccaccactga

SEQ ID NO: 4873 - DNA, 3846 bp, Artificial Sequence
  Description of Artificial Sequence: Synthetic polynucleotide
atgggcatcctgccaagcccaggaatgcccgccctgctgtctctggtgagcctgctgtccgtgctgctgatgggatgcgtggcagagacaggcacacagtgcgtgaacctgaccacaaggacccagctgccccctgcctataccaattctttcacacggggcgtgtactatcccgacaaggtgtttagaagctccgtgctgcactccacacaggatctgtttctgcctttcttttctaacgtgacctggttccacgccatccacgtgtccggcaccaatggcacaaagcggttcgacaatcccgtgctgccttttaacgatggcgtgtacttcgccagcaccgagaagtccaacatcatcagaggctggatctttggcaccacactggactctaagacacagagcctgctgatcgtgaacaatgccaccaacgtggtgatcaaggtgtgcgagttccagttttgtaatgatccattcctgggcgtgtactatcacaagaacaataagtcctggatggagtctgagtttcgcgtgtattctagcgccaacaattgcacatttgagtacgtgagccagcccttcctgatggacctggagggcaagcagggcaatttcaagaacctgagggagttcgtgtttaagaatatcgatggctacttcaagatctacagcaagcacaccccaatcaacctggtgcgcgacctgccacagggattctccgccctggagccactggtggatctgcccatcggcatcaacatcacccggtttcagacactgctggccctgcacagatcctacctgacaccaggcgactcctctagcggatggaccgcaggagctgccgcctactatgtgggctatctgcagccccggaccttcctgctgaagtacaacgagaatggcaccatcacagacgcagtggattgcgccctggaccccctgtctgagacaaagtgtacactgaagagctttaccgtggagaagggcatctatcagacaagcaatttcagggtgcagcctaccgagtccatcgtgcgctttcccaatatcacaaacctgtgcccttttggcgaggtgttcaacgccaccagattcgccagcgtgtacgcctggaatcggaagagaatctccaactgcgtggccgactattctgtgctgtacaactccgcctctttcagcacctttaagtgctatggcgtgtctcccacaaagctgaatgatctgtgctttaccaacgtgtacgccgatagcttcgtgatcaggggagacgaagtgagacagatcgcaccaggacagacaggaaagatcgcagactacaattataagctgcctgacgatttcaccggctgcgtgatcgcctggaactccaacaatctggattctaaagtgggcggcaactacaattatctgtacaggctgtttcgcaagtccaatctgaagccattcgagcgggacatctccacagagatctaccaggccggctctaccccctgcaatggcgtggagggctttaactgttatttccctctgcagtcttacggcttccagccaacaaacggcgtgggctatcagccctacagagtggtggtgctgtcctttgagctgctgcacgcaccagcaacagtgtgcggcccaaagaagtctaccaatctggtgaagaacaagtgcgtgaacttcaacttcaacggactgaccggcacaggcgtgctgaccgagagcaataagaagttcctgccttttcagcagttcggcagggacatcgcagataccacagacgccgtgcgcgaccctcagaccctggagatcctggacatcacaccatgcagcttcggcggcgtgtccgtgatcacaccaggcaccaatacatccaaccaggtggccgtgctgtatcaggacgtgaattgtaccgaggtgcccgtggcaatccacgcagatcagctgacccctacatggcgggtgtactctaccggcagcaacgtgttccagacaagagccggatgcctgatcggagcagagcacgtgaacaatagctatgagtgcgacatccctatcggcgccggcatctgtgccagctaccagacccagacaaactccccatctggagcaggctccgtggccagccagtccatcatcgcctataccatgagcctgggcgccgagaacatagtggcctactccaacaattctatcgccatccctaccaacttcacaatcagcgtgaccacagagatcctgccagtgtctatgaccaagacaagcgtggactgcacaatgtatatctgtggcgatagcaccgagtgctccaacctgctgctgcagtacggctccttttgtacccagctgaatagagccctgacaggcatcgccgtggagcaggataagaacacacaggaggtgttcgcccaggtgaagcagatctacaagaccccacccatcaaggactttggcggcttcaacttcagccagatcctgcctgatccaagcaagccctccaagaggtcttttatcgaggacctgctgttcaacaaggtgaccctggccgatgccggcttcatcaagcagtatggagattgcctgggagacatcgcagcccgcgacctgatctgtgcccagaagtttaatggcctgaccgtgctgcctccactgctgacagatgagatgatcgcccagtacacatctgccctgctggccggcaccatcacaagcggatggaccttcggcgcaggagccgccctgcagatcccttttgccatgcagatggcctataggttcaacggcatcggcgtgacccagaatgtgctgtacgagaaccagaagctgatcgccaatcagtttaacagcgccatcggcaagatccaggactctctgtcctctacagccagcgccctgggcaagctgcaggatgtggtgaatcagaacgcccaggccctgaataccctggtgaagcagctgagctccaacttcggcgccatctctagcgtgctgaatgacatcctgagccggctggacccccctgaggcagaggtgcagatcgacaggctgatcacaggccgcctgcagagcctgcagacctacgtgacacagcagctgatcagggcagcagagatcagagcctccgccaatctggccgccaccaagatgagcgagtgcgtgctgggacagtccaagagggtggacttttgtggcaagggctatcacctgatgtctttcccacagagcgcccctcacggcgtggtgtttctgcacgtgacctacgtgccagcccaggagaagaacttcaccacagcaccagccatctgccacgatggaaaggcacactttcctagggagggcgtgttcgtgtctaacggcacccactggtttgtgacacagcgcaatttctacgagccacagatcatcaccacagacaatacattcgtgagcggcaactgtgatgtggtgatcggcatcgtgaacaataccgtgtatgatccactgcagcccgagctggactcctttaaggaggagctggataagtacttcaagaatcacacctctcccgacgtggatctgggcgacatctccggcatcaatgcctctgtggtgaacatccagaaggagatcgaccggctgaacgaggtggccaagaatctgaacgagagcctgatcgatctgcaggagctgggcaagtatgagcagtacatcaagggctctggcagagagaacctgtatttccagggaggaggaggcagcggatacatccctgaggcaccaagggacggacaggcctacgtgcgcaaggatggcgagtgggtgctgctgtccacctttctgggccatcatcaccaccaccaccaccactga

SEQ ID NO: 4874 - DNA, 3846 bp, Artificial Sequence
  Description of Artificial Sequence: Synthetic polynucleotide
atgggcatcctgccaagcccaggaatgcccgccctgctgtctctggtgagcctgctgtccgtgctgctgatgggatgcgtggcagagacaggcacacagtgcgtgaacctgaccacaaggacccagctgccccctgcctataccaattctttcacacggggcgtgtactatcccgacaaggtgtttagaagctccgtgctgcactccacacaggatctgtttctgcctttcttttctaacgtgacctggttccacgccatccacgtgtccggcaccaatggcacaaagcggttcgacaatcccgtgctgccttttaacgatggcgtgtacttcgccagcaccgagaagtccaacatcatcagaggctggatctttggcaccacactggactctaagacacagagcctgctgatcgtgaacaatgccaccaacgtggtgatcaaggtgtgcgagttccagttttgtaatgatccattcctgggcgtgtactatcacaagaacaataagtcctggatggagtctgagtttcgcgtgtattctagcgccaacaattgcacatttgagtacgtgagccagcccttcctgatggacctggagggcaagcagggcaatttcaagaacctgagggagttcgtgtttaagaatatcgatggctacttcaagatctacagcaagcacaccccaatcaacctggtgcgcgacctgccacagggattctccgccctggagccactggtggatctgcccatcggcatcaacatcacccggtttcagacactgctggccctgcacagatcctacctgacaccaggcgactcctctagcggatggaccgcaggagctgccgcctactatgtgggctatctgcagccccggaccttcctgctgaagtacaacgagaatggcaccatcacagacgcagtggattgcgccctggaccccctgtctgagacaaagtgtacactgaagagctttaccgtggagaagggcatctatcagacaagcaatttcagggtgcagcctaccgagtccatcgtgcgctttcccaatatcacaaacctgtgcccttttggcgaggtgttcaacgccaccagattcgccagcgtgtaccaatggaatcggaagagaatctccaactgcgtggccgactattctgtgctgtacaactccgcctctttcagcacctttaagtgctatggcgtgtctcccacaaagctgaatgatctgtgctttaccaacgtgtacgccgatagcttcgtgatcaggggagacgaagtgagacagatcgcaccaggacagacaggaaagatcgcagactacaattataagctgcctgacgatttcaccggctgcgtgatcgcctggaactccaacaatctggattctaaagtgggcggcaactacaattatctgtacaggctgtttcgcaagtccaatctgaagccattcgagcgggacatctccacagagatctaccaggccggctctaccccctgcaatggcgtggagggctttaactgttatttccctctgcagtcttacggcttccagccaacaaacggcgtgggctatcagccctacagagtggtggtgctgtcctttgagctgctgcacgcaccagcaacagtgtgcggcccaaagaagtctaccaatctggtgaagaacaagtgcgtgaacttcaacttcaacggactgaccggcacaggcgtgctgaccgagagcaataagaagttcctgccttttcagcagttcggcagggacatcgcagataccacagacgccgtgcgcgaccctcagaccctggagatcctggacatcacaccatgcagcttcggcggcgtgtccgtgatcacaccaggcaccaatacatccaaccaggtggccgtgctgtatcaggacgtgaattgtaccgaggtgcccgtggcaatccacgcagatcagctgacccctacatggcgggtgtactctaccggcagcaacgtgttccagacaagagccggatgcctgatcggagcagagcacgtgaacaatagctatgagtgcgacatccctatcggcgccggcatctgtgccagctaccagacccagacaaactccccatctggagcaggctccgtggccagccagtccatcatcgcctataccatgagcctgggcgccgagaacagcgtggcctactccaacaattctatcgccatccctaccaacttcacaatcagcgtgaccacagagatcctgccagtgtctatgaccaagacaagcgtggactgcacaatgtatatctgtggcgatagcaccgagtgctccaacctgctgctgcagtacggctccttttgtacccagctgaatagagccctgacaggcatcgccgtggagcaggataagaacacacaggaggtgttcgcccaggtgaagcagatctacaagaccccacccatcaaggactttggcggcttcaacttcagccagatcctgcctgatccaagcaagccctccaagaggtcttttatcgaggacctgctgttcaacaaggtgaccctggccgatgccggcttcatcaagcagtatggagattgcctgggagacatcgcagcccgcgacctgatctgtgcccagaagtttaatggcctgaccgtgctgcctccactgctgacagatgagatgatcgcccagtacacatctgccctgctggccggcaccatcacaagcggatggaccttcggcgcaggagccgccctgcagatcccttttgccatgcagatggcctataggttcaacggcatcggcgtgacccagaatgtgctgtacgagaaccagaagctgatcgccaatcagtttaacagcgccatcggcaagatccaggactctctgtcctctacagccagcgccctgggcaagctgcaggatgtggtgaatcagaacgcccaggccctgaataccctggtgaagcagctgagctccaacttcggcgccatctctagcgtgctgaatgacatcctgagccggctggacccccctgaggcagaggtgcagatcgacaggctgatcacaggccgcctgcagagcctgcagacctacgtgacacagcagctgatcagggcagcagagatcagagcctccgccaatctggccgccaccaagatgagcgagtgcgtgctgggacagtccaagagggtggacttttgtggcaagggctatcacctgatgtctttcccacagagcgcccctcacggcgtggtgtttctgcacgtgacctacgtgccagcccaggagaagaacttcaccacagcaccagccatctgccacgatggaaaggcacactttcctagggagggcgtgttcgtgtctaacggcacccactggtttgtgacacagcgcaatttctacgagccacagatcatcaccacagacaatacattcgtgagcggcaactgtgatgtggtgatcggcatcgtgaacaataccgtgtatgatccactgcagcccgagctggactcctttaaggaggagctggataagtacttcaagaatcacacctctcccgacgtggatctgggcgacatctccggcatcaatgcctctgtggtgaacatccagaaggagatcgaccggctgaacgaggtggccaagaatctgaacgagagcctgatcgatctgcaggagctgggcaagtatgagcagtacatcaagggctctggcagagagaacctgtatttccagggaggaggaggcagcggatacatccctgaggcaccaagggacggacaggcctacgtgcgcaaggatggcgagtgggtgctgctgtccacctttctgggccatcatcaccaccaccaccaccactga

SEQ ID NO: 4875 - DNA, 3846 bp, Artificial Sequence
  Description of Artificial Sequence: Synthetic polynucleotide
atgggcatcctgccaagcccaggaatgcccgccctgctgtctctggtgagcctgctgtccgtgctgctgatgggatgcgtggcagagacaggcacacagtgcgtgaacctgaccacaaggacccagctgccccctgcctataccaattctttcacacggggcgtgtactatcccgacaaggtgtttagaagctccgtgctgcactccacacaggatctgtttctgcctttcttttctaacgtgacctggttccacgccatccacgtgtccggcaccaatggcacaaagcggttcgacaatcccgtgctgccttttaacgatggcgtgtacttcgccagcaccgagaagtccaacatcatcagaggctggatctttggcaccacactggactctaagacacagagcctgctgatcgtgaacaatgccaccaacgtggtgatcaaggtgtgcgagttccagttttgtaatgatccattcctgggcgtgtactatcacaagaacaataagtcctggatggagtctgagtttcgcgtgtattctagcgccaacaattgcacatttgagtacgtgagccagcccttcctgatggacctggagggcaagcagggcaatttcaagaacctgagggagttcgtgtttaagaatatcgatggctacttcaagatctacagcaagcacaccccaatcaacctggtgcgcgacctgccacagggattctccgccctggagccactggtggatctgcccatcggcatcaacatcacccggtttcagacactgctggccctgcacagatcctacctgacaccaggcgactcctctagcggatggaccgcaggagctgccgcctactatgtgggctatctgcagccccggaccttcctgctgaagtacaacgagaatggcaccatcacagacgcagtggattgcgccctggaccccctgtctgagacaaagtgtacactgaagagctttaccgtggagaagggcatctatcagacaagcaatttcagggtgcagcctaccgagtccatcgtgcgctttcccaatatcacaaacctgtgcccttttggcgaggtgttcaacgccaccagattcgccagcgtgtacgcctggaatcggaagagaatctccaactgcgtggccgactattctgtgctgtacaactccgcctctttcagcacctttaagtgctatggcgtgtctcccacaaagctgaatgatctgtgctttaccaacgtgtacgccgatagcttcgtgatcaggggagacgaagtgagacagatcgcaccaggacagacaggaaagatcgcagactacaattatcgactgcctgacgatttcaccggctgcgtgatcgcctggaactccaacaatctggattctaaagtgggcggcaactacaattatctgtacaggctgtttcgcaagtccaatctgaagccattcgagcgggacatctccacagagatctaccaggccggctctaccccctgcaatggcgtggagggctttaactgttatttccctctgcagtcttacggcttccagccaacaaacggcgtgggctatcagccctacagagtggtggtgctgtcctttgagctgctgcacgcaccagcaacagtgtgcggcccaaagaagtctaccaatctggtgaagaacaagtgcgtgaacttcaacttcaacggactgaccggcacaggcgtgctgaccgagagcaataagaagttcctgccttttcagcagttcggcagggacatcgcagataccacagacgccgtgcgcgaccctcagaccctggagatcctggacatcacaccatgcagcttcggcggcgtgtccgtgatcacaccaggcaccaatacatccaaccaggtggccgtgctgtatcaggacgtgaattgtaccgaggtgcccgtggcaatccacgcagatcagctgacccctacatggcgggtgtactctaccggcagcaacgtgttccagacaagagccggatgcctgatcggagcagagcacgtgaacaatagctatgagtgcgacatccctatcggcgccggcatctgtgccagctaccagacccagacaaactccccatctggagcaggctccgtggccagccagtccatcatcgcctataccatgagcctgggcgccgagaacagcgtggcctactccaacaattctatcgccatccctaccaacttcacaatcagcgtgaccacagagatcctgccagtgtctatgaccaagacaagcgtggactgcacaatgtatatctgtggcgatagcaccgagtgctccaacctgctgctgcagtacggctccttttgtacccagctgaatagagccctgacaggcatcgccgtggagcaggataagaacacacaggaggtgttcgcccaggtgaagcagatctacaagaccccacccatcaaggactttggcggcttcaacttcagccagatcctgcctgatccaagcaagccctccaagaggtcttttatcgaggacctgctgttcaacaaggtgaccctggccgatgccggcttcatcaagcagtatggagattgcctgggagacatcgcagcccgcgacctgatctgtgcccagaagtttaatggcctgaccgtgctgcctccactgctgacagatgagatgatcgcccagtacacatctgccctgctggccggcaccatcacaagcggatggaccttcggcgcaggagccgccctgcagatcccttttgccatgcagatggcctataggttcaacggcatcggcgtgacccagaatgtgctgtacgagaaccagaagctgatcgccaatcagtttaacagcgccatcggcaagatccaggactctctgtcctctacagccagcgccctgggcaagctgcaggatgtggtgaatcagaacgcccaggccctgaataccctggtgaagcagctgagctccaacttcggcgccatctctagcgtgctgaatgacatcctgagccggctggacccccctgaggcagaggtgcagatcgacaggctgatcacaggccgcctgcagagcctgcagacctacgtgacacagcagctgatcagggcagcagagatcagagcctccgccaatctggccgccaccaagatgagcgagtgcgtgctgggacagtccaagagggtggacttttgtggcaagggctatcacctgatgtctttcccacagagcgcccctcacggcgtggtgtttctgcacgtgacctacgtgccagcccaggagaagaacttcaccacagcaccagccatctgccacgatggaaaggcacactttcctagggagggcgtgttcgtgtctaacggcacccactggtttgtgacacagcgcaatttctacgagccacagatcatcaccacagacaatacattcgtgagcggcaactgtgatgtggtgatcggcatcgtgaacaataccgtgtatgatccactgcagcccgagctggactcctttaaggaggagctggataagtacttcaagaatcacacctctcccgacgtggatctgggcgacatctccggcatcaatgcctctgtggtgaacatccagaaggagatcgaccggctgaacgaggtggccaagaatctgaacgagagcctgatcgatctgcaggagctgggcaagtatgagcagtacatcaagggctctggcagagagaacctgtatttccagggaggaggaggcagcggatacatccctgaggcaccaagggacggacaggcctacgtgcgcaaggatggcgagtgggtgctgctgtccacctttctgggccatcatcaccaccaccaccaccactga

SEQ ID NO: 4876 - DNA, 3846 bp, Artificial Sequence
  Description of Artificial Sequence: Synthetic polynucleotide
atgggcatcctgccaagcccaggaatgcccgccctgctgtctctggtgagcctgctgtccgtgctgctgatgggatgcgtggcagagacaggcacacagtgcgtgaacctgaccacaaggacccagctgccccctgcctataccaattctttcacacggggcgtgtactatcccgacaaggtgtttagaagctccgtgctgcactccacacaggatctgtttctgcctttcttttctaacgtgacctggttccacgccatccacgtgtccggcaccaatggcacaaagcggttcgacaatcccgtgctgccttttaacgatggcgtgtacttcgccagcaccgagaagtccaacatcatcagaggctggatctttggcaccacactggactctaagacacagagcctgctgatcgtgaacaatgccaccaacgtggtgatcaaggtgtgcgagttccagttttgtaatgatccattcctgggcgtgtactatcacaagaacaataagtcctggatggagtctgagtttcgcgtgtattctagcgccaacaattgcacatttgagtacgtgagccagcccttcctgatggacctggagggcaagcagggcaatttcaagaacctgagggagttcgtgtttaagaatatcgatggctacttcaagatctacagcaagcacaccccaatcaacctggtgcgcgacctgccacagggattctccgccctggagccactggtggatctgcccatcggcatcaacatcacccggtttcagacactgctggccctgcacagatcctacctgacaccaggcgactcctctagcggatggaccgcaggagctgccgcctactatgtgggctatctgcagccccggaccttcctgctgaagtacaacgagaatggcaccatcacagacgcagtggattgcgccctggaccccctgtctgagacaaagtgtacactgaagagctttaccgtggagaagggcatctatcagacaagcaatttcagggtgcagcctaccgagtccatcgtgcgctttcccaatatcacaaacctgtgcccttttggcgaggtgttcaacgccaccagattcgccagcgtgtacgcctggaatcggaagagaatctccaactgcgtggccgactattctgtgctgtacaactccgcctctttcagcacctttaagtgctatggcgtgtctcccacaaagctgaatgatctgtgctttaccaacgtgtacgccgatagcttcgtgatcaggggagacgaagtgagacagatcgcaccaggacagacaggaaagatcgcagactacaattataagctgcctgacgatttcaccggctgcgtgatcgcctggaactccaacaatctggattctaaagtgggcggcaactacaattatctgtacaggctgtttcgcaagtccaatctgaagccattcaaacgggacatctccacagagatctaccaggccggctctaccccctgcaatggcgtggagggctttaactgttatttccctctgcagtcttacggcttccagccaacaaacggcgtgggctatcagccctacagagtggtggtgctgtcctttgagctgctgcacgcaccagcaacagtgtgcggcccaaagaagtctaccaatctggtgaagaacaagtgcgtgaacttcaacttcaacggactgaccggcacaggcgtgctgaccgagagcaataagaagttcctgccttttcagcagttcggcagggacatcgcagataccacagacgccgtgcgcgaccctcagaccctggagatcctggacatcacaccatgcagcttcggcggcgtgtccgtgatcacaccaggcaccaatacatccaaccaggtggccgtgctgtatcaggacgtgaattgtaccgaggtgcccgtggcaatccacgcagatcagctgacccctacatggcgggtgtactctaccggcagcaacgtgttccagacaagagccggatgcctgatcggagcagagcacgtgaacaatagctatgagtgcgacatccctatcggcgccggcatctgtgccagctaccagacccagacaaactccccatctggagcaggctccgtggccagccagtccatcatcgcctataccatgagcctgggcgccgagaacagcgtggcctactccaacaattctatcgccatccctaccaacttcacaatcagcgtgaccacagagatcctgccagtgtctatgaccaagacaagcgtggactgcacaatgtatatctgtggcgatagcaccgagtgctccaacctgctgctgcagtacggctccttttgtacccagctgaatagagccctgacaggcatcgccgtggagcaggataagaacacacaggaggtgttcgcccaggtgaagcagatctacaagaccccacccatcaaggactttggcggcttcaacttcagccagatcctgcctgatccaagcaagccctccaagaggtcttttatcgaggacctgctgttcaacaaggtgaccctggccgatgccggcttcatcaagcagtatggagattgcctgggagacatcgcagcccgcgacctgatctgtgcccagaagtttaatggcctgaccgtgctgcctccactgctgacagatgagatgatcgcccagtacacatctgccctgctggccggcaccatcacaagcggatggaccttcggcgcaggagccgccctgcagatcccttttgccatgcagatggcctataggttcaacggcatcggcgtgacccagaatgtgctgtacgagaaccagaagctgatcgccaatcagtttaacagcgccatcggcaagatccaggactctctgtcctctacagccagcgccctgggcaagctgcaggatgtggtgaatcagaacgcccaggccctgaataccctggtgaagcagctgagctccaacttcggcgccatctctagcgtgctgaatgacatcctgagccggctggacccccctgaggcagaggtgcagatcgacaggctgatcacaggccgcctgcagagcctgcagacctacgtgacacagcagctgatcagggcagcagagatcagagcctccgccaatctggccgccaccaagatgagcgagtgcgtgctgggacagtccaagagggtggacttttgtggcaagggctatcacctgatgtctttcccacagagcgcccctcacggcgtggtgtttctgcacgtgacctacgtgccagcccaggagaagaacttcaccacagcaccagccatctgccacgatggaaaggcacactttcctagggagggcgtgttcgtgtctaacggcacccactggtttgtgacacagcgcaatttctacgagccacagatcatcaccacagacaatacattcgtgagcggcaactgtgatgtggtgatcggcatcgtgaacaataccgtgtatgatccactgcagcccgagctggactcctttaaggaggagctggataagtacttcaagaatcacacctctcccgacgtggatctgggcgacatctccggcatcaatgcctctgtggtgaacatccagaaggagatcgaccggctgaacgaggtggccaagaatctgaacgagagcctgatcgatctgcaggagctgggcaagtatgagcagtacatcaagggctctggcagagagaacctgtatttccagggaggaggaggcagcggatacatccctgaggcaccaagggacggacaggcctacgtgcgcaaggatggcgagtgggtgctgctgtccacctttctgggccatcatcaccaccaccaccaccactga

SEQ ID NO: 4877 - DNA, 3846 bp, Artificial Sequence
  Description of Artificial Sequence: Synthetic polynucleotide
atgggcatcctgccaagcccaggaatgcccgccctgctgtctctggtgagcctgctgtccgtgctgctgatgggatgcgtggcagagacaggcacacagtgcgtgaacctgaccacaaggacccagctgccccctgcctataccaattctttcacacggggcgtgtactatcccgacaaggtgtttagaagctccgtgctgcactccacacaggatctgtttctgcctttcttttctaacgtgacctggttccacgccatccacgtgtccggcaccaatggcacaaagcggttcgacaatcccgtgctgccttttaacgatggcgtgtacttcgccagcaccgagaagtccaacatcatcagaggctggatctttggcaccacactggactctaagacacagagcctgctgatcgtgaacaatgccaccaacgtggtgatcaaggtgtgcgagttccagttttgtaatgatccattcctgggcgtgtactatcacaagaacaataagtcctggatggagtctgagtttcgcgtgtattctagcgccaacaattgcacatttgagtacgtgagccagcccttcctgatggacctggagggcaagcagggcaatttcaagaacctgagggagttcgtgtttaagaatatcgatggctacttcaagatctacagcaagcacaccccaatcaacctggtgcgcgacctgccacagggattctccgccctggagccactggtggatctgcccatcggcatcaacatcacccggtttcagacactgctggccctgcacagatcctacctgacaccaggcgactcctctagcggatggaccgcaggagctgccgcctactatgtgggctatctgcagccccggaccttcctgctgaagtacaacgagaatggcaccatcacagacgcagtggattgcgccctggaccccctgtctgagacaaagtgtacactgaagagctttaccgtggagaagggcatctatcagacaagcaatttcagggtgcagcctaccgagtccatcgtgcgctttcccaatatcacaaacctgtgcccttttggcgaggtgttcaacgccaccagattcgccagcgtgtacgcctggaatcggaagagaatctccaactgcgtggccgactattctgtgctgtacaactccgcctctttcagcacctttaagtgctatggcgtgtctcccacaaagctgaatgatctgtgctttaccaacgtgtacgccgatagcttcgtgatcaggggagacgaagtgagacagatcgcaccaggacagacaggaaagatcgcagactacaattataagctgcctgacgatttcaccggctgcgtgatcgcctggaactccaacaatctggattctaaagtgggcggcaactacaattatctgtacaggctgtttcgcaagtccaatctgaagccattcgagcgggacatctccacagagatctaccaggccggctctaccccctgcaatggcgtggagggctttaactgttatttccctctgcagtcttacggcttccagccaacaaacggcgtgggctatcagccctacagagtggtggtgctgtcctttgagctgctgcacgcaccagcaacagtgtgcggcccaaagaagtctaccaatctggtgaagaacaagtgcgtgaacttcaacttcaacggactgaccggcacaggcgtgctgaccgagagcaataagaagttcctgccttttcagcagttcggcagggacatcgcagataccacagacgccgtgcgcgaccctcagaccctggagatcctggacatcacaccatgcagcttcggcggcgtgtccgtgatcacaccaggcaccaatacatccaaccaggtggccgtgctgtatcaggacgtgaattgtaccgaggtgcccgtggcaatccacgcagatcagctgacccctacatggcgggtgtactctaccggcagcaacgtgttccagacaagagccggatgcctgatcggagcagagcacgtgaacaatagctatgagtgcgacatccctatcggcgccggcatctgtgccagctaccagacccagacaaactccccatctggagcaggctccgtggccagccagtccatcatcgcctataccatgagcctgggcgccgagaacagcgtggcctactccaacaattctatcgccatccctaccaacttcacaatcagcgtgaccacagagatcctgccagtgtctatgaccaagacaagcgtggactgcacaatgtatatctgtggcgatagcaccgagtgctccaacctgctgctgcagtacggctccttttgtacccagctgaatagagccctgacaggcatcgccgtggagcaggataagaacacacaggaggtgttcgcccaggtgaagcagatctacaagaccccacccatcaaggactttggcggcttcaacttcagccagatcctgcctgatccaagcaagccctccaagaggtcttttatcgaggacctgctgttcaacaaggtgaccctggccgatgccggcttcatcaagcagtatggagattgcctgggagacatcgcagcccgcgacctgatctgtgcccagaagtttaatggcctgaccgtgctgcctccactgctgacagatgagatgatcgcccagtacacatctgccctgctggccggcaccatcacaagcggatggaccttcggcgcaggagccgccctgcagatcccttttgccatgcagatggcctataggttcaacggcatcggcgtgacccagaatgtgctgtacgagaaccagaagctgatcgccaatcagtttaacagcgccatcggcaagatccaggactctctgtcctctacagccagcgccctgggcaagctgcaggatgtggtgaatcagaacgcccaggccctgaataccctggtgaagcagctgagctccaacttcggcgccatctctagcgtgctgaatgacatcctgagccggctggacccccctgaggcagaggtgcagatcgacaggctgatcacaggccgcctgcagagcctgcagacctacgtgacacagcagctgatcagggcagcagagatcagagcctccgccaatctggccgccaccaagatgagcgagtgcgtgctgggacagtccaagagggtggacttttgtggcccgggctatcacctgatgtctttcccacagagcgcccctcacggcgtggtgtttctgcacgtgacctacgtgccagcccaggagaagaacttcaccacagcaccagccatctgccacgatggaaaggcacactttcctagggagggcgtgttcgtgtctaacggcacccactggtttgtgacacagcgcaatttctacgagccacagatcatcaccacagacaatacattcgtgagcggcaactgtgatgtggtgatcggcatcgtgaacaataccgtgtatgatccactgcagcccgagctggactcctttaaggaggagctggataagtacttcaagaatcacacctctcccgacgtggatctgggcgacatctccggcatcaatgcctctgtggtgaacatccagaaggagatcgaccggctgaacgaggtggccaagaatctgaacgagagcctgatcgatctgcaggagctgggcaagtatgagcagtacatcaagggctctggcagagagaacctgtatttccagggaggaggaggcagcggatacatccctgaggcaccaagggacggacaggcctacgtgcgcaaggatggcgagtgggtgctgctgtccacctttctgggccatcatcaccaccaccaccaccactga

SEQ ID NO: 4878 - DNA, 3846 bp, Artificial Sequence
  Description of Artificial Sequence: Synthetic polynucleotide
atgggcatcctgccaagcccaggaatgcccgccctgctgtctctggtgagcctgctgtccgtgctgctgatgggatgcgtggcagagacaggcacacagtgcgtgaacctgaccacaaggacccagctgccccctgcctataccaattctttcacacggggcgtgtactatcccgacaaggtgtttagaagctccgtgctgcactccacacaggatctgtttctgcctttcttttctaacgtgacctggttccacgccatccacgtgtccggcaccaatggcacaaagcggttcgacaatcccgtgctgccttttaacgatggcgtgtacttcgccagcaccgagaagtccaacatcatcagaggctggatctttggcaccacactggactctaagacacagagcctgctgatcgtgaacaatgccaccaacgtggtgatcaaggtgtgcgagttccagttttgtaatgatccattcctgggcgtgtactatcacaagaacaataagtcctggatggagtctgagtttcgcgtgtattctagcgccaacaattgcacatttgagtacgtgagccagcccttcctgatggacctggagggcaagcagggcaatttcaagaacctgagggagttcgtgtttaagaatatcgatggctacttcaagatctacagcaagcacaccccaatcaacctggtgcgcgacctgccacagggattctccgccctggagccactggtggatctgcccatcggcatcaacatcacccggtttcagacactgctggccctgcacagatcctacctgacaccaggcgactcctctagcggatggaccgcaggagctgccgcctactatgtgggctatctgcagccccggaccttcctgctgaagtacaacgagaatggcaccatcacagacgcagtggattgcgccctggaccccctgtctgagacaaagtgtacactgaagagctttaccgtggagaagggcatctatcagacaagcaatttcagggtgcagcctaccgagtccatcgtgcgctttcccaatatcacaaacctgtgcccttttggcgaggtgttcaacgccaccagattcgccagcgtgtacgcctggaatcggaagagaatctccaactgcgtggccgactattctgtgctgtacaactccgcctctttcagcacctttaagtgctatggcgtgtctcccacaaagctgaatgatctgtgctttaccaacgtgtacgccgatagcttcgtgatcaggggagacgaagtgagacagatcgcaccaggacagacaggaaagatcgcagactacaattataagctgcctgacgatttcaccggctgcgtgatcgcctggaactccaacaatctggattctaaagtgggcggcaactacaattatctgtacaggctgtttcgcaagtccaatctgtgtccattcgagcgggacatctccacagagatctaccaggccggctctaccccctgcaatggcgtggagggctttaactgttatttccctctgcagtcttacggcttccagccaacaaacggcgtgggctatcagccctacagagtggtggtgctgtcctttgagctgctgcacgcaccagcaacagtgtgcggcccaaagaagtctaccaatctggtgaagaacaagtgcgtgaacttcaacttcaacggactgaccggcacaggcgtgctgaccgagagcaataagaagttcctgccttttcagcagttcggcagggacatcgcagataccacagacgccgtgcgcgaccctcagaccctggagatcctggacatcacaccatgcagcttcggcggcgtgtccgtgatcacaccaggcaccaatacatccaaccaggtggccgtgctgtatcaggacgtgaattgtaccgaggtgcccgtggcaatccacgcagatcagctgacccctacatggcgggtgtactctaccggcagcaacgtgttccagacaagagccggatgcctgatcggagcagagcacgtgaacaatagctatgagtgcgacatccctatcggcgccggcatctgtgccagctaccagacccagacaaactccccatctggagcaggctccgtggccagccagtccatcatcgcctataccatgagcctgggcgccgagaacagcgtggcctactccaacaattctatcgccatccctaccaacttcacaatcagcgtgaccacagagatcctgccagtgtctatgaccaagacaagcgtggactgcacaatgtatatctgtggcgatagcaccgagtgctccaacctgctgctgcagtacggctccttttgtacccagctgaatagagccctgacaggcatcgccgtggagcaggataagaacacacaggaggtgttcgcccaggtgaagcagatctacaagaccccacccatcaaggactttggcggcttcaacttcagccagatcctgcctgatccaagcaagccctccaagaggtcttttatcgaggacctgctgttcaacaaggtgaccctggccgatgccggcttcatcaagcagtatggagattgcctgggagacatcgcagcccgcgacctgatctgtgcccagaagtttaatggcctgaccgtgctgcctccactgctgacagatgagatgatcgcccagtacacatctgccctgctggccggcaccatcacaagcggatggaccttcggcgcaggagccgccctgcagatcccttttgccatgcagatggcctataggttcaacggcatcggcgtgacccagaatgtgctgtacgagaaccagaagctgatcgccaatcagtttaacagcgccatcggcaagatccaggactctctgtcctctacagccagcgccctgggcaagctgcaggatgtggtgaatcagaacgcccaggccctgaataccctggtgaagcagctgagctccaacttcggcgccatctctagcgtgctgaatgacatcctgagccggctggacccccctgaggcagaggtgcagatcgacaggctgatcacaggccgcctgcagagcctgcagacctacgtgacacagcagctgatcagggcagcagagatcagagcctccgccaatctggccgccaccaagatgagcgagtgcgtgctgggacagtccaagagggtggacttttgtggcaagggctatcacctgatgtctttcccacagagcgcccctcacggcgtggtgtttctgcacgtgacctacgtgccagcccaggagaagaacttcaccacagcaccagccatctgccacgatggaaaggcacactttcctagggagggcgtgttcgtgtctaacggcacccactggtttgtgacacagcgcaatttctacgagccacagatcatcaccacagacaatacattcgtgagcggcaactgtgatgtggtgatcggcatcgtgaacaataccgtgtatgatccactgcagcccgagctggactcctttaaggaggagctggataagtacttcaagaatcacacctctcccgacgtggatctgggcgacatctccggcatcaatgcctctgtggtgaacatccagaaggagatcgaccggctgaacgaggtggccaagaatctgaacgagagcctgatcgatctgcaggagctgggcaagtatgagcagtacatcaagggctctggcagagagaacctgtatttccagggaggaggaggcagcggatacatccctgaggcaccaagggacggacaggcctacgtgcgcaaggatggcgagtgggtgctgctgtccacctttctgggccatcatcaccaccaccaccaccactga

SEQ ID NO: 4879 - DNA, 3846 bp, Artificial Sequence
  Description of Artificial Sequence: Synthetic polynucleotide
atgggcatcctgccaagcccaggaatgcccgccctgctgtctctggtgagcctgctgtccgtgctgctgatgggatgcgtggcagagacaggcacacagtgcgtgaacctgaccacaaggacccagctgccccctgcctataccaattctttcacacggggcgtgtactatcccgacaaggtgtttagaagctccgtgctgcactccacacaggatctgtttctgcctttcttttctaacgtgacctggttccacgccatccacgtgtccggcaccaatggcacaaagcggttcgacaatcccgtgctgccttttaacgatggcgtgtacttcgccagcaccgagaagtccaacatcatcagaggctggatctttggcaccacactggactctaagacacagagcctgctgatcgtgaacaatgccaccaacgtggtgatcaaggtgtgcgagttccagttttgtaatgatccattcctgggcgtgtactatcacaagaacaataagtcctggatggagtctgagtttcgcgtgtattctagcgccaacaattgcacatttgagtacgtgagccagcccttcctgatggacctggagggcaagcagggcaatttcaagaacctgagggagttcgtgtttaagaatatcgatggctacttcaagatctacagcaagcacaccccaatcaacctggtgcgcgacctgccacagggattctccgccctggagccactggtggatctgcccatcggcatcaacatcacccggtttcagacactgctggccctgcacagatcctacctgacaccaggcgactcctctagcggatggaccgcaggagctgccgcctactatgtgggctatctgcagccccggaccttcctgctgaagtacaacgagaatggcaccatcacagacgcagtggattgcgccctggaccccctgtctgagacaaagtgtacactgaagagctttaccgtggagaagggcatctatcagacaagcaatttcagggtgcagcctaccgagtccatcgtgcgctttcccaatatcacaaacctgtgcccttttggcgaggtgttcaacgccaccagattcgccagcgtgtacgcctggaatcggaagagaatctccaactgcgtggccgactattctgtgctgtacaactccgcctctttcagcacctttaagtgctatggcgtgtctcccacaaagctgaatgatctgtgctttaccaacgtgtacgccgatagcttcgtgatcaggggagacgaagtgagacagatcgcaccaggacagacaggaaagatcgcagactacaattataagctgcctgacgatttcaccggctgcgtgatcgcctggaactccaacaatctggattctaaagtgggcggcaactacaattatctgtacaggctgtttcgcaagtccaatctgaagccattcgggcgggacatctccacagagatctaccaggccggctctaccccctgcaatggcgtggagggctttaactgttatttccctctgcagtcttacggcttccagccaacaaacggcgtgggctatcagccctacagagtggtggtgctgtcctttgagctgctgcacgcaccagcaacagtgtgcggcccaaagaagtctaccaatctggtgaagaacaagtgcgtgaacttcaacttcaacggactgaccggcacaggcgtgctgaccgagagcaataagaagttcctgccttttcagcagttcggcagggacatcgcagataccacagacgccgtgcgcgaccctcagaccctggagatcctggacatcacaccatgcagcttcggcggcgtgtccgtgatcacaccaggcaccaatacatccaaccaggtggccgtgctgtatcaggacgtgaattgtaccgaggtgcccgtggcaatccacgcagatcagctgacccctacatggcgggtgtactctaccggcagcaacgtgttccagacaagagccggatgcctgatcggagcagagcacgtgaacaatagctatgagtgcgacatccctatcggcgccggcatctgtgccagctaccagacccagacaaactccccatctggagcaggctccgtggccagccagtccatcatcgcctataccatgagcctgggcgccgagaacagcgtggcctactccaacaattctatcgccatccctaccaacttcacaatcagcgtgaccacagagatcctgccagtgtctatgaccaagacaagcgtggactgcacaatgtatatctgtggcgatagcaccgagtgctccaacctgctgctgcagtacggctccttttgtacccagctgaatagagccctgacaggcatcgccgtggagcaggataagaacacacaggaggtgttcgcccaggtgaagcagatctacaagaccccacccatcaaggactttggcggcttcaacttcagccagatcctgcctgatccaagcaagccctccaagaggtcttttatcgaggacctgctgttcaacaaggtgaccctggccgatgccggcttcatcaagcagtatggagattgcctgggagacatcgcagcccgcgacctgatctgtgcccagaagtttaatggcctgaccgtgctgcctccactgctgacagatgagatgatcgcccagtacacatctgccctgctggccggcaccatcacaagcggatggaccttcggcgcaggagccgccctgcagatcccttttgccatgcagatggcctataggttcaacggcatcggcgtgacccagaatgtgctgtacgagaaccagaagctgatcgccaatcagtttaacagcgccatcggcaagatccaggactctctgtcctctacagccagcgccctgggcaagctgcaggatgtggtgaatcagaacgcccaggccctgaataccctggtgaagcagctgagctccaacttcggcgccatctctagcgtgctgaatgacatcctgagccggctggacccccctgaggcagaggtgcagatcgacaggctgatcacaggccgcctgcagagcctgcagacctacgtgacacagcagctgatcagggcagcagagatcagagcctccgccaatctggccgccaccaagatgagcgagtgcgtgctgggacagtccaagagggtggacttttgtggcaagggctatcacctgatgtctttcccacagagcgcccctcacggcgtggtgtttctgcacgtgacctacgtgccagcccaggagaagaacttcaccacagcaccagccatctgccacgatggaaaggcacactttcctagggagggcgtgttcgtgtctaacggcacccactggtttgtgacacagcgcaatttctacgagccacagatcatcaccacagacaatacattcgtgagcggcaactgtgatgtggtgatcggcatcgtgaacaataccgtgtatgatccactgcagcccgagctggactcctttaaggaggagctggataagtacttcaagaatcacacctctcccgacgtggatctgggcgacatctccggcatcaatgcctctgtggtgaacatccagaaggagatcgaccggctgaacgaggtggccaagaatctgaacgagagcctgatcgatctgcaggagctgggcaagtatgagcagtacatcaagggctctggcagagagaacctgtatttccagggaggaggaggcagcggatacatccctgaggcaccaagggacggacaggcctacgtgcgcaaggatggcgagtgggtgctgctgtccacctttctgggccatcatcaccaccaccaccaccactga

SEQ ID NO: 4880 - DNA, 3846 bp, Artificial Sequence
  Description of Artificial Sequence: Synthetic polynucleotide
atgggcatcctgccaagcccaggaatgcccgccctgctgtctctggtgagcctgctgtccgtgctgctgatgggatgcgtggcagagacaggcacacagtgcgtgaacctgaccacaaggacccagctgccccctgcctataccaattctttcacacggggcgtgtactatcccgacaaggtgtttagaagctccgtgctgcactccacacaggatctgtttctgcctttcttttctaacgtgacctggttccacgccatccacgtgtccggcaccaatggcacaaagcggttcgacaatcccgtgctgccttttaacgatggcgtgtacttcgccagcaccgagaagtccaacatcatcagaggctggatctttggcaccacactggactctaagacacagagcctgctgatcgtgaacaatgccaccaacgtggtgatcaaggtgtgcgagttccagttttgtaatgatccattcctgggcgtgtactatcacaagaacaataagtcctggatggagtctgagtttcgcgtgtattctagcgccaacaattgcacatttgagtacgtgagccagcccttcctgatggacctggagggcaagcagggcaatttcaagaacctgagggagttcgtgtttaagaatatcgatggctacttcaagatctacagcaagcacaccccaatcaacctggtgcgcgacctgccacagggattctccgccctggagccactggtggatctgcccatcggcatcaacatcacccggtttcagacactgctggccctgcacagatcctacctgacaccaggcgactcctctagcggatggaccgcaggagctgccgcctactatgtgggctatctgcagccccggaccttcctgctgaagtacaacgagaatggcaccatcacagacgcagtggattgcgccctggaccccctgtctgagacaaagtgtacactgaagagctttaccgtggagaagggcatctatcagacaagcaatttcagggtgcagcctaccgagtccatcgtgcgctttcccaatatcacaaacctgtgcccttttggcgaggtgttcaacgccaccagattcgccagcgtgtacgcctggaatcggaagagaatctccaactgcgtggccgactattctgtgctgtacaactccgcctctttcagcacctttaagtgctatggcgtgtctcccacaaagctgaatgatctgtgctttaccaacgtgtacgccgatagcttcgtgatcaggggagacgaagtgagacagatcgcaccaggacagacaggaaagatcgcagactacaattataagctgcctgacgatttcaccggctgcgtgatcgcctggaactcctcaaatctggattctaaagtgggcggcaactacaattatctgtacaggctgtttcgcaagtccaatctgaagccattcgagcgggacatctccacagagatctaccaggccggctctaccccctgcaatggcgtggagggctttaactgttatttccctctgcagtcttacggcttccagccaacaaacggcgtgggctatcagccctacagagtggtggtgctgtcctttgagctgctgcacgcaccagcaacagtgtgcggcccaaagaagtctaccaatctggtgaagaacaagtgcgtgaacttcaacttcaacggactgaccggcacaggcgtgctgaccgagagcaataagaagttcctgccttttcagcagttcggcagggacatcgcagataccacagacgccgtgcgcgaccctcagaccctggagatcctggacatcacaccatgcagcttcggcggcgtgtccgtgatcacaccaggcaccaatacatccaaccaggtggccgtgctgtatcaggacgtgaattgtaccgaggtgcccgtggcaatccacgcagatcagctgacccctacatggcgggtgtactctaccggcagcaacgtgttccagacaagagccggatgcctgatcggagcagagcacgtgaacaatagctatgagtgcgacatccctatcggcgccggcatctgtgccagctaccagacccagacaaactccccatctggagcaggctccgtggccagccagtccatcatcgcctataccatgagcctgggcgccgagaacagcgtggcctactccaacaattctatcgccatccctaccaacttcacaatcagcgtgaccacagagatcctgccagtgtctatgaccaagacaagcgtggactgcacaatgtatatctgtggcgatagcaccgagtgctccaacctgctgctgcagtacggctccttttgtacccagctgaatagagccctgacaggcatcgccgtggagcaggataagaacacacaggaggtgttcgcccaggtgaagcagatctacaagaccccacccatcaaggactttggcggcttcaacttcagccagatcctgcctgatccaagcaagccctccaagaggtcttttatcgaggacctgctgttcaacaaggtgaccctggccgatgccggcttcatcaagcagtatggagattgcctgggagacatcgcagcccgcgacctgatctgtgcccagaagtttaatggcctgaccgtgctgcctccactgctgacagatgagatgatcgcccagtacacatctgccctgctggccggcaccatcacaagcggatggaccttcggcgcaggagccgccctgcagatcccttttgccatgcagatggcctataggttcaacggcatcggcgtgacccagaatgtgctgtacgagaaccagaagctgatcgccaatcagtttaacagcgccatcggcaagatccaggactctctgtcctctacagccagcgccctgggcaagctgcaggatgtggtgaatcagaacgcccaggccctgaataccctggtgaagcagctgagctccaacttcggcgccatctctagcgtgctgaatgacatcctgagccggctggacccccctgaggcagaggtgcagatcgacaggctgatcacaggccgcctgcagagcctgcagacctacgtgacacagcagctgatcagggcagcagagatcagagcctccgccaatctggccgccaccaagatgagcgagtgcgtgctgggacagtccaagagggtggacttttgtggcaagggctatcacctgatgtctttcccacagagcgcccctcacggcgtggtgtttctgcacgtgacctacgtgccagcccaggagaagaacttcaccacagcaccagccatctgccacgatggaaaggcacactttcctagggagggcgtgttcgtgtctaacggcacccactggtttgtgacacagcgcaatttctacgagccacagatcatcaccacagacaatacattcgtgagcggcaactgtgatgtggtgatcggcatcgtgaacaataccgtgtatgatccactgcagcccgagctggactcctttaaggaggagctggataagtacttcaagaatcacacctctcccgacgtggatctgggcgacatctccggcatcaatgcctctgtggtgaacatccagaaggagatcgaccggctgaacgaggtggccaagaatctgaacgagagcctgatcgatctgcaggagctgggcaagtatgagcagtacatcaagggctctggcagagagaacctgtatttccagggaggaggaggcagcggatacatccctgaggcaccaagggacggacaggcctacgtgcgcaaggatggcgagtgggtgctgctgtccacctttctgggccatcatcaccaccaccaccaccactga

SEQ ID NO: 4881 - DNA, 3846 bp, Artificial Sequence
  Description of Artificial Sequence: Synthetic polynucleotide
atgggcatcctgccaagcccaggaatgcccgccctgctgtctctggtgagcctgctgtccgtgctgctgatgggatgcgtggcagagacaggcacacagtgcgtgaacctgaccacaaggacccagctgccccctgcctataccaattctttcacacggggcgtgtactatcccgacaaggtgtttagaagctccgtgctgcactccacacaggatctgtttctgcctttcttttctaacgtgacctggttccacgccatccacgtgtccggcaccaatggcacaaagcggttcgacaatcccgtgctgccttttaacgatggcgtgtacttcgccagcaccgagaagtccaacatcatcagaggctggatctttggcaccacactggactctaagacacagagcctgctgatcgtgaacaatgccaccaacgtggtgatcaaggtgtgcgagttccagttttgtaatgatccattcctgggcgtgtactatcacaagaacaataagtcctggatggagtctgagtttcgcgtgtattctagcgccaacaattgcacatttgagtacgtgagccagcccttcctgatggacctggagggcaagcagggcaatttcaagaacctgagggagttcgtgtttaagaatatcgatggctacttcaagatctacagcaagcacaccccaatcaacctggtgcgcgacctgccacagggattctccgccctggagccactggtggatctgcccatcggcatcaacatcacccggtttcagacactgctggccctgcacagatcctacctgacaccaggcgactcctctagcggatggaccgcaggagctgccgcctactatgtgggctatctgcagccccggaccttcctgctgaagtacaacgagaatggcaccatcacagacgcagtggattgcgccctggaccccctgtctgagacaaagtgtacactgaagagctttaccgtggagaagggcatctatcagacaagcaatttcagggtgcagcctaccgagtccatcgtgcgctttcccaatatcacaaacctgtgcccttttggcgaggtgttcaacgccaccagattcgccagcgtgtacgcctggaatcggaagagaatctccaactgcgtggccgactattctgtgctgtacaactccgcctctttcagcacctttaagtgctatggcgtgtctcccacaaagctgaatgatctgtgctttaccaacgtgtacgccgatagcttcgtgatcaggggagacgaagtgagacagatcgcaccaggacagacaggaaagatcgcagactacaattataagctgcctgacgatttcaccggctgcgtgatcgcctggaactccaacaatctggattctaaagtgggcggcaactacaattatctgtacaggctgtttcgcaagtccaatctgaagccattcgagcgggacatctccacagagatctaccaggccggctctaccccctgcaatggcgtggagggctttaactgttatttccctctgcagtcttacggcttccagccaacaaacggcgtgggctatcagccctacagagtggtggtgctgtcctttgagctgctgcacgcaccagcaacagtgtgcggcccaaagaagtctaccaatctggtgaagaacaagtgcgtgaacttcaacttcaacggactgaccggcacaggcgtgctgaccgagagcaataagaagttcctgccttttcagcagttcggcagggacatcgcagataccacagacgccgtgcgcgaccctcagaccctggagatcctggacatcacaccatgcagcttcggcggcgtgtccgtgatcacaccaggcaccaatacatccaaccaggtggccgtgctgtatcaggacgtgaattgtaccgaggtgcccgtggcaatccacgcagatcagctgacccctacatggcgggtgtactctaccggcagcaacgtgttccagacaagagccggatgcctgatcggagcagagcacgtgaacaatagctatgagtgcgacatccctatcggcgccggcatctgtgccagctaccagacccagacaaactccccatctggagcaggctccgtggccagccagtccatcatcgcctataccatgagcctgggcgccgagaacagcgtggcctactccaacaattctatcgccatccctaccaacttcacaatcagcgtgaccacagagatcctgccagtgtctatgaccaagacaagcgtggactgcacaatgtatatctgtggcgatagcaccgagtgctccaacctgctgctgcagtacggctccttttgtacccagctgaatagagccctgacaggcatcgccgtggagcaggataagaacacacaggaggtgttcgcccaggtgaagcagatctacaagaccccacccatcaaggactttggcggcttcaacttcagccagatcctgcctgatccaagcaagccctccaagaggtcttttatcgaggacctgctgttcaacaaggtgaccctggccgatgccggcttcatcaagcagtatggagattgcctgggagacatcgcagcccgcgacctgatctgtgcccagaagtttaatggcctgaccgtgctgcctccactgctgacagatgagatgatcgcccagtacacatctgccctgctggccggcaccatcacaagcggatggaccttcggcgcaggagccgccctgcagatcccttttgccatgcagatggcctataggttcaacggcatcggcgtgacccagaatgtgctgtacgagaaccagaagctgatcgccaatcagtttaacagcgccatcggcaagatccaggactctctgtcctctacagccagcgccctgggcaagctgcaggatgtggtgaatcagaacgcccaggccctgaataccctggtgaagcagctgagctcctcgttcggcgccatctctagcgtgctgaatgacatcctgagccggctggacccccctgaggcagaggtgcagatcgacaggctgatcacaggccgcctgcagagcctgcagacctacgtgacacagcagctgatcagggcagcagagatcagagcctccgccaatctggccgccaccaagatgagcgagtgcgtgctgggacagtccaagagggtggacttttgtggcaagggctatcacctgatgtctttcccacagagcgcccctcacggcgtggtgtttctgcacgtgacctacgtgccagcccaggagaagaacttcaccacagcaccagccatctgccacgatggaaaggcacactttcctagggagggcgtgttcgtgtctaacggcacccactggtttgtgacacagcgcaatttctacgagccacagatcatcaccacagacaatacattcgtgagcggcaactgtgatgtggtgatcggcatcgtgaacaataccgtgtatgatccactgcagcccgagctggactcctttaaggaggagctggataagtacttcaagaatcacacctctcccgacgtggatctgggcgacatctccggcatcaatgcctctgtggtgaacatccagaaggagatcgaccggctgaacgaggtggccaagaatctgaacgagagcctgatcgatctgcaggagctgggcaagtatgagcagtacatcaagggctctggcagagagaacctgtatttccagggaggaggaggcagcggatacatccctgaggcaccaagggacggacaggcctacgtgcgcaaggatggcgagtgggtgctgctgtccacctttctgggccatcatcaccaccaccaccaccactga

SEQ ID NO: 4882 - DNA, 3846 bp, Artificial Sequence
  Description of Artificial Sequence: Synthetic polynucleotide
atgggcatcctgccaagcccaggaatgcccgccctgctgtctctggtgagcctgctgtccgtgctgctgatgggatgcgtggcagagacaggcacacagtgcgtgaacctgaccacaaggacccagctgccccctgcctataccaattctttcacacggggcgtgtactatcccgacaaggtgtttagaagctccgtgctgcactccacacaggatctgtttctgcctttcttttctaacgtgacctggttccacgccatccacgtgtccggcaccaatggcacaaagcggttcgacaatcccgtgctgccttttaacgatggcgtgtacttcgccagcaccgagaagtccaacatcatcagaggctggatctttggcaccacactggactctaagacacagagcctgctgatcgtgaacaatgccaccaacgtggtgatcaaggtgtgcgagttccagttttgtaatgatccattcctgggcgtgtactatcacaagaacaataagtcctggatggagtctgagtttcgcgtgtattctagcgccaacaattgcacatttgagtacgtgagccagcccttcctgatggacctggagggcaagcagggcaatttcaagaacctgagggagttcgtgtttaagaatatcgatggctacttcaagatctacagcaagcacaccccaatcaacctggtgcgcgacctgccacagggattctccgccctggagccactggtggatctgcccatcggcatcaacatcacccggtttcagacactgctggccctgcacagatcctacctgacaccaggcgactcctctagcggatggaccgcaggagctgccgcctactatgtgggctatctgcagccccggaccttcctgctgaagtacaacgagaatggcaccatcacagacgcagtggattgcgccctggaccccctgtctgagacaaagtgtacactgaagagctttaccgtggagaagggcatctatcagacaagcaatttcagggtgcagcctaccgagtccatcgtgcgctttcccaatatcacaaacctgtgcccttttggcgaggtgttcaacgccaccagattcgccagcgtgtacgcctggaatcggaagagaatctccaactgcgtggccgactattctgtgctgtacaactccgcctctttcagcacctttaagtgctatggcgtgtctcccacaaagctgaatgatctgtgctttaccaacgtgtacgccgatagcttcgtgatcaggggagacgaagtgagacagatcgcaccaggacagacaggaaagatcgcagactacaattataagctgcctgacgatttcaccggctgcgtgatcgcctggaactccaacaatctggattctaaagtgggcggcaactacaattatctgtacaggctgtttcgcaagtccaatctgaagccattcgagcgggacatctccatggagatctaccaggccggctctaccccctgcaatggcgtggagggctttaactgttatttccctctgcagtcttacggcttccagccaacaaacggcgtgggctatcagccctacagagtggtggtgctgtcctttgagctgctgcacgcaccagcaacagtgtgcggcccaaagaagtctaccaatctggtgaagaacaagtgcgtgaacttcaacttcaacggactgaccggcacaggcgtgctgaccgagagcaataagaagttcctgccttttcagcagttcggcagggacatcgcagataccacagacgccgtgcgcgaccctcagaccctggagatcctggacatcacaccatgcagcttcggcggcgtgtccgtgatcacaccaggcaccaatacatccaaccaggtggccgtgctgtatcaggacgtgaattgtaccgaggtgcccgtggcaatccacgcagatcagctgacccctacatggcgggtgtactctaccggcagcaacgtgttccagacaagagccggatgcctgatcggagcagagcacgtgaacaatagctatgagtgcgacatccctatcggcgccggcatctgtgccagctaccagacccagacaaactccccatctggagcaggctccgtggccagccagtccatcatcgcctataccatgagcctgggcgccgagaacagcgtggcctactccaacaattctatcgccatccctaccaacttcacaatcagcgtgaccacagagatcctgccagtgtctatgaccaagacaagcgtggactgcacaatgtatatctgtggcgatagcaccgagtgctccaacctgctgctgcagtacggctccttttgtacccagctgaatagagccctgacaggcatcgccgtggagcaggataagaacacacaggaggtgttcgcccaggtgaagcagatctacaagaccccacccatcaaggactttggcggcttcaacttcagccagatcctgcctgatccaagcaagccctccaagaggtcttttatcgaggacctgctgttcaacaaggtgaccctggccgatgccggcttcatcaagcagtatggagattgcctgggagacatcgcagcccgcgacctgatctgtgcccagaagtttaatggcctgaccgtgctgcctccactgctgacagatgagatgatcgcccagtacacatctgccctgctggccggcaccatcacaagcggatggaccttcggcgcaggagccgccctgcagatcccttttgccatgcagatggcctataggttcaacggcatcggcgtgacccagaatgtgctgtacgagaaccagaagctgatcgccaatcagtttaacagcgccatcggcaagatccaggactctctgtcctctacagccagcgccctgggcaagctgcaggatgtggtgaatcagaacgcccaggccctgaataccctggtgaagcagctgagctccaacttcggcgccatctctagcgtgctgaatgacatcctgagccggctggacccccctgaggcagaggtgcagatcgacaggctgatcacaggccgcctgcagagcctgcagacctacgtgacacagcagctgatcagggcagcagagatcagagcctccgccaatctggccgccaccaagatgagcgagtgcgtgctgggacagtccaagagggtggacttttgtggcaagggctatcacctgatgtctttcccacagagcgcccctcacggcgtggtgtttctgcacgtgacctacgtgccagcccaggagaagaacttcaccacagcaccagccatctgccacgatggaaaggcacactttcctagggagggcgtgttcgtgtctaacggcacccactggtttgtgacacagcgcaatttctacgagccacagatcatcaccacagacaatacattcgtgagcggcaactgtgatgtggtgatcggcatcgtgaacaataccgtgtatgatccactgcagcccgagctggactcctttaaggaggagctggataagtacttcaagaatcacacctctcccgacgtggatctgggcgacatctccggcatcaatgcctctgtggtgaacatccagaaggagatcgaccggctgaacgaggtggccaagaatctgaacgagagcctgatcgatctgcaggagctgggcaagtatgagcagtacatcaagggctctggcagagagaacctgtatttccagggaggaggaggcagcggatacatccctgaggcaccaagggacggacaggcctacgtgcgcaaggatggcgagtgggtgctgctgtccacctttctgggccatcatcaccaccaccaccaccactga

SEQ ID NO: 4883 - DNA, 3846 bp, Artificial Sequence
  Description of Artificial Sequence: Synthetic polynucleotide
atgggcatcctgccaagcccaggaatgcccgccctgctgtctctggtgagcctgctgtccgtgctgctgatgggatgcgtggcagagacaggcacacagtgcgtgaacctgaccacaaggacccagctgccccctgcctataccaattctttcacacggggcgtgtactatcccgacaaggtgtttagaagctccgtgctgcactccacacaggatctgtttctgcctttcttttctaacgtgacctggttccacgccatccacgtgtccggcaccaatggcacaaagcggttcgacaatcccgtgctgccttttaacgatggcgtgtacttcgccagcaccgagaagtccaacatcatcagaggctggatctttggcaccacactggactctaagacacagagcctgctgatcgtgaacaatgccaccaacgtggtgatcaaggtgtgcgagttccagttttgtaatgatccattcctgggcgtgtactatcacaagaacaataagtcctggatggagtctgagtttcgcgtgtattctagcgccaacaattgcacatttgagtacgtgagccagcccttcctgatggacctggagggcaagcagggcaatttcaagaacctgagggagttcgtgtttaagaatatcgatggctacttcaagatctacagcaagcacaccccaatcaacctggtgcgcgacctgccacagggattctccgccctggagccactggtggatctgcccatcggcatcaacatcacccggtttcagacactgctggccctgcacagatcctacctgacaccaggcgactcctctagcggatggaccgcaggagctgccgcctactatgtgggctatctgcagccccggaccttcctgctgaagtacaacgagaatggcaccatcacagacgcagtggattgcgccctggaccccctgtctgagacaaagtgtacactgaagagctttaccgtggagaagggcatctatcagacaagcaatttcagggtgcagcctaccgagtccatcgtgcgctttcccaatatcacaaacctgtgcccttttggcgaggtgttcaacgccaccagattcgccagcgtgtacgcctggaatcggaagagaatctccaactgcgtggccgactattctgtgctgtacaactccgcctctttcagcacctttaagtgctatggcgtgtctcccacaaagctgaatgatctgtgctttaccaacgtgtacgccgatagcttcgtgatcaggggagacgaagtgagacagatcgcaccaggacagacaggaaagatcgcagactacaattataagctgcctgacgatttcaccggctgcgtgatcgcctggaactccaacaatctggattctaaagtgggcggcaactacaattatctgtacaggctgtttcgcaagtccaatctgaagccattcgagcgggacatctccacagagatctaccaggccggctctaccccctgcaatggcgtggagggctttaactgttatttccctctgcagtcttacggcttccagccaacaaacggcgtgggctatcagccctacagagtggtggtgctgtcctttgagctgctgcacgcaccagcaacagtgtgcggcccaaagaagtctaccaatctggtgaagaacaagtgcgtgaacttcaacttcaacggactgaccggcacaggcgtgctgaccgagagcaataagaagttcctgccttttcagcagttcggcagggacatcgcagataccacagacgccgtgcgcgaccctcagaccctggagatcctggacatcacaccatgcagcttcggcggcgtgtccgtgatcacaccaggcaccaatacatccaaccaggtggccgtgctgtatcaggacgtgaattgtaccgaggtgcccgtggcaatccacgcagatcagctgacccctacatggcgggtgtactctaccggcagcaacgtgttccagacaagagccggatgcctgatcggagcagagcacgtgaacaatagctatgagtgcgacatccctatcggcgccggcatctgtgccagctaccagacccagacaaactccccatctggagcaggctccgtggccagccagtccatcatcgcctataccatgagcctgggcgccgagaacagcgtggcctactccaacaattctatcgccatccctaccaacttcacaatcagcgtgaccacagagatcctgccagtgtctatgaccaagacaagcgtggactgcacaatgtatatctgtggcgatagcaccgagtgctccaacctgctgctgcagtacggctccttttgtacccagctgaatagagccctgacaggcatcgccgtggagcaggataagaacacacaggaggtgttcgcccaggtgaagcagatctacaagaccccacccatcaaggactttggcggcttcaacttcagccagatcctgcctgatccaagcaagccctccaagaggtcttttatcgaggacctgctgttcaacaaggtgaccctggccgatgccggcttcatcaagcagtatggagattgcctgggagacatcgcagcccgcgacctgatctgtgcccagaagtttaatggcctgaccgtgctgcctccactgctgacagatgagatgatcgcccagtacacatctgccctgctggccggcaccatcacaagcggatggaccttcggcgcaggagccgccctgcagatcccttttgccatgcagatggcctataggttcaacggcatcggcgtgacccagaatgtgctgtacgagaaccagaagctgatcgccaatcagtttaacagcgccatcggcaagatccaggactctctgtcctctacagccagcgccctgggcaagctgcaggatgtggtgaatcagaacgcccaggccctgaataccctggtgaagcagctgagctccaacttcggcgccatctctagcgtgctgaatgacatcctgagccggctggacccccctgaggcagaggtgcagatcgacaggctgatcacaggccgcctgcagagcctgcagacctacgtgacacagcagctgatcagggcagcagagatcagagcctccgccaatctggccgccaccaagatgagcgagtgcgtgctgggacagtccaagagggtggacttttgtggcaagggctatcacctgatgtctttcccacagagcgcccctcacggcgtggtgtttctgcacgtgacctacgtgccagcccaggggaagaacttcaccacagcaccagccatctgccacgatggaaaggcacactttcctagggagggcgtgttcgtgtctaacggcacccactggtttgtgacacagcgcaatttctacgagccacagatcatcaccacagacaatacattcgtgagcggcaactgtgatgtggtgatcggcatcgtgaacaataccgtgtatgatccactgcagcccgagctggactcctttaaggaggagctggataagtacttcaagaatcacacctctcccgacgtggatctgggcgacatctccggcatcaatgcctctgtggtgaacatccagaaggagatcgaccggctgaacgaggtggccaagaatctgaacgagagcctgatcgatctgcaggagctgggcaagtatgagcagtacatcaagggctctggcagagagaacctgtatttccagggaggaggaggcagcggatacatccctgaggcaccaagggacggacaggcctacgtgcgcaaggatggcgagtgggtgctgctgtccacctttctgggccatcatcaccaccaccaccaccactga

SEQ ID NO: 4884 - DNA, 3846 bp, Artificial Sequence
  Description of Artificial Sequence: Synthetic polynucleotide
atgggcatcctgccaagcccaggaatgcccgccctgctgtctctggtgagcctgctgtccgtgctgctgatgggatgcgtggcagagacaggcacacagtgcgtgaacctgaccacaaggacccagctgccccctgcctataccaattctttcacacggggcgtgtactatcccgacaaggtgtttagaagctccgtgctgcactccacacaggatctgtttctgcctttcttttctaacgtgacctggttccacgccatccacgtgtccggcaccaatggcacaaagcggttcgacaatcccgtgctgccttttaacgatggcgtgtacttcgccagcaccgagaagtccaacatcatcagaggctggatctttggcaccacactggactctaagacacagagcctgctgatcgtgaacaatgccaccaacgtggtgatcaaggtgtgcgagttccagttttgtaatgatccattcctgggcgtgtactatcacaagaacaataagtcctggatggagtctgagtttcgcgtgtattctagcgccaacaattgcacatttgagtacgtgagccagcccttcctgatggacctggagggcaagcagggcaatttcaagaacctgagggagttcgtgtttaagaatatcgatggctacttcaagatctacagcaagcacaccccaatcaacctggtgcgcgacctgccacagggattctccgccctggagccactggtggatctgcccatcggcatcaacatcacccggtttcagacactgctggccctgcacagatcctacctgacaccaggcgactcctctagcggatggaccgcaggagctgccgcctactatgtgggctatctgcagccccggaccttcctgctgaagtacaacgagaatggcaccatcacagacgcagtggattgcgccctggaccccctgtctgagacaaagtgtacactgaagagctttaccgtggagaagggcatctatcagacaagcaatttcagggtgcagcctaccgagtccatcgtgcgctttcccaatatcacaaacctgtgcccttttggcgaggtgttcaacgccaccagattcgccagcgtgtacgcctggaatcggaagagaatctccaactgcgtggccgactattctgtgctgtacaactccgcctctttcagcacctttaagtgctatggcgtgtctcccacaaagctgaatgatctgtgctttaccaacgtgtacgccgatagcttcgtgatcaggggagacgaagtgagacagatcgcaccaggacagacaggaaagatcgcagactacaattataagctgcctgacgatttcaccggctgcgtgatcgcctggaactccaacaatctggattctaaagtgggcggcaactacaattatctgtacaggctgtttcgcaagtccaatctgaagccattcgagcgggacatctccacagagtggtaccaggccggctctaccccctgcaatggcgtggagggctttaactgttatttccctctgcagtcttacggcttccagccaacaaacggcgtgggctatcagccctacagagtggtggtgctgtcctttgagctgctgcacgcaccagcaacagtgtgcggcccaaagaagtctaccaatctggtgaagaacaagtgcgtgaacttcaacttcaacggactgaccggcacaggcgtgctgaccgagagcaataagaagttcctgccttttcagcagttcggcagggacatcgcagataccacagacgccgtgcgcgaccctcagaccctggagatcctggacatcacaccatgcagcttcggcggcgtgtccgtgatcacaccaggcaccaatacatccaaccaggtggccgtgctgtatcaggacgtgaattgtaccgaggtgcccgtggcaatccacgcagatcagctgacccctacatggcgggtgtactctaccggcagcaacgtgttccagacaagagccggatgcctgatcggagcagagcacgtgaacaatagctatgagtgcgacatccctatcggcgccggcatctgtgccagctaccagacccagacaaactccccatctggagcaggctccgtggccagccagtccatcatcgcctataccatgagcctgggcgccgagaacagcgtggcctactccaacaattctatcgccatccctaccaacttcacaatcagcgtgaccacagagatcctgccagtgtctatgaccaagacaagcgtggactgcacaatgtatatctgtggcgatagcaccgagtgctccaacctgctgctgcagtacggctccttttgtacccagctgaatagagccctgacaggcatcgccgtggagcaggataagaacacacaggaggtgttcgcccaggtgaagcagatctacaagaccccacccatcaaggactttggcggcttcaacttcagccagatcctgcctgatccaagcaagccctccaagaggtcttttatcgaggacctgctgttcaacaaggtgaccctggccgatgccggcttcatcaagcagtatggagattgcctgggagacatcgcagcccgcgacctgatctgtgcccagaagtttaatggcctgaccgtgctgcctccactgctgacagatgagatgatcgcccagtacacatctgccctgctggccggcaccatcacaagcggatggaccttcggcgcaggagccgccctgcagatcccttttgccatgcagatggcctataggttcaacggcatcggcgtgacccagaatgtgctgtacgagaaccagaagctgatcgccaatcagtttaacagcgccatcggcaagatccaggactctctgtcctctacagccagcgccctgggcaagctgcaggatgtggtgaatcagaacgcccaggccctgaataccctggtgaagcagctgagctccaacttcggcgccatctctagcgtgctgaatgacatcctgagccggctggacccccctgaggcagaggtgcagatcgacaggctgatcacaggccgcctgcagagcctgcagacctacgtgacacagcagctgatcagggcagcagagatcagagcctccgccaatctggccgccaccaagatgagcgagtgcgtgctgggacagtccaagagggtggacttttgtggcaagggctatcacctgatgtctttcccacagagcgcccctcacggcgtggtgtttctgcacgtgacctacgtgccagcccaggagaagaacttcaccacagcaccagccatctgccacgatggaaaggcacactttcctagggagggcgtgttcgtgtctaacggcacccactggtttgtgacacagcgcaatttctacgagccacagatcatcaccacagacaatacattcgtgagcggcaactgtgatgtggtgatcggcatcgtgaacaataccgtgtatgatccactgcagcccgagctggactcctttaaggaggagctggataagtacttcaagaatcacacctctcccgacgtggatctgggcgacatctccggcatcaatgcctctgtggtgaacatccagaaggagatcgaccggctgaacgaggtggccaagaatctgaacgagagcctgatcgatctgcaggagctgggcaagtatgagcagtacatcaagggctctggcagagagaacctgtatttccagggaggaggaggcagcggatacatccctgaggcaccaagggacggacaggcctacgtgcgcaaggatggcgagtgggtgctgctgtccacctttctgggccatcatcaccaccaccaccaccactga

SEQ ID NO: 4885 - DNA, 3846 bp, Artificial Sequence
  Description of Artificial Sequence: Synthetic polynucleotide
atgggcatcctgccaagcccaggaatgcccgccctgctgtctctggtgagcctgctgtccgtgctgctgatgggatgcgtggcagagacaggcacacagtgcgtgaacctgaccacaaggacccagctgccccctgcctataccaattctttcacacggggcgtgtactatcccgacaaggtgtttagaagctccgtgctgcactccacacaggatctgtttctgcctttcttttctaacgtgacctggttccacgccatccacgtgtccggcaccaatggcacaaagcggttcgacaatcccgtgctgccttttaacgatggcgtgtacttcgccagcaccgagaagtccaacatcatcagaggctggatctttggcaccacactggactctaagacacagagcctgctgatcgtgaacaatgccaccaacgtggtgatcaaggtgtgcgagttccagttttgtaatgatccattcctgggcgtgtactatcacaagaacaataagtcctggatggagtctgagtttcgcgtgtattctagcgccaacaattgcacatttgagtacgtgagccagcccttcctgatggacctggagggcaagcagggcaatttcaagaacctgagggagttcgtgtttaagaatatcgatggctacttcaagatctacagcaagcacaccccaatcaacctggtgcgcgacctgccacagggattctccgccctggagccactggtggatctgcccatcggcatcaacatcacccggtttcagacactgctggccctgcacagatcctacctgacaccaggcgactcctctagcggatggaccgcaggagctgccgcctactatgtgggctatctgcagccccggaccttcctgctgaagtacaacgagaatggcaccatcacagacgcagtggattgcgccctggaccccctgtctgagacaaagtgtacactgaagagctttaccgtggagaagggcatctatcagacaagcaatttcagggtgcagcctaccgagtccatcgtgcgctttcccaatatcacaaacctgtgcccttttggcgaggtgttcaacgccaccagattcgccagcgtgtacgcctggaatcggaagagaatctccaactgcgtggccgactattctgtgctgtacaactccaaatctttcagcacctttaagtgctatggcgtgtctcccacaaagctgaatgatctgtgctttaccaacgtgtacgccgatagcttcgtgatcaggggagacgaagtgagacagatcgcaccaggacagacaggaaagatcgcagactacaattataagctgcctgacgatttcaccggctgcgtgatcgcctggaactccaacaatctggattctaaagtgggcggcaactacaattatctgtacaggctgtttcgcaagtccaatctgaagccattcgagcgggacatctccacagagatctaccaggccggctctaccccctgcaatggcgtggagggctttaactgttatttccctctgcagtcttacggcttccagccaacaaacggcgtgggctatcagccctacagagtggtggtgctgtcctttgagctgctgcacgcaccagcaacagtgtgcggcccaaagaagtctaccaatctggtgaagaacaagtgcgtgaacttcaacttcaacggactgaccggcacaggcgtgctgaccgagagcaataagaagttcctgccttttcagcagttcggcagggacatcgcagataccacagacgccgtgcgcgaccctcagaccctggagatcctggacatcacaccatgcagcttcggcggcgtgtccgtgatcacaccaggcaccaatacatccaaccaggtggccgtgctgtatcaggacgtgaattgtaccgaggtgcccgtggcaatccacgcagatcagctgacccctacatggcgggtgtactctaccggcagcaacgtgttccagacaagagccggatgcctgatcggagcagagcacgtgaacaatagctatgagtgcgacatccctatcggcgccggcatctgtgccagctaccagacccagacaaactccccatctggagcaggctccgtggccagccagtccatcatcgcctataccatgagcctgggcgccgagaacagcgtggcctactccaacaattctatcgccatccctaccaacttcacaatcagcgtgaccacagagatcctgccagtgtctatgaccaagacaagcgtggactgcacaatgtatatctgtggcgatagcaccgagtgctccaacctgctgctgcagtacggctccttttgtacccagctgaatagagccctgacaggcatcgccgtggagcaggataagaacacacaggaggtgttcgcccaggtgaagcagatctacaagaccccacccatcaaggactttggcggcttcaacttcagccagatcctgcctgatccaagcaagccctccaagaggtcttttatcgaggacctgctgttcaacaaggtgaccctggccgatgccggcttcatcaagcagtatggagattgcctgggagacatcgcagcccgcgacctgatctgtgcccagaagtttaatggcctgaccgtgctgcctccactgctgacagatgagatgatcgcccagtacacatctgccctgctggccggcaccatcacaagcggatggaccttcggcgcaggagccgccctgcagatcccttttgccatgcagatggcctataggttcaacggcatcggcgtgacccagaatgtgctgtacgagaaccagaagctgatcgccaatcagtttaacagcgccatcggcaagatccaggactctctgtcctctacagccagcgccctgggcaagctgcaggatgtggtgaatcagaacgcccaggccctgaataccctggtgaagcagctgagctccaacttcggcgccatctctagcgtgctgaatgacatcctgagccggctggacccccctgaggcagaggtgcagatcgacaggctgatcacaggccgcctgcagagcctgcagacctacgtgacacagcagctgatcagggcagcagagatcagagcctccgccaatctggccgccaccaagatgagcgagtgcgtgctgggacagtccaagagggtggacttttgtggcaagggctatcacctgatgtctttcccacagagcgcccctcacggcgtggtgtttctgcacgtgacctacgtgccagcccaggagaagaacttcaccacagcaccagccatctgccacgatggaaaggcacactttcctagggagggcgtgttcgtgtctaacggcacccactggtttgtgacacagcgcaatttctacgagccacagatcatcaccacagacaatacattcgtgagcggcaactgtgatgtggtgatcggcatcgtgaacaataccgtgtatgatccactgcagcccgagctggactcctttaaggaggagctggataagtacttcaagaatcacacctctcccgacgtggatctgggcgacatctccggcatcaatgcctctgtggtgaacatccagaaggagatcgaccggctgaacgaggtggccaagaatctgaacgagagcctgatcgatctgcaggagctgggcaagtatgagcagtacatcaagggctctggcagagagaacctgtatttccagggaggaggaggcagcggatacatccctgaggcaccaagggacggacaggcctacgtgcgcaaggatggcgagtgggtgctgctgtccacctttctgggccatcatcaccaccaccaccaccactga

SEQ ID NO: 4886 - DNA, 3846 bp, Artificial Sequence
  Description of Artificial Sequence: Synthetic polynucleotide
atgggcatcctgccaagcccaggaatgcccgccctgctgtctctggtgagcctgctgtccgtgctgctgatgggatgcgtggcagagacaggcacacagtgcgtgaacctgaccacaaggacccagctgccccctgcctataccaattctttcacacggggcgtgtactatcccgacaaggtgtttagaagctccgtgctgcactccacacaggatctgtttctgcctttcttttctaacgtgacctggttccacgccatccacgtgtccggcaccaatggcacaaagcggttcgacaatcccgtgctgccttttaacgatggcgtgtacttcgccagcaccgagaagtccaacatcatcagaggctggatctttggcaccacactggactctaagacacagagcctgctgatcgtgaacaatgccaccaacgtggtgatcaaggtgtgcgagttccagttttgtaatgatccattcctgggcgtgtactatcacaagaacaataagtcctggatggagtctgagtttcgcgtgtattctagcgccaacaattgcacatttgagtacgtgagccagcccttcctgatggacctggagggcaagcagggcaatttcaagaacctgagggagttcgtgtttaagaatatcgatggctacttcaagatctacagcaagcacaccccaatcaacctggtgcgcgacctgccacagggattctccgccctggagccactggtggatctgcccatcggcatcaacatcacccggtttcagacactgctggccctgcacagatcctacctgacaccaggcgactcctctagcggatggaccgcaggagctgccgcctactatgtgggctatctgcagccccggaccttcctgctgaagtacaacgagaatggcaccatcacagacgcagtggattgcgccctggaccccctgtctgagacaaagtgtacactgaagagctttaccgtggagaagggcatctatcagacaagcaatttcagggtgcagcctaccgagtccatcgtgcgctttcccaatatcacaaacctgtgcccttttggcgaggtgttcaacgccaccagattcgttagcgtgtacgcctggaatcggaagagaatctccaactgcgtggccgactattctgtgctgtacaactccgcctctttcagcacctttaagtgctatggcgtgtctcccacaaagctgaatgatctgtgctttaccaacgtgtacgccgatagcttcgtgatcaggggagacgaagtgagacagatcgcaccaggacagacaggaaagatcgcagactacaattataagctgcctgacgatttcaccggctgcgtgatcgcctggaactccaacaatctggattctaaagtgggcggcaactacaattatctgtacaggctgtttcgcaagtccaatctgaagccattcgagcgggacatctccacagagatctaccaggccggctctaccccctgcaatggcgtggagggctttaactgttatttccctctgcagtcttacggcttccagccaacaaacggcgtgggctatcagccctacagagtggtggtgctgtcctttgagctgctgcacgcaccagcaacagtgtgcggcccaaagaagtctaccaatctggtgaagaacaagtgcgtgaacttcaacttcaacggactgaccggcacaggcgtgctgaccgagagcaataagaagttcctgccttttcagcagttcggcagggacatcgcagataccacagacgccgtgcgcgaccctcagaccctggagatcctggacatcacaccatgcagcttcggcggcgtgtccgtgatcacaccaggcaccaatacatccaaccaggtggccgtgctgtatcaggacgtgaattgtaccgaggtgcccgtggcaatccacgcagatcagctgacccctacatggcgggtgtactctaccggcagcaacgtgttccagacaagagccggatgcctgatcggagcagagcacgtgaacaatagctatgagtgcgacatccctatcggcgccggcatctgtgccagctaccagacccagacaaactccccatctggagcaggctccgtggccagccagtccatcatcgcctataccatgagcctgggcgccgagaacagcgtggcctactccaacaattctatcgccatccctaccaacttcacaatcagcgtgaccacagagatcctgccagtgtctatgaccaagacaagcgtggactgcacaatgtatatctgtggcgatagcaccgagtgctccaacctgctgctgcagtacggctccttttgtacccagctgaatagagccctgacaggcatcgccgtggagcaggataagaacacacaggaggtgttcgcccaggtgaagcagatctacaagaccccacccatcaaggactttggcggcttcaacttcagccagatcctgcctgatccaagcaagccctccaagaggtcttttatcgaggacctgctgttcaacaaggtgaccctggccgatgccggcttcatcaagcagtatggagattgcctgggagacatcgcagcccgcgacctgatctgtgcccagaagtttaatggcctgaccgtgctgcctccactgctgacagatgagatgatcgcccagtacacatctgccctgctggccggcaccatcacaagcggatggaccttcggcgcaggagccgccctgcagatcccttttgccatgcagatggcctataggttcaacggcatcggcgtgacccagaatgtgctgtacgagaaccagaagctgatcgccaatcagtttaacagcgccatcggcaagatccaggactctctgtcctctacagccagcgccctgggcaagctgcaggatgtggtgaatcagaacgcccaggccctgaataccctggtgaagcagctgagctccaacttcggcgccatctctagcgtgctgaatgacatcctgagccggctggacccccctgaggcagaggtgcagatcgacaggctgatcacaggccgcctgcagagcctgcagacctacgtgacacagcagctgatcagggcagcagagatcagagcctccgccaatctggccgccaccaagatgagcgagtgcgtgctgggacagtccaagagggtggacttttgtggcaagggctatcacctgatgtctttcccacagagcgcccctcacggcgtggtgtttctgcacgtgacctacgtgccagcccaggagaagaacttcaccacagcaccagccatctgccacgatggaaaggcacactttcctagggagggcgtgttcgtgtctaacggcacccactggtttgtgacacagcgcaatttctacgagccacagatcatcaccacagacaatacattcgtgagcggcaactgtgatgtggtgatcggcatcgtgaacaataccgtgtatgatccactgcagcccgagctggactcctttaaggaggagctggataagtacttcaagaatcacacctctcccgacgtggatctgggcgacatctccggcatcaatgcctctgtggtgaacatccagaaggagatcgaccggctgaacgaggtggccaagaatctgaacgagagcctgatcgatctgcaggagctgggcaagtatgagcagtacatcaagggctctggcagagagaacctgtatttccagggaggaggaggcagcggatacatccctgaggcaccaagggacggacaggcctacgtgcgcaaggatggcgagtgggtgctgctgtccacctttctgggccatcatcaccaccaccaccaccactga

SEQ ID NO: 4887 - DNA, 3846 bp, Artificial Sequence
  Description of Artificial Sequence: Synthetic polynucleotide
atgggcatcctgccaagcccaggaatgcccgccctgctgtctctggtgagcctgctgtccgtgctgctgatgggatgcgtggcagagacaggcacacagtgcgtgaacctgaccacaaggacccagctgccccctgcctataccaattctttcacacggggcgtgtactatcccgacaaggtgtttagaagctccgtgctgcactccacacaggatctgtttctgcctttcttttctaacgtgacctggttccacgccatccacgtgtccggcaccaatggcacaaagcggttcgacaatcccgtgctgccttttaacgatggcgtgtacttcgccagcaccgagaagtccaacatcatcagaggctggatctttggcaccacactggactctaagacacagagcctgctgatcgtgaacaatgccaccaacgtggtgatcaaggtgtgcgagttccagttttgtaatgatccattcctgggcgtgtactatcacaagaacaataagtcctggatggagtctgagtttcgcgtgtattctagcgccaacaattgcacatttgagtacgtgagccagcccttcctgatggacctggagggcaagcagggcaatttcaagaacctgagggagttcgtgtttaagaatatcgatggctacttcaagatctacagcaagcacaccccaatcaacctggtgcgcgacctgccacagggattctccgccctggagccactggtggatctgcccatcggcatcaacatcacccggtttcagacactgctggccctgcacagatcctacctgacaccaggcgactcctctagcggatggaccgcaggagctgccgcctactatgtgggctatctgcagccccggaccttcctgctgaagtacaacgagaatggcaccatcacagacgcagtggattgcgccctggaccccctgtctgagacaaagtgtacactgaagagctttaccgtggagaagggcatctatcagacaagcaatttcagggtgcagcctaccgagtccatcgtgcgctttcccaatatcacaaacctgtgcccttttggcgaggtgttcaacgccaccagattcgccagcgtgtacgcctggaatcggaagagaatctccaactgcgtggccgactattctgtgctgtacaactccgcctctttcagcacctttaagtgctatggcgtgtctcccacaaagctgaatgatctgtgctttaccaacgtgtacgccgatagcttcgtgatcaggggagacgaagtgagacagatcgcaccaggacagacaggaaagatcgcagactacaattataagctgcctgacgatttcaccggctgcgtgatcgcctggaactccaacaatctggattctaaagtgggcggcaactacaattatctgtacaggctgtttcgcaagtccaatctgaagccattcgagcgggacatctccacagagatctaccaggccggctctaccccctgcaatggcgtggagggctttaactgttatttccctctgcagtcttacggcttccagccaacaaacggcgtgggctatcagccctacagagtggtggtgctgtcctttgagctgctgcacgcaccagcaacagtgtgcggcccaaagaagtctaccaatctggtgaagaacaagtgcgtgaacttcaacttcaacggactgaccggcacaggcgtgctgaccgagagcaataagaagttcctgccttttcagcagttcggcagggacatcgcagataccacagacgccgtgcgcgaccctcagaccctggagatcctggacatcacaccatgcagcttcggcggcgtgtccgtgatcacaccaggcaccaatacatccaaccaggtggccgtgctgtatcaggacgtgaattgtaccgaggtgcccgtggcaatccacgcagatcagctgacccctacatggcgggtgtactctaccggcagcaacgtgttccagacaagagccggatgcctgatcggagcagagcacgtgaacaatagctatgagtgcgacatccctatcggcgccggcatctgtgccagctaccagacccagacaaactccccatctggagcaggctccgtggccagccagtccatcatcgcctataccatgagcctgggcgccgagaacagcgtggcctactccaacaattctatcgccatccctaccaacttcacaatcagcgtgaccacagagatcctgccagtgtctatgaccaagacaagcgtggactgcacaatgtatatctgtggcgatagcaccgagtgctccaacctgctgctgcagtacggctccttttgtacccagctgaatagagccctgacaggcatcgccgtggagcaggataagaacacacaggaggtgttcgcccaggtgaagcagatctacaagaccccacccatcaaggactttggcggcttcaacttcagccagatcctgcctgatccaagcaagccctccaagaggtcttttatcgaggacctgctgttcaacaaggtgaccctggccgatgccggcttcatcaagcagtatggagattgcctgggagacatcgcagcccgcgacctgatctgtgcccagaagtttaatggcctgaccgtgctgcctccactgctgacagatgagatgatcgcccagtacacatctgccctgctggccggcaccatcacaagcggatggaccttcggcgcaggagccgccctgcagatcccttttgccatgcagatggcctataggttcaacggcatcggcgtgacccagaatgtgctgtacgagaaccagaagctgatcgccaatcagtttaacagcgccatcggcaagatccaggactctctgtcctctacagccagcgccctgggcaagctgcaggatgtggtgaatcagaacgcccaggccctgaataccctggtgaagcagctgagctccaacttcggcgccatctctagcgtgctgaatgacatcctgagccggctggacccccctgaggcagaggtgcagatcgacaggctgatcacaggccgcctgcagagcctgcagacctacgtgacacagcagctgatcagggcagcagagatcagagcctccgccaatctggccgccaccaagatgagcgagtgcgtgctgggacagtccaagagggtggacttttgtggcaagggctatcacctgatgtctttcccacagagcgcccctcacggcgtggtgtttctgcacgtgacctacgtgccagcccagtgtaagaacttcaccacagcaccagccatctgccacgatggaaaggcacactttcctagggagggcgtgttcgtgtctaacggcacccactggtttgtgacacagcgcaatttctacgagccacagatcatcaccacagacaatacattcgtgagcggcaactgtgatgtggtgatcggcatcgtgaacaataccgtgtatgatccactgcagcccgagctggactcctttaaggaggagctggataagtacttcaagaatcacacctctcccgacgtggatctgggcgacatctccggcatcaatgcctctgtggtgaacatccagaaggagatcgaccggctgaacgaggtggccaagaatctgaacgagagcctgatcgatctgcaggagctgggcaagtatgagcagtacatcaagggctctggcagagagaacctgtatttccagggaggaggaggcagcggatacatccctgaggcaccaagggacggacaggcctacgtgcgcaaggatggcgagtgggtgctgctgtccacctttctgggccatcatcaccaccaccaccaccactga

SEQ ID NO: 4888 - DNA, 3846 bp, Artificial Sequence
  Description of Artificial Sequence: Synthetic polynucleotide
atgggcatcctgccaagcccaggaatgcccgccctgctgtctctggtgagcctgctgtccgtgctgctgatgggatgcgtggcagagacaggcacacagtgcgtgaacctgaccacaaggacccagctgccccctgcctataccaattctttcacacggggcgtgtactatcccgacaaggtgtttagaagctccgtgctgcactccacacaggatctgtttctgcctttcttttctaacgtgacctggttccacgccatccacgtgtccggcaccaatggcacaaagcggttcgacaatcccgtgctgccttttaacgatggcgtgtacttcgccagcaccgagaagtccaacatcatcagaggctggatctttggcaccacactggactctaagacacagagcctgctgatcgtgaacaatgccaccaacgtggtgatcaaggtgtgcgagttccagttttgtaatgatccattcctgggcgtgtactatcacaagaacaataagtcctggatggagtctgagtttcgcgtgtattctagcgccaacaattgcacatttgagtacgtgagccagcccttcctgatggacctggagggcaagcagggcaatttcaagaacctgagggagttcgtgtttaagaatatcgatggctacttcaagatctacagcaagcacaccccaatcaacctggtgcgcgacctgccacagggattctccgccctggagccactggtggatctgcccatcggcatcaacatcacccggtttcagacactgctggccctgcacagatcctacctgacaccaggcgactcctctagcggatggaccgcaggagctgccgcctactatgtgggctatctgcagccccggaccttcctgctgaagtacaacgagaatggcaccatcacagacgcagtggattgcgccctggaccccctgtctgagacaaagtgtacactgaagagctttaccgtggagaagggcatctatcagacaagcaatttcagggtgcagcctaccgagtccatcgtgcgctttcccaatatcacaaacctgtgcccttttggcgaggtgttcaacgccaccagattcgccagcgtgtacgcctggaatcggaagagaatctccaactgcgtggccgactattctgtgctgtacaactccgcctctttcagcacctttaagtgctatggcgtgtctcccacaaagctgaatgatctgtgctttaccaacgtgtacgccgatagcttcgtgatcaggggagacgaaattagacagatcgcaccaggacagacaggaaagatcgcagactacaattataagctgcctgacgatttcaccggctgcgtgatcgcctggaactccaacaatctggattctaaagtgggcggcaactacaattatctgtacaggctgtttcgcaagtccaatctgaagccattcgagcgggacatctccacagagatctaccaggccggctctaccccctgcaatggcgtggagggctttaactgttatttccctctgcagtcttacggcttccagccaacaaacggcgtgggctatcagccctacagagtggtggtgctgtcctttgagctgctgcacgcaccagcaacagtgtgcggcccaaagaagtctaccaatctggtgaagaacaagtgcgtgaacttcaacttcaacggactgaccggcacaggcgtgctgaccgagagcaataagaagttcctgccttttcagcagttcggcagggacatcgcagataccacagacgccgtgcgcgaccctcagaccctggagatcctggacatcacaccatgcagcttcggcggcgtgtccgtgatcacaccaggcaccaatacatccaaccaggtggccgtgctgtatcaggacgtgaattgtaccgaggtgcccgtggcaatccacgcagatcagctgacccctacatggcgggtgtactctaccggcagcaacgtgttccagacaagagccggatgcctgatcggagcagagcacgtgaacaatagctatgagtgcgacatccctatcggcgccggcatctgtgccagctaccagacccagacaaactccccatctggagcaggctccgtggccagccagtccatcatcgcctataccatgagcctgggcgccgagaacagcgtggcctactccaacaattctatcgccatccctaccaacttcacaatcagcgtgaccacagagatcctgccagtgtctatgaccaagacaagcgtggactgcacaatgtatatctgtggcgatagcaccgagtgctccaacctgctgctgcagtacggctccttttgtacccagctgaatagagccctgacaggcatcgccgtggagcaggataagaacacacaggaggtgttcgcccaggtgaagcagatctacaagaccccacccatcaaggactttggcggcttcaacttcagccagatcctgcctgatccaagcaagccctccaagaggtcttttatcgaggacctgctgttcaacaaggtgaccctggccgatgccggcttcatcaagcagtatggagattgcctgggagacatcgcagcccgcgacctgatctgtgcccagaagtttaatggcctgaccgtgctgcctccactgctgacagatgagatgatcgcccagtacacatctgccctgctggccggcaccatcacaagcggatggaccttcggcgcaggagccgccctgcagatcccttttgccatgcagatggcctataggttcaacggcatcggcgtgacccagaatgtgctgtacgagaaccagaagctgatcgccaatcagtttaacagcgccatcggcaagatccaggactctctgtcctctacagccagcgccctgggcaagctgcaggatgtggtgaatcagaacgcccaggccctgaataccctggtgaagcagctgagctccaacttcggcgccatctctagcgtgctgaatgacatcctgagccggctggacccccctgaggcagaggtgcagatcgacaggctgatcacaggccgcctgcagagcctgcagacctacgtgacacagcagctgatcagggcagcagagatcagagcctccgccaatctggccgccaccaagatgagcgagtgcgtgctgggacagtccaagagggtggacttttgtggcaagggctatcacctgatgtctttcccacagagcgcccctcacggcgtggtgtttctgcacgtgacctacgtgccagcccaggagaagaacttcaccacagcaccagccatctgccacgatggaaaggcacactttcctagggagggcgtgttcgtgtctaacggcacccactggtttgtgacacagcgcaatttctacgagccacagatcatcaccacagacaatacattcgtgagcggcaactgtgatgtggtgatcggcatcgtgaacaataccgtgtatgatccactgcagcccgagctggactcctttaaggaggagctggataagtacttcaagaatcacacctctcccgacgtggatctgggcgacatctccggcatcaatgcctctgtggtgaacatccagaaggagatcgaccggctgaacgaggtggccaagaatctgaacgagagcctgatcgatctgcaggagctgggcaagtatgagcagtacatcaagggctctggcagagagaacctgtatttccagggaggaggaggcagcggatacatccctgaggcaccaagggacggacaggcctacgtgcgcaaggatggcgagtgggtgctgctgtccacctttctgggccatcatcaccaccaccaccaccactga

SEQ ID NO: 4889 - DNA, 3846 bp, Artificial Sequence
  Description of Artificial Sequence: Synthetic polynucleotide
atgggcatcctgccaagcccaggaatgcccgccctgctgtctctggtgagcctgctgtccgtgctgctgatgggatgcgtggcagagacaggcacacagtgcgtgaacctgaccacaaggacccagctgccccctgcctataccaattctttcacacggggcgtgtactatcccgacaaggtgtttagaagctccgtgctgcactccacacaggatctgtttctgcctttcttttctaacgtgacctggttccacgccatccacgtgtccggcaccaatggcacaaagcggttcgacaatcccgtgctgccttttaacgatggcgtgtacttcgccagcaccgagaagtccaacatcatcagaggctggatctttggcaccacactggactctaagacacagagcctgctgatcgtgaacaatgccaccaacgtggtgatcaaggtgtgcgagttccagttttgtaatgatccattcctgggcgtgtactatcacaagaacaataagtcctggatggagtctgagtttcgcgtgtattctagcgccaacaattgcacatttgagtacgtgagccagcccttcctgatggacctggagggcaagcagggcaatttcaagaacctgagggagttcgtgtttaagaatatcgatggctacttcaagatctacagcaagcacaccccaatcaacctggtgcgcgacctgccacagggattctccgccctggagccactggtggatctgcccatcggcatcaacatcacccggtttcagacactgctggccctgcacagatcctacctgacaccaggcgactcctctagcggatggaccgcaggagctgccgcctactatgtgggctatctgcagccccggaccttcctgctgaagtacaacgagaatggcaccatcacagacgcagtggattgcgccctggaccccctgtctgagacaaagtgtacactgaagagctttaccgtggagaagggcatctatcagacaagcaatttcagggtgcagcctaccgagtccatcgtgcgctttcccaatatcacaaacctgtgcccttttggcgaggtgttcaacgccaccagattcgccagcgtgtacgcctggaatcggaagagaatctccaactgcgtggccgactattctgtgctgtacaactccgcctctttcagcacctttaagtgctatggcgtgtctcccacaaagctgaatgatctgtgctttaccaacgtgtacgccgatagcttcgtgatcaggggagacgaagtgagacagatcgcaccaggacagacaggaaagatcgcagactacaattataagctgcctgacgatttcaccggctgcgtgatcgcctggaactccaacaatctggattctaaagtgggcggcaactacaattatctgtacaggctgtttcgcaagtccaatctgaagccattcgagcgggacatctccacagagtactaccaggccggctctaccccctgcaatggcgtggagggctttaactgttatttccctctgcagtcttacggcttccagccaacaaacggcgtgggctatcagccctacagagtggtggtgctgtcctttgagctgctgcacgcaccagcaacagtgtgcggcccaaagaagtctaccaatctggtgaagaacaagtgcgtgaacttcaacttcaacggactgaccggcacaggcgtgctgaccgagagcaataagaagttcctgccttttcagcagttcggcagggacatcgcagataccacagacgccgtgcgcgaccctcagaccctggagatcctggacatcacaccatgcagcttcggcggcgtgtccgtgatcacaccaggcaccaatacatccaaccaggtggccgtgctgtatcaggacgtgaattgtaccgaggtgcccgtggcaatccacgcagatcagctgacccctacatggcgggtgtactctaccggcagcaacgtgttccagacaagagccggatgcctgatcggagcagagcacgtgaacaatagctatgagtgcgacatccctatcggcgccggcatctgtgccagctaccagacccagacaaactccccatctggagcaggctccgtggccagccagtccatcatcgcctataccatgagcctgggcgccgagaacagcgtggcctactccaacaattctatcgccatccctaccaacttcacaatcagcgtgaccacagagatcctgccagtgtctatgaccaagacaagcgtggactgcacaatgtatatctgtggcgatagcaccgagtgctccaacctgctgctgcagtacggctccttttgtacccagctgaatagagccctgacaggcatcgccgtggagcaggataagaacacacaggaggtgttcgcccaggtgaagcagatctacaagaccccacccatcaaggactttggcggcttcaacttcagccagatcctgcctgatccaagcaagccctccaagaggtcttttatcgaggacctgctgttcaacaaggtgaccctggccgatgccggcttcatcaagcagtatggagattgcctgggagacatcgcagcccgcgacctgatctgtgcccagaagtttaatggcctgaccgtgctgcctccactgctgacagatgagatgatcgcccagtacacatctgccctgctggccggcaccatcacaagcggatggaccttcggcgcaggagccgccctgcagatcccttttgccatgcagatggcctataggttcaacggcatcggcgtgacccagaatgtgctgtacgagaaccagaagctgatcgccaatcagtttaacagcgccatcggcaagatccaggactctctgtcctctacagccagcgccctgggcaagctgcaggatgtggtgaatcagaacgcccaggccctgaataccctggtgaagcagctgagctccaacttcggcgccatctctagcgtgctgaatgacatcctgagccggctggacccccctgaggcagaggtgcagatcgacaggctgatcacaggccgcctgcagagcctgcagacctacgtgacacagcagctgatcagggcagcagagatcagagcctccgccaatctggccgccaccaagatgagcgagtgcgtgctgggacagtccaagagggtggacttttgtggcaagggctatcacctgatgtctttcccacagagcgcccctcacggcgtggtgtttctgcacgtgacctacgtgccagcccaggagaagaacttcaccacagcaccagccatctgccacgatggaaaggcacactttcctagggagggcgtgttcgtgtctaacggcacccactggtttgtgacacagcgcaatttctacgagccacagatcatcaccacagacaatacattcgtgagcggcaactgtgatgtggtgatcggcatcgtgaacaataccgtgtatgatccactgcagcccgagctggactcctttaaggaggagctggataagtacttcaagaatcacacctctcccgacgtggatctgggcgacatctccggcatcaatgcctctgtggtgaacatccagaaggagatcgaccggctgaacgaggtggccaagaatctgaacgagagcctgatcgatctgcaggagctgggcaagtatgagcagtacatcaagggctctggcagagagaacctgtatttccagggaggaggaggcagcggatacatccctgaggcaccaagggacggacaggcctacgtgcgcaaggatggcgagtgggtgctgctgtccacctttctgggccatcatcaccaccaccaccaccactga

SEQ ID NO: 4890 - DNA, 3846 bp, Artificial Sequence
  Description of Artificial Sequence: Synthetic polynucleotide
atgggcatcctgccaagcccaggaatgcccgccctgctgtctctggtgagcctgctgtccgtgctgctgatgggatgcgtggcagagacaggcacacagtgcgtgaacctgaccacaaggacccagctgccccctgcctataccaattctttcacacggggcgtgtactatcccgacaaggtgtttagaagctccgtgctgcactccacacaggatctgtttctgcctttcttttctaacgtgacctggttccacgccatccacgtgtccggcaccaatggcacaaagcggttcgacaatcccgtgctgccttttaacgatggcgtgtacttcgccagcaccgagaagtccaacatcatcagaggctggatctttggcaccacactggactctaagacacagagcctgctgatcgtgaacaatgccaccaacgtggtgatcaaggtgtgcgagttccagttttgtaatgatccattcctgggcgtgtactatcacaagaacaataagtcctggatggagtctgagtttcgcgtgtattctagcgccaacaattgcacatttgagtacgtgagccagcccttcctgatggacctggagggcaagcagggcaatttcaagaacctgagggagttcgtgtttaagaatatcgatggctacttcaagatctacagcaagcacaccccaatcaacctggtgcgcgacctgccacagggattctccgccctggagccactggtggatctgcccatcggcatcaacatcacccggtttcagacactgctggccctgcacagatcctacctgacaccaggcgactcctctagcggatggaccgcaggagctgccgcctactatgtgggctatctgcagccccggaccttcctgctgaagtacaacgagaatggcaccatcacagacgcagtggattgcgccctggaccccctgtctgagacaaagtgtacactgaagagctttaccgtggagaagggcatctatcagacaagcaatttcagggtgcagcctaccgagtccatcgtgcgctttcccaatatcacaaacctgtgcccttttggcgaggtgttcaacgccaccagattcgccagcgtgtacgcctggaatcggaagagaatctccaactgcgtggccgactattctgtgctgtacaactccgcctctttcagcacctttaagtgctatggcgtgtctcccacaaagctgaatgatctgtgctttaccaacgtgtacgccgatagcttcgtgatcaggggagacgaagtgagacagatcgcaccaggacagacaggaaagatcgcagactacaattataagctgcctgacgatttcaccggctgcgtgatcgcctggaactccaacaatctggattctaaagtgggcggcaactacaattatctgtacaggctgtttcgcaagtccaatctgaagccattcgagcgggacatctccacagagatctaccaggccggctctaccccctgcaatggcgtggagggctttaactgttatttccctctgcagtcttacggcttccagccaacaaacggcgtgggctatcagccctacagagtggtggtgctgtcctttgagctgctgcacgcaccagcaacagtgtgcggcccaaagaagtctaccaatctggtgaagaacaagtgcgtgaacttcaacttcaacggactgaccggcacaggcgtgctgaccgagagcaataagaagttcctgccttttcagcagttcggcagggacatcgcagataccacagacgccgtgcgcgaccctcagaccctggagatcctggacatcacaccatgcagcttcggcggcgtgtccgtgatcacaccaggcaccaatacatccaaccaggtggccgtgctgtatcaggacgtgaattgtaccgaggtgcccgtggcaatccacgcagatcagctgacccctacatggcgggtgtactctaccggcagcaacgtgttccagacaagagccggatgcctgatcggagcagagcacgtgaacaatagctatgagtgcgacatccctatcggcgccggcatctgtgccagctaccagacccagacaaactccccatctggagcaggctccgtggccagccagtccatcatcgcctataccatgagcctgggcgccgagaacagcgtggcctactccaacaattctatcgccatccctaccaacttcacaatcagcgtgaccacagagatcctgccagtgtctatgaccaagacaagcgtggactgcacaatgtatatctgtggcgatagcaccgagtgctccaacctgctgctgcagtacggctccttttgtacccagctgaatagagccctgacaggcatcgccgtggagcaggataagaacacacaggaggtgttcgcccaggtgaagcagatctacaagaccccacccatcaaggactttggcggcttcaacttcagccagatcctgcctgatccaagcaagccctccaagaggtcttttatcgaggacctgctgttcaacaaggtgaccctggccgatgccggcttcatcaagcagtatggagattgcctgggagacatcgcagcccgcgacctgatctgtgcccagaagtttaatggcctgaccgtgctgcctccactgctgacagatgagatgatcgcccagtacacatctgccctgctggccggcaccatcacaagcggatggaccttcggcgcaggagccgccctgcagatcccttttgccatgcagatggcctataggttcaacggcatcggcgtgacccagaatgtgctgtacgagaaccagaagctgatcgccaatcagtttaacagcgccatcggcaagatccaggactctctgtcctctacagccagcgccctgggcaagctgcaggatgtggtgaatcagaacgcccaggccctgaataccctggtgaagcagctgagctccaacttcggcgccatctctagcgtgctgaatgacatcctgagccggctggacccccctgaggcagaggtgcagatcgacaggctgatcacaggccgcctgcagagcctgcagacctacgtgacacagcagctgatcagggcagcagagatcagagcctccgccaatctggccgccaccaagatgagcgagtgcgtgctgggacagtccaagagggtggacttttgtggccgaggctatcacctgatgtctttcccacagagcgcccctcacggcgtggtgtttctgcacgtgacctacgtgccagcccaggagaagaacttcaccacagcaccagccatctgccacgatggaaaggcacactttcctagggagggcgtgttcgtgtctaacggcacccactggtttgtgacacagcgcaatttctacgagccacagatcatcaccacagacaatacattcgtgagcggcaactgtgatgtggtgatcggcatcgtgaacaataccgtgtatgatccactgcagcccgagctggactcctttaaggaggagctggataagtacttcaagaatcacacctctcccgacgtggatctgggcgacatctccggcatcaatgcctctgtggtgaacatccagaaggagatcgaccggctgaacgaggtggccaagaatctgaacgagagcctgatcgatctgcaggagctgggcaagtatgagcagtacatcaagggctctggcagagagaacctgtatttccagggaggaggaggcagcggatacatccctgaggcaccaagggacggacaggcctacgtgcgcaaggatggcgagtgggtgctgctgtccacctttctgggccatcatcaccaccaccaccaccactga

SEQ ID NO: 4891 - DNA, 3846 bp, Artificial Sequence
  Description of Artificial Sequence: Synthetic polynucleotide
atgggcatcctgccaagcccaggaatgcccgccctgctgtctctggtgagcctgctgtccgtgctgctgatgggatgcgtggcagagacaggcacacagtgcgtgaacctgaccacaaggacccagctgccccctgcctataccaattctttcacacggggcgtgtactatcccgacaaggtgtttagaagctccgtgctgcactccacacaggatctgtttctgcctttcttttctaacgtgacctggttccacgccatccacgtgtccggcaccaatggcacaaagcggttcgacaatcccgtgctgccttttaacgatggcgtgtacttcgccagcaccgagaagtccaacatcatcagaggctggatctttggcaccacactggactctaagacacagagcctgctgatcgtgaacaatgccaccaacgtggtgatcaaggtgtgcgagttccagttttgtaatgatccattcctgggcgtgtactatcacaagaacaataagtcctggatggagtctgagtttcgcgtgtattctagcgccaacaattgcacatttgagtacgtgagccagcccttcctgatggacctggagggcaagcagggcaatttcaagaacctgagggagttcgtgtttaagaatatcgatggctacttcaagatctacagcaagcacaccccaatcaacctggtgcgcgacctgccacagggattctccgccctggagccactggtggatctgcccatcggcatcaacatcacccggtttcagacactgctggccctgcacagatcctacctgacaccaggcgactcctctagcggatggaccgcaggagctgccgcctactatgtgggctatctgcagccccggaccttcctgctgaagtacaacgagaatggcaccatcacagacgcagtggattgcgccctggaccccctgtctgagacaaagtgtacactgaagagctttaccgtggagaagggcatctatcagacaagcaatttcagggtgcagcctaccgagtccatcgtgcgctttcccaatatcacaaacctgtgcccttttggcgaggtgttcaacgccaccagattctgtagcgtgtacgcctggaatcggaagagaatctccaactgcgtggccgactattctgtgctgtacaactccgcctctttcagcacctttaagtgctatggcgtgtctcccacaaagctgaatgatctgtgctttaccaacgtgtacgccgatagcttcgtgatcaggggagacgaagtgagacagatcgcaccaggacagacaggaaagatcgcagactacaattataagctgcctgacgatttcaccggctgcgtgatcgcctggaactccaacaatctggattctaaagtgggcggcaactacaattatctgtacaggctgtttcgcaagtccaatctgaagccattcgagcgggacatctccacagagatctaccaggccggctctaccccctgcaatggcgtggagggctttaactgttatttccctctgcagtcttacggcttccagccaacaaacggcgtgggctatcagccctacagagtggtggtgctgtcctttgagctgctgcacgcaccagcaacagtgtgcggcccaaagaagtctaccaatctggtgaagaacaagtgcgtgaacttcaacttcaacggactgaccggcacaggcgtgctgaccgagagcaataagaagttcctgccttttcagcagttcggcagggacatcgcagataccacagacgccgtgcgcgaccctcagaccctggagatcctggacatcacaccatgcagcttcggcggcgtgtccgtgatcacaccaggcaccaatacatccaaccaggtggccgtgctgtatcaggacgtgaattgtaccgaggtgcccgtggcaatccacgcagatcagctgacccctacatggcgggtgtactctaccggcagcaacgtgttccagacaagagccggatgcctgatcggagcagagcacgtgaacaatagctatgagtgcgacatccctatcggcgccggcatctgtgccagctaccagacccagacaaactccccatctggagcaggctccgtggccagccagtccatcatcgcctataccatgagcctgggcgccgagaacagcgtggcctactccaacaattctatcgccatccctaccaacttcacaatcagcgtgaccacagagatcctgccagtgtctatgaccaagacaagcgtggactgcacaatgtatatctgtggcgatagcaccgagtgctccaacctgctgctgcagtacggctccttttgtacccagctgaatagagccctgacaggcatcgccgtggagcaggataagaacacacaggaggtgttcgcccaggtgaagcagatctacaagaccccacccatcaaggactttggcggcttcaacttcagccagatcctgcctgatccaagcaagccctccaagaggtcttttatcgaggacctgctgttcaacaaggtgaccctggccgatgccggcttcatcaagcagtatggagattgcctgggagacatcgcagcccgcgacctgatctgtgcccagaagtttaatggcctgaccgtgctgcctccactgctgacagatgagatgatcgcccagtacacatctgccctgctggccggcaccatcacaagcggatggaccttcggcgcaggagccgccctgcagatcccttttgccatgcagatggcctataggttcaacggcatcggcgtgacccagaatgtgctgtacgagaaccagaagctgatcgccaatcagtttaacagcgccatcggcaagatccaggactctctgtcctctacagccagcgccctgggcaagctgcaggatgtggtgaatcagaacgcccaggccctgaataccctggtgaagcagctgagctccaacttcggcgccatctctagcgtgctgaatgacatcctgagccggctggacccccctgaggcagaggtgcagatcgacaggctgatcacaggccgcctgcagagcctgcagacctacgtgacacagcagctgatcagggcagcagagatcagagcctccgccaatctggccgccaccaagatgagcgagtgcgtgctgggacagtccaagagggtggacttttgtggcaagggctatcacctgatgtctttcccacagagcgcccctcacggcgtggtgtttctgcacgtgacctacgtgccagcccaggagaagaacttcaccacagcaccagccatctgccacgatggaaaggcacactttcctagggagggcgtgttcgtgtctaacggcacccactggtttgtgacacagcgcaatttctacgagccacagatcatcaccacagacaatacattcgtgagcggcaactgtgatgtggtgatcggcatcgtgaacaataccgtgtatgatccactgcagcccgagctggactcctttaaggaggagctggataagtacttcaagaatcacacctctcccgacgtggatctgggcgacatctccggcatcaatgcctctgtggtgaacatccagaaggagatcgaccggctgaacgaggtggccaagaatctgaacgagagcctgatcgatctgcaggagctgggcaagtatgagcagtacatcaagggctctggcagagagaacctgtatttccagggaggaggaggcagcggatacatccctgaggcaccaagggacggacaggcctacgtgcgcaaggatggcgagtgggtgctgctgtccacctttctgggccatcatcaccaccaccaccaccactga

SEQ ID NO: 4892 - DNA, 3846 bp, Artificial Sequence
  Description of Artificial Sequence: Synthetic polynucleotide
atgggcatcctgccaagcccaggaatgcccgccctgctgtctctggtgagcctgctgtccgtgctgctgatgggatgcgtggcagagacaggcacacagtgcgtgaacctgaccacaaggacccagctgccccctgcctataccaattctttcacacggggcgtgtactatcccgacaaggtgtttagaagctccgtgctgcactccacacaggatctgtttctgcctttcttttctaacgtgacctggttccacgccatccacgtgtccggcaccaatggcacaaagcggttcgacaatcccgtgctgccttttaacgatggcgtgtacttcgccagcaccgagaagtccaacatcatcagaggctggatctttggcaccacactggactctaagacacagagcctgctgatcgtgaacaatgccaccaacgtggtgatcaaggtgtgcgagttccagttttgtaatgatccattcctgggcgtgtactatcacaagaacaataagtcctggatggagtctgagtttcgcgtgtattctagcgccaacaattgcacatttgagtacgtgagccagcccttcctgatggacctggagggcaagcagggcaatttcaagaacctgagggagttcgtgtttaagaatatcgatggctacttcaagatctacagcaagcacaccccaatcaacctggtgcgcgacctgccacagggattctccgccctggagccactggtggatctgcccatcggcatcaacatcacccggtttcagacactgctggccctgcacagatcctacctgacaccaggcgactcctctagcggatggaccgcaggagctgccgcctactatgtgggctatctgcagccccggaccttcctgctgaagtacaacgagaatggcaccatcacagacgcagtggattgcgccctggaccccctgtctgagacaaagtgtacactgaagagctttaccgtggagaagggcatctatcagacaagcaatttcagggtgcagcctaccgagtccatcgtgcgctttcccaatatcacaaacctgtgcccttacggcgaggtgttcaacgccaccagattcgccagcgtgtacgcctggaatcggaagagaatctccaactgcgtggccgactattctgtgctgtacaactccgcctctttcagcacctttaagtgctatggcgtgtctcccacaaagctgaatgatctgtgctttaccaacgtgtacgccgatagcttcgtgatcaggggagacgaagtgagacagatcgcaccaggacagacaggaaagatcgcagactacaattataagctgcctgacgatttcaccggctgcgtgatcgcctggaactccaacaatctggattctaaagtgggcggcaactacaattatctgtacaggctgtttcgcaagtccaatctgaagccattcgagcgggacatctccacagagatctaccaggccggctctaccccctgcaatggcgtggagggctttaactgttatttccctctgcagtcttacggcttccagccaacaaacggcgtgggctatcagccctacagagtggtggtgctgtcctttgagctgctgcacgcaccagcaacagtgtgcggcccaaagaagtctaccaatctggtgaagaacaagtgcgtgaacttcaacttcaacggactgaccggcacaggcgtgctgaccgagagcaataagaagttcctgccttttcagcagttcggcagggacatcgcagataccacagacgccgtgcgcgaccctcagaccctggagatcctggacatcacaccatgcagcttcggcggcgtgtccgtgatcacaccaggcaccaatacatccaaccaggtggccgtgctgtatcaggacgtgaattgtaccgaggtgcccgtggcaatccacgcagatcagctgacccctacatggcgggtgtactctaccggcagcaacgtgttccagacaagagccggatgcctgatcggagcagagcacgtgaacaatagctatgagtgcgacatccctatcggcgccggcatctgtgccagctaccagacccagacaaactccccatctggagcaggctccgtggccagccagtccatcatcgcctataccatgagcctgggcgccgagaacagcgtggcctactccaacaattctatcgccatccctaccaacttcacaatcagcgtgaccacagagatcctgccagtgtctatgaccaagacaagcgtggactgcacaatgtatatctgtggcgatagcaccgagtgctccaacctgctgctgcagtacggctccttttgtacccagctgaatagagccctgacaggcatcgccgtggagcaggataagaacacacaggaggtgttcgcccaggtgaagcagatctacaagaccccacccatcaaggactttggcggcttcaacttcagccagatcctgcctgatccaagcaagccctccaagaggtcttttatcgaggacctgctgttcaacaaggtgaccctggccgatgccggcttcatcaagcagtatggagattgcctgggagacatcgcagcccgcgacctgatctgtgcccagaagtttaatggcctgaccgtgctgcctccactgctgacagatgagatgatcgcccagtacacatctgccctgctggccggcaccatcacaagcggatggaccttcggcgcaggagccgccctgcagatcccttttgccatgcagatggcctataggttcaacggcatcggcgtgacccagaatgtgctgtacgagaaccagaagctgatcgccaatcagtttaacagcgccatcggcaagatccaggactctctgtcctctacagccagcgccctgggcaagctgcaggatgtggtgaatcagaacgcccaggccctgaataccctggtgaagcagctgagctccaacttcggcgccatctctagcgtgctgaatgacatcctgagccggctggacccccctgaggcagaggtgcagatcgacaggctgatcacaggccgcctgcagagcctgcagacctacgtgacacagcagctgatcagggcagcagagatcagagcctccgccaatctggccgccaccaagatgagcgagtgcgtgctgggacagtccaagagggtggacttttgtggcaagggctatcacctgatgtctttcccacagagcgcccctcacggcgtggtgtttctgcacgtgacctacgtgccagcccaggagaagaacttcaccacagcaccagccatctgccacgatggaaaggcacactttcctagggagggcgtgttcgtgtctaacggcacccactggtttgtgacacagcgcaatttctacgagccacagatcatcaccacagacaatacattcgtgagcggcaactgtgatgtggtgatcggcatcgtgaacaataccgtgtatgatccactgcagcccgagctggactcctttaaggaggagctggataagtacttcaagaatcacacctctcccgacgtggatctgggcgacatctccggcatcaatgcctctgtggtgaacatccagaaggagatcgaccggctgaacgaggtggccaagaatctgaacgagagcctgatcgatctgcaggagctgggcaagtatgagcagtacatcaagggctctggcagagagaacctgtatttccagggaggaggaggcagcggatacatccctgaggcaccaagggacggacaggcctacgtgcgcaaggatggcgagtgggtgctgctgtccacctttctgggccatcatcaccaccaccaccaccactga

SEQ ID NO: 4893 - DNA, 3846 bp, Artificial Sequence
  Description of Artificial Sequence: Synthetic polynucleotide
atgggcatcctgccaagcccaggaatgcccgccctgctgtctctggtgagcctgctgtccgtgctgctgatgggatgcgtggcagagacaggcacacagtgcgtgaacctgaccacaaggacccagctgccccctgcctataccaattctttcacacggggcgtgtactatcccgacaaggtgtttagaagctccgtgctgcactccacacaggatctgtttctgcctttcttttctaacgtgacctggttccacgccatccacgtgtccggcaccaatggcacaaagcggttcgacaatcccgtgctgccttttaacgatggcgtgtacttcgccagcaccgagaagtccaacatcatcagaggctggatctttggcaccacactggactctaagacacagagcctgctgatcgtgaacaatgccaccaacgtggtgatcaaggtgtgcgagttccagttttgtaatgatccattcctgggcgtgtactatcacaagaacaataagtcctggatggagtctgagtttcgcgtgtattctagcgccaacaattgcacatttgagtacgtgagccagcccttcctgatggacctggagggcaagcagggcaatttcaagaacctgagggagttcgtgtttaagaatatcgatggctacttcaagatctacagcaagcacaccccaatcaacctggtgcgcgacctgccacagggattctccgccctggagccactggtggatctgcccatcggcatcaacatcacccggtttcagacactgctggccctgcacagatcctacctgacaccaggcgactcctctagcggatggaccgcaggagctgccgcctactatgtgggctatctgcagccccggaccttcctgctgaagtacaacgagaatggcaccatcacagacgcagtggattgcgccctggaccccctgtctgagacaaagtgtacactgaagagctttaccgtggagaagggcatctatcagacaagcaatttcagggtgcagcctaccgagtccatcgtgcgctttcccaatatcacaaacctgtgcccttttggcgaggtgttcaacgccaccagattcgccagcgtgtacgcctggaatcggaagagaatctccaactgcgtggccgactattctgtgctgtacaactccgcctctttcagcacctttaagtgctatggcgtgtctcccacaaagctgaatgatctgtgctttaccaacgtgtacgccgatagcttcgtgatcaggggagacgaagtgagacagatcgcaccaggacagacaggaaagatcgcagactacaattataagctgcctgacgatttcaccggctgcgtgatcgcctggaactccaacaatctggattctaaagtgggcggcaactacaattatctgtacaggctgtttcgcaagtccaatctgaagccattcgagcgggacatctccacagaggtctaccaggccggctctaccccctgcaatggcgtggagggctttaactgttatttccctctgcagtcttacggcttccagccaacaaacggcgtgggctatcagccctacagagtggtggtgctgtcctttgagctgctgcacgcaccagcaacagtgtgcggcccaaagaagtctaccaatctggtgaagaacaagtgcgtgaacttcaacttcaacggactgaccggcacaggcgtgctgaccgagagcaataagaagttcctgccttttcagcagttcggcagggacatcgcagataccacagacgccgtgcgcgaccctcagaccctggagatcctggacatcacaccatgcagcttcggcggcgtgtccgtgatcacaccaggcaccaatacatccaaccaggtggccgtgctgtatcaggacgtgaattgtaccgaggtgcccgtggcaatccacgcagatcagctgacccctacatggcgggtgtactctaccggcagcaacgtgttccagacaagagccggatgcctgatcggagcagagcacgtgaacaatagctatgagtgcgacatccctatcggcgccggcatctgtgccagctaccagacccagacaaactccccatctggagcaggctccgtggccagccagtccatcatcgcctataccatgagcctgggcgccgagaacagcgtggcctactccaacaattctatcgccatccctaccaacttcacaatcagcgtgaccacagagatcctgccagtgtctatgaccaagacaagcgtggactgcacaatgtatatctgtggcgatagcaccgagtgctccaacctgctgctgcagtacggctccttttgtacccagctgaatagagccctgacaggcatcgccgtggagcaggataagaacacacaggaggtgttcgcccaggtgaagcagatctacaagaccccacccatcaaggactttggcggcttcaacttcagccagatcctgcctgatccaagcaagccctccaagaggtcttttatcgaggacctgctgttcaacaaggtgaccctggccgatgccggcttcatcaagcagtatggagattgcctgggagacatcgcagcccgcgacctgatctgtgcccagaagtttaatggcctgaccgtgctgcctccactgctgacagatgagatgatcgcccagtacacatctgccctgctggccggcaccatcacaagcggatggaccttcggcgcaggagccgccctgcagatcccttttgccatgcagatggcctataggttcaacggcatcggcgtgacccagaatgtgctgtacgagaaccagaagctgatcgccaatcagtttaacagcgccatcggcaagatccaggactctctgtcctctacagccagcgccctgggcaagctgcaggatgtggtgaatcagaacgcccaggccctgaataccctggtgaagcagctgagctccaacttcggcgccatctctagcgtgctgaatgacatcctgagccggctggacccccctgaggcagaggtgcagatcgacaggctgatcacaggccgcctgcagagcctgcagacctacgtgacacagcagctgatcagggcagcagagatcagagcctccgccaatctggccgccaccaagatgagcgagtgcgtgctgggacagtccaagagggtggacttttgtggcaagggctatcacctgatgtctttcccacagagcgcccctcacggcgtggtgtttctgcacgtgacctacgtgccagcccaggagaagaacttcaccacagcaccagccatctgccacgatggaaaggcacactttcctagggagggcgtgttcgtgtctaacggcacccactggtttgtgacacagcgcaatttctacgagccacagatcatcaccacagacaatacattcgtgagcggcaactgtgatgtggtgatcggcatcgtgaacaataccgtgtatgatccactgcagcccgagctggactcctttaaggaggagctggataagtacttcaagaatcacacctctcccgacgtggatctgggcgacatctccggcatcaatgcctctgtggtgaacatccagaaggagatcgaccggctgaacgaggtggccaagaatctgaacgagagcctgatcgatctgcaggagctgggcaagtatgagcagtacatcaagggctctggcagagagaacctgtatttccagggaggaggaggcagcggatacatccctgaggcaccaagggacggacaggcctacgtgcgcaaggatggcgagtgggtgctgctgtccacctttctgggccatcatcaccaccaccaccaccactga

SEQ ID NO: 4894 - DNA, 3846 bp, Artificial Sequence
  Description of Artificial Sequence: Synthetic polynucleotide
atgggcatcctgccaagcccaggaatgcccgccctgctgtctctggtgagcctgctgtccgtgctgctgatgggatgcgtggcagagacaggcacacagtgcgtgaacctgaccacaaggacccagctgccccctgcctataccaattctttcacacggggcgtgtactatcccgacaaggtgtttagaagctccgtgctgcactccacacaggatctgtttctgcctttcttttctaacgtgacctggttccacgccatccacgtgtccggcaccaatggcacaaagcggttcgacaatcccgtgctgccttttaacgatggcgtgtacttcgccagcaccgagaagtccaacatcatcagaggctggatctttggcaccacactggactctaagacacagagcctgctgatcgtgaacaatgccaccaacgtggtgatcaaggtgtgcgagttccagttttgtaatgatccattcctgggcgtgtactatcacaagaacaataagtcctggatggagtctgagtttcgcgtgtattctagcgccaacaattgcacatttgagtacgtgagccagcccttcctgatggacctggagggcaagcagggcaatttcaagaacctgagggagttcgtgtttaagaatatcgatggctacttcaagatctacagcaagcacaccccaatcaacctggtgcgcgacctgccacagggattctccgccctggagccactggtggatctgcccatcggcatcaacatcacccggtttcagacactgctggccctgcacagatcctacctgacaccaggcgactcctctagcggatggaccgcaggagctgccgcctactatgtgggctatctgcagccccggaccttcctgctgaagtacaacgagaatggcaccatcacagacgcagtggattgcgccctggaccccctgtctgagacaaagtgtacactgaagagctttaccgtggagaagggcatctatcagacaagcaatttcagggtgcagcctaccgagtccatcgtgcgctttcccaatatcacaaacctgtgccctataggcgaggtgttcaacgccaccagattcgccagcgtgtacgcctggaatcggaagagaatctccaactgcgtggccgactattctgtgctgtacaactccgcctctttcagcacctttaagtgctatggcgtgtctcccacaaagctgaatgatctgtgctttaccaacgtgtacgccgatagcttcgtgatcaggggagacgaagtgagacagatcgcaccaggacagacaggaaagatcgcagactacaattataagctgcctgacgatttcaccggctgcgtgatcgcctggaactccaacaatctggattctaaagtgggcggcaactacaattatctgtacaggctgtttcgcaagtccaatctgaagccattcgagcgggacatctccacagagatctaccaggccggctctaccccctgcaatggcgtggagggctttaactgttatttccctctgcagtcttacggcttccagccaacaaacggcgtgggctatcagccctacagagtggtggtgctgtcctttgagctgctgcacgcaccagcaacagtgtgcggcccaaagaagtctaccaatctggtgaagaacaagtgcgtgaacttcaacttcaacggactgaccggcacaggcgtgctgaccgagagcaataagaagttcctgccttttcagcagttcggcagggacatcgcagataccacagacgccgtgcgcgaccctcagaccctggagatcctggacatcacaccatgcagcttcggcggcgtgtccgtgatcacaccaggcaccaatacatccaaccaggtggccgtgctgtatcaggacgtgaattgtaccgaggtgcccgtggcaatccacgcagatcagctgacccctacatggcgggtgtactctaccggcagcaacgtgttccagacaagagccggatgcctgatcggagcagagcacgtgaacaatagctatgagtgcgacatccctatcggcgccggcatctgtgccagctaccagacccagacaaactccccatctggagcaggctccgtggccagccagtccatcatcgcctataccatgagcctgggcgccgagaacagcgtggcctactccaacaattctatcgccatccctaccaacttcacaatcagcgtgaccacagagatcctgccagtgtctatgaccaagacaagcgtggactgcacaatgtatatctgtggcgatagcaccgagtgctccaacctgctgctgcagtacggctccttttgtacccagctgaatagagccctgacaggcatcgccgtggagcaggataagaacacacaggaggtgttcgcccaggtgaagcagatctacaagaccccacccatcaaggactttggcggcttcaacttcagccagatcctgcctgatccaagcaagccctccaagaggtcttttatcgaggacctgctgttcaacaaggtgaccctggccgatgccggcttcatcaagcagtatggagattgcctgggagacatcgcagcccgcgacctgatctgtgcccagaagtttaatggcctgaccgtgctgcctccactgctgacagatgagatgatcgcccagtacacatctgccctgctggccggcaccatcacaagcggatggaccttcggcgcaggagccgccctgcagatcccttttgccatgcagatggcctataggttcaacggcatcggcgtgacccagaatgtgctgtacgagaaccagaagctgatcgccaatcagtttaacagcgccatcggcaagatccaggactctctgtcctctacagccagcgccctgggcaagctgcaggatgtggtgaatcagaacgcccaggccctgaataccctggtgaagcagctgagctccaacttcggcgccatctctagcgtgctgaatgacatcctgagccggctggacccccctgaggcagaggtgcagatcgacaggctgatcacaggccgcctgcagagcctgcagacctacgtgacacagcagctgatcagggcagcagagatcagagcctccgccaatctggccgccaccaagatgagcgagtgcgtgctgggacagtccaagagggtggacttttgtggcaagggctatcacctgatgtctttcccacagagcgcccctcacggcgtggtgtttctgcacgtgacctacgtgccagcccaggagaagaacttcaccacagcaccagccatctgccacgatggaaaggcacactttcctagggagggcgtgttcgtgtctaacggcacccactggtttgtgacacagcgcaatttctacgagccacagatcatcaccacagacaatacattcgtgagcggcaactgtgatgtggtgatcggcatcgtgaacaataccgtgtatgatccactgcagcccgagctggactcctttaaggaggagctggataagtacttcaagaatcacacctctcccgacgtggatctgggcgacatctccggcatcaatgcctctgtggtgaacatccagaaggagatcgaccggctgaacgaggtggccaagaatctgaacgagagcctgatcgatctgcaggagctgggcaagtatgagcagtacatcaagggctctggcagagagaacctgtatttccagggaggaggaggcagcggatacatccctgaggcaccaagggacggacaggcctacgtgcgcaaggatggcgagtgggtgctgctgtccacctttctgggccatcatcaccaccaccaccaccactga

SEQ ID NO: 4895 - DNA, 3846 bp, Artificial Sequence
  Description of Artificial Sequence: Synthetic polynucleotide
atgggcatcctgccaagcccaggaatgcccgccctgctgtctctggtgagcctgctgtccgtgctgctgatgggatgcgtggcagagacaggcacacagtgcgtgaacctgaccacaaggacccagctgccccctgcctataccaattctttcacacggggcgtgtactatcccgacaaggtgtttagaagctccgtgctgcactccacacaggatctgtttctgcctttcttttctaacgtgacctggttccacgccatccacgtgtccggcaccaatggcacaaagcggttcgacaatcccgtgctgccttttaacgatggcgtgtacttcgccagcaccgagaagtccaacatcatcagaggctggatctttggcaccacactggactctaagacacagagcctgctgatcgtgaacaatgccaccaacgtggtgatcaaggtgtgcgagttccagttttgtaatgatccattcctgggcgtgtactatcacaagaacaataagtcctggatggagtctgagtttcgcgtgtattctagcgccaacaattgcacatttgagtacgtgagccagcccttcctgatggacctggagggcaagcagggcaatttcaagaacctgagggagttcgtgtttaagaatatcgatggctacttcaagatctacagcaagcacaccccaatcaacctggtgcgcgacctgccacagggattctccgccctggagccactggtggatctgcccatcggcatcaacatcacccggtttcagacactgctggccctgcacagatcctacctgacaccaggcgactcctctagcggatggaccgcaggagctgccgcctactatgtgggctatctgcagccccggaccttcctgctgaagtacaacgagaatggcaccatcacagacgcagtggattgcgccctggaccccctgtctgagacaaagtgtacactgaagagctttaccgtggagaagggcatctatcagacaagcaatttcagggtgcagcctaccgagtccatcgtgcgctttcccaatatcacaaacctgtgcccttttggcgaggtgttcaacgccaccagattcgccagcgtgtacgcctggaatcggaagagaatctccaactgcgtgtttgactattctgtgctgtacaactccgcctctttcagcacctttaagtgctatggcgtgtctcccacaaagctgaatgatctgtgctttaccaacgtgtacgccgatagcttcgtgatcaggggagacgaagtgagacagatcgcaccaggacagacaggaaagatcgcagactacaattataagctgcctgacgatttcaccggctgcgtgatcgcctggaactccaacaatctggattctaaagtgggcggcaactacaattatctgtacaggctgtttcgcaagtccaatctgaagccattcgagcgggacatctccacagagatctaccaggccggctctaccccctgcaatggcgtggagggctttaactgttatttccctctgcagtcttacggcttccagccaacaaacggcgtgggctatcagccctacagagtggtggtgctgtcctttgagctgctgcacgcaccagcaacagtgtgcggcccaaagaagtctaccaatctggtgaagaacaagtgcgtgaacttcaacttcaacggactgaccggcacaggcgtgctgaccgagagcaataagaagttcctgccttttcagcagttcggcagggacatcgcagataccacagacgccgtgcgcgaccctcagaccctggagatcctggacatcacaccatgcagcttcggcggcgtgtccgtgatcacaccaggcaccaatacatccaaccaggtggccgtgctgtatcaggacgtgaattgtaccgaggtgcccgtggcaatccacgcagatcagctgacccctacatggcgggtgtactctaccggcagcaacgtgttccagacaagagccggatgcctgatcggagcagagcacgtgaacaatagctatgagtgcgacatccctatcggcgccggcatctgtgccagctaccagacccagacaaactccccatctggagcaggctccgtggccagccagtccatcatcgcctataccatgagcctgggcgccgagaacagcgtggcctactccaacaattctatcgccatccctaccaacttcacaatcagcgtgaccacagagatcctgccagtgtctatgaccaagacaagcgtggactgcacaatgtatatctgtggcgatagcaccgagtgctccaacctgctgctgcagtacggctccttttgtacccagctgaatagagccctgacaggcatcgccgtggagcaggataagaacacacaggaggtgttcgcccaggtgaagcagatctacaagaccccacccatcaaggactttggcggcttcaacttcagccagatcctgcctgatccaagcaagccctccaagaggtcttttatcgaggacctgctgttcaacaaggtgaccctggccgatgccggcttcatcaagcagtatggagattgcctgggagacatcgcagcccgcgacctgatctgtgcccagaagtttaatggcctgaccgtgctgcctccactgctgacagatgagatgatcgcccagtacacatctgccctgctggccggcaccatcacaagcggatggaccttcggcgcaggagccgccctgcagatcccttttgccatgcagatggcctataggttcaacggcatcggcgtgacccagaatgtgctgtacgagaaccagaagctgatcgccaatcagtttaacagcgccatcggcaagatccaggactctctgtcctctacagccagcgccctgggcaagctgcaggatgtggtgaatcagaacgcccaggccctgaataccctggtgaagcagctgagctccaacttcggcgccatctctagcgtgctgaatgacatcctgagccggctggacccccctgaggcagaggtgcagatcgacaggctgatcacaggccgcctgcagagcctgcagacctacgtgacacagcagctgatcagggcagcagagatcagagcctccgccaatctggccgccaccaagatgagcgagtgcgtgctgggacagtccaagagggtggacttttgtggcaagggctatcacctgatgtctttcccacagagcgcccctcacggcgtggtgtttctgcacgtgacctacgtgccagcccaggagaagaacttcaccacagcaccagccatctgccacgatggaaaggcacactttcctagggagggcgtgttcgtgtctaacggcacccactggtttgtgacacagcgcaatttctacgagccacagatcatcaccacagacaatacattcgtgagcggcaactgtgatgtggtgatcggcatcgtgaacaataccgtgtatgatccactgcagcccgagctggactcctttaaggaggagctggataagtacttcaagaatcacacctctcccgacgtggatctgggcgacatctccggcatcaatgcctctgtggtgaacatccagaaggagatcgaccggctgaacgaggtggccaagaatctgaacgagagcctgatcgatctgcaggagctgggcaagtatgagcagtacatcaagggctctggcagagagaacctgtatttccagggaggaggaggcagcggatacatccctgaggcaccaagggacggacaggcctacgtgcgcaaggatggcgagtgggtgctgctgtccacctttctgggccatcatcaccaccaccaccaccactga

SEQ ID NO: 4896 - DNA, 3846 bp, Artificial Sequence
  Description of Artificial Sequence: Synthetic polynucleotide
atgggcatcctgccaagcccaggaatgcccgccctgctgtctctggtgagcctgctgtccgtgctgctgatgggatgcgtggcagagacaggcacacagtgcgtgaacctgaccacaaggacccagctgccccctgcctataccaattctttcacacggggcgtgtactatcccgacaaggtgtttagaagctccgtgctgcactccacacaggatctgtttctgcctttcttttctaacgtgacctggttccacgccatccacgtgtccggcaccaatggcacaaagcggttcgacaatcccgtgctgccttttaacgatggcgtgtacttcgccagcaccgagaagtccaacatcatcagaggctggatctttggcaccacactggactctaagacacagagcctgctgatcgtgaacaatgccaccaacgtggtgatcaaggtgtgcgagttccagttttgtaatgatccattcctgggcgtgtactatcacaagaacaataagtcctggatggagtctgagtttcgcgtgtattctagcgccaacaattgcacatttgagtacgtgagccagcccttcctgatggacctggagggcaagcagggcaatttcaagaacctgagggagttcgtgtttaagaatatcgatggctacttcaagatctacagcaagcacaccccaatcaacctggtgcgcgacctgccacagggattctccgccctggagccactggtggatctgcccatcggcatcaacatcacccggtttcagacactgctggccctgcacagatcctacctgacaccaggcgactcctctagcggatggaccgcaggagctgccgcctactatgtgggctatctgcagccccggaccttcctgctgaagtacaacgagaatggcaccatcacagacgcagtggattgcgccctggaccccctgtctgagacaaagtgtacactgaagagctttaccgtggagaagggcatctatcagacaagcaatttcagggtgcagcctaccgagtccatcgtgcgctttcccaatatcacaaacctgtgcccttttggcgaggtgttcaacgccaccagattcgccagcgtgtacgcctggaatcggaagagaatctccaactgcgtggccgactattctgtgctgtacaactccgcctctttcagcacctttaagtgctatggcgtgtctcccacaaagctgaatgatctgtgctttaccaacgtgtacgccgatagcttcgtgatcaggggagacgaagtgagacagatcgcaccaggacagacaggaaagatcgcagactacaattataagctgcctgacgatttcaccggctgcgtgatcgcctggaactccaacaatctggattctaaagtgggcggcaactacaattatctgtacaggctgtttcgcaagtccaatctgagtccattcgagcgggacatctccacagagatctaccaggccggctctaccccctgcaatggcgtggagggctttaactgttatttccctctgcagtcttacggcttccagccaacaaacggcgtgggctatcagccctacagagtggtggtgctgtcctttgagctgctgcacgcaccagcaacagtgtgcggcccaaagaagtctaccaatctggtgaagaacaagtgcgtgaacttcaacttcaacggactgaccggcacaggcgtgctgaccgagagcaataagaagttcctgccttttcagcagttcggcagggacatcgcagataccacagacgccgtgcgcgaccctcagaccctggagatcctggacatcacaccatgcagcttcggcggcgtgtccgtgatcacaccaggcaccaatacatccaaccaggtggccgtgctgtatcaggacgtgaattgtaccgaggtgcccgtggcaatccacgcagatcagctgacccctacatggcgggtgtactctaccggcagcaacgtgttccagacaagagccggatgcctgatcggagcagagcacgtgaacaatagctatgagtgcgacatccctatcggcgccggcatctgtgccagctaccagacccagacaaactccccatctggagcaggctccgtggccagccagtccatcatcgcctataccatgagcctgggcgccgagaacagcgtggcctactccaacaattctatcgccatccctaccaacttcacaatcagcgtgaccacagagatcctgccagtgtctatgaccaagacaagcgtggactgcacaatgtatatctgtggcgatagcaccgagtgctccaacctgctgctgcagtacggctccttttgtacccagctgaatagagccctgacaggcatcgccgtggagcaggataagaacacacaggaggtgttcgcccaggtgaagcagatctacaagaccccacccatcaaggactttggcggcttcaacttcagccagatcctgcctgatccaagcaagccctccaagaggtcttttatcgaggacctgctgttcaacaaggtgaccctggccgatgccggcttcatcaagcagtatggagattgcctgggagacatcgcagcccgcgacctgatctgtgcccagaagtttaatggcctgaccgtgctgcctccactgctgacagatgagatgatcgcccagtacacatctgccctgctggccggcaccatcacaagcggatggaccttcggcgcaggagccgccctgcagatcccttttgccatgcagatggcctataggttcaacggcatcggcgtgacccagaatgtgctgtacgagaaccagaagctgatcgccaatcagtttaacagcgccatcggcaagatccaggactctctgtcctctacagccagcgccctgggcaagctgcaggatgtggtgaatcagaacgcccaggccctgaataccctggtgaagcagctgagctccaacttcggcgccatctctagcgtgctgaatgacatcctgagccggctggacccccctgaggcagaggtgcagatcgacaggctgatcacaggccgcctgcagagcctgcagacctacgtgacacagcagctgatcagggcagcagagatcagagcctccgccaatctggccgccaccaagatgagcgagtgcgtgctgggacagtccaagagggtggacttttgtggcaagggctatcacctgatgtctttcccacagagcgcccctcacggcgtggtgtttctgcacgtgacctacgtgccagcccaggagaagaacttcaccacagcaccagccatctgccacgatggaaaggcacactttcctagggagggcgtgttcgtgtctaacggcacccactggtttgtgacacagcgcaatttctacgagccacagatcatcaccacagacaatacattcgtgagcggcaactgtgatgtggtgatcggcatcgtgaacaataccgtgtatgatccactgcagcccgagctggactcctttaaggaggagctggataagtacttcaagaatcacacctctcccgacgtggatctgggcgacatctccggcatcaatgcctctgtggtgaacatccagaaggagatcgaccggctgaacgaggtggccaagaatctgaacgagagcctgatcgatctgcaggagctgggcaagtatgagcagtacatcaagggctctggcagagagaacctgtatttccagggaggaggaggcagcggatacatccctgaggcaccaagggacggacaggcctacgtgcgcaaggatggcgagtgggtgctgctgtccacctttctgggccatcatcaccaccaccaccaccactga

SEQ ID NO: 4897 - DNA, 3846 bp, Artificial Sequence
  Description of Artificial Sequence: Synthetic polynucleotide
atgggcatcctgccaagcccaggaatgcccgccctgctgtctctggtgagcctgctgtccgtgctgctgatgggatgcgtggcagagacaggcacacagtgcgtgaacctgaccacaaggacccagctgccccctgcctataccaattctttcacacggggcgtgtactatcccgacaaggtgtttagaagctccgtgctgcactccacacaggatctgtttctgcctttcttttctaacgtgacctggttccacgccatccacgtgtccggcaccaatggcacaaagcggttcgacaatcccgtgctgccttttaacgatggcgtgtacttcgccagcaccgagaagtccaacatcatcagaggctggatctttggcaccacactggactctaagacacagagcctgctgatcgtgaacaatgccaccaacgtggtgatcaaggtgtgcgagttccagttttgtaatgatccattcctgggcgtgtactatcacaagaacaataagtcctggatggagtctgagtttcgcgtgtattctagcgccaacaattgcacatttgagtacgtgagccagcccttcctgatggacctggagggcaagcagggcaatttcaagaacctgagggagttcgtgtttaagaatatcgatggctacttcaagatctacagcaagcacaccccaatcaacctggtgcgcgacctgccacagggattctccgccctggagccactggtggatctgcccatcggcatcaacatcacccggtttcagacactgctggccctgcacagatcctacctgacaccaggcgactcctctagcggatggaccgcaggagctgccgcctactatgtgggctatctgcagccccggaccttcctgctgaagtacaacgagaatggcaccatcacagacgcagtggattgcgccctggaccccctgtctgagacaaagtgtacactgaagagctttaccgtggagaagggcatctatcagacaagcaatttcagggtgcagcctaccgagtccatcgtgcgctttcccaatatcacaaacctgtgcccttttggcgaggtgttcaacgccaccagattcgccagcgtgtacgcctggaatcggaagagaatctccaactgcgtggccgactattctgtgctgtacaactccgcctctttcagcacctttaagtgctatggcgtgtctcccacaaagctgaatgatctgtgctttaccaacgtgtacgccgatagcttcgtgatcaggggagacgaagtgagacagatcgcaccaggacagacaggaaagatcgcagactacaattataagctgcctgacgatttcaccggctgcgtgatcgcctggaactccaacaatctggattctaaagtgggcggcaactacaattatctgtacaggctgtttcgcaagtccaatctgaagccattcgagcgggacatctccacagagatctaccaggccggctctaccccctgcaatggcgtggagggctttaactgttatttccctctgcagtcttacggcttccagccaacaaacggcgtgggctatcagccctacagagtggtggtgctgtcctttgagctgctgaaagcaccagcaacagtgtgcggcccaaagaagtctaccaatctggtgaagaacaagtgcgtgaacttcaacttcaacggactgaccggcacaggcgtgctgaccgagagcaataagaagttcctgccttttcagcagttcggcagggacatcgcagataccacagacgccgtgcgcgaccctcagaccctggagatcctggacatcacaccatgcagcttcggcggcgtgtccgtgatcacaccaggcaccaatacatccaaccaggtggccgtgctgtatcaggacgtgaattgtaccgaggtgcccgtggcaatccacgcagatcagctgacccctacatggcgggtgtactctaccggcagcaacgtgttccagacaagagccggatgcctgatcggagcagagcacgtgaacaatagctatgagtgcgacatccctatcggcgccggcatctgtgccagctaccagacccagacaaactccccatctggagcaggctccgtggccagccagtccatcatcgcctataccatgagcctgggcgccgagaacagcgtggcctactccaacaattctatcgccatccctaccaacttcacaatcagcgtgaccacagagatcctgccagtgtctatgaccaagacaagcgtggactgcacaatgtatatctgtggcgatagcaccgagtgctccaacctgctgctgcagtacggctccttttgtacccagctgaatagagccctgacaggcatcgccgtggagcaggataagaacacacaggaggtgttcgcccaggtgaagcagatctacaagaccccacccatcaaggactttggcggcttcaacttcagccagatcctgcctgatccaagcaagccctccaagaggtcttttatcgaggacctgctgttcaacaaggtgaccctggccgatgccggcttcatcaagcagtatggagattgcctgggagacatcgcagcccgcgacctgatctgtgcccagaagtttaatggcctgaccgtgctgcctccactgctgacagatgagatgatcgcccagtacacatctgccctgctggccggcaccatcacaagcggatggaccttcggcgcaggagccgccctgcagatcccttttgccatgcagatggcctataggttcaacggcatcggcgtgacccagaatgtgctgtacgagaaccagaagctgatcgccaatcagtttaacagcgccatcggcaagatccaggactctctgtcctctacagccagcgccctgggcaagctgcaggatgtggtgaatcagaacgcccaggccctgaataccctggtgaagcagctgagctccaacttcggcgccatctctagcgtgctgaatgacatcctgagccggctggacccccctgaggcagaggtgcagatcgacaggctgatcacaggccgcctgcagagcctgcagacctacgtgacacagcagctgatcagggcagcagagatcagagcctccgccaatctggccgccaccaagatgagcgagtgcgtgctgggacagtccaagagggtggacttttgtggcaagggctatcacctgatgtctttcccacagagcgcccctcacggcgtggtgtttctgcacgtgacctacgtgccagcccaggagaagaacttcaccacagcaccagccatctgccacgatggaaaggcacactttcctagggagggcgtgttcgtgtctaacggcacccactggtttgtgacacagcgcaatttctacgagccacagatcatcaccacagacaatacattcgtgagcggcaactgtgatgtggtgatcggcatcgtgaacaataccgtgtatgatccactgcagcccgagctggactcctttaaggaggagctggataagtacttcaagaatcacacctctcccgacgtggatctgggcgacatctccggcatcaatgcctctgtggtgaacatccagaaggagatcgaccggctgaacgaggtggccaagaatctgaacgagagcctgatcgatctgcaggagctgggcaagtatgagcagtacatcaagggctctggcagagagaacctgtatttccagggaggaggaggcagcggatacatccctgaggcaccaagggacggacaggcctacgtgcgcaaggatggcgagtgggtgctgctgtccacctttctgggccatcatcaccaccaccaccaccactga

SEQ ID NO: 4898 - DNA, 3846 bp, Artificial Sequence
  Description of Artificial Sequence: Synthetic polynucleotide
atgggcatcctgccaagcccaggaatgcccgccctgctgtctctggtgagcctgctgtccgtgctgctgatgggatgcgtggcagagacaggcacacagtgcgtgaacctgaccacaaggacccagctgccccctgcctataccaattctttcacacggggcgtgtactatcccgacaaggtgtttagaagctccgtgctgcactccacacaggatctgtttctgcctttcttttctaacgtgacctggttccacgccatccacgtgtccggcaccaatggcacaaagcggttcgacaatcccgtgctgccttttaacgatggcgtgtacttcgccagcaccgagaagtccaacatcatcagaggctggatctttggcaccacactggactctaagacacagagcctgctgatcgtgaacaatgccaccaacgtggtgatcaaggtgtgcgagttccagttttgtaatgatccattcctgggcgtgtactatcacaagaacaataagtcctggatggagtctgagtttcgcgtgtattctagcgccaacaattgcacatttgagtacgtgagccagcccttcctgatggacctggagggcaagcagggcaatttcaagaacctgagggagttcgtgtttaagaatatcgatggctacttcaagatctacagcaagcacaccccaatcaacctggtgcgcgacctgccacagggattctccgccctggagccactggtggatctgcccatcggcatcaacatcacccggtttcagacactgctggccctgcacagatcctacctgacaccaggcgactcctctagcggatggaccgcaggagctgccgcctactatgtgggctatctgcagccccggaccttcctgctgaagtacaacgagaatggcaccatcacagacgcagtggattgcgccctggaccccctgtctgagacaaagtgtacactgaagagctttaccgtggagaagggcatctatcagacaagcaatttcagggtgcagcctaccgagtccatcgtgcgctttcccaatatcacaaacctgtgcccttttggcgaggtgttcaacgccaccagattcgccagcgtgtacgcctggaatcggaagagaatctccaactgcgtggccgactattctgtgctgtacaactccgcctctttcagcacctttaagtgctatggcgtgtctcccacaaagctgaatgatctgtgctttaccaacgtgtacgccgatagcttcgtgatcaggggagacgaagtgagacagatcgcaccaggacagacaggaaagatcgcagactacaattataagctgcctgacgatttcaccggctgcgtgatcgcctggaactccaacaatctggattctaaagtgggcggcaactacaattatctgtacaggctgtttcgcaagtccaatctgaagccattcgagcgggacatctccacagagatctaccaggccggctctaccccctgcaatggcgtggagggctttaactgttatttccctctgcagtcttacggcttccagccaacaaacggcgtgggctatcagccctacagagtggtggtgctgtcctttgagctgctgcacgcaccagcaacagtgtgcggcccaaagaagtctaccaatctggtgaagaacaagtgcgtgaacttcaacttcaacggagaaaccggcacaggcgtgctgaccgagagcaataagaagttcctgccttttcagcagttcggcagggacatcgcagataccacagacgccgtgcgcgaccctcagaccctggagatcctggacatcacaccatgcagcttcggcggcgtgtccgtgatcacaccaggcaccaatacatccaaccaggtggccgtgctgtatcaggacgtgaattgtaccgaggtgcccgtggcaatccacgcagatcagctgacccctacatggcgggtgtactctaccggcagcaacgtgttccagacaagagccggatgcctgatcggagcagagcacgtgaacaatagctatgagtgcgacatccctatcggcgccggcatctgtgccagctaccagacccagacaaactccccatctggagcaggctccgtggccagccagtccatcatcgcctataccatgagcctgggcgccgagaacagcgtggcctactccaacaattctatcgccatccctaccaacttcacaatcagcgtgaccacagagatcctgccagtgtctatgaccaagacaagcgtggactgcacaatgtatatctgtggcgatagcaccgagtgctccaacctgctgctgcagtacggctccttttgtacccagctgaatagagccctgacaggcatcgccgtggagcaggataagaacacacaggaggtgttcgcccaggtgaagcagatctacaagaccccacccatcaaggactttggcggcttcaacttcagccagatcctgcctgatccaagcaagccctccaagaggtcttttatcgaggacctgctgttcaacaaggtgaccctggccgatgccggcttcatcaagcagtatggagattgcctgggagacatcgcagcccgcgacctgatctgtgcccagaagtttaatggcctgaccgtgctgcctccactgctgacagatgagatgatcgcccagtacacatctgccctgctggccggcaccatcacaagcggatggaccttcggcgcaggagccgccctgcagatcccttttgccatgcagatggcctataggttcaacggcatcggcgtgacccagaatgtgctgtacgagaaccagaagctgatcgccaatcagtttaacagcgccatcggcaagatccaggactctctgtcctctacagccagcgccctgggcaagctgcaggatgtggtgaatcagaacgcccaggccctgaataccctggtgaagcagctgagctccaacttcggcgccatctctagcgtgctgaatgacatcctgagccggctggacccccctgaggcagaggtgcagatcgacaggctgatcacaggccgcctgcagagcctgcagacctacgtgacacagcagctgatcagggcagcagagatcagagcctccgccaatctggccgccaccaagatgagcgagtgcgtgctgggacagtccaagagggtggacttttgtggcaagggctatcacctgatgtctttcccacagagcgcccctcacggcgtggtgtttctgcacgtgacctacgtgccagcccaggagaagaacttcaccacagcaccagccatctgccacgatggaaaggcacactttcctagggagggcgtgttcgtgtctaacggcacccactggtttgtgacacagcgcaatttctacgagccacagatcatcaccacagacaatacattcgtgagcggcaactgtgatgtggtgatcggcatcgtgaacaataccgtgtatgatccactgcagcccgagctggactcctttaaggaggagctggataagtacttcaagaatcacacctctcccgacgtggatctgggcgacatctccggcatcaatgcctctgtggtgaacatccagaaggagatcgaccggctgaacgaggtggccaagaatctgaacgagagcctgatcgatctgcaggagctgggcaagtatgagcagtacatcaagggctctggcagagagaacctgtatttccagggaggaggaggcagcggatacatccctgaggcaccaagggacggacaggcctacgtgcgcaaggatggcgagtgggtgctgctgtccacctttctgggccatcatcaccaccaccaccaccactga

SEQ ID NO: 4899 - DNA, 3846 bp, Artificial Sequence
  Description of Artificial Sequence: Synthetic polynucleotide
atgggcatcctgccaagcccaggaatgcccgccctgctgtctctggtgagcctgctgtccgtgctgctgatgggatgcgtggcagagacaggcacacagtgcgtgaacctgaccacaaggacccagctgccccctgcctataccaattctttcacacggggcgtgtactatcccgacaaggtgtttagaagctccgtgctgcactccacacaggatctgtttctgcctttcttttctaacgtgacctggttccacgccatccacgtgtccggcaccaatggcacaaagcggttcgacaatcccgtgctgccttttaacgatggcgtgtacttcgccagcaccgagaagtccaacatcatcagaggctggatctttggcaccacactggactctaagacacagagcctgctgatcgtgaacaatgccaccaacgtggtgatcaaggtgtgcgagttccagttttgtaatgatccattcctgggcgtgtactatcacaagaacaataagtcctggatggagtctgagtttcgcgtgtattctagcgccaacaattgcacatttgagtacgtgagccagcccttcctgatggacctggagggcaagcagggcaatttcaagaacctgagggagttcgtgtttaagaatatcgatggctacttcaagatctacagcaagcacaccccaatcaacctggtgcgcgacctgccacagggattctccgccctggagccactggtggatctgcccatcggcatcaacatcacccggtttcagacactgctggccctgcacagatcctacctgacaccaggcgactcctctagcggatggaccgcaggagctgccgcctactatgtgggctatctgcagccccggaccttcctgctgaagtacaacgagaatggcaccatcacagacgcagtggattgcgccctggaccccctgtctgagacaaagtgtacactgaagagctttaccgtggagaagggcatctatcagacaagcaatttcagggtgcagcctaccgagtccatcgtgcgctttcccaatatcacaaacctgtgcccttttggcgaggtgttcaacgccaccagattcgccagcgtgtacgcctggaatcggaagagaatctccaactgcgtggccgactattctgtgctgtacaactcctgttctttcagcacctttaagtgctatggcgtgtctcccacaaagctgaatgatctgtgctttaccaacgtgtacgccgatagcttcgtgatcaggggagacgaagtgagacagatcgcaccaggacagacaggaaagatcgcagactacaattataagctgcctgacgatttcaccggctgcgtgatcgcctggaactccaacaatctggattctaaagtgggcggcaactacaattatctgtacaggctgtttcgcaagtccaatctgaagccattcgagcgggacatctccacagagatctaccaggccggctctaccccctgcaatggcgtggagggctttaactgttatttccctctgcagtcttacggcttccagccaacaaacggcgtgggctatcagccctacagagtggtggtgctgtcctttgagctgctgcacgcaccagcaacagtgtgcggcccaaagaagtctaccaatctggtgaagaacaagtgcgtgaacttcaacttcaacggactgaccggcacaggcgtgctgaccgagagcaataagaagttcctgccttttcagcagttcggcagggacatcgcagataccacagacgccgtgcgcgaccctcagaccctggagatcctggacatcacaccatgcagcttcggcggcgtgtccgtgatcacaccaggcaccaatacatccaaccaggtggccgtgctgtatcaggacgtgaattgtaccgaggtgcccgtggcaatccacgcagatcagctgacccctacatggcgggtgtactctaccggcagcaacgtgttccagacaagagccggatgcctgatcggagcagagcacgtgaacaatagctatgagtgcgacatccctatcggcgccggcatctgtgccagctaccagacccagacaaactccccatctggagcaggctccgtggccagccagtccatcatcgcctataccatgagcctgggcgccgagaacagcgtggcctactccaacaattctatcgccatccctaccaacttcacaatcagcgtgaccacagagatcctgccagtgtctatgaccaagacaagcgtggactgcacaatgtatatctgtggcgatagcaccgagtgctccaacctgctgctgcagtacggctccttttgtacccagctgaatagagccctgacaggcatcgccgtggagcaggataagaacacacaggaggtgttcgcccaggtgaagcagatctacaagaccccacccatcaaggactttggcggcttcaacttcagccagatcctgcctgatccaagcaagccctccaagaggtcttttatcgaggacctgctgttcaacaaggtgaccctggccgatgccggcttcatcaagcagtatggagattgcctgggagacatcgcagcccgcgacctgatctgtgcccagaagtttaatggcctgaccgtgctgcctccactgctgacagatgagatgatcgcccagtacacatctgccctgctggccggcaccatcacaagcggatggaccttcggcgcaggagccgccctgcagatcccttttgccatgcagatggcctataggttcaacggcatcggcgtgacccagaatgtgctgtacgagaaccagaagctgatcgccaatcagtttaacagcgccatcggcaagatccaggactctctgtcctctacagccagcgccctgggcaagctgcaggatgtggtgaatcagaacgcccaggccctgaataccctggtgaagcagctgagctccaacttcggcgccatctctagcgtgctgaatgacatcctgagccggctggacccccctgaggcagaggtgcagatcgacaggctgatcacaggccgcctgcagagcctgcagacctacgtgacacagcagctgatcagggcagcagagatcagagcctccgccaatctggccgccaccaagatgagcgagtgcgtgctgggacagtccaagagggtggacttttgtggcaagggctatcacctgatgtctttcccacagagcgcccctcacggcgtggtgtttctgcacgtgacctacgtgccagcccaggagaagaacttcaccacagcaccagccatctgccacgatggaaaggcacactttcctagggagggcgtgttcgtgtctaacggcacccactggtttgtgacacagcgcaatttctacgagccacagatcatcaccacagacaatacattcgtgagcggcaactgtgatgtggtgatcggcatcgtgaacaataccgtgtatgatccactgcagcccgagctggactcctttaaggaggagctggataagtacttcaagaatcacacctctcccgacgtggatctgggcgacatctccggcatcaatgcctctgtggtgaacatccagaaggagatcgaccggctgaacgaggtggccaagaatctgaacgagagcctgatcgatctgcaggagctgggcaagtatgagcagtacatcaagggctctggcagagagaacctgtatttccagggaggaggaggcagcggatacatccctgaggcaccaagggacggacaggcctacgtgcgcaaggatggcgagtgggtgctgctgtccacctttctgggccatcatcaccaccaccaccaccactga

SEQ ID NO: 4900 - DNA, 3846 bp, Artificial Sequence
  Description of Artificial Sequence: Synthetic polynucleotide
atgggcatcctgccaagcccaggaatgcccgccctgctgtctctggtgagcctgctgtccgtgctgctgatgggatgcgtggcagagacaggcacacagtgcgtgaacctgaccacaaggacccagctgccccctgcctataccaattctttcacacggggcgtgtactatcccgacaaggtgtttagaagctccgtgctgcactccacacaggatctgtttctgcctttcttttctaacgtgacctggttccacgccatccacgtgtccggcaccaatggcacaaagcggttcgacaatcccgtgctgccttttaacgatggcgtgtacttcgccagcaccgagaagtccaacatcatcagaggctggatctttggcaccacactggactctaagacacagagcctgctgatcgtgaacaatgccaccaacgtggtgatcaaggtgtgcgagttccagttttgtaatgatccattcctgggcgtgtactatcacaagaacaataagtcctggatggagtctgagtttcgcgtgtattctagcgccaacaattgcacatttgagtacgtgagccagcccttcctgatggacctggagggcaagcagggcaatttcaagaacctgagggagttcgtgtttaagaatatcgatggctacttcaagatctacagcaagcacaccccaatcaacctggtgcgcgacctgccacagggattctccgccctggagccactggtggatctgcccatcggcatcaacatcacccggtttcagacactgctggccctgcacagatcctacctgacaccaggcgactcctctagcggatggaccgcaggagctgccgcctactatgtgggctatctgcagccccggaccttcctgctgaagtacaacgagaatggcaccatcacagacgcagtggattgcgccctggaccccctgtctgagacaaagtgtacactgaagagctttaccgtggagaagggcatctatcagacaagcaatttcagggtgcagcctaccgagtccatcgtgcgctttcccaatatcacaaacctgtgcccttttggcgaggtgttcaacgccaccagattcgccagcgtgtacgcctggaatcggaagagaatctccaactgcgtggccgactattctgtgctgtacaactccgcctctttcagcacctttaagtgctatggcgtgtctcccacaaagctgaatgatctgtgctttaccaacgtgtacgccgatagcttcgtgatcaggggagacgaagtgagacagatcgcaccaggacagacaggaaagatcgcagactacaattataagctgcctgacgatttcaccggctgcgtgatcgcctggaactccaacaatctggattctaaagtgggcggcaactacaattatctgtacaggctgtttcgcaagtccaatctgaagccattcgagcgggacatctccacagagatctaccaggccggctctaccccctgcaatggcgtggagggctttaactgttatttccctctgcagtcttacggcttccagccaacaaacggcgtgggctatcagccctacagagtggtggtgctgtcctttgagctgaaacacgcaccagcaacagtgtgcggcccaaagaagtctaccaatctggtgaagaacaagtgcgtgaacttcaacttcaacggactgaccggcacaggcgtgctgaccgagagcaataagaagttcctgccttttcagcagttcggcagggacatcgcagataccacagacgccgtgcgcgaccctcagaccctggagatcctggacatcacaccatgcagcttcggcggcgtgtccgtgatcacaccaggcaccaatacatccaaccaggtggccgtgctgtatcaggacgtgaattgtaccgaggtgcccgtggcaatccacgcagatcagctgacccctacatggcgggtgtactctaccggcagcaacgtgttccagacaagagccggatgcctgatcggagcagagcacgtgaacaatagctatgagtgcgacatccctatcggcgccggcatctgtgccagctaccagacccagacaaactccccatctggagcaggctccgtggccagccagtccatcatcgcctataccatgagcctgggcgccgagaacagcgtggcctactccaacaattctatcgccatccctaccaacttcacaatcagcgtgaccacagagatcctgccagtgtctatgaccaagacaagcgtggactgcacaatgtatatctgtggcgatagcaccgagtgctccaacctgctgctgcagtacggctccttttgtacccagctgaatagagccctgacaggcatcgccgtggagcaggataagaacacacaggaggtgttcgcccaggtgaagcagatctacaagaccccacccatcaaggactttggcggcttcaacttcagccagatcctgcctgatccaagcaagccctccaagaggtcttttatcgaggacctgctgttcaacaaggtgaccctggccgatgccggcttcatcaagcagtatggagattgcctgggagacatcgcagcccgcgacctgatctgtgcccagaagtttaatggcctgaccgtgctgcctccactgctgacagatgagatgatcgcccagtacacatctgccctgctggccggcaccatcacaagcggatggaccttcggcgcaggagccgccctgcagatcccttttgccatgcagatggcctataggttcaacggcatcggcgtgacccagaatgtgctgtacgagaaccagaagctgatcgccaatcagtttaacagcgccatcggcaagatccaggactctctgtcctctacagccagcgccctgggcaagctgcaggatgtggtgaatcagaacgcccaggccctgaataccctggtgaagcagctgagctccaacttcggcgccatctctagcgtgctgaatgacatcctgagccggctggacccccctgaggcagaggtgcagatcgacaggctgatcacaggccgcctgcagagcctgcagacctacgtgacacagcagctgatcagggcagcagagatcagagcctccgccaatctggccgccaccaagatgagcgagtgcgtgctgggacagtccaagagggtggacttttgtggcaagggctatcacctgatgtctttcccacagagcgcccctcacggcgtggtgtttctgcacgtgacctacgtgccagcccaggagaagaacttcaccacagcaccagccatctgccacgatggaaaggcacactttcctagggagggcgtgttcgtgtctaacggcacccactggtttgtgacacagcgcaatttctacgagccacagatcatcaccacagacaatacattcgtgagcggcaactgtgatgtggtgatcggcatcgtgaacaataccgtgtatgatccactgcagcccgagctggactcctttaaggaggagctggataagtacttcaagaatcacacctctcccgacgtggatctgggcgacatctccggcatcaatgcctctgtggtgaacatccagaaggagatcgaccggctgaacgaggtggccaagaatctgaacgagagcctgatcgatctgcaggagctgggcaagtatgagcagtacatcaagggctctggcagagagaacctgtatttccagggaggaggaggcagcggatacatccctgaggcaccaagggacggacaggcctacgtgcgcaaggatggcgagtgggtgctgctgtccacctttctgggccatcatcaccaccaccaccaccactga

SEQ ID NO: 4901 - DNA, 3846 bp, Artificial Sequence
  Description of Artificial Sequence: Synthetic polynucleotide
atgggcatcctgccaagcccaggaatgcccgccctgctgtctctggtgagcctgctgtccgtgctgctgatgggatgcgtggcagagacaggcacacagtgcgtgaacctgaccacaaggacccagctgccccctgcctataccaattctttcacacggggcgtgtactatcccgacaaggtgtttagaagctccgtgctgcactccacacaggatctgtttctgcctttcttttctaacgtgacctggttccacgccatccacgtgtccggcaccaatggcacaaagcggttcgacaatcccgtgctgccttttaacgatggcgtgtacttcgccagcaccgagaagtccaacatcatcagaggctggatctttggcaccacactggactctaagacacagagcctgctgatcgtgaacaatgccaccaacgtggtgatcaaggtgtgcgagttccagttttgtaatgatccattcctgggcgtgtactatcacaagaacaataagtcctggatggagtctgagtttcgcgtgtattctagcgccaacaattgcacatttgagtacgtgagccagcccttcctgatggacctggagggcaagcagggcaatttcaagaacctgagggagttcgtgtttaagaatatcgatggctacttcaagatctacagcaagcacaccccaatcaacctggtgcgcgacctgccacagggattctccgccctggagccactggtggatctgcccatcggcatcaacatcacccggtttcagacactgctggccctgcacagatcctacctgacaccaggcgactcctctagcggatggaccgcaggagctgccgcctactatgtgggctatctgcagccccggaccttcctgctgaagtacaacgagaatggcaccatcacagacgcagtggattgcgccctggaccccctgtctgagacaaagtgtacactgaagagctttaccgtggagaagggcatctatcagacaagcaatttcagggtgcagcctaccgagtccatcgtgcgctttcccaatatcacaaacctgtgcccttttggcgaggtgttcaacgccaccagattcgccagcgtgagtgcctggaatcggaagagaatctccaactgcgtggccgactattctgtgctgtacaactccgcctctttcagcacctttaagtgctatggcgtgtctcccacaaagctgaatgatctgtgctttaccaacgtgtacgccgatagcttcgtgatcaggggagacgaagtgagacagatcgcaccaggacagacaggaaagatcgcagactacaattataagctgcctgacgatttcaccggctgcgtgatcgcctggaactccaacaatctggattctaaagtgggcggcaactacaattatctgtacaggctgtttcgcaagtccaatctgaagccattcgagcgggacatctccacagagatctaccaggccggctctaccccctgcaatggcgtggagggctttaactgttatttccctctgcagtcttacggcttccagccaacaaacggcgtgggctatcagccctacagagtggtggtgctgtcctttgagctgctgcacgcaccagcaacagtgtgcggcccaaagaagtctaccaatctggtgaagaacaagtgcgtgaacttcaacttcaacggactgaccggcacaggcgtgctgaccgagagcaataagaagttcctgccttttcagcagttcggcagggacatcgcagataccacagacgccgtgcgcgaccctcagaccctggagatcctggacatcacaccatgcagcttcggcggcgtgtccgtgatcacaccaggcaccaatacatccaaccaggtggccgtgctgtatcaggacgtgaattgtaccgaggtgcccgtggcaatccacgcagatcagctgacccctacatggcgggtgtactctaccggcagcaacgtgttccagacaagagccggatgcctgatcggagcagagcacgtgaacaatagctatgagtgcgacatccctatcggcgccggcatctgtgccagctaccagacccagacaaactccccatctggagcaggctccgtggccagccagtccatcatcgcctataccatgagcctgggcgccgagaacagcgtggcctactccaacaattctatcgccatccctaccaacttcacaatcagcgtgaccacagagatcctgccagtgtctatgaccaagacaagcgtggactgcacaatgtatatctgtggcgatagcaccgagtgctccaacctgctgctgcagtacggctccttttgtacccagctgaatagagccctgacaggcatcgccgtggagcaggataagaacacacaggaggtgttcgcccaggtgaagcagatctacaagaccccacccatcaaggactttggcggcttcaacttcagccagatcctgcctgatccaagcaagccctccaagaggtcttttatcgaggacctgctgttcaacaaggtgaccctggccgatgccggcttcatcaagcagtatggagattgcctgggagacatcgcagcccgcgacctgatctgtgcccagaagtttaatggcctgaccgtgctgcctccactgctgacagatgagatgatcgcccagtacacatctgccctgctggccggcaccatcacaagcggatggaccttcggcgcaggagccgccctgcagatcccttttgccatgcagatggcctataggttcaacggcatcggcgtgacccagaatgtgctgtacgagaaccagaagctgatcgccaatcagtttaacagcgccatcggcaagatccaggactctctgtcctctacagccagcgccctgggcaagctgcaggatgtggtgaatcagaacgcccaggccctgaataccctggtgaagcagctgagctccaacttcggcgccatctctagcgtgctgaatgacatcctgagccggctggacccccctgaggcagaggtgcagatcgacaggctgatcacaggccgcctgcagagcctgcagacctacgtgacacagcagctgatcagggcagcagagatcagagcctccgccaatctggccgccaccaagatgagcgagtgcgtgctgggacagtccaagagggtggacttttgtggcaagggctatcacctgatgtctttcccacagagcgcccctcacggcgtggtgtttctgcacgtgacctacgtgccagcccaggagaagaacttcaccacagcaccagccatctgccacgatggaaaggcacactttcctagggagggcgtgttcgtgtctaacggcacccactggtttgtgacacagcgcaatttctacgagccacagatcatcaccacagacaatacattcgtgagcggcaactgtgatgtggtgatcggcatcgtgaacaataccgtgtatgatccactgcagcccgagctggactcctttaaggaggagctggataagtacttcaagaatcacacctctcccgacgtggatctgggcgacatctccggcatcaatgcctctgtggtgaacatccagaaggagatcgaccggctgaacgaggtggccaagaatctgaacgagagcctgatcgatctgcaggagctgggcaagtatgagcagtacatcaagggctctggcagagagaacctgtatttccagggaggaggaggcagcggatacatccctgaggcaccaagggacggacaggcctacgtgcgcaaggatggcgagtgggtgctgctgtccacctttctgggccatcatcaccaccaccaccaccactga

SEQ ID NO: 4902 - DNA, 3846 bp, Artificial Sequence
  Description of Artificial Sequence: Synthetic polynucleotide
atgggcatcctgccaagcccaggaatgcccgccctgctgtctctggtgagcctgctgtccgtgctgctgatgggatgcgtggcagagacaggcacacagtgcgtgaacctgaccacaaggacccagctgccccctgcctataccaattctttcacacggggcgtgtactatcccgacaaggtgtttagaagctccgtgctgcactccacacaggatctgtttctgcctttcttttctaacgtgacctggttccacgccatccacgtgtccggcaccaatggcacaaagcggttcgacaatcccgtgctgccttttaacgatggcgtgtacttcgccagcaccgagaagtccaacatcatcagaggctggatctttggcaccacactggactctaagacacagagcctgctgatcgtgaacaatgccaccaacgtggtgatcaaggtgtgcgagttccagttttgtaatgatccattcctgggcgtgtactatcacaagaacaataagtcctggatggagtctgagtttcgcgtgtattctagcgccaacaattgcacatttgagtacgtgagccagcccttcctgatggacctggagggcaagcagggcaatttcaagaacctgagggagttcgtgtttaagaatatcgatggctacttcaagatctacagcaagcacaccccaatcaacctggtgcgcgacctgccacagggattctccgccctggagccactggtggatctgcccatcggcatcaacatcacccggtttcagacactgctggccctgcacagatcctacctgacaccaggcgactcctctagcggatggaccgcaggagctgccgcctactatgtgggctatctgcagccccggaccttcctgctgaagtacaacgagaatggcaccatcacagacgcagtggattgcgccctggaccccctgtctgagacaaagtgtacactgaagagctttaccgtggagaagggcatctatcagacaagcaatttcagggtgcagcctaccgagtccatcgtgcgctttcccaatatcacaaacctgtgcccttttggcgaggtgttcaacgccaccagattcgccagcgtgtacgcctggaatcggaagagaatctccaactgcgtggccgactattctgtgctgtacaactccgcctctttcagcacctttaagtgctatggcgtgtctcccacaaagctgaatgatctgtgctttaccaacgtgtacgccgatagcttcgtgatcaggggagacgaagtgagacagatcgcaccaggacagacaggaaagatcgcagactacaattataagctgcctgacgatttcaccggctgcgtgatcgcctggaactccaacaatctggattctaaagtgggcggcaactacaattatctgtacaggctgtttcgcaagtccaatctgaagccattcgagcgggacatctccacactcatctaccaggccggctctaccccctgcaatggcgtggagggctttaactgttatttccctctgcagtcttacggcttccagccaacaaacggcgtgggctatcagccctacagagtggtggtgctgtcctttgagctgctgcacgcaccagcaacagtgtgcggcccaaagaagtctaccaatctggtgaagaacaagtgcgtgaacttcaacttcaacggactgaccggcacaggcgtgctgaccgagagcaataagaagttcctgccttttcagcagttcggcagggacatcgcagataccacagacgccgtgcgcgaccctcagaccctggagatcctggacatcacaccatgcagcttcggcggcgtgtccgtgatcacaccaggcaccaatacatccaaccaggtggccgtgctgtatcaggacgtgaattgtaccgaggtgcccgtggcaatccacgcagatcagctgacccctacatggcgggtgtactctaccggcagcaacgtgttccagacaagagccggatgcctgatcggagcagagcacgtgaacaatagctatgagtgcgacatccctatcggcgccggcatctgtgccagctaccagacccagacaaactccccatctggagcaggctccgtggccagccagtccatcatcgcctataccatgagcctgggcgccgagaacagcgtggcctactccaacaattctatcgccatccctaccaacttcacaatcagcgtgaccacagagatcctgccagtgtctatgaccaagacaagcgtggactgcacaatgtatatctgtggcgatagcaccgagtgctccaacctgctgctgcagtacggctccttttgtacccagctgaatagagccctgacaggcatcgccgtggagcaggataagaacacacaggaggtgttcgcccaggtgaagcagatctacaagaccccacccatcaaggactttggcggcttcaacttcagccagatcctgcctgatccaagcaagccctccaagaggtcttttatcgaggacctgctgttcaacaaggtgaccctggccgatgccggcttcatcaagcagtatggagattgcctgggagacatcgcagcccgcgacctgatctgtgcccagaagtttaatggcctgaccgtgctgcctccactgctgacagatgagatgatcgcccagtacacatctgccctgctggccggcaccatcacaagcggatggaccttcggcgcaggagccgccctgcagatcccttttgccatgcagatggcctataggttcaacggcatcggcgtgacccagaatgtgctgtacgagaaccagaagctgatcgccaatcagtttaacagcgccatcggcaagatccaggactctctgtcctctacagccagcgccctgggcaagctgcaggatgtggtgaatcagaacgcccaggccctgaataccctggtgaagcagctgagctccaacttcggcgccatctctagcgtgctgaatgacatcctgagccggctggacccccctgaggcagaggtgcagatcgacaggctgatcacaggccgcctgcagagcctgcagacctacgtgacacagcagctgatcagggcagcagagatcagagcctccgccaatctggccgccaccaagatgagcgagtgcgtgctgggacagtccaagagggtggacttttgtggcaagggctatcacctgatgtctttcccacagagcgcccctcacggcgtggtgtttctgcacgtgacctacgtgccagcccaggagaagaacttcaccacagcaccagccatctgccacgatggaaaggcacactttcctagggagggcgtgttcgtgtctaacggcacccactggtttgtgacacagcgcaatttctacgagccacagatcatcaccacagacaatacattcgtgagcggcaactgtgatgtggtgatcggcatcgtgaacaataccgtgtatgatccactgcagcccgagctggactcctttaaggaggagctggataagtacttcaagaatcacacctctcccgacgtggatctgggcgacatctccggcatcaatgcctctgtggtgaacatccagaaggagatcgaccggctgaacgaggtggccaagaatctgaacgagagcctgatcgatctgcaggagctgggcaagtatgagcagtacatcaagggctctggcagagagaacctgtatttccagggaggaggaggcagcggatacatccctgaggcaccaagggacggacaggcctacgtgcgcaaggatggcgagtgggtgctgctgtccacctttctgggccatcatcaccaccaccaccaccactga

SEQ ID NO: 4903 - DNA, 3846 bp, Artificial Sequence
  Description of Artificial Sequence: Synthetic polynucleotide
atgggcatcctgccaagcccaggaatgcccgccctgctgtctctggtgagcctgctgtccgtgctgctgatgggatgcgtggcagagacaggcacacagtgcgtgaacctgaccacaaggacccagctgccccctgcctataccaattctttcacacggggcgtgtactatcccgacaaggtgtttagaagctccgtgctgcactccacacaggatctgtttctgcctttcttttctaacgtgacctggttccacgccatccacgtgtccggcaccaatggcacaaagcggttcgacaatcccgtgctgccttttaacgatggcgtgtacttcgccagcaccgagaagtccaacatcatcagaggctggatctttggcaccacactggactctaagacacagagcctgctgatcgtgaacaatgccaccaacgtggtgatcaaggtgtgcgagttccagttttgtaatgatccattcctgggcgtgtactatcacaagaacaataagtcctggatggagtctgagtttcgcgtgtattctagcgccaacaattgcacatttgagtacgtgagccagcccttcctgatggacctggagggcaagcagggcaatttcaagaacctgagggagttcgtgtttaagaatatcgatggctacttcaagatctacagcaagcacaccccaatcaacctggtgcgcgacctgccacagggattctccgccctggagccactggtggatctgcccatcggcatcaacatcacccggtttcagacactgctggccctgcacagatcctacctgacaccaggcgactcctctagcggatggaccgcaggagctgccgcctactatgtgggctatctgcagccccggaccttcctgctgaagtacaacgagaatggcaccatcacagacgcagtggattgcgccctggaccccctgtctgagacaaagtgtacactgaagagctttaccgtggagaagggcatctatcagacaagcaatttcagggtgcagcctaccgagtccatcgtgcgctttcccaatatcacaaacctgtgcccttttggcgaggtgttcaacgccaccagattcgccagcgtgtacgcctggaatcggaagagaatctccaactgcgtggccgactattctgtgctgtacaactccgcctctttcagcacctttaagtgctatggcgtgtctcccacaaagctgaatgatctgtgctttaccaacgtgtacgccgatagcttcgtgatcaggggagacgaagtgagacagatcgcaccaggacagacaggaaagatcgcagactacaattataagctgcctgacgatttcaccggctgcgtgatcgcctggaactccaacaatctggattctaaagtgggcggcaactacaattatctgtacaggctgtttcgcaagtccaatctgaagccattcgagcgggacatctccacagagatctaccaggccggcgcgaccccctgcaatggcgtggagggctttaactgttatttccctctgcagtcttacggcttccagccaacaaacggcgtgggctatcagccctacagagtggtggtgctgtcctttgagctgctgcacgcaccagcaacagtgtgcggcccaaagaagtctaccaatctggtgaagaacaagtgcgtgaacttcaacttcaacggactgaccggcacaggcgtgctgaccgagagcaataagaagttcctgccttttcagcagttcggcagggacatcgcagataccacagacgccgtgcgcgaccctcagaccctggagatcctggacatcacaccatgcagcttcggcggcgtgtccgtgatcacaccaggcaccaatacatccaaccaggtggccgtgctgtatcaggacgtgaattgtaccgaggtgcccgtggcaatccacgcagatcagctgacccctacatggcgggtgtactctaccggcagcaacgtgttccagacaagagccggatgcctgatcggagcagagcacgtgaacaatagctatgagtgcgacatccctatcggcgccggcatctgtgccagctaccagacccagacaaactccccatctggagcaggctccgtggccagccagtccatcatcgcctataccatgagcctgggcgccgagaacagcgtggcctactccaacaattctatcgccatccctaccaacttcacaatcagcgtgaccacagagatcctgccagtgtctatgaccaagacaagcgtggactgcacaatgtatatctgtggcgatagcaccgagtgctccaacctgctgctgcagtacggctccttttgtacccagctgaatagagccctgacaggcatcgccgtggagcaggataagaacacacaggaggtgttcgcccaggtgaagcagatctacaagaccccacccatcaaggactttggcggcttcaacttcagccagatcctgcctgatccaagcaagccctccaagaggtcttttatcgaggacctgctgttcaacaaggtgaccctggccgatgccggcttcatcaagcagtatggagattgcctgggagacatcgcagcccgcgacctgatctgtgcccagaagtttaatggcctgaccgtgctgcctccactgctgacagatgagatgatcgcccagtacacatctgccctgctggccggcaccatcacaagcggatggaccttcggcgcaggagccgccctgcagatcccttttgccatgcagatggcctataggttcaacggcatcggcgtgacccagaatgtgctgtacgagaaccagaagctgatcgccaatcagtttaacagcgccatcggcaagatccaggactctctgtcctctacagccagcgccctgggcaagctgcaggatgtggtgaatcagaacgcccaggccctgaataccctggtgaagcagctgagctccaacttcggcgccatctctagcgtgctgaatgacatcctgagccggctggacccccctgaggcagaggtgcagatcgacaggctgatcacaggccgcctgcagagcctgcagacctacgtgacacagcagctgatcagggcagcagagatcagagcctccgccaatctggccgccaccaagatgagcgagtgcgtgctgggacagtccaagagggtggacttttgtggcaagggctatcacctgatgtctttcccacagagcgcccctcacggcgtggtgtttctgcacgtgacctacgtgccagcccaggagaagaacttcaccacagcaccagccatctgccacgatggaaaggcacactttcctagggagggcgtgttcgtgtctaacggcacccactggtttgtgacacagcgcaatttctacgagccacagatcatcaccacagacaatacattcgtgagcggcaactgtgatgtggtgatcggcatcgtgaacaataccgtgtatgatccactgcagcccgagctggactcctttaaggaggagctggataagtacttcaagaatcacacctctcccgacgtggatctgggcgacatctccggcatcaatgcctctgtggtgaacatccagaaggagatcgaccggctgaacgaggtggccaagaatctgaacgagagcctgatcgatctgcaggagctgggcaagtatgagcagtacatcaagggctctggcagagagaacctgtatttccagggaggaggaggcagcggatacatccctgaggcaccaagggacggacaggcctacgtgcgcaaggatggcgagtgggtgctgctgtccacctttctgggccatcatcaccaccaccaccaccactga

SEQ ID NO: 4904 - DNA, 3846 bp, Artificial Sequence
  Description of Artificial Sequence: Synthetic polynucleotide
atgggcatcctgccaagcccaggaatgcccgccctgctgtctctggtgagcctgctgtccgtgctgctgatgggatgcgtggcagagacaggcacacagtgcgtgaacctgaccacaaggacccagctgccccctgcctataccaattctttcacacggggcgtgtactatcccgacaaggtgtttagaagctccgtgctgcactccacacaggatctgtttctgcctttcttttctaacgtgacctggttccacgccatccacgtgtccggcaccaatggcacaaagcggttcgacaatcccgtgctgccttttaacgatggcgtgtacttcgccagcaccgagaagtccaacatcatcagaggctggatctttggcaccacactggactctaagacacagagcctgctgatcgtgaacaatgccaccaacgtggtgatcaaggtgtgcgagttccagttttgtaatgatccattcctgggcgtgtactatcacaagaacaataagtcctggatggagtctgagtttcgcgtgtattctagcgccaacaattgcacatttgagtacgtgagccagcccttcctgatggacctggagggcaagcagggcaatttcaagaacctgagggagttcgtgtttaagaatatcgatggctacttcaagatctacagcaagcacaccccaatcaacctggtgcgcgacctgccacagggattctccgccctggagccactggtggatctgcccatcggcatcaacatcacccggtttcagacactgctggccctgcacagatcctacctgacaccaggcgactcctctagcggatggaccgcaggagctgccgcctactatgtgggctatctgcagccccggaccttcctgctgaagtacaacgagaatggcaccatcacagacgcagtggattgcgccctggaccccctgtctgagacaaagtgtacactgaagagctttaccgtggagaagggcatctatcagacaagcaatttcagggtgcagcctaccgagtccatcgtgcgctttcccaatatcacaaacctgtgcccttttggcgaggtgttcaacgccaccagattcgccagcgtgtacgcctggaatcggaagagaatctccaactgcgtggccgactattctttgctgtacaactccgcctctttcagcacctttaagtgctatggcgtgtctcccacaaagctgaatgatctgtgctttaccaacgtgtacgccgatagcttcgtgatcaggggagacgaagtgagacagatcgcaccaggacagacaggaaagatcgcagactacaattataagctgcctgacgatttcaccggctgcgtgatcgcctggaactccaacaatctggattctaaagtgggcggcaactacaattatctgtacaggctgtttcgcaagtccaatctgaagccattcgagcgggacatctccacagagatctaccaggccggctctaccccctgcaatggcgtggagggctttaactgttatttccctctgcagtcttacggcttccagccaacaaacggcgtgggctatcagccctacagagtggtggtgctgtcctttgagctgctgcacgcaccagcaacagtgtgcggcccaaagaagtctaccaatctggtgaagaacaagtgcgtgaacttcaacttcaacggactgaccggcacaggcgtgctgaccgagagcaataagaagttcctgccttttcagcagttcggcagggacatcgcagataccacagacgccgtgcgcgaccctcagaccctggagatcctggacatcacaccatgcagcttcggcggcgtgtccgtgatcacaccaggcaccaatacatccaaccaggtggccgtgctgtatcaggacgtgaattgtaccgaggtgcccgtggcaatccacgcagatcagctgacccctacatggcgggtgtactctaccggcagcaacgtgttccagacaagagccggatgcctgatcggagcagagcacgtgaacaatagctatgagtgcgacatccctatcggcgccggcatctgtgccagctaccagacccagacaaactccccatctggagcaggctccgtggccagccagtccatcatcgcctataccatgagcctgggcgccgagaacagcgtggcctactccaacaattctatcgccatccctaccaacttcacaatcagcgtgaccacagagatcctgccagtgtctatgaccaagacaagcgtggactgcacaatgtatatctgtggcgatagcaccgagtgctccaacctgctgctgcagtacggctccttttgtacccagctgaatagagccctgacaggcatcgccgtggagcaggataagaacacacaggaggtgttcgcccaggtgaagcagatctacaagaccccacccatcaaggactttggcggcttcaacttcagccagatcctgcctgatccaagcaagccctccaagaggtcttttatcgaggacctgctgttcaacaaggtgaccctggccgatgccggcttcatcaagcagtatggagattgcctgggagacatcgcagcccgcgacctgatctgtgcccagaagtttaatggcctgaccgtgctgcctccactgctgacagatgagatgatcgcccagtacacatctgccctgctggccggcaccatcacaagcggatggaccttcggcgcaggagccgccctgcagatcccttttgccatgcagatggcctataggttcaacggcatcggcgtgacccagaatgtgctgtacgagaaccagaagctgatcgccaatcagtttaacagcgccatcggcaagatccaggactctctgtcctctacagccagcgccctgggcaagctgcaggatgtggtgaatcagaacgcccaggccctgaataccctggtgaagcagctgagctccaacttcggcgccatctctagcgtgctgaatgacatcctgagccggctggacccccctgaggcagaggtgcagatcgacaggctgatcacaggccgcctgcagagcctgcagacctacgtgacacagcagctgatcagggcagcagagatcagagcctccgccaatctggccgccaccaagatgagcgagtgcgtgctgggacagtccaagagggtggacttttgtggcaagggctatcacctgatgtctttcccacagagcgcccctcacggcgtggtgtttctgcacgtgacctacgtgccagcccaggagaagaacttcaccacagcaccagccatctgccacgatggaaaggcacactttcctagggagggcgtgttcgtgtctaacggcacccactggtttgtgacacagcgcaatttctacgagccacagatcatcaccacagacaatacattcgtgagcggcaactgtgatgtggtgatcggcatcgtgaacaataccgtgtatgatccactgcagcccgagctggactcctttaaggaggagctggataagtacttcaagaatcacacctctcccgacgtggatctgggcgacatctccggcatcaatgcctctgtggtgaacatccagaaggagatcgaccggctgaacgaggtggccaagaatctgaacgagagcctgatcgatctgcaggagctgggcaagtatgagcagtacatcaagggctctggcagagagaacctgtatttccagggaggaggaggcagcggatacatccctgaggcaccaagggacggacaggcctacgtgcgcaaggatggcgagtgggtgctgctgtccacctttctgggccatcatcaccaccaccaccaccactga

SEQ ID NO: 4905 - DNA, 3846 bp, Artificial Sequence
  Description of Artificial Sequence: Synthetic polynucleotide
atgggcatcctgccaagcccaggaatgcccgccctgctgtctctggtgagcctgctgtccgtgctgctgatgggatgcgtggcagagacaggcacacagtgcgtgaacctgaccacaaggacccagctgccccctgcctataccaattctttcacacggggcgtgtactatcccgacaaggtgtttagaagctccgtgctgcactccacacaggatctgtttctgcctttcttttctaacgtgacctggttccacgccatccacgtgtccggcaccaatggcacaaagcggttcgacaatcccgtgctgccttttaacgatggcgtgtacttcgccagcaccgagaagtccaacatcatcagaggctggatctttggcaccacactggactctaagacacagagcctgctgatcgtgaacaatgccaccaacgtggtgatcaaggtgtgcgagttccagttttgtaatgatccattcctgggcgtgtactatcacaagaacaataagtcctggatggagtctgagtttcgcgtgtattctagcgccaacaattgcacatttgagtacgtgagccagcccttcctgatggacctggagggcaagcagggcaatttcaagaacctgagggagttcgtgtttaagaatatcgatggctacttcaagatctacagcaagcacaccccaatcaacctggtgcgcgacctgccacagggattctccgccctggagccactggtggatctgcccatcggcatcaacatcacccggtttcagacactgctggccctgcacagatcctacctgacaccaggcgactcctctagcggatggaccgcaggagctgccgcctactatgtgggctatctgcagccccggaccttcctgctgaagtacaacgagaatggcaccatcacagacgcagtggattgcgccctggaccccctgtctgagacaaagtgtacactgaagagctttaccgtggagaagggcatctatcagacaagcaatttcagggtgcagcctaccgagtccatcgtgcgctttcccaatatcacaaacctgtgcccttttggcgaggtgttcaacgccaccagattcgccagcgtgtacgcctggaatcggaagagaatctccaactgcgtggccgactattctgaactgtacaactccgcctctttcagcacctttaagtgctatggcgtgtctcccacaaagctgaatgatctgtgctttaccaacgtgtacgccgatagcttcgtgatcaggggagacgaagtgagacagatcgcaccaggacagacaggaaagatcgcagactacaattataagctgcctgacgatttcaccggctgcgtgatcgcctggaactccaacaatctggattctaaagtgggcggcaactacaattatctgtacaggctgtttcgcaagtccaatctgaagccattcgagcgggacatctccacagagatctaccaggccggctctaccccctgcaatggcgtggagggctttaactgttatttccctctgcagtcttacggcttccagccaacaaacggcgtgggctatcagccctacagagtggtggtgctgtcctttgagctgctgcacgcaccagcaacagtgtgcggcccaaagaagtctaccaatctggtgaagaacaagtgcgtgaacttcaacttcaacggactgaccggcacaggcgtgctgaccgagagcaataagaagttcctgccttttcagcagttcggcagggacatcgcagataccacagacgccgtgcgcgaccctcagaccctggagatcctggacatcacaccatgcagcttcggcggcgtgtccgtgatcacaccaggcaccaatacatccaaccaggtggccgtgctgtatcaggacgtgaattgtaccgaggtgcccgtggcaatccacgcagatcagctgacccctacatggcgggtgtactctaccggcagcaacgtgttccagacaagagccggatgcctgatcggagcagagcacgtgaacaatagctatgagtgcgacatccctatcggcgccggcatctgtgccagctaccagacccagacaaactccccatctggagcaggctccgtggccagccagtccatcatcgcctataccatgagcctgggcgccgagaacagcgtggcctactccaacaattctatcgccatccctaccaacttcacaatcagcgtgaccacagagatcctgccagtgtctatgaccaagacaagcgtggactgcacaatgtatatctgtggcgatagcaccgagtgctccaacctgctgctgcagtacggctccttttgtacccagctgaatagagccctgacaggcatcgccgtggagcaggataagaacacacaggaggtgttcgcccaggtgaagcagatctacaagaccccacccatcaaggactttggcggcttcaacttcagccagatcctgcctgatccaagcaagccctccaagaggtcttttatcgaggacctgctgttcaacaaggtgaccctggccgatgccggcttcatcaagcagtatggagattgcctgggagacatcgcagcccgcgacctgatctgtgcccagaagtttaatggcctgaccgtgctgcctccactgctgacagatgagatgatcgcccagtacacatctgccctgctggccggcaccatcacaagcggatggaccttcggcgcaggagccgccctgcagatcccttttgccatgcagatggcctataggttcaacggcatcggcgtgacccagaatgtgctgtacgagaaccagaagctgatcgccaatcagtttaacagcgccatcggcaagatccaggactctctgtcctctacagccagcgccctgggcaagctgcaggatgtggtgaatcagaacgcccaggccctgaataccctggtgaagcagctgagctccaacttcggcgccatctctagcgtgctgaatgacatcctgagccggctggacccccctgaggcagaggtgcagatcgacaggctgatcacaggccgcctgcagagcctgcagacctacgtgacacagcagctgatcagggcagcagagatcagagcctccgccaatctggccgccaccaagatgagcgagtgcgtgctgggacagtccaagagggtggacttttgtggcaagggctatcacctgatgtctttcccacagagcgcccctcacggcgtggtgtttctgcacgtgacctacgtgccagcccaggagaagaacttcaccacagcaccagccatctgccacgatggaaaggcacactttcctagggagggcgtgttcgtgtctaacggcacccactggtttgtgacacagcgcaatttctacgagccacagatcatcaccacagacaatacattcgtgagcggcaactgtgatgtggtgatcggcatcgtgaacaataccgtgtatgatccactgcagcccgagctggactcctttaaggaggagctggataagtacttcaagaatcacacctctcccgacgtggatctgggcgacatctccggcatcaatgcctctgtggtgaacatccagaaggagatcgaccggctgaacgaggtggccaagaatctgaacgagagcctgatcgatctgcaggagctgggcaagtatgagcagtacatcaagggctctggcagagagaacctgtatttccagggaggaggaggcagcggatacatccctgaggcaccaagggacggacaggcctacgtgcgcaaggatggcgagtgggtgctgctgtccacctttctgggccatcatcaccaccaccaccaccactga

SEQ ID NO: 4906 - DNA, 3846 bp, Artificial Sequence
  Description of Artificial Sequence: Synthetic polynucleotide
atgggcatcctgccaagcccaggaatgcccgccctgctgtctctggtgagcctgctgtccgtgctgctgatgggatgcgtggcagagacaggcacacagtgcgtgaacctgaccacaaggacccagctgccccctgcctataccaattctttcacacggggcgtgtactatcccgacaaggtgtttagaagctccgtgctgcactccacacaggatctgtttctgcctttcttttctaacgtgacctggttccacgccatccacgtgtccggcaccaatggcacaaagcggttcgacaatcccgtgctgccttttaacgatggcgtgtacttcgccagcaccgagaagtccaacatcatcagaggctggatctttggcaccacactggactctaagacacagagcctgctgatcgtgaacaatgccaccaacgtggtgatcaaggtgtgcgagttccagttttgtaatgatccattcctgggcgtgtactatcacaagaacaataagtcctggatggagtctgagtttcgcgtgtattctagcgccaacaattgcacatttgagtacgtgagccagcccttcctgatggacctggagggcaagcagggcaatttcaagaacctgagggagttcgtgtttaagaatatcgatggctacttcaagatctacagcaagcacaccccaatcaacctggtgcgcgacctgccacagggattctccgccctggagccactggtggatctgcccatcggcatcaacatcacccggtttcagacactgctggccctgcacagatcctacctgacaccaggcgactcctctagcggatggaccgcaggagctgccgcctactatgtgggctatctgcagccccggaccttcctgctgaagtacaacgagaatggcaccatcacagacgcagtggattgcgccctggaccccctgtctgagacaaagtgtacactgaagagctttaccgtggagaagggcatctatcagacaagcaatttcagggtgcagcctaccgagtccatcgtgcgctttcccaatatcacaaacctgtgcccttttggcgaggtgttcaacgccaccagattcgccagcgtgtacgcctggaatcggaagagaatctccaactgcgtggccgactattctgtgctgtacaactccgcctctttcagcacctttaagtgctatggcgtgtctcccacaaagctgaatgatctgtgctttaccaacgtgtacgccgatagcttcgtgatcaggggagacgaagtgagacagatcgcaccaggacagacaggaaagatcgcagactacaattataagctgcctgacgatttcaccggctgcgtgatcgcctggaactccaacaatctggattctaaagtgggcggcaactacaattatctgtacaggctgtttcgcaagtccaatctgaagccattcgagcgggacatctccacagatatctaccaggccggctctaccccctgcaatggcgtggagggctttaactgttatttccctctgcagtcttacggcttccagccaacaaacggcgtgggctatcagccctacagagtggtggtgctgtcctttgagctgctgcacgcaccagcaacagtgtgcggcccaaagaagtctaccaatctggtgaagaacaagtgcgtgaacttcaacttcaacggactgaccggcacaggcgtgctgaccgagagcaataagaagttcctgccttttcagcagttcggcagggacatcgcagataccacagacgccgtgcgcgaccctcagaccctggagatcctggacatcacaccatgcagcttcggcggcgtgtccgtgatcacaccaggcaccaatacatccaaccaggtggccgtgctgtatcaggacgtgaattgtaccgaggtgcccgtggcaatccacgcagatcagctgacccctacatggcgggtgtactctaccggcagcaacgtgttccagacaagagccggatgcctgatcggagcagagcacgtgaacaatagctatgagtgcgacatccctatcggcgccggcatctgtgccagctaccagacccagacaaactccccatctggagcaggctccgtggccagccagtccatcatcgcctataccatgagcctgggcgccgagaacagcgtggcctactccaacaattctatcgccatccctaccaacttcacaatcagcgtgaccacagagatcctgccagtgtctatgaccaagacaagcgtggactgcacaatgtatatctgtggcgatagcaccgagtgctccaacctgctgctgcagtacggctccttttgtacccagctgaatagagccctgacaggcatcgccgtggagcaggataagaacacacaggaggtgttcgcccaggtgaagcagatctacaagaccccacccatcaaggactttggcggcttcaacttcagccagatcctgcctgatccaagcaagccctccaagaggtcttttatcgaggacctgctgttcaacaaggtgaccctggccgatgccggcttcatcaagcagtatggagattgcctgggagacatcgcagcccgcgacctgatctgtgcccagaagtttaatggcctgaccgtgctgcctccactgctgacagatgagatgatcgcccagtacacatctgccctgctggccggcaccatcacaagcggatggaccttcggcgcaggagccgccctgcagatcccttttgccatgcagatggcctataggttcaacggcatcggcgtgacccagaatgtgctgtacgagaaccagaagctgatcgccaatcagtttaacagcgccatcggcaagatccaggactctctgtcctctacagccagcgccctgggcaagctgcaggatgtggtgaatcagaacgcccaggccctgaataccctggtgaagcagctgagctccaacttcggcgccatctctagcgtgctgaatgacatcctgagccggctggacccccctgaggcagaggtgcagatcgacaggctgatcacaggccgcctgcagagcctgcagacctacgtgacacagcagctgatcagggcagcagagatcagagcctccgccaatctggccgccaccaagatgagcgagtgcgtgctgggacagtccaagagggtggacttttgtggcaagggctatcacctgatgtctttcccacagagcgcccctcacggcgtggtgtttctgcacgtgacctacgtgccagcccaggagaagaacttcaccacagcaccagccatctgccacgatggaaaggcacactttcctagggagggcgtgttcgtgtctaacggcacccactggtttgtgacacagcgcaatttctacgagccacagatcatcaccacagacaatacattcgtgagcggcaactgtgatgtggtgatcggcatcgtgaacaataccgtgtatgatccactgcagcccgagctggactcctttaaggaggagctggataagtacttcaagaatcacacctctcccgacgtggatctgggcgacatctccggcatcaatgcctctgtggtgaacatccagaaggagatcgaccggctgaacgaggtggccaagaatctgaacgagagcctgatcgatctgcaggagctgggcaagtatgagcagtacatcaagggctctggcagagagaacctgtatttccagggaggaggaggcagcggatacatccctgaggcaccaagggacggacaggcctacgtgcgcaaggatggcgagtgggtgctgctgtccacctttctgggccatcatcaccaccaccaccaccactga

SEQ ID NO: 4907 - DNA, 3846 bp, Artificial Sequence
  Description of Artificial Sequence: Synthetic polynucleotide
atgggcatcctgccaagcccaggaatgcccgccctgctgtctctggtgagcctgctgtccgtgctgctgatgggatgcgtggcagagacaggcacacagtgcgtgaacctgaccacaaggacccagctgccccctgcctataccaattctttcacacggggcgtgtactatcccgacaaggtgtttagaagctccgtgctgcactccacacaggatctgtttctgcctttcttttctaacgtgacctggttccacgccatccacgtgtccggcaccaatggcacaaagcggttcgacaatcccgtgctgccttttaacgatggcgtgtacttcgccagcaccgagaagtccaacatcatcagaggctggatctttggcaccacactggactctaagacacagagcctgctgatcgtgaacaatgccaccaacgtggtgatcaaggtgtgcgagttccagttttgtaatgatccattcctgggcgtgtactatcacaagaacaataagtcctggatggagtctgagtttcgcgtgtattctagcgccaacaattgcacatttgagtacgtgagccagcccttcctgatggacctggagggcaagcagggcaatttcaagaacctgagggagttcgtgtttaagaatatcgatggctacttcaagatctacagcaagcacaccccaatcaacctggtgcgcgacctgccacagggattctccgccctggagccactggtggatctgcccatcggcatcaacatcacccggtttcagacactgctggccctgcacagatcctacctgacaccaggcgactcctctagcggatggaccgcaggagctgccgcctactatgtgggctatctgcagccccggaccttcctgctgaagtacaacgagaatggcaccatcacagacgcagtggattgcgccctggaccccctgtctgagacaaagtgtacactgaagagctttaccgtggagaagggcatctatcagacaagcaatttcagggtgcagcctaccgagtccatcgtgcgctttcccaatatcacaaacctgtgcccttttggcgaggtgttcaacgccaccagattcgccagcgtgtacgcctggaatcggaagagaatctccaactgcgtggccgactattctgtgctgtacaactccgcctctttcagcacctttaagtgctatggcgtgtctcccacaaagctgaatgatctgtgctttaccaacgtgtacgccgatagcttcgtgatcaggggagacgaagtgagacagatcgcaccaggacagacaggaaagatcgcagactacaattataagctgcctgacgatttcaccggctgcgtgatcgcctggaactccgaaaatctggattctaaagtgggcggcaactacaattatctgtacaggctgtttcgcaagtccaatctgaagccattcgagcgggacatctccacagagatctaccaggccggctctaccccctgcaatggcgtggagggctttaactgttatttccctctgcagtcttacggcttccagccaacaaacggcgtgggctatcagccctacagagtggtggtgctgtcctttgagctgctgcacgcaccagcaacagtgtgcggcccaaagaagtctaccaatctggtgaagaacaagtgcgtgaacttcaacttcaacggactgaccggcacaggcgtgctgaccgagagcaataagaagttcctgccttttcagcagttcggcagggacatcgcagataccacagacgccgtgcgcgaccctcagaccctggagatcctggacatcacaccatgcagcttcggcggcgtgtccgtgatcacaccaggcaccaatacatccaaccaggtggccgtgctgtatcaggacgtgaattgtaccgaggtgcccgtggcaatccacgcagatcagctgacccctacatggcgggtgtactctaccggcagcaacgtgttccagacaagagccggatgcctgatcggagcagagcacgtgaacaatagctatgagtgcgacatccctatcggcgccggcatctgtgccagctaccagacccagacaaactccccatctggagcaggctccgtggccagccagtccatcatcgcctataccatgagcctgggcgccgagaacagcgtggcctactccaacaattctatcgccatccctaccaacttcacaatcagcgtgaccacagagatcctgccagtgtctatgaccaagacaagcgtggactgcacaatgtatatctgtggcgatagcaccgagtgctccaacctgctgctgcagtacggctccttttgtacccagctgaatagagccctgacaggcatcgccgtggagcaggataagaacacacaggaggtgttcgcccaggtgaagcagatctacaagaccccacccatcaaggactttggcggcttcaacttcagccagatcctgcctgatccaagcaagccctccaagaggtcttttatcgaggacctgctgttcaacaaggtgaccctggccgatgccggcttcatcaagcagtatggagattgcctgggagacatcgcagcccgcgacctgatctgtgcccagaagtttaatggcctgaccgtgctgcctccactgctgacagatgagatgatcgcccagtacacatctgccctgctggccggcaccatcacaagcggatggaccttcggcgcaggagccgccctgcagatcccttttgccatgcagatggcctataggttcaacggcatcggcgtgacccagaatgtgctgtacgagaaccagaagctgatcgccaatcagtttaacagcgccatcggcaagatccaggactctctgtcctctacagccagcgccctgggcaagctgcaggatgtggtgaatcagaacgcccaggccctgaataccctggtgaagcagctgagctccaacttcggcgccatctctagcgtgctgaatgacatcctgagccggctggacccccctgaggcagaggtgcagatcgacaggctgatcacaggccgcctgcagagcctgcagacctacgtgacacagcagctgatcagggcagcagagatcagagcctccgccaatctggccgccaccaagatgagcgagtgcgtgctgggacagtccaagagggtggacttttgtggcaagggctatcacctgatgtctttcccacagagcgcccctcacggcgtggtgtttctgcacgtgacctacgtgccagcccaggagaagaacttcaccacagcaccagccatctgccacgatggaaaggcacactttcctagggagggcgtgttcgtgtctaacggcacccactggtttgtgacacagcgcaatttctacgagccacagatcatcaccacagacaatacattcgtgagcggcaactgtgatgtggtgatcggcatcgtgaacaataccgtgtatgatccactgcagcccgagctggactcctttaaggaggagctggataagtacttcaagaatcacacctctcccgacgtggatctgggcgacatctccggcatcaatgcctctgtggtgaacatccagaaggagatcgaccggctgaacgaggtggccaagaatctgaacgagagcctgatcgatctgcaggagctgggcaagtatgagcagtacatcaagggctctggcagagagaacctgtatttccagggaggaggaggcagcggatacatccctgaggcaccaagggacggacaggcctacgtgcgcaaggatggcgagtgggtgctgctgtccacctttctgggccatcatcaccaccaccaccaccactga

SEQ ID NO: 4908 - DNA, 3846 bp, Artificial Sequence
  Description of Artificial Sequence: Synthetic polynucleotide
atgggcatcctgccaagcccaggaatgcccgccctgctgtctctggtgagcctgctgtccgtgctgctgatgggatgcgtggcagagacaggcacacagtgcgtgaacctgaccacaaggacccagctgccccctgcctataccaattctttcacacggggcgtgtactatcccgacaaggtgtttagaagctccgtgctgcactccacacaggatctgtttctgcctttcttttctaacgtgacctggttccacgccatccacgtgtccggcaccaatggcacaaagcggttcgacaatcccgtgctgccttttaacgatggcgtgtacttcgccagcaccgagaagtccaacatcatcagaggctggatctttggcaccacactggactctaagacacagagcctgctgatcgtgaacaatgccaccaacgtggtgatcaaggtgtgcgagttccagttttgtaatgatccattcctgggcgtgtactatcacaagaacaataagtcctggatggagtctgagtttcgcgtgtattctagcgccaacaattgcacatttgagtacgtgagccagcccttcctgatggacctggagggcaagcagggcaatttcaagaacctgagggagttcgtgtttaagaatatcgatggctacttcaagatctacagcaagcacaccccaatcaacctggtgcgcgacctgccacagggattctccgccctggagccactggtggatctgcccatcggcatcaacatcacccggtttcagacactgctggccctgcacagatcctacctgacaccaggcgactcctctagcggatggaccgcaggagctgccgcctactatgtgggctatctgcagccccggaccttcctgctgaagtacaacgagaatggcaccatcacagacgcagtggattgcgccctggaccccctgtctgagacaaagtgtacactgaagagctttaccgtggagaagggcatctatcagacaagcaatttcagggtgcagcctaccgagtccatcgtgcgctttcccaatatcacaaacctgtgcccttttggcgaggtgttcaacgccaccagattcgccagcgtgtacgcctggaatcggaagagaatctccaactgcgtggccgactattctgtgctgtacaactccgcctctttcagcacctttaagtgctatggcgtgtctcccacaaagctgaatgatctgtgctttaccaacgtgtacgccgatagcttcgtgatcaggggagacgaagtgagacagatcgcaccaggacagacaggaaagatcgcagactacaattatcaactgcctgacgatttcaccggctgcgtgatcgcctggaactccaacaatctggattctaaagtgggcggcaactacaattatctgtacaggctgtttcgcaagtccaatctgaagccattcgagcgggacatctccacagagatctaccaggccggctctaccccctgcaatggcgtggagggctttaactgttatttccctctgcagtcttacggcttccagccaacaaacggcgtgggctatcagccctacagagtggtggtgctgtcctttgagctgctgcacgcaccagcaacagtgtgcggcccaaagaagtctaccaatctggtgaagaacaagtgcgtgaacttcaacttcaacggactgaccggcacaggcgtgctgaccgagagcaataagaagttcctgccttttcagcagttcggcagggacatcgcagataccacagacgccgtgcgcgaccctcagaccctggagatcctggacatcacaccatgcagcttcggcggcgtgtccgtgatcacaccaggcaccaatacatccaaccaggtggccgtgctgtatcaggacgtgaattgtaccgaggtgcccgtggcaatccacgcagatcagctgacccctacatggcgggtgtactctaccggcagcaacgtgttccagacaagagccggatgcctgatcggagcagagcacgtgaacaatagctatgagtgcgacatccctatcggcgccggcatctgtgccagctaccagacccagacaaactccccatctggagcaggctccgtggccagccagtccatcatcgcctataccatgagcctgggcgccgagaacagcgtggcctactccaacaattctatcgccatccctaccaacttcacaatcagcgtgaccacagagatcctgccagtgtctatgaccaagacaagcgtggactgcacaatgtatatctgtggcgatagcaccgagtgctccaacctgctgctgcagtacggctccttttgtacccagctgaatagagccctgacaggcatcgccgtggagcaggataagaacacacaggaggtgttcgcccaggtgaagcagatctacaagaccccacccatcaaggactttggcggcttcaacttcagccagatcctgcctgatccaagcaagccctccaagaggtcttttatcgaggacctgctgttcaacaaggtgaccctggccgatgccggcttcatcaagcagtatggagattgcctgggagacatcgcagcccgcgacctgatctgtgcccagaagtttaatggcctgaccgtgctgcctccactgctgacagatgagatgatcgcccagtacacatctgccctgctggccggcaccatcacaagcggatggaccttcggcgcaggagccgccctgcagatcccttttgccatgcagatggcctataggttcaacggcatcggcgtgacccagaatgtgctgtacgagaaccagaagctgatcgccaatcagtttaacagcgccatcggcaagatccaggactctctgtcctctacagccagcgccctgggcaagctgcaggatgtggtgaatcagaacgcccaggccctgaataccctggtgaagcagctgagctccaacttcggcgccatctctagcgtgctgaatgacatcctgagccggctggacccccctgaggcagaggtgcagatcgacaggctgatcacaggccgcctgcagagcctgcagacctacgtgacacagcagctgatcagggcagcagagatcagagcctccgccaatctggccgccaccaagatgagcgagtgcgtgctgggacagtccaagagggtggacttttgtggcaagggctatcacctgatgtctttcccacagagcgcccctcacggcgtggtgtttctgcacgtgacctacgtgccagcccaggagaagaacttcaccacagcaccagccatctgccacgatggaaaggcacactttcctagggagggcgtgttcgtgtctaacggcacccactggtttgtgacacagcgcaatttctacgagccacagatcatcaccacagacaatacattcgtgagcggcaactgtgatgtggtgatcggcatcgtgaacaataccgtgtatgatccactgcagcccgagctggactcctttaaggaggagctggataagtacttcaagaatcacacctctcccgacgtggatctgggcgacatctccggcatcaatgcctctgtggtgaacatccagaaggagatcgaccggctgaacgaggtggccaagaatctgaacgagagcctgatcgatctgcaggagctgggcaagtatgagcagtacatcaagggctctggcagagagaacctgtatttccagggaggaggaggcagcggatacatccctgaggcaccaagggacggacaggcctacgtgcgcaaggatggcgagtgggtgctgctgtccacctttctgggccatcatcaccaccaccaccaccactga

SEQ ID NO: 4909 - DNA, 3846 bp, Artificial Sequence
  Description of Artificial Sequence: Synthetic polynucleotide
atgggcatcctgccaagcccaggaatgcccgccctgctgtctctggtgagcctgctgtccgtgctgctgatgggatgcgtggcagagacaggcacacagtgcgtgaacctgaccacaaggacccagctgccccctgcctataccaattctttcacacggggcgtgtactatcccgacaaggtgtttagaagctccgtgctgcactccacacaggatctgtttctgcctttcttttctaacgtgacctggttccacgccatccacgtgtccggcaccaatggcacaaagcggttcgacaatcccgtgctgccttttaacgatggcgtgtacttcgccagcaccgagaagtccaacatcatcagaggctggatctttggcaccacactggactctaagacacagagcctgctgatcgtgaacaatgccaccaacgtggtgatcaaggtgtgcgagttccagttttgtaatgatccattcctgggcgtgtactatcacaagaacaataagtcctggatggagtctgagtttcgcgtgtattctagcgccaacaattgcacatttgagtacgtgagccagcccttcctgatggacctggagggcaagcagggcaatttcaagaacctgagggagttcgtgtttaagaatatcgatggctacttcaagatctacagcaagcacaccccaatcaacctggtgcgcgacctgccacagggattctccgccctggagccactggtggatctgcccatcggcatcaacatcacccggtttcagacactgctggccctgcacagatcctacctgacaccaggcgactcctctagcggatggaccgcaggagctgccgcctactatgtgggctatctgcagccccggaccttcctgctgaagtacaacgagaatggcaccatcacagacgcagtggattgcgccctggaccccctgtctgagacaaagtgtacactgaagagctttaccgtggagaagggcatctatcagacaagcaatttcagggtgcagcctaccgagtccatcgtgcgctttcccaatatcacaaacctgtgcccttttggcgaggtgttcaacgccaccagattcgccagcgtgtacgcctggaatcggaagagaatctccaactgcgtggccgactattctgtgctgtacaactccgcctctttcagcacctttaagtgctatggcgtgtctccctcgaagctgaatgatctgtgctttaccaacgtgtacgccgatagcttcgtgatcaggggagacgaagtgagacagatcgcaccaggacagacaggaaagatcgcagactacaattataagctgcctgacgatttcaccggctgcgtgatcgcctggaactccaacaatctggattctaaagtgggcggcaactacaattatctgtacaggctgtttcgcaagtccaatctgaagccattcgagcgggacatctccacagagatctaccaggccggctctaccccctgcaatggcgtggagggctttaactgttatttccctctgcagtcttacggcttccagccaacaaacggcgtgggctatcagccctacagagtggtggtgctgtcctttgagctgctgcacgcaccagcaacagtgtgcggcccaaagaagtctaccaatctggtgaagaacaagtgcgtgaacttcaacttcaacggactgaccggcacaggcgtgctgaccgagagcaataagaagttcctgccttttcagcagttcggcagggacatcgcagataccacagacgccgtgcgcgaccctcagaccctggagatcctggacatcacaccatgcagcttcggcggcgtgtccgtgatcacaccaggcaccaatacatccaaccaggtggccgtgctgtatcaggacgtgaattgtaccgaggtgcccgtggcaatccacgcagatcagctgacccctacatggcgggtgtactctaccggcagcaacgtgttccagacaagagccggatgcctgatcggagcagagcacgtgaacaatagctatgagtgcgacatccctatcggcgccggcatctgtgccagctaccagacccagacaaactccccatctggagcaggctccgtggccagccagtccatcatcgcctataccatgagcctgggcgccgagaacagcgtggcctactccaacaattctatcgccatccctaccaacttcacaatcagcgtgaccacagagatcctgccagtgtctatgaccaagacaagcgtggactgcacaatgtatatctgtggcgatagcaccgagtgctccaacctgctgctgcagtacggctccttttgtacccagctgaatagagccctgacaggcatcgccgtggagcaggataagaacacacaggaggtgttcgcccaggtgaagcagatctacaagaccccacccatcaaggactttggcggcttcaacttcagccagatcctgcctgatccaagcaagccctccaagaggtcttttatcgaggacctgctgttcaacaaggtgaccctggccgatgccggcttcatcaagcagtatggagattgcctgggagacatcgcagcccgcgacctgatctgtgcccagaagtttaatggcctgaccgtgctgcctccactgctgacagatgagatgatcgcccagtacacatctgccctgctggccggcaccatcacaagcggatggaccttcggcgcaggagccgccctgcagatcccttttgccatgcagatggcctataggttcaacggcatcggcgtgacccagaatgtgctgtacgagaaccagaagctgatcgccaatcagtttaacagcgccatcggcaagatccaggactctctgtcctctacagccagcgccctgggcaagctgcaggatgtggtgaatcagaacgcccaggccctgaataccctggtgaagcagctgagctccaacttcggcgccatctctagcgtgctgaatgacatcctgagccggctggacccccctgaggcagaggtgcagatcgacaggctgatcacaggccgcctgcagagcctgcagacctacgtgacacagcagctgatcagggcagcagagatcagagcctccgccaatctggccgccaccaagatgagcgagtgcgtgctgggacagtccaagagggtggacttttgtggcaagggctatcacctgatgtctttcccacagagcgcccctcacggcgtggtgtttctgcacgtgacctacgtgccagcccaggagaagaacttcaccacagcaccagccatctgccacgatggaaaggcacactttcctagggagggcgtgttcgtgtctaacggcacccactggtttgtgacacagcgcaatttctacgagccacagatcatcaccacagacaatacattcgtgagcggcaactgtgatgtggtgatcggcatcgtgaacaataccgtgtatgatccactgcagcccgagctggactcctttaaggaggagctggataagtacttcaagaatcacacctctcccgacgtggatctgggcgacatctccggcatcaatgcctctgtggtgaacatccagaaggagatcgaccggctgaacgaggtggccaagaatctgaacgagagcctgatcgatctgcaggagctgggcaagtatgagcagtacatcaagggctctggcagagagaacctgtatttccagggaggaggaggcagcggatacatccctgaggcaccaagggacggacaggcctacgtgcgcaaggatggcgagtgggtgctgctgtccacctttctgggccatcatcaccaccaccaccaccactga

SEQ ID NO: 4910 - DNA, 3846 bp, Artificial Sequence
  Description of Artificial Sequence: Synthetic polynucleotide
atgggcatcctgccaagcccaggaatgcccgccctgctgtctctggtgagcctgctgtccgtgctgctgatgggatgcgtggcagagacaggcacacagtgcgtgaacctgaccacaaggacccagctgccccctgcctataccaattctttcacacggggcgtgtactatcccgacaaggtgtttagaagctccgtgctgcactccacacaggatctgtttctgcctttcttttctaacgtgacctggttccacgccatccacgtgtccggcaccaatggcacaaagcggttcgacaatcccgtgctgccttttaacgatggcgtgtacttcgccagcaccgagaagtccaacatcatcagaggctggatctttggcaccacactggactctaagacacagagcctgctgatcgtgaacaatgccaccaacgtggtgatcaaggtgtgcgagttccagttttgtaatgatccattcctgggcgtgtactatcacaagaacaataagtcctggatggagtctgagtttcgcgtgtattctagcgccaacaattgcacatttgagtacgtgagccagcccttcctgatggacctggagggcaagcagggcaatttcaagaacctgagggagttcgtgtttaagaatatcgatggctacttcaagatctacagcaagcacaccccaatcaacctggtgcgcgacctgccacagggattctccgccctggagccactggtggatctgcccatcggcatcaacatcacccggtttcagacactgctggccctgcacagatcctacctgacaccaggcgactcctctagcggatggaccgcaggagctgccgcctactatgtgggctatctgcagccccggaccttcctgctgaagtacaacgagaatggcaccatcacagacgcagtggattgcgccctggaccccctgtctgagacaaagtgtacactgaagagctttaccgtggagaagggcatctatcagacaagcaatttcagggtgcagcctaccgagtccatcgtgcgctttcccaatatcacaaacctgtgcccttttggcgaggtgttcaacgccaccagattcgccagcgtgtacgcctggaatcggaagagaatctccaactgcgtggccgactattctgtgctgtacaactccgcctctttcagcacctttaagtgctatggcgtgtctcccacaaagctgaatgatctgtgctttaccaacgtgtacgccgatagcttcgtgatcaggggagacgaagtgagacagatcgcaccaggacagacaggaaagatcgcagactacaattataagctgcctgacgatttcaccggctgcgtgatcgcctggaactccaacaatctggattctaaagtgggcggcaactacaattatctgtacaggctgtttcgcaagtccaatctgaagccattcgagcgggacatctccacagagatctaccaggccggctctaccccctgcaatggcgtggagggctttaactgttatttccctctgcagtcttacggcttccagccaacaaacggcgtgggctatcagccctacagagtggtggtgctgtcctttgagctgctgcacgcaccagcaacagtgtgcggcccaaagaagtctaccaatctggtgaagaacaagtgcgtgaacttcaacttcaacggactgaccggcacaggcgtgctgaccgagagcaataagaagttcctgccttttcagcagttcggcagggacatcgcagataccacagacgccgtgcgcgaccctcagaccctggagatcctggacatcacaccatgcagcttcggcggcgtgtccgtgatcacaccaggcaccaatacatccaaccaggtggccgtgctgtatcaggacgtgaattgtaccgaggtgcccgtggcaatccacgcagatcagctgacccctacatggcgggtgtactctaccggcagcaacgtgttccagacaagagccggatgcctgatcggagcagagcacgtgaacaatagctatgagtgcgacatccctatcggcgccggcatctgtgccagctaccagacccagacaaactccccatctggagcaggctccgtggccagccagtccatcatcgcctataccatgagcctgggcgccgagaacgtagtggcctactccaacaattctatcgccatccctaccaacttcacaatcagcgtgaccacagagatcctgccagtgtctatgaccaagacaagcgtggactgcacaatgtatatctgtggcgatagcaccgagtgctccaacctgctgctgcagtacggctccttttgtacccagctgaatagagccctgacaggcatcgccgtggagcaggataagaacacacaggaggtgttcgcccaggtgaagcagatctacaagaccccacccatcaaggactttggcggcttcaacttcagccagatcctgcctgatccaagcaagccctccaagaggtcttttatcgaggacctgctgttcaacaaggtgaccctggccgatgccggcttcatcaagcagtatggagattgcctgggagacatcgcagcccgcgacctgatctgtgcccagaagtttaatggcctgaccgtgctgcctccactgctgacagatgagatgatcgcccagtacacatctgccctgctggccggcaccatcacaagcggatggaccttcggcgcaggagccgccctgcagatcccttttgccatgcagatggcctataggttcaacggcatcggcgtgacccagaatgtgctgtacgagaaccagaagctgatcgccaatcagtttaacagcgccatcggcaagatccaggactctctgtcctctacagccagcgccctgggcaagctgcaggatgtggtgaatcagaacgcccaggccctgaataccctggtgaagcagctgagctccaacttcggcgccatctctagcgtgctgaatgacatcctgagccggctggacccccctgaggcagaggtgcagatcgacaggctgatcacaggccgcctgcagagcctgcagacctacgtgacacagcagctgatcagggcagcagagatcagagcctccgccaatctggccgccaccaagatgagcgagtgcgtgctgggacagtccaagagggtggacttttgtggcaagggctatcacctgatgtctttcccacagagcgcccctcacggcgtggtgtttctgcacgtgacctacgtgccagcccaggagaagaacttcaccacagcaccagccatctgccacgatggaaaggcacactttcctagggagggcgtgttcgtgtctaacggcacccactggtttgtgacacagcgcaatttctacgagccacagatcatcaccacagacaatacattcgtgagcggcaactgtgatgtggtgatcggcatcgtgaacaataccgtgtatgatccactgcagcccgagctggactcctttaaggaggagctggataagtacttcaagaatcacacctctcccgacgtggatctgggcgacatctccggcatcaatgcctctgtggtgaacatccagaaggagatcgaccggctgaacgaggtggccaagaatctgaacgagagcctgatcgatctgcaggagctgggcaagtatgagcagtacatcaagggctctggcagagagaacctgtatttccagggaggaggaggcagcggatacatccctgaggcaccaagggacggacaggcctacgtgcgcaaggatggcgagtgggtgctgctgtccacctttctgggccatcatcaccaccaccaccaccactga

SEQ ID NO: 4911 - DNA, 3846 bp, Artificial Sequence
  Description of Artificial Sequence: Synthetic polynucleotide
atgggcatcctgccaagcccaggaatgcccgccctgctgtctctggtgagcctgctgtccgtgctgctgatgggatgcgtggcagagacaggcacacagtgcgtgaacctgaccacaaggacccagctgccccctgcctataccaattctttcacacggggcgtgtactatcccgacaaggtgtttagaagctccgtgctgcactccacacaggatctgtttctgcctttcttttctaacgtgacctggttccacgccatccacgtgtccggcaccaatggcacaaagcggttcgacaatcccgtgctgccttttaacgatggcgtgtacttcgccagcaccgagaagtccaacatcatcagaggctggatctttggcaccacactggactctaagacacagagcctgctgatcgtgaacaatgccaccaacgtggtgatcaaggtgtgcgagttccagttttgtaatgatccattcctgggcgtgtactatcacaagaacaataagtcctggatggagtctgagtttcgcgtgtattctagcgccaacaattgcacatttgagtacgtgagccagcccttcctgatggacctggagggcaagcagggcaatttcaagaacctgagggagttcgtgtttaagaatatcgatggctacttcaagatctacagcaagcacaccccaatcaacctggtgcgcgacctgccacagggattctccgccctggagccactggtggatctgcccatcggcatcaacatcacccggtttcagacactgctggccctgcacagatcctacctgacaccaggcgactcctctagcggatggaccgcaggagctgccgcctactatgtgggctatctgcagccccggaccttcctgctgaagtacaacgagaatggcaccatcacagacgcagtggattgcgccctggaccccctgtctgagacaaagtgtacactgaagagctttaccgtggagaagggcatctatcagacaagcaatttcagggtgcagcctaccgagtccatcgtgcgctttcccaatatcacaaacctgtgcccttttggcgaggtgttcaacgccaccagattcgccagcgtgtacgcctggaatcggaagagaatctccaactgcgtggccgactattctgtgctgtacaactccgcctctttcagcacctttaagtgctatggcgtgtctcccacaaagctggatgatctgtgctttaccaacgtgtacgccgatagcttcgtgatcaggggagacgaagtgagacagatcgcaccaggacagacaggaaagatcgcagactacaattataagctgcctgacgatttcaccggctgcgtgatcgcctggaactccaacaatctggattctaaagtgggcggcaactacaattatctgtacaggctgtttcgcaagtccaatctgaagccattcgagcgggacatctccacagagatctaccaggccggctctaccccctgcaatggcgtggagggctttaactgttatttccctctgcagtcttacggcttccagccaacaaacggcgtgggctatcagccctacagagtggtggtgctgtcctttgagctgctgcacgcaccagcaacagtgtgcggcccaaagaagtctaccaatctggtgaagaacaagtgcgtgaacttcaacttcaacggactgaccggcacaggcgtgctgaccgagagcaataagaagttcctgccttttcagcagttcggcagggacatcgcagataccacagacgccgtgcgcgaccctcagaccctggagatcctggacatcacaccatgcagcttcggcggcgtgtccgtgatcacaccaggcaccaatacatccaaccaggtggccgtgctgtatcaggacgtgaattgtaccgaggtgcccgtggcaatccacgcagatcagctgacccctacatggcgggtgtactctaccggcagcaacgtgttccagacaagagccggatgcctgatcggagcagagcacgtgaacaatagctatgagtgcgacatccctatcggcgccggcatctgtgccagctaccagacccagacaaactccccatctggagcaggctccgtggccagccagtccatcatcgcctataccatgagcctgggcgccgagaacagcgtggcctactccaacaattctatcgccatccctaccaacttcacaatcagcgtgaccacagagatcctgccagtgtctatgaccaagacaagcgtggactgcacaatgtatatctgtggcgatagcaccgagtgctccaacctgctgctgcagtacggctccttttgtacccagctgaatagagccctgacaggcatcgccgtggagcaggataagaacacacaggaggtgttcgcccaggtgaagcagatctacaagaccccacccatcaaggactttggcggcttcaacttcagccagatcctgcctgatccaagcaagccctccaagaggtcttttatcgaggacctgctgttcaacaaggtgaccctggccgatgccggcttcatcaagcagtatggagattgcctgggagacatcgcagcccgcgacctgatctgtgcccagaagtttaatggcctgaccgtgctgcctccactgctgacagatgagatgatcgcccagtacacatctgccctgctggccggcaccatcacaagcggatggaccttcggcgcaggagccgccctgcagatcccttttgccatgcagatggcctataggttcaacggcatcggcgtgacccagaatgtgctgtacgagaaccagaagctgatcgccaatcagtttaacagcgccatcggcaagatccaggactctctgtcctctacagccagcgccctgggcaagctgcaggatgtggtgaatcagaacgcccaggccctgaataccctggtgaagcagctgagctccaacttcggcgccatctctagcgtgctgaatgacatcctgagccggctggacccccctgaggcagaggtgcagatcgacaggctgatcacaggccgcctgcagagcctgcagacctacgtgacacagcagctgatcagggcagcagagatcagagcctccgccaatctggccgccaccaagatgagcgagtgcgtgctgggacagtccaagagggtggacttttgtggcaagggctatcacctgatgtctttcccacagagcgcccctcacggcgtggtgtttctgcacgtgacctacgtgccagcccaggagaagaacttcaccacagcaccagccatctgccacgatggaaaggcacactttcctagggagggcgtgttcgtgtctaacggcacccactggtttgtgacacagcgcaatttctacgagccacagatcatcaccacagacaatacattcgtgagcggcaactgtgatgtggtgatcggcatcgtgaacaataccgtgtatgatccactgcagcccgagctggactcctttaaggaggagctggataagtacttcaagaatcacacctctcccgacgtggatctgggcgacatctccggcatcaatgcctctgtggtgaacatccagaaggagatcgaccggctgaacgaggtggccaagaatctgaacgagagcctgatcgatctgcaggagctgggcaagtatgagcagtacatcaagggctctggcagagagaacctgtatttccagggaggaggaggcagcggatacatccctgaggcaccaagggacggacaggcctacgtgcgcaaggatggcgagtgggtgctgctgtccacctttctgggccatcatcaccaccaccaccaccactga

SEQ ID NO: 4912 - DNA, 3846 bp, Artificial Sequence
  Description of Artificial Sequence: Synthetic polynucleotide
atgggcatcctgccaagcccaggaatgcccgccctgctgtctctggtgagcctgctgtccgtgctgctgatgggatgcgtggcagagacaggcacacagtgcgtgaacctgaccacaaggacccagctgccccctgcctataccaattctttcacacggggcgtgtactatcccgacaaggtgtttagaagctccgtgctgcactccacacaggatctgtttctgcctttcttttctaacgtgacctggttccacgccatccacgtgtccggcaccaatggcacaaagcggttcgacaatcccgtgctgccttttaacgatggcgtgtacttcgccagcaccgagaagtccaacatcatcagaggctggatctttggcaccacactggactctaagacacagagcctgctgatcgtgaacaatgccaccaacgtggtgatcaaggtgtgcgagttccagttttgtaatgatccattcctgggcgtgtactatcacaagaacaataagtcctggatggagtctgagtttcgcgtgtattctagcgccaacaattgcacatttgagtacgtgagccagcccttcctgatggacctggagggcaagcagggcaatttcaagaacctgagggagttcgtgtttaagaatatcgatggctacttcaagatctacagcaagcacaccccaatcaacctggtgcgcgacctgccacagggattctccgccctggagccactggtggatctgcccatcggcatcaacatcacccggtttcagacactgctggccctgcacagatcctacctgacaccaggcgactcctctagcggatggaccgcaggagctgccgcctactatgtgggctatctgcagccccggaccttcctgctgaagtacaacgagaatggcaccatcacagacgcagtggattgcgccctggaccccctgtctgagacaaagtgtacactgaagagctttaccgtggagaagggcatctatcagacaagcaatttcagggtgcagcctaccgagtccatcgtgcgctttcccaatatcacaaacctgtgcccttttggcgaggtgttcaacgccaccagattcgccagcgtgtacgcctggaatcggaagagaatctccaactgcgtggccgactattctgtgctgtacaactccgccactttcagcacctttaagtgctatggcgtgtctcccacaaagctgaatgatctgtgctttaccaacgtgtacgccgatagcttcgtgatcaggggagacgaagtgagacagatcgcaccaggacagacaggaaagatcgcagactacaattataagctgcctgacgatttcaccggctgcgtgatcgcctggaactccaacaatctggattctaaagtgggcggcaactacaattatctgtacaggctgtttcgcaagtccaatctgaagccattcgagcgggacatctccacagagatctaccaggccggctctaccccctgcaatggcgtggagggctttaactgttatttccctctgcagtcttacggcttccagccaacaaacggcgtgggctatcagccctacagagtggtggtgctgtcctttgagctgctgcacgcaccagcaacagtgtgcggcccaaagaagtctaccaatctggtgaagaacaagtgcgtgaacttcaacttcaacggactgaccggcacaggcgtgctgaccgagagcaataagaagttcctgccttttcagcagttcggcagggacatcgcagataccacagacgccgtgcgcgaccctcagaccctggagatcctggacatcacaccatgcagcttcggcggcgtgtccgtgatcacaccaggcaccaatacatccaaccaggtggccgtgctgtatcaggacgtgaattgtaccgaggtgcccgtggcaatccacgcagatcagctgacccctacatggcgggtgtactctaccggcagcaacgtgttccagacaagagccggatgcctgatcggagcagagcacgtgaacaatagctatgagtgcgacatccctatcggcgccggcatctgtgccagctaccagacccagacaaactccccatctggagcaggctccgtggccagccagtccatcatcgcctataccatgagcctgggcgccgagaacagcgtggcctactccaacaattctatcgccatccctaccaacttcacaatcagcgtgaccacagagatcctgccagtgtctatgaccaagacaagcgtggactgcacaatgtatatctgtggcgatagcaccgagtgctccaacctgctgctgcagtacggctccttttgtacccagctgaatagagccctgacaggcatcgccgtggagcaggataagaacacacaggaggtgttcgcccaggtgaagcagatctacaagaccccacccatcaaggactttggcggcttcaacttcagccagatcctgcctgatccaagcaagccctccaagaggtcttttatcgaggacctgctgttcaacaaggtgaccctggccgatgccggcttcatcaagcagtatggagattgcctgggagacatcgcagcccgcgacctgatctgtgcccagaagtttaatggcctgaccgtgctgcctccactgctgacagatgagatgatcgcccagtacacatctgccctgctggccggcaccatcacaagcggatggaccttcggcgcaggagccgccctgcagatcccttttgccatgcagatggcctataggttcaacggcatcggcgtgacccagaatgtgctgtacgagaaccagaagctgatcgccaatcagtttaacagcgccatcggcaagatccaggactctctgtcctctacagccagcgccctgggcaagctgcaggatgtggtgaatcagaacgcccaggccctgaataccctggtgaagcagctgagctccaacttcggcgccatctctagcgtgctgaatgacatcctgagccggctggacccccctgaggcagaggtgcagatcgacaggctgatcacaggccgcctgcagagcctgcagacctacgtgacacagcagctgatcagggcagcagagatcagagcctccgccaatctggccgccaccaagatgagcgagtgcgtgctgggacagtccaagagggtggacttttgtggcaagggctatcacctgatgtctttcccacagagcgcccctcacggcgtggtgtttctgcacgtgacctacgtgccagcccaggagaagaacttcaccacagcaccagccatctgccacgatggaaaggcacactttcctagggagggcgtgttcgtgtctaacggcacccactggtttgtgacacagcgcaatttctacgagccacagatcatcaccacagacaatacattcgtgagcggcaactgtgatgtggtgatcggcatcgtgaacaataccgtgtatgatccactgcagcccgagctggactcctttaaggaggagctggataagtacttcaagaatcacacctctcccgacgtggatctgggcgacatctccggcatcaatgcctctgtggtgaacatccagaaggagatcgaccggctgaacgaggtggccaagaatctgaacgagagcctgatcgatctgcaggagctgggcaagtatgagcagtacatcaagggctctggcagagagaacctgtatttccagggaggaggaggcagcggatacatccctgaggcaccaagggacggacaggcctacgtgcgcaaggatggcgagtgggtgctgctgtccacctttctgggccatcatcaccaccaccaccaccactga

SEQ ID NO: 4913 - DNA, 3846 bp, Artificial Sequence
  Description of Artificial Sequence: Synthetic polynucleotide
atgggcatcctgccaagcccaggaatgcccgccctgctgtctctggtgagcctgctgtccgtgctgctgatgggatgcgtggcagagacaggcacacagtgcgtgaacctgaccacaaggacccagctgccccctgcctataccaattctttcacacggggcgtgtactatcccgacaaggtgtttagaagctccgtgctgcactccacacaggatctgtttctgcctttcttttctaacgtgacctggttccacgccatccacgtgtccggcaccaatggcacaaagcggttcgacaatcccgtgctgccttttaacgatggcgtgtacttcgccagcaccgagaagtccaacatcatcagaggctggatctttggcaccacactggactctaagacacagagcctgctgatcgtgaacaatgccaccaacgtggtgatcaaggtgtgcgagttccagttttgtaatgatccattcctgggcgtgtactatcacaagaacaataagtcctggatggagtctgagtttcgcgtgtattctagcgccaacaattgcacatttgagtacgtgagccagcccttcctgatggacctggagggcaagcagggcaatttcaagaacctgagggagttcgtgtttaagaatatcgatggctacttcaagatctacagcaagcacaccccaatcaacctggtgcgcgacctgccacagggattctccgccctggagccactggtggatctgcccatcggcatcaacatcacccggtttcagacactgctggccctgcacagatcctacctgacaccaggcgactcctctagcggatggaccgcaggagctgccgcctactatgtgggctatctgcagccccggaccttcctgctgaagtacaacgagaatggcaccatcacagacgcagtggattgcgccctggaccccctgtctgagacaaagtgtacactgaagagctttaccgtggagaagggcatctatcagacaagcaatttcagggtgcagcctaccgagtccatcgtgcgctttcccaatatcacaaacctgtgcccttttggcgaggtgttcaacgccaccagattcgccagcgtgtacgcctggaatcggaagagaatctccaactgcgtggccgactattctgtgctgtacaactccgcctctttcagcacctttaagtgctatggcgtgtctcccacaaagctgaatgatctgtgctttaccaacgtgtacgccgatagcttcgtgatcaggggagacgaagtgagacagatcgcaccaggacagacaggaaagatcgcagactacaattataagctgcctgacgatttcaccggctgcgtgatcgcctggaactccaacaatctggattctaaagtgggcggcaactacaattatctgtacaggctgtttcgcaagtccaatctgaagccattcgagcgggacatctccacagagatctaccaggccggctctaccccctgcaatggcgtggagggctttaactgttatttccctctgcagtcttacggcttccagccaacaaacggcgtgggctatcagccctacagagtggtggtgctgtcctttgagctgctgcacgcaccagcaacagtgtgcggcccaaagaagtctaccaatctggtgaagaacaagtgcgtgaacttcaacttcaacggactgaccggcacaggcgtgctgaccgagagcaataagaagttcctgccttttcagcagttcggcagggacatcgcagataccacagacgccgtgcgcgaccctcagaccctggagatcctggacatcacaccatgcagcttcggcggcgtgtccgtgatcacaccaggcaccaatacatccaaccaggtggccgtgctgtatcaggacgtgaattgtaccgaggtgcccgtggcaatccacgcagatcagctgacccctacatggcgggtgtactctaccggcagcaacgtgttccagacaagagccggatgcctgatcggagcagagcacgtgaacaatagctatgagtgcgacatccctatcggcgccggcatctgtgccagctaccagacccagacaaactccccatctggagcaggctccgtggccagccagtccatcatcgcctataccatgagcctgggcgccgagaacagcgtggcctactccaacaattctatcgccatccctaccaacttcacaatcagcgtgaccacagagatcctgccagtgtctatgaccaagacaagcgtggactgcacaatgtatatctgtggcgatagcaccgagtgctccaacctgctgctgcagtacggctccttttgtacccagctgaatagagccctgacaggcatcgccgtggagcaggataagaacacacaggaggtgttcgcccaggtgaagcagatctacaagaccccacccatcaaggactttggcggcttcaacttcagccagatcctgcctgatccaagcaagccctccaagaggtcttttatcgaggacctgctgttcaacaaggtgaccctggccgatgccggcttcatcaagcagtatggagattgcctgggagacatcgcagcccgcgacctgatctgtgcccagaagtttaatggcctgaccgtgctgcctccactgctgacagatgagatgatcgcccagtacacatctgccctgctggccggcaccatcacaagcggatggaccttcggcgcaggagccgccctgcagatcccttttgccatgcagatggcctataggttcaacggcatcggcgtgacccagaatgtgctgtacgagaaccagaagctgatcgccaatcagtttaacagcgccatcggcaagatccaggactctctgtcctctacagccagcgccctgggcaagctgcaggatgtggtgaatcagaacgcccaggccctgaataccctggtggctcagctgagctccaacttcggcgccatctctagcgtgctgaatgacatcctgagccggctggacccccctgaggcagaggtgcagatcgacaggctgatcacaggccgcctgcagagcctgcagacctacgtgacacagcagctgatcagggcagcagagatcagagcctccgccaatctggccgccaccaagatgagcgagtgcgtgctgggacagtccaagagggtggacttttgtggcaagggctatcacctgatgtctttcccacagagcgcccctcacggcgtggtgtttctgcacgtgacctacgtgccagcccaggagaagaacttcaccacagcaccagccatctgccacgatggaaaggcacactttcctagggagggcgtgttcgtgtctaacggcacccactggtttgtgacacagcgcaatttctacgagccacagatcatcaccacagacaatacattcgtgagcggcaactgtgatgtggtgatcggcatcgtgaacaataccgtgtatgatccactgcagcccgagctggactcctttaaggaggagctggataagtacttcaagaatcacacctctcccgacgtggatctgggcgacatctccggcatcaatgcctctgtggtgaacatccagaaggagatcgaccggctgaacgaggtggccaagaatctgaacgagagcctgatcgatctgcaggagctgggcaagtatgagcagtacatcaagggctctggcagagagaacctgtatttccagggaggaggaggcagcggatacatccctgaggcaccaagggacggacaggcctacgtgcgcaaggatggcgagtgggtgctgctgtccacctttctgggccatcatcaccaccaccaccaccactga

SEQ ID NO: 4914 - DNA, 3846 bp, Artificial Sequence
  Description of Artificial Sequence: Synthetic polynucleotide
atgggcatcctgccaagcccaggaatgcccgccctgctgtctctggtgagcctgctgtccgtgctgctgatgggatgcgtggcagagacaggcacacagtgcgtgaacctgaccacaaggacccagctgccccctgcctataccaattctttcacacggggcgtgtactatcccgacaaggtgtttagaagctccgtgctgcactccacacaggatctgtttctgcctttcttttctaacgtgacctggttccacgccatccacgtgtccggcaccaatggcacaaagcggttcgacaatcccgtgctgccttttaacgatggcgtgtacttcgccagcaccgagaagtccaacatcatcagaggctggatctttggcaccacactggactctaagacacagagcctgctgatcgtgaacaatgccaccaacgtggtgatcaaggtgtgcgagttccagttttgtaatgatccattcctgggcgtgtactatcacaagaacaataagtcctggatggagtctgagtttcgcgtgtattctagcgccaacaattgcacatttgagtacgtgagccagcccttcctgatggacctggagggcaagcagggcaatttcaagaacctgagggagttcgtgtttaagaatatcgatggctacttcaagatctacagcaagcacaccccaatcaacctggtgcgcgacctgccacagggattctccgccctggagccactggtggatctgcccatcggcatcaacatcacccggtttcagacactgctggccctgcacagatcctacctgacaccaggcgactcctctagcggatggaccgcaggagctgccgcctactatgtgggctatctgcagccccggaccttcctgctgaagtacaacgagaatggcaccatcacagacgcagtggattgcgccctggaccccctgtctgagacaaagtgtacactgaagagctttaccgtggagaagggcatctatcagacaagcaatttcagggtgcagcctaccgagtccatcgtgcgctttcccaatatcacaaacctgtgcccttttggcgaggtgttcaacgccaccagattcgccagcgtgtacgcctggaatcggaagagaatctccaactgcgtggccgactattctgtgctgtacaactccgcctctttcagcacctttaagtgctatggcgtgtctcccacaaagctgaatgatctgtgctttaccaacgtgtacgccgatagcttcgtgatcaggggagacgaagtgagacagatcgcaccaggacagacaggaaagatcgcagactacaattataagctgcctgacgatttcaccggctgcgtgatcgcctggaactccaacaatctggattctaaatgtggcggcaactacaattatctgtacaggctgtttcgcaagtccaatctgaagccattcgagcgggacatctccacagagatctaccaggccggctctaccccctgcaatggcgtggagggctttaactgttatttccctctgcagtcttacggcttccagccaacaaacggcgtgggctatcagccctacagagtggtggtgctgtcctttgagctgctgcacgcaccagcaacagtgtgcggcccaaagaagtctaccaatctggtgaagaacaagtgcgtgaacttcaacttcaacggactgaccggcacaggcgtgctgaccgagagcaataagaagttcctgccttttcagcagttcggcagggacatcgcagataccacagacgccgtgcgcgaccctcagaccctggagatcctggacatcacaccatgcagcttcggcggcgtgtccgtgatcacaccaggcaccaatacatccaaccaggtggccgtgctgtatcaggacgtgaattgtaccgaggtgcccgtggcaatccacgcagatcagctgacccctacatggcgggtgtactctaccggcagcaacgtgttccagacaagagccggatgcctgatcggagcagagcacgtgaacaatagctatgagtgcgacatccctatcggcgccggcatctgtgccagctaccagacccagacaaactccccatctggagcaggctccgtggccagccagtccatcatcgcctataccatgagcctgggcgccgagaacagcgtggcctactccaacaattctatcgccatccctaccaacttcacaatcagcgtgaccacagagatcctgccagtgtctatgaccaagacaagcgtggactgcacaatgtatatctgtggcgatagcaccgagtgctccaacctgctgctgcagtacggctccttttgtacccagctgaatagagccctgacaggcatcgccgtggagcaggataagaacacacaggaggtgttcgcccaggtgaagcagatctacaagaccccacccatcaaggactttggcggcttcaacttcagccagatcctgcctgatccaagcaagccctccaagaggtcttttatcgaggacctgctgttcaacaaggtgaccctggccgatgccggcttcatcaagcagtatggagattgcctgggagacatcgcagcccgcgacctgatctgtgcccagaagtttaatggcctgaccgtgctgcctccactgctgacagatgagatgatcgcccagtacacatctgccctgctggccggcaccatcacaagcggatggaccttcggcgcaggagccgccctgcagatcccttttgccatgcagatggcctataggttcaacggcatcggcgtgacccagaatgtgctgtacgagaaccagaagctgatcgccaatcagtttaacagcgccatcggcaagatccaggactctctgtcctctacagccagcgccctgggcaagctgcaggatgtggtgaatcagaacgcccaggccctgaataccctggtgaagcagctgagctccaacttcggcgccatctctagcgtgctgaatgacatcctgagccggctggacccccctgaggcagaggtgcagatcgacaggctgatcacaggccgcctgcagagcctgcagacctacgtgacacagcagctgatcagggcagcagagatcagagcctccgccaatctggccgccaccaagatgagcgagtgcgtgctgggacagtccaagagggtggacttttgtggcaagggctatcacctgatgtctttcccacagagcgcccctcacggcgtggtgtttctgcacgtgacctacgtgccagcccaggagaagaacttcaccacagcaccagccatctgccacgatggaaaggcacactttcctagggagggcgtgttcgtgtctaacggcacccactggtttgtgacacagcgcaatttctacgagccacagatcatcaccacagacaatacattcgtgagcggcaactgtgatgtggtgatcggcatcgtgaacaataccgtgtatgatccactgcagcccgagctggactcctttaaggaggagctggataagtacttcaagaatcacacctctcccgacgtggatctgggcgacatctccggcatcaatgcctctgtggtgaacatccagaaggagatcgaccggctgaacgaggtggccaagaatctgaacgagagcctgatcgatctgcaggagctgggcaagtatgagcagtacatcaagggctctggcagagagaacctgtatttccagggaggaggaggcagcggatacatccctgaggcaccaagggacggacaggcctacgtgcgcaaggatggcgagtgggtgctgctgtccacctttctgggccatcatcaccaccaccaccaccactga

SEQ ID NO: 4915 - DNA, 3846 bp, Artificial Sequence
  Description of Artificial Sequence: Synthetic polynucleotide
atgggcatcctgccaagcccaggaatgcccgccctgctgtctctggtgagcctgctgtccgtgctgctgatgggatgcgtggcagagacaggcacacagtgcgtgaacctgaccacaaggacccagctgccccctgcctataccaattctttcacacggggcgtgtactatcccgacaaggtgtttagaagctccgtgctgcactccacacaggatctgtttctgcctttcttttctaacgtgacctggttccacgccatccacgtgtccggcaccaatggcacaaagcggttcgacaatcccgtgctgccttttaacgatggcgtgtacttcgccagcaccgagaagtccaacatcatcagaggctggatctttggcaccacactggactctaagacacagagcctgctgatcgtgaacaatgccaccaacgtggtgatcaaggtgtgcgagttccagttttgtaatgatccattcctgggcgtgtactatcacaagaacaataagtcctggatggagtctgagtttcgcgtgtattctagcgccaacaattgcacatttgagtacgtgagccagcccttcctgatggacctggagggcaagcagggcaatttcaagaacctgagggagttcgtgtttaagaatatcgatggctacttcaagatctacagcaagcacaccccaatcaacctggtgcgcgacctgccacagggattctccgccctggagccactggtggatctgcccatcggcatcaacatcacccggtttcagacactgctggccctgcacagatcctacctgacaccaggcgactcctctagcggatggaccgcaggagctgccgcctactatgtgggctatctgcagccccggaccttcctgctgaagtacaacgagaatggcaccatcacagacgcagtggattgcgccctggaccccctgtctgagacaaagtgtacactgaagagctttaccgtggagaagggcatctatcagacaagcaatttcagggtgcagcctaccgagtccatcgtgcgctttcccaatatcacaaacctgtgcccttttggcgaggtgttcaacgccaccagattcgccagcgtgtacgcctggaatcggaagagaatctccaactgcgtggccgactattctgtgctgtacaactccgcctctttcagcacctttaagtgctatggcgtgtctcccacaaagctgaatgatctgtgctttaccaacgtgtacgccgatagcttcgtgatcaggggagacgaagtgagacagatcgcaccaggacagacaggaaagatcgcagactacaattataagctgcctgacgatttcaccggctgcgtgatcgcctggaactccaacaatctggattctaaagtgggcggcaactacaattatctgtacaggctgtttcgcaagtccaatctgaagccattcgagcgggacatctccacagagatctaccaggccggctctaccccctgcaatggcgtggagggctttaactgttatttccctctgcagtcttacggcttccagccaacaaacggcgtgggctatcagccctacagagtggtggtgctgtcctttgagctgctgcacgcaccacatacagtgtgcggcccaaagaagtctaccaatctggtgaagaacaagtgcgtgaacttcaacttcaacggactgaccggcacaggcgtgctgaccgagagcaataagaagttcctgccttttcagcagttcggcagggacatcgcagataccacagacgccgtgcgcgaccctcagaccctggagatcctggacatcacaccatgcagcttcggcggcgtgtccgtgatcacaccaggcaccaatacatccaaccaggtggccgtgctgtatcaggacgtgaattgtaccgaggtgcccgtggcaatccacgcagatcagctgacccctacatggcgggtgtactctaccggcagcaacgtgttccagacaagagccggatgcctgatcggagcagagcacgtgaacaatagctatgagtgcgacatccctatcggcgccggcatctgtgccagctaccagacccagacaaactccccatctggagcaggctccgtggccagccagtccatcatcgcctataccatgagcctgggcgccgagaacagcgtggcctactccaacaattctatcgccatccctaccaacttcacaatcagcgtgaccacagagatcctgccagtgtctatgaccaagacaagcgtggactgcacaatgtatatctgtggcgatagcaccgagtgctccaacctgctgctgcagtacggctccttttgtacccagctgaatagagccctgacaggcatcgccgtggagcaggataagaacacacaggaggtgttcgcccaggtgaagcagatctacaagaccccacccatcaaggactttggcggcttcaacttcagccagatcctgcctgatccaagcaagccctccaagaggtcttttatcgaggacctgctgttcaacaaggtgaccctggccgatgccggcttcatcaagcagtatggagattgcctgggagacatcgcagcccgcgacctgatctgtgcccagaagtttaatggcctgaccgtgctgcctccactgctgacagatgagatgatcgcccagtacacatctgccctgctggccggcaccatcacaagcggatggaccttcggcgcaggagccgccctgcagatcccttttgccatgcagatggcctataggttcaacggcatcggcgtgacccagaatgtgctgtacgagaaccagaagctgatcgccaatcagtttaacagcgccatcggcaagatccaggactctctgtcctctacagccagcgccctgggcaagctgcaggatgtggtgaatcagaacgcccaggccctgaataccctggtgaagcagctgagctccaacttcggcgccatctctagcgtgctgaatgacatcctgagccggctggacccccctgaggcagaggtgcagatcgacaggctgatcacaggccgcctgcagagcctgcagacctacgtgacacagcagctgatcagggcagcagagatcagagcctccgccaatctggccgccaccaagatgagcgagtgcgtgctgggacagtccaagagggtggacttttgtggcaagggctatcacctgatgtctttcccacagagcgcccctcacggcgtggtgtttctgcacgtgacctacgtgccagcccaggagaagaacttcaccacagcaccagccatctgccacgatggaaaggcacactttcctagggagggcgtgttcgtgtctaacggcacccactggtttgtgacacagcgcaatttctacgagccacagatcatcaccacagacaatacattcgtgagcggcaactgtgatgtggtgatcggcatcgtgaacaataccgtgtatgatccactgcagcccgagctggactcctttaaggaggagctggataagtacttcaagaatcacacctctcccgacgtggatctgggcgacatctccggcatcaatgcctctgtggtgaacatccagaaggagatcgaccggctgaacgaggtggccaagaatctgaacgagagcctgatcgatctgcaggagctgggcaagtatgagcagtacatcaagggctctggcagagagaacctgtatttccagggaggaggaggcagcggatacatccctgaggcaccaagggacggacaggcctacgtgcgcaaggatggcgagtgggtgctgctgtccacctttctgggccatcatcaccaccaccaccaccactga

SEQ ID NO: 4916 - DNA, 3846 bp, Artificial Sequence
  Description of Artificial Sequence: Synthetic polynucleotide
atgggcatcctgccaagcccaggaatgcccgccctgctgtctctggtgagcctgctgtccgtgctgctgatgggatgcgtggcagagacaggcacacagtgcgtgaacctgaccacaaggacccagctgccccctgcctataccaattctttcacacggggcgtgtactatcccgacaaggtgtttagaagctccgtgctgcactccacacaggatctgtttctgcctttcttttctaacgtgacctggttccacgccatccacgtgtccggcaccaatggcacaaagcggttcgacaatcccgtgctgccttttaacgatggcgtgtacttcgccagcaccgagaagtccaacatcatcagaggctggatctttggcaccacactggactctaagacacagagcctgctgatcgtgaacaatgccaccaacgtggtgatcaaggtgtgcgagttccagttttgtaatgatccattcctgggcgtgtactatcacaagaacaataagtcctggatggagtctgagtttcgcgtgtattctagcgccaacaattgcacatttgagtacgtgagccagcccttcctgatggacctggagggcaagcagggcaatttcaagaacctgagggagttcgtgtttaagaatatcgatggctacttcaagatctacagcaagcacaccccaatcaacctggtgcgcgacctgccacagggattctccgccctggagccactggtggatctgcccatcggcatcaacatcacccggtttcagacactgctggccctgcacagatcctacctgacaccaggcgactcctctagcggatggaccgcaggagctgccgcctactatgtgggctatctgcagccccggaccttcctgctgaagtacaacgagaatggcaccatcacagacgcagtggattgcgccctggaccccctgtctgagacaaagtgtacactgaagagctttaccgtggagaagggcatctatcagacaagcaatttcagggtgcagcctaccgagtccatcgtgcgctttcccaatatcacaaacctgtgcccttttggcgaggtgttcaacgccaccagattcgccagcgtgtacgcctggaatcggaagagaatctccaactgcgtggccgactattctgtgctgtacaactccgcctctttcagcacctttaagtgctatggcgtgtctcccacaaagctgaatgatctgtgctttaccaacgtgtacgccgatagcttcgtgatcaggggagacgaagtgagacagatcgcaccaggacagacaggaaagatcgcagactacaattataagctgcctgacgatttcaccggctgcgtgatcgcctggaactccaacaatctggattctaaagtgggcggcaactacaattatctgtacaggctgtttcgcaagtccaatctgaagccattcgagcgggacatcctcacagagatctaccaggccggctctaccccctgcaatggcgtggagggctttaactgttatttccctctgcagtcttacggcttccagccaacaaacggcgtgggctatcagccctacagagtggtggtgctgtcctttgagctgctgcacgcaccagcaacagtgtgcggcccaaagaagtctaccaatctggtgaagaacaagtgcgtgaacttcaacttcaacggactgaccggcacaggcgtgctgaccgagagcaataagaagttcctgccttttcagcagttcggcagggacatcgcagataccacagacgccgtgcgcgaccctcagaccctggagatcctggacatcacaccatgcagcttcggcggcgtgtccgtgatcacaccaggcaccaatacatccaaccaggtggccgtgctgtatcaggacgtgaattgtaccgaggtgcccgtggcaatccacgcagatcagctgacccctacatggcgggtgtactctaccggcagcaacgtgttccagacaagagccggatgcctgatcggagcagagcacgtgaacaatagctatgagtgcgacatccctatcggcgccggcatctgtgccagctaccagacccagacaaactccccatctggagcaggctccgtggccagccagtccatcatcgcctataccatgagcctgggcgccgagaacagcgtggcctactccaacaattctatcgccatccctaccaacttcacaatcagcgtgaccacagagatcctgccagtgtctatgaccaagacaagcgtggactgcacaatgtatatctgtggcgatagcaccgagtgctccaacctgctgctgcagtacggctccttttgtacccagctgaatagagccctgacaggcatcgccgtggagcaggataagaacacacaggaggtgttcgcccaggtgaagcagatctacaagaccccacccatcaaggactttggcggcttcaacttcagccagatcctgcctgatccaagcaagccctccaagaggtcttttatcgaggacctgctgttcaacaaggtgaccctggccgatgccggcttcatcaagcagtatggagattgcctgggagacatcgcagcccgcgacctgatctgtgcccagaagtttaatggcctgaccgtgctgcctccactgctgacagatgagatgatcgcccagtacacatctgccctgctggccggcaccatcacaagcggatggaccttcggcgcaggagccgccctgcagatcccttttgccatgcagatggcctataggttcaacggcatcggcgtgacccagaatgtgctgtacgagaaccagaagctgatcgccaatcagtttaacagcgccatcggcaagatccaggactctctgtcctctacagccagcgccctgggcaagctgcaggatgtggtgaatcagaacgcccaggccctgaataccctggtgaagcagctgagctccaacttcggcgccatctctagcgtgctgaatgacatcctgagccggctggacccccctgaggcagaggtgcagatcgacaggctgatcacaggccgcctgcagagcctgcagacctacgtgacacagcagctgatcagggcagcagagatcagagcctccgccaatctggccgccaccaagatgagcgagtgcgtgctgggacagtccaagagggtggacttttgtggcaagggctatcacctgatgtctttcccacagagcgcccctcacggcgtggtgtttctgcacgtgacctacgtgccagcccaggagaagaacttcaccacagcaccagccatctgccacgatggaaaggcacactttcctagggagggcgtgttcgtgtctaacggcacccactggtttgtgacacagcgcaatttctacgagccacagatcatcaccacagacaatacattcgtgagcggcaactgtgatgtggtgatcggcatcgtgaacaataccgtgtatgatccactgcagcccgagctggactcctttaaggaggagctggataagtacttcaagaatcacacctctcccgacgtggatctgggcgacatctccggcatcaatgcctctgtggtgaacatccagaaggagatcgaccggctgaacgaggtggccaagaatctgaacgagagcctgatcgatctgcaggagctgggcaagtatgagcagtacatcaagggctctggcagagagaacctgtatttccagggaggaggaggcagcggatacatccctgaggcaccaagggacggacaggcctacgtgcgcaaggatggcgagtgggtgctgctgtccacctttctgggccatcatcaccaccaccaccaccactga

SEQ ID NO: 4917 - DNA, 3846 bp, Artificial Sequence
  Description of Artificial Sequence: Synthetic polynucleotide
atgggcatcctgccaagcccaggaatgcccgccctgctgtctctggtgagcctgctgtccgtgctgctgatgggatgcgtggcagagacaggcacacagtgcgtgaacctgaccacaaggacccagctgccccctgcctataccaattctttcacacggggcgtgtactatcccgacaaggtgtttagaagctccgtgctgcactccacacaggatctgtttctgcctttcttttctaacgtgacctggttccacgccatccacgtgtccggcaccaatggcacaaagcggttcgacaatcccgtgctgccttttaacgatggcgtgtacttcgccagcaccgagaagtccaacatcatcagaggctggatctttggcaccacactggactctaagacacagagcctgctgatcgtgaacaatgccaccaacgtggtgatcaaggtgtgcgagttccagttttgtaatgatccattcctgggcgtgtactatcacaagaacaataagtcctggatggagtctgagtttcgcgtgtattctagcgccaacaattgcacatttgagtacgtgagccagcccttcctgatggacctggagggcaagcagggcaatttcaagaacctgagggagttcgtgtttaagaatatcgatggctacttcaagatctacagcaagcacaccccaatcaacctggtgcgcgacctgccacagggattctccgccctggagccactggtggatctgcccatcggcatcaacatcacccggtttcagacactgctggccctgcacagatcctacctgacaccaggcgactcctctagcggatggaccgcaggagctgccgcctactatgtgggctatctgcagccccggaccttcctgctgaagtacaacgagaatggcaccatcacagacgcagtggattgcgccctggaccccctgtctgagacaaagtgtacactgaagagctttaccgtggagaagggcatctatcagacaagcaatttcagggtgcagcctaccgagtccatcgtgcgctttcccaatatcacaaacctgtgcccttttggcgaggtgttcaacgccaccagattcgccagcgtgtacgcctggaatcggaagagaatctccaactgcgtggccgactattctgtgctgtacaactccgcctctttctgtacctttaagtgctatggcgtgtctcccacaaagctgaatgatctgtgctttaccaacgtgtacgccgatagcttcgtgatcaggggagacgaagtgagacagatcgcaccaggacagacaggaaagatcgcagactacaattataagctgcctgacgatttcaccggctgcgtgatcgcctggaactccaacaatctggattctaaagtgggcggcaactacaattatctgtacaggctgtttcgcaagtccaatctgaagccattcgagcgggacatctccacagagatctaccaggccggctctaccccctgcaatggcgtggagggctttaactgttatttccctctgcagtcttacggcttccagccaacaaacggcgtgggctatcagccctacagagtggtggtgctgtcctttgagctgctgcacgcaccagcaacagtgtgcggcccaaagaagtctaccaatctggtgaagaacaagtgcgtgaacttcaacttcaacggactgaccggcacaggcgtgctgaccgagagcaataagaagttcctgccttttcagcagttcggcagggacatcgcagataccacagacgccgtgcgcgaccctcagaccctggagatcctggacatcacaccatgcagcttcggcggcgtgtccgtgatcacaccaggcaccaatacatccaaccaggtggccgtgctgtatcaggacgtgaattgtaccgaggtgcccgtggcaatccacgcagatcagctgacccctacatggcgggtgtactctaccggcagcaacgtgttccagacaagagccggatgcctgatcggagcagagcacgtgaacaatagctatgagtgcgacatccctatcggcgccggcatctgtgccagctaccagacccagacaaactccccatctggagcaggctccgtggccagccagtccatcatcgcctataccatgagcctgggcgccgagaacagcgtggcctactccaacaattctatcgccatccctaccaacttcacaatcagcgtgaccacagagatcctgccagtgtctatgaccaagacaagcgtggactgcacaatgtatatctgtggcgatagcaccgagtgctccaacctgctgctgcagtacggctccttttgtacccagctgaatagagccctgacaggcatcgccgtggagcaggataagaacacacaggaggtgttcgcccaggtgaagcagatctacaagaccccacccatcaaggactttggcggcttcaacttcagccagatcctgcctgatccaagcaagccctccaagaggtcttttatcgaggacctgctgttcaacaaggtgaccctggccgatgccggcttcatcaagcagtatggagattgcctgggagacatcgcagcccgcgacctgatctgtgcccagaagtttaatggcctgaccgtgctgcctccactgctgacagatgagatgatcgcccagtacacatctgccctgctggccggcaccatcacaagcggatggaccttcggcgcaggagccgccctgcagatcccttttgccatgcagatggcctataggttcaacggcatcggcgtgacccagaatgtgctgtacgagaaccagaagctgatcgccaatcagtttaacagcgccatcggcaagatccaggactctctgtcctctacagccagcgccctgggcaagctgcaggatgtggtgaatcagaacgcccaggccctgaataccctggtgaagcagctgagctccaacttcggcgccatctctagcgtgctgaatgacatcctgagccggctggacccccctgaggcagaggtgcagatcgacaggctgatcacaggccgcctgcagagcctgcagacctacgtgacacagcagctgatcagggcagcagagatcagagcctccgccaatctggccgccaccaagatgagcgagtgcgtgctgggacagtccaagagggtggacttttgtggcaagggctatcacctgatgtctttcccacagagcgcccctcacggcgtggtgtttctgcacgtgacctacgtgccagcccaggagaagaacttcaccacagcaccagccatctgccacgatggaaaggcacactttcctagggagggcgtgttcgtgtctaacggcacccactggtttgtgacacagcgcaatttctacgagccacagatcatcaccacagacaatacattcgtgagcggcaactgtgatgtggtgatcggcatcgtgaacaataccgtgtatgatccactgcagcccgagctggactcctttaaggaggagctggataagtacttcaagaatcacacctctcccgacgtggatctgggcgacatctccggcatcaatgcctctgtggtgaacatccagaaggagatcgaccggctgaacgaggtggccaagaatctgaacgagagcctgatcgatctgcaggagctgggcaagtatgagcagtacatcaagggctctggcagagagaacctgtatttccagggaggaggaggcagcggatacatccctgaggcaccaagggacggacaggcctacgtgcgcaaggatggcgagtgggtgctgctgtccacctttctgggccatcatcaccaccaccaccaccactga

SEQ ID NO: 4918 - DNA, 3846 bp, Artificial Sequence
  Description of Artificial Sequence: Synthetic polynucleotide
atgggcatcctgccaagcccaggaatgcccgccctgctgtctctggtgagcctgctgtccgtgctgctgatgggatgcgtggcagagacaggcacacagtgcgtgaacctgaccacaaggacccagctgccccctgcctataccaattctttcacacggggcgtgtactatcccgacaaggtgtttagaagctccgtgctgcactccacacaggatctgtttctgcctttcttttctaacgtgacctggttccacgccatccacgtgtccggcaccaatggcacaaagcggttcgacaatcccgtgctgccttttaacgatggcgtgtacttcgccagcaccgagaagtccaacatcatcagaggctggatctttggcaccacactggactctaagacacagagcctgctgatcgtgaacaatgccaccaacgtggtgatcaaggtgtgcgagttccagttttgtaatgatccattcctgggcgtgtactatcacaagaacaataagtcctggatggagtctgagtttcgcgtgtattctagcgccaacaattgcacatttgagtacgtgagccagcccttcctgatggacctggagggcaagcagggcaatttcaagaacctgagggagttcgtgtttaagaatatcgatggctacttcaagatctacagcaagcacaccccaatcaacctggtgcgcgacctgccacagggattctccgccctggagccactggtggatctgcccatcggcatcaacatcacccggtttcagacactgctggccctgcacagatcctacctgacaccaggcgactcctctagcggatggaccgcaggagctgccgcctactatgtgggctatctgcagccccggaccttcctgctgaagtacaacgagaatggcaccatcacagacgcagtggattgcgccctggaccccctgtctgagacaaagtgtacactgaagagctttaccgtggagaagggcatctatcagacaagcaatttcagggtgcagcctaccgagtccatcgtgcgctttcccaatatcacaaacctgtgcccttttggcgaggtgttcaacgccaccagattcgccagcgtgtacgcctggaatcggaagagaatctccggttgcgtggccgactattctgtgctgtacaactccgcctctttcagcacctttaagtgctatggcgtgtctcccacaaagctgaatgatctgtgctttaccaacgtgtacgccgatagcttcgtgatcaggggagacgaagtgagacagatcgcaccaggacagacaggaaagatcgcagactacaattataagctgcctgacgatttcaccggctgcgtgatcgcctggaactccaacaatctggattctaaagtgggcggcaactacaattatctgtacaggctgtttcgcaagtccaatctgaagccattcgagcgggacatctccacagagatctaccaggccggctctaccccctgcaatggcgtggagggctttaactgttatttccctctgcagtcttacggcttccagccaacaaacggcgtgggctatcagccctacagagtggtggtgctgtcctttgagctgctgcacgcaccagcaacagtgtgcggcccaaagaagtctaccaatctggtgaagaacaagtgcgtgaacttcaacttcaacggactgaccggcacaggcgtgctgaccgagagcaataagaagttcctgccttttcagcagttcggcagggacatcgcagataccacagacgccgtgcgcgaccctcagaccctggagatcctggacatcacaccatgcagcttcggcggcgtgtccgtgatcacaccaggcaccaatacatccaaccaggtggccgtgctgtatcaggacgtgaattgtaccgaggtgcccgtggcaatccacgcagatcagctgacccctacatggcgggtgtactctaccggcagcaacgtgttccagacaagagccggatgcctgatcggagcagagcacgtgaacaatagctatgagtgcgacatccctatcggcgccggcatctgtgccagctaccagacccagacaaactccccatctggagcaggctccgtggccagccagtccatcatcgcctataccatgagcctgggcgccgagaacagcgtggcctactccaacaattctatcgccatccctaccaacttcacaatcagcgtgaccacagagatcctgccagtgtctatgaccaagacaagcgtggactgcacaatgtatatctgtggcgatagcaccgagtgctccaacctgctgctgcagtacggctccttttgtacccagctgaatagagccctgacaggcatcgccgtggagcaggataagaacacacaggaggtgttcgcccaggtgaagcagatctacaagaccccacccatcaaggactttggcggcttcaacttcagccagatcctgcctgatccaagcaagccctccaagaggtcttttatcgaggacctgctgttcaacaaggtgaccctggccgatgccggcttcatcaagcagtatggagattgcctgggagacatcgcagcccgcgacctgatctgtgcccagaagtttaatggcctgaccgtgctgcctccactgctgacagatgagatgatcgcccagtacacatctgccctgctggccggcaccatcacaagcggatggaccttcggcgcaggagccgccctgcagatcccttttgccatgcagatggcctataggttcaacggcatcggcgtgacccagaatgtgctgtacgagaaccagaagctgatcgccaatcagtttaacagcgccatcggcaagatccaggactctctgtcctctacagccagcgccctgggcaagctgcaggatgtggtgaatcagaacgcccaggccctgaataccctggtgaagcagctgagctccaacttcggcgccatctctagcgtgctgaatgacatcctgagccggctggacccccctgaggcagaggtgcagatcgacaggctgatcacaggccgcctgcagagcctgcagacctacgtgacacagcagctgatcagggcagcagagatcagagcctccgccaatctggccgccaccaagatgagcgagtgcgtgctgggacagtccaagagggtggacttttgtggcaagggctatcacctgatgtctttcccacagagcgcccctcacggcgtggtgtttctgcacgtgacctacgtgccagcccaggagaagaacttcaccacagcaccagccatctgccacgatggaaaggcacactttcctagggagggcgtgttcgtgtctaacggcacccactggtttgtgacacagcgcaatttctacgagccacagatcatcaccacagacaatacattcgtgagcggcaactgtgatgtggtgatcggcatcgtgaacaataccgtgtatgatccactgcagcccgagctggactcctttaaggaggagctggataagtacttcaagaatcacacctctcccgacgtggatctgggcgacatctccggcatcaatgcctctgtggtgaacatccagaaggagatcgaccggctgaacgaggtggccaagaatctgaacgagagcctgatcgatctgcaggagctgggcaagtatgagcagtacatcaagggctctggcagagagaacctgtatttccagggaggaggaggcagcggatacatccctgaggcaccaagggacggacaggcctacgtgcgcaaggatggcgagtgggtgctgctgtccacctttctgggccatcatcaccaccaccaccaccactga

SEQ ID NO: 4919 - DNA, 3846 bp, Artificial Sequence
  Description of Artificial Sequence: Synthetic polynucleotide
atgggcatcctgccaagcccaggaatgcccgccctgctgtctctggtgagcctgctgtccgtgctgctgatgggatgcgtggcagagacaggcacacagtgcgtgaacctgaccacaaggacccagctgccccctgcctataccaattctttcacacggggcgtgtactatcccgacaaggtgtttagaagctccgtgctgcactccacacaggatctgtttctgcctttcttttctaacgtgacctggttccacgccatccacgtgtccggcaccaatggcacaaagcggttcgacaatcccgtgctgccttttaacgatggcgtgtacttcgccagcaccgagaagtccaacatcatcagaggctggatctttggcaccacactggactctaagacacagagcctgctgatcgtgaacaatgccaccaacgtggtgatcaaggtgtgcgagttccagttttgtaatgatccattcctgggcgtgtactatcacaagaacaataagtcctggatggagtctgagtttcgcgtgtattctagcgccaacaattgcacatttgagtacgtgagccagcccttcctgatggacctggagggcaagcagggcaatttcaagaacctgagggagttcgtgtttaagaatatcgatggctacttcaagatctacagcaagcacaccccaatcaacctggtgcgcgacctgccacagggattctccgccctggagccactggtggatctgcccatcggcatcaacatcacccggtttcagacactgctggccctgcacagatcctacctgacaccaggcgactcctctagcggatggaccgcaggagctgccgcctactatgtgggctatctgcagccccggaccttcctgctgaagtacaacgagaatggcaccatcacagacgcagtggattgcgccctggaccccctgtctgagacaaagtgtacactgaagagctttaccgtggagaagggcatctatcagacaagcaatttccaagtgcagcctaccgagtccatcgtgcgctttcccaatatcacaaacctgtgcccttttggcgaggtgttcaacgccaccagattcgccagcgtgtacgcctggaatcggaagagaatctccaactgcgtggccgactattctgtgctgtacaactccgcctctttcagcacctttaagtgctatggcgtgtctcccacaaagctgaatgatctgtgctttaccaacgtgtacgccgatagcttcgtgatcaggggagacgaagtgagacagatcgcaccaggacagacaggaaagatcgcagactacaattataagctgcctgacgatttcaccggctgcgtgatcgcctggaactccaacaatctggattctaaagtgggcggcaactacaattatctgtacaggctgtttcgcaagtccaatctgaagccattcgagcgggacatctccacagagatctaccaggccggctctaccccctgcaatggcgtggagggctttaactgttatttccctctgcagtcttacggcttccagccaacaaacggcgtgggctatcagccctacagagtggtggtgctgtcctttgagctgctgcacgcaccagcaacagtgtgcggcccaaagaagtctaccaatctggtgaagaacaagtgcgtgaacttcaacttcaacggactgaccggcacaggcgtgctgaccgagagcaataagaagttcctgccttttcagcagttcggcagggacatcgcagataccacagacgccgtgcgcgaccctcagaccctggagatcctggacatcacaccatgcagcttcggcggcgtgtccgtgatcacaccaggcaccaatacatccaaccaggtggccgtgctgtatcaggacgtgaattgtaccgaggtgcccgtggcaatccacgcagatcagctgacccctacatggcgggtgtactctaccggcagcaacgtgttccagacaagagccggatgcctgatcggagcagagcacgtgaacaatagctatgagtgcgacatccctatcggcgccggcatctgtgccagctaccagacccagacaaactccccatctggagcaggctccgtggccagccagtccatcatcgcctataccatgagcctgggcgccgagaacagcgtggcctactccaacaattctatcgccatccctaccaacttcacaatcagcgtgaccacagagatcctgccagtgtctatgaccaagacaagcgtggactgcacaatgtatatctgtggcgatagcaccgagtgctccaacctgctgctgcagtacggctccttttgtacccagctgaatagagccctgacaggcatcgccgtggagcaggataagaacacacaggaggtgttcgcccaggtgaagcagatctacaagaccccacccatcaaggactttggcggcttcaacttcagccagatcctgcctgatccaagcaagccctccaagaggtcttttatcgaggacctgctgttcaacaaggtgaccctggccgatgccggcttcatcaagcagtatggagattgcctgggagacatcgcagcccgcgacctgatctgtgcccagaagtttaatggcctgaccgtgctgcctccactgctgacagatgagatgatcgcccagtacacatctgccctgctggccggcaccatcacaagcggatggaccttcggcgcaggagccgccctgcagatcccttttgccatgcagatggcctataggttcaacggcatcggcgtgacccagaatgtgctgtacgagaaccagaagctgatcgccaatcagtttaacagcgccatcggcaagatccaggactctctgtcctctacagccagcgccctgggcaagctgcaggatgtggtgaatcagaacgcccaggccctgaataccctggtgaagcagctgagctccaacttcggcgccatctctagcgtgctgaatgacatcctgagccggctggacccccctgaggcagaggtgcagatcgacaggctgatcacaggccgcctgcagagcctgcagacctacgtgacacagcagctgatcagggcagcagagatcagagcctccgccaatctggccgccaccaagatgagcgagtgcgtgctgggacagtccaagagggtggacttttgtggcaagggctatcacctgatgtctttcccacagagcgcccctcacggcgtggtgtttctgcacgtgacctacgtgccagcccaggagaagaacttcaccacagcaccagccatctgccacgatggaaaggcacactttcctagggagggcgtgttcgtgtctaacggcacccactggtttgtgacacagcgcaatttctacgagccacagatcatcaccacagacaatacattcgtgagcggcaactgtgatgtggtgatcggcatcgtgaacaataccgtgtatgatccactgcagcccgagctggactcctttaaggaggagctggataagtacttcaagaatcacacctctcccgacgtggatctgggcgacatctccggcatcaatgcctctgtggtgaacatccagaaggagatcgaccggctgaacgaggtggccaagaatctgaacgagagcctgatcgatctgcaggagctgggcaagtatgagcagtacatcaagggctctggcagagagaacctgtatttccagggaggaggaggcagcggatacatccctgaggcaccaagggacggacaggcctacgtgcgcaaggatggcgagtgggtgctgctgtccacctttctgggccatcatcaccaccaccaccaccactga

SEQ ID NO: 4920 - DNA, 3846 bp, Artificial Sequence
  Description of Artificial Sequence: Synthetic polynucleotide
atgggcatcctgccaagcccaggaatgcccgccctgctgtctctggtgagcctgctgtccgtgctgctgatgggatgcgtggcagagacaggcacacagtgcgtgaacctgaccacaaggacccagctgccccctgcctataccaattctttcacacggggcgtgtactatcccgacaaggtgtttagaagctccgtgctgcactccacacaggatctgtttctgcctttcttttctaacgtgacctggttccacgccatccacgtgtccggcaccaatggcacaaagcggttcgacaatcccgtgctgccttttaacgatggcgtgtacttcgccagcaccgagaagtccaacatcatcagaggctggatctttggcaccacactggactctaagacacagagcctgctgatcgtgaacaatgccaccaacgtggtgatcaaggtgtgcgagttccagttttgtaatgatccattcctgggcgtgtactatcacaagaacaataagtcctggatggagtctgagtttcgcgtgtattctagcgccaacaattgcacatttgagtacgtgagccagcccttcctgatggacctggagggcaagcagggcaatttcaagaacctgagggagttcgtgtttaagaatatcgatggctacttcaagatctacagcaagcacaccccaatcaacctggtgcgcgacctgccacagggattctccgccctggagccactggtggatctgcccatcggcatcaacatcacccggtttcagacactgctggccctgcacagatcctacctgacaccaggcgactcctctagcggatggaccgcaggagctgccgcctactatgtgggctatctgcagccccggaccttcctgctgaagtacaacgagaatggcaccatcacagacgcagtggattgcgccctggaccccctgtctgagacaaagtgtacactgaagagctttaccgtggagaagggcatctatcagacaagcaatttcagggtgcagcctaccgagtccatcgtgcgctttcccaatatcacaaacctgtgcccttttggcgaggtgttcaacgccaccagattcgccagcgtgtacgcctggaatcggaagagaatctccaactgcgtggccgactattctgtgctgtacaactccgcctctttcagcacctttaagtgctatggcgtgtctcccacaaagctgaatgatctgtgctttaccaacgtgtacgccgatagcttcgtgatcaggggagacgaagtgagacagatcgcaccaggacagacaggaaagatcgcagactacaattataagctgcctgacgatttcaccggctgcgtgatcgcctggaactccaacaatctggattctaaagtgggcggcaactacaattatctgtacaggctgtttcgcaagtccaatctgaagccattcgagcgggacatctccacagagatctaccaggccggctctaccccctgcaatggcgtggagggctttaactgttatttccctctgcagtcttacggcttccagccaacaaacggcgtgggctatcagccctacagagtggtggtgctgtcctttgagctgctgcacgcaccagcaacagtgtgcggcccaaagaagtctaccaatctggtgaagaacaagtgcgtgaacttcaacttcaacggactgaccggcacaggcgtgctgaccgagagcaataagaagttcctgccttttcagcagttcggcagggacatcgcagataccacagacgccgtgcgcgaccctcagaccctggagatcctggacatcacaccatgcagcttcggcggcgtgtccgtgatcacaccaggcaccaatacatccaaccaggtggccgtgctgtatcaggacgtgaattgtaccgaggtgcccgtggcaatccacgcagatcagctgacccctacatggcgggtgtactctaccggcagcaacgtgttccagacaagagccggatgcctgatcggagcagagcacgtgaacaatagctatgagtgcgacatccctatcggcgccggcatctgtgccagctaccagacccagacaaactccccatctggagcaggctccgtggccagccagtccatcatcgcctataccatgagcctgggcgccgagaacatggtggcctactccaacaattctatcgccatccctaccaacttcacaatcagcgtgaccacagagatcctgccagtgtctatgaccaagacaagcgtggactgcacaatgtatatctgtggcgatagcaccgagtgctccaacctgctgctgcagtacggctccttttgtacccagctgaatagagccctgacaggcatcgccgtggagcaggataagaacacacaggaggtgttcgcccaggtgaagcagatctacaagaccccacccatcaaggactttggcggcttcaacttcagccagatcctgcctgatccaagcaagccctccaagaggtcttttatcgaggacctgctgttcaacaaggtgaccctggccgatgccggcttcatcaagcagtatggagattgcctgggagacatcgcagcccgcgacctgatctgtgcccagaagtttaatggcctgaccgtgctgcctccactgctgacagatgagatgatcgcccagtacacatctgccctgctggccggcaccatcacaagcggatggaccttcggcgcaggagccgccctgcagatcccttttgccatgcagatggcctataggttcaacggcatcggcgtgacccagaatgtgctgtacgagaaccagaagctgatcgccaatcagtttaacagcgccatcggcaagatccaggactctctgtcctctacagccagcgccctgggcaagctgcaggatgtggtgaatcagaacgcccaggccctgaataccctggtgaagcagctgagctccaacttcggcgccatctctagcgtgctgaatgacatcctgagccggctggacccccctgaggcagaggtgcagatcgacaggctgatcacaggccgcctgcagagcctgcagacctacgtgacacagcagctgatcagggcagcagagatcagagcctccgccaatctggccgccaccaagatgagcgagtgcgtgctgggacagtccaagagggtggacttttgtggcaagggctatcacctgatgtctttcccacagagcgcccctcacggcgtggtgtttctgcacgtgacctacgtgccagcccaggagaagaacttcaccacagcaccagccatctgccacgatggaaaggcacactttcctagggagggcgtgttcgtgtctaacggcacccactggtttgtgacacagcgcaatttctacgagccacagatcatcaccacagacaatacattcgtgagcggcaactgtgatgtggtgatcggcatcgtgaacaataccgtgtatgatccactgcagcccgagctggactcctttaaggaggagctggataagtacttcaagaatcacacctctcccgacgtggatctgggcgacatctccggcatcaatgcctctgtggtgaacatccagaaggagatcgaccggctgaacgaggtggccaagaatctgaacgagagcctgatcgatctgcaggagctgggcaagtatgagcagtacatcaagggctctggcagagagaacctgtatttccagggaggaggaggcagcggatacatccctgaggcaccaagggacggacaggcctacgtgcgcaaggatggcgagtgggtgctgctgtccacctttctgggccatcatcaccaccaccaccaccactga

SEQ ID NO: 4921 - DNA, 3846 bp, Artificial Sequence
  Description of Artificial Sequence: Synthetic polynucleotide
atgggcatcctgccaagcccaggaatgcccgccctgctgtctctggtgagcctgctgtccgtgctgctgatgggatgcgtggcagagacaggcacacagtgcgtgaacctgaccacaaggacccagctgccccctgcctataccaattctttcacacggggcgtgtactatcccgacaaggtgtttagaagctccgtgctgcactccacacaggatctgtttctgcctttcttttctaacgtgacctggttccacgccatccacgtgtccggcaccaatggcacaaagcggttcgacaatcccgtgctgccttttaacgatggcgtgtacttcgccagcaccgagaagtccaacatcatcagaggctggatctttggcaccacactggactctaagacacagagcctgctgatcgtgaacaatgccaccaacgtggtgatcaaggtgtgcgagttccagttttgtaatgatccattcctgggcgtgtactatcacaagaacaataagtcctggatggagtctgagtttcgcgtgtattctagcgccaacaattgcacatttgagtacgtgagccagcccttcctgatggacctggagggcaagcagggcaatttcaagaacctgagggagttcgtgtttaagaatatcgatggctacttcaagatctacagcaagcacaccccaatcaacctggtgcgcgacctgccacagggattctccgccctggagccactggtggatctgcccatcggcatcaacatcacccggtttcagacactgctggccctgcacagatcctacctgacaccaggcgactcctctagcggatggaccgcaggagctgccgcctactatgtgggctatctgcagccccggaccttcctgctgaagtacaacgagaatggcaccatcacagacgcagtggattgcgccctggaccccctgtctgagacaaagtgtacactgaagagctttaccgtggagaagggcatctatcagacaagcaatttcagggtgcagcctaccgagtccatcgtgcgctttcccaatatcacaaacctgtgcccttttggcgaggtgttcaacgccaccagattcgccagcgtgtacgcctggaatcggaagagaatctccaactgcgtggccgactattctgtgctgtacaactccgcctctttcagcacctttaagtgctatggcgtgtctcccacaaagctgaatgatctgtgctttaccaacgtgtacgccgatagcttcgtgatcaggggagacgaagtgagacagatcgcaccaggacagacaggaaagatcgcagactacaattataagctgcctgacgatttcaccggctgcgtgatcgcctggaactccaacgacctggattctaaagtgggcggcaactacaattatctgtacaggctgtttcgcaagtccaatctgaagccattcgagcgggacatctccacagagatctaccaggccggctctaccccctgcaatggcgtggagggctttaactgttatttccctctgcagtcttacggcttccagccaacaaacggcgtgggctatcagccctacagagtggtggtgctgtcctttgagctgctgcacgcaccagcaacagtgtgcggcccaaagaagtctaccaatctggtgaagaacaagtgcgtgaacttcaacttcaacggactgaccggcacaggcgtgctgaccgagagcaataagaagttcctgccttttcagcagttcggcagggacatcgcagataccacagacgccgtgcgcgaccctcagaccctggagatcctggacatcacaccatgcagcttcggcggcgtgtccgtgatcacaccaggcaccaatacatccaaccaggtggccgtgctgtatcaggacgtgaattgtaccgaggtgcccgtggcaatccacgcagatcagctgacccctacatggcgggtgtactctaccggcagcaacgtgttccagacaagagccggatgcctgatcggagcagagcacgtgaacaatagctatgagtgcgacatccctatcggcgccggcatctgtgccagctaccagacccagacaaactccccatctggagcaggctccgtggccagccagtccatcatcgcctataccatgagcctgggcgccgagaacagcgtggcctactccaacaattctatcgccatccctaccaacttcacaatcagcgtgaccacagagatcctgccagtgtctatgaccaagacaagcgtggactgcacaatgtatatctgtggcgatagcaccgagtgctccaacctgctgctgcagtacggctccttttgtacccagctgaatagagccctgacaggcatcgccgtggagcaggataagaacacacaggaggtgttcgcccaggtgaagcagatctacaagaccccacccatcaaggactttggcggcttcaacttcagccagatcctgcctgatccaagcaagccctccaagaggtcttttatcgaggacctgctgttcaacaaggtgaccctggccgatgccggcttcatcaagcagtatggagattgcctgggagacatcgcagcccgcgacctgatctgtgcccagaagtttaatggcctgaccgtgctgcctccactgctgacagatgagatgatcgcccagtacacatctgccctgctggccggcaccatcacaagcggatggaccttcggcgcaggagccgccctgcagatcccttttgccatgcagatggcctataggttcaacggcatcggcgtgacccagaatgtgctgtacgagaaccagaagctgatcgccaatcagtttaacagcgccatcggcaagatccaggactctctgtcctctacagccagcgccctgggcaagctgcaggatgtggtgaatcagaacgcccaggccctgaataccctggtgaagcagctgagctccaacttcggcgccatctctagcgtgctgaatgacatcctgagccggctggacccccctgaggcagaggtgcagatcgacaggctgatcacaggccgcctgcagagcctgcagacctacgtgacacagcagctgatcagggcagcagagatcagagcctccgccaatctggccgccaccaagatgagcgagtgcgtgctgggacagtccaagagggtggacttttgtggcaagggctatcacctgatgtctttcccacagagcgcccctcacggcgtggtgtttctgcacgtgacctacgtgccagcccaggagaagaacttcaccacagcaccagccatctgccacgatggaaaggcacactttcctagggagggcgtgttcgtgtctaacggcacccactggtttgtgacacagcgcaatttctacgagccacagatcatcaccacagacaatacattcgtgagcggcaactgtgatgtggtgatcggcatcgtgaacaataccgtgtatgatccactgcagcccgagctggactcctttaaggaggagctggataagtacttcaagaatcacacctctcccgacgtggatctgggcgacatctccggcatcaatgcctctgtggtgaacatccagaaggagatcgaccggctgaacgaggtggccaagaatctgaacgagagcctgatcgatctgcaggagctgggcaagtatgagcagtacatcaagggctctggcagagagaacctgtatttccagggaggaggaggcagcggatacatccctgaggcaccaagggacggacaggcctacgtgcgcaaggatggcgagtgggtgctgctgtccacctttctgggccatcatcaccaccaccaccaccactga

SEQ ID NO: 4922 - DNA, 3846 bp, Artificial Sequence
  Description of Artificial Sequence: Synthetic polynucleotide
atgggcatcctgccaagcccaggaatgcccgccctgctgtctctggtgagcctgctgtccgtgctgctgatgggatgcgtggcagagacaggcacacagtgcgtgaacctgaccacaaggacccagctgccccctgcctataccaattctttcacacggggcgtgtactatcccgacaaggtgtttagaagctccgtgctgcactccacacaggatctgtttctgcctttcttttctaacgtgacctggttccacgccatccacgtgtccggcaccaatggcacaaagcggttcgacaatcccgtgctgccttttaacgatggcgtgtacttcgccagcaccgagaagtccaacatcatcagaggctggatctttggcaccacactggactctaagacacagagcctgctgatcgtgaacaatgccaccaacgtggtgatcaaggtgtgcgagttccagttttgtaatgatccattcctgggcgtgtactatcacaagaacaataagtcctggatggagtctgagtttcgcgtgtattctagcgccaacaattgcacatttgagtacgtgagccagcccttcctgatggacctggagggcaagcagggcaatttcaagaacctgagggagttcgtgtttaagaatatcgatggctacttcaagatctacagcaagcacaccccaatcaacctggtgcgcgacctgccacagggattctccgccctggagccactggtggatctgcccatcggcatcaacatcacccggtttcagacactgctggccctgcacagatcctacctgacaccaggcgactcctctagcggatggaccgcaggagctgccgcctactatgtgggctatctgcagccccggaccttcctgctgaagtacaacgagaatggcaccatcacagacgcagtggattgcgccctggaccccctgtctgagacaaagtgtacactgaagagctttaccgtggagaagggcatctatcagacaagcaatttcagggtgcagcctaccgagtccatcgtgcgctttcccaatatcacaaacctgtgcccttttggcgaggtgttcaacgccaccagattcgccagcgtgtacgcctggaatcggaagagaatctccaactgcgtggccgactattctgtgctgtacaactccgcctctttcagcacctttaagtgctatggcgtgtctcccacaaagctgaatgatctgtgctttaccaacgtgtacgccgatagcttcgtgatcaggggagacgaagtgagacagatcgcaccaggacagacaggaaagatcgcagactacaattataagctgcctgacgatttcaccggctgcgtgatcgcctggaactccaacaatctggattctaaagtgggcggcaactacaattatctgtacaggctgtttcgcaagtccaatctgaagccattcgagcgggacatctccacagagatctaccaggccggctctaccccctgcaatggcgtggagggctttaactgttatttccctctgcagtcttacggcttccagccaacaaacggcgtgggctatcagccctacagagtggtggtgctgtcctttgagctgctgcacgcaccagcaacagtgtgcggcccaaagaagtctaccaatctggtgaagaacaagtgcgtgaacttcaacttcaacggactgaccggcacaggcgtgctgaccgagagcaataagaagttcctgccttttcagcagttcggcagggacatcgcagataccacagacgccgtgcgcgaccctcagaccctggagatcctggacatcacaccatgcagcttcggcggcgtgtccgtgatcacaccaggcaccaatacatccaaccaggtggccgtgctgtatcaggacgtgaattgtaccgaggtgcccgtggcaatccacgcagatcagctgacccctacatggcgggtgtactctaccggcagcaacgtgttccagacaagagccggatgcctgatcggagcagagcacgtgaacaatagctatgagtgcgacatccctatcggcgccggcatctgtgccagctaccagacccagacaaactccccatctggagcaggctccgtggccagccagtccatcatcgcctataccatgagcctgggcgccgtcaacagcgtggcctactccaacaattctatcgccatccctaccaacttcacaatcagcgtgaccacagagatcctgccagtgtctatgaccaagacaagcgtggactgcacaatgtatatctgtggcgatagcaccgagtgctccaacctgctgctgcagtacggctccttttgtacccagctgaatagagccctgacaggcatcgccgtggagcaggataagaacacacaggaggtgttcgcccaggtgaagcagatctacaagaccccacccatcaaggactttggcggcttcaacttcagccagatcctgcctgatccaagcaagccctccaagaggtcttttatcgaggacctgctgttcaacaaggtgaccctggccgatgccggcttcatcaagcagtatggagattgcctgggagacatcgcagcccgcgacctgatctgtgcccagaagtttaatggcctgaccgtgctgcctccactgctgacagatgagatgatcgcccagtacacatctgccctgctggccggcaccatcacaagcggatggaccttcggcgcaggagccgccctgcagatcccttttgccatgcagatggcctataggttcaacggcatcggcgtgacccagaatgtgctgtacgagaaccagaagctgatcgccaatcagtttaacagcgccatcggcaagatccaggactctctgtcctctacagccagcgccctgggcaagctgcaggatgtggtgaatcagaacgcccaggccctgaataccctggtgaagcagctgagctccaacttcggcgccatctctagcgtgctgaatgacatcctgagccggctggacccccctgaggcagaggtgcagatcgacaggctgatcacaggccgcctgcagagcctgcagacctacgtgacacagcagctgatcagggcagcagagatcagagcctccgccaatctggccgccaccaagatgagcgagtgcgtgctgggacagtccaagagggtggacttttgtggcaagggctatcacctgatgtctttcccacagagcgcccctcacggcgtggtgtttctgcacgtgacctacgtgccagcccaggagaagaacttcaccacagcaccagccatctgccacgatggaaaggcacactttcctagggagggcgtgttcgtgtctaacggcacccactggtttgtgacacagcgcaatttctacgagccacagatcatcaccacagacaatacattcgtgagcggcaactgtgatgtggtgatcggcatcgtgaacaataccgtgtatgatccactgcagcccgagctggactcctttaaggaggagctggataagtacttcaagaatcacacctctcccgacgtggatctgggcgacatctccggcatcaatgcctctgtggtgaacatccagaaggagatcgaccggctgaacgaggtggccaagaatctgaacgagagcctgatcgatctgcaggagctgggcaagtatgagcagtacatcaagggctctggcagagagaacctgtatttccagggaggaggaggcagcggatacatccctgaggcaccaagggacggacaggcctacgtgcgcaaggatggcgagtgggtgctgctgtccacctttctgggccatcatcaccaccaccaccaccactga

SEQ ID NO: 4923 - DNA, 3846 bp, Artificial Sequence
  Description of Artificial Sequence: Synthetic polynucleotide
atgggcatcctgccaagcccaggaatgcccgccctgctgtctctggtgagcctgctgtccgtgctgctgatgggatgcgtggcagagacaggcacacagtgcgtgaacctgaccacaaggacccagctgccccctgcctataccaattctttcacacggggcgtgtactatcccgacaaggtgtttagaagctccgtgctgcactccacacaggatctgtttctgcctttcttttctaacgtgacctggttccacgccatccacgtgtccggcaccaatggcacaaagcggttcgacaatcccgtgctgccttttaacgatggcgtgtacttcgccagcaccgagaagtccaacatcatcagaggctggatctttggcaccacactggactctaagacacagagcctgctgatcgtgaacaatgccaccaacgtggtgatcaaggtgtgcgagttccagttttgtaatgatccattcctgggcgtgtactatcacaagaacaataagtcctggatggagtctgagtttcgcgtgtattctagcgccaacaattgcacatttgagtacgtgagccagcccttcctgatggacctggagggcaagcagggcaatttcaagaacctgagggagttcgtgtttaagaatatcgatggctacttcaagatctacagcaagcacaccccaatcaacctggtgcgcgacctgccacagggattctccgccctggagccactggtggatctgcccatcggcatcaacatcacccggtttcagacactgctggccctgcacagatcctacctgacaccaggcgactcctctagcggatggaccgcaggagctgccgcctactatgtgggctatctgcagccccggaccttcctgctgaagtacaacgagaatggcaccatcacagacgcagtggattgcgccctggaccccctgtctgagacaaagtgtacactgaagagctttaccgtggagaagggcatctatcagacaagcaatttcagggtgcagcctaccgagtccatcgtgcgctttcccaatatcacaaacctgtgcccttttggcgaggtgttcaacgccaccagattcgccagcgtgtacgcctggaatcggaagagaatctccaactgcgtggccgactattctgtgctgtacaactccgcctctttcagcacctttaagtgctatggcgtgtctcccacaaagctgaatgatctgtgctttaccaacgtgtacgccgatagcttcgtgatcaggggagacgaagtgagacagatcgcaccaggacagacaggaaagatcgcagactacaattataagctgcctgacgatttcaccggctgcgtgatcgcctggaactccaacaatctggattctaaagtgggcggcaactacaattatctgtacaggctgtttcgcaagtccaatctgaagccattcgagcgggacatctccacagagatctaccaggccggctctaccccctgcaatggcgtggagggctttaactgttatttccctctgcagtcttacggcttccagccaacaaacggcgtgggctatcagccctacagagtggtggtgctgtcctttgagctgctgcacgcaccatgtacagtgtgcggcccaaagaagtctaccaatctggtgaagaacaagtgcgtgaacttcaacttcaacggactgaccggcacaggcgtgctgaccgagagcaataagaagttcctgccttttcagcagttcggcagggacatcgcagataccacagacgccgtgcgcgaccctcagaccctggagatcctggacatcacaccatgcagcttcggcggcgtgtccgtgatcacaccaggcaccaatacatccaaccaggtggccgtgctgtatcaggacgtgaattgtaccgaggtgcccgtggcaatccacgcagatcagctgacccctacatggcgggtgtactctaccggcagcaacgtgttccagacaagagccggatgcctgatcggagcagagcacgtgaacaatagctatgagtgcgacatccctatcggcgccggcatctgtgccagctaccagacccagacaaactccccatctggagcaggctccgtggccagccagtccatcatcgcctataccatgagcctgggcgccgagaacagcgtggcctactccaacaattctatcgccatccctaccaacttcacaatcagcgtgaccacagagatcctgccagtgtctatgaccaagacaagcgtggactgcacaatgtatatctgtggcgatagcaccgagtgctccaacctgctgctgcagtacggctccttttgtacccagctgaatagagccctgacaggcatcgccgtggagcaggataagaacacacaggaggtgttcgcccaggtgaagcagatctacaagaccccacccatcaaggactttggcggcttcaacttcagccagatcctgcctgatccaagcaagccctccaagaggtcttttatcgaggacctgctgttcaacaaggtgaccctggccgatgccggcttcatcaagcagtatggagattgcctgggagacatcgcagcccgcgacctgatctgtgcccagaagtttaatggcctgaccgtgctgcctccactgctgacagatgagatgatcgcccagtacacatctgccctgctggccggcaccatcacaagcggatggaccttcggcgcaggagccgccctgcagatcccttttgccatgcagatggcctataggttcaacggcatcggcgtgacccagaatgtgctgtacgagaaccagaagctgatcgccaatcagtttaacagcgccatcggcaagatccaggactctctgtcctctacagccagcgccctgggcaagctgcaggatgtggtgaatcagaacgcccaggccctgaataccctggtgaagcagctgagctccaacttcggcgccatctctagcgtgctgaatgacatcctgagccggctggacccccctgaggcagaggtgcagatcgacaggctgatcacaggccgcctgcagagcctgcagacctacgtgacacagcagctgatcagggcagcagagatcagagcctccgccaatctggccgccaccaagatgagcgagtgcgtgctgggacagtccaagagggtggacttttgtggcaagggctatcacctgatgtctttcccacagagcgcccctcacggcgtggtgtttctgcacgtgacctacgtgccagcccaggagaagaacttcaccacagcaccagccatctgccacgatggaaaggcacactttcctagggagggcgtgttcgtgtctaacggcacccactggtttgtgacacagcgcaatttctacgagccacagatcatcaccacagacaatacattcgtgagcggcaactgtgatgtggtgatcggcatcgtgaacaataccgtgtatgatccactgcagcccgagctggactcctttaaggaggagctggataagtacttcaagaatcacacctctcccgacgtggatctgggcgacatctccggcatcaatgcctctgtggtgaacatccagaaggagatcgaccggctgaacgaggtggccaagaatctgaacgagagcctgatcgatctgcaggagctgggcaagtatgagcagtacatcaagggctctggcagagagaacctgtatttccagggaggaggaggcagcggatacatccctgaggcaccaagggacggacaggcctacgtgcgcaaggatggcgagtgggtgctgctgtccacctttctgggccatcatcaccaccaccaccaccactga

SEQ ID NO: 4924 - DNA, 3846 bp, Artificial Sequence
  Description of Artificial Sequence: Synthetic polynucleotide
atgggcatcctgccaagcccaggaatgcccgccctgctgtctctggtgagcctgctgtccgtgctgctgatgggatgcgtggcagagacaggcacacagtgcgtgaacctgaccacaaggacccagctgccccctgcctataccaattctttcacacggggcgtgtactatcccgacaaggtgtttagaagctccgtgctgcactccacacaggatctgtttctgcctttcttttctaacgtgacctggttccacgccatccacgtgtccggcaccaatggcacaaagcggttcgacaatcccgtgctgccttttaacgatggcgtgtacttcgccagcaccgagaagtccaacatcatcagaggctggatctttggcaccacactggactctaagacacagagcctgctgatcgtgaacaatgccaccaacgtggtgatcaaggtgtgcgagttccagttttgtaatgatccattcctgggcgtgtactatcacaagaacaataagtcctggatggagtctgagtttcgcgtgtattctagcgccaacaattgcacatttgagtacgtgagccagcccttcctgatggacctggagggcaagcagggcaatttcaagaacctgagggagttcgtgtttaagaatatcgatggctacttcaagatctacagcaagcacaccccaatcaacctggtgcgcgacctgccacagggattctccgccctggagccactggtggatctgcccatcggcatcaacatcacccggtttcagacactgctggccctgcacagatcctacctgacaccaggcgactcctctagcggatggaccgcaggagctgccgcctactatgtgggctatctgcagccccggaccttcctgctgaagtacaacgagaatggcaccatcacagacgcagtggattgcgccctggaccccctgtctgagacaaagtgtacactgaagagctttaccgtggagaagggcatctatcagacaagcaatttcagggtgcagcctaccgagtccatcgtgcgctttcccaatatcacaaacctgtgcccttttggcgaggtgttcaacgccaccagattcgccagcgtgtacgcctggaatcggaagagaatctccaactgcgtggccgactattctgtgctgtacaactccgcctctttcagcacctttaagtgctatggcgtgtctcccacaaagctgaatgatctgtgctttaccaacgtgtacgccgatagcttcgtgatcaggggagacgaagtgagacagatcgcaccaggacagacaggaaagatcgcagactacaattataagctgcctgacgatttcaccggctgcgtgatcgcctggaactccaacaatctggattctaaagtgggcggcaactacaattatctgtacaggctgtttcgcaagtccaatctgaagccattcgagcgggacatctccacagagatctaccaggccggctctaccccctgcaatggcgtggagggctttaactgttatttccctctgcagtcttacggcttccagccaacaaacggcgtgggctatcagccctacagagtggtggtgctgtcctttgagctgctgcacgcaccagcaacagtgtgcggcccaaagaagtctaccaatctggtgaagaacaagtgcgtgaacttcaacttcaacggactgaccggcacaggcgtgctgaccgagagcaataagaagttcctgccttttcagcagttcggcagggacatcgcagataccacagacgccgtgcgcgaccctcagaccctggagatcctggacatcacaccatgcagcttcggcggcgtgtccgtgatcacaccaggcaccaatacatccaaccaggtggccgtgctgtatcaggacgtgaattgtaccgaggtgcccgtggcaatccacgcagatcagctgacccctacatggcgggtgtactctaccggcagcaacgtgttccagacaagagccggatgcctgatcggagcagagcacgtgaacaatagctatgagtgcgacatccctatcggcgccggcatctgtgccagctaccagacccagacaaactccccatctggagcaggctccgtggccagccagtccatcatcgcctataccatgagcctgggcgccgagaacagcgtggcctactccaacaattctatcgccatccctaccaacttcacaatcagcgtgaccacagagatcctgccagtgtctatgaccaagacaagcgtggactgcacaatgtatatctgtggcgatagcaccgagtgctccaacctgctgctgcagtacggctccttttgtacccagctgaatagagccctgacaggcatcgccgtggagcaggataagaacacacaggaggtgttcgcccaggtgaagcagatctacaagaccccacccatcaaggactttggcggcttcaacttcagccagatcctgcctgatccaagcaagccctccaagaggtcttttatcgaggacctgctgttcaacaaggtgaccctggccgatgccggcttcatcaagcagtatggagattgcctgggagacatcgcagcccgcgacctgatctgtgcccagaagtttaatggcctgaccgtgctgcctccactgctgacagatgagatgatcgcccagtacacatctgccctgctggccggcaccatcacaagcggatggaccttcggcgcaggagccgccctgcagatcccttttgccatgcagatggcctataggttcaacggcatcggcgtgacccagaatgtgctgtacgagaaccagaagctgatcgccaatcagtttaacagcgccatcggcaagatccaggactctctgtcctctacagccagcgccctgggcaagctgcaggatgtggtgaatcagaacgcccaggccctgaataccctggtgaagcagctgagctccaacttcggcgccatctctagcgtgctgaatgacatcctgagccggctggacccccctgaggcagaggtgcagatcgacaggctgatcacaggccgcctgcagagcctgcagacctacgtgacacagcagctgatcagggcagcagagatcagagcctccgccaatctggccgccaccaagatgagcgagtgcgtgctgggacagtccaagagggtggacttttgtggcaagggctatcacctgatgtctttcccacagagcgcccctcacggcgtggtgtttctgcacgtgacctacgtgccagcccaggataagaacttcaccacagcaccagccatctgccacgatggaaaggcacactttcctagggagggcgtgttcgtgtctaacggcacccactggtttgtgacacagcgcaatttctacgagccacagatcatcaccacagacaatacattcgtgagcggcaactgtgatgtggtgatcggcatcgtgaacaataccgtgtatgatccactgcagcccgagctggactcctttaaggaggagctggataagtacttcaagaatcacacctctcccgacgtggatctgggcgacatctccggcatcaatgcctctgtggtgaacatccagaaggagatcgaccggctgaacgaggtggccaagaatctgaacgagagcctgatcgatctgcaggagctgggcaagtatgagcagtacatcaagggctctggcagagagaacctgtatttccagggaggaggaggcagcggatacatccctgaggcaccaagggacggacaggcctacgtgcgcaaggatggcgagtgggtgctgctgtccacctttctgggccatcatcaccaccaccaccaccactga

SEQ ID NO: 4925 - DNA, 3846 bp, Artificial Sequence
  Description of Artificial Sequence: Synthetic polynucleotide
atgggcatcctgccaagcccaggaatgcccgccctgctgtctctggtgagcctgctgtccgtgctgctgatgggatgcgtggcagagacaggcacacagtgcgtgaacctgaccacaaggacccagctgccccctgcctataccaattctttcacacggggcgtgtactatcccgacaaggtgtttagaagctccgtgctgcactccacacaggatctgtttctgcctttcttttctaacgtgacctggttccacgccatccacgtgtccggcaccaatggcacaaagcggttcgacaatcccgtgctgccttttaacgatggcgtgtacttcgccagcaccgagaagtccaacatcatcagaggctggatctttggcaccacactggactctaagacacagagcctgctgatcgtgaacaatgccaccaacgtggtgatcaaggtgtgcgagttccagttttgtaatgatccattcctgggcgtgtactatcacaagaacaataagtcctggatggagtctgagtttcgcgtgtattctagcgccaacaattgcacatttgagtacgtgagccagcccttcctgatggacctggagggcaagcagggcaatttcaagaacctgagggagttcgtgtttaagaatatcgatggctacttcaagatctacagcaagcacaccccaatcaacctggtgcgcgacctgccacagggattctccgccctggagccactggtggatctgcccatcggcatcaacatcacccggtttcagacactgctggccctgcacagatcctacctgacaccaggcgactcctctagcggatggaccgcaggagctgccgcctactatgtgggctatctgcagccccggaccttcctgctgaagtacaacgagaatggcaccatcacagacgcagtggattgcgccctggaccccctgtctgagacaaagtgtacactgaagagctttaccgtggagaagggcatctatcagacaagcaatttcagggtgcagcctaccgagtccatcgtgcgctttcccaatatcacaaacctgtgcccttttggcgaggtgttcaacgccaccagattcgccagcgtgtacgcctggaatcggaagagaatctccaactgcgtggccgactattctgtgctgtacaactccgcctctttcagcacctttaagtgctatggcgtgtctcccacaaagctgaatgatctgtgctttaccaacgtgtacgccgatagcttcgtgatcaggggagacgaagtgagacagatcgcaccaggacagacaggaaagatcgcagactacaattataagctgcctgacgatttcaccggctgcgtgatcgcctggaactccaacaatctggattctaaagtgggcggcaactacaattatctgtacaggctgtttcgcaagtccaatctgaagccattcgagcgggacatctccacagagatctaccaggccggctctaccccctgcaatggcgtggagggctttaactgttatttccctctgcagtcttacggcttccagccaacaaacggcgtgggctatcagccctacagagtggtggtgctgtcctttgagctgctgcacgcaccagcaacagtgtgcggcccaaagaagtctaccaatctggtgaagaacaagtgcgtgaacttcaacttcaacggactgaccggcacaggcgtgctgaccgagagcaataagaagttcctgccttttcagcagttcggcagggacatcgcagataccacagacgccgtgcgcgaccctcagaccctggagatcctggacatcacaccatgcagcttcggcggcgtgtccgtgatcacaccaggcaccaatacatccaaccaggtggccgtgctgtatcaggacgtgaattgtaccgaggtgcccgtggcaatccacgcagatcagctgacccctacatggcgggtgtactctaccggcagcaacgtgttccagacaagagccggatgcctgatcggagcagagcacgtgaacaatagctatgagtgcgacatccctatcggcgccggcatctgtgccagctaccagacccagacaaactccccatctggagcaggctccgtggccagccagtccatcatcgcctataccatgagcctgggcgccgagaacagcgtggcctactccaacaattctatcgccatccctaccaacttcacaatcagcgtgaccacagagatcctgccagtgtctatgaccaagacaagcgtggactgcacaatgtatatctgtggcgatagcaccgagtgctccaacctgctgctgcagtacggctccttttgtacccagctgaatagagccctgacaggcatcgccgtggagcaggataagaacacacaggaggtgttcgcccaggtgaagcagatctacaagaccccacccatcaaggactttggcggcttcaacttcagccagatcctgcctgatccaagcaagccctccaagaggtcttttatcgaggacctgctgttcaacaaggtgaccctggccgatgccggcttcatcaagcagtatggagattgcctgggagacatcgcagcccgcgacctgatctgtgcccagaagtttaatggcctgaccgtgctgcctccactgctgacagatgagatgatcgcccagtacacatctgccctgctggccggcaccatcacaagcggatggaccttcggctacggagccgccctgcagatcccttttgccatgcagatggcctataggttcaacggcatcggcgtgacccagaatgtgctgtacgagaaccagaagctgatcgccaatcagtttaacagcgccatcggcaagatccaggactctctgtcctctacagccagcgccctgggcaagctgcaggatgtggtgaatcagaacgcccaggccctgaataccctggtgaagcagctgagctccaacttcggcgccatctctagcgtgctgaatgacatcctgagccggctggacccccctgaggcagaggtgcagatcgacaggctgatcacaggccgcctgcagagcctgcagacctacgtgacacagcagctgatcagggcagcagagatcagagcctccgccaatctggccgccaccaagatgagcgagtgcgtgctgggacagtccaagagggtggacttttgtggcaagggctatcacctgatgtctttcccacagagcgcccctcacggcgtggtgtttctgcacgtgacctacgtgccagcccaggagaagaacttcaccacagcaccagccatctgccacgatggaaaggcacactttcctagggagggcgtgttcgtgtctaacggcacccactggtttgtgacacagcgcaatttctacgagccacagatcatcaccacagacaatacattcgtgagcggcaactgtgatgtggtgatcggcatcgtgaacaataccgtgtatgatccactgcagcccgagctggactcctttaaggaggagctggataagtacttcaagaatcacacctctcccgacgtggatctgggcgacatctccggcatcaatgcctctgtggtgaacatccagaaggagatcgaccggctgaacgaggtggccaagaatctgaacgagagcctgatcgatctgcaggagctgggcaagtatgagcagtacatcaagggctctggcagagagaacctgtatttccagggaggaggaggcagcggatacatccctgaggcaccaagggacggacaggcctacgtgcgcaaggatggcgagtgggtgctgctgtccacctttctgggccatcatcaccaccaccaccaccactga

SEQ ID NO: 4926 - DNA, 3846 bp, Artificial Sequence
  Description of Artificial Sequence: Synthetic polynucleotide
atgggcatcctgccaagcccaggaatgcccgccctgctgtctctggtgagcctgctgtccgtgctgctgatgggatgcgtggcagagacaggcacacagtgcgtgaacctgaccacaaggacccagctgccccctgcctataccaattctttcacacggggcgtgtactatcccgacaaggtgtttagaagctccgtgctgcactccacacaggatctgtttctgcctttcttttctaacgtgacctggttccacgccatccacgtgtccggcaccaatggcacaaagcggttcgacaatcccgtgctgccttttaacgatggcgtgtacttcgccagcaccgagaagtccaacatcatcagaggctggatctttggcaccacactggactctaagacacagagcctgctgatcgtgaacaatgccaccaacgtggtgatcaaggtgtgcgagttccagttttgtaatgatccattcctgggcgtgtactatcacaagaacaataagtcctggatggagtctgagtttcgcgtgtattctagcgccaacaattgcacatttgagtacgtgagccagcccttcctgatggacctggagggcaagcagggcaatttcaagaacctgagggagttcgtgtttaagaatatcgatggctacttcaagatctacagcaagcacaccccaatcaacctggtgcgcgacctgccacagggattctccgccctggagccactggtggatctgcccatcggcatcaacatcacccggtttcagacactgctggccctgcacagatcctacctgacaccaggcgactcctctagcggatggaccgcaggagctgccgcctactatgtgggctatctgcagccccggaccttcctgctgaagtacaacgagaatggcaccatcacagacgcagtggattgcgccctggaccccctgtctgagacaaagtgtacactgaagagctttaccgtggagaagggcatctatcagacaagcaatttcagggtgcagcctaccgagtccatcgtgcgctttcccaatatcacaaacctgtgcccttttggcgaggtgttcaacgccaccagattcgccagcgtgtacgcctggaatcggaagagaatctccaactgcgtggccgactattctgtgctgtacaactccgcctctttcagcacctttaagtgctatggcgtgtctcccacaaagctgaatgatctgtgctttaccaacgtgtacgccgatagcttcgtgatcaggggagacgaagtgagacagatcgcaccaggacagacaggaaagatcgcagactacaattataagctgcctgacgatttcaccggctgcgtgatcgcctggaactccaacaatctggattctaaagtgggcggcaactacaattatctgtacaggctgtttcgcaagtccaatctgaagccattcgagcgggacatctccacagagatctaccaggccggctctaccccctgcaatggcgtggagggctttaactgttatttccctctgcagtcttacggcttccagccaacaaacggcgtgggctatcagccctacagagtggtggtgctgtcctttgagctgctgcacgcaccagcaacagtgtgcggcccaaagaagtctaccaatctggtgaagaacaagtgcgtgaacttcaacttcaacggactgaccggcacaggcgtgctgaccgagagcaataagaagttcctgccttttcagcagttcggcagggacatcgcagataccacagacgccgtgcgcgaccctcagaccctggagatcctggacatcacaccatgcagcttcggcggcgtgtccgtgatcacaccaggcaccaatacatccaaccaggtggccgtgctgtatcaggacgtgaattgtaccgaggtgcccgtggcaatccacgcagatcagctgacccctacatggcgggtgtactctaccggcagcaacgtgttccagacaagagccggatgcctgatcggagcagagcacgtgaacaatagctatgagtgcgacatccctatcggcgccggcatctgtgccagctaccagacccagacaaactccccatctggagcaggctccgtggccagccagtccatcatcgcctatacccaaagcctgggcgccgagaacagcgtggcctactccaacaattctatcgccatccctaccaacttcacaatcagcgtgaccacagagatcctgccagtgtctatgaccaagacaagcgtggactgcacaatgtatatctgtggcgatagcaccgagtgctccaacctgctgctgcagtacggctccttttgtacccagctgaatagagccctgacaggcatcgccgtggagcaggataagaacacacaggaggtgttcgcccaggtgaagcagatctacaagaccccacccatcaaggactttggcggcttcaacttcagccagatcctgcctgatccaagcaagccctccaagaggtcttttatcgaggacctgctgttcaacaaggtgaccctggccgatgccggcttcatcaagcagtatggagattgcctgggagacatcgcagcccgcgacctgatctgtgcccagaagtttaatggcctgaccgtgctgcctccactgctgacagatgagatgatcgcccagtacacatctgccctgctggccggcaccatcacaagcggatggaccttcggcgcaggagccgccctgcagatcccttttgccatgcagatggcctataggttcaacggcatcggcgtgacccagaatgtgctgtacgagaaccagaagctgatcgccaatcagtttaacagcgccatcggcaagatccaggactctctgtcctctacagccagcgccctgggcaagctgcaggatgtggtgaatcagaacgcccaggccctgaataccctggtgaagcagctgagctccaacttcggcgccatctctagcgtgctgaatgacatcctgagccggctggacccccctgaggcagaggtgcagatcgacaggctgatcacaggccgcctgcagagcctgcagacctacgtgacacagcagctgatcagggcagcagagatcagagcctccgccaatctggccgccaccaagatgagcgagtgcgtgctgggacagtccaagagggtggacttttgtggcaagggctatcacctgatgtctttcccacagagcgcccctcacggcgtggtgtttctgcacgtgacctacgtgccagcccaggagaagaacttcaccacagcaccagccatctgccacgatggaaaggcacactttcctagggagggcgtgttcgtgtctaacggcacccactggtttgtgacacagcgcaatttctacgagccacagatcatcaccacagacaatacattcgtgagcggcaactgtgatgtggtgatcggcatcgtgaacaataccgtgtatgatccactgcagcccgagctggactcctttaaggaggagctggataagtacttcaagaatcacacctctcccgacgtggatctgggcgacatctccggcatcaatgcctctgtggtgaacatccagaaggagatcgaccggctgaacgaggtggccaagaatctgaacgagagcctgatcgatctgcaggagctgggcaagtatgagcagtacatcaagggctctggcagagagaacctgtatttccagggaggaggaggcagcggatacatccctgaggcaccaagggacggacaggcctacgtgcgcaaggatggcgagtgggtgctgctgtccacctttctgggccatcatcaccaccaccaccaccactga

SEQ ID NO: 4927 - DNA, 3846 bp, Artificial Sequence
  Description of Artificial Sequence: Synthetic polynucleotide
atgggcatcctgccaagcccaggaatgcccgccctgctgtctctggtgagcctgctgtccgtgctgctgatgggatgcgtggcagagacaggcacacagtgcgtgaacctgaccacaaggacccagctgccccctgcctataccaattctttcacacggggcgtgtactatcccgacaaggtgtttagaagctccgtgctgcactccacacaggatctgtttctgcctttcttttctaacgtgacctggttccacgccatccacgtgtccggcaccaatggcacaaagcggttcgacaatcccgtgctgccttttaacgatggcgtgtacttcgccagcaccgagaagtccaacatcatcagaggctggatctttggcaccacactggactctaagacacagagcctgctgatcgtgaacaatgccaccaacgtggtgatcaaggtgtgcgagttccagttttgtaatgatccattcctgggcgtgtactatcacaagaacaataagtcctggatggagtctgagtttcgcgtgtattctagcgccaacaattgcacatttgagtacgtgagccagcccttcctgatggacctggagggcaagcagggcaatttcaagaacctgagggagttcgtgtttaagaatatcgatggctacttcaagatctacagcaagcacaccccaatcaacctggtgcgcgacctgccacagggattctccgccctggagccactggtggatctgcccatcggcatcaacatcacccggtttcagacactgctggccctgcacagatcctacctgacaccaggcgactcctctagcggatggaccgcaggagctgccgcctactatgtgggctatctgcagccccggaccttcctgctgaagtacaacgagaatggcaccatcacagacgcagtggattgcgccctggaccccctgtctgagacaaagtgtacactgaagagctttaccgtggagaagggcatctatcagacaagcaatttcagggtgcagcctaccgagtccatcgtgcgctttcccaatatcacaaacctgtgcccttttggcgaggtgttcaacgccaccagattcgccagcgtgtacgcctggaatcggaagagaatctccaactgcgtggccgactattctgtgctgtacaactccccgtctttcagcacctttaagtgctatggcgtgtctcccacaaagctgaatgatctgtgctttaccaacgtgtacgccgatagcttcgtgatcaggggagacgaagtgagacagatcgcaccaggacagacaggaaagatcgcagactacaattataagctgcctgacgatttcaccggctgcgtgatcgcctggaactccaacaatctggattctaaagtgggcggcaactacaattatctgtacaggctgtttcgcaagtccaatctgaagccattcgagcgggacatctccacagagatctaccaggccggctctaccccctgcaatggcgtggagggctttaactgttatttccctctgcagtcttacggcttccagccaacaaacggcgtgggctatcagccctacagagtggtggtgctgtcctttgagctgctgcacgcaccagcaacagtgtgcggcccaaagaagtctaccaatctggtgaagaacaagtgcgtgaacttcaacttcaacggactgaccggcacaggcgtgctgaccgagagcaataagaagttcctgccttttcagcagttcggcagggacatcgcagataccacagacgccgtgcgcgaccctcagaccctggagatcctggacatcacaccatgcagcttcggcggcgtgtccgtgatcacaccaggcaccaatacatccaaccaggtggccgtgctgtatcaggacgtgaattgtaccgaggtgcccgtggcaatccacgcagatcagctgacccctacatggcgggtgtactctaccggcagcaacgtgttccagacaagagccggatgcctgatcggagcagagcacgtgaacaatagctatgagtgcgacatccctatcggcgccggcatctgtgccagctaccagacccagacaaactccccatctggagcaggctccgtggccagccagtccatcatcgcctataccatgagcctgggcgccgagaacagcgtggcctactccaacaattctatcgccatccctaccaacttcacaatcagcgtgaccacagagatcctgccagtgtctatgaccaagacaagcgtggactgcacaatgtatatctgtggcgatagcaccgagtgctccaacctgctgctgcagtacggctccttttgtacccagctgaatagagccctgacaggcatcgccgtggagcaggataagaacacacaggaggtgttcgcccaggtgaagcagatctacaagaccccacccatcaaggactttggcggcttcaacttcagccagatcctgcctgatccaagcaagccctccaagaggtcttttatcgaggacctgctgttcaacaaggtgaccctggccgatgccggcttcatcaagcagtatggagattgcctgggagacatcgcagcccgcgacctgatctgtgcccagaagtttaatggcctgaccgtgctgcctccactgctgacagatgagatgatcgcccagtacacatctgccctgctggccggcaccatcacaagcggatggaccttcggcgcaggagccgccctgcagatcccttttgccatgcagatggcctataggttcaacggcatcggcgtgacccagaatgtgctgtacgagaaccagaagctgatcgccaatcagtttaacagcgccatcggcaagatccaggactctctgtcctctacagccagcgccctgggcaagctgcaggatgtggtgaatcagaacgcccaggccctgaataccctggtgaagcagctgagctccaacttcggcgccatctctagcgtgctgaatgacatcctgagccggctggacccccctgaggcagaggtgcagatcgacaggctgatcacaggccgcctgcagagcctgcagacctacgtgacacagcagctgatcagggcagcagagatcagagcctccgccaatctggccgccaccaagatgagcgagtgcgtgctgggacagtccaagagggtggacttttgtggcaagggctatcacctgatgtctttcccacagagcgcccctcacggcgtggtgtttctgcacgtgacctacgtgccagcccaggagaagaacttcaccacagcaccagccatctgccacgatggaaaggcacactttcctagggagggcgtgttcgtgtctaacggcacccactggtttgtgacacagcgcaatttctacgagccacagatcatcaccacagacaatacattcgtgagcggcaactgtgatgtggtgatcggcatcgtgaacaataccgtgtatgatccactgcagcccgagctggactcctttaaggaggagctggataagtacttcaagaatcacacctctcccgacgtggatctgggcgacatctccggcatcaatgcctctgtggtgaacatccagaaggagatcgaccggctgaacgaggtggccaagaatctgaacgagagcctgatcgatctgcaggagctgggcaagtatgagcagtacatcaagggctctggcagagagaacctgtatttccagggaggaggaggcagcggatacatccctgaggcaccaagggacggacaggcctacgtgcgcaaggatggcgagtgggtgctgctgtccacctttctgggccatcatcaccaccaccaccaccactga

SEQ ID NO: 4928 - DNA, 3846 bp, Artificial Sequence
  Description of Artificial Sequence: Synthetic polynucleotide
atgggcatcctgccaagcccaggaatgcccgccctgctgtctctggtgagcctgctgtccgtgctgctgatgggatgcgtggcagagacaggcacacagtgcgtgaacctgaccacaaggacccagctgccccctgcctataccaattctttcacacggggcgtgtactatcccgacaaggtgtttagaagctccgtgctgcactccacacaggatctgtttctgcctttcttttctaacgtgacctggttccacgccatccacgtgtccggcaccaatggcacaaagcggttcgacaatcccgtgctgccttttaacgatggcgtgtacttcgccagcaccgagaagtccaacatcatcagaggctggatctttggcaccacactggactctaagacacagagcctgctgatcgtgaacaatgccaccaacgtggtgatcaaggtgtgcgagttccagttttgtaatgatccattcctgggcgtgtactatcacaagaacaataagtcctggatggagtctgagtttcgcgtgtattctagcgccaacaattgcacatttgagtacgtgagccagcccttcctgatggacctggagggcaagcagggcaatttcaagaacctgagggagttcgtgtttaagaatatcgatggctacttcaagatctacagcaagcacaccccaatcaacctggtgcgcgacctgccacagggattctccgccctggagccactggtggatctgcccatcggcatcaacatcacccggtttcagacactgctggccctgcacagatcctacctgacaccaggcgactcctctagcggatggaccgcaggagctgccgcctactatgtgggctatctgcagccccggaccttcctgctgaagtacaacgagaatggcaccatcacagacgcagtggattgcgccctggaccccctgtctgagacaaagtgtacactgaagagctttaccgtggagaagggcatctatcagacaagcaatttcagggtgcagcctaccgagtccatcgtgcgctttcccaatatcacaaacctgtgcccttttggcgaggtgttcaacgccaccagattcgccagcgtgtacgcctggaatcggaagagaatctccaactgcgtggccgactattctgtgctgtacaactccgcctctttcagcacctttaagtgctatggcgtgtctcccacaaagctgaatgatctgtgctttaccaacgtgtacgccgatagcttcgtgatcaggggagacgaagtgagacagatcgcaccaggacagacaggaaagatcgcagactacaattataagctgcctgacgatttcaccggctgcgtgatcgcctggaactccaacaatctggattctaaagtgggcggcaactacaattatctgtacaggctgtttcgcaagtccaatctgaagccattcgagcgggacatctccacagagatctaccaggccggctctaccccctgcaatggcgtggagggctttaactgttatttccctctgcagtcttacggcttccagccaacaaacggcgtgggctatcagccctacagagtggtggtgctgtcctttgagctgctgtttgcaccagcaacagtgtgcggcccaaagaagtctaccaatctggtgaagaacaagtgcgtgaacttcaacttcaacggactgaccggcacaggcgtgctgaccgagagcaataagaagttcctgccttttcagcagttcggcagggacatcgcagataccacagacgccgtgcgcgaccctcagaccctggagatcctggacatcacaccatgcagcttcggcggcgtgtccgtgatcacaccaggcaccaatacatccaaccaggtggccgtgctgtatcaggacgtgaattgtaccgaggtgcccgtggcaatccacgcagatcagctgacccctacatggcgggtgtactctaccggcagcaacgtgttccagacaagagccggatgcctgatcggagcagagcacgtgaacaatagctatgagtgcgacatccctatcggcgccggcatctgtgccagctaccagacccagacaaactccccatctggagcaggctccgtggccagccagtccatcatcgcctataccatgagcctgggcgccgagaacagcgtggcctactccaacaattctatcgccatccctaccaacttcacaatcagcgtgaccacagagatcctgccagtgtctatgaccaagacaagcgtggactgcacaatgtatatctgtggcgatagcaccgagtgctccaacctgctgctgcagtacggctccttttgtacccagctgaatagagccctgacaggcatcgccgtggagcaggataagaacacacaggaggtgttcgcccaggtgaagcagatctacaagaccccacccatcaaggactttggcggcttcaacttcagccagatcctgcctgatccaagcaagccctccaagaggtcttttatcgaggacctgctgttcaacaaggtgaccctggccgatgccggcttcatcaagcagtatggagattgcctgggagacatcgcagcccgcgacctgatctgtgcccagaagtttaatggcctgaccgtgctgcctccactgctgacagatgagatgatcgcccagtacacatctgccctgctggccggcaccatcacaagcggatggaccttcggcgcaggagccgccctgcagatcccttttgccatgcagatggcctataggttcaacggcatcggcgtgacccagaatgtgctgtacgagaaccagaagctgatcgccaatcagtttaacagcgccatcggcaagatccaggactctctgtcctctacagccagcgccctgggcaagctgcaggatgtggtgaatcagaacgcccaggccctgaataccctggtgaagcagctgagctccaacttcggcgccatctctagcgtgctgaatgacatcctgagccggctggacccccctgaggcagaggtgcagatcgacaggctgatcacaggccgcctgcagagcctgcagacctacgtgacacagcagctgatcagggcagcagagatcagagcctccgccaatctggccgccaccaagatgagcgagtgcgtgctgggacagtccaagagggtggacttttgtggcaagggctatcacctgatgtctttcccacagagcgcccctcacggcgtggtgtttctgcacgtgacctacgtgccagcccaggagaagaacttcaccacagcaccagccatctgccacgatggaaaggcacactttcctagggagggcgtgttcgtgtctaacggcacccactggtttgtgacacagcgcaatttctacgagccacagatcatcaccacagacaatacattcgtgagcggcaactgtgatgtggtgatcggcatcgtgaacaataccgtgtatgatccactgcagcccgagctggactcctttaaggaggagctggataagtacttcaagaatcacacctctcccgacgtggatctgggcgacatctccggcatcaatgcctctgtggtgaacatccagaaggagatcgaccggctgaacgaggtggccaagaatctgaacgagagcctgatcgatctgcaggagctgggcaagtatgagcagtacatcaagggctctggcagagagaacctgtatttccagggaggaggaggcagcggatacatccctgaggcaccaagggacggacaggcctacgtgcgcaaggatggcgagtgggtgctgctgtccacctttctgggccatcatcaccaccaccaccaccactga

SEQ ID NO: 4929 - DNA, 3846 bp, Artificial Sequence
  Description of Artificial Sequence: Synthetic polynucleotide
atgggcatcctgccaagcccaggaatgcccgccctgctgtctctggtgagcctgctgtccgtgctgctgatgggatgcgtggcagagacaggcacacagtgcgtgaacctgaccacaaggacccagctgccccctgcctataccaattctttcacacggggcgtgtactatcccgacaaggtgtttagaagctccgtgctgcactccacacaggatctgtttctgcctttcttttctaacgtgacctggttccacgccatccacgtgtccggcaccaatggcacaaagcggttcgacaatcccgtgctgccttttaacgatggcgtgtacttcgccagcaccgagaagtccaacatcatcagaggctggatctttggcaccacactggactctaagacacagagcctgctgatcgtgaacaatgccaccaacgtggtgatcaaggtgtgcgagttccagttttgtaatgatccattcctgggcgtgtactatcacaagaacaataagtcctggatggagtctgagtttcgcgtgtattctagcgccaacaattgcacatttgagtacgtgagccagcccttcctgatggacctggagggcaagcagggcaatttcaagaacctgagggagttcgtgtttaagaatatcgatggctacttcaagatctacagcaagcacaccccaatcaacctggtgcgcgacctgccacagggattctccgccctggagccactggtggatctgcccatcggcatcaacatcacccggtttcagacactgctggccctgcacagatcctacctgacaccaggcgactcctctagcggatggaccgcaggagctgccgcctactatgtgggctatctgcagccccggaccttcctgctgaagtacaacgagaatggcaccatcacagacgcagtggattgcgccctggaccccctgtctgagacaaagtgtacactgaagagctttaccgtggagaagggcatctatcagacaagcaatttcagggtgcagcctaccgagtccatcgtgcgctttcccaatatcacaaacctgtgcccttttggcgaggtgttcaacgccaccagattcgccagcgtgtacgcctggaatcggaagagaatctccaactgcgtggccgactattctgtgctgtacaactccgcctctttcagcacctttaagtgctatggcgtgtctcccacaaagctgaatgatctgtgctttaccaacgtgtacgccgatagcttcgtgatcaggggagacgaagtgagacagatcgcaccaggacagacaggaaagatcgcagactacaattataagctgcctgacgatttcaccggctgcgtgatcgcctggaactccaacaatctggattctaaagtgggcggcaactacaattatctgtacaggctgtttcgcaagtccaatctgaagccattcgagcgggacatctccacagagatctaccaggccggctctaccccctgcaatggcgtggagggctttaactgttatttccctctgcagtcttacggcttccagccaacaaacggcgtgggctatcagccctacagagtggtggtgctgtcctttgagctgctgcacgcaccagcaacagtgtgcggcccaaagaagtctaccaatctggtgaagaacaagtgcgtgaacttcaacttcaacggactgaccggcacaggcgtgctgaccgagagcaataagaagttcctgccttttcagcagttcggcagggacatcgcagataccacagacgccgtgcgcgaccctcagaccctggagatcctggacatcacaccatgcagcttcggcggcgtgtccgtgatcacaccaggcaccaatacatccaaccaggtggccgtgctgtatcaggacgtgaattgtaccgaggtgcccgtggcaatccacgcagatcagctgacccctacatggcgggtgtactctaccggcagcaacgtgttccagacaagagccggatgcctgatcggagcagagcacgtgaacaatagctatgagtgcgacatccctatcggcgccggcatctgtgccagctaccagacccagacaaactccccatctggagcaggctccgtggccagccagtccatcatcgcctataccatgagcctgggcgccgagaacagcgtggcctactccaacaatcatatcgccatccctaccaacttcacaatcagcgtgaccacagagatcctgccagtgtctatgaccaagacaagcgtggactgcacaatgtatatctgtggcgatagcaccgagtgctccaacctgctgctgcagtacggctccttttgtacccagctgaatagagccctgacaggcatcgccgtggagcaggataagaacacacaggaggtgttcgcccaggtgaagcagatctacaagaccccacccatcaaggactttggcggcttcaacttcagccagatcctgcctgatccaagcaagccctccaagaggtcttttatcgaggacctgctgttcaacaaggtgaccctggccgatgccggcttcatcaagcagtatggagattgcctgggagacatcgcagcccgcgacctgatctgtgcccagaagtttaatggcctgaccgtgctgcctccactgctgacagatgagatgatcgcccagtacacatctgccctgctggccggcaccatcacaagcggatggaccttcggcgcaggagccgccctgcagatcccttttgccatgcagatggcctataggttcaacggcatcggcgtgacccagaatgtgctgtacgagaaccagaagctgatcgccaatcagtttaacagcgccatcggcaagatccaggactctctgtcctctacagccagcgccctgggcaagctgcaggatgtggtgaatcagaacgcccaggccctgaataccctggtgaagcagctgagctccaacttcggcgccatctctagcgtgctgaatgacatcctgagccggctggacccccctgaggcagaggtgcagatcgacaggctgatcacaggccgcctgcagagcctgcagacctacgtgacacagcagctgatcagggcagcagagatcagagcctccgccaatctggccgccaccaagatgagcgagtgcgtgctgggacagtccaagagggtggacttttgtggcaagggctatcacctgatgtctttcccacagagcgcccctcacggcgtggtgtttctgcacgtgacctacgtgccagcccaggagaagaacttcaccacagcaccagccatctgccacgatggaaaggcacactttcctagggagggcgtgttcgtgtctaacggcacccactggtttgtgacacagcgcaatttctacgagccacagatcatcaccacagacaatacattcgtgagcggcaactgtgatgtggtgatcggcatcgtgaacaataccgtgtatgatccactgcagcccgagctggactcctttaaggaggagctggataagtacttcaagaatcacacctctcccgacgtggatctgggcgacatctccggcatcaatgcctctgtggtgaacatccagaaggagatcgaccggctgaacgaggtggccaagaatctgaacgagagcctgatcgatctgcaggagctgggcaagtatgagcagtacatcaagggctctggcagagagaacctgtatttccagggaggaggaggcagcggatacatccctgaggcaccaagggacggacaggcctacgtgcgcaaggatggcgagtgggtgctgctgtccacctttctgggccatcatcaccaccaccaccaccactga

SEQ ID NO: 4930 - DNA, 3846 bp, Artificial Sequence
  Description of Artificial Sequence: Synthetic polynucleotide
atgggcatcctgccaagcccaggaatgcccgccctgctgtctctggtgagcctgctgtccgtgctgctgatgggatgcgtggcagagacaggcacacagtgcgtgaacctgaccacaaggacccagctgccccctgcctataccaattctttcacacggggcgtgtactatcccgacaaggtgtttagaagctccgtgctgcactccacacaggatctgtttctgcctttcttttctaacgtgacctggttccacgccatccacgtgtccggcaccaatggcacaaagcggttcgacaatcccgtgctgccttttaacgatggcgtgtacttcgccagcaccgagaagtccaacatcatcagaggctggatctttggcaccacactggactctaagacacagagcctgctgatcgtgaacaatgccaccaacgtggtgatcaaggtgtgcgagttccagttttgtaatgatccattcctgggcgtgtactatcacaagaacaataagtcctggatggagtctgagtttcgcgtgtattctagcgccaacaattgcacatttgagtacgtgagccagcccttcctgatggacctggagggcaagcagggcaatttcaagaacctgagggagttcgtgtttaagaatatcgatggctacttcaagatctacagcaagcacaccccaatcaacctggtgcgcgacctgccacagggattctccgccctggagccactggtggatctgcccatcggcatcaacatcacccggtttcagacactgctggccctgcacagatcctacctgacaccaggcgactcctctagcggatggaccgcaggagctgccgcctactatgtgggctatctgcagccccggaccttcctgctgaagtacaacgagaatggcaccatcacagacgcagtggattgcgccctggaccccctgtctgagacaaagtgtacactgaagagctttaccgtggagaagggcatctatcagacaagcaatttcagggtgcagcctaccgagtccatcgtgcgctttcccaatatcacaaacctgtgcccttttggcgaggtgttcaacgccaccagattcgccagcgtgtacgcctggaatcggaagagaatctccaactgcgtggccgactattctgtgctgtacaactccgcctctttcagcacctttaagtgctatggcgtgtctcccacaaagctgaatgatctgtgctttaccaacgtgtacgccgatagcttcgtgatcaggggagacgaagtgagacagatcgcaccaggacagacaggaaagatcgcagactacaattataagctgcctgacgatttcaccggctgcgtgatcgcctggaactccaacaatctggattctaaagtgggcggcaactacaattatctgtacaggctgtttcgcaagtccaatctgaagccattcgagcgggacatctccacagagatctaccaggccggctctaccccctgcaatggcgtggagggctttaactgttatttccctctgcagtcttacggcttccagccaacaaacggcgtgggctatcagccctacagagtggtggtgctgtcctttgagctgctgcacgcaccagcaacagtgtgcggcccaaagaagtctaccaatctggtgaagaacaagtgcgtgaacttcaacttcaacggactgaccggcacaggcgtgctgaccgagagcaataagaagttcctgccttttcagcagttcggcagggacatcgcagataccacagacgccgtgcgcgaccctcagaccctggagatcctggacatcacaccatgcagcttcggcggcgtgtccgtgatcacaccaggcaccaatacatccaaccaggtggccgtgctgtatcaggacgtgaattgtaccgaggtgcccgtggcaatccacgcagatcagctgacccctacatggcgggtgtactctaccggcagcaacgtgttccagacaagagccggatgcctgatcggagcagagcacgtgaacaatagctatgagtgcgacatccctatcggcgccggcatctgtgccagctaccagacccagacaaactccccatctggagcaggctccgtggccagccagtccatcatcgcctataccatgagcctgggcgccgagaacagcgtggcctactccaacaattctatcgccatccctaccaacttcacaatcagcgtgaccacagagatcctgccagtgtctatgaccaagacaagcgtggactgcacaatgtatatctgtggcgatagcaccgagtgctccaacctgctgctgcagtacggctccttttgtacccagctgaatagagccctgacaggcatcgccgtggagcaggataagaacacacaggaggtgttcgcccaggtgaagcagatctacaagaccccacccatcaaggactttggcggcttcaacttcagccagatcctgcctgatccaagcaagccctccaagaggtcttttatcgaggacctgctgttcaacaaggtgaccctggccgatgccggcttcatcaagcagtatggagattgcctgggagacatcgcagcccgcgacctgatctgtgcccagaagtttaatggcctgaccgtgctgcctccactgctgacagatgagatgatcgcccagtacacatctgccctgctggccggcaccatcacaagcggatggaccttcggcgcaggagccgccctgcagatcccttttgccatgcagatggcctataggttcaacggcatcggcgtgacccagaatgtgctgtacgagaaccagaagctgatcgccaatcagtttaacagcgccatcggcaagatccaggactctctgtcctctacagccagcgccctgggcaagctgcaggatgtggtgaatcagaacgcccaggccctgaataccctggtgaagcagctgagctccaacttcggcgccatctctagcgtgctgaataatatcctgagccggctggacccccctgaggcagaggtgcagatcgacaggctgatcacaggccgcctgcagagcctgcagacctacgtgacacagcagctgatcagggcagcagagatcagagcctccgccaatctggccgccaccaagatgagcgagtgcgtgctgggacagtccaagagggtggacttttgtggcaagggctatcacctgatgtctttcccacagagcgcccctcacggcgtggtgtttctgcacgtgacctacgtgccagcccaggagaagaacttcaccacagcaccagccatctgccacgatggaaaggcacactttcctagggagggcgtgttcgtgtctaacggcacccactggtttgtgacacagcgcaatttctacgagccacagatcatcaccacagacaatacattcgtgagcggcaactgtgatgtggtgatcggcatcgtgaacaataccgtgtatgatccactgcagcccgagctggactcctttaaggaggagctggataagtacttcaagaatcacacctctcccgacgtggatctgggcgacatctccggcatcaatgcctctgtggtgaacatccagaaggagatcgaccggctgaacgaggtggccaagaatctgaacgagagcctgatcgatctgcaggagctgggcaagtatgagcagtacatcaagggctctggcagagagaacctgtatttccagggaggaggaggcagcggatacatccctgaggcaccaagggacggacaggcctacgtgcgcaaggatggcgagtgggtgctgctgtccacctttctgggccatcatcaccaccaccaccaccactga

SEQ ID NO: 4931 - DNA, 3846 bp, Artificial Sequence
  Description of Artificial Sequence: Synthetic polynucleotide
atgggcatcctgccaagcccaggaatgcccgccctgctgtctctggtgagcctgctgtccgtgctgctgatgggatgcgtggcagagacaggcacacagtgcgtgaacctgaccacaaggacccagctgccccctgcctataccaattctttcacacggggcgtgtactatcccgacaaggtgtttagaagctccgtgctgcactccacacaggatctgtttctgcctttcttttctaacgtgacctggttccacgccatccacgtgtccggcaccaatggcacaaagcggttcgacaatcccgtgctgccttttaacgatggcgtgtacttcgccagcaccgagaagtccaacatcatcagaggctggatctttggcaccacactggactctaagacacagagcctgctgatcgtgaacaatgccaccaacgtggtgatcaaggtgtgcgagttccagttttgtaatgatccattcctgggcgtgtactatcacaagaacaataagtcctggatggagtctgagtttcgcgtgtattctagcgccaacaattgcacatttgagtacgtgagccagcccttcctgatggacctggagggcaagcagggcaatttcaagaacctgagggagttcgtgtttaagaatatcgatggctacttcaagatctacagcaagcacaccccaatcaacctggtgcgcgacctgccacagggattctccgccctggagccactggtggatctgcccatcggcatcaacatcacccggtttcagacactgctggccctgcacagatcctacctgacaccaggcgactcctctagcggatggaccgcaggagctgccgcctactatgtgggctatctgcagccccggaccttcctgctgaagtacaacgagacgggcaccatcacagacgcagtggattgcgccctggaccccctgtctgagacaaagtgtacactgaagagctttaccgtggagaagggcatctatcagacaagcaatttcagggtgcagcctaccgagtccatcgtgcgctttcccaatatcacaaacctgtgcccttttggcgaggtgttcaacgccaccagattcgccagcgtgtacgcctggaatcggaagagaatctccaactgcgtggccgactattctgtgctgtacaactccgcctctttcagcacctttaagtgctatggcgtgtctcccacaaagctgaatgatctgtgctttaccaacgtgtacgccgatagcttcgtgatcaggggagacgaagtgagacagatcgcaccaggacagacaggaaagatcgcagactacaattataagctgcctgacgatttcaccggctgcgtgatcgcctggaactccaacaatctggattctaaagtgggcggcaactacaattatctgtacaggctgtttcgcaagtccaatctgaagccattcgagcgggacatctccacagagatctaccaggccggctctaccccctgcaatggcgtggagggctttaactgttatttccctctgcagtcttacggcttccagccaacaaacggcgtgggctatcagccctacagagtggtggtgctgtcctttgagctgctgcacgcaccagcaacagtgtgcggcccaaagaagtctaccaatctggtgaagaacaagtgcgtgaacttcaacttcaacggactgaccggcacaggcgtgctgaccgagagcaataagaagttcctgccttttcagcagttcggcagggacatcgcagataccacagacgccgtgcgcgaccctcagaccctggagatcctggacatcacaccatgcagcttcggcggcgtgtccgtgatcacaccaggcaccaatacatccaaccaggtggccgtgctgtatcaggacgtgaattgtaccgaggtgcccgtggcaatccacgcagatcagctgacccctacatggcgggtgtactctaccggcagcaacgtgttccagacaagagccggatgcctgatcggagcagagcacgtgaacaatagctatgagtgcgacatccctatcggcgccggcatctgtgccagctaccagacccagacaaactccccatctggagcaggctccgtggccagccagtccatcatcgcctataccatgagcctgggcgccgagaacagcgtggcctactccaacaattctatcgccatccctaccaacttcacaatcagcgtgaccacagagatcctgccagtgtctatgaccaagacaagcgtggactgcacaatgtatatctgtggcgatagcaccgagtgctccaacctgctgctgcagtacggctccttttgtacccagctgaatagagccctgacaggcatcgccgtggagcaggataagaacacacaggaggtgttcgcccaggtgaagcagatctacaagaccccacccatcaaggactttggcggcttcaacttcagccagatcctgcctgatccaagcaagccctccaagaggtcttttatcgaggacctgctgttcaacaaggtgaccctggccgatgccggcttcatcaagcagtatggagattgcctgggagacatcgcagcccgcgacctgatctgtgcccagaagtttaatggcctgaccgtgctgcctccactgctgacagatgagatgatcgcccagtacacatctgccctgctggccggcaccatcacaagcggatggaccttcggcgcaggagccgccctgcagatcccttttgccatgcagatggcctataggttcaacggcatcggcgtgacccagaatgtgctgtacgagaaccagaagctgatcgccaatcagtttaacagcgccatcggcaagatccaggactctctgtcctctacagccagcgccctgggcaagctgcaggatgtggtgaatcagaacgcccaggccctgaataccctggtgaagcagctgagctccaacttcggcgccatctctagcgtgctgaatgacatcctgagccggctggacccccctgaggcagaggtgcagatcgacaggctgatcacaggccgcctgcagagcctgcagacctacgtgacacagcagctgatcagggcagcagagatcagagcctccgccaatctggccgccaccaagatgagcgagtgcgtgctgggacagtccaagagggtggacttttgtggcaagggctatcacctgatgtctttcccacagagcgcccctcacggcgtggtgtttctgcacgtgacctacgtgccagcccaggagaagaacttcaccacagcaccagccatctgccacgatggaaaggcacactttcctagggagggcgtgttcgtgtctaacggcacccactggtttgtgacacagcgcaatttctacgagccacagatcatcaccacagacaatacattcgtgagcggcaactgtgatgtggtgatcggcatcgtgaacaataccgtgtatgatccactgcagcccgagctggactcctttaaggaggagctggataagtacttcaagaatcacacctctcccgacgtggatctgggcgacatctccggcatcaatgcctctgtggtgaacatccagaaggagatcgaccggctgaacgaggtggccaagaatctgaacgagagcctgatcgatctgcaggagctgggcaagtatgagcagtacatcaagggctctggcagagagaacctgtatttccagggaggaggaggcagcggatacatccctgaggcaccaagggacggacaggcctacgtgcgcaaggatggcgagtgggtgctgctgtccacctttctgggccatcatcaccaccaccaccaccactga

SEQ ID NO: 4932 - DNA, 3846 bp, Artificial Sequence
  Description of Artificial Sequence: Synthetic polynucleotide
atgggcatcctgccaagcccaggaatgcccgccctgctgtctctggtgagcctgctgtccgtgctgctgatgggatgcgtggcagagacaggcacacagtgcgtgaacctgaccacaaggacccagctgccccctgcctataccaattctttcacacggggcgtgtactatcccgacaaggtgtttagaagctccgtgctgcactccacacaggatctgtttctgcctttcttttctaacgtgacctggttccacgccatccacgtgtccggcaccaatggcacaaagcggttcgacaatcccgtgctgccttttaacgatggcgtgtacttcgccagcaccgagaagtccaacatcatcagaggctggatctttggcaccacactggactctaagacacagagcctgctgatcgtgaacaatgccaccaacgtggtgatcaaggtgtgcgagttccagttttgtaatgatccattcctgggcgtgtactatcacaagaacaataagtcctggatggagtctgagtttcgcgtgtattctagcgccaacaattgcacatttgagtacgtgagccagcccttcctgatggacctggagggcaagcagggcaatttcaagaacctgagggagttcgtgtttaagaatatcgatggctacttcaagatctacagcaagcacaccccaatcaacctggtgcgcgacctgccacagggattctccgccctggagccactggtggatctgcccatcggcatcaacatcacccggtttcagacactgctggccctgcacagatcctacctgacaccaggcgactcctctagcggatggaccgcaggagctgccgcctactatgtgggctatctgcagccccggaccttcctgctgaagtacaacgagaatggcaccatcacagacgcagtggattgcgccctggaccccctgtctgagacaaagtgtacactgaagagctttaccgtggagaagggcatctatcagacaagcaatttcagggtgcagcctaccgagtccatcgtgcgctttcccaatatcacaaacctgtgcccttttggcgaggtgttcaacgccaccagattcgccagcgtgtacgcctggaatcggaagagaatctccaactgcgtggccgactattctgtgctgtacgcttccgcctctttcagcacctttaagtgctatggcgtgtctcccacaaagctgaatgatctgtgctttaccaacgtgtacgccgatagcttcgtgatcaggggagacgaagtgagacagatcgcaccaggacagacaggaaagatcgcagactacaattataagctgcctgacgatttcaccggctgcgtgatcgcctggaactccaacaatctggattctaaagtgggcggcaactacaattatctgtacaggctgtttcgcaagtccaatctgaagccattcgagcgggacatctccacagagatctaccaggccggctctaccccctgcaatggcgtggagggctttaactgttatttccctctgcagtcttacggcttccagccaacaaacggcgtgggctatcagccctacagagtggtggtgctgtcctttgagctgctgcacgcaccagcaacagtgtgcggcccaaagaagtctaccaatctggtgaagaacaagtgcgtgaacttcaacttcaacggactgaccggcacaggcgtgctgaccgagagcaataagaagttcctgccttttcagcagttcggcagggacatcgcagataccacagacgccgtgcgcgaccctcagaccctggagatcctggacatcacaccatgcagcttcggcggcgtgtccgtgatcacaccaggcaccaatacatccaaccaggtggccgtgctgtatcaggacgtgaattgtaccgaggtgcccgtggcaatccacgcagatcagctgacccctacatggcgggtgtactctaccggcagcaacgtgttccagacaagagccggatgcctgatcggagcagagcacgtgaacaatagctatgagtgcgacatccctatcggcgccggcatctgtgccagctaccagacccagacaaactccccatctggagcaggctccgtggccagccagtccatcatcgcctataccatgagcctgggcgccgagaacagcgtggcctactccaacaattctatcgccatccctaccaacttcacaatcagcgtgaccacagagatcctgccagtgtctatgaccaagacaagcgtggactgcacaatgtatatctgtggcgatagcaccgagtgctccaacctgctgctgcagtacggctccttttgtacccagctgaatagagccctgacaggcatcgccgtggagcaggataagaacacacaggaggtgttcgcccaggtgaagcagatctacaagaccccacccatcaaggactttggcggcttcaacttcagccagatcctgcctgatccaagcaagccctccaagaggtcttttatcgaggacctgctgttcaacaaggtgaccctggccgatgccggcttcatcaagcagtatggagattgcctgggagacatcgcagcccgcgacctgatctgtgcccagaagtttaatggcctgaccgtgctgcctccactgctgacagatgagatgatcgcccagtacacatctgccctgctggccggcaccatcacaagcggatggaccttcggcgcaggagccgccctgcagatcccttttgccatgcagatggcctataggttcaacggcatcggcgtgacccagaatgtgctgtacgagaaccagaagctgatcgccaatcagtttaacagcgccatcggcaagatccaggactctctgtcctctacagccagcgccctgggcaagctgcaggatgtggtgaatcagaacgcccaggccctgaataccctggtgaagcagctgagctccaacttcggcgccatctctagcgtgctgaatgacatcctgagccggctggacccccctgaggcagaggtgcagatcgacaggctgatcacaggccgcctgcagagcctgcagacctacgtgacacagcagctgatcagggcagcagagatcagagcctccgccaatctggccgccaccaagatgagcgagtgcgtgctgggacagtccaagagggtggacttttgtggcaagggctatcacctgatgtctttcccacagagcgcccctcacggcgtggtgtttctgcacgtgacctacgtgccagcccaggagaagaacttcaccacagcaccagccatctgccacgatggaaaggcacactttcctagggagggcgtgttcgtgtctaacggcacccactggtttgtgacacagcgcaatttctacgagccacagatcatcaccacagacaatacattcgtgagcggcaactgtgatgtggtgatcggcatcgtgaacaataccgtgtatgatccactgcagcccgagctggactcctttaaggaggagctggataagtacttcaagaatcacacctctcccgacgtggatctgggcgacatctccggcatcaatgcctctgtggtgaacatccagaaggagatcgaccggctgaacgaggtggccaagaatctgaacgagagcctgatcgatctgcaggagctgggcaagtatgagcagtacatcaagggctctggcagagagaacctgtatttccagggaggaggaggcagcggatacatccctgaggcaccaagggacggacaggcctacgtgcgcaaggatggcgagtgggtgctgctgtccacctttctgggccatcatcaccaccaccaccaccactga

SEQ ID NO: 4933 - DNA, 3846 bp, Artificial Sequence
  Description of Artificial Sequence: Synthetic polynucleotide
atgggcatcctgccaagcccaggaatgcccgccctgctgtctctggtgagcctgctgtccgtgctgctgatgggatgcgtggcagagacaggcacacagtgcgtgaacctgaccacaaggacccagctgccccctgcctataccaattctttcacacggggcgtgtactatcccgacaaggtgtttagaagctccgtgctgcactccacacaggatctgtttctgcctttcttttctaacgtgacctggttccacgccatccacgtgtccggcaccaatggcacaaagcggttcgacaatcccgtgctgccttttaacgatggcgtgtacttcgccagcaccgagaagtccaacatcatcagaggctggatctttggcaccacactggactctaagacacagagcctgctgatcgtgaacaatgccaccaacgtggtgatcaaggtgtgcgagttccagttttgtaatgatccattcctgggcgtgtactatcacaagaacaataagtcctggatggagtctgagtttcgcgtgtattctagcgccaacaattgcacatttgagtacgtgagccagcccttcctgatggacctggagggcaagcagggcaatttcaagaacctgagggagttcgtgtttaagaatatcgatggctacttcaagatctacagcaagcacaccccaatcaacctggtgcgcgacctgccacagggattctccgccctggagccactggtggatctgcccatcggcatcaacatcacccggtttcagacactgctggccctgcacagatcctacctgacaccaggcgactcctctagcggatggaccgcaggagctgccgcctactatgtgggctatctgcagccccggaccttcctgctgaagtacaacgagaatggcaccatcacagacgcagtggattgcgccctggaccccctgtctgagacaaagtgtacactgaagagctttaccgtggagaagggcatctatcagacaagcaatttcagggtgcagcctaccgagtccatcgtgcgctttcccaatatcacaaacctgtgcccttttggcgaggtgttcaacgccaccagattcgccagcgtgtacgcctggaatcggaagagaatctccaactgcgtggccgactattctgtgctgtacgaatccgcctctttcagcacctttaagtgctatggcgtgtctcccacaaagctgaatgatctgtgctttaccaacgtgtacgccgatagcttcgtgatcaggggagacgaagtgagacagatcgcaccaggacagacaggaaagatcgcagactacaattataagctgcctgacgatttcaccggctgcgtgatcgcctggaactccaacaatctggattctaaagtgggcggcaactacaattatctgtacaggctgtttcgcaagtccaatctgaagccattcgagcgggacatctccacagagatctaccaggccggctctaccccctgcaatggcgtggagggctttaactgttatttccctctgcagtcttacggcttccagccaacaaacggcgtgggctatcagccctacagagtggtggtgctgtcctttgagctgctgcacgcaccagcaacagtgtgcggcccaaagaagtctaccaatctggtgaagaacaagtgcgtgaacttcaacttcaacggactgaccggcacaggcgtgctgaccgagagcaataagaagttcctgccttttcagcagttcggcagggacatcgcagataccacagacgccgtgcgcgaccctcagaccctggagatcctggacatcacaccatgcagcttcggcggcgtgtccgtgatcacaccaggcaccaatacatccaaccaggtggccgtgctgtatcaggacgtgaattgtaccgaggtgcccgtggcaatccacgcagatcagctgacccctacatggcgggtgtactctaccggcagcaacgtgttccagacaagagccggatgcctgatcggagcagagcacgtgaacaatagctatgagtgcgacatccctatcggcgccggcatctgtgccagctaccagacccagacaaactccccatctggagcaggctccgtggccagccagtccatcatcgcctataccatgagcctgggcgccgagaacagcgtggcctactccaacaattctatcgccatccctaccaacttcacaatcagcgtgaccacagagatcctgccagtgtctatgaccaagacaagcgtggactgcacaatgtatatctgtggcgatagcaccgagtgctccaacctgctgctgcagtacggctccttttgtacccagctgaatagagccctgacaggcatcgccgtggagcaggataagaacacacaggaggtgttcgcccaggtgaagcagatctacaagaccccacccatcaaggactttggcggcttcaacttcagccagatcctgcctgatccaagcaagccctccaagaggtcttttatcgaggacctgctgttcaacaaggtgaccctggccgatgccggcttcatcaagcagtatggagattgcctgggagacatcgcagcccgcgacctgatctgtgcccagaagtttaatggcctgaccgtgctgcctccactgctgacagatgagatgatcgcccagtacacatctgccctgctggccggcaccatcacaagcggatggaccttcggcgcaggagccgccctgcagatcccttttgccatgcagatggcctataggttcaacggcatcggcgtgacccagaatgtgctgtacgagaaccagaagctgatcgccaatcagtttaacagcgccatcggcaagatccaggactctctgtcctctacagccagcgccctgggcaagctgcaggatgtggtgaatcagaacgcccaggccctgaataccctggtgaagcagctgagctccaacttcggcgccatctctagcgtgctgaatgacatcctgagccggctggacccccctgaggcagaggtgcagatcgacaggctgatcacaggccgcctgcagagcctgcagacctacgtgacacagcagctgatcagggcagcagagatcagagcctccgccaatctggccgccaccaagatgagcgagtgcgtgctgggacagtccaagagggtggacttttgtggcaagggctatcacctgatgtctttcccacagagcgcccctcacggcgtggtgtttctgcacgtgacctacgtgccagcccaggagaagaacttcaccacagcaccagccatctgccacgatggaaaggcacactttcctagggagggcgtgttcgtgtctaacggcacccactggtttgtgacacagcgcaatttctacgagccacagatcatcaccacagacaatacattcgtgagcggcaactgtgatgtggtgatcggcatcgtgaacaataccgtgtatgatccactgcagcccgagctggactcctttaaggaggagctggataagtacttcaagaatcacacctctcccgacgtggatctgggcgacatctccggcatcaatgcctctgtggtgaacatccagaaggagatcgaccggctgaacgaggtggccaagaatctgaacgagagcctgatcgatctgcaggagctgggcaagtatgagcagtacatcaagggctctggcagagagaacctgtatttccagggaggaggaggcagcggatacatccctgaggcaccaagggacggacaggcctacgtgcgcaaggatggcgagtgggtgctgctgtccacctttctgggccatcatcaccaccaccaccaccactga

SEQ ID NO: 4934 - DNA, 3846 bp, Artificial Sequence
  Description of Artificial Sequence: Synthetic polynucleotide
atgggcatcctgccaagcccaggaatgcccgccctgctgtctctggtgagcctgctgtccgtgctgctgatgggatgcgtggcagagacaggcacacagtgcgtgaacctgaccacaaggacccagctgccccctgcctataccaattctttcacacggggcgtgtactatcccgacaaggtgtttagaagctccgtgctgcactccacacaggatctgtttctgcctttcttttctaacgtgacctggttccacgccatccacgtgtccggcaccaatggcacaaagcggttcgacaatcccgtgctgccttttaacgatggcgtgtacttcgccagcaccgagaagtccaacatcatcagaggctggatctttggcaccacactggactctaagacacagagcctgctgatcgtgaacaatgccaccaacgtggtgatcaaggtgtgcgagttccagttttgtaatgatccattcctgggcgtgtactatcacaagaacaataagtcctggatggagtctgagtttcgcgtgtattctagcgccaacaattgcacatttgagtacgtgagccagcccttcctgatggacctggagggcaagcagggcaatttcaagaacctgagggagttcgtgtttaagaatatcgatggctacttcaagatctacagcaagcacaccccaatcaacctggtgcgcgacctgccacagggattctccgccctggagccactggtggatctgcccatcggcatcaacatcacccggtttcagacactgctggccctgcacagatcctacctgacaccaggcgactcctctagcggatggaccgcaggagctgccgcctactatgtgggctatctgcagccccggaccttcctgctgaagtacaacgagaatggcaccatcacagacgcagtggattgcgccctggaccccctgtctgagacaaagtgtacactgaagagctttaccgtggagaagggcatctatcagacaagcaatttcagggtgcagcctaccgagtccatcgtgcgctttcccaatatcacaaacctgtgcccttttggcgaggtgttcaacgccaccagattcgccagcgtgtacgcctggaatcggaagagaatctccaactgcgtggccgactattctgtgctgtacaactccgcctctttcagcacctttaagtgctatggcgtgtctcccacaaagctgaatgatctgtgctttaccaacgtgtacgccgatagcttcgtgatcaggggagacgaagtgagacagatcgcaccaggacagacaggaaagatcgcagactacaattataagctgcctgacgatttcaccggctgcgtgatcgcctggaactccaacaatctggattctaaagtgggcggcaactacaattatctgtacaggctgtttcgcaagtccaatctgaagccattcgagcgggacatctccacagagatctaccaggccggctctaccccctgcaatggcgtggagggctttaactgttatttccctctgcagtcttacggcttccagccaacaaacggcgtgggctatcagccctacagagtggtggtgctgtcctttgagctgctgcacgcaccagcaacagtgtgcggcccaaagaagtctaccaatctggtgaagaacaagtgcgtgaacttcaacttcaacggactgaccggcacaggcgtgctgaccgagagcaataagaagttcctgccttttcagcagttcggcagggacatcgcagataccacagacgccgtgcgcgaccctcagaccctggagatcctggacatcacaccatgcagcttcggcggcgtgtccgtgatcacaccaggcaccaatacatccaaccaggtggccgtgctgtatcaggacgtgaattgtaccgaggtgcccgtggcaatccacgcagatcagctgacccctacatggcgggtgtactctaccggcagcaacgtgttccagacaagagccggatgcctgatcggagcagagcacgtgaacaatagctatgagtgcgacatccctatcggcgccggcatctgtgccagctaccagacccagacaaactccccatctggagcaggctccgtggccagccagtccatcatcgcctataccatgagcctgggcgccgagaacagcgtggcctactccaacaattctatcgccatccctaccaacttcacaatcagcgtgaccacagagatcctgccagtgtctatgaccaagacaagcgtggactgcacaatgtatatctgtggcgatagcaccgagtgctccaacctgctgctgcagtacggctccttttgtacccagctgaatagagccctgacaggcatcgccgtggagcaggataagaacacacaggaggtgttcgcccaggtgaagcagatctacaagaccccacccatcaaggactttggcggcttcaacttcagccagatcctgcctgatccaagcaagccctccaagaggtcttttatcgaggacctgctgttcaacaaggtgaccctggccgatgccggcttcatcaagcagtatggagattgcctgggagacatcgcagcccgcgacctgatctgtgcccagaagtttaatggcctgaccgtgctgcctccactgctgacagatgagatgatcgcccagtacacatctgccctgctggccggcaccatcacaagcggatggaccttcggcgcaggagccgccctgcagatcccttttgccatgcagatggcctataggttcaacggcatcggcgtgacccagaatgtgctgtacgagaaccagaagctgatcgccaatcagtttaacagcgccatcggcaagatccaggactctctgtcctctacagccagcgccctgggcaagctgcaggatgtggtgaatcagaacgcccaggccctgaataccctggtgaagcagctgagctccaacttcggcgccatctctagcgtgctgaatgacatcctgagccggctggacccccctgaggcagaggtgcagatcgacaggctgatcacaggccgcctgcagagcctgcagacctacgtgacacagcagctgatcagggcagcagagatcagagcctccgccaatctggccgccaccaagatgagcgagtgcgtgctgggacagtccaagagggtggacttttgtggcaagggctttcacctgatgtctttcccacagagcgcccctcacggcgtggtgtttctgcacgtgacctacgtgccagcccaggagaagaacttcaccacagcaccagccatctgccacgatggaaaggcacactttcctagggagggcgtgttcgtgtctaacggcacccactggtttgtgacacagcgcaatttctacgagccacagatcatcaccacagacaatacattcgtgagcggcaactgtgatgtggtgatcggcatcgtgaacaataccgtgtatgatccactgcagcccgagctggactcctttaaggaggagctggataagtacttcaagaatcacacctctcccgacgtggatctgggcgacatctccggcatcaatgcctctgtggtgaacatccagaaggagatcgaccggctgaacgaggtggccaagaatctgaacgagagcctgatcgatctgcaggagctgggcaagtatgagcagtacatcaagggctctggcagagagaacctgtatttccagggaggaggaggcagcggatacatccctgaggcaccaagggacggacaggcctacgtgcgcaaggatggcgagtgggtgctgctgtccacctttctgggccatcatcaccaccaccaccaccactga

SEQ ID NO: 4935 - DNA, 3846 bp, Artificial Sequence
  Description of Artificial Sequence: Synthetic polynucleotide
atgggcatcctgccaagcccaggaatgcccgccctgctgtctctggtgagcctgctgtccgtgctgctgatgggatgcgtggcagagacaggcacacagtgcgtgaacctgaccacaaggacccagctgccccctgcctataccaattctttcacacggggcgtgtactatcccgacaaggtgtttagaagctccgtgctgcactccacacaggatctgtttctgcctttcttttctaacgtgacctggttccacgccatccacgtgtccggcaccaatggcacaaagcggttcgacaatcccgtgctgccttttaacgatggcgtgtacttcgccagcaccgagaagtccaacatcatcagaggctggatctttggcaccacactggactctaagacacagagcctgctgatcgtgaacaatgccaccaacgtggtgatcaaggtgtgcgagttccagttttgtaatgatccattcctgggcgtgtactatcacaagaacaataagtcctggatggagtctgagtttcgcgtgtattctagcgccaacaattgcacatttgagtacgtgagccagcccttcctgatggacctggagggcaagcagggcaatttcaagaacctgagggagttcgtgtttaagaatatcgatggctacttcaagatctacagcaagcacaccccaatcaacctggtgcgcgacctgccacagggattctccgccctggagccactggtggatctgcccatcggcatcaacatcacccggtttcagacactgctggccctgcacagatcctacctgacaccaggcgactcctctagcggatggaccgcaggagctgccgcctactatgtgggctatctgcagccccggaccttcctgctgaagtacaacgagaatggcaccatcacagacgcagtggattgcgccctggaccccctgtctgagacaaagtgtacactgaagagctttaccgtggagaagggcatctatcagacaagcaatttcagggtgcagcctaccgagtccatcgtgcgctttcccaatatcacaaacctgtgcccttttggcgaggtgttcaacgccaccagattcgccagcgtgtacgcctggaatcggaagagaatctccaactgcgtggccgactattctgtgctgtacaactccgcctctttcagcacctttaagtgctatggcgtgtctcccacaaagctgaatgatctgtgctttaccaacgtgtacgccgatagcttcgtgatcaggggagacgaagtgagacagatcgcaccaggacagacaggaaagatcgcagactacaattataagctgcctgacgatttcaccggctgcgtgatcgcctggaactccaacaatctggattctaaagtgggcggcaactacaattatctgtacaggctgtttcgcaagtccaatctgaagccattcgagcgggacatctccgaagagatctaccaggccggctctaccccctgcaatggcgtggagggctttaactgttatttccctctgcagtcttacggcttccagccaacaaacggcgtgggctatcagccctacagagtggtggtgctgtcctttgagctgctgcacgcaccagcaacagtgtgcggcccaaagaagtctaccaatctggtgaagaacaagtgcgtgaacttcaacttcaacggactgaccggcacaggcgtgctgaccgagagcaataagaagttcctgccttttcagcagttcggcagggacatcgcagataccacagacgccgtgcgcgaccctcagaccctggagatcctggacatcacaccatgcagcttcggcggcgtgtccgtgatcacaccaggcaccaatacatccaaccaggtggccgtgctgtatcaggacgtgaattgtaccgaggtgcccgtggcaatccacgcagatcagctgacccctacatggcgggtgtactctaccggcagcaacgtgttccagacaagagccggatgcctgatcggagcagagcacgtgaacaatagctatgagtgcgacatccctatcggcgccggcatctgtgccagctaccagacccagacaaactccccatctggagcaggctccgtggccagccagtccatcatcgcctataccatgagcctgggcgccgagaacagcgtggcctactccaacaattctatcgccatccctaccaacttcacaatcagcgtgaccacagagatcctgccagtgtctatgaccaagacaagcgtggactgcacaatgtatatctgtggcgatagcaccgagtgctccaacctgctgctgcagtacggctccttttgtacccagctgaatagagccctgacaggcatcgccgtggagcaggataagaacacacaggaggtgttcgcccaggtgaagcagatctacaagaccccacccatcaaggactttggcggcttcaacttcagccagatcctgcctgatccaagcaagccctccaagaggtcttttatcgaggacctgctgttcaacaaggtgaccctggccgatgccggcttcatcaagcagtatggagattgcctgggagacatcgcagcccgcgacctgatctgtgcccagaagtttaatggcctgaccgtgctgcctccactgctgacagatgagatgatcgcccagtacacatctgccctgctggccggcaccatcacaagcggatggaccttcggcgcaggagccgccctgcagatcccttttgccatgcagatggcctataggttcaacggcatcggcgtgacccagaatgtgctgtacgagaaccagaagctgatcgccaatcagtttaacagcgccatcggcaagatccaggactctctgtcctctacagccagcgccctgggcaagctgcaggatgtggtgaatcagaacgcccaggccctgaataccctggtgaagcagctgagctccaacttcggcgccatctctagcgtgctgaatgacatcctgagccggctggacccccctgaggcagaggtgcagatcgacaggctgatcacaggccgcctgcagagcctgcagacctacgtgacacagcagctgatcagggcagcagagatcagagcctccgccaatctggccgccaccaagatgagcgagtgcgtgctgggacagtccaagagggtggacttttgtggcaagggctatcacctgatgtctttcccacagagcgcccctcacggcgtggtgtttctgcacgtgacctacgtgccagcccaggagaagaacttcaccacagcaccagccatctgccacgatggaaaggcacactttcctagggagggcgtgttcgtgtctaacggcacccactggtttgtgacacagcgcaatttctacgagccacagatcatcaccacagacaatacattcgtgagcggcaactgtgatgtggtgatcggcatcgtgaacaataccgtgtatgatccactgcagcccgagctggactcctttaaggaggagctggataagtacttcaagaatcacacctctcccgacgtggatctgggcgacatctccggcatcaatgcctctgtggtgaacatccagaaggagatcgaccggctgaacgaggtggccaagaatctgaacgagagcctgatcgatctgcaggagctgggcaagtatgagcagtacatcaagggctctggcagagagaacctgtatttccagggaggaggaggcagcggatacatccctgaggcaccaagggacggacaggcctacgtgcgcaaggatggcgagtgggtgctgctgtccacctttctgggccatcatcaccaccaccaccaccactga

SEQ ID NO: 4936 - DNA, 3846 bp, Artificial Sequence
  Description of Artificial Sequence: Synthetic polynucleotide
atgggcatcctgccaagcccaggaatgcccgccctgctgtctctggtgagcctgctgtccgtgctgctgatgggatgcgtggcagagacaggcacacagtgcgtgaacctgaccacaaggacccagctgccccctgcctataccaattctttcacacggggcgtgtactatcccgacaaggtgtttagaagctccgtgctgcactccacacaggatctgtttctgcctttcttttctaacgtgacctggttccacgccatccacgtgtccggcaccaatggcacaaagcggttcgacaatcccgtgctgccttttaacgatggcgtgtacttcgccagcaccgagaagtccaacatcatcagaggctggatctttggcaccacactggactctaagacacagagcctgctgatcgtgaacaatgccaccaacgtggtgatcaaggtgtgcgagttccagttttgtaatgatccattcctgggcgtgtactatcacaagaacaataagtcctggatggagtctgagtttcgcgtgtattctagcgccaacaattgcacatttgagtacgtgagccagcccttcctgatggacctggagggcaagcagggcaatttcaagaacctgagggagttcgtgtttaagaatatcgatggctacttcaagatctacagcaagcacaccccaatcaacctggtgcgcgacctgccacagggattctccgccctggagccactggtggatctgcccatcggcatcaacatcacccggtttcagacactgctggccctgcacagatcctacctgacaccaggcgactcctctagcggatggaccgcaggagctgccgcctactatgtgggctatctgcagccccggaccttcctgctgaagtacaacgagaatggcaccatcacagacgcagtggattgcgccctggaccccctgtctgagacaaagtgtacactgaagagctttaccgtggagaagggcatctatcagacaagcaatttcagggtgcagcctaccgagtccatcgtgcgctttcccaatatcacaaacctgtgcccttttggcgaggtgttcaacgccaccagattcgccagcgtgtacgcctggaatcggaagagaatctccaactgcgtggccgactattctgtgctgtacaactccgcctctttcagcacctttaagtgctatggcgtgtctcccacaaagctgaatgatctgtgctttaccaacgtgtacgccgatagcttcgtgatcaggggagacgaagtgagacagatcgcaccaggacagacaggaaagatcgcagactacaattatactctgcctgacgatttcaccggctgcgtgatcgcctggaactccaacaatctggattctaaagtgggcggcaactacaattatctgtacaggctgtttcgcaagtccaatctgaagccattcgagcgggacatctccacagagatctaccaggccggctctaccccctgcaatggcgtggagggctttaactgttatttccctctgcagtcttacggcttccagccaacaaacggcgtgggctatcagccctacagagtggtggtgctgtcctttgagctgctgcacgcaccagcaacagtgtgcggcccaaagaagtctaccaatctggtgaagaacaagtgcgtgaacttcaacttcaacggactgaccggcacaggcgtgctgaccgagagcaataagaagttcctgccttttcagcagttcggcagggacatcgcagataccacagacgccgtgcgcgaccctcagaccctggagatcctggacatcacaccatgcagcttcggcggcgtgtccgtgatcacaccaggcaccaatacatccaaccaggtggccgtgctgtatcaggacgtgaattgtaccgaggtgcccgtggcaatccacgcagatcagctgacccctacatggcgggtgtactctaccggcagcaacgtgttccagacaagagccggatgcctgatcggagcagagcacgtgaacaatagctatgagtgcgacatccctatcggcgccggcatctgtgccagctaccagacccagacaaactccccatctggagcaggctccgtggccagccagtccatcatcgcctataccatgagcctgggcgccgagaacagcgtggcctactccaacaattctatcgccatccctaccaacttcacaatcagcgtgaccacagagatcctgccagtgtctatgaccaagacaagcgtggactgcacaatgtatatctgtggcgatagcaccgagtgctccaacctgctgctgcagtacggctccttttgtacccagctgaatagagccctgacaggcatcgccgtggagcaggataagaacacacaggaggtgttcgcccaggtgaagcagatctacaagaccccacccatcaaggactttggcggcttcaacttcagccagatcctgcctgatccaagcaagccctccaagaggtcttttatcgaggacctgctgttcaacaaggtgaccctggccgatgccggcttcatcaagcagtatggagattgcctgggagacatcgcagcccgcgacctgatctgtgcccagaagtttaatggcctgaccgtgctgcctccactgctgacagatgagatgatcgcccagtacacatctgccctgctggccggcaccatcacaagcggatggaccttcggcgcaggagccgccctgcagatcccttttgccatgcagatggcctataggttcaacggcatcggcgtgacccagaatgtgctgtacgagaaccagaagctgatcgccaatcagtttaacagcgccatcggcaagatccaggactctctgtcctctacagccagcgccctgggcaagctgcaggatgtggtgaatcagaacgcccaggccctgaataccctggtgaagcagctgagctccaacttcggcgccatctctagcgtgctgaatgacatcctgagccggctggacccccctgaggcagaggtgcagatcgacaggctgatcacaggccgcctgcagagcctgcagacctacgtgacacagcagctgatcagggcagcagagatcagagcctccgccaatctggccgccaccaagatgagcgagtgcgtgctgggacagtccaagagggtggacttttgtggcaagggctatcacctgatgtctttcccacagagcgcccctcacggcgtggtgtttctgcacgtgacctacgtgccagcccaggagaagaacttcaccacagcaccagccatctgccacgatggaaaggcacactttcctagggagggcgtgttcgtgtctaacggcacccactggtttgtgacacagcgcaatttctacgagccacagatcatcaccacagacaatacattcgtgagcggcaactgtgatgtggtgatcggcatcgtgaacaataccgtgtatgatccactgcagcccgagctggactcctttaaggaggagctggataagtacttcaagaatcacacctctcccgacgtggatctgggcgacatctccggcatcaatgcctctgtggtgaacatccagaaggagatcgaccggctgaacgaggtggccaagaatctgaacgagagcctgatcgatctgcaggagctgggcaagtatgagcagtacatcaagggctctggcagagagaacctgtatttccagggaggaggaggcagcggatacatccctgaggcaccaagggacggacaggcctacgtgcgcaaggatggcgagtgggtgctgctgtccacctttctgggccatcatcaccaccaccaccaccactga

SEQ ID NO: 4937 - DNA, 3846 bp, Artificial Sequence
  Description of Artificial Sequence: Synthetic polynucleotide
atgggcatcctgccaagcccaggaatgcccgccctgctgtctctggtgagcctgctgtccgtgctgctgatgggatgcgtggcagagacaggcacacagtgcgtgaacctgaccacaaggacccagctgccccctgcctataccaattctttcacacggggcgtgtactatcccgacaaggtgtttagaagctccgtgctgcactccacacaggatctgtttctgcctttcttttctaacgtgacctggttccacgccatccacgtgtccggcaccaatggcacaaagcggttcgacaatcccgtgctgccttttaacgatggcgtgtacttcgccagcaccgagaagtccaacatcatcagaggctggatctttggcaccacactggactctaagacacagagcctgctgatcgtgaacaatgccaccaacgtggtgatcaaggtgtgcgagttccagttttgtaatgatccattcctgggcgtgtactatcacaagaacaataagtcctggatggagtctgagtttcgcgtgtattctagcgccaacaattgcacatttgagtacgtgagccagcccttcctgatggacctggagggcaagcagggcaatttcaagaacctgagggagttcgtgtttaagaatatcgatggctacttcaagatctacagcaagcacaccccaatcaacctggtgcgcgacctgccacagggattctccgccctggagccactggtggatctgcccatcggcatcaacatcacccggtttcagacactgctggccctgcacagatcctacctgacaccaggcgactcctctagcggatggaccgcaggagctgccgcctactatgtgggctatctgcagccccggaccttcctgctgaagtacaacgagaatggcaccatcacagacgcagtggattgcgccctggaccccctgtctgagacaaagtgtacactgaagagctttaccgtggagaagggcatctatcagacaagcaatttcagggtgcagcctaccgagtccatcgtgcgctttcccaatatcacaaacctgtgcccttttggcgaggtgttcaacgccaccagattcgccagcgtgtacgattggaatcggaagagaatctccaactgcgtggccgactattctgtgctgtacaactccgcctctttcagcacctttaagtgctatggcgtgtctcccacaaagctgaatgatctgtgctttaccaacgtgtacgccgatagcttcgtgatcaggggagacgaagtgagacagatcgcaccaggacagacaggaaagatcgcagactacaattataagctgcctgacgatttcaccggctgcgtgatcgcctggaactccaacaatctggattctaaagtgggcggcaactacaattatctgtacaggctgtttcgcaagtccaatctgaagccattcgagcgggacatctccacagagatctaccaggccggctctaccccctgcaatggcgtggagggctttaactgttatttccctctgcagtcttacggcttccagccaacaaacggcgtgggctatcagccctacagagtggtggtgctgtcctttgagctgctgcacgcaccagcaacagtgtgcggcccaaagaagtctaccaatctggtgaagaacaagtgcgtgaacttcaacttcaacggactgaccggcacaggcgtgctgaccgagagcaataagaagttcctgccttttcagcagttcggcagggacatcgcagataccacagacgccgtgcgcgaccctcagaccctggagatcctggacatcacaccatgcagcttcggcggcgtgtccgtgatcacaccaggcaccaatacatccaaccaggtggccgtgctgtatcaggacgtgaattgtaccgaggtgcccgtggcaatccacgcagatcagctgacccctacatggcgggtgtactctaccggcagcaacgtgttccagacaagagccggatgcctgatcggagcagagcacgtgaacaatagctatgagtgcgacatccctatcggcgccggcatctgtgccagctaccagacccagacaaactccccatctggagcaggctccgtggccagccagtccatcatcgcctataccatgagcctgggcgccgagaacagcgtggcctactccaacaattctatcgccatccctaccaacttcacaatcagcgtgaccacagagatcctgccagtgtctatgaccaagacaagcgtggactgcacaatgtatatctgtggcgatagcaccgagtgctccaacctgctgctgcagtacggctccttttgtacccagctgaatagagccctgacaggcatcgccgtggagcaggataagaacacacaggaggtgttcgcccaggtgaagcagatctacaagaccccacccatcaaggactttggcggcttcaacttcagccagatcctgcctgatccaagcaagccctccaagaggtcttttatcgaggacctgctgttcaacaaggtgaccctggccgatgccggcttcatcaagcagtatggagattgcctgggagacatcgcagcccgcgacctgatctgtgcccagaagtttaatggcctgaccgtgctgcctccactgctgacagatgagatgatcgcccagtacacatctgccctgctggccggcaccatcacaagcggatggaccttcggcgcaggagccgccctgcagatcccttttgccatgcagatggcctataggttcaacggcatcggcgtgacccagaatgtgctgtacgagaaccagaagctgatcgccaatcagtttaacagcgccatcggcaagatccaggactctctgtcctctacagccagcgccctgggcaagctgcaggatgtggtgaatcagaacgcccaggccctgaataccctggtgaagcagctgagctccaacttcggcgccatctctagcgtgctgaatgacatcctgagccggctggacccccctgaggcagaggtgcagatcgacaggctgatcacaggccgcctgcagagcctgcagacctacgtgacacagcagctgatcagggcagcagagatcagagcctccgccaatctggccgccaccaagatgagcgagtgcgtgctgggacagtccaagagggtggacttttgtggcaagggctatcacctgatgtctttcccacagagcgcccctcacggcgtggtgtttctgcacgtgacctacgtgccagcccaggagaagaacttcaccacagcaccagccatctgccacgatggaaaggcacactttcctagggagggcgtgttcgtgtctaacggcacccactggtttgtgacacagcgcaatttctacgagccacagatcatcaccacagacaatacattcgtgagcggcaactgtgatgtggtgatcggcatcgtgaacaataccgtgtatgatccactgcagcccgagctggactcctttaaggaggagctggataagtacttcaagaatcacacctctcccgacgtggatctgggcgacatctccggcatcaatgcctctgtggtgaacatccagaaggagatcgaccggctgaacgaggtggccaagaatctgaacgagagcctgatcgatctgcaggagctgggcaagtatgagcagtacatcaagggctctggcagagagaacctgtatttccagggaggaggaggcagcggatacatccctgaggcaccaagggacggacaggcctacgtgcgcaaggatggcgagtgggtgctgctgtccacctttctgggccatcatcaccaccaccaccaccactga

SEQ ID NO: 4938 - DNA, 3846 bp, Artificial Sequence
  Description of Artificial Sequence: Synthetic polynucleotide
atgggcatcctgccaagcccaggaatgcccgccctgctgtctctggtgagcctgctgtccgtgctgctgatgggatgcgtggcagagacaggcacacagtgcgtgaacctgaccacaaggacccagctgccccctgcctataccaattctttcacacggggcgtgtactatcccgacaaggtgtttagaagctccgtgctgcactccacacaggatctgtttctgcctttcttttctaacgtgacctggttccacgccatccacgtgtccggcaccaatggcacaaagcggttcgacaatcccgtgctgccttttaacgatggcgtgtacttcgccagcaccgagaagtccaacatcatcagaggctggatctttggcaccacactggactctaagacacagagcctgctgatcgtgaacaatgccaccaacgtggtgatcaaggtgtgcgagttccagttttgtaatgatccattcctgggcgtgtactatcacaagaacaataagtcctggatggagtctgagtttcgcgtgtattctagcgccaacaattgcacatttgagtacgtgagccagcccttcctgatggacctggagggcaagcagggcaatttcaagaacctgagggagttcgtgtttaagaatatcgatggctacttcaagatctacagcaagcacaccccaatcaacctggtgcgcgacctgccacagggattctccgccctggagccactggtggatctgcccatcggcatcaacatcacccggtttcagacactgctggccctgcacagatcctacctgacaccaggcgactcctctagcggatggaccgcaggagctgccgcctactatgtgggctatctgcagccccggaccttcctgctgaagtacaacgagaatggcaccatcacagacgcagtggattgcgccctggaccccctgtctgagacaaagtgtacactgaagagctttaccgtggagaagggcatctatcagacaagcaatttcagggtgcagcctaccgagtccatcgtgcgctttcccaatatcacaaacctgtgcccttttggcgaggtgttcaacgccaccagattcgccagcgtgtacgcctggaatcggaagagaatctccaactgcgtggccgactattctgtgctgtacaactccgcctctttcagcacctttaagtgctatggcgtgtctcccacaaagctgaatgatctgtgctttaccaacgtgtacgccgatagcttcgtgatcaggggagacgaagtgagacagatcgcaccaggacagacaggaaagatcgcagactacaattataagctgcctgacgatttcaccggctgcgtgatcgcctggaactccaacaatctggattctaaagtgggcggcaactacaattatctgtacaggctgtttcgcaagtccaatctgaagccattcgagatagacatctccacagagatctaccaggccggctctaccccctgcaatggcgtggagggctttaactgttatttccctctgcagtcttacggcttccagccaacaaacggcgtgggctatcagccctacagagtggtggtgctgtcctttgagctgctgcacgcaccagcaacagtgtgcggcccaaagaagtctaccaatctggtgaagaacaagtgcgtgaacttcaacttcaacggactgaccggcacaggcgtgctgaccgagagcaataagaagttcctgccttttcagcagttcggcagggacatcgcagataccacagacgccgtgcgcgaccctcagaccctggagatcctggacatcacaccatgcagcttcggcggcgtgtccgtgatcacaccaggcaccaatacatccaaccaggtggccgtgctgtatcaggacgtgaattgtaccgaggtgcccgtggcaatccacgcagatcagctgacccctacatggcgggtgtactctaccggcagcaacgtgttccagacaagagccggatgcctgatcggagcagagcacgtgaacaatagctatgagtgcgacatccctatcggcgccggcatctgtgccagctaccagacccagacaaactccccatctggagcaggctccgtggccagccagtccatcatcgcctataccatgagcctgggcgccgagaacagcgtggcctactccaacaattctatcgccatccctaccaacttcacaatcagcgtgaccacagagatcctgccagtgtctatgaccaagacaagcgtggactgcacaatgtatatctgtggcgatagcaccgagtgctccaacctgctgctgcagtacggctccttttgtacccagctgaatagagccctgacaggcatcgccgtggagcaggataagaacacacaggaggtgttcgcccaggtgaagcagatctacaagaccccacccatcaaggactttggcggcttcaacttcagccagatcctgcctgatccaagcaagccctccaagaggtcttttatcgaggacctgctgttcaacaaggtgaccctggccgatgccggcttcatcaagcagtatggagattgcctgggagacatcgcagcccgcgacctgatctgtgcccagaagtttaatggcctgaccgtgctgcctccactgctgacagatgagatgatcgcccagtacacatctgccctgctggccggcaccatcacaagcggatggaccttcggcgcaggagccgccctgcagatcccttttgccatgcagatggcctataggttcaacggcatcggcgtgacccagaatgtgctgtacgagaaccagaagctgatcgccaatcagtttaacagcgccatcggcaagatccaggactctctgtcctctacagccagcgccctgggcaagctgcaggatgtggtgaatcagaacgcccaggccctgaataccctggtgaagcagctgagctccaacttcggcgccatctctagcgtgctgaatgacatcctgagccggctggacccccctgaggcagaggtgcagatcgacaggctgatcacaggccgcctgcagagcctgcagacctacgtgacacagcagctgatcagggcagcagagatcagagcctccgccaatctggccgccaccaagatgagcgagtgcgtgctgggacagtccaagagggtggacttttgtggcaagggctatcacctgatgtctttcccacagagcgcccctcacggcgtggtgtttctgcacgtgacctacgtgccagcccaggagaagaacttcaccacagcaccagccatctgccacgatggaaaggcacactttcctagggagggcgtgttcgtgtctaacggcacccactggtttgtgacacagcgcaatttctacgagccacagatcatcaccacagacaatacattcgtgagcggcaactgtgatgtggtgatcggcatcgtgaacaataccgtgtatgatccactgcagcccgagctggactcctttaaggaggagctggataagtacttcaagaatcacacctctcccgacgtggatctgggcgacatctccggcatcaatgcctctgtggtgaacatccagaaggagatcgaccggctgaacgaggtggccaagaatctgaacgagagcctgatcgatctgcaggagctgggcaagtatgagcagtacatcaagggctctggcagagagaacctgtatttccagggaggaggaggcagcggatacatccctgaggcaccaagggacggacaggcctacgtgcgcaaggatggcgagtgggtgctgctgtccacctttctgggccatcatcaccaccaccaccaccactga

SEQ ID NO: 4939 - DNA, 3846 bp, Artificial Sequence
  Description of Artificial Sequence: Synthetic polynucleotide
atgggcatcctgccaagcccaggaatgcccgccctgctgtctctggtgagcctgctgtccgtgctgctgatgggatgcgtggcagagacaggcacacagtgcgtgaacctgaccacaaggacccagctgccccctgcctataccaattctttcacacggggcgtgtactatcccgacaaggtgtttagaagctccgtgctgcactccacacaggatctgtttctgcctttcttttctaacgtgacctggttccacgccatccacgtgtccggcaccaatggcacaaagcggttcgacaatcccgtgctgccttttaacgatggcgtgtacttcgccagcaccgagaagtccaacatcatcagaggctggatctttggcaccacactggactctaagacacagagcctgctgatcgtgaacaatgccaccaacgtggtgatcaaggtgtgcgagttccagttttgtaatgatccattcctgggcgtgtactatcacaagaacaataagtcctggatggagtctgagtttcgcgtgtattctagcgccaacaattgcacatttgagtacgtgagccagcccttcctgatggacctggagggcaagcagggcaatttcaagaacctgagggagttcgtgtttaagaatatcgatggctacttcaagatctacagcaagcacaccccaatcaacctggtgcgcgacctgccacagggattctccgccctggagccactggtggatctgcccatcggcatcaacatcacccggtttcagacactgctggccctgcacagatcctacctgacaccaggcgactcctctagcggatggaccgcaggagctgccgcctactatgtgggctatctgcagccccggaccttcctgctgaagtacaacgagaatggcaccatcacagacgcagtggattgcgccctggaccccctgtctgagacaaagtgtacactgaagagctttaccgtggagaagggcatctatcagacaagcaatttcagggtgcagcctaccgagtccatcgtgcgctttcccaatatcacaaacctgtgcccttttggcgaggtgttcaacgccaccagattcgccagcgtgtacgcctggaatcggaagagaatctccaactgcgtggccgactattctgtgctgtacaactccgcctctttcagcacctttaagtgctatggcgtgtctcccacaaagctgaatgatctgtgctttaccaacgtgtacgccgatagcttcgtgatcaggggagacgaagtgagacagatcgcaccaggacagacaggaaagatcgcagactacaattataagctgcctgacgatttcaccggctgcgtgatcgcctggaactccaacaatctggattctaaagtgggcggcaactacaattatctgtacaggctgtttcgcaagtccaatctgaagccattcgagcgggacatctccacagagatctaccaggccggctctaccccctgcaatggcgtggagggctttaactgttatttccctctgcagtcttacggcttccagccaacaaacggcgtgggctatcagccctacagagtggtggtgctgtcctttgagctgctgcacgcaccagcaacagtgtgcggcccaaagaagtctaccaatctggtgaagaacaagtgcgtgaacttcaacttcaacggactgaccggcacaggcgtgctgaccgagagcaataagaagttcctgccttttcagcagttcggcagggacatcgcagataccacagacgccgtgcgcgaccctcagaccctggagatcctggacatcacaccatgcagcttcggcggcgtgtccgtgatcacaccaggcaccaatacatccaaccaggtggccgtgctgtatcaggacgtgaattgtaccgaggtgcccgtggcaatccacgcagatcagctgacccctacatggcgggtgtactctaccggcagcaacgtgttccagacaagagccggatgcctgatcggagcagagcacgtgaacaatagctatgagtgcgacatccctatcggcgccggcatctgtgccagctaccagacccagacaaactccccatctggagcaggctccgtggccagccagtccatcatcgcctataccatgagcctgggcgccgagaacagcgtggcctactccaacaattctatcgccatccctaccaacttcacaatcagcgtgaccacagagatcctgccagtgtctatgaccaagacaagcgtggactgcacaatgtatatctgtggcgatagcaccgagtgctccaacctgctgctgcagtacggctccttttgtacccagctgaatagagccctgacaggcatcgccgtggagcaggataagaacacacaggaggtgttcgcccaggtgaagcagatctacaagaccccacccatcaaggactttggcggcttcaacttcagccagatcctgcctgatccaagcaagccctccaagaggtcttttatcgaggacctgctgttcaacaaggtgaccctggccgatgccggcttcatcaagcagtatggagattgcctgggagacatcgcagcccgcgacctgatctgtgcccagaagtttaatggcctgaccgtgctgcctccactgctgacagatgagatgatcgcccagtacacatctgccctgctggccggcaccatcacaagcggatggaccttcggcgcaggagccgccctgcagatcccttttgccatgcagatggcctataggttcaacggcatcggcgtgacccagaatgtgctgtacgagaaccagaagctgatcgccaatcagtttaacagcgccatcggcaagatccaggactctctgtcctctacagccagcgccctgggcaagctgcaggatgtggtgaatcagaacgcccaggccctgaataccctggtgaagcagctgagctccaacttcggcgccatctctagcgtgctgaatgacatcctgagccggctggacccccctgaggcagaggtgcagatcgacaggctgatcacaggccgcctgcagagcctgcagacctacgtgacacagcagctgatcagggcagcagagatcagagcctccgccaatctggccgccaccaagatgagcgagtgcgtgctgggacagtccaagagggtggacttttgtggcaagggctatcacctgatgtctttcccacagagcgcccctcacggcgtggtgtttctgcacgtgacctacgtgccagcccagagtaagaacttcaccacagcaccagccatctgccacgatggaaaggcacactttcctagggagggcgtgttcgtgtctaacggcacccactggtttgtgacacagcgcaatttctacgagccacagatcatcaccacagacaatacattcgtgagcggcaactgtgatgtggtgatcggcatcgtgaacaataccgtgtatgatccactgcagcccgagctggactcctttaaggaggagctggataagtacttcaagaatcacacctctcccgacgtggatctgggcgacatctccggcatcaatgcctctgtggtgaacatccagaaggagatcgaccggctgaacgaggtggccaagaatctgaacgagagcctgatcgatctgcaggagctgggcaagtatgagcagtacatcaagggctctggcagagagaacctgtatttccagggaggaggaggcagcggatacatccctgaggcaccaagggacggacaggcctacgtgcgcaaggatggcgagtgggtgctgctgtccacctttctgggccatcatcaccaccaccaccaccactga

SEQ ID NO: 4940 - DNA, 3846 bp, Artificial Sequence
  Description of Artificial Sequence: Synthetic polynucleotide
atgggcatcctgccaagcccaggaatgcccgccctgctgtctctggtgagcctgctgtccgtgctgctgatgggatgcgtggcagagacaggcacacagtgcgtgaacctgaccacaaggacccagctgccccctgcctataccaattctttcacacggggcgtgtactatcccgacaaggtgtttagaagctccgtgctgcactccacacaggatctgtttctgcctttcttttctaacgtgacctggttccacgccatccacgtgtccggcaccaatggcacaaagcggttcgacaatcccgtgctgccttttaacgatggcgtgtacttcgccagcaccgagaagtccaacatcatcagaggctggatctttggcaccacactggactctaagacacagagcctgctgatcgtgaacaatgccaccaacgtggtgatcaaggtgtgcgagttccagttttgtaatgatccattcctgggcgtgtactatcacaagaacaataagtcctggatggagtctgagtttcgcgtgtattctagcgccaacaattgcacatttgagtacgtgagccagcccttcctgatggacctggagggcaagcagggcaatttcaagaacctgagggagttcgtgtttaagaatatcgatggctacttcaagatctacagcaagcacaccccaatcaacctggtgcgcgacctgccacagggattctccgccctggagccactggtggatctgcccatcggcatcaacatcacccggtttcagacactgctggccctgcacagatcctacctgacaccaggcgactcctctagcggatggaccgcaggagctgccgcctactatgtgggctatctgcagccccggaccttcctgctgaagtacaacgagaatggcaccatcacagacgcagtggattgcgccctggaccccctgtctgagacaaagtgtacactgaagagctttaccgtggagaagggcatctatcagacaagcaatttcagggtgcagcctaccgagtccatcgtgcgctttcccaatatcacaaacctgtgcccttttggcgaggtgttcaacgccaccagattcgccagcgtgtacgcctggaatcggaagagaatctccaactgcgtggccgactattctgtgctgtacaactccgcctctttcagcacctttaagtgctatggcgtgtctcccacaaagctgaatgatctgtgctttaccaacgtgtacgccgatagcttcgtgatcaggggagacgaagtgagacagatcgcaccaggacagacaggaaagatccgtgactacaattataagctgcctgacgatttcaccggctgcgtgatcgcctggaactccaacaatctggattctaaagtgggcggcaactacaattatctgtacaggctgtttcgcaagtccaatctgaagccattcgagcgggacatctccacagagatctaccaggccggctctaccccctgcaatggcgtggagggctttaactgttatttccctctgcagtcttacggcttccagccaacaaacggcgtgggctatcagccctacagagtggtggtgctgtcctttgagctgctgcacgcaccagcaacagtgtgcggcccaaagaagtctaccaatctggtgaagaacaagtgcgtgaacttcaacttcaacggactgaccggcacaggcgtgctgaccgagagcaataagaagttcctgccttttcagcagttcggcagggacatcgcagataccacagacgccgtgcgcgaccctcagaccctggagatcctggacatcacaccatgcagcttcggcggcgtgtccgtgatcacaccaggcaccaatacatccaaccaggtggccgtgctgtatcaggacgtgaattgtaccgaggtgcccgtggcaatccacgcagatcagctgacccctacatggcgggtgtactctaccggcagcaacgtgttccagacaagagccggatgcctgatcggagcagagcacgtgaacaatagctatgagtgcgacatccctatcggcgccggcatctgtgccagctaccagacccagacaaactccccatctggagcaggctccgtggccagccagtccatcatcgcctataccatgagcctgggcgccgagaacagcgtggcctactccaacaattctatcgccatccctaccaacttcacaatcagcgtgaccacagagatcctgccagtgtctatgaccaagacaagcgtggactgcacaatgtatatctgtggcgatagcaccgagtgctccaacctgctgctgcagtacggctccttttgtacccagctgaatagagccctgacaggcatcgccgtggagcaggataagaacacacaggaggtgttcgcccaggtgaagcagatctacaagaccccacccatcaaggactttggcggcttcaacttcagccagatcctgcctgatccaagcaagccctccaagaggtcttttatcgaggacctgctgttcaacaaggtgaccctggccgatgccggcttcatcaagcagtatggagattgcctgggagacatcgcagcccgcgacctgatctgtgcccagaagtttaatggcctgaccgtgctgcctccactgctgacagatgagatgatcgcccagtacacatctgccctgctggccggcaccatcacaagcggatggaccttcggcgcaggagccgccctgcagatcccttttgccatgcagatggcctataggttcaacggcatcggcgtgacccagaatgtgctgtacgagaaccagaagctgatcgccaatcagtttaacagcgccatcggcaagatccaggactctctgtcctctacagccagcgccctgggcaagctgcaggatgtggtgaatcagaacgcccaggccctgaataccctggtgaagcagctgagctccaacttcggcgccatctctagcgtgctgaatgacatcctgagccggctggacccccctgaggcagaggtgcagatcgacaggctgatcacaggccgcctgcagagcctgcagacctacgtgacacagcagctgatcagggcagcagagatcagagcctccgccaatctggccgccaccaagatgagcgagtgcgtgctgggacagtccaagagggtggacttttgtggcaagggctatcacctgatgtctttcccacagagcgcccctcacggcgtggtgtttctgcacgtgacctacgtgccagcccaggagaagaacttcaccacagcaccagccatctgccacgatggaaaggcacactttcctagggagggcgtgttcgtgtctaacggcacccactggtttgtgacacagcgcaatttctacgagccacagatcatcaccacagacaatacattcgtgagcggcaactgtgatgtggtgatcggcatcgtgaacaataccgtgtatgatccactgcagcccgagctggactcctttaaggaggagctggataagtacttcaagaatcacacctctcccgacgtggatctgggcgacatctccggcatcaatgcctctgtggtgaacatccagaaggagatcgaccggctgaacgaggtggccaagaatctgaacgagagcctgatcgatctgcaggagctgggcaagtatgagcagtacatcaagggctctggcagagagaacctgtatttccagggaggaggaggcagcggatacatccctgaggcaccaagggacggacaggcctacgtgcgcaaggatggcgagtgggtgctgctgtccacctttctgggccatcatcaccaccaccaccaccactga

SEQ ID NO: 4941 - DNA, 3846 bp, Artificial Sequence
  Description of Artificial Sequence: Synthetic polynucleotide
atgggcatcctgccaagcccaggaatgcccgccctgctgtctctggtgagcctgctgtccgtgctgctgatgggatgcgtggcagagacaggcacacagtgcgtgaacctgaccacaaggacccagctgccccctgcctataccaattctttcacacggggcgtgtactatcccgacaaggtgtttagaagctccgtgctgcactccacacaggatctgtttctgcctttcttttctaacgtgacctggttccacgccatccacgtgtccggcaccaatggcacaaagcggttcgacaatcccgtgctgccttttaacgatggcgtgtacttcgccagcaccgagaagtccaacatcatcagaggctggatctttggcaccacactggactctaagacacagagcctgctgatcgtgaacaatgccaccaacgtggtgatcaaggtgtgcgagttccagttttgtaatgatccattcctgggcgtgtactatcacaagaacaataagtcctggatggagtctgagtttcgcgtgtattctagcgccaacaattgcacatttgagtacgtgagccagcccttcctgatggacctggagggcaagcagggcaatttcaagaacctgagggagttcgtgtttaagaatatcgatggctacttcaagatctacagcaagcacaccccaatcaacctggtgcgcgacctgccacagggattctccgccctggagccactggtggatctgcccatcggcatcaacatcacccggtttcagacactgctggccctgcacagatcctacctgacaccaggcgactcctctagcggatggaccgcaggagctgccgcctactatgtgggctatctgcagccccggaccttcctgctgaagtacaacgagaatggcaccatcacagacgcagtggattgcgccctggaccccctgtctgagacaaagtgtacactgaagagctttaccgtggagaagggcatctatcagacaagcaatttcagggtgcagcctaccgagtccatcgtgcgctttcccaatatcacaaacctgtgcccttttggcgaggtgttcaacgccaccagattcgccagcgtgtacgcctggaatcggaagagaatctccaactgcgtggccgactattctgtgctgtacaactccgcctctttcagcacctttaagtgctatggcgtgtctcccacaaagctgaatgatctgtgctttaccaacgtgtacgccgatagcttcgtgatcaggggagacgaagtgagacagatcgcaccaggacagacaggaaagatcgcagactacaattataagctgcctgacgatttcaccggctgcgtgatcgcctggaactccaacaatctggattctaaagtgggcggcaactacaattatctgtacaggctgtttcgcaagtccaatctgaagccattcgagcgggacatctccacagagatctaccaggccggctctaccccctgcaatggcgtggagggctttaactgttatttccctctgcagtcttacggcttccagccaacaaacggcgtgggctatcagccctacagagtggtggtgctgtcctttgagctgctgcacgcaccagcaacagtgtgcggcccaaagaagtctaccaatctggtgaagaacaagtgcgtgaacttcaacttcaacggactgaccggcacaggcgtgctgaccgagagcaataagaagttcctgccttttcagcagttcggcagggacatcgcagataccacagacgccgtgcgcgaccctcagaccctggagatcctggacatcacaccatgcagcttcggcggcgtgtccgtgatcacaccaggcaccaatacatccaaccaggtggccgtgctgtatcaggacgtgaattgtaccgaggtgcccgtggcaatccacgcagatcagctgacccctacatggcgggtgtactctaccggcagcaacgtgttccagacaagagccggatgcctgatcggagcagagcacgtgaacaatagctatgagtgcgacatccctatcggcgccggcatctgtgccagctaccagacccagacaaactccccatctggagcaggctccgtggccagccagtccatcatcgcctataccatgagcctgggcgccgagaacagcgtggcctactccaacaattctatcgccatccctaccaacttcacaatcagcgtgaccacagagatcctgccagtgtctatgaccaagacaagcgtggactgcacaatgtatatctgtggcgatagcaccgagtgctccaacctgctgctgcagtacggctccttttgtacccagctgaatagagccctgacaggcatcgccgtggagcaggataagaacacacaggaggtgttcgcccaggtgaagcagatctacaagaccccacccatcaaggactttggcggcttcaacttcagccagatcctgcctgatccaagcaagccctccaagaggtcttttatcgaggacctgctgttcaacaaggtgaccctggccgatgccggcttcatcaagcagtatggagattgcctgggagacatcgcagcccgcgacctgatctgtgcccagaagtttaatggcctgaccgtgctgcctccactgctgacagatgagatgatcgcccagtacacatctgccctgctggccggcaccatcacaagcggatggaccttcggcgcaggagccgccctgcagatcccttttgccatgcagatggcctataggttcaacggcatcggcgtgacccagaatgtgctgtacgagaaccagaagctgatcgccaatcagtttaacagcgccatcggcaagatccaggactctctgtcctctacagccagcgccctgggcaagctgcaggatgtggtgaatcagaacgcccaggccctgaataccctggtgaagcagctgagctccaacttcggcgccatctctagcgtgctgaatgacatcctgagccgggcggacccccctgaggcagaggtgcagatcgacaggctgatcacaggccgcctgcagagcctgcagacctacgtgacacagcagctgatcagggcagcagagatcagagcctccgccaatctggccgccaccaagatgagcgagtgcgtgctgggacagtccaagagggtggacttttgtggcaagggctatcacctgatgtctttcccacagagcgcccctcacggcgtggtgtttctgcacgtgacctacgtgccagcccaggagaagaacttcaccacagcaccagccatctgccacgatggaaaggcacactttcctagggagggcgtgttcgtgtctaacggcacccactggtttgtgacacagcgcaatttctacgagccacagatcatcaccacagacaatacattcgtgagcggcaactgtgatgtggtgatcggcatcgtgaacaataccgtgtatgatccactgcagcccgagctggactcctttaaggaggagctggataagtacttcaagaatcacacctctcccgacgtggatctgggcgacatctccggcatcaatgcctctgtggtgaacatccagaaggagatcgaccggctgaacgaggtggccaagaatctgaacgagagcctgatcgatctgcaggagctgggcaagtatgagcagtacatcaagggctctggcagagagaacctgtatttccagggaggaggaggcagcggatacatccctgaggcaccaagggacggacaggcctacgtgcgcaaggatggcgagtgggtgctgctgtccacctttctgggccatcatcaccaccaccaccaccactga

SEQ ID NO: 4942 - DNA, 3846 bp, Artificial Sequence
  Description of Artificial Sequence: Synthetic polynucleotide
atgggcatcctgccaagcccaggaatgcccgccctgctgtctctggtgagcctgctgtccgtgctgctgatgggatgcgtggcagagacaggcacacagtgcgtgaacctgaccacaaggacccagctgccccctgcctataccaattctttcacacggggcgtgtactatcccgacaaggtgtttagaagctccgtgctgcactccacacaggatctgtttctgcctttcttttctaacgtgacctggttccacgccatccacgtgtccggcaccaatggcacaaagcggttcgacaatcccgtgctgccttttaacgatggcgtgtacttcgccagcaccgagaagtccaacatcatcagaggctggatctttggcaccacactggactctaagacacagagcctgctgatcgtgaacaatgccaccaacgtggtgatcaaggtgtgcgagttccagttttgtaatgatccattcctgggcgtgtactatcacaagaacaataagtcctggatggagtctgagtttcgcgtgtattctagcgccaacaattgcacatttgagtacgtgagccagcccttcctgatggacctggagggcaagcagggcaatttcaagaacctgagggagttcgtgtttaagaatatcgatggctacttcaagatctacagcaagcacaccccaatcaacctggtgcgcgacctgccacagggattctccgccctggagccactggtggatctgcccatcggcatcaacatcacccggtttcagacactgctggccctgcacagatcctacctgacaccaggcgactcctctagcggatggaccgcaggagctgccgcctactatgtgggctatctgcagccccggaccttcctgctgaagtacaacgagaatggcaccatcacagacgcagtggattgcgccctggaccccctgtctgagacaaagtgtacactgaagagctttaccgtggagaagggcatctatcagacaagcaatttcagggtgcagcctaccgagtccatcgtgcgctttcccaatatcacaaacctgtgcccttttggcgaggtgttcaacgccaccagattcgccagcgtgtacgcctggaatcggaagagaatctccaactgcgtggccgactattctgtgctgtacaactccgcctctttcagcacctttaagtgctatggcgtgtctcccacaaagctgaatgatctgtgctttaccaacgtgtacgccgatagcttcgtgatcaggggagacgaagtgagacagatcgcaccaggacagacaggagcgatcgcagactacaattataagctgcctgacgatttcaccggctgcgtgatcgcctggaactccaacaatctggattctaaagtgggcggcaactacaattatctgtacaggctgtttcgcaagtccaatctgaagccattcgagcgggacatctccacagagatctaccaggccggctctaccccctgcaatggcgtggagggctttaactgttatttccctctgcagtcttacggcttccagccaacaaacggcgtgggctatcagccctacagagtggtggtgctgtcctttgagctgctgcacgcaccagcaacagtgtgcggcccaaagaagtctaccaatctggtgaagaacaagtgcgtgaacttcaacttcaacggactgaccggcacaggcgtgctgaccgagagcaataagaagttcctgccttttcagcagttcggcagggacatcgcagataccacagacgccgtgcgcgaccctcagaccctggagatcctggacatcacaccatgcagcttcggcggcgtgtccgtgatcacaccaggcaccaatacatccaaccaggtggccgtgctgtatcaggacgtgaattgtaccgaggtgcccgtggcaatccacgcagatcagctgacccctacatggcgggtgtactctaccggcagcaacgtgttccagacaagagccggatgcctgatcggagcagagcacgtgaacaatagctatgagtgcgacatccctatcggcgccggcatctgtgccagctaccagacccagacaaactccccatctggagcaggctccgtggccagccagtccatcatcgcctataccatgagcctgggcgccgagaacagcgtggcctactccaacaattctatcgccatccctaccaacttcacaatcagcgtgaccacagagatcctgccagtgtctatgaccaagacaagcgtggactgcacaatgtatatctgtggcgatagcaccgagtgctccaacctgctgctgcagtacggctccttttgtacccagctgaatagagccctgacaggcatcgccgtggagcaggataagaacacacaggaggtgttcgcccaggtgaagcagatctacaagaccccacccatcaaggactttggcggcttcaacttcagccagatcctgcctgatccaagcaagccctccaagaggtcttttatcgaggacctgctgttcaacaaggtgaccctggccgatgccggcttcatcaagcagtatggagattgcctgggagacatcgcagcccgcgacctgatctgtgcccagaagtttaatggcctgaccgtgctgcctccactgctgacagatgagatgatcgcccagtacacatctgccctgctggccggcaccatcacaagcggatggaccttcggcgcaggagccgccctgcagatcccttttgccatgcagatggcctataggttcaacggcatcggcgtgacccagaatgtgctgtacgagaaccagaagctgatcgccaatcagtttaacagcgccatcggcaagatccaggactctctgtcctctacagccagcgccctgggcaagctgcaggatgtggtgaatcagaacgcccaggccctgaataccctggtgaagcagctgagctccaacttcggcgccatctctagcgtgctgaatgacatcctgagccggctggacccccctgaggcagaggtgcagatcgacaggctgatcacaggccgcctgcagagcctgcagacctacgtgacacagcagctgatcagggcagcagagatcagagcctccgccaatctggccgccaccaagatgagcgagtgcgtgctgggacagtccaagagggtggacttttgtggcaagggctatcacctgatgtctttcccacagagcgcccctcacggcgtggtgtttctgcacgtgacctacgtgccagcccaggagaagaacttcaccacagcaccagccatctgccacgatggaaaggcacactttcctagggagggcgtgttcgtgtctaacggcacccactggtttgtgacacagcgcaatttctacgagccacagatcatcaccacagacaatacattcgtgagcggcaactgtgatgtggtgatcggcatcgtgaacaataccgtgtatgatccactgcagcccgagctggactcctttaaggaggagctggataagtacttcaagaatcacacctctcccgacgtggatctgggcgacatctccggcatcaatgcctctgtggtgaacatccagaaggagatcgaccggctgaacgaggtggccaagaatctgaacgagagcctgatcgatctgcaggagctgggcaagtatgagcagtacatcaagggctctggcagagagaacctgtatttccagggaggaggaggcagcggatacatccctgaggcaccaagggacggacaggcctacgtgcgcaaggatggcgagtgggtgctgctgtccacctttctgggccatcatcaccaccaccaccaccactga

SEQ ID NO: 4943 - DNA, 3846 bp, Artificial Sequence
  Description of Artificial Sequence: Synthetic polynucleotide
atgggcatcctgccaagcccaggaatgcccgccctgctgtctctggtgagcctgctgtccgtgctgctgatgggatgcgtggcagagacaggcacacagtgcgtgaacctgaccacaaggacccagctgccccctgcctataccaattctttcacacggggcgtgtactatcccgacaaggtgtttagaagctccgtgctgcactccacacaggatctgtttctgcctttcttttctaacgtgacctggttccacgccatccacgtgtccggcaccaatggcacaaagcggttcgacaatcccgtgctgccttttaacgatggcgtgtacttcgccagcaccgagaagtccaacatcatcagaggctggatctttggcaccacactggactctaagacacagagcctgctgatcgtgaacaatgccaccaacgtggtgatcaaggtgtgcgagttccagttttgtaatgatccattcctgggcgtgtactatcacaagaacaataagtcctggatggagtctgagtttcgcgtgtattctagcgccaacaattgcacatttgagtacgtgagccagcccttcctgatggacctggagggcaagcagggcaatttcaagaacctgagggagttcgtgtttaagaatatcgatggctacttcaagatctacagcaagcacaccccaatcaacctggtgcgcgacctgccacagggattctccgccctggagccactggtggatctgcccatcggcatcaacatcacccggtttcagacactgctggccctgcacagatcctacctgacaccaggcgactcctctagcggatggaccgcaggagctgccgcctactatgtgggctatctgcagccccggaccttcctgctgaagtacaacgagaatggcaccatcacagacgcagtggattgcgccctggaccccctgtctgagacaaagtgtacactgaagagctttaccgtggagaagggcatctatcagacaagcaatttcagggtgcagcctaccgagtccatcgtgcgctttcccaatatcacaaacctgtgcccttttggcgaggtgttcaacgccaccagattcgccagcgtgtacgcctggaatcggaagagaatctccaactgcgtggccgactattctgtgctgtacaactccgcctctttcagcacctttaagtgctatggcgtgtctcccacaaagctgaatgatctgtgctttaccaacgtgtacgccgatagcttcgtgatcaggggagacgaagtgagacagatcgcaccaggacagacaggaaagatcgcagactacaattataagctgcctgacgatttcaccggctgcgtgatcgcctggaactccaacaatctggattctaaagtgggcggcaactacaattatctgtacaggctgtttcgcaagtccaatctgaagccattcgagcgggacatctcccaagagatctaccaggccggctctaccccctgcaatggcgtggagggctttaactgttatttccctctgcagtcttacggcttccagccaacaaacggcgtgggctatcagccctacagagtggtggtgctgtcctttgagctgctgcacgcaccagcaacagtgtgcggcccaaagaagtctaccaatctggtgaagaacaagtgcgtgaacttcaacttcaacggactgaccggcacaggcgtgctgaccgagagcaataagaagttcctgccttttcagcagttcggcagggacatcgcagataccacagacgccgtgcgcgaccctcagaccctggagatcctggacatcacaccatgcagcttcggcggcgtgtccgtgatcacaccaggcaccaatacatccaaccaggtggccgtgctgtatcaggacgtgaattgtaccgaggtgcccgtggcaatccacgcagatcagctgacccctacatggcgggtgtactctaccggcagcaacgtgttccagacaagagccggatgcctgatcggagcagagcacgtgaacaatagctatgagtgcgacatccctatcggcgccggcatctgtgccagctaccagacccagacaaactccccatctggagcaggctccgtggccagccagtccatcatcgcctataccatgagcctgggcgccgagaacagcgtggcctactccaacaattctatcgccatccctaccaacttcacaatcagcgtgaccacagagatcctgccagtgtctatgaccaagacaagcgtggactgcacaatgtatatctgtggcgatagcaccgagtgctccaacctgctgctgcagtacggctccttttgtacccagctgaatagagccctgacaggcatcgccgtggagcaggataagaacacacaggaggtgttcgcccaggtgaagcagatctacaagaccccacccatcaaggactttggcggcttcaacttcagccagatcctgcctgatccaagcaagccctccaagaggtcttttatcgaggacctgctgttcaacaaggtgaccctggccgatgccggcttcatcaagcagtatggagattgcctgggagacatcgcagcccgcgacctgatctgtgcccagaagtttaatggcctgaccgtgctgcctccactgctgacagatgagatgatcgcccagtacacatctgccctgctggccggcaccatcacaagcggatggaccttcggcgcaggagccgccctgcagatcccttttgccatgcagatggcctataggttcaacggcatcggcgtgacccagaatgtgctgtacgagaaccagaagctgatcgccaatcagtttaacagcgccatcggcaagatccaggactctctgtcctctacagccagcgccctgggcaagctgcaggatgtggtgaatcagaacgcccaggccctgaataccctggtgaagcagctgagctccaacttcggcgccatctctagcgtgctgaatgacatcctgagccggctggacccccctgaggcagaggtgcagatcgacaggctgatcacaggccgcctgcagagcctgcagacctacgtgacacagcagctgatcagggcagcagagatcagagcctccgccaatctggccgccaccaagatgagcgagtgcgtgctgggacagtccaagagggtggacttttgtggcaagggctatcacctgatgtctttcccacagagcgcccctcacggcgtggtgtttctgcacgtgacctacgtgccagcccaggagaagaacttcaccacagcaccagccatctgccacgatggaaaggcacactttcctagggagggcgtgttcgtgtctaacggcacccactggtttgtgacacagcgcaatttctacgagccacagatcatcaccacagacaatacattcgtgagcggcaactgtgatgtggtgatcggcatcgtgaacaataccgtgtatgatccactgcagcccgagctggactcctttaaggaggagctggataagtacttcaagaatcacacctctcccgacgtggatctgggcgacatctccggcatcaatgcctctgtggtgaacatccagaaggagatcgaccggctgaacgaggtggccaagaatctgaacgagagcctgatcgatctgcaggagctgggcaagtatgagcagtacatcaagggctctggcagagagaacctgtatttccagggaggaggaggcagcggatacatccctgaggcaccaagggacggacaggcctacgtgcgcaaggatggcgagtgggtgctgctgtccacctttctgggccatcatcaccaccaccaccaccactga

SEQ ID NO: 4944 - DNA, 3846 bp, Artificial Sequence
  Description of Artificial Sequence: Synthetic polynucleotide
atgggcatcctgccaagcccaggaatgcccgccctgctgtctctggtgagcctgctgtccgtgctgctgatgggatgcgtggcagagacaggcacacagtgcgtgaacctgaccacaaggacccagctgccccctgcctataccaattctttcacacggggcgtgtactatcccgacaaggtgtttagaagctccgtgctgcactccacacaggatctgtttctgcctttcttttctaacgtgacctggttccacgccatccacgtgtccggcaccaatggcacaaagcggttcgacaatcccgtgctgccttttaacgatggcgtgtacttcgccagcaccgagaagtccaacatcatcagaggctggatctttggcaccacactggactctaagacacagagcctgctgatcgtgaacaatgccaccaacgtggtgatcaaggtgtgcgagttccagttttgtaatgatccattcctgggcgtgtactatcacaagaacaataagtcctggatggagtctgagtttcgcgtgtattctagcgccaacaattgcacatttgagtacgtgagccagcccttcctgatggacctggagggcaagcagggcaatttcaagaacctgagggagttcgtgtttaagaatatcgatggctacttcaagatctacagcaagcacaccccaatcaacctggtgcgcgacctgccacagggattctccgccctggagccactggtggatctgcccatcggcatcaacatcacccggtttcagacactgctggccctgcacagatcctacctgacaccaggcgactcctctagcggatggaccgcaggagctgccgcctactatgtgggctatctgcagccccggaccttcctgctgaagtacaacgagaatggcaccatcacagacgcagtggattgcgccctggaccccctgtctgagacaaagtgtacactgaagagctttaccgtggagaagggcatctatcagacaagcaatttcagggtgcagcctaccgagtccatcgtgcgctttcccaatatcacaaacctgtgcccttttggcgaggtgttcaacgccaccagattcgccagcgtgtacgcctggaatcggaagagaatctccaactgcgtggccgactattctgtgctgtacaactccgcctctttcagcacctttaagtgctatggcgtgtctcccacaaagctgaatgatctgtgctttaccaacgtgtacgccgatagcttcgtgatcaggggagacgaagtgagacagatcgcaccaggacagacaggaaagatcgcagactacaattataagctgcctgacgatttcaccggctgcgtgatcgcctggaactcccataatctggattctaaagtgggcggcaactacaattatctgtacaggctgtttcgcaagtccaatctgaagccattcgagcgggacatctccacagagatctaccaggccggctctaccccctgcaatggcgtggagggctttaactgttatttccctctgcagtcttacggcttccagccaacaaacggcgtgggctatcagccctacagagtggtggtgctgtcctttgagctgctgcacgcaccagcaacagtgtgcggcccaaagaagtctaccaatctggtgaagaacaagtgcgtgaacttcaacttcaacggactgaccggcacaggcgtgctgaccgagagcaataagaagttcctgccttttcagcagttcggcagggacatcgcagataccacagacgccgtgcgcgaccctcagaccctggagatcctggacatcacaccatgcagcttcggcggcgtgtccgtgatcacaccaggcaccaatacatccaaccaggtggccgtgctgtatcaggacgtgaattgtaccgaggtgcccgtggcaatccacgcagatcagctgacccctacatggcgggtgtactctaccggcagcaacgtgttccagacaagagccggatgcctgatcggagcagagcacgtgaacaatagctatgagtgcgacatccctatcggcgccggcatctgtgccagctaccagacccagacaaactccccatctggagcaggctccgtggccagccagtccatcatcgcctataccatgagcctgggcgccgagaacagcgtggcctactccaacaattctatcgccatccctaccaacttcacaatcagcgtgaccacagagatcctgccagtgtctatgaccaagacaagcgtggactgcacaatgtatatctgtggcgatagcaccgagtgctccaacctgctgctgcagtacggctccttttgtacccagctgaatagagccctgacaggcatcgccgtggagcaggataagaacacacaggaggtgttcgcccaggtgaagcagatctacaagaccccacccatcaaggactttggcggcttcaacttcagccagatcctgcctgatccaagcaagccctccaagaggtcttttatcgaggacctgctgttcaacaaggtgaccctggccgatgccggcttcatcaagcagtatggagattgcctgggagacatcgcagcccgcgacctgatctgtgcccagaagtttaatggcctgaccgtgctgcctccactgctgacagatgagatgatcgcccagtacacatctgccctgctggccggcaccatcacaagcggatggaccttcggcgcaggagccgccctgcagatcccttttgccatgcagatggcctataggttcaacggcatcggcgtgacccagaatgtgctgtacgagaaccagaagctgatcgccaatcagtttaacagcgccatcggcaagatccaggactctctgtcctctacagccagcgccctgggcaagctgcaggatgtggtgaatcagaacgcccaggccctgaataccctggtgaagcagctgagctccaacttcggcgccatctctagcgtgctgaatgacatcctgagccggctggacccccctgaggcagaggtgcagatcgacaggctgatcacaggccgcctgcagagcctgcagacctacgtgacacagcagctgatcagggcagcagagatcagagcctccgccaatctggccgccaccaagatgagcgagtgcgtgctgggacagtccaagagggtggacttttgtggcaagggctatcacctgatgtctttcccacagagcgcccctcacggcgtggtgtttctgcacgtgacctacgtgccagcccaggagaagaacttcaccacagcaccagccatctgccacgatggaaaggcacactttcctagggagggcgtgttcgtgtctaacggcacccactggtttgtgacacagcgcaatttctacgagccacagatcatcaccacagacaatacattcgtgagcggcaactgtgatgtggtgatcggcatcgtgaacaataccgtgtatgatccactgcagcccgagctggactcctttaaggaggagctggataagtacttcaagaatcacacctctcccgacgtggatctgggcgacatctccggcatcaatgcctctgtggtgaacatccagaaggagatcgaccggctgaacgaggtggccaagaatctgaacgagagcctgatcgatctgcaggagctgggcaagtatgagcagtacatcaagggctctggcagagagaacctgtatttccagggaggaggaggcagcggatacatccctgaggcaccaagggacggacaggcctacgtgcgcaaggatggcgagtgggtgctgctgtccacctttctgggccatcatcaccaccaccaccaccactga

SEQ ID NO: 4945 - DNA, 3846 bp, Artificial Sequence
  Description of Artificial Sequence: Synthetic polynucleotide
atgggcatcctgccaagcccaggaatgcccgccctgctgtctctggtgagcctgctgtccgtgctgctgatgggatgcgtggcagagacaggcacacagtgcgtgaacctgaccacaaggacccagctgccccctgcctataccaattctttcacacggggcgtgtactatcccgacaaggtgtttagaagctccgtgctgcactccacacaggatctgtttctgcctttcttttctaacgtgacctggttccacgccatccacgtgtccggcaccaatggcacaaagcggttcgacaatcccgtgctgccttttaacgatggcgtgtacttcgccagcaccgagaagtccaacatcatcagaggctggatctttggcaccacactggactctaagacacagagcctgctgatcgtgaacaatgccaccaacgtggtgatcaaggtgtgcgagttccagttttgtaatgatccattcctgggcgtgtactatcacaagaacaataagtcctggatggagtctgagtttcgcgtgtattctagcgccaacaattgcacatttgagtacgtgagccagcccttcctgatggacctggagggcaagcagggcaatttcaagaacctgagggagttcgtgtttaagaatatcgatggctacttcaagatctacagcaagcacaccccaatcaacctggtgcgcgacctgccacagggattctccgccctggagccactggtggatctgcccatcggcatcaacatcacccggtttcagacactgctggccctgcacagatcctacctgacaccaggcgactcctctagcggatggaccgcaggagctgccgcctactatgtgggctatctgcagccccggaccttcctgctgaagtacaacgagaatggcaccatcacagacgcagtggattgcgccctggaccccctgtctgagacaaagtgtacactgaagagctttaccgtggagaagggcatctatcagacaagcaatttcagggtgcagcctaccgagtccatcgtgcgctttcccaatatcacaaacctgtgcccttttggcgaggtgttcaacgccaccagattcgccagcgtgtacgcctggaatcggaagagaatctccaactgcgtggccgactattctgtgctgtacaactccgcctctttcagcacctttaagtgctatggcgtgtctcccacaaagctgaatgatctgtgctttaccaacgtgtacgccgatagcttcgtgatcaggggagacgaagtgagacagatcgcaccaggacagacaggaaagatcgcagactacaattataagctgcctgacgatttcaccggctgcgtgatcgcctggaactccaacaatctggattctaaagaaggcggcaactacaattatctgtacaggctgtttcgcaagtccaatctgaagccattcgagcgggacatctccacagagatctaccaggccggctctaccccctgcaatggcgtggagggctttaactgttatttccctctgcagtcttacggcttccagccaacaaacggcgtgggctatcagccctacagagtggtggtgctgtcctttgagctgctgcacgcaccagcaacagtgtgcggcccaaagaagtctaccaatctggtgaagaacaagtgcgtgaacttcaacttcaacggactgaccggcacaggcgtgctgaccgagagcaataagaagttcctgccttttcagcagttcggcagggacatcgcagataccacagacgccgtgcgcgaccctcagaccctggagatcctggacatcacaccatgcagcttcggcggcgtgtccgtgatcacaccaggcaccaatacatccaaccaggtggccgtgctgtatcaggacgtgaattgtaccgaggtgcccgtggcaatccacgcagatcagctgacccctacatggcgggtgtactctaccggcagcaacgtgttccagacaagagccggatgcctgatcggagcagagcacgtgaacaatagctatgagtgcgacatccctatcggcgccggcatctgtgccagctaccagacccagacaaactccccatctggagcaggctccgtggccagccagtccatcatcgcctataccatgagcctgggcgccgagaacagcgtggcctactccaacaattctatcgccatccctaccaacttcacaatcagcgtgaccacagagatcctgccagtgtctatgaccaagacaagcgtggactgcacaatgtatatctgtggcgatagcaccgagtgctccaacctgctgctgcagtacggctccttttgtacccagctgaatagagccctgacaggcatcgccgtggagcaggataagaacacacaggaggtgttcgcccaggtgaagcagatctacaagaccccacccatcaaggactttggcggcttcaacttcagccagatcctgcctgatccaagcaagccctccaagaggtcttttatcgaggacctgctgttcaacaaggtgaccctggccgatgccggcttcatcaagcagtatggagattgcctgggagacatcgcagcccgcgacctgatctgtgcccagaagtttaatggcctgaccgtgctgcctccactgctgacagatgagatgatcgcccagtacacatctgccctgctggccggcaccatcacaagcggatggaccttcggcgcaggagccgccctgcagatcccttttgccatgcagatggcctataggttcaacggcatcggcgtgacccagaatgtgctgtacgagaaccagaagctgatcgccaatcagtttaacagcgccatcggcaagatccaggactctctgtcctctacagccagcgccctgggcaagctgcaggatgtggtgaatcagaacgcccaggccctgaataccctggtgaagcagctgagctccaacttcggcgccatctctagcgtgctgaatgacatcctgagccggctggacccccctgaggcagaggtgcagatcgacaggctgatcacaggccgcctgcagagcctgcagacctacgtgacacagcagctgatcagggcagcagagatcagagcctccgccaatctggccgccaccaagatgagcgagtgcgtgctgggacagtccaagagggtggacttttgtggcaagggctatcacctgatgtctttcccacagagcgcccctcacggcgtggtgtttctgcacgtgacctacgtgccagcccaggagaagaacttcaccacagcaccagccatctgccacgatggaaaggcacactttcctagggagggcgtgttcgtgtctaacggcacccactggtttgtgacacagcgcaatttctacgagccacagatcatcaccacagacaatacattcgtgagcggcaactgtgatgtggtgatcggcatcgtgaacaataccgtgtatgatccactgcagcccgagctggactcctttaaggaggagctggataagtacttcaagaatcacacctctcccgacgtggatctgggcgacatctccggcatcaatgcctctgtggtgaacatccagaaggagatcgaccggctgaacgaggtggccaagaatctgaacgagagcctgatcgatctgcaggagctgggcaagtatgagcagtacatcaagggctctggcagagagaacctgtatttccagggaggaggaggcagcggatacatccctgaggcaccaagggacggacaggcctacgtgcgcaaggatggcgagtgggtgctgctgtccacctttctgggccatcatcaccaccaccaccaccactga

SEQ ID NO: 4946 - DNA, 3846 bp, Artificial Sequence
  Description of Artificial Sequence: Synthetic polynucleotide
atgggcatcctgccaagcccaggaatgcccgccctgctgtctctggtgagcctgctgtccgtgctgctgatgggatgcgtggcagagacaggcacacagtgcgtgaacctgaccacaaggacccagctgccccctgcctataccaattctttcacacggggcgtgtactatcccgacaaggtgtttagaagctccgtgctgcactccacacaggatctgtttctgcctttcttttctaacgtgacctggttccacgccatccacgtgtccggcaccaatggcacaaagcggttcgacaatcccgtgctgccttttaacgatggcgtgtacttcgccagcaccgagaagtccaacatcatcagaggctggatctttggcaccacactggactctaagacacagagcctgctgatcgtgaacaatgccaccaacgtggtgatcaaggtgtgcgagttccagttttgtaatgatccattcctgggcgtgtactatcacaagaacaataagtcctggatggagtctgagtttcgcgtgtattctagcgccaacaattgcacatttgagtacgtgagccagcccttcctgatggacctggagggcaagcagggcaatttcaagaacctgagggagttcgtgtttaagaatatcgatggctacttcaagatctacagcaagcacaccccaatcaacctggtgcgcgacctgccacagggattctccgccctggagccactggtggatctgcccatcggcatcaacatcacccggtttcagacactgctggccctgcacagatcctacctgacaccaggcgactcctctagcggatggaccgcaggagctgccgcctactatgtgggctatctgcagccccggaccttcctgctgaagtacaacgagaatggcaccatcacagacgcagtggattgcgccctggaccccctgtctgagacaaagtgtacactgaagagctttaccgtggagaagggcatctatcagacaagcaatttcagggtgcagcctaccgagtccatcgtgcgctttcccaatatcacaaacctgtgcccttttggcgaggtgttcaacgccaccagattcgccagcgtgtacgcctggaatcggaagagaatctccaactgcgtggccgactattctgtgctgtacaactccgcctctttcagcacctttaagtgctatggcgtgtctcccacaaagctgaatgatctgtgctttaccaacgtgtacgccgatagcttcgtgatcaggggagacgaagtgagacagatcgcaccaggacagacaggaaagatcgcagactacaattataagctgcctgacgatttcaccggctgcgtgatcgcctggaactccaacaatctggattctaaagtgggcggcaactacaattatctgtacaggctgtttcgcaagtccaatctgaagccattcgagcgggacatctccacagagatctaccaggccggctctaccccctgcaatggcgtggagggctttaactgttatttccctctgcagtcttacggcttccagccaacaaacggcgtgggctatcagccctacagagtggtggtgctgtcctttgagctgctgcacgcaccagcaacagtgtgcggcccaaagaagtctaccaatctggtgaagaacaagtgcgtgaacttcaacttcaacggactgaccggcacaggcgtgctgaccgagagcaataagaagttcctgccttttcagcagttcggcagggacatcgcagataccacagacgccgtgcgcgaccctcagaccctggagatcctggacatcacaccatgcagcttcggcggcgtgtccgtgatcacaccaggcaccaatacatccaaccaggtggccgtgctgtatcaggacgtgaattgtaccgaggtgcccgtggcaatccacgcagatcagctgacccctacatggcgggtgtactctaccggcagcaacgtgttccagacaagagccggatgcctgatcggagcagagcacgtgaacaatagctatgagtgcgacatccctatcggcgccggcatctgtgccagctaccagacccagacaaactccccatctggagcaggctccgtggccagccagtccatcatcgcctatacctgtagcctgggcgccgagaacagcgtggcctactccaacaattctatcgccatccctaccaacttcacaatcagcgtgaccacagagatcctgccagtgtctatgaccaagacaagcgtggactgcacaatgtatatctgtggcgatagcaccgagtgctccaacctgctgctgcagtacggctccttttgtacccagctgaatagagccctgacaggcatcgccgtggagcaggataagaacacacaggaggtgttcgcccaggtgaagcagatctacaagaccccacccatcaaggactttggcggcttcaacttcagccagatcctgcctgatccaagcaagccctccaagaggtcttttatcgaggacctgctgttcaacaaggtgaccctggccgatgccggcttcatcaagcagtatggagattgcctgggagacatcgcagcccgcgacctgatctgtgcccagaagtttaatggcctgaccgtgctgcctccactgctgacagatgagatgatcgcccagtacacatctgccctgctggccggcaccatcacaagcggatggaccttcggcgcaggagccgccctgcagatcccttttgccatgcagatggcctataggttcaacggcatcggcgtgacccagaatgtgctgtacgagaaccagaagctgatcgccaatcagtttaacagcgccatcggcaagatccaggactctctgtcctctacagccagcgccctgggcaagctgcaggatgtggtgaatcagaacgcccaggccctgaataccctggtgaagcagctgagctccaacttcggcgccatctctagcgtgctgaatgacatcctgagccggctggacccccctgaggcagaggtgcagatcgacaggctgatcacaggccgcctgcagagcctgcagacctacgtgacacagcagctgatcagggcagcagagatcagagcctccgccaatctggccgccaccaagatgagcgagtgcgtgctgggacagtccaagagggtggacttttgtggcaagggctatcacctgatgtctttcccacagagcgcccctcacggcgtggtgtttctgcacgtgacctacgtgccagcccaggagaagaacttcaccacagcaccagccatctgccacgatggaaaggcacactttcctagggagggcgtgttcgtgtctaacggcacccactggtttgtgacacagcgcaatttctacgagccacagatcatcaccacagacaatacattcgtgagcggcaactgtgatgtggtgatcggcatcgtgaacaataccgtgtatgatccactgcagcccgagctggactcctttaaggaggagctggataagtacttcaagaatcacacctctcccgacgtggatctgggcgacatctccggcatcaatgcctctgtggtgaacatccagaaggagatcgaccggctgaacgaggtggccaagaatctgaacgagagcctgatcgatctgcaggagctgggcaagtatgagcagtacatcaagggctctggcagagagaacctgtatttccagggaggaggaggcagcggatacatccctgaggcaccaagggacggacaggcctacgtgcgcaaggatggcgagtgggtgctgctgtccacctttctgggccatcatcaccaccaccaccaccactga

SEQ ID NO: 4947 - DNA, 3846 bp, Artificial Sequence
  Description of Artificial Sequence: Synthetic polynucleotide
atgggcatcctgccaagcccaggaatgcccgccctgctgtctctggtgagcctgctgtccgtgctgctgatgggatgcgtggcagagacaggcacacagtgcgtgaacctgaccacaaggacccagctgccccctgcctataccaattctttcacacggggcgtgtactatcccgacaaggtgtttagaagctccgtgctgcactccacacaggatctgtttctgcctttcttttctaacgtgacctggttccacgccatccacgtgtccggcaccaatggcacaaagcggttcgacaatcccgtgctgccttttaacgatggcgtgtacttcgccagcaccgagaagtccaacatcatcagaggctggatctttggcaccacactggactctaagacacagagcctgctgatcgtgaacaatgccaccaacgtggtgatcaaggtgtgcgagttccagttttgtaatgatccattcctgggcgtgtactatcacaagaacaataagtcctggatggagtctgagtttcgcgtgtattctagcgccaacaattgcacatttgagtacgtgagccagcccttcctgatggacctggagggcaagcagggcaatttcaagaacctgagggagttcgtgtttaagaatatcgatggctacttcaagatctacagcaagcacaccccaatcaacctggtgcgcgacctgccacagggattctccgccctggagccactggtggatctgcccatcggcatcaacatcacccggtttcagacactgctggccctgcacagatcctacctgacaccaggcgactcctctagcggatggaccgcaggagctgccgcctactatgtgggctatctgcagccccggaccttcctgctgaagtacaacgagaatggcaccatcacagacgcagtggattgcgccctggaccccctgtctgagacaaagtgtacactgaagagctttaccgtggagaagggcatctatcagacaagcaatttcagggtgcagcctaccgagtccatcgtgcgctttcccaatatcacaaacctgtgcccttttggcgaggtgttcaacgccaccagattcgccagcgtgtacgcctggaatcggaagagaatctccaactgcgtggccgactattctgtgctgtacaactccgcctctttcagcacctttaagtgctatggcgtgtctcccacaaagctgaatgatcaatgctttaccaacgtgtacgccgatagcttcgtgatcaggggagacgaagtgagacagatcgcaccaggacagacaggaaagatcgcagactacaattataagctgcctgacgatttcaccggctgcgtgatcgcctggaactccaacaatctggattctaaagtgggcggcaactacaattatctgtacaggctgtttcgcaagtccaatctgaagccattcgagcgggacatctccacagagatctaccaggccggctctaccccctgcaatggcgtggagggctttaactgttatttccctctgcagtcttacggcttccagccaacaaacggcgtgggctatcagccctacagagtggtggtgctgtcctttgagctgctgcacgcaccagcaacagtgtgcggcccaaagaagtctaccaatctggtgaagaacaagtgcgtgaacttcaacttcaacggactgaccggcacaggcgtgctgaccgagagcaataagaagttcctgccttttcagcagttcggcagggacatcgcagataccacagacgccgtgcgcgaccctcagaccctggagatcctggacatcacaccatgcagcttcggcggcgtgtccgtgatcacaccaggcaccaatacatccaaccaggtggccgtgctgtatcaggacgtgaattgtaccgaggtgcccgtggcaatccacgcagatcagctgacccctacatggcgggtgtactctaccggcagcaacgtgttccagacaagagccggatgcctgatcggagcagagcacgtgaacaatagctatgagtgcgacatccctatcggcgccggcatctgtgccagctaccagacccagacaaactccccatctggagcaggctccgtggccagccagtccatcatcgcctataccatgagcctgggcgccgagaacagcgtggcctactccaacaattctatcgccatccctaccaacttcacaatcagcgtgaccacagagatcctgccagtgtctatgaccaagacaagcgtggactgcacaatgtatatctgtggcgatagcaccgagtgctccaacctgctgctgcagtacggctccttttgtacccagctgaatagagccctgacaggcatcgccgtggagcaggataagaacacacaggaggtgttcgcccaggtgaagcagatctacaagaccccacccatcaaggactttggcggcttcaacttcagccagatcctgcctgatccaagcaagccctccaagaggtcttttatcgaggacctgctgttcaacaaggtgaccctggccgatgccggcttcatcaagcagtatggagattgcctgggagacatcgcagcccgcgacctgatctgtgcccagaagtttaatggcctgaccgtgctgcctccactgctgacagatgagatgatcgcccagtacacatctgccctgctggccggcaccatcacaagcggatggaccttcggcgcaggagccgccctgcagatcccttttgccatgcagatggcctataggttcaacggcatcggcgtgacccagaatgtgctgtacgagaaccagaagctgatcgccaatcagtttaacagcgccatcggcaagatccaggactctctgtcctctacagccagcgccctgggcaagctgcaggatgtggtgaatcagaacgcccaggccctgaataccctggtgaagcagctgagctccaacttcggcgccatctctagcgtgctgaatgacatcctgagccggctggacccccctgaggcagaggtgcagatcgacaggctgatcacaggccgcctgcagagcctgcagacctacgtgacacagcagctgatcagggcagcagagatcagagcctccgccaatctggccgccaccaagatgagcgagtgcgtgctgggacagtccaagagggtggacttttgtggcaagggctatcacctgatgtctttcccacagagcgcccctcacggcgtggtgtttctgcacgtgacctacgtgccagcccaggagaagaacttcaccacagcaccagccatctgccacgatggaaaggcacactttcctagggagggcgtgttcgtgtctaacggcacccactggtttgtgacacagcgcaatttctacgagccacagatcatcaccacagacaatacattcgtgagcggcaactgtgatgtggtgatcggcatcgtgaacaataccgtgtatgatccactgcagcccgagctggactcctttaaggaggagctggataagtacttcaagaatcacacctctcccgacgtggatctgggcgacatctccggcatcaatgcctctgtggtgaacatccagaaggagatcgaccggctgaacgaggtggccaagaatctgaacgagagcctgatcgatctgcaggagctgggcaagtatgagcagtacatcaagggctctggcagagagaacctgtatttccagggaggaggaggcagcggatacatccctgaggcaccaagggacggacaggcctacgtgcgcaaggatggcgagtgggtgctgctgtccacctttctgggccatcatcaccaccaccaccaccactga

SEQ ID NO: 4948 - DNA, 3846 bp, Artificial Sequence
  Description of Artificial Sequence: Synthetic polynucleotide
atgggcatcctgccaagcccaggaatgcccgccctgctgtctctggtgagcctgctgtccgtgctgctgatgggatgcgtggcagagacaggcacacagtgcgtgaacctgaccacaaggacccagctgccccctgcctataccaattctttcacacggggcgtgtactatcccgacaaggtgtttagaagctccgtgctgcactccacacaggatctgtttctgcctttcttttctaacgtgacctggttccacgccatccacgtgtccggcaccaatggcacaaagcggttcgacaatcccgtgctgccttttaacgatggcgtgtacttcgccagcaccgagaagtccaacatcatcagaggctggatctttggcaccacactggactctaagacacagagcctgctgatcgtgaacaatgccaccaacgtggtgatcaaggtgtgcgagttccagttttgtaatgatccattcctgggcgtgtactatcacaagaacaataagtcctggatggagtctgagtttcgcgtgtattctagcgccaacaattgcacatttgagtacgtgagccagcccttcctgatggacctggagggcaagcagggcaatttcaagaacctgagggagttcgtgtttaagaatatcgatggctacttcaagatctacagcaagcacaccccaatcaacctggtgcgcgacctgccacagggattctccgccctggagccactggtggatctgcccatcggcatcaacatcacccggtttcagacactgctggccctgcacagatcctacctgacaccaggcgactcctctagcggatggaccgcaggagctgccgcctactatgtgggctatctgcagccccggaccttcctgctgaagtacaacgagaatggcaccatcacagacgcagtggattgcgccctggaccccctgtctgagacaaagtgtacactgaagagctttaccgtggagaagggcatctatcagacaagcaatttcagggtgcagcctaccgagtccatcgtgcgctttcccaatatcacaaacctgtgcccttttggcgaggtgttcaacgccaccagattcgccagcgtgtacgcctggaatcggaagagaatctccaactgcgtggccgactattctgtgctgtacaactccgcctctttcagcacctttaagtgctatggcgtgtctcccacaaagctgaatgatctgtgctttaccaacgtgtacgccgatagcttcgtgatcaggggagacgaagtgagacagatcgcaccaggacagacaggaaagatcgcagactacaattataagctgcctgacgatttcaccggctgcgtgatcgcctggaactccaacaatctggattctaaagtgggcggcaactacaattatctgtacaggctgtttcgcaagtccaatctgaagccattcgagcgggacatctccacagagatctaccaggccggctctaccccctgcaatggcgtggagggctttaactgttatttccctctgcagtcttacggcttccagccaacaaacggcgtgggctatcagccctacagagtggtggtgctgtcctttgagctggctcacgcaccagcaacagtgtgcggcccaaagaagtctaccaatctggtgaagaacaagtgcgtgaacttcaacttcaacggactgaccggcacaggcgtgctgaccgagagcaataagaagttcctgccttttcagcagttcggcagggacatcgcagataccacagacgccgtgcgcgaccctcagaccctggagatcctggacatcacaccatgcagcttcggcggcgtgtccgtgatcacaccaggcaccaatacatccaaccaggtggccgtgctgtatcaggacgtgaattgtaccgaggtgcccgtggcaatccacgcagatcagctgacccctacatggcgggtgtactctaccggcagcaacgtgttccagacaagagccggatgcctgatcggagcagagcacgtgaacaatagctatgagtgcgacatccctatcggcgccggcatctgtgccagctaccagacccagacaaactccccatctggagcaggctccgtggccagccagtccatcatcgcctataccatgagcctgggcgccgagaacagcgtggcctactccaacaattctatcgccatccctaccaacttcacaatcagcgtgaccacagagatcctgccagtgtctatgaccaagacaagcgtggactgcacaatgtatatctgtggcgatagcaccgagtgctccaacctgctgctgcagtacggctccttttgtacccagctgaatagagccctgacaggcatcgccgtggagcaggataagaacacacaggaggtgttcgcccaggtgaagcagatctacaagaccccacccatcaaggactttggcggcttcaacttcagccagatcctgcctgatccaagcaagccctccaagaggtcttttatcgaggacctgctgttcaacaaggtgaccctggccgatgccggcttcatcaagcagtatggagattgcctgggagacatcgcagcccgcgacctgatctgtgcccagaagtttaatggcctgaccgtgctgcctccactgctgacagatgagatgatcgcccagtacacatctgccctgctggccggcaccatcacaagcggatggaccttcggcgcaggagccgccctgcagatcccttttgccatgcagatggcctataggttcaacggcatcggcgtgacccagaatgtgctgtacgagaaccagaagctgatcgccaatcagtttaacagcgccatcggcaagatccaggactctctgtcctctacagccagcgccctgggcaagctgcaggatgtggtgaatcagaacgcccaggccctgaataccctggtgaagcagctgagctccaacttcggcgccatctctagcgtgctgaatgacatcctgagccggctggacccccctgaggcagaggtgcagatcgacaggctgatcacaggccgcctgcagagcctgcagacctacgtgacacagcagctgatcagggcagcagagatcagagcctccgccaatctggccgccaccaagatgagcgagtgcgtgctgggacagtccaagagggtggacttttgtggcaagggctatcacctgatgtctttcccacagagcgcccctcacggcgtggtgtttctgcacgtgacctacgtgccagcccaggagaagaacttcaccacagcaccagccatctgccacgatggaaaggcacactttcctagggagggcgtgttcgtgtctaacggcacccactggtttgtgacacagcgcaatttctacgagccacagatcatcaccacagacaatacattcgtgagcggcaactgtgatgtggtgatcggcatcgtgaacaataccgtgtatgatccactgcagcccgagctggactcctttaaggaggagctggataagtacttcaagaatcacacctctcccgacgtggatctgggcgacatctccggcatcaatgcctctgtggtgaacatccagaaggagatcgaccggctgaacgaggtggccaagaatctgaacgagagcctgatcgatctgcaggagctgggcaagtatgagcagtacatcaagggctctggcagagagaacctgtatttccagggaggaggaggcagcggatacatccctgaggcaccaagggacggacaggcctacgtgcgcaaggatggcgagtgggtgctgctgtccacctttctgggccatcatcaccaccaccaccaccactga

SEQ ID NO: 4949 - DNA, 3846 bp, Artificial Sequence
  Description of Artificial Sequence: Synthetic polynucleotide
atgggcatcctgccaagcccaggaatgcccgccctgctgtctctggtgagcctgctgtccgtgctgctgatgggatgcgtggcagagacaggcacacagtgcgtgaacctgaccacaaggacccagctgccccctgcctataccaattctttcacacggggcgtgtactatcccgacaaggtgtttagaagctccgtgctgcactccacacaggatctgtttctgcctttcttttctaacgtgacctggttccacgccatccacgtgtccggcaccaatggcacaaagcggttcgacaatcccgtgctgccttttaacgatggcgtgtacttcgccagcaccgagaagtccaacatcatcagaggctggatctttggcaccacactggactctaagacacagagcctgctgatcgtgaacaatgccaccaacgtggtgatcaaggtgtgcgagttccagttttgtaatgatccattcctgggcgtgtactatcacaagaacaataagtcctggatggagtctgagtttcgcgtgtattctagcgccaacaattgcacatttgagtacgtgagccagcccttcctgatggacctggagggcaagcagggcaatttcaagaacctgagggagttcgtgtttaagaatatcgatggctacttcaagatctacagcaagcacaccccaatcaacctggtgcgcgacctgccacagggattctccgccctggagccactggtggatctgcccatcggcatcaacatcacccggtttcagacactgctggccctgcacagatcctacctgacaccaggcgactcctctagcggatggaccgcaggagctgccgcctactatgtgggctatctgcagccccggaccttcctgctgaagtacaacgagaatggcaccatcacagacgcagtggattgcgccctggaccccctgtctgagacaaagtgtacactgaagagctttaccgtggagaagggcatctatcagacaagcaatttcagggtgcagcctaccgagtccatcgtgcgctttcccaatatcacaaacctgtgcccttttggcgaggtgttcaacgccaccagattcgccagcgtgtacgcctggaatcggaagagaatctccaactgcgtggccgactattctcgactgtacaactccgcctctttcagcacctttaagtgctatggcgtgtctcccacaaagctgaatgatctgtgctttaccaacgtgtacgccgatagcttcgtgatcaggggagacgaagtgagacagatcgcaccaggacagacaggaaagatcgcagactacaattataagctgcctgacgatttcaccggctgcgtgatcgcctggaactccaacaatctggattctaaagtgggcggcaactacaattatctgtacaggctgtttcgcaagtccaatctgaagccattcgagcgggacatctccacagagatctaccaggccggctctaccccctgcaatggcgtggagggctttaactgttatttccctctgcagtcttacggcttccagccaacaaacggcgtgggctatcagccctacagagtggtggtgctgtcctttgagctgctgcacgcaccagcaacagtgtgcggcccaaagaagtctaccaatctggtgaagaacaagtgcgtgaacttcaacttcaacggactgaccggcacaggcgtgctgaccgagagcaataagaagttcctgccttttcagcagttcggcagggacatcgcagataccacagacgccgtgcgcgaccctcagaccctggagatcctggacatcacaccatgcagcttcggcggcgtgtccgtgatcacaccaggcaccaatacatccaaccaggtggccgtgctgtatcaggacgtgaattgtaccgaggtgcccgtggcaatccacgcagatcagctgacccctacatggcgggtgtactctaccggcagcaacgtgttccagacaagagccggatgcctgatcggagcagagcacgtgaacaatagctatgagtgcgacatccctatcggcgccggcatctgtgccagctaccagacccagacaaactccccatctggagcaggctccgtggccagccagtccatcatcgcctataccatgagcctgggcgccgagaacagcgtggcctactccaacaattctatcgccatccctaccaacttcacaatcagcgtgaccacagagatcctgccagtgtctatgaccaagacaagcgtggactgcacaatgtatatctgtggcgatagcaccgagtgctccaacctgctgctgcagtacggctccttttgtacccagctgaatagagccctgacaggcatcgccgtggagcaggataagaacacacaggaggtgttcgcccaggtgaagcagatctacaagaccccacccatcaaggactttggcggcttcaacttcagccagatcctgcctgatccaagcaagccctccaagaggtcttttatcgaggacctgctgttcaacaaggtgaccctggccgatgccggcttcatcaagcagtatggagattgcctgggagacatcgcagcccgcgacctgatctgtgcccagaagtttaatggcctgaccgtgctgcctccactgctgacagatgagatgatcgcccagtacacatctgccctgctggccggcaccatcacaagcggatggaccttcggcgcaggagccgccctgcagatcccttttgccatgcagatggcctataggttcaacggcatcggcgtgacccagaatgtgctgtacgagaaccagaagctgatcgccaatcagtttaacagcgccatcggcaagatccaggactctctgtcctctacagccagcgccctgggcaagctgcaggatgtggtgaatcagaacgcccaggccctgaataccctggtgaagcagctgagctccaacttcggcgccatctctagcgtgctgaatgacatcctgagccggctggacccccctgaggcagaggtgcagatcgacaggctgatcacaggccgcctgcagagcctgcagacctacgtgacacagcagctgatcagggcagcagagatcagagcctccgccaatctggccgccaccaagatgagcgagtgcgtgctgggacagtccaagagggtggacttttgtggcaagggctatcacctgatgtctttcccacagagcgcccctcacggcgtggtgtttctgcacgtgacctacgtgccagcccaggagaagaacttcaccacagcaccagccatctgccacgatggaaaggcacactttcctagggagggcgtgttcgtgtctaacggcacccactggtttgtgacacagcgcaatttctacgagccacagatcatcaccacagacaatacattcgtgagcggcaactgtgatgtggtgatcggcatcgtgaacaataccgtgtatgatccactgcagcccgagctggactcctttaaggaggagctggataagtacttcaagaatcacacctctcccgacgtggatctgggcgacatctccggcatcaatgcctctgtggtgaacatccagaaggagatcgaccggctgaacgaggtggccaagaatctgaacgagagcctgatcgatctgcaggagctgggcaagtatgagcagtacatcaagggctctggcagagagaacctgtatttccagggaggaggaggcagcggatacatccctgaggcaccaagggacggacaggcctacgtgcgcaaggatggcgagtgggtgctgctgtccacctttctgggccatcatcaccaccaccaccaccactga

SEQ ID NO: 4950 - DNA, 3846 bp, Artificial Sequence
  Description of Artificial Sequence: Synthetic polynucleotide
atgggcatcctgccaagcccaggaatgcccgccctgctgtctctggtgagcctgctgtccgtgctgctgatgggatgcgtggcagagacaggcacacagtgcgtgaacctgaccacaaggacccagctgccccctgcctataccaattctttcacacggggcgtgtactatcccgacaaggtgtttagaagctccgtgctgcactccacacaggatctgtttctgcctttcttttctaacgtgacctggttccacgccatccacgtgtccggcaccaatggcacaaagcggttcgacaatcccgtgctgccttttaacgatggcgtgtacttcgccagcaccgagaagtccaacatcatcagaggctggatctttggcaccacactggactctaagacacagagcctgctgatcgtgaacaatgccaccaacgtggtgatcaaggtgtgcgagttccagttttgtaatgatccattcctgggcgtgtactatcacaagaacaataagtcctggatggagtctgagtttcgcgtgtattctagcgccaacaattgcacatttgagtacgtgagccagcccttcctgatggacctggagggcaagcagggcaatttcaagaacctgagggagttcgtgtttaagaatatcgatggctacttcaagatctacagcaagcacaccccaatcaacctggtgcgcgacctgccacagggattctccgccctggagccactggtggatctgcccatcggcatcaacatcacccggtttcagacactgctggccctgcacagatcctacctgacaccaggcgactcctctagcggatggaccgcaggagctgccgcctactatgtgggctatctgcagccccggaccttcctgctgaagtacaacgagaatggcaccatcacagacgcagtggattgcgccctggaccccctgtctgagacaaagtgtacactgaagagctttaccgtggagaagggcatctatcagacaagcaatttcagggtgcagcctaccgagtccatcgtgcgctttcccaatatcacaaacctgtgcccttttggcgaggtgttcaacgccaccagattcgccagcgtgtacgcctggaatcggaagagaatctccaactgcgtggccgactattctgtgctgtacaactccgcctctttcagcacctttaagtgctatggcgtgtctcccacaaagctgaatgatctgtgctttaccaacgtgtacgccgatagcttcgtgatcaggggagacgaagtgagacagatcgcaccaggacagacaggaaagatcgcagactacaattataagctgcctgacgatttcaccggctgcgtgatcgcctggaactccaacaatctggattctaaagtgggcggcaactacaattatctgtacaggctgtttcgcaagtccaatctgaagccattcgagcgggacatctccacagagatctaccaggccggctctaccccctataatggcgtggagggctttaactgttatttccctctgcagtcttacggcttccagccaacaaacggcgtgggctatcagccctacagagtggtggtgctgtcctttgagctgctgcacgcaccagcaacagtgtgcggcccaaagaagtctaccaatctggtgaagaacaagtgcgtgaacttcaacttcaacggactgaccggcacaggcgtgctgaccgagagcaataagaagttcctgccttttcagcagttcggcagggacatcgcagataccacagacgccgtgcgcgaccctcagaccctggagatcctggacatcacaccatgcagcttcggcggcgtgtccgtgatcacaccaggcaccaatacatccaaccaggtggccgtgctgtatcaggacgtgaattgtaccgaggtgcccgtggcaatccacgcagatcagctgacccctacatggcgggtgtactctaccggcagcaacgtgttccagacaagagccggatgcctgatcggagcagagcacgtgaacaatagctatgagtgcgacatccctatcggcgccggcatctgtgccagctaccagacccagacaaactccccatctggagcaggctccgtggccagccagtccatcatcgcctataccatgagcctgggcgccgagaacagcgtggcctactccaacaattctatcgccatccctaccaacttcacaatcagcgtgaccacagagatcctgccagtgtctatgaccaagacaagcgtggactgcacaatgtatatctgtggcgatagcaccgagtgctccaacctgctgctgcagtacggctccttttgtacccagctgaatagagccctgacaggcatcgccgtggagcaggataagaacacacaggaggtgttcgcccaggtgaagcagatctacaagaccccacccatcaaggactttggcggcttcaacttcagccagatcctgcctgatccaagcaagccctccaagaggtcttttatcgaggacctgctgttcaacaaggtgaccctggccgatgccggcttcatcaagcagtatggagattgcctgggagacatcgcagcccgcgacctgatctgtgcccagaagtttaatggcctgaccgtgctgcctccactgctgacagatgagatgatcgcccagtacacatctgccctgctggccggcaccatcacaagcggatggaccttcggcgcaggagccgccctgcagatcccttttgccatgcagatggcctataggttcaacggcatcggcgtgacccagaatgtgctgtacgagaaccagaagctgatcgccaatcagtttaacagcgccatcggcaagatccaggactctctgtcctctacagccagcgccctgggcaagctgcaggatgtggtgaatcagaacgcccaggccctgaataccctggtgaagcagctgagctccaacttcggcgccatctctagcgtgctgaatgacatcctgagccggctggacccccctgaggcagaggtgcagatcgacaggctgatcacaggccgcctgcagagcctgcagacctacgtgacacagcagctgatcagggcagcagagatcagagcctccgccaatctggccgccaccaagatgagcgagtgcgtgctgggacagtccaagagggtggacttttgtggcaagggctatcacctgatgtctttcccacagagcgcccctcacggcgtggtgtttctgcacgtgacctacgtgccagcccaggagaagaacttcaccacagcaccagccatctgccacgatggaaaggcacactttcctagggagggcgtgttcgtgtctaacggcacccactggtttgtgacacagcgcaatttctacgagccacagatcatcaccacagacaatacattcgtgagcggcaactgtgatgtggtgatcggcatcgtgaacaataccgtgtatgatccactgcagcccgagctggactcctttaaggaggagctggataagtacttcaagaatcacacctctcccgacgtggatctgggcgacatctccggcatcaatgcctctgtggtgaacatccagaaggagatcgaccggctgaacgaggtggccaagaatctgaacgagagcctgatcgatctgcaggagctgggcaagtatgagcagtacatcaagggctctggcagagagaacctgtatttccagggaggaggaggcagcggatacatccctgaggcaccaagggacggacaggcctacgtgcgcaaggatggcgagtgggtgctgctgtccacctttctgggccatcatcaccaccaccaccaccactga

SEQ ID NO: 4951 - DNA, 3846 bp, Artificial Sequence
  Description of Artificial Sequence: Synthetic polynucleotide
atgggcatcctgccaagcccaggaatgcccgccctgctgtctctggtgagcctgctgtccgtgctgctgatgggatgcgtggcagagacaggcacacagtgcgtgaacctgaccacaaggacccagctgccccctgcctataccaattctttcacacggggcgtgtactatcccgacaaggtgtttagaagctccgtgctgcactccacacaggatctgtttctgcctttcttttctaacgtgacctggttccacgccatccacgtgtccggcaccaatggcacaaagcggttcgacaatcccgtgctgccttttaacgatggcgtgtacttcgccagcaccgagaagtccaacatcatcagaggctggatctttggcaccacactggactctaagacacagagcctgctgatcgtgaacaatgccaccaacgtggtgatcaaggtgtgcgagttccagttttgtaatgatccattcctgggcgtgtactatcacaagaacaataagtcctggatggagtctgagtttcgcgtgtattctagcgccaacaattgcacatttgagtacgtgagccagcccttcctgatggacctggagggcaagcagggcaatttcaagaacctgagggagttcgtgtttaagaatatcgatggctacttcaagatctacagcaagcacaccccaatcaacctggtgcgcgacctgccacagggattctccgccctggagccactggtggatctgcccatcggcatcaacatcacccggtttcagacactgctggccctgcacagatcctacctgacaccaggcgactcctctagcggatggaccgcaggagctgccgcctactatgtgggctatctgcagccccggaccttcctgctgaagtacaacgagaatggcaccatcacagacgcagtggattgcgccctggaccccctgtctgagacaaagtgtacactgaagagctttaccgtggagaagggcatctatcagacaagcaatttcagggtgcagcctaccgagtccatcgtgcgctttcccaatatcacaaacctgtgcccttttggcgaggtgttcaacgccaccagattcgccagcgtgtacgcctggaatcggaagagaatctccaactgcgtggccgactattctgtgctgtacaactccgcctctttcagcacctttaagtgctatggcgtgtctcccacaaagctgaatgatctgtgctttaccaacgtgtacgccgatagcttcgtgatcaggggagacgaagtgagacagatcgcaccaggacagacaggaaagatcgcagactacaattataagctgcctgacgatttcaccggctgcgtgatcgcctggaactccaacaatctggattctaaagtgggcggcaactacaattatctgtacaggctgtttcgcaagtccaatctgaagccattcgagcgggacatctccacagagatctaccaggccggctctaccccctgcaatggcgtggagggctttaactgttatttccctctgcagtcttacggcttccagccaacaaacggcgtgggctatcagccctacagagtggtggtgctgtcctttgagctgctgcacgcaccagcaacagtgtgcggcccaaagaagtctaccaatctggtgaagaacaagtgcgtgaacttcaacttcaacggactgaccggcacaggcgtgctgaccgagagcaataagaagttcctgccttttcagcagttcggcagggacatcgcagataccacagacgccgtgcgcgaccctcagaccctggagatcctggacatcacaccatgcccgttcggcggcgtgtccgtgatcacaccaggcaccaatacatccaaccaggtggccgtgctgtatcaggacgtgaattgtaccgaggtgcccgtggcaatccacgcagatcagctgacccctacatggcgggtgtactctaccggcagcaacgtgttccagacaagagccggatgcctgatcggagcagagcacgtgaacaatagctatgagtgcgacatccctatcggcgccggcatctgtgccagctaccagacccagacaaactccccatctggagcaggctccgtggccagccagtccatcatcgcctataccatgagcctgggcgccgagaacagcgtggcctactccaacaattctatcgccatccctaccaacttcacaatcagcgtgaccacagagatcctgccagtgtctatgaccaagacaagcgtggactgcacaatgtatatctgtggcgatagcaccgagtgctccaacctgctgctgcagtacggctccttttgtacccagctgaatagagccctgacaggcatcgccgtggagcaggataagaacacacaggaggtgttcgcccaggtgaagcagatctacaagaccccacccatcaaggactttggcggcttcaacttcagccagatcctgcctgatccaagcaagccctccaagaggtcttttatcgaggacctgctgttcaacaaggtgaccctggccgatgccggcttcatcaagcagtatggagattgcctgggagacatcgcagcccgcgacctgatctgtgcccagaagtttaatggcctgaccgtgctgcctccactgctgacagatgagatgatcgcccagtacacatctgccctgctggccggcaccatcacaagcggatggaccttcggcgcaggagccgccctgcagatcccttttgccatgcagatggcctataggttcaacggcatcggcgtgacccagaatgtgctgtacgagaaccagaagctgatcgccaatcagtttaacagcgccatcggcaagatccaggactctctgtcctctacagccagcgccctgggcaagctgcaggatgtggtgaatcagaacgcccaggccctgaataccctggtgaagcagctgagctccaacttcggcgccatctctagcgtgctgaatgacatcctgagccggctggacccccctgaggcagaggtgcagatcgacaggctgatcacaggccgcctgcagagcctgcagacctacgtgacacagcagctgatcagggcagcagagatcagagcctccgccaatctggccgccaccaagatgagcgagtgcgtgctgggacagtccaagagggtggacttttgtggcaagggctatcacctgatgtctttcccacagagcgcccctcacggcgtggtgtttctgcacgtgacctacgtgccagcccaggagaagaacttcaccacagcaccagccatctgccacgatggaaaggcacactttcctagggagggcgtgttcgtgtctaacggcacccactggtttgtgacacagcgcaatttctacgagccacagatcatcaccacagacaatacattcgtgagcggcaactgtgatgtggtgatcggcatcgtgaacaataccgtgtatgatccactgcagcccgagctggactcctttaaggaggagctggataagtacttcaagaatcacacctctcccgacgtggatctgggcgacatctccggcatcaatgcctctgtggtgaacatccagaaggagatcgaccggctgaacgaggtggccaagaatctgaacgagagcctgatcgatctgcaggagctgggcaagtatgagcagtacatcaagggctctggcagagagaacctgtatttccagggaggaggaggcagcggatacatccctgaggcaccaagggacggacaggcctacgtgcgcaaggatggcgagtgggtgctgctgtccacctttctgggccatcatcaccaccaccaccaccactga

SEQ ID NO: 4952 - DNA, 3846 bp, Artificial Sequence
  Description of Artificial Sequence: Synthetic polynucleotide
atgggcatcctgccaagcccaggaatgcccgccctgctgtctctggtgagcctgctgtccgtgctgctgatgggatgcgtggcagagacaggcacacagtgcgtgaacctgaccacaaggacccagctgccccctgcctataccaattctttcacacggggcgtgtactatcccgacaaggtgtttagaagctccgtgctgcactccacacaggatctgtttctgcctttcttttctaacgtgacctggttccacgccatccacgtgtccggcaccaatggcacaaagcggttcgacaatcccgtgctgccttttaacgatggcgtgtacttcgccagcaccgagaagtccaacatcatcagaggctggatctttggcaccacactggactctaagacacagagcctgctgatcgtgaacaatgccaccaacgtggtgatcaaggtgtgcgagttccagttttgtaatgatccattcctgggcgtgtactatcacaagaacaataagtcctggatggagtctgagtttcgcgtgtattctagcgccaacaattgcacatttgagtacgtgagccagcccttcctgatggacctggagggcaagcagggcaatttcaagaacctgagggagttcgtgtttaagaatatcgatggctacttcaagatctacagcaagcacaccccaatcaacctggtgcgcgacctgccacagggattctccgccctggagccactggtggatctgcccatcggcatcaacatcacccggtttcagacactgctggccctgcacagatcctacctgacaccaggcgactcctctagcggatggaccgcaggagctgccgcctactatgtgggctatctgcagccccggaccttcctgctgaagtacaacgagaatggcaccatcacagacgcagtggattgcgccctggaccccctgtctgagacaaagtgtacactgaagagctttaccgtggagaagggcatctatcagacaagcaatttcagggtgcagcctaccgagtccatcgtgcgctttcccaatatcacaaacctgtgcccttttggcgaggtgttcaacgccaccagattcgccagcgtgtacgcctggaatcggaagagaatctccaactgcgtggccgactattctgtgctgtacaactccgcctctttcagcacctttaagtgctatggcgtgtctcccacaaagctgaatgatctgtgctttaccaacgtgtacgccgatagcttcgtgatcaggggagacgaagtgagacagatcgcaccaggacagacaggaaagatcgcagactacaattataagctgcctgacgatttcaccggctgcgtgatcgcctggaactccaacaatctggattctaaagtgggcggcaactacaattatctgtacaggctgtttcgcaagtccaatctgaagccattcgagcgggacatctccacagagatctaccaggccggctctaccccctgcaatggcgtggagggctttaactgttatttccctctgcagtcttacggcttccagccaacaaacggcgtgggctatcagccctacagagtggtggtgctgtcctttgagctgctgcacgcaccagcaacagtgtgcggcccaaagaagtctaccaatctggtgaagaacaagtgcgtgaacttcaacttcaacggactgaccggcacaggcgtgctgaccgagagcaataagaagttcctgccttttcagcagttcggcagggacatcgcagataccacagacgccgtgcgcgaccctcagaccctggagatcctggacatcacaccatgcagcttcggcggcgtgtccgtgatcacaccaggcaccaatacatccaaccaggtggccgtgctgtatcaggacgtgaattgtaccgaggtgcccgtggcaatccacgcagatcagctgacccctacatggcgggtgtactctaccggcagcaacgtgttccagacaagagccggatgcctgatcggagcagagcacgtgaacaatagctatgagtgcgacatccctatcggcgccggcatctgtgccagctaccagacccagacaaactccccatctggagcaggctccgtggccagccagtccatcatcgcctataccatgagcctgggcgccgagaacagcgtggcctactccaacaattctatcgccatccctaccaacttcacaatcagcgtgaccacagagatcctgccagtgtctatgaccaagacaagcgtggactgcacaatgtatatctgtggcgatagcaccgagtgctccaacctgctgctgcagtacggctccttttgtacccagctgaatagagccctgacaggcatcgccgtggagcaggataagaacacacaggaggtgttcgcccaggtgaagcagatctacaagaccccacccatcaaggactttggcggcttcaacttcagccagatcctgcctgatccaagcaagccctccaagaggtcttttatcgaggacctgctgttcaacaaggtgaccctggccgatgccggcttcatcaagcagtatggagattgcctgggagacatcgcagcccgcgacctgatctgtgcccagaagtttaatggcctgaccgtgctgcctccactgctgacagatgagatgatcgcccagtacacatctgccctgctggccggcaccatcacaagcggatggaccttcggcgcaggagccgccctgcagatcccttttgccatgcagatggcctataggttcaacggcatcggcgtgacccagaatgtgctgtacgagaaccagaagctgatcgccaatcagtttaacagcgccatcggcaagatccaggactctctgtcctctacagccagcgccctgggcaagctgcaggatgtggtgaatcagaacgcccaggccctgaataccctggtgaagcagctgagctccaacttcggcgccatctctagcgtgctgaatgcgatcctgagccggctggacccccctgaggcagaggtgcagatcgacaggctgatcacaggccgcctgcagagcctgcagacctacgtgacacagcagctgatcagggcagcagagatcagagcctccgccaatctggccgccaccaagatgagcgagtgcgtgctgggacagtccaagagggtggacttttgtggcaagggctatcacctgatgtctttcccacagagcgcccctcacggcgtggtgtttctgcacgtgacctacgtgccagcccaggagaagaacttcaccacagcaccagccatctgccacgatggaaaggcacactttcctagggagggcgtgttcgtgtctaacggcacccactggtttgtgacacagcgcaatttctacgagccacagatcatcaccacagacaatacattcgtgagcggcaactgtgatgtggtgatcggcatcgtgaacaataccgtgtatgatccactgcagcccgagctggactcctttaaggaggagctggataagtacttcaagaatcacacctctcccgacgtggatctgggcgacatctccggcatcaatgcctctgtggtgaacatccagaaggagatcgaccggctgaacgaggtggccaagaatctgaacgagagcctgatcgatctgcaggagctgggcaagtatgagcagtacatcaagggctctggcagagagaacctgtatttccagggaggaggaggcagcggatacatccctgaggcaccaagggacggacaggcctacgtgcgcaaggatggcgagtgggtgctgctgtccacctttctgggccatcatcaccaccaccaccaccactga

SEQ ID NO: 4953 - DNA, 3846 bp, Artificial Sequence
  Description of Artificial Sequence: Synthetic polynucleotide
atgggcatcctgccaagcccaggaatgcccgccctgctgtctctggtgagcctgctgtccgtgctgctgatgggatgcgtggcagagacaggcacacagtgcgtgaacctgaccacaaggacccagctgccccctgcctataccaattctttcacacggggcgtgtactatcccgacaaggtgtttagaagctccgtgctgcactccacacaggatctgtttctgcctttcttttctaacgtgacctggttccacgccatccacgtgtccggcaccaatggcacaaagcggttcgacaatcccgtgctgccttttaacgatggcgtgtacttcgccagcaccgagaagtccaacatcatcagaggctggatctttggcaccacactggactctaagacacagagcctgctgatcgtgaacaatgccaccaacgtggtgatcaaggtgtgcgagttccagttttgtaatgatccattcctgggcgtgtactatcacaagaacaataagtcctggatggagtctgagtttcgcgtgtattctagcgccaacaattgcacatttgagtacgtgagccagcccttcctgatggacctggagggcaagcagggcaatttcaagaacctgagggagttcgtgtttaagaatatcgatggctacttcaagatctacagcaagcacaccccaatcaacctggtgcgcgacctgccacagggattctccgccctggagccactggtggatctgcccatcggcatcaacatcacccggtttcagacactgctggccctgcacagatcctacctgacaccaggcgactcctctagcggatggaccgcaggagctgccgcctactatgtgggctatctgcagccccggaccttcctgctgaagtacaacgagaatggcaccatcacagacgcagtggattgcgccctggaccccctgtctgagacaaagtgtacactgaagagctttaccgtggagaagggcatctatcagacaagcaatttcagggtgcagcctaccgagtccatcgtgcgctttcccaatatcacaaacctgtgcccttttggcgaggtgttcaacgccaccagattcgccagcgtgtacgcctggaatcggaagagaatctccaactgcgtggccgactattctgtgctgtacaactccgcctctttcagcacctttaagtgctatggcgtgtctcccacaaagctgaatgatctgtgctttaccaacgtgtacgccgatagcttcgtgatcaggggagacgaagtgagacagatcgcaccaggacagacaggaaatatcgcagactacaattataagctgcctgacgatttcaccggctgcgtgatcgcctggaactccaacaatctggattctaaagtgggcggcaactacaattatctgtacaggctgtttcgcaagtccaatctgaagccattcgagcgggacatctccacagagatctaccaggccggctctaccccctgcaatggcgtggagggctttaactgttatttccctctgcagtcttacggcttccagccaacaaacggcgtgggctatcagccctacagagtggtggtgctgtcctttgagctgctgcacgcaccagcaacagtgtgcggcccaaagaagtctaccaatctggtgaagaacaagtgcgtgaacttcaacttcaacggactgaccggcacaggcgtgctgaccgagagcaataagaagttcctgccttttcagcagttcggcagggacatcgcagataccacagacgccgtgcgcgaccctcagaccctggagatcctggacatcacaccatgcagcttcggcggcgtgtccgtgatcacaccaggcaccaatacatccaaccaggtggccgtgctgtatcaggacgtgaattgtaccgaggtgcccgtggcaatccacgcagatcagctgacccctacatggcgggtgtactctaccggcagcaacgtgttccagacaagagccggatgcctgatcggagcagagcacgtgaacaatagctatgagtgcgacatccctatcggcgccggcatctgtgccagctaccagacccagacaaactccccatctggagcaggctccgtggccagccagtccatcatcgcctataccatgagcctgggcgccgagaacagcgtggcctactccaacaattctatcgccatccctaccaacttcacaatcagcgtgaccacagagatcctgccagtgtctatgaccaagacaagcgtggactgcacaatgtatatctgtggcgatagcaccgagtgctccaacctgctgctgcagtacggctccttttgtacccagctgaatagagccctgacaggcatcgccgtggagcaggataagaacacacaggaggtgttcgcccaggtgaagcagatctacaagaccccacccatcaaggactttggcggcttcaacttcagccagatcctgcctgatccaagcaagccctccaagaggtcttttatcgaggacctgctgttcaacaaggtgaccctggccgatgccggcttcatcaagcagtatggagattgcctgggagacatcgcagcccgcgacctgatctgtgcccagaagtttaatggcctgaccgtgctgcctccactgctgacagatgagatgatcgcccagtacacatctgccctgctggccggcaccatcacaagcggatggaccttcggcgcaggagccgccctgcagatcccttttgccatgcagatggcctataggttcaacggcatcggcgtgacccagaatgtgctgtacgagaaccagaagctgatcgccaatcagtttaacagcgccatcggcaagatccaggactctctgtcctctacagccagcgccctgggcaagctgcaggatgtggtgaatcagaacgcccaggccctgaataccctggtgaagcagctgagctccaacttcggcgccatctctagcgtgctgaatgacatcctgagccggctggacccccctgaggcagaggtgcagatcgacaggctgatcacaggccgcctgcagagcctgcagacctacgtgacacagcagctgatcagggcagcagagatcagagcctccgccaatctggccgccaccaagatgagcgagtgcgtgctgggacagtccaagagggtggacttttgtggcaagggctatcacctgatgtctttcccacagagcgcccctcacggcgtggtgtttctgcacgtgacctacgtgccagcccaggagaagaacttcaccacagcaccagccatctgccacgatggaaaggcacactttcctagggagggcgtgttcgtgtctaacggcacccactggtttgtgacacagcgcaatttctacgagccacagatcatcaccacagacaatacattcgtgagcggcaactgtgatgtggtgatcggcatcgtgaacaataccgtgtatgatccactgcagcccgagctggactcctttaaggaggagctggataagtacttcaagaatcacacctctcccgacgtggatctgggcgacatctccggcatcaatgcctctgtggtgaacatccagaaggagatcgaccggctgaacgaggtggccaagaatctgaacgagagcctgatcgatctgcaggagctgggcaagtatgagcagtacatcaagggctctggcagagagaacctgtatttccagggaggaggaggcagcggatacatccctgaggcaccaagggacggacaggcctacgtgcgcaaggatggcgagtgggtgctgctgtccacctttctgggccatcatcaccaccaccaccaccactga

SEQ ID NO: 4954 - DNA, 3846 bp, Artificial Sequence
  Description of Artificial Sequence: Synthetic polynucleotide
atgggcatcctgccaagcccaggaatgcccgccctgctgtctctggtgagcctgctgtccgtgctgctgatgggatgcgtggcagagacaggcacacagtgcgtgaacctgaccacaaggacccagctgccccctgcctataccaattctttcacacggggcgtgtactatcccgacaaggtgtttagaagctccgtgctgcactccacacaggatctgtttctgcctttcttttctaacgtgacctggttccacgccatccacgtgtccggcaccaatggcacaaagcggttcgacaatcccgtgctgccttttaacgatggcgtgtacttcgccagcaccgagaagtccaacatcatcagaggctggatctttggcaccacactggactctaagacacagagcctgctgatcgtgaacaatgccaccaacgtggtgatcaaggtgtgcgagttccagttttgtaatgatccattcctgggcgtgtactatcacaagaacaataagtcctggatggagtctgagtttcgcgtgtattctagcgccaacaattgcacatttgagtacgtgagccagcccttcctgatggacctggagggcaagcagggcaatttcaagaacctgagggagttcgtgtttaagaatatcgatggctacttcaagatctacagcaagcacaccccaatcaacctggtgcgcgacctgccacagggattctccgccctggagccactggtggatctgcccatcggcatcaacatcacccggtttcagacactgctggccctgcacagatcctacctgacaccaggcgactcctctagcggatggaccgcaggagctgccgcctactatgtgggctatctgcagccccggaccttcctgctgaagtacaacgagaatggcaccatcacagacgcagtggattgcgccctggaccccctgtctgagacaaagtgtacactgaagagctttaccgtggagaagggcatctatcagacaagcaatttcagggtgcagcctaccgagtccatcgtgcgctttcccaatatcacaaacctgtgcccttttggcgaggtgttcaacgccaccagattcgccagcgtgtacgcctggaatcggaagagaatctccaactgcgtggccgactattctgtgctgtacaactccgcctctttcagcacctttaagtgctatggcgtgtctcccacaaagctgaatgatctgtgctttaccaacgtgtacgccgatagcttcgtgatcaggggagacgaagtgagacagatcgcaccaggacagacaggaaagatcgcagactacaattataagctgcctgacgatttcaccggctgcgtgatcgcctggaactccaacaatctggattctaaagtgggcggcaactacaattatctgtacaggctgtttcgcaagtccaatctgaagccattcgagcgggacatctccacagagatctaccaggccggctctaccccctgcaatggcgtggagggctttaaccaatatttccctctgcagtcttacggcttccagccaacaaacggcgtgggctatcagccctacagagtggtggtgctgtcctttgagctgctgcacgcaccagcaacagtgtgcggcccaaagaagtctaccaatctggtgaagaacaagtgcgtgaacttcaacttcaacggactgaccggcacaggcgtgctgaccgagagcaataagaagttcctgccttttcagcagttcggcagggacatcgcagataccacagacgccgtgcgcgaccctcagaccctggagatcctggacatcacaccatgcagcttcggcggcgtgtccgtgatcacaccaggcaccaatacatccaaccaggtggccgtgctgtatcaggacgtgaattgtaccgaggtgcccgtggcaatccacgcagatcagctgacccctacatggcgggtgtactctaccggcagcaacgtgttccagacaagagccggatgcctgatcggagcagagcacgtgaacaatagctatgagtgcgacatccctatcggcgccggcatctgtgccagctaccagacccagacaaactccccatctggagcaggctccgtggccagccagtccatcatcgcctataccatgagcctgggcgccgagaacagcgtggcctactccaacaattctatcgccatccctaccaacttcacaatcagcgtgaccacagagatcctgccagtgtctatgaccaagacaagcgtggactgcacaatgtatatctgtggcgatagcaccgagtgctccaacctgctgctgcagtacggctccttttgtacccagctgaatagagccctgacaggcatcgccgtggagcaggataagaacacacaggaggtgttcgcccaggtgaagcagatctacaagaccccacccatcaaggactttggcggcttcaacttcagccagatcctgcctgatccaagcaagccctccaagaggtcttttatcgaggacctgctgttcaacaaggtgaccctggccgatgccggcttcatcaagcagtatggagattgcctgggagacatcgcagcccgcgacctgatctgtgcccagaagtttaatggcctgaccgtgctgcctccactgctgacagatgagatgatcgcccagtacacatctgccctgctggccggcaccatcacaagcggatggaccttcggcgcaggagccgccctgcagatcccttttgccatgcagatggcctataggttcaacggcatcggcgtgacccagaatgtgctgtacgagaaccagaagctgatcgccaatcagtttaacagcgccatcggcaagatccaggactctctgtcctctacagccagcgccctgggcaagctgcaggatgtggtgaatcagaacgcccaggccctgaataccctggtgaagcagctgagctccaacttcggcgccatctctagcgtgctgaatgacatcctgagccggctggacccccctgaggcagaggtgcagatcgacaggctgatcacaggccgcctgcagagcctgcagacctacgtgacacagcagctgatcagggcagcagagatcagagcctccgccaatctggccgccaccaagatgagcgagtgcgtgctgggacagtccaagagggtggacttttgtggcaagggctatcacctgatgtctttcccacagagcgcccctcacggcgtggtgtttctgcacgtgacctacgtgccagcccaggagaagaacttcaccacagcaccagccatctgccacgatggaaaggcacactttcctagggagggcgtgttcgtgtctaacggcacccactggtttgtgacacagcgcaatttctacgagccacagatcatcaccacagacaatacattcgtgagcggcaactgtgatgtggtgatcggcatcgtgaacaataccgtgtatgatccactgcagcccgagctggactcctttaaggaggagctggataagtacttcaagaatcacacctctcccgacgtggatctgggcgacatctccggcatcaatgcctctgtggtgaacatccagaaggagatcgaccggctgaacgaggtggccaagaatctgaacgagagcctgatcgatctgcaggagctgggcaagtatgagcagtacatcaagggctctggcagagagaacctgtatttccagggaggaggaggcagcggatacatccctgaggcaccaagggacggacaggcctacgtgcgcaaggatggcgagtgggtgctgctgtccacctttctgggccatcatcaccaccaccaccaccactga

SEQ ID NO: 4955 - DNA, 3846 bp, Artificial Sequence
  Description of Artificial Sequence: Synthetic polynucleotide
atgggcatcctgccaagcccaggaatgcccgccctgctgtctctggtgagcctgctgtccgtgctgctgatgggatgcgtggcagagacaggcacacagtgcgtgaacctgaccacaaggacccagctgccccctgcctataccaattctttcacacggggcgtgtactatcccgacaaggtgtttagaagctccgtgctgcactccacacaggatctgtttctgcctttcttttctaacgtgacctggttccacgccatccacgtgtccggcaccaatggcacaaagcggttcgacaatcccgtgctgccttttaacgatggcgtgtacttcgccagcaccgagaagtccaacatcatcagaggctggatctttggcaccacactggactctaagacacagagcctgctgatcgtgaacaatgccaccaacgtggtgatcaaggtgtgcgagttccagttttgtaatgatccattcctgggcgtgtactatcacaagaacaataagtcctggatggagtctgagtttcgcgtgtattctagcgccaacaattgcacatttgagtacgtgagccagcccttcctgatggacctggagggcaagcagggcaatttcaagaacctgagggagttcgtgtttaagaatatcgatggctacttcaagatctacagcaagcacaccccaatcaacctggtgcgcgacctgccacagggattctccgccctggagccactggtggatctgcccatcggcatcaacatcacccggtttcagacactgctggccctgcacagatcctacctgacaccaggcgactcctctagcggatggaccgcaggagctgccgcctactatgtgggctatctgcagccccggaccttcctgctgaagtacaacgagaatggcaccatcacagacgcagtggattgcgccctggaccccctgtctgagacaaagtgtacactgaagagctttaccgtggagaagggcatctatcagacaagcaatttcagggtgcagcctaccgagtccatcgtgcgctttcccaatatcacaaacctgtgcccttttggcgaggtgttcaacgccaccagattcgccagcgtgtacgcctggaatcggaagagaatctccaactgcgtggccgactattctgtgctgtacaactccgcctctttcagcacctttaagtgctatggcgtgtctcccacaaagctgaatgatctgtgctttaccaacgtgtacgccgatagcttcgtgatcaggggagacgaagtgagacagatcgcaccaggacagacaggaaagatcgcagactacaattataagctgcctgacgatttcaccggctgcgtgatcgcctggaactccaacaatctggattctaaagtgggcggcaactacaattatctgtacaggctgtttcgcaagtccaatctgaagccattcgagcgggacatctccacagagatctaccaggccggctctaccccctgcaatggcgtggagggctttaactgttatttccctctgcagtcttacgtattccagccaacaaacggcgtgggctatcagccctacagagtggtggtgctgtcctttgagctgctgcacgcaccagcaacagtgtgcggcccaaagaagtctaccaatctggtgaagaacaagtgcgtgaacttcaacttcaacggactgaccggcacaggcgtgctgaccgagagcaataagaagttcctgccttttcagcagttcggcagggacatcgcagataccacagacgccgtgcgcgaccctcagaccctggagatcctggacatcacaccatgcagcttcggcggcgtgtccgtgatcacaccaggcaccaatacatccaaccaggtggccgtgctgtatcaggacgtgaattgtaccgaggtgcccgtggcaatccacgcagatcagctgacccctacatggcgggtgtactctaccggcagcaacgtgttccagacaagagccggatgcctgatcggagcagagcacgtgaacaatagctatgagtgcgacatccctatcggcgccggcatctgtgccagctaccagacccagacaaactccccatctggagcaggctccgtggccagccagtccatcatcgcctataccatgagcctgggcgccgagaacagcgtggcctactccaacaattctatcgccatccctaccaacttcacaatcagcgtgaccacagagatcctgccagtgtctatgaccaagacaagcgtggactgcacaatgtatatctgtggcgatagcaccgagtgctccaacctgctgctgcagtacggctccttttgtacccagctgaatagagccctgacaggcatcgccgtggagcaggataagaacacacaggaggtgttcgcccaggtgaagcagatctacaagaccccacccatcaaggactttggcggcttcaacttcagccagatcctgcctgatccaagcaagccctccaagaggtcttttatcgaggacctgctgttcaacaaggtgaccctggccgatgccggcttcatcaagcagtatggagattgcctgggagacatcgcagcccgcgacctgatctgtgcccagaagtttaatggcctgaccgtgctgcctccactgctgacagatgagatgatcgcccagtacacatctgccctgctggccggcaccatcacaagcggatggaccttcggcgcaggagccgccctgcagatcccttttgccatgcagatggcctataggttcaacggcatcggcgtgacccagaatgtgctgtacgagaaccagaagctgatcgccaatcagtttaacagcgccatcggcaagatccaggactctctgtcctctacagccagcgccctgggcaagctgcaggatgtggtgaatcagaacgcccaggccctgaataccctggtgaagcagctgagctccaacttcggcgccatctctagcgtgctgaatgacatcctgagccggctggacccccctgaggcagaggtgcagatcgacaggctgatcacaggccgcctgcagagcctgcagacctacgtgacacagcagctgatcagggcagcagagatcagagcctccgccaatctggccgccaccaagatgagcgagtgcgtgctgggacagtccaagagggtggacttttgtggcaagggctatcacctgatgtctttcccacagagcgcccctcacggcgtggtgtttctgcacgtgacctacgtgccagcccaggagaagaacttcaccacagcaccagccatctgccacgatggaaaggcacactttcctagggagggcgtgttcgtgtctaacggcacccactggtttgtgacacagcgcaatttctacgagccacagatcatcaccacagacaatacattcgtgagcggcaactgtgatgtggtgatcggcatcgtgaacaataccgtgtatgatccactgcagcccgagctggactcctttaaggaggagctggataagtacttcaagaatcacacctctcccgacgtggatctgggcgacatctccggcatcaatgcctctgtggtgaacatccagaaggagatcgaccggctgaacgaggtggccaagaatctgaacgagagcctgatcgatctgcaggagctgggcaagtatgagcagtacatcaagggctctggcagagagaacctgtatttccagggaggaggaggcagcggatacatccctgaggcaccaagggacggacaggcctacgtgcgcaaggatggcgagtgggtgctgctgtccacctttctgggccatcatcaccaccaccaccaccactga

SEQ ID NO: 4956 - DNA, 3846 bp, Artificial Sequence
  Description of Artificial Sequence: Synthetic polynucleotide
atgggcatcctgccaagcccaggaatgcccgccctgctgtctctggtgagcctgctgtccgtgctgctgatgggatgcgtggcagagacaggcacacagtgcgtgaacctgaccacaaggacccagctgccccctgcctataccaattctttcacacggggcgtgtactatcccgacaaggtgtttagaagctccgtgctgcactccacacaggatctgtttctgcctttcttttctaacgtgacctggttccacgccatccacgtgtccggcaccaatggcacaaagcggttcgacaatcccgtgctgccttttaacgatggcgtgtacttcgccagcaccgagaagtccaacatcatcagaggctggatctttggcaccacactggactctaagacacagagcctgctgatcgtgaacaatgccaccaacgtggtgatcaaggtgtgcgagttccagttttgtaatgatccattcctgggcgtgtactatcacaagaacaataagtcctggatggagtctgagtttcgcgtgtattctagcgccaacaattgcacatttgagtacgtgagccagcccttcctgatggacctggagggcaagcagggcaatttcaagaacctgagggagttcgtgtttaagaatatcgatggctacttcaagatctacagcaagcacaccccaatcaacctggtgcgcgacctgccacagggattctccgccctggagccactggtggatctgcccatcggcatcaacatcacccggtttcagacactgctggccctgcacagatcctacctgacaccaggcgactcctctagcggatggaccgcaggagctgccgcctactatgtgggctatctgcagccccggaccttcctgctgaagtacaacgagaatggcaccatcacagacgcagtggattgcgccctggaccccctgtctgagacaaagtgtacactgaagagctttaccgtggagaagggcatctatcagacaagcaatttcagggtgcagcctaccgagtccatcgtgcgctttcccaatatcacaaacctgtgcccttttggcgaggtgttcaacgccaccagattcgccagcgtgtacgcctggaatcggaagagaatctccaactgcgtggccgactattctgtgctgtacaactccgcctctttcagcacctttaagtgctatggcgtgtctcccacaaagctgaatgatctgtgctttaccaacgtgtacgccgatagcttcgtgatcaggggagacgaagtgagacagatcgcaccaggacagacaggaaagatcgcagactacaattataagctgcctgacgatttcaccggctgcgtgatcgcctggaactccaacaatctggattctaaagtgggcggcaactacaattatctgtacaggctgtttcgcaagtccaatctgaagccattcgagcgggacatctccacagagatctaccaggccggctctaccccctgcaatggcgtggagggctttaacgaatatttccctctgcagtcttacggcttccagccaacaaacggcgtgggctatcagccctacagagtggtggtgctgtcctttgagctgctgcacgcaccagcaacagtgtgcggcccaaagaagtctaccaatctggtgaagaacaagtgcgtgaacttcaacttcaacggactgaccggcacaggcgtgctgaccgagagcaataagaagttcctgccttttcagcagttcggcagggacatcgcagataccacagacgccgtgcgcgaccctcagaccctggagatcctggacatcacaccatgcagcttcggcggcgtgtccgtgatcacaccaggcaccaatacatccaaccaggtggccgtgctgtatcaggacgtgaattgtaccgaggtgcccgtggcaatccacgcagatcagctgacccctacatggcgggtgtactctaccggcagcaacgtgttccagacaagagccggatgcctgatcggagcagagcacgtgaacaatagctatgagtgcgacatccctatcggcgccggcatctgtgccagctaccagacccagacaaactccccatctggagcaggctccgtggccagccagtccatcatcgcctataccatgagcctgggcgccgagaacagcgtggcctactccaacaattctatcgccatccctaccaacttcacaatcagcgtgaccacagagatcctgccagtgtctatgaccaagacaagcgtggactgcacaatgtatatctgtggcgatagcaccgagtgctccaacctgctgctgcagtacggctccttttgtacccagctgaatagagccctgacaggcatcgccgtggagcaggataagaacacacaggaggtgttcgcccaggtgaagcagatctacaagaccccacccatcaaggactttggcggcttcaacttcagccagatcctgcctgatccaagcaagccctccaagaggtcttttatcgaggacctgctgttcaacaaggtgaccctggccgatgccggcttcatcaagcagtatggagattgcctgggagacatcgcagcccgcgacctgatctgtgcccagaagtttaatggcctgaccgtgctgcctccactgctgacagatgagatgatcgcccagtacacatctgccctgctggccggcaccatcacaagcggatggaccttcggcgcaggagccgccctgcagatcccttttgccatgcagatggcctataggttcaacggcatcggcgtgacccagaatgtgctgtacgagaaccagaagctgatcgccaatcagtttaacagcgccatcggcaagatccaggactctctgtcctctacagccagcgccctgggcaagctgcaggatgtggtgaatcagaacgcccaggccctgaataccctggtgaagcagctgagctccaacttcggcgccatctctagcgtgctgaatgacatcctgagccggctggacccccctgaggcagaggtgcagatcgacaggctgatcacaggccgcctgcagagcctgcagacctacgtgacacagcagctgatcagggcagcagagatcagagcctccgccaatctggccgccaccaagatgagcgagtgcgtgctgggacagtccaagagggtggacttttgtggcaagggctatcacctgatgtctttcccacagagcgcccctcacggcgtggtgtttctgcacgtgacctacgtgccagcccaggagaagaacttcaccacagcaccagccatctgccacgatggaaaggcacactttcctagggagggcgtgttcgtgtctaacggcacccactggtttgtgacacagcgcaatttctacgagccacagatcatcaccacagacaatacattcgtgagcggcaactgtgatgtggtgatcggcatcgtgaacaataccgtgtatgatccactgcagcccgagctggactcctttaaggaggagctggataagtacttcaagaatcacacctctcccgacgtggatctgggcgacatctccggcatcaatgcctctgtggtgaacatccagaaggagatcgaccggctgaacgaggtggccaagaatctgaacgagagcctgatcgatctgcaggagctgggcaagtatgagcagtacatcaagggctctggcagagagaacctgtatttccagggaggaggaggcagcggatacatccctgaggcaccaagggacggacaggcctacgtgcgcaaggatggcgagtgggtgctgctgtccacctttctgggccatcatcaccaccaccaccaccactga

SEQ ID NO: 4957 - DNA, 3846 bp, Artificial Sequence
  Description of Artificial Sequence: Synthetic polynucleotide
atgggcatcctgccaagcccaggaatgcccgccctgctgtctctggtgagcctgctgtccgtgctgctgatgggatgcgtggcagagacaggcacacagtgcgtgaacctgaccacaaggacccagctgccccctgcctataccaattctttcacacggggcgtgtactatcccgacaaggtgtttagaagctccgtgctgcactccacacaggatctgtttctgcctttcttttctaacgtgacctggttccacgccatccacgtgtccggcaccaatggcacaaagcggttcgacaatcccgtgctgccttttaacgatggcgtgtacttcgccagcaccgagaagtccaacatcatcagaggctggatctttggcaccacactggactctaagacacagagcctgctgatcgtgaacaatgccaccaacgtggtgatcaaggtgtgcgagttccagttttgtaatgatccattcctgggcgtgtactatcacaagaacaataagtcctggatggagtctgagtttcgcgtgtattctagcgccaacaattgcacatttgagtacgtgagccagcccttcctgatggacctggagggcaagcagggcaatttcaagaacctgagggagttcgtgtttaagaatatcgatggctacttcaagatctacagcaagcacaccccaatcaacctggtgcgcgacctgccacagggattctccgccctggagccactggtggatctgcccatcggcatcaacatcacccggtttcagacactgctggccctgcacagatcctacctgacaccaggcgactcctctagcggatggaccgcaggagctgccgcctactatgtgggctatctgcagccccggaccttcctgctgaagtacaacgagaatggcaccatcacagacgcagtggattgcgccctggaccccctgtctgagacaaagtgtacactgaagagctttaccgtggagaagggcatctatcagacaagcaatttcagggtgcagcctaccgagtccatcgtgcgctttcccaatatcacaaacctgtgcccttttggcgaggtgttcaacgccaccagattcgccagcgtgtacgcctggaatcggaagagaatctccaactgcgtggccgactattctgtgctgtacaactccgcctctttcagcacctttaagtgctatggcgtgtctcccacaaagctgaatgatctgtgctttaccaacgtgtacgccgatagcttcgtgatcaggggagacgaagtgagacagatcgcaccaggacagacaggaaagatcgcagactacaattataagctgcctgacgatttcaccggctgcgtgatcgcctggaactccaacaatctggattctaaagtgggcggcaactacaattatctgtacaggctgtttcgcaagtccaatctgaagccattcgagcgggacatctccacagagatctaccaggccggctctaccccctgcaatggcgtggagggctttaactgttatttccctctgcagtcttacggcttccagccaacaaacggcgtgggctatcagccctacagagtggtggtgctgtcctttgagctgctgcacgcaccagcaacagtgtgcggcccaaagaagtctaccaatctggtgaagaacaagtgcgtgaacttcaacttcaacggactgaccggcacaggcgtgctgaccgagagcaataagaagttcctgccttttcagcagttcggcagggacatcgcagataccacagacgccgtgcgcgaccctcagaccctggagatcctggacatcacaccatgcagcttcggcggcgtgtccgtgatcacaccaggcaccaatacatccaaccaggtggccgtgctgtatcaggacgtgaattgtaccgaggtgcccgtggcaatccacgcagatcagctgacccctacatggcgggtgtactctaccggcagcaacgtgttccagacaagagccggatgcctgatcggagcagagcacgtgaacaatagctatgagtgcgacatccctatcggcgccggcatctgtgccagctaccagacccagacaaactccccatctggagcaggctccgtggccagccagtccatcatcgcctataccatgagcctgggcgccgagaacagcgtggcctactccaacaattctatcgccatccctaccaacttcacaatcagcgtgaccacagagatcctgccagtgtctatgaccaagacaagcgtggactgcacaatgtatatctgtggcgatagcaccgagtgctccaacctgctgctgcagtacggctccttttgtacccagctgaatagagccctgacaggcatcgccgtggagcaggataagaacacacaggaggtgttcgcccaggtgaagcagatctacaagaccccacccatcaaggactttggcggcttcaacttcagccagatcctgcctgatccaagcaagccctccaagaggtcttttatcgaggacctgctgttcaacaaggtgaccctggccgatgccggcttcatcaagcagtatggagattgcctgggagacatcgcagcccgcgacctgatctgtgcccagaagtttaatggcctgaccgtgctgcctccactgctgacagatgagatgatcgcccagtacacatctgccctgctggccggcaccatcacaagcggatggaccttcggcgcaggagccgccctgcagatcccttttgccatgcagatggcctataggttcaacggcatcggcgtgacccagaatgtgctgtacgagaaccagaagctgatcgccaatcagtttaacagcgccatcggcaagatccaggactctctgtcctctacagccagcgccctgggcaagctgcaggatgtggtgaatcagaacgcccaggccctgaataccctggtgaagcagctgagctccaacttcggcgccatctctagcgtgctgaatgacatcctgagccggctggacccccctgaggcagaggtgcagatcgacaggctgatcacaggccgcctgcagagcctgcagacctacgtgacacagcagctgatcagggcagcagagatcagagcctccgccaatctggccgccaccaagatgagcgagtgcgtgctgggacagtccaagagggtggacttttgtggcaagggctatcacctgatgtctttcccacagagcgcccctcacggcgtggtgtttctgcacgtgacctacgtgccagcccagaggaagaacttcaccacagcaccagccatctgccacgatggaaaggcacactttcctagggagggcgtgttcgtgtctaacggcacccactggtttgtgacacagcgcaatttctacgagccacagatcatcaccacagacaatacattcgtgagcggcaactgtgatgtggtgatcggcatcgtgaacaataccgtgtatgatccactgcagcccgagctggactcctttaaggaggagctggataagtacttcaagaatcacacctctcccgacgtggatctgggcgacatctccggcatcaatgcctctgtggtgaacatccagaaggagatcgaccggctgaacgaggtggccaagaatctgaacgagagcctgatcgatctgcaggagctgggcaagtatgagcagtacatcaagggctctggcagagagaacctgtatttccagggaggaggaggcagcggatacatccctgaggcaccaagggacggacaggcctacgtgcgcaaggatggcgagtgggtgctgctgtccacctttctgggccatcatcaccaccaccaccaccactga

SEQ ID NO: 4958 - DNA, 3846 bp, Artificial Sequence
  Description of Artificial Sequence: Synthetic polynucleotide
atgggcatcctgccaagcccaggaatgcccgccctgctgtctctggtgagcctgctgtccgtgctgctgatgggatgcgtggcagagacaggcacacagtgcgtgaacctgaccacaaggacccagctgccccctgcctataccaattctttcacacggggcgtgtactatcccgacaaggtgtttagaagctccgtgctgcactccacacaggatctgtttctgcctttcttttctaacgtgacctggttccacgccatccacgtgtccggcaccaatggcacaaagcggttcgacaatcccgtgctgccttttaacgatggcgtgtacttcgccagcaccgagaagtccaacatcatcagaggctggatctttggcaccacactggactctaagacacagagcctgctgatcgtgaacaatgccaccaacgtggtgatcaaggtgtgcgagttccagttttgtaatgatccattcctgggcgtgtactatcacaagaacaataagtcctggatggagtctgagtttcgcgtgtattctagcgccaacaattgcacatttgagtacgtgagccagcccttcctgatggacctggagggcaagcagggcaatttcaagaacctgagggagttcgtgtttaagaatatcgatggctacttcaagatctacagcaagcacaccccaatcaacctggtgcgcgacctgccacagggattctccgccctggagccactggtggatctgcccatcggcatcaacatcacccggtttcagacactgctggccctgcacagatcctacctgacaccaggcgactcctctagcggatggaccgcaggagctgccgcctactatgtgggctatctgcagccccggaccttcctgctgaagtacaacgagaatggcaccatcacagacgcagtggattgcgccctggaccccctgtctgagacaaagtgtacactgaagagctttaccgtggagaagggcatctatcagacaagcaatttcagggtgcagcctaccgagtccatcgtgcgctttcccaatatcacaaacctgtgcccttttggcgaggtgttcaacgccaccagattcgccagcgtgtacgcctggaatcggaagagaatctccaactgcgtggccgactattctgtgctgtacaactccgcctctttcagcacctttaagtgctatggcgtgtctcccacaaagctgaatgatctgtgctttaccaacgtgtacgccgatagcttcgtgatcaggggagacgaagtgagacagatcgcaccaggacagacaggaaagatcgcagactacaattataacctgcctgacgatttcaccggctgcgtgatcgcctggaactccaacaatctggattctaaagtgggcggcaactacaattatctgtacaggctgtttcgcaagtccaatctgaagccattcgagcgggacatctccacagagatctaccaggccggctctaccccctgcaatggcgtggagggctttaactgttatttccctctgcagtcttacggcttccagccaacaaacggcgtgggctatcagccctacagagtggtggtgctgtcctttgagctgctgcacgcaccagcaacagtgtgcggcccaaagaagtctaccaatctggtgaagaacaagtgcgtgaacttcaacttcaacggactgaccggcacaggcgtgctgaccgagagcaataagaagttcctgccttttcagcagttcggcagggacatcgcagataccacagacgccgtgcgcgaccctcagaccctggagatcctggacatcacaccatgcagcttcggcggcgtgtccgtgatcacaccaggcaccaatacatccaaccaggtggccgtgctgtatcaggacgtgaattgtaccgaggtgcccgtggcaatccacgcagatcagctgacccctacatggcgggtgtactctaccggcagcaacgtgttccagacaagagccggatgcctgatcggagcagagcacgtgaacaatagctatgagtgcgacatccctatcggcgccggcatctgtgccagctaccagacccagacaaactccccatctggagcaggctccgtggccagccagtccatcatcgcctataccatgagcctgggcgccgagaacagcgtggcctactccaacaattctatcgccatccctaccaacttcacaatcagcgtgaccacagagatcctgccagtgtctatgaccaagacaagcgtggactgcacaatgtatatctgtggcgatagcaccgagtgctccaacctgctgctgcagtacggctccttttgtacccagctgaatagagccctgacaggcatcgccgtggagcaggataagaacacacaggaggtgttcgcccaggtgaagcagatctacaagaccccacccatcaaggactttggcggcttcaacttcagccagatcctgcctgatccaagcaagccctccaagaggtcttttatcgaggacctgctgttcaacaaggtgaccctggccgatgccggcttcatcaagcagtatggagattgcctgggagacatcgcagcccgcgacctgatctgtgcccagaagtttaatggcctgaccgtgctgcctccactgctgacagatgagatgatcgcccagtacacatctgccctgctggccggcaccatcacaagcggatggaccttcggcgcaggagccgccctgcagatcccttttgccatgcagatggcctataggttcaacggcatcggcgtgacccagaatgtgctgtacgagaaccagaagctgatcgccaatcagtttaacagcgccatcggcaagatccaggactctctgtcctctacagccagcgccctgggcaagctgcaggatgtggtgaatcagaacgcccaggccctgaataccctggtgaagcagctgagctccaacttcggcgccatctctagcgtgctgaatgacatcctgagccggctggacccccctgaggcagaggtgcagatcgacaggctgatcacaggccgcctgcagagcctgcagacctacgtgacacagcagctgatcagggcagcagagatcagagcctccgccaatctggccgccaccaagatgagcgagtgcgtgctgggacagtccaagagggtggacttttgtggcaagggctatcacctgatgtctttcccacagagcgcccctcacggcgtggtgtttctgcacgtgacctacgtgccagcccaggagaagaacttcaccacagcaccagccatctgccacgatggaaaggcacactttcctagggagggcgtgttcgtgtctaacggcacccactggtttgtgacacagcgcaatttctacgagccacagatcatcaccacagacaatacattcgtgagcggcaactgtgatgtggtgatcggcatcgtgaacaataccgtgtatgatccactgcagcccgagctggactcctttaaggaggagctggataagtacttcaagaatcacacctctcccgacgtggatctgggcgacatctccggcatcaatgcctctgtggtgaacatccagaaggagatcgaccggctgaacgaggtggccaagaatctgaacgagagcctgatcgatctgcaggagctgggcaagtatgagcagtacatcaagggctctggcagagagaacctgtatttccagggaggaggaggcagcggatacatccctgaggcaccaagggacggacaggcctacgtgcgcaaggatggcgagtgggtgctgctgtccacctttctgggccatcatcaccaccaccaccaccactga

SEQ ID NO: 4959 - DNA, 3846 bp, Artificial Sequence
  Description of Artificial Sequence: Synthetic polynucleotide
atgggcatcctgccaagcccaggaatgcccgccctgctgtctctggtgagcctgctgtccgtgctgctgatgggatgcgtggcagagacaggcacacagtgcgtgaacctgaccacaaggacccagctgccccctgcctataccaattctttcacacggggcgtgtactatcccgacaaggtgtttagaagctccgtgctgcactccacacaggatctgtttctgcctttcttttctaacgtgacctggttccacgccatccacgtgtccggcaccaatggcacaaagcggttcgacaatcccgtgctgccttttaacgatggcgtgtacttcgccagcaccgagaagtccaacatcatcagaggctggatctttggcaccacactggactctaagacacagagcctgctgatcgtgaacaatgccaccaacgtggtgatcaaggtgtgcgagttccagttttgtaatgatccattcctgggcgtgtactatcacaagaacaataagtcctggatggagtctgagtttcgcgtgtattctagcgccaacaattgcacatttgagtacgtgagccagcccttcctgatggacctggagggcaagcagggcaatttcaagaacctgagggagttcgtgtttaagaatatcgatggctacttcaagatctacagcaagcacaccccaatcaacctggtgcgcgacctgccacagggattctccgccctggagccactggtggatctgcccatcggcatcaacatcacccggtttcagacactgctggccctgcacagatcctacctgacaccaggcgactcctctagcggatggaccgcaggagctgccgcctactatgtgggctatctgcagccccggaccttcctgctgaagtacaacgagaatggcaccatcacagacgcagtggattgcgccctggaccccctgtctgagacaaagtgtacactgaagagctttaccgtggagaagggcatctatcagacaagcaatttcagggtgcagcctaccgagtccatcgtgcgctttcccaatatcacaaacctgtgcccttttggcgaggtgttcaacgccaccagattcgccagcgtgtacgcctggaatcggaagagaatctccaactgcgtggccgactattctgtgctgtacaactccgcctctttcagcacctttaagtgctatggcgtgtctcccacaaagctgaatgatctgtgctttaccaacgtgtacgccgatagcttcgtgatcaggggagacgaagtgagacagatcgcaccaggacagacaggaaagatcgcagactacaattataagctgcctgacgatttcaccggctgcgtgatcgcctggaactccaacaatctggattctaaagtgggcggcaactacaattatctgtacaggctgtttcgcaagtccaatctgaagccattcgagcgggacatctccagtgagatctaccaggccggctctaccccctgcaatggcgtggagggctttaactgttatttccctctgcagtcttacggcttccagccaacaaacggcgtgggctatcagccctacagagtggtggtgctgtcctttgagctgctgcacgcaccagcaacagtgtgcggcccaaagaagtctaccaatctggtgaagaacaagtgcgtgaacttcaacttcaacggactgaccggcacaggcgtgctgaccgagagcaataagaagttcctgccttttcagcagttcggcagggacatcgcagataccacagacgccgtgcgcgaccctcagaccctggagatcctggacatcacaccatgcagcttcggcggcgtgtccgtgatcacaccaggcaccaatacatccaaccaggtggccgtgctgtatcaggacgtgaattgtaccgaggtgcccgtggcaatccacgcagatcagctgacccctacatggcgggtgtactctaccggcagcaacgtgttccagacaagagccggatgcctgatcggagcagagcacgtgaacaatagctatgagtgcgacatccctatcggcgccggcatctgtgccagctaccagacccagacaaactccccatctggagcaggctccgtggccagccagtccatcatcgcctataccatgagcctgggcgccgagaacagcgtggcctactccaacaattctatcgccatccctaccaacttcacaatcagcgtgaccacagagatcctgccagtgtctatgaccaagacaagcgtggactgcacaatgtatatctgtggcgatagcaccgagtgctccaacctgctgctgcagtacggctccttttgtacccagctgaatagagccctgacaggcatcgccgtggagcaggataagaacacacaggaggtgttcgcccaggtgaagcagatctacaagaccccacccatcaaggactttggcggcttcaacttcagccagatcctgcctgatccaagcaagccctccaagaggtcttttatcgaggacctgctgttcaacaaggtgaccctggccgatgccggcttcatcaagcagtatggagattgcctgggagacatcgcagcccgcgacctgatctgtgcccagaagtttaatggcctgaccgtgctgcctccactgctgacagatgagatgatcgcccagtacacatctgccctgctggccggcaccatcacaagcggatggaccttcggcgcaggagccgccctgcagatcccttttgccatgcagatggcctataggttcaacggcatcggcgtgacccagaatgtgctgtacgagaaccagaagctgatcgccaatcagtttaacagcgccatcggcaagatccaggactctctgtcctctacagccagcgccctgggcaagctgcaggatgtggtgaatcagaacgcccaggccctgaataccctggtgaagcagctgagctccaacttcggcgccatctctagcgtgctgaatgacatcctgagccggctggacccccctgaggcagaggtgcagatcgacaggctgatcacaggccgcctgcagagcctgcagacctacgtgacacagcagctgatcagggcagcagagatcagagcctccgccaatctggccgccaccaagatgagcgagtgcgtgctgggacagtccaagagggtggacttttgtggcaagggctatcacctgatgtctttcccacagagcgcccctcacggcgtggtgtttctgcacgtgacctacgtgccagcccaggagaagaacttcaccacagcaccagccatctgccacgatggaaaggcacactttcctagggagggcgtgttcgtgtctaacggcacccactggtttgtgacacagcgcaatttctacgagccacagatcatcaccacagacaatacattcgtgagcggcaactgtgatgtggtgatcggcatcgtgaacaataccgtgtatgatccactgcagcccgagctggactcctttaaggaggagctggataagtacttcaagaatcacacctctcccgacgtggatctgggcgacatctccggcatcaatgcctctgtggtgaacatccagaaggagatcgaccggctgaacgaggtggccaagaatctgaacgagagcctgatcgatctgcaggagctgggcaagtatgagcagtacatcaagggctctggcagagagaacctgtatttccagggaggaggaggcagcggatacatccctgaggcaccaagggacggacaggcctacgtgcgcaaggatggcgagtgggtgctgctgtccacctttctgggccatcatcaccaccaccaccaccactga

SEQ ID NO: 4960 - DNA, 3846 bp, Artificial Sequence
  Description of Artificial Sequence: Synthetic polynucleotide
atgggcatcctgccaagcccaggaatgcccgccctgctgtctctggtgagcctgctgtccgtgctgctgatgggatgcgtggcagagacaggcacacagtgcgtgaacctgaccacaaggacccagctgccccctgcctataccaattctttcacacggggcgtgtactatcccgacaaggtgtttagaagctccgtgctgcactccacacaggatctgtttctgcctttcttttctaacgtgacctggttccacgccatccacgtgtccggcaccaatggcacaaagcggttcgacaatcccgtgctgccttttaacgatggcgtgtacttcgccagcaccgagaagtccaacatcatcagaggctggatctttggcaccacactggactctaagacacagagcctgctgatcgtgaacaatgccaccaacgtggtgatcaaggtgtgcgagttccagttttgtaatgatccattcctgggcgtgtactatcacaagaacaataagtcctggatggagtctgagtttcgcgtgtattctagcgccaacaattgcacatttgagtacgtgagccagcccttcctgatggacctggagggcaagcagggcaatttcaagaacctgagggagttcgtgtttaagaatatcgatggctacttcaagatctacagcaagcacaccccaatcaacctggtgcgcgacctgccacagggattctccgccctggagccactggtggatctgcccatcggcatcaacatcacccggtttcagacactgctggccctgcacagatcctacctgacaccaggcgactcctctagcggatggaccgcaggagctgccgcctactatgtgggctatctgcagccccggaccttcctgctgaagtacaacgagaatggcaccatcacagacgcagtggattgcgccctggaccccctgtctgagacaaagtgtacactgaagagctttaccgtggagaagggcatctatcagacaagcaatttcagggtgcagcctaccgagtccatcgtgcgctttcccaatatcacaaacctgtgcccttttggcgaggtgttcaacgccaccagattcgccagcgtgtacgcctggaatcggaagagaatctccaactgcgtggccgactattctgtgctgtacaactccgcctctttcagcacctttaagtgctatggcgtgtctcccacaaagctgaatgatctgtgctttaccaacgtgtacgccgatagcttcgtgatcaggggagacgaagtgagacagatcgcaccaggacagacaggaaagatcgcagactacaattataagctgcctgacgatttcaccggctgcgtgatcgcctggaactccaacaatctggattctaaagtgggcggcaactacaattatctgtacaggctgtttcgcaagtccaatctgaagccattcgagcgggacatctccacagagatctaccaggccggctctaccccctgcaatggcgtggagggctttaactgttatttccctctgcagtcttacggcttccagccaacaaacggcgtgggctatcagccctacagagtggtggtgctgtcctttgagctgctgcacgcaccagcaacagtgtgcggcccaaagaagtctaccaatctggtgaagaacaagtgcgtgaacttcaacttcaacggactgaccggcacaggcgtgctgaccgagagcaataagaagttcctgccttttcagcagttcggcagggacatcgcagataccacagacgccgtgcgcgaccctcagaccctggagatcctggacatcacaccatgcagcttcggcggcgtgtccgtgatcacaccaggcaccaatacatccaaccaggtggccgtgctgtatcaggacgtgaattgtaccgaggtgcccgtggcaatccacgcagatcagctgacccctacatggcgggtgtactctaccggcagcaacgtgttccagacaagagccggatgcctgatcggagcagagcacgtgaacaatagctatgagtgcgacatccctatcggcgccggcatctgtgccagctaccagacccagacaaactccccatctggagcaggctccgtggccagccagtccatcatcgcctataccatgagcctgggcgccgagaacagcgtggcctactccaacaattctatcgccatccctaccaacttcacaatcagcgtgaccacagagatcctgccagtgtctatgaccaagacaagcgtggactgcacaatgtatatctgtggcgatagcaccgagtgctccaacctgctgctgcagtacggctccttttgtacccagctgaatagagccctgacaggcatcgccgtggagcaggataagaacacacaggaggtgttcgcccaggtgaagcagatctacaagaccccacccatcaaggactttggcggcttcaacttcagccagatcctgcctgatccaagcaagccctccaagaggtcttttatcgaggacctgctgttcaacaaggtgaccctggccgatgccggcttcatcaagcagtatggagattgcctgggagacatcgcagcccgcgacctgatctgtgcccagaagtttaatggcctgaccgtgctgcctccactgctgacagatgagatgatcgcccagtacacatctgccctgctggccggcaccatcacaagcggatggaccttcggcgcaggagccgccctgacgatcccttttgccatgcagatggcctataggttcaacggcatcggcgtgacccagaatgtgctgtacgagaaccagaagctgatcgccaatcagtttaacagcgccatcggcaagatccaggactctctgtcctctacagccagcgccctgggcaagctgcaggatgtggtgaatcagaacgcccaggccctgaataccctggtgaagcagctgagctccaacttcggcgccatctctagcgtgctgaatgacatcctgagccggctggacccccctgaggcagaggtgcagatcgacaggctgatcacaggccgcctgcagagcctgcagacctacgtgacacagcagctgatcagggcagcagagatcagagcctccgccaatctggccgccaccaagatgagcgagtgcgtgctgggacagtccaagagggtggacttttgtggcaagggctatcacctgatgtctttcccacagagcgcccctcacggcgtggtgtttctgcacgtgacctacgtgccagcccaggagaagaacttcaccacagcaccagccatctgccacgatggaaaggcacactttcctagggagggcgtgttcgtgtctaacggcacccactggtttgtgacacagcgcaatttctacgagccacagatcatcaccacagacaatacattcgtgagcggcaactgtgatgtggtgatcggcatcgtgaacaataccgtgtatgatccactgcagcccgagctggactcctttaaggaggagctggataagtacttcaagaatcacacctctcccgacgtggatctgggcgacatctccggcatcaatgcctctgtggtgaacatccagaaggagatcgaccggctgaacgaggtggccaagaatctgaacgagagcctgatcgatctgcaggagctgggcaagtatgagcagtacatcaagggctctggcagagagaacctgtatttccagggaggaggaggcagcggatacatccctgaggcaccaagggacggacaggcctacgtgcgcaaggatggcgagtgggtgctgctgtccacctttctgggccatcatcaccaccaccaccaccactga

SEQ ID NO: 4961 - DNA, 3846 bp, Artificial Sequence
  Description of Artificial Sequence: Synthetic polynucleotide
atgggcatcctgccaagcccaggaatgcccgccctgctgtctctggtgagcctgctgtccgtgctgctgatgggatgcgtggcagagacaggcacacagtgcgtgaacctgaccacaaggacccagctgccccctgcctataccaattctttcacacggggcgtgtactatcccgacaaggtgtttagaagctccgtgctgcactccacacaggatctgtttctgcctttcttttctaacgtgacctggttccacgccatccacgtgtccggcaccaatggcacaaagcggttcgacaatcccgtgctgccttttaacgatggcgtgtacttcgccagcaccgagaagtccaacatcatcagaggctggatctttggcaccacactggactctaagacacagagcctgctgatcgtgaacaatgccaccaacgtggtgatcaaggtgtgcgagttccagttttgtaatgatccattcctgggcgtgtactatcacaagaacaataagtcctggatggagtctgagtttcgcgtgtattctagcgccaacaattgcacatttgagtacgtgagccagcccttcctgatggacctggagggcaagcagggcaatttcaagaacctgagggagttcgtgtttaagaatatcgatggctacttcaagatctacagcaagcacaccccaatcaacctggtgcgcgacctgccacagggattctccgccctggagccactggtggatctgcccatcggcatcaacatcacccggtttcagacactgctggccctgcacagatcctacctgacaccaggcgactcctctagcggatggaccgcaggagctgccgcctactatgtgggctatctgcagccccggaccttcctgctgaagtacaacgagaatggcaccatcacagacgcagtggattgcgccctggaccccctgtctgagacaaagtgtacactgaagagctttaccgtggagaagggcatctatcagacaagcaatttcagggtgcagcctaccgagtccatcgtgcgctttcccaatatcacaaacctgtgcccttttggcgaggtgttcaacgccaccagattcgccagcgtgtacgcctggaatcggaagagaatctccaactgcgtggccgactattctgtgctgtacaactccgcctctttcagcacctttaagtgctatggcgtgtctcccacaaagctgaatcatctgtgctttaccaacgtgtacgccgatagcttcgtgatcaggggagacgaagtgagacagatcgcaccaggacagacaggaaagatcgcagactacaattataagctgcctgacgatttcaccggctgcgtgatcgcctggaactccaacaatctggattctaaagtgggcggcaactacaattatctgtacaggctgtttcgcaagtccaatctgaagccattcgagcgggacatctccacagagatctaccaggccggctctaccccctgcaatggcgtggagggctttaactgttatttccctctgcagtcttacggcttccagccaacaaacggcgtgggctatcagccctacagagtggtggtgctgtcctttgagctgctgcacgcaccagcaacagtgtgcggcccaaagaagtctaccaatctggtgaagaacaagtgcgtgaacttcaacttcaacggactgaccggcacaggcgtgctgaccgagagcaataagaagttcctgccttttcagcagttcggcagggacatcgcagataccacagacgccgtgcgcgaccctcagaccctggagatcctggacatcacaccatgcagcttcggcggcgtgtccgtgatcacaccaggcaccaatacatccaaccaggtggccgtgctgtatcaggacgtgaattgtaccgaggtgcccgtggcaatccacgcagatcagctgacccctacatggcgggtgtactctaccggcagcaacgtgttccagacaagagccggatgcctgatcggagcagagcacgtgaacaatagctatgagtgcgacatccctatcggcgccggcatctgtgccagctaccagacccagacaaactccccatctggagcaggctccgtggccagccagtccatcatcgcctataccatgagcctgggcgccgagaacagcgtggcctactccaacaattctatcgccatccctaccaacttcacaatcagcgtgaccacagagatcctgccagtgtctatgaccaagacaagcgtggactgcacaatgtatatctgtggcgatagcaccgagtgctccaacctgctgctgcagtacggctccttttgtacccagctgaatagagccctgacaggcatcgccgtggagcaggataagaacacacaggaggtgttcgcccaggtgaagcagatctacaagaccccacccatcaaggactttggcggcttcaacttcagccagatcctgcctgatccaagcaagccctccaagaggtcttttatcgaggacctgctgttcaacaaggtgaccctggccgatgccggcttcatcaagcagtatggagattgcctgggagacatcgcagcccgcgacctgatctgtgcccagaagtttaatggcctgaccgtgctgcctccactgctgacagatgagatgatcgcccagtacacatctgccctgctggccggcaccatcacaagcggatggaccttcggcgcaggagccgccctgcagatcccttttgccatgcagatggcctataggttcaacggcatcggcgtgacccagaatgtgctgtacgagaaccagaagctgatcgccaatcagtttaacagcgccatcggcaagatccaggactctctgtcctctacagccagcgccctgggcaagctgcaggatgtggtgaatcagaacgcccaggccctgaataccctggtgaagcagctgagctccaacttcggcgccatctctagcgtgctgaatgacatcctgagccggctggacccccctgaggcagaggtgcagatcgacaggctgatcacaggccgcctgcagagcctgcagacctacgtgacacagcagctgatcagggcagcagagatcagagcctccgccaatctggccgccaccaagatgagcgagtgcgtgctgggacagtccaagagggtggacttttgtggcaagggctatcacctgatgtctttcccacagagcgcccctcacggcgtggtgtttctgcacgtgacctacgtgccagcccaggagaagaacttcaccacagcaccagccatctgccacgatggaaaggcacactttcctagggagggcgtgttcgtgtctaacggcacccactggtttgtgacacagcgcaatttctacgagccacagatcatcaccacagacaatacattcgtgagcggcaactgtgatgtggtgatcggcatcgtgaacaataccgtgtatgatccactgcagcccgagctggactcctttaaggaggagctggataagtacttcaagaatcacacctctcccgacgtggatctgggcgacatctccggcatcaatgcctctgtggtgaacatccagaaggagatcgaccggctgaacgaggtggccaagaatctgaacgagagcctgatcgatctgcaggagctgggcaagtatgagcagtacatcaagggctctggcagagagaacctgtatttccagggaggaggaggcagcggatacatccctgaggcaccaagggacggacaggcctacgtgcgcaaggatggcgagtgggtgctgctgtccacctttctgggccatcatcaccaccaccaccaccactga

SEQ ID NO: 4962 - DNA, 3846 bp, Artificial Sequence
  Description of Artificial Sequence: Synthetic polynucleotide
atgggcatcctgccaagcccaggaatgcccgccctgctgtctctggtgagcctgctgtccgtgctgctgatgggatgcgtggcagagacaggcacacagtgcgtgaacctgaccacaaggacccagctgccccctgcctataccaattctttcacacggggcgtgtactatcccgacaaggtgtttagaagctccgtgctgcactccacacaggatctgtttctgcctttcttttctaacgtgacctggttccacgccatccacgtgtccggcaccaatggcacaaagcggttcgacaatcccgtgctgccttttaacgatggcgtgtacttcgccagcaccgagaagtccaacatcatcagaggctggatctttggcaccacactggactctaagacacagagcctgctgatcgtgaacaatgccaccaacgtggtgatcaaggtgtgcgagttccagttttgtaatgatccattcctgggcgtgtactatcacaagaacaataagtcctggatggagtctgagtttcgcgtgtattctagcgccaacaattgcacatttgagtacgtgagccagcccttcctgatggacctggagggcaagcagggcaatttcaagaacctgagggagttcgtgtttaagaatatcgatggctacttcaagatctacagcaagcacaccccaatcaacctggtgcgcgacctgccacagggattctccgccctggagccactggtggatctgcccatcggcatcaacatcacccggtttcagacactgctggccctgcacagatcctacctgacaccaggcgactcctctagcggatggaccgcaggagctgccgcctactatgtgggctatctgcagccccggaccttcctgctgaagtacaacgagaatggcaccatcacagacgcagtggattgcgccctggaccccctgtctgagacaaagtgtacactgaagagctttaccgtggagaagggcatctatcagacaagcaatttcagggtgcagcctaccgagtccatcgtgcgctttcccaatatcacaaacctgtgcccttttggcgaggtgttcaacgccaccagattcgccagcgtgtacgcctggaatcggaagagaatctccaactgcgtggccgactattctgtgctgtacaactccgcctctttcagcacctttaagtgctatggcgtgtctcccacaaagctgaatgatctgtgctttaccaacgtgtacgccgatagcttcgtgatcaggggagacgaagtgagacagatcgcaccaggacagacaggaaagatcgcagactacaattataagctgcctgacgatttcaccggctgcgtgatcgcctggaactccaacaatctggattctaaactaggcggcaactacaattatctgtacaggctgtttcgcaagtccaatctgaagccattcgagcgggacatctccacagagatctaccaggccggctctaccccctgcaatggcgtggagggctttaactgttatttccctctgcagtcttacggcttccagccaacaaacggcgtgggctatcagccctacagagtggtggtgctgtcctttgagctgctgcacgcaccagcaacagtgtgcggcccaaagaagtctaccaatctggtgaagaacaagtgcgtgaacttcaacttcaacggactgaccggcacaggcgtgctgaccgagagcaataagaagttcctgccttttcagcagttcggcagggacatcgcagataccacagacgccgtgcgcgaccctcagaccctggagatcctggacatcacaccatgcagcttcggcggcgtgtccgtgatcacaccaggcaccaatacatccaaccaggtggccgtgctgtatcaggacgtgaattgtaccgaggtgcccgtggcaatccacgcagatcagctgacccctacatggcgggtgtactctaccggcagcaacgtgttccagacaagagccggatgcctgatcggagcagagcacgtgaacaatagctatgagtgcgacatccctatcggcgccggcatctgtgccagctaccagacccagacaaactccccatctggagcaggctccgtggccagccagtccatcatcgcctataccatgagcctgggcgccgagaacagcgtggcctactccaacaattctatcgccatccctaccaacttcacaatcagcgtgaccacagagatcctgccagtgtctatgaccaagacaagcgtggactgcacaatgtatatctgtggcgatagcaccgagtgctccaacctgctgctgcagtacggctccttttgtacccagctgaatagagccctgacaggcatcgccgtggagcaggataagaacacacaggaggtgttcgcccaggtgaagcagatctacaagaccccacccatcaaggactttggcggcttcaacttcagccagatcctgcctgatccaagcaagccctccaagaggtcttttatcgaggacctgctgttcaacaaggtgaccctggccgatgccggcttcatcaagcagtatggagattgcctgggagacatcgcagcccgcgacctgatctgtgcccagaagtttaatggcctgaccgtgctgcctccactgctgacagatgagatgatcgcccagtacacatctgccctgctggccggcaccatcacaagcggatggaccttcggcgcaggagccgccctgcagatcccttttgccatgcagatggcctataggttcaacggcatcggcgtgacccagaatgtgctgtacgagaaccagaagctgatcgccaatcagtttaacagcgccatcggcaagatccaggactctctgtcctctacagccagcgccctgggcaagctgcaggatgtggtgaatcagaacgcccaggccctgaataccctggtgaagcagctgagctccaacttcggcgccatctctagcgtgctgaatgacatcctgagccggctggacccccctgaggcagaggtgcagatcgacaggctgatcacaggccgcctgcagagcctgcagacctacgtgacacagcagctgatcagggcagcagagatcagagcctccgccaatctggccgccaccaagatgagcgagtgcgtgctgggacagtccaagagggtggacttttgtggcaagggctatcacctgatgtctttcccacagagcgcccctcacggcgtggtgtttctgcacgtgacctacgtgccagcccaggagaagaacttcaccacagcaccagccatctgccacgatggaaaggcacactttcctagggagggcgtgttcgtgtctaacggcacccactggtttgtgacacagcgcaatttctacgagccacagatcatcaccacagacaatacattcgtgagcggcaactgtgatgtggtgatcggcatcgtgaacaataccgtgtatgatccactgcagcccgagctggactcctttaaggaggagctggataagtacttcaagaatcacacctctcccgacgtggatctgggcgacatctccggcatcaatgcctctgtggtgaacatccagaaggagatcgaccggctgaacgaggtggccaagaatctgaacgagagcctgatcgatctgcaggagctgggcaagtatgagcagtacatcaagggctctggcagagagaacctgtatttccagggaggaggaggcagcggatacatccctgaggcaccaagggacggacaggcctacgtgcgcaaggatggcgagtgggtgctgctgtccacctttctgggccatcatcaccaccaccaccaccactga

SEQ ID NO: 4963 - DNA, 3846 bp, Artificial Sequence
  Description of Artificial Sequence: Synthetic polynucleotide
atgggcatcctgccaagcccaggaatgcccgccctgctgtctctggtgagcctgctgtccgtgctgctgatgggatgcgtggcagagacaggcacacagtgcgtgaacctgaccacaaggacccagctgccccctgcctataccaattctttcacacggggcgtgtactatcccgacaaggtgtttagaagctccgtgctgcactccacacaggatctgtttctgcctttcttttctaacgtgacctggttccacgccatccacgtgtccggcaccaatggcacaaagcggttcgacaatcccgtgctgccttttaacgatggcgtgtacttcgccagcaccgagaagtccaacatcatcagaggctggatctttggcaccacactggactctaagacacagagcctgctgatcgtgaacaatgccaccaacgtggtgatcaaggtgtgcgagttccagttttgtaatgatccattcctgggcgtgtactatcacaagaacaataagtcctggatggagtctgagtttcgcgtgtattctagcgccaacaattgcacatttgagtacgtgagccagcccttcctgatggacctggagggcaagcagggcaatttcaagaacctgagggagttcgtgtttaagaatatcgatggctacttcaagatctacagcaagcacaccccaatcaacctggtgcgcgacctgccacagggattctccgccctggagccactggtggatctgcccatcggcatcaacatcacccggtttcagacactgctggccctgcacagatcctacctgacaccaggcgactcctctagcggatggaccgcaggagctgccgcctactatgtgggctatctgcagccccggaccttcctgctgaagtacaacgagaatggcaccatcacagacgcagtggattgcgccctggaccccctgtctgagacaaagtgtacactgaagagctttaccgtggagaagggcatctatcagacaagcaatttcagggtgcagcctaccgagtccatcgtgcgctttcccaatatcacaaacctgtgcccttttggcgaggtgttcaacgccaccagattcgccagcgtgtacgcctggaatcggaagagaatctccaactgcgtggccgactattctgtgctgtacaactccgcctctttcagcacctttaagtgctatggcgtgtctcccacaaagctgaatgatctgtgctttaccaacgtgtacgccgatagcttcgtgatcaggggagacgaagtgagacagatcgcaccaggacagacaggaaagatcgcagactacaattataagctgcctgacgatttcaccggctgcgtgatcgcctggaactccaacaatctggattctaaagtgggcggcaactacaattatctgtacaggctgtttcgcaagtccaatctgaagccattcgagcgggacatctccaacgagatctaccaggccggctctaccccctgcaatggcgtggagggctttaactgttatttccctctgcagtcttacggcttccagccaacaaacggcgtgggctatcagccctacagagtggtggtgctgtcctttgagctgctgcacgcaccagcaacagtgtgcggcccaaagaagtctaccaatctggtgaagaacaagtgcgtgaacttcaacttcaacggactgaccggcacaggcgtgctgaccgagagcaataagaagttcctgccttttcagcagttcggcagggacatcgcagataccacagacgccgtgcgcgaccctcagaccctggagatcctggacatcacaccatgcagcttcggcggcgtgtccgtgatcacaccaggcaccaatacatccaaccaggtggccgtgctgtatcaggacgtgaattgtaccgaggtgcccgtggcaatccacgcagatcagctgacccctacatggcgggtgtactctaccggcagcaacgtgttccagacaagagccggatgcctgatcggagcagagcacgtgaacaatagctatgagtgcgacatccctatcggcgccggcatctgtgccagctaccagacccagacaaactccccatctggagcaggctccgtggccagccagtccatcatcgcctataccatgagcctgggcgccgagaacagcgtggcctactccaacaattctatcgccatccctaccaacttcacaatcagcgtgaccacagagatcctgccagtgtctatgaccaagacaagcgtggactgcacaatgtatatctgtggcgatagcaccgagtgctccaacctgctgctgcagtacggctccttttgtacccagctgaatagagccctgacaggcatcgccgtggagcaggataagaacacacaggaggtgttcgcccaggtgaagcagatctacaagaccccacccatcaaggactttggcggcttcaacttcagccagatcctgcctgatccaagcaagccctccaagaggtcttttatcgaggacctgctgttcaacaaggtgaccctggccgatgccggcttcatcaagcagtatggagattgcctgggagacatcgcagcccgcgacctgatctgtgcccagaagtttaatggcctgaccgtgctgcctccactgctgacagatgagatgatcgcccagtacacatctgccctgctggccggcaccatcacaagcggatggaccttcggcgcaggagccgccctgcagatcccttttgccatgcagatggcctataggttcaacggcatcggcgtgacccagaatgtgctgtacgagaaccagaagctgatcgccaatcagtttaacagcgccatcggcaagatccaggactctctgtcctctacagccagcgccctgggcaagctgcaggatgtggtgaatcagaacgcccaggccctgaataccctggtgaagcagctgagctccaacttcggcgccatctctagcgtgctgaatgacatcctgagccggctggacccccctgaggcagaggtgcagatcgacaggctgatcacaggccgcctgcagagcctgcagacctacgtgacacagcagctgatcagggcagcagagatcagagcctccgccaatctggccgccaccaagatgagcgagtgcgtgctgggacagtccaagagggtggacttttgtggcaagggctatcacctgatgtctttcccacagagcgcccctcacggcgtggtgtttctgcacgtgacctacgtgccagcccaggagaagaacttcaccacagcaccagccatctgccacgatggaaaggcacactttcctagggagggcgtgttcgtgtctaacggcacccactggtttgtgacacagcgcaatttctacgagccacagatcatcaccacagacaatacattcgtgagcggcaactgtgatgtggtgatcggcatcgtgaacaataccgtgtatgatccactgcagcccgagctggactcctttaaggaggagctggataagtacttcaagaatcacacctctcccgacgtggatctgggcgacatctccggcatcaatgcctctgtggtgaacatccagaaggagatcgaccggctgaacgaggtggccaagaatctgaacgagagcctgatcgatctgcaggagctgggcaagtatgagcagtacatcaagggctctggcagagagaacctgtatttccagggaggaggaggcagcggatacatccctgaggcaccaagggacggacaggcctacgtgcgcaaggatggcgagtgggtgctgctgtccacctttctgggccatcatcaccaccaccaccaccactga

SEQ ID NO: 4964 - DNA, 3846 bp, Artificial Sequence
  Description of Artificial Sequence: Synthetic polynucleotide
atgggcatcctgccaagcccaggaatgcccgccctgctgtctctggtgagcctgctgtccgtgctgctgatgggatgcgtggcagagacaggcacacagtgcgtgaacctgaccacaaggacccagctgccccctgcctataccaattctttcacacggggcgtgtactatcccgacaaggtgtttagaagctccgtgctgcactccacacaggatctgtttctgcctttcttttctaacgtgacctggttccacgccatccacgtgtccggcaccaatggcacaaagcggttcgacaatcccgtgctgccttttaacgatggcgtgtacttcgccagcaccgagaagtccaacatcatcagaggctggatctttggcaccacactggactctaagacacagagcctgctgatcgtgaacaatgccaccaacgtggtgatcaaggtgtgcgagttccagttttgtaatgatccattcctgggcgtgtactatcacaagaacaataagtcctggatggagtctgagtttcgcgtgtattctagcgccaacaattgcacatttgagtacgtgagccagcccttcctgatggacctggagggcaagcagggcaatttcaagaacctgagggagttcgtgtttaagaatatcgatggctacttcaagatctacagcaagcacaccccaatcaacctggtgcgcgacctgccacagggattctccgccctggagccactggtggatctgcccatcggcatcaacatcacccggtttcagacactgctggccctgcacagatcctacctgacaccaggcgactcctctagcggatggaccgcaggagctgccgcctactatgtgggctatctgcagccccggaccttcctgctgaagtacaacgagaatggcaccatcacagacgcagtggattgcgccctggaccccctgtctgagacaaagtgtacactgaagagctttaccgtggagaagggcatctatcagacaagcaatttcagggtgcagcctaccgagtccatcgtgcgctttcccaatatcacaaacctgtgcccttttggcgaggtgttcaacgccaccagattcgccagcgtgtacgcctggaatcggaagagaatctccaactgcgtggccgactattctgtgctgtacaactccgcctctttcagcacctttaagtgctatggcgtgtctcccacaaagctgaatgatctgtgctttaccaacgtgtacgccgatagcttcgtgatcaggggagacgaagtgagacagatcgcaccaggacagacaggaaagatcgcagactacaattataagctgcctgacgatttcaccggctgcgtgatcgcctggaactccaacaatctggattctaaagtgggcggcaactacaattatctgtacaggctgtttcgcaagtccaatctgaagccattcgagcgggacatctccacaatgatctaccaggccggctctaccccctgcaatggcgtggagggctttaactgttatttccctctgcagtcttacggcttccagccaacaaacggcgtgggctatcagccctacagagtggtggtgctgtcctttgagctgctgcacgcaccagcaacagtgtgcggcccaaagaagtctaccaatctggtgaagaacaagtgcgtgaacttcaacttcaacggactgaccggcacaggcgtgctgaccgagagcaataagaagttcctgccttttcagcagttcggcagggacatcgcagataccacagacgccgtgcgcgaccctcagaccctggagatcctggacatcacaccatgcagcttcggcggcgtgtccgtgatcacaccaggcaccaatacatccaaccaggtggccgtgctgtatcaggacgtgaattgtaccgaggtgcccgtggcaatccacgcagatcagctgacccctacatggcgggtgtactctaccggcagcaacgtgttccagacaagagccggatgcctgatcggagcagagcacgtgaacaatagctatgagtgcgacatccctatcggcgccggcatctgtgccagctaccagacccagacaaactccccatctggagcaggctccgtggccagccagtccatcatcgcctataccatgagcctgggcgccgagaacagcgtggcctactccaacaattctatcgccatccctaccaacttcacaatcagcgtgaccacagagatcctgccagtgtctatgaccaagacaagcgtggactgcacaatgtatatctgtggcgatagcaccgagtgctccaacctgctgctgcagtacggctccttttgtacccagctgaatagagccctgacaggcatcgccgtggagcaggataagaacacacaggaggtgttcgcccaggtgaagcagatctacaagaccccacccatcaaggactttggcggcttcaacttcagccagatcctgcctgatccaagcaagccctccaagaggtcttttatcgaggacctgctgttcaacaaggtgaccctggccgatgccggcttcatcaagcagtatggagattgcctgggagacatcgcagcccgcgacctgatctgtgcccagaagtttaatggcctgaccgtgctgcctccactgctgacagatgagatgatcgcccagtacacatctgccctgctggccggcaccatcacaagcggatggaccttcggcgcaggagccgccctgcagatcccttttgccatgcagatggcctataggttcaacggcatcggcgtgacccagaatgtgctgtacgagaaccagaagctgatcgccaatcagtttaacagcgccatcggcaagatccaggactctctgtcctctacagccagcgccctgggcaagctgcaggatgtggtgaatcagaacgcccaggccctgaataccctggtgaagcagctgagctccaacttcggcgccatctctagcgtgctgaatgacatcctgagccggctggacccccctgaggcagaggtgcagatcgacaggctgatcacaggccgcctgcagagcctgcagacctacgtgacacagcagctgatcagggcagcagagatcagagcctccgccaatctggccgccaccaagatgagcgagtgcgtgctgggacagtccaagagggtggacttttgtggcaagggctatcacctgatgtctttcccacagagcgcccctcacggcgtggtgtttctgcacgtgacctacgtgccagcccaggagaagaacttcaccacagcaccagccatctgccacgatggaaaggcacactttcctagggagggcgtgttcgtgtctaacggcacccactggtttgtgacacagcgcaatttctacgagccacagatcatcaccacagacaatacattcgtgagcggcaactgtgatgtggtgatcggcatcgtgaacaataccgtgtatgatccactgcagcccgagctggactcctttaaggaggagctggataagtacttcaagaatcacacctctcccgacgtggatctgggcgacatctccggcatcaatgcctctgtggtgaacatccagaaggagatcgaccggctgaacgaggtggccaagaatctgaacgagagcctgatcgatctgcaggagctgggcaagtatgagcagtacatcaagggctctggcagagagaacctgtatttccagggaggaggaggcagcggatacatccctgaggcaccaagggacggacaggcctacgtgcgcaaggatggcgagtgggtgctgctgtccacctttctgggccatcatcaccaccaccaccaccactga

SEQ ID NO: 4965 - DNA, 3846 bp, Artificial Sequence
  Description of Artificial Sequence: Synthetic polynucleotide
atgggcatcctgccaagcccaggaatgcccgccctgctgtctctggtgagcctgctgtccgtgctgctgatgggatgcgtggcagagacaggcacacagtgcgtgaacctgaccacaaggacccagctgccccctgcctataccaattctttcacacggggcgtgtactatcccgacaaggtgtttagaagctccgtgctgcactccacacaggatctgtttctgcctttcttttctaacgtgacctggttccacgccatccacgtgtccggcaccaatggcacaaagcggttcgacaatcccgtgctgccttttaacgatggcgtgtacttcgccagcaccgagaagtccaacatcatcagaggctggatctttggcaccacactggactctaagacacagagcctgctgatcgtgaacaatgccaccaacgtggtgatcaaggtgtgcgagttccagttttgtaatgatccattcctgggcgtgtactatcacaagaacaataagtcctggatggagtctgagtttcgcgtgtattctagcgccaacaattgcacatttgagtacgtgagccagcccttcctgatggacctggagggcaagcagggcaatttcaagaacctgagggagttcgtgtttaagaatatcgatggctacttcaagatctacagcaagcacaccccaatcaacctggtgcgcgacctgccacagggattctccgccctggagccactggtggatctgcccatcggcatcaacatcacccggtttcagacactgctggccctgcacagatcctacctgacaccaggcgactcctctagcggatggaccgcaggagctgccgcctactatgtgggctatctgcagccccggaccttcctgctgaagtacaacgagaatggcaccatcacagacgcagtggattgcgccctggaccccctgtctgagacaaagtgtacactgaagagctttaccgtggagaagggcatctatcagacaagcaatttcagggtgcagcctaccgagtccatcgtgcgctttcccaatatcacaaacctgtgcccttttggcgaggtgttcaacgccaccagattcgccagcgtgtacgcctggaatcggaagagaatctccaactgcgtggccgactattctgtgctgtacaactccgcctctttcagcacctttaagtgctatggcgtgtctcccacaaagctgaatgatctgtgctttaccaacgtgtacgccgatagcttcgtgatcaggggagacgaagtgagacagatcgcaccaggacagacaggaaagatcgcagactacaattataagctgcctgacgatttcaccggctgcgtgatcgcctggaactccaacaatctggattctaaagtgggcggcaactacaattatctgtacaggctgtttcgcaagtccaatctgaagccattcgagcgggacatctccacagagatctaccaggccggctcttcgccctgcaatggcgtggagggctttaactgttatttccctctgcagtcttacggcttccagccaacaaacggcgtgggctatcagccctacagagtggtggtgctgtcctttgagctgctgcacgcaccagcaacagtgtgcggcccaaagaagtctaccaatctggtgaagaacaagtgcgtgaacttcaacttcaacggactgaccggcacaggcgtgctgaccgagagcaataagaagttcctgccttttcagcagttcggcagggacatcgcagataccacagacgccgtgcgcgaccctcagaccctggagatcctggacatcacaccatgcagcttcggcggcgtgtccgtgatcacaccaggcaccaatacatccaaccaggtggccgtgctgtatcaggacgtgaattgtaccgaggtgcccgtggcaatccacgcagatcagctgacccctacatggcgggtgtactctaccggcagcaacgtgttccagacaagagccggatgcctgatcggagcagagcacgtgaacaatagctatgagtgcgacatccctatcggcgccggcatctgtgccagctaccagacccagacaaactccccatctggagcaggctccgtggccagccagtccatcatcgcctataccatgagcctgggcgccgagaacagcgtggcctactccaacaattctatcgccatccctaccaacttcacaatcagcgtgaccacagagatcctgccagtgtctatgaccaagacaagcgtggactgcacaatgtatatctgtggcgatagcaccgagtgctccaacctgctgctgcagtacggctccttttgtacccagctgaatagagccctgacaggcatcgccgtggagcaggataagaacacacaggaggtgttcgcccaggtgaagcagatctacaagaccccacccatcaaggactttggcggcttcaacttcagccagatcctgcctgatccaagcaagccctccaagaggtcttttatcgaggacctgctgttcaacaaggtgaccctggccgatgccggcttcatcaagcagtatggagattgcctgggagacatcgcagcccgcgacctgatctgtgcccagaagtttaatggcctgaccgtgctgcctccactgctgacagatgagatgatcgcccagtacacatctgccctgctggccggcaccatcacaagcggatggaccttcggcgcaggagccgccctgcagatcccttttgccatgcagatggcctataggttcaacggcatcggcgtgacccagaatgtgctgtacgagaaccagaagctgatcgccaatcagtttaacagcgccatcggcaagatccaggactctctgtcctctacagccagcgccctgggcaagctgcaggatgtggtgaatcagaacgcccaggccctgaataccctggtgaagcagctgagctccaacttcggcgccatctctagcgtgctgaatgacatcctgagccggctggacccccctgaggcagaggtgcagatcgacaggctgatcacaggccgcctgcagagcctgcagacctacgtgacacagcagctgatcagggcagcagagatcagagcctccgccaatctggccgccaccaagatgagcgagtgcgtgctgggacagtccaagagggtggacttttgtggcaagggctatcacctgatgtctttcccacagagcgcccctcacggcgtggtgtttctgcacgtgacctacgtgccagcccaggagaagaacttcaccacagcaccagccatctgccacgatggaaaggcacactttcctagggagggcgtgttcgtgtctaacggcacccactggtttgtgacacagcgcaatttctacgagccacagatcatcaccacagacaatacattcgtgagcggcaactgtgatgtggtgatcggcatcgtgaacaataccgtgtatgatccactgcagcccgagctggactcctttaaggaggagctggataagtacttcaagaatcacacctctcccgacgtggatctgggcgacatctccggcatcaatgcctctgtggtgaacatccagaaggagatcgaccggctgaacgaggtggccaagaatctgaacgagagcctgatcgatctgcaggagctgggcaagtatgagcagtacatcaagggctctggcagagagaacctgtatttccagggaggaggaggcagcggatacatccctgaggcaccaagggacggacaggcctacgtgcgcaaggatggcgagtgggtgctgctgtccacctttctgggccatcatcaccaccaccaccaccactga

SEQ ID NO: 4966 - DNA, 3846 bp, Artificial Sequence
  Description of Artificial Sequence: Synthetic polynucleotide
atgggcatcctgccaagcccaggaatgcccgccctgctgtctctggtgagcctgctgtccgtgctgctgatgggatgcgtggcagagacaggcacacagtgcgtgaacctgaccacaaggacccagctgccccctgcctataccaattctttcacacggggcgtgtactatcccgacaaggtgtttagaagctccgtgctgcactccacacaggatctgtttctgcctttcttttctaacgtgacctggttccacgccatccacgtgtccggcaccaatggcacaaagcggttcgacaatcccgtgctgccttttaacgatggcgtgtacttcgccagcaccgagaagtccaacatcatcagaggctggatctttggcaccacactggactctaagacacagagcctgctgatcgtgaacaatgccaccaacgtggtgatcaaggtgtgcgagttccagttttgtaatgatccattcctgggcgtgtactatcacaagaacaataagtcctggatggagtctgagtttcgcgtgtattctagcgccaacaattgcacatttgagtacgtgagccagcccttcctgatggacctggagggcaagcagggcaatttcaagaacctgagggagttcgtgtttaagaatatcgatggctacttcaagatctacagcaagcacaccccaatcaacctggtgcgcgacctgccacagggattctccgccctggagccactggtggatctgcccatcggcatcaacatcacccggtttcagacactgctggccctgcacagatcctacctgacaccaggcgactcctctagcggatggaccgcaggagctgccgcctactatgtgggctatctgcagccccggaccttcctgctgaagtacaacgagaatggcaccatcacagacgcagtggattgcgccctggaccccctgtctgagacaaagtgtacactgaagagctttaccgtggagaagggcatctatcagacaagcaatttcagggtgcagcctaccgagtccatcgtgcgctttcccaatatcacaaacctgtgcccttttggcgaggtgttcaacgccaccagattcgccagcgtgtacgcctggaatcggaagagaatctccaactgcgtggccgactattctgtgctgtacaactccgcctctttcagcacctttaagtgctatggcgtgtctcccacaaagctgaatgatctgtgctttaccaacgtgtacgccgatagcttcgtgatcaggggagacgaagtgagacagatcgcaccaggacagacaggaaagatcgcagactacacttataagctgcctgacgatttcaccggctgcgtgatcgcctggaactccaacaatctggattctaaagtgggcggcaactacaattatctgtacaggctgtttcgcaagtccaatctgaagccattcgagcgggacatctccacagagatctaccaggccggctctaccccctgcaatggcgtggagggctttaactgttatttccctctgcagtcttacggcttccagccaacaaacggcgtgggctatcagccctacagagtggtggtgctgtcctttgagctgctgcacgcaccagcaacagtgtgcggcccaaagaagtctaccaatctggtgaagaacaagtgcgtgaacttcaacttcaacggactgaccggcacaggcgtgctgaccgagagcaataagaagttcctgccttttcagcagttcggcagggacatcgcagataccacagacgccgtgcgcgaccctcagaccctggagatcctggacatcacaccatgcagcttcggcggcgtgtccgtgatcacaccaggcaccaatacatccaaccaggtggccgtgctgtatcaggacgtgaattgtaccgaggtgcccgtggcaatccacgcagatcagctgacccctacatggcgggtgtactctaccggcagcaacgtgttccagacaagagccggatgcctgatcggagcagagcacgtgaacaatagctatgagtgcgacatccctatcggcgccggcatctgtgccagctaccagacccagacaaactccccatctggagcaggctccgtggccagccagtccatcatcgcctataccatgagcctgggcgccgagaacagcgtggcctactccaacaattctatcgccatccctaccaacttcacaatcagcgtgaccacagagatcctgccagtgtctatgaccaagacaagcgtggactgcacaatgtatatctgtggcgatagcaccgagtgctccaacctgctgctgcagtacggctccttttgtacccagctgaatagagccctgacaggcatcgccgtggagcaggataagaacacacaggaggtgttcgcccaggtgaagcagatctacaagaccccacccatcaaggactttggcggcttcaacttcagccagatcctgcctgatccaagcaagccctccaagaggtcttttatcgaggacctgctgttcaacaaggtgaccctggccgatgccggcttcatcaagcagtatggagattgcctgggagacatcgcagcccgcgacctgatctgtgcccagaagtttaatggcctgaccgtgctgcctccactgctgacagatgagatgatcgcccagtacacatctgccctgctggccggcaccatcacaagcggatggaccttcggcgcaggagccgccctgcagatcccttttgccatgcagatggcctataggttcaacggcatcggcgtgacccagaatgtgctgtacgagaaccagaagctgatcgccaatcagtttaacagcgccatcggcaagatccaggactctctgtcctctacagccagcgccctgggcaagctgcaggatgtggtgaatcagaacgcccaggccctgaataccctggtgaagcagctgagctccaacttcggcgccatctctagcgtgctgaatgacatcctgagccggctggacccccctgaggcagaggtgcagatcgacaggctgatcacaggccgcctgcagagcctgcagacctacgtgacacagcagctgatcagggcagcagagatcagagcctccgccaatctggccgccaccaagatgagcgagtgcgtgctgggacagtccaagagggtggacttttgtggcaagggctatcacctgatgtctttcccacagagcgcccctcacggcgtggtgtttctgcacgtgacctacgtgccagcccaggagaagaacttcaccacagcaccagccatctgccacgatggaaaggcacactttcctagggagggcgtgttcgtgtctaacggcacccactggtttgtgacacagcgcaatttctacgagccacagatcatcaccacagacaatacattcgtgagcggcaactgtgatgtggtgatcggcatcgtgaacaataccgtgtatgatccactgcagcccgagctggactcctttaaggaggagctggataagtacttcaagaatcacacctctcccgacgtggatctgggcgacatctccggcatcaatgcctctgtggtgaacatccagaaggagatcgaccggctgaacgaggtggccaagaatctgaacgagagcctgatcgatctgcaggagctgggcaagtatgagcagtacatcaagggctctggcagagagaacctgtatttccagggaggaggaggcagcggatacatccctgaggcaccaagggacggacaggcctacgtgcgcaaggatggcgagtgggtgctgctgtccacctttctgggccatcatcaccaccaccaccaccactga

SEQ ID NO: 4967 - DNA, 3846 bp, Artificial Sequence
  Description of Artificial Sequence: Synthetic polynucleotide
atgggcatcctgccaagcccaggaatgcccgccctgctgtctctggtgagcctgctgtccgtgctgctgatgggatgcgtggcagagacaggcacacagtgcgtgaacctgaccacaaggacccagctgccccctgcctataccaattctttcacacggggcgtgtactatcccgacaaggtgtttagaagctccgtgctgcactccacacaggatctgtttctgcctttcttttctaacgtgacctggttccacgccatccacgtgtccggcaccaatggcacaaagcggttcgacaatcccgtgctgccttttaacgatggcgtgtacttcgccagcaccgagaagtccaacatcatcagaggctggatctttggcaccacactggactctaagacacagagcctgctgatcgtgaacaatgccaccaacgtggtgatcaaggtgtgcgagttccagttttgtaatgatccattcctgggcgtgtactatcacaagaacaataagtcctggatggagtctgagtttcgcgtgtattctagcgccaacaattgcacatttgagtacgtgagccagcccttcctgatggacctggagggcaagcagggcaatttcaagaacctgagggagttcgtgtttaagaatatcgatggctacttcaagatctacagcaagcacaccccaatcaacctggtgcgcgacctgccacagggattctccgccctggagccactggtggatctgcccatcggcatcaacatcacccggtttcagacactgctggccctgcacagatcctacctgacaccaggcgactcctctagcggatggaccgcaggagctgccgcctactatgtgggctatctgcagccccggaccttcctgctgaagtacaacgagaatggcaccatcacagacgcagtggattgcgccctggaccccctgtctgagacaaagtgtacactgaagagctttaccgtggagaagggcatctatcagacaagcaatttcagggtgcagcctaccgagtccatcgtgcgctttcccaatatcacaaacctgtgcccttttggcgaggtgttcaacgccaccagattcgccagcgtgtacgcctggaatcggaagagaatctccaactgcgtggccgactattctgtgctgtacaactccgcctctttcagcacctttaagtgctatggcgtgtctcccacaaagctgaatgatctgtgctttaccaacgtgtacgccgatagcttcgtgatcaggggagacgaagtgagacagatcgcaccaggacagacaggaaagatcgcagactacaattataagctgcctgacgatttcaccggctgcgtgatcgcctggaactccaacaatctggattctaaagtgggcggcaactacaattatctgtacaggctgtttcgcaagtccaatctgaagccattcgagcgggacatctccacagagtgttaccaggccggctctaccccctgcaatggcgtggagggctttaactgttatttccctctgcagtcttacggcttccagccaacaaacggcgtgggctatcagccctacagagtggtggtgctgtcctttgagctgctgcacgcaccagcaacagtgtgcggcccaaagaagtctaccaatctggtgaagaacaagtgcgtgaacttcaacttcaacggactgaccggcacaggcgtgctgaccgagagcaataagaagttcctgccttttcagcagttcggcagggacatcgcagataccacagacgccgtgcgcgaccctcagaccctggagatcctggacatcacaccatgcagcttcggcggcgtgtccgtgatcacaccaggcaccaatacatccaaccaggtggccgtgctgtatcaggacgtgaattgtaccgaggtgcccgtggcaatccacgcagatcagctgacccctacatggcgggtgtactctaccggcagcaacgtgttccagacaagagccggatgcctgatcggagcagagcacgtgaacaatagctatgagtgcgacatccctatcggcgccggcatctgtgccagctaccagacccagacaaactccccatctggagcaggctccgtggccagccagtccatcatcgcctataccatgagcctgggcgccgagaacagcgtggcctactccaacaattctatcgccatccctaccaacttcacaatcagcgtgaccacagagatcctgccagtgtctatgaccaagacaagcgtggactgcacaatgtatatctgtggcgatagcaccgagtgctccaacctgctgctgcagtacggctccttttgtacccagctgaatagagccctgacaggcatcgccgtggagcaggataagaacacacaggaggtgttcgcccaggtgaagcagatctacaagaccccacccatcaaggactttggcggcttcaacttcagccagatcctgcctgatccaagcaagccctccaagaggtcttttatcgaggacctgctgttcaacaaggtgaccctggccgatgccggcttcatcaagcagtatggagattgcctgggagacatcgcagcccgcgacctgatctgtgcccagaagtttaatggcctgaccgtgctgcctccactgctgacagatgagatgatcgcccagtacacatctgccctgctggccggcaccatcacaagcggatggaccttcggcgcaggagccgccctgcagatcccttttgccatgcagatggcctataggttcaacggcatcggcgtgacccagaatgtgctgtacgagaaccagaagctgatcgccaatcagtttaacagcgccatcggcaagatccaggactctctgtcctctacagccagcgccctgggcaagctgcaggatgtggtgaatcagaacgcccaggccctgaataccctggtgaagcagctgagctccaacttcggcgccatctctagcgtgctgaatgacatcctgagccggctggacccccctgaggcagaggtgcagatcgacaggctgatcacaggccgcctgcagagcctgcagacctacgtgacacagcagctgatcagggcagcagagatcagagcctccgccaatctggccgccaccaagatgagcgagtgcgtgctgggacagtccaagagggtggacttttgtggcaagggctatcacctgatgtctttcccacagagcgcccctcacggcgtggtgtttctgcacgtgacctacgtgccagcccaggagaagaacttcaccacagcaccagccatctgccacgatggaaaggcacactttcctagggagggcgtgttcgtgtctaacggcacccactggtttgtgacacagcgcaatttctacgagccacagatcatcaccacagacaatacattcgtgagcggcaactgtgatgtggtgatcggcatcgtgaacaataccgtgtatgatccactgcagcccgagctggactcctttaaggaggagctggataagtacttcaagaatcacacctctcccgacgtggatctgggcgacatctccggcatcaatgcctctgtggtgaacatccagaaggagatcgaccggctgaacgaggtggccaagaatctgaacgagagcctgatcgatctgcaggagctgggcaagtatgagcagtacatcaagggctctggcagagagaacctgtatttccagggaggaggaggcagcggatacatccctgaggcaccaagggacggacaggcctacgtgcgcaaggatggcgagtgggtgctgctgtccacctttctgggccatcatcaccaccaccaccaccactga

SEQ ID NO: 4968 - DNA, 3846 bp, Artificial Sequence
  Description of Artificial Sequence: Synthetic polynucleotide
atgggcatcctgccaagcccaggaatgcccgccctgctgtctctggtgagcctgctgtccgtgctgctgatgggatgcgtggcagagacaggcacacagtgcgtgaacctgaccacaaggacccagctgccccctgcctataccaattctttcacacggggcgtgtactatcccgacaaggtgtttagaagctccgtgctgcactccacacaggatctgtttctgcctttcttttctaacgtgacctggttccacgccatccacgtgtccggcaccaatggcacaaagcggttcgacaatcccgtgctgccttttaacgatggcgtgtacttcgccagcaccgagaagtccaacatcatcagaggctggatctttggcaccacactggactctaagacacagagcctgctgatcgtgaacaatgccaccaacgtggtgatcaaggtgtgcgagttccagttttgtaatgatccattcctgggcgtgtactatcacaagaacaataagtcctggatggagtctgagtttcgcgtgtattctagcgccaacaattgcacatttgagtacgtgagccagcccttcctgatggacctggagggcaagcagggcaatttcaagaacctgagggagttcgtgtttaagaatatcgatggctacttcaagatctacagcaagcacaccccaatcaacctggtgcgcgacctgccacagggattctccgccctggagccactggtggatctgcccatcggcatcaacatcacccggtttcagacactgctggccctgcacagatcctacctgacaccaggcgactcctctagcggatggaccgcaggagctgccgcctactatgtgggctatctgcagccccggaccttcctgctgaagtacaacgagaatggcaccatcacagacgcagtggattgcgccctggaccccctgtctgagacaaagtgtacactgaagagctttaccgtggagaagggcatctatcagacaagcaatttcagggtgcagcctaccgagtccatcgtgcgctttcccaatatcacaaacctgtgcccttttggcgaggtgttcaacgccaccagattcgccagcgtgtacgcctggaatcggaagagaatctccaactgcgtggccgactattctgcgctgtacaactccgcctctttcagcacctttaagtgctatggcgtgtctcccacaaagctgaatgatctgtgctttaccaacgtgtacgccgatagcttcgtgatcaggggagacgaagtgagacagatcgcaccaggacagacaggaaagatcgcagactacaattataagctgcctgacgatttcaccggctgcgtgatcgcctggaactccaacaatctggattctaaagtgggcggcaactacaattatctgtacaggctgtttcgcaagtccaatctgaagccattcgagcgggacatctccacagagatctaccaggccggctctaccccctgcaatggcgtggagggctttaactgttatttccctctgcagtcttacggcttccagccaacaaacggcgtgggctatcagccctacagagtggtggtgctgtcctttgagctgctgcacgcaccagcaacagtgtgcggcccaaagaagtctaccaatctggtgaagaacaagtgcgtgaacttcaacttcaacggactgaccggcacaggcgtgctgaccgagagcaataagaagttcctgccttttcagcagttcggcagggacatcgcagataccacagacgccgtgcgcgaccctcagaccctggagatcctggacatcacaccatgcagcttcggcggcgtgtccgtgatcacaccaggcaccaatacatccaaccaggtggccgtgctgtatcaggacgtgaattgtaccgaggtgcccgtggcaatccacgcagatcagctgacccctacatggcgggtgtactctaccggcagcaacgtgttccagacaagagccggatgcctgatcggagcagagcacgtgaacaatagctatgagtgcgacatccctatcggcgccggcatctgtgccagctaccagacccagacaaactccccatctggagcaggctccgtggccagccagtccatcatcgcctataccatgagcctgggcgccgagaacagcgtggcctactccaacaattctatcgccatccctaccaacttcacaatcagcgtgaccacagagatcctgccagtgtctatgaccaagacaagcgtggactgcacaatgtatatctgtggcgatagcaccgagtgctccaacctgctgctgcagtacggctccttttgtacccagctgaatagagccctgacaggcatcgccgtggagcaggataagaacacacaggaggtgttcgcccaggtgaagcagatctacaagaccccacccatcaaggactttggcggcttcaacttcagccagatcctgcctgatccaagcaagccctccaagaggtcttttatcgaggacctgctgttcaacaaggtgaccctggccgatgccggcttcatcaagcagtatggagattgcctgggagacatcgcagcccgcgacctgatctgtgcccagaagtttaatggcctgaccgtgctgcctccactgctgacagatgagatgatcgcccagtacacatctgccctgctggccggcaccatcacaagcggatggaccttcggcgcaggagccgccctgcagatcccttttgccatgcagatggcctataggttcaacggcatcggcgtgacccagaatgtgctgtacgagaaccagaagctgatcgccaatcagtttaacagcgccatcggcaagatccaggactctctgtcctctacagccagcgccctgggcaagctgcaggatgtggtgaatcagaacgcccaggccctgaataccctggtgaagcagctgagctccaacttcggcgccatctctagcgtgctgaatgacatcctgagccggctggacccccctgaggcagaggtgcagatcgacaggctgatcacaggccgcctgcagagcctgcagacctacgtgacacagcagctgatcagggcagcagagatcagagcctccgccaatctggccgccaccaagatgagcgagtgcgtgctgggacagtccaagagggtggacttttgtggcaagggctatcacctgatgtctttcccacagagcgcccctcacggcgtggtgtttctgcacgtgacctacgtgccagcccaggagaagaacttcaccacagcaccagccatctgccacgatggaaaggcacactttcctagggagggcgtgttcgtgtctaacggcacccactggtttgtgacacagcgcaatttctacgagccacagatcatcaccacagacaatacattcgtgagcggcaactgtgatgtggtgatcggcatcgtgaacaataccgtgtatgatccactgcagcccgagctggactcctttaaggaggagctggataagtacttcaagaatcacacctctcccgacgtggatctgggcgacatctccggcatcaatgcctctgtggtgaacatccagaaggagatcgaccggctgaacgaggtggccaagaatctgaacgagagcctgatcgatctgcaggagctgggcaagtatgagcagtacatcaagggctctggcagagagaacctgtatttccagggaggaggaggcagcggatacatccctgaggcaccaagggacggacaggcctacgtgcgcaaggatggcgagtgggtgctgctgtccacctttctgggccatcatcaccaccaccaccaccactga

SEQ ID NO: 4969 - DNA, 3846 bp, Artificial Sequence
  Description of Artificial Sequence: Synthetic polynucleotide
atgggcatcctgccaagcccaggaatgcccgccctgctgtctctggtgagcctgctgtccgtgctgctgatgggatgcgtggcagagacaggcacacagtgcgtgaacctgaccacaaggacccagctgccccctgcctataccaattctttcacacggggcgtgtactatcccgacaaggtgtttagaagctccgtgctgcactccacacaggatctgtttctgcctttcttttctaacgtgacctggttccacgccatccacgtgtccggcaccaatggcacaaagcggttcgacaatcccgtgctgccttttaacgatggcgtgtacttcgccagcaccgagaagtccaacatcatcagaggctggatctttggcaccacactggactctaagacacagagcctgctgatcgtgaacaatgccaccaacgtggtgatcaaggtgtgcgagttccagttttgtaatgatccattcctgggcgtgtactatcacaagaacaataagtcctggatggagtctgagtttcgcgtgtattctagcgccaacaattgcacatttgagtacgtgagccagcccttcctgatggacctggagggcaagcagggcaatttcaagaacctgagggagttcgtgtttaagaatatcgatggctacttcaagatctacagcaagcacaccccaatcaacctggtgcgcgacctgccacagggattctccgccctggagccactggtggatctgcccatcggcatcaacatcacccggtttcagacactgctggccctgcacagatcctacctgacaccaggcgactcctctagcggatggaccgcaggagctgccgcctactatgtgggctatctgcagccccggaccttcctgctgaagtacaacgagaatggcaccatcacagacgcagtggattgcgccctggaccccctgtctgagacaaagtgtacactgaagagctttaccgtggagaagggcatctatcagacaagcaatttcagggtgcagcctaccgagtccatcgtgcgctttcccaatatcacaaacctgtgcccttttggcgaggtgttcaacgccaccagattcgccagcgtgtacgcctggaatcggaagagaatctccaactgcgtggccgactattctgtgctgtacaactccgcctctttcagcacctttaagtgctatggcgtgtctcccacaaagctgaatgatctgtgctttaccaacgtgtacgccgatcaattcgtgatcaggggagacgaagtgagacagatcgcaccaggacagacaggaaagatcgcagactacaattataagctgcctgacgatttcaccggctgcgtgatcgcctggaactccaacaatctggattctaaagtgggcggcaactacaattatctgtacaggctgtttcgcaagtccaatctgaagccattcgagcgggacatctccacagagatctaccaggccggctctaccccctgcaatggcgtggagggctttaactgttatttccctctgcagtcttacggcttccagccaacaaacggcgtgggctatcagccctacagagtggtggtgctgtcctttgagctgctgcacgcaccagcaacagtgtgcggcccaaagaagtctaccaatctggtgaagaacaagtgcgtgaacttcaacttcaacggactgaccggcacaggcgtgctgaccgagagcaataagaagttcctgccttttcagcagttcggcagggacatcgcagataccacagacgccgtgcgcgaccctcagaccctggagatcctggacatcacaccatgcagcttcggcggcgtgtccgtgatcacaccaggcaccaatacatccaaccaggtggccgtgctgtatcaggacgtgaattgtaccgaggtgcccgtggcaatccacgcagatcagctgacccctacatggcgggtgtactctaccggcagcaacgtgttccagacaagagccggatgcctgatcggagcagagcacgtgaacaatagctatgagtgcgacatccctatcggcgccggcatctgtgccagctaccagacccagacaaactccccatctggagcaggctccgtggccagccagtccatcatcgcctataccatgagcctgggcgccgagaacagcgtggcctactccaacaattctatcgccatccctaccaacttcacaatcagcgtgaccacagagatcctgccagtgtctatgaccaagacaagcgtggactgcacaatgtatatctgtggcgatagcaccgagtgctccaacctgctgctgcagtacggctccttttgtacccagctgaatagagccctgacaggcatcgccgtggagcaggataagaacacacaggaggtgttcgcccaggtgaagcagatctacaagaccccacccatcaaggactttggcggcttcaacttcagccagatcctgcctgatccaagcaagccctccaagaggtcttttatcgaggacctgctgttcaacaaggtgaccctggccgatgccggcttcatcaagcagtatggagattgcctgggagacatcgcagcccgcgacctgatctgtgcccagaagtttaatggcctgaccgtgctgcctccactgctgacagatgagatgatcgcccagtacacatctgccctgctggccggcaccatcacaagcggatggaccttcggcgcaggagccgccctgcagatcccttttgccatgcagatggcctataggttcaacggcatcggcgtgacccagaatgtgctgtacgagaaccagaagctgatcgccaatcagtttaacagcgccatcggcaagatccaggactctctgtcctctacagccagcgccctgggcaagctgcaggatgtggtgaatcagaacgcccaggccctgaataccctggtgaagcagctgagctccaacttcggcgccatctctagcgtgctgaatgacatcctgagccggctggacccccctgaggcagaggtgcagatcgacaggctgatcacaggccgcctgcagagcctgcagacctacgtgacacagcagctgatcagggcagcagagatcagagcctccgccaatctggccgccaccaagatgagcgagtgcgtgctgggacagtccaagagggtggacttttgtggcaagggctatcacctgatgtctttcccacagagcgcccctcacggcgtggtgtttctgcacgtgacctacgtgccagcccaggagaagaacttcaccacagcaccagccatctgccacgatggaaaggcacactttcctagggagggcgtgttcgtgtctaacggcacccactggtttgtgacacagcgcaatttctacgagccacagatcatcaccacagacaatacattcgtgagcggcaactgtgatgtggtgatcggcatcgtgaacaataccgtgtatgatccactgcagcccgagctggactcctttaaggaggagctggataagtacttcaagaatcacacctctcccgacgtggatctgggcgacatctccggcatcaatgcctctgtggtgaacatccagaaggagatcgaccggctgaacgaggtggccaagaatctgaacgagagcctgatcgatctgcaggagctgggcaagtatgagcagtacatcaagggctctggcagagagaacctgtatttccagggaggaggaggcagcggatacatccctgaggcaccaagggacggacaggcctacgtgcgcaaggatggcgagtgggtgctgctgtccacctttctgggccatcatcaccaccaccaccaccactga

SEQ ID NO: 4970 - DNA, 3846 bp, Artificial Sequence
  Description of Artificial Sequence: Synthetic polynucleotide
atgggcatcctgccaagcccaggaatgcccgccctgctgtctctggtgagcctgctgtccgtgctgctgatgggatgcgtggcagagacaggcacacagtgcgtgaacctgaccacaaggacccagctgccccctgcctataccaattctttcacacggggcgtgtactatcccgacaaggtgtttagaagctccgtgctgcactccacacaggatctgtttctgcctttcttttctaacgtgacctggttccacgccatccacgtgtccggcaccaatggcacaaagcggttcgacaatcccgtgctgccttttaacgatggcgtgtacttcgccagcaccgagaagtccaacatcatcagaggctggatctttggcaccacactggactctaagacacagagcctgctgatcgtgaacaatgccaccaacgtggtgatcaaggtgtgcgagttccagttttgtaatgatccattcctgggcgtgtactatcacaagaacaataagtcctggatggagtctgagtttcgcgtgtattctagcgccaacaattgcacatttgagtacgtgagccagcccttcctgatggacctggagggcaagcagggcaatttcaagaacctgagggagttcgtgtttaagaatatcgatggctacttcaagatctacagcaagcacaccccaatcaacctggtgcgcgacctgccacagggattctccgccctggagccactggtggatctgcccatcggcatcaacatcacccggtttcagacactgctggccctgcacagatcctacctgacaccaggcgactcctctagcggatggaccgcaggagctgccgcctactatgtgggctatctgcagccccggaccttcctgctgaagtacaacgagaatggcaccatcacagacgcagtggattgcgccctggaccccctgtctgagacaaagtgtacactgaagagctttaccgtggagaagggcatctatcagacaagcaatttcagggtgcagcctaccgagtccatcgtgcgctttcccaatatcacaaacctgtgcccttttggcgaggtgttcaacgccaccagattcgccagcgtgtacgcctggaatcggaagagaatctccaactgcgtggccgactattctgtgctgtacaactccgcctctttcagcacctttaagtgctatggcgtgtctcccacaaagctgaatgatctgtgctttaccaacgtgtacgccgatagcttcgtgatcaggggagacgaagtgagacagatcgcaccaggacagacaggaaagatcgcagactacaattataagctgcctgacgatttcaccggctgcgtgatcgcctggaactcctgtaatctggattctaaagtgggcggcaactacaattatctgtacaggctgtttcgcaagtccaatctgaagccattcgagcgggacatctccacagagatctaccaggccggctctaccccctgcaatggcgtggagggctttaactgttatttccctctgcagtcttacggcttccagccaacaaacggcgtgggctatcagccctacagagtggtggtgctgtcctttgagctgctgcacgcaccagcaacagtgtgcggcccaaagaagtctaccaatctggtgaagaacaagtgcgtgaacttcaacttcaacggactgaccggcacaggcgtgctgaccgagagcaataagaagttcctgccttttcagcagttcggcagggacatcgcagataccacagacgccgtgcgcgaccctcagaccctggagatcctggacatcacaccatgcagcttcggcggcgtgtccgtgatcacaccaggcaccaatacatccaaccaggtggccgtgctgtatcaggacgtgaattgtaccgaggtgcccgtggcaatccacgcagatcagctgacccctacatggcgggtgtactctaccggcagcaacgtgttccagacaagagccggatgcctgatcggagcagagcacgtgaacaatagctatgagtgcgacatccctatcggcgccggcatctgtgccagctaccagacccagacaaactccccatctggagcaggctccgtggccagccagtccatcatcgcctataccatgagcctgggcgccgagaacagcgtggcctactccaacaattctatcgccatccctaccaacttcacaatcagcgtgaccacagagatcctgccagtgtctatgaccaagacaagcgtggactgcacaatgtatatctgtggcgatagcaccgagtgctccaacctgctgctgcagtacggctccttttgtacccagctgaatagagccctgacaggcatcgccgtggagcaggataagaacacacaggaggtgttcgcccaggtgaagcagatctacaagaccccacccatcaaggactttggcggcttcaacttcagccagatcctgcctgatccaagcaagccctccaagaggtcttttatcgaggacctgctgttcaacaaggtgaccctggccgatgccggcttcatcaagcagtatggagattgcctgggagacatcgcagcccgcgacctgatctgtgcccagaagtttaatggcctgaccgtgctgcctccactgctgacagatgagatgatcgcccagtacacatctgccctgctggccggcaccatcacaagcggatggaccttcggcgcaggagccgccctgcagatcccttttgccatgcagatggcctataggttcaacggcatcggcgtgacccagaatgtgctgtacgagaaccagaagctgatcgccaatcagtttaacagcgccatcggcaagatccaggactctctgtcctctacagccagcgccctgggcaagctgcaggatgtggtgaatcagaacgcccaggccctgaataccctggtgaagcagctgagctccaacttcggcgccatctctagcgtgctgaatgacatcctgagccggctggacccccctgaggcagaggtgcagatcgacaggctgatcacaggccgcctgcagagcctgcagacctacgtgacacagcagctgatcagggcagcagagatcagagcctccgccaatctggccgccaccaagatgagcgagtgcgtgctgggacagtccaagagggtggacttttgtggcaagggctatcacctgatgtctttcccacagagcgcccctcacggcgtggtgtttctgcacgtgacctacgtgccagcccaggagaagaacttcaccacagcaccagccatctgccacgatggaaaggcacactttcctagggagggcgtgttcgtgtctaacggcacccactggtttgtgacacagcgcaatttctacgagccacagatcatcaccacagacaatacattcgtgagcggcaactgtgatgtggtgatcggcatcgtgaacaataccgtgtatgatccactgcagcccgagctggactcctttaaggaggagctggataagtacttcaagaatcacacctctcccgacgtggatctgggcgacatctccggcatcaatgcctctgtggtgaacatccagaaggagatcgaccggctgaacgaggtggccaagaatctgaacgagagcctgatcgatctgcaggagctgggcaagtatgagcagtacatcaagggctctggcagagagaacctgtatttccagggaggaggaggcagcggatacatccctgaggcaccaagggacggacaggcctacgtgcgcaaggatggcgagtgggtgctgctgtccacctttctgggccatcatcaccaccaccaccaccactga

SEQ ID NO: 4971 - DNA, 3846 bp, Artificial Sequence
  Description of Artificial Sequence: Synthetic polynucleotide
atgggcatcctgccaagcccaggaatgcccgccctgctgtctctggtgagcctgctgtccgtgctgctgatgggatgcgtggcagagacaggcacacagtgcgtgaacctgaccacaaggacccagctgccccctgcctataccaattctttcacacggggcgtgtactatcccgacaaggtgtttagaagctccgtgctgcactccacacaggatctgtttctgcctttcttttctaacgtgacctggttccacgccatccacgtgtccggcaccaatggcacaaagcggttcgacaatcccgtgctgccttttaacgatggcgtgtacttcgccagcaccgagaagtccaacatcatcagaggctggatctttggcaccacactggactctaagacacagagcctgctgatcgtgaacaatgccaccaacgtggtgatcaaggtgtgcgagttccagttttgtaatgatccattcctgggcgtgtactatcacaagaacaataagtcctggatggagtctgagtttcgcgtgtattctagcgccaacaattgcacatttgagtacgtgagccagcccttcctgatggacctggagggcaagcagggcaatttcaagaacctgagggagttcgtgtttaagaatatcgatggctacttcaagatctacagcaagcacaccccaatcaacctggtgcgcgacctgccacagggattctccgccctggagccactggtggatctgcccatcggcatcaacatcacccggtttcagacactgctggccctgcacagatcctacctgacaccaggcgactcctctagcggatggaccgcaggagctgccgcctactatgtgggctatctgcagccccggaccttcctgctgaagtacaacgagaatggcaccatcacagacgcagtggattgcgccctggaccccctgtctgagacaaagtgtacactgaagagctttaccgtggagaagggcatctatcagacaagcaatttcagggtgcagcctaccgagtccatcgtgcgctttcccaatatcacaaacctgtgcccttttggcgaggtgttcaacgccaccagattcgccagcgtgtacgcctggaatcggaagagaatctccaactgcgtggccgactattctgtgctgtacaactcccaatctttcagcacctttaagtgctatggcgtgtctcccacaaagctgaatgatctgtgctttaccaacgtgtacgccgatagcttcgtgatcaggggagacgaagtgagacagatcgcaccaggacagacaggaaagatcgcagactacaattataagctgcctgacgatttcaccggctgcgtgatcgcctggaactccaacaatctggattctaaagtgggcggcaactacaattatctgtacaggctgtttcgcaagtccaatctgaagccattcgagcgggacatctccacagagatctaccaggccggctctaccccctgcaatggcgtggagggctttaactgttatttccctctgcagtcttacggcttccagccaacaaacggcgtgggctatcagccctacagagtggtggtgctgtcctttgagctgctgcacgcaccagcaacagtgtgcggcccaaagaagtctaccaatctggtgaagaacaagtgcgtgaacttcaacttcaacggactgaccggcacaggcgtgctgaccgagagcaataagaagttcctgccttttcagcagttcggcagggacatcgcagataccacagacgccgtgcgcgaccctcagaccctggagatcctggacatcacaccatgcagcttcggcggcgtgtccgtgatcacaccaggcaccaatacatccaaccaggtggccgtgctgtatcaggacgtgaattgtaccgaggtgcccgtggcaatccacgcagatcagctgacccctacatggcgggtgtactctaccggcagcaacgtgttccagacaagagccggatgcctgatcggagcagagcacgtgaacaatagctatgagtgcgacatccctatcggcgccggcatctgtgccagctaccagacccagacaaactccccatctggagcaggctccgtggccagccagtccatcatcgcctataccatgagcctgggcgccgagaacagcgtggcctactccaacaattctatcgccatccctaccaacttcacaatcagcgtgaccacagagatcctgccagtgtctatgaccaagacaagcgtggactgcacaatgtatatctgtggcgatagcaccgagtgctccaacctgctgctgcagtacggctccttttgtacccagctgaatagagccctgacaggcatcgccgtggagcaggataagaacacacaggaggtgttcgcccaggtgaagcagatctacaagaccccacccatcaaggactttggcggcttcaacttcagccagatcctgcctgatccaagcaagccctccaagaggtcttttatcgaggacctgctgttcaacaaggtgaccctggccgatgccggcttcatcaagcagtatggagattgcctgggagacatcgcagcccgcgacctgatctgtgcccagaagtttaatggcctgaccgtgctgcctccactgctgacagatgagatgatcgcccagtacacatctgccctgctggccggcaccatcacaagcggatggaccttcggcgcaggagccgccctgcagatcccttttgccatgcagatggcctataggttcaacggcatcggcgtgacccagaatgtgctgtacgagaaccagaagctgatcgccaatcagtttaacagcgccatcggcaagatccaggactctctgtcctctacagccagcgccctgggcaagctgcaggatgtggtgaatcagaacgcccaggccctgaataccctggtgaagcagctgagctccaacttcggcgccatctctagcgtgctgaatgacatcctgagccggctggacccccctgaggcagaggtgcagatcgacaggctgatcacaggccgcctgcagagcctgcagacctacgtgacacagcagctgatcagggcagcagagatcagagcctccgccaatctggccgccaccaagatgagcgagtgcgtgctgggacagtccaagagggtggacttttgtggcaagggctatcacctgatgtctttcccacagagcgcccctcacggcgtggtgtttctgcacgtgacctacgtgccagcccaggagaagaacttcaccacagcaccagccatctgccacgatggaaaggcacactttcctagggagggcgtgttcgtgtctaacggcacccactggtttgtgacacagcgcaatttctacgagccacagatcatcaccacagacaatacattcgtgagcggcaactgtgatgtggtgatcggcatcgtgaacaataccgtgtatgatccactgcagcccgagctggactcctttaaggaggagctggataagtacttcaagaatcacacctctcccgacgtggatctgggcgacatctccggcatcaatgcctctgtggtgaacatccagaaggagatcgaccggctgaacgaggtggccaagaatctgaacgagagcctgatcgatctgcaggagctgggcaagtatgagcagtacatcaagggctctggcagagagaacctgtatttccagggaggaggaggcagcggatacatccctgaggcaccaagggacggacaggcctacgtgcgcaaggatggcgagtgggtgctgctgtccacctttctgggccatcatcaccaccaccaccaccactga

SEQ ID NO: 4972 - DNA, 3846 bp, Artificial Sequence
  Description of Artificial Sequence: Synthetic polynucleotide
atgggcatcctgccaagcccaggaatgcccgccctgctgtctctggtgagcctgctgtccgtgctgctgatgggatgcgtggcagagacaggcacacagtgcgtgaacctgaccacaaggacccagctgccccctgcctataccaattctttcacacggggcgtgtactatcccgacaaggtgtttagaagctccgtgctgcactccacacaggatctgtttctgcctttcttttctaacgtgacctggttccacgccatccacgtgtccggcaccaatggcacaaagcggttcgacaatcccgtgctgccttttaacgatggcgtgtacttcgccagcaccgagaagtccaacatcatcagaggctggatctttggcaccacactggactctaagacacagagcctgctgatcgtgaacaatgccaccaacgtggtgatcaaggtgtgcgagttccagttttgtaatgatccattcctgggcgtgtactatcacaagaacaataagtcctggatggagtctgagtttcgcgtgtattctagcgccaacaattgcacatttgagtacgtgagccagcccttcctgatggacctggagggcaagcagggcaatttcaagaacctgagggagttcgtgtttaagaatatcgatggctacttcaagatctacagcaagcacaccccaatcaacctggtgcgcgacctgccacagggattctccgccctggagccagctgtggatctgcccatcggcatcaacatcacccggtttcagacactgctggccctgcacagatcctacctgacaccaggcgactcctctagcggatggaccgcaggagctgccgcctactatgtgggctatctgcagccccggaccttcctgctgaagtacaacgagaatggcaccatcacagacgcagtggattgcgccctggaccccctgtctgagacaaagtgtacactgaagagctttaccgtggagaagggcatctatcagacaagcaatttcagggtgcagcctaccgagtccatcgtgcgctttcccaatatcacaaacctgtgcccttttggcgaggtgttcaacgccaccagattcgccagcgtgtacgcctggaatcggaagagaatctccaactgcgtggccgactattctgtgctgtacaactccgcctctttcagcacctttaagtgctatggcgtgtctcccacaaagctgaatgatctgtgctttaccaacgtgtacgccgatagcttcgtgatcaggggagacgaagtgagacagatcgcaccaggacagacaggaaagatcgcagactacaattataagctgcctgacgatttcaccggctgcgtgatcgcctggaactccaacaatctggattctaaagtgggcggcaactacaattatctgtacaggctgtttcgcaagtccaatctgaagccattcgagcgggacatctccacagagatctaccaggccggctctaccccctgcaatggcgtggagggctttaactgttatttccctctgcagtcttacggcttccagccaacaaacggcgtgggctatcagccctacagagtggtggtgctgtcctttgagctgctgcacgcaccagcaacagtgtgcggcccaaagaagtctaccaatctggtgaagaacaagtgcgtgaacttcaacttcaacggactgaccggcacaggcgtgctgaccgagagcaataagaagttcctgccttttcagcagttcggcagggacatcgcagataccacagacgccgtgcgcgaccctcagaccctggagatcctggacatcacaccatgcagcttcggcggcgtgtccgtgatcacaccaggcaccaatacatccaaccaggtggccgtgctgtatcaggacgtgaattgtaccgaggtgcccgtggcaatccacgcagatcagctgacccctacatggcgggtgtactctaccggcagcaacgtgttccagacaagagccggatgcctgatcggagcagagcacgtgaacaatagctatgagtgcgacatccctatcggcgccggcatctgtgccagctaccagacccagacaaactccccatctggagcaggctccgtggccagccagtccatcatcgcctataccatgagcctgggcgccgagaacagcgtggcctactccaacaattctatcgccatccctaccaacttcacaatcagcgtgaccacagagatcctgccagtgtctatgaccaagacaagcgtggactgcacaatgtatatctgtggcgatagcaccgagtgctccaacctgctgctgcagtacggctccttttgtacccagctgaatagagccctgacaggcatcgccgtggagcaggataagaacacacaggaggtgttcgcccaggtgaagcagatctacaagaccccacccatcaaggactttggcggcttcaacttcagccagatcctgcctgatccaagcaagccctccaagaggtcttttatcgaggacctgctgttcaacaaggtgaccctggccgatgccggcttcatcaagcagtatggagattgcctgggagacatcgcagcccgcgacctgatctgtgcccagaagtttaatggcctgaccgtgctgcctccactgctgacagatgagatgatcgcccagtacacatctgccctgctggccggcaccatcacaagcggatggaccttcggcgcaggagccgccctgcagatcccttttgccatgcagatggcctataggttcaacggcatcggcgtgacccagaatgtgctgtacgagaaccagaagctgatcgccaatcagtttaacagcgccatcggcaagatccaggactctctgtcctctacagccagcgccctgggcaagctgcaggatgtggtgaatcagaacgcccaggccctgaataccctggtgaagcagctgagctccaacttcggcgccatctctagcgtgctgaatgacatcctgagccggctggacccccctgaggcagaggtgcagatcgacaggctgatcacaggccgcctgcagagcctgcagacctacgtgacacagcagctgatcagggcagcagagatcagagcctccgccaatctggccgccaccaagatgagcgagtgcgtgctgggacagtccaagagggtggacttttgtggcaagggctatcacctgatgtctttcccacagagcgcccctcacggcgtggtgtttctgcacgtgacctacgtgccagcccaggagaagaacttcaccacagcaccagccatctgccacgatggaaaggcacactttcctagggagggcgtgttcgtgtctaacggcacccactggtttgtgacacagcgcaatttctacgagccacagatcatcaccacagacaatacattcgtgagcggcaactgtgatgtggtgatcggcatcgtgaacaataccgtgtatgatccactgcagcccgagctggactcctttaaggaggagctggataagtacttcaagaatcacacctctcccgacgtggatctgggcgacatctccggcatcaatgcctctgtggtgaacatccagaaggagatcgaccggctgaacgaggtggccaagaatctgaacgagagcctgatcgatctgcaggagctgggcaagtatgagcagtacatcaagggctctggcagagagaacctgtatttccagggaggaggaggcagcggatacatccctgaggcaccaagggacggacaggcctacgtgcgcaaggatggcgagtgggtgctgctgtccacctttctgggccatcatcaccaccaccaccaccactga

SEQ ID NO: 4973 - DNA, 3846 bp, Artificial Sequence
  Description of Artificial Sequence: Synthetic polynucleotide
atgggcatcctgccaagcccaggaatgcccgccctgctgtctctggtgagcctgctgtccgtgctgctgatgggatgcgtggcagagacaggcacacagtgcgtgaacctgaccacaaggacccagctgccccctgcctataccaattctttcacacggggcgtgtactatcccgacaaggtgtttagaagctccgtgctgcactccacacaggatctgtttctgcctttcttttctaacgtgacctggttccacgccatccacgtgtccggcaccaatggcacaaagcggttcgacaatcccgtgctgccttttaacgatggcgtgtacttcgccagcaccgagaagtccaacatcatcagaggctggatctttggcaccacactggactctaagacacagagcctgctgatcgtgaacaatgccaccaacgtggtgatcaaggtgtgcgagttccagttttgtaatgatccattcctgggcgtgtactatcacaagaacaataagtcctggatggagtctgagtttcgcgtgtattctagcgccaacaattgcacatttgagtacgtgagccagcccttcctgatggacctggagggcaagcagggcaatttcaagaacctgagggagttcgtgtttaagaatatcgatggctacttcaagatctacagcaagcacaccccaatcaacctggtgcgcgacctgccacagggattctccgccctggagccactggtggatctgcccatcggcatcaacatcacccggtttcagacactgctggccctgcacagatcctacctgacaccaggcgactcctctagcggatggaccgcaggagctgccgcctactatgtgggctatctgcagccccggaccttcctgctgaagtacaacgagaatggcaccatcacagacgcagtggattgcgccctggaccccctgtctgagacaaagtgtacactgaagagctttaccgtggagaagggcatctatcagacaagcaatttcagggtgcagcctaccgagtccatcgtgcgctttcccaatatcacaaacctgtgcccttttggcgaggtgttcaacgccaccagattcgccagcgtgtacgcctggaatcggaagagaatctccaactgcgtggccgactattctgtgctgtacaactccgcctctttcagcacctttaagtgctatggcgtgtctcccacaaagctgaatgatctgtgctttaccaacgtgtacgccgatagcttcgtgatcaggggagacgaagtgagacagatcgcaccaggacagacaggaaagatcgcagactacaattataagctgcctgacgatttcaccggctgcgtgatcgcctggaactccaacaatctggattctaaagtgggcggcaactacaattatctgtacaggctgtttcgcaagtccaatctggggccattcgagcgggacatctccacagagatctaccaggccggctctaccccctgcaatggcgtggagggctttaactgttatttccctctgcagtcttacggcttccagccaacaaacggcgtgggctatcagccctacagagtggtggtgctgtcctttgagctgctgcacgcaccagcaacagtgtgcggcccaaagaagtctaccaatctggtgaagaacaagtgcgtgaacttcaacttcaacggactgaccggcacaggcgtgctgaccgagagcaataagaagttcctgccttttcagcagttcggcagggacatcgcagataccacagacgccgtgcgcgaccctcagaccctggagatcctggacatcacaccatgcagcttcggcggcgtgtccgtgatcacaccaggcaccaatacatccaaccaggtggccgtgctgtatcaggacgtgaattgtaccgaggtgcccgtggcaatccacgcagatcagctgacccctacatggcgggtgtactctaccggcagcaacgtgttccagacaagagccggatgcctgatcggagcagagcacgtgaacaatagctatgagtgcgacatccctatcggcgccggcatctgtgccagctaccagacccagacaaactccccatctggagcaggctccgtggccagccagtccatcatcgcctataccatgagcctgggcgccgagaacagcgtggcctactccaacaattctatcgccatccctaccaacttcacaatcagcgtgaccacagagatcctgccagtgtctatgaccaagacaagcgtggactgcacaatgtatatctgtggcgatagcaccgagtgctccaacctgctgctgcagtacggctccttttgtacccagctgaatagagccctgacaggcatcgccgtggagcaggataagaacacacaggaggtgttcgcccaggtgaagcagatctacaagaccccacccatcaaggactttggcggcttcaacttcagccagatcctgcctgatccaagcaagccctccaagaggtcttttatcgaggacctgctgttcaacaaggtgaccctggccgatgccggcttcatcaagcagtatggagattgcctgggagacatcgcagcccgcgacctgatctgtgcccagaagtttaatggcctgaccgtgctgcctccactgctgacagatgagatgatcgcccagtacacatctgccctgctggccggcaccatcacaagcggatggaccttcggcgcaggagccgccctgcagatcccttttgccatgcagatggcctataggttcaacggcatcggcgtgacccagaatgtgctgtacgagaaccagaagctgatcgccaatcagtttaacagcgccatcggcaagatccaggactctctgtcctctacagccagcgccctgggcaagctgcaggatgtggtgaatcagaacgcccaggccctgaataccctggtgaagcagctgagctccaacttcggcgccatctctagcgtgctgaatgacatcctgagccggctggacccccctgaggcagaggtgcagatcgacaggctgatcacaggccgcctgcagagcctgcagacctacgtgacacagcagctgatcagggcagcagagatcagagcctccgccaatctggccgccaccaagatgagcgagtgcgtgctgggacagtccaagagggtggacttttgtggcaagggctatcacctgatgtctttcccacagagcgcccctcacggcgtggtgtttctgcacgtgacctacgtgccagcccaggagaagaacttcaccacagcaccagccatctgccacgatggaaaggcacactttcctagggagggcgtgttcgtgtctaacggcacccactggtttgtgacacagcgcaatttctacgagccacagatcatcaccacagacaatacattcgtgagcggcaactgtgatgtggtgatcggcatcgtgaacaataccgtgtatgatccactgcagcccgagctggactcctttaaggaggagctggataagtacttcaagaatcacacctctcccgacgtggatctgggcgacatctccggcatcaatgcctctgtggtgaacatccagaaggagatcgaccggctgaacgaggtggccaagaatctgaacgagagcctgatcgatctgcaggagctgggcaagtatgagcagtacatcaagggctctggcagagagaacctgtatttccagggaggaggaggcagcggatacatccctgaggcaccaagggacggacaggcctacgtgcgcaaggatggcgagtgggtgctgctgtccacctttctgggccatcatcaccaccaccaccaccactga

SEQ ID NO: 4974 - DNA, 3846 bp, Artificial Sequence
  Description of Artificial Sequence: Synthetic polynucleotide
atgggcatcctgccaagcccaggaatgcccgccctgctgtctctggtgagcctgctgtccgtgctgctgatgggatgcgtggcagagacaggcacacagtgcgtgaacctgaccacaaggacccagctgccccctgcctataccaattctttcacacggggcgtgtactatcccgacaaggtgtttagaagctccgtgctgcactccacacaggatctgtttctgcctttcttttctaacgtgacctggttccacgccatccacgtgtccggcaccaatggcacaaagcggttcgacaatcccgtgctgccttttaacgatggcgtgtacttcgccagcaccgagaagtccaacatcatcagaggctggatctttggcaccacactggactctaagacacagagcctgctgatcgtgaacaatgccaccaacgtggtgatcaaggtgtgcgagttccagttttgtaatgatccattcctgggcgtgtactatcacaagaacaataagtcctggatggagtctgagtttcgcgtgtattctagcgccaacaattgcacatttgagtacgtgagccagcccttcctgatggacctggagggcaagcagggcaatttcaagaacctgagggagttcgtgtttaagaatatcgatggctacttcaagatctacagcaagcacaccccaatcaacctggtgcgcgacctgccacagggattctccgccctggagccactggtggatctgcccatcggcatcaacatcacccggtttcagacactgctggccctgcacagatcctacctgacaccaggcgactcctctagcggatggaccgcaggagctgccgcctactatgtgggctatctgcagccccggaccttcctgctgaagtacaacgagaatggcaccatcacagacgcagtggattgcgccctggaccccctgtctgagacaaagtgtacactgaagagctttaccgtggagaagggcatctatcagacaagcaatttcagggtgcagcctaccgagtccatcgtgcgctttcccaatatcacaaacctgtgcccttttggcgaggtgttcaacgccaccagattcgccagcgtgtacgcctggaatcggaagagaatctccaactgcgtggccgactattctgtgctgtacaactccgcctctttcagcacctttaagtgctatggcgtgtctcccacaaagctgaatgatctgtgctttaccaacgtgtacgccgatagcttcgtgatcaggggagacgaagtgagacagatcgcaccaggacagacaggaaagatcgcagactacaattataagctgcctgacgatttcaccggctgcgtgatcgcctggaactccaacaatctggattctaaagtgggcggcaactacaattatctgtacaggctgtttcgcaagtccaatctgaagccattcgagcgggacatctccacagagttctaccaggccggctctaccccctgcaatggcgtggagggctttaactgttatttccctctgcagtcttacggcttccagccaacaaacggcgtgggctatcagccctacagagtggtggtgctgtcctttgagctgctgcacgcaccagcaacagtgtgcggcccaaagaagtctaccaatctggtgaagaacaagtgcgtgaacttcaacttcaacggactgaccggcacaggcgtgctgaccgagagcaataagaagttcctgccttttcagcagttcggcagggacatcgcagataccacagacgccgtgcgcgaccctcagaccctggagatcctggacatcacaccatgcagcttcggcggcgtgtccgtgatcacaccaggcaccaatacatccaaccaggtggccgtgctgtatcaggacgtgaattgtaccgaggtgcccgtggcaatccacgcagatcagctgacccctacatggcgggtgtactctaccggcagcaacgtgttccagacaagagccggatgcctgatcggagcagagcacgtgaacaatagctatgagtgcgacatccctatcggcgccggcatctgtgccagctaccagacccagacaaactccccatctggagcaggctccgtggccagccagtccatcatcgcctataccatgagcctgggcgccgagaacagcgtggcctactccaacaattctatcgccatccctaccaacttcacaatcagcgtgaccacagagatcctgccagtgtctatgaccaagacaagcgtggactgcacaatgtatatctgtggcgatagcaccgagtgctccaacctgctgctgcagtacggctccttttgtacccagctgaatagagccctgacaggcatcgccgtggagcaggataagaacacacaggaggtgttcgcccaggtgaagcagatctacaagaccccacccatcaaggactttggcggcttcaacttcagccagatcctgcctgatccaagcaagccctccaagaggtcttttatcgaggacctgctgttcaacaaggtgaccctggccgatgccggcttcatcaagcagtatggagattgcctgggagacatcgcagcccgcgacctgatctgtgcccagaagtttaatggcctgaccgtgctgcctccactgctgacagatgagatgatcgcccagtacacatctgccctgctggccggcaccatcacaagcggatggaccttcggcgcaggagccgccctgcagatcccttttgccatgcagatggcctataggttcaacggcatcggcgtgacccagaatgtgctgtacgagaaccagaagctgatcgccaatcagtttaacagcgccatcggcaagatccaggactctctgtcctctacagccagcgccctgggcaagctgcaggatgtggtgaatcagaacgcccaggccctgaataccctggtgaagcagctgagctccaacttcggcgccatctctagcgtgctgaatgacatcctgagccggctggacccccctgaggcagaggtgcagatcgacaggctgatcacaggccgcctgcagagcctgcagacctacgtgacacagcagctgatcagggcagcagagatcagagcctccgccaatctggccgccaccaagatgagcgagtgcgtgctgggacagtccaagagggtggacttttgtggcaagggctatcacctgatgtctttcccacagagcgcccctcacggcgtggtgtttctgcacgtgacctacgtgccagcccaggagaagaacttcaccacagcaccagccatctgccacgatggaaaggcacactttcctagggagggcgtgttcgtgtctaacggcacccactggtttgtgacacagcgcaatttctacgagccacagatcatcaccacagacaatacattcgtgagcggcaactgtgatgtggtgatcggcatcgtgaacaataccgtgtatgatccactgcagcccgagctggactcctttaaggaggagctggataagtacttcaagaatcacacctctcccgacgtggatctgggcgacatctccggcatcaatgcctctgtggtgaacatccagaaggagatcgaccggctgaacgaggtggccaagaatctgaacgagagcctgatcgatctgcaggagctgggcaagtatgagcagtacatcaagggctctggcagagagaacctgtatttccagggaggaggaggcagcggatacatccctgaggcaccaagggacggacaggcctacgtgcgcaaggatggcgagtgggtgctgctgtccacctttctgggccatcatcaccaccaccaccaccactga

SEQ ID NO: 4975 - DNA, 3846 bp, Artificial Sequence
  Description of Artificial Sequence: Synthetic polynucleotide
atgggcatcctgccaagcccaggaatgcccgccctgctgtctctggtgagcctgctgtccgtgctgctgatgggatgcgtggcagagacaggcacacagtgcgtgaacctgaccacaaggacccagctgccccctgcctataccaattctttcacacggggcgtgtactatcccgacaaggtgtttagaagctccgtgctgcactccacacaggatctgtttctgcctttcttttctaacgtgacctggttccacgccatccacgtgtccggcaccaatggcacaaagcggttcgacaatcccgtgctgccttttaacgatggcgtgtacttcgccagcaccgagaagtccaacatcatcagaggctggatctttggcaccacactggactctaagacacagagcctgctgatcgtgaacaatgccaccaacgtggtgatcaaggtgtgcgagttccagttttgtaatgatccattcctgggcgtgtactatcacaagaacaataagtcctggatggagtctgagtttcgcgtgtattctagcgccaacaattgcacatttgagtacgtgagccagcccttcctgatggacctggagggcaagcagggcaatttcaagaacctgagggagttcgtgtttaagaatatcgatggctacttcaagatctacagcaagcacaccccaatcaacctggtgcgcgacctgccacagggattctccgccctggagccactggtggatctgcccatcggcatcaacatcacccggtttcagacactgctggccctgcacagatcctacctgacaccaggcgactcctctagcggatggaccgcaggagctgccgcctactatgtgggctatctgcagccccggaccttcctgctgaagtacaacgagaatggcaccatcacagacgcagtggattgcgccctggaccccctgtctgagacaaagtgtacactgaagagctttaccgtggagaagggcatctatcagacaagcaatttcagggtgcagcctaccgagtccatcgtgcgctttcccaatatcacaaacctgtgcccttttggcgaggtgttcaacgccaccagattcgccagcgtgtacgcctggaatcggaagagaatctccaactgcgtggccgactattctgtgctgtacaactccgcctctttcagcacctttaagtgctatggcgtgtctcccacaaagctgaatgatctgtgctttaccaacgtgtacgccgatagcttcgtgatcaggggagacgaagtgagacagatcgcaccaggacagacaggaaagatcgcagactacaattataagctgcctgacgatttcaccggctgcgtgatcgcctggaactccaacaatctggattctaaagtgggcggcaactacaattatctgtacaggctgtttcgcaagtccaatctgaagccattcgagcgggacatctccacagagatctaccaggccggctctaccccctgcaatggcgtggagggctttaactgttatttccctctgcagtcttacggcttccagccaacaaacggcgtgggctatcagccctacagagtggtggtgctgtcctttgagctgctgcacgcaccagcaacagtgtgcggcccaaagaagtctaccaatctggtgaagaacaagtgcgtgaacttcaacttcaacggactgaccggcacaggcgtgctgaccgagagcaataagaagttcctgccttttcagcagttcggcagggacatcgcagataccacagacgccgtgcgcgaccctcagaccctggagatcctggacatcacaccatgcagcttcggcggcgtgtccgtgatcacaccaggcaccaatacatccaaccaggtggccgtgctgtatcaggacgtgaattgtaccgaggtgcccgtggcaatccacgcagatcagctgacccctacatggcgggtgtactctaccggcagcaacgtgttccagacaagagccggatgcctgatcggagcagagcacgtgaacaatagctatgagtgcgacatccctatcggcgccggcatctgtgccagctaccagacccagacaaactccccatctggagcaggctccgtggccagccagtccatcatcgcctataccgttagcctgggcgccgagaacagcgtggcctactccaacaattctatcgccatccctaccaacttcacaatcagcgtgaccacagagatcctgccagtgtctatgaccaagacaagcgtggactgcacaatgtatatctgtggcgatagcaccgagtgctccaacctgctgctgcagtacggctccttttgtacccagctgaatagagccctgacaggcatcgccgtggagcaggataagaacacacaggaggtgttcgcccaggtgaagcagatctacaagaccccacccatcaaggactttggcggcttcaacttcagccagatcctgcctgatccaagcaagccctccaagaggtcttttatcgaggacctgctgttcaacaaggtgaccctggccgatgccggcttcatcaagcagtatggagattgcctgggagacatcgcagcccgcgacctgatctgtgcccagaagtttaatggcctgaccgtgctgcctccactgctgacagatgagatgatcgcccagtacacatctgccctgctggccggcaccatcacaagcggatggaccttcggcgcaggagccgccctgcagatcccttttgccatgcagatggcctataggttcaacggcatcggcgtgacccagaatgtgctgtacgagaaccagaagctgatcgccaatcagtttaacagcgccatcggcaagatccaggactctctgtcctctacagccagcgccctgggcaagctgcaggatgtggtgaatcagaacgcccaggccctgaataccctggtgaagcagctgagctccaacttcggcgccatctctagcgtgctgaatgacatcctgagccggctggacccccctgaggcagaggtgcagatcgacaggctgatcacaggccgcctgcagagcctgcagacctacgtgacacagcagctgatcagggcagcagagatcagagcctccgccaatctggccgccaccaagatgagcgagtgcgtgctgggacagtccaagagggtggacttttgtggcaagggctatcacctgatgtctttcccacagagcgcccctcacggcgtggtgtttctgcacgtgacctacgtgccagcccaggagaagaacttcaccacagcaccagccatctgccacgatggaaaggcacactttcctagggagggcgtgttcgtgtctaacggcacccactggtttgtgacacagcgcaatttctacgagccacagatcatcaccacagacaatacattcgtgagcggcaactgtgatgtggtgatcggcatcgtgaacaataccgtgtatgatccactgcagcccgagctggactcctttaaggaggagctggataagtacttcaagaatcacacctctcccgacgtggatctgggcgacatctccggcatcaatgcctctgtggtgaacatccagaaggagatcgaccggctgaacgaggtggccaagaatctgaacgagagcctgatcgatctgcaggagctgggcaagtatgagcagtacatcaagggctctggcagagagaacctgtatttccagggaggaggaggcagcggatacatccctgaggcaccaagggacggacaggcctacgtgcgcaaggatggcgagtgggtgctgctgtccacctttctgggccatcatcaccaccaccaccaccactga

SEQ ID NO: 4976 - DNA, 3846 bp, Artificial Sequence
  Description of Artificial Sequence: Synthetic polynucleotide
atgggcatcctgccaagcccaggaatgcccgccctgctgtctctggtgagcctgctgtccgtgctgctgatgggatgcgtggcagagacaggcacacagtgcgtgaacctgaccacaaggacccagctgccccctgcctataccaattctttcacacggggcgtgtactatcccgacaaggtgtttagaagctccgtgctgcactccacacaggatctgtttctgcctttcttttctaacgtgacctggttccacgccatccacgtgtccggcaccaatggcacaaagcggttcgacaatcccgtgctgccttttaacgatggcgtgtacttcgccagcaccgagaagtccaacatcatcagaggctggatctttggcaccacactggactctaagacacagagcctgctgatcgtgaacaatgccaccaacgtggtgatcaaggtgtgcgagttccagttttgtaatgatccattcctgggcgtgtactatcacaagaacaataagtcctggatggagtctgagtttcgcgtgtattctagcgccaacaattgcacatttgagtacgtgagccagcccttcctgatggacctggagggcaagcagggcaatttcaagaacctgagggagttcgtgtttaagaatatcgatggctacttcaagatctacagcaagcacaccccaatcaacctggtgcgcgacctgccacagggattctccgccctggagccactggtggatctgcccatcggcatcaacatcacccggtttcagacactgctggccctgcacagatcctacctgacaccaggcgactcctctagcggatggaccgcaggagctgccgcctactatgtgggctatctgcagccccggaccttcctgctgaagtacaacgagaatggcaccatcacagacgcagtggattgcgccctggaccccctgtctgagacaaagtgtacactgaagagctttaccgtggagaagggcatctatcagacaagcaatttcagggtgcagcctaccgagtccatcgtgcgctttcccaatatcacaaacctgtgcccttttggcgaggtgttcaacgccaccagattcgccagcgtgtacgcctggaatcggaagagaatctccaactgcgtggccgactattctgtgctgtacaactccgcctctttcagcacctttaagtgctatggcgtgtctcccacaaagctgaatgatctgtgctttaccaacgtgtacgccgatagcttcgtgatcaggggagacgaagtgagacagatcgcaccaggacagacaggaaagatcgcagactacaattataagctgcctgacgatttcaccggctgcgtgatcgcctggaactccaacaatctggattctaaagtgggcggcaactacaattatctgtacaggctgtttcgcaagtccaatctgaagccattcgagcgggacatctccacagagatctaccaggccggctctaccccctgcaatggcgtggagggctttaactgttatttccctctgcagtcttacggcttccagccaacaaacggcgtgggctatcagccctacagagtggtggtgctgtcctttgagctgctgcacgcaccagcaacagtgtgcggcccaaagaagtctaccaatctggtgaagaacaagtgcgtgaacttcaacttcaacggactgaccggcacaggcgtgctgaccgagagcaataagaagttcctgccttttcagcagttcggcagggacatcgcagataccacagacgccgtgcgcgaccctcagaccctggagatcctggacatcacaccatgcagcttcggcggcgtgtccgtgatcacaccaggcaccaatacatccaaccaggtggccgtgctgtatcaggacgtgaattgtaccgaggtgcccgtggcaatccacgcagatcagctgacccctacatggcgggtgtactctaccggcagcaacgtgttccagacaagagccggatgcctgatcggagcagagcacgtgaacaatagctatgagtgcgacatccctatcggcgccggcatctgtgccagctaccagacccagacaaactccccatctggagcaggctccgtggccagccagtccatcatcgcctataccatgagcctgggcgccgagaacagcgtggcctactccaacaattctatcgccatccctaccaacttcacaatcagcgtgaccacagagatcctgccagtgtctatgaccaagacaagcgtggactgcacaatgtatatctgtggcgatagcaccgagtgctccaacctgctgctgcagtacggctccttttgtacccagctgaatagagccctgacaggcatcgccgtggagcaggataagaacacacaggaggtgttcgcccaggtgaagcagatctacaagaccccacccatcaaggactttggcggcttcaacttcagccagatcctgcctgatccaagcaagccctccaagaggtcttttatcgaggacctgctgttcaacaaggtgaccctggccgatgccggcttcatcaagcagtatggagattgcctgggagacatcgcagcccgcgacctgatctgtgcccagaagtttaatggcctgaccgtgctgcctccactgctgacagatgagatgatcgcccagtacacatctgccctgctggccggcaccatcacaagcggatggaccttcggcgcaggagccgccctgcagatcccttttgccatgcagatggcctataggttcaacggcatcggcgtgacccagaatgtgctgtacgagaaccagaagctgatcgccaatcagtttaacagcgccatcggcaagatccaggactctctgtcctctacagccagcgccctgggcaagctgcaggatgtggtgaatcagaacgcccaggccctgaataccctggtgaagcagctgagctccaacttcggcgccatctctagcgtgctgaatgaaatcctgagccggctggacccccctgaggcagaggtgcagatcgacaggctgatcacaggccgcctgcagagcctgcagacctacgtgacacagcagctgatcagggcagcagagatcagagcctccgccaatctggccgccaccaagatgagcgagtgcgtgctgggacagtccaagagggtggacttttgtggcaagggctatcacctgatgtctttcccacagagcgcccctcacggcgtggtgtttctgcacgtgacctacgtgccagcccaggagaagaacttcaccacagcaccagccatctgccacgatggaaaggcacactttcctagggagggcgtgttcgtgtctaacggcacccactggtttgtgacacagcgcaatttctacgagccacagatcatcaccacagacaatacattcgtgagcggcaactgtgatgtggtgatcggcatcgtgaacaataccgtgtatgatccactgcagcccgagctggactcctttaaggaggagctggataagtacttcaagaatcacacctctcccgacgtggatctgggcgacatctccggcatcaatgcctctgtggtgaacatccagaaggagatcgaccggctgaacgaggtggccaagaatctgaacgagagcctgatcgatctgcaggagctgggcaagtatgagcagtacatcaagggctctggcagagagaacctgtatttccagggaggaggaggcagcggatacatccctgaggcaccaagggacggacaggcctacgtgcgcaaggatggcgagtgggtgctgctgtccacctttctgggccatcatcaccaccaccaccaccactga

SEQ ID NO: 4977 - DNA, 3846 bp, Artificial Sequence
  Description of Artificial Sequence: Synthetic polynucleotide
atgggcatcctgccaagcccaggaatgcccgccctgctgtctctggtgagcctgctgtccgtgctgctgatgggatgcgtggcagagacaggcacacagtgcgtgaacctgaccacaaggacccagctgccccctgcctataccaattctttcacacggggcgtgtactatcccgacaaggtgtttagaagctccgtgctgcactccacacaggatctgtttctgcctttcttttctaacgtgacctggttccacgccatccacgtgtccggcaccaatggcacaaagcggttcgacaatcccgtgctgccttttaacgatggcgtgtacttcgccagcaccgagaagtccaacatcatcagaggctggatctttggcaccacactggactctaagacagctagcctgctgatcgtgaacaatgccaccaacgtggtgatcaaggtgtgcgagttccagttttgtaatgatccattcctgggcgtgtactatcacaagaacaataagtcctggatggagtctgagtttcgcgtgtattctagcgccaacaattgcacatttgagtacgtgagccagcccttcctgatggacctggagggcaagcagggcaatttcaagaacctgagggagttcgtgtttaagaatatcgatggctacttcaagatctacagcaagcacaccccaatcaacctggtgcgcgacctgccacagggattctccgccctggagccactggtggatctgcccatcggcatcaacatcacccggtttcagacactgctggccctgcacagatcctacctgacaccaggcgactcctctagcggatggaccgcaggagctgccgcctactatgtgggctatctgcagccccggaccttcctgctgaagtacaacgagaatggcaccatcacagacgcagtggattgcgccctggaccccctgtctgagacaaagtgtacactgaagagctttaccgtggagaagggcatctatcagacaagcaatttcagggtgcagcctaccgagtccatcgtgcgctttcccaatatcacaaacctgtgcccttttggcgaggtgttcaacgccaccagattcgccagcgtgtacgcctggaatcggaagagaatctccaactgcgtggccgactattctgtgctgtacaactccgcctctttcagcacctttaagtgctatggcgtgtctcccacaaagctgaatgatctgtgctttaccaacgtgtacgccgatagcttcgtgatcaggggagacgaagtgagacagatcgcaccaggacagacaggaaagatcgcagactacaattataagctgcctgacgatttcaccggctgcgtgatcgcctggaactccaacaatctggattctaaagtgggcggcaactacaattatctgtacaggctgtttcgcaagtccaatctgaagccattcgagcgggacatctccacagagatctaccaggccggctctaccccctgcaatggcgtggagggctttaactgttatttccctctgcagtcttacggcttccagccaacaaacggcgtgggctatcagccctacagagtggtggtgctgtcctttgagctgctgcacgcaccagcaacagtgtgcggcccaaagaagtctaccaatctggtgaagaacaagtgcgtgaacttcaacttcaacggactgaccggcacaggcgtgctgaccgagagcaataagaagttcctgccttttcagcagttcggcagggacatcgcagataccacagacgccgtgcgcgaccctcagaccctggagatcctggacatcacaccatgcagcttcggcggcgtgtccgtgatcacaccaggcaccaatacatccaaccaggtggccgtgctgtatcaggacgtgaattgtaccgaggtgcccgtggcaatccacgcagatcagctgacccctacatggcgggtgtactctaccggcagcaacgtgttccagacaagagccggatgcctgatcggagcagagcacgtgaacaatagctatgagtgcgacatccctatcggcgccggcatctgtgccagctaccagacccagacaaactccccatctggagcaggctccgtggccagccagtccatcatcgcctataccatgagcctgggcgccgagaacagcgtggcctactccaacaattctatcgccatccctaccaacttcacaatcagcgtgaccacagagatcctgccagtgtctatgaccaagacaagcgtggactgcacaatgtatatctgtggcgatagcaccgagtgctccaacctgctgctgcagtacggctccttttgtacccagctgaatagagccctgacaggcatcgccgtggagcaggataagaacacacaggaggtgttcgcccaggtgaagcagatctacaagaccccacccatcaaggactttggcggcttcaacttcagccagatcctgcctgatccaagcaagccctccaagaggtcttttatcgaggacctgctgttcaacaaggtgaccctggccgatgccggcttcatcaagcagtatggagattgcctgggagacatcgcagcccgcgacctgatctgtgcccagaagtttaatggcctgaccgtgctgcctccactgctgacagatgagatgatcgcccagtacacatctgccctgctggccggcaccatcacaagcggatggaccttcggcgcaggagccgccctgcagatcccttttgccatgcagatggcctataggttcaacggcatcggcgtgacccagaatgtgctgtacgagaaccagaagctgatcgccaatcagtttaacagcgccatcggcaagatccaggactctctgtcctctacagccagcgccctgggcaagctgcaggatgtggtgaatcagaacgcccaggccctgaataccctggtgaagcagctgagctccaacttcggcgccatctctagcgtgctgaatgacatcctgagccggctggacccccctgaggcagaggtgcagatcgacaggctgatcacaggccgcctgcagagcctgcagacctacgtgacacagcagctgatcagggcagcagagatcagagcctccgccaatctggccgccaccaagatgagcgagtgcgtgctgggacagtccaagagggtggacttttgtggcaagggctatcacctgatgtctttcccacagagcgcccctcacggcgtggtgtttctgcacgtgacctacgtgccagcccaggagaagaacttcaccacagcaccagccatctgccacgatggaaaggcacactttcctagggagggcgtgttcgtgtctaacggcacccactggtttgtgacacagcgcaatttctacgagccacagatcatcaccacagacaatacattcgtgagcggcaactgtgatgtggtgatcggcatcgtgaacaataccgtgtatgatccactgcagcccgagctggactcctttaaggaggagctggataagtacttcaagaatcacacctctcccgacgtggatctgggcgacatctccggcatcaatgcctctgtggtgaacatccagaaggagatcgaccggctgaacgaggtggccaagaatctgaacgagagcctgatcgatctgcaggagctgggcaagtatgagcagtacatcaagggctctggcagagagaacctgtatttccagggaggaggaggcagcggatacatccctgaggcaccaagggacggacaggcctacgtgcgcaaggatggcgagtgggtgctgctgtccacctttctgggccatcatcaccaccaccaccaccactga

SEQ ID NO: 4978 - DNA, 3846 bp, Artificial Sequence
  Description of Artificial Sequence: Synthetic polynucleotide
atgggcatcctgccaagcccaggaatgcccgccctgctgtctctggtgagcctgctgtccgtgctgctgatgggatgcgtggcagagacaggcacacagtgcgtgaacctgaccacaaggacccagctgccccctgcctataccaattctttcacacggggcgtgtactatcccgacaaggtgtttagaagctccgtgctgcactccacacaggatctgtttctgcctttcttttctaacgtgacctggttccacgccatccacgtgtccggcaccaatggcacaaagcggttcgacaatcccgtgctgccttttaacgatggcgtgtacttcgccagcaccgagaagtccaacatcatcagaggctggatctttggcaccacactggactctaagacacagagcctgctgatcgtgaacaatgccaccaacgtggtgatcaaggtgtgcgagttccagttttgtaatgatccattcctgggcgtgtactatcacaagaacaataagtcctggatggagtctgagtttcgcgtgtattctagcgccaacaattgcacatttgagtacgtgagccagcccttcctgatggacctggagggcaagcagggcaatttcaagaacctgagggagttcgtgtttaagaatatcgatggctacttcaagatctacagcaagcacaccccaatcaacctggtgcgcgacctgccacagggattctccgccctggagccactggtggatctgcccatcggcatcaacatcacccggtttcagacactgctggccctgcacagatcctacctgacaccaggcgactcctctagcggatggaccgcaggagctgccgcctactatgtgggctatctgcagccccggaccttcctgctgaagtacaacgagaatggcaccatcacagacgcagtggattgcgccctggaccccctgtctgagacaaagtgtacactgaagagctttaccgtggagaagggcatctatcagacaagcaatttcagggtgcagcctaccgagtccatcgtgcgctttcccaatatcacaaacctgtgcccttttggcgaggtgttcaacgccaccagattcgccagcgtgtacgcctttaatcggaagagaatctccaactgcgtggccgactattctgtgctgtacaactccgcctctttcagcacctttaagtgctatggcgtgtctcccacaaagctgaatgatctgtgctttaccaacgtgtacgccgatagcttcgtgatcaggggagacgaagtgagacagatcgcaccaggacagacaggaaagatcgcagactacaattataagctgcctgacgatttcaccggctgcgtgatcgcctggaactccaacaatctggattctaaagtgggcggcaactacaattatctgtacaggctgtttcgcaagtccaatctgaagccattcgagcgggacatctccacagagatctaccaggccggctctaccccctgcaatggcgtggagggctttaactgttatttccctctgcagtcttacggcttccagccaacaaacggcgtgggctatcagccctacagagtggtggtgctgtcctttgagctgctgcacgcaccagcaacagtgtgcggcccaaagaagtctaccaatctggtgaagaacaagtgcgtgaacttcaacttcaacggactgaccggcacaggcgtgctgaccgagagcaataagaagttcctgccttttcagcagttcggcagggacatcgcagataccacagacgccgtgcgcgaccctcagaccctggagatcctggacatcacaccatgcagcttcggcggcgtgtccgtgatcacaccaggcaccaatacatccaaccaggtggccgtgctgtatcaggacgtgaattgtaccgaggtgcccgtggcaatccacgcagatcagctgacccctacatggcgggtgtactctaccggcagcaacgtgttccagacaagagccggatgcctgatcggagcagagcacgtgaacaatagctatgagtgcgacatccctatcggcgccggcatctgtgccagctaccagacccagacaaactccccatctggagcaggctccgtggccagccagtccatcatcgcctataccatgagcctgggcgccgagaacagcgtggcctactccaacaattctatcgccatccctaccaacttcacaatcagcgtgaccacagagatcctgccagtgtctatgaccaagacaagcgtggactgcacaatgtatatctgtggcgatagcaccgagtgctccaacctgctgctgcagtacggctccttttgtacccagctgaatagagccctgacaggcatcgccgtggagcaggataagaacacacaggaggtgttcgcccaggtgaagcagatctacaagaccccacccatcaaggactttggcggcttcaacttcagccagatcctgcctgatccaagcaagccctccaagaggtcttttatcgaggacctgctgttcaacaaggtgaccctggccgatgccggcttcatcaagcagtatggagattgcctgggagacatcgcagcccgcgacctgatctgtgcccagaagtttaatggcctgaccgtgctgcctccactgctgacagatgagatgatcgcccagtacacatctgccctgctggccggcaccatcacaagcggatggaccttcggcgcaggagccgccctgcagatcccttttgccatgcagatggcctataggttcaacggcatcggcgtgacccagaatgtgctgtacgagaaccagaagctgatcgccaatcagtttaacagcgccatcggcaagatccaggactctctgtcctctacagccagcgccctgggcaagctgcaggatgtggtgaatcagaacgcccaggccctgaataccctggtgaagcagctgagctccaacttcggcgccatctctagcgtgctgaatgacatcctgagccggctggacccccctgaggcagaggtgcagatcgacaggctgatcacaggccgcctgcagagcctgcagacctacgtgacacagcagctgatcagggcagcagagatcagagcctccgccaatctggccgccaccaagatgagcgagtgcgtgctgggacagtccaagagggtggacttttgtggcaagggctatcacctgatgtctttcccacagagcgcccctcacggcgtggtgtttctgcacgtgacctacgtgccagcccaggagaagaacttcaccacagcaccagccatctgccacgatggaaaggcacactttcctagggagggcgtgttcgtgtctaacggcacccactggtttgtgacacagcgcaatttctacgagccacagatcatcaccacagacaatacattcgtgagcggcaactgtgatgtggtgatcggcatcgtgaacaataccgtgtatgatccactgcagcccgagctggactcctttaaggaggagctggataagtacttcaagaatcacacctctcccgacgtggatctgggcgacatctccggcatcaatgcctctgtggtgaacatccagaaggagatcgaccggctgaacgaggtggccaagaatctgaacgagagcctgatcgatctgcaggagctgggcaagtatgagcagtacatcaagggctctggcagagagaacctgtatttccagggaggaggaggcagcggatacatccctgaggcaccaagggacggacaggcctacgtgcgcaaggatggcgagtgggtgctgctgtccacctttctgggccatcatcaccaccaccaccaccactga

SEQ ID NO: 4979 - DNA, 3846 bp, Artificial Sequence
  Description of Artificial Sequence: Synthetic polynucleotide
atgggcatcctgccaagcccaggaatgcccgccctgctgtctctggtgagcctgctgtccgtgctgctgatgggatgcgtggcagagacaggcacacagtgcgtgaacctgaccacaaggacccagctgccccctgcctataccaattctttcacacggggcgtgtactatcccgacaaggtgtttagaagctccgtgctgcactccacacaggatctgtttctgcctttcttttctaacgtgacctggttccacgccatccacgtgtccggcaccaatggcacaaagcggttcgacaatcccgtgctgccttttaacgatggcgtgtacttcgccagcaccgagaagtccaacatcatcagaggctggatctttggcaccacactggactctaagacacagagcctgctgatcgtgaacaatgccaccaacgtggtgatcaaggtgtgcgagttccagttttgtaatgatccattcctgggcgtgtactatcacaagaacaataagtcctggatggagtctgagtttcgcgtgtattctagcgccaacaattgcacatttgagtacgtgagccagcccttcctgatggacctggagggcaagcagggcaatttcaagaacctgagggagttcgtgtttaagaatatcgatggctacttcaagatctacagcaagcacaccccaatcaacctggtgcgcgacctgccacagggattctccgccctggagccactggtggatctgcccatcggcatcaacatcacccggtttcagacactgctggccctgcacagatcctacctgacaccaggcgactcctctagcggatggaccgcaggagctgccgcctactatgtgggctatctgcagccccggaccttcctgctgaagtacaacgagaatggcaccatcacagacgcagtggattgcgccctggaccccctgtctgagacaaagtgtacactgaagagctttaccgtggagaagggcatctatcagacaagcaatttcagggtgcagcctaccgagtccatcgtgcgctttcccaatatcacaaacctgtgcccttttggcgagtatttcaacgccaccagattcgccagcgtgtacgcctggaatcggaagagaatctccaactgcgtggccgactattctgtgctgtacaactccgcctctttcagcacctttaagtgctatggcgtgtctcccacaaagctgaatgatctgtgctttaccaacgtgtacgccgatagcttcgtgatcaggggagacgaagtgagacagatcgcaccaggacagacaggaaagatcgcagactacaattataagctgcctgacgatttcaccggctgcgtgatcgcctggaactccaacaatctggattctaaagtgggcggcaactacaattatctgtacaggctgtttcgcaagtccaatctgaagccattcgagcgggacatctccacagagatctaccaggccggctctaccccctgcaatggcgtggagggctttaactgttatttccctctgcagtcttacggcttccagccaacaaacggcgtgggctatcagccctacagagtggtggtgctgtcctttgagctgctgcacgcaccagcaacagtgtgcggcccaaagaagtctaccaatctggtgaagaacaagtgcgtgaacttcaacttcaacggactgaccggcacaggcgtgctgaccgagagcaataagaagttcctgccttttcagcagttcggcagggacatcgcagataccacagacgccgtgcgcgaccctcagaccctggagatcctggacatcacaccatgcagcttcggcggcgtgtccgtgatcacaccaggcaccaatacatccaaccaggtggccgtgctgtatcaggacgtgaattgtaccgaggtgcccgtggcaatccacgcagatcagctgacccctacatggcgggtgtactctaccggcagcaacgtgttccagacaagagccggatgcctgatcggagcagagcacgtgaacaatagctatgagtgcgacatccctatcggcgccggcatctgtgccagctaccagacccagacaaactccccatctggagcaggctccgtggccagccagtccatcatcgcctataccatgagcctgggcgccgagaacagcgtggcctactccaacaattctatcgccatccctaccaacttcacaatcagcgtgaccacagagatcctgccagtgtctatgaccaagacaagcgtggactgcacaatgtatatctgtggcgatagcaccgagtgctccaacctgctgctgcagtacggctccttttgtacccagctgaatagagccctgacaggcatcgccgtggagcaggataagaacacacaggaggtgttcgcccaggtgaagcagatctacaagaccccacccatcaaggactttggcggcttcaacttcagccagatcctgcctgatccaagcaagccctccaagaggtcttttatcgaggacctgctgttcaacaaggtgaccctggccgatgccggcttcatcaagcagtatggagattgcctgggagacatcgcagcccgcgacctgatctgtgcccagaagtttaatggcctgaccgtgctgcctccactgctgacagatgagatgatcgcccagtacacatctgccctgctggccggcaccatcacaagcggatggaccttcggcgcaggagccgccctgcagatcccttttgccatgcagatggcctataggttcaacggcatcggcgtgacccagaatgtgctgtacgagaaccagaagctgatcgccaatcagtttaacagcgccatcggcaagatccaggactctctgtcctctacagccagcgccctgggcaagctgcaggatgtggtgaatcagaacgcccaggccctgaataccctggtgaagcagctgagctccaacttcggcgccatctctagcgtgctgaatgacatcctgagccggctggacccccctgaggcagaggtgcagatcgacaggctgatcacaggccgcctgcagagcctgcagacctacgtgacacagcagctgatcagggcagcagagatcagagcctccgccaatctggccgccaccaagatgagcgagtgcgtgctgggacagtccaagagggtggacttttgtggcaagggctatcacctgatgtctttcccacagagcgcccctcacggcgtggtgtttctgcacgtgacctacgtgccagcccaggagaagaacttcaccacagcaccagccatctgccacgatggaaaggcacactttcctagggagggcgtgttcgtgtctaacggcacccactggtttgtgacacagcgcaatttctacgagccacagatcatcaccacagacaatacattcgtgagcggcaactgtgatgtggtgatcggcatcgtgaacaataccgtgtatgatccactgcagcccgagctggactcctttaaggaggagctggataagtacttcaagaatcacacctctcccgacgtggatctgggcgacatctccggcatcaatgcctctgtggtgaacatccagaaggagatcgaccggctgaacgaggtggccaagaatctgaacgagagcctgatcgatctgcaggagctgggcaagtatgagcagtacatcaagggctctggcagagagaacctgtatttccagggaggaggaggcagcggatacatccctgaggcaccaagggacggacaggcctacgtgcgcaaggatggcgagtgggtgctgctgtccacctttctgggccatcatcaccaccaccaccaccactga

SEQ ID NO: 4980 - DNA, 3846 bp, Artificial Sequence
  Description of Artificial Sequence: Synthetic polynucleotide
atgggcatcctgccaagcccaggaatgcccgccctgctgtctctggtgagcctgctgtccgtgctgctgatgggatgcgtggcagagacaggcacacagtgcgtgaacctgaccacaaggacccagctgccccctgcctataccaattctttcacacggggcgtgtactatcccgacaaggtgtttagaagctccgtgctgcactccacacaggatctgtttctgcctttcttttctaacgtgacctggttccacgccatccacgtgtccggcaccaatggcacaaagcggttcgacaatcccgtgctgccttttaacgatggcgtgtacttcgccagcaccgagaagtccaacatcatcagaggctggatctttggcaccacactggactctaagacacagagcctgctgatcgtgaacaatgccaccaacgtggtgatcaaggtgtgcgagttccagttttgtaatgatccattcctgggcgtgtactatcacaagaacaataagtcctggatggagtctgagtttcgcgtgtattctagcgccaacaattgcacatttgagtacgtgagccagcccttcctgatggacctggagggcaagcagggcaatttcaagaacctgagggagttcgtgtttaagaatatcgatggctacttcaagatctacagcaagcacaccccaatcaacctggtgcgcgacctgccacagggattctccgccctggagccactggtggatctgcccatcggcatcaacatcacccggtttcagacactgctggccctgcacagatcctacctgacaccaggcgactcctctagcggatggaccgcaggagctgccgcctactatgtgggctatctgcagccccggaccttcctgctgaagtacaacgagaatggcaccatcacagacgcagtggattgcgccctggaccccctgtctgagacaaagtgtacactgaagagctttaccgtggagaagggcatctatcagacaagcaatttcagggtgcagcctaccgagtccatcgtgcgctttcccaatatcacaaacctgtgcccttttggcgaggtgttcaacgccaccagattcgccagcgtgtacgcctggaatcggaagagaatctccaactgcgtggccgactattctgtgctgtacaactccgcctctttcagcacctttaagtgctatggcgtgtctcccacaaagctgaatgatctgtgctttaccaacgtgtacgccgatagcttcgtgatcaggggagacgaagtgagacagatcgcaccaggacagacaggaaagatcgcagactacaattataagctgcctgacgatttcaccggctgcgtgatcgcctggaactccaacaatctggattctaaaccgggcggcaactacaattatctgtacaggctgtttcgcaagtccaatctgaagccattcgagcgggacatctccacagagatctaccaggccggctctaccccctgcaatggcgtggagggctttaactgttatttccctctgcagtcttacggcttccagccaacaaacggcgtgggctatcagccctacagagtggtggtgctgtcctttgagctgctgcacgcaccagcaacagtgtgcggcccaaagaagtctaccaatctggtgaagaacaagtgcgtgaacttcaacttcaacggactgaccggcacaggcgtgctgaccgagagcaataagaagttcctgccttttcagcagttcggcagggacatcgcagataccacagacgccgtgcgcgaccctcagaccctggagatcctggacatcacaccatgcagcttcggcggcgtgtccgtgatcacaccaggcaccaatacatccaaccaggtggccgtgctgtatcaggacgtgaattgtaccgaggtgcccgtggcaatccacgcagatcagctgacccctacatggcgggtgtactctaccggcagcaacgtgttccagacaagagccggatgcctgatcggagcagagcacgtgaacaatagctatgagtgcgacatccctatcggcgccggcatctgtgccagctaccagacccagacaaactccccatctggagcaggctccgtggccagccagtccatcatcgcctataccatgagcctgggcgccgagaacagcgtggcctactccaacaattctatcgccatccctaccaacttcacaatcagcgtgaccacagagatcctgccagtgtctatgaccaagacaagcgtggactgcacaatgtatatctgtggcgatagcaccgagtgctccaacctgctgctgcagtacggctccttttgtacccagctgaatagagccctgacaggcatcgccgtggagcaggataagaacacacaggaggtgttcgcccaggtgaagcagatctacaagaccccacccatcaaggactttggcggcttcaacttcagccagatcctgcctgatccaagcaagccctccaagaggtcttttatcgaggacctgctgttcaacaaggtgaccctggccgatgccggcttcatcaagcagtatggagattgcctgggagacatcgcagcccgcgacctgatctgtgcccagaagtttaatggcctgaccgtgctgcctccactgctgacagatgagatgatcgcccagtacacatctgccctgctggccggcaccatcacaagcggatggaccttcggcgcaggagccgccctgcagatcccttttgccatgcagatggcctataggttcaacggcatcggcgtgacccagaatgtgctgtacgagaaccagaagctgatcgccaatcagtttaacagcgccatcggcaagatccaggactctctgtcctctacagccagcgccctgggcaagctgcaggatgtggtgaatcagaacgcccaggccctgaataccctggtgaagcagctgagctccaacttcggcgccatctctagcgtgctgaatgacatcctgagccggctggacccccctgaggcagaggtgcagatcgacaggctgatcacaggccgcctgcagagcctgcagacctacgtgacacagcagctgatcagggcagcagagatcagagcctccgccaatctggccgccaccaagatgagcgagtgcgtgctgggacagtccaagagggtggacttttgtggcaagggctatcacctgatgtctttcccacagagcgcccctcacggcgtggtgtttctgcacgtgacctacgtgccagcccaggagaagaacttcaccacagcaccagccatctgccacgatggaaaggcacactttcctagggagggcgtgttcgtgtctaacggcacccactggtttgtgacacagcgcaatttctacgagccacagatcatcaccacagacaatacattcgtgagcggcaactgtgatgtggtgatcggcatcgtgaacaataccgtgtatgatccactgcagcccgagctggactcctttaaggaggagctggataagtacttcaagaatcacacctctcccgacgtggatctgggcgacatctccggcatcaatgcctctgtggtgaacatccagaaggagatcgaccggctgaacgaggtggccaagaatctgaacgagagcctgatcgatctgcaggagctgggcaagtatgagcagtacatcaagggctctggcagagagaacctgtatttccagggaggaggaggcagcggatacatccctgaggcaccaagggacggacaggcctacgtgcgcaaggatggcgagtgggtgctgctgtccacctttctgggccatcatcaccaccaccaccaccactga

SEQ ID NO: 4981 - DNA, 3846 bp, Artificial Sequence
  Description of Artificial Sequence: Synthetic polynucleotide
atgggcatcctgccaagcccaggaatgcccgccctgctgtctctggtgagcctgctgtccgtgctgctgatgggatgcgtggcagagacaggcacacagtgcgtgaacctgaccacaaggacccagctgccccctgcctataccaattctttcacacggggcgtgtactatcccgacaaggtgtttagaagctccgtgctgcactccacacaggatctgtttctgcctttcttttctaacgtgacctggttccacgccatccacgtgtccggcaccaatggcacaaagcggttcgacaatcccgtgctgccttttaacgatggcgtgtacttcgccagcaccgagaagtccaacatcatcagaggctggatctttggcaccacactggactctaagacacagagcctgctgatcgtgaacaatgccaccaacgtggtgatcaaggtgtgcgagttccagttttgtaatgatccattcctgggcgtgtactatcacaagaacaataagtcctggatggagtctgagtttcgcgtgtattctagcgccaacaattgcacatttgagtacgtgagccagcccttcctgatggacctggagggcaagcagggcaatttcaagaacctgagggagttcgtgtttaagaatatcgatggctacttcaagatctacagcaagcacaccccaatcaacctggtgcgcgacctgccacagggattctccgccctggagccactggtggatctgcccatcggcatcaacatcacccggtttcagacactgctggccctgcacagatcctacctgacaccaggcgactcctctagcggatggaccgcaggagctgccgcctactatgtgggctatctgcagccccggaccttcctgctgaagtacaacgagaatggcaccatcacagacgcagtggattgcgccctggaccccctgtctgagacaaagtgtacactgaagagctttaccgtggagaagggcatctatcagacaagcaatttcagggtgcagcctaccgagtccatcgtgcgctttcccaatatcacaaacctgtgcccttttggcgaggtgttcaacgccaccagattcgccagcgtgtacgcctggaatcggaagagaatctccaactgcgtggccgactattctgtgctgtacaactccgcctctttcagcacctttaagtgctatggcgtgtctcccacaaagctgaatgatctgtgctttaccaacgtgtacgccgatagcttcgtgatcaggggagacgaacttagacagatcgcaccaggacagacaggaaagatcgcagactacaattataagctgcctgacgatttcaccggctgcgtgatcgcctggaactccaacaatctggattctaaagtgggcggcaactacaattatctgtacaggctgtttcgcaagtccaatctgaagccattcgagcgggacatctccacagagatctaccaggccggctctaccccctgcaatggcgtggagggctttaactgttatttccctctgcagtcttacggcttccagccaacaaacggcgtgggctatcagccctacagagtggtggtgctgtcctttgagctgctgcacgcaccagcaacagtgtgcggcccaaagaagtctaccaatctggtgaagaacaagtgcgtgaacttcaacttcaacggactgaccggcacaggcgtgctgaccgagagcaataagaagttcctgccttttcagcagttcggcagggacatcgcagataccacagacgccgtgcgcgaccctcagaccctggagatcctggacatcacaccatgcagcttcggcggcgtgtccgtgatcacaccaggcaccaatacatccaaccaggtggccgtgctgtatcaggacgtgaattgtaccgaggtgcccgtggcaatccacgcagatcagctgacccctacatggcgggtgtactctaccggcagcaacgtgttccagacaagagccggatgcctgatcggagcagagcacgtgaacaatagctatgagtgcgacatccctatcggcgccggcatctgtgccagctaccagacccagacaaactccccatctggagcaggctccgtggccagccagtccatcatcgcctataccatgagcctgggcgccgagaacagcgtggcctactccaacaattctatcgccatccctaccaacttcacaatcagcgtgaccacagagatcctgccagtgtctatgaccaagacaagcgtggactgcacaatgtatatctgtggcgatagcaccgagtgctccaacctgctgctgcagtacggctccttttgtacccagctgaatagagccctgacaggcatcgccgtggagcaggataagaacacacaggaggtgttcgcccaggtgaagcagatctacaagaccccacccatcaaggactttggcggcttcaacttcagccagatcctgcctgatccaagcaagccctccaagaggtcttttatcgaggacctgctgttcaacaaggtgaccctggccgatgccggcttcatcaagcagtatggagattgcctgggagacatcgcagcccgcgacctgatctgtgcccagaagtttaatggcctgaccgtgctgcctccactgctgacagatgagatgatcgcccagtacacatctgccctgctggccggcaccatcacaagcggatggaccttcggcgcaggagccgccctgcagatcccttttgccatgcagatggcctataggttcaacggcatcggcgtgacccagaatgtgctgtacgagaaccagaagctgatcgccaatcagtttaacagcgccatcggcaagatccaggactctctgtcctctacagccagcgccctgggcaagctgcaggatgtggtgaatcagaacgcccaggccctgaataccctggtgaagcagctgagctccaacttcggcgccatctctagcgtgctgaatgacatcctgagccggctggacccccctgaggcagaggtgcagatcgacaggctgatcacaggccgcctgcagagcctgcagacctacgtgacacagcagctgatcagggcagcagagatcagagcctccgccaatctggccgccaccaagatgagcgagtgcgtgctgggacagtccaagagggtggacttttgtggcaagggctatcacctgatgtctttcccacagagcgcccctcacggcgtggtgtttctgcacgtgacctacgtgccagcccaggagaagaacttcaccacagcaccagccatctgccacgatggaaaggcacactttcctagggagggcgtgttcgtgtctaacggcacccactggtttgtgacacagcgcaatttctacgagccacagatcatcaccacagacaatacattcgtgagcggcaactgtgatgtggtgatcggcatcgtgaacaataccgtgtatgatccactgcagcccgagctggactcctttaaggaggagctggataagtacttcaagaatcacacctctcccgacgtggatctgggcgacatctccggcatcaatgcctctgtggtgaacatccagaaggagatcgaccggctgaacgaggtggccaagaatctgaacgagagcctgatcgatctgcaggagctgggcaagtatgagcagtacatcaagggctctggcagagagaacctgtatttccagggaggaggaggcagcggatacatccctgaggcaccaagggacggacaggcctacgtgcgcaaggatggcgagtgggtgctgctgtccacctttctgggccatcatcaccaccaccaccaccactga

SEQ ID NO: 4982 - DNA, 3846 bp, Artificial Sequence
  Description of Artificial Sequence: Synthetic polynucleotide
atgggcatcctgccaagcccaggaatgcccgccctgctgtctctggtgagcctgctgtccgtgctgctgatgggatgcgtggcagagacaggcacacagtgcgtgaacctgaccacaaggacccagctgccccctgcctataccaattctttcacacggggcgtgtactatcccgacaaggtgtttagaagctccgtgctgcactccacacaggatctgtttctgcctttcttttctaacgtgacctggttccacgccatccacgtgtccggcaccaatggcacaaagcggttcgacaatcccgtgctgccttttaacgatggcgtgtacttcgccagcaccgagaagtccaacatcatcagaggctggatctttggcaccacactggactctaagacacagagcctgctgatcgtgaacaatgccaccaacgtggtgatcaaggtgtgcgagttccagttttgtaatgatccattcctgggcgtgtactatcacaagaacaataagtcctggatggagtctgagtttcgcgtgtattctagcgccaacaattgcacatttgagtacgtgagccagcccttcctgatggacctggagggcaagcagggcaatttcaagaacctgagggagttcgtgtttaagaatatcgatggctacttcaagatctacagcaagcacaccccaatcaacctggtgcgcgacctgccacagggattctccgccctggagccactggtggatctgcccatcggcatcaacatcacccggtttcagacactgctggccctgcacagatcctacctgacaccaggcgactcctctagcggatggaccgcaggagctgccgcctactatgtgggctatctgcagccccggaccttcctgctgaagtacaacgagaatggcaccatcacagacgcagtggattgcgccctggaccccctgtctgagacaaagtgtacactgaagagctttaccgtggagaagggcatctatcagacaagcaatttcagggtgcagcctaccgagtccatcgtgcgctttcccaatatcacaaacctgtgcccttttggcgaggtgttcaacgccaccagattcgccagcgtgtacgcctggaatcggaagagaatctccaactgcgtggccgactattctgtgctgtacaactccgcctctttcagcacctttaagtgctatggcgtgtctcccacaaagctgaatgatctgtgctttaccaacgtgtacgccgatagcttcgtgatcaggggagacgaagtgagacagatcgcaccaggacagacaggaaagatcgcagactacaattataagctgcctgacgatttcaccggctgcgtgatcgcctggaactccaacaatctggattctaaagtgggcggcaactacaattatctgtacaggctgtttcgcaagtccaatctgaagccattcgagcgggacatctccacagagatctaccaggccggctctaccccctgcaatggcgtggagggctttaactgttatttccctctgcagtcttacggcttccagccaacaaacggcgtgggctatcagccctacagagtggtggtgctgtcctttgagctgctgcacgcaccagcaacagtgtgcggcccaaagaagtctaccaatctggtgaagaacaagtgcgtgaacttcaacttcaacggactgaccggcacaggcgtgctgaccgagagcaataagaagttcctgccttttcagcagttcggcagggacatcgcagataccacagacgccgtgcgcgaccctcagaccctggagatcctggacatcacaccatgcagcttcggcggcgtgtccgtgatcacaccaggcaccaatacatccaaccaggtggccgtgctgtatcaggacgtgaattgtaccgaggtgcccgtggcaatccacgcagatcagctgacccctacatggcgggtgtactctaccggcagcaacgtgttccagacaagagccggatgcctgatcggagcagagcacgtgaacaatagctatgagtgcgacatccctatcggcgccggcatctgtgccagctaccagacccagacaaactccccatctggagcaggctccgtggccagccagtccatcatcgcctataccatgagcctgggcgccgagaacagcgtggcctactccaacaattctatcgccatccctaccaacttcacaatcagcgtgaccacagagatcctgccagtgtctatgaccaagacaagcgtggactgcacaatgtatatctgtggcgatagcaccgagtgctccaacctgctgctgcagtacggctccttttgtacccagctgaatagagccctgacaggcatcgccgtggagcaggataagaacacacaggaggtgttcgcccaggtgaagcagatctacaagaccccacccatcaaggactttggcggcttcaacttcagccagatcctgcctgatccaagcaagccctccaagaggtcttttatcgaggacctgctgttcaacaaggtgaccctggccgatgccggcttcatcaagcagtatggagattgcctgggagacatcgcagcccgcgacctgatctgtgcccagaagtttaatggcctgaccgtgctgcctccactgctgacagatgagatgatcgcccagtacacatctgccctgctggccggcaccatcacaagcggatggaccttcggcgcaggagccgccctgcagatcccttttgccatgcagatggcctataggttcaacggcatcggcgtgacccagaatgtgctgtacgagaaccagaagctgatcgccaatcagtttaacagcgccatcggcaagatccaggactctctgtcctctacagccagcgccctgggcaagctgcaggatgtggtgaatcagaacgcccaggccctgaataccctggtgaagcagctgagctccaacttcggcgccatctctagcgtgctgaatgacatcctgagccgggtcgacccccctgaggcagaggtgcagatcgacaggctgatcacaggccgcctgcagagcctgcagacctacgtgacacagcagctgatcagggcagcagagatcagagcctccgccaatctggccgccaccaagatgagcgagtgcgtgctgggacagtccaagagggtggacttttgtggcaagggctatcacctgatgtctttcccacagagcgcccctcacggcgtggtgtttctgcacgtgacctacgtgccagcccaggagaagaacttcaccacagcaccagccatctgccacgatggaaaggcacactttcctagggagggcgtgttcgtgtctaacggcacccactggtttgtgacacagcgcaatttctacgagccacagatcatcaccacagacaatacattcgtgagcggcaactgtgatgtggtgatcggcatcgtgaacaataccgtgtatgatccactgcagcccgagctggactcctttaaggaggagctggataagtacttcaagaatcacacctctcccgacgtggatctgggcgacatctccggcatcaatgcctctgtggtgaacatccagaaggagatcgaccggctgaacgaggtggccaagaatctgaacgagagcctgatcgatctgcaggagctgggcaagtatgagcagtacatcaagggctctggcagagagaacctgtatttccagggaggaggaggcagcggatacatccctgaggcaccaagggacggacaggcctacgtgcgcaaggatggcgagtgggtgctgctgtccacctttctgggccatcatcaccaccaccaccaccactga

SEQ ID NO: 4983 - DNA, 3846 bp, Artificial Sequence
  Description of Artificial Sequence: Synthetic polynucleotide
atgggcatcctgccaagcccaggaatgcccgccctgctgtctctggtgagcctgctgtccgtgctgctgatgggatgcgtggcagagacaggcacacagtgcgtgaacctgaccacaaggacccagctgccccctgcctataccaattctttcacacggggcgtgtactatcccgacaaggtgtttagaagctccgtgctgcactccacacaggatctgtttctgcctttcttttctaacgtgacctggttccacgccatccacgtgtccggcaccaatggcacaaagcggttcgacaatcccgtgctgccttttaacgatggcgtgtacttcgccagcaccgagaagtccaacatcatcagaggctggatctttggcaccacactggactctaagacacagagcctgctgatcgtgaacaatgccaccaacgtggtgatcaaggtgtgcgagttccagttttgtaatgatccattcctgggcgtgtactatcacaagaacaataagtcctggatggagtctgagtttcgcgtgtattctagcgccaacaattgcacatttgagtacgtgagccagcccttcctgatggacctggagggcaagcagggcaatttcaagaacctgagggagttcgtgtttaagaatatcgatggctacttcaagatctacagcaagcacaccccaatcaacctggtgcgcgacctgccacagggattctccgccctggagccactggtggatctgcccatcggcatcaacatcacccggtttcagacactgctggccctgcacagatcctacctgacaccaggcgactcctctagcggatggaccgcaggagctgccgcctactatgtgggctatctgcagccccggaccttcctgctgaagtacaacgagaatggcaccatcacagacgcagtggattgcgccctggaccccctgtctgagacaaagtgtacactgaagagctttaccgtggagaagggcatctatcagacaagcaatttcagggtgcagcctaccgagtccatcgtgcgctttcccaatatcacaaacctgtgcccttttggcgaggtgttcaacgccaccagattcgccagcgtgtacgcctggaatcggaagagaatctccaactgcgtggccgactattctgtgctgtacaactccgcctctttcagcacctttaagtgctatggcgtgtctcccacaaagctgaatgatctgtgctttccgaacgtgtacgccgatagcttcgtgatcaggggagacgaagtgagacagatcgcaccaggacagacaggaaagatcgcagactacaattataagctgcctgacgatttcaccggctgcgtgatcgcctggaactccaacaatctggattctaaagtgggcggcaactacaattatctgtacaggctgtttcgcaagtccaatctgaagccattcgagcgggacatctccacagagatctaccaggccggctctaccccctgcaatggcgtggagggctttaactgttatttccctctgcagtcttacggcttccagccaacaaacggcgtgggctatcagccctacagagtggtggtgctgtcctttgagctgctgcacgcaccagcaacagtgtgcggcccaaagaagtctaccaatctggtgaagaacaagtgcgtgaacttcaacttcaacggactgaccggcacaggcgtgctgaccgagagcaataagaagttcctgccttttcagcagttcggcagggacatcgcagataccacagacgccgtgcgcgaccctcagaccctggagatcctggacatcacaccatgcagcttcggcggcgtgtccgtgatcacaccaggcaccaatacatccaaccaggtggccgtgctgtatcaggacgtgaattgtaccgaggtgcccgtggcaatccacgcagatcagctgacccctacatggcgggtgtactctaccggcagcaacgtgttccagacaagagccggatgcctgatcggagcagagcacgtgaacaatagctatgagtgcgacatccctatcggcgccggcatctgtgccagctaccagacccagacaaactccccatctggagcaggctccgtggccagccagtccatcatcgcctataccatgagcctgggcgccgagaacagcgtggcctactccaacaattctatcgccatccctaccaacttcacaatcagcgtgaccacagagatcctgccagtgtctatgaccaagacaagcgtggactgcacaatgtatatctgtggcgatagcaccgagtgctccaacctgctgctgcagtacggctccttttgtacccagctgaatagagccctgacaggcatcgccgtggagcaggataagaacacacaggaggtgttcgcccaggtgaagcagatctacaagaccccacccatcaaggactttggcggcttcaacttcagccagatcctgcctgatccaagcaagccctccaagaggtcttttatcgaggacctgctgttcaacaaggtgaccctggccgatgccggcttcatcaagcagtatggagattgcctgggagacatcgcagcccgcgacctgatctgtgcccagaagtttaatggcctgaccgtgctgcctccactgctgacagatgagatgatcgcccagtacacatctgccctgctggccggcaccatcacaagcggatggaccttcggcgcaggagccgccctgcagatcccttttgccatgcagatggcctataggttcaacggcatcggcgtgacccagaatgtgctgtacgagaaccagaagctgatcgccaatcagtttaacagcgccatcggcaagatccaggactctctgtcctctacagccagcgccctgggcaagctgcaggatgtggtgaatcagaacgcccaggccctgaataccctggtgaagcagctgagctccaacttcggcgccatctctagcgtgctgaatgacatcctgagccggctggacccccctgaggcagaggtgcagatcgacaggctgatcacaggccgcctgcagagcctgcagacctacgtgacacagcagctgatcagggcagcagagatcagagcctccgccaatctggccgccaccaagatgagcgagtgcgtgctgggacagtccaagagggtggacttttgtggcaagggctatcacctgatgtctttcccacagagcgcccctcacggcgtggtgtttctgcacgtgacctacgtgccagcccaggagaagaacttcaccacagcaccagccatctgccacgatggaaaggcacactttcctagggagggcgtgttcgtgtctaacggcacccactggtttgtgacacagcgcaatttctacgagccacagatcatcaccacagacaatacattcgtgagcggcaactgtgatgtggtgatcggcatcgtgaacaataccgtgtatgatccactgcagcccgagctggactcctttaaggaggagctggataagtacttcaagaatcacacctctcccgacgtggatctgggcgacatctccggcatcaatgcctctgtggtgaacatccagaaggagatcgaccggctgaacgaggtggccaagaatctgaacgagagcctgatcgatctgcaggagctgggcaagtatgagcagtacatcaagggctctggcagagagaacctgtatttccagggaggaggaggcagcggatacatccctgaggcaccaagggacggacaggcctacgtgcgcaaggatggcgagtgggtgctgctgtccacctttctgggccatcatcaccaccaccaccaccactga

SEQ ID NO: 4984 - DNA, 3846 bp, Artificial Sequence
  Description of Artificial Sequence: Synthetic polynucleotide
atgggcatcctgccaagcccaggaatgcccgccctgctgtctctggtgagcctgctgtccgtgctgctgatgggatgcgtggcagagacaggcacacagtgcgtgaacctgaccacaaggacccagctgccccctgcctataccaattctttcacacggggcgtgtactatcccgacaaggtgtttagaagctccgtgctgcactccacacaggatctgtttctgcctttcttttctaacgtgacctggttccacgccatccacgtgtccggcaccaatggcacaaagcggttcgacaatcccgtgctgccttttaacgatggcgtgtacttcgccagcaccgagaagtccaacatcatcagaggctggatctttggcaccacactggactctaagacacagagcctgctgatcgtgaacaatgccaccaacgtggtgatcaaggtgtgcgagttccagttttgtaatgatccattcctgggcgtgtactatcacaagaacaataagtcctggatggagtctgagtttcgcgtgtattctagcgccaacaattgcacatttgagtacgtgagccagcccttcctgatggacctggagggcaagcagggcaatttcaagaacctgagggagttcgtgtttaagaatatcgatggctacttcaagatctacagcaagcacaccccaatcaacctggtgcgcgacctgccacagggattctccgccctggagccactggtggatctgcccatcggcatcaacatcacccggtttcagacactgctggccctgcacagatcctacctgacaccaggcgactcctctagcggatggaccgcaggagctgccgcctactatgtgggctatctgcagccccggaccttcctgctgaagtacaacgagaatggcaccatcacagacgcagtggattgcgccctggaccccctgtctgagacaaagtgtacactgaagagctttaccgtggagaagggcatctatcagacaagcaatttcagggtgcagcctaccgagtccatcgtgcgctttcccaatatcacaaacctgtgcccttttggcgaggtgttcaacgccaccagattcgccagcgtgtacgcctggaatcggaagagaatctccaactgcgtggccgactattctgtgctgtacaactccgcctctttcagcacctttaagtgctatggcgtgtctcccacaaagctgaatgatctgtgctttaccaacgtgtacgccgatagcttcgtgatcaggggagacgaagtgagacagatcgcaccaggacagacaggaaagatcgcagactacaattataagctgcctgacgatttcaccggctgcgtgatcgcctggaactccaacaatctggattctaaagtgggcggcaactacaattatctgtacaggctgtttcgcaagtccaatctgaagccattcgctcgggacatctccacagagatctaccaggccggctctaccccctgcaatggcgtggagggctttaactgttatttccctctgcagtcttacggcttccagccaacaaacggcgtgggctatcagccctacagagtggtggtgctgtcctttgagctgctgcacgcaccagcaacagtgtgcggcccaaagaagtctaccaatctggtgaagaacaagtgcgtgaacttcaacttcaacggactgaccggcacaggcgtgctgaccgagagcaataagaagttcctgccttttcagcagttcggcagggacatcgcagataccacagacgccgtgcgcgaccctcagaccctggagatcctggacatcacaccatgcagcttcggcggcgtgtccgtgatcacaccaggcaccaatacatccaaccaggtggccgtgctgtatcaggacgtgaattgtaccgaggtgcccgtggcaatccacgcagatcagctgacccctacatggcgggtgtactctaccggcagcaacgtgttccagacaagagccggatgcctgatcggagcagagcacgtgaacaatagctatgagtgcgacatccctatcggcgccggcatctgtgccagctaccagacccagacaaactccccatctggagcaggctccgtggccagccagtccatcatcgcctataccatgagcctgggcgccgagaacagcgtggcctactccaacaattctatcgccatccctaccaacttcacaatcagcgtgaccacagagatcctgccagtgtctatgaccaagacaagcgtggactgcacaatgtatatctgtggcgatagcaccgagtgctccaacctgctgctgcagtacggctccttttgtacccagctgaatagagccctgacaggcatcgccgtggagcaggataagaacacacaggaggtgttcgcccaggtgaagcagatctacaagaccccacccatcaaggactttggcggcttcaacttcagccagatcctgcctgatccaagcaagccctccaagaggtcttttatcgaggacctgctgttcaacaaggtgaccctggccgatgccggcttcatcaagcagtatggagattgcctgggagacatcgcagcccgcgacctgatctgtgcccagaagtttaatggcctgaccgtgctgcctccactgctgacagatgagatgatcgcccagtacacatctgccctgctggccggcaccatcacaagcggatggaccttcggcgcaggagccgccctgcagatcccttttgccatgcagatggcctataggttcaacggcatcggcgtgacccagaatgtgctgtacgagaaccagaagctgatcgccaatcagtttaacagcgccatcggcaagatccaggactctctgtcctctacagccagcgccctgggcaagctgcaggatgtggtgaatcagaacgcccaggccctgaataccctggtgaagcagctgagctccaacttcggcgccatctctagcgtgctgaatgacatcctgagccggctggacccccctgaggcagaggtgcagatcgacaggctgatcacaggccgcctgcagagcctgcagacctacgtgacacagcagctgatcagggcagcagagatcagagcctccgccaatctggccgccaccaagatgagcgagtgcgtgctgggacagtccaagagggtggacttttgtggcaagggctatcacctgatgtctttcccacagagcgcccctcacggcgtggtgtttctgcacgtgacctacgtgccagcccaggagaagaacttcaccacagcaccagccatctgccacgatggaaaggcacactttcctagggagggcgtgttcgtgtctaacggcacccactggtttgtgacacagcgcaatttctacgagccacagatcatcaccacagacaatacattcgtgagcggcaactgtgatgtggtgatcggcatcgtgaacaataccgtgtatgatccactgcagcccgagctggactcctttaaggaggagctggataagtacttcaagaatcacacctctcccgacgtggatctgggcgacatctccggcatcaatgcctctgtggtgaacatccagaaggagatcgaccggctgaacgaggtggccaagaatctgaacgagagcctgatcgatctgcaggagctgggcaagtatgagcagtacatcaagggctctggcagagagaacctgtatttccagggaggaggaggcagcggatacatccctgaggcaccaagggacggacaggcctacgtgcgcaaggatggcgagtgggtgctgctgtccacctttctgggccatcatcaccaccaccaccaccactga

SEQ ID NO: 4985 - DNA, 3846 bp, Artificial Sequence
  Description of Artificial Sequence: Synthetic polynucleotide
atgggcatcctgccaagcccaggaatgcccgccctgctgtctctggtgagcctgctgtccgtgctgctgatgggatgcgtggcagagacaggcacacagtgcgtgaacctgaccacaaggacccagctgccccctgcctataccaattctttcacacggggcgtgtactatcccgacaaggtgtttagaagctccgtgctgcactccacacaggatctgtttctgcctttcttttctaacgtgacctggttccacgccatccacgtgtccggcaccaatggcacaaagcggttcgacaatcccgtgctgccttttaacgatggcgtgtacttcgccagcaccgagaagtccaacatcatcagaggctggatctttggcaccacactggactctaagacacagagcctgctgatcgtgaacaatgccaccaacgtggtgatcaaggtgtgcgagttccagttttgtaatgatccattcctgggcgtgtactatcacaagaacaataagtcctggatggagtctgagtttcgcgtgtattctagcgccaacaattgcacatttgagtacgtgagccagcccttcctgatggacctggagggcaagcagggcaatttcaagaacctgagggagttcgtgtttaagaatatcgatggctacttcaagatctacagcaagcacaccccaatcaacctggtgcgcgacctgccacagggattctccgccctggagccactggtggatctgcccatcggcatcaacatcacccggtttcagacactgctggccctgcacagatcctacctgacaccaggcgactcctctagcggatggaccgcaggagctgccgcctactatgtgggctatctgcagccccggaccttcctgctgaagtacaacgagaatggcaccatcacagacgcagtggattgcgccctggaccccctgtctgagacaaagtgtacactgaagagctttaccgtggagaagggcatctatcagacaagcaatttcagggtgcagcctaccgagtccatcgtgcgctttcccaatatcacaaacctgtgcccttttggcgaggtgttcaacgccaccagattcgccagcgtgtacgcctggaatcggaagagaatctccaactgcgtggccgactattctgtgctgtacaactccgcctctttcagcacctttaagtgctatggcgtgtctcccacaaagctgaatgatctgtgctttaccaacgtgtacgccgatagcttcgtgatcaggggagacgaagtgagacagatcgcaccaggacagacaggaaagatcgcagactacaattataagctgcctgacgatttcaccggctgcgtgatcgcctggaactccaacaatctggattctaaagtgggcggcaactacaattatctgtacaggctgtttcgcaagtccaatctggacccattcgagcgggacatctccacagagatctaccaggccggctctaccccctgcaatggcgtggagggctttaactgttatttccctctgcagtcttacggcttccagccaacaaacggcgtgggctatcagccctacagagtggtggtgctgtcctttgagctgctgcacgcaccagcaacagtgtgcggcccaaagaagtctaccaatctggtgaagaacaagtgcgtgaacttcaacttcaacggactgaccggcacaggcgtgctgaccgagagcaataagaagttcctgccttttcagcagttcggcagggacatcgcagataccacagacgccgtgcgcgaccctcagaccctggagatcctggacatcacaccatgcagcttcggcggcgtgtccgtgatcacaccaggcaccaatacatccaaccaggtggccgtgctgtatcaggacgtgaattgtaccgaggtgcccgtggcaatccacgcagatcagctgacccctacatggcgggtgtactctaccggcagcaacgtgttccagacaagagccggatgcctgatcggagcagagcacgtgaacaatagctatgagtgcgacatccctatcggcgccggcatctgtgccagctaccagacccagacaaactccccatctggagcaggctccgtggccagccagtccatcatcgcctataccatgagcctgggcgccgagaacagcgtggcctactccaacaattctatcgccatccctaccaacttcacaatcagcgtgaccacagagatcctgccagtgtctatgaccaagacaagcgtggactgcacaatgtatatctgtggcgatagcaccgagtgctccaacctgctgctgcagtacggctccttttgtacccagctgaatagagccctgacaggcatcgccgtggagcaggataagaacacacaggaggtgttcgcccaggtgaagcagatctacaagaccccacccatcaaggactttggcggcttcaacttcagccagatcctgcctgatccaagcaagccctccaagaggtcttttatcgaggacctgctgttcaacaaggtgaccctggccgatgccggcttcatcaagcagtatggagattgcctgggagacatcgcagcccgcgacctgatctgtgcccagaagtttaatggcctgaccgtgctgcctccactgctgacagatgagatgatcgcccagtacacatctgccctgctggccggcaccatcacaagcggatggaccttcggcgcaggagccgccctgcagatcccttttgccatgcagatggcctataggttcaacggcatcggcgtgacccagaatgtgctgtacgagaaccagaagctgatcgccaatcagtttaacagcgccatcggcaagatccaggactctctgtcctctacagccagcgccctgggcaagctgcaggatgtggtgaatcagaacgcccaggccctgaataccctggtgaagcagctgagctccaacttcggcgccatctctagcgtgctgaatgacatcctgagccggctggacccccctgaggcagaggtgcagatcgacaggctgatcacaggccgcctgcagagcctgcagacctacgtgacacagcagctgatcagggcagcagagatcagagcctccgccaatctggccgccaccaagatgagcgagtgcgtgctgggacagtccaagagggtggacttttgtggcaagggctatcacctgatgtctttcccacagagcgcccctcacggcgtggtgtttctgcacgtgacctacgtgccagcccaggagaagaacttcaccacagcaccagccatctgccacgatggaaaggcacactttcctagggagggcgtgttcgtgtctaacggcacccactggtttgtgacacagcgcaatttctacgagccacagatcatcaccacagacaatacattcgtgagcggcaactgtgatgtggtgatcggcatcgtgaacaataccgtgtatgatccactgcagcccgagctggactcctttaaggaggagctggataagtacttcaagaatcacacctctcccgacgtggatctgggcgacatctccggcatcaatgcctctgtggtgaacatccagaaggagatcgaccggctgaacgaggtggccaagaatctgaacgagagcctgatcgatctgcaggagctgggcaagtatgagcagtacatcaagggctctggcagagagaacctgtatttccagggaggaggaggcagcggatacatccctgaggcaccaagggacggacaggcctacgtgcgcaaggatggcgagtgggtgctgctgtccacctttctgggccatcatcaccaccaccaccaccactga

SEQ ID NO: 4986 - DNA, 3846 bp, Artificial Sequence
  Description of Artificial Sequence: Synthetic polynucleotide
atgggcatcctgccaagcccaggaatgcccgccctgctgtctctggtgagcctgctgtccgtgctgctgatgggatgcgtggcagagacaggcacacagtgcgtgaacctgaccacaaggacccagctgccccctgcctataccaattctttcacacggggcgtgtactatcccgacaaggtgtttagaagctccgtgctgcactccacacaggatctgtttctgcctttcttttctaacgtgacctggttccacgccatccacgtgtccggcaccaatggcacaaagcggttcgacaatcccgtgctgccttttaacgatggcgtgtacttcgccagcaccgagaagtccaacatcatcagaggctggatctttggcaccacactggactctaagacacagagcctgctgatcgtgaacaatgccaccaacgtggtgatcaaggtgtgcgagttccagttttgtaatgatccattcctgggcgtgtactatcacaagaacaataagtcctggatggagtctgagtttcgcgtgtattctagcgccaacaattgcacatttgagtacgtgagccagcccttcctgatggacctggagggcaagcagggcaatttcaagaacctgagggagttcgtgtttaagaatatcgatggctacttcaagatctacagcaagcacaccccaatcaacctggtgcgcgacctgccacagggattctccgccctggagccactggtggatctgcccatcggcatcaacatcacccggtttcagacactgctggccctgcacagatcctacctgacaccaggcgactcctctagcggatggaccgcaggagctgccgcctactatgtgggctatctgcagccccggaccttcctgctgaagtacaacgagaatggcaccatcacagacgcagtggattgcgccctggaccccctgtctgagacaaagtgtacactgaagagctttaccgtggagaagggcatctatcagacaagcaatttcagggtgcagcctaccgagtccatcgtgcgctttcccaatatcacaaacctgtgcccttttggcgaggtgttcaacgccaccagattcgccagcgtgtacgcctggaatcggaagagaatctccaactgcgtggccgactattctgtgctgtacaactccgcctctttcagcacctttaagtgctatggcgtgtctcccacaaagctgaatgatctgtgctttaccaacgtgtacgccgatagcttcgtgatcaggggagacgaagtgagacagatcgcaccaggacagacaggaaagatcgcagactacaattataagctgcctgacgatttcaccggctgcgtgatcgcctggaactccaacaatctggattctaaagtgggcggcaactacaattatctgtacaggctgtttcgcaagtccaatctgaagccattcgagcgggacatctccacagagatctaccaggccggctctaccccctgcaatggcgtggagggctttaactgttatttccctctgcagtcttacggcttccagccaacaaacggcgtgggctatcagccctacagagtggtggtgctgtcctttgagctgctgccggcaccagcaacagtgtgcggcccaaagaagtctaccaatctggtgaagaacaagtgcgtgaacttcaacttcaacggactgaccggcacaggcgtgctgaccgagagcaataagaagttcctgccttttcagcagttcggcagggacatcgcagataccacagacgccgtgcgcgaccctcagaccctggagatcctggacatcacaccatgcagcttcggcggcgtgtccgtgatcacaccaggcaccaatacatccaaccaggtggccgtgctgtatcaggacgtgaattgtaccgaggtgcccgtggcaatccacgcagatcagctgacccctacatggcgggtgtactctaccggcagcaacgtgttccagacaagagccggatgcctgatcggagcagagcacgtgaacaatagctatgagtgcgacatccctatcggcgccggcatctgtgccagctaccagacccagacaaactccccatctggagcaggctccgtggccagccagtccatcatcgcctataccatgagcctgggcgccgagaacagcgtggcctactccaacaattctatcgccatccctaccaacttcacaatcagcgtgaccacagagatcctgccagtgtctatgaccaagacaagcgtggactgcacaatgtatatctgtggcgatagcaccgagtgctccaacctgctgctgcagtacggctccttttgtacccagctgaatagagccctgacaggcatcgccgtggagcaggataagaacacacaggaggtgttcgcccaggtgaagcagatctacaagaccccacccatcaaggactttggcggcttcaacttcagccagatcctgcctgatccaagcaagccctccaagaggtcttttatcgaggacctgctgttcaacaaggtgaccctggccgatgccggcttcatcaagcagtatggagattgcctgggagacatcgcagcccgcgacctgatctgtgcccagaagtttaatggcctgaccgtgctgcctccactgctgacagatgagatgatcgcccagtacacatctgccctgctggccggcaccatcacaagcggatggaccttcggcgcaggagccgccctgcagatcccttttgccatgcagatggcctataggttcaacggcatcggcgtgacccagaatgtgctgtacgagaaccagaagctgatcgccaatcagtttaacagcgccatcggcaagatccaggactctctgtcctctacagccagcgccctgggcaagctgcaggatgtggtgaatcagaacgcccaggccctgaataccctggtgaagcagctgagctccaacttcggcgccatctctagcgtgctgaatgacatcctgagccggctggacccccctgaggcagaggtgcagatcgacaggctgatcacaggccgcctgcagagcctgcagacctacgtgacacagcagctgatcagggcagcagagatcagagcctccgccaatctggccgccaccaagatgagcgagtgcgtgctgggacagtccaagagggtggacttttgtggcaagggctatcacctgatgtctttcccacagagcgcccctcacggcgtggtgtttctgcacgtgacctacgtgccagcccaggagaagaacttcaccacagcaccagccatctgccacgatggaaaggcacactttcctagggagggcgtgttcgtgtctaacggcacccactggtttgtgacacagcgcaatttctacgagccacagatcatcaccacagacaatacattcgtgagcggcaactgtgatgtggtgatcggcatcgtgaacaataccgtgtatgatccactgcagcccgagctggactcctttaaggaggagctggataagtacttcaagaatcacacctctcccgacgtggatctgggcgacatctccggcatcaatgcctctgtggtgaacatccagaaggagatcgaccggctgaacgaggtggccaagaatctgaacgagagcctgatcgatctgcaggagctgggcaagtatgagcagtacatcaagggctctggcagagagaacctgtatttccagggaggaggaggcagcggatacatccctgaggcaccaagggacggacaggcctacgtgcgcaaggatggcgagtgggtgctgctgtccacctttctgggccatcatcaccaccaccaccaccactga

SEQ ID NO: 4987 - DNA, 3846 bp, Artificial Sequence
  Description of Artificial Sequence: Synthetic polynucleotide
atgggcatcctgccaagcccaggaatgcccgccctgctgtctctggtgagcctgctgtccgtgctgctgatgggatgcgtggcagagacaggcacacagtgcgtgaacctgaccacaaggacccagctgccccctgcctataccaattctttcacacggggcgtgtactatcccgacaaggtgtttagaagctccgtgctgcactccacacaggatctgtttctgcctttcttttctaacgtgacctggttccacgccatccacgtgtccggcaccaatggcacaaagcggttcgacaatcccgtgctgccttttaacgatggcgtgtacttcgccagcaccgagaagtccaacatcatcagaggctggatctttggcaccacactggactctaagacacagagcctgctgatcgtgaacaatgccaccaacgtggtgatcaaggtgtgcgagttccagttttgtaatgatccattcctgggcgtgtactatcacaagaacaataagtcctggatggagtctgagtttcgcgtgtattctagcgccaacaattgcacatttgagtacgtgagccagcccttcctgatggacctggagggcaagcagggcaatttcaagaacctgagggagttcgtgtttaagaatatcgatggctacttcaagatctacagcaagcacaccccaatcaacctggtgcgcgacctgccacagggattctccgccctggagccactggtggatctgcccatcggcatcaacatcacccggtttcagacactgctggccctgcacagatcctacctgacaccaggcgactcctctagcggatggaccgcaggagctgccgcctactatgtgggctatctgcagccccggaccttcctgctgaagtacaacgagaatggcaccatcacagacgcagtggattgcgccctggaccccctgtctgagacaaagtgtacactgaagagctttaccgtggagaagggcatctatcagacaagcaatttcagggtgcagcctaccgagtccatcgtgcgctttcccaatatcacaaacctgtgcccttttggcgaggtgttcaacgccaccagattcgccagcgtgtacgcctggaatcggaagagaatctccaactgcgtggccgactattctgtgctgtacaactccgcctctttcagcacctttaagtgctatggcgtgtctcccacaaagctgaatgatctgtgctttaccaacgtgtacgccgatagcttcgtgatcaggggagacgaagtgagacagatcgcaccaggacagacaggaaagatcgcagactacaattataagctgcctgacgatttcaccggctgcgtgatcgcctggaactccaacaatctggattctaaagtgggcggcaactacaattatctgtacaggctgtttcgcaagtccaatctgaagccattcgagcgggacatctccacagagatctaccaggccggctctaccccctgcaatggcgtggagggctttaactgttatttccctctgcagtcttacggcttccagccaacaaacggcgtgggctatcagccctacagagtggtggtgctgtcctttgagctgctgcacgcaccagcaacagtgtgcggcccaaagaagtctaccaatctggtgaagaacaagtgcgtgaacttcaacttcaacggactgaccggcacaggcgtgctgaccgagagcaataagaagttcctgccttttcagcagttcggcagggacatcgcagataccacagacgccgtgcgcgaccctcagaccctggagatcctggacatcacaccatgcagcttcggcggcgtgtccgtgatcacaccaggcaccaatacatccaaccaggtggccgtgctgtatcaggacgtgaattgtaccgaggtgcccgtggcaatccacgcagatcagctgacccctacatggcgggtgtactctaccggcagcaacgtgttccagacaagagccggatgcctgatcggagcagagcacgtgaacaatagctatgagtgcgacatccctatcggcgccggcatctgtgccagctaccagacccagacaaactccccatctggagcaggctccgtggccagccagtccatcatcgcctataccatgagcctgggcgccgagaacagcgtggcctactccaacaattctatcgccatccctaccaacttcacaatcagcgtgaccacagagatcctgccagtgtctatgaccaagacaagcgtggactgcacaatgtatatctgtggcgatagcaccgagtgctccaacctgctgctgcagtacggctccttttgtacccagctgaatagagccctgacaggcatcgccgtggagcaggataagaacacacaggaggtgttcgcccaggtgaagcagatctacaagaccccacccatcaaggactttggcggcttcaacttcagccagatcctgcctgatccaagcaagccctccaagaggtcttttatcgaggacctgctgttcaacaaggtgaccctggccgatgccggcttcatcaagcagtatggagattgcctgggagacatcgcagcccgcgacctgatctgtgcccagaagtttaatggcctgaccgtgctgcctccactgctgacagatgagatgatcgcccagtacacatctgccctgctggccggcaccatcacaagcggatggaccttcggcgcaggagccgccctgcagatcccttttgccatgcagatggcctataggttcaacggcatcggcgtgacccagaatgtgctgtacgagaaccagaagctgatcgccaatcagtttaacagcgccatcggcaagatccaggactctctgtcctctacagccagcgccctgggcaagctgcaggatgtggtgaatcagaacgcccaggccctgaataccctggtgaagcagctgagctccaacttcggcgccatctctagcgtgctgaatgacatcctgagccggctggacccccctgaggcagaggtgcagatcgacaggctgatcacaggccgcctgcagagcctgcagacctacgtgacacagcagctgatcagggcagcagagatcagagcctccgccaatctggccgccaccaagatgagcgagtgcgtgctgggacagtccaagagggtggacttttgtggcacgggctatcacctgatgtctttcccacagagcgcccctcacggcgtggtgtttctgcacgtgacctacgtgccagcccaggagaagaacttcaccacagcaccagccatctgccacgatggaaaggcacactttcctagggagggcgtgttcgtgtctaacggcacccactggtttgtgacacagcgcaatttctacgagccacagatcatcaccacagacaatacattcgtgagcggcaactgtgatgtggtgatcggcatcgtgaacaataccgtgtatgatccactgcagcccgagctggactcctttaaggaggagctggataagtacttcaagaatcacacctctcccgacgtggatctgggcgacatctccggcatcaatgcctctgtggtgaacatccagaaggagatcgaccggctgaacgaggtggccaagaatctgaacgagagcctgatcgatctgcaggagctgggcaagtatgagcagtacatcaagggctctggcagagagaacctgtatttccagggaggaggaggcagcggatacatccctgaggcaccaagggacggacaggcctacgtgcgcaaggatggcgagtgggtgctgctgtccacctttctgggccatcatcaccaccaccaccaccactga

SEQ ID NO: 4988 - DNA, 3846 bp, Artificial Sequence
  Description of Artificial Sequence: Synthetic polynucleotide
atgggcatcctgccaagcccaggaatgcccgccctgctgtctctggtgagcctgctgtccgtgctgctgatgggatgcgtggcagagacaggcacacagtgcgtgaacctgaccacaaggacccagctgccccctgcctataccaattctttcacacggggcgtgtactatcccgacaaggtgtttagaagctccgtgctgcactccacacaggatctgtttctgcctttcttttctaacgtgacctggttccacgccatccacgtgtccggcaccaatggcacaaagcggttcgacaatcccgtgctgccttttaacgatggcgtgtacttcgccagcaccgagaagtccaacatcatcagaggctggatctttggcaccacactggactctaagacacagagcctgctgatcgtgaacaatgccaccaacgtggtgatcaaggtgtgcgagttccagttttgtaatgatccattcctgggcgtgtactatcacaagaacaataagtcctggatggagtctgagtttcgcgtgtattctagcgccaacaattgcacatttgagtacgtgagccagcccttcctgatggacctggagggcaagcagggcaatttcaagaacctgagggagttcgtgtttaagaatatcgatggctacttcaagatctacagcaagcacaccccaatcaacctggtgcgcgacctgccacagggattctccgccctggagccatgggtggatctgcccatcggcatcaacatcacccggtttcagacactgctggccctgcacagatcctacctgacaccaggcgactcctctagcggatggaccgcaggagctgccgcctactatgtgggctatctgcagccccggaccttcctgctgaagtacaacgagaatggcaccatcacagacgcagtggattgcgccctggaccccctgtctgagacaaagtgtacactgaagagctttaccgtggagaagggcatctatcagacaagcaatttcagggtgcagcctaccgagtccatcgtgcgctttcccaatatcacaaacctgtgcccttttggcgaggtgttcaacgccaccagattcgccagcgtgtacgcctggaatcggaagagaatctccaactgcgtggccgactattctgtgctgtacaactccgcctctttcagcacctttaagtgctatggcgtgtctcccacaaagctgaatgatctgtgctttaccaacgtgtacgccgatagcttcgtgatcaggggagacgaagtgagacagatcgcaccaggacagacaggaaagatcgcagactacaattataagctgcctgacgatttcaccggctgcgtgatcgcctggaactccaacaatctggattctaaagtgggcggcaactacaattatctgtacaggctgtttcgcaagtccaatctgaagccattcgagcgggacatctccacagagatctaccaggccggctctaccccctgcaatggcgtggagggctttaactgttatttccctctgcagtcttacggcttccagccaacaaacggcgtgggctatcagccctacagagtggtggtgctgtcctttgagctgctgcacgcaccagcaacagtgtgcggcccaaagaagtctaccaatctggtgaagaacaagtgcgtgaacttcaacttcaacggactgaccggcacaggcgtgctgaccgagagcaataagaagttcctgccttttcagcagttcggcagggacatcgcagataccacagacgccgtgcgcgaccctcagaccctggagatcctggacatcacaccatgcagcttcggcggcgtgtccgtgatcacaccaggcaccaatacatccaaccaggtggccgtgctgtatcaggacgtgaattgtaccgaggtgcccgtggcaatccacgcagatcagctgacccctacatggcgggtgtactctaccggcagcaacgtgttccagacaagagccggatgcctgatcggagcagagcacgtgaacaatagctatgagtgcgacatccctatcggcgccggcatctgtgccagctaccagacccagacaaactccccatctggagcaggctccgtggccagccagtccatcatcgcctataccatgagcctgggcgccgagaacagcgtggcctactccaacaattctatcgccatccctaccaacttcacaatcagcgtgaccacagagatcctgccagtgtctatgaccaagacaagcgtggactgcacaatgtatatctgtggcgatagcaccgagtgctccaacctgctgctgcagtacggctccttttgtacccagctgaatagagccctgacaggcatcgccgtggagcaggataagaacacacaggaggtgttcgcccaggtgaagcagatctacaagaccccacccatcaaggactttggcggcttcaacttcagccagatcctgcctgatccaagcaagccctccaagaggtcttttatcgaggacctgctgttcaacaaggtgaccctggccgatgccggcttcatcaagcagtatggagattgcctgggagacatcgcagcccgcgacctgatctgtgcccagaagtttaatggcctgaccgtgctgcctccactgctgacagatgagatgatcgcccagtacacatctgccctgctggccggcaccatcacaagcggatggaccttcggcgcaggagccgccctgcagatcccttttgccatgcagatggcctataggttcaacggcatcggcgtgacccagaatgtgctgtacgagaaccagaagctgatcgccaatcagtttaacagcgccatcggcaagatccaggactctctgtcctctacagccagcgccctgggcaagctgcaggatgtggtgaatcagaacgcccaggccctgaataccctggtgaagcagctgagctccaacttcggcgccatctctagcgtgctgaatgacatcctgagccggctggacccccctgaggcagaggtgcagatcgacaggctgatcacaggccgcctgcagagcctgcagacctacgtgacacagcagctgatcagggcagcagagatcagagcctccgccaatctggccgccaccaagatgagcgagtgcgtgctgggacagtccaagagggtggacttttgtggcaagggctatcacctgatgtctttcccacagagcgcccctcacggcgtggtgtttctgcacgtgacctacgtgccagcccaggagaagaacttcaccacagcaccagccatctgccacgatggaaaggcacactttcctagggagggcgtgttcgtgtctaacggcacccactggtttgtgacacagcgcaatttctacgagccacagatcatcaccacagacaatacattcgtgagcggcaactgtgatgtggtgatcggcatcgtgaacaataccgtgtatgatccactgcagcccgagctggactcctttaaggaggagctggataagtacttcaagaatcacacctctcccgacgtggatctgggcgacatctccggcatcaatgcctctgtggtgaacatccagaaggagatcgaccggctgaacgaggtggccaagaatctgaacgagagcctgatcgatctgcaggagctgggcaagtatgagcagtacatcaagggctctggcagagagaacctgtatttccagggaggaggaggcagcggatacatccctgaggcaccaagggacggacaggcctacgtgcgcaaggatggcgagtgggtgctgctgtccacctttctgggccatcatcaccaccaccaccaccactga

SEQ ID NO: 4989 - DNA, 3846 bp, Artificial Sequence
  Description of Artificial Sequence: Synthetic polynucleotide
atgggcatcctgccaagcccaggaatgcccgccctgctgtctctggtgagcctgctgtccgtgctgctgatgggatgcgtggcagagacaggcacacagtgcgtgaacctgaccacaaggacccagctgccccctgcctataccaattctttcacacggggcgtgtactatcccgacaaggtgtttagaagctccgtgctgcactccacacaggatctgtttctgcctttcttttctaacgtgacctggttccacgccatccacgtgtccggcaccaatggcacaaagcggttcgacaatcccgtgctgccttttaacgatggcgtgtacttcgccagcaccgagaagtccaacatcatcagaggctggatctttggcaccacactggactctaagacacagagcctgctgatcgtgaacaatgccaccaacgtggtgatcaaggtgtgcgagttccagttttgtaatgatccattcctgggcgtgtactatcacaagaacaataagtcctggatggagtctgagtttcgcgtgtattctagcgccaacaattgcacatttgagtacgtgagccagcccttcctgatggacctggagggcaagcagggcaatttcaagaacctgagggagttcgtgtttaagaatatcgatggctacttcaagatctacagcaagcacaccccaatcaacctggtgcgcgacctgccacagggattctccgccctggagccactggtggatctgcccatcggcatcaacatcacccggtttcagacactgctggccctgcacagatcctacctgacaccaggcgactcctctagcggatggaccgcaggagctgccgcctactatgtgggctatctgcagccccggaccttcctgctgaagtacaacgagaatggcaccatcacagacgcagtggattgcgccctggaccccctgtctgagacaaagtgtacactgaagagctttaccgtggagaagggcatctatcagacaagcaatttcagggtgcagcctaccgagtccatcgtgcgctttcccaatatcacaaacctgtgcccttttggcgaggtgttcaacgccaccagattcgccagcgtgtacgcctggaatcggaagagaatctccaactgcgtggccgactattctgtgctgtacaactccgcctctttcagcacctttaagtgctatggcgtgtctcccacaaagctgaatgatctgtgctttaccaacgtgtacgccgatagcttcgtgatcaggggagacgaagtgagacagatcgcaccaggacagacaggaaagatcgcagactacaattataagctgcctgacgatttcaccggctgcgtgatcgcctggaactccgcgaatctggattctaaagtgggcggcaactacaattatctgtacaggctgtttcgcaagtccaatctgaagccattcgagcgggacatctccacagagatctaccaggccggctctaccccctgcaatggcgtggagggctttaactgttatttccctctgcagtcttacggcttccagccaacaaacggcgtgggctatcagccctacagagtggtggtgctgtcctttgagctgctgcacgcaccagcaacagtgtgcggcccaaagaagtctaccaatctggtgaagaacaagtgcgtgaacttcaacttcaacggactgaccggcacaggcgtgctgaccgagagcaataagaagttcctgccttttcagcagttcggcagggacatcgcagataccacagacgccgtgcgcgaccctcagaccctggagatcctggacatcacaccatgcagcttcggcggcgtgtccgtgatcacaccaggcaccaatacatccaaccaggtggccgtgctgtatcaggacgtgaattgtaccgaggtgcccgtggcaatccacgcagatcagctgacccctacatggcgggtgtactctaccggcagcaacgtgttccagacaagagccggatgcctgatcggagcagagcacgtgaacaatagctatgagtgcgacatccctatcggcgccggcatctgtgccagctaccagacccagacaaactccccatctggagcaggctccgtggccagccagtccatcatcgcctataccatgagcctgggcgccgagaacagcgtggcctactccaacaattctatcgccatccctaccaacttcacaatcagcgtgaccacagagatcctgccagtgtctatgaccaagacaagcgtggactgcacaatgtatatctgtggcgatagcaccgagtgctccaacctgctgctgcagtacggctccttttgtacccagctgaatagagccctgacaggcatcgccgtggagcaggataagaacacacaggaggtgttcgcccaggtgaagcagatctacaagaccccacccatcaaggactttggcggcttcaacttcagccagatcctgcctgatccaagcaagccctccaagaggtcttttatcgaggacctgctgttcaacaaggtgaccctggccgatgccggcttcatcaagcagtatggagattgcctgggagacatcgcagcccgcgacctgatctgtgcccagaagtttaatggcctgaccgtgctgcctccactgctgacagatgagatgatcgcccagtacacatctgccctgctggccggcaccatcacaagcggatggaccttcggcgcaggagccgccctgcagatcccttttgccatgcagatggcctataggttcaacggcatcggcgtgacccagaatgtgctgtacgagaaccagaagctgatcgccaatcagtttaacagcgccatcggcaagatccaggactctctgtcctctacagccagcgccctgggcaagctgcaggatgtggtgaatcagaacgcccaggccctgaataccctggtgaagcagctgagctccaacttcggcgccatctctagcgtgctgaatgacatcctgagccggctggacccccctgaggcagaggtgcagatcgacaggctgatcacaggccgcctgcagagcctgcagacctacgtgacacagcagctgatcagggcagcagagatcagagcctccgccaatctggccgccaccaagatgagcgagtgcgtgctgggacagtccaagagggtggacttttgtggcaagggctatcacctgatgtctttcccacagagcgcccctcacggcgtggtgtttctgcacgtgacctacgtgccagcccaggagaagaacttcaccacagcaccagccatctgccacgatggaaaggcacactttcctagggagggcgtgttcgtgtctaacggcacccactggtttgtgacacagcgcaatttctacgagccacagatcatcaccacagacaatacattcgtgagcggcaactgtgatgtggtgatcggcatcgtgaacaataccgtgtatgatccactgcagcccgagctggactcctttaaggaggagctggataagtacttcaagaatcacacctctcccgacgtggatctgggcgacatctccggcatcaatgcctctgtggtgaacatccagaaggagatcgaccggctgaacgaggtggccaagaatctgaacgagagcctgatcgatctgcaggagctgggcaagtatgagcagtacatcaagggctctggcagagagaacctgtatttccagggaggaggaggcagcggatacatccctgaggcaccaagggacggacaggcctacgtgcgcaaggatggcgagtgggtgctgctgtccacctttctgggccatcatcaccaccaccaccaccactga

SEQ ID NO: 4990 - DNA, 3846 bp, Artificial Sequence
  Description of Artificial Sequence: Synthetic polynucleotide
atgggcatcctgccaagcccaggaatgcccgccctgctgtctctggtgagcctgctgtccgtgctgctgatgggatgcgtggcagagacaggcacacagtgcgtgaacctgaccacaaggacccagctgccccctgcctataccaattctttcacacggggcgtgtactatcccgacaaggtgtttagaagctccgtgctgcactccacacaggatctgtttctgcctttcttttctaacgtgacctggttccacgccatccacgtgtccggcaccaatggcacaaagcggttcgacaatcccgtgctgccttttaacgatggcgtgtacttcgccagcaccgagaagtccaacatcatcagaggctggatctttggcaccacactggactctaagacacagagcctgctgatcgtgaacaatgccaccaacgtggtgatcaaggtgtgcgagttccagttttgtaatgatccattcctgggcgtgtactatcacaagaacaataagtcctggatggagtctgagtttcgcgtgtattctagcgccaacaattgcacatttgagtacgtgagccagcccttcctgatggacctggagggcaagcagggcaatttcaagaacctgagggagttcgtgtttaagaatatcgatggctacttcaagatctacagcaagcacaccccaatcaacctggtgcgcgacctgccacagggattctccgccctggagccactggtggatctgcccatcggcatcaacatcacccggtttcagacactgctggccctgcacagatcctacctgacaccaggcgactcctctagcggatggaccgcaggagctgccgcctactatgtgggctatctgcagccccggaccttcctgctgaagtacaacgagaatggcaccatcacagacgcagtggattgcgccctggaccccctgtctgagacaaagtgtacactgaagagctttaccgtggagaagggcatctatcagacaagcaatttcagggtgcagcctaccgagtccatcgtgcgctttcccaatatcacaaacctgtgcccttttggcgaggtgttcaacgccaccagattcgccagcgtgtacgcctggaatcggaagagaatctccaactgcgtggccgactattctgtgctgtacaactccgcctctttcagcacctttaagtgctatggcgtgtctcccacaaagctgaatgatctgtgctttaccaacgtgtacgccgatagcttcgtgatcaggggagacgaagtgagacagatcgcaccaggacagacaggaaagatcgcagactacaattataagctgcctgacgatttcaccggctgcgtgatcgcctggaactccaacaatctggattctaaagtgggcggcaactacaattatctgtacaggctgtttcgcaagtccaatctgaagccattcgagcgggacatctccacagagatctaccaggccggctctaccccctcaaatggcgtggagggctttaactgttatttccctctgcagtcttacggcttccagccaacaaacggcgtgggctatcagccctacagagtggtggtgctgtcctttgagctgctgcacgcaccagcaacagtgtgcggcccaaagaagtctaccaatctggtgaagaacaagtgcgtgaacttcaacttcaacggactgaccggcacaggcgtgctgaccgagagcaataagaagttcctgccttttcagcagttcggcagggacatcgcagataccacagacgccgtgcgcgaccctcagaccctggagatcctggacatcacaccatgcagcttcggcggcgtgtccgtgatcacaccaggcaccaatacatccaaccaggtggccgtgctgtatcaggacgtgaattgtaccgaggtgcccgtggcaatccacgcagatcagctgacccctacatggcgggtgtactctaccggcagcaacgtgttccagacaagagccggatgcctgatcggagcagagcacgtgaacaatagctatgagtgcgacatccctatcggcgccggcatctgtgccagctaccagacccagacaaactccccatctggagcaggctccgtggccagccagtccatcatcgcctataccatgagcctgggcgccgagaacagcgtggcctactccaacaattctatcgccatccctaccaacttcacaatcagcgtgaccacagagatcctgccagtgtctatgaccaagacaagcgtggactgcacaatgtatatctgtggcgatagcaccgagtgctccaacctgctgctgcagtacggctccttttgtacccagctgaatagagccctgacaggcatcgccgtggagcaggataagaacacacaggaggtgttcgcccaggtgaagcagatctacaagaccccacccatcaaggactttggcggcttcaacttcagccagatcctgcctgatccaagcaagccctccaagaggtcttttatcgaggacctgctgttcaacaaggtgaccctggccgatgccggcttcatcaagcagtatggagattgcctgggagacatcgcagcccgcgacctgatctgtgcccagaagtttaatggcctgaccgtgctgcctccactgctgacagatgagatgatcgcccagtacacatctgccctgctggccggcaccatcacaagcggatggaccttcggcgcaggagccgccctgcagatcccttttgccatgcagatggcctataggttcaacggcatcggcgtgacccagaatgtgctgtacgagaaccagaagctgatcgccaatcagtttaacagcgccatcggcaagatccaggactctctgtcctctacagccagcgccctgggcaagctgcaggatgtggtgaatcagaacgcccaggccctgaataccctggtgaagcagctgagctccaacttcggcgccatctctagcgtgctgaatgacatcctgagccggctggacccccctgaggcagaggtgcagatcgacaggctgatcacaggccgcctgcagagcctgcagacctacgtgacacagcagctgatcagggcagcagagatcagagcctccgccaatctggccgccaccaagatgagcgagtgcgtgctgggacagtccaagagggtggacttttgtggcaagggctatcacctgatgtctttcccacagagcgcccctcacggcgtggtgtttctgcacgtgacctacgtgccagcccaggagaagaacttcaccacagcaccagccatctgccacgatggaaaggcacactttcctagggagggcgtgttcgtgtctaacggcacccactggtttgtgacacagcgcaatttctacgagccacagatcatcaccacagacaatacattcgtgagcggcaactgtgatgtggtgatcggcatcgtgaacaataccgtgtatgatccactgcagcccgagctggactcctttaaggaggagctggataagtacttcaagaatcacacctctcccgacgtggatctgggcgacatctccggcatcaatgcctctgtggtgaacatccagaaggagatcgaccggctgaacgaggtggccaagaatctgaacgagagcctgatcgatctgcaggagctgggcaagtatgagcagtacatcaagggctctggcagagagaacctgtatttccagggaggaggaggcagcggatacatccctgaggcaccaagggacggacaggcctacgtgcgcaaggatggcgagtgggtgctgctgtccacctttctgggccatcatcaccaccaccaccaccactga

SEQ ID NO: 4991 - DNA, 3846 bp, Artificial Sequence
  Description of Artificial Sequence: Synthetic polynucleotide
atgggcatcctgccaagcccaggaatgcccgccctgctgtctctggtgagcctgctgtccgtgctgctgatgggatgcgtggcagagacaggcacacagtgcgtgaacctgaccacaaggacccagctgccccctgcctataccaattctttcacacggggcgtgtactatcccgacaaggtgtttagaagctccgtgctgcactccacacaggatctgtttctgcctttcttttctaacgtgacctggttccacgccatccacgtgtccggcaccaatggcacaaagcggttcgacaatcccgtgctgccttttaacgatggcgtgtacttcgccagcaccgagaagtccaacatcatcagaggctggatctttggcaccacactggactctaagacacagagcctgctgatcgtgaacaatgccaccaacgtggtgatcaaggtgtgcgagttccagttttgtaatgatccattcctgggcgtgtactatcacaagaacaataagtcctggatggagtctgagtttcgcgtgtattctagcgccaacaattgcacatttgagtacgtgagccagcccttcctgatggacctggagggcaagcagggcaatttcaagaacctgagggagttcgtgtttaagaatatcgatggctacttcaagatctacagcaagcacaccccaatcaacctggtgcgcgacctgccacagggattctccgccctggagccactggtggatctgcccatcggcatcaacatcacccggtttcagacactgctggccctgcacagatcctacctgacaccaggcgactcctctagcggatggaccgcaggagctgccgcctactatgtgggctatctgcagccccggaccttcctgctgaagtacaacgagaatggcaccatcacagacgcagtggattgcgccctggaccccctgtctgagacaaagtgtacactgaagagctttaccgtggagaagggcatctatcagacaagcaatttcagggtgcagcctaccgagtccatcgtgcgctttcccaatatcacaaacctgtgcccttttggcgaggtgttcaacgccaccagattcgccagcgtgtacgcctggaatcggaaggtcatctccaactgcgtggccgactattctgtgctgtacaactccgcctctttcagcacctttaagtgctatggcgtgtctcccacaaagctgaatgatctgtgctttaccaacgtgtacgccgatagcttcgtgatcaggggagacgaagtgagacagatcgcaccaggacagacaggaaagatcgcagactacaattataagctgcctgacgatttcaccggctgcgtgatcgcctggaactccaacaatctggattctaaagtgggcggcaactacaattatctgtacaggctgtttcgcaagtccaatctgaagccattcgagcgggacatctccacagagatctaccaggccggctctaccccctgcaatggcgtggagggctttaactgttatttccctctgcagtcttacggcttccagccaacaaacggcgtgggctatcagccctacagagtggtggtgctgtcctttgagctgctgcacgcaccagcaacagtgtgcggcccaaagaagtctaccaatctggtgaagaacaagtgcgtgaacttcaacttcaacggactgaccggcacaggcgtgctgaccgagagcaataagaagttcctgccttttcagcagttcggcagggacatcgcagataccacagacgccgtgcgcgaccctcagaccctggagatcctggacatcacaccatgcagcttcggcggcgtgtccgtgatcacaccaggcaccaatacatccaaccaggtggccgtgctgtatcaggacgtgaattgtaccgaggtgcccgtggcaatccacgcagatcagctgacccctacatggcgggtgtactctaccggcagcaacgtgttccagacaagagccggatgcctgatcggagcagagcacgtgaacaatagctatgagtgcgacatccctatcggcgccggcatctgtgccagctaccagacccagacaaactccccatctggagcaggctccgtggccagccagtccatcatcgcctataccatgagcctgggcgccgagaacagcgtggcctactccaacaattctatcgccatccctaccaacttcacaatcagcgtgaccacagagatcctgccagtgtctatgaccaagacaagcgtggactgcacaatgtatatctgtggcgatagcaccgagtgctccaacctgctgctgcagtacggctccttttgtacccagctgaatagagccctgacaggcatcgccgtggagcaggataagaacacacaggaggtgttcgcccaggtgaagcagatctacaagaccccacccatcaaggactttggcggcttcaacttcagccagatcctgcctgatccaagcaagccctccaagaggtcttttatcgaggacctgctgttcaacaaggtgaccctggccgatgccggcttcatcaagcagtatggagattgcctgggagacatcgcagcccgcgacctgatctgtgcccagaagtttaatggcctgaccgtgctgcctccactgctgacagatgagatgatcgcccagtacacatctgccctgctggccggcaccatcacaagcggatggaccttcggcgcaggagccgccctgcagatcccttttgccatgcagatggcctataggttcaacggcatcggcgtgacccagaatgtgctgtacgagaaccagaagctgatcgccaatcagtttaacagcgccatcggcaagatccaggactctctgtcctctacagccagcgccctgggcaagctgcaggatgtggtgaatcagaacgcccaggccctgaataccctggtgaagcagctgagctccaacttcggcgccatctctagcgtgctgaatgacatcctgagccggctggacccccctgaggcagaggtgcagatcgacaggctgatcacaggccgcctgcagagcctgcagacctacgtgacacagcagctgatcagggcagcagagatcagagcctccgccaatctggccgccaccaagatgagcgagtgcgtgctgggacagtccaagagggtggacttttgtggcaagggctatcacctgatgtctttcccacagagcgcccctcacggcgtggtgtttctgcacgtgacctacgtgccagcccaggagaagaacttcaccacagcaccagccatctgccacgatggaaaggcacactttcctagggagggcgtgttcgtgtctaacggcacccactggtttgtgacacagcgcaatttctacgagccacagatcatcaccacagacaatacattcgtgagcggcaactgtgatgtggtgatcggcatcgtgaacaataccgtgtatgatccactgcagcccgagctggactcctttaaggaggagctggataagtacttcaagaatcacacctctcccgacgtggatctgggcgacatctccggcatcaatgcctctgtggtgaacatccagaaggagatcgaccggctgaacgaggtggccaagaatctgaacgagagcctgatcgatctgcaggagctgggcaagtatgagcagtacatcaagggctctggcagagagaacctgtatttccagggaggaggaggcagcggatacatccctgaggcaccaagggacggacaggcctacgtgcgcaaggatggcgagtgggtgctgctgtccacctttctgggccatcatcaccaccaccaccaccactga

SEQ ID NO: 4992 - DNA, 3846 bp, Artificial Sequence
  Description of Artificial Sequence: Synthetic polynucleotide
atgggcatcctgccaagcccaggaatgcccgccctgctgtctctggtgagcctgctgtccgtgctgctgatgggatgcgtggcagagacaggcacacagtgcgtgaacctgaccacaaggacccagctgccccctgcctataccaattctttcacacggggcgtgtactatcccgacaaggtgtttagaagctccgtgctgcactccacacaggatctgtttctgcctttcttttctaacgtgacctggttccacgccatccacgtgtccggcaccaatggcacaaagcggttcgacaatcccgtgctgccttttaacgatggcgtgtacttcgccagcaccgagaagtccaacatcatcagaggctggatctttggcaccacactggactctaagacacagagcctgctgatcgtgaacaatgccaccaacgtggtgatcaaggtgtgcgagttccagttttgtaatgatccattcctgggcgtgtactatcacaagaacaataagtcctggatggagtctgagtttcgcgtgtattctagcgccaacaattgcacatttgagtacgtgagccagcccttcctgatggacctggagggcaagcagggcaatttcaagaacctgagggagttcgtgtttaagaatatcgatggctacttcaagatctacagcaagcacaccccaatcaacctggtgcgcgacctgccacagggattctccgccctggagccactggtggatctgcccatcggcatcaacatcacccggtttcagacactgctggccctgcacagatcctacctgacaccaggcgactcctctagcggatggaccgcaggagctgccgcctactatgtgggctatctgcagccccggaccttcctgctgaagtacaacgagaatggcaccatcacagacgcagtggattgcgccctggaccccctgtctgagacaaagtgtacactgaagagctttaccgtggagaagggcatctatcagacaagcaatttcagggtgcagcctaccgagtccatcgtgcgctttcccaatatcacaaacctgtgcccttttggcgaggtgttcaacgccaccagattcgccagcgtgtacgcctggaatcggaagagaatctccaactgcgtggccgactattctgtgctgtacaactccgcctctttcagcacctttaagtgctatggcgtgtctcccacaaagctgaatgatctgtgctttaccaacgtgtacgccgatagcttcgtgatcaggggagacgaagtgagacagatcgcaccaggacagacaggaataatcgcagactacaattataagctgcctgacgatttcaccggctgcgtgatcgcctggaactccaacaatctggattctaaagtgggcggcaactacaattatctgtacaggctgtttcgcaagtccaatctgaagccattcgagcgggacatctccacagagatctaccaggccggctctaccccctgcaatggcgtggagggctttaactgttatttccctctgcagtcttacggcttccagccaacaaacggcgtgggctatcagccctacagagtggtggtgctgtcctttgagctgctgcacgcaccagcaacagtgtgcggcccaaagaagtctaccaatctggtgaagaacaagtgcgtgaacttcaacttcaacggactgaccggcacaggcgtgctgaccgagagcaataagaagttcctgccttttcagcagttcggcagggacatcgcagataccacagacgccgtgcgcgaccctcagaccctggagatcctggacatcacaccatgcagcttcggcggcgtgtccgtgatcacaccaggcaccaatacatccaaccaggtggccgtgctgtatcaggacgtgaattgtaccgaggtgcccgtggcaatccacgcagatcagctgacccctacatggcgggtgtactctaccggcagcaacgtgttccagacaagagccggatgcctgatcggagcagagcacgtgaacaatagctatgagtgcgacatccctatcggcgccggcatctgtgccagctaccagacccagacaaactccccatctggagcaggctccgtggccagccagtccatcatcgcctataccatgagcctgggcgccgagaacagcgtggcctactccaacaattctatcgccatccctaccaacttcacaatcagcgtgaccacagagatcctgccagtgtctatgaccaagacaagcgtggactgcacaatgtatatctgtggcgatagcaccgagtgctccaacctgctgctgcagtacggctccttttgtacccagctgaatagagccctgacaggcatcgccgtggagcaggataagaacacacaggaggtgttcgcccaggtgaagcagatctacaagaccccacccatcaaggactttggcggcttcaacttcagccagatcctgcctgatccaagcaagccctccaagaggtcttttatcgaggacctgctgttcaacaaggtgaccctggccgatgccggcttcatcaagcagtatggagattgcctgggagacatcgcagcccgcgacctgatctgtgcccagaagtttaatggcctgaccgtgctgcctccactgctgacagatgagatgatcgcccagtacacatctgccctgctggccggcaccatcacaagcggatggaccttcggcgcaggagccgccctgcagatcccttttgccatgcagatggcctataggttcaacggcatcggcgtgacccagaatgtgctgtacgagaaccagaagctgatcgccaatcagtttaacagcgccatcggcaagatccaggactctctgtcctctacagccagcgccctgggcaagctgcaggatgtggtgaatcagaacgcccaggccctgaataccctggtgaagcagctgagctccaacttcggcgccatctctagcgtgctgaatgacatcctgagccggctggacccccctgaggcagaggtgcagatcgacaggctgatcacaggccgcctgcagagcctgcagacctacgtgacacagcagctgatcagggcagcagagatcagagcctccgccaatctggccgccaccaagatgagcgagtgcgtgctgggacagtccaagagggtggacttttgtggcaagggctatcacctgatgtctttcccacagagcgcccctcacggcgtggtgtttctgcacgtgacctacgtgccagcccaggagaagaacttcaccacagcaccagccatctgccacgatggaaaggcacactttcctagggagggcgtgttcgtgtctaacggcacccactggtttgtgacacagcgcaatttctacgagccacagatcatcaccacagacaatacattcgtgagcggcaactgtgatgtggtgatcggcatcgtgaacaataccgtgtatgatccactgcagcccgagctggactcctttaaggaggagctggataagtacttcaagaatcacacctctcccgacgtggatctgggcgacatctccggcatcaatgcctctgtggtgaacatccagaaggagatcgaccggctgaacgaggtggccaagaatctgaacgagagcctgatcgatctgcaggagctgggcaagtatgagcagtacatcaagggctctggcagagagaacctgtatttccagggaggaggaggcagcggatacatccctgaggcaccaagggacggacaggcctacgtgcgcaaggatggcgagtgggtgctgctgtccacctttctgggccatcatcaccaccaccaccaccactga

SEQ ID NO: 4993 - DNA, 3846 bp, Artificial Sequence
  Description of Artificial Sequence: Synthetic polynucleotide
atgggcatcctgccaagcccaggaatgcccgccctgctgtctctggtgagcctgctgtccgtgctgctgatgggatgcgtggcagagacaggcacacagtgcgtgaacctgaccacaaggacccagctgccccctgcctataccaattctttcacacggggcgtgtactatcccgacaaggtgtttagaagctccgtgctgcactccacacaggatctgtttctgcctttcttttctaacgtgacctggttccacgccatccacgtgtccggcaccaatggcacaaagcggttcgacaatcccgtgctgccttttaacgatggcgtgtacttcgccagcaccgagaagtccaacatcatcagaggctggatctttggcaccacactggactctaagacacagagcctgctgatcgtgaacaatgccaccaacgtggtgatcaaggtgtgcgagttccagttttgtaatgatccattcctgggcgtgtactatcacaagaacaataagtcctggatggagtctgagtttcgcgtgtattctagcgccaacaattgcacatttgagtacgtgagccagcccttcctgatggacctggagggcaagcagggcaatttcaagaacctgagggagttcgtgtttaagaatatcgatggctacttcaagatctacagcaagcacaccccaatcaacctggtgcgcgacctgccacagggattctccgccctggagccactggtggatctgcccatcggcatcaacatcacccggtttcagacactgctggccctgcacagatcctacctgacaccaggcgactcctctagcggatggaccgcaggagctgccgcctactatgtgggctatctgcagccccggaccttcctgctgaagtacaacgagaatggcaccatcacagacgcagtggattgcgccctggaccccctgtctgagacaaagtgtacactgaagagctttaccgtggagaagggcatctatcagacaagcaatttcagggtgcagcctaccgagtccatcgtgcgctttcccaatatcacaaacctgtgcccttttggcgaggtgttcaacgccaccagattcgccagcgtgtacgcctggaatcggaagagaatctccaactgcgtggccgactattctgtgctgtacaactccgcctctttcagcacctttaagtgctatggcgtgtctcccacaaagctgaatgatctgtgctttaccaacgtgtacgccgatagcttcgtgatcaggggagacgaagtgagacagatcgcaccaggacagacaggaaagatcgcagactacaattataagctgcctgacgatttcaccggctgcgtgatcgcctggaactccaacaatctggattctaaagtgggcggcaactacaattatctgtacaggctgtttcgcaagtccaatctgaagccattcgagcgggacatctccacagagatctaccaggccggctctaccccctgcaatggcgtggagggctttaactgttatttccctctgcagtcttacggcttccagccaacaaacggcgtgggctatcagccctacagagtggtggtgctgtcctttgagctgctgcacgcaccagcaacagtgtgcggcccaaagaagtctaccaatctggtgaagaacaagtgcgtgaacttcaacttcaacggactgaccggcacaggcgtgctgaccgagagcaataagaagttcctgccttttcagcagttcggcagggacatcgcagataccacagacgccgtgcgcgaccctcagaccctggagatcctggacatcacaccatgcagcttcggcggcgtgtccgtgatcacaccaggcaccaatacatccaaccaggtggccgtgctgtatcaggacgtgaattgtaccgaggtgcccgtggcaatccacgcagatcagctgacccctacatggcgggtgtactctaccggcagcaacgtgttccagacaagagccggatgcctgatcggagcagagcacgtgaacaatagctatgagtgcgacatccctatcggcgccggcatctgtgccagctaccagacccagacaaactccccatctggagcaggctccgtggccagccagtccatcatcgcctataccatgagcctgggcgccgagaacagcgtggcctactccaacaattctatcgccatccctaccaacttcacaatcagcgtgaccacagagatcctgccagtgtctatgaccaagacaagcgtggactgcacaatgtatatctgtggcgatagcaccgagtgctccaacctgctgctgcagtacggctccttttgtacccagctgaatagagccctgacaggcatcgccgtggagcaggataagaacacacaggaggtgttcgcccaggtgaagcagatctacaagaccccacccatcaaggactttggcggcttcaacttcagccagatcctgcctgatccaagcaagccctccaagaggtcttttatcgaggacctgctgttcaacaaggtgaccctggccgatgccggcttcatcaagcagtatggagattgcctgggagacatcgcagcccgcgacctgatctgtgcccagaagtttaatggcctgaccgtgctgcctccactgctgacagatgagatgatcgcccagtacacatctgccctgctggccggcaccatcacaagcggatggaccttcggcgcaggagccgccctgcagatcccttttgccatgcagatggcctataggttcaacggcatcggcgtgacccagaatgtgctgtacgagaaccagaagctgatcgccaatcagtttaacagcgccatcggcaagatccaggactctctgtcctctacagccagcgccctgggcaagctgcaggatgtggtgaatcagaacgcccaggccctgaataccctggtgaagcagctgagctccactttcggcgccatctctagcgtgctgaatgacatcctgagccggctggacccccctgaggcagaggtgcagatcgacaggctgatcacaggccgcctgcagagcctgcagacctacgtgacacagcagctgatcagggcagcagagatcagagcctccgccaatctggccgccaccaagatgagcgagtgcgtgctgggacagtccaagagggtggacttttgtggcaagggctatcacctgatgtctttcccacagagcgcccctcacggcgtggtgtttctgcacgtgacctacgtgccagcccaggagaagaacttcaccacagcaccagccatctgccacgatggaaaggcacactttcctagggagggcgtgttcgtgtctaacggcacccactggtttgtgacacagcgcaatttctacgagccacagatcatcaccacagacaatacattcgtgagcggcaactgtgatgtggtgatcggcatcgtgaacaataccgtgtatgatccactgcagcccgagctggactcctttaaggaggagctggataagtacttcaagaatcacacctctcccgacgtggatctgggcgacatctccggcatcaatgcctctgtggtgaacatccagaaggagatcgaccggctgaacgaggtggccaagaatctgaacgagagcctgatcgatctgcaggagctgggcaagtatgagcagtacatcaagggctctggcagagagaacctgtatttccagggaggaggaggcagcggatacatccctgaggcaccaagggacggacaggcctacgtgcgcaaggatggcgagtgggtgctgctgtccacctttctgggccatcatcaccaccaccaccaccactga

SEQ ID NO: 4994 - DNA, 3846 bp, Artificial Sequence
  Description of Artificial Sequence: Synthetic polynucleotide
atgggcatcctgccaagcccaggaatgcccgccctgctgtctctggtgagcctgctgtccgtgctgctgatgggatgcgtggcagagacaggcacacagtgcgtgaacctgaccacaaggacccagctgccccctgcctataccaattctttcacacggggcgtgtactatcccgacaaggtgtttagaagctccgtgctgcactccacacaggatctgtttctgcctttcttttctaacgtgacctggttccacgccatccacgtgtccggcaccaatggcacaaagcggttcgacaatcccgtgctgccttttaacgatggcgtgtacttcgccagcaccgagaagtccaacatcatcagaggctggatctttggcaccacactggactctaagacacagagcctgctgatcgtgaacaatgccaccaacgtggtgatcaaggtgtgcgagttccagttttgtaatgatccattcctgggcgtgtactatcacaagaacaataagtcctggatggagtctgagtttcgcgtgtattctagcgccaacaattgcacatttgagtacgtgagccagcccttcctgatggacctggagggcaagcagggcaatttcaagaacctgagggagttcgtgtttaagaatatcgatggctacttcaagatctacagcaagcacaccccaatcaacctggtgcgcgacctgccacagggattctccgccctggagccactggtggatctgcccatcggcatcaacatcacccggtttcagacactgctggccctgcacagatcctacctgacaccaggcgactcctctagcggatggaccgcaggagctgccgcctactatgtgggctatctgcagccccggaccttcctgctgaagtacaacgagaatggcaccatcacagacgcagtggattgcgccctggaccccctgtctgagacaaagtgtacactgaagagctttaccgtggagaagggcatctatcagacaagcaatttcagggtgcagcctaccgagtccatcgtgcgctttcccaatatcacaaacctgtgcccttttggcgaggtgttcaacgccaccagattcgccagcgtgtacgcctggaatcggaagagaatctccaactgcgtggccgactattctgtgctgtacaactccgcctctttcagcacctttaagtgctatggcgtgtctcccacaaagctgaatgatctgtgctttaccaacgtgtacgccgatagcttcgtgatcaggggagacgaagtgagacagatcgcaccaggacagacaggaaagatcgcagactacaattataagctgcctgacgatttcaccggctgcgtgatcgcctggaactccaacaatctggattctaaagtgggcggcaactacaattatctgtacaggctgtttcgcaagtccaatctgaagccattcgagcgggacatctccacagagatctaccaggccggctctaccccctgcaatggcgtggagggctttaactgttatttccctctgcagtcttacggcttccagccaacaaacggcgtgggctatcagccctacagagtggtggtgctgtcctttgagctgctgtcagcaccagcaacagtgtgcggcccaaagaagtctaccaatctggtgaagaacaagtgcgtgaacttcaacttcaacggactgaccggcacaggcgtgctgaccgagagcaataagaagttcctgccttttcagcagttcggcagggacatcgcagataccacagacgccgtgcgcgaccctcagaccctggagatcctggacatcacaccatgcagcttcggcggcgtgtccgtgatcacaccaggcaccaatacatccaaccaggtggccgtgctgtatcaggacgtgaattgtaccgaggtgcccgtggcaatccacgcagatcagctgacccctacatggcgggtgtactctaccggcagcaacgtgttccagacaagagccggatgcctgatcggagcagagcacgtgaacaatagctatgagtgcgacatccctatcggcgccggcatctgtgccagctaccagacccagacaaactccccatctggagcaggctccgtggccagccagtccatcatcgcctataccatgagcctgggcgccgagaacagcgtggcctactccaacaattctatcgccatccctaccaacttcacaatcagcgtgaccacagagatcctgccagtgtctatgaccaagacaagcgtggactgcacaatgtatatctgtggcgatagcaccgagtgctccaacctgctgctgcagtacggctccttttgtacccagctgaatagagccctgacaggcatcgccgtggagcaggataagaacacacaggaggtgttcgcccaggtgaagcagatctacaagaccccacccatcaaggactttggcggcttcaacttcagccagatcctgcctgatccaagcaagccctccaagaggtcttttatcgaggacctgctgttcaacaaggtgaccctggccgatgccggcttcatcaagcagtatggagattgcctgggagacatcgcagcccgcgacctgatctgtgcccagaagtttaatggcctgaccgtgctgcctccactgctgacagatgagatgatcgcccagtacacatctgccctgctggccggcaccatcacaagcggatggaccttcggcgcaggagccgccctgcagatcccttttgccatgcagatggcctataggttcaacggcatcggcgtgacccagaatgtgctgtacgagaaccagaagctgatcgccaatcagtttaacagcgccatcggcaagatccaggactctctgtcctctacagccagcgccctgggcaagctgcaggatgtggtgaatcagaacgcccaggccctgaataccctggtgaagcagctgagctccaacttcggcgccatctctagcgtgctgaatgacatcctgagccggctggacccccctgaggcagaggtgcagatcgacaggctgatcacaggccgcctgcagagcctgcagacctacgtgacacagcagctgatcagggcagcagagatcagagcctccgccaatctggccgccaccaagatgagcgagtgcgtgctgggacagtccaagagggtggacttttgtggcaagggctatcacctgatgtctttcccacagagcgcccctcacggcgtggtgtttctgcacgtgacctacgtgccagcccaggagaagaacttcaccacagcaccagccatctgccacgatggaaaggcacactttcctagggagggcgtgttcgtgtctaacggcacccactggtttgtgacacagcgcaatttctacgagccacagatcatcaccacagacaatacattcgtgagcggcaactgtgatgtggtgatcggcatcgtgaacaataccgtgtatgatccactgcagcccgagctggactcctttaaggaggagctggataagtacttcaagaatcacacctctcccgacgtggatctgggcgacatctccggcatcaatgcctctgtggtgaacatccagaaggagatcgaccggctgaacgaggtggccaagaatctgaacgagagcctgatcgatctgcaggagctgggcaagtatgagcagtacatcaagggctctggcagagagaacctgtatttccagggaggaggaggcagcggatacatccctgaggcaccaagggacggacaggcctacgtgcgcaaggatggcgagtgggtgctgctgtccacctttctgggccatcatcaccaccaccaccaccactga

SEQ ID NO: 4995 - DNA, 3846 bp, Artificial Sequence
  Description of Artificial Sequence: Synthetic polynucleotide
atgggcatcctgccaagcccaggaatgcccgccctgctgtctctggtgagcctgctgtccgtgctgctgatgggatgcgtggcagagacaggcacacagtgcgtgaacctgaccacaaggacccagctgccccctgcctataccaattctttcacacggggcgtgtactatcccgacaaggtgtttagaagctccgtgctgcactccacacaggatctgtttctgcctttcttttctaacgtgacctggttccacgccatccacgtgtccggcaccaatggcacaaagcggttcgacaatcccgtgctgccttttaacgatggcgtgtacttcgccagcaccgagaagtccaacatcatcagaggctggatctttggcaccacactggactctaagacacagagcctgctgatcgtgaacaatgccaccaacgtggtgatcaaggtgtgcgagttccagttttgtaatgatccattcctgggcgtgtactatcacaagaacaataagtcctggatggagtctgagtttcgcgtgtattctagcgccaacaattgcacatttgagtacgtgagccagcccttcctgatggacctggagggcaagcagggcaatttcaagaacctgagggagttcgtgtttaagaatatcgatggctacttcaagatctacagcaagcacaccccaatcaacctggtgcgcgacctgccacagggattctccgccctggagccactggtggatctgcccatcggcatcaacatcacccggtttcagacactgctggccctgcacagatcctacctgacaccaggcgactcctctagcggatggaccgcaggagctgccgcctactatgtgggctatctgcagccccggaccttcctgctgaagtacaacgagaatggcaccatcacagacgcagtggattgcgccctggaccccctgtctgagacaaagtgtacactgaagagctttaccgtggagaagggcatctatcagacaagcaatttcagggtgcagcctaccgagtccatcgtgcgctttcccaatatcacaaacctgtgcccttttggcgaggtgttcaacgccaccagattcgccagcgtgtacgcctggaatcggaagagaatctccaactgcgtggccgactattctgtgctgtacaactccgcctctttcagcacctttaagtgctatggcgtgtctcccacaaagctgaatgatctgtgctttaccaacgtgtacgccgatagcttcgtgatcaggggagacgaagtgagacagatcgcaccaggacagacaggaaagatcgcagactacaattataagctgcctgacgatttcaccggctgcgtgatcgcctggaactccaacaatctggattctaaagtgggcggcaactacaattatctgtacaggctgtttcgcaagtccaatctgaagccattcgagcgggacatctccacagagggttaccaggccggctctaccccctgcaatggcgtggagggctttaactgttatttccctctgcagtcttacggcttccagccaacaaacggcgtgggctatcagccctacagagtggtggtgctgtcctttgagctgctgcacgcaccagcaacagtgtgcggcccaaagaagtctaccaatctggtgaagaacaagtgcgtgaacttcaacttcaacggactgaccggcacaggcgtgctgaccgagagcaataagaagttcctgccttttcagcagttcggcagggacatcgcagataccacagacgccgtgcgcgaccctcagaccctggagatcctggacatcacaccatgcagcttcggcggcgtgtccgtgatcacaccaggcaccaatacatccaaccaggtggccgtgctgtatcaggacgtgaattgtaccgaggtgcccgtggcaatccacgcagatcagctgacccctacatggcgggtgtactctaccggcagcaacgtgttccagacaagagccggatgcctgatcggagcagagcacgtgaacaatagctatgagtgcgacatccctatcggcgccggcatctgtgccagctaccagacccagacaaactccccatctggagcaggctccgtggccagccagtccatcatcgcctataccatgagcctgggcgccgagaacagcgtggcctactccaacaattctatcgccatccctaccaacttcacaatcagcgtgaccacagagatcctgccagtgtctatgaccaagacaagcgtggactgcacaatgtatatctgtggcgatagcaccgagtgctccaacctgctgctgcagtacggctccttttgtacccagctgaatagagccctgacaggcatcgccgtggagcaggataagaacacacaggaggtgttcgcccaggtgaagcagatctacaagaccccacccatcaaggactttggcggcttcaacttcagccagatcctgcctgatccaagcaagccctccaagaggtcttttatcgaggacctgctgttcaacaaggtgaccctggccgatgccggcttcatcaagcagtatggagattgcctgggagacatcgcagcccgcgacctgatctgtgcccagaagtttaatggcctgaccgtgctgcctccactgctgacagatgagatgatcgcccagtacacatctgccctgctggccggcaccatcacaagcggatggaccttcggcgcaggagccgccctgcagatcccttttgccatgcagatggcctataggttcaacggcatcggcgtgacccagaatgtgctgtacgagaaccagaagctgatcgccaatcagtttaacagcgccatcggcaagatccaggactctctgtcctctacagccagcgccctgggcaagctgcaggatgtggtgaatcagaacgcccaggccctgaataccctggtgaagcagctgagctccaacttcggcgccatctctagcgtgctgaatgacatcctgagccggctggacccccctgaggcagaggtgcagatcgacaggctgatcacaggccgcctgcagagcctgcagacctacgtgacacagcagctgatcagggcagcagagatcagagcctccgccaatctggccgccaccaagatgagcgagtgcgtgctgggacagtccaagagggtggacttttgtggcaagggctatcacctgatgtctttcccacagagcgcccctcacggcgtggtgtttctgcacgtgacctacgtgccagcccaggagaagaacttcaccacagcaccagccatctgccacgatggaaaggcacactttcctagggagggcgtgttcgtgtctaacggcacccactggtttgtgacacagcgcaatttctacgagccacagatcatcaccacagacaatacattcgtgagcggcaactgtgatgtggtgatcggcatcgtgaacaataccgtgtatgatccactgcagcccgagctggactcctttaaggaggagctggataagtacttcaagaatcacacctctcccgacgtggatctgggcgacatctccggcatcaatgcctctgtggtgaacatccagaaggagatcgaccggctgaacgaggtggccaagaatctgaacgagagcctgatcgatctgcaggagctgggcaagtatgagcagtacatcaagggctctggcagagagaacctgtatttccagggaggaggaggcagcggatacatccctgaggcaccaagggacggacaggcctacgtgcgcaaggatggcgagtgggtgctgctgtccacctttctgggccatcatcaccaccaccaccaccactga

SEQ ID NO: 4996 - DNA, 3846 bp, Artificial Sequence
  Description of Artificial Sequence: Synthetic polynucleotide
atgggcatcctgccaagcccaggaatgcccgccctgctgtctctggtgagcctgctgtccgtgctgctgatgggatgcgtggcagagacaggcacacagtgcgtgaacctgaccacaaggacccagctgccccctgcctataccaattctttcacacggggcgtgtactatcccgacaaggtgtttagaagctccgtgctgcactccacacaggatctgtttctgcctttcttttctaacgtgacctggttccacgccatccacgtgtccggcaccaatggcacaaagcggttcgacaatcccgtgctgccttttaacgatggcgtgtacttcgccagcaccgagaagtccaacatcatcagaggctggatctttggcaccacactggactctaagacacagagcctgctgatcgtgaacaatgccaccaacgtggtgatcaaggtgtgcgagttccagttttgtaatgatccattcctgggcgtgtactatcacaagaacaataagtcctggatggagtctgagtttcgcgtgtattctagcgccaacaattgcacatttgagtacgtgagccagcccttcctgatggacctggagggcaagcagggcaatttcaagaacctgagggagttcgtgtttaagaatatcgatggctacttcaagatctacagcaagcacaccccaatcaacctggtgcgcgacctgccacagggattctccgccctggagccactggtggatctgcccatcggcatcaacatcacccggtttcagacactgctggccctgcacagatcctacctgacaccaggcgactcctctagcggatggaccgcaggagctgccgcctactatgtgggctatctgcagccccggaccttcctgctgaagtacaacgagaatggcaccatcacagacgcagtggattgcgccctggaccccctgtctgagacaaagtgtacactgaagagctttaccgtggagaagggcatctatcagacaagcaatttcagggtgcagcctaccgagtccatcgtgcgctttcccaatatcacaaacctgtgcccttttggcgaggtgttcaacgccaccagattcgccagcgtgtacgcctggaatcggaagagaatctccaactgcgtggccgactattctgtgctgtacaactccgcctctttcagcacctttaagtgctatggcgtgtctcccacaaagctgaatgatctgtgctttaccaacgtgtacgccgatagcttcgtgatcaggggagacgaagtgagacagatcgcaccaggacagacaggaaagatcgcagactacaattataagctgcctgacgatttcaccggctgcgtgatcgcctggaactccataaatctggattctaaagtgggcggcaactacaattatctgtacaggctgtttcgcaagtccaatctgaagccattcgagcgggacatctccacagagatctaccaggccggctctaccccctgcaatggcgtggagggctttaactgttatttccctctgcagtcttacggcttccagccaacaaacggcgtgggctatcagccctacagagtggtggtgctgtcctttgagctgctgcacgcaccagcaacagtgtgcggcccaaagaagtctaccaatctggtgaagaacaagtgcgtgaacttcaacttcaacggactgaccggcacaggcgtgctgaccgagagcaataagaagttcctgccttttcagcagttcggcagggacatcgcagataccacagacgccgtgcgcgaccctcagaccctggagatcctggacatcacaccatgcagcttcggcggcgtgtccgtgatcacaccaggcaccaatacatccaaccaggtggccgtgctgtatcaggacgtgaattgtaccgaggtgcccgtggcaatccacgcagatcagctgacccctacatggcgggtgtactctaccggcagcaacgtgttccagacaagagccggatgcctgatcggagcagagcacgtgaacaatagctatgagtgcgacatccctatcggcgccggcatctgtgccagctaccagacccagacaaactccccatctggagcaggctccgtggccagccagtccatcatcgcctataccatgagcctgggcgccgagaacagcgtggcctactccaacaattctatcgccatccctaccaacttcacaatcagcgtgaccacagagatcctgccagtgtctatgaccaagacaagcgtggactgcacaatgtatatctgtggcgatagcaccgagtgctccaacctgctgctgcagtacggctccttttgtacccagctgaatagagccctgacaggcatcgccgtggagcaggataagaacacacaggaggtgttcgcccaggtgaagcagatctacaagaccccacccatcaaggactttggcggcttcaacttcagccagatcctgcctgatccaagcaagccctccaagaggtcttttatcgaggacctgctgttcaacaaggtgaccctggccgatgccggcttcatcaagcagtatggagattgcctgggagacatcgcagcccgcgacctgatctgtgcccagaagtttaatggcctgaccgtgctgcctccactgctgacagatgagatgatcgcccagtacacatctgccctgctggccggcaccatcacaagcggatggaccttcggcgcaggagccgccctgcagatcccttttgccatgcagatggcctataggttcaacggcatcggcgtgacccagaatgtgctgtacgagaaccagaagctgatcgccaatcagtttaacagcgccatcggcaagatccaggactctctgtcctctacagccagcgccctgggcaagctgcaggatgtggtgaatcagaacgcccaggccctgaataccctggtgaagcagctgagctccaacttcggcgccatctctagcgtgctgaatgacatcctgagccggctggacccccctgaggcagaggtgcagatcgacaggctgatcacaggccgcctgcagagcctgcagacctacgtgacacagcagctgatcagggcagcagagatcagagcctccgccaatctggccgccaccaagatgagcgagtgcgtgctgggacagtccaagagggtggacttttgtggcaagggctatcacctgatgtctttcccacagagcgcccctcacggcgtggtgtttctgcacgtgacctacgtgccagcccaggagaagaacttcaccacagcaccagccatctgccacgatggaaaggcacactttcctagggagggcgtgttcgtgtctaacggcacccactggtttgtgacacagcgcaatttctacgagccacagatcatcaccacagacaatacattcgtgagcggcaactgtgatgtggtgatcggcatcgtgaacaataccgtgtatgatccactgcagcccgagctggactcctttaaggaggagctggataagtacttcaagaatcacacctctcccgacgtggatctgggcgacatctccggcatcaatgcctctgtggtgaacatccagaaggagatcgaccggctgaacgaggtggccaagaatctgaacgagagcctgatcgatctgcaggagctgggcaagtatgagcagtacatcaagggctctggcagagagaacctgtatttccagggaggaggaggcagcggatacatccctgaggcaccaagggacggacaggcctacgtgcgcaaggatggcgagtgggtgctgctgtccacctttctgggccatcatcaccaccaccaccaccactga

SEQ ID NO: 4997 - DNA, 3846 bp, Artificial Sequence
  Description of Artificial Sequence: Synthetic polynucleotide
atgggcatcctgccaagcccaggaatgcccgccctgctgtctctggtgagcctgctgtccgtgctgctgatgggatgcgtggcagagacaggcacacagtgcgtgaacctgaccacaaggacccagctgccccctgcctataccaattctttcacacggggcgtgtactatcccgacaaggtgtttagaagctccgtgctgcactccacacaggatctgtttctgcctttcttttctaacgtgacctggttccacgccatccacgtgtccggcaccaatggcacaaagcggttcgacaatcccgtgctgccttttaacgatggcgtgtacttcgccagcaccgagaagtccaacatcatcagaggctggatctttggcaccacactggactctaagacacagagcctgctgatcgtgaacaatgccaccaacgtggtgatcaaggtgtgcgagttccagttttgtaatgatccattcctgggcgtgtactatcacaagaacaataagtcctggatggagtctgagtttcgcgtgtattctagcgccaacaattgcacatttgagtacgtgagccagcccttcctgatggacctggagggcaagcagggcaatttcaagaacctgagggagttcgtgtttaagaatatcgatggctacttcaagatctacagcaagcacaccccaatcaacctggtgcgcgacctgccacagggattctccgccctggagccactggtggatctgcccatcggcatcaacatcacccggtttcagacactgctggccctgcacagatcctacctgacaccaggcgactcctctagcggatggaccgcaggagctgccgcctactatgtgggctatctgcagccccggaccttcctgctgaagtacaacgagaatggcaccatcacagacgcagtggattgcgccctggaccccctgtctgagacaaagtgtacactgaagagctttaccgtggagaagggcatctatcagacaagcaatttcagggtgcagcctaccgagtccatcgtgcgctttcccaatatcacaaacctgtgcccttttggcgaggtgttcaacgccaccagattcgccagcgtgtacgcctggaatcggaagagaatctccaactgcgtggccgactattctgtgctgtacaactccgcctctttcagcacctttaagtgctatggcgtgtctcccacaaagctgaatgatctgtgctttaccaacgtgtacgccgatagcttcgtgatcaggggagacgaagtgagacagatcgcaccaggacagacaggaaagatcgcagactacaattataagctgcctgacgatttcaccggctgcgtgatcgcctggaactccaacgaactggattctaaagtgggcggcaactacaattatctgtacaggctgtttcgcaagtccaatctgaagccattcgagcgggacatctccacagagatctaccaggccggctctaccccctgcaatggcgtggagggctttaactgttatttccctctgcagtcttacggcttccagccaacaaacggcgtgggctatcagccctacagagtggtggtgctgtcctttgagctgctgcacgcaccagcaacagtgtgcggcccaaagaagtctaccaatctggtgaagaacaagtgcgtgaacttcaacttcaacggactgaccggcacaggcgtgctgaccgagagcaataagaagttcctgccttttcagcagttcggcagggacatcgcagataccacagacgccgtgcgcgaccctcagaccctggagatcctggacatcacaccatgcagcttcggcggcgtgtccgtgatcacaccaggcaccaatacatccaaccaggtggccgtgctgtatcaggacgtgaattgtaccgaggtgcccgtggcaatccacgcagatcagctgacccctacatggcgggtgtactctaccggcagcaacgtgttccagacaagagccggatgcctgatcggagcagagcacgtgaacaatagctatgagtgcgacatccctatcggcgccggcatctgtgccagctaccagacccagacaaactccccatctggagcaggctccgtggccagccagtccatcatcgcctataccatgagcctgggcgccgagaacagcgtggcctactccaacaattctatcgccatccctaccaacttcacaatcagcgtgaccacagagatcctgccagtgtctatgaccaagacaagcgtggactgcacaatgtatatctgtggcgatagcaccgagtgctccaacctgctgctgcagtacggctccttttgtacccagctgaatagagccctgacaggcatcgccgtggagcaggataagaacacacaggaggtgttcgcccaggtgaagcagatctacaagaccccacccatcaaggactttggcggcttcaacttcagccagatcctgcctgatccaagcaagccctccaagaggtcttttatcgaggacctgctgttcaacaaggtgaccctggccgatgccggcttcatcaagcagtatggagattgcctgggagacatcgcagcccgcgacctgatctgtgcccagaagtttaatggcctgaccgtgctgcctccactgctgacagatgagatgatcgcccagtacacatctgccctgctggccggcaccatcacaagcggatggaccttcggcgcaggagccgccctgcagatcccttttgccatgcagatggcctataggttcaacggcatcggcgtgacccagaatgtgctgtacgagaaccagaagctgatcgccaatcagtttaacagcgccatcggcaagatccaggactctctgtcctctacagccagcgccctgggcaagctgcaggatgtggtgaatcagaacgcccaggccctgaataccctggtgaagcagctgagctccaacttcggcgccatctctagcgtgctgaatgacatcctgagccggctggacccccctgaggcagaggtgcagatcgacaggctgatcacaggccgcctgcagagcctgcagacctacgtgacacagcagctgatcagggcagcagagatcagagcctccgccaatctggccgccaccaagatgagcgagtgcgtgctgggacagtccaagagggtggacttttgtggcaagggctatcacctgatgtctttcccacagagcgcccctcacggcgtggtgtttctgcacgtgacctacgtgccagcccaggagaagaacttcaccacagcaccagccatctgccacgatggaaaggcacactttcctagggagggcgtgttcgtgtctaacggcacccactggtttgtgacacagcgcaatttctacgagccacagatcatcaccacagacaatacattcgtgagcggcaactgtgatgtggtgatcggcatcgtgaacaataccgtgtatgatccactgcagcccgagctggactcctttaaggaggagctggataagtacttcaagaatcacacctctcccgacgtggatctgggcgacatctccggcatcaatgcctctgtggtgaacatccagaaggagatcgaccggctgaacgaggtggccaagaatctgaacgagagcctgatcgatctgcaggagctgggcaagtatgagcagtacatcaagggctctggcagagagaacctgtatttccagggaggaggaggcagcggatacatccctgaggcaccaagggacggacaggcctacgtgcgcaaggatggcgagtgggtgctgctgtccacctttctgggccatcatcaccaccaccaccaccactga

SEQ ID NO: 4998 - DNA, 3846 bp, Artificial Sequence
  Description of Artificial Sequence: Synthetic polynucleotide
atgggcatcctgccaagcccaggaatgcccgccctgctgtctctggtgagcctgctgtccgtgctgctgatgggatgcgtggcagagacaggcacacagtgcgtgaacctgaccacaaggacccagctgccccctgcctataccaattctttcacacggggcgtgtactatcccgacaaggtgtttagaagctccgtgctgcactccacacaggatctgtttctgcctttcttttctaacgtgacctggttccacgccatccacgtgtccggcaccaatggcacaaagcggttcgacaatcccgtgctgccttttaacgatggcgtgtacttcgccagcaccgagaagtccaacatcatcagaggctggatctttggcaccacactggactctaagacacagagcctgctgatcgtgaacaatgccaccaacgtggtgatcaaggtgtgcgagttccagttttgtaatgatccattcctgggcgtgtactatcacaagaacaataagtcctggatggagtctgagtttcgcgtgtattctagcgccaacaattgcacatttgagtacgtgagccagcccttcctgatggacctggagggcaagcagggcaatttcaagaacctgagggagttcgtgtttaagaatatcgatggctacttcaagatctacagcaagcacaccccaatcaacctggtgcgcgacctgccacagggattctccgccctggagccactggtggatctgcccatcggcatcaacatcacccggtttcagacactgctggccctgcacagatcctacctgacaccaggcgactcctctagcggatggaccgcaggagctgccgcctactatgtgggctatctgcagccccggaccttcctgctgaagtacaacgagaatggcaccatcacagacgcagtggattgcgccctggaccccctgtctgagacaaagtgtacactgaagagctttaccgtggagaagggcatctatcagacaagcaatttcagggtgcagcctaccgagtccatcgtgcgctttcccaatatcacaaacctgtgcccttttggcgaggtgttcaacgccaccagattcgccagcgtgtacgcctggaatcggaagagaatctccaactgcgtggccgactattctgtgctgtacaactccgcctctttcagcacctttaagtgctatggcgtgtctcccacaaagctgaatgatctgtgctttaccaacgtgtacgccgatagcttcgtgatcaggggagacgaagtgagacagatcgcaccaggacagacaggaaagatcgcagactacaattataagctgcctgacgatttcaccggctgcgtgatcgcctggaactccaacaatctggattctaaagtgggcggcaactacaattatctgtacaggctgtttcgcaagtccaatctgaagccattcgagcgggacatctccacagagatctaccaggccggctctaccccctgcaatggcgtggagggctttaactgttatttccctctgcagtcttacggcttccagccaacaaacggcgtgggctatcagccctacagagtggtggtgctgtcctttgagctgctgcacgcaccagcaacagtgtgcggcccaaagaagtctaccaatctggtgaagaacaagtgcgtgaacttcaacttcaacggactgaccggcacaggcgtgctgaccgagagcaataagaagttcctgccttttcagcagttcggcagggacatcgcagataccacagacgccgtgcgcgaccctcagaccctggagatcctggacatcacaccatgcagcttcggcggcgtgtccgtgatcacaccaggcaccaatacatccaaccaggtggccgtgctgtatcaggacgtgaattgtaccgaggtgcccgtggcaatccacgcagatcagctgacccctacatggcgggtgtactctaccggcagcaacgtgttccagacaagagccggatgcctgatcggagcagagcacgtgaacaatagctatgagtgcgacatccctatcggcgccggcatctgtgccagctaccagacccagacaaactccccatctggagcaggctccgtggccagccagtccatcatcgcctataccatgagcctgggcgccgagaacagcgtggcctactccaacaattctatcgccatccctaccaacttcacaatcagcgtgaccacagagatcctgccagtgtctatgaccaagacaagcgtggactgcacaatgtatatctgtggcgatagcaccgagtgctccaacctgctgctgcagtacggctccttttgtacccagctgaatagagccctgacaggcatcgccgtggagcaggataagaacacacaggaggtgttcgcccaggtgaagcagatctacaagaccccacccatcaaggactttggcggcttcaacttcagccagatcctgcctgatccaagcaagccctccaagaggtcttttatcgaggacctgctgttcaacaaggtgaccctggccgatgccggcttcatcaagcagtatggagattgcctgggagacatcgcagcccgcgacctgatctgtgcccagaagtttaatggcctgaccgtgctgcctccactgctgacagatgagatgatcgcccagtacacatctgccctgctggccggcaccatcacaagcggatggaccttcggcgcaggagccgccctgcagatcccttttgccatgcagatggcctataggttcaacggcatcggcgtgacccagaatgtgctgtacgagaaccagaagctgatcgccaatcagtttaacagcgccatcggcaagatccaggactctctgtcctctacagccagcgccctgggcaagctgcaggatgtggtgaatcagaacgcccaggccctgaataccctggtgaagcagctgagctccaacttcggcgccatctctagcgtgctgaatgacatcctgagccggctggacccccctgaggcagaggtgcagatcgacaggctgatcacaggccgcctgcagagcctgcagacctacgtgacacagcagctgatcagggcagcagagatcagagcctccgccaatctggccgccaccaagatgagcgagtgcgtgctgggacagtccaagagggtgcatttttgtggcaagggctatcacctgatgtctttcccacagagcgcccctcacggcgtggtgtttctgcacgtgacctacgtgccagcccaggagaagaacttcaccacagcaccagccatctgccacgatggaaaggcacactttcctagggagggcgtgttcgtgtctaacggcacccactggtttgtgacacagcgcaatttctacgagccacagatcatcaccacagacaatacattcgtgagcggcaactgtgatgtggtgatcggcatcgtgaacaataccgtgtatgatccactgcagcccgagctggactcctttaaggaggagctggataagtacttcaagaatcacacctctcccgacgtggatctgggcgacatctccggcatcaatgcctctgtggtgaacatccagaaggagatcgaccggctgaacgaggtggccaagaatctgaacgagagcctgatcgatctgcaggagctgggcaagtatgagcagtacatcaagggctctggcagagagaacctgtatttccagggaggaggaggcagcggatacatccctgaggcaccaagggacggacaggcctacgtgcgcaaggatggcgagtgggtgctgctgtccacctttctgggccatcatcaccaccaccaccaccactga

SEQ ID NO: 4999 - DNA, 3846 bp, Artificial Sequence
  Description of Artificial Sequence: Synthetic polynucleotide
atgggcatcctgccaagcccaggaatgcccgccctgctgtctctggtgagcctgctgtccgtgctgctgatgggatgcgtggcagagacaggcacacagtgcgtgaacctgaccacaaggacccagctgccccctgcctataccaattctttcacacggggcgtgtactatcccgacaaggtgtttagaagctccgtgctgcactccacacaggatctgtttctgcctttcttttctaacgtgacctggttccacgccatccacgtgtccggcaccaatggcacaaagcggttcgacaatcccgtgctgccttttaacgatggcgtgtacttcgccagcaccgagaagtccaacatcatcagaggctggatctttggcaccacactggactctaagacacagagcctgctgatcgtgaacaatgccaccaacgtggtgatcaaggtgtgcgagttccagttttgtaatgatccattcctgggcgtgtactatcacaagaacaataagtcctggatggagtctgagtttcgcgtgtattctagcgccaacaattgcacatttgagtacgtgagccagcccttcctgatggacctggagggcaagcagggcaatttcaagaacctgagggagttcgtgtttaagaatatcgatggctacttcaagatctacagcaagcacaccccaatcaacctggtgcgcgacctgccacagggattctccgccctggagccactggtggatctgcccatcggcatcaacatcacccggtttcagacactgctggccctgcacagatcctacctgacaccaggcgactcctctagcggatggaccgcaggagctgccgcctactatgtgggctatctgcagccccggaccttcctgctgaagtacaacgagaatggcaccatcacagacgcagtggattgcgccctggaccccctgtctgagacaaagtgtacactgaagagctttaccgtggagaagggcatctatcagacaagcaatttcagggtgcagcctaccgagtccatcgtgcgctttcccaatatcacaaacctgtgcccttttggcgaggtgttcaacgccaccagattcgccagcgtgtacgcctggaatcggaagagaatctccaactgcgtggccgactattctgtgctgtacaactccgcctctttcagcacctttaagtgctatggcgtgtctcccacaaagctgaatgatctgtgctttaccaacgtgtacgccgatagcttcgtgatcaggggagacgaagtgagacagatcgcaccaggacagacaggaaagatcgcagactacaattataagctgcctgacgatttcaccggctgcgtgatcgcctggaactccaacaatctggattctaaagtgggcggcaactacaattatctgtacaggctgtttcgcaagtccaatctgaagccattcgagcgggacatctcctttgagatctaccaggccggctctaccccctgcaatggcgtggagggctttaactgttatttccctctgcagtcttacggcttccagccaacaaacggcgtgggctatcagccctacagagtggtggtgctgtcctttgagctgctgcacgcaccagcaacagtgtgcggcccaaagaagtctaccaatctggtgaagaacaagtgcgtgaacttcaacttcaacggactgaccggcacaggcgtgctgaccgagagcaataagaagttcctgccttttcagcagttcggcagggacatcgcagataccacagacgccgtgcgcgaccctcagaccctggagatcctggacatcacaccatgcagcttcggcggcgtgtccgtgatcacaccaggcaccaatacatccaaccaggtggccgtgctgtatcaggacgtgaattgtaccgaggtgcccgtggcaatccacgcagatcagctgacccctacatggcgggtgtactctaccggcagcaacgtgttccagacaagagccggatgcctgatcggagcagagcacgtgaacaatagctatgagtgcgacatccctatcggcgccggcatctgtgccagctaccagacccagacaaactccccatctggagcaggctccgtggccagccagtccatcatcgcctataccatgagcctgggcgccgagaacagcgtggcctactccaacaattctatcgccatccctaccaacttcacaatcagcgtgaccacagagatcctgccagtgtctatgaccaagacaagcgtggactgcacaatgtatatctgtggcgatagcaccgagtgctccaacctgctgctgcagtacggctccttttgtacccagctgaatagagccctgacaggcatcgccgtggagcaggataagaacacacaggaggtgttcgcccaggtgaagcagatctacaagaccccacccatcaaggactttggcggcttcaacttcagccagatcctgcctgatccaagcaagccctccaagaggtcttttatcgaggacctgctgttcaacaaggtgaccctggccgatgccggcttcatcaagcagtatggagattgcctgggagacatcgcagcccgcgacctgatctgtgcccagaagtttaatggcctgaccgtgctgcctccactgctgacagatgagatgatcgcccagtacacatctgccctgctggccggcaccatcacaagcggatggaccttcggcgcaggagccgccctgcagatcccttttgccatgcagatggcctataggttcaacggcatcggcgtgacccagaatgtgctgtacgagaaccagaagctgatcgccaatcagtttaacagcgccatcggcaagatccaggactctctgtcctctacagccagcgccctgggcaagctgcaggatgtggtgaatcagaacgcccaggccctgaataccctggtgaagcagctgagctccaacttcggcgccatctctagcgtgctgaatgacatcctgagccggctggacccccctgaggcagaggtgcagatcgacaggctgatcacaggccgcctgcagagcctgcagacctacgtgacacagcagctgatcagggcagcagagatcagagcctccgccaatctggccgccaccaagatgagcgagtgcgtgctgggacagtccaagagggtggacttttgtggcaagggctatcacctgatgtctttcccacagagcgcccctcacggcgtggtgtttctgcacgtgacctacgtgccagcccaggagaagaacttcaccacagcaccagccatctgccacgatggaaaggcacactttcctagggagggcgtgttcgtgtctaacggcacccactggtttgtgacacagcgcaatttctacgagccacagatcatcaccacagacaatacattcgtgagcggcaactgtgatgtggtgatcggcatcgtgaacaataccgtgtatgatccactgcagcccgagctggactcctttaaggaggagctggataagtacttcaagaatcacacctctcccgacgtggatctgggcgacatctccggcatcaatgcctctgtggtgaacatccagaaggagatcgaccggctgaacgaggtggccaagaatctgaacgagagcctgatcgatctgcaggagctgggcaagtatgagcagtacatcaagggctctggcagagagaacctgtatttccagggaggaggaggcagcggatacatccctgaggcaccaagggacggacaggcctacgtgcgcaaggatggcgagtgggtgctgctgtccacctttctgggccatcatcaccaccaccaccaccactga

SEQ ID NO: 5000 - DNA, 3846 bp, Artificial Sequence
  Description of Artificial Sequence: Synthetic polynucleotide
atgggcatcctgccaagcccaggaatgcccgccctgctgtctctggtgagcctgctgtccgtgctgctgatgggatgcgtggcagagacaggcacacagtgcgtgaacctgaccacaaggacccagctgccccctgcctataccaattctttcacacggggcgtgtactatcccgacaaggtgtttagaagctccgtgctgcactccacacaggatctgtttctgcctttcttttctaacgtgacctggttccacgccatccacgtgtccggcaccaatggcacaaagcggttcgacaatcccgtgctgccttttaacgatggcgtgtacttcgccagcaccgagaagtccaacatcatcagaggctggatctttggcaccacactggactctaagacacagagcctgctgatcgtgaacaatgccaccaacgtggtgatcaaggtgtgcgagttccagttttgtaatgatccattcctgggcgtgtactatcacaagaacaataagtcctggatggagtctgagtttcgcgtgtattctagcgccaacaattgcacatttgagtacgtgagccagcccttcctgatggacctggagggcaagcagggcaatttcaagaacctgagggagttcgtgtttaagaatatcgatggctacttcaagatctacagcaagcacaccccaatcaacctggtgcgcgacctgccacagggattctccgccctggagccactggtggatctgcccatcggcatcaacatcacccggtttcagacactgctggccctgcacagatcctacctgacaccaggcgactcctctagcggatggaccgcaggagctgccgcctactatgtgggctatctgcagccccggaccttcctgctgaagtacaacgagaatggcaccatcacagacgcagtggattgcgccctggaccccctgtctgagacaaagtgtacactgaagagctttaccgtggagaagggcatctatcagacaagcaatttcagggtgcagcctaccgagtccatcgtgcgctttcccaatatcacaaacctgtgcccttttggcgaggtgttcaacgccaccagattcgccagcgtgtacgcctggaatcggaagagaatctccaactgcgtggccgactattctgtgctgtttaactccgcctctttcagcacctttaagtgctatggcgtgtctcccacaaagctgaatgatctgtgctttaccaacgtgtacgccgatagcttcgtgatcaggggagacgaagtgagacagatcgcaccaggacagacaggaaagatcgcagactacaattataagctgcctgacgatttcaccggctgcgtgatcgcctggaactccaacaatctggattctaaagtgggcggcaactacaattatctgtacaggctgtttcgcaagtccaatctgaagccattcgagcgggacatctccacagagatctaccaggccggctctaccccctgcaatggcgtggagggctttaactgttatttccctctgcagtcttacggcttccagccaacaaacggcgtgggctatcagccctacagagtggtggtgctgtcctttgagctgctgcacgcaccagcaacagtgtgcggcccaaagaagtctaccaatctggtgaagaacaagtgcgtgaacttcaacttcaacggactgaccggcacaggcgtgctgaccgagagcaataagaagttcctgccttttcagcagttcggcagggacatcgcagataccacagacgccgtgcgcgaccctcagaccctggagatcctggacatcacaccatgcagcttcggcggcgtgtccgtgatcacaccaggcaccaatacatccaaccaggtggccgtgctgtatcaggacgtgaattgtaccgaggtgcccgtggcaatccacgcagatcagctgacccctacatggcgggtgtactctaccggcagcaacgtgttccagacaagagccggatgcctgatcggagcagagcacgtgaacaatagctatgagtgcgacatccctatcggcgccggcatctgtgccagctaccagacccagacaaactccccatctggagcaggctccgtggccagccagtccatcatcgcctataccatgagcctgggcgccgagaacagcgtggcctactccaacaattctatcgccatccctaccaacttcacaatcagcgtgaccacagagatcctgccagtgtctatgaccaagacaagcgtggactgcacaatgtatatctgtggcgatagcaccgagtgctccaacctgctgctgcagtacggctccttttgtacccagctgaatagagccctgacaggcatcgccgtggagcaggataagaacacacaggaggtgttcgcccaggtgaagcagatctacaagaccccacccatcaaggactttggcggcttcaacttcagccagatcctgcctgatccaagcaagccctccaagaggtcttttatcgaggacctgctgttcaacaaggtgaccctggccgatgccggcttcatcaagcagtatggagattgcctgggagacatcgcagcccgcgacctgatctgtgcccagaagtttaatggcctgaccgtgctgcctccactgctgacagatgagatgatcgcccagtacacatctgccctgctggccggcaccatcacaagcggatggaccttcggcgcaggagccgccctgcagatcccttttgccatgcagatggcctataggttcaacggcatcggcgtgacccagaatgtgctgtacgagaaccagaagctgatcgccaatcagtttaacagcgccatcggcaagatccaggactctctgtcctctacagccagcgccctgggcaagctgcaggatgtggtgaatcagaacgcccaggccctgaataccctggtgaagcagctgagctccaacttcggcgccatctctagcgtgctgaatgacatcctgagccggctggacccccctgaggcagaggtgcagatcgacaggctgatcacaggccgcctgcagagcctgcagacctacgtgacacagcagctgatcagggcagcagagatcagagcctccgccaatctggccgccaccaagatgagcgagtgcgtgctgggacagtccaagagggtggacttttgtggcaagggctatcacctgatgtctttcccacagagcgcccctcacggcgtggtgtttctgcacgtgacctacgtgccagcccaggagaagaacttcaccacagcaccagccatctgccacgatggaaaggcacactttcctagggagggcgtgttcgtgtctaacggcacccactggtttgtgacacagcgcaatttctacgagccacagatcatcaccacagacaatacattcgtgagcggcaactgtgatgtggtgatcggcatcgtgaacaataccgtgtatgatccactgcagcccgagctggactcctttaaggaggagctggataagtacttcaagaatcacacctctcccgacgtggatctgggcgacatctccggcatcaatgcctctgtggtgaacatccagaaggagatcgaccggctgaacgaggtggccaagaatctgaacgagagcctgatcgatctgcaggagctgggcaagtatgagcagtacatcaagggctctggcagagagaacctgtatttccagggaggaggaggcagcggatacatccctgaggcaccaagggacggacaggcctacgtgcgcaaggatggcgagtgggtgctgctgtccacctttctgggccatcatcaccaccaccaccaccactga

SEQ ID NO: 5001 - DNA, 3846 bp, Artificial Sequence
  Description of Artificial Sequence: Synthetic polynucleotide
atgggcatcctgccaagcccaggaatgcccgccctgctgtctctggtgagcctgctgtccgtgctgctgatgggatgcgtggcagagacaggcacacagtgcgtgaacctgaccacaaggacccagctgccccctgcctataccaattctttcacacggggcgtgtactatcccgacaaggtgtttagaagctccgtgctgcactccacacaggatctgtttctgcctttcttttctaacgtgacctggttccacgccatccacgtgtccggcaccaatggcacaaagcggttcgacaatcccgtgctgccttttaacgatggcgtgtacttcgccagcaccgagaagtccaacatcatcagaggctggatctttggcaccacactggactctaagacacagagcctgctgatcgtgaacaatgccaccaacgtggtgatcaaggtgtgcgagttccagttttgtaatgatccattcctgggcgtgtactatcacaagaacaataagtcctggatggagtctgagtttcgcgtgtattctagcgccaacaattgcacatttgagtacgtgagccagcccttcctgatggacctggagggcaagcagggcaatttcaagaacctgagggagttcgtgtttaagaatatcgatggctacttcaagatctacagcaagcacaccccaatcaacctggtgcgcgacctgccacagggattctccgccctggagccactggtggatctgcccatcggcatcaacatcacccggtttcagacactgctggccctgcacagatcctacctgacaccaggcgactcctctagcggatggaccgcaggagctgccgcctactatgtgggctatctgcagccccggaccttcctgctgaagtacaacgagaatggcaccatcacagacgcagtggattgcgccctggaccccctgtctgagacaaagtgtacactgaagagctttaccgtggagaagggcatctatcagacaagcaatttcagggtgcagcctaccgagtccatcgtgcgctttcccaatatcacaaacctgtgcccttttggcgaggtgttcaacgccaccagattcgccagcgtgtacgcctggaatcggaagagaatctccaactgcgtggccgactattctgtgctgtacaactccgcctctttcagcacctttaagtgctatggcgtgtctcccacaaagctgaatgatctgtgctttaccaacgtgtacgccgatagcttcgtgatcaggggagacgaagtgagacagatcgcaccaggacagacaggaaagatcgcagactacaattataagctgcctgacgatttcaccggctgcgtgatcgcctggaactccaacaatctggattctaaagtgggcggcaactacaattatctgtacaggctgtttcgcaagtccaatctgaagccattcgagcgggacatctccacagagatctaccaggccggctctaccccctgcaatggcgtggagggctttaactgttatttccctctgcagtcttacggcttccagccaacaaacggcgtgggctatcagccctacagagtggtggtgctgtcctttgagctgctgcacgcaccagcaacagtgtgcggcccaaagaagtctaccaatctggtgaagaacaagtgcgtgaacttcaacttcaacggactgaccggcacaggcgtgctgaccgagagcaataagcaattcctgccttttcagcagttcggcagggacatcgcagataccacagacgccgtgcgcgaccctcagaccctggagatcctggacatcacaccatgcagcttcggcggcgtgtccgtgatcacaccaggcaccaatacatccaaccaggtggccgtgctgtatcaggacgtgaattgtaccgaggtgcccgtggcaatccacgcagatcagctgacccctacatggcgggtgtactctaccggcagcaacgtgttccagacaagagccggatgcctgatcggagcagagcacgtgaacaatagctatgagtgcgacatccctatcggcgccggcatctgtgccagctaccagacccagacaaactccccatctggagcaggctccgtggccagccagtccatcatcgcctataccatgagcctgggcgccgagaacagcgtggcctactccaacaattctatcgccatccctaccaacttcacaatcagcgtgaccacagagatcctgccagtgtctatgaccaagacaagcgtggactgcacaatgtatatctgtggcgatagcaccgagtgctccaacctgctgctgcagtacggctccttttgtacccagctgaatagagccctgacaggcatcgccgtggagcaggataagaacacacaggaggtgttcgcccaggtgaagcagatctacaagaccccacccatcaaggactttggcggcttcaacttcagccagatcctgcctgatccaagcaagccctccaagaggtcttttatcgaggacctgctgttcaacaaggtgaccctggccgatgccggcttcatcaagcagtatggagattgcctgggagacatcgcagcccgcgacctgatctgtgcccagaagtttaatggcctgaccgtgctgcctccactgctgacagatgagatgatcgcccagtacacatctgccctgctggccggcaccatcacaagcggatggaccttcggcgcaggagccgccctgcagatcccttttgccatgcagatggcctataggttcaacggcatcggcgtgacccagaatgtgctgtacgagaaccagaagctgatcgccaatcagtttaacagcgccatcggcaagatccaggactctctgtcctctacagccagcgccctgggcaagctgcaggatgtggtgaatcagaacgcccaggccctgaataccctggtgaagcagctgagctccaacttcggcgccatctctagcgtgctgaatgacatcctgagccggctggacccccctgaggcagaggtgcagatcgacaggctgatcacaggccgcctgcagagcctgcagacctacgtgacacagcagctgatcagggcagcagagatcagagcctccgccaatctggccgccaccaagatgagcgagtgcgtgctgggacagtccaagagggtggacttttgtggcaagggctatcacctgatgtctttcccacagagcgcccctcacggcgtggtgtttctgcacgtgacctacgtgccagcccaggagaagaacttcaccacagcaccagccatctgccacgatggaaaggcacactttcctagggagggcgtgttcgtgtctaacggcacccactggtttgtgacacagcgcaatttctacgagccacagatcatcaccacagacaatacattcgtgagcggcaactgtgatgtggtgatcggcatcgtgaacaataccgtgtatgatccactgcagcccgagctggactcctttaaggaggagctggataagtacttcaagaatcacacctctcccgacgtggatctgggcgacatctccggcatcaatgcctctgtggtgaacatccagaaggagatcgaccggctgaacgaggtggccaagaatctgaacgagagcctgatcgatctgcaggagctgggcaagtatgagcagtacatcaagggctctggcagagagaacctgtatttccagggaggaggaggcagcggatacatccctgaggcaccaagggacggacaggcctacgtgcgcaaggatggcgagtgggtgctgctgtccacctttctgggccatcatcaccaccaccaccaccactga

SEQ ID NO: 5002 - DNA, 3846 bp, Artificial Sequence
  Description of Artificial Sequence: Synthetic polynucleotide
atgggcatcctgccaagcccaggaatgcccgccctgctgtctctggtgagcctgctgtccgtgctgctgatgggatgcgtggcagagacaggcacacagtgcgtgaacctgaccacaaggacccagctgccccctgcctataccaattctttcacacggggcgtgtactatcccgacaaggtgtttagaagctccgtgctgcactccacacaggatctgtttctgcctttcttttctaacgtgacctggttccacgccatccacgtgtccggcaccaatggcacaaagcggttcgacaatcccgtgctgccttttaacgatggcgtgtacttcgccagcaccgagaagtccaacatcatcagaggctggatctttggcaccacactggactctaagacacagagcctgctgatcgtgaacaatgccaccaacgtggtgatcaaggtgtgcgagttccagttttgtaatgatccattcctgggcgtgtactatcacaagaacaataagtcctggatggagtctgagtttcgcgtgtattctagcgccaacaattgcacatttgagtacgtgagccagcccttcctgatggacctggagggcaagcagggcaatttcaagaacctgagggagttcgtgtttaagaatatcgatggctacttcaagatctacagcaagcacaccccaatcaacctggtgcgcgacctgccacagggattctccgccctggagccactggtggatctgcccatcggcatcaacatcacccggtttcagacactgctggccctgcacagatcctacctgacaccaggcgactcctctagcggatggaccgcaggagctgccgcctactatgtgggctatctgcagccccggaccttcctgctgaagtacaacgagaatggcaccatcacagacgcagtggattgcgccctggaccccctgtctgagacaaagtgtacactgaagagctttaccgtggagaagggcatctatcagacaagcaatttcagggtgcagcctaccgagtccatcgtgcgctttcccaatatcacaaacctgtgcccttttggcgaggtgttcaacgccaccagattcgccagcgtgtacgcctggaatcggaagagaatctccaactgcgtggccgactattctgtgctgtacaactccgcctctttcacgacctttaagtgctatggcgtgtctcccacaaagctgaatgatctgtgctttaccaacgtgtacgccgatagcttcgtgatcaggggagacgaagtgagacagatcgcaccaggacagacaggaaagatcgcagactacaattataagctgcctgacgatttcaccggctgcgtgatcgcctggaactccaacaatctggattctaaagtgggcggcaactacaattatctgtacaggctgtttcgcaagtccaatctgaagccattcgagcgggacatctccacagagatctaccaggccggctctaccccctgcaatggcgtggagggctttaactgttatttccctctgcagtcttacggcttccagccaacaaacggcgtgggctatcagccctacagagtggtggtgctgtcctttgagctgctgcacgcaccagcaacagtgtgcggcccaaagaagtctaccaatctggtgaagaacaagtgcgtgaacttcaacttcaacggactgaccggcacaggcgtgctgaccgagagcaataagaagttcctgccttttcagcagttcggcagggacatcgcagataccacagacgccgtgcgcgaccctcagaccctggagatcctggacatcacaccatgcagcttcggcggcgtgtccgtgatcacaccaggcaccaatacatccaaccaggtggccgtgctgtatcaggacgtgaattgtaccgaggtgcccgtggcaatccacgcagatcagctgacccctacatggcgggtgtactctaccggcagcaacgtgttccagacaagagccggatgcctgatcggagcagagcacgtgaacaatagctatgagtgcgacatccctatcggcgccggcatctgtgccagctaccagacccagacaaactccccatctggagcaggctccgtggccagccagtccatcatcgcctataccatgagcctgggcgccgagaacagcgtggcctactccaacaattctatcgccatccctaccaacttcacaatcagcgtgaccacagagatcctgccagtgtctatgaccaagacaagcgtggactgcacaatgtatatctgtggcgatagcaccgagtgctccaacctgctgctgcagtacggctccttttgtacccagctgaatagagccctgacaggcatcgccgtggagcaggataagaacacacaggaggtgttcgcccaggtgaagcagatctacaagaccccacccatcaaggactttggcggcttcaacttcagccagatcctgcctgatccaagcaagccctccaagaggtcttttatcgaggacctgctgttcaacaaggtgaccctggccgatgccggcttcatcaagcagtatggagattgcctgggagacatcgcagcccgcgacctgatctgtgcccagaagtttaatggcctgaccgtgctgcctccactgctgacagatgagatgatcgcccagtacacatctgccctgctggccggcaccatcacaagcggatggaccttcggcgcaggagccgccctgcagatcccttttgccatgcagatggcctataggttcaacggcatcggcgtgacccagaatgtgctgtacgagaaccagaagctgatcgccaatcagtttaacagcgccatcggcaagatccaggactctctgtcctctacagccagcgccctgggcaagctgcaggatgtggtgaatcagaacgcccaggccctgaataccctggtgaagcagctgagctccaacttcggcgccatctctagcgtgctgaatgacatcctgagccggctggacccccctgaggcagaggtgcagatcgacaggctgatcacaggccgcctgcagagcctgcagacctacgtgacacagcagctgatcagggcagcagagatcagagcctccgccaatctggccgccaccaagatgagcgagtgcgtgctgggacagtccaagagggtggacttttgtggcaagggctatcacctgatgtctttcccacagagcgcccctcacggcgtggtgtttctgcacgtgacctacgtgccagcccaggagaagaacttcaccacagcaccagccatctgccacgatggaaaggcacactttcctagggagggcgtgttcgtgtctaacggcacccactggtttgtgacacagcgcaatttctacgagccacagatcatcaccacagacaatacattcgtgagcggcaactgtgatgtggtgatcggcatcgtgaacaataccgtgtatgatccactgcagcccgagctggactcctttaaggaggagctggataagtacttcaagaatcacacctctcccgacgtggatctgggcgacatctccggcatcaatgcctctgtggtgaacatccagaaggagatcgaccggctgaacgaggtggccaagaatctgaacgagagcctgatcgatctgcaggagctgggcaagtatgagcagtacatcaagggctctggcagagagaacctgtatttccagggaggaggaggcagcggatacatccctgaggcaccaagggacggacaggcctacgtgcgcaaggatggcgagtgggtgctgctgtccacctttctgggccatcatcaccaccaccaccaccactga

SEQ ID NO: 5003 - DNA, 3846 bp, Artificial Sequence
  Description of Artificial Sequence: Synthetic polynucleotide
atgggcatcctgccaagcccaggaatgcccgccctgctgtctctggtgagcctgctgtccgtgctgctgatgggatgcgtggcagagacaggcacacagtgcgtgaacctgaccacaaggacccagctgccccctgcctataccaattctttcacacggggcgtgtactatcccgacaaggtgtttagaagctccgtgctgcactccacacaggatctgtttctgcctttcttttctaacgtgacctggttccacgccatccacgtgtccggcaccaatggcacaaagcggttcgacaatcccgtgctgccttttaacgatggcgtgtacttcgccagcaccgagaagtccaacatcatcagaggctggatctttggcaccacactggactctaagacacagagcctgctgatcgtgaacaatgccaccaacgtggtgatcaaggtgtgcgagttccagttttgtaatgatccattcctgggcgtgtactatcacaagaacaataagtcctggatggagtctgagtttcgcgtgtattctagcgccaacaattgcacatttgagtacgtgagccagcccttcctgatggacctggagggcaagcagggcaatttcaagaacctgagggagttcgtgtttaagaatatcgatggctacttcaagatctacagcaagcacaccccaatcaacctggtgcgcgacctgccacagggattctccgccctggagccactggtggatctgcccatcggcatcaacatcacccggtttcagacactgctggccctgcacagatcctacctgacaccaggcgactcctctagcggatggaccgcaggagctgccgcctactatgtgggctatctgcagccccggaccttcctgctgaagtacaacgagaatggcaccatcacagacgcagtggattgcgccctggaccccctgtctgagacaaagtgtacactgaagagctttaccgtggagaagggcatctatcagacaagcaatttcagggtgcagcctaccgagtccatcgtgcgctttcccaatatcacaaacctgtgcccttttggcgaggtgttcaacgccaccagattcgccagcgtgtacgcctggaatcggaagagaatctccaactgcgtggccgactattctgtgctgtacaactccgcctctttcagcacctttaagtgctatggcgtgtctcccacaaagctgaatgatctgtgctttaccaacgtgtacgccgataaattcgtgatcaggggagacgaagtgagacagatcgcaccaggacagacaggaaagatcgcagactacaattataagctgcctgacgatttcaccggctgcgtgatcgcctggaactccaacaatctggattctaaagtgggcggcaactacaattatctgtacaggctgtttcgcaagtccaatctgaagccattcgagcgggacatctccacagagatctaccaggccggctctaccccctgcaatggcgtggagggctttaactgttatttccctctgcagtcttacggcttccagccaacaaacggcgtgggctatcagccctacagagtggtggtgctgtcctttgagctgctgcacgcaccagcaacagtgtgcggcccaaagaagtctaccaatctggtgaagaacaagtgcgtgaacttcaacttcaacggactgaccggcacaggcgtgctgaccgagagcaataagaagttcctgccttttcagcagttcggcagggacatcgcagataccacagacgccgtgcgcgaccctcagaccctggagatcctggacatcacaccatgcagcttcggcggcgtgtccgtgatcacaccaggcaccaatacatccaaccaggtggccgtgctgtatcaggacgtgaattgtaccgaggtgcccgtggcaatccacgcagatcagctgacccctacatggcgggtgtactctaccggcagcaacgtgttccagacaagagccggatgcctgatcggagcagagcacgtgaacaatagctatgagtgcgacatccctatcggcgccggcatctgtgccagctaccagacccagacaaactccccatctggagcaggctccgtggccagccagtccatcatcgcctataccatgagcctgggcgccgagaacagcgtggcctactccaacaattctatcgccatccctaccaacttcacaatcagcgtgaccacagagatcctgccagtgtctatgaccaagacaagcgtggactgcacaatgtatatctgtggcgatagcaccgagtgctccaacctgctgctgcagtacggctccttttgtacccagctgaatagagccctgacaggcatcgccgtggagcaggataagaacacacaggaggtgttcgcccaggtgaagcagatctacaagaccccacccatcaaggactttggcggcttcaacttcagccagatcctgcctgatccaagcaagccctccaagaggtcttttatcgaggacctgctgttcaacaaggtgaccctggccgatgccggcttcatcaagcagtatggagattgcctgggagacatcgcagcccgcgacctgatctgtgcccagaagtttaatggcctgaccgtgctgcctccactgctgacagatgagatgatcgcccagtacacatctgccctgctggccggcaccatcacaagcggatggaccttcggcgcaggagccgccctgcagatcccttttgccatgcagatggcctataggttcaacggcatcggcgtgacccagaatgtgctgtacgagaaccagaagctgatcgccaatcagtttaacagcgccatcggcaagatccaggactctctgtcctctacagccagcgccctgggcaagctgcaggatgtggtgaatcagaacgcccaggccctgaataccctggtgaagcagctgagctccaacttcggcgccatctctagcgtgctgaatgacatcctgagccggctggacccccctgaggcagaggtgcagatcgacaggctgatcacaggccgcctgcagagcctgcagacctacgtgacacagcagctgatcagggcagcagagatcagagcctccgccaatctggccgccaccaagatgagcgagtgcgtgctgggacagtccaagagggtggacttttgtggcaagggctatcacctgatgtctttcccacagagcgcccctcacggcgtggtgtttctgcacgtgacctacgtgccagcccaggagaagaacttcaccacagcaccagccatctgccacgatggaaaggcacactttcctagggagggcgtgttcgtgtctaacggcacccactggtttgtgacacagcgcaatttctacgagccacagatcatcaccacagacaatacattcgtgagcggcaactgtgatgtggtgatcggcatcgtgaacaataccgtgtatgatccactgcagcccgagctggactcctttaaggaggagctggataagtacttcaagaatcacacctctcccgacgtggatctgggcgacatctccggcatcaatgcctctgtggtgaacatccagaaggagatcgaccggctgaacgaggtggccaagaatctgaacgagagcctgatcgatctgcaggagctgggcaagtatgagcagtacatcaagggctctggcagagagaacctgtatttccagggaggaggaggcagcggatacatccctgaggcaccaagggacggacaggcctacgtgcgcaaggatggcgagtgggtgctgctgtccacctttctgggccatcatcaccaccaccaccaccactga

SEQ ID NO: 5004 - DNA, 3846 bp, Artificial Sequence
  Description of Artificial Sequence: Synthetic polynucleotide
atgggcatcctgccaagcccaggaatgcccgccctgctgtctctggtgagcctgctgtccgtgctgctgatgggatgcgtggcagagacaggcacacagtgcgtgaacctgaccacaaggacccagctgccccctgcctataccaattctttcacacggggcgtgtactatcccgacaaggtgtttagaagctccgtgctgcactccacacaggatctgtttctgcctttcttttctaacgtgacctggttccacgccatccacgtgtccggcaccaatggcacaaagcggttcgacaatcccgtgctgccttttaacgatggcgtgtacttcgccagcaccgagaagtccaacatcatcagaggctggatctttggcaccacactggactctaagacacagagcctgctgatcgtgaacaatgccaccaacgtggtgatcaaggtgtgcgagttccagttttgtaatgatccattcctgggcgtgtactatcacaagaacaataagtcctggatggagtctgagtttcgcgtgtattctagcgccaacaattgcacatttgagtacgtgagccagcccttcctgatggacctggagggcaagcagggcaatttcaagaacctgagggagttcgtgtttaagaatatcgatggctacttcaagatctacagcaagcacaccccaatcaacctggtgcgcgacctgccacagggattctccgccctggagccactggtggatctgcccatcggcatcaacatcacccggtttcagacactgctggccctgcacagatcctacctgacaccaggcgactcctctagcggatggaccgcaggagctgccgcctactatgtgggctatctgcagccccggaccttcctgctgaagtacaacgagaatggcaccatcacagacgcagtggattgcgccctggaccccctgtctgagacaaagtgtacactgaagagctttaccgtggagaagggcatctatcagacaagcaatttcagggtgcagcctaccgagtccatcgtgcgctttcccaatatcacaaacctgtgcccttttggcgaggtgttcaacgccaccagattcgccagcgtgtacgcctggaatcggaagagaatctccaactgcgtggccgactattctgtgctgtacaactccgcctctttcagcacctttaagtgctatggcgtgtctcccacaaagctgaatgatctgtgctttaccaacgtgtacgccgatagcttcgtgatcaggggagacgaagtgagacagatcgcaccaggacagacaggaaagatcgcagactacaattataagctgcctgacgatttcaccggctgcgtgatcgcctggaactccaacaatctggattctaaagtgggcggcaactacaattatctgtacaggctgtttcgcaagtccaatctgaagccattcgagcgggacatcgatacagagatctaccaggccggctctaccccctgcaatggcgtggagggctttaactgttatttccctctgcagtcttacggcttccagccaacaaacggcgtgggctatcagccctacagagtggtggtgctgtcctttgagctgctgcacgcaccagcaacagtgtgcggcccaaagaagtctaccaatctggtgaagaacaagtgcgtgaacttcaacttcaacggactgaccggcacaggcgtgctgaccgagagcaataagaagttcctgccttttcagcagttcggcagggacatcgcagataccacagacgccgtgcgcgaccctcagaccctggagatcctggacatcacaccatgcagcttcggcggcgtgtccgtgatcacaccaggcaccaatacatccaaccaggtggccgtgctgtatcaggacgtgaattgtaccgaggtgcccgtggcaatccacgcagatcagctgacccctacatggcgggtgtactctaccggcagcaacgtgttccagacaagagccggatgcctgatcggagcagagcacgtgaacaatagctatgagtgcgacatccctatcggcgccggcatctgtgccagctaccagacccagacaaactccccatctggagcaggctccgtggccagccagtccatcatcgcctataccatgagcctgggcgccgagaacagcgtggcctactccaacaattctatcgccatccctaccaacttcacaatcagcgtgaccacagagatcctgccagtgtctatgaccaagacaagcgtggactgcacaatgtatatctgtggcgatagcaccgagtgctccaacctgctgctgcagtacggctccttttgtacccagctgaatagagccctgacaggcatcgccgtggagcaggataagaacacacaggaggtgttcgcccaggtgaagcagatctacaagaccccacccatcaaggactttggcggcttcaacttcagccagatcctgcctgatccaagcaagccctccaagaggtcttttatcgaggacctgctgttcaacaaggtgaccctggccgatgccggcttcatcaagcagtatggagattgcctgggagacatcgcagcccgcgacctgatctgtgcccagaagtttaatggcctgaccgtgctgcctccactgctgacagatgagatgatcgcccagtacacatctgccctgctggccggcaccatcacaagcggatggaccttcggcgcaggagccgccctgcagatcccttttgccatgcagatggcctataggttcaacggcatcggcgtgacccagaatgtgctgtacgagaaccagaagctgatcgccaatcagtttaacagcgccatcggcaagatccaggactctctgtcctctacagccagcgccctgggcaagctgcaggatgtggtgaatcagaacgcccaggccctgaataccctggtgaagcagctgagctccaacttcggcgccatctctagcgtgctgaatgacatcctgagccggctggacccccctgaggcagaggtgcagatcgacaggctgatcacaggccgcctgcagagcctgcagacctacgtgacacagcagctgatcagggcagcagagatcagagcctccgccaatctggccgccaccaagatgagcgagtgcgtgctgggacagtccaagagggtggacttttgtggcaagggctatcacctgatgtctttcccacagagcgcccctcacggcgtggtgtttctgcacgtgacctacgtgccagcccaggagaagaacttcaccacagcaccagccatctgccacgatggaaaggcacactttcctagggagggcgtgttcgtgtctaacggcacccactggtttgtgacacagcgcaatttctacgagccacagatcatcaccacagacaatacattcgtgagcggcaactgtgatgtggtgatcggcatcgtgaacaataccgtgtatgatccactgcagcccgagctggactcctttaaggaggagctggataagtacttcaagaatcacacctctcccgacgtggatctgggcgacatctccggcatcaatgcctctgtggtgaacatccagaaggagatcgaccggctgaacgaggtggccaagaatctgaacgagagcctgatcgatctgcaggagctgggcaagtatgagcagtacatcaagggctctggcagagagaacctgtatttccagggaggaggaggcagcggatacatccctgaggcaccaagggacggacaggcctacgtgcgcaaggatggcgagtgggtgctgctgtccacctttctgggccatcatcaccaccaccaccaccactga

SEQ ID NO: 5005 - DNA, 3846 bp, Artificial Sequence
  Description of Artificial Sequence: Synthetic polynucleotide
atgggcatcctgccaagcccaggaatgcccgccctgctgtctctggtgagcctgctgtccgtgctgctgatgggatgcgtggcagagacaggcacacagtgcgtgaacctgaccacaaggacccagctgccccctgcctataccaattctttcacacggggcgtgtactatcccgacaaggtgtttagaagctccgtgctgcactccacacaggatctgtttctgcctttcttttctaacgtgacctggttccacgccatccacgtgtccggcaccaatggcacaaagcggttcgacaatcccgtgctgccttttaacgatggcgtgtacttcgccagcaccgagaagtccaacatcatcagaggctggatctttggcaccacactggactctaagacacagagcctgctgatcgtgaacaatgccaccaacgtggtgatcaaggtgtgcgagttccagttttgtaatgatccattcctgggcgtgtactatcacaagaacaataagtcctggatggagtctgagtttcgcgtgtattctagcgccaacaattgcacatttgagtacgtgagccagcccttcctgatggacctggagggcaagcagggcaatttcaagaacctgagggagttcgtgtttaagaatatcgatggctacttcaagatctacagcaagcacaccccaatcaacctggtgcgcgacctgccacagggattctccgccctggagccactggtggatctgcccatcggcatcaacatcacccggtttcagacactgctggccctgcacagatcctacctgacaccaggcgactcctctagcggatggaccgcaggagctgccgcctactatgtgggctatctgcagccccggaccttcctgctgaagtacaacgagaatggcaccatcacagacgcagtggattgcgccctggaccccctgtctgagacaaagtgtacactgaagagctttaccgtggagaagggcatctatcagacaagcaatttcagggtgcagcctaccgagtccatcgtgcgctttcccaatatcacaaacctgtgcccttttggcgaggtgttcaacgccaccagattcgccagcgtgtacgcctggaatcggaagagaatctccaactgcgtggccgactattctgtgctgtacaactccgcctctttcagcacctttaagtgctatggcgtgtctcccacaaagctgaatgatctgtgctttaccaacgtgtacgccgatagcttcgtgatcaggggagacgaagtgagacagatcgcaccaggacagacaggaaagatcgcagactacaattataagctgcctgacgatttcaccggctgcgtgatcgcctggaactccaacaatctggattctaaagtgggcggcaactacaattatctgtacaggctgtttcgcaagtccaatctgaagccattcgagcgggacatctccacagagatctaccaggccggctctaccccctgcaatggcgtggagggctttaactgttatttccctctgcagtcttacggcttccagccaacaaacggcgtgggctatcagccctacagagtggtggtgctgtcctttgagctgctgcacgcaccagcaacagtgtgcggcccaaagaagtctaccaatctggtgaagaacaagtgcgtgaacttcaacttcaacggactgaccggcacaggcgtgctgaccgagagcaataagaagttcctgccttttcagcagttcggcagggacatcgcagataccacagacgccgtgcgcgaccctcagaccctggagatcctggacatcacaccatgcagcttcggcggcgtgtccgtgatcacaccaggcaccaatacatccaaccaggtggccgtgctgtatcaggacgtgaattgtaccgaggtgcccgtggcaatccacgcagatcagctgacccctacatggcgggtgtactctaccggcagcaacgtgttccagacaagagccggatgcctgatcggagcagagcacgtgaacaatagctatgagtgcgacatccctatcggcgccggcatctgtgccagctaccagacccagacaaactccccatctggagcaggctccgtggccagccagtccatcatcgcctataccatgagcctgggcgccgagaactgtgtggcctactccaacaattctatcgccatccctaccaacttcacaatcagcgtgaccacagagatcctgccagtgtctatgaccaagacaagcgtggactgcacaatgtatatctgtggcgatagcaccgagtgctccaacctgctgctgcagtacggctccttttgtacccagctgaatagagccctgacaggcatcgccgtggagcaggataagaacacacaggaggtgttcgcccaggtgaagcagatctacaagaccccacccatcaaggactttggcggcttcaacttcagccagatcctgcctgatccaagcaagccctccaagaggtcttttatcgaggacctgctgttcaacaaggtgaccctggccgatgccggcttcatcaagcagtatggagattgcctgggagacatcgcagcccgcgacctgatctgtgcccagaagtttaatggcctgaccgtgctgcctccactgctgacagatgagatgatcgcccagtacacatctgccctgctggccggcaccatcacaagcggatggaccttcggcgcaggagccgccctgcagatcccttttgccatgcagatggcctataggttcaacggcatcggcgtgacccagaatgtgctgtacgagaaccagaagctgatcgccaatcagtttaacagcgccatcggcaagatccaggactctctgtcctctacagccagcgccctgggcaagctgcaggatgtggtgaatcagaacgcccaggccctgaataccctggtgaagcagctgagctccaacttcggcgccatctctagcgtgctgaatgacatcctgagccggctggacccccctgaggcagaggtgcagatcgacaggctgatcacaggccgcctgcagagcctgcagacctacgtgacacagcagctgatcagggcagcagagatcagagcctccgccaatctggccgccaccaagatgagcgagtgcgtgctgggacagtccaagagggtggacttttgtggcaagggctatcacctgatgtctttcccacagagcgcccctcacggcgtggtgtttctgcacgtgacctacgtgccagcccaggagaagaacttcaccacagcaccagccatctgccacgatggaaaggcacactttcctagggagggcgtgttcgtgtctaacggcacccactggtttgtgacacagcgcaatttctacgagccacagatcatcaccacagacaatacattcgtgagcggcaactgtgatgtggtgatcggcatcgtgaacaataccgtgtatgatccactgcagcccgagctggactcctttaaggaggagctggataagtacttcaagaatcacacctctcccgacgtggatctgggcgacatctccggcatcaatgcctctgtggtgaacatccagaaggagatcgaccggctgaacgaggtggccaagaatctgaacgagagcctgatcgatctgcaggagctgggcaagtatgagcagtacatcaagggctctggcagagagaacctgtatttccagggaggaggaggcagcggatacatccctgaggcaccaagggacggacaggcctacgtgcgcaaggatggcgagtgggtgctgctgtccacctttctgggccatcatcaccaccaccaccaccactga

SEQ ID NO: 5006 - DNA, 3846 bp, Artificial Sequence
  Description of Artificial Sequence: Synthetic polynucleotide
atgggcatcctgccaagcccaggaatgcccgccctgctgtctctggtgagcctgctgtccgtgctgctgatgggatgcgtggcagagacaggcacacagtgcgtgaacctgaccacaaggacccagctgccccctgcctataccaattctttcacacggggcgtgtactatcccgacaaggtgtttagaagctccgtgctgcactccacacaggatctgtttctgcctttcttttctaacgtgacctggttccacgccatccacgtgtccggcaccaatggcacaaagcggttcgacaatcccgtgctgccttttaacgatggcgtgtacttcgccagcaccgagaagtccaacatcatcagaggctggatctttggcaccacactggactctaagacacagagcctgctgatcgtgaacaatgccaccaacgtggtgatcaaggtgtgcgagttccagttttgtaatgatccattcctgggcgtgtactatcacaagaacaataagtcctggatggagtctgagtttcgcgtgtattctagcgccaacaattgcacatttgagtacgtgagccagcccttcctgatggacctggagggcaagcagggcaatttcaagaacctgagggagttcgtgtttaagaatatcgatggctacttcaagatctacagcaagcacaccccaatcaacctggtgcgcgacctgccacagggattctccgccctggagccactggtggatctgcccatcggcatcaacatcacccggtttcagacactgctggccctgcacagatcctacctgacaccaggcgactcctctagcggatggaccgcaggagctgccgcctactatgtgggctatctgcagccccggaccttcctgctgaagtacaacgagaatggcaccatcacagacgcagtggattgcgccctggaccccctgtctgagacaaagtgtacactgaagagctttaccgtggagaagggcatctatcagacaagcaatttcagggtgcagcctaccgagtccatcgtgcgctttcccaatatcacaaacctgtgcccttttggcgaggtgttcaacgccaccagattcgccagcgtgtacgcctggaatcggaagagaatctccaactgcgtggccgactattctgtgctgtacaactccgcctctttcagcacctttaagtgctatggcgtgtctcccacaaagctgaatgatctgtgctttaccaacgtgtacgccgatagcttcgtgatcaggggagacgaagtgagacagatcgcaccaggacagacaggaaagatcgcagactacaattataagctgcctgacgatttcaccggctgcgtgatcgcctggaactccaacaatctggattctaaagtgggcggcaactacaattatctgtacaggctgtttcgcaagtccaatctgaagccattcgagcgggacatctccacagagatctaccaggccggctctaccccctgcaatggcgtggagggctttaactgttatttccctctgcagtcttacggcttccagccaacaaacggcgtgggctatcagccctacagagtggtggtgctgtcctttgagctgctgcacgcaccagcaacagtgtgcggcccaaagaagtctaccaatctggtgaagaacaagtgcgtgaacttcaacttcaacggactgaccggcacaggcgtgctgaccgagagcaataagaagttcctgccttttcagcagttcggcagggacatcgcagataccacagacgccgtgcgcgaccctcagaccctggagatcctggacatcacaccatgcagcttcggcggcgtgtccgtgatcacaccaggcaccaatacatccaaccaggtggccgtgctgtatcaggacgtgaattgtaccgaggtgcccgtggcaatccacgcagatcagctgacccctacatggcgggtgtactctaccggcagcaacgtgttccagacaagagccggatgcctgatcggagcagagcacgtgaacaatagctatgagtgcgacatccctatcggcgccggcatctgtgccagctaccagacccagacaaactccccatctggagcaggctccgtggccagccagtccatcatcgcctataccatgagcctgggcgccgagaacagcgtggcctactccaacaattctatcgccatccctaccaacttcacaatcagcgtgaccacagagatcctgccagtgtctatgaccaagacaagcgtggactgcacaatgtatatctgtggcgatagcaccgagtgctccaacctgctgctgcagtacggctccttttgtacccagctgaatagagccctgacaggcatcgccgtggagcaggataagaacacacaggaggtgttcgcccaggtgaagcagatctacaagaccccacccatcaaggactttggcggcttcaacttcagccagatcctgcctgatccaagcaagccctccaagaggtcttttatcgaggacctgctgttcaacaaggtgaccctggccgatgccggcttcatcaagcagtatggagattgcctgggagacatcgcagcccgcgacctgatctgtgcccagaagtttaatggcctgaccgtgctgcctccactgctgacagatgagatgatcgcccagtacacatctgccctgctggccggcaccatcacaagcggatggaccttcggcgcaggagccgccctgcagatcccttttgccatgcagatggcctataggttcaacggcatcggcgtgacccagaatgtgctgtacgagaaccagaagctgatcgccaatcagtttaacagcgccatcggcaagatccaggactctctgtcctctacagccagcgccctgggcaagctgcaggatgtggtgaatcagaacgcccaggccctgaataccctggtgaagcagctgagctccaacttcggcgccatctctagcgtgctgaatgacatcctgagccggctggacccccctgatgcagaggtgcagatcgacaggctgatcacaggccgcctgcagagcctgcagacctacgtgacacagcagctgatcagggcagcagagatcagagcctccgccaatctggccgccaccaagatgagcgagtgcgtgctgggacagtccaagagggtggacttttgtggcaagggctatcacctgatgtctttcccacagagcgcccctcacggcgtggtgtttctgcacgtgacctacgtgccagcccaggagaagaacttcaccacagcaccagccatctgccacgatggaaaggcacactttcctagggagggcgtgttcgtgtctaacggcacccactggtttgtgacacagcgcaatttctacgagccacagatcatcaccacagacaatacattcgtgagcggcaactgtgatgtggtgatcggcatcgtgaacaataccgtgtatgatccactgcagcccgagctggactcctttaaggaggagctggataagtacttcaagaatcacacctctcccgacgtggatctgggcgacatctccggcatcaatgcctctgtggtgaacatccagaaggagatcgaccggctgaacgaggtggccaagaatctgaacgagagcctgatcgatctgcaggagctgggcaagtatgagcagtacatcaagggctctggcagagagaacctgtatttccagggaggaggaggcagcggatacatccctgaggcaccaagggacggacaggcctacgtgcgcaaggatggcgagtgggtgctgctgtccacctttctgggccatcatcaccaccaccaccaccactga

SEQ ID NO: 5007 - DNA, 3846 bp, Artificial Sequence
  Description of Artificial Sequence: Synthetic polynucleotide
atgggcatcctgccaagcccaggaatgcccgccctgctgtctctggtgagcctgctgtccgtgctgctgatgggatgcgtggcagagacaggcacacagtgcgtgaacctgaccacaaggacccagctgccccctgcctataccaattctttcacacggggcgtgtactatcccgacaaggtgtttagaagctccgtgctgcactccacacaggatctgtttctgcctttcttttctaacgtgacctggttccacgccatccacgtgtccggcaccaatggcacaaagcggttcgacaatcccgtgctgccttttaacgatggcgtgtacttcgccagcaccgagaagtccaacatcatcagaggctggatctttggcaccacactggactctaagacacagagcctgctgatcgtgaacaatgccaccaacgtggtgatcaaggtgtgcgagttccagttttgtaatgatccattcctgggcgtgtactatcacaagaacaataagtcctggatggagtctgagtttcgcgtgtattctagcgccaacaattgcacatttgagtacgtgagccagcccttcctgatggacctggagggcaagcagggcaatttcaagaacctgagggagttcgtgtttaagaatatcgatggctacttcaagatctacagcaagcacaccccaatcaacctggtgcgcgacctgccacagggattctccgccctggagccactggtggatctgcccatcggcatcaacatcacccggtttcagacactgctggccctgcacagatcctacctgacaccaggcgactcctctagcggatggaccgcaggagctgccgcctactatgtgggctatctgcagccccggaccttcctgctgaagtacaacgagaatggcaccatcacagacgcagtggattgcgccctggaccccctgtctgagacaaagtgtacactgaagagctttaccgtggagaagggcatctatcagacaagcaatttcagggtgcagcctaccgagtccatcgtgcgctttcccaatatcacaaacctgtgcccttttggcgaggtgttcaacgccaccagattcgccagcgtgtacgcctggaatcggaagagaatctccaactgcgtggccgactattctgtgctgtacaactccgcctctttcagcacctttaagtgctatggcgtgtctcccacaaagctgaatgatctgtgctttaccaacgtgtacgccgatagcttcgtgatcaggggagacgaagtgagacagatcgcaccaggacagacaggaaagatcgcagactacaattataagctgcctgacgatttcaccggctgcgtgatcgcctggaactccaacaatctggattctaaagtgggcggcaactacaattatctgtacaggctgtttcgcaagtccaatctgaagccattcgagaaagacatctccacagagatctaccaggccggctctaccccctgcaatggcgtggagggctttaactgttatttccctctgcagtcttacggcttccagccaacaaacggcgtgggctatcagccctacagagtggtggtgctgtcctttgagctgctgcacgcaccagcaacagtgtgcggcccaaagaagtctaccaatctggtgaagaacaagtgcgtgaacttcaacttcaacggactgaccggcacaggcgtgctgaccgagagcaataagaagttcctgccttttcagcagttcggcagggacatcgcagataccacagacgccgtgcgcgaccctcagaccctggagatcctggacatcacaccatgcagcttcggcggcgtgtccgtgatcacaccaggcaccaatacatccaaccaggtggccgtgctgtatcaggacgtgaattgtaccgaggtgcccgtggcaatccacgcagatcagctgacccctacatggcgggtgtactctaccggcagcaacgtgttccagacaagagccggatgcctgatcggagcagagcacgtgaacaatagctatgagtgcgacatccctatcggcgccggcatctgtgccagctaccagacccagacaaactccccatctggagcaggctccgtggccagccagtccatcatcgcctataccatgagcctgggcgccgagaacagcgtggcctactccaacaattctatcgccatccctaccaacttcacaatcagcgtgaccacagagatcctgccagtgtctatgaccaagacaagcgtggactgcacaatgtatatctgtggcgatagcaccgagtgctccaacctgctgctgcagtacggctccttttgtacccagctgaatagagccctgacaggcatcgccgtggagcaggataagaacacacaggaggtgttcgcccaggtgaagcagatctacaagaccccacccatcaaggactttggcggcttcaacttcagccagatcctgcctgatccaagcaagccctccaagaggtcttttatcgaggacctgctgttcaacaaggtgaccctggccgatgccggcttcatcaagcagtatggagattgcctgggagacatcgcagcccgcgacctgatctgtgcccagaagtttaatggcctgaccgtgctgcctccactgctgacagatgagatgatcgcccagtacacatctgccctgctggccggcaccatcacaagcggatggaccttcggcgcaggagccgccctgcagatcccttttgccatgcagatggcctataggttcaacggcatcggcgtgacccagaatgtgctgtacgagaaccagaagctgatcgccaatcagtttaacagcgccatcggcaagatccaggactctctgtcctctacagccagcgccctgggcaagctgcaggatgtggtgaatcagaacgcccaggccctgaataccctggtgaagcagctgagctccaacttcggcgccatctctagcgtgctgaatgacatcctgagccggctggacccccctgaggcagaggtgcagatcgacaggctgatcacaggccgcctgcagagcctgcagacctacgtgacacagcagctgatcagggcagcagagatcagagcctccgccaatctggccgccaccaagatgagcgagtgcgtgctgggacagtccaagagggtggacttttgtggcaagggctatcacctgatgtctttcccacagagcgcccctcacggcgtggtgtttctgcacgtgacctacgtgccagcccaggagaagaacttcaccacagcaccagccatctgccacgatggaaaggcacactttcctagggagggcgtgttcgtgtctaacggcacccactggtttgtgacacagcgcaatttctacgagccacagatcatcaccacagacaatacattcgtgagcggcaactgtgatgtggtgatcggcatcgtgaacaataccgtgtatgatccactgcagcccgagctggactcctttaaggaggagctggataagtacttcaagaatcacacctctcccgacgtggatctgggcgacatctccggcatcaatgcctctgtggtgaacatccagaaggagatcgaccggctgaacgaggtggccaagaatctgaacgagagcctgatcgatctgcaggagctgggcaagtatgagcagtacatcaagggctctggcagagagaacctgtatttccagggaggaggaggcagcggatacatccctgaggcaccaagggacggacaggcctacgtgcgcaaggatggcgagtgggtgctgctgtccacctttctgggccatcatcaccaccaccaccaccactga

SEQ ID NO: 5008 - DNA, 3846 bp, Artificial Sequence
  Description of Artificial Sequence: Synthetic polynucleotide
atgggcatcctgccaagcccaggaatgcccgccctgctgtctctggtgagcctgctgtccgtgctgctgatgggatgcgtggcagagacaggcacacagtgcgtgaacctgaccacaaggacccagctgccccctgcctataccaattctttcacacggggcgtgtactatcccgacaaggtgtttagaagctccgtgctgcactccacacaggatctgtttctgcctttcttttctaacgtgacctggttccacgccatccacgtgtccggcaccaatggcacaaagcggttcgacaatcccgtgctgccttttaacgatggcgtgtacttcgccagcaccgagaagtccaacatcatcagaggctggatctttggcaccacactggactctaagacacagagcctgctgatcgtgaacaatgccaccaacgtggtgatcaaggtgtgcgagttccagttttgtaatgatccattcctgggcgtgtactatcacaagaacaataagtcctggatggagtctgagtttcgcgtgtattctagcgccaacaattgcacatttgagtacgtgagccagcccttcctgatggacctggagggcaagcagggcaatttcaagaacctgagggagttcgtgtttaagaatatcgatggctacttcaagatctacagcaagcacaccccaatcaacctggtgcgcgacctgccacagggattctccgccctggagccactggtggatctgcccatcggcatcaacatcacccggtttcagacactgctggccctgcacagatcctacctgacaccaggcgactcctctagcggatggaccgcaggagctgccgcctactatgtgggctatctgcagccccggaccttcctgctgaagtacaacgagaatggcaccatcacagacgcagtggattgcgccctggaccccctgtctgagacaaagtgtacactgaagagctttaccgtggagaagggcatctatcagacaagcaatttcagggtgcagcctaccgagtccatcgtgcgctttcccaatatcacaaacctgtgcccttttggcgaggtgttcaacgccaccagattcgccagcgtgtacgcctggaatcggaagagaatctccaactgcgtggccgactattctgtgctgtacaactccgcctctttcagcacctttaagtgctatggcgtgtctcccacaaagctgaatgatctgtgctttaccaacgtgtacgccgatagcttcgtgatcaggggagacgaagtgagacagatcgcaccaggacagacaggaaagatcgcagactacaattataagctgcctgacgatttcaccggctgcgtgatcgcctggaactccaacaatctggattctaaagtgggcggcaactacaattatctgtacaggctgtttcgcaagtccaatctgaagccattcgagcgggacatctccacagagatctaccaggccggctctaccccctgcactggcgtggagggctttaactgttatttccctctgcagtcttacggcttccagccaacaaacggcgtgggctatcagccctacagagtggtggtgctgtcctttgagctgctgcacgcaccagcaacagtgtgcggcccaaagaagtctaccaatctggtgaagaacaagtgcgtgaacttcaacttcaacggactgaccggcacaggcgtgctgaccgagagcaataagaagttcctgccttttcagcagttcggcagggacatcgcagataccacagacgccgtgcgcgaccctcagaccctggagatcctggacatcacaccatgcagcttcggcggcgtgtccgtgatcacaccaggcaccaatacatccaaccaggtggccgtgctgtatcaggacgtgaattgtaccgaggtgcccgtggcaatccacgcagatcagctgacccctacatggcgggtgtactctaccggcagcaacgtgttccagacaagagccggatgcctgatcggagcagagcacgtgaacaatagctatgagtgcgacatccctatcggcgccggcatctgtgccagctaccagacccagacaaactccccatctggagcaggctccgtggccagccagtccatcatcgcctataccatgagcctgggcgccgagaacagcgtggcctactccaacaattctatcgccatccctaccaacttcacaatcagcgtgaccacagagatcctgccagtgtctatgaccaagacaagcgtggactgcacaatgtatatctgtggcgatagcaccgagtgctccaacctgctgctgcagtacggctccttttgtacccagctgaatagagccctgacaggcatcgccgtggagcaggataagaacacacaggaggtgttcgcccaggtgaagcagatctacaagaccccacccatcaaggactttggcggcttcaacttcagccagatcctgcctgatccaagcaagccctccaagaggtcttttatcgaggacctgctgttcaacaaggtgaccctggccgatgccggcttcatcaagcagtatggagattgcctgggagacatcgcagcccgcgacctgatctgtgcccagaagtttaatggcctgaccgtgctgcctccactgctgacagatgagatgatcgcccagtacacatctgccctgctggccggcaccatcacaagcggatggaccttcggcgcaggagccgccctgcagatcccttttgccatgcagatggcctataggttcaacggcatcggcgtgacccagaatgtgctgtacgagaaccagaagctgatcgccaatcagtttaacagcgccatcggcaagatccaggactctctgtcctctacagccagcgccctgggcaagctgcaggatgtggtgaatcagaacgcccaggccctgaataccctggtgaagcagctgagctccaacttcggcgccatctctagcgtgctgaatgacatcctgagccggctggacccccctgaggcagaggtgcagatcgacaggctgatcacaggccgcctgcagagcctgcagacctacgtgacacagcagctgatcagggcagcagagatcagagcctccgccaatctggccgccaccaagatgagcgagtgcgtgctgggacagtccaagagggtggacttttgtggcaagggctatcacctgatgtctttcccacagagcgcccctcacggcgtggtgtttctgcacgtgacctacgtgccagcccaggagaagaacttcaccacagcaccagccatctgccacgatggaaaggcacactttcctagggagggcgtgttcgtgtctaacggcacccactggtttgtgacacagcgcaatttctacgagccacagatcatcaccacagacaatacattcgtgagcggcaactgtgatgtggtgatcggcatcgtgaacaataccgtgtatgatccactgcagcccgagctggactcctttaaggaggagctggataagtacttcaagaatcacacctctcccgacgtggatctgggcgacatctccggcatcaatgcctctgtggtgaacatccagaaggagatcgaccggctgaacgaggtggccaagaatctgaacgagagcctgatcgatctgcaggagctgggcaagtatgagcagtacatcaagggctctggcagagagaacctgtatttccagggaggaggaggcagcggatacatccctgaggcaccaagggacggacaggcctacgtgcgcaaggatggcgagtgggtgctgctgtccacctttctgggccatcatcaccaccaccaccaccactga

SEQ ID NO: 5009 - DNA, 3846 bp, Artificial Sequence
  Description of Artificial Sequence: Synthetic polynucleotide
atgggcatcctgccaagcccaggaatgcccgccctgctgtctctggtgagcctgctgtccgtgctgctgatgggatgcgtggcagagacaggcacacagtgcgtgaacctgaccacaaggacccagctgccccctgcctataccaattctttcacacggggcgtgtactatcccgacaaggtgtttagaagctccgtgctgcactccacacaggatctgtttctgcctttcttttctaacgtgacctggttccacgccatccacgtgtccggcaccaatggcacaaagcggttcgacaatcccgtgctgccttttaacgatggcgtgtacttcgccagcaccgagaagtccaacatcatcagaggctggatctttggcaccacactggactctaagacacagagcctgctgatcgtgaacaatgccaccaacgtggtgatcaaggtgtgcgagttccagttttgtaatgatccattcctgggcgtgtactatcacaagaacaataagtcctggatggagtctgagtttcgcgtgtattctagcgccaacaattgcacatttgagtacgtgagccagcccttcctgatggacctggagggcaagcagggcaatttcaagaacctgagggagttcgtgtttaagaatatcgatggctacttcaagatctacagcaagcacaccccaatcaacctggtgcgcgacctgccacagggattctccgccctggagccactggtggatctgcccatcggcatcaacatcacccggtttcagacactgctggccctgcacagatcctacctgacaccaggcgactcctctagcggatggaccgcaggagctgccgcctactatgtgggctatctgcagccccggaccttcctgctgaagtacaacgagaatggcaccatcacagacgcagtggattgcgccctggaccccctgtctgagacaaagtgtacactgaagagctttaccgtggagaagggcatctatcagacaagcaatttcagggtgcagcctaccgagtccatcgtgcgctttcccaatatcacaaacctgtgcccttttggcgaggtgttcaacgccaccagattcccgagcgtgtacgcctggaatcggaagagaatctccaactgcgtggccgactattctgtgctgtacaactccgcctctttcagcacctttaagtgctatggcgtgtctcccacaaagctgaatgatctgtgctttaccaacgtgtacgccgatagcttcgtgatcaggggagacgaagtgagacagatcgcaccaggacagacaggaaagatcgcagactacaattataagctgcctgacgatttcaccggctgcgtgatcgcctggaactccaacaatctggattctaaagtgggcggcaactacaattatctgtacaggctgtttcgcaagtccaatctgaagccattcgagcgggacatctccacagagatctaccaggccggctctaccccctgcaatggcgtggagggctttaactgttatttccctctgcagtcttacggcttccagccaacaaacggcgtgggctatcagccctacagagtggtggtgctgtcctttgagctgctgcacgcaccagcaacagtgtgcggcccaaagaagtctaccaatctggtgaagaacaagtgcgtgaacttcaacttcaacggactgaccggcacaggcgtgctgaccgagagcaataagaagttcctgccttttcagcagttcggcagggacatcgcagataccacagacgccgtgcgcgaccctcagaccctggagatcctggacatcacaccatgcagcttcggcggcgtgtccgtgatcacaccaggcaccaatacatccaaccaggtggccgtgctgtatcaggacgtgaattgtaccgaggtgcccgtggcaatccacgcagatcagctgacccctacatggcgggtgtactctaccggcagcaacgtgttccagacaagagccggatgcctgatcggagcagagcacgtgaacaatagctatgagtgcgacatccctatcggcgccggcatctgtgccagctaccagacccagacaaactccccatctggagcaggctccgtggccagccagtccatcatcgcctataccatgagcctgggcgccgagaacagcgtggcctactccaacaattctatcgccatccctaccaacttcacaatcagcgtgaccacagagatcctgccagtgtctatgaccaagacaagcgtggactgcacaatgtatatctgtggcgatagcaccgagtgctccaacctgctgctgcagtacggctccttttgtacccagctgaatagagccctgacaggcatcgccgtggagcaggataagaacacacaggaggtgttcgcccaggtgaagcagatctacaagaccccacccatcaaggactttggcggcttcaacttcagccagatcctgcctgatccaagcaagccctccaagaggtcttttatcgaggacctgctgttcaacaaggtgaccctggccgatgccggcttcatcaagcagtatggagattgcctgggagacatcgcagcccgcgacctgatctgtgcccagaagtttaatggcctgaccgtgctgcctccactgctgacagatgagatgatcgcccagtacacatctgccctgctggccggcaccatcacaagcggatggaccttcggcgcaggagccgccctgcagatcccttttgccatgcagatggcctataggttcaacggcatcggcgtgacccagaatgtgctgtacgagaaccagaagctgatcgccaatcagtttaacagcgccatcggcaagatccaggactctctgtcctctacagccagcgccctgggcaagctgcaggatgtggtgaatcagaacgcccaggccctgaataccctggtgaagcagctgagctccaacttcggcgccatctctagcgtgctgaatgacatcctgagccggctggacccccctgaggcagaggtgcagatcgacaggctgatcacaggccgcctgcagagcctgcagacctacgtgacacagcagctgatcagggcagcagagatcagagcctccgccaatctggccgccaccaagatgagcgagtgcgtgctgggacagtccaagagggtggacttttgtggcaagggctatcacctgatgtctttcccacagagcgcccctcacggcgtggtgtttctgcacgtgacctacgtgccagcccaggagaagaacttcaccacagcaccagccatctgccacgatggaaaggcacactttcctagggagggcgtgttcgtgtctaacggcacccactggtttgtgacacagcgcaatttctacgagccacagatcatcaccacagacaatacattcgtgagcggcaactgtgatgtggtgatcggcatcgtgaacaataccgtgtatgatccactgcagcccgagctggactcctttaaggaggagctggataagtacttcaagaatcacacctctcccgacgtggatctgggcgacatctccggcatcaatgcctctgtggtgaacatccagaaggagatcgaccggctgaacgaggtggccaagaatctgaacgagagcctgatcgatctgcaggagctgggcaagtatgagcagtacatcaagggctctggcagagagaacctgtatttccagggaggaggaggcagcggatacatccctgaggcaccaagggacggacaggcctacgtgcgcaaggatggcgagtgggtgctgctgtccacctttctgggccatcatcaccaccaccaccaccactga

SEQ ID NO: 5010 - DNA, 3846 bp, Artificial Sequence
  Description of Artificial Sequence: Synthetic polynucleotide
atgggcatcctgccaagcccaggaatgcccgccctgctgtctctggtgagcctgctgtccgtgctgctgatgggatgcgtggcagagacaggcacacagtgcgtgaacctgaccacaaggacccagctgccccctgcctataccaattctttcacacggggcgtgtactatcccgacaaggtgtttagaagctccgtgctgcactccacacaggatctgtttctgcctttcttttctaacgtgacctggttccacgccatccacgtgtccggcaccaatggcacaaagcggttcgacaatcccgtgctgccttttaacgatggcgtgtacttcgccagcaccgagaagtccaacatcatcagaggctggatctttggcaccacactggactctaagacacagagcctgctgatcgtgaacaatgccaccaacgtggtgatcaaggtgtgcgagttccagttttgtaatgatccattcctgggcgtgtactatcacaagaacaataagtcctggatggagtctgagtttcgcgtgtattctagcgccaacaattgcacatttgagtacgtgagccagcccttcctgatggacctggagggcaagcagggcaatttcaagaacctgagggagttcgtgtttaagaatatcgatggctacttcaagatctacagcaagcacaccccaatcaacctggtgcgcgacctgccacagggattctccgccctggagccactggtggatctgcccatcggcatcaacatcacccggtttcagacactgctggccctgcacagatcctacctgacaccaggcgactcctctagcggatggaccgcaggagctgccgcctactatgtgggctatctgcagccccggaccttcctgctgaagtacaacgagaatggcaccatcacagacgcagtggattgcgccctggaccccctgtctgagacaaagtgtacactgaagagctttaccgtggagaagggcatctatcagacaagcaatttcagggtgcagcctaccgagtccatcgtgcgctttccccgaatcacaaacctgtgcccttttggcgaggtgttcaacgccaccagattcgccagcgtgtacgcctggaatcggaagagaatctccaactgcgtggccgactattctgtgctgtacaactccgcctctttcagcacctttaagtgctatggcgtgtctcccacaaagctgaatgatctgtgctttaccaacgtgtacgccgatagcttcgtgatcaggggagacgaagtgagacagatcgcaccaggacagacaggaaagatcgcagactacaattataagctgcctgacgatttcaccggctgcgtgatcgcctggaactccaacaatctggattctaaagtgggcggcaactacaattatctgtacaggctgtttcgcaagtccaatctgaagccattcgagcgggacatctccacagagatctaccaggccggctctaccccctgcaatggcgtggagggctttaactgttatttccctctgcagtcttacggcttccagccaacaaacggcgtgggctatcagccctacagagtggtggtgctgtcctttgagctgctgcacgcaccagcaacagtgtgcggcccaaagaagtctaccaatctggtgaagaacaagtgcgtgaacttcaacttcaacggactgaccggcacaggcgtgctgaccgagagcaataagaagttcctgccttttcagcagttcggcagggacatcgcagataccacagacgccgtgcgcgaccctcagaccctggagatcctggacatcacaccatgcagcttcggcggcgtgtccgtgatcacaccaggcaccaatacatccaaccaggtggccgtgctgtatcaggacgtgaattgtaccgaggtgcccgtggcaatccacgcagatcagctgacccctacatggcgggtgtactctaccggcagcaacgtgttccagacaagagccggatgcctgatcggagcagagcacgtgaacaatagctatgagtgcgacatccctatcggcgccggcatctgtgccagctaccagacccagacaaactccccatctggagcaggctccgtggccagccagtccatcatcgcctataccatgagcctgggcgccgagaacagcgtggcctactccaacaattctatcgccatccctaccaacttcacaatcagcgtgaccacagagatcctgccagtgtctatgaccaagacaagcgtggactgcacaatgtatatctgtggcgatagcaccgagtgctccaacctgctgctgcagtacggctccttttgtacccagctgaatagagccctgacaggcatcgccgtggagcaggataagaacacacaggaggtgttcgcccaggtgaagcagatctacaagaccccacccatcaaggactttggcggcttcaacttcagccagatcctgcctgatccaagcaagccctccaagaggtcttttatcgaggacctgctgttcaacaaggtgaccctggccgatgccggcttcatcaagcagtatggagattgcctgggagacatcgcagcccgcgacctgatctgtgcccagaagtttaatggcctgaccgtgctgcctccactgctgacagatgagatgatcgcccagtacacatctgccctgctggccggcaccatcacaagcggatggaccttcggcgcaggagccgccctgcagatcccttttgccatgcagatggcctataggttcaacggcatcggcgtgacccagaatgtgctgtacgagaaccagaagctgatcgccaatcagtttaacagcgccatcggcaagatccaggactctctgtcctctacagccagcgccctgggcaagctgcaggatgtggtgaatcagaacgcccaggccctgaataccctggtgaagcagctgagctccaacttcggcgccatctctagcgtgctgaatgacatcctgagccggctggacccccctgaggcagaggtgcagatcgacaggctgatcacaggccgcctgcagagcctgcagacctacgtgacacagcagctgatcagggcagcagagatcagagcctccgccaatctggccgccaccaagatgagcgagtgcgtgctgggacagtccaagagggtggacttttgtggcaagggctatcacctgatgtctttcccacagagcgcccctcacggcgtggtgtttctgcacgtgacctacgtgccagcccaggagaagaacttcaccacagcaccagccatctgccacgatggaaaggcacactttcctagggagggcgtgttcgtgtctaacggcacccactggtttgtgacacagcgcaatttctacgagccacagatcatcaccacagacaatacattcgtgagcggcaactgtgatgtggtgatcggcatcgtgaacaataccgtgtatgatccactgcagcccgagctggactcctttaaggaggagctggataagtacttcaagaatcacacctctcccgacgtggatctgggcgacatctccggcatcaatgcctctgtggtgaacatccagaaggagatcgaccggctgaacgaggtggccaagaatctgaacgagagcctgatcgatctgcaggagctgggcaagtatgagcagtacatcaagggctctggcagagagaacctgtatttccagggaggaggaggcagcggatacatccctgaggcaccaagggacggacaggcctacgtgcgcaaggatggcgagtgggtgctgctgtccacctttctgggccatcatcaccaccaccaccaccactga

SEQ ID NO: 5011 - DNA, 3846 bp, Artificial Sequence
  Description of Artificial Sequence: Synthetic polynucleotide
atgggcatcctgccaagcccaggaatgcccgccctgctgtctctggtgagcctgctgtccgtgctgctgatgggatgcgtggcagagacaggcacacagtgcgtgaacctgaccacaaggacccagctgccccctgcctataccaattctttcacacggggcgtgtactatcccgacaaggtgtttagaagctccgtgctgcactccacacaggatctgtttctgcctttcttttctaacgtgacctggttccacgccatccacgtgtccggcaccaatggcacaaagcggttcgacaatcccgtgctgccttttaacgatggcgtgtacttcgccagcaccgagaagtccaacatcatcagaggctggatctttggcaccacactggactctaagacacagagcctgctgatcgtgaacaatgccaccaacgtggtgatcaaggtgtgcgagttccagttttgtaatgatccattcctgggcgtgtactatcacaagaacaataagtcctggatggagtctgagtttcgcgtgtattctagcgccaacaattgcacatttgagtacgtgagccagcccttcctgatggacctggagggcaagcagggcaatttcaagaacctgagggagttcgtgtttaagaatatcgatggctacttcaagatctacagcaagcacaccccaatcaacctggtgcgcgacctgccacagggattctccgccctggagccactggtggatctgcccatcggcatcaacatcacccggtttcagacactgctggccctgcacagatcctacctgacaccaggcgactcctctagcggatggaccgcaggagctgccgcctactatgtgggctatctgcagccccggaccttcctgctgaagtacaacgagaatggcaccatcacagacgcagtggattgcgccctggaccccctgtctgagacaaagtgtacactgaagagctttaccgtggagaagggcatctatcagacaagcaatttcagggtgcagcctaccgagtccatcgtgcgctttcccaatatcacaaacctgtgcccttttggcgaggtgttcaacgccaccagattcgccagcgtgtacgcctggaatcggaagagaatctccaactgcgtggccgactattctgtgctgtacaactccgcctctttcagcacctttaagtgctatggcgtgtctcccacaaagctgaatgatctgtgctttaccaacgtgtacgccgatagcttcgtgatcaggggagacgaagtgagacagatcgcaccaggacagacaggaaagatcgcagactacaattataagctgcctgacgatttcaccggctgcgtgatcgcctggaactccaacaatctggattctaaagtgggcggcaactacaattatctgtacaggctgtttcgcaagtccaatctgaagccattcgagcgggacatctcctgggagatctaccaggccggctctaccccctgcaatggcgtggagggctttaactgttatttccctctgcagtcttacggcttccagccaacaaacggcgtgggctatcagccctacagagtggtggtgctgtcctttgagctgctgcacgcaccagcaacagtgtgcggcccaaagaagtctaccaatctggtgaagaacaagtgcgtgaacttcaacttcaacggactgaccggcacaggcgtgctgaccgagagcaataagaagttcctgccttttcagcagttcggcagggacatcgcagataccacagacgccgtgcgcgaccctcagaccctggagatcctggacatcacaccatgcagcttcggcggcgtgtccgtgatcacaccaggcaccaatacatccaaccaggtggccgtgctgtatcaggacgtgaattgtaccgaggtgcccgtggcaatccacgcagatcagctgacccctacatggcgggtgtactctaccggcagcaacgtgttccagacaagagccggatgcctgatcggagcagagcacgtgaacaatagctatgagtgcgacatccctatcggcgccggcatctgtgccagctaccagacccagacaaactccccatctggagcaggctccgtggccagccagtccatcatcgcctataccatgagcctgggcgccgagaacagcgtggcctactccaacaattctatcgccatccctaccaacttcacaatcagcgtgaccacagagatcctgccagtgtctatgaccaagacaagcgtggactgcacaatgtatatctgtggcgatagcaccgagtgctccaacctgctgctgcagtacggctccttttgtacccagctgaatagagccctgacaggcatcgccgtggagcaggataagaacacacaggaggtgttcgcccaggtgaagcagatctacaagaccccacccatcaaggactttggcggcttcaacttcagccagatcctgcctgatccaagcaagccctccaagaggtcttttatcgaggacctgctgttcaacaaggtgaccctggccgatgccggcttcatcaagcagtatggagattgcctgggagacatcgcagcccgcgacctgatctgtgcccagaagtttaatggcctgaccgtgctgcctccactgctgacagatgagatgatcgcccagtacacatctgccctgctggccggcaccatcacaagcggatggaccttcggcgcaggagccgccctgcagatcccttttgccatgcagatggcctataggttcaacggcatcggcgtgacccagaatgtgctgtacgagaaccagaagctgatcgccaatcagtttaacagcgccatcggcaagatccaggactctctgtcctctacagccagcgccctgggcaagctgcaggatgtggtgaatcagaacgcccaggccctgaataccctggtgaagcagctgagctccaacttcggcgccatctctagcgtgctgaatgacatcctgagccggctggacccccctgaggcagaggtgcagatcgacaggctgatcacaggccgcctgcagagcctgcagacctacgtgacacagcagctgatcagggcagcagagatcagagcctccgccaatctggccgccaccaagatgagcgagtgcgtgctgggacagtccaagagggtggacttttgtggcaagggctatcacctgatgtctttcccacagagcgcccctcacggcgtggtgtttctgcacgtgacctacgtgccagcccaggagaagaacttcaccacagcaccagccatctgccacgatggaaaggcacactttcctagggagggcgtgttcgtgtctaacggcacccactggtttgtgacacagcgcaatttctacgagccacagatcatcaccacagacaatacattcgtgagcggcaactgtgatgtggtgatcggcatcgtgaacaataccgtgtatgatccactgcagcccgagctggactcctttaaggaggagctggataagtacttcaagaatcacacctctcccgacgtggatctgggcgacatctccggcatcaatgcctctgtggtgaacatccagaaggagatcgaccggctgaacgaggtggccaagaatctgaacgagagcctgatcgatctgcaggagctgggcaagtatgagcagtacatcaagggctctggcagagagaacctgtatttccagggaggaggaggcagcggatacatccctgaggcaccaagggacggacaggcctacgtgcgcaaggatggcgagtgggtgctgctgtccacctttctgggccatcatcaccaccaccaccaccactga

SEQ ID NO: 5012 - DNA, 3846 bp, Artificial Sequence
  Description of Artificial Sequence: Synthetic polynucleotide
atgggcatcctgccaagcccaggaatgcccgccctgctgtctctggtgagcctgctgtccgtgctgctgatgggatgcgtggcagagacaggcacacagtgcgtgaacctgaccacaaggacccagctgccccctgcctataccaattctttcacacggggcgtgtactatcccgacaaggtgtttagaagctccgtgctgcactccacacaggatctgtttctgcctttcttttctaacgtgacctggttccacgccatccacgtgtccggcaccaatggcacaaagcggttcgacaatcccgtgctgccttttaacgatggcgtgtacttcgccagcaccgagaagtccaacatcatcagaggctggatctttggcaccacactggactctaagacacagagcctgctgatcgtgaacaatgccaccaacgtggtgatcaaggtgtgcgagttccagttttgtaatgatccattcctgggcgtgtactatcacaagaacaataagtcctggatggagtctgagtttcgcgtgtattctagcgccaacaattgcacatttgagtacgtgagccagcccttcctgatggacctggagggcaagcagggcaatttcaagaacctgagggagttcgtgtttaagaatatcgatggctacttcaagatctacagcaagcacaccccaatcaacctggtgcgcgacctgccacagggattctccgccctggagccactggtggatctgcccatcggcatcaacatcacccggtttcagacactgctggccctgcacagatcctacctgacaccaggcgactcctctagcggatggaccgcaggagctgccgcctactatgtgggctatctgcagccccggaccttcctgctgaagtacaacgagaatggcaccatcacagacgcagtggattgcgccctggaccccctgtctgagacaaagtgtacactgaagagctttaccgtggagaagggcatctatcagacaagcaatttcagggtgcagcctaccgagtccatcgtgcgctttcccaatatcacaaacctgtgcccttttggcgaggtgttcaacgccaccagattcgccagcgtgtacgcctggaatcggaagagaatctccaactgcgtggccgactattctgtgctgtacaactccgattctttcagcacctttaagtgctatggcgtgtctcccacaaagctgaatgatctgtgctttaccaacgtgtacgccgatagcttcgtgatcaggggagacgaagtgagacagatcgcaccaggacagacaggaaagatcgcagactacaattataagctgcctgacgatttcaccggctgcgtgatcgcctggaactccaacaatctggattctaaagtgggcggcaactacaattatctgtacaggctgtttcgcaagtccaatctgaagccattcgagcgggacatctccacagagatctaccaggccggctctaccccctgcaatggcgtggagggctttaactgttatttccctctgcagtcttacggcttccagccaacaaacggcgtgggctatcagccctacagagtggtggtgctgtcctttgagctgctgcacgcaccagcaacagtgtgcggcccaaagaagtctaccaatctggtgaagaacaagtgcgtgaacttcaacttcaacggactgaccggcacaggcgtgctgaccgagagcaataagaagttcctgccttttcagcagttcggcagggacatcgcagataccacagacgccgtgcgcgaccctcagaccctggagatcctggacatcacaccatgcagcttcggcggcgtgtccgtgatcacaccaggcaccaatacatccaaccaggtggccgtgctgtatcaggacgtgaattgtaccgaggtgcccgtggcaatccacgcagatcagctgacccctacatggcgggtgtactctaccggcagcaacgtgttccagacaagagccggatgcctgatcggagcagagcacgtgaacaatagctatgagtgcgacatccctatcggcgccggcatctgtgccagctaccagacccagacaaactccccatctggagcaggctccgtggccagccagtccatcatcgcctataccatgagcctgggcgccgagaacagcgtggcctactccaacaattctatcgccatccctaccaacttcacaatcagcgtgaccacagagatcctgccagtgtctatgaccaagacaagcgtggactgcacaatgtatatctgtggcgatagcaccgagtgctccaacctgctgctgcagtacggctccttttgtacccagctgaatagagccctgacaggcatcgccgtggagcaggataagaacacacaggaggtgttcgcccaggtgaagcagatctacaagaccccacccatcaaggactttggcggcttcaacttcagccagatcctgcctgatccaagcaagccctccaagaggtcttttatcgaggacctgctgttcaacaaggtgaccctggccgatgccggcttcatcaagcagtatggagattgcctgggagacatcgcagcccgcgacctgatctgtgcccagaagtttaatggcctgaccgtgctgcctccactgctgacagatgagatgatcgcccagtacacatctgccctgctggccggcaccatcacaagcggatggaccttcggcgcaggagccgccctgcagatcccttttgccatgcagatggcctataggttcaacggcatcggcgtgacccagaatgtgctgtacgagaaccagaagctgatcgccaatcagtttaacagcgccatcggcaagatccaggactctctgtcctctacagccagcgccctgggcaagctgcaggatgtggtgaatcagaacgcccaggccctgaataccctggtgaagcagctgagctccaacttcggcgccatctctagcgtgctgaatgacatcctgagccggctggacccccctgaggcagaggtgcagatcgacaggctgatcacaggccgcctgcagagcctgcagacctacgtgacacagcagctgatcagggcagcagagatcagagcctccgccaatctggccgccaccaagatgagcgagtgcgtgctgggacagtccaagagggtggacttttgtggcaagggctatcacctgatgtctttcccacagagcgcccctcacggcgtggtgtttctgcacgtgacctacgtgccagcccaggagaagaacttcaccacagcaccagccatctgccacgatggaaaggcacactttcctagggagggcgtgttcgtgtctaacggcacccactggtttgtgacacagcgcaatttctacgagccacagatcatcaccacagacaatacattcgtgagcggcaactgtgatgtggtgatcggcatcgtgaacaataccgtgtatgatccactgcagcccgagctggactcctttaaggaggagctggataagtacttcaagaatcacacctctcccgacgtggatctgggcgacatctccggcatcaatgcctctgtggtgaacatccagaaggagatcgaccggctgaacgaggtggccaagaatctgaacgagagcctgatcgatctgcaggagctgggcaagtatgagcagtacatcaagggctctggcagagagaacctgtatttccagggaggaggaggcagcggatacatccctgaggcaccaagggacggacaggcctacgtgcgcaaggatggcgagtgggtgctgctgtccacctttctgggccatcatcaccaccaccaccaccactga

SEQ ID NO: 5013 - DNA, 3846 bp, Artificial Sequence
  Description of Artificial Sequence: Synthetic polynucleotide
atgggcatcctgccaagcccaggaatgcccgccctgctgtctctggtgagcctgctgtccgtgctgctgatgggatgcgtggcagagacaggcacacagtgcgtgaacctgaccacaaggacccagctgccccctgcctataccaattctttcacacggggcgtgtactatcccgacaaggtgtttagaagctccgtgctgcactccacacaggatctgtttctgcctttcttttctaacgtgacctggttccacgccatccacgtgtccggcaccaatggcacaaagcggttcgacaatcccgtgctgccttttaacgatggcgtgtacttcgccagcaccgagaagtccaacatcatcagaggctggatctttggcaccacactggactctaagacacagagcctgctgatcgtgaacaatgccaccaacgtggtgatcaaggtgtgcgagttccagttttgtaatgatccattcctgggcgtgtactatcacaagaacaataagtcctggatggagtctgagtttcgcgtgtattctagcgccaacaattgcacatttgagtacgtgagccagcccttcctgatggacctggagggcaagcagggcaatttcaagaacctgagggagttcgtgtttaagaatatcgatggctacttcaagatctacagcaagcacaccccaatcaacctggtgcgcgacctgccacagggattctccgccctggagccactggtggatctgcccatcggcatcaacatcacccggtttcagacactgctggccctgcacagatcctacctgacaccaggcgactcctctagcggatggaccgcaggagctgccgcctactatgtgggctatctgcagccccggaccttcctgctgaagtacaacgagaatggcaccatcacagacgcagtggattgcgccctggaccccctgtctgagacaaagtgtacactgaagagctttaccgtggagaagggcatctatcagacaagcaatttcagggtgcagcctaccgagtccatcgtgcgctttcccaatatcacaaacctgtgcccttttggcgaggtgttcaacgccaccagattcgccagcgtgtacgcctggaatcggaagagaatctccaactgcgtggccgactattctgtgctgtacaactccgcctctttcagcacctttaagtgctatggcgtgtctcccacaaagctgaatgatctgtgctttaccaacgtgtacgccgatagcttcgtgatcaggggagacgaagtgagacagatcgcaccaggacagacaggaaagatcgcagactacaattataagctgcctgacgatttcaccggctgcgtgatcgcctggaactccaacaatctggattctaaagtgggcggcaactacaattatctgtacaggctgtttcgcaagtccaatctgaagccattcgagcgggacatctccacagagatctaccaggccggctctacccccactaatggcgtggagggctttaactgttatttccctctgcagtcttacggcttccagccaacaaacggcgtgggctatcagccctacagagtggtggtgctgtcctttgagctgctgcacgcaccagcaacagtgtgcggcccaaagaagtctaccaatctggtgaagaacaagtgcgtgaacttcaacttcaacggactgaccggcacaggcgtgctgaccgagagcaataagaagttcctgccttttcagcagttcggcagggacatcgcagataccacagacgccgtgcgcgaccctcagaccctggagatcctggacatcacaccatgcagcttcggcggcgtgtccgtgatcacaccaggcaccaatacatccaaccaggtggccgtgctgtatcaggacgtgaattgtaccgaggtgcccgtggcaatccacgcagatcagctgacccctacatggcgggtgtactctaccggcagcaacgtgttccagacaagagccggatgcctgatcggagcagagcacgtgaacaatagctatgagtgcgacatccctatcggcgccggcatctgtgccagctaccagacccagacaaactccccatctggagcaggctccgtggccagccagtccatcatcgcctataccatgagcctgggcgccgagaacagcgtggcctactccaacaattctatcgccatccctaccaacttcacaatcagcgtgaccacagagatcctgccagtgtctatgaccaagacaagcgtggactgcacaatgtatatctgtggcgatagcaccgagtgctccaacctgctgctgcagtacggctccttttgtacccagctgaatagagccctgacaggcatcgccgtggagcaggataagaacacacaggaggtgttcgcccaggtgaagcagatctacaagaccccacccatcaaggactttggcggcttcaacttcagccagatcctgcctgatccaagcaagccctccaagaggtcttttatcgaggacctgctgttcaacaaggtgaccctggccgatgccggcttcatcaagcagtatggagattgcctgggagacatcgcagcccgcgacctgatctgtgcccagaagtttaatggcctgaccgtgctgcctccactgctgacagatgagatgatcgcccagtacacatctgccctgctggccggcaccatcacaagcggatggaccttcggcgcaggagccgccctgcagatcccttttgccatgcagatggcctataggttcaacggcatcggcgtgacccagaatgtgctgtacgagaaccagaagctgatcgccaatcagtttaacagcgccatcggcaagatccaggactctctgtcctctacagccagcgccctgggcaagctgcaggatgtggtgaatcagaacgcccaggccctgaataccctggtgaagcagctgagctccaacttcggcgccatctctagcgtgctgaatgacatcctgagccggctggacccccctgaggcagaggtgcagatcgacaggctgatcacaggccgcctgcagagcctgcagacctacgtgacacagcagctgatcagggcagcagagatcagagcctccgccaatctggccgccaccaagatgagcgagtgcgtgctgggacagtccaagagggtggacttttgtggcaagggctatcacctgatgtctttcccacagagcgcccctcacggcgtggtgtttctgcacgtgacctacgtgccagcccaggagaagaacttcaccacagcaccagccatctgccacgatggaaaggcacactttcctagggagggcgtgttcgtgtctaacggcacccactggtttgtgacacagcgcaatttctacgagccacagatcatcaccacagacaatacattcgtgagcggcaactgtgatgtggtgatcggcatcgtgaacaataccgtgtatgatccactgcagcccgagctggactcctttaaggaggagctggataagtacttcaagaatcacacctctcccgacgtggatctgggcgacatctccggcatcaatgcctctgtggtgaacatccagaaggagatcgaccggctgaacgaggtggccaagaatctgaacgagagcctgatcgatctgcaggagctgggcaagtatgagcagtacatcaagggctctggcagagagaacctgtatttccagggaggaggaggcagcggatacatccctgaggcaccaagggacggacaggcctacgtgcgcaaggatggcgagtgggtgctgctgtccacctttctgggccatcatcaccaccaccaccaccactga

SEQ ID NO: 5014 - DNA, 3846 bp, Artificial Sequence
  Description of Artificial Sequence: Synthetic polynucleotide
atgggcatcctgccaagcccaggaatgcccgccctgctgtctctggtgagcctgctgtccgtgctgctgatgggatgcgtggcagagacaggcacacagtgcgtgaacctgaccacaaggacccagctgccccctgcctataccaattctttcacacggggcgtgtactatcccgacaaggtgtttagaagctccgtgctgcactccacacaggatctgtttctgcctttcttttctaacgtgacctggttccacgccatccacgtgtccggcaccaatggcacaaagcggttcgacaatcccgtgctgccttttaacgatggcgtgtacttcgccagcaccgagaagtccaacatcatcagaggctggatctttggcaccacactggactctaagacacagagcctgctgatcgtgaacaatgccaccaacgtggtgatcaaggtgtgcgagttccagttttgtaatgatccattcctgggcgtgtactatcacaagaacaataagtcctggatggagtctgagtttcgcgtgtattctagcgccaacaattgcacatttgagtacgtgagccagcccttcctgatggacctggagggcaagcagggcaatttcaagaacctgagggagttcgtgtttaagaatatcgatggctacttcaagatctacagcaagcacaccccaatcaacctggtgcgcgacctgccacagggattctccgccctggagccactggtggatctgcccatcggcatcaacatcacccggtttcagacactgctggccctgcacagatcctacctgacaccaggcgactcctctagcggatggaccgcaggagctgccgcctactatgtgggctatctgcagccccggaccttcctgctgaagtacaacgagaatggcaccatcacagacgcagtggattgcgccctggaccccctgtctgagacaaagtgtacactgaagagctttaccgtggagaagggcatctatcagacaagcaatttcagggtgcagcctaccgagtccatcgtgcgctttcccaatatcacaaacctgtgcccttttggcgaggtgttcaacgccaccagattcgccagcgtgtacgcctggaatcggaagagaatctccaactgcgtggccgactattctgtgctgtacaactccgcctctttcagcacctttaagtgctatggcgtgtctcccacaaagctgaatgatctgtgctttaccaacgtgtacgccgatagcttcgtgatcaggggagacgaagtgagacagatcgcaccaggacagacaggaaagatcgcagactacaattataagctgcctgacgatttcaccggctgcgtgatcgcctggaactccaacaatctggattctaaagtgggcggcaactacaattatctgtacaggctgtttcgcaagtccaatctgaagccattcgagcgggacatcgctacagagatctaccaggccggctctaccccctgcaatggcgtggagggctttaactgttatttccctctgcagtcttacggcttccagccaacaaacggcgtgggctatcagccctacagagtggtggtgctgtcctttgagctgctgcacgcaccagcaacagtgtgcggcccaaagaagtctaccaatctggtgaagaacaagtgcgtgaacttcaacttcaacggactgaccggcacaggcgtgctgaccgagagcaataagaagttcctgccttttcagcagttcggcagggacatcgcagataccacagacgccgtgcgcgaccctcagaccctggagatcctggacatcacaccatgcagcttcggcggcgtgtccgtgatcacaccaggcaccaatacatccaaccaggtggccgtgctgtatcaggacgtgaattgtaccgaggtgcccgtggcaatccacgcagatcagctgacccctacatggcgggtgtactctaccggcagcaacgtgttccagacaagagccggatgcctgatcggagcagagcacgtgaacaatagctatgagtgcgacatccctatcggcgccggcatctgtgccagctaccagacccagacaaactccccatctggagcaggctccgtggccagccagtccatcatcgcctataccatgagcctgggcgccgagaacagcgtggcctactccaacaattctatcgccatccctaccaacttcacaatcagcgtgaccacagagatcctgccagtgtctatgaccaagacaagcgtggactgcacaatgtatatctgtggcgatagcaccgagtgctccaacctgctgctgcagtacggctccttttgtacccagctgaatagagccctgacaggcatcgccgtggagcaggataagaacacacaggaggtgttcgcccaggtgaagcagatctacaagaccccacccatcaaggactttggcggcttcaacttcagccagatcctgcctgatccaagcaagccctccaagaggtcttttatcgaggacctgctgttcaacaaggtgaccctggccgatgccggcttcatcaagcagtatggagattgcctgggagacatcgcagcccgcgacctgatctgtgcccagaagtttaatggcctgaccgtgctgcctccactgctgacagatgagatgatcgcccagtacacatctgccctgctggccggcaccatcacaagcggatggaccttcggcgcaggagccgccctgcagatcccttttgccatgcagatggcctataggttcaacggcatcggcgtgacccagaatgtgctgtacgagaaccagaagctgatcgccaatcagtttaacagcgccatcggcaagatccaggactctctgtcctctacagccagcgccctgggcaagctgcaggatgtggtgaatcagaacgcccaggccctgaataccctggtgaagcagctgagctccaacttcggcgccatctctagcgtgctgaatgacatcctgagccggctggacccccctgaggcagaggtgcagatcgacaggctgatcacaggccgcctgcagagcctgcagacctacgtgacacagcagctgatcagggcagcagagatcagagcctccgccaatctggccgccaccaagatgagcgagtgcgtgctgggacagtccaagagggtggacttttgtggcaagggctatcacctgatgtctttcccacagagcgcccctcacggcgtggtgtttctgcacgtgacctacgtgccagcccaggagaagaacttcaccacagcaccagccatctgccacgatggaaaggcacactttcctagggagggcgtgttcgtgtctaacggcacccactggtttgtgacacagcgcaatttctacgagccacagatcatcaccacagacaatacattcgtgagcggcaactgtgatgtggtgatcggcatcgtgaacaataccgtgtatgatccactgcagcccgagctggactcctttaaggaggagctggataagtacttcaagaatcacacctctcccgacgtggatctgggcgacatctccggcatcaatgcctctgtggtgaacatccagaaggagatcgaccggctgaacgaggtggccaagaatctgaacgagagcctgatcgatctgcaggagctgggcaagtatgagcagtacatcaagggctctggcagagagaacctgtatttccagggaggaggaggcagcggatacatccctgaggcaccaagggacggacaggcctacgtgcgcaaggatggcgagtgggtgctgctgtccacctttctgggccatcatcaccaccaccaccaccactga

SEQ ID NO: 5015 - DNA, 3846 bp, Artificial Sequence
  Description of Artificial Sequence: Synthetic polynucleotide
atgggcatcctgccaagcccaggaatgcccgccctgctgtctctggtgagcctgctgtccgtgctgctgatgggatgcgtggcagagacaggcacacagtgcgtgaacctgaccacaaggacccagctgccccctgcctataccaattctttcacacggggcgtgtactatcccgacaaggtgtttagaagctccgtgctgcactccacacaggatctgtttctgcctttcttttctaacgtgacctggttccacgccatccacgtgtccggcaccaatggcacaaagcggttcgacaatcccgtgctgccttttaacgatggcgtgtacttcgccagcaccgagaagtccaacatcatcagaggctggatctttggcaccacactggactctaagacacagagcctgctgatcgtgaacaatgccaccaacgtggtgatcaaggtgtgcgagttccagttttgtaatgatccattcctgggcgtgtactatcacaagaacaataagtcctggatggagtctgagtttcgcgtgtattctagcgccaacaattgcacatttgagtacgtgagccagcccttcctgatggacctggagggcaagcagggcaatttcaagaacctgagggagttcgtgtttaagaatatcgatggctacttcaagatctacagcaagcacaccccaatcaacctggtgcgcgacctgccacagggattctccgccctggagccactggtggatctgcccatcggcatcaacatcacccggtttcagacactgctggccctgcacagatcctacctgacaccaggcgactcctctagcggatggaccgcaggagctgccgcctactatgtgggctatctgcagccccggaccttcctgctgaagtacaacgagaatggcaccatcacagacgcagtggattgcgccctggaccccctgtctgagacaaagtgtacactgaagagctttaccgtggagaagggcatctatcagacaagcaatttcagggtgcagcctaccgagtccatcgtgcgctttcccaatatcacaaacctgtgcccttttggcgaggtgttcaacgccaccagattcgccagcgtgtacgcctggaatcggaagagaatctccaactgcgtggccgactattctgtgctgtacaactccgcctctttcagcacctttaagtgctatggcgtgtctcccacaaagctgaatgatctgtgctttaccaacgtgtacgccgatagcttcgtgatcaggggagacgaagtgagacagatcgcaccaggacagacaggagtaatcgcagactacaattataagctgcctgacgatttcaccggctgcgtgatcgcctggaactccaacaatctggattctaaagtgggcggcaactacaattatctgtacaggctgtttcgcaagtccaatctgaagccattcgagcgggacatctccacagagatctaccaggccggctctaccccctgcaatggcgtggagggctttaactgttatttccctctgcagtcttacggcttccagccaacaaacggcgtgggctatcagccctacagagtggtggtgctgtcctttgagctgctgcacgcaccagcaacagtgtgcggcccaaagaagtctaccaatctggtgaagaacaagtgcgtgaacttcaacttcaacggactgaccggcacaggcgtgctgaccgagagcaataagaagttcctgccttttcagcagttcggcagggacatcgcagataccacagacgccgtgcgcgaccctcagaccctggagatcctggacatcacaccatgcagcttcggcggcgtgtccgtgatcacaccaggcaccaatacatccaaccaggtggccgtgctgtatcaggacgtgaattgtaccgaggtgcccgtggcaatccacgcagatcagctgacccctacatggcgggtgtactctaccggcagcaacgtgttccagacaagagccggatgcctgatcggagcagagcacgtgaacaatagctatgagtgcgacatccctatcggcgccggcatctgtgccagctaccagacccagacaaactccccatctggagcaggctccgtggccagccagtccatcatcgcctataccatgagcctgggcgccgagaacagcgtggcctactccaacaattctatcgccatccctaccaacttcacaatcagcgtgaccacagagatcctgccagtgtctatgaccaagacaagcgtggactgcacaatgtatatctgtggcgatagcaccgagtgctccaacctgctgctgcagtacggctccttttgtacccagctgaatagagccctgacaggcatcgccgtggagcaggataagaacacacaggaggtgttcgcccaggtgaagcagatctacaagaccccacccatcaaggactttggcggcttcaacttcagccagatcctgcctgatccaagcaagccctccaagaggtcttttatcgaggacctgctgttcaacaaggtgaccctggccgatgccggcttcatcaagcagtatggagattgcctgggagacatcgcagcccgcgacctgatctgtgcccagaagtttaatggcctgaccgtgctgcctccactgctgacagatgagatgatcgcccagtacacatctgccctgctggccggcaccatcacaagcggatggaccttcggcgcaggagccgccctgcagatcccttttgccatgcagatggcctataggttcaacggcatcggcgtgacccagaatgtgctgtacgagaaccagaagctgatcgccaatcagtttaacagcgccatcggcaagatccaggactctctgtcctctacagccagcgccctgggcaagctgcaggatgtggtgaatcagaacgcccaggccctgaataccctggtgaagcagctgagctccaacttcggcgccatctctagcgtgctgaatgacatcctgagccggctggacccccctgaggcagaggtgcagatcgacaggctgatcacaggccgcctgcagagcctgcagacctacgtgacacagcagctgatcagggcagcagagatcagagcctccgccaatctggccgccaccaagatgagcgagtgcgtgctgggacagtccaagagggtggacttttgtggcaagggctatcacctgatgtctttcccacagagcgcccctcacggcgtggtgtttctgcacgtgacctacgtgccagcccaggagaagaacttcaccacagcaccagccatctgccacgatggaaaggcacactttcctagggagggcgtgttcgtgtctaacggcacccactggtttgtgacacagcgcaatttctacgagccacagatcatcaccacagacaatacattcgtgagcggcaactgtgatgtggtgatcggcatcgtgaacaataccgtgtatgatccactgcagcccgagctggactcctttaaggaggagctggataagtacttcaagaatcacacctctcccgacgtggatctgggcgacatctccggcatcaatgcctctgtggtgaacatccagaaggagatcgaccggctgaacgaggtggccaagaatctgaacgagagcctgatcgatctgcaggagctgggcaagtatgagcagtacatcaagggctctggcagagagaacctgtatttccagggaggaggaggcagcggatacatccctgaggcaccaagggacggacaggcctacgtgcgcaaggatggcgagtgggtgctgctgtccacctttctgggccatcatcaccaccaccaccaccactga

SEQ ID NO: 5016 - DNA, 3846 bp, Artificial Sequence
  Description of Artificial Sequence: Synthetic polynucleotide
atgggcatcctgccaagcccaggaatgcccgccctgctgtctctggtgagcctgctgtccgtgctgctgatgggatgcgtggcagagacaggcacacagtgcgtgaacctgaccacaaggacccagctgccccctgcctataccaattctttcacacggggcgtgtactatcccgacaaggtgtttagaagctccgtgctgcactccacacaggatctgtttctgcctttcttttctaacgtgacctggttccacgccatccacgtgtccggcaccaatggcacaaagcggttcgacaatcccgtgctgccttttaacgatggcgtgtacttcgccagcaccgagaagtccaacatcatcagaggctggatctttggcaccacactggactctaagacacagagcctgctgatcgtgaacaatgccaccaacgtggtgatcaaggtgtgcgagttccagttttgtaatgatccattcctgggcgtgtactatcacaagaacaataagtcctggatggagtctgagtttcgcgtgtattctagcgccaacaattgcacatttgagtacgtgagccagcccttcctgatggacctggagggcaagcagggcaatttcaagaacctgagggagttcgtgtttaagaatatcgatggctacttcaagatctacagcaagcacaccccaatcaacctggtgcgcgacctgccacagggattctccgccctggagccactggtggatctgcccatcggcatcaacatcacccggtttcagacactgctggccctgcacagatcctacctgacaccaggcgactcctctagcggatggaccgcaggagctgccgcctactatgtgggctatctgcagccccggaccttcctgctgaagtacaacgagaatggcaccatcacagacgcagtggattgcgccctggaccccctgtctgagacaaagtgtacactgaagagctttaccgtggagaagggcatctatcagacaagcaatttcagggtgcagcctaccgagtccatcgtgcgctttcccaatatcacaaacctgtgcccttttggcgaggtgttcaacgccaccagattcgggagcgtgtacgcctggaatcggaagagaatctccaactgcgtggccgactattctgtgctgtacaactccgcctctttcagcacctttaagtgctatggcgtgtctcccacaaagctgaatgatctgtgctttaccaacgtgtacgccgatagcttcgtgatcaggggagacgaagtgagacagatcgcaccaggacagacaggaaagatcgcagactacaattataagctgcctgacgatttcaccggctgcgtgatcgcctggaactccaacaatctggattctaaagtgggcggcaactacaattatctgtacaggctgtttcgcaagtccaatctgaagccattcgagcgggacatctccacagagatctaccaggccggctctaccccctgcaatggcgtggagggctttaactgttatttccctctgcagtcttacggcttccagccaacaaacggcgtgggctatcagccctacagagtggtggtgctgtcctttgagctgctgcacgcaccagcaacagtgtgcggcccaaagaagtctaccaatctggtgaagaacaagtgcgtgaacttcaacttcaacggactgaccggcacaggcgtgctgaccgagagcaataagaagttcctgccttttcagcagttcggcagggacatcgcagataccacagacgccgtgcgcgaccctcagaccctggagatcctggacatcacaccatgcagcttcggcggcgtgtccgtgatcacaccaggcaccaatacatccaaccaggtggccgtgctgtatcaggacgtgaattgtaccgaggtgcccgtggcaatccacgcagatcagctgacccctacatggcgggtgtactctaccggcagcaacgtgttccagacaagagccggatgcctgatcggagcagagcacgtgaacaatagctatgagtgcgacatccctatcggcgccggcatctgtgccagctaccagacccagacaaactccccatctggagcaggctccgtggccagccagtccatcatcgcctataccatgagcctgggcgccgagaacagcgtggcctactccaacaattctatcgccatccctaccaacttcacaatcagcgtgaccacagagatcctgccagtgtctatgaccaagacaagcgtggactgcacaatgtatatctgtggcgatagcaccgagtgctccaacctgctgctgcagtacggctccttttgtacccagctgaatagagccctgacaggcatcgccgtggagcaggataagaacacacaggaggtgttcgcccaggtgaagcagatctacaagaccccacccatcaaggactttggcggcttcaacttcagccagatcctgcctgatccaagcaagccctccaagaggtcttttatcgaggacctgctgttcaacaaggtgaccctggccgatgccggcttcatcaagcagtatggagattgcctgggagacatcgcagcccgcgacctgatctgtgcccagaagtttaatggcctgaccgtgctgcctccactgctgacagatgagatgatcgcccagtacacatctgccctgctggccggcaccatcacaagcggatggaccttcggcgcaggagccgccctgcagatcccttttgccatgcagatggcctataggttcaacggcatcggcgtgacccagaatgtgctgtacgagaaccagaagctgatcgccaatcagtttaacagcgccatcggcaagatccaggactctctgtcctctacagccagcgccctgggcaagctgcaggatgtggtgaatcagaacgcccaggccctgaataccctggtgaagcagctgagctccaacttcggcgccatctctagcgtgctgaatgacatcctgagccggctggacccccctgaggcagaggtgcagatcgacaggctgatcacaggccgcctgcagagcctgcagacctacgtgacacagcagctgatcagggcagcagagatcagagcctccgccaatctggccgccaccaagatgagcgagtgcgtgctgggacagtccaagagggtggacttttgtggcaagggctatcacctgatgtctttcccacagagcgcccctcacggcgtggtgtttctgcacgtgacctacgtgccagcccaggagaagaacttcaccacagcaccagccatctgccacgatggaaaggcacactttcctagggagggcgtgttcgtgtctaacggcacccactggtttgtgacacagcgcaatttctacgagccacagatcatcaccacagacaatacattcgtgagcggcaactgtgatgtggtgatcggcatcgtgaacaataccgtgtatgatccactgcagcccgagctggactcctttaaggaggagctggataagtacttcaagaatcacacctctcccgacgtggatctgggcgacatctccggcatcaatgcctctgtggtgaacatccagaaggagatcgaccggctgaacgaggtggccaagaatctgaacgagagcctgatcgatctgcaggagctgggcaagtatgagcagtacatcaagggctctggcagagagaacctgtatttccagggaggaggaggcagcggatacatccctgaggcaccaagggacggacaggcctacgtgcgcaaggatggcgagtgggtgctgctgtccacctttctgggccatcatcaccaccaccaccaccactga

SEQ ID NO: 5017 - DNA, 3846 bp, Artificial Sequence
  Description of Artificial Sequence: Synthetic polynucleotide
atgggcatcctgccaagcccaggaatgcccgccctgctgtctctggtgagcctgctgtccgtgctgctgatgggatgcgtggcagagacaggcacacagtgcgtgaacctgaccacaaggacccagctgccccctgcctataccaattctttcacacggggcgtgtactatcccgacaaggtgtttagaagctccgtgctgcactccacacaggatctgtttctgcctttcttttctaacgtgacctggttccacgccatccacgtgtccggcaccaatggcacaaagcggttcgacaatcccgtgctgccttttaacgatggcgtgtacttcgccagcaccgagaagtccaacatcatcagaggctggatctttggcaccacactggactctaagacacagagcctgctgatcgtgaacaatgccaccaacgtggtgatcaaggtgtgcgagttccagttttgtaatgatccattcctgggcgtgtactatcacaagaacaataagtcctggatggagtctgagtttcgcgtgtattctagcgccaacaattgcacatttgagtacgtgagccagcccttcctgatggacctggagggcaagcagggcaatttcaagaacctgagggagttcgtgtttaagaatatcgatggctacttcaagatctacagcaagcacaccccaatcaacctggtgcgcgacctgccacagggattctccgccctggagccactggtggatctgcccatcggcatcaacatcacccggtttcagacactgctggccctgcacagatcctacctgacaccaggcgactcctctagcggatggaccgcaggagctgccgcctactatgtgggctatctgcagccccggaccttcctgctgaagtacaacgagaatggcaccatcacagacgcagtggattgcgccctggaccccctgtctgagacaaagtgtacactgaagagctttaccgtggagaagggcatctatcagacaagcaatttcagggtgcagcctaccgagtccatcgtgcgctttcccaatatcacaaacctgtgcccttttggcgaggtgttcaacgccaccagattcgccagcgtgtacgcctggaatcggaagagaatctccaactgcgtggccgactattctcaactgtacaactccgcctctttcagcacctttaagtgctatggcgtgtctcccacaaagctgaatgatctgtgctttaccaacgtgtacgccgatagcttcgtgatcaggggagacgaagtgagacagatcgcaccaggacagacaggaaagatcgcagactacaattataagctgcctgacgatttcaccggctgcgtgatcgcctggaactccaacaatctggattctaaagtgggcggcaactacaattatctgtacaggctgtttcgcaagtccaatctgaagccattcgagcgggacatctccacagagatctaccaggccggctctaccccctgcaatggcgtggagggctttaactgttatttccctctgcagtcttacggcttccagccaacaaacggcgtgggctatcagccctacagagtggtggtgctgtcctttgagctgctgcacgcaccagcaacagtgtgcggcccaaagaagtctaccaatctggtgaagaacaagtgcgtgaacttcaacttcaacggactgaccggcacaggcgtgctgaccgagagcaataagaagttcctgccttttcagcagttcggcagggacatcgcagataccacagacgccgtgcgcgaccctcagaccctggagatcctggacatcacaccatgcagcttcggcggcgtgtccgtgatcacaccaggcaccaatacatccaaccaggtggccgtgctgtatcaggacgtgaattgtaccgaggtgcccgtggcaatccacgcagatcagctgacccctacatggcgggtgtactctaccggcagcaacgtgttccagacaagagccggatgcctgatcggagcagagcacgtgaacaatagctatgagtgcgacatccctatcggcgccggcatctgtgccagctaccagacccagacaaactccccatctggagcaggctccgtggccagccagtccatcatcgcctataccatgagcctgggcgccgagaacagcgtggcctactccaacaattctatcgccatccctaccaacttcacaatcagcgtgaccacagagatcctgccagtgtctatgaccaagacaagcgtggactgcacaatgtatatctgtggcgatagcaccgagtgctccaacctgctgctgcagtacggctccttttgtacccagctgaatagagccctgacaggcatcgccgtggagcaggataagaacacacaggaggtgttcgcccaggtgaagcagatctacaagaccccacccatcaaggactttggcggcttcaacttcagccagatcctgcctgatccaagcaagccctccaagaggtcttttatcgaggacctgctgttcaacaaggtgaccctggccgatgccggcttcatcaagcagtatggagattgcctgggagacatcgcagcccgcgacctgatctgtgcccagaagtttaatggcctgaccgtgctgcctccactgctgacagatgagatgatcgcccagtacacatctgccctgctggccggcaccatcacaagcggatggaccttcggcgcaggagccgccctgcagatcccttttgccatgcagatggcctataggttcaacggcatcggcgtgacccagaatgtgctgtacgagaaccagaagctgatcgccaatcagtttaacagcgccatcggcaagatccaggactctctgtcctctacagccagcgccctgggcaagctgcaggatgtggtgaatcagaacgcccaggccctgaataccctggtgaagcagctgagctccaacttcggcgccatctctagcgtgctgaatgacatcctgagccggctggacccccctgaggcagaggtgcagatcgacaggctgatcacaggccgcctgcagagcctgcagacctacgtgacacagcagctgatcagggcagcagagatcagagcctccgccaatctggccgccaccaagatgagcgagtgcgtgctgggacagtccaagagggtggacttttgtggcaagggctatcacctgatgtctttcccacagagcgcccctcacggcgtggtgtttctgcacgtgacctacgtgccagcccaggagaagaacttcaccacagcaccagccatctgccacgatggaaaggcacactttcctagggagggcgtgttcgtgtctaacggcacccactggtttgtgacacagcgcaatttctacgagccacagatcatcaccacagacaatacattcgtgagcggcaactgtgatgtggtgatcggcatcgtgaacaataccgtgtatgatccactgcagcccgagctggactcctttaaggaggagctggataagtacttcaagaatcacacctctcccgacgtggatctgggcgacatctccggcatcaatgcctctgtggtgaacatccagaaggagatcgaccggctgaacgaggtggccaagaatctgaacgagagcctgatcgatctgcaggagctgggcaagtatgagcagtacatcaagggctctggcagagagaacctgtatttccagggaggaggaggcagcggatacatccctgaggcaccaagggacggacaggcctacgtgcgcaaggatggcgagtgggtgctgctgtccacctttctgggccatcatcaccaccaccaccaccactga

SEQ ID NO: 5018 - DNA, 3846 bp, Artificial Sequence
  Description of Artificial Sequence: Synthetic polynucleotide
atgggcatcctgccaagcccaggaatgcccgccctgctgtctctggtgagcctgctgtccgtgctgctgatgggatgcgtggcagagacaggcacacagtgcgtgaacctgaccacaaggacccagctgccccctgcctataccaattctttcacacggggcgtgtactatcccgacaaggtgtttagaagctccgtgctgcactccacacaggatctgtttctgcctttcttttctaacgtgacctggttccacgccatccacgtgtccggcaccaatggcacaaagcggttcgacaatcccgtgctgccttttaacgatggcgtgtacttcgccagcaccgagaagtccaacatcatcagaggctggatctttggcaccacactggactctaagacacagagcctgctgatcgtgaacaatgccaccaacgtggtgatcaaggtgtgcgagttccagttttgtaatgatccattcctgggcgtgtactatcacaagaacaataagtcctggatggagtctgagtttcgcgtgtattctagcgccaacaattgcacatttgagtacgtgagccagcccttcctgatggacctggagggcaagcagggcaatttcaagaacctgagggagttcgtgtttaagaatatcgatggctacttcaagatctacagcaagcacaccccaatcaacctggtgcgcgacctgccacagggattctccgccctggagccactggtggatctgcccatcggcatcaacatcacccggtttcagacactgctggccctgcacagatcctacctgacaccaggcgactcctctagcggatggaccgcaggagctgccgcctactatgtgggctatctgcagccccggaccttcctgctgaagtacaacgagaatggcaccatcacagacgcagtggattgcgccctggaccccctgtctgagacaaagtgtacactgaagagctttaccgtggagaagggcatctatcagacaagcaatttcagggtgcagcctaccgagtccatcgtgcgctttcccaatatcacaaacctgtgcccttttggcgaggtgttcaacgccaccagattcgccagcgtgtacgcctggaatcggaagagaatctccaactgcgtggccgactattctgtgctgtacaactccgcctctttcagcacctttaagtgctatggcgtgtctcccacaaagctgaatgatctgtgctttaccaacgtgtacgccgatagcttcgtgatcaggggagacgaagtgagacagatcgcaccaggacagacaggaaagatcgcagactacaattataagctgcctgacgatttcaccggctgcgtgatcgcctggaactccaacaatctggattctaaagtgggcggcaactacaattatctgtacaggctgtttcgcaagtccaatctgaagccattcgagcgggacatctccacagagatctaccaggccggctctaccccctgcaatggcgtggagggctttaactgttatttccctctgcagtcttacggcttccagccaacaaacggcgtgggctatcagccctacagagtggtggtgctgtcctttgagctgctgcacgcaccagcaacagtgtgcggcccaaagaagtctaccaatctggtgaagaacaagtgcgtgaacttcaacttcaacggactgaccggcacaggcgtgctgaccgagagcaataagaagttcctgccttttcagcagttcggcagggacatcgcagataccacagacgccgtgcgcgaccctcagaccctggagatcctggacatcacaccatgcagcttcggcggcgtgtccgtgatcacaccaggcaccaatacatccaaccaggtggccgtgctgtatcaggacgtgaattgtaccgaggtgcccgtggcaatccacgcagatcagctgacccctacatggcgggtgtactctaccggcagcaacgtgttccagacaagagccggatgcctgatcggagcagagcacgtgaacaatagctatgagtgcgacatccctatcggcgccggcatctgtgccagctaccagacccagacaaactccccatctggagcaggctccgtggccagccagtccatcatcgcctataccatgagcctgggcgccgagaacagcgtggcctactccaacaattctatcgccatccctaccaacttcacaatcagcgtgaccacagagatcctgccagtgtctatgaccaagacaagcgtggactgcacaatgtatatctgtggcgatagcaccgagtgctccaacctgctgctgcagtacggctccttttgtacccagctgaatagagccctgacaggcatcgccgtggagcaggataagaacacacaggaggtgttcgcccaggtgaagcagatctacaagaccccacccatcaaggactttggcggcttcaacttcagccagatcctgcctgatccaagcaagccctccaagaggtcttttatcgaggacctgctgttcaacaaggtgaccctggccgatgccggcttcatcaagcagtatggagattgcctgggagacatcgcagcccgcgacctgatctgtgcccagaagtttaatggcctgaccgtgctgcctccactgctgacagatgagatgatcgcccagtacacatctgccctgctggccggcaccatcacaagcggatggaccttcggcgcaggagccgccctgcagatcccttttgacatgcagatggcctataggttcaacggcatcggcgtgacccagaatgtgctgtacgagaaccagaagctgatcgccaatcagtttaacagcgccatcggcaagatccaggactctctgtcctctacagccagcgccctgggcaagctgcaggatgtggtgaatcagaacgcccaggccctgaataccctggtgaagcagctgagctccaacttcggcgccatctctagcgtgctgaatgacatcctgagccggctggacccccctgaggcagaggtgcagatcgacaggctgatcacaggccgcctgcagagcctgcagacctacgtgacacagcagctgatcagggcagcagagatcagagcctccgccaatctggccgccaccaagatgagcgagtgcgtgctgggacagtccaagagggtggacttttgtggcaagggctatcacctgatgtctttcccacagagcgcccctcacggcgtggtgtttctgcacgtgacctacgtgccagcccaggagaagaacttcaccacagcaccagccatctgccacgatggaaaggcacactttcctagggagggcgtgttcgtgtctaacggcacccactggtttgtgacacagcgcaatttctacgagccacagatcatcaccacagacaatacattcgtgagcggcaactgtgatgtggtgatcggcatcgtgaacaataccgtgtatgatccactgcagcccgagctggactcctttaaggaggagctggataagtacttcaagaatcacacctctcccgacgtggatctgggcgacatctccggcatcaatgcctctgtggtgaacatccagaaggagatcgaccggctgaacgaggtggccaagaatctgaacgagagcctgatcgatctgcaggagctgggcaagtatgagcagtacatcaagggctctggcagagagaacctgtatttccagggaggaggaggcagcggatacatccctgaggcaccaagggacggacaggcctacgtgcgcaaggatggcgagtgggtgctgctgtccacctttctgggccatcatcaccaccaccaccaccactga

SEQ ID NO: 5019 - DNA, 3846 bp, Artificial Sequence
  Description of Artificial Sequence: Synthetic polynucleotide
atgggcatcctgccaagcccaggaatgcccgccctgctgtctctggtgagcctgctgtccgtgctgctgatgggatgcgtggcagagacaggcacacagtgcgtgaacctgaccacaaggacccagctgccccctgcctataccaattctttcacacggggcgtgtactatcccgacaaggtgtttagaagctccgtgctgcactccacacaggatctgtttctgcctttcttttctaacgtgacctggttccacgccatccacgtgtccggcaccaatggcacaaagcggttcgacaatcccgtgctgccttttaacgatggcgtgtacttcgccagcaccgagaagtccaacatcatcagaggctggatctttggcaccacactggactctaagacacagagcctgctgatcgtgaacaatgccaccaacgtggtgatcaaggtgtgcgagttccagttttgtaatgatccattcctgggcgtgtactatcacaagaacaataagtcctggatggagtctgagtttcgcgtgtattctagcgccaacaattgcacatttgagtacgtgagccagcccttcctgatggacctggagggcaagcagggcaatttcaagaacctgagggagttcgtgtttaagaatatcgatggctacttcaagatctacagcaagcacaccccaatcaacctggtgcgcgacctgccacagggattctccgccctggagccactggtggatctgcccatcggcatcaacatcacccggtttcagacactgctggccctgcacagatcctacctgacaccaggcgactcctctagcggatggaccgcaggagctgccgcctactatgtgggctatctgcagccccggaccttcctgctgaagtacaacgagaatggcaccatcacagacgcagtggattgcgccctggaccccctgtctgagacaaagtgtacactgaagagctttaccgtggagaagggcatctatcagacaagcaatttcagggtgcagcctaccgagtccatcgtgcgctttcccaatatcacaaacctgtgcccttttggcgaggtgttcaacgccaccagattcgccagcgtgtacgcctggaatcggaagagaatctccaactgcgtggccgactattctgtgctgtacaactccgcctctttcgctacctttaagtgctatggcgtgtctcccacaaagctgaatgatctgtgctttaccaacgtgtacgccgatagcttcgtgatcaggggagacgaagtgagacagatcgcaccaggacagacaggaaagatcgcagactacaattataagctgcctgacgatttcaccggctgcgtgatcgcctggaactccaacaatctggattctaaagtgggcggcaactacaattatctgtacaggctgtttcgcaagtccaatctgaagccattcgagcgggacatctccacagagatctaccaggccggctctaccccctgcaatggcgtggagggctttaactgttatttccctctgcagtcttacggcttccagccaacaaacggcgtgggctatcagccctacagagtggtggtgctgtcctttgagctgctgcacgcaccagcaacagtgtgcggcccaaagaagtctaccaatctggtgaagaacaagtgcgtgaacttcaacttcaacggactgaccggcacaggcgtgctgaccgagagcaataagaagttcctgccttttcagcagttcggcagggacatcgcagataccacagacgccgtgcgcgaccctcagaccctggagatcctggacatcacaccatgcagcttcggcggcgtgtccgtgatcacaccaggcaccaatacatccaaccaggtggccgtgctgtatcaggacgtgaattgtaccgaggtgcccgtggcaatccacgcagatcagctgacccctacatggcgggtgtactctaccggcagcaacgtgttccagacaagagccggatgcctgatcggagcagagcacgtgaacaatagctatgagtgcgacatccctatcggcgccggcatctgtgccagctaccagacccagacaaactccccatctggagcaggctccgtggccagccagtccatcatcgcctataccatgagcctgggcgccgagaacagcgtggcctactccaacaattctatcgccatccctaccaacttcacaatcagcgtgaccacagagatcctgccagtgtctatgaccaagacaagcgtggactgcacaatgtatatctgtggcgatagcaccgagtgctccaacctgctgctgcagtacggctccttttgtacccagctgaatagagccctgacaggcatcgccgtggagcaggataagaacacacaggaggtgttcgcccaggtgaagcagatctacaagaccccacccatcaaggactttggcggcttcaacttcagccagatcctgcctgatccaagcaagccctccaagaggtcttttatcgaggacctgctgttcaacaaggtgaccctggccgatgccggcttcatcaagcagtatggagattgcctgggagacatcgcagcccgcgacctgatctgtgcccagaagtttaatggcctgaccgtgctgcctccactgctgacagatgagatgatcgcccagtacacatctgccctgctggccggcaccatcacaagcggatggaccttcggcgcaggagccgccctgcagatcccttttgccatgcagatggcctataggttcaacggcatcggcgtgacccagaatgtgctgtacgagaaccagaagctgatcgccaatcagtttaacagcgccatcggcaagatccaggactctctgtcctctacagccagcgccctgggcaagctgcaggatgtggtgaatcagaacgcccaggccctgaataccctggtgaagcagctgagctccaacttcggcgccatctctagcgtgctgaatgacatcctgagccggctggacccccctgaggcagaggtgcagatcgacaggctgatcacaggccgcctgcagagcctgcagacctacgtgacacagcagctgatcagggcagcagagatcagagcctccgccaatctggccgccaccaagatgagcgagtgcgtgctgggacagtccaagagggtggacttttgtggcaagggctatcacctgatgtctttcccacagagcgcccctcacggcgtggtgtttctgcacgtgacctacgtgccagcccaggagaagaacttcaccacagcaccagccatctgccacgatggaaaggcacactttcctagggagggcgtgttcgtgtctaacggcacccactggtttgtgacacagcgcaatttctacgagccacagatcatcaccacagacaatacattcgtgagcggcaactgtgatgtggtgatcggcatcgtgaacaataccgtgtatgatccactgcagcccgagctggactcctttaaggaggagctggataagtacttcaagaatcacacctctcccgacgtggatctgggcgacatctccggcatcaatgcctctgtggtgaacatccagaaggagatcgaccggctgaacgaggtggccaagaatctgaacgagagcctgatcgatctgcaggagctgggcaagtatgagcagtacatcaagggctctggcagagagaacctgtatttccagggaggaggaggcagcggatacatccctgaggcaccaagggacggacaggcctacgtgcgcaaggatggcgagtgggtgctgctgtccacctttctgggccatcatcaccaccaccaccaccactga

SEQ ID NO: 5020 - DNA, 3846 bp, Artificial Sequence
  Description of Artificial Sequence: Synthetic polynucleotide
atgggcatcctgccaagcccaggaatgcccgccctgctgtctctggtgagcctgctgtccgtgctgctgatgggatgcgtggcagagacaggcacacagtgcgtgaacctgaccacaaggacccagctgccccctgcctataccaattctttcacacggggcgtgtactatcccgacaaggtgtttagaagctccgtgctgcactccacacaggatctgtttctgcctttcttttctaacgtgacctggttccacgccatccacgtgtccggcaccaatggcacaaagcggttcgacaatcccgtgctgccttttaacgatggcgtgtacttcgccagcaccgagaagtccaacatcatcagaggctggatctttggcaccacactggactctaagacacagagcctgctgatcgtgaacaatgccaccaacgtggtgatcaaggtgtgcgagttccagttttgtaatgatccattcctgggcgtgtactatcacaagaacaataagtcctggatggagtctgagtttcgcgtgtattctagcgccaacaattgcacatttgagtacgtgagccagcccttcctgatggacctggagggcaagcagggcaatttcaagaacctgagggagttcgtgtttaagaatatcgatggctacttcaagatctacagcaagcacaccccaatcaacctggtgcgcgacctgccacagggattctccgccctggagccactggtggatctgcccatcggcatcaacatcacccggtttcagacactgctggccctgcacagatcctacctgacaccaggcgactcctctagcggatggaccgcaggagctgccgcctactatgtgggctatctgcagccccggaccttcctgctgaagtacaacgagaatggcaccatcacagacgcagtggattgcgccctggaccccctgtctgagacaaagtgtacactgaagagctttaccgtggagaagggcatctatcagacaagcaatttcagggtgcagcctaccgagtccatcgtgcgctttcccaatatcacaaacctgtgcccttttggcgaggtgttcaacgccaccagattcgccagcgtgtactcatggaatcggaagagaatctccaactgcgtggccgactattctgtgctgtacaactccgcctctttcagcacctttaagtgctatggcgtgtctcccacaaagctgaatgatctgtgctttaccaacgtgtacgccgatagcttcgtgatcaggggagacgaagtgagacagatcgcaccaggacagacaggaaagatcgcagactacaattataagctgcctgacgatttcaccggctgcgtgatcgcctggaactccaacaatctggattctaaagtgggcggcaactacaattatctgtacaggctgtttcgcaagtccaatctgaagccattcgagcgggacatctccacagagatctaccaggccggctctaccccctgcaatggcgtggagggctttaactgttatttccctctgcagtcttacggcttccagccaacaaacggcgtgggctatcagccctacagagtggtggtgctgtcctttgagctgctgcacgcaccagcaacagtgtgcggcccaaagaagtctaccaatctggtgaagaacaagtgcgtgaacttcaacttcaacggactgaccggcacaggcgtgctgaccgagagcaataagaagttcctgccttttcagcagttcggcagggacatcgcagataccacagacgccgtgcgcgaccctcagaccctggagatcctggacatcacaccatgcagcttcggcggcgtgtccgtgatcacaccaggcaccaatacatccaaccaggtggccgtgctgtatcaggacgtgaattgtaccgaggtgcccgtggcaatccacgcagatcagctgacccctacatggcgggtgtactctaccggcagcaacgtgttccagacaagagccggatgcctgatcggagcagagcacgtgaacaatagctatgagtgcgacatccctatcggcgccggcatctgtgccagctaccagacccagacaaactccccatctggagcaggctccgtggccagccagtccatcatcgcctataccatgagcctgggcgccgagaacagcgtggcctactccaacaattctatcgccatccctaccaacttcacaatcagcgtgaccacagagatcctgccagtgtctatgaccaagacaagcgtggactgcacaatgtatatctgtggcgatagcaccgagtgctccaacctgctgctgcagtacggctccttttgtacccagctgaatagagccctgacaggcatcgccgtggagcaggataagaacacacaggaggtgttcgcccaggtgaagcagatctacaagaccccacccatcaaggactttggcggcttcaacttcagccagatcctgcctgatccaagcaagccctccaagaggtcttttatcgaggacctgctgttcaacaaggtgaccctggccgatgccggcttcatcaagcagtatggagattgcctgggagacatcgcagcccgcgacctgatctgtgcccagaagtttaatggcctgaccgtgctgcctccactgctgacagatgagatgatcgcccagtacacatctgccctgctggccggcaccatcacaagcggatggaccttcggcgcaggagccgccctgcagatcccttttgccatgcagatggcctataggttcaacggcatcggcgtgacccagaatgtgctgtacgagaaccagaagctgatcgccaatcagtttaacagcgccatcggcaagatccaggactctctgtcctctacagccagcgccctgggcaagctgcaggatgtggtgaatcagaacgcccaggccctgaataccctggtgaagcagctgagctccaacttcggcgccatctctagcgtgctgaatgacatcctgagccggctggacccccctgaggcagaggtgcagatcgacaggctgatcacaggccgcctgcagagcctgcagacctacgtgacacagcagctgatcagggcagcagagatcagagcctccgccaatctggccgccaccaagatgagcgagtgcgtgctgggacagtccaagagggtggacttttgtggcaagggctatcacctgatgtctttcccacagagcgcccctcacggcgtggtgtttctgcacgtgacctacgtgccagcccaggagaagaacttcaccacagcaccagccatctgccacgatggaaaggcacactttcctagggagggcgtgttcgtgtctaacggcacccactggtttgtgacacagcgcaatttctacgagccacagatcatcaccacagacaatacattcgtgagcggcaactgtgatgtggtgatcggcatcgtgaacaataccgtgtatgatccactgcagcccgagctggactcctttaaggaggagctggataagtacttcaagaatcacacctctcccgacgtggatctgggcgacatctccggcatcaatgcctctgtggtgaacatccagaaggagatcgaccggctgaacgaggtggccaagaatctgaacgagagcctgatcgatctgcaggagctgggcaagtatgagcagtacatcaagggctctggcagagagaacctgtatttccagggaggaggaggcagcggatacatccctgaggcaccaagggacggacaggcctacgtgcgcaaggatggcgagtgggtgctgctgtccacctttctgggccatcatcaccaccaccaccaccactga

SEQ ID NO: 5021 - DNA, 3846 bp, Artificial Sequence
  Description of Artificial Sequence: Synthetic polynucleotide
atgggcatcctgccaagcccaggaatgcccgccctgctgtctctggtgagcctgctgtccgtgctgctgatgggatgcgtggcagagacaggcacacagtgcgtgaacctgaccacaaggacccagctgccccctgcctataccaattctttcacacggggcgtgtactatcccgacaaggtgtttagaagctccgtgctgcactccacacaggatctgtttctgcctttcttttctaacgtgacctggttccacgccatccacgtgtccggcaccaatggcacaaagcggttcgacaatcccgtgctgccttttaacgatggcgtgtacttcgccagcaccgagaagtccaacatcatcagaggctggatctttggcaccacactggactctaagacacagagcctgctgatcgtgaacaatgccaccaacgtggtgatcaaggtgtgcgagttccagttttgtaatgatccattcctgggcgtgtactatcacaagaacaataagtcctggatggagtctgagtttcgcgtgtattctagcgccaacaattgcacatttgagtacgtgagccagcccttcctgatggacctggagggcaagcagggcaatttcaagaacctgagggagttcgtgtttaagaatatcgatggctacttcaagatctacagcaagcacaccccaatcaacctggtgcgcgacctgccacagggattctccgccctggagccactggtggatctgcccatcggcatcaacatcacccggtttcagacactgctggccctgcacagatcctacctgacaccaggcgactcctctagcggatggaccgcaggagctgccgcctactatgtgggctatctgcagccccggaccttcctgctgaagtacaacgagaatggcaccatcacagacgcagtggattgcgccctggaccccctgtctgagacaaagtgtacactgaagagctttaccgtggagaagggcatctatcagacaagcaatttcagggtgcagcctaccgagtccatcgtgcgctttcccaatatcacaaacctgtgcccttttggcgaggtgttcaacgccaccagattcgccagcgtgtacgcctggaatcggaagagaatctccaactgcgtggccgactattctgtgctgtacaactccgcctctttcagcacctttaagtgctatggcgtgtctcccacaaagctgaatgatctgtgctttaccaacgtgtacgccgatagcttcgtgatcaggggagacgaagtgagacagatcgcaccaggacagacaggaaagatcgcagactacaattataagctgcctgacgatttcaccggctgcgtgatcgcctggaactccaacaatctggattctaaagtgggcggcaactacaattatctgtacaggctgtttcgcaagtccaatctgaagccattcgagcgggacatctccttggagatctaccaggccggctctaccccctgcaatggcgtggagggctttaactgttatttccctctgcagtcttacggcttccagccaacaaacggcgtgggctatcagccctacagagtggtggtgctgtcctttgagctgctgcacgcaccagcaacagtgtgcggcccaaagaagtctaccaatctggtgaagaacaagtgcgtgaacttcaacttcaacggactgaccggcacaggcgtgctgaccgagagcaataagaagttcctgccttttcagcagttcggcagggacatcgcagataccacagacgccgtgcgcgaccctcagaccctggagatcctggacatcacaccatgcagcttcggcggcgtgtccgtgatcacaccaggcaccaatacatccaaccaggtggccgtgctgtatcaggacgtgaattgtaccgaggtgcccgtggcaatccacgcagatcagctgacccctacatggcgggtgtactctaccggcagcaacgtgttccagacaagagccggatgcctgatcggagcagagcacgtgaacaatagctatgagtgcgacatccctatcggcgccggcatctgtgccagctaccagacccagacaaactccccatctggagcaggctccgtggccagccagtccatcatcgcctataccatgagcctgggcgccgagaacagcgtggcctactccaacaattctatcgccatccctaccaacttcacaatcagcgtgaccacagagatcctgccagtgtctatgaccaagacaagcgtggactgcacaatgtatatctgtggcgatagcaccgagtgctccaacctgctgctgcagtacggctccttttgtacccagctgaatagagccctgacaggcatcgccgtggagcaggataagaacacacaggaggtgttcgcccaggtgaagcagatctacaagaccccacccatcaaggactttggcggcttcaacttcagccagatcctgcctgatccaagcaagccctccaagaggtcttttatcgaggacctgctgttcaacaaggtgaccctggccgatgccggcttcatcaagcagtatggagattgcctgggagacatcgcagcccgcgacctgatctgtgcccagaagtttaatggcctgaccgtgctgcctccactgctgacagatgagatgatcgcccagtacacatctgccctgctggccggcaccatcacaagcggatggaccttcggcgcaggagccgccctgcagatcccttttgccatgcagatggcctataggttcaacggcatcggcgtgacccagaatgtgctgtacgagaaccagaagctgatcgccaatcagtttaacagcgccatcggcaagatccaggactctctgtcctctacagccagcgccctgggcaagctgcaggatgtggtgaatcagaacgcccaggccctgaataccctggtgaagcagctgagctccaacttcggcgccatctctagcgtgctgaatgacatcctgagccggctggacccccctgaggcagaggtgcagatcgacaggctgatcacaggccgcctgcagagcctgcagacctacgtgacacagcagctgatcagggcagcagagatcagagcctccgccaatctggccgccaccaagatgagcgagtgcgtgctgggacagtccaagagggtggacttttgtggcaagggctatcacctgatgtctttcccacagagcgcccctcacggcgtggtgtttctgcacgtgacctacgtgccagcccaggagaagaacttcaccacagcaccagccatctgccacgatggaaaggcacactttcctagggagggcgtgttcgtgtctaacggcacccactggtttgtgacacagcgcaatttctacgagccacagatcatcaccacagacaatacattcgtgagcggcaactgtgatgtggtgatcggcatcgtgaacaataccgtgtatgatccactgcagcccgagctggactcctttaaggaggagctggataagtacttcaagaatcacacctctcccgacgtggatctgggcgacatctccggcatcaatgcctctgtggtgaacatccagaaggagatcgaccggctgaacgaggtggccaagaatctgaacgagagcctgatcgatctgcaggagctgggcaagtatgagcagtacatcaagggctctggcagagagaacctgtatttccagggaggaggaggcagcggatacatccctgaggcaccaagggacggacaggcctacgtgcgcaaggatggcgagtgggtgctgctgtccacctttctgggccatcatcaccaccaccaccaccactga

SEQ ID NO: 5022 - DNA, 3846 bp, Artificial Sequence
  Description of Artificial Sequence: Synthetic polynucleotide
atgggcatcctgccaagcccaggaatgcccgccctgctgtctctggtgagcctgctgtccgtgctgctgatgggatgcgtggcagagacaggcacacagtgcgtgaacctgaccacaaggacccagctgccccctgcctataccaattctttcacacggggcgtgtactatcccgacaaggtgtttagaagctccgtgctgcactccacacaggatctgtttctgcctttcttttctaacgtgacctggttccacgccatccacgtgtccggcaccaatggcacaaagcggttcgacaatcccgtgctgccttttaacgatggcgtgtacttcgccagcaccgagaagtccaacatcatcagaggctggatctttggcaccacactggactctaagacacagagcctgctgatcgtgaacaatgccaccaacgtggtgatcaaggtgtgcgagttccagttttgtaatgatccattcctgggcgtgtactatcacaagaacaataagtcctggatggagtctgagtttcgcgtgtattctagcgccaacaattgcacatttgagtacgtgagccagcccttcctgatggacctggagggcaagcagggcaatttcaagaacctgagggagttcgtgtttaagaatatcgatggctacttcaagatctacagcaagcacaccccaatcaacctggtgcgcgacctgccacagggattctccgccctggagccactggtggatctgcccatcggcatcaacatcacccggtttcagacactgctggccctgcacagatcctacctgacaccaggcgactcctctagcggatggaccgcaggagctgccgcctactatgtgggctatctgcagccccggaccttcctgctgaagtacaacgagaatggcaccatcacagacgcagtggattgcgccctggaccccctgtctgagacaaagtgtacactgaagagctttaccgtggagaagggcatctatcagacaagcaatttcagggtgcagcctaccgagtccatcgtgcgctttcccaatatcacaaacctgtgcccttttggcgaggtgttcaacgccaccagattcgccagcgtgtacgcctggaatcggaagagaatctccaactgcgtggccgacttttctgtgctgtacaactccgcctctttcagcacctttaagtgctatggcgtgtctcccacaaagctgaatgatctgtgctttaccaacgtgtacgccgatagcttcgtgatcaggggagacgaagtgagacagatcgcaccaggacagacaggaaagatcgcagactacaattataagctgcctgacgatttcaccggctgcgtgatcgcctggaactccaacaatctggattctaaagtgggcggcaactacaattatctgtacaggctgtttcgcaagtccaatctgaagccattcgagcgggacatctccacagagatctaccaggccggctctaccccctgcaatggcgtggagggctttaactgttatttccctctgcagtcttacggcttccagccaacaaacggcgtgggctatcagccctacagagtggtggtgctgtcctttgagctgctgcacgcaccagcaacagtgtgcggcccaaagaagtctaccaatctggtgaagaacaagtgcgtgaacttcaacttcaacggactgaccggcacaggcgtgctgaccgagagcaataagaagttcctgccttttcagcagttcggcagggacatcgcagataccacagacgccgtgcgcgaccctcagaccctggagatcctggacatcacaccatgcagcttcggcggcgtgtccgtgatcacaccaggcaccaatacatccaaccaggtggccgtgctgtatcaggacgtgaattgtaccgaggtgcccgtggcaatccacgcagatcagctgacccctacatggcgggtgtactctaccggcagcaacgtgttccagacaagagccggatgcctgatcggagcagagcacgtgaacaatagctatgagtgcgacatccctatcggcgccggcatctgtgccagctaccagacccagacaaactccccatctggagcaggctccgtggccagccagtccatcatcgcctataccatgagcctgggcgccgagaacagcgtggcctactccaacaattctatcgccatccctaccaacttcacaatcagcgtgaccacagagatcctgccagtgtctatgaccaagacaagcgtggactgcacaatgtatatctgtggcgatagcaccgagtgctccaacctgctgctgcagtacggctccttttgtacccagctgaatagagccctgacaggcatcgccgtggagcaggataagaacacacaggaggtgttcgcccaggtgaagcagatctacaagaccccacccatcaaggactttggcggcttcaacttcagccagatcctgcctgatccaagcaagccctccaagaggtcttttatcgaggacctgctgttcaacaaggtgaccctggccgatgccggcttcatcaagcagtatggagattgcctgggagacatcgcagcccgcgacctgatctgtgcccagaagtttaatggcctgaccgtgctgcctccactgctgacagatgagatgatcgcccagtacacatctgccctgctggccggcaccatcacaagcggatggaccttcggcgcaggagccgccctgcagatcccttttgccatgcagatggcctataggttcaacggcatcggcgtgacccagaatgtgctgtacgagaaccagaagctgatcgccaatcagtttaacagcgccatcggcaagatccaggactctctgtcctctacagccagcgccctgggcaagctgcaggatgtggtgaatcagaacgcccaggccctgaataccctggtgaagcagctgagctccaacttcggcgccatctctagcgtgctgaatgacatcctgagccggctggacccccctgaggcagaggtgcagatcgacaggctgatcacaggccgcctgcagagcctgcagacctacgtgacacagcagctgatcagggcagcagagatcagagcctccgccaatctggccgccaccaagatgagcgagtgcgtgctgggacagtccaagagggtggacttttgtggcaagggctatcacctgatgtctttcccacagagcgcccctcacggcgtggtgtttctgcacgtgacctacgtgccagcccaggagaagaacttcaccacagcaccagccatctgccacgatggaaaggcacactttcctagggagggcgtgttcgtgtctaacggcacccactggtttgtgacacagcgcaatttctacgagccacagatcatcaccacagacaatacattcgtgagcggcaactgtgatgtggtgatcggcatcgtgaacaataccgtgtatgatccactgcagcccgagctggactcctttaaggaggagctggataagtacttcaagaatcacacctctcccgacgtggatctgggcgacatctccggcatcaatgcctctgtggtgaacatccagaaggagatcgaccggctgaacgaggtggccaagaatctgaacgagagcctgatcgatctgcaggagctgggcaagtatgagcagtacatcaagggctctggcagagagaacctgtatttccagggaggaggaggcagcggatacatccctgaggcaccaagggacggacaggcctacgtgcgcaaggatggcgagtgggtgctgctgtccacctttctgggccatcatcaccaccaccaccaccactga

SEQ ID NO: 5023 - DNA, 3846 bp, Artificial Sequence
  Description of Artificial Sequence: Synthetic polynucleotide
atgggcatcctgccaagcccaggaatgcccgccctgctgtctctggtgagcctgctgtccgtgctgctgatgggatgcgtggcagagacaggcacacagtgcgtgaacctgaccacaaggacccagctgccccctgcctataccaattctttcacacggggcgtgtactatcccgacaaggtgtttagaagctccgtgctgcactccacacaggatctgtttctgcctttcttttctaacgtgacctggttccacgccatccacgtgtccggcaccaatggcacaaagcggttcgacaatcccgtgctgccttttaacgatggcgtgtacttcgccagcaccgagaagtccaacatcatcagaggctggatctttggcaccacactggactctaagacacagagcctgctgatcgtgaacaatgccaccaacgtggtgatcaaggtgtgcgagttccagttttgtaatgatccattcctgggcgtgtactatcacaagaacaataagtcctggatggagtctgagtttcgcgtgtattctagcgccaacaattgcacatttgagtacgtgagccagcccttcctgatggacctggagggcaagcagggcaatttcaagaacctgagggagttcgtgtttaagaatatcgatggctacttcaagatctacagcaagcacaccccaatcaacctggtgcgcgacctgccacagggattctccgccctggagccactggtggatctgcccatcggcatcaacatcacccggtttcagacactgctggccctgcacagatcctacctgacaccaggcgactcctctagcggatggaccgcaggagctgccgcctactatgtgggctatctgcagccccggaccttcctgctgaagtacaacgagaatggcaccatcacagacgcagtggattgcgccctggaccccctgtctgagacaaagtgtacactgaagagctttaccgtggagaagggcatctatcagacaagcaatttcagggtgcagcctaccgagtccatcgtgcgctttcccaatatcacaaacctgtgcccttttggcgaggtgttcaacgccaccagattcgccagcgtgtacgcctggaatcggaagagaatctccaactgcgtggccgactattctgtgctgtacaactccgcctctttcagcacctttaagtgctatggcgtgtctcccacaaagctgaatgatctgtgctttaccaacgtgtacgccgatagcttcgtgatcaggggagacgaagtgagacagatcgcaccaggacagacaggaaagatcgcagactacaattataagctgcctgacgatttcaccggctgcgtgatcgcctggaactccaacaatctggattctaaagtgggcggcaactacaattatctgtacaggctgtttcgcaagtccaatctgaagccattcgagcgggacatctccacagagatctaccaggccggctctaccccctgcaatggcgtggagggctttaactgttatttccctctgcagtcttacggcttccagccaacaaacggcgtgggctatcagccctacagagtggtggtgctgtcctttgagctgctgcacgcaccagcaacagtgtgcggcccaaagaagtctaccaatctggtgaagaacaagtgcgtgaacttcaacttcaacggactgaccggcacaggcgtgctgaccgagagcaataagaagttcctgccttttcagcagttcggcagggacatcgcagataccacagacgccgtgcgcgaccctcagaccctggagatcctggacatcaaaccatgcagcttcggcggcgtgtccgtgatcacaccaggcaccaatacatccaaccaggtggccgtgctgtatcaggacgtgaattgtaccgaggtgcccgtggcaatccacgcagatcagctgacccctacatggcgggtgtactctaccggcagcaacgtgttccagacaagagccggatgcctgatcggagcagagcacgtgaacaatagctatgagtgcgacatccctatcggcgccggcatctgtgccagctaccagacccagacaaactccccatctggagcaggctccgtggccagccagtccatcatcgcctataccatgagcctgggcgccgagaacagcgtggcctactccaacaattctatcgccatccctaccaacttcacaatcagcgtgaccacagagatcctgccagtgtctatgaccaagacaagcgtggactgcacaatgtatatctgtggcgatagcaccgagtgctccaacctgctgctgcagtacggctccttttgtacccagctgaatagagccctgacaggcatcgccgtggagcaggataagaacacacaggaggtgttcgcccaggtgaagcagatctacaagaccccacccatcaaggactttggcggcttcaacttcagccagatcctgcctgatccaagcaagccctccaagaggtcttttatcgaggacctgctgttcaacaaggtgaccctggccgatgccggcttcatcaagcagtatggagattgcctgggagacatcgcagcccgcgacctgatctgtgcccagaagtttaatggcctgaccgtgctgcctccactgctgacagatgagatgatcgcccagtacacatctgccctgctggccggcaccatcacaagcggatggaccttcggcgcaggagccgccctgcagatcccttttgccatgcagatggcctataggttcaacggcatcggcgtgacccagaatgtgctgtacgagaaccagaagctgatcgccaatcagtttaacagcgccatcggcaagatccaggactctctgtcctctacagccagcgccctgggcaagctgcaggatgtggtgaatcagaacgcccaggccctgaataccctggtgaagcagctgagctccaacttcggcgccatctctagcgtgctgaatgacatcctgagccggctggacccccctgaggcagaggtgcagatcgacaggctgatcacaggccgcctgcagagcctgcagacctacgtgacacagcagctgatcagggcagcagagatcagagcctccgccaatctggccgccaccaagatgagcgagtgcgtgctgggacagtccaagagggtggacttttgtggcaagggctatcacctgatgtctttcccacagagcgcccctcacggcgtggtgtttctgcacgtgacctacgtgccagcccaggagaagaacttcaccacagcaccagccatctgccacgatggaaaggcacactttcctagggagggcgtgttcgtgtctaacggcacccactggtttgtgacacagcgcaatttctacgagccacagatcatcaccacagacaatacattcgtgagcggcaactgtgatgtggtgatcggcatcgtgaacaataccgtgtatgatccactgcagcccgagctggactcctttaaggaggagctggataagtacttcaagaatcacacctctcccgacgtggatctgggcgacatctccggcatcaatgcctctgtggtgaacatccagaaggagatcgaccggctgaacgaggtggccaagaatctgaacgagagcctgatcgatctgcaggagctgggcaagtatgagcagtacatcaagggctctggcagagagaacctgtatttccagggaggaggaggcagcggatacatccctgaggcaccaagggacggacaggcctacgtgcgcaaggatggcgagtgggtgctgctgtccacctttctgggccatcatcaccaccaccaccaccactga

SEQ ID NO: 5024 - DNA, 3846 bp, Artificial Sequence
  Description of Artificial Sequence: Synthetic polynucleotide
atgggcatcctgccaagcccaggaatgcccgccctgctgtctctggtgagcctgctgtccgtgctgctgatgggatgcgtggcagagacaggcacacagtgcgtgaacctgaccacaaggacccagctgccccctgcctataccaattctttcacacggggcgtgtactatcccgacaaggtgtttagaagctccgtgctgcactccacacaggatctgtttctgcctttcttttctaacgtgacctggttccacgccatccacgtgtccggcaccaatggcacaaagcggttcgacaatcccgtgctgccttttaacgatggcgtgtacttcgccagcaccgagaagtccaacatcatcagaggctggatctttggcaccacactggactctaagacacagagcctgctgatcgtgaacaatgccaccaacgtggtgatcaaggtgtgcgagttccagttttgtaatgatccattcctgggcgtgtactatcacaagaacaataagtcctggatggagtctgagtttcgcgtgtattctagcgccaacaattgcacatttgagtacgtgagccagcccttcctgatggacctggagggcaagcagggcaatttcaagaacctgagggagttcgtgtttaagaatatcgatggctacttcaagatctacagcaagcacaccccaatcaacctggtgcgcgacctgccacagggattctccgccctggagccactggtggatctgcccatcggcatcaacatcacccggtttcagacactgctggccctgcacagatcctacctgacaccaggcgactcctctagcggatggaccgcaggagctgccgcctactatgtgggctatctgcagccccggaccttcctgctgaagtacaacgagaatggcaccatcacagacgcagtggattgcgccctggaccccctgtctgagacaaagtgtacactgaagagctttaccgtggagaagggcatctatcagacaagcaatttcagggtgcagcctaccgagtccatcgtgcgctttcccaatatcacaaacctgtgcccttttggcgaggtgttcaacgccaccagattcgccagcgtgtacgcctggaatcggaagagaatctccaactgcgtggccgactattctgtgctgtacaactccgcctctttcagcacctttaagtgctatggcgtgtctcccacaaagctgaatgatctgtgctttaccaacgtgtacgccgatagcttcgtgatcaggggagacgaagtgagacagatcgcaccaggacagacaggaaagatcgcagactacaattataagctgcctgacgatttcaccggctgcgtgatcgcctggaactccaacaatctggattctaaagtgggcggcaactacaattatctgtacaggctgtttcgcaagtccaatctgaagccattcgagcgggacatctccacagagatctaccaggccggctctaccccctgcaatgcggtggagggctttaactgttatttccctctgcagtcttacggcttccagccaacaaacggcgtgggctatcagccctacagagtggtggtgctgtcctttgagctgctgcacgcaccagcaacagtgtgcggcccaaagaagtctaccaatctggtgaagaacaagtgcgtgaacttcaacttcaacggactgaccggcacaggcgtgctgaccgagagcaataagaagttcctgccttttcagcagttcggcagggacatcgcagataccacagacgccgtgcgcgaccctcagaccctggagatcctggacatcacaccatgcagcttcggcggcgtgtccgtgatcacaccaggcaccaatacatccaaccaggtggccgtgctgtatcaggacgtgaattgtaccgaggtgcccgtggcaatccacgcagatcagctgacccctacatggcgggtgtactctaccggcagcaacgtgttccagacaagagccggatgcctgatcggagcagagcacgtgaacaatagctatgagtgcgacatccctatcggcgccggcatctgtgccagctaccagacccagacaaactccccatctggagcaggctccgtggccagccagtccatcatcgcctataccatgagcctgggcgccgagaacagcgtggcctactccaacaattctatcgccatccctaccaacttcacaatcagcgtgaccacagagatcctgccagtgtctatgaccaagacaagcgtggactgcacaatgtatatctgtggcgatagcaccgagtgctccaacctgctgctgcagtacggctccttttgtacccagctgaatagagccctgacaggcatcgccgtggagcaggataagaacacacaggaggtgttcgcccaggtgaagcagatctacaagaccccacccatcaaggactttggcggcttcaacttcagccagatcctgcctgatccaagcaagccctccaagaggtcttttatcgaggacctgctgttcaacaaggtgaccctggccgatgccggcttcatcaagcagtatggagattgcctgggagacatcgcagcccgcgacctgatctgtgcccagaagtttaatggcctgaccgtgctgcctccactgctgacagatgagatgatcgcccagtacacatctgccctgctggccggcaccatcacaagcggatggaccttcggcgcaggagccgccctgcagatcccttttgccatgcagatggcctataggttcaacggcatcggcgtgacccagaatgtgctgtacgagaaccagaagctgatcgccaatcagtttaacagcgccatcggcaagatccaggactctctgtcctctacagccagcgccctgggcaagctgcaggatgtggtgaatcagaacgcccaggccctgaataccctggtgaagcagctgagctccaacttcggcgccatctctagcgtgctgaatgacatcctgagccggctggacccccctgaggcagaggtgcagatcgacaggctgatcacaggccgcctgcagagcctgcagacctacgtgacacagcagctgatcagggcagcagagatcagagcctccgccaatctggccgccaccaagatgagcgagtgcgtgctgggacagtccaagagggtggacttttgtggcaagggctatcacctgatgtctttcccacagagcgcccctcacggcgtggtgtttctgcacgtgacctacgtgccagcccaggagaagaacttcaccacagcaccagccatctgccacgatggaaaggcacactttcctagggagggcgtgttcgtgtctaacggcacccactggtttgtgacacagcgcaatttctacgagccacagatcatcaccacagacaatacattcgtgagcggcaactgtgatgtggtgatcggcatcgtgaacaataccgtgtatgatccactgcagcccgagctggactcctttaaggaggagctggataagtacttcaagaatcacacctctcccgacgtggatctgggcgacatctccggcatcaatgcctctgtggtgaacatccagaaggagatcgaccggctgaacgaggtggccaagaatctgaacgagagcctgatcgatctgcaggagctgggcaagtatgagcagtacatcaagggctctggcagagagaacctgtatttccagggaggaggaggcagcggatacatccctgaggcaccaagggacggacaggcctacgtgcgcaaggatggcgagtgggtgctgctgtccacctttctgggccatcatcaccaccaccaccaccactga

SEQ ID NO: 5025 - DNA, 3846 bp, Artificial Sequence
  Description of Artificial Sequence: Synthetic polynucleotide
atgggcatcctgccaagcccaggaatgcccgccctgctgtctctggtgagcctgctgtccgtgctgctgatgggatgcgtggcagagacaggcacacagtgcgtgaacctgaccacaaggacccagctgccccctgcctataccaattctttcacacggggcgtgtactatcccgacaaggtgtttagaagctccgtgctgcactccacacaggatctgtttctgcctttcttttctaacgtgacctggttccacgccatccacgtgtccggcaccaatggcacaaagcggttcgacaatcccgtgctgccttttaacgatggcgtgtacttcgccagcaccgagaagtccaacatcatcagaggctggatctttggcaccacactggactctaagacacagagcctgctgatcgtgaacaatgccaccaacgtggtgatcaaggtgtgcgagttccagttttgtaatgatccattcctgggcgtgtactatcacaagaacaataagtcctggatggagtctgagtttcgcgtgtattctagcgccaacaattgcacatttgagtacgtgagccagcccttcctgatggacctggagggcaagcagggcaatttcaagaacctgagggagttcgtgtttaagaatatcgatggctacttcaagatctacagcaagcacaccccaatcaacctggtgcgcgacctgccacagggattctccgccctggagccactggtggatctgcccatcggcatcaacatcacccggtttcagacactgctggccctgcacagatcctacctgacaccaggcgactcctctagcggatggaccgcaggagctgccgcctactatgtgggctatctgcagccccggaccttcctgctgaagtacaacgagaatggcaccatcacagacgcagtggattgcgccctggaccccctgtctgagacaaagtgtacactgaagagctttaccgtggagaagggcatctatcagacaagcaatttcagggtgcagcctaccgagtccatcgtgcgctttcccaatatcacaaacctgtgcccttttggcgaggtgttcaacgccaccagattcgccagcgtgtacgcctggaatcggaagagaatctccaactgcgtggccgactattctgtgctgtacaactccgcctctttcagcacctttaagtgctatggcgtgtctcccacaaagctgaatgatctgtgctttaccaacgtgtacgccgatagcttcgtgatcaggggagacgaagtgagacagatcgcaccaggacagacaggaaagatcgcagactacaattataagctgcctgacgatttcaccggctgcgtgatcgcctggaactccaacaatctggattctaaagtgggcggcaactacaattatctgtacaggctgtttcgcaagtccaatctgaagccattcgagcgggacatctccacagagatctaccaggccggctctaccccctgcaatggcgtggagggctttaactgttatttccctctgcagtcttacggcttccagccaacaaacggcgtgggctatcagccctacagagtggtggtgctgtcctttgagctgctgcacgcaccagcaacagtgtgcggcccaaagaagtctaccaatctggtgaagaacaagtgcgtgaacttcaacttcaacggactgaccggcacaggcgtgctgaccgagagcaataagaagttcctgccttttcagcagttcggcagggacatcgcagataccacagacgccgtgcgcgaccctcagaccctggagatcctggacatcacaccatgcagcttcggcggcgtgtccgtgatcacaccaggcaccaatacatccaaccaggtggccgtgctgtatcaggacgtgaattgtaccgaggtgcccgtggcaatccacgcagatcagctgacccctacatggcgggtgtactctaccggcagcaacgtgttccagacaagagccggatgcctgatcggagcagagcacgtgaacaatagctatgagtgcgacatccctatcggcgccggcatctgtgccagctaccagacccagacaaactccccatctggagcaggctccgtggccagccagtccatcatcgcctataccatgagcctgggcgccgagaacagcgtggcctactccaacaattctatcgccatccctaccaacttcacaatcagcgtgaccacagagatcctgccagtgtctatgaccaagacaagcgtggactgcacaatgtatatctgtggcgatagcaccgagtgctccaacctgctgctgcagtacggctccttttgtacccagctgaatagagccctgacaggcatcgccgtggagcaggataagaacacacaggaggtgttcgcccaggtgaagcagatctacaagaccccacccatcaaggactttggcggcttcaacttcagccagatcctgcctgatccaagcaagccctccaagaggtcttttatcgaggacctgctgttcaacaaggtgaccctggccgatgccggcttcatcaagcagtatggagattgcctgggagacatcgcagcccgcgacctgatctgtgcccagaagtttaatggcctgaccgtgctgcctccactgctgacagatgagatgatcgcccagtacacatctgccctgctggccggcaccatcacaagcggatggaccttcggcgcaggagccgccctgcagatcccttttgccatgcagatggcctataggttcaacggcatcggcgtgacccagaatgtgctgtacgagaaccagaagctgatcgccaatcagtttaacagcgccatcggcaagatccaggactctctgtcctctacagccagcgccctgggcaagctgcaggatgtggtgaatcagaacgcccaggccctgaataccctggtgaagcagctgagctccaacttcggcgccatctctagcgtgctgaatgacatcctgagccggctggacccccctgaggcagaggtgcagatcgacaggctgatcacaggccgcctgcagagcctgcagacctacgtgacacagcagctgatcagggcagcagagatcagagcctccgccaatctggccgccaccaagatgagcgagtgcgtgctgggacagtccaagagggtggacttttgtggcaagggctatcacctgatgtctttcccacagagcgcccctcacggcgtggtgtttctgcacgtgacctacgtgccagcccagaataagaacttcaccacagcaccagccatctgccacgatggaaaggcacactttcctagggagggcgtgttcgtgtctaacggcacccactggtttgtgacacagcgcaatttctacgagccacagatcatcaccacagacaatacattcgtgagcggcaactgtgatgtggtgatcggcatcgtgaacaataccgtgtatgatccactgcagcccgagctggactcctttaaggaggagctggataagtacttcaagaatcacacctctcccgacgtggatctgggcgacatctccggcatcaatgcctctgtggtgaacatccagaaggagatcgaccggctgaacgaggtggccaagaatctgaacgagagcctgatcgatctgcaggagctgggcaagtatgagcagtacatcaagggctctggcagagagaacctgtatttccagggaggaggaggcagcggatacatccctgaggcaccaagggacggacaggcctacgtgcgcaaggatggcgagtgggtgctgctgtccacctttctgggccatcatcaccaccaccaccaccactga

SEQ ID NO: 5026 - DNA, 3846 bp, Artificial Sequence
  Description of Artificial Sequence: Synthetic polynucleotide
atgggcatcctgccaagcccaggaatgcccgccctgctgtctctggtgagcctgctgtccgtgctgctgatgggatgcgtggcagagacaggcacacagtgcgtgaacctgaccacaaggacccagctgccccctgcctataccaattctttcacacggggcgtgtactatcccgacaaggtgtttagaagctccgtgctgcactccacacaggatctgtttctgcctttcttttctaacgtgacctggttccacgccatccacgtgtccggcaccaatggcacaaagcggttcgacaatcccgtgctgccttttaacgatggcgtgtacttcgccagcaccgagaagtccaacatcatcagaggctggatctttggcaccacactggactctaagacacagagcctgctgatcgtgaacaatgccaccaacgtggtgatcaaggtgtgcgagttccagttttgtaatgatccattcctgggcgtgtactatcacaagaacaataagtcctggatggagtctgagtttcgcgtgtattctagcgccaacaattgcacatttgagtacgtgagccagcccttcctgatggacctggagggcaagcagggcaatttcaagaacctgagggagttcgtgtttaagaatatcgatggctacttcaagatctacagcaagcacaccccaatcaacctggtgcgcgacctgccacagggattctccgccctggagccactggtggatctgcccatcggcatcaacatcacccggtttcagacactgctggccctgcacagatcctacctgacaccaggcgactcctctagcggatggaccgcaggagctgccgcctactatgtgggctatctgcagccccggaccttcctgctgaagtacaacgagaatggcaccatcacagacgcagtggattgcgccctggaccccctgtctgagacaaagtgtacactgaagagctttaccgtggagaagggcatctatcagacaagcaatttcagggtgcagcctaccgagtccatcgtgcgctttcccaatatcacaaacctgtgcccttttggcgaggtgttcaacgccaccagattcgccagcgtgtacgcctggaatcggaagagaatctccaactgcgtggccgactattctgtgctgtacaactccgcctctttcagcacctttaagtgctatggcgtgtctcccacaaagctgaatgatctgtgctttaccaacgtgtacgccgatagcttcgtgatcaggggagacgaagtgagacagatcgcaccaggacagacaggaaagatcgcagactacaattataagctgcctgacgatttcaccggctgcgtgatcgcctggaactccaacaatctggattctaaagtgggcggcaactacaattatctgtacaggctgtttcgcaagtccaatctgaagccattcgagcgggacatctccacagagatctaccaggccggctctaccccctgcaatggcgtggagggctttaacgcatatttccctctgcagtcttacggcttccagccaacaaacggcgtgggctatcagccctacagagtggtggtgctgtcctttgagctgctgcacgcaccagcaacagtgtgcggcccaaagaagtctaccaatctggtgaagaacaagtgcgtgaacttcaacttcaacggactgaccggcacaggcgtgctgaccgagagcaataagaagttcctgccttttcagcagttcggcagggacatcgcagataccacagacgccgtgcgcgaccctcagaccctggagatcctggacatcacaccatgcagcttcggcggcgtgtccgtgatcacaccaggcaccaatacatccaaccaggtggccgtgctgtatcaggacgtgaattgtaccgaggtgcccgtggcaatccacgcagatcagctgacccctacatggcgggtgtactctaccggcagcaacgtgttccagacaagagccggatgcctgatcggagcagagcacgtgaacaatagctatgagtgcgacatccctatcggcgccggcatctgtgccagctaccagacccagacaaactccccatctggagcaggctccgtggccagccagtccatcatcgcctataccatgagcctgggcgccgagaacagcgtggcctactccaacaattctatcgccatccctaccaacttcacaatcagcgtgaccacagagatcctgccagtgtctatgaccaagacaagcgtggactgcacaatgtatatctgtggcgatagcaccgagtgctccaacctgctgctgcagtacggctccttttgtacccagctgaatagagccctgacaggcatcgccgtggagcaggataagaacacacaggaggtgttcgcccaggtgaagcagatctacaagaccccacccatcaaggactttggcggcttcaacttcagccagatcctgcctgatccaagcaagccctccaagaggtcttttatcgaggacctgctgttcaacaaggtgaccctggccgatgccggcttcatcaagcagtatggagattgcctgggagacatcgcagcccgcgacctgatctgtgcccagaagtttaatggcctgaccgtgctgcctccactgctgacagatgagatgatcgcccagtacacatctgccctgctggccggcaccatcacaagcggatggaccttcggcgcaggagccgccctgcagatcccttttgccatgcagatggcctataggttcaacggcatcggcgtgacccagaatgtgctgtacgagaaccagaagctgatcgccaatcagtttaacagcgccatcggcaagatccaggactctctgtcctctacagccagcgccctgggcaagctgcaggatgtggtgaatcagaacgcccaggccctgaataccctggtgaagcagctgagctccaacttcggcgccatctctagcgtgctgaatgacatcctgagccggctggacccccctgaggcagaggtgcagatcgacaggctgatcacaggccgcctgcagagcctgcagacctacgtgacacagcagctgatcagggcagcagagatcagagcctccgccaatctggccgccaccaagatgagcgagtgcgtgctgggacagtccaagagggtggacttttgtggcaagggctatcacctgatgtctttcccacagagcgcccctcacggcgtggtgtttctgcacgtgacctacgtgccagcccaggagaagaacttcaccacagcaccagccatctgccacgatggaaaggcacactttcctagggagggcgtgttcgtgtctaacggcacccactggtttgtgacacagcgcaatttctacgagccacagatcatcaccacagacaatacattcgtgagcggcaactgtgatgtggtgatcggcatcgtgaacaataccgtgtatgatccactgcagcccgagctggactcctttaaggaggagctggataagtacttcaagaatcacacctctcccgacgtggatctgggcgacatctccggcatcaatgcctctgtggtgaacatccagaaggagatcgaccggctgaacgaggtggccaagaatctgaacgagagcctgatcgatctgcaggagctgggcaagtatgagcagtacatcaagggctctggcagagagaacctgtatttccagggaggaggaggcagcggatacatccctgaggcaccaagggacggacaggcctacgtgcgcaaggatggcgagtgggtgctgctgtccacctttctgggccatcatcaccaccaccaccaccactga

SEQ ID NO: 5027 - DNA, 3846 bp, Artificial Sequence
  Description of Artificial Sequence: Synthetic polynucleotide
atgggcatcctgccaagcccaggaatgcccgccctgctgtctctggtgagcctgctgtccgtgctgctgatgggatgcgtggcagagacaggcacacagtgcgtgaacctgaccacaaggacccagctgccccctgcctataccaattctttcacacggggcgtgtactatcccgacaaggtgtttagaagctccgtgctgcactccacacaggatctgtttctgcctttcttttctaacgtgacctggttccacgccatccacgtgtccggcaccaatggcacaaagcggttcgacaatcccgtgctgccttttaacgatggcgtgtacttcgccagcaccgagaagtccaacatcatcagaggctggatctttggcaccacactggactctaagacacagagcctgctgatcgtgaacaatgccaccaacgtggtgatcaaggtgtgcgagttccagttttgtaatgatccattcctgggcgtgtactatcacaagaacaataagtcctggatggagtctgagtttcgcgtgtattctagcgccaacaattgcacatttgagtacgtgagccagcccttcctgatggacctggagggcaagcagggcaatttcaagaacctgagggagttcgtgtttaagaatatcgatggctacttcaagatctacagcaagcacaccccaatcaacctggtgcgcgacctgccacagggattctccgccctggagccactggtggatctgcccatcggcatcaacatcacccggtttcagacactgctggccctgcacagatcctacctgacaccaggcgactcctctagcggatggaccgcaggagctgccgcctactatgtgggctatctgcagccccggaccttcctgctgaagtacaacgagaatggcaccatcacagacgcagtggattgcgccctggaccccctgtctgagacaaagtgtacactgaagagctttaccgtggagaagggcatctatcagacaagcaatttcagggtgcagcctaccgagtccatcgtgcgctttcccaatatcacaaacctgtgcccttttggcgaggtgttcaacgccaccagattcgccagcgtgtacgcctggaatcggaagagaatctccaactgcgtggccgactattctgtgctgtacaactccgcctctttcagcacctttaagtgctatggcgtgtctcccacaaagctgaatgatctgtgctttaccaacgtgtacgccgatagcttcgtgatcaggggagacgaagtgagacagatcgcaccaggacagacaggaaagatcgcagactacaattataagctgcctgacgatttcaccggctgcgtgatcgcctggaactccaacaatctggattctaaaatgggcggcaactacaattatctgtacaggctgtttcgcaagtccaatctgaagccattcgagcgggacatctccacagagatctaccaggccggctctaccccctgcaatggcgtggagggctttaactgttatttccctctgcagtcttacggcttccagccaacaaacggcgtgggctatcagccctacagagtggtggtgctgtcctttgagctgctgcacgcaccagcaacagtgtgcggcccaaagaagtctaccaatctggtgaagaacaagtgcgtgaacttcaacttcaacggactgaccggcacaggcgtgctgaccgagagcaataagaagttcctgccttttcagcagttcggcagggacatcgcagataccacagacgccgtgcgcgaccctcagaccctggagatcctggacatcacaccatgcagcttcggcggcgtgtccgtgatcacaccaggcaccaatacatccaaccaggtggccgtgctgtatcaggacgtgaattgtaccgaggtgcccgtggcaatccacgcagatcagctgacccctacatggcgggtgtactctaccggcagcaacgtgttccagacaagagccggatgcctgatcggagcagagcacgtgaacaatagctatgagtgcgacatccctatcggcgccggcatctgtgccagctaccagacccagacaaactccccatctggagcaggctccgtggccagccagtccatcatcgcctataccatgagcctgggcgccgagaacagcgtggcctactccaacaattctatcgccatccctaccaacttcacaatcagcgtgaccacagagatcctgccagtgtctatgaccaagacaagcgtggactgcacaatgtatatctgtggcgatagcaccgagtgctccaacctgctgctgcagtacggctccttttgtacccagctgaatagagccctgacaggcatcgccgtggagcaggataagaacacacaggaggtgttcgcccaggtgaagcagatctacaagaccccacccatcaaggactttggcggcttcaacttcagccagatcctgcctgatccaagcaagccctccaagaggtcttttatcgaggacctgctgttcaacaaggtgaccctggccgatgccggcttcatcaagcagtatggagattgcctgggagacatcgcagcccgcgacctgatctgtgcccagaagtttaatggcctgaccgtgctgcctccactgctgacagatgagatgatcgcccagtacacatctgccctgctggccggcaccatcacaagcggatggaccttcggcgcaggagccgccctgcagatcccttttgccatgcagatggcctataggttcaacggcatcggcgtgacccagaatgtgctgtacgagaaccagaagctgatcgccaatcagtttaacagcgccatcggcaagatccaggactctctgtcctctacagccagcgccctgggcaagctgcaggatgtggtgaatcagaacgcccaggccctgaataccctggtgaagcagctgagctccaacttcggcgccatctctagcgtgctgaatgacatcctgagccggctggacccccctgaggcagaggtgcagatcgacaggctgatcacaggccgcctgcagagcctgcagacctacgtgacacagcagctgatcagggcagcagagatcagagcctccgccaatctggccgccaccaagatgagcgagtgcgtgctgggacagtccaagagggtggacttttgtggcaagggctatcacctgatgtctttcccacagagcgcccctcacggcgtggtgtttctgcacgtgacctacgtgccagcccaggagaagaacttcaccacagcaccagccatctgccacgatggaaaggcacactttcctagggagggcgtgttcgtgtctaacggcacccactggtttgtgacacagcgcaatttctacgagccacagatcatcaccacagacaatacattcgtgagcggcaactgtgatgtggtgatcggcatcgtgaacaataccgtgtatgatccactgcagcccgagctggactcctttaaggaggagctggataagtacttcaagaatcacacctctcccgacgtggatctgggcgacatctccggcatcaatgcctctgtggtgaacatccagaaggagatcgaccggctgaacgaggtggccaagaatctgaacgagagcctgatcgatctgcaggagctgggcaagtatgagcagtacatcaagggctctggcagagagaacctgtatttccagggaggaggaggcagcggatacatccctgaggcaccaagggacggacaggcctacgtgcgcaaggatggcgagtgggtgctgctgtccacctttctgggccatcatcaccaccaccaccaccactga

SEQ ID NO: 5028 - DNA, 3846 bp, Artificial Sequence
  Description of Artificial Sequence: Synthetic polynucleotide
atgggcatcctgccaagcccaggaatgcccgccctgctgtctctggtgagcctgctgtccgtgctgctgatgggatgcgtggcagagacaggcacacagtgcgtgaacctgaccacaaggacccagctgccccctgcctataccaattctttcacacggggcgtgtactatcccgacaaggtgtttagaagctccgtgctgcactccacacaggatctgtttctgcctttcttttctaacgtgacctggttccacgccatccacgtgtccggcaccaatggcacaaagcggttcgacaatcccgtgctgccttttaacgatggcgtgtacttcgccagcaccgagaagtccaacatcatcagaggctggatctttggcaccacactggactctaagacacagagcctgctgatcgtgaacaatgccaccaacgtggtgatcaaggtgtgcgagttccagttttgtaatgatccattcctgggcgtgtactatcacaagaacaataagtcctggatggagtctgagtttcgcgtgtattctagcgccaacaattgcacatttgagtacgtgagccagcccttcctgatggacctggagggcaagcagggcaatttcaagaacctgagggagttcgtgtttaagaatatcgatggctacttcaagatctacagcaagcacaccccaatcaacctggtgcgcgacctgccacagggattctccgccctggagccactggtggatctgcccatcggcatcaacatcacccggtttcagacactgctggccctgcacagatcctacctgacaccaggcgactcctctagcggatggaccgcaggagctgccgcctactatgtgggctatctgcagccccggaccttcctgctgaagtacaacgagaatggcaccatcacagacgcagtggattgcgccctggaccccctgtctgagacaaagtgtacactgaagagctttaccgtggagaagggcatctatcagacaagcaatttcagggtgcagcctaccgagtccatcgtgcgctttcccaatatcacaaacctgtgcccttttggcgagatattcaacgccaccagattcgccagcgtgtacgcctggaatcggaagagaatctccaactgcgtggccgactattctgtgctgtacaactccgcctctttcagcacctttaagtgctatggcgtgtctcccacaaagctgaatgatctgtgctttaccaacgtgtacgccgatagcttcgtgatcaggggagacgaagtgagacagatcgcaccaggacagacaggaaagatcgcagactacaattataagctgcctgacgatttcaccggctgcgtgatcgcctggaactccaacaatctggattctaaagtgggcggcaactacaattatctgtacaggctgtttcgcaagtccaatctgaagccattcgagcgggacatctccacagagatctaccaggccggctctaccccctgcaatggcgtggagggctttaactgttatttccctctgcagtcttacggcttccagccaacaaacggcgtgggctatcagccctacagagtggtggtgctgtcctttgagctgctgcacgcaccagcaacagtgtgcggcccaaagaagtctaccaatctggtgaagaacaagtgcgtgaacttcaacttcaacggactgaccggcacaggcgtgctgaccgagagcaataagaagttcctgccttttcagcagttcggcagggacatcgcagataccacagacgccgtgcgcgaccctcagaccctggagatcctggacatcacaccatgcagcttcggcggcgtgtccgtgatcacaccaggcaccaatacatccaaccaggtggccgtgctgtatcaggacgtgaattgtaccgaggtgcccgtggcaatccacgcagatcagctgacccctacatggcgggtgtactctaccggcagcaacgtgttccagacaagagccggatgcctgatcggagcagagcacgtgaacaatagctatgagtgcgacatccctatcggcgccggcatctgtgccagctaccagacccagacaaactccccatctggagcaggctccgtggccagccagtccatcatcgcctataccatgagcctgggcgccgagaacagcgtggcctactccaacaattctatcgccatccctaccaacttcacaatcagcgtgaccacagagatcctgccagtgtctatgaccaagacaagcgtggactgcacaatgtatatctgtggcgatagcaccgagtgctccaacctgctgctgcagtacggctccttttgtacccagctgaatagagccctgacaggcatcgccgtggagcaggataagaacacacaggaggtgttcgcccaggtgaagcagatctacaagaccccacccatcaaggactttggcggcttcaacttcagccagatcctgcctgatccaagcaagccctccaagaggtcttttatcgaggacctgctgttcaacaaggtgaccctggccgatgccggcttcatcaagcagtatggagattgcctgggagacatcgcagcccgcgacctgatctgtgcccagaagtttaatggcctgaccgtgctgcctccactgctgacagatgagatgatcgcccagtacacatctgccctgctggccggcaccatcacaagcggatggaccttcggcgcaggagccgccctgcagatcccttttgccatgcagatggcctataggttcaacggcatcggcgtgacccagaatgtgctgtacgagaaccagaagctgatcgccaatcagtttaacagcgccatcggcaagatccaggactctctgtcctctacagccagcgccctgggcaagctgcaggatgtggtgaatcagaacgcccaggccctgaataccctggtgaagcagctgagctccaacttcggcgccatctctagcgtgctgaatgacatcctgagccggctggacccccctgaggcagaggtgcagatcgacaggctgatcacaggccgcctgcagagcctgcagacctacgtgacacagcagctgatcagggcagcagagatcagagcctccgccaatctggccgccaccaagatgagcgagtgcgtgctgggacagtccaagagggtggacttttgtggcaagggctatcacctgatgtctttcccacagagcgcccctcacggcgtggtgtttctgcacgtgacctacgtgccagcccaggagaagaacttcaccacagcaccagccatctgccacgatggaaaggcacactttcctagggagggcgtgttcgtgtctaacggcacccactggtttgtgacacagcgcaatttctacgagccacagatcatcaccacagacaatacattcgtgagcggcaactgtgatgtggtgatcggcatcgtgaacaataccgtgtatgatccactgcagcccgagctggactcctttaaggaggagctggataagtacttcaagaatcacacctctcccgacgtggatctgggcgacatctccggcatcaatgcctctgtggtgaacatccagaaggagatcgaccggctgaacgaggtggccaagaatctgaacgagagcctgatcgatctgcaggagctgggcaagtatgagcagtacatcaagggctctggcagagagaacctgtatttccagggaggaggaggcagcggatacatccctgaggcaccaagggacggacaggcctacgtgcgcaaggatggcgagtgggtgctgctgtccacctttctgggccatcatcaccaccaccaccaccactga

SEQ ID NO: 5029 - DNA, 3846 bp, Artificial Sequence
  Description of Artificial Sequence: Synthetic polynucleotide
atgggcatcctgccaagcccaggaatgcccgccctgctgtctctggtgagcctgctgtccgtgctgctgatgggatgcgtggcagagacaggcacacagtgcgtgaacctgaccacaaggacccagctgccccctgcctataccaattctttcacacggggcgtgtactatcccgacaaggtgtttagaagctccgtgctgcactccacacaggatctgtttctgcctttcttttctaacgtgacctggttccacgccatccacgtgtccggcaccaatggcacaaagcggttcgacaatcccgtgctgccttttaacgatggcgtgtacttcgccagcaccgagaagtccaacatcatcagaggctggatctttggcaccacactggactctaagacacagagcctgctgatcgtgaacaatgccaccaacgtggtgatcaaggtgtgcgagttccagttttgtaatgatccattcctgggcgtgtactatcacaagaacaataagtcctggatggagtctgagtttcgcgtgtattctagcgccaacaattgcacatttgagtacgtgagccagcccttcctgatggacctggagggcaagcagggcaatttcaagaacctgagggagttcgtgtttaagaatatcgatggctacttcaagatctacagcaagcacaccccaatcaacctggtgcgcgacctgccacagggattctccgccctggagccactggtggatctgcccatcggcatcaacatcacccggtttcagacactgctggccctgcacagatcctacctgacaccaggcgactcctctagcggatggaccgcaggagctgccgcctactatgtgggctatctgcagccccggaccttcctgctgaagtacaacgagaatggcaccatcacagacgcagtggattgcgccctggaccccctgtctgagacaaagtgtacactgaagagctttaccgtggagaagggcatctatcagacaagcaatttcagggtgcagcctaccgagtccatcgtgcgctttcccaatatcacaaacctgtgcccttttggcgaggtgttcaacgccaccagattcgccagcgtgtacgcctggaatcggaagagaatctccaactgcgtggccgactattctgtgctgtacgattccgcctctttcagcacctttaagtgctatggcgtgtctcccacaaagctgaatgatctgtgctttaccaacgtgtacgccgatagcttcgtgatcaggggagacgaagtgagacagatcgcaccaggacagacaggaaagatcgcagactacaattataagctgcctgacgatttcaccggctgcgtgatcgcctggaactccaacaatctggattctaaagtgggcggcaactacaattatctgtacaggctgtttcgcaagtccaatctgaagccattcgagcgggacatctccacagagatctaccaggccggctctaccccctgcaatggcgtggagggctttaactgttatttccctctgcagtcttacggcttccagccaacaaacggcgtgggctatcagccctacagagtggtggtgctgtcctttgagctgctgcacgcaccagcaacagtgtgcggcccaaagaagtctaccaatctggtgaagaacaagtgcgtgaacttcaacttcaacggactgaccggcacaggcgtgctgaccgagagcaataagaagttcctgccttttcagcagttcggcagggacatcgcagataccacagacgccgtgcgcgaccctcagaccctggagatcctggacatcacaccatgcagcttcggcggcgtgtccgtgatcacaccaggcaccaatacatccaaccaggtggccgtgctgtatcaggacgtgaattgtaccgaggtgcccgtggcaatccacgcagatcagctgacccctacatggcgggtgtactctaccggcagcaacgtgttccagacaagagccggatgcctgatcggagcagagcacgtgaacaatagctatgagtgcgacatccctatcggcgccggcatctgtgccagctaccagacccagacaaactccccatctggagcaggctccgtggccagccagtccatcatcgcctataccatgagcctgggcgccgagaacagcgtggcctactccaacaattctatcgccatccctaccaacttcacaatcagcgtgaccacagagatcctgccagtgtctatgaccaagacaagcgtggactgcacaatgtatatctgtggcgatagcaccgagtgctccaacctgctgctgcagtacggctccttttgtacccagctgaatagagccctgacaggcatcgccgtggagcaggataagaacacacaggaggtgttcgcccaggtgaagcagatctacaagaccccacccatcaaggactttggcggcttcaacttcagccagatcctgcctgatccaagcaagccctccaagaggtcttttatcgaggacctgctgttcaacaaggtgaccctggccgatgccggcttcatcaagcagtatggagattgcctgggagacatcgcagcccgcgacctgatctgtgcccagaagtttaatggcctgaccgtgctgcctccactgctgacagatgagatgatcgcccagtacacatctgccctgctggccggcaccatcacaagcggatggaccttcggcgcaggagccgccctgcagatcccttttgccatgcagatggcctataggttcaacggcatcggcgtgacccagaatgtgctgtacgagaaccagaagctgatcgccaatcagtttaacagcgccatcggcaagatccaggactctctgtcctctacagccagcgccctgggcaagctgcaggatgtggtgaatcagaacgcccaggccctgaataccctggtgaagcagctgagctccaacttcggcgccatctctagcgtgctgaatgacatcctgagccggctggacccccctgaggcagaggtgcagatcgacaggctgatcacaggccgcctgcagagcctgcagacctacgtgacacagcagctgatcagggcagcagagatcagagcctccgccaatctggccgccaccaagatgagcgagtgcgtgctgggacagtccaagagggtggacttttgtggcaagggctatcacctgatgtctttcccacagagcgcccctcacggcgtggtgtttctgcacgtgacctacgtgccagcccaggagaagaacttcaccacagcaccagccatctgccacgatggaaaggcacactttcctagggagggcgtgttcgtgtctaacggcacccactggtttgtgacacagcgcaatttctacgagccacagatcatcaccacagacaatacattcgtgagcggcaactgtgatgtggtgatcggcatcgtgaacaataccgtgtatgatccactgcagcccgagctggactcctttaaggaggagctggataagtacttcaagaatcacacctctcccgacgtggatctgggcgacatctccggcatcaatgcctctgtggtgaacatccagaaggagatcgaccggctgaacgaggtggccaagaatctgaacgagagcctgatcgatctgcaggagctgggcaagtatgagcagtacatcaagggctctggcagagagaacctgtatttccagggaggaggaggcagcggatacatccctgaggcaccaagggacggacaggcctacgtgcgcaaggatggcgagtgggtgctgctgtccacctttctgggccatcatcaccaccaccaccaccactga

SEQ ID NO: 5030 - DNA, 3846 bp, Artificial Sequence
  Description of Artificial Sequence: Synthetic polynucleotide
atgggcatcctgccaagcccaggaatgcccgccctgctgtctctggtgagcctgctgtccgtgctgctgatgggatgcgtggcagagacaggcacacagtgcgtgaacctgaccacaaggacccagctgccccctgcctataccaattctttcacacggggcgtgtactatcccgacaaggtgtttagaagctccgtgctgcactccacacaggatctgtttctgcctttcttttctaacgtgacctggttccacgccatccacgtgtccggcaccaatggcacaaagcggttcgacaatcccgtgctgccttttaacgatggcgtgtacttcgccagcaccgagaagtccaacatcatcagaggctggatctttggcaccacactggactctaagacacagagcctgctgatcgtgaacaatgccaccaacgtggtgatcaaggtgtgcgagttccagttttgtaatgatccattcctgggcgtgtactatcacaagaacaataagtcctggatggagtctgagtttcgcgtgtattctagcgccaacaattgcacatttgagtacgtgagccagcccttcctgatggacctggagggcaagcagggcaatttcaagaacctgagggagttcgtgtttaagaatatcgatggctacttcaagatctacagcaagcacaccccaatcaacctggtgcgcgacctgccacagggattctccgccctggagccactggtggatctgcccatcggcatcaacatcacccggtttcagacactgctggccctgcacagatcctacctgacaccaggcgactcctctagcggatggaccgcaggagctgccgcctactatgtgggctatctgcagccccggaccttcctgctgaagtacaacgagaatggcaccatcacagacgcagtggattgcgccctggaccccctgtctgagacaaagtgtacactgaagagctttaccgtggagaagggcatctatcagacaagcaatttcagggtgcagcctaccgagtccatcgtgcgctttcccaatatcacaaacctgtgcccttttggcgaggtgttcaacgccaccagattcgccagcgtgtacgcctggaatcggaagagaatctccaactgcgtggccgactattctgtgctgtacaactccgcctctttcagcacctttaagtgctatggcgtgtctcccacaaagctgaatgatctgtgctttaccaacgtgtacgccgatagcttcgtgatcaggggagacgaagtgagacagatcgcaccaggacagacaggaaagatcgcagactacaattataagctgcctgacgatttcaccggctgcgtgatcgcctggaactccaacaatctggattctaaagtgggcggcaactacaattatctgtacaggctgtttcgcaagtccaatctgaagccattcgagcgggacatctccacagagatctaccaggccggctctaccccctgcaatggcgtggagggctttaactgttatttccctctgcagtcttacggcttccagccaacaaacggcgtgggctatcagccctacagagtggtggtgctgtcctttgagctgctgcacgcaccagcaacagtgtgcggcccaaagaagtctaccaatctggtgaagaacaagtgcgtgaacttcaacttcaacggactgaccggcacaggcgtgctgaccgagagcaataagaagttcctgccttttcagcagttcggcagggacatcgcagataccacagacgccgtgcgcgaccctcagaccctggagatcctggacatcacaccatgcagcttcggcggcgtgtccgtgatcacaccaggcaccaatacatccaaccaggtggccgtgctgtatcaggacgtgaattgtaccgaggtgcccgtggcaatccacgcagatcagctgacccctacatggcgggtgtactctaccggcagcaacgtgttccagacaagagccggatgcctgatcggagcagagcacgtgaacaatagctatgagtgcgacatccctatcggcgccggcatctgtgccagctaccagacccagacaaactccccatctggagcaggctccgtggccagccagtccatcatcgcctataccatgagcctgggcgccactaacagcgtggcctactccaacaattctatcgccatccctaccaacttcacaatcagcgtgaccacagagatcctgccagtgtctatgaccaagacaagcgtggactgcacaatgtatatctgtggcgatagcaccgagtgctccaacctgctgctgcagtacggctccttttgtacccagctgaatagagccctgacaggcatcgccgtggagcaggataagaacacacaggaggtgttcgcccaggtgaagcagatctacaagaccccacccatcaaggactttggcggcttcaacttcagccagatcctgcctgatccaagcaagccctccaagaggtcttttatcgaggacctgctgttcaacaaggtgaccctggccgatgccggcttcatcaagcagtatggagattgcctgggagacatcgcagcccgcgacctgatctgtgcccagaagtttaatggcctgaccgtgctgcctccactgctgacagatgagatgatcgcccagtacacatctgccctgctggccggcaccatcacaagcggatggaccttcggcgcaggagccgccctgcagatcccttttgccatgcagatggcctataggttcaacggcatcggcgtgacccagaatgtgctgtacgagaaccagaagctgatcgccaatcagtttaacagcgccatcggcaagatccaggactctctgtcctctacagccagcgccctgggcaagctgcaggatgtggtgaatcagaacgcccaggccctgaataccctggtgaagcagctgagctccaacttcggcgccatctctagcgtgctgaatgacatcctgagccggctggacccccctgaggcagaggtgcagatcgacaggctgatcacaggccgcctgcagagcctgcagacctacgtgacacagcagctgatcagggcagcagagatcagagcctccgccaatctggccgccaccaagatgagcgagtgcgtgctgggacagtccaagagggtggacttttgtggcaagggctatcacctgatgtctttcccacagagcgcccctcacggcgtggtgtttctgcacgtgacctacgtgccagcccaggagaagaacttcaccacagcaccagccatctgccacgatggaaaggcacactttcctagggagggcgtgttcgtgtctaacggcacccactggtttgtgacacagcgcaatttctacgagccacagatcatcaccacagacaatacattcgtgagcggcaactgtgatgtggtgatcggcatcgtgaacaataccgtgtatgatccactgcagcccgagctggactcctttaaggaggagctggataagtacttcaagaatcacacctctcccgacgtggatctgggcgacatctccggcatcaatgcctctgtggtgaacatccagaaggagatcgaccggctgaacgaggtggccaagaatctgaacgagagcctgatcgatctgcaggagctgggcaagtatgagcagtacatcaagggctctggcagagagaacctgtatttccagggaggaggaggcagcggatacatccctgaggcaccaagggacggacaggcctacgtgcgcaaggatggcgagtgggtgctgctgtccacctttctgggccatcatcaccaccaccaccaccactga

SEQ ID NO: 5031 - DNA, 3846 bp, Artificial Sequence
  Description of Artificial Sequence: Synthetic polynucleotide
atgggcatcctgccaagcccaggaatgcccgccctgctgtctctggtgagcctgctgtccgtgctgctgatgggatgcgtggcagagacaggcacacagtgcgtgaacctgaccacaaggacccagctgccccctgcctataccaattctttcacacggggcgtgtactatcccgacaaggtgtttagaagctccgtgctgcactccacacaggatctgtttctgcctttcttttctaacgtgacctggttccacgccatccacgtgtccggcaccaatggcacaaagcggttcgacaatcccgtgctgccttttaacgatggcgtgtacttcgccagcaccgagaagtccaacatcatcagaggctggatctttggcaccacactggactctaagacacagagcctgctgatcgtgaacaatgccaccaacgtggtgatcaaggtgtgcgagttccagttttgtaatgatccattcctgggcgtgtactatcacaagaacaataagtcctggatggagtctgagtttcgcgtgtattctagcgccaacaattgcacatttgagtacgtgagccagcccttcctgatggacctggagggcaagcagggcaatttcaagaacctgagggagttcgtgtttaagaatatcgatggctacttcaagatctacagcaagcacaccccaatcaacctggtgcgcgacctgccacagggattctccgccctggagccactggtggatctgcccatcggcatcaacatcacccggtttcagacactgctggccctgcacagatcctacctgacaccaggcgactcctctagcggatggaccgcaggagctgccgcctactatgtgggctatctgcagccccggaccttcctgctgaagtacaacgagaatggcaccatcacagacgcagtggattgcgccctggaccccctgtctgagacaaagtgtacactgaagagctttaccgtggagaagggcatctatcagacaagcaatttcagggtgcagcctaccgagtccatcgtgcgctttcccaatatcacaaacctgtgcccttttggcgaggtgttcaacgccaccagattcgccagcgtgtacgcctggaatcggaagagaatctccaactgcgtggccgactattctgtgctgtacaactccgcctctttcagcacctttaagtgctatggcgtgtctcccacaaagctgaatgatctgtgctttaccaacgtgtacgccgatagcttcgtgatcaggggagacgaagtgagacagatcgcaccaggacagacaggaaagatcgcagactacaattataagctgcctgacgatttcaccggctgcgtgatcgcctggaactccaacaatctggattctaaagtgggcggcaactacaattatctgtacaggctgtttcgcaagtccaatctgaagccattcgagcgggacatctccacagagatctaccaggccggctctaccccctgcaatggcgtggagggctttaactgttatttccctctgcagtcttacggcttccagccaacaaacggcgtgggctatcagccctacagagtggtggtgctgtcctttgagctgctgcacgcaccagcaacagtgtgcggcccaaagaagtctaccaatctggtgaagaacaagtgcgtgaacttcaacttcaacggactgaccggcacaggcgtgctgaccgagagcaataagaagttcctgccttttcagcagttcggcagggacatcgcagataccacagacgccgtgcgcgaccctcagaccctggagatcctggacatcacaccatgcagcttcggcggcgtgtccgtgatcacaccaggcaccaatacatccaaccaggtggccgtgctgtatcaggacgtgaattgtaccgaggtgcccgtggcaatccacgcagatcagctgacccctacatggcgggtgtactctaccggcagcaacgtgttccagacaagagccggatgcctgatcggagcagagcacgtgaacaatagctatgagtgcgacatccctatcggcgccggcatctgtgccagctaccagacccagacaaactccccatctggagcaggctccgtggccagccagtccatcatcgcctataccatgagcctgggcgccgagaacagcgtggcctactccaacaattctatcgccatccctaccaacttcacaatcagcgtgaccacagagatcctgccagtgtctatgaccaagacaagcgtggactgcacaatgtatatctgtggcgatagcaccgagtgctccaacctgctgctgcagtacggctccttttgtacccagctgaatagagccctgacaggcatcgccgtggagcaggataagaacacacaggaggtgttcgcccaggtgaagcagatctacaagaccccacccatcaaggactttggcggcttcaacttcagccagatcctgcctgatccaagcaagccctccaagaggtcttttatcgaggacctgctgttcaacaaggtgaccctggccgatgccggcttcatcaagcagtatggagattgcctgggagacatcgcagcccgcgacctgatctgtgcccagaagtttaatggcctgaccgtgctgcctccactgctgacagatgagatgatcgcccagtacacatctgccctgctggccggcaccatcacaagcggatggaccttcggcgcaggagccgccctgcagatcccttttgccatgcagatggcctataggttcaacggcatcggcgtgacccagaatgtgctgtacgagaaccagaagctgatcgccaatcagtttaacagcgccatcggcaagatccaggactctctgtcctctacagccagcgccctgggcaagctgcaggatgtggtgaatcagaacgcccaggccctgaataccctggtgaagcagctgagctccaacttcggcgccatctctagcgtgctgaatgacatcctgagccggctggaaccccctgaggcagaggtgcagatcgacaggctgatcacaggccgcctgcagagcctgcagacctacgtgacacagcagctgatcagggcagcagagatcagagcctccgccaatctggccgccaccaagatgagcgagtgcgtgctgggacagtccaagagggtggacttttgtggcaagggctatcacctgatgtctttcccacagagcgcccctcacggcgtggtgtttctgcacgtgacctacgtgccagcccaggagaagaacttcaccacagcaccagccatctgccacgatggaaaggcacactttcctagggagggcgtgttcgtgtctaacggcacccactggtttgtgacacagcgcaatttctacgagccacagatcatcaccacagacaatacattcgtgagcggcaactgtgatgtggtgatcggcatcgtgaacaataccgtgtatgatccactgcagcccgagctggactcctttaaggaggagctggataagtacttcaagaatcacacctctcccgacgtggatctgggcgacatctccggcatcaatgcctctgtggtgaacatccagaaggagatcgaccggctgaacgaggtggccaagaatctgaacgagagcctgatcgatctgcaggagctgggcaagtatgagcagtacatcaagggctctggcagagagaacctgtatttccagggaggaggaggcagcggatacatccctgaggcaccaagggacggacaggcctacgtgcgcaaggatggcgagtgggtgctgctgtccacctttctgggccatcatcaccaccaccaccaccactga

SEQ ID NO: 5032 - DNA, 3846 bp, Artificial Sequence
  Description of Artificial Sequence: Synthetic polynucleotide
atgggcatcctgccaagcccaggaatgcccgccctgctgtctctggtgagcctgctgtccgtgctgctgatgggatgcgtggcagagacaggcacacagtgcgtgaacctgaccacaaggacccagctgccccctgcctataccaattctttcacacggggcgtgtactatcccgacaaggtgtttagaagctccgtgctgcactccacacaggatctgtttctgcctttcttttctaacgtgacctggttccacgccatccacgtgtccggcaccaatggcacaaagcggttcgacaatcccgtgctgccttttaacgatggcgtgtacttcgccagcaccgagaagtccaacatcatcagaggctggatctttggcaccacactggactctaagacagaaagcctgctgatcgtgaacaatgccaccaacgtggtgatcaaggtgtgcgagttccagttttgtaatgatccattcctgggcgtgtactatcacaagaacaataagtcctggatggagtctgagtttcgcgtgtattctagcgccaacaattgcacatttgagtacgtgagccagcccttcctgatggacctggagggcaagcagggcaatttcaagaacctgagggagttcgtgtttaagaatatcgatggctacttcaagatctacagcaagcacaccccaatcaacctggtgcgcgacctgccacagggattctccgccctggagccactggtggatctgcccatcggcatcaacatcacccggtttcagacactgctggccctgcacagatcctacctgacaccaggcgactcctctagcggatggaccgcaggagctgccgcctactatgtgggctatctgcagccccggaccttcctgctgaagtacaacgagaatggcaccatcacagacgcagtggattgcgccctggaccccctgtctgagacaaagtgtacactgaagagctttaccgtggagaagggcatctatcagacaagcaatttcagggtgcagcctaccgagtccatcgtgcgctttcccaatatcacaaacctgtgcccttttggcgaggtgttcaacgccaccagattcgccagcgtgtacgcctggaatcggaagagaatctccaactgcgtggccgactattctgtgctgtacaactccgcctctttcagcacctttaagtgctatggcgtgtctcccacaaagctgaatgatctgtgctttaccaacgtgtacgccgatagcttcgtgatcaggggagacgaagtgagacagatcgcaccaggacagacaggaaagatcgcagactacaattataagctgcctgacgatttcaccggctgcgtgatcgcctggaactccaacaatctggattctaaagtgggcggcaactacaattatctgtacaggctgtttcgcaagtccaatctgaagccattcgagcgggacatctccacagagatctaccaggccggctctaccccctgcaatggcgtggagggctttaactgttatttccctctgcagtcttacggcttccagccaacaaacggcgtgggctatcagccctacagagtggtggtgctgtcctttgagctgctgcacgcaccagcaacagtgtgcggcccaaagaagtctaccaatctggtgaagaacaagtgcgtgaacttcaacttcaacggactgaccggcacaggcgtgctgaccgagagcaataagaagttcctgccttttcagcagttcggcagggacatcgcagataccacagacgccgtgcgcgaccctcagaccctggagatcctggacatcacaccatgcagcttcggcggcgtgtccgtgatcacaccaggcaccaatacatccaaccaggtggccgtgctgtatcaggacgtgaattgtaccgaggtgcccgtggcaatccacgcagatcagctgacccctacatggcgggtgtactctaccggcagcaacgtgttccagacaagagccggatgcctgatcggagcagagcacgtgaacaatagctatgagtgcgacatccctatcggcgccggcatctgtgccagctaccagacccagacaaactccccatctggagcaggctccgtggccagccagtccatcatcgcctataccatgagcctgggcgccgagaacagcgtggcctactccaacaattctatcgccatccctaccaacttcacaatcagcgtgaccacagagatcctgccagtgtctatgaccaagacaagcgtggactgcacaatgtatatctgtggcgatagcaccgagtgctccaacctgctgctgcagtacggctccttttgtacccagctgaatagagccctgacaggcatcgccgtggagcaggataagaacacacaggaggtgttcgcccaggtgaagcagatctacaagaccccacccatcaaggactttggcggcttcaacttcagccagatcctgcctgatccaagcaagccctccaagaggtcttttatcgaggacctgctgttcaacaaggtgaccctggccgatgccggcttcatcaagcagtatggagattgcctgggagacatcgcagcccgcgacctgatctgtgcccagaagtttaatggcctgaccgtgctgcctccactgctgacagatgagatgatcgcccagtacacatctgccctgctggccggcaccatcacaagcggatggaccttcggcgcaggagccgccctgcagatcccttttgccatgcagatggcctataggttcaacggcatcggcgtgacccagaatgtgctgtacgagaaccagaagctgatcgccaatcagtttaacagcgccatcggcaagatccaggactctctgtcctctacagccagcgccctgggcaagctgcaggatgtggtgaatcagaacgcccaggccctgaataccctggtgaagcagctgagctccaacttcggcgccatctctagcgtgctgaatgacatcctgagccggctggacccccctgaggcagaggtgcagatcgacaggctgatcacaggccgcctgcagagcctgcagacctacgtgacacagcagctgatcagggcagcagagatcagagcctccgccaatctggccgccaccaagatgagcgagtgcgtgctgggacagtccaagagggtggacttttgtggcaagggctatcacctgatgtctttcccacagagcgcccctcacggcgtggtgtttctgcacgtgacctacgtgccagcccaggagaagaacttcaccacagcaccagccatctgccacgatggaaaggcacactttcctagggagggcgtgttcgtgtctaacggcacccactggtttgtgacacagcgcaatttctacgagccacagatcatcaccacagacaatacattcgtgagcggcaactgtgatgtggtgatcggcatcgtgaacaataccgtgtatgatccactgcagcccgagctggactcctttaaggaggagctggataagtacttcaagaatcacacctctcccgacgtggatctgggcgacatctccggcatcaatgcctctgtggtgaacatccagaaggagatcgaccggctgaacgaggtggccaagaatctgaacgagagcctgatcgatctgcaggagctgggcaagtatgagcagtacatcaagggctctggcagagagaacctgtatttccagggaggaggaggcagcggatacatccctgaggcaccaagggacggacaggcctacgtgcgcaaggatggcgagtgggtgctgctgtccacctttctgggccatcatcaccaccaccaccaccactga

SEQ ID NO: 5033 - DNA, 3846 bp, Artificial Sequence
  Description of Artificial Sequence: Synthetic polynucleotide
atgggcatcctgccaagcccaggaatgcccgccctgctgtctctggtgagcctgctgtccgtgctgctgatgggatgcgtggcagagacaggcacacagtgcgtgaacctgaccacaaggacccagctgccccctgcctataccaattctttcacacggggcgtgtactatcccgacaaggtgtttagaagctccgtgctgcactccacacaggatctgtttctgcctttcttttctaacgtgacctggttccacgccatccacgtgtccggcaccaatggcacaaagcggttcgacaatcccgtgctgccttttaacgatggcgtgtacttcgccagcaccgagaagtccaacatcatcagaggctggatctttggcaccacactggactctaagacacagagcctgctgatcgtgaacaatgccaccaacgtggtgatcaaggtgtgcgagttccagttttgtaatgatccattcctgggcgtgtactatcacaagaacaataagtcctggatggagtctgagtttcgcgtgtattctagcgccaacaattgcacatttgagtacgtgagccagcccttcctgatggacctggagggcaagcagggcaatttcaagaacctgagggagttcgtgtttaagaatatcgatggctacttcaagatctacagcaagcacaccccaatcaacctggtgcgcgacctgccacagggattctccgccctggagccactggtggatctgcccatcggcatcaacatcacccggtttcagacactgctggccctgcacagatcctacctgacaccaggcgactcctctagcggatggaccgcaggagctgccgcctactatgtgggctatctgcagccccggaccttcctgctgaagtacaacgagaatggcaccatcacagacgcagtggattgcgccctggaccccctgtctgagacaaagtgtacactgaagagctttaccgtggagaagggcatctatcagacaagcaatttcagggtgcagcctaccgagtccatcgtgcgctttcccaatatcacaaacctgtgcccttttggcgaggtgttcaacgccaccagattcgccagcgtgtacgcctggaatcggaagagaatctccaactgcgtggccgactattctgtgctgtacaactccgcctctttcagcacctttaagtgctatggcgtgtctcccacaaagctgaatgatctgtgctttaccaacgtgtacgccgatagcttcgtgatcaggggagacgaagtgagagaaatcgcaccaggacagacaggaaagatcgcagactacaattataagctgcctgacgatttcaccggctgcgtgatcgcctggaactccaacaatctggattctaaagtgggcggcaactacaattatctgtacaggctgtttcgcaagtccaatctgaagccattcgagcgggacatctccacagagatctaccaggccggctctaccccctgcaatggcgtggagggctttaactgttatttccctctgcagtcttacggcttccagccaacaaacggcgtgggctatcagccctacagagtggtggtgctgtcctttgagctgctgcacgcaccagcaacagtgtgcggcccaaagaagtctaccaatctggtgaagaacaagtgcgtgaacttcaacttcaacggactgaccggcacaggcgtgctgaccgagagcaataagaagttcctgccttttcagcagttcggcagggacatcgcagataccacagacgccgtgcgcgaccctcagaccctggagatcctggacatcacaccatgcagcttcggcggcgtgtccgtgatcacaccaggcaccaatacatccaaccaggtggccgtgctgtatcaggacgtgaattgtaccgaggtgcccgtggcaatccacgcagatcagctgacccctacatggcgggtgtactctaccggcagcaacgtgttccagacaagagccggatgcctgatcggagcagagcacgtgaacaatagctatgagtgcgacatccctatcggcgccggcatctgtgccagctaccagacccagacaaactccccatctggagcaggctccgtggccagccagtccatcatcgcctataccatgagcctgggcgccgagaacagcgtggcctactccaacaattctatcgccatccctaccaacttcacaatcagcgtgaccacagagatcctgccagtgtctatgaccaagacaagcgtggactgcacaatgtatatctgtggcgatagcaccgagtgctccaacctgctgctgcagtacggctccttttgtacccagctgaatagagccctgacaggcatcgccgtggagcaggataagaacacacaggaggtgttcgcccaggtgaagcagatctacaagaccccacccatcaaggactttggcggcttcaacttcagccagatcctgcctgatccaagcaagccctccaagaggtcttttatcgaggacctgctgttcaacaaggtgaccctggccgatgccggcttcatcaagcagtatggagattgcctgggagacatcgcagcccgcgacctgatctgtgcccagaagtttaatggcctgaccgtgctgcctccactgctgacagatgagatgatcgcccagtacacatctgccctgctggccggcaccatcacaagcggatggaccttcggcgcaggagccgccctgcagatcccttttgccatgcagatggcctataggttcaacggcatcggcgtgacccagaatgtgctgtacgagaaccagaagctgatcgccaatcagtttaacagcgccatcggcaagatccaggactctctgtcctctacagccagcgccctgggcaagctgcaggatgtggtgaatcagaacgcccaggccctgaataccctggtgaagcagctgagctccaacttcggcgccatctctagcgtgctgaatgacatcctgagccggctggacccccctgaggcagaggtgcagatcgacaggctgatcacaggccgcctgcagagcctgcagacctacgtgacacagcagctgatcagggcagcagagatcagagcctccgccaatctggccgccaccaagatgagcgagtgcgtgctgggacagtccaagagggtggacttttgtggcaagggctatcacctgatgtctttcccacagagcgcccctcacggcgtggtgtttctgcacgtgacctacgtgccagcccaggagaagaacttcaccacagcaccagccatctgccacgatggaaaggcacactttcctagggagggcgtgttcgtgtctaacggcacccactggtttgtgacacagcgcaatttctacgagccacagatcatcaccacagacaatacattcgtgagcggcaactgtgatgtggtgatcggcatcgtgaacaataccgtgtatgatccactgcagcccgagctggactcctttaaggaggagctggataagtacttcaagaatcacacctctcccgacgtggatctgggcgacatctccggcatcaatgcctctgtggtgaacatccagaaggagatcgaccggctgaacgaggtggccaagaatctgaacgagagcctgatcgatctgcaggagctgggcaagtatgagcagtacatcaagggctctggcagagagaacctgtatttccagggaggaggaggcagcggatacatccctgaggcaccaagggacggacaggcctacgtgcgcaaggatggcgagtgggtgctgctgtccacctttctgggccatcatcaccaccaccaccaccactga

SEQ ID NO: 5034 - DNA, 3846 bp, Artificial Sequence
  Description of Artificial Sequence: Synthetic polynucleotide
atgggcatcctgccaagcccaggaatgcccgccctgctgtctctggtgagcctgctgtccgtgctgctgatgggatgcgtggcagagacaggcacacagtgcgtgaacctgaccacaaggacccagctgccccctgcctataccaattctttcacacggggcgtgtactatcccgacaaggtgtttagaagctccgtgctgcactccacacaggatctgtttctgcctttcttttctaacgtgacctggttccacgccatccacgtgtccggcaccaatggcacaaagcggttcgacaatcccgtgctgccttttaacgatggcgtgtacttcgccagcaccgagaagtccaacatcatcagaggctggatctttggcaccacactggactctaagacacagagcctgctgatcgtgaacaatgccaccaacgtggtgatcaaggtgtgcgagttccagttttgtaatgatccattcctgggcgtgtactatcacaagaacaataagtcctggatggagtctgagtttcgcgtgtattctagcgccaacaattgcacatttgagtacgtgagccagcccttcctgatggacctggagggcaagcagggcaatttcaagaacctgagggagttcgtgtttaagaatatcgatggctacttcaagatctacagcaagcacaccccaatcaacctggtgcgcgacctgccacagggattctccgccctggagccactggtggatctgcccatcggcatcaacatcacccggtttcagacactgctggccctgcacagatcctacctgacaccaggcgactcctctagcggatggaccgcaggagctgccgcctactatgtgggctatctgcagccccggaccttcctgctgaagtacaacgagaatggcaccatcacagacgcagtggattgcgccctggaccccctgtctgagacaaagtgtacactgaagagctttaccgtggagaagggcatctatcagacaagcaatttcagggtgcagcctaccgagtccatcgtgcgctttcccaatatcacaaacctgtgcccttttggcgaggtgttcaacgccaccagattcgccagcgtgtacgcctggaatcggaagagaatctccaactgcgtggccgactattctgtgctgtacaactccgcctctttcagcacctttaagtgctatggcgtgtctcccacaaagctgaatgatctgtgctttaccaacgtgtacgccgatagcttcgtgatcaggggagacgaagtgagacagatcgcaccaggacagacaggaaagatcgcagactacaattataagctgcctgacgatttcaccggctgcgtgatcgcctggaactccaaaaatctggattctaaagtgggcggcaactacaattatctgtacaggctgtttcgcaagtccaatctgaagccattcgagcgggacatctccacagagatctaccaggccggctctaccccctgcaatggcgtggagggctttaactgttatttccctctgcagtcttacggcttccagccaacaaacggcgtgggctatcagccctacagagtggtggtgctgtcctttgagctgctgcacgcaccagcaacagtgtgcggcccaaagaagtctaccaatctggtgaagaacaagtgcgtgaacttcaacttcaacggactgaccggcacaggcgtgctgaccgagagcaataagaagttcctgccttttcagcagttcggcagggacatcgcagataccacagacgccgtgcgcgaccctcagaccctggagatcctggacatcacaccatgcagcttcggcggcgtgtccgtgatcacaccaggcaccaatacatccaaccaggtggccgtgctgtatcaggacgtgaattgtaccgaggtgcccgtggcaatccacgcagatcagctgacccctacatggcgggtgtactctaccggcagcaacgtgttccagacaagagccggatgcctgatcggagcagagcacgtgaacaatagctatgagtgcgacatccctatcggcgccggcatctgtgccagctaccagacccagacaaactccccatctggagcaggctccgtggccagccagtccatcatcgcctataccatgagcctgggcgccgagaacagcgtggcctactccaacaattctatcgccatccctaccaacttcacaatcagcgtgaccacagagatcctgccagtgtctatgaccaagacaagcgtggactgcacaatgtatatctgtggcgatagcaccgagtgctccaacctgctgctgcagtacggctccttttgtacccagctgaatagagccctgacaggcatcgccgtggagcaggataagaacacacaggaggtgttcgcccaggtgaagcagatctacaagaccccacccatcaaggactttggcggcttcaacttcagccagatcctgcctgatccaagcaagccctccaagaggtcttttatcgaggacctgctgttcaacaaggtgaccctggccgatgccggcttcatcaagcagtatggagattgcctgggagacatcgcagcccgcgacctgatctgtgcccagaagtttaatggcctgaccgtgctgcctccactgctgacagatgagatgatcgcccagtacacatctgccctgctggccggcaccatcacaagcggatggaccttcggcgcaggagccgccctgcagatcccttttgccatgcagatggcctataggttcaacggcatcggcgtgacccagaatgtgctgtacgagaaccagaagctgatcgccaatcagtttaacagcgccatcggcaagatccaggactctctgtcctctacagccagcgccctgggcaagctgcaggatgtggtgaatcagaacgcccaggccctgaataccctggtgaagcagctgagctccaacttcggcgccatctctagcgtgctgaatgacatcctgagccggctggacccccctgaggcagaggtgcagatcgacaggctgatcacaggccgcctgcagagcctgcagacctacgtgacacagcagctgatcagggcagcagagatcagagcctccgccaatctggccgccaccaagatgagcgagtgcgtgctgggacagtccaagagggtggacttttgtggcaagggctatcacctgatgtctttcccacagagcgcccctcacggcgtggtgtttctgcacgtgacctacgtgccagcccaggagaagaacttcaccacagcaccagccatctgccacgatggaaaggcacactttcctagggagggcgtgttcgtgtctaacggcacccactggtttgtgacacagcgcaatttctacgagccacagatcatcaccacagacaatacattcgtgagcggcaactgtgatgtggtgatcggcatcgtgaacaataccgtgtatgatccactgcagcccgagctggactcctttaaggaggagctggataagtacttcaagaatcacacctctcccgacgtggatctgggcgacatctccggcatcaatgcctctgtggtgaacatccagaaggagatcgaccggctgaacgaggtggccaagaatctgaacgagagcctgatcgatctgcaggagctgggcaagtatgagcagtacatcaagggctctggcagagagaacctgtatttccagggaggaggaggcagcggatacatccctgaggcaccaagggacggacaggcctacgtgcgcaaggatggcgagtgggtgctgctgtccacctttctgggccatcatcaccaccaccaccaccactga

SEQ ID NO: 5035 - DNA, 3846 bp, Artificial Sequence
  Description of Artificial Sequence: Synthetic polynucleotide
atgggcatcctgccaagcccaggaatgcccgccctgctgtctctggtgagcctgctgtccgtgctgctgatgggatgcgtggcagagacaggcacacagtgcgtgaacctgaccacaaggacccagctgccccctgcctataccaattctttcacacggggcgtgtactatcccgacaaggtgtttagaagctccgtgctgcactccacacaggatctgtttctgcctttcttttctaacgtgacctggttccacgccatccacgtgtccggcaccaatggcacaaagcggttcgacaatcccgtgctgccttttaacgatggcgtgtacttcgccagcaccgagaagtccaacatcatcagaggctggatctttggcaccacactggactctaagacacagagcctgctgatcgtgaacaatgccaccaacgtggtgatcaaggtgtgcgagttccagttttgtaatgatccattcctgggcgtgtactatcacaagaacaataagtcctggatggagtctgagtttcgcgtgtattctagcgccaacaattgcacatttgagtacgtgagccagcccttcctgatggacctggagggcaagcagggcaatttcaagaacctgagggagttcgtgtttaagaatatcgatggctacttcaagatctacagcaagcacaccccaatcaacctggtgcgcgacctgccacagggattctccgccctggagccactggtggatctgcccatcggcatcaacatcacccggtttcagacactgctggccctgcacagatcctacctgacaccaggcgactcctctagcggatggaccgcaggagctgccgcctactatgtgggctatctgcagccccggaccttcctgctgaagtacaacgagaatggcaccatcacagacgcagtggattgcgccctggaccccctgtctgagacaaagtgtacactgaagagctttaccgtggagaagggcatctatcagacaagcaatttcagggtgcagcctaccgagtccatcgtgcgctttcccaatatcacaaacctgtgcccttttggcgaggtgttcaacgccaccagattcgccagcgtgtacgcctggaatcggaagagaatctccaactgcgtggccgactattctgtgctgtacaactccgcctctttcagcacctttaagtgctatggcgtgtctcccacaaagctgaatgatctgtgctttaccaacgtgtacgccgatagcttcgtgatcaggggagacgaagtgagacagatcgcaccaggacagacaggaaagatcgcagactacaattataagctgcctgacgatttcaccggctgcgtgatcgcctggaactccaacaatctggattctaaagtgggcggcaactacaattatctgtacaggctgtttcgcaagtccaatctgaagccattcgagcgggacatctccacagagatctaccaggccggctctaccccctgcaatggcgtggagggctttaactgttatttccctctgcagtcttacggcttccagccaacaaacggcgtgggctatcagccctacagagtggtggtgctgtcctttgagctgctgcacgcaccagcaacagtgtgcggcccaaagaagtctaccaatctggtgaagaacaagtgcgtgaacttcaacttcaacggactgaccggcacaggcgtgctgaccgagagcaataagaagttcctgccttttcagcagttcggcagggacatcgcagataccacagacgccgtgcgcgaccctcagaccctggagatcctggacatcacaccatgcagcttcggcggcgtgtccgtgatcacaccaggcaccaatacatccaaccaggtggccgtgctgtatcaggacgtgaattgtaccgaggtgcccgtggcaatccacgcagatcagctgacccctacatggcgggtgtactctaccggcagcaacgtgttccagacaagagccggatgcctgatcggagcagagcacgtgaacaatagctatgagtgcgacatccctatcggcgccggcatctgtgccagctaccagacccagacaaactccccatctggagcaggctccgtggccagccagtccatcatcgcctataccatgagcctgggcgccgagaacagcgtggcctactccaacaattctatcgccatccctaccaacttcacaatcagcgtgaccacagagatcctgccagtgtctatgaccaagacaagcgtggactgcacaatgtatatctgtggcgatagcaccgagtgctccaacctgctgctgcagtacggctccttttgtacccagctgaatagagccctgacaggcatcgccgtggagcaggataagaacacacaggaggtgttcgcccaggtgaagcagatctacaagaccccacccatcaaggactttggcggcttcaacttcagccagatcctgcctgatccaagcaagccctccaagaggtcttttatcgaggacctgctgttcaacaaggtgaccctggccgatgccggcttcatcaagcagtatggagattgcctgggagacatcgcagcccgcgacctgatctgtgcccagaagtttaatggcctgaccgtgctgcctccactgctgacagatgagatgatcgcccagtacacatctgccctgctggccggcaccatcacaagcggatggaccttcggcgcaggagccgccctgcagatcccttttgccatgcagatggcctataggttcaacggcatcggcgtgacccagaatgtgctgtacgagaaccagaagctgatcgccaatcagtttaacagcgccatcggcaagatccaggactctctgtcctctacagccagcgccctgggcaagctgcaggatgtggtgaatcagaacgcccaggccctgaataccctggtgaagcagctgagctccaacttcggcgccatctctagcgtgctgaatgacatcctgagccggctgaatccccctgaggcagaggtgcagatcgacaggctgatcacaggccgcctgcagagcctgcagacctacgtgacacagcagctgatcagggcagcagagatcagagcctccgccaatctggccgccaccaagatgagcgagtgcgtgctgggacagtccaagagggtggacttttgtggcaagggctatcacctgatgtctttcccacagagcgcccctcacggcgtggtgtttctgcacgtgacctacgtgccagcccaggagaagaacttcaccacagcaccagccatctgccacgatggaaaggcacactttcctagggagggcgtgttcgtgtctaacggcacccactggtttgtgacacagcgcaatttctacgagccacagatcatcaccacagacaatacattcgtgagcggcaactgtgatgtggtgatcggcatcgtgaacaataccgtgtatgatccactgcagcccgagctggactcctttaaggaggagctggataagtacttcaagaatcacacctctcccgacgtggatctgggcgacatctccggcatcaatgcctctgtggtgaacatccagaaggagatcgaccggctgaacgaggtggccaagaatctgaacgagagcctgatcgatctgcaggagctgggcaagtatgagcagtacatcaagggctctggcagagagaacctgtatttccagggaggaggaggcagcggatacatccctgaggcaccaagggacggacaggcctacgtgcgcaaggatggcgagtgggtgctgctgtccacctttctgggccatcatcaccaccaccaccaccactga

SEQ ID NO: 5036 - DNA, 3846 bp, Artificial Sequence
  Description of Artificial Sequence: Synthetic polynucleotide
atgggcatcctgccaagcccaggaatgcccgccctgctgtctctggtgagcctgctgtccgtgctgctgatgggatgcgtggcagagacaggcacacagtgcgtgaacctgaccacaaggacccagctgccccctgcctataccaattctttcacacggggcgtgtactatcccgacaaggtgtttagaagctccgtgctgcactccacacaggatctgtttctgcctttcttttctaacgtgacctggttccacgccatccacgtgtccggcaccaatggcacaaagcggttcgacaatcccgtgctgccttttaacgatggcgtgtacttcgccagcaccgagaagtccaacatcatcagaggctggatctttggcaccacactggactctaagacacagagcctgctgatcgtgaacaatgccaccaacgtggtgatcaaggtgtgcgagttccagttttgtaatgatccattcctgggcgtgtactatcacaagaacaataagtcctggatggagtctgagtttcgcgtgtattctagcgccaacaattgcacatttgagtacgtgagccagcccttcctgatggacctggagggcaagcagggcaatttcaagaacctgagggagttcgtgtttaagaatatcgatggctacttcaagatctacagcaagcacaccccaatcaacctggtgcgcgacctgccacagggattctccgccctggagccactggtggatctgcccatcggcatcaacatcacccggtttcagacactgctggccctgcacagatcctacctgacaccaggcgactcctctagcggatggaccgcaggagctgccgcctactatgtgggctatctgcagccccggaccttcctgctgaagtacaacgagaatggcaccatcacagacgcagtggattgcgccctggaccccctgtctgagacaaagtgtacactgaagagctttaccgtggagaagggcatctatcagacaagcaatttcagggtgcagcctaccgagtccatcgtgcgctttcccaatatcacaaacctgtgcccttttggcgaggtgttcaacgccaccagattcgccagcgtgtacgcctggaatcggaagagaatctccaactgcgtggccgactattctgtgctgtacaactccgcctctttcagcacctttaagtgctatggcgtgtctcccacaaagctgaatgatctgtgctttaccaacgtgtacgccgatagcttcgtgatcaggggagacgaagtgagacagatcgcaccaggacagacaggaaagatcgcagactacaattataagctgcctgacgatttcaccggctgcgtgatcgcctggaactccaacaatctggattctaaagtgggcggcaactacaattatctgtacaggctgtttcgcaagtccaatctgaagccattcgagcgggacatctccacagagatctaccaggccggcaaaaccccctgcaatggcgtggagggctttaactgttatttccctctgcagtcttacggcttccagccaacaaacggcgtgggctatcagccctacagagtggtggtgctgtcctttgagctgctgcacgcaccagcaacagtgtgcggcccaaagaagtctaccaatctggtgaagaacaagtgcgtgaacttcaacttcaacggactgaccggcacaggcgtgctgaccgagagcaataagaagttcctgccttttcagcagttcggcagggacatcgcagataccacagacgccgtgcgcgaccctcagaccctggagatcctggacatcacaccatgcagcttcggcggcgtgtccgtgatcacaccaggcaccaatacatccaaccaggtggccgtgctgtatcaggacgtgaattgtaccgaggtgcccgtggcaatccacgcagatcagctgacccctacatggcgggtgtactctaccggcagcaacgtgttccagacaagagccggatgcctgatcggagcagagcacgtgaacaatagctatgagtgcgacatccctatcggcgccggcatctgtgccagctaccagacccagacaaactccccatctggagcaggctccgtggccagccagtccatcatcgcctataccatgagcctgggcgccgagaacagcgtggcctactccaacaattctatcgccatccctaccaacttcacaatcagcgtgaccacagagatcctgccagtgtctatgaccaagacaagcgtggactgcacaatgtatatctgtggcgatagcaccgagtgctccaacctgctgctgcagtacggctccttttgtacccagctgaatagagccctgacaggcatcgccgtggagcaggataagaacacacaggaggtgttcgcccaggtgaagcagatctacaagaccccacccatcaaggactttggcggcttcaacttcagccagatcctgcctgatccaagcaagccctccaagaggtcttttatcgaggacctgctgttcaacaaggtgaccctggccgatgccggcttcatcaagcagtatggagattgcctgggagacatcgcagcccgcgacctgatctgtgcccagaagtttaatggcctgaccgtgctgcctccactgctgacagatgagatgatcgcccagtacacatctgccctgctggccggcaccatcacaagcggatggaccttcggcgcaggagccgccctgcagatcccttttgccatgcagatggcctataggttcaacggcatcggcgtgacccagaatgtgctgtacgagaaccagaagctgatcgccaatcagtttaacagcgccatcggcaagatccaggactctctgtcctctacagccagcgccctgggcaagctgcaggatgtggtgaatcagaacgcccaggccctgaataccctggtgaagcagctgagctccaacttcggcgccatctctagcgtgctgaatgacatcctgagccggctggacccccctgaggcagaggtgcagatcgacaggctgatcacaggccgcctgcagagcctgcagacctacgtgacacagcagctgatcagggcagcagagatcagagcctccgccaatctggccgccaccaagatgagcgagtgcgtgctgggacagtccaagagggtggacttttgtggcaagggctatcacctgatgtctttcccacagagcgcccctcacggcgtggtgtttctgcacgtgacctacgtgccagcccaggagaagaacttcaccacagcaccagccatctgccacgatggaaaggcacactttcctagggagggcgtgttcgtgtctaacggcacccactggtttgtgacacagcgcaatttctacgagccacagatcatcaccacagacaatacattcgtgagcggcaactgtgatgtggtgatcggcatcgtgaacaataccgtgtatgatccactgcagcccgagctggactcctttaaggaggagctggataagtacttcaagaatcacacctctcccgacgtggatctgggcgacatctccggcatcaatgcctctgtggtgaacatccagaaggagatcgaccggctgaacgaggtggccaagaatctgaacgagagcctgatcgatctgcaggagctgggcaagtatgagcagtacatcaagggctctggcagagagaacctgtatttccagggaggaggaggcagcggatacatccctgaggcaccaagggacggacaggcctacgtgcgcaaggatggcgagtgggtgctgctgtccacctttctgggccatcatcaccaccaccaccaccactga

SEQ ID NO: 5037 - DNA, 3846 bp, Artificial Sequence
  Description of Artificial Sequence: Synthetic polynucleotide
atgggcatcctgccaagcccaggaatgcccgccctgctgtctctggtgagcctgctgtccgtgctgctgatgggatgcgtggcagagacaggcacacagtgcgtgaacctgaccacaaggacccagctgccccctgcctataccaattctttcacacggggcgtgtactatcccgacaaggtgtttagaagctccgtgctgcactccacacaggatctgtttctgcctttcttttctaacgtgacctggttccacgccatccacgtgtccggcaccaatggcacaaagcggttcgacaatcccgtgctgccttttaacgatggcgtgtacttcgccagcaccgagaagtccaacatcatcagaggctggatctttggcaccacactggactctaagacacagagcctgctgatcgtgaacaatgccaccaacgtggtgatcaaggtgtgcgagttccagttttgtaatgatccattcctgggcgtgtactatcacaagaacaataagtcctggatggagtctgagtttcgcgtgtattctagcgccaacaattgcacatttgagtacgtgagccagcccttcctgatggacctggagggcaagcagggcaatttcaagaacctgagggagttcgtgtttaagaatatcgatggctacttcaagatctacagcaagcacaccccaatcaacctggtgcgcgacctgccacagggattctccgccctggagccactggtggatctgcccatcggcatcaacatcacccggtttcagacactgctggccctgcacagatcctacctgacaccaggcgactcctctagcggatggaccgcaggagctgccgcctactatgtgggctatctgcagccccggaccttcctgctgaagtacaacgagaatggcaccatcacagacgcagtggattgcgccctggaccccctgtctgagacaaagtgtacactgaagagctttaccgtggagaagggcatctatcagacaagcaatttcagggtgcagcctaccgagtccatcgtgcgctttcccaatatcacaaacctgtgcccttttggcgaggtgttcaacgccaccagattcgccagcgtgtacgcctggaatcggaagagaatctccaactgcgtggccgactattctgtgctgtacaactccgcctctttcagcacctttaagtgctatggcgtgtctcccacaaagctgaatgatctgtgctttaccaacgtgtacgccgatagcttcgtgatcaggggagacgaagtgagacagatcgcaccaggacagacaggaaagatcgcagactacaattataagctgcctgacgatttcaccggctgcgtgatcgcctggaactccaacaatctggattctaaagtgggcggcaactacaattatctgtacaggctgtttcgcaagtccaatctgaagccattcgagcgggacatctccacaggtatctaccaggccggctctaccccctgcaatggcgtggagggctttaactgttatttccctctgcagtcttacggcttccagccaacaaacggcgtgggctatcagccctacagagtggtggtgctgtcctttgagctgctgcacgcaccagcaacagtgtgcggcccaaagaagtctaccaatctggtgaagaacaagtgcgtgaacttcaacttcaacggactgaccggcacaggcgtgctgaccgagagcaataagaagttcctgccttttcagcagttcggcagggacatcgcagataccacagacgccgtgcgcgaccctcagaccctggagatcctggacatcacaccatgcagcttcggcggcgtgtccgtgatcacaccaggcaccaatacatccaaccaggtggccgtgctgtatcaggacgtgaattgtaccgaggtgcccgtggcaatccacgcagatcagctgacccctacatggcgggtgtactctaccggcagcaacgtgttccagacaagagccggatgcctgatcggagcagagcacgtgaacaatagctatgagtgcgacatccctatcggcgccggcatctgtgccagctaccagacccagacaaactccccatctggagcaggctccgtggccagccagtccatcatcgcctataccatgagcctgggcgccgagaacagcgtggcctactccaacaattctatcgccatccctaccaacttcacaatcagcgtgaccacagagatcctgccagtgtctatgaccaagacaagcgtggactgcacaatgtatatctgtggcgatagcaccgagtgctccaacctgctgctgcagtacggctccttttgtacccagctgaatagagccctgacaggcatcgccgtggagcaggataagaacacacaggaggtgttcgcccaggtgaagcagatctacaagaccccacccatcaaggactttggcggcttcaacttcagccagatcctgcctgatccaagcaagccctccaagaggtcttttatcgaggacctgctgttcaacaaggtgaccctggccgatgccggcttcatcaagcagtatggagattgcctgggagacatcgcagcccgcgacctgatctgtgcccagaagtttaatggcctgaccgtgctgcctccactgctgacagatgagatgatcgcccagtacacatctgccctgctggccggcaccatcacaagcggatggaccttcggcgcaggagccgccctgcagatcccttttgccatgcagatggcctataggttcaacggcatcggcgtgacccagaatgtgctgtacgagaaccagaagctgatcgccaatcagtttaacagcgccatcggcaagatccaggactctctgtcctctacagccagcgccctgggcaagctgcaggatgtggtgaatcagaacgcccaggccctgaataccctggtgaagcagctgagctccaacttcggcgccatctctagcgtgctgaatgacatcctgagccggctggacccccctgaggcagaggtgcagatcgacaggctgatcacaggccgcctgcagagcctgcagacctacgtgacacagcagctgatcagggcagcagagatcagagcctccgccaatctggccgccaccaagatgagcgagtgcgtgctgggacagtccaagagggtggacttttgtggcaagggctatcacctgatgtctttcccacagagcgcccctcacggcgtggtgtttctgcacgtgacctacgtgccagcccaggagaagaacttcaccacagcaccagccatctgccacgatggaaaggcacactttcctagggagggcgtgttcgtgtctaacggcacccactggtttgtgacacagcgcaatttctacgagccacagatcatcaccacagacaatacattcgtgagcggcaactgtgatgtggtgatcggcatcgtgaacaataccgtgtatgatccactgcagcccgagctggactcctttaaggaggagctggataagtacttcaagaatcacacctctcccgacgtggatctgggcgacatctccggcatcaatgcctctgtggtgaacatccagaaggagatcgaccggctgaacgaggtggccaagaatctgaacgagagcctgatcgatctgcaggagctgggcaagtatgagcagtacatcaagggctctggcagagagaacctgtatttccagggaggaggaggcagcggatacatccctgaggcaccaagggacggacaggcctacgtgcgcaaggatggcgagtgggtgctgctgtccacctttctgggccatcatcaccaccaccaccaccactga

SEQ ID NO: 5038 - DNA, 3846 bp, Artificial Sequence
  Description of Artificial Sequence: Synthetic polynucleotide
atgggcatcctgccaagcccaggaatgcccgccctgctgtctctggtgagcctgctgtccgtgctgctgatgggatgcgtggcagagacaggcacacagtgcgtgaacctgaccacaaggacccagctgccccctgcctataccaattctttcacacggggcgtgtactatcccgacaaggtgtttagaagctccgtgctgcactccacacaggatctgtttctgcctttcttttctaacgtgacctggttccacgccatccacgtgtccggcaccaatggcacaaagcggttcgacaatcccgtgctgccttttaacgatggcgtgtacttcgccagcaccgagaagtccaacatcatcagaggctggatctttggcaccacactggactctaagacacagagcctgctgatcgtgaacaatgccaccaacgtggtgatcaaggtgtgcgagttccagttttgtaatgatccattcctgggcgtgtactatcacaagaacaataagtcctggatggagtctgagtttcgcgtgtattctagcgccaacaattgcacatttgagtacgtgagccagcccttcctgatggacctggagggcaagcagggcaatttcaagaacctgagggagttcgtgtttaagaatatcgatggctacttcaagatctacagcaagcacaccccaatcaacctggtgcgcgacctgccacagggattctccgccctggagccactggtggatctgcccatcggcatcaacatcacccggtttcagacactgctggccctgcacagatcctacctgacaccaggcgactcctctagcggatggaccgcaggagctgccgcctactatgtgggctatctgcagccccggaccttcctgctgaagtacaacgagaatggcaccatcacagacgcagtggattgcgccctggaccccctgtctgagacaaagtgtacactgaagagctttaccgtggagaagggcatctatcagacaagcaatttcagggtgcagcctaccgagtccatcgtgcgctttcccaatatcacaaacctgtgcccttttggcgaggtgttcaacgccaccagattcgccagcgtgtacgcctggaatcggaagagaatctccaactgcgtggccgactattctgtgctgtacaactccgcctctttcagcacctttaagtgctatggcgtgtctcccacaaagctgaatgatctgtgctttaccaacgtgtacgccgatagcttcgtgatcaggggagacgaagtgagacagatcgcaccaggacagacaggaaagatcgcagactacaattataagctgcctgacgatttcaccggctgcgtgatcgcctggaactccaacaatctggattctaaagtgggcggcaactacaattatctgtacaggctgtttcgcaagtccaatctgaagccattcgagcgggacatctccacagagatctaccaggccggctctaccccctgcaatggcgtggagggctttaactgttatttccctctgcagtcttacggcttccagccaacaaacggcgtgggctatcagccctacagagtggtggtgctgtcctttgagctgctgcacgcaccagcaacagtgtgcggcccaaagaagtctaccaatctggtgaagaacaagtgcgtgaacttcaacttcaacggactgaccggcacaggcgtgctgaccgagagcaataagaagttcctgccttttcagcagttcggcagggacatcgcagataccacagacgccgtgcgcgaccctcagaccctggagatcctggacatcacaccatgcagcttcggcggcgtgtccgtgatcacaccaggcaccaatacatccaaccaggtggccgtgctgtatcaggacgtgaattgtaccgaggtgcccgtggcaatccacgcagatcagctgacccctacatggcgggtgtactctaccggcagcaacgtgttccagacaagagccggatgcctgatcggagcagagcacgtgaacaatagctatgagtgcgacatccctatcggcgccggcatctgtgccagctaccagacccagacaaactccccatctggagcaggctccgtggccagccagtccatcatcgcctataccatgagcctgggcgccgagaacagcgtggcctactccaacaattctatcgccatccctaccaacttcacaatcagcgtgaccacagagatcctgccagtgtctatgaccaagacaagcgtggactgcacaatgtatatctgtggcgatagcaccgagtgctccaacctgctgctgcagtacggctccttttgtacccagctgaatagagccctgacaggcatcgccgtggagcaggataagaacacacaggaggtgttcgcccaggtgaagcagatctacaagaccccacccatcaaggactttggcggcttcaacttcagccagatcctgcctgatccaagcaagccctccaagaggtcttttatcgaggacctgctgttcaacaaggtgaccctggccgatgccggcttcatcaagcagtatggagattgcctgggagacatcgcagcccgcgacctgatctgtgcccagaagtttaatggcctgaccgtgctgcctccactgctgacagatgagcaaatcgcccagtacacatctgccctgctggccggcaccatcacaagcggatggaccttcggcgcaggagccgccctgcagatcccttttgccatgcagatggcctataggttcaacggcatcggcgtgacccagaatgtgctgtacgagaaccagaagctgatcgccaatcagtttaacagcgccatcggcaagatccaggactctctgtcctctacagccagcgccctgggcaagctgcaggatgtggtgaatcagaacgcccaggccctgaataccctggtgaagcagctgagctccaacttcggcgccatctctagcgtgctgaatgacatcctgagccggctggacccccctgaggcagaggtgcagatcgacaggctgatcacaggccgcctgcagagcctgcagacctacgtgacacagcagctgatcagggcagcagagatcagagcctccgccaatctggccgccaccaagatgagcgagtgcgtgctgggacagtccaagagggtggacttttgtggcaagggctatcacctgatgtctttcccacagagcgcccctcacggcgtggtgtttctgcacgtgacctacgtgccagcccaggagaagaacttcaccacagcaccagccatctgccacgatggaaaggcacactttcctagggagggcgtgttcgtgtctaacggcacccactggtttgtgacacagcgcaatttctacgagccacagatcatcaccacagacaatacattcgtgagcggcaactgtgatgtggtgatcggcatcgtgaacaataccgtgtatgatccactgcagcccgagctggactcctttaaggaggagctggataagtacttcaagaatcacacctctcccgacgtggatctgggcgacatctccggcatcaatgcctctgtggtgaacatccagaaggagatcgaccggctgaacgaggtggccaagaatctgaacgagagcctgatcgatctgcaggagctgggcaagtatgagcagtacatcaagggctctggcagagagaacctgtatttccagggaggaggaggcagcggatacatccctgaggcaccaagggacggacaggcctacgtgcgcaaggatggcgagtgggtgctgctgtccacctttctgggccatcatcaccaccaccaccaccactga

SEQ ID NO: 5039 - DNA, 3846 bp, Artificial Sequence
  Description of Artificial Sequence: Synthetic polynucleotide
atgggcatcctgccaagcccaggaatgcccgccctgctgtctctggtgagcctgctgtccgtgctgctgatgggatgcgtggcagagacaggcacacagtgcgtgaacctgaccacaaggacccagctgccccctgcctataccaattctttcacacggggcgtgtactatcccgacaaggtgtttagaagctccgtgctgcactccacacaggatctgtttctgcctttcttttctaacgtgacctggttccacgccatccacgtgtccggcaccaatggcacaaagcggttcgacaatcccgtgctgccttttaacgatggcgtgtacttcgccagcaccgagaagtccaacatcatcagaggctggatctttggcaccacactggactctaagacacagagcctgctgatcgtgaacaatgccaccaacgtggtgatcaaggtgtgcgagttccagttttgtaatgatccattcctgggcgtgtactatcacaagaacaataagtcctggatggagtctgagtttcgcgtgtattctagcgccaacaattgcacatttgagtacgtgagccagcccttcctgatggacctggagggcaagcagggcaatttcaagaacctgagggagttcgtgtttaagaatatcgatggctacttcaagatctacagcaagcacaccccaatcaacctggtgcgcgacctgccacagggattctccgccctggagccactggtggatctgcccatcggcatcaacatcacccggtttcagacactgctggccctgcacagatcctacctgacaccaggcgactcctctagcggatggaccgcaggagctgccgcctactatgtgggctatctgcagccccggaccttcctgctgaagtacaacgagaatggcaccatcacagacgcagtggattgcgccctggaccccctgtctgagacaaagtgtacactgaagagctttaccgtggagaagggcatctatcagacaagcaatttcagggtgcagcctaccgagtccatcgtgcgctttcccaatatcacaaacctgtgcccttttggcgaggtgttcaacgccaccagattcgccagcgtgtacgcctggaatcggaagagaatctccaactgcgtggccgactattctgtgctgtacaactccgcctctttcagcacctttaagtgctatggcgtgtctcccacaaagctgaatgatctgtgctttaccaacgtgtacgccgatagcttcgtgatcaggggagacgaagtgagacagatcgcaccaggacagacaggaaagatcgcagactacaattataagctgcctgacgatttcaccggctgcgtgatcgcctggaactccaacaatctggattctaaagtgggcggcaactacaattatctgtacaggctgtttcgcaagtccaatctgaagccattcgagcgggacatctccacagagatctaccaggccggctctaccccctgcaatggcgtggagggctttaactgttatttccctctgcagtcttacggcttccagccaacaaacggcgtgggctatcagccctacagagtggtggtgctgtcctttgagctgctgcacgcaccagcaacagtgtgcggcccaaagaagtctaccaatctggtgaagaacaagtgcgtgaacttcaacttcaacggactgaccggcacaggcgtgctgaccgagagcaataagaagttcctgccttttcagcagttcggcagggacatcgcagataccacagacgccgtgcgcgaccctcagaccctggagatcctggacatcacaccatgcagcttcggcggcgtgtccgtgatcacaccaggcaccaatacatccaaccaggtggccgtgctgtatcaggacgtgaattgtaccgaggtgcccgtggcaatccacgcagatcagctgacccctacatggcgggtgtactctaccggcagcaacgtgttccagacaagagccggatgcctgatcggagcagagcacgtgaacaatagctatgagtgcgacatccctatcggcgccggcatctgtgccagctaccagacccagacaaactccccatctggagcaggctccgtggccagccagtccatcatcgcctataccatgagcctgggcgccgagaacagcgtggcctactccaacaattctatcgccatccctaccaacttcacaatcagcgtgaccacagagatcctgccagtgtctatgaccaagacaagcgtggactgcacaatgtatatctgtggcgatagcaccgagtgctccaacctgctgctgcagtacggctccttttgtacccagctgaatagagccctgacaggcatcgccgtggagcaggataagaacacacaggaggtgttcgcccaggtgaagcagatctacaagaccccacccatcaaggactttggcggcttcaacttcagccagatcctgcctgatccaagcaagccctccaagaggtcttttatcgaggacctgctgttcaacaaggtgaccctggccgatgccggcttcatcaagcagtatggagattgcctgggagacatcgcagcccgcgacctgatctgtgcccagaagtttaatggcctgaccgtgctgcctccactgctgacagatgagatgatcgcccagtacacatctgccctgctggccggcaccatcacaagcggatggaccttcggcgcaggagccgccctgcagatcccttttgccatgcagatggcctataggttcaacggcatcggcgtgacccagaatgtgctgtacgagaaccagaagctgatcgccaatcagtttaacagcgccatcggcaagatccaggactctctgtcctctacagccagcgccctgggcaagctgcaggatgtggtgaatcagaacgcccaggccctgaataccctggtgaagcagctgagctccaacttcggcgccatctctagcgtgctgaatgacatcctgagccggctggacccccctgaggcagaggtgcagatcgacaggctgatcacaggccgcctgcagagcctgcagacctacgtgacacagcagctgatcagggcagcagagatcagagcctccgccaatctggccgccaccaagatgagcgagtgcgtgctgggacagtccaagaggcaagacttttgtggcaagggctatcacctgatgtctttcccacagagcgcccctcacggcgtggtgtttctgcacgtgacctacgtgccagcccaggagaagaacttcaccacagcaccagccatctgccacgatggaaaggcacactttcctagggagggcgtgttcgtgtctaacggcacccactggtttgtgacacagcgcaatttctacgagccacagatcatcaccacagacaatacattcgtgagcggcaactgtgatgtggtgatcggcatcgtgaacaataccgtgtatgatccactgcagcccgagctggactcctttaaggaggagctggataagtacttcaagaatcacacctctcccgacgtggatctgggcgacatctccggcatcaatgcctctgtggtgaacatccagaaggagatcgaccggctgaacgaggtggccaagaatctgaacgagagcctgatcgatctgcaggagctgggcaagtatgagcagtacatcaagggctctggcagagagaacctgtatttccagggaggaggaggcagcggatacatccctgaggcaccaagggacggacaggcctacgtgcgcaaggatggcgagtgggtgctgctgtccacctttctgggccatcatcaccaccaccaccaccactga

SEQ ID NO: 5040 - DNA, 3846 bp, Artificial Sequence
  Description of Artificial Sequence: Synthetic polynucleotide
atgggcatcctgccaagcccaggaatgcccgccctgctgtctctggtgagcctgctgtccgtgctgctgatgggatgcgtggcagagacaggcacacagtgcgtgaacctgaccacaaggacccagctgccccctgcctataccaattctttcacacggggcgtgtactatcccgacaaggtgtttagaagctccgtgctgcactccacacaggatctgtttctgcctttcttttctaacgtgacctggttccacgccatccacgtgtccggcaccaatggcacaaagcggttcgacaatcccgtgctgccttttaacgatggcgtgtacttcgccagcaccgagaagtccaacatcatcagaggctggatctttggcaccacactggactctaagacacagagcctgctgatcgtgaacaatgccaccaacgtggtgatcaaggtgtgcgagttccagttttgtaatgatccattcctgggcgtgtactatcacaagaacaataagtcctggatggagtctgagtttcgcgtgtattctagcgccaacaattgcacatttgagtacgtgagccagcccttcctgatggacctggagggcaagcagggcaatttcaagaacctgagggagttcgtgtttaagaatatcgatggctacttcaagatctacagcaagcacaccccaatcaacctggtgcgcgacctgccacagggattctccgccctggagccactggtggatctgcccatcggcatcaacatcacccggtttcagacactgctggccctgcacagatcctacctgacaccaggcgactcctctagcggatggaccgcaggagctgccgcctactatgtgggctatctgcagccccggaccttcctgctgaagtacaacgagaatggcaccatcacagacgcagtggattgcgccctggaccccctgtctgagacaaagtgtacactgaagagctttaccgtggagaagggcatctatcagacaagcaatttcagggtgcagcctaccgagtccatcgtgcgctttcccaatatcacaaacctgtgcccttttggcgaggtgttcaacgccaccagattcgccagcgtgtacgcctggaatcggaagagaatctccaactgcgtggccgactattctgtgctgtacaactcctcatctttcagcacctttaagtgctatggcgtgtctcccacaaagctgaatgatctgtgctttaccaacgtgtacgccgatagcttcgtgatcaggggagacgaagtgagacagatcgcaccaggacagacaggaaagatcgcagactacaattataagctgcctgacgatttcaccggctgcgtgatcgcctggaactccaacaatctggattctaaagtgggcggcaactacaattatctgtacaggctgtttcgcaagtccaatctgaagccattcgagcgggacatctccacagagatctaccaggccggctctaccccctgcaatggcgtggagggctttaactgttatttccctctgcagtcttacggcttccagccaacaaacggcgtgggctatcagccctacagagtggtggtgctgtcctttgagctgctgcacgcaccagcaacagtgtgcggcccaaagaagtctaccaatctggtgaagaacaagtgcgtgaacttcaacttcaacggactgaccggcacaggcgtgctgaccgagagcaataagaagttcctgccttttcagcagttcggcagggacatcgcagataccacagacgccgtgcgcgaccctcagaccctggagatcctggacatcacaccatgcagcttcggcggcgtgtccgtgatcacaccaggcaccaatacatccaaccaggtggccgtgctgtatcaggacgtgaattgtaccgaggtgcccgtggcaatccacgcagatcagctgacccctacatggcgggtgtactctaccggcagcaacgtgttccagacaagagccggatgcctgatcggagcagagcacgtgaacaatagctatgagtgcgacatccctatcggcgccggcatctgtgccagctaccagacccagacaaactccccatctggagcaggctccgtggccagccagtccatcatcgcctataccatgagcctgggcgccgagaacagcgtggcctactccaacaattctatcgccatccctaccaacttcacaatcagcgtgaccacagagatcctgccagtgtctatgaccaagacaagcgtggactgcacaatgtatatctgtggcgatagcaccgagtgctccaacctgctgctgcagtacggctccttttgtacccagctgaatagagccctgacaggcatcgccgtggagcaggataagaacacacaggaggtgttcgcccaggtgaagcagatctacaagaccccacccatcaaggactttggcggcttcaacttcagccagatcctgcctgatccaagcaagccctccaagaggtcttttatcgaggacctgctgttcaacaaggtgaccctggccgatgccggcttcatcaagcagtatggagattgcctgggagacatcgcagcccgcgacctgatctgtgcccagaagtttaatggcctgaccgtgctgcctccactgctgacagatgagatgatcgcccagtacacatctgccctgctggccggcaccatcacaagcggatggaccttcggcgcaggagccgccctgcagatcccttttgccatgcagatggcctataggttcaacggcatcggcgtgacccagaatgtgctgtacgagaaccagaagctgatcgccaatcagtttaacagcgccatcggcaagatccaggactctctgtcctctacagccagcgccctgggcaagctgcaggatgtggtgaatcagaacgcccaggccctgaataccctggtgaagcagctgagctccaacttcggcgccatctctagcgtgctgaatgacatcctgagccggctggacccccctgaggcagaggtgcagatcgacaggctgatcacaggccgcctgcagagcctgcagacctacgtgacacagcagctgatcagggcagcagagatcagagcctccgccaatctggccgccaccaagatgagcgagtgcgtgctgggacagtccaagagggtggacttttgtggcaagggctatcacctgatgtctttcccacagagcgcccctcacggcgtggtgtttctgcacgtgacctacgtgccagcccaggagaagaacttcaccacagcaccagccatctgccacgatggaaaggcacactttcctagggagggcgtgttcgtgtctaacggcacccactggtttgtgacacagcgcaatttctacgagccacagatcatcaccacagacaatacattcgtgagcggcaactgtgatgtggtgatcggcatcgtgaacaataccgtgtatgatccactgcagcccgagctggactcctttaaggaggagctggataagtacttcaagaatcacacctctcccgacgtggatctgggcgacatctccggcatcaatgcctctgtggtgaacatccagaaggagatcgaccggctgaacgaggtggccaagaatctgaacgagagcctgatcgatctgcaggagctgggcaagtatgagcagtacatcaagggctctggcagagagaacctgtatttccagggaggaggaggcagcggatacatccctgaggcaccaagggacggacaggcctacgtgcgcaaggatggcgagtgggtgctgctgtccacctttctgggccatcatcaccaccaccaccaccactga

SEQ ID NO: 5041 - DNA, 3846 bp, Artificial Sequence
  Description of Artificial Sequence: Synthetic polynucleotide
atgggcatcctgccaagcccaggaatgcccgccctgctgtctctggtgagcctgctgtccgtgctgctgatgggatgcgtggcagagacaggcacacagtgcgtgaacctgaccacaaggacccagctgccccctgcctataccaattctttcacacggggcgtgtactatcccgacaaggtgtttagaagctccgtgctgcactccacacaggatctgtttctgcctttcttttctaacgtgacctggttccacgccatccacgtgtccggcaccaatggcacaaagcggttcgacaatcccgtgctgccttttaacgatggcgtgtacttcgccagcaccgagaagtccaacatcatcagaggctggatctttggcaccacactggactctaagacacagagcctgctgatcgtgaacaatgccaccaacgtggtgatcaaggtgtgcgagttccagttttgtaatgatccattcctgggcgtgtactatcacaagaacaataagtcctggatggagtctgagtttcgcgtgtattctagcgccaacaattgcacatttgagtacgtgagccagcccttcctgatggacctggagggcaagcagggcaatttcaagaacctgagggagttcgtgtttaagaatatcgatggctacttcaagatctacagcaagcacaccccaatcaacctggtgcgcgacctgccacagggattctccgccctggagccactggtggatctgcccatcggcatcaacatcacccggtttcagacactgctggccctgcacagatcctacctgacaccaggcgactcctctagcggatggaccgcaggagctgccgcctactatgtgggctatctgcagccccggaccttcctgctgaagtacaacgagaatggcaccatcacagacgcagtggattgcgccctggaccccctgtctgagacaaagtgtacactgaagagctttaccgtggagaagggcatctatcagacaagcaatttcagggtgcagcctaccgagtccatcgtgcgctttcccaatatcacaaacctgtgcccttttggcgaggtgttcaacgccaccagattcgccagcgtgtacgcctggaatcggaagagaatctccaactgcgtggccgactattctgtgctgtacaactccgcctctttcagcacctttaagtgctatggcgtgtctcccacaaagctgaatgatctgtgctttaccaacgtgtacgccgatagcttcgtgatcaggggagacgaagtgagacagatcgcaccaggacagacaggaaagatcgcagactacaattataagctgcctgacgatttcaccggctgcgtgatcgcctggaactccaacaatctggattctaaagcaggcggcaactacaattatctgtacaggctgtttcgcaagtccaatctgaagccattcgagcgggacatctccacagagatctaccaggccggctctaccccctgcaatggcgtggagggctttaactgttatttccctctgcagtcttacggcttccagccaacaaacggcgtgggctatcagccctacagagtggtggtgctgtcctttgagctgctgcacgcaccagcaacagtgtgcggcccaaagaagtctaccaatctggtgaagaacaagtgcgtgaacttcaacttcaacggactgaccggcacaggcgtgctgaccgagagcaataagaagttcctgccttttcagcagttcggcagggacatcgcagataccacagacgccgtgcgcgaccctcagaccctggagatcctggacatcacaccatgcagcttcggcggcgtgtccgtgatcacaccaggcaccaatacatccaaccaggtggccgtgctgtatcaggacgtgaattgtaccgaggtgcccgtggcaatccacgcagatcagctgacccctacatggcgggtgtactctaccggcagcaacgtgttccagacaagagccggatgcctgatcggagcagagcacgtgaacaatagctatgagtgcgacatccctatcggcgccggcatctgtgccagctaccagacccagacaaactccccatctggagcaggctccgtggccagccagtccatcatcgcctataccatgagcctgggcgccgagaacagcgtggcctactccaacaattctatcgccatccctaccaacttcacaatcagcgtgaccacagagatcctgccagtgtctatgaccaagacaagcgtggactgcacaatgtatatctgtggcgatagcaccgagtgctccaacctgctgctgcagtacggctccttttgtacccagctgaatagagccctgacaggcatcgccgtggagcaggataagaacacacaggaggtgttcgcccaggtgaagcagatctacaagaccccacccatcaaggactttggcggcttcaacttcagccagatcctgcctgatccaagcaagccctccaagaggtcttttatcgaggacctgctgttcaacaaggtgaccctggccgatgccggcttcatcaagcagtatggagattgcctgggagacatcgcagcccgcgacctgatctgtgcccagaagtttaatggcctgaccgtgctgcctccactgctgacagatgagatgatcgcccagtacacatctgccctgctggccggcaccatcacaagcggatggaccttcggcgcaggagccgccctgcagatcccttttgccatgcagatggcctataggttcaacggcatcggcgtgacccagaatgtgctgtacgagaaccagaagctgatcgccaatcagtttaacagcgccatcggcaagatccaggactctctgtcctctacagccagcgccctgggcaagctgcaggatgtggtgaatcagaacgcccaggccctgaataccctggtgaagcagctgagctccaacttcggcgccatctctagcgtgctgaatgacatcctgagccggctggacccccctgaggcagaggtgcagatcgacaggctgatcacaggccgcctgcagagcctgcagacctacgtgacacagcagctgatcagggcagcagagatcagagcctccgccaatctggccgccaccaagatgagcgagtgcgtgctgggacagtccaagagggtggacttttgtggcaagggctatcacctgatgtctttcccacagagcgcccctcacggcgtggtgtttctgcacgtgacctacgtgccagcccaggagaagaacttcaccacagcaccagccatctgccacgatggaaaggcacactttcctagggagggcgtgttcgtgtctaacggcacccactggtttgtgacacagcgcaatttctacgagccacagatcatcaccacagacaatacattcgtgagcggcaactgtgatgtggtgatcggcatcgtgaacaataccgtgtatgatccactgcagcccgagctggactcctttaaggaggagctggataagtacttcaagaatcacacctctcccgacgtggatctgggcgacatctccggcatcaatgcctctgtggtgaacatccagaaggagatcgaccggctgaacgaggtggccaagaatctgaacgagagcctgatcgatctgcaggagctgggcaagtatgagcagtacatcaagggctctggcagagagaacctgtatttccagggaggaggaggcagcggatacatccctgaggcaccaagggacggacaggcctacgtgcgcaaggatggcgagtgggtgctgctgtccacctttctgggccatcatcaccaccaccaccaccactga

SEQ ID NO: 5042 - DNA, 3846 bp, Artificial Sequence
  Description of Artificial Sequence: Synthetic polynucleotide
atgggcatcctgccaagcccaggaatgcccgccctgctgtctctggtgagcctgctgtccgtgctgctgatgggatgcgtggcagagacaggcacacagtgcgtgaacctgaccacaaggacccagctgccccctgcctataccaattctttcacacggggcgtgtactatcccgacaaggtgtttagaagctccgtgctgcactccacacaggatctgtttctgcctttcttttctaacgtgacctggttccacgccatccacgtgtccggcaccaatggcacaaagcggttcgacaatcccgtgctgccttttaacgatggcgtgtacttcgccagcaccgagaagtccaacatcatcagaggctggatctttggcaccacactggactctaagacacagagcctgctgatcgtgaacaatgccaccaacgtggtgatcaaggtgtgcgagttccagttttgtaatgatccattcctgggcgtgtactatcacaagaacaataagtcctggatggagtctgagtttcgcgtgtattctagcgccaacaattgcacatttgagtacgtgagccagcccttcctgatggacctggagggcaagcagggcaatttcaagaacctgagggagttcgtgtttaagaatatcgatggctacttcaagatctacagcaagcacaccccaatcaacctggtgcgcgacctgccacagggattctccgccctggagccactggtggatctgcccatcggcatcaacatcacccggtttcagacactgctggccctgcacagatcctacctgacaccaggcgactcctctagcggatggaccgcaggagctgccgcctactatgtgggctatctgcagccccggaccttcctgctgaagtacaacgagaatggcaccatcacagacgcagtggattgcgccctggaccccctgtctgagacaaagtgtacactgaagagctttaccgtggagaagggcatctatcagacaagcaatttcagggtgcagcctaccgagtccatcgtgcgctttcccaatatcacaaacctgtgcccttttggcgaggtgttcaacgccaccagattcgccagcgtgtacgcctggaatcggaagagaatctccaactgcgtggccgactattctgtgctgtacaactccgcctctttcagcacctttaagtgctatggcgtgtctcccacaaagctgaatgatctgtgctttaccaacgtgtacgccgatagcttcgtgatcaggggagacgaagtgagacagatcgcaccaggacagacaggacatatcgcagactacaattataagctgcctgacgatttcaccggctgcgtgatcgcctggaactccaacaatctggattctaaagtgggcggcaactacaattatctgtacaggctgtttcgcaagtccaatctgaagccattcgagcgggacatctccacagagatctaccaggccggctctaccccctgcaatggcgtggagggctttaactgttatttccctctgcagtcttacggcttccagccaacaaacggcgtgggctatcagccctacagagtggtggtgctgtcctttgagctgctgcacgcaccagcaacagtgtgcggcccaaagaagtctaccaatctggtgaagaacaagtgcgtgaacttcaacttcaacggactgaccggcacaggcgtgctgaccgagagcaataagaagttcctgccttttcagcagttcggcagggacatcgcagataccacagacgccgtgcgcgaccctcagaccctggagatcctggacatcacaccatgcagcttcggcggcgtgtccgtgatcacaccaggcaccaatacatccaaccaggtggccgtgctgtatcaggacgtgaattgtaccgaggtgcccgtggcaatccacgcagatcagctgacccctacatggcgggtgtactctaccggcagcaacgtgttccagacaagagccggatgcctgatcggagcagagcacgtgaacaatagctatgagtgcgacatccctatcggcgccggcatctgtgccagctaccagacccagacaaactccccatctggagcaggctccgtggccagccagtccatcatcgcctataccatgagcctgggcgccgagaacagcgtggcctactccaacaattctatcgccatccctaccaacttcacaatcagcgtgaccacagagatcctgccagtgtctatgaccaagacaagcgtggactgcacaatgtatatctgtggcgatagcaccgagtgctccaacctgctgctgcagtacggctccttttgtacccagctgaatagagccctgacaggcatcgccgtggagcaggataagaacacacaggaggtgttcgcccaggtgaagcagatctacaagaccccacccatcaaggactttggcggcttcaacttcagccagatcctgcctgatccaagcaagccctccaagaggtcttttatcgaggacctgctgttcaacaaggtgaccctggccgatgccggcttcatcaagcagtatggagattgcctgggagacatcgcagcccgcgacctgatctgtgcccagaagtttaatggcctgaccgtgctgcctccactgctgacagatgagatgatcgcccagtacacatctgccctgctggccggcaccatcacaagcggatggaccttcggcgcaggagccgccctgcagatcccttttgccatgcagatggcctataggttcaacggcatcggcgtgacccagaatgtgctgtacgagaaccagaagctgatcgccaatcagtttaacagcgccatcggcaagatccaggactctctgtcctctacagccagcgccctgggcaagctgcaggatgtggtgaatcagaacgcccaggccctgaataccctggtgaagcagctgagctccaacttcggcgccatctctagcgtgctgaatgacatcctgagccggctggacccccctgaggcagaggtgcagatcgacaggctgatcacaggccgcctgcagagcctgcagacctacgtgacacagcagctgatcagggcagcagagatcagagcctccgccaatctggccgccaccaagatgagcgagtgcgtgctgggacagtccaagagggtggacttttgtggcaagggctatcacctgatgtctttcccacagagcgcccctcacggcgtggtgtttctgcacgtgacctacgtgccagcccaggagaagaacttcaccacagcaccagccatctgccacgatggaaaggcacactttcctagggagggcgtgttcgtgtctaacggcacccactggtttgtgacacagcgcaatttctacgagccacagatcatcaccacagacaatacattcgtgagcggcaactgtgatgtggtgatcggcatcgtgaacaataccgtgtatgatccactgcagcccgagctggactcctttaaggaggagctggataagtacttcaagaatcacacctctcccgacgtggatctgggcgacatctccggcatcaatgcctctgtggtgaacatccagaaggagatcgaccggctgaacgaggtggccaagaatctgaacgagagcctgatcgatctgcaggagctgggcaagtatgagcagtacatcaagggctctggcagagagaacctgtatttccagggaggaggaggcagcggatacatccctgaggcaccaagggacggacaggcctacgtgcgcaaggatggcgagtgggtgctgctgtccacctttctgggccatcatcaccaccaccaccaccactga

SEQ ID NO: 5043 - DNA, 3846 bp, Artificial Sequence
  Description of Artificial Sequence: Synthetic polynucleotide
atgggcatcctgccaagcccaggaatgcccgccctgctgtctctggtgagcctgctgtccgtgctgctgatgggatgcgtggcagagacaggcacacagtgcgtgaacctgaccacaaggacccagctgccccctgcctataccaattctttcacacggggcgtgtactatcccgacaaggtgtttagaagctccgtgctgcactccacacaggatctgtttctgcctttcttttctaacgtgacctggttccacgccatccacgtgtccggcaccaatggcacaaagcggttcgacaatcccgtgctgccttttaacgatggcgtgtacttcgccagcaccgagaagtccaacatcatcagaggctggatctttggcaccacactggactctaagacacagagcctgctgatcgtgaacaatgccaccaacgtggtgatcaaggtgtgcgagttccagttttgtaatgatccattcctgggcgtgtactatcacaagaacaataagtcctggatggagtctgagtttcgcgtgtattctagcgccaacaattgcacatttgagtacgtgagccagcccttcctgatggacctggagggcaagcagggcaatttcaagaacctgagggagttcgtgtttaagaatatcgatggctacttcaagatctacagcaagcacaccccaatcaacctggtgcgcgacctgccacagggattctccgccctggagccactggtggatctgcccatcggcatcaacatcacccggtttcagacactgctggccctgcacagatcctacctgacaccaggcgactcctctagcggatggaccgcaggagctgccgcctactatgtgggctatctgcagccccggaccttcctgctgaagtacaacgagaatggcaccatcacagacgcagtggattgcgccctggaccccctgtctgagacaaagtgtacactgaagagctttaccgtggagaagggcatctatcagacaagcaatttcagggtgcagcctaccgagtccatcgtgcgctttcccaatatcacaaacctgtgcccttttggcgaggtgttcaacgccaccagattcgccagcgtgtacgcctggaatcggaagagaatctccaactgcgtggccgactattctgtgctgtacaactccgcctctttcagcacctttaagtgctatggcgtgtctcccacaaagctgaatgatctgtgctttaccaacgtgtacgccgatagcttcgtgatcaggggagacgaagtgagacagatcgcaccaggacagacaggaaagatcgcagactacaattataagctgcctgacgatttcaccggctgcgtgatcgcctggaactccaacaatctggattctaaagtgggcggcaactacaattatctgtacaggctgtttcgcaagtccaatctgaagccattcgagcgggacatctccgtcgagatctaccaggccggctctaccccctgcaatggcgtggagggctttaactgttatttccctctgcagtcttacggcttccagccaacaaacggcgtgggctatcagccctacagagtggtggtgctgtcctttgagctgctgcacgcaccagcaacagtgtgcggcccaaagaagtctaccaatctggtgaagaacaagtgcgtgaacttcaacttcaacggactgaccggcacaggcgtgctgaccgagagcaataagaagttcctgccttttcagcagttcggcagggacatcgcagataccacagacgccgtgcgcgaccctcagaccctggagatcctggacatcacaccatgcagcttcggcggcgtgtccgtgatcacaccaggcaccaatacatccaaccaggtggccgtgctgtatcaggacgtgaattgtaccgaggtgcccgtggcaatccacgcagatcagctgacccctacatggcgggtgtactctaccggcagcaacgtgttccagacaagagccggatgcctgatcggagcagagcacgtgaacaatagctatgagtgcgacatccctatcggcgccggcatctgtgccagctaccagacccagacaaactccccatctggagcaggctccgtggccagccagtccatcatcgcctataccatgagcctgggcgccgagaacagcgtggcctactccaacaattctatcgccatccctaccaacttcacaatcagcgtgaccacagagatcctgccagtgtctatgaccaagacaagcgtggactgcacaatgtatatctgtggcgatagcaccgagtgctccaacctgctgctgcagtacggctccttttgtacccagctgaatagagccctgacaggcatcgccgtggagcaggataagaacacacaggaggtgttcgcccaggtgaagcagatctacaagaccccacccatcaaggactttggcggcttcaacttcagccagatcctgcctgatccaagcaagccctccaagaggtcttttatcgaggacctgctgttcaacaaggtgaccctggccgatgccggcttcatcaagcagtatggagattgcctgggagacatcgcagcccgcgacctgatctgtgcccagaagtttaatggcctgaccgtgctgcctccactgctgacagatgagatgatcgcccagtacacatctgccctgctggccggcaccatcacaagcggatggaccttcggcgcaggagccgccctgcagatcccttttgccatgcagatggcctataggttcaacggcatcggcgtgacccagaatgtgctgtacgagaaccagaagctgatcgccaatcagtttaacagcgccatcggcaagatccaggactctctgtcctctacagccagcgccctgggcaagctgcaggatgtggtgaatcagaacgcccaggccctgaataccctggtgaagcagctgagctccaacttcggcgccatctctagcgtgctgaatgacatcctgagccggctggacccccctgaggcagaggtgcagatcgacaggctgatcacaggccgcctgcagagcctgcagacctacgtgacacagcagctgatcagggcagcagagatcagagcctccgccaatctggccgccaccaagatgagcgagtgcgtgctgggacagtccaagagggtggacttttgtggcaagggctatcacctgatgtctttcccacagagcgcccctcacggcgtggtgtttctgcacgtgacctacgtgccagcccaggagaagaacttcaccacagcaccagccatctgccacgatggaaaggcacactttcctagggagggcgtgttcgtgtctaacggcacccactggtttgtgacacagcgcaatttctacgagccacagatcatcaccacagacaatacattcgtgagcggcaactgtgatgtggtgatcggcatcgtgaacaataccgtgtatgatccactgcagcccgagctggactcctttaaggaggagctggataagtacttcaagaatcacacctctcccgacgtggatctgggcgacatctccggcatcaatgcctctgtggtgaacatccagaaggagatcgaccggctgaacgaggtggccaagaatctgaacgagagcctgatcgatctgcaggagctgggcaagtatgagcagtacatcaagggctctggcagagagaacctgtatttccagggaggaggaggcagcggatacatccctgaggcaccaagggacggacaggcctacgtgcgcaaggatggcgagtgggtgctgctgtccacctttctgggccatcatcaccaccaccaccaccactga

SEQ ID NO: 5044 - DNA, 3846 bp, Artificial Sequence
  Description of Artificial Sequence: Synthetic polynucleotide
atgggcatcctgccaagcccaggaatgcccgccctgctgtctctggtgagcctgctgtccgtgctgctgatgggatgcgtggcagagacaggcacacagtgcgtgaacctgaccacaaggacccagctgccccctgcctataccaattctttcacacggggcgtgtactatcccgacaaggtgtttagaagctccgtgctgcactccacacaggatctgtttctgcctttcttttctaacgtgacctggttccacgccatccacgtgtccggcaccaatggcacaaagcggttcgacaatcccgtgctgccttttaacgatggcgtgtacttcgccagcaccgagaagtccaacatcatcagaggctggatctttggcaccacactggactctaagacacagagcctgctgatcgtgaacaatgccaccaacgtggtgatcaaggtgtgcgagttccagttttgtaatgatccattcctgggcgtgtactatcacaagaacaataagtcctggatggagtctgagtttcgcgtgtattctagcgccaacaattgcacatttgagtacgtgagccagcccttcctgatggacctggagggcaagcagggcaatttcaagaacctgagggagttcgtgtttaagaatatcgatggctacttcaagatctacagcaagcacaccccaatcaacctggtgcgcgacctgccacagggattctccgccctggagccactggtggatctgcccatcggcatcaacatcacccggtttcagacactgctggccctgcacagatcctacctgacaccaggcgactcctctagcggatggaccgcaggagctgccgcctactatgtgggctatctgcagccccggaccttcctgctgaagtacaacgagaatggcaccatcacagacgcagtggattgcgccctggaccccctgtctgagacaaagtgtacactgaagagctttaccgtggagaagggcatctatcagacaagcaatttcagggtgcagcctaccgagtccatcgtgcgctttcccaatatcacaaacctgtgcccttttggcgaggtgttcaacgccaccagattcgccagcgtgtacgcctggaatcggaagagaatctccaactgcgtggccgactattctgtgctgtacaactccgcctctttcagcacctttaagtgctatggcgtgtctcccacaaagctgaatgatctgtgctttaccaacgtgtacgccgatagcttcgtgatcaggggagacgaagtgagacagatcgcaccaggacagacaggaaagatcgcagactacaattataagctgcctgacgatttcaccggctgcgtgatcgcctggaactccaacaatctggattctaaagtgggcggcaactacaattatctgtacaggctgtttcgcaagtccaatctgaagccattcgagcgggacatctccacagagatctaccaggccggctctaccccctgcaatggcgtggagggctttaactgttatttccctctgcagtcttacggcttccagccaacaaacggcgtgggctatcagccctacagagtggtggtgctgtcctttgagctgctgcacgcaccagcaacagtgtgcggcccaaagaagtctaccaatctggtgaagaacaagtgcgtgaacttcaacttcaacggactgaccggcacaggcgtgctgaccgagagcaataagaagttcctgccttttcagcagttcggcagggacatcgcagataccacagacgccgtgcgcgaccctcagaccctggagatcctggacatcacaccatgcagcttcggcggcgtgtccgtgatcacaccaggcaccaatacatccaaccaggtggccgtgctgtatcaggacgtgaattgtaccgaggtgcccgtggcaatccacgcagatcagctgacccctacatggcgggtgtactctaccggcagcaacgtgttccagacaagagccggatgcctgatcggagcagagcacgtgaacaatagctatgagtgcgacatccctatcggcgccggcatctgtgccagctaccagacccagacaaactccccatctggagcaggctccgtggccagccagtccatcatcgcctataccatgagcctgggcgccgagaacagcgtggcctactccaacaattctatcgccatccctaccaacttcacaatcagcgtgaccacagagatcctgccagtgtctatgaccaagacaagcgtggactgcacaatgtatatctgtggcgatagcaccgagtgctccaacctgctgctgcagtacggctccttttgtacccagctgaatagagccctgacaggcatcgccgtggagcaggataagaacacacaggaggtgttcgcccaggtgaagcagatctacaagaccccacccatcaaggactttggcggcttcaacttcagccagatcctgcctgatccaagcaagccctccaagaggtcttttatcgaggacctgctgttcaacaaggtgaccctggccgatgccggcttcatcaagcagtatggagattgcctgggagacatcgcagcccgcgacctgatctgtgcccagaagtttaatggcctgaccgtgctgcctccactgctgacagatgagatgatcgcccagtacacatctgccctgctggccggcaccatcacaagcggatggaccttcggcgcaggagccgccctgcagatcccttttgccatgcagatggcctataggttcaacggcatcggcgtgacccagaatgtgctgtacgagaaccagaagctgatcgccaatcagtttaacagcgccatcggcaagatccaggactctctgtcctctacagccagcgccctgggcaagctgcaggatgtggtgaatcagaacgcccaggccctgaataccctggtgaagcagctgagctccaacttcggcgccatctctagcgtgctgaatgacatcctgagccggctggacccccctgaggcagaggtgcagatcgacaggctgatcacaggccgcctgcagagcctgcagacctacgtgacacagcagctgatcagggcagcagagatcagagcctccgccaatctggccgccaccaagatgagcgagtgcgtgctgggacagtccaagagggtggacttttgtggcaagggctatcacctgatgtctttcccacagagcgcccctcacggcgtggtgtttctgcacgtgacctacgtgccagcccaggagaagaacttcaccacagcaccagccatctgccacgatggaaaggcacactttcctagggagggcgtgttcgtgtctaacggcacccactggtttgtgacacagcgcaatttctacgagccacagatcatcaccacagacaatacattcgtgagcggcaactgtgatgtggtgatcggcatcgtgaacaataccgtgtatgatccactgcagcccgagcgtgactcctttaaggaggagctggataagtacttcaagaatcacacctctcccgacgtggatctgggcgacatctccggcatcaatgcctctgtggtgaacatccagaaggagatcgaccggctgaacgaggtggccaagaatctgaacgagagcctgatcgatctgcaggagctgggcaagtatgagcagtacatcaagggctctggcagagagaacctgtatttccagggaggaggaggcagcggatacatccctgaggcaccaagggacggacaggcctacgtgcgcaaggatggcgagtgggtgctgctgtccacctttctgggccatcatcaccaccaccaccaccactga

SEQ ID NO: 5045 - DNA, 3846 bp, Artificial Sequence
  Description of Artificial Sequence: Synthetic polynucleotide
atgggcatcctgccaagcccaggaatgcccgccctgctgtctctggtgagcctgctgtccgtgctgctgatgggatgcgtggcagagacaggcacacagtgcgtgaacctgaccacaaggacccagctgccccctgcctataccaattctttcacacggggcgtgtactatcccgacaaggtgtttagaagctccgtgctgcactccacacaggatctgtttctgcctttcttttctaacgtgacctggttccacgccatccacgtgtccggcaccaatggcacaaagcggttcgacaatcccgtgctgccttttaacgatggcgtgtacttcgccagcaccgagaagtccaacatcatcagaggctggatctttggcaccacactggactctaagacacagagcctgctgatcgtgaacaatgccaccaacgtggtgatcaaggtgtgcgagttccagttttgtaatgatccattcctgggcgtgtactatcacaagaacaataagtcctggatggagtctgagtttcgcgtgtattctagcgccaacaattgcacatttgagtacgtgagccagcccttcctgatggacctggagggcaagcagggcaatttcaagaacctgagggagttcgtgtttaagaatatcgatggctacttcaagatctacagcaagcacaccccaatcaacctggtgcgcgacctgccacagggattctccgccctggagccactggtggatctgcccatcggcatcaacatcacccggtttcagacactgctggccctgcacagatcctacctgacaccaggcgactcctctagcggatggaccgcaggagctgccgcctactatgtgggctatctgcagccccggaccttcctgctgaagtacaacgagaatggcaccatcacagacgcagtggattgcgccctggaccccctgtctgagacaaagtgtacactgaagagctttaccgtggagaagggcatctatcagacaagcaatttcagggtgcagcctaccgagtccatcgtgcgctttcccaatatcacaaacctgtgcccttttggcgaggtgttcaacgccaccagattcgccagcgtgtacgcctggaatcggaagagaatctccaactgcgtggccgactattctgtgctgtacaactccgcctctttcagcacctttaagtgctatggcgtgtctcccacaaagctgaatgatctgtgctttaccaacgtgtacgccgatagcttcgtgatcaggggagacgaagtgagacagatcgcaccaggacagacaggaaagatcgcagactacaattataagctgcctgacgatttcaccggctgcgtgatcgcctggaactccaacaatctggattctaaagtgggcggcaactacaattatctgtacaggctgtttcgcaagtccaatctgaagccattcgagcgggacatctccacagagatctaccaggccggctctaccccctgcaatggcgtggagggctttaactgttatttccctctgcagtcttacggcttccagccaacaaacggcgtgggctatcagccctacagagtggtggtgctgtcctttgagctgctgcacgcaccagcaacagtgtgcggcccaaagaagtctaccaatctggtgaagaacaagtgcgtgaacttcaacttcaacggactgaccggcacaggcgtgctgaccgagagcaataagaagttcctgccttttcagcagttcggcagggacatcgcagataccacagacgccgtgcgcgaccctcagaccctggagatcctggacatcacaccatgcagcttcggcggcgtgtccgtgatcacaccaggcaccaatacatccaaccaggtggccgtgctgtatcaggacgtgaattgtaccgaggtgcccgtggcaatccacgcagatcagctgacccctacatggcgggtgtactctaccggcagcaacgtgttccagacaagagccggatgcctgatcggagcagagcacgtgaacaatagctatgagtgcgacatccctatcggcgccggcatctgtgccagctaccagacccagacaaactccccatctggagcaggctccgtggccagccagtccatcatcgcctataccatgagcctgggcgccgagaacagcgtggcctactccaacaattctatcgccatccctaccaacttcacaatcagcgtgaccacagagatcctgccagtgtctatgaccaagacaagcgtggactgcacaatgtatatctgtggcgatagcaccgagtgctccaacctgctgctgcagtacggctccttttgtacccagctgaatagagccctgacaggcatcgccgtggagcaggataagaacacacaggaggtgttcgcccaggtgaagcagatctacaagaccccacccatcaaggactttggcggcttcaacttcagccagatcctgcctgatccaagcaagccctccaagaggtcttttatcgaggacctgctgttcaacaaggtgaccctggccgatgccggcttcatcaagcagtatggagattgcctgggagacatcgcagcccgcgacctgatctgtgcccagaagtttaatggcctgaccgtgctgcctccactgctgacagatgagatgatcgcccagtacacatctgccctgctggccggcaccatcacaagcggatggaccttcggcgcaggagccgccctgcagatcccttttgccatgcagatggcctataggttcaacggcatcggcgtgacccagaatgtgctgtacgagaaccagaagctgatcgccaatcagtttaacagcgccatcggcaagatccaggactctctgtcctctacagccagcgccctgggcaagctgcaggatgtggtgaatcagaacgcccaggccctgaataccctggtgaagcagctgagctccaacttcggcgccatctctagcgtgctgaatgacatcctgagccggctggacccccctgaggcagaggtgcagatcgacaggctgatcacaggccgcctgcagagcctgcagacctacgtgacacagcagctgatcagggcagcagagatcagagcctccgccaatctggccgccaccaagatgcaagagtgcgtgctgggacagtccaagagggtggacttttgtggcaagggctatcacctgatgtctttcccacagagcgcccctcacggcgtggtgtttctgcacgtgacctacgtgccagcccaggagaagaacttcaccacagcaccagccatctgccacgatggaaaggcacactttcctagggagggcgtgttcgtgtctaacggcacccactggtttgtgacacagcgcaatttctacgagccacagatcatcaccacagacaatacattcgtgagcggcaactgtgatgtggtgatcggcatcgtgaacaataccgtgtatgatccactgcagcccgagctggactcctttaaggaggagctggataagtacttcaagaatcacacctctcccgacgtggatctgggcgacatctccggcatcaatgcctctgtggtgaacatccagaaggagatcgaccggctgaacgaggtggccaagaatctgaacgagagcctgatcgatctgcaggagctgggcaagtatgagcagtacatcaagggctctggcagagagaacctgtatttccagggaggaggaggcagcggatacatccctgaggcaccaagggacggacaggcctacgtgcgcaaggatggcgagtgggtgctgctgtccacctttctgggccatcatcaccaccaccaccaccactga

SEQ ID NO: 5046 - DNA, 3846 bp, Artificial Sequence
  Description of Artificial Sequence: Synthetic polynucleotide
atgggcatcctgccaagcccaggaatgcccgccctgctgtctctggtgagcctgctgtccgtgctgctgatgggatgcgtggcagagacaggcacacagtgcgtgaacctgaccacaaggacccagctgccccctgcctataccaattctttcacacggggcgtgtactatcccgacaaggtgtttagaagctccgtgctgcactccacacaggatctgtttctgcctttcttttctaacgtgacctggttccacgccatccacgtgtccggcaccaatggcacaaagcggttcgacaatcccgtgctgccttttaacgatggcgtgtacttcgccagcaccgagaagtccaacatcatcagaggctggatctttggcaccacactggactctaagacaccaagcctgctgatcgtgaacaatgccaccaacgtggtgatcaaggtgtgcgagttccagttttgtaatgatccattcctgggcgtgtactatcacaagaacaataagtcctggatggagtctgagtttcgcgtgtattctagcgccaacaattgcacatttgagtacgtgagccagcccttcctgatggacctggagggcaagcagggcaatttcaagaacctgagggagttcgtgtttaagaatatcgatggctacttcaagatctacagcaagcacaccccaatcaacctggtgcgcgacctgccacagggattctccgccctggagccactggtggatctgcccatcggcatcaacatcacccggtttcagacactgctggccctgcacagatcctacctgacaccaggcgactcctctagcggatggaccgcaggagctgccgcctactatgtgggctatctgcagccccggaccttcctgctgaagtacaacgagaatggcaccatcacagacgcagtggattgcgccctggaccccctgtctgagacaaagtgtacactgaagagctttaccgtggagaagggcatctatcagacaagcaatttcagggtgcagcctaccgagtccatcgtgcgctttcccaatatcacaaacctgtgcccttttggcgaggtgttcaacgccaccagattcgccagcgtgtacgcctggaatcggaagagaatctccaactgcgtggccgactattctgtgctgtacaactccgcctctttcagcacctttaagtgctatggcgtgtctcccacaaagctgaatgatctgtgctttaccaacgtgtacgccgatagcttcgtgatcaggggagacgaagtgagacagatcgcaccaggacagacaggaaagatcgcagactacaattataagctgcctgacgatttcaccggctgcgtgatcgcctggaactccaacaatctggattctaaagtgggcggcaactacaattatctgtacaggctgtttcgcaagtccaatctgaagccattcgagcgggacatctccacagagatctaccaggccggctctaccccctgcaatggcgtggagggctttaactgttatttccctctgcagtcttacggcttccagccaacaaacggcgtgggctatcagccctacagagtggtggtgctgtcctttgagctgctgcacgcaccagcaacagtgtgcggcccaaagaagtctaccaatctggtgaagaacaagtgcgtgaacttcaacttcaacggactgaccggcacaggcgtgctgaccgagagcaataagaagttcctgccttttcagcagttcggcagggacatcgcagataccacagacgccgtgcgcgaccctcagaccctggagatcctggacatcacaccatgcagcttcggcggcgtgtccgtgatcacaccaggcaccaatacatccaaccaggtggccgtgctgtatcaggacgtgaattgtaccgaggtgcccgtggcaatccacgcagatcagctgacccctacatggcgggtgtactctaccggcagcaacgtgttccagacaagagccggatgcctgatcggagcagagcacgtgaacaatagctatgagtgcgacatccctatcggcgccggcatctgtgccagctaccagacccagacaaactccccatctggagcaggctccgtggccagccagtccatcatcgcctataccatgagcctgggcgccgagaacagcgtggcctactccaacaattctatcgccatccctaccaacttcacaatcagcgtgaccacagagatcctgccagtgtctatgaccaagacaagcgtggactgcacaatgtatatctgtggcgatagcaccgagtgctccaacctgctgctgcagtacggctccttttgtacccagctgaatagagccctgacaggcatcgccgtggagcaggataagaacacacaggaggtgttcgcccaggtgaagcagatctacaagaccccacccatcaaggactttggcggcttcaacttcagccagatcctgcctgatccaagcaagccctccaagaggtcttttatcgaggacctgctgttcaacaaggtgaccctggccgatgccggcttcatcaagcagtatggagattgcctgggagacatcgcagcccgcgacctgatctgtgcccagaagtttaatggcctgaccgtgctgcctccactgctgacagatgagatgatcgcccagtacacatctgccctgctggccggcaccatcacaagcggatggaccttcggcgcaggagccgccctgcagatcccttttgccatgcagatggcctataggttcaacggcatcggcgtgacccagaatgtgctgtacgagaaccagaagctgatcgccaatcagtttaacagcgccatcggcaagatccaggactctctgtcctctacagccagcgccctgggcaagctgcaggatgtggtgaatcagaacgcccaggccctgaataccctggtgaagcagctgagctccaacttcggcgccatctctagcgtgctgaatgacatcctgagccggctggacccccctgaggcagaggtgcagatcgacaggctgatcacaggccgcctgcagagcctgcagacctacgtgacacagcagctgatcagggcagcagagatcagagcctccgccaatctggccgccaccaagatgagcgagtgcgtgctgggacagtccaagagggtggacttttgtggcaagggctatcacctgatgtctttcccacagagcgcccctcacggcgtggtgtttctgcacgtgacctacgtgccagcccaggagaagaacttcaccacagcaccagccatctgccacgatggaaaggcacactttcctagggagggcgtgttcgtgtctaacggcacccactggtttgtgacacagcgcaatttctacgagccacagatcatcaccacagacaatacattcgtgagcggcaactgtgatgtggtgatcggcatcgtgaacaataccgtgtatgatccactgcagcccgagctggactcctttaaggaggagctggataagtacttcaagaatcacacctctcccgacgtggatctgggcgacatctccggcatcaatgcctctgtggtgaacatccagaaggagatcgaccggctgaacgaggtggccaagaatctgaacgagagcctgatcgatctgcaggagctgggcaagtatgagcagtacatcaagggctctggcagagagaacctgtatttccagggaggaggaggcagcggatacatccctgaggcaccaagggacggacaggcctacgtgcgcaaggatggcgagtgggtgctgctgtccacctttctgggccatcatcaccaccaccaccaccactga

SEQ ID NO: 5047 - DNA, 3846 bp, Artificial Sequence
  Description of Artificial Sequence: Synthetic polynucleotide
atgggcatcctgccaagcccaggaatgcccgccctgctgtctctggtgagcctgctgtccgtgctgctgatgggatgcgtggcagagacaggcacacagtgcgtgaacctgaccacaaggacccagctgccccctgcctataccaattctttcacacggggcgtgtactatcccgacaaggtgtttagaagctccgtgctgcactccacacaggatctgtttctgcctttcttttctaacgtgacctggttccacgccatccacgtgtccggcaccaatggcacaaagcggttcgacaatcccgtgctgccttttaacgatggcgtgtacttcgccagcaccgagaagtccaacatcatcagaggctggatctttggcaccacactggactctaagacacagagcctgctgatcgtgaacaatgccaccaacgtggtgatcaaggtgtgcgagttccagttttgtaatgatccattcctgggcgtgtactatcacaagaacaataagtcctggatggagtctgagtttcgcgtgtattctagcgccaacaattgcacatttgagtacgtgagccagcccttcctgatggacctggagggcaagcagggcaatttcaagaacctgagggagttcgtgtttaagaatatcgatggctacttcaagatctacagcaagcacaccccaatcaacctggtgcgcgacctgccacagggattctccgccctggagccactggtggatctgcccatcggcatcaacatcacccggtttcagacactgctggccctgcacagatcctacctgacaccaggcgactcctctagcggatggaccgcaggagctgccgcctactatgtgggctatctgcagccccggaccttcctgctgaagtacaacgagaatggcaccatcacagacgcagtggattgcgccctggaccccctgtctgagacaaagtgtacactgaagagctttaccgtggagaagggcatctatcagacaagcaatttcagggtgcagcctaccgagtccatcgtgcgctttcccaatatcacaaacctgtgcccttttggcgaggtgttcaacgccaccagattcgccagcgtgtacgcctggaatcggaagagaatctccaactgcgtggccgactattctgtgctgtacaactccgcctctttcagcacctttaagtgctatggcgtgtctcccacaaagctgaatgatctgtgctttaccaacgtgtacgccgatagcttcgtgatcaggggagacgaagtgagacagatcgcaccaggacagacaggaaagatcgcagactacaattataagctgcctgacgatttcaccggctgcgtgatcgcctggaactccaacaatctggattctaaagtgggcggcaactacaattatctgtacaggctgtttcgcaagtccaatctgaagccattcgagcgggacatctccacagagatctaccaggccggctctaccccctgcaatggcgtggagggctttaactgttatttccctctgcagtcttacggcttccagccaacaaacggcgtgggctatcagccctacagagtggtggtgctgtcctttgagctgctgcgagcaccagcaacagtgtgcggcccaaagaagtctaccaatctggtgaagaacaagtgcgtgaacttcaacttcaacggactgaccggcacaggcgtgctgaccgagagcaataagaagttcctgccttttcagcagttcggcagggacatcgcagataccacagacgccgtgcgcgaccctcagaccctggagatcctggacatcacaccatgcagcttcggcggcgtgtccgtgatcacaccaggcaccaatacatccaaccaggtggccgtgctgtatcaggacgtgaattgtaccgaggtgcccgtggcaatccacgcagatcagctgacccctacatggcgggtgtactctaccggcagcaacgtgttccagacaagagccggatgcctgatcggagcagagcacgtgaacaatagctatgagtgcgacatccctatcggcgccggcatctgtgccagctaccagacccagacaaactccccatctggagcaggctccgtggccagccagtccatcatcgcctataccatgagcctgggcgccgagaacagcgtggcctactccaacaattctatcgccatccctaccaacttcacaatcagcgtgaccacagagatcctgccagtgtctatgaccaagacaagcgtggactgcacaatgtatatctgtggcgatagcaccgagtgctccaacctgctgctgcagtacggctccttttgtacccagctgaatagagccctgacaggcatcgccgtggagcaggataagaacacacaggaggtgttcgcccaggtgaagcagatctacaagaccccacccatcaaggactttggcggcttcaacttcagccagatcctgcctgatccaagcaagccctccaagaggtcttttatcgaggacctgctgttcaacaaggtgaccctggccgatgccggcttcatcaagcagtatggagattgcctgggagacatcgcagcccgcgacctgatctgtgcccagaagtttaatggcctgaccgtgctgcctccactgctgacagatgagatgatcgcccagtacacatctgccctgctggccggcaccatcacaagcggatggaccttcggcgcaggagccgccctgcagatcccttttgccatgcagatggcctataggttcaacggcatcggcgtgacccagaatgtgctgtacgagaaccagaagctgatcgccaatcagtttaacagcgccatcggcaagatccaggactctctgtcctctacagccagcgccctgggcaagctgcaggatgtggtgaatcagaacgcccaggccctgaataccctggtgaagcagctgagctccaacttcggcgccatctctagcgtgctgaatgacatcctgagccggctggacccccctgaggcagaggtgcagatcgacaggctgatcacaggccgcctgcagagcctgcagacctacgtgacacagcagctgatcagggcagcagagatcagagcctccgccaatctggccgccaccaagatgagcgagtgcgtgctgggacagtccaagagggtggacttttgtggcaagggctatcacctgatgtctttcccacagagcgcccctcacggcgtggtgtttctgcacgtgacctacgtgccagcccaggagaagaacttcaccacagcaccagccatctgccacgatggaaaggcacactttcctagggagggcgtgttcgtgtctaacggcacccactggtttgtgacacagcgcaatttctacgagccacagatcatcaccacagacaatacattcgtgagcggcaactgtgatgtggtgatcggcatcgtgaacaataccgtgtatgatccactgcagcccgagctggactcctttaaggaggagctggataagtacttcaagaatcacacctctcccgacgtggatctgggcgacatctccggcatcaatgcctctgtggtgaacatccagaaggagatcgaccggctgaacgaggtggccaagaatctgaacgagagcctgatcgatctgcaggagctgggcaagtatgagcagtacatcaagggctctggcagagagaacctgtatttccagggaggaggaggcagcggatacatccctgaggcaccaagggacggacaggcctacgtgcgcaaggatggcgagtgggtgctgctgtccacctttctgggccatcatcaccaccaccaccaccactga

SEQ ID NO: 5048 - DNA, 3846 bp, Artificial Sequence
  Description of Artificial Sequence: Synthetic polynucleotide
atgggcatcctgccaagcccaggaatgcccgccctgctgtctctggtgagcctgctgtccgtgctgctgatgggatgcgtggcagagacaggcacacagtgcgtgaacctgaccacaaggacccagctgccccctgcctataccaattctttcacacggggcgtgtactatcccgacaaggtgtttagaagctccgtgctgcactccacacaggatctgtttctgcctttcttttctaacgtgacctggttccacgccatccacgtgtccggcaccaatggcacaaagcggttcgacaatcccgtgctgccttttaacgatggcgtgtacttcgccagcaccgagaagtccaacatcatcagaggctggatctttggcaccacactggactctaagacacagagcctgctgatcgtgaacaatgccaccaacgtggtgatcaaggtgtgcgagttccagttttgtaatgatccattcctgggcgtgtactatcacaagaacaataagtcctggatggagtctgagtttcgcgtgtattctagcgccaacaattgcacatttgagtacgtgagccagcccttcctgatggacctggagggcaagcagggcaatttcaagaacctgagggagttcgtgtttaagaatatcgatggctacttcaagatctacagcaagcacaccccaatcaacctggtgcgcgacctgccacagggattctccgccctggagccactggtggatctgcccatcggcatcaacatcacccggtttcagacactgctggccctgcacagatcctacctgacaccaggcgactcctctagcggatggaccgcaggagctgccgcctactatgtgggctatctgcagccccggaccttcctgctgaagtacaacgagaatggcaccatcacagacgcagtggattgcgccctggaccccctgtctgagacaaagtgtacactgaagagctttaccgtggagaagggcatctatcagacaagcaatttcagggtgcagcctaccgagtccatcgtgcgctttcccaatatcacaaacctgtgcccttttggcgaggtgttcaacgccaccagattcgccagcgtgtacgcctggaatcggaagagaatctccaactgcgtggccgactattctgtgctgtacaactccgcctctttcagcacctttaagtgctatggcgtgtctcccacaaagctgaatgatctgtgctttaccaacgtgtacgccgatagcttcgtgatcaggggagacgaagtgagacagatcgcaccaggacagacaggacaaatcgcagactacaattataagctgcctgacgatttcaccggctgcgtgatcgcctggaactccaacaatctggattctaaagtgggcggcaactacaattatctgtacaggctgtttcgcaagtccaatctgaagccattcgagcgggacatctccacagagatctaccaggccggctctaccccctgcaatggcgtggagggctttaactgttatttccctctgcagtcttacggcttccagccaacaaacggcgtgggctatcagccctacagagtggtggtgctgtcctttgagctgctgcacgcaccagcaacagtgtgcggcccaaagaagtctaccaatctggtgaagaacaagtgcgtgaacttcaacttcaacggactgaccggcacaggcgtgctgaccgagagcaataagaagttcctgccttttcagcagttcggcagggacatcgcagataccacagacgccgtgcgcgaccctcagaccctggagatcctggacatcacaccatgcagcttcggcggcgtgtccgtgatcacaccaggcaccaatacatccaaccaggtggccgtgctgtatcaggacgtgaattgtaccgaggtgcccgtggcaatccacgcagatcagctgacccctacatggcgggtgtactctaccggcagcaacgtgttccagacaagagccggatgcctgatcggagcagagcacgtgaacaatagctatgagtgcgacatccctatcggcgccggcatctgtgccagctaccagacccagacaaactccccatctggagcaggctccgtggccagccagtccatcatcgcctataccatgagcctgggcgccgagaacagcgtggcctactccaacaattctatcgccatccctaccaacttcacaatcagcgtgaccacagagatcctgccagtgtctatgaccaagacaagcgtggactgcacaatgtatatctgtggcgatagcaccgagtgctccaacctgctgctgcagtacggctccttttgtacccagctgaatagagccctgacaggcatcgccgtggagcaggataagaacacacaggaggtgttcgcccaggtgaagcagatctacaagaccccacccatcaaggactttggcggcttcaacttcagccagatcctgcctgatccaagcaagccctccaagaggtcttttatcgaggacctgctgttcaacaaggtgaccctggccgatgccggcttcatcaagcagtatggagattgcctgggagacatcgcagcccgcgacctgatctgtgcccagaagtttaatggcctgaccgtgctgcctccactgctgacagatgagatgatcgcccagtacacatctgccctgctggccggcaccatcacaagcggatggaccttcggcgcaggagccgccctgcagatcccttttgccatgcagatggcctataggttcaacggcatcggcgtgacccagaatgtgctgtacgagaaccagaagctgatcgccaatcagtttaacagcgccatcggcaagatccaggactctctgtcctctacagccagcgccctgggcaagctgcaggatgtggtgaatcagaacgcccaggccctgaataccctggtgaagcagctgagctccaacttcggcgccatctctagcgtgctgaatgacatcctgagccggctggacccccctgaggcagaggtgcagatcgacaggctgatcacaggccgcctgcagagcctgcagacctacgtgacacagcagctgatcagggcagcagagatcagagcctccgccaatctggccgccaccaagatgagcgagtgcgtgctgggacagtccaagagggtggacttttgtggcaagggctatcacctgatgtctttcccacagagcgcccctcacggcgtggtgtttctgcacgtgacctacgtgccagcccaggagaagaacttcaccacagcaccagccatctgccacgatggaaaggcacactttcctagggagggcgtgttcgtgtctaacggcacccactggtttgtgacacagcgcaatttctacgagccacagatcatcaccacagacaatacattcgtgagcggcaactgtgatgtggtgatcggcatcgtgaacaataccgtgtatgatccactgcagcccgagctggactcctttaaggaggagctggataagtacttcaagaatcacacctctcccgacgtggatctgggcgacatctccggcatcaatgcctctgtggtgaacatccagaaggagatcgaccggctgaacgaggtggccaagaatctgaacgagagcctgatcgatctgcaggagctgggcaagtatgagcagtacatcaagggctctggcagagagaacctgtatttccagggaggaggaggcagcggatacatccctgaggcaccaagggacggacaggcctacgtgcgcaaggatggcgagtgggtgctgctgtccacctttctgggccatcatcaccaccaccaccaccactga

SEQ ID NO: 5049 - DNA, 3846 bp, Artificial Sequence
  Description of Artificial Sequence: Synthetic polynucleotide
atgggcatcctgccaagcccaggaatgcccgccctgctgtctctggtgagcctgctgtccgtgctgctgatgggatgcgtggcagagacaggcacacagtgcgtgaacctgaccacaaggacccagctgccccctgcctataccaattctttcacacggggcgtgtactatcccgacaaggtgtttagaagctccgtgctgcactccacacaggatctgtttctgcctttcttttctaacgtgacctggttccacgccatccacgtgtccggcaccaatggcacaaagcggttcgacaatcccgtgctgccttttaacgatggcgtgtacttcgccagcaccgagaagtccaacatcatcagaggctggatctttggcaccacactggactctaagacacagagcctgctgatcgtgaacaatgccaccaacgtggtgatcaaggtgtgcgagttccagttttgtaatgatccattcctgggcgtgtactatcacaagaacaataagtcctggatggagtctgagtttcgcgtgtattctagcgccaacaattgcacatttgagtacgtgagccagcccttcctgatggacctggagggcaagcagggcaatttcaagaacctgagggagttcgtgtttaagaatatcgatggctacttcaagatctacagcaagcacaccccaatcaacctggtgcgcgacctgccacagggattctccgccctggagccactggtggatctgcccatcggcatcaacatcacccggtttcagacactgctggccctgcacagatcctacctgacaccaggcgactcctctagcggatggaccgcaggagctgccgcctactatgtgggctatctgcagccccggaccttcctgctgaagtacaacgagaatggcaccatcacagacgcagtggattgcgccctggaccccctgtctgagacaaagtgtacactgaagagctttaccgtggagaagggcatctatcagacaagcaatttcagggtgcagcctaccgagtccatcgtgcgctttcccaatatcacaaacctgtgcccttttggcgaggtgttcaacgccaccagattcgccagcgtgtacgcctggaatcggaagagaatctccaactgcgtggccgactattctgtgctgtacaactccgcctctttcagcacctttaagtgctatggcgtgtctcccacaaagctgaatgatctgtgctttaccaacgtgtacgccgatagcttcgtgatcaggggagacgaagtgagacagatcgcaccaggacagacaggaaagatcgcagactacaattataagctgcctgacgatttcaccggctgcgtgatcgcctggaactccaacaatctggattctaaaataggcggcaactacaattatctgtacaggctgtttcgcaagtccaatctgaagccattcgagcgggacatctccacagagatctaccaggccggctctaccccctgcaatggcgtggagggctttaactgttatttccctctgcagtcttacggcttccagccaacaaacggcgtgggctatcagccctacagagtggtggtgctgtcctttgagctgctgcacgcaccagcaacagtgtgcggcccaaagaagtctaccaatctggtgaagaacaagtgcgtgaacttcaacttcaacggactgaccggcacaggcgtgctgaccgagagcaataagaagttcctgccttttcagcagttcggcagggacatcgcagataccacagacgccgtgcgcgaccctcagaccctggagatcctggacatcacaccatgcagcttcggcggcgtgtccgtgatcacaccaggcaccaatacatccaaccaggtggccgtgctgtatcaggacgtgaattgtaccgaggtgcccgtggcaatccacgcagatcagctgacccctacatggcgggtgtactctaccggcagcaacgtgttccagacaagagccggatgcctgatcggagcagagcacgtgaacaatagctatgagtgcgacatccctatcggcgccggcatctgtgccagctaccagacccagacaaactccccatctggagcaggctccgtggccagccagtccatcatcgcctataccatgagcctgggcgccgagaacagcgtggcctactccaacaattctatcgccatccctaccaacttcacaatcagcgtgaccacagagatcctgccagtgtctatgaccaagacaagcgtggactgcacaatgtatatctgtggcgatagcaccgagtgctccaacctgctgctgcagtacggctccttttgtacccagctgaatagagccctgacaggcatcgccgtggagcaggataagaacacacaggaggtgttcgcccaggtgaagcagatctacaagaccccacccatcaaggactttggcggcttcaacttcagccagatcctgcctgatccaagcaagccctccaagaggtcttttatcgaggacctgctgttcaacaaggtgaccctggccgatgccggcttcatcaagcagtatggagattgcctgggagacatcgcagcccgcgacctgatctgtgcccagaagtttaatggcctgaccgtgctgcctccactgctgacagatgagatgatcgcccagtacacatctgccctgctggccggcaccatcacaagcggatggaccttcggcgcaggagccgccctgcagatcccttttgccatgcagatggcctataggttcaacggcatcggcgtgacccagaatgtgctgtacgagaaccagaagctgatcgccaatcagtttaacagcgccatcggcaagatccaggactctctgtcctctacagccagcgccctgggcaagctgcaggatgtggtgaatcagaacgcccaggccctgaataccctggtgaagcagctgagctccaacttcggcgccatctctagcgtgctgaatgacatcctgagccggctggacccccctgaggcagaggtgcagatcgacaggctgatcacaggccgcctgcagagcctgcagacctacgtgacacagcagctgatcagggcagcagagatcagagcctccgccaatctggccgccaccaagatgagcgagtgcgtgctgggacagtccaagagggtggacttttgtggcaagggctatcacctgatgtctttcccacagagcgcccctcacggcgtggtgtttctgcacgtgacctacgtgccagcccaggagaagaacttcaccacagcaccagccatctgccacgatggaaaggcacactttcctagggagggcgtgttcgtgtctaacggcacccactggtttgtgacacagcgcaatttctacgagccacagatcatcaccacagacaatacattcgtgagcggcaactgtgatgtggtgatcggcatcgtgaacaataccgtgtatgatccactgcagcccgagctggactcctttaaggaggagctggataagtacttcaagaatcacacctctcccgacgtggatctgggcgacatctccggcatcaatgcctctgtggtgaacatccagaaggagatcgaccggctgaacgaggtggccaagaatctgaacgagagcctgatcgatctgcaggagctgggcaagtatgagcagtacatcaagggctctggcagagagaacctgtatttccagggaggaggaggcagcggatacatccctgaggcaccaagggacggacaggcctacgtgcgcaaggatggcgagtgggtgctgctgtccacctttctgggccatcatcaccaccaccaccaccactga

SEQ ID NO: 5050 - DNA, 3846 bp, Artificial Sequence
  Description of Artificial Sequence: Synthetic polynucleotide
atgggcatcctgccaagcccaggaatgcccgccctgctgtctctggtgagcctgctgtccgtgctgctgatgggatgcgtggcagagacaggcacacagtgcgtgaacctgaccacaaggacccagctgccccctgcctataccaattctttcacacggggcgtgtactatcccgacaaggtgtttagaagctccgtgctgcactccacacaggatctgtttctgcctttcttttctaacgtgacctggttccacgccatccacgtgtccggcaccaatggcacaaagcggttcgacaatcccgtgctgccttttaacgatggcgtgtacttcgccagcaccgagaagtccaacatcatcagaggctggatctttggcaccacactggactctaagacacagagcctgctgatcgtgaacaatgccaccaacgtggtgatcaaggtgtgcgagttccagttttgtaatgatccattcctgggcgtgtactatcacaagaacaataagtcctggatggagtctgagtttcgcgtgtattctagcgccaacaattgcacatttgagtacgtgagccagcccttcctgatggacctggagggcaagcagggcaatttcaagaacctgagggagttcgtgtttaagaatatcgatggctacttcaagatctacagcaagcacaccccaatcaacctggtgcgcgacctgccacagggattctccgccctggagccactggtggatctgcccatcggcatcaacatcacccggtttcagacactgctggccctgcacagatcctacctgacaccaggcgactcctctagcggatggaccgcaggagctgccgcctactatgtgggctatctgcagccccggaccttcctgctgaagtacaacgagaatggcaccatcacagacgcagtggattgcgccctggaccccctgtctgagacaaagtgtacactgaagagctttaccgtggagaagggcatctatcagacaagcaatttcagggtgcagcctaccgagtccatcgtgcgctttcccaatatcacaaacctgtgcccttttggcgaggtgttcaacgccaccagattcgccagcgtgtacgcctggaatcggaagagaatctccaactgcgtggccgactattctgtgctgtacaactccgcctctttcagcacctttaagtgctatggcgtgtctcccacaaagctgaatgatctgtgctttaccaacgtgtacgccgatcgtttcgtgatcaggggagacgaagtgagacagatcgcaccaggacagacaggaaagatcgcagactacaattataagctgcctgacgatttcaccggctgcgtgatcgcctggaactccaacaatctggattctaaagtgggcggcaactacaattatctgtacaggctgtttcgcaagtccaatctgaagccattcgagcgggacatctccacagagatctaccaggccggctctaccccctgcaatggcgtggagggctttaactgttatttccctctgcagtcttacggcttccagccaacaaacggcgtgggctatcagccctacagagtggtggtgctgtcctttgagctgctgcacgcaccagcaacagtgtgcggcccaaagaagtctaccaatctggtgaagaacaagtgcgtgaacttcaacttcaacggactgaccggcacaggcgtgctgaccgagagcaataagaagttcctgccttttcagcagttcggcagggacatcgcagataccacagacgccgtgcgcgaccctcagaccctggagatcctggacatcacaccatgcagcttcggcggcgtgtccgtgatcacaccaggcaccaatacatccaaccaggtggccgtgctgtatcaggacgtgaattgtaccgaggtgcccgtggcaatccacgcagatcagctgacccctacatggcgggtgtactctaccggcagcaacgtgttccagacaagagccggatgcctgatcggagcagagcacgtgaacaatagctatgagtgcgacatccctatcggcgccggcatctgtgccagctaccagacccagacaaactccccatctggagcaggctccgtggccagccagtccatcatcgcctataccatgagcctgggcgccgagaacagcgtggcctactccaacaattctatcgccatccctaccaacttcacaatcagcgtgaccacagagatcctgccagtgtctatgaccaagacaagcgtggactgcacaatgtatatctgtggcgatagcaccgagtgctccaacctgctgctgcagtacggctccttttgtacccagctgaatagagccctgacaggcatcgccgtggagcaggataagaacacacaggaggtgttcgcccaggtgaagcagatctacaagaccccacccatcaaggactttggcggcttcaacttcagccagatcctgcctgatccaagcaagccctccaagaggtcttttatcgaggacctgctgttcaacaaggtgaccctggccgatgccggcttcatcaagcagtatggagattgcctgggagacatcgcagcccgcgacctgatctgtgcccagaagtttaatggcctgaccgtgctgcctccactgctgacagatgagatgatcgcccagtacacatctgccctgctggccggcaccatcacaagcggatggaccttcggcgcaggagccgccctgcagatcccttttgccatgcagatggcctataggttcaacggcatcggcgtgacccagaatgtgctgtacgagaaccagaagctgatcgccaatcagtttaacagcgccatcggcaagatccaggactctctgtcctctacagccagcgccctgggcaagctgcaggatgtggtgaatcagaacgcccaggccctgaataccctggtgaagcagctgagctccaacttcggcgccatctctagcgtgctgaatgacatcctgagccggctggacccccctgaggcagaggtgcagatcgacaggctgatcacaggccgcctgcagagcctgcagacctacgtgacacagcagctgatcagggcagcagagatcagagcctccgccaatctggccgccaccaagatgagcgagtgcgtgctgggacagtccaagagggtggacttttgtggcaagggctatcacctgatgtctttcccacagagcgcccctcacggcgtggtgtttctgcacgtgacctacgtgccagcccaggagaagaacttcaccacagcaccagccatctgccacgatggaaaggcacactttcctagggagggcgtgttcgtgtctaacggcacccactggtttgtgacacagcgcaatttctacgagccacagatcatcaccacagacaatacattcgtgagcggcaactgtgatgtggtgatcggcatcgtgaacaataccgtgtatgatccactgcagcccgagctggactcctttaaggaggagctggataagtacttcaagaatcacacctctcccgacgtggatctgggcgacatctccggcatcaatgcctctgtggtgaacatccagaaggagatcgaccggctgaacgaggtggccaagaatctgaacgagagcctgatcgatctgcaggagctgggcaagtatgagcagtacatcaagggctctggcagagagaacctgtatttccagggaggaggaggcagcggatacatccctgaggcaccaagggacggacaggcctacgtgcgcaaggatggcgagtgggtgctgctgtccacctttctgggccatcatcaccaccaccaccaccactga

SEQ ID NO: 5051 - DNA, 3846 bp, Artificial Sequence
  Description of Artificial Sequence: Synthetic polynucleotide
atgggcatcctgccaagcccaggaatgcccgccctgctgtctctggtgagcctgctgtccgtgctgctgatgggatgcgtggcagagacaggcacacagtgcgtgaacctgaccacaaggacccagctgccccctgcctataccaattctttcacacggggcgtgtactatcccgacaaggtgtttagaagctccgtgctgcactccacacaggatctgtttctgcctttcttttctaacgtgacctggttccacgccatccacgtgtccggcaccaatggcacaaagcggttcgacaatcccgtgctgccttttaacgatggcgtgtacttcgccagcaccgagaagtccaacatcatcagaggctggatctttggcaccacactggactctaagacacagagcctgctgatcgtgaacaatgccaccaacgtggtgatcaaggtgtgcgagttccagttttgtaatgatccattcctgggcgtgtactatcacaagaacaataagtcctggatggagtctgagtttcgcgtgtattctagcgccaacaattgcacatttgagtacgtgagccagcccttcctgatggacctggagggcaagcagggcaatttcaagaacctgagggagttcgtgtttaagaatatcgatggctacttcaagatctacagcaagcacaccccaatcaacctggtgcgcgacctgccacagggattctccgccctggagccactggtggatctgcccatcggcatcaacatcacccggtttcagacactgctggccctgcacagatcctacctgacaccaggcgactcctctagcggatggaccgcaggagctgccgcctactatgtgggctatctgcagccccggaccttcctgctgaagtacaacgagaatggcaccatcacagacgcagtggattgcgccctggaccccctgtctgagacaaagtgtacactgaagagctttaccgtggagaagggcatctatcagacaagcaatttcagggtgcagcctaccgagtccatcgtgcgctttcccaatatcacaaacctgtgcccttttggcgaggtgttcaacgccaccagattcgccagcgtgtacgcctggaatcggaagagaatctccaactgcgtggccgactattctgtgctgtacaactccgcctctttcagctcatttaagtgctatggcgtgtctcccacaaagctgaatgatctgtgctttaccaacgtgtacgccgatagcttcgtgatcaggggagacgaagtgagacagatcgcaccaggacagacaggaaagatcgcagactacaattataagctgcctgacgatttcaccggctgcgtgatcgcctggaactccaacaatctggattctaaagtgggcggcaactacaattatctgtacaggctgtttcgcaagtccaatctgaagccattcgagcgggacatctccacagagatctaccaggccggctctaccccctgcaatggcgtggagggctttaactgttatttccctctgcagtcttacggcttccagccaacaaacggcgtgggctatcagccctacagagtggtggtgctgtcctttgagctgctgcacgcaccagcaacagtgtgcggcccaaagaagtctaccaatctggtgaagaacaagtgcgtgaacttcaacttcaacggactgaccggcacaggcgtgctgaccgagagcaataagaagttcctgccttttcagcagttcggcagggacatcgcagataccacagacgccgtgcgcgaccctcagaccctggagatcctggacatcacaccatgcagcttcggcggcgtgtccgtgatcacaccaggcaccaatacatccaaccaggtggccgtgctgtatcaggacgtgaattgtaccgaggtgcccgtggcaatccacgcagatcagctgacccctacatggcgggtgtactctaccggcagcaacgtgttccagacaagagccggatgcctgatcggagcagagcacgtgaacaatagctatgagtgcgacatccctatcggcgccggcatctgtgccagctaccagacccagacaaactccccatctggagcaggctccgtggccagccagtccatcatcgcctataccatgagcctgggcgccgagaacagcgtggcctactccaacaattctatcgccatccctaccaacttcacaatcagcgtgaccacagagatcctgccagtgtctatgaccaagacaagcgtggactgcacaatgtatatctgtggcgatagcaccgagtgctccaacctgctgctgcagtacggctccttttgtacccagctgaatagagccctgacaggcatcgccgtggagcaggataagaacacacaggaggtgttcgcccaggtgaagcagatctacaagaccccacccatcaaggactttggcggcttcaacttcagccagatcctgcctgatccaagcaagccctccaagaggtcttttatcgaggacctgctgttcaacaaggtgaccctggccgatgccggcttcatcaagcagtatggagattgcctgggagacatcgcagcccgcgacctgatctgtgcccagaagtttaatggcctgaccgtgctgcctccactgctgacagatgagatgatcgcccagtacacatctgccctgctggccggcaccatcacaagcggatggaccttcggcgcaggagccgccctgcagatcccttttgccatgcagatggcctataggttcaacggcatcggcgtgacccagaatgtgctgtacgagaaccagaagctgatcgccaatcagtttaacagcgccatcggcaagatccaggactctctgtcctctacagccagcgccctgggcaagctgcaggatgtggtgaatcagaacgcccaggccctgaataccctggtgaagcagctgagctccaacttcggcgccatctctagcgtgctgaatgacatcctgagccggctggacccccctgaggcagaggtgcagatcgacaggctgatcacaggccgcctgcagagcctgcagacctacgtgacacagcagctgatcagggcagcagagatcagagcctccgccaatctggccgccaccaagatgagcgagtgcgtgctgggacagtccaagagggtggacttttgtggcaagggctatcacctgatgtctttcccacagagcgcccctcacggcgtggtgtttctgcacgtgacctacgtgccagcccaggagaagaacttcaccacagcaccagccatctgccacgatggaaaggcacactttcctagggagggcgtgttcgtgtctaacggcacccactggtttgtgacacagcgcaatttctacgagccacagatcatcaccacagacaatacattcgtgagcggcaactgtgatgtggtgatcggcatcgtgaacaataccgtgtatgatccactgcagcccgagctggactcctttaaggaggagctggataagtacttcaagaatcacacctctcccgacgtggatctgggcgacatctccggcatcaatgcctctgtggtgaacatccagaaggagatcgaccggctgaacgaggtggccaagaatctgaacgagagcctgatcgatctgcaggagctgggcaagtatgagcagtacatcaagggctctggcagagagaacctgtatttccagggaggaggaggcagcggatacatccctgaggcaccaagggacggacaggcctacgtgcgcaaggatggcgagtgggtgctgctgtccacctttctgggccatcatcaccaccaccaccaccactga

SEQ ID NO: 5052 - DNA, 3846 bp, Artificial Sequence
  Description of Artificial Sequence: Synthetic polynucleotide
atgggcatcctgccaagcccaggaatgcccgccctgctgtctctggtgagcctgctgtccgtgctgctgatgggatgcgtggcagagacaggcacacagtgcgtgaacctgaccacaaggacccagctgccccctgcctataccaattctttcacacggggcgtgtactatcccgacaaggtgtttagaagctccgtgctgcactccacacaggatctgtttctgcctttcttttctaacgtgacctggttccacgccatccacgtgtccggcaccaatggcacaaagcggttcgacaatcccgtgctgccttttaacgatggcgtgtacttcgccagcaccgagaagtccaacatcatcagaggctggatctttggcaccacactggactctaagacaacgagcctgctgatcgtgaacaatgccaccaacgtggtgatcaaggtgtgcgagttccagttttgtaatgatccattcctgggcgtgtactatcacaagaacaataagtcctggatggagtctgagtttcgcgtgtattctagcgccaacaattgcacatttgagtacgtgagccagcccttcctgatggacctggagggcaagcagggcaatttcaagaacctgagggagttcgtgtttaagaatatcgatggctacttcaagatctacagcaagcacaccccaatcaacctggtgcgcgacctgccacagggattctccgccctggagccactggtggatctgcccatcggcatcaacatcacccggtttcagacactgctggccctgcacagatcctacctgacaccaggcgactcctctagcggatggaccgcaggagctgccgcctactatgtgggctatctgcagccccggaccttcctgctgaagtacaacgagaatggcaccatcacagacgcagtggattgcgccctggaccccctgtctgagacaaagtgtacactgaagagctttaccgtggagaagggcatctatcagacaagcaatttcagggtgcagcctaccgagtccatcgtgcgctttcccaatatcacaaacctgtgcccttttggcgaggtgttcaacgccaccagattcgccagcgtgtacgcctggaatcggaagagaatctccaactgcgtggccgactattctgtgctgtacaactccgcctctttcagcacctttaagtgctatggcgtgtctcccacaaagctgaatgatctgtgctttaccaacgtgtacgccgatagcttcgtgatcaggggagacgaagtgagacagatcgcaccaggacagacaggaaagatcgcagactacaattataagctgcctgacgatttcaccggctgcgtgatcgcctggaactccaacaatctggattctaaagtgggcggcaactacaattatctgtacaggctgtttcgcaagtccaatctgaagccattcgagcgggacatctccacagagatctaccaggccggctctaccccctgcaatggcgtggagggctttaactgttatttccctctgcagtcttacggcttccagccaacaaacggcgtgggctatcagccctacagagtggtggtgctgtcctttgagctgctgcacgcaccagcaacagtgtgcggcccaaagaagtctaccaatctggtgaagaacaagtgcgtgaacttcaacttcaacggactgaccggcacaggcgtgctgaccgagagcaataagaagttcctgccttttcagcagttcggcagggacatcgcagataccacagacgccgtgcgcgaccctcagaccctggagatcctggacatcacaccatgcagcttcggcggcgtgtccgtgatcacaccaggcaccaatacatccaaccaggtggccgtgctgtatcaggacgtgaattgtaccgaggtgcccgtggcaatccacgcagatcagctgacccctacatggcgggtgtactctaccggcagcaacgtgttccagacaagagccggatgcctgatcggagcagagcacgtgaacaatagctatgagtgcgacatccctatcggcgccggcatctgtgccagctaccagacccagacaaactccccatctggagcaggctccgtggccagccagtccatcatcgcctataccatgagcctgggcgccgagaacagcgtggcctactccaacaattctatcgccatccctaccaacttcacaatcagcgtgaccacagagatcctgccagtgtctatgaccaagacaagcgtggactgcacaatgtatatctgtggcgatagcaccgagtgctccaacctgctgctgcagtacggctccttttgtacccagctgaatagagccctgacaggcatcgccgtggagcaggataagaacacacaggaggtgttcgcccaggtgaagcagatctacaagaccccacccatcaaggactttggcggcttcaacttcagccagatcctgcctgatccaagcaagccctccaagaggtcttttatcgaggacctgctgttcaacaaggtgaccctggccgatgccggcttcatcaagcagtatggagattgcctgggagacatcgcagcccgcgacctgatctgtgcccagaagtttaatggcctgaccgtgctgcctccactgctgacagatgagatgatcgcccagtacacatctgccctgctggccggcaccatcacaagcggatggaccttcggcgcaggagccgccctgcagatcccttttgccatgcagatggcctataggttcaacggcatcggcgtgacccagaatgtgctgtacgagaaccagaagctgatcgccaatcagtttaacagcgccatcggcaagatccaggactctctgtcctctacagccagcgccctgggcaagctgcaggatgtggtgaatcagaacgcccaggccctgaataccctggtgaagcagctgagctccaacttcggcgccatctctagcgtgctgaatgacatcctgagccggctggacccccctgaggcagaggtgcagatcgacaggctgatcacaggccgcctgcagagcctgcagacctacgtgacacagcagctgatcagggcagcagagatcagagcctccgccaatctggccgccaccaagatgagcgagtgcgtgctgggacagtccaagagggtggacttttgtggcaagggctatcacctgatgtctttcccacagagcgcccctcacggcgtggtgtttctgcacgtgacctacgtgccagcccaggagaagaacttcaccacagcaccagccatctgccacgatggaaaggcacactttcctagggagggcgtgttcgtgtctaacggcacccactggtttgtgacacagcgcaatttctacgagccacagatcatcaccacagacaatacattcgtgagcggcaactgtgatgtggtgatcggcatcgtgaacaataccgtgtatgatccactgcagcccgagctggactcctttaaggaggagctggataagtacttcaagaatcacacctctcccgacgtggatctgggcgacatctccggcatcaatgcctctgtggtgaacatccagaaggagatcgaccggctgaacgaggtggccaagaatctgaacgagagcctgatcgatctgcaggagctgggcaagtatgagcagtacatcaagggctctggcagagagaacctgtatttccagggaggaggaggcagcggatacatccctgaggcaccaagggacggacaggcctacgtgcgcaaggatggcgagtgggtgctgctgtccacctttctgggccatcatcaccaccaccaccaccactga

SEQ ID NO: 5053 - DNA, 3846 bp, Artificial Sequence
  Description of Artificial Sequence: Synthetic polynucleotide
atgggcatcctgccaagcccaggaatgcccgccctgctgtctctggtgagcctgctgtccgtgctgctgatgggatgcgtggcagagacaggcacacagtgcgtgaacctgaccacaaggacccagctgccccctgcctataccaattctttcacacggggcgtgtactatcccgacaaggtgtttagaagctccgtgctgcactccacacaggatctgtttctgcctttcttttctaacgtgacctggttccacgccatccacgtgtccggcaccaatggcacaaagcggttcgacaatcccgtgctgccttttaacgatggcgtgtacttcgccagcaccgagaagtccaacatcatcagaggctggatctttggcaccacactggactctaagacacagagcctgctgatcgtgaacaatgccaccaacgtggtgatcaaggtgtgcgagttccagttttgtaatgatccattcctgggcgtgtactatcacaagaacaataagtcctggatggagtctgagtttcgcgtgtattctagcgccaacaattgcacatttgagtacgtgagccagcccttcctgatggacctggagggcaagcagggcaatttcaagaacctgagggagttcgtgtttaagaatatcgatggctacttcaagatctacagcaagcacaccccaatcaacctggtgcgcgacctgccacagggattctccgccctggagccactggtggatctgcccatcggcatcaacatcacccggtttcagacactgctggccctgcacagatcctacctgacaccaggcgactcctctagcggatggaccgcaggagctgccgcctactatgtgggctatctgcagccccggaccttcctgctgaagtacaacgagaatggcaccatcacagacgcagtggattgcgccctggaccccctgtctgagacaaagtgtacactgaagagctttaccgtggagaagggcatctatcagacaagcaatttcagggtgcagcctaccgagtccatcgtgcgctttcccaatatcacaaacctgtgcccttttggcgaggtgttcaacgccaccagattcgccagcgtgtacgcctggaatcggaagagaatctccaactgcgtggccgactattctgtgctgtacaactccgcctctttcagcacctttaagtgctatggcgtgtctcccacaaagctgaatgatctgtgctttaccaacgtgtacgccgatagcttcgtgatcaggggagacgaagtgagacagatcgcaccaggacagacaggaaagatcgcagactacaattataagctgcctgacgatttcaccggctgcgtgatcgcctggaactccaacaatctggattctaaagtgggcggcaactacaattatctgtacaggctgtttcgcaagtccaatctgaagccattcgagcgggacatctccacagagatctaccaggccggctctaccccctgcaatggcgtggagggctttaactattatttccctctgcagtcttacggcttccagccaacaaacggcgtgggctatcagccctacagagtggtggtgctgtcctttgagctgctgcacgcaccagcaacagtgtgcggcccaaagaagtctaccaatctggtgaagaacaagtgcgtgaacttcaacttcaacggactgaccggcacaggcgtgctgaccgagagcaataagaagttcctgccttttcagcagttcggcagggacatcgcagataccacagacgccgtgcgcgaccctcagaccctggagatcctggacatcacaccatgcagcttcggcggcgtgtccgtgatcacaccaggcaccaatacatccaaccaggtggccgtgctgtatcaggacgtgaattgtaccgaggtgcccgtggcaatccacgcagatcagctgacccctacatggcgggtgtactctaccggcagcaacgtgttccagacaagagccggatgcctgatcggagcagagcacgtgaacaatagctatgagtgcgacatccctatcggcgccggcatctgtgccagctaccagacccagacaaactccccatctggagcaggctccgtggccagccagtccatcatcgcctataccatgagcctgggcgccgagaacagcgtggcctactccaacaattctatcgccatccctaccaacttcacaatcagcgtgaccacagagatcctgccagtgtctatgaccaagacaagcgtggactgcacaatgtatatctgtggcgatagcaccgagtgctccaacctgctgctgcagtacggctccttttgtacccagctgaatagagccctgacaggcatcgccgtggagcaggataagaacacacaggaggtgttcgcccaggtgaagcagatctacaagaccccacccatcaaggactttggcggcttcaacttcagccagatcctgcctgatccaagcaagccctccaagaggtcttttatcgaggacctgctgttcaacaaggtgaccctggccgatgccggcttcatcaagcagtatggagattgcctgggagacatcgcagcccgcgacctgatctgtgcccagaagtttaatggcctgaccgtgctgcctccactgctgacagatgagatgatcgcccagtacacatctgccctgctggccggcaccatcacaagcggatggaccttcggcgcaggagccgccctgcagatcccttttgccatgcagatggcctataggttcaacggcatcggcgtgacccagaatgtgctgtacgagaaccagaagctgatcgccaatcagtttaacagcgccatcggcaagatccaggactctctgtcctctacagccagcgccctgggcaagctgcaggatgtggtgaatcagaacgcccaggccctgaataccctggtgaagcagctgagctccaacttcggcgccatctctagcgtgctgaatgacatcctgagccggctggacccccctgaggcagaggtgcagatcgacaggctgatcacaggccgcctgcagagcctgcagacctacgtgacacagcagctgatcagggcagcagagatcagagcctccgccaatctggccgccaccaagatgagcgagtgcgtgctgggacagtccaagagggtggacttttgtggcaagggctatcacctgatgtctttcccacagagcgcccctcacggcgtggtgtttctgcacgtgacctacgtgccagcccaggagaagaacttcaccacagcaccagccatctgccacgatggaaaggcacactttcctagggagggcgtgttcgtgtctaacggcacccactggtttgtgacacagcgcaatttctacgagccacagatcatcaccacagacaatacattcgtgagcggcaactgtgatgtggtgatcggcatcgtgaacaataccgtgtatgatccactgcagcccgagctggactcctttaaggaggagctggataagtacttcaagaatcacacctctcccgacgtggatctgggcgacatctccggcatcaatgcctctgtggtgaacatccagaaggagatcgaccggctgaacgaggtggccaagaatctgaacgagagcctgatcgatctgcaggagctgggcaagtatgagcagtacatcaagggctctggcagagagaacctgtatttccagggaggaggaggcagcggatacatccctgaggcaccaagggacggacaggcctacgtgcgcaaggatggcgagtgggtgctgctgtccacctttctgggccatcatcaccaccaccaccaccactga

SEQ ID NO: 5054 - DNA, 3846 bp, Artificial Sequence
  Description of Artificial Sequence: Synthetic polynucleotide
atgggcatcctgccaagcccaggaatgcccgccctgctgtctctggtgagcctgctgtccgtgctgctgatgggatgcgtggcagagacaggcacacagtgcgtgaacctgaccacaaggacccagctgccccctgcctataccaattctttcacacggggcgtgtactatcccgacaaggtgtttagaagctccgtgctgcactccacacaggatctgtttctgcctttcttttctaacgtgacctggttccacgccatccacgtgtccggcaccaatggcacaaagcggttcgacaatcccgtgctgccttttaacgatggcgtgtacttcgccagcaccgagaagtccaacatcatcagaggctggatctttggcaccacactggactctaagacacagagcctgctgatcgtgaacaatgccaccaacgtggtgatcaaggtgtgcgagttccagttttgtaatgatccattcctgggcgtgtactatcacaagaacaataagtcctggatggagtctgagtttcgcgtgtattctagcgccaacaattgcacatttgagtacgtgagccagcccttcctgatggacctggagggcaagcagggcaatttcaagaacctgagggagttcgtgtttaagaatatcgatggctacttcaagatctacagcaagcacaccccaatcaacctggtgcgcgacctgccacagggattctccgccctggagccactggtggatctgcccatcggcatcaacatcacccggtttcagacactgctggccctgcacagatcctacctgacaccaggcgactcctctagcggatggaccgcaggagctgccgcctactatgtgggctatctgcagccccggaccttcctgctgaagtacaacgagaatggcaccatcacagacgcagtggattgcgccctggaccccctgtctgagacaaagtgtacactgaagagctttaccgtggagaagggcatctatcagacaagcaatttcagggtgcagcctaccgagtccatcgtgcgctttcccaatatcacaaacctgtgcccttttggcgaggtgttcaacgccaccagattcgccagcgtgtacgcctggaatcggaagagaatctccaactgcgtggccgactattctgtgctgtacaactccgcctctttcaaaacctttaagtgctatggcgtgtctcccacaaagctgaatgatctgtgctttaccaacgtgtacgccgatagcttcgtgatcaggggagacgaagtgagacagatcgcaccaggacagacaggaaagatcgcagactacaattataagctgcctgacgatttcaccggctgcgtgatcgcctggaactccaacaatctggattctaaagtgggcggcaactacaattatctgtacaggctgtttcgcaagtccaatctgaagccattcgagcgggacatctccacagagatctaccaggccggctctaccccctgcaatggcgtggagggctttaactgttatttccctctgcagtcttacggcttccagccaacaaacggcgtgggctatcagccctacagagtggtggtgctgtcctttgagctgctgcacgcaccagcaacagtgtgcggcccaaagaagtctaccaatctggtgaagaacaagtgcgtgaacttcaacttcaacggactgaccggcacaggcgtgctgaccgagagcaataagaagttcctgccttttcagcagttcggcagggacatcgcagataccacagacgccgtgcgcgaccctcagaccctggagatcctggacatcacaccatgcagcttcggcggcgtgtccgtgatcacaccaggcaccaatacatccaaccaggtggccgtgctgtatcaggacgtgaattgtaccgaggtgcccgtggcaatccacgcagatcagctgacccctacatggcgggtgtactctaccggcagcaacgtgttccagacaagagccggatgcctgatcggagcagagcacgtgaacaatagctatgagtgcgacatccctatcggcgccggcatctgtgccagctaccagacccagacaaactccccatctggagcaggctccgtggccagccagtccatcatcgcctataccatgagcctgggcgccgagaacagcgtggcctactccaacaattctatcgccatccctaccaacttcacaatcagcgtgaccacagagatcctgccagtgtctatgaccaagacaagcgtggactgcacaatgtatatctgtggcgatagcaccgagtgctccaacctgctgctgcagtacggctccttttgtacccagctgaatagagccctgacaggcatcgccgtggagcaggataagaacacacaggaggtgttcgcccaggtgaagcagatctacaagaccccacccatcaaggactttggcggcttcaacttcagccagatcctgcctgatccaagcaagccctccaagaggtcttttatcgaggacctgctgttcaacaaggtgaccctggccgatgccggcttcatcaagcagtatggagattgcctgggagacatcgcagcccgcgacctgatctgtgcccagaagtttaatggcctgaccgtgctgcctccactgctgacagatgagatgatcgcccagtacacatctgccctgctggccggcaccatcacaagcggatggaccttcggcgcaggagccgccctgcagatcccttttgccatgcagatggcctataggttcaacggcatcggcgtgacccagaatgtgctgtacgagaaccagaagctgatcgccaatcagtttaacagcgccatcggcaagatccaggactctctgtcctctacagccagcgccctgggcaagctgcaggatgtggtgaatcagaacgcccaggccctgaataccctggtgaagcagctgagctccaacttcggcgccatctctagcgtgctgaatgacatcctgagccggctggacccccctgaggcagaggtgcagatcgacaggctgatcacaggccgcctgcagagcctgcagacctacgtgacacagcagctgatcagggcagcagagatcagagcctccgccaatctggccgccaccaagatgagcgagtgcgtgctgggacagtccaagagggtggacttttgtggcaagggctatcacctgatgtctttcccacagagcgcccctcacggcgtggtgtttctgcacgtgacctacgtgccagcccaggagaagaacttcaccacagcaccagccatctgccacgatggaaaggcacactttcctagggagggcgtgttcgtgtctaacggcacccactggtttgtgacacagcgcaatttctacgagccacagatcatcaccacagacaatacattcgtgagcggcaactgtgatgtggtgatcggcatcgtgaacaataccgtgtatgatccactgcagcccgagctggactcctttaaggaggagctggataagtacttcaagaatcacacctctcccgacgtggatctgggcgacatctccggcatcaatgcctctgtggtgaacatccagaaggagatcgaccggctgaacgaggtggccaagaatctgaacgagagcctgatcgatctgcaggagctgggcaagtatgagcagtacatcaagggctctggcagagagaacctgtatttccagggaggaggaggcagcggatacatccctgaggcaccaagggacggacaggcctacgtgcgcaaggatggcgagtgggtgctgctgtccacctttctgggccatcatcaccaccaccaccaccactga

SEQ ID NO: 5055 - DNA, 3846 bp, Artificial Sequence
  Description of Artificial Sequence: Synthetic polynucleotide
atgggcatcctgccaagcccaggaatgcccgccctgctgtctctggtgagcctgctgtccgtgctgctgatgggatgcgtggcagagacaggcacacagtgcgtgaacctgaccacaaggacccagctgccccctgcctataccaattctttcacacggggcgtgtactatcccgacaaggtgtttagaagctccgtgctgcactccacacaggatctgtttctgcctttcttttctaacgtgacctggttccacgccatccacgtgtccggcaccaatggcacaaagcggttcgacaatcccgtgctgccttttaacgatggcgtgtacttcgccagcaccgagaagtccaacatcatcagaggctggatctttggcaccacactggactctaagacacagagcctgctgatcgtgaacaatgccaccaacgtggtgatcaaggtgtgcgagttccagttttgtaatgatccattcctgggcgtgtactatcacaagaacaataagtcctggatggagtctgagtttcgcgtgtattctagcgccaacaattgcacatttgagtacgtgagccagcccttcctgatggacctggagggcaagcagggcaatttcaagaacctgagggagttcgtgtttaagaatatcgatggctacttcaagatctacagcaagcacaccccaatcaacctggtgcgcgacctgccacagggattctccgccctggagccactggtggatctgcccatcggcatcaacatcacccggtttcagacactgctggccctgcacagatcctacctgacaccaggcgactcctctagcggatggaccgcaggagctgccgcctactatgtgggctatctgcagccccggaccttcctgctgaagtacaacgagaatggcaccatcacagacgcagtggattgcgccctggaccccctgtctgagacaaagtgtacactgaagagctttaccgtggagaagggcatctatcagacaagcaatttcagggtgcagcctaccgagtccatcgtgcgctttcccaatatcacaaacctgtgcccttttggcgaggtgttcaacgccaccagattcgccagcgtgtacgcctggaatcggaagagaatctccaactgcgtggccgactattctgtgctgtacaactccgcctctttcagcacctttaagtgctatggcgtgtctcccacaaagctgaatgatctgtgctttaccaacgtgtacgccgatagcttcgtgatcaggggagacgaagtgagacagatcgcaccaggacagacaggaaagatcgcagactacaattataagctgcctgacgatttcaccggctgcgtgatcgcctggaactccaacaatctggattctaaagtgggcggcaactacaattatctgtacaggctgtttcgcaagtccaatctgaagccatatgagcgggacatctccacagagatctaccaggccggctctaccccctgcaatggcgtggagggctttaactgttatttccctctgcagtcttacggcttccagccaacaaacggcgtgggctatcagccctacagagtggtggtgctgtcctttgagctgctgcacgcaccagcaacagtgtgcggcccaaagaagtctaccaatctggtgaagaacaagtgcgtgaacttcaacttcaacggactgaccggcacaggcgtgctgaccgagagcaataagaagttcctgccttttcagcagttcggcagggacatcgcagataccacagacgccgtgcgcgaccctcagaccctggagatcctggacatcacaccatgcagcttcggcggcgtgtccgtgatcacaccaggcaccaatacatccaaccaggtggccgtgctgtatcaggacgtgaattgtaccgaggtgcccgtggcaatccacgcagatcagctgacccctacatggcgggtgtactctaccggcagcaacgtgttccagacaagagccggatgcctgatcggagcagagcacgtgaacaatagctatgagtgcgacatccctatcggcgccggcatctgtgccagctaccagacccagacaaactccccatctggagcaggctccgtggccagccagtccatcatcgcctataccatgagcctgggcgccgagaacagcgtggcctactccaacaattctatcgccatccctaccaacttcacaatcagcgtgaccacagagatcctgccagtgtctatgaccaagacaagcgtggactgcacaatgtatatctgtggcgatagcaccgagtgctccaacctgctgctgcagtacggctccttttgtacccagctgaatagagccctgacaggcatcgccgtggagcaggataagaacacacaggaggtgttcgcccaggtgaagcagatctacaagaccccacccatcaaggactttggcggcttcaacttcagccagatcctgcctgatccaagcaagccctccaagaggtcttttatcgaggacctgctgttcaacaaggtgaccctggccgatgccggcttcatcaagcagtatggagattgcctgggagacatcgcagcccgcgacctgatctgtgcccagaagtttaatggcctgaccgtgctgcctccactgctgacagatgagatgatcgcccagtacacatctgccctgctggccggcaccatcacaagcggatggaccttcggcgcaggagccgccctgcagatcccttttgccatgcagatggcctataggttcaacggcatcggcgtgacccagaatgtgctgtacgagaaccagaagctgatcgccaatcagtttaacagcgccatcggcaagatccaggactctctgtcctctacagccagcgccctgggcaagctgcaggatgtggtgaatcagaacgcccaggccctgaataccctggtgaagcagctgagctccaacttcggcgccatctctagcgtgctgaatgacatcctgagccggctggacccccctgaggcagaggtgcagatcgacaggctgatcacaggccgcctgcagagcctgcagacctacgtgacacagcagctgatcagggcagcagagatcagagcctccgccaatctggccgccaccaagatgagcgagtgcgtgctgggacagtccaagagggtggacttttgtggcaagggctatcacctgatgtctttcccacagagcgcccctcacggcgtggtgtttctgcacgtgacctacgtgccagcccaggagaagaacttcaccacagcaccagccatctgccacgatggaaaggcacactttcctagggagggcgtgttcgtgtctaacggcacccactggtttgtgacacagcgcaatttctacgagccacagatcatcaccacagacaatacattcgtgagcggcaactgtgatgtggtgatcggcatcgtgaacaataccgtgtatgatccactgcagcccgagctggactcctttaaggaggagctggataagtacttcaagaatcacacctctcccgacgtggatctgggcgacatctccggcatcaatgcctctgtggtgaacatccagaaggagatcgaccggctgaacgaggtggccaagaatctgaacgagagcctgatcgatctgcaggagctgggcaagtatgagcagtacatcaagggctctggcagagagaacctgtatttccagggaggaggaggcagcggatacatccctgaggcaccaagggacggacaggcctacgtgcgcaaggatggcgagtgggtgctgctgtccacctttctgggccatcatcaccaccaccaccaccactga

SEQ ID NO: 5056 - DNA, 3846 bp, Artificial Sequence
  Description of Artificial Sequence: Synthetic polynucleotide
atgggcatcctgccaagcccaggaatgcccgccctgctgtctctggtgagcctgctgtccgtgctgctgatgggatgcgtggcagagacaggcacacagtgcgtgaacctgaccacaaggacccagctgccccctgcctataccaattctttcacacggggcgtgtactatcccgacaaggtgtttagaagctccgtgctgcactccacacaggatctgtttctgcctttcttttctaacgtgacctggttccacgccatccacgtgtccggcaccaatggcacaaagcggttcgacaatcccgtgctgccttttaacgatggcgtgtacttcgccagcaccgagaagtccaacatcatcagaggctggatctttggcaccacactggactctaagacacagagcctgctgatcgtgaacaatgccaccaacgtggtgatcaaggtgtgcgagttccagttttgtaatgatccattcctgggcgtgtactatcacaagaacaataagtcctggatggagtctgagtttcgcgtgtattctagcgccaacaattgcacatttgagtacgtgagccagcccttcctgatggacctggagggcaagcagggcaatttcaagaacctgagggagttcgtgtttaagaatatcgatggctacttcaagatctacagcaagcacaccccaatcaacctggtgcgcgacctgccacagggattctccgccctggagccactggtggatctgcccatcggcatcaacatcacccggtttcagacactgctggccctgcacagatcctacctgacaccaggcgactcctctagcggatggaccgcaggagctgccgcctactatgtgggctatctgcagccccggaccttcctgctgaagtacaacgagaatggcaccatcacagacgcagtggattgcgccctggaccccctgtctgagacaaagtgtacactgaagagctttaccgtggagaagggcatctatcagacaagcaatttcagggtgcagcctaccgagtccatcgtgcgctttcccaatatcacaaacctgtgcccttttggcgaggtgttcaacgccaccagattcgccagcgtgtacgcctggaatcggaagagaatctccaactgcgtggccgactattctgtgctgtacaactccgcctctttcagcacctttaagtgctatggcgtgtctcccacaaagctgaatgatctgtgctttaccaacgtgtacgccgatagcttcgtgatcaggggagacgaagtgagacagatcgcaccaggacagacaggaaagatcgcagactacaattataagctgcctgacgatttcaccggctgcgtgatcgcctggaactccaacaatctggattctaaagtgggcggcaactacaattatctgtacaggctgtttcgcaagtccaatctgaagccattcgagcgggacatctccacagagatctaccaggccggctctaccccctgcaatggcgtggagggctttaactgttatttccctctgcagtcttacggcttccagccaacaaacggcgtgggctatcagccctacagagtggtggtgctgtcctttgagctgctgcacgcaccagcaacagtgtgcggcccaaagaagtctaccaatctggtgaagaacaagtgcgtgaacttcaacttcaacggactgaccggcacaggcgtgctgaccgagagcaataagaagttcctgccttttcagcagttcggcagggacatcgcagataccacagacgccgtgcgcgaccctcagaccctggagatcctggacatcataccatgcagcttcggcggcgtgtccgtgatcacaccaggcaccaatacatccaaccaggtggccgtgctgtatcaggacgtgaattgtaccgaggtgcccgtggcaatccacgcagatcagctgacccctacatggcgggtgtactctaccggcagcaacgtgttccagacaagagccggatgcctgatcggagcagagcacgtgaacaatagctatgagtgcgacatccctatcggcgccggcatctgtgccagctaccagacccagacaaactccccatctggagcaggctccgtggccagccagtccatcatcgcctataccatgagcctgggcgccgagaacagcgtggcctactccaacaattctatcgccatccctaccaacttcacaatcagcgtgaccacagagatcctgccagtgtctatgaccaagacaagcgtggactgcacaatgtatatctgtggcgatagcaccgagtgctccaacctgctgctgcagtacggctccttttgtacccagctgaatagagccctgacaggcatcgccgtggagcaggataagaacacacaggaggtgttcgcccaggtgaagcagatctacaagaccccacccatcaaggactttggcggcttcaacttcagccagatcctgcctgatccaagcaagccctccaagaggtcttttatcgaggacctgctgttcaacaaggtgaccctggccgatgccggcttcatcaagcagtatggagattgcctgggagacatcgcagcccgcgacctgatctgtgcccagaagtttaatggcctgaccgtgctgcctccactgctgacagatgagatgatcgcccagtacacatctgccctgctggccggcaccatcacaagcggatggaccttcggcgcaggagccgccctgcagatcccttttgccatgcagatggcctataggttcaacggcatcggcgtgacccagaatgtgctgtacgagaaccagaagctgatcgccaatcagtttaacagcgccatcggcaagatccaggactctctgtcctctacagccagcgccctgggcaagctgcaggatgtggtgaatcagaacgcccaggccctgaataccctggtgaagcagctgagctccaacttcggcgccatctctagcgtgctgaatgacatcctgagccggctggacccccctgaggcagaggtgcagatcgacaggctgatcacaggccgcctgcagagcctgcagacctacgtgacacagcagctgatcagggcagcagagatcagagcctccgccaatctggccgccaccaagatgagcgagtgcgtgctgggacagtccaagagggtggacttttgtggcaagggctatcacctgatgtctttcccacagagcgcccctcacggcgtggtgtttctgcacgtgacctacgtgccagcccaggagaagaacttcaccacagcaccagccatctgccacgatggaaaggcacactttcctagggagggcgtgttcgtgtctaacggcacccactggtttgtgacacagcgcaatttctacgagccacagatcatcaccacagacaatacattcgtgagcggcaactgtgatgtggtgatcggcatcgtgaacaataccgtgtatgatccactgcagcccgagctggactcctttaaggaggagctggataagtacttcaagaatcacacctctcccgacgtggatctgggcgacatctccggcatcaatgcctctgtggtgaacatccagaaggagatcgaccggctgaacgaggtggccaagaatctgaacgagagcctgatcgatctgcaggagctgggcaagtatgagcagtacatcaagggctctggcagagagaacctgtatttccagggaggaggaggcagcggatacatccctgaggcaccaagggacggacaggcctacgtgcgcaaggatggcgagtgggtgctgctgtccacctttctgggccatcatcaccaccaccaccaccactga

SEQ ID NO: 5057 - DNA, 3846 bp, Artificial Sequence
  Description of Artificial Sequence: Synthetic polynucleotide
atgggcatcctgccaagcccaggaatgcccgccctgctgtctctggtgagcctgctgtccgtgctgctgatgggatgcgtggcagagacaggcacacagtgcgtgaacctgaccacaaggacccagctgccccctgcctataccaattctttcacacggggcgtgtactatcccgacaaggtgtttagaagctccgtgctgcactccacacaggatctgtttctgcctttcttttctaacgtgacctggttccacgccatccacgtgtccggcaccaatggcacaaagcggttcgacaatcccgtgctgccttttaacgatggcgtgtacttcgccagcaccgagaagtccaacatcatcagaggctggatctttggcaccacactggactctaagacacagagcctgctgatcgtgaacaatgccaccaacgtggtgatcaaggtgtgcgagttccagttttgtaatgatccattcctgggcgtgtactatcacaagaacaataagtcctggatggagtctgagtttcgcgtgtattctagcgccaacaattgcacatttgagtacgtgagccagcccttcctgatggacctggagggcaagcagggcaatttcaagaacctgagggagttcgtgtttaagaatatcgatggctacttcaagatctacagcaagcacaccccaatcaacctggtgcgcgacctgccacagggattctccgccctggagccactggtggatctgcccatcggcatcaacatcacccggtttcagacactgctggccctgcacagatcctacctgacaccaggcgactcctctagcggatggaccgcaggagctgccgcctactatgtgggctatctgcagccccggaccttcctgctgaagtacaacgagaatggcaccatcacagacgcagtggattgcgccctggaccccctgtctgagacaaagtgtacactgaagagctttaccgtggagaagggcatctatcagacaagcaatttcagggtgcagcctaccgagtccatcgtgcgctttcccaatatcacaaacctgtgcccttttggcgaggtgttcaacgccaccagattcgccagcgtgtacgcctggaatcggaagagaatctccaactgcgtggccgactattctgtgctgtacaactccgcctctttcagcacctttaagtgctatggcgtgtctcccacaaagctgaatgatctgtgctttaccaacgtgtacgccgatagcttcgtgatcaggggagacgaagtgagacagatcgcaccaggacagacaggaaagatcgcagactacaattataagctgcctgacgatttcaccggctgcgtgatcgcctggaactccaacaatctggattctaaagtgggcggcaactacaattatctgtacaggctgtttcgcaagtccaatctgaagccattcgagaatgacatctccacagagatctaccaggccggctctaccccctgcaatggcgtggagggctttaactgttatttccctctgcagtcttacggcttccagccaacaaacggcgtgggctatcagccctacagagtggtggtgctgtcctttgagctgctgcacgcaccagcaacagtgtgcggcccaaagaagtctaccaatctggtgaagaacaagtgcgtgaacttcaacttcaacggactgaccggcacaggcgtgctgaccgagagcaataagaagttcctgccttttcagcagttcggcagggacatcgcagataccacagacgccgtgcgcgaccctcagaccctggagatcctggacatcacaccatgcagcttcggcggcgtgtccgtgatcacaccaggcaccaatacatccaaccaggtggccgtgctgtatcaggacgtgaattgtaccgaggtgcccgtggcaatccacgcagatcagctgacccctacatggcgggtgtactctaccggcagcaacgtgttccagacaagagccggatgcctgatcggagcagagcacgtgaacaatagctatgagtgcgacatccctatcggcgccggcatctgtgccagctaccagacccagacaaactccccatctggagcaggctccgtggccagccagtccatcatcgcctataccatgagcctgggcgccgagaacagcgtggcctactccaacaattctatcgccatccctaccaacttcacaatcagcgtgaccacagagatcctgccagtgtctatgaccaagacaagcgtggactgcacaatgtatatctgtggcgatagcaccgagtgctccaacctgctgctgcagtacggctccttttgtacccagctgaatagagccctgacaggcatcgccgtggagcaggataagaacacacaggaggtgttcgcccaggtgaagcagatctacaagaccccacccatcaaggactttggcggcttcaacttcagccagatcctgcctgatccaagcaagccctccaagaggtcttttatcgaggacctgctgttcaacaaggtgaccctggccgatgccggcttcatcaagcagtatggagattgcctgggagacatcgcagcccgcgacctgatctgtgcccagaagtttaatggcctgaccgtgctgcctccactgctgacagatgagatgatcgcccagtacacatctgccctgctggccggcaccatcacaagcggatggaccttcggcgcaggagccgccctgcagatcccttttgccatgcagatggcctataggttcaacggcatcggcgtgacccagaatgtgctgtacgagaaccagaagctgatcgccaatcagtttaacagcgccatcggcaagatccaggactctctgtcctctacagccagcgccctgggcaagctgcaggatgtggtgaatcagaacgcccaggccctgaataccctggtgaagcagctgagctccaacttcggcgccatctctagcgtgctgaatgacatcctgagccggctggacccccctgaggcagaggtgcagatcgacaggctgatcacaggccgcctgcagagcctgcagacctacgtgacacagcagctgatcagggcagcagagatcagagcctccgccaatctggccgccaccaagatgagcgagtgcgtgctgggacagtccaagagggtggacttttgtggcaagggctatcacctgatgtctttcccacagagcgcccctcacggcgtggtgtttctgcacgtgacctacgtgccagcccaggagaagaacttcaccacagcaccagccatctgccacgatggaaaggcacactttcctagggagggcgtgttcgtgtctaacggcacccactggtttgtgacacagcgcaatttctacgagccacagatcatcaccacagacaatacattcgtgagcggcaactgtgatgtggtgatcggcatcgtgaacaataccgtgtatgatccactgcagcccgagctggactcctttaaggaggagctggataagtacttcaagaatcacacctctcccgacgtggatctgggcgacatctccggcatcaatgcctctgtggtgaacatccagaaggagatcgaccggctgaacgaggtggccaagaatctgaacgagagcctgatcgatctgcaggagctgggcaagtatgagcagtacatcaagggctctggcagagagaacctgtatttccagggaggaggaggcagcggatacatccctgaggcaccaagggacggacaggcctacgtgcgcaaggatggcgagtgggtgctgctgtccacctttctgggccatcatcaccaccaccaccaccactga

SEQ ID NO: 5058 - DNA, 3846 bp, Artificial Sequence
  Description of Artificial Sequence: Synthetic polynucleotide
atgggcatcctgccaagcccaggaatgcccgccctgctgtctctggtgagcctgctgtccgtgctgctgatgggatgcgtggcagagacaggcacacagtgcgtgaacctgaccacaaggacccagctgccccctgcctataccaattctttcacacggggcgtgtactatcccgacaaggtgtttagaagctccgtgctgcactccacacaggatctgtttctgcctttcttttctaacgtgacctggttccacgccatccacgtgtccggcaccaatggcacaaagcggttcgacaatcccgtgctgccttttaacgatggcgtgtacttcgccagcaccgagaagtccaacatcatcagaggctggatctttggcaccacactggactctaagacacagagcctgctgatcgtgaacaatgccaccaacgtggtgatcaaggtgtgcgagttccagttttgtaatgatccattcctgggcgtgtactatcacaagaacaataagtcctggatggagtctgagtttcgcgtgtattctagcgccaacaattgcacatttgagtacgtgagccagcccttcctgatggacctggagggcaagcagggcaatttcaagaacctgagggagttcgtgtttaagaatatcgatggctacttcaagatctacagcaagcacaccccaatcaacctggtgcgcgacctgccacagggattctccgccctggagccactggtggatctgcccatcggcatcaacatcacccggtttcagacactgctggccctgcacagatcctacctgacaccaggcgactcctctagcggatggaccgcaggagctgccgcctactatgtgggctatctgcagccccggaccttcctgctgaagtacaacgagaatggcaccatcacagacgcagtggattgcgccctggaccccctgtctgagacaaagtgtacactgaagagctttaccgtggagaagggcatctatcagacaagcaatttcagggtgcagcctaccgagtccatcgtgcgctttcccaatatcacaaacctgtgcccttttggcgaggtgttcaacgccaccagattcgccagcgtgtacgcctggaatcggaagagaatctccaactgcgtggccgactattctgtgctgtacaactccgcctctttcagcacctttaagtgctatggcgtgtctcccacaaagctgaatgatctgtgctttaccaacgtgtacgccgatagcttcgtgatcaggggagacgaagtgagacagatcgcaccaggacagacaggagacatcgcagactacaattataagctgcctgacgatttcaccggctgcgtgatcgcctggaactccaacaatctggattctaaagtgggcggcaactacaattatctgtacaggctgtttcgcaagtccaatctgaagccattcgagcgggacatctccacagagatctaccaggccggctctaccccctgcaatggcgtggagggctttaactgttatttccctctgcagtcttacggcttccagccaacaaacggcgtgggctatcagccctacagagtggtggtgctgtcctttgagctgctgcacgcaccagcaacagtgtgcggcccaaagaagtctaccaatctggtgaagaacaagtgcgtgaacttcaacttcaacggactgaccggcacaggcgtgctgaccgagagcaataagaagttcctgccttttcagcagttcggcagggacatcgcagataccacagacgccgtgcgcgaccctcagaccctggagatcctggacatcacaccatgcagcttcggcggcgtgtccgtgatcacaccaggcaccaatacatccaaccaggtggccgtgctgtatcaggacgtgaattgtaccgaggtgcccgtggcaatccacgcagatcagctgacccctacatggcgggtgtactctaccggcagcaacgtgttccagacaagagccggatgcctgatcggagcagagcacgtgaacaatagctatgagtgcgacatccctatcggcgccggcatctgtgccagctaccagacccagacaaactccccatctggagcaggctccgtggccagccagtccatcatcgcctataccatgagcctgggcgccgagaacagcgtggcctactccaacaattctatcgccatccctaccaacttcacaatcagcgtgaccacagagatcctgccagtgtctatgaccaagacaagcgtggactgcacaatgtatatctgtggcgatagcaccgagtgctccaacctgctgctgcagtacggctccttttgtacccagctgaatagagccctgacaggcatcgccgtggagcaggataagaacacacaggaggtgttcgcccaggtgaagcagatctacaagaccccacccatcaaggactttggcggcttcaacttcagccagatcctgcctgatccaagcaagccctccaagaggtcttttatcgaggacctgctgttcaacaaggtgaccctggccgatgccggcttcatcaagcagtatggagattgcctgggagacatcgcagcccgcgacctgatctgtgcccagaagtttaatggcctgaccgtgctgcctccactgctgacagatgagatgatcgcccagtacacatctgccctgctggccggcaccatcacaagcggatggaccttcggcgcaggagccgccctgcagatcccttttgccatgcagatggcctataggttcaacggcatcggcgtgacccagaatgtgctgtacgagaaccagaagctgatcgccaatcagtttaacagcgccatcggcaagatccaggactctctgtcctctacagccagcgccctgggcaagctgcaggatgtggtgaatcagaacgcccaggccctgaataccctggtgaagcagctgagctccaacttcggcgccatctctagcgtgctgaatgacatcctgagccggctggacccccctgaggcagaggtgcagatcgacaggctgatcacaggccgcctgcagagcctgcagacctacgtgacacagcagctgatcagggcagcagagatcagagcctccgccaatctggccgccaccaagatgagcgagtgcgtgctgggacagtccaagagggtggacttttgtggcaagggctatcacctgatgtctttcccacagagcgcccctcacggcgtggtgtttctgcacgtgacctacgtgccagcccaggagaagaacttcaccacagcaccagccatctgccacgatggaaaggcacactttcctagggagggcgtgttcgtgtctaacggcacccactggtttgtgacacagcgcaatttctacgagccacagatcatcaccacagacaatacattcgtgagcggcaactgtgatgtggtgatcggcatcgtgaacaataccgtgtatgatccactgcagcccgagctggactcctttaaggaggagctggataagtacttcaagaatcacacctctcccgacgtggatctgggcgacatctccggcatcaatgcctctgtggtgaacatccagaaggagatcgaccggctgaacgaggtggccaagaatctgaacgagagcctgatcgatctgcaggagctgggcaagtatgagcagtacatcaagggctctggcagagagaacctgtatttccagggaggaggaggcagcggatacatccctgaggcaccaagggacggacaggcctacgtgcgcaaggatggcgagtgggtgctgctgtccacctttctgggccatcatcaccaccaccaccaccactga

SEQ ID NO: 5059 - DNA, 3846 bp, Artificial Sequence
  Description of Artificial Sequence: Synthetic polynucleotide
atgggcatcctgccaagcccaggaatgcccgccctgctgtctctggtgagcctgctgtccgtgctgctgatgggatgcgtggcagagacaggcacacagtgcgtgaacctgaccacaaggacccagctgccccctgcctataccaattctttcacacggggcgtgtactatcccgacaaggtgtttagaagctccgtgctgcactccacacaggatctgtttctgcctttcttttctaacgtgacctggttccacgccatccacgtgtccggcaccaatggcacaaagcggttcgacaatcccgtgctgccttttaacgatggcgtgtacttcgccagcaccgagaagtccaacatcatcagaggctggatctttggcaccacactggactctaagacacagagcctgctgatcgtgaacaatgccaccaacgtggtgatcaaggtgtgcgagttccagttttgtaatgatccattcctgggcgtgtactatcacaagaacaataagtcctggatggagtctgagtttcgcgtgtattctagcgccaacaattgcacatttgagtacgtgagccagcccttcctgatggacctggagggcaagcagggcaatttcaagaacctgagggagttcgtgtttaagaatatcgatggctacttcaagatctacagcaagcacaccccaatcaacctggtgcgcgacctgccacagggattctccgccctggagccactggtggatctgcccatcggcatcaacatcacccggtttcagacactgctggccctgcacagatcctacctgacaccaggcgactcctctagcggatggaccgcaggagctgccgcctactatgtgggctatctgcagccccggaccttcctgctgaagtacaacgagaatggcaccatcacagacgcagtggattgcgccctggaccccctgtctgagacaaagtgtacactgaagagctttaccgtggagaagggcatctatcagacaagcaatttcagggtgcagcctaccgagtccatcgtgcgctttcccaatatcacaaacctgtgcccttttggcgaggtgttcaacgccaccagattcgccagcgtgtacgcctggaatcggaagagaatctccaactgcgtggccgactattctgtgctgtacaactccgcctctttcagcacctttaagtgctatggcgtgtctcccacaaagctgaatgatctgtgctttaccaacgtgtacgccgatagcttcgtgatcaggggagacgaagtgagacagatcgcaccaggacagacaggaaagatcgcagactacaattataagctgcctgacgatttcaccggctgcgtgatcgcctggaactccaacaatctggattctaaagtgggcggcaactacaattatctgtacaggctgtttcgcaagtccaatctgaagccattcgagcgggacatctccacagagatctaccaggccggctctaccccctgcaatggcgtggagggctttaactgttatttccctctgcagtcttacggcttccagccaacaaacggcgtgggctatcagccctacagagtggtggtgctggtatttgagctgctgcacgcaccagcaacagtgtgcggcccaaagaagtctaccaatctggtgaagaacaagtgcgtgaacttcaacttcaacggactgaccggcacaggcgtgctgaccgagagcaataagaagttcctgccttttcagcagttcggcagggacatcgcagataccacagacgccgtgcgcgaccctcagaccctggagatcctggacatcacaccatgcagcttcggcggcgtgtccgtgatcacaccaggcaccaatacatccaaccaggtggccgtgctgtatcaggacgtgaattgtaccgaggtgcccgtggcaatccacgcagatcagctgacccctacatggcgggtgtactctaccggcagcaacgtgttccagacaagagccggatgcctgatcggagcagagcacgtgaacaatagctatgagtgcgacatccctatcggcgccggcatctgtgccagctaccagacccagacaaactccccatctggagcaggctccgtggccagccagtccatcatcgcctataccatgagcctgggcgccgagaacagcgtggcctactccaacaattctatcgccatccctaccaacttcacaatcagcgtgaccacagagatcctgccagtgtctatgaccaagacaagcgtggactgcacaatgtatatctgtggcgatagcaccgagtgctccaacctgctgctgcagtacggctccttttgtacccagctgaatagagccctgacaggcatcgccgtggagcaggataagaacacacaggaggtgttcgcccaggtgaagcagatctacaagaccccacccatcaaggactttggcggcttcaacttcagccagatcctgcctgatccaagcaagccctccaagaggtcttttatcgaggacctgctgttcaacaaggtgaccctggccgatgccggcttcatcaagcagtatggagattgcctgggagacatcgcagcccgcgacctgatctgtgcccagaagtttaatggcctgaccgtgctgcctccactgctgacagatgagatgatcgcccagtacacatctgccctgctggccggcaccatcacaagcggatggaccttcggcgcaggagccgccctgcagatcccttttgccatgcagatggcctataggttcaacggcatcggcgtgacccagaatgtgctgtacgagaaccagaagctgatcgccaatcagtttaacagcgccatcggcaagatccaggactctctgtcctctacagccagcgccctgggcaagctgcaggatgtggtgaatcagaacgcccaggccctgaataccctggtgaagcagctgagctccaacttcggcgccatctctagcgtgctgaatgacatcctgagccggctggacccccctgaggcagaggtgcagatcgacaggctgatcacaggccgcctgcagagcctgcagacctacgtgacacagcagctgatcagggcagcagagatcagagcctccgccaatctggccgccaccaagatgagcgagtgcgtgctgggacagtccaagagggtggacttttgtggcaagggctatcacctgatgtctttcccacagagcgcccctcacggcgtggtgtttctgcacgtgacctacgtgccagcccaggagaagaacttcaccacagcaccagccatctgccacgatggaaaggcacactttcctagggagggcgtgttcgtgtctaacggcacccactggtttgtgacacagcgcaatttctacgagccacagatcatcaccacagacaatacattcgtgagcggcaactgtgatgtggtgatcggcatcgtgaacaataccgtgtatgatccactgcagcccgagctggactcctttaaggaggagctggataagtacttcaagaatcacacctctcccgacgtggatctgggcgacatctccggcatcaatgcctctgtggtgaacatccagaaggagatcgaccggctgaacgaggtggccaagaatctgaacgagagcctgatcgatctgcaggagctgggcaagtatgagcagtacatcaagggctctggcagagagaacctgtatttccagggaggaggaggcagcggatacatccctgaggcaccaagggacggacaggcctacgtgcgcaaggatggcgagtgggtgctgctgtccacctttctgggccatcatcaccaccaccaccaccactga

SEQ ID NO: 5060 - DNA, 3846 bp, Artificial Sequence
  Description of Artificial Sequence: Synthetic polynucleotide
atgggcatcctgccaagcccaggaatgcccgccctgctgtctctggtgagcctgctgtccgtgctgctgatgggatgcgtggcagagacaggcacacagtgcgtgaacctgaccacaaggacccagctgccccctgcctataccaattctttcacacggggcgtgtactatcccgacaaggtgtttagaagctccgtgctgcactccacacaggatctgtttctgcctttcttttctaacgtgacctggttccacgccatccacgtgtccggcaccaatggcacaaagcggttcgacaatcccgtgctgccttttaacgatggcgtgtacttcgccagcaccgagaagtccaacatcatcagaggctggatctttggcaccacactggactctaagacacagagcctgctgatcgtgaacaatgccaccaacgtggtgatcaaggtgtgcgagttccagttttgtaatgatccattcctgggcgtgtactatcacaagaacaataagtcctggatggagtctgagtttcgcgtgtattctagcgccaacaattgcacatttgagtacgtgagccagcccttcctgatggacctggagggcaagcagggcaatttcaagaacctgagggagttcgtgtttaagaatatcgatggctacttcaagatctacagcaagcacaccccaatcaacctggtgcgcgacctgccacagggattctccgccctggagccactggtggatctgcccatcggcatcaacatcacccggtttcagacactgctggccctgcacagatcctacctgacaccaggcgactcctctagcggatggaccgcaggagctgccgcctactatgtgggctatctgcagccccggaccttcctgctgaagtacaacgagaatggcaccatcacagacgcagtggattgcgccctggaccccctgtctgagacaaagtgtacactgaagagctttaccgtggagaagggcatctatcagacaagcaatttcagggtgcagcctaccgagtccatcgtgcgctttcccaatatcacaaacctgtgcccttttggcgaggtgttcaacgccaccagattcgccagcgtgtacgcctggaatcggaagagaatctccaactgcgtggccgactattctgtgctgtacaactccgcctctttcagcacctttaagtgctatggcgtgtctcccacaaagctgaatgatctgtgctttgtaaacgtgtacgccgatagcttcgtgatcaggggagacgaagtgagacagatcgcaccaggacagacaggaaagatcgcagactacaattataagctgcctgacgatttcaccggctgcgtgatcgcctggaactccaacaatctggattctaaagtgggcggcaactacaattatctgtacaggctgtttcgcaagtccaatctgaagccattcgagcgggacatctccacagagatctaccaggccggctctaccccctgcaatggcgtggagggctttaactgttatttccctctgcagtcttacggcttccagccaacaaacggcgtgggctatcagccctacagagtggtggtgctgtcctttgagctgctgcacgcaccagcaacagtgtgcggcccaaagaagtctaccaatctggtgaagaacaagtgcgtgaacttcaacttcaacggactgaccggcacaggcgtgctgaccgagagcaataagaagttcctgccttttcagcagttcggcagggacatcgcagataccacagacgccgtgcgcgaccctcagaccctggagatcctggacatcacaccatgcagcttcggcggcgtgtccgtgatcacaccaggcaccaatacatccaaccaggtggccgtgctgtatcaggacgtgaattgtaccgaggtgcccgtggcaatccacgcagatcagctgacccctacatggcgggtgtactctaccggcagcaacgtgttccagacaagagccggatgcctgatcggagcagagcacgtgaacaatagctatgagtgcgacatccctatcggcgccggcatctgtgccagctaccagacccagacaaactccccatctggagcaggctccgtggccagccagtccatcatcgcctataccatgagcctgggcgccgagaacagcgtggcctactccaacaattctatcgccatccctaccaacttcacaatcagcgtgaccacagagatcctgccagtgtctatgaccaagacaagcgtggactgcacaatgtatatctgtggcgatagcaccgagtgctccaacctgctgctgcagtacggctccttttgtacccagctgaatagagccctgacaggcatcgccgtggagcaggataagaacacacaggaggtgttcgcccaggtgaagcagatctacaagaccccacccatcaaggactttggcggcttcaacttcagccagatcctgcctgatccaagcaagccctccaagaggtcttttatcgaggacctgctgttcaacaaggtgaccctggccgatgccggcttcatcaagcagtatggagattgcctgggagacatcgcagcccgcgacctgatctgtgcccagaagtttaatggcctgaccgtgctgcctccactgctgacagatgagatgatcgcccagtacacatctgccctgctggccggcaccatcacaagcggatggaccttcggcgcaggagccgccctgcagatcccttttgccatgcagatggcctataggttcaacggcatcggcgtgacccagaatgtgctgtacgagaaccagaagctgatcgccaatcagtttaacagcgccatcggcaagatccaggactctctgtcctctacagccagcgccctgggcaagctgcaggatgtggtgaatcagaacgcccaggccctgaataccctggtgaagcagctgagctccaacttcggcgccatctctagcgtgctgaatgacatcctgagccggctggacccccctgaggcagaggtgcagatcgacaggctgatcacaggccgcctgcagagcctgcagacctacgtgacacagcagctgatcagggcagcagagatcagagcctccgccaatctggccgccaccaagatgagcgagtgcgtgctgggacagtccaagagggtggacttttgtggcaagggctatcacctgatgtctttcccacagagcgcccctcacggcgtggtgtttctgcacgtgacctacgtgccagcccaggagaagaacttcaccacagcaccagccatctgccacgatggaaaggcacactttcctagggagggcgtgttcgtgtctaacggcacccactggtttgtgacacagcgcaatttctacgagccacagatcatcaccacagacaatacattcgtgagcggcaactgtgatgtggtgatcggcatcgtgaacaataccgtgtatgatccactgcagcccgagctggactcctttaaggaggagctggataagtacttcaagaatcacacctctcccgacgtggatctgggcgacatctccggcatcaatgcctctgtggtgaacatccagaaggagatcgaccggctgaacgaggtggccaagaatctgaacgagagcctgatcgatctgcaggagctgggcaagtatgagcagtacatcaagggctctggcagagagaacctgtatttccagggaggaggaggcagcggatacatccctgaggcaccaagggacggacaggcctacgtgcgcaaggatggcgagtgggtgctgctgtccacctttctgggccatcatcaccaccaccaccaccactga

SEQ ID NO: 5061 - DNA, 3846 bp, Artificial Sequence
  Description of Artificial Sequence: Synthetic polynucleotide
atgggcatcctgccaagcccaggaatgcccgccctgctgtctctggtgagcctgctgtccgtgctgctgatgggatgcgtggcagagacaggcacacagtgcgtgaacctgaccacaaggacccagctgccccctgcctataccaattctttcacacggggcgtgtactatcccgacaaggtgtttagaagctccgtgctgcactccacacaggatctgtttctgcctttcttttctaacgtgacctggttccacgccatccacgtgtccggcaccaatggcacaaagcggttcgacaatcccgtgctgccttttaacgatggcgtgtacttcgccagcaccgagaagtccaacatcatcagaggctggatctttggcaccacactggactctaagacacagagcctgctgatcgtgaacaatgccaccaacgtggtgatcaaggtgtgcgagttccagttttgtaatgatccattcctgggcgtgtactatcacaagaacaataagtcctggatggagtctgagtttcgcgtgtattctagcgccaacaattgcacatttgagtacgtgagccagcccttcctgatggacctggagggcaagcagggcaatttcaagaacctgagggagttcgtgtttaagaatatcgatggctacttcaagatctacagcaagcacaccccaatcaacctggtgcgcgacctgccacagggattctccgccctggagccactggtggatctgcccatcggcatcaacatcacccggtttcagacactgctggccctgcacagatcctacctgacaccaggcgactcctctagcggatggaccgcaggagctgccgcctactatgtgggctatctgcagccccggaccttcctgctgaagtacaacgagaatggcaccatcacagacgcagtggattgcgccctggaccccctgtctgagacaaagtgtacactgaagagctttaccgtggagaagggcatctatcagacaagcaatttcagggtgcagcctaccgagtccatcgtgcgctttcccaatatcacaaacctgtgcccttttggcgaggtgttcaacgccaccagattcgccagcgtgtacgcctggaatcggaagagaatctccaactgcgtggccgactattctggactgtacaactccgcctctttcagcacctttaagtgctatggcgtgtctcccacaaagctgaatgatctgtgctttaccaacgtgtacgccgatagcttcgtgatcaggggagacgaagtgagacagatcgcaccaggacagacaggaaagatcgcagactacaattataagctgcctgacgatttcaccggctgcgtgatcgcctggaactccaacaatctggattctaaagtgggcggcaactacaattatctgtacaggctgtttcgcaagtccaatctgaagccattcgagcgggacatctccacagagatctaccaggccggctctaccccctgcaatggcgtggagggctttaactgttatttccctctgcagtcttacggcttccagccaacaaacggcgtgggctatcagccctacagagtggtggtgctgtcctttgagctgctgcacgcaccagcaacagtgtgcggcccaaagaagtctaccaatctggtgaagaacaagtgcgtgaacttcaacttcaacggactgaccggcacaggcgtgctgaccgagagcaataagaagttcctgccttttcagcagttcggcagggacatcgcagataccacagacgccgtgcgcgaccctcagaccctggagatcctggacatcacaccatgcagcttcggcggcgtgtccgtgatcacaccaggcaccaatacatccaaccaggtggccgtgctgtatcaggacgtgaattgtaccgaggtgcccgtggcaatccacgcagatcagctgacccctacatggcgggtgtactctaccggcagcaacgtgttccagacaagagccggatgcctgatcggagcagagcacgtgaacaatagctatgagtgcgacatccctatcggcgccggcatctgtgccagctaccagacccagacaaactccccatctggagcaggctccgtggccagccagtccatcatcgcctataccatgagcctgggcgccgagaacagcgtggcctactccaacaattctatcgccatccctaccaacttcacaatcagcgtgaccacagagatcctgccagtgtctatgaccaagacaagcgtggactgcacaatgtatatctgtggcgatagcaccgagtgctccaacctgctgctgcagtacggctccttttgtacccagctgaatagagccctgacaggcatcgccgtggagcaggataagaacacacaggaggtgttcgcccaggtgaagcagatctacaagaccccacccatcaaggactttggcggcttcaacttcagccagatcctgcctgatccaagcaagccctccaagaggtcttttatcgaggacctgctgttcaacaaggtgaccctggccgatgccggcttcatcaagcagtatggagattgcctgggagacatcgcagcccgcgacctgatctgtgcccagaagtttaatggcctgaccgtgctgcctccactgctgacagatgagatgatcgcccagtacacatctgccctgctggccggcaccatcacaagcggatggaccttcggcgcaggagccgccctgcagatcccttttgccatgcagatggcctataggttcaacggcatcggcgtgacccagaatgtgctgtacgagaaccagaagctgatcgccaatcagtttaacagcgccatcggcaagatccaggactctctgtcctctacagccagcgccctgggcaagctgcaggatgtggtgaatcagaacgcccaggccctgaataccctggtgaagcagctgagctccaacttcggcgccatctctagcgtgctgaatgacatcctgagccggctggacccccctgaggcagaggtgcagatcgacaggctgatcacaggccgcctgcagagcctgcagacctacgtgacacagcagctgatcagggcagcagagatcagagcctccgccaatctggccgccaccaagatgagcgagtgcgtgctgggacagtccaagagggtggacttttgtggcaagggctatcacctgatgtctttcccacagagcgcccctcacggcgtggtgtttctgcacgtgacctacgtgccagcccaggagaagaacttcaccacagcaccagccatctgccacgatggaaaggcacactttcctagggagggcgtgttcgtgtctaacggcacccactggtttgtgacacagcgcaatttctacgagccacagatcatcaccacagacaatacattcgtgagcggcaactgtgatgtggtgatcggcatcgtgaacaataccgtgtatgatccactgcagcccgagctggactcctttaaggaggagctggataagtacttcaagaatcacacctctcccgacgtggatctgggcgacatctccggcatcaatgcctctgtggtgaacatccagaaggagatcgaccggctgaacgaggtggccaagaatctgaacgagagcctgatcgatctgcaggagctgggcaagtatgagcagtacatcaagggctctggcagagagaacctgtatttccagggaggaggaggcagcggatacatccctgaggcaccaagggacggacaggcctacgtgcgcaaggatggcgagtgggtgctgctgtccacctttctgggccatcatcaccaccaccaccaccactga

SEQ ID NO: 5062 - DNA, 3846 bp, Artificial Sequence
  Description of Artificial Sequence: Synthetic polynucleotide
atgggcatcctgccaagcccaggaatgcccgccctgctgtctctggtgagcctgctgtccgtgctgctgatgggatgcgtggcagagacaggcacacagtgcgtgaacctgaccacaaggacccagctgccccctgcctataccaattctttcacacggggcgtgtactatcccgacaaggtgtttagaagctccgtgctgcactccacacaggatctgtttctgcctttcttttctaacgtgacctggttccacgccatccacgtgtccggcaccaatggcacaaagcggttcgacaatcccgtgctgccttttaacgatggcgtgtacttcgccagcaccgagaagtccaacatcatcagaggctggatctttggcaccacactggactctaagacacagagcctgctgatcgtgaacaatgccaccaacgtggtgatcaaggtgtgcgagttccagttttgtaatgatccattcctgggcgtgtactatcacaagaacaataagtcctggatggagtctgagtttcgcgtgtattctagcgccaacaattgcacatttgagtacgtgagccagcccttcctgatggacctggagggcaagcagggcaatttcaagaacctgagggagttcgtgtttaagaatatcgatggctacttcaagatctacagcaagcacaccccaatcaacctggtgcgcgacctgccacagggattctccgccctggagccactggtggatctgcccatcggcatcaacatcacccggtttcagacactgctggccctgcacagatcctacctgacaccaggcgactcctctagcggatggaccgcaggagctgccgcctactatgtgggctatctgcagccccggaccttcctgctgaagtacaacgagaatggcaccatcacagacgcagtggattgcgccctggaccccctgtctgagacaaagtgtacactgaagagctttaccgtggagaagggcatctatcagacaagcaatttcagggtgcagcctaccgagtccatcgtgcgctttcccaatatcacaaacctgtgcccttttggcgaggtgttcaacgccaccagattcgccagcgtgtacgcctggaatcggaagagaatctccaactgcgtggccgactattctgtgctgtacaactccgcctctttcagcacctttaagtgctatggcgtgtctcccacaaagctgaatgatctgtgctttaccaacgtgtacgccgatagcttcgtgatcaggggagacgaagtgagacagatcgcaccaggacagacaggaaagatcgcagactacaattataagctgcctgacgatttcaccggctgcgtgatcgcctggaactccaacaatctggattctaaagtgggcggcaactacaattatctgtacaggctgtttcgcaagtccaatctgaagccattcgagcgggacatctccacagagatctaccaggccggctctaccccctgcaatggcgtggagggctttaactgttatttccctctgcagtcttacggcttccagccaacaaacggcgtgggctatcagccctacagagtggtggtgctgtcctttgagctgctgcacgcaccagcaacagtgtgcggcccaaagaagtctaccaatctggtgaagaacaagtgcgtgaacttcaacttcaacggactgaccggcacaggcgtgctgaccgagagcaataagaagttcctgccttttcagcagttcggcagggacatcgcagataccacagacgccgtgcgcgaccctcagaccctggagatcctggacatcacaccatgcagcttcggcggcgtgtccgtgatcacaccaggcaccaatacatccaaccaggtggccgtgctgtatcaggacgtgaattgtaccgaggtgcccgtggcaatccacgcagatcagctgacccctacatggcgggtgtactctaccggcagcaacgtgttccagacaagagccggatgcctgatcggagcagagcacgtgaacaatagctatgagtgcgacatccctatcggcgccggcatctgtgccagctaccagacccagacaaactccccatctggagcaggctccgtggccagccagtccatcatcgcctataccatgagcctgggcgccgagaacagcgtggcctactccaacaattctatcgccatccctaccaacttcacaatcagcgtgaccacagagatcctgccagtgtctatgaccaagacaagcgtggactgcacaatgtatatctgtggcgatagcaccgagtgctccaacctgctgctgcagtacggctccttttgtacccagctgaatagagccctgacaggcatcgccgtggagcaggataagaacacacaggaggtgttcgcccaggtgaagcagatctacaagaccccacccatcaaggactttggcggcttcaacttcagccagatcctgcctgatccaagcaagccctccaagaggtcttttatcgaggacctgctgttcaacaaggtgaccctggccgatgccggcttcatcaagcagtatggagattgcctgggagacatcgcagcccgcgacctgatctgtgcccagaagtttaatggcctgaccgtgctgcctccactgctgacagatgagatgatcgcccagtacacatctgccctgctggccggcaccatcacaagcggatggaccttcggcgcaggagccgccctgcagatcccttttgccatgcagatggcctataggttcaacggcatcggcgtgacccagaatgtgctgtacgagaaccagaagctgatcgccaatcagtttaacagcgccatcggcaagatccaggactctctgtcctctacagccagcgccctgggcaagctgcaggatgtggtgaatcagaacgcccaggccctgaataccctggtgaagcagctgagctccaacttcggcgccatctctagcgtgctgaatagtatcctgagccggctggacccccctgaggcagaggtgcagatcgacaggctgatcacaggccgcctgcagagcctgcagacctacgtgacacagcagctgatcagggcagcagagatcagagcctccgccaatctggccgccaccaagatgagcgagtgcgtgctgggacagtccaagagggtggacttttgtggcaagggctatcacctgatgtctttcccacagagcgcccctcacggcgtggtgtttctgcacgtgacctacgtgccagcccaggagaagaacttcaccacagcaccagccatctgccacgatggaaaggcacactttcctagggagggcgtgttcgtgtctaacggcacccactggtttgtgacacagcgcaatttctacgagccacagatcatcaccacagacaatacattcgtgagcggcaactgtgatgtggtgatcggcatcgtgaacaataccgtgtatgatccactgcagcccgagctggactcctttaaggaggagctggataagtacttcaagaatcacacctctcccgacgtggatctgggcgacatctccggcatcaatgcctctgtggtgaacatccagaaggagatcgaccggctgaacgaggtggccaagaatctgaacgagagcctgatcgatctgcaggagctgggcaagtatgagcagtacatcaagggctctggcagagagaacctgtatttccagggaggaggaggcagcggatacatccctgaggcaccaagggacggacaggcctacgtgcgcaaggatggcgagtgggtgctgctgtccacctttctgggccatcatcaccaccaccaccaccactga

SEQ ID NO: 5063 - DNA, 3846 bp, Artificial Sequence
  Description of Artificial Sequence: Synthetic polynucleotide
atgggcatcctgccaagcccaggaatgcccgccctgctgtctctggtgagcctgctgtccgtgctgctgatgggatgcgtggcagagacaggcacacagtgcgtgaacctgaccacaaggacccagctgccccctgcctataccaattctttcacacggggcgtgtactatcccgacaaggtgtttagaagctccgtgctgcactccacacaggatctgtttctgcctttcttttctaacgtgacctggttccacgccatccacgtgtccggcaccaatggcacaaagcggttcgacaatcccgtgctgccttttaacgatggcgtgtacttcgccagcaccgagaagtccaacatcatcagaggctggatctttggcaccacactggactctaagacacagagcctgctgatcgtgaacaatgccaccaacgtggtgatcaaggtgtgcgagttccagttttgtaatgatccattcctgggcgtgtactatcacaagaacaataagtcctggatggagtctgagtttcgcgtgtattctagcgccaacaattgcacatttgagtacgtgagccagcccttcctgatggacctggagggcaagcagggcaatttcaagaacctgagggagttcgtgtttaagaatatcgatggctacttcaagatctacagcaagcacaccccaatcaacctggtgcgcgacctgccacagggattctccgccctggagccactggtggatctgcccatcggcatcaacatcacccggtttcagacactgctggccctgcacagatcctacctgacaccaggcgactcctctagcggatggaccgcaggagctgccgcctactatgtgggctatctgcagccccggaccttcctgctgaagtacaacgagaatggcaccatcacagacgcagtggattgcgccctggaccccctgtctgagacaaagtgtacactgaagagctttaccgtggagaagggcatctatcagacaagcaatttcagggtgcagcctaccgagtccatcgtgcgctttcccaatatcacaaacctgtgcccttttggcgaggtgttcaacgccaccagattcgccagcgtgtacgcctggaatcggaagagaatctccaactgcgtggccgactattctgtgctgtacaactccgcctctttcagcacctttaagtgctatggcgtgtctcccacaaagctgaatgatctgtgctttaccaacgtgtacgccgatagcttcgtgatcaggggagacgaagtgagacagatcgcaccaggacagacaggaaagatcgcagactacaattataagctgcctgacgatttcaccggctgcgtgatcgcctggaactccaacaatctggattctaaagtgggcggcaactacaattatctgtacaggctgtttcgcaagtccaatctgaagccattcgagcgggacatctccacagagatctaccaggccggctctaccccctgcaatggcgtggagggctttaactgttatttccctctgcagtcttacggcttccagccaacaaacggcgtgggctatcagccctacagagtggtggtgctgtcctttgagctgctgcacgcaccagcaacagtgtgcggcccaaagaagtctaccaatctggtgaagaacaagtgcgtgaacttcaacttcaacggactgaccggcacaggcgtgctgaccgagagcaataagaagttcctgccttttcagcagttcggcagggacatcgcagataccacagacgccgtgcgcgaccctcagaccctggagatcctggacatcacaccatgcagcttcggcggcgtgtccgtgatcacaccaggcaccaatacatccaaccaggtggccgtgctgtatcaggacgtgaattgtaccgaggtgcccgtggcaatccacgcagatcagctgacccctacatggcgggtgtactctaccggcagcaacgtgttccagacaagagccggatgcctgatcggagcagagcacgtgaacaatagctatgagtgcgacatccctatcggcgccggcatctgtgccagctaccagacccagacaaactccccatctggagcaggctccgtggccagccagtccatcatcgcctataccagtagcctgggcgccgagaacagcgtggcctactccaacaattctatcgccatccctaccaacttcacaatcagcgtgaccacagagatcctgccagtgtctatgaccaagacaagcgtggactgcacaatgtatatctgtggcgatagcaccgagtgctccaacctgctgctgcagtacggctccttttgtacccagctgaatagagccctgacaggcatcgccgtggagcaggataagaacacacaggaggtgttcgcccaggtgaagcagatctacaagaccccacccatcaaggactttggcggcttcaacttcagccagatcctgcctgatccaagcaagccctccaagaggtcttttatcgaggacctgctgttcaacaaggtgaccctggccgatgccggcttcatcaagcagtatggagattgcctgggagacatcgcagcccgcgacctgatctgtgcccagaagtttaatggcctgaccgtgctgcctccactgctgacagatgagatgatcgcccagtacacatctgccctgctggccggcaccatcacaagcggatggaccttcggcgcaggagccgccctgcagatcccttttgccatgcagatggcctataggttcaacggcatcggcgtgacccagaatgtgctgtacgagaaccagaagctgatcgccaatcagtttaacagcgccatcggcaagatccaggactctctgtcctctacagccagcgccctgggcaagctgcaggatgtggtgaatcagaacgcccaggccctgaataccctggtgaagcagctgagctccaacttcggcgccatctctagcgtgctgaatgacatcctgagccggctggacccccctgaggcagaggtgcagatcgacaggctgatcacaggccgcctgcagagcctgcagacctacgtgacacagcagctgatcagggcagcagagatcagagcctccgccaatctggccgccaccaagatgagcgagtgcgtgctgggacagtccaagagggtggacttttgtggcaagggctatcacctgatgtctttcccacagagcgcccctcacggcgtggtgtttctgcacgtgacctacgtgccagcccaggagaagaacttcaccacagcaccagccatctgccacgatggaaaggcacactttcctagggagggcgtgttcgtgtctaacggcacccactggtttgtgacacagcgcaatttctacgagccacagatcatcaccacagacaatacattcgtgagcggcaactgtgatgtggtgatcggcatcgtgaacaataccgtgtatgatccactgcagcccgagctggactcctttaaggaggagctggataagtacttcaagaatcacacctctcccgacgtggatctgggcgacatctccggcatcaatgcctctgtggtgaacatccagaaggagatcgaccggctgaacgaggtggccaagaatctgaacgagagcctgatcgatctgcaggagctgggcaagtatgagcagtacatcaagggctctggcagagagaacctgtatttccagggaggaggaggcagcggatacatccctgaggcaccaagggacggacaggcctacgtgcgcaaggatggcgagtgggtgctgctgtccacctttctgggccatcatcaccaccaccaccaccactga

SEQ ID NO: 5064 - DNA, 3846 bp, Artificial Sequence
  Description of Artificial Sequence: Synthetic polynucleotide
atgggcatcctgccaagcccaggaatgcccgccctgctgtctctggtgagcctgctgtccgtgctgctgatgggatgcgtggcagagacaggcacacagtgcgtgaacctgaccacaaggacccagctgccccctgcctataccaattctttcacacggggcgtgtactatcccgacaaggtgtttagaagctccgtgctgcactccacacaggatctgtttctgcctttcttttctaacgtgacctggttccacgccatccacgtgtccggcaccaatggcacaaagcggttcgacaatcccgtgctgccttttaacgatggcgtgtacttcgccagcaccgagaagtccaacatcatcagaggctggatctttggcaccacactggactctaagacacagagcctgctgatcgtgaacaatgccaccaacgtggtgatcaaggtgtgcgagttccagttttgtaatgatccattcctgggcgtgtactatcacaagaacaataagtcctggatggagtctgagtttcgcgtgtattctagcgccaacaattgcacatttgagtacgtgagccagcccttcctgatggacctggagggcaagcagggcaatttcaagaacctgagggagttcgtgtttaagaatatcgatggctacttcaagatctacagcaagcacaccccaatcaacctggtgcgcgacctgccacagggattctccgccctggagccactggtggatctgcccatcggcatcaacatcacccggtttcagacactgctggccctgcacagatcctacctgacaccaggcgactcctctagcggatggaccgcaggagctgccgcctactatgtgggctatctgcagccccggaccttcctgctgaagtacaacgagaatggcaccatcacagacgcagtggattgcgccctggaccccctgtctgagacaaagtgtacactgaagagctttaccgtggagaagggcatctatcagacaagcaatttcagggtgcagcctaccgagtccatcgtgcgctttcccaatatcacaaacctgtgcccttttggcgaggtgttcaacgccaccagattcgccagcgtgtacgcctggaatcggaagagaatctccaactgcgtggccgactattctgtgctgtacaactccgcctctttcagcacctttaagtgctatggcgtgtctcccacaaagctgaatgatctgtgctttaccaacgtgtacgccgatagcttcgtgatcaggggagacgaagtgagacagatcgcaccaggacagacaggaaagatcgcagactacaattataagctgcctgacgatttcaccggctgcgtgatcgcctggaactccaacaatctggattctaaagtgggcggcaactacaattatctgtacaggctgtttcgcaagtccaatctgaagccattcgagcgggacatctgtacagagatctaccaggccggctctaccccctgcaatggcgtggagggctttaactgttatttccctctgcagtcttacggcttccagccaacaaacggcgtgggctatcagccctacagagtggtggtgctgtcctttgagctgctgcacgcaccagcaacagtgtgcggcccaaagaagtctaccaatctggtgaagaacaagtgcgtgaacttcaacttcaacggactgaccggcacaggcgtgctgaccgagagcaataagaagttcctgccttttcagcagttcggcagggacatcgcagataccacagacgccgtgcgcgaccctcagaccctggagatcctggacatcacaccatgcagcttcggcggcgtgtccgtgatcacaccaggcaccaatacatccaaccaggtggccgtgctgtatcaggacgtgaattgtaccgaggtgcccgtggcaatccacgcagatcagctgacccctacatggcgggtgtactctaccggcagcaacgtgttccagacaagagccggatgcctgatcggagcagagcacgtgaacaatagctatgagtgcgacatccctatcggcgccggcatctgtgccagctaccagacccagacaaactccccatctggagcaggctccgtggccagccagtccatcatcgcctataccatgagcctgggcgccgagaacagcgtggcctactccaacaattctatcgccatccctaccaacttcacaatcagcgtgaccacagagatcctgccagtgtctatgaccaagacaagcgtggactgcacaatgtatatctgtggcgatagcaccgagtgctccaacctgctgctgcagtacggctccttttgtacccagctgaatagagccctgacaggcatcgccgtggagcaggataagaacacacaggaggtgttcgcccaggtgaagcagatctacaagaccccacccatcaaggactttggcggcttcaacttcagccagatcctgcctgatccaagcaagccctccaagaggtcttttatcgaggacctgctgttcaacaaggtgaccctggccgatgccggcttcatcaagcagtatggagattgcctgggagacatcgcagcccgcgacctgatctgtgcccagaagtttaatggcctgaccgtgctgcctccactgctgacagatgagatgatcgcccagtacacatctgccctgctggccggcaccatcacaagcggatggaccttcggcgcaggagccgccctgcagatcccttttgccatgcagatggcctataggttcaacggcatcggcgtgacccagaatgtgctgtacgagaaccagaagctgatcgccaatcagtttaacagcgccatcggcaagatccaggactctctgtcctctacagccagcgccctgggcaagctgcaggatgtggtgaatcagaacgcccaggccctgaataccctggtgaagcagctgagctccaacttcggcgccatctctagcgtgctgaatgacatcctgagccggctggacccccctgaggcagaggtgcagatcgacaggctgatcacaggccgcctgcagagcctgcagacctacgtgacacagcagctgatcagggcagcagagatcagagcctccgccaatctggccgccaccaagatgagcgagtgcgtgctgggacagtccaagagggtggacttttgtggcaagggctatcacctgatgtctttcccacagagcgcccctcacggcgtggtgtttctgcacgtgacctacgtgccagcccaggagaagaacttcaccacagcaccagccatctgccacgatggaaaggcacactttcctagggagggcgtgttcgtgtctaacggcacccactggtttgtgacacagcgcaatttctacgagccacagatcatcaccacagacaatacattcgtgagcggcaactgtgatgtggtgatcggcatcgtgaacaataccgtgtatgatccactgcagcccgagctggactcctttaaggaggagctggataagtacttcaagaatcacacctctcccgacgtggatctgggcgacatctccggcatcaatgcctctgtggtgaacatccagaaggagatcgaccggctgaacgaggtggccaagaatctgaacgagagcctgatcgatctgcaggagctgggcaagtatgagcagtacatcaagggctctggcagagagaacctgtatttccagggaggaggaggcagcggatacatccctgaggcaccaagggacggacaggcctacgtgcgcaaggatggcgagtgggtgctgctgtccacctttctgggccatcatcaccaccaccaccaccactga

SEQ ID NO: 5065 - DNA, 3846 bp, Artificial Sequence
  Description of Artificial Sequence: Synthetic polynucleotide
atgggcatcctgccaagcccaggaatgcccgccctgctgtctctggtgagcctgctgtccgtgctgctgatgggatgcgtggcagagacaggcacacagtgcgtgaacctgaccacaaggacccagctgccccctgcctataccaattctttcacacggggcgtgtactatcccgacaaggtgtttagaagctccgtgctgcactccacacaggatctgtttctgcctttcttttctaacgtgacctggttccacgccatccacgtgtccggcaccaatggcacaaagcggttcgacaatcccgtgctgccttttaacgatggcgtgtacttcgccagcaccgagaagtccaacatcatcagaggctggatctttggcaccacactggactctaagacacagagcctgctgatcgtgaacaatgccaccaacgtggtgatcaaggtgtgcgagttccagttttgtaatgatccattcctgggcgtgtactatcacaagaacaataagtcctggatggagtctgagtttcgcgtgtattctagcgccaacaattgcacatttgagtacgtgagccagcccttcctgatggacctggagggcaagcagggcaatttcaagaacctgagggagttcgtgtttaagaatatcgatggctacttcaagatctacagcaagcacaccccaatcaacctggtgcgcgacctgccacagggattctccgccctggagccactggtggatctgcccatcggcatcaacatcacccggtttcagacactgctggccctgcacagatcctacctgacaccaggcgactcctctagcggatggaccgcaggagctgccgcctactatgtgggctatctgcagccccggaccttcctgctgaagtacaacgagaatggcaccatcacagacgcagtggattgcgccctggaccccctgtctgagacaaagtgtacactgaagagctttaccgtggagaagggcatctatcagacaagcaatttcagggtgcagcctaccgagtccatcgtgcgctttcccaatatcacaaacctgtgcccttttggcgaggtgttcaacgccaccagattcgccagcgtgtacgcctggaatcggaagagaatctccaactgcgtggccgactattctgtgctgtacaactccgcctctttcagcacctttaagtgctatggcgtgtctcccacaaagctgaatgatctgtgctttaccaacgtgtacgccgatagcttcgtgatcaggggagacgaagtgagacagatcgcaccaggacagacaggaaagatcgcagactacaattataagctgcctgacgatttcaccggctgcgtgatcgcctggaactccaacaatctggattctaaagtgggcggcaactacaattatctgtacaggctgtttcgcaagtccaatctgaagccattcgagcgggacatctccacagagatctaccaggccggctctaccccctgcaatggcgtggagggctttaactgttatttccctctgcagtcttacggcttccagccaacaaacggcgtgggctatcagccctacagagtggtggtgctgtcctttgagctgctgcacgcaccagcaacagtgtgcggcccaaagaagtctaccaatctggtgaagaacaagtgcgtgaacttcaacttcaacggactgaccggcacaggcgtgctgaccgagagcaataagaagttcctgccttttcagcagttcggcagggacatcgcagataccacagacgccgtgcgcgaccctcagaccctggagatcctggacatcacaccatgcagcttcggcggcgtgtccgtgatcacaccaggcaccaatacatccaaccaggtggccgtgctgtatcaggacgtgaattgtaccgaggtgcccgtggcaatccacgcagatcagctgacccctacatggcgggtgtactctaccggcagcaacgtgttccagacaagagccggatgcctgatcggagcagagcacgtgaacaatagctatgagtgcgacatccctatcggcgccggcatctgtgccagctaccagacccagacaaactccccatctggagcaggctccgtggccagccagtccatcatcgcctataccatgagcctgggcgccgagaacagcgtggcctactccaacaattctatcgccatccctaccaacttcacaatcagcgtgaccacagagatcctgccagtgtctatgaccaagacaagcgtggactgcacaatgtatatctgtggcgatagcaccgagtgctccaacctgctgctgcagtacggctccttttgtacccagctgaatagagccctgacaggcatcgccgtggagcaggataagaacacacaggaggtgttcgcccaggtgaagcagatctacaagaccccacccatcaaggactttggcggcttcaacttcagccagatcctgcctgatccaagcaagccctccaagaggtcttttatcgaggacctgctgttcaacaaggtgaccctggccgatgccggcttcatcaagcagtatggagattgcctgggagacatcgcagcccgcgacctgatctgtgcccagaagtttaatggcctgaccgtgctgcctccactgctgacagatgagatgatcgcccagtacacatctgccctgctggccggcaccatcacaagcggatggaccttcggcgcaggagccgccctgcagatcccttttgccatgcagatggcctataggttcaacggcatcggcgtgacccagaatgtgctgtacgagaaccagaagctgatcgccaatcagtttaacagcgccatcggcaagatccaggactctctgtcctctacagccagcgccctgggcaagctgcaggatgtggtgaatcagaacgcccaggccctgaataccctggtgaagcagctgagctccaacttcggcgccatctctagcgtgctgaatgacatcctgagccggctggacccccctgaggcagaggtgcagatcgacaggctgatcacaggccgcctgcagagcctgcagacctacgtgacacagcagctgatcagggcagcagagatcagagcctccgccaatctggccgccaccaagatgagcgagtgcgtgctgggacagtccaagagggtggacttttgtggcaagggctatcacctgatgtctttcccacagagcgcccctcacggcgtggtgtttctgcacgtgacctacgtgccagcccagacgaagaacttcaccacagcaccagccatctgccacgatggaaaggcacactttcctagggagggcgtgttcgtgtctaacggcacccactggtttgtgacacagcgcaatttctacgagccacagatcatcaccacagacaatacattcgtgagcggcaactgtgatgtggtgatcggcatcgtgaacaataccgtgtatgatccactgcagcccgagctggactcctttaaggaggagctggataagtacttcaagaatcacacctctcccgacgtggatctgggcgacatctccggcatcaatgcctctgtggtgaacatccagaaggagatcgaccggctgaacgaggtggccaagaatctgaacgagagcctgatcgatctgcaggagctgggcaagtatgagcagtacatcaagggctctggcagagagaacctgtatttccagggaggaggaggcagcggatacatccctgaggcaccaagggacggacaggcctacgtgcgcaaggatggcgagtgggtgctgctgtccacctttctgggccatcatcaccaccaccaccaccactga

SEQ ID NO: 5066 - DNA, 3846 bp, Artificial Sequence
  Description of Artificial Sequence: Synthetic polynucleotide
atgggcatcctgccaagcccaggaatgcccgccctgctgtctctggtgagcctgctgtccgtgctgctgatgggatgcgtggcagagacaggcacacagtgcgtgaacctgaccacaaggacccagctgccccctgcctataccaattctttcacacggggcgtgtactatcccgacaaggtgtttagaagctccgtgctgcactccacacaggatctgtttctgcctttcttttctaacgtgacctggttccacgccatccacgtgtccggcaccaatggcacaaagcggttcgacaatcccgtgctgccttttaacgatggcgtgtacttcgccagcaccgagaagtccaacatcatcagaggctggatctttggcaccacactggactctaagacacagagcctgctgatcgtgaacaatgccaccaacgtggtgatcaaggtgtgcgagttccagttttgtaatgatccattcctgggcgtgtactatcacaagaacaataagtcctggatggagtctgagtttcgcgtgtattctagcgccaacaattgcacatttgagtacgtgagccagcccttcctgatggacctggagggcaagcagggcaatttcaagaacctgagggagttcgtgtttaagaatatcgatggctacttcaagatctacagcaagcacaccccaatcaacctggtgcgcgacctgccacagggattctccgccctggagccactggtggatctgcccatcggcatcaacatcacccggtttcagacactgctggccctgcacagatcctacctgacaccaggcgactcctctagcggatggaccgcaggagctgccgcctactatgtgggctatctgcagccccggaccttcctgctgaagtacaacgagaatggcaccatcacagacgcagtggattgcgccctggaccccctgtctgagacaaagtgtacactgaagagctttaccgtggagaagggcatctatcagacaagcaatttcagggtgcagcctaccgagtccatcgtgcgctttcccaatatcacaaacctgtgcccttttggcgaggtgttcaacgccaccagattcgccagcgtgtacgcctggaatcggaagagaatctccaactgcgtggccgactattctgtgctgtacaactccgcctctttcagcacctttaagtgctatggcgtgtctcccacaaagctgaatgatctgtgctttaccaacgtgtacgccgatagcttcgtgatcaggggagacgaagtgagacagatcgcaccaggacagacaggaaagatcgcagactacaattataagctgcctgacgatttcaccggctgcgtgatcgcctggaactccaacaatctggattctaaagtgggcggcaactacaattatctgtacaggctgtttcgcaagtccaatctgaagccattcgagcgggacatctccacagagatctaccaggccggctctaccccctgcaatggcgtggagggctttaactgttatttccctctgcagtcttacggcttccagccaacaaacggcgtgggctatcagccctacagagtggtggtgctgtcctttgagctgctgcacgcaccagcaacagtgtgcggcccaaagaagtctaccaatctggtgaagaacaagtgcgtgaacttcaacttcaacggactgaccggcacaggcgtgctgaccgagagcaataagaagttcctgccttttcagcagttcggcagggacatcgcagataccacagacgccgtgcgcgaccctcagaccctggagatcctggacatcacaccatgcagcttcggcggcgtgtccgtgatcacaccaggcaccaatacatccaaccaggtggccgtgctgtatcaggacgtgaattgtaccgaggtgcccgtggcaatccacgcagatcagctgacccctacatggcgggtgtactctaccggcagcaacgtgttccagacaagagccggatgcctgatcggagcagagcacgtgaacaatagctatgagtgcgacatccctatcggcgccggcatctgtgccagctaccagacccagacaaactccccatctggagcaggctccgtggccagccagtccatcatcgcctataccatgagcctgggcgccgagaacagcgtggcctactccaacaattctatcgccatccctaccaacttcacaatcagcgtgaccacagagatcctgccagtgtctatgaccaagacaagcgtggactgcacaatgtatatctgtggcgatagcaccgagtgctccaacctgctgctgcagtacggctccttttgtacccagctgaatagagccctgacaggcatcgccgtggagcaggataagaacacacaggaggtgttcgcccaggtgaagcagatctacaagaccccacccatcaaggactttggcggcttcaacttcagccagatcctgcctgatccaagcaagccctccaagaggtcttttatcgaggacctgctgttcaacaaggtgaccctggccgatgccggcttcatcaagcagtatggagattgcctgggagacatcgcagcccgcgacctgatctgtgcccagaagtttaatggcctgaccgtgctgcctccactgctgacagatgagatgatcgcccagtacacatctgccctgctggccggcaccatcacaagcggatggaccttcggcgcaggagccgccctgcagatcccttttgccatgcagatggcctataggttcaacggcatcggcgtgacccagaatgtgctgtacgagaaccagaagctgatcgccaatcagtttaacagcgccatcggcaagatccaggactctctgtcctctacagccagcgccctgggcaagctgcaggatgtggtgaatcagaacgcccaggccctgaataccctggtgaagcagctgagctccaacttcggcgccatctctagcgtgctgaatgacatcctgagccggctggacccccctgaggcagaggtgcagatcgacaggctgatcacaggccgcctgcagagcctgcagacctacgtgacacagcagctgatcagggcagcagagatcagagcctccgccaatctggccgccaccaagatgagcgagtgcgtgctgggacagtccaagagggtggacttttgtggcaagggctatcacctgatgtctttcccacagagcgcccctcacggcgtggtgtttctgcacgtgacctacgtgccagcccaggctaagaacttcaccacagcaccagccatctgccacgatggaaaggcacactttcctagggagggcgtgttcgtgtctaacggcacccactggtttgtgacacagcgcaatttctacgagccacagatcatcaccacagacaatacattcgtgagcggcaactgtgatgtggtgatcggcatcgtgaacaataccgtgtatgatccactgcagcccgagctggactcctttaaggaggagctggataagtacttcaagaatcacacctctcccgacgtggatctgggcgacatctccggcatcaatgcctctgtggtgaacatccagaaggagatcgaccggctgaacgaggtggccaagaatctgaacgagagcctgatcgatctgcaggagctgggcaagtatgagcagtacatcaagggctctggcagagagaacctgtatttccagggaggaggaggcagcggatacatccctgaggcaccaagggacggacaggcctacgtgcgcaaggatggcgagtgggtgctgctgtccacctttctgggccatcatcaccaccaccaccaccactga

SEQ ID NO: 5067 - DNA, 3846 bp, Artificial Sequence
  Description of Artificial Sequence: Synthetic polynucleotide
atgggcatcctgccaagcccaggaatgcccgccctgctgtctctggtgagcctgctgtccgtgctgctgatgggatgcgtggcagagacaggcacacagtgcgtgaacctgaccacaaggacccagctgccccctgcctataccaattctttcacacggggcgtgtactatcccgacaaggtgtttagaagctccgtgctgcactccacacaggatctgtttctgcctttcttttctaacgtgacctggttccacgccatccacgtgtccggcaccaatggcacaaagcggttcgacaatcccgtgctgccttttaacgatggcgtgtacttcgccagcaccgagaagtccaacatcatcagaggctggatctttggcaccacactggactctaagacacagagcctgctgatcgtgaacaatgccaccaacgtggtgatcaaggtgtgcgagttccagttttgtaatgatccattcctgggcgtgtactatcacaagaacaataagtcctggatggagtctgagtttcgcgtgtattctagcgccaacaattgcacatttgagtacgtgagccagcccttcctgatggacctggagggcaagcagggcaatttcaagaacctgagggagttcgtgtttaagaatatcgatggctacttcaagatctacagcaagcacaccccaatcaacctggtgcgcgacctgccacagggattctccgccctggagccactggtggatctgcccatcggcatcaacatcacccggtttcagacactgctggccctgcacagatcctacctgacaccaggcgactcctctagcggatggaccgcaggagctgccgcctactatgtgggctatctgcagccccggaccttcctgctgaagtacaacgagaatggcaccatcacagacgcagtggattgcgccctggaccccctgtctgagacaaagtgtacactgaagagctttaccgtggagaagggcatctatcagacaagcaatttcagggtgcagcctaccgagtccatcgtgcgctttcccaatatcacaaacctgtgcccttttggcgaggtgttcaacgccaccagattcgccagcgtgtacgcctggaatcggaagagaatctccaactgcgtggccgactattctgtgctgtacaactccgcctctttcagcacctttaagtgctatggcgtgtctcccacaaagctgaatgatctgtgctttaccaacgtgtacgccgatagcttcgtgatcaggggagacgaagtgagacagatcgcaccaggacagacaggaaagatcgcagactacaattataagctgcctgacgatttcaccggctgcgtgatcgcctggaactccaacaatctggattctaaagtgggcggcaactacaattatctgtacaggctgtttcgcaagtccaatctgaagccattcgagcgggacatctccacagagatctaccaggccggctctaccccctgcaatggcgtggagggctttaactgttatttccctctgcagtcttacggcttccagccaacaaacggcgtgggctatcagccctacagagtggtggtgctgtcctttgagctgctgcacgcaccagcaacagtgtgcggcccaaagaagtctaccaatctggtgaagaacaagtgcgtgaacttcaacttcaacggactgaccggcacaggcgtgctgaccgagagcaataagaagttcctgccttttcagcagttcggcagggacatcgcagataccacagacgccgtgcgcgaccctcagaccctggagatcctggacatcacaccatgcagcttcggcggcgtgtccgtgatcacaccaggcaccaatacatccaaccaggtggccgtgctgtatcaggacgtgaattgtaccgaggtgcccgtggcaatccacgcagatcagctgacccctacatggcgggtgtactctaccggcagcaacgtgttccagacaagagccggatgcctgatcggagcagagcacgtgaacaatagctatgagtgcgacatccctatcggcgccggcatctgtgccagctaccagacccagacaaactccccatctggagcaggctccgtggccagccagtccatcatcgcctataccgctagcctgggcgccgagaacagcgtggcctactccaacaattctatcgccatccctaccaacttcacaatcagcgtgaccacagagatcctgccagtgtctatgaccaagacaagcgtggactgcacaatgtatatctgtggcgatagcaccgagtgctccaacctgctgctgcagtacggctccttttgtacccagctgaatagagccctgacaggcatcgccgtggagcaggataagaacacacaggaggtgttcgcccaggtgaagcagatctacaagaccccacccatcaaggactttggcggcttcaacttcagccagatcctgcctgatccaagcaagccctccaagaggtcttttatcgaggacctgctgttcaacaaggtgaccctggccgatgccggcttcatcaagcagtatggagattgcctgggagacatcgcagcccgcgacctgatctgtgcccagaagtttaatggcctgaccgtgctgcctccactgctgacagatgagatgatcgcccagtacacatctgccctgctggccggcaccatcacaagcggatggaccttcggcgcaggagccgccctgcagatcccttttgccatgcagatggcctataggttcaacggcatcggcgtgacccagaatgtgctgtacgagaaccagaagctgatcgccaatcagtttaacagcgccatcggcaagatccaggactctctgtcctctacagccagcgccctgggcaagctgcaggatgtggtgaatcagaacgcccaggccctgaataccctggtgaagcagctgagctccaacttcggcgccatctctagcgtgctgaatgacatcctgagccggctggacccccctgaggcagaggtgcagatcgacaggctgatcacaggccgcctgcagagcctgcagacctacgtgacacagcagctgatcagggcagcagagatcagagcctccgccaatctggccgccaccaagatgagcgagtgcgtgctgggacagtccaagagggtggacttttgtggcaagggctatcacctgatgtctttcccacagagcgcccctcacggcgtggtgtttctgcacgtgacctacgtgccagcccaggagaagaacttcaccacagcaccagccatctgccacgatggaaaggcacactttcctagggagggcgtgttcgtgtctaacggcacccactggtttgtgacacagcgcaatttctacgagccacagatcatcaccacagacaatacattcgtgagcggcaactgtgatgtggtgatcggcatcgtgaacaataccgtgtatgatccactgcagcccgagctggactcctttaaggaggagctggataagtacttcaagaatcacacctctcccgacgtggatctgggcgacatctccggcatcaatgcctctgtggtgaacatccagaaggagatcgaccggctgaacgaggtggccaagaatctgaacgagagcctgatcgatctgcaggagctgggcaagtatgagcagtacatcaagggctctggcagagagaacctgtatttccagggaggaggaggcagcggatacatccctgaggcaccaagggacggacaggcctacgtgcgcaaggatggcgagtgggtgctgctgtccacctttctgggccatcatcaccaccaccaccaccactga

SEQ ID NO: 5068 - DNA, 3846 bp, Artificial Sequence
  Description of Artificial Sequence: Synthetic polynucleotide
atgggcatcctgccaagcccaggaatgcccgccctgctgtctctggtgagcctgctgtccgtgctgctgatgggatgcgtggcagagacaggcacacagtgcgtgaacctgaccacaaggacccagctgccccctgcctataccaattctttcacacggggcgtgtactatcccgacaaggtgtttagaagctccgtgctgcactccacacaggatctgtttctgcctttcttttctaacgtgacctggttccacgccatccacgtgtccggcaccaatggcacaaagcggttcgacaatcccgtgctgccttttaacgatggcgtgtacttcgccagcaccgagaagtccaacatcatcagaggctggatctttggcaccacactggactctaagacacagagcctgctgatcgtgaacaatgccaccaacgtggtgatcaaggtgtgcgagttccagttttgtaatgatccattcctgggcgtgtactatcacaagaacaataagtcctggatggagtctgagtttcgcgtgtattctagcgccaacaattgcacatttgagtacgtgagccagcccttcctgatggacctggagggcaagcagggcaatttcaagaacctgagggagttcgtgtttaagaatatcgatggctacttcaagatctacagcaagcacaccccaatcaacctggtgcgcgacctgccacagggattctccgccctggagccactggtggatctgcccatcggcatcaacatcacccggtttcagacactgctggccctgcacagatcctacctgacaccaggcgactcctctagcggatggaccgcaggagctgccgcctactatgtgggctatctgcagccccggaccttcctgctgaagtacaacgagaatggcaccatcacagacgcagtggattgcgccctggaccccctgtctgagacaaagtgtacactgaagagctttaccgtggagaagggcatctatcagacaagcaatttcagggtgcagcctaccgagtccatcgtgcgctttcccaatatcacaaacctgtgcccttttggcgaggtgttcaacgccaccagattcgccagcgtgtacgcctggaatcggaagagaatctccaactgcgtggccgactattctgtgctgtacaactccgcctctttcagcacctttaagtgctatggcgtgtctcccacaaagctgaatgatctgtgctttaccaacgtgtacgccgatagcttcgtgatcaggggagacgaagtgagacagatcgcaccaggacagacaggaaagatcgcagactacaattataagctgcctgacgatttcaccggctgcgtgatcgcctggaactccaacaatctggattctaaagtgggcggcaactacaattatctgtacaggctgtttcgcaagtccaatctgaagccattcgagcgggacatctccacagagatctaccaggccggctctaccccctgcaatggcgtggagggctttaactgttatttccctctgcagtcttacggcttccagccaacaaacggcgtgggctatcagccctacagagtggtggtgctgtcctttgagctgctgcacgcaccagcaacagtgtgcggcccaaagaagtctaccaatctggtgaagaacaagtgcgtgaacttcaacttcaacggagtcaccggcacaggcgtgctgaccgagagcaataagaagttcctgccttttcagcagttcggcagggacatcgcagataccacagacgccgtgcgcgaccctcagaccctggagatcctggacatcacaccatgcagcttcggcggcgtgtccgtgatcacaccaggcaccaatacatccaaccaggtggccgtgctgtatcaggacgtgaattgtaccgaggtgcccgtggcaatccacgcagatcagctgacccctacatggcgggtgtactctaccggcagcaacgtgttccagacaagagccggatgcctgatcggagcagagcacgtgaacaatagctatgagtgcgacatccctatcggcgccggcatctgtgccagctaccagacccagacaaactccccatctggagcaggctccgtggccagccagtccatcatcgcctataccatgagcctgggcgccgagaacagcgtggcctactccaacaattctatcgccatccctaccaacttcacaatcagcgtgaccacagagatcctgccagtgtctatgaccaagacaagcgtggactgcacaatgtatatctgtggcgatagcaccgagtgctccaacctgctgctgcagtacggctccttttgtacccagctgaatagagccctgacaggcatcgccgtggagcaggataagaacacacaggaggtgttcgcccaggtgaagcagatctacaagaccccacccatcaaggactttggcggcttcaacttcagccagatcctgcctgatccaagcaagccctccaagaggtcttttatcgaggacctgctgttcaacaaggtgaccctggccgatgccggcttcatcaagcagtatggagattgcctgggagacatcgcagcccgcgacctgatctgtgcccagaagtttaatggcctgaccgtgctgcctccactgctgacagatgagatgatcgcccagtacacatctgccctgctggccggcaccatcacaagcggatggaccttcggcgcaggagccgccctgcagatcccttttgccatgcagatggcctataggttcaacggcatcggcgtgacccagaatgtgctgtacgagaaccagaagctgatcgccaatcagtttaacagcgccatcggcaagatccaggactctctgtcctctacagccagcgccctgggcaagctgcaggatgtggtgaatcagaacgcccaggccctgaataccctggtgaagcagctgagctccaacttcggcgccatctctagcgtgctgaatgacatcctgagccggctggacccccctgaggcagaggtgcagatcgacaggctgatcacaggccgcctgcagagcctgcagacctacgtgacacagcagctgatcagggcagcagagatcagagcctccgccaatctggccgccaccaagatgagcgagtgcgtgctgggacagtccaagagggtggacttttgtggcaagggctatcacctgatgtctttcccacagagcgcccctcacggcgtggtgtttctgcacgtgacctacgtgccagcccaggagaagaacttcaccacagcaccagccatctgccacgatggaaaggcacactttcctagggagggcgtgttcgtgtctaacggcacccactggtttgtgacacagcgcaatttctacgagccacagatcatcaccacagacaatacattcgtgagcggcaactgtgatgtggtgatcggcatcgtgaacaataccgtgtatgatccactgcagcccgagctggactcctttaaggaggagctggataagtacttcaagaatcacacctctcccgacgtggatctgggcgacatctccggcatcaatgcctctgtggtgaacatccagaaggagatcgaccggctgaacgaggtggccaagaatctgaacgagagcctgatcgatctgcaggagctgggcaagtatgagcagtacatcaagggctctggcagagagaacctgtatttccagggaggaggaggcagcggatacatccctgaggcaccaagggacggacaggcctacgtgcgcaaggatggcgagtgggtgctgctgtccacctttctgggccatcatcaccaccaccaccaccactga

SEQ ID NO: 5069 - DNA, 3846 bp, Artificial Sequence
  Description of Artificial Sequence: Synthetic polynucleotide
atgggcatcctgccaagcccaggaatgcccgccctgctgtctctggtgagcctgctgtccgtgctgctgatgggatgcgtggcagagacaggcacacagtgcgtgaacctgaccacaaggacccagctgccccctgcctataccaattctttcacacggggcgtgtactatcccgacaaggtgtttagaagctccgtgctgcactccacacaggatctgtttctgcctttcttttctaacgtgacctggttccacgccatccacgtgtccggcaccaatggcacaaagcggttcgacaatcccgtgctgccttttaacgatggcgtgtacttcgccagcaccgagaagtccaacatcatcagaggctggatctttggcaccacactggactctaagacacagagcctgctgatcgtgaacaatgccaccaacgtggtgatcaaggtgtgcgagttccagttttgtaatgatccattcctgggcgtgtactatcacaagaacaataagtcctggatggagtctgagtttcgcgtgtattctagcgccaacaattgcacatttgagtacgtgagccagcccttcctgatggacctggagggcaagcagggcaatttcaagaacctgagggagttcgtgtttaagaatatcgatggctacttcaagatctacagcaagcacaccccaatcaacctggtgcgcgacctgccacagggattctccgccctggagccactggtggatctgcccatcggcatcaacatcacccggtttcagacactgctggccctgcacagatcctacctgacaccaggcgactcctctagcggatggaccgcaggagctgccgcctactatgtgggctatctgcagccccggaccttcctgctgaagtacaacgagaatggcaccatcacagacgcagtggattgcgccctggaccccctgtctgagacaaagtgtacactgaagagctttaccgtggagaagggcatctatcagacaagcaatttcagggtgcagcctaccgagtccatcgtgcgctttcccaatatcacaaacctgtgcccttttggcgaggtgttcaacgccaccagattctctagcgtgtacgcctggaatcggaagagaatctccaactgcgtggccgactattctgtgctgtacaactccgcctctttcagcacctttaagtgctatggcgtgtctcccacaaagctgaatgatctgtgctttaccaacgtgtacgccgatagcttcgtgatcaggggagacgaagtgagacagatcgcaccaggacagacaggaaagatcgcagactacaattataagctgcctgacgatttcaccggctgcgtgatcgcctggaactccaacaatctggattctaaagtgggcggcaactacaattatctgtacaggctgtttcgcaagtccaatctgaagccattcgagcgggacatctccacagagatctaccaggccggctctaccccctgcaatggcgtggagggctttaactgttatttccctctgcagtcttacggcttccagccaacaaacggcgtgggctatcagccctacagagtggtggtgctgtcctttgagctgctgcacgcaccagcaacagtgtgcggcccaaagaagtctaccaatctggtgaagaacaagtgcgtgaacttcaacttcaacggactgaccggcacaggcgtgctgaccgagagcaataagaagttcctgccttttcagcagttcggcagggacatcgcagataccacagacgccgtgcgcgaccctcagaccctggagatcctggacatcacaccatgcagcttcggcggcgtgtccgtgatcacaccaggcaccaatacatccaaccaggtggccgtgctgtatcaggacgtgaattgtaccgaggtgcccgtggcaatccacgcagatcagctgacccctacatggcgggtgtactctaccggcagcaacgtgttccagacaagagccggatgcctgatcggagcagagcacgtgaacaatagctatgagtgcgacatccctatcggcgccggcatctgtgccagctaccagacccagacaaactccccatctggagcaggctccgtggccagccagtccatcatcgcctataccatgagcctgggcgccgagaacagcgtggcctactccaacaattctatcgccatccctaccaacttcacaatcagcgtgaccacagagatcctgccagtgtctatgaccaagacaagcgtggactgcacaatgtatatctgtggcgatagcaccgagtgctccaacctgctgctgcagtacggctccttttgtacccagctgaatagagccctgacaggcatcgccgtggagcaggataagaacacacaggaggtgttcgcccaggtgaagcagatctacaagaccccacccatcaaggactttggcggcttcaacttcagccagatcctgcctgatccaagcaagccctccaagaggtcttttatcgaggacctgctgttcaacaaggtgaccctggccgatgccggcttcatcaagcagtatggagattgcctgggagacatcgcagcccgcgacctgatctgtgcccagaagtttaatggcctgaccgtgctgcctccactgctgacagatgagatgatcgcccagtacacatctgccctgctggccggcaccatcacaagcggatggaccttcggcgcaggagccgccctgcagatcccttttgccatgcagatggcctataggttcaacggcatcggcgtgacccagaatgtgctgtacgagaaccagaagctgatcgccaatcagtttaacagcgccatcggcaagatccaggactctctgtcctctacagccagcgccctgggcaagctgcaggatgtggtgaatcagaacgcccaggccctgaataccctggtgaagcagctgagctccaacttcggcgccatctctagcgtgctgaatgacatcctgagccggctggacccccctgaggcagaggtgcagatcgacaggctgatcacaggccgcctgcagagcctgcagacctacgtgacacagcagctgatcagggcagcagagatcagagcctccgccaatctggccgccaccaagatgagcgagtgcgtgctgggacagtccaagagggtggacttttgtggcaagggctatcacctgatgtctttcccacagagcgcccctcacggcgtggtgtttctgcacgtgacctacgtgccagcccaggagaagaacttcaccacagcaccagccatctgccacgatggaaaggcacactttcctagggagggcgtgttcgtgtctaacggcacccactggtttgtgacacagcgcaatttctacgagccacagatcatcaccacagacaatacattcgtgagcggcaactgtgatgtggtgatcggcatcgtgaacaataccgtgtatgatccactgcagcccgagctggactcctttaaggaggagctggataagtacttcaagaatcacacctctcccgacgtggatctgggcgacatctccggcatcaatgcctctgtggtgaacatccagaaggagatcgaccggctgaacgaggtggccaagaatctgaacgagagcctgatcgatctgcaggagctgggcaagtatgagcagtacatcaagggctctggcagagagaacctgtatttccagggaggaggaggcagcggatacatccctgaggcaccaagggacggacaggcctacgtgcgcaaggatggcgagtgggtgctgctgtccacctttctgggccatcatcaccaccaccaccaccactga

SEQ ID NO: 5070 - DNA, 3846 bp, Artificial Sequence
  Description of Artificial Sequence: Synthetic polynucleotide
atgggcatcctgccaagcccaggaatgcccgccctgctgtctctggtgagcctgctgtccgtgctgctgatgggatgcgtggcagagacaggcacacagtgcgtgaacctgaccacaaggacccagctgccccctgcctataccaattctttcacacggggcgtgtactatcccgacaaggtgtttagaagctccgtgctgcactccacacaggatctgtttctgcctttcttttctaacgtgacctggttccacgccatccacgtgtccggcaccaatggcacaaagcggttcgacaatcccgtgctgccttttaacgatggcgtgtacttcgccagcaccgagaagtccaacatcatcagaggctggatctttggcaccacactggactctaagacacagagcctgctgatcgtgaacaatgccaccaacgtggtgatcaaggtgtgcgagttccagttttgtaatgatccattcctgggcgtgtactatcacaagaacaataagtcctggatggagtctgagtttcgcgtgtattctagcgccaacaattgcacatttgagtacgtgagccagcccttcctgatggacctggagggcaagcagggcaatttcaagaacctgagggagttcgtgtttaagaatatcgatggctacttcaagatctacagcaagcacaccccaatcaacctggtgcgcgacctgccacagggattctccgccctggagccactggtggatctgcccatcggcatcaacatcacccggtttcagacactgctggccctgcacagatcctacctgacaccaggcgactcctctagcggatggaccgcaggagctgccgcctactatgtgggctatctgcagccccggaccttcctgctgaagtacaacgagaatggcaccatcacagacgcagtggattgcgccctggaccccctgtctgagacaaagtgtacactgaagagctttaccgtggagaagggcatctatcagacaagcaatttcagggtgcagcctaccgagtccatcgtgcgctttcccaatgtaacaaacctgtgcccttttggcgaggtgttcaacgccaccagattcgccagcgtgtacgcctggaatcggaagagaatctccaactgcgtggccgactattctgtgctgtacaactccgcctctttcagcacctttaagtgctatggcgtgtctcccacaaagctgaatgatctgtgctttaccaacgtgtacgccgatagcttcgtgatcaggggagacgaagtgagacagatcgcaccaggacagacaggaaagatcgcagactacaattataagctgcctgacgatttcaccggctgcgtgatcgcctggaactccaacaatctggattctaaagtgggcggcaactacaattatctgtacaggctgtttcgcaagtccaatctgaagccattcgagcgggacatctccacagagatctaccaggccggctctaccccctgcaatggcgtggagggctttaactgttatttccctctgcagtcttacggcttccagccaacaaacggcgtgggctatcagccctacagagtggtggtgctgtcctttgagctgctgcacgcaccagcaacagtgtgcggcccaaagaagtctaccaatctggtgaagaacaagtgcgtgaacttcaacttcaacggactgaccggcacaggcgtgctgaccgagagcaataagaagttcctgccttttcagcagttcggcagggacatcgcagataccacagacgccgtgcgcgaccctcagaccctggagatcctggacatcacaccatgcagcttcggcggcgtgtccgtgatcacaccaggcaccaatacatccaaccaggtggccgtgctgtatcaggacgtgaattgtaccgaggtgcccgtggcaatccacgcagatcagctgacccctacatggcgggtgtactctaccggcagcaacgtgttccagacaagagccggatgcctgatcggagcagagcacgtgaacaatagctatgagtgcgacatccctatcggcgccggcatctgtgccagctaccagacccagacaaactccccatctggagcaggctccgtggccagccagtccatcatcgcctataccatgagcctgggcgccgagaacagcgtggcctactccaacaattctatcgccatccctaccaacttcacaatcagcgtgaccacagagatcctgccagtgtctatgaccaagacaagcgtggactgcacaatgtatatctgtggcgatagcaccgagtgctccaacctgctgctgcagtacggctccttttgtacccagctgaatagagccctgacaggcatcgccgtggagcaggataagaacacacaggaggtgttcgcccaggtgaagcagatctacaagaccccacccatcaaggactttggcggcttcaacttcagccagatcctgcctgatccaagcaagccctccaagaggtcttttatcgaggacctgctgttcaacaaggtgaccctggccgatgccggcttcatcaagcagtatggagattgcctgggagacatcgcagcccgcgacctgatctgtgcccagaagtttaatggcctgaccgtgctgcctccactgctgacagatgagatgatcgcccagtacacatctgccctgctggccggcaccatcacaagcggatggaccttcggcgcaggagccgccctgcagatcccttttgccatgcagatggcctataggttcaacggcatcggcgtgacccagaatgtgctgtacgagaaccagaagctgatcgccaatcagtttaacagcgccatcggcaagatccaggactctctgtcctctacagccagcgccctgggcaagctgcaggatgtggtgaatcagaacgcccaggccctgaataccctggtgaagcagctgagctccaacttcggcgccatctctagcgtgctgaatgacatcctgagccggctggacccccctgaggcagaggtgcagatcgacaggctgatcacaggccgcctgcagagcctgcagacctacgtgacacagcagctgatcagggcagcagagatcagagcctccgccaatctggccgccaccaagatgagcgagtgcgtgctgggacagtccaagagggtggacttttgtggcaagggctatcacctgatgtctttcccacagagcgcccctcacggcgtggtgtttctgcacgtgacctacgtgccagcccaggagaagaacttcaccacagcaccagccatctgccacgatggaaaggcacactttcctagggagggcgtgttcgtgtctaacggcacccactggtttgtgacacagcgcaatttctacgagccacagatcatcaccacagacaatacattcgtgagcggcaactgtgatgtggtgatcggcatcgtgaacaataccgtgtatgatccactgcagcccgagctggactcctttaaggaggagctggataagtacttcaagaatcacacctctcccgacgtggatctgggcgacatctccggcatcaatgcctctgtggtgaacatccagaaggagatcgaccggctgaacgaggtggccaagaatctgaacgagagcctgatcgatctgcaggagctgggcaagtatgagcagtacatcaagggctctggcagagagaacctgtatttccagggaggaggaggcagcggatacatccctgaggcaccaagggacggacaggcctacgtgcgcaaggatggcgagtgggtgctgctgtccacctttctgggccatcatcaccaccaccaccaccactga

SEQ ID NO: 5071 - DNA, 3846 bp, Artificial Sequence
  Description of Artificial Sequence: Synthetic polynucleotide
atgggcatcctgccaagcccaggaatgcccgccctgctgtctctggtgagcctgctgtccgtgctgctgatgggatgcgtggcagagacaggcacacagtgcgtgaacctgaccacaaggacccagctgccccctgcctataccaattctttcacacggggcgtgtactatcccgacaaggtgtttagaagctccgtgctgcactccacacaggatctgtttctgcctttcttttctaacgtgacctggttccacgccatccacgtgtccggcaccaatggcacaaagcggttcgacaatcccgtgctgccttttaacgatggcgtgtacttcgccagcaccgagaagtccaacatcatcagaggctggatctttggcaccacactggactctaagacacagagcctgctgatcgtgaacaatgccaccaacgtggtgatcaaggtgtgcgagttccagttttgtaatgatccattcctgggcgtgtactatcacaagaacaataagtcctggatggagtctgagtttcgcgtgtattctagcgccaacaattgcacatttgagtacgtgagccagcccttcctgatggacctggagggcaagcagggcaatttcaagaacctgagggagttcgtgtttaagaatatcgatggctacttcaagatctacagcaagcacaccccaatcaacctggtgcgcgacctgccacagggattctccgccctggagccacaagtggatctgcccatcggcatcaacatcacccggtttcagacactgctggccctgcacagatcctacctgacaccaggcgactcctctagcggatggaccgcaggagctgccgcctactatgtgggctatctgcagccccggaccttcctgctgaagtacaacgagaatggcaccatcacagacgcagtggattgcgccctggaccccctgtctgagacaaagtgtacactgaagagctttaccgtggagaagggcatctatcagacaagcaatttcagggtgcagcctaccgagtccatcgtgcgctttcccaatatcacaaacctgtgcccttttggcgaggtgttcaacgccaccagattcgccagcgtgtacgcctggaatcggaagagaatctccaactgcgtggccgactattctgtgctgtacaactccgcctctttcagcacctttaagtgctatggcgtgtctcccacaaagctgaatgatctgtgctttaccaacgtgtacgccgatagcttcgtgatcaggggagacgaagtgagacagatcgcaccaggacagacaggaaagatcgcagactacaattataagctgcctgacgatttcaccggctgcgtgatcgcctggaactccaacaatctggattctaaagtgggcggcaactacaattatctgtacaggctgtttcgcaagtccaatctgaagccattcgagcgggacatctccacagagatctaccaggccggctctaccccctgcaatggcgtggagggctttaactgttatttccctctgcagtcttacggcttccagccaacaaacggcgtgggctatcagccctacagagtggtggtgctgtcctttgagctgctgcacgcaccagcaacagtgtgcggcccaaagaagtctaccaatctggtgaagaacaagtgcgtgaacttcaacttcaacggactgaccggcacaggcgtgctgaccgagagcaataagaagttcctgccttttcagcagttcggcagggacatcgcagataccacagacgccgtgcgcgaccctcagaccctggagatcctggacatcacaccatgcagcttcggcggcgtgtccgtgatcacaccaggcaccaatacatccaaccaggtggccgtgctgtatcaggacgtgaattgtaccgaggtgcccgtggcaatccacgcagatcagctgacccctacatggcgggtgtactctaccggcagcaacgtgttccagacaagagccggatgcctgatcggagcagagcacgtgaacaatagctatgagtgcgacatccctatcggcgccggcatctgtgccagctaccagacccagacaaactccccatctggagcaggctccgtggccagccagtccatcatcgcctataccatgagcctgggcgccgagaacagcgtggcctactccaacaattctatcgccatccctaccaacttcacaatcagcgtgaccacagagatcctgccagtgtctatgaccaagacaagcgtggactgcacaatgtatatctgtggcgatagcaccgagtgctccaacctgctgctgcagtacggctccttttgtacccagctgaatagagccctgacaggcatcgccgtggagcaggataagaacacacaggaggtgttcgcccaggtgaagcagatctacaagaccccacccatcaaggactttggcggcttcaacttcagccagatcctgcctgatccaagcaagccctccaagaggtcttttatcgaggacctgctgttcaacaaggtgaccctggccgatgccggcttcatcaagcagtatggagattgcctgggagacatcgcagcccgcgacctgatctgtgcccagaagtttaatggcctgaccgtgctgcctccactgctgacagatgagatgatcgcccagtacacatctgccctgctggccggcaccatcacaagcggatggaccttcggcgcaggagccgccctgcagatcccttttgccatgcagatggcctataggttcaacggcatcggcgtgacccagaatgtgctgtacgagaaccagaagctgatcgccaatcagtttaacagcgccatcggcaagatccaggactctctgtcctctacagccagcgccctgggcaagctgcaggatgtggtgaatcagaacgcccaggccctgaataccctggtgaagcagctgagctccaacttcggcgccatctctagcgtgctgaatgacatcctgagccggctggacccccctgaggcagaggtgcagatcgacaggctgatcacaggccgcctgcagagcctgcagacctacgtgacacagcagctgatcagggcagcagagatcagagcctccgccaatctggccgccaccaagatgagcgagtgcgtgctgggacagtccaagagggtggacttttgtggcaagggctatcacctgatgtctttcccacagagcgcccctcacggcgtggtgtttctgcacgtgacctacgtgccagcccaggagaagaacttcaccacagcaccagccatctgccacgatggaaaggcacactttcctagggagggcgtgttcgtgtctaacggcacccactggtttgtgacacagcgcaatttctacgagccacagatcatcaccacagacaatacattcgtgagcggcaactgtgatgtggtgatcggcatcgtgaacaataccgtgtatgatccactgcagcccgagctggactcctttaaggaggagctggataagtacttcaagaatcacacctctcccgacgtggatctgggcgacatctccggcatcaatgcctctgtggtgaacatccagaaggagatcgaccggctgaacgaggtggccaagaatctgaacgagagcctgatcgatctgcaggagctgggcaagtatgagcagtacatcaagggctctggcagagagaacctgtatttccagggaggaggaggcagcggatacatccctgaggcaccaagggacggacaggcctacgtgcgcaaggatggcgagtgggtgctgctgtccacctttctgggccatcatcaccaccaccaccaccactga

SEQ ID NO: 5072 - DNA, 3846 bp, Artificial Sequence
  Description of Artificial Sequence: Synthetic polynucleotide
atgggcatcctgccaagcccaggaatgcccgccctgctgtctctggtgagcctgctgtccgtgctgctgatgggatgcgtggcagagacaggcacacagtgcgtgaacctgaccacaaggacccagctgccccctgcctataccaattctttcacacggggcgtgtactatcccgacaaggtgtttagaagctccgtgctgcactccacacaggatctgtttctgcctttcttttctaacgtgacctggttccacgccatccacgtgtccggcaccaatggcacaaagcggttcgacaatcccgtgctgccttttaacgatggcgtgtacttcgccagcaccgagaagtccaacatcatcagaggctggatctttggcaccacactggactctaagacacagagcctgctgatcgtgaacaatgccaccaacgtggtgatcaaggtgtgcgagttccagttttgtaatgatccattcctgggcgtgtactatcacaagaacaataagtcctggatggagtctgagtttcgcgtgtattctagcgccaacaattgcacatttgagtacgtgagccagcccttcctgatggacctggagggcaagcagggcaatttcaagaacctgagggagttcgtgtttaagaatatcgatggctacttcaagatctacagcaagcacaccccaatcaacctggtgcgcgacctgccacagggattctccgccctggagccactggtggatctgcccatcggcatcaacatcacccggtttcagacactgctggccctgcacagatcctacctgacaccaggcgactcctctagcggatggaccgcaggagctgccgcctactatgtgggctatctgcagccccggaccttcctgctgaagtacaacgagaatggcaccatcacagacgcagtggattgcgccctggaccccctgtctgagacaaagtgtacactgaagagctttaccgtggagaagggcatctatcagacaagcaatttcagggtgcagcctaccgagtccatcgtgcgctttcccaatatcacaaacctgtgcccttttggcgaggtgttcaacgccaccagattcgccagcgtgtacgcctggaatcggaagagaatctccaactgcgtggccgactattctgtgctgtacaactccgcctctttcagcacctttaagtgctatggcgtgtctcccacaaagctgaatgatctgtgctttaccaacgtgtacgccgatagcttcgtgatcaggggagacgaagtgagacagatcgcaccaggacagacaggaaagatcgcagactacaattataagctgcctgacgatttcaccggctgcgtgatcgcctggaactccaacaatctggattctaaagtgggcggcaactacaattatctgtacaggctgtttcgcaagtccaatctgaagccattcgagcgggacatctccacagagatctaccaggccggctctaccccctgcaatggcgtggagggctttaactgttatttccctctgcagtcttacggcttccagccaacaaacggcgtgggctatcagccctacagagtggtggtgctgtcctttgagctgctgcacgcaccagcaacagtgtgcggcccaaagaagtctaccaatctggtgaagaacaagtgcgtgaacttcaacttcaacggactgaccggcacaggcgtgctgaccgagagcaataagaagttcctgccttttcagcagttcggcagggacatcgcagataccacagacgccgtgcgcgaccctcagaccctggagatcctggacatcacaccatgcagcttcggcggcgtgtccgtgatcacaccaggcaccaatacatccaaccaggtggccgtgctgtatcaggacgtgaattgtaccgaggtgcccgtggcaatccacgcagatcagctgacccctacatggcgggtgtactctaccggcagcaacgtgttccagacaagagccggatgcctgatcggagcagagcacgtgaacaatagctatgagtgcgacatccctatcggcgccggcatctgtgccagctaccagacccagacaaactccccatctggagcaggctccgtggccagccagtccatcatcgcctataccatgagcctgggcgccgagaacagcgtggcctactccaacaattctatcgccatccctaccaacttcacaatcagcgtgaccacagagatcctgccagtgtctatgaccaagacaagcgtggactgcacaatgtatatctgtggcgatagcaccgagtgctccaacctgctgctgcagtacggctccttttgtacccagctgaatagagccctgacaggcatcgccgtggagcaggataagaacacacaggaggtgttcgcccaggtgaagcagatctacaagaccccacccatcaaggactttggcggcttcaacttcagccagatcctgcctgatccaagcaagccctccaagaggtcttttatcgaggacctgctgttcaacaaggtgaccctggccgatgccggcttcatcaagcagtatggagattgcctgggagacatcgcagcccgcgacctgatctgtgcccagaagtttaatggcctgaccgtgctgcctccactgctgacagatgagatgatcgcccagtacacatctgccctgctggccggcaccatcacaagcggatggaccttcggcgcaggagccgccctgcagatcccttttgccatgcagatggcctataggttcaacggcatcggcgtgacccagaatgtgctgtacgagaaccagaagctgatcgccaatcagtttaacagcgccatcggcaagatccaggactctctgtcctctacagccagcgccctgggcaagctgcaggatgtggtgaatcagaacgcccaggccctgaataccctggtgaagcagctgagctccaacttcggcgccatctctagcgtgctgaatgacatcctgagccggctggacccccctgcggcagaggtgcagatcgacaggctgatcacaggccgcctgcagagcctgcagacctacgtgacacagcagctgatcagggcagcagagatcagagcctccgccaatctggccgccaccaagatgagcgagtgcgtgctgggacagtccaagagggtggacttttgtggcaagggctatcacctgatgtctttcccacagagcgcccctcacggcgtggtgtttctgcacgtgacctacgtgccagcccaggagaagaacttcaccacagcaccagccatctgccacgatggaaaggcacactttcctagggagggcgtgttcgtgtctaacggcacccactggtttgtgacacagcgcaatttctacgagccacagatcatcaccacagacaatacattcgtgagcggcaactgtgatgtggtgatcggcatcgtgaacaataccgtgtatgatccactgcagcccgagctggactcctttaaggaggagctggataagtacttcaagaatcacacctctcccgacgtggatctgggcgacatctccggcatcaatgcctctgtggtgaacatccagaaggagatcgaccggctgaacgaggtggccaagaatctgaacgagagcctgatcgatctgcaggagctgggcaagtatgagcagtacatcaagggctctggcagagagaacctgtatttccagggaggaggaggcagcggatacatccctgaggcaccaagggacggacaggcctacgtgcgcaaggatggcgagtgggtgctgctgtccacctttctgggccatcatcaccaccaccaccaccactga

SEQ ID NO: 5073 - DNA, 3846 bp, Artificial Sequence
  Description of Artificial Sequence: Synthetic polynucleotide
atgggcatcctgccaagcccaggaatgcccgccctgctgtctctggtgagcctgctgtccgtgctgctgatgggatgcgtggcagagacaggcacacagtgcgtgaacctgaccacaaggacccagctgccccctgcctataccaattctttcacacggggcgtgtactatcccgacaaggtgtttagaagctccgtgctgcactccacacaggatctgtttctgcctttcttttctaacgtgacctggttccacgccatccacgtgtccggcaccaatggcacaaagcggttcgacaatcccgtgctgccttttaacgatggcgtgtacttcgccagcaccgagaagtccaacatcatcagaggctggatctttggcaccacactggactctaagacacagagcctgctgatcgtgaacaatgccaccaacgtggtgatcaaggtgtgcgagttccagttttgtaatgatccattcctgggcgtgtactatcacaagaacaataagtcctggatggagtctgagtttcgcgtgtattctagcgccaacaattgcacatttgagtacgtgagccagcccttcctgatggacctggagggcaagcagggcaatttcaagaacctgagggagttcgtgtttaagaatatcgatggctacttcaagatctacagcaagcacaccccaatcaacctggtgcgcgacctgccacagggattctccgccctggagccactggtggatctgcccatcggcatcaacatcacccggtttcagacactgctggccctgcacagatcctacctgacaccaggcgactcctctagcggatggaccgcaggagctgccgcctactatgtgggctatctgcagccccggaccttcctgctgaagtacaacgagtatggcaccatcacagacgcagtggattgcgccctggaccccctgtctgagacaaagtgtacactgaagagctttaccgtggagaagggcatctatcagacaagcaatttcagggtgcagcctaccgagtccatcgtgcgctttcccaatatcacaaacctgtgcccttttggcgaggtgttcaacgccaccagattcgccagcgtgtacgcctggaatcggaagagaatctccaactgcgtggccgactattctgtgctgtacaactccgcctctttcagcacctttaagtgctatggcgtgtctcccacaaagctgaatgatctgtgctttaccaacgtgtacgccgatagcttcgtgatcaggggagacgaagtgagacagatcgcaccaggacagacaggaaagatcgcagactacaattataagctgcctgacgatttcaccggctgcgtgatcgcctggaactccaacaatctggattctaaagtgggcggcaactacaattatctgtacaggctgtttcgcaagtccaatctgaagccattcgagcgggacatctccacagagatctaccaggccggctctaccccctgcaatggcgtggagggctttaactgttatttccctctgcagtcttacggcttccagccaacaaacggcgtgggctatcagccctacagagtggtggtgctgtcctttgagctgctgcacgcaccagcaacagtgtgcggcccaaagaagtctaccaatctggtgaagaacaagtgcgtgaacttcaacttcaacggactgaccggcacaggcgtgctgaccgagagcaataagaagttcctgccttttcagcagttcggcagggacatcgcagataccacagacgccgtgcgcgaccctcagaccctggagatcctggacatcacaccatgcagcttcggcggcgtgtccgtgatcacaccaggcaccaatacatccaaccaggtggccgtgctgtatcaggacgtgaattgtaccgaggtgcccgtggcaatccacgcagatcagctgacccctacatggcgggtgtactctaccggcagcaacgtgttccagacaagagccggatgcctgatcggagcagagcacgtgaacaatagctatgagtgcgacatccctatcggcgccggcatctgtgccagctaccagacccagacaaactccccatctggagcaggctccgtggccagccagtccatcatcgcctataccatgagcctgggcgccgagaacagcgtggcctactccaacaattctatcgccatccctaccaacttcacaatcagcgtgaccacagagatcctgccagtgtctatgaccaagacaagcgtggactgcacaatgtatatctgtggcgatagcaccgagtgctccaacctgctgctgcagtacggctccttttgtacccagctgaatagagccctgacaggcatcgccgtggagcaggataagaacacacaggaggtgttcgcccaggtgaagcagatctacaagaccccacccatcaaggactttggcggcttcaacttcagccagatcctgcctgatccaagcaagccctccaagaggtcttttatcgaggacctgctgttcaacaaggtgaccctggccgatgccggcttcatcaagcagtatggagattgcctgggagacatcgcagcccgcgacctgatctgtgcccagaagtttaatggcctgaccgtgctgcctccactgctgacagatgagatgatcgcccagtacacatctgccctgctggccggcaccatcacaagcggatggaccttcggcgcaggagccgccctgcagatcccttttgccatgcagatggcctataggttcaacggcatcggcgtgacccagaatgtgctgtacgagaaccagaagctgatcgccaatcagtttaacagcgccatcggcaagatccaggactctctgtcctctacagccagcgccctgggcaagctgcaggatgtggtgaatcagaacgcccaggccctgaataccctggtgaagcagctgagctccaacttcggcgccatctctagcgtgctgaatgacatcctgagccggctggacccccctgaggcagaggtgcagatcgacaggctgatcacaggccgcctgcagagcctgcagacctacgtgacacagcagctgatcagggcagcagagatcagagcctccgccaatctggccgccaccaagatgagcgagtgcgtgctgggacagtccaagagggtggacttttgtggcaagggctatcacctgatgtctttcccacagagcgcccctcacggcgtggtgtttctgcacgtgacctacgtgccagcccaggagaagaacttcaccacagcaccagccatctgccacgatggaaaggcacactttcctagggagggcgtgttcgtgtctaacggcacccactggtttgtgacacagcgcaatttctacgagccacagatcatcaccacagacaatacattcgtgagcggcaactgtgatgtggtgatcggcatcgtgaacaataccgtgtatgatccactgcagcccgagctggactcctttaaggaggagctggataagtacttcaagaatcacacctctcccgacgtggatctgggcgacatctccggcatcaatgcctctgtggtgaacatccagaaggagatcgaccggctgaacgaggtggccaagaatctgaacgagagcctgatcgatctgcaggagctgggcaagtatgagcagtacatcaagggctctggcagagagaacctgtatttccagggaggaggaggcagcggatacatccctgaggcaccaagggacggacaggcctacgtgcgcaaggatggcgagtgggtgctgctgtccacctttctgggccatcatcaccaccaccaccaccactga

SEQ ID NO: 5074 - DNA, 3846 bp, Artificial Sequence
  Description of Artificial Sequence: Synthetic polynucleotide
atgggcatcctgccaagcccaggaatgcccgccctgctgtctctggtgagcctgctgtccgtgctgctgatgggatgcgtggcagagacaggcacacagtgcgtgaacctgaccacaaggacccagctgccccctgcctataccaattctttcacacggggcgtgtactatcccgacaaggtgtttagaagctccgtgctgcactccacacaggatctgtttctgcctttcttttctaacgtgacctggttccacgccatccacgtgtccggcaccaatggcacaaagcggttcgacaatcccgtgctgccttttaacgatggcgtgtacttcgccagcaccgagaagtccaacatcatcagaggctggatctttggcaccacactggactctaagacacagagcctgctgatcgtgaacaatgccaccaacgtggtgatcaaggtgtgcgagttccagttttgtaatgatccattcctgggcgtgtactatcacaagaacaataagtcctggatggagtctgagtttcgcgtgtattctagcgccaacaattgcacatttgagtacgtgagccagcccttcctgatggacctggagggcaagcagggcaatttcaagaacctgagggagttcgtgtttaagaatatcgatggctacttcaagatctacagcaagcacaccccaatcaacctggtgcgcgacctgccacagggattctccgccctggagccactggtggatctgcccatcggcatcaacatcacccggtttcagacactgctggccctgcacagatcctacctgacaccaggcgactcctctagcggatggaccgcaggagctgccgcctactatgtgggctatctgcagccccggaccttcctgctgaagtacaacgagaatggcaccatcacagacgcagtggattgcgccctggaccccctgtctgagacaaagtgtacactgaagagctttaccgtggagaagggcatctatcagacaagcaatttcagggtgcagcctaccgagtccatcgtgcgctttcccaatatcacaaacctgtgccctatgggcgaggtgttcaacgccaccagattcgccagcgtgtacgcctggaatcggaagagaatctccaactgcgtggccgactattctgtgctgtacaactccgcctctttcagcacctttaagtgctatggcgtgtctcccacaaagctgaatgatctgtgctttaccaacgtgtacgccgatagcttcgtgatcaggggagacgaagtgagacagatcgcaccaggacagacaggaaagatcgcagactacaattataagctgcctgacgatttcaccggctgcgtgatcgcctggaactccaacaatctggattctaaagtgggcggcaactacaattatctgtacaggctgtttcgcaagtccaatctgaagccattcgagcgggacatctccacagagatctaccaggccggctctaccccctgcaatggcgtggagggctttaactgttatttccctctgcagtcttacggcttccagccaacaaacggcgtgggctatcagccctacagagtggtggtgctgtcctttgagctgctgcacgcaccagcaacagtgtgcggcccaaagaagtctaccaatctggtgaagaacaagtgcgtgaacttcaacttcaacggactgaccggcacaggcgtgctgaccgagagcaataagaagttcctgccttttcagcagttcggcagggacatcgcagataccacagacgccgtgcgcgaccctcagaccctggagatcctggacatcacaccatgcagcttcggcggcgtgtccgtgatcacaccaggcaccaatacatccaaccaggtggccgtgctgtatcaggacgtgaattgtaccgaggtgcccgtggcaatccacgcagatcagctgacccctacatggcgggtgtactctaccggcagcaacgtgttccagacaagagccggatgcctgatcggagcagagcacgtgaacaatagctatgagtgcgacatccctatcggcgccggcatctgtgccagctaccagacccagacaaactccccatctggagcaggctccgtggccagccagtccatcatcgcctataccatgagcctgggcgccgagaacagcgtggcctactccaacaattctatcgccatccctaccaacttcacaatcagcgtgaccacagagatcctgccagtgtctatgaccaagacaagcgtggactgcacaatgtatatctgtggcgatagcaccgagtgctccaacctgctgctgcagtacggctccttttgtacccagctgaatagagccctgacaggcatcgccgtggagcaggataagaacacacaggaggtgttcgcccaggtgaagcagatctacaagaccccacccatcaaggactttggcggcttcaacttcagccagatcctgcctgatccaagcaagccctccaagaggtcttttatcgaggacctgctgttcaacaaggtgaccctggccgatgccggcttcatcaagcagtatggagattgcctgggagacatcgcagcccgcgacctgatctgtgcccagaagtttaatggcctgaccgtgctgcctccactgctgacagatgagatgatcgcccagtacacatctgccctgctggccggcaccatcacaagcggatggaccttcggcgcaggagccgccctgcagatcccttttgccatgcagatggcctataggttcaacggcatcggcgtgacccagaatgtgctgtacgagaaccagaagctgatcgccaatcagtttaacagcgccatcggcaagatccaggactctctgtcctctacagccagcgccctgggcaagctgcaggatgtggtgaatcagaacgcccaggccctgaataccctggtgaagcagctgagctccaacttcggcgccatctctagcgtgctgaatgacatcctgagccggctggacccccctgaggcagaggtgcagatcgacaggctgatcacaggccgcctgcagagcctgcagacctacgtgacacagcagctgatcagggcagcagagatcagagcctccgccaatctggccgccaccaagatgagcgagtgcgtgctgggacagtccaagagggtggacttttgtggcaagggctatcacctgatgtctttcccacagagcgcccctcacggcgtggtgtttctgcacgtgacctacgtgccagcccaggagaagaacttcaccacagcaccagccatctgccacgatggaaaggcacactttcctagggagggcgtgttcgtgtctaacggcacccactggtttgtgacacagcgcaatttctacgagccacagatcatcaccacagacaatacattcgtgagcggcaactgtgatgtggtgatcggcatcgtgaacaataccgtgtatgatccactgcagcccgagctggactcctttaaggaggagctggataagtacttcaagaatcacacctctcccgacgtggatctgggcgacatctccggcatcaatgcctctgtggtgaacatccagaaggagatcgaccggctgaacgaggtggccaagaatctgaacgagagcctgatcgatctgcaggagctgggcaagtatgagcagtacatcaagggctctggcagagagaacctgtatttccagggaggaggaggcagcggatacatccctgaggcaccaagggacggacaggcctacgtgcgcaaggatggcgagtgggtgctgctgtccacctttctgggccatcatcaccaccaccaccaccactga

SEQ ID NO: 5075 - DNA, 3846 bp, Artificial Sequence
  Description of Artificial Sequence: Synthetic polynucleotide
atgggcatcctgccaagcccaggaatgcccgccctgctgtctctggtgagcctgctgtccgtgctgctgatgggatgcgtggcagagacaggcacacagtgcgtgaacctgaccacaaggacccagctgccccctgcctataccaattctttcacacggggcgtgtactatcccgacaaggtgtttagaagctccgtgctgcactccacacaggatctgtttctgcctttcttttctaacgtgacctggttccacgccatccacgtgtccggcaccaatggcacaaagcggttcgacaatcccgtgctgccttttaacgatggcgtgtacttcgccagcaccgagaagtccaacatcatcagaggctggatctttggcaccacactggactctaagacacagagcctgctgatcgtgaacaatgccaccaacgtggtgatcaaggtgtgcgagttccagttttgtaatgatccattcctgggcgtgtactatcacaagaacaataagtcctggatggagtctgagtttcgcgtgtattctagcgccaacaattgcacatttgagtacgtgagccagcccttcctgatggacctggagggcaagcagggcaatttcaagaacctgagggagttcgtgtttaagaatatcgatggctacttcaagatctacagcaagcacaccccaatcaacctggtgcgcgacctgccacagggattctccgccctggagccactggtggatctgcccatcggcatcaacatcacccggtttcagacactgctggccctgcacagatcctacctgacaccaggcgactcctctagcggatggaccgcaggagctgccgcctactatgtgggctatctgcagccccggaccttcctgctgaagtacaacgagaatggcaccatcacagacgcagtggattgcgccctggaccccctgtctgagacaaagtgtacactgaagagctttaccgtggagaagggcatctatcagacaagcaatttcagggtgcagcctaccgagtccatcgtgcgctttcccgtcatcacaaacctgtgcccttttggcgaggtgttcaacgccaccagattcgccagcgtgtacgcctggaatcggaagagaatctccaactgcgtggccgactattctgtgctgtacaactccgcctctttcagcacctttaagtgctatggcgtgtctcccacaaagctgaatgatctgtgctttaccaacgtgtacgccgatagcttcgtgatcaggggagacgaagtgagacagatcgcaccaggacagacaggaaagatcgcagactacaattataagctgcctgacgatttcaccggctgcgtgatcgcctggaactccaacaatctggattctaaagtgggcggcaactacaattatctgtacaggctgtttcgcaagtccaatctgaagccattcgagcgggacatctccacagagatctaccaggccggctctaccccctgcaatggcgtggagggctttaactgttatttccctctgcagtcttacggcttccagccaacaaacggcgtgggctatcagccctacagagtggtggtgctgtcctttgagctgctgcacgcaccagcaacagtgtgcggcccaaagaagtctaccaatctggtgaagaacaagtgcgtgaacttcaacttcaacggactgaccggcacaggcgtgctgaccgagagcaataagaagttcctgccttttcagcagttcggcagggacatcgcagataccacagacgccgtgcgcgaccctcagaccctggagatcctggacatcacaccatgcagcttcggcggcgtgtccgtgatcacaccaggcaccaatacatccaaccaggtggccgtgctgtatcaggacgtgaattgtaccgaggtgcccgtggcaatccacgcagatcagctgacccctacatggcgggtgtactctaccggcagcaacgtgttccagacaagagccggatgcctgatcggagcagagcacgtgaacaatagctatgagtgcgacatccctatcggcgccggcatctgtgccagctaccagacccagacaaactccccatctggagcaggctccgtggccagccagtccatcatcgcctataccatgagcctgggcgccgagaacagcgtggcctactccaacaattctatcgccatccctaccaacttcacaatcagcgtgaccacagagatcctgccagtgtctatgaccaagacaagcgtggactgcacaatgtatatctgtggcgatagcaccgagtgctccaacctgctgctgcagtacggctccttttgtacccagctgaatagagccctgacaggcatcgccgtggagcaggataagaacacacaggaggtgttcgcccaggtgaagcagatctacaagaccccacccatcaaggactttggcggcttcaacttcagccagatcctgcctgatccaagcaagccctccaagaggtcttttatcgaggacctgctgttcaacaaggtgaccctggccgatgccggcttcatcaagcagtatggagattgcctgggagacatcgcagcccgcgacctgatctgtgcccagaagtttaatggcctgaccgtgctgcctccactgctgacagatgagatgatcgcccagtacacatctgccctgctggccggcaccatcacaagcggatggaccttcggcgcaggagccgccctgcagatcccttttgccatgcagatggcctataggttcaacggcatcggcgtgacccagaatgtgctgtacgagaaccagaagctgatcgccaatcagtttaacagcgccatcggcaagatccaggactctctgtcctctacagccagcgccctgggcaagctgcaggatgtggtgaatcagaacgcccaggccctgaataccctggtgaagcagctgagctccaacttcggcgccatctctagcgtgctgaatgacatcctgagccggctggacccccctgaggcagaggtgcagatcgacaggctgatcacaggccgcctgcagagcctgcagacctacgtgacacagcagctgatcagggcagcagagatcagagcctccgccaatctggccgccaccaagatgagcgagtgcgtgctgggacagtccaagagggtggacttttgtggcaagggctatcacctgatgtctttcccacagagcgcccctcacggcgtggtgtttctgcacgtgacctacgtgccagcccaggagaagaacttcaccacagcaccagccatctgccacgatggaaaggcacactttcctagggagggcgtgttcgtgtctaacggcacccactggtttgtgacacagcgcaatttctacgagccacagatcatcaccacagacaatacattcgtgagcggcaactgtgatgtggtgatcggcatcgtgaacaataccgtgtatgatccactgcagcccgagctggactcctttaaggaggagctggataagtacttcaagaatcacacctctcccgacgtggatctgggcgacatctccggcatcaatgcctctgtggtgaacatccagaaggagatcgaccggctgaacgaggtggccaagaatctgaacgagagcctgatcgatctgcaggagctgggcaagtatgagcagtacatcaagggctctggcagagagaacctgtatttccagggaggaggaggcagcggatacatccctgaggcaccaagggacggacaggcctacgtgcgcaaggatggcgagtgggtgctgctgtccacctttctgggccatcatcaccaccaccaccaccactga

SEQ ID NO: 5076 - DNA, 3846 bp, Artificial Sequence
  Description of Artificial Sequence: Synthetic polynucleotide
atgggcatcctgccaagcccaggaatgcccgccctgctgtctctggtgagcctgctgtccgtgctgctgatgggatgcgtggcagagacaggcacacagtgcgtgaacctgaccacaaggacccagctgccccctgcctataccaattctttcacacggggcgtgtactatcccgacaaggtgtttagaagctccgtgctgcactccacacaggatctgtttctgcctttcttttctaacgtgacctggttccacgccatccacgtgtccggcaccaatggcacaaagcggttcgacaatcccgtgctgccttttaacgatggcgtgtacttcgccagcaccgagaagtccaacatcatcagaggctggatctttggcaccacactggactctaagacacagagcctgctgatcgtgaacaatgccaccaacgtggtgatcaaggtgtgcgagttccagttttgtaatgatccattcctgggcgtgtactatcacaagaacaataagtcctggatggagtctgagtttcgcgtgtattctagcgccaacaattgcacatttgagtacgtgagccagcccttcctgatggacctggagggcaagcagggcaatttcaagaacctgagggagttcgtgtttaagaatatcgatggctacttcaagatctacagcaagcacaccccaatcaacctggtgcgcgacctgccacagggattctccgccctggagccactggtggatctgcccatcggcatcaacatcacccggtttcagacactgctggccctgcacagatcctacctgacaccaggcgactcctctagcggatggaccgcaggagctgccgcctactatgtgggctatctgcagccccggaccttcctgctgaagtacaacgagaatggcaccatcacagacgcagtggattgcgccctggaccccctgtctgagacaaagtgtacactgaagagctttaccgtggagaagggcatctatcagacaagcaatttcagggtgcagcctaccgagtccatcgtgcgctttcccaatatcacaaacctgtgcccttttggcgaggtgttcaacgccaccagattcgccagcgtgtacgcctggaatcggaagagaatctccaactgcgtggccgactattctgtgctgtacaactccgcctctttcagcacctttaagtgctatggcgtgtctcccacaaagctgaatgatctgtgctttaccaacgtgtacgccgatagcttcgtgatcaggggagacgaagtgagacagatcgcaccaggacagacaggaaagatcgcagactacaattataagctgcctgacgatttcaccggctgcgtgatcgcctggaactccaacaatctggattctaaagtgggcggcaactacaattatctgtacaggctgtttcgcaagtccaatctgaagccattcgagcgggacatctccacagagatctaccaggccggctctaccccctgcaatggcgtggagggctttaactgttatttccctctgcagtcttacggcttccagccaacaaacggcgtgggctatcagccctacagagtggtggtgctgtcctttgagctgctgcacgcaccagcaacagtgtgcggcccaaagaagtctaccaatctggtgaagaacaagtgcgtgaacttcaacttcaacggactgaccggcacaggcgtgctgaccgagagcaataagaagttcctgccttttcagcagttcggcagggacatcgcagataccacagacgccgtgcgcgaccctcagaccctggagatcctggacatcacaccatgcagcttcggcggcgtgtccgtgatcacaccaggcaccaatacatccaaccaggtggccgtgctgtatcaggacgtgaattgtaccgaggtgcccgtggcaatccacgcagatcagctgacccctacatggcgggtgtactctaccggcagcaacgtgttccagacaagagccggatgcctgatcggagcagagcacgtgaacaatagctatgagtgcgacatccctatcggcgccggcatctgtgccagctaccagacccagacaaactccccatctggagcaggctccgtggccagccagtccatcatcgcctataccatgagcctgggcgccgagaacagcgtggcctactccaacaattctatcgccatccctaccaacttcacaatcagcgtgaccacagagatcctgccagtgtctatgaccaagacaagcgtggactgcacaatgtatatctgtggcgatagcaccgagtgctccaacctgctgctgcagtacggctccttttgtacccagctgaatagagccctgacaggcatcgccgtggagcaggataagaacacacaggaggtgttcgcccaggtgaagcagatctacaagaccccacccatcaaggactttggcggcttcaacttcagccagatcctgcctgatccaagcaagccctccaagaggtcttttatcgaggacctgctgttcaacaaggtgaccctggccgatgccggcttcatcaagcagtatggagattgcctgggagacatcgcagcccgcgacctgatctgtgcccagaagtttaatggcctgaccgtgctgcctccactgctgacagatgagatgatcgcccagtacacatctgccctgctggccggcaccatcacaagcggatggaccttcggcgcaggagccgccctgcagatcccttttgccatgcagatggcctataggttcaacggcatcggcgtgacccagaatgtgctgtacgagaaccagaagctgatcgccaatcagtttaacagcgccatcggcaagatccaggactctctgtcctctacagccagcgccctgggcaagctgcaggatgtggtgaatcagaacgcccaggccctgaataccctggtgaagcagctgagctcccgtttcggcgccatctctagcgtgctgaatgacatcctgagccggctggacccccctgaggcagaggtgcagatcgacaggctgatcacaggccgcctgcagagcctgcagacctacgtgacacagcagctgatcagggcagcagagatcagagcctccgccaatctggccgccaccaagatgagcgagtgcgtgctgggacagtccaagagggtggacttttgtggcaagggctatcacctgatgtctttcccacagagcgcccctcacggcgtggtgtttctgcacgtgacctacgtgccagcccaggagaagaacttcaccacagcaccagccatctgccacgatggaaaggcacactttcctagggagggcgtgttcgtgtctaacggcacccactggtttgtgacacagcgcaatttctacgagccacagatcatcaccacagacaatacattcgtgagcggcaactgtgatgtggtgatcggcatcgtgaacaataccgtgtatgatccactgcagcccgagctggactcctttaaggaggagctggataagtacttcaagaatcacacctctcccgacgtggatctgggcgacatctccggcatcaatgcctctgtggtgaacatccagaaggagatcgaccggctgaacgaggtggccaagaatctgaacgagagcctgatcgatctgcaggagctgggcaagtatgagcagtacatcaagggctctggcagagagaacctgtatttccagggaggaggaggcagcggatacatccctgaggcaccaagggacggacaggcctacgtgcgcaaggatggcgagtgggtgctgctgtccacctttctgggccatcatcaccaccaccaccaccactga

SEQ ID NO: 5077 - DNA, 3846 bp, Artificial Sequence
  Description of Artificial Sequence: Synthetic polynucleotide
atgggcatcctgccaagcccaggaatgcccgccctgctgtctctggtgagcctgctgtccgtgctgctgatgggatgcgtggcagagacaggcacacagtgcgtgaacctgaccacaaggacccagctgccccctgcctataccaattctttcacacggggcgtgtactatcccgacaaggtgtttagaagctccgtgctgcactccacacaggatctgtttctgcctttcttttctaacgtgacctggttccacgccatccacgtgtccggcaccaatggcacaaagcggttcgacaatcccgtgctgccttttaacgatggcgtgtacttcgccagcaccgagaagtccaacatcatcagaggctggatctttggcaccacactggactctaagacacagagcctgctgatcgtgaacaatgccaccaacgtggtgatcaaggtgtgcgagttccagttttgtaatgatccattcctgggcgtgtactatcacaagaacaataagtcctggatggagtctgagtttcgcgtgtattctagcgccaacaattgcacatttgagtacgtgagccagcccttcctgatggacctggagggcaagcagggcaatttcaagaacctgagggagttcgtgtttaagaatatcgatggctacttcaagatctacagcaagcacaccccaatcaacctggtgcgcgacctgccacagggattctccgccctggagccactggtggatctgcccatcggcatcaacatcacccggtttcagacactgctggccctgcacagatcctacctgacaccaggcgactcctctagcggatggaccgcaggagctgccgcctactatgtgggctatctgcagccccggaccttcctgctgaagtacaacgagaatggcaccatcacagacgcagtggattgcgccctggaccccctgtctgagacaaagtgtacactgaagagctttaccgtggagaagggcatctatcagacaagcaatttcagggtgcagcctaccgagtccatcgtgcgctttcccaatatcacaaacctgtgcccttttggcgaggtgttcaacgccaccagattcgccagcgtgtacgcctggaatcggaagagaatctccaactgcgtggccgactattctgtgctgtacaactccgcctctttccaaacctttaagtgctatggcgtgtctcccacaaagctgaatgatctgtgctttaccaacgtgtacgccgatagcttcgtgatcaggggagacgaagtgagacagatcgcaccaggacagacaggaaagatcgcagactacaattataagctgcctgacgatttcaccggctgcgtgatcgcctggaactccaacaatctggattctaaagtgggcggcaactacaattatctgtacaggctgtttcgcaagtccaatctgaagccattcgagcgggacatctccacagagatctaccaggccggctctaccccctgcaatggcgtggagggctttaactgttatttccctctgcagtcttacggcttccagccaacaaacggcgtgggctatcagccctacagagtggtggtgctgtcctttgagctgctgcacgcaccagcaacagtgtgcggcccaaagaagtctaccaatctggtgaagaacaagtgcgtgaacttcaacttcaacggactgaccggcacaggcgtgctgaccgagagcaataagaagttcctgccttttcagcagttcggcagggacatcgcagataccacagacgccgtgcgcgaccctcagaccctggagatcctggacatcacaccatgcagcttcggcggcgtgtccgtgatcacaccaggcaccaatacatccaaccaggtggccgtgctgtatcaggacgtgaattgtaccgaggtgcccgtggcaatccacgcagatcagctgacccctacatggcgggtgtactctaccggcagcaacgtgttccagacaagagccggatgcctgatcggagcagagcacgtgaacaatagctatgagtgcgacatccctatcggcgccggcatctgtgccagctaccagacccagacaaactccccatctggagcaggctccgtggccagccagtccatcatcgcctataccatgagcctgggcgccgagaacagcgtggcctactccaacaattctatcgccatccctaccaacttcacaatcagcgtgaccacagagatcctgccagtgtctatgaccaagacaagcgtggactgcacaatgtatatctgtggcgatagcaccgagtgctccaacctgctgctgcagtacggctccttttgtacccagctgaatagagccctgacaggcatcgccgtggagcaggataagaacacacaggaggtgttcgcccaggtgaagcagatctacaagaccccacccatcaaggactttggcggcttcaacttcagccagatcctgcctgatccaagcaagccctccaagaggtcttttatcgaggacctgctgttcaacaaggtgaccctggccgatgccggcttcatcaagcagtatggagattgcctgggagacatcgcagcccgcgacctgatctgtgcccagaagtttaatggcctgaccgtgctgcctccactgctgacagatgagatgatcgcccagtacacatctgccctgctggccggcaccatcacaagcggatggaccttcggcgcaggagccgccctgcagatcccttttgccatgcagatggcctataggttcaacggcatcggcgtgacccagaatgtgctgtacgagaaccagaagctgatcgccaatcagtttaacagcgccatcggcaagatccaggactctctgtcctctacagccagcgccctgggcaagctgcaggatgtggtgaatcagaacgcccaggccctgaataccctggtgaagcagctgagctccaacttcggcgccatctctagcgtgctgaatgacatcctgagccggctggacccccctgaggcagaggtgcagatcgacaggctgatcacaggccgcctgcagagcctgcagacctacgtgacacagcagctgatcagggcagcagagatcagagcctccgccaatctggccgccaccaagatgagcgagtgcgtgctgggacagtccaagagggtggacttttgtggcaagggctatcacctgatgtctttcccacagagcgcccctcacggcgtggtgtttctgcacgtgacctacgtgccagcccaggagaagaacttcaccacagcaccagccatctgccacgatggaaaggcacactttcctagggagggcgtgttcgtgtctaacggcacccactggtttgtgacacagcgcaatttctacgagccacagatcatcaccacagacaatacattcgtgagcggcaactgtgatgtggtgatcggcatcgtgaacaataccgtgtatgatccactgcagcccgagctggactcctttaaggaggagctggataagtacttcaagaatcacacctctcccgacgtggatctgggcgacatctccggcatcaatgcctctgtggtgaacatccagaaggagatcgaccggctgaacgaggtggccaagaatctgaacgagagcctgatcgatctgcaggagctgggcaagtatgagcagtacatcaagggctctggcagagagaacctgtatttccagggaggaggaggcagcggatacatccctgaggcaccaagggacggacaggcctacgtgcgcaaggatggcgagtgggtgctgctgtccacctttctgggccatcatcaccaccaccaccaccactga

SEQ ID NO: 5078 - DNA, 3846 bp, Artificial Sequence
  Description of Artificial Sequence: Synthetic polynucleotide
atgggcatcctgccaagcccaggaatgcccgccctgctgtctctggtgagcctgctgtccgtgctgctgatgggatgcgtggcagagacaggcacacagtgcgtgaacctgaccacaaggacccagctgccccctgcctataccaattctttcacacggggcgtgtactatcccgacaaggtgtttagaagctccgtgctgcactccacacaggatctgtttctgcctttcttttctaacgtgacctggttccacgccatccacgtgtccggcaccaatggcacaaagcggttcgacaatcccgtgctgccttttaacgatggcgtgtacttcgccagcaccgagaagtccaacatcatcagaggctggatctttggcaccacactggactctaagacacagagcctgctgatcgtgaacaatgccaccaacgtggtgatcaaggtgtgcgagttccagttttgtaatgatccattcctgggcgtgtactatcacaagaacaataagtcctggatggagtctgagtttcgcgtgtattctagcgccaacaattgcacatttgagtacgtgagccagcccttcctgatggacctggagggcaagcagggcaatttcaagaacctgagggagttcgtgtttaagaatatcgatggctacttcaagatctacagcaagcacaccccaatcaacctggtgcgcgacctgccacagggattctccgccctggagccactggtggatctgcccatcggcatcaacatcacccggtttcagacactgctggccctgcacagatcctacctgacaccaggcgactcctctagcggatggaccgcaggagctgccgcctactatgtgggctatctgcagccccggaccttcctgctgaagtacaacgagaatggcaccatcacagacgcagtggattgcgccctggaccccctgtctgagacaaagtgtacactgaagagctttaccgtggagaagggcatctatcagacaagcaatttcagggtgcagcctaccgagtccatcgtgcgctttcccaatatcacaaacctgtgcccttttggcgaggtgttcaacgccaccagattcgccagcgtgtacgcctggaatcggaagagaatctccaactgcgtggccgactattctgtgctgtactcatccgcctctttcagcacctttaagtgctatggcgtgtctcccacaaagctgaatgatctgtgctttaccaacgtgtacgccgatagcttcgtgatcaggggagacgaagtgagacagatcgcaccaggacagacaggaaagatcgcagactacaattataagctgcctgacgatttcaccggctgcgtgatcgcctggaactccaacaatctggattctaaagtgggcggcaactacaattatctgtacaggctgtttcgcaagtccaatctgaagccattcgagcgggacatctccacagagatctaccaggccggctctaccccctgcaatggcgtggagggctttaactgttatttccctctgcagtcttacggcttccagccaacaaacggcgtgggctatcagccctacagagtggtggtgctgtcctttgagctgctgcacgcaccagcaacagtgtgcggcccaaagaagtctaccaatctggtgaagaacaagtgcgtgaacttcaacttcaacggactgaccggcacaggcgtgctgaccgagagcaataagaagttcctgccttttcagcagttcggcagggacatcgcagataccacagacgccgtgcgcgaccctcagaccctggagatcctggacatcacaccatgcagcttcggcggcgtgtccgtgatcacaccaggcaccaatacatccaaccaggtggccgtgctgtatcaggacgtgaattgtaccgaggtgcccgtggcaatccacgcagatcagctgacccctacatggcgggtgtactctaccggcagcaacgtgttccagacaagagccggatgcctgatcggagcagagcacgtgaacaatagctatgagtgcgacatccctatcggcgccggcatctgtgccagctaccagacccagacaaactccccatctggagcaggctccgtggccagccagtccatcatcgcctataccatgagcctgggcgccgagaacagcgtggcctactccaacaattctatcgccatccctaccaacttcacaatcagcgtgaccacagagatcctgccagtgtctatgaccaagacaagcgtggactgcacaatgtatatctgtggcgatagcaccgagtgctccaacctgctgctgcagtacggctccttttgtacccagctgaatagagccctgacaggcatcgccgtggagcaggataagaacacacaggaggtgttcgcccaggtgaagcagatctacaagaccccacccatcaaggactttggcggcttcaacttcagccagatcctgcctgatccaagcaagccctccaagaggtcttttatcgaggacctgctgttcaacaaggtgaccctggccgatgccggcttcatcaagcagtatggagattgcctgggagacatcgcagcccgcgacctgatctgtgcccagaagtttaatggcctgaccgtgctgcctccactgctgacagatgagatgatcgcccagtacacatctgccctgctggccggcaccatcacaagcggatggaccttcggcgcaggagccgccctgcagatcccttttgccatgcagatggcctataggttcaacggcatcggcgtgacccagaatgtgctgtacgagaaccagaagctgatcgccaatcagtttaacagcgccatcggcaagatccaggactctctgtcctctacagccagcgccctgggcaagctgcaggatgtggtgaatcagaacgcccaggccctgaataccctggtgaagcagctgagctccaacttcggcgccatctctagcgtgctgaatgacatcctgagccggctggacccccctgaggcagaggtgcagatcgacaggctgatcacaggccgcctgcagagcctgcagacctacgtgacacagcagctgatcagggcagcagagatcagagcctccgccaatctggccgccaccaagatgagcgagtgcgtgctgggacagtccaagagggtggacttttgtggcaagggctatcacctgatgtctttcccacagagcgcccctcacggcgtggtgtttctgcacgtgacctacgtgccagcccaggagaagaacttcaccacagcaccagccatctgccacgatggaaaggcacactttcctagggagggcgtgttcgtgtctaacggcacccactggtttgtgacacagcgcaatttctacgagccacagatcatcaccacagacaatacattcgtgagcggcaactgtgatgtggtgatcggcatcgtgaacaataccgtgtatgatccactgcagcccgagctggactcctttaaggaggagctggataagtacttcaagaatcacacctctcccgacgtggatctgggcgacatctccggcatcaatgcctctgtggtgaacatccagaaggagatcgaccggctgaacgaggtggccaagaatctgaacgagagcctgatcgatctgcaggagctgggcaagtatgagcagtacatcaagggctctggcagagagaacctgtatttccagggaggaggaggcagcggatacatccctgaggcaccaagggacggacaggcctacgtgcgcaaggatggcgagtgggtgctgctgtccacctttctgggccatcatcaccaccaccaccaccactga

SEQ ID NO: 5079 - DNA, 3846 bp, Artificial Sequence
  Description of Artificial Sequence: Synthetic polynucleotide
atgggcatcctgccaagcccaggaatgcccgccctgctgtctctggtgagcctgctgtccgtgctgctgatgggatgcgtggcagagacaggcacacagtgcgtgaacctgaccacaaggacccagctgccccctgcctataccaattctttcacacggggcgtgtactatcccgacaaggtgtttagaagctccgtgctgcactccacacaggatctgtttctgcctttcttttctaacgtgacctggttccacgccatccacgtgtccggcaccaatggcacaaagcggttcgacaatcccgtgctgccttttaacgatggcgtgtacttcgccagcaccgagaagtccaacatcatcagaggctggatctttggcaccacactggactctaagacacagagcctgctgatcgtgaacaatgccaccaacgtggtgatcaaggtgtgcgagttccagttttgtaatgatccattcctgggcgtgtactatcacaagaacaataagtcctggatggagtctgagtttcgcgtgtattctagcgccaacaattgcacatttgagtacgtgagccagcccttcctgatggacctggagggcaagcagggcaatttcaagaacctgagggagttcgtgtttaagaatatcgatggctacttcaagatctacagcaagcacaccccaatcaacctggtgcgcgacctgccacagggattctccgccctggagccactggtggatctgcccatcggcatcaacatcacccggtttcagacactgctggccctgcacagatcctacctgacaccaggcgactcctctagcggatggaccgcaggagctgccgcctactatgtgggctatctgcagccccggaccttcctgctgaagtacaacgagaatggcaccatcacagacgcagtggattgcgccctggaccccctgtctgagacaaagtgtacactgaagagctttaccgtggagaagggcatctatcagacaagcaatttcagggtgcagcctaccgagtccatcgtgcgctttcccaatatcacaaacctgtgcccttttggcgaggtgttcaacgccaccagattcgccagcgtgtacgcctggaatcggaagagaatctccaactgcgtggccgactattctgtgctgtacaactccgcctctttcagcacctttaagtgctatggcgtgtctcccacaaagctgaatgatctgtgctttaccaacgtgtacgccgatagcttcgtgatcaggggagacgaagtgagacagatcgcaccaggacagacaggaaagatcgcagactacaattataagctgcctgacgatttcaccggctgcgtgatcgcctggaactccaacaatctggattctaaagtgggcggcaactacaattatctgtacaggctgtttcgcaagtccaatctgaagccattcgagcgggacatctccacagagatctaccaggccggctctaccccctgcaatggcgtggagggctttaactgttatttccctctgcagtcttacggcttccagccaacaaacggcgtgggctatcagccctacagagtggtggtgctgtcctttgagctgctgcacgcaccagcaacagtgtgcggcccaaagaagtctaccaatctggtgaagaacaagtgcgtgaacttcaacttcaacggactgaccggcacaggcgtgctgaccgagagcaataagaagttcctgccttttcagcagttcggcagggacatcgcagataccacagacgccgtgcgcgaccctcagaccctggagatcctggacatcacaccatgcagcttcggcggcgtgtccgtgatcacaccaggcaccaatacatccaaccaggtggccgtgctgtatcaggacgtgaattgtaccgaggtgcccgtggcaatccacgcagatcagctgacccctacatggcgggtgtactctaccggcagcaacgtgttccagacaagagccggatgcctgatcggagcagagcacgtgaacaatagctatgagtgcgacatccctatcggcgccggcatctgtgccagctaccagacccagacaaactccccatctggagcaggctccgtggccagccagtccatcatcgcctataccatgagcctgggcgccgagaacagcgtggcctactccaacaattctatcgccatccctaccaacttcacaatcagcgtgaccacagagatcctgccagtgtctatgaccaagacaagcgtggactgcacaatgtatatctgtggcgatagcaccgagtgctccaacctgctgctgcagtacggctccttttgtacccagctgaatagagccctgacaggcatcgccgtggagcaggataagaacacacaggaggtgttcgcccaggtgaagcagatctacaagaccccacccatcaaggactttggcggcttcaacttcagccagatcctgcctgatccaagcaagccctccaagaggtcttttatcgaggacctgctgttcaacaaggtgaccctggccgatgccggcttcatcaagcagtatggagattgcctgggagacatcgcagcccgcgacctgatctgtgcccagaagtttaatggcctgaccgtgctgcctccactgctgacagatgagatgatcgcccagtacacatctgccctgctggccggcaccatcacaagcggatggaccttcggcgcaggagccgccctgcagatcccttttgccatgcagatggcctataggttcaacggcatcggcgtgacccagaatgtgctgtacgagaaccagaagctgatcgccaatcagtttaacagcgccatcggcaagatccaggactctctgtcctctacagccagcgccctgggcaagctgcaggatgtggtgaatcagaacgcccaggccctgaataccctggtgaagcagctgagctccaacttcggcgccatctctagcgtgctgaatgacatcctgagccggctggacccccctgaggcagaggtgcagatcgacaggctgatcacaggccgcctgcagagcctgcagacctacgtgacacagcagctgatcagggcagcagagatcagagcctccgccaatctggccgccaccaagatgagcgagtgcgtgctgggacagtccaagagggtggacttttgtggcaagggctatcacctgatgtctttcccacagagcgcccctcacggcgtggtgtttctgcacgtgacctacgtgccagcccagatgaagaacttcaccacagcaccagccatctgccacgatggaaaggcacactttcctagggagggcgtgttcgtgtctaacggcacccactggtttgtgacacagcgcaatttctacgagccacagatcatcaccacagacaatacattcgtgagcggcaactgtgatgtggtgatcggcatcgtgaacaataccgtgtatgatccactgcagcccgagctggactcctttaaggaggagctggataagtacttcaagaatcacacctctcccgacgtggatctgggcgacatctccggcatcaatgcctctgtggtgaacatccagaaggagatcgaccggctgaacgaggtggccaagaatctgaacgagagcctgatcgatctgcaggagctgggcaagtatgagcagtacatcaagggctctggcagagagaacctgtatttccagggaggaggaggcagcggatacatccctgaggcaccaagggacggacaggcctacgtgcgcaaggatggcgagtgggtgctgctgtccacctttctgggccatcatcaccaccaccaccaccactga

SEQ ID NO: 5080 - DNA, 3846 bp, Artificial Sequence
  Description of Artificial Sequence: Synthetic polynucleotide
atgggcatcctgccaagcccaggaatgcccgccctgctgtctctggtgagcctgctgtccgtgctgctgatgggatgcgtggcagagacaggcacacagtgcgtgaacctgaccacaaggacccagctgccccctgcctataccaattctttcacacggggcgtgtactatcccgacaaggtgtttagaagctccgtgctgcactccacacaggatctgtttctgcctttcttttctaacgtgacctggttccacgccatccacgtgtccggcaccaatggcacaaagcggttcgacaatcccgtgctgccttttaacgatggcgtgtacttcgccagcaccgagaagtccaacatcatcagaggctggatctttggcaccacactggactctaagacacagagcctgctgatcgtgaacaatgccaccaacgtggtgatcaaggtgtgcgagttccagttttgtaatgatccattcctgggcgtgtactatcacaagaacaataagtcctggatggagtctgagtttcgcgtgtattctagcgccaacaattgcacatttgagtacgtgagccagcccttcctgatggacctggagggcaagcagggcaatttcaagaacctgagggagttcgtgtttaagaatatcgatggctacttcaagatctacagcaagcacaccccaatcaacctggtgcgcgacctgccacagggattctccgccctggagccactggtggatctgcccatcggcatcaacatcacccggtttcagacactgctggccctgcacagatcctacctgacaccaggcgactcctctagcggatggaccgcaggagctgccgcctactatgtgggctatctgcagccccggaccttcctgctgaagtacaacgagaatggcaccatcacagacgcagtggattgcgccctggaccccctgtctgagacaaagtgtacactgaagagctttaccgtggagaagggcatctatcagacaagcaatttcagggtgcagcctaccgagtccatcgtgcgctttcccaatatcacaaacctgtgcccttttggcgaggtgttcaacgccaccagattcgccagcgtgtacgcctggaatcggaagagaatctccaactgcgtggccgactattctgtgctgtacaactccgcctctttcagcacctttaagtgctatggcgtgtctcccacaaagctgaatgatctgtgctttaccaacgtgtacgccgatagcttcgtgatcaggggagacgaagtgagacagatcgcaccaggacagacaggaaagatcgcagactacaattataagctgcctgacgatttcaccggctgcgtgatcgcctggaactccaacaatctggattctaaaaatggcggcaactacaattatctgtacaggctgtttcgcaagtccaatctgaagccattcgagcgggacatctccacagagatctaccaggccggctctaccccctgcaatggcgtggagggctttaactgttatttccctctgcagtcttacggcttccagccaacaaacggcgtgggctatcagccctacagagtggtggtgctgtcctttgagctgctgcacgcaccagcaacagtgtgcggcccaaagaagtctaccaatctggtgaagaacaagtgcgtgaacttcaacttcaacggactgaccggcacaggcgtgctgaccgagagcaataagaagttcctgccttttcagcagttcggcagggacatcgcagataccacagacgccgtgcgcgaccctcagaccctggagatcctggacatcacaccatgcagcttcggcggcgtgtccgtgatcacaccaggcaccaatacatccaaccaggtggccgtgctgtatcaggacgtgaattgtaccgaggtgcccgtggcaatccacgcagatcagctgacccctacatggcgggtgtactctaccggcagcaacgtgttccagacaagagccggatgcctgatcggagcagagcacgtgaacaatagctatgagtgcgacatccctatcggcgccggcatctgtgccagctaccagacccagacaaactccccatctggagcaggctccgtggccagccagtccatcatcgcctataccatgagcctgggcgccgagaacagcgtggcctactccaacaattctatcgccatccctaccaacttcacaatcagcgtgaccacagagatcctgccagtgtctatgaccaagacaagcgtggactgcacaatgtatatctgtggcgatagcaccgagtgctccaacctgctgctgcagtacggctccttttgtacccagctgaatagagccctgacaggcatcgccgtggagcaggataagaacacacaggaggtgttcgcccaggtgaagcagatctacaagaccccacccatcaaggactttggcggcttcaacttcagccagatcctgcctgatccaagcaagccctccaagaggtcttttatcgaggacctgctgttcaacaaggtgaccctggccgatgccggcttcatcaagcagtatggagattgcctgggagacatcgcagcccgcgacctgatctgtgcccagaagtttaatggcctgaccgtgctgcctccactgctgacagatgagatgatcgcccagtacacatctgccctgctggccggcaccatcacaagcggatggaccttcggcgcaggagccgccctgcagatcccttttgccatgcagatggcctataggttcaacggcatcggcgtgacccagaatgtgctgtacgagaaccagaagctgatcgccaatcagtttaacagcgccatcggcaagatccaggactctctgtcctctacagccagcgccctgggcaagctgcaggatgtggtgaatcagaacgcccaggccctgaataccctggtgaagcagctgagctccaacttcggcgccatctctagcgtgctgaatgacatcctgagccggctggacccccctgaggcagaggtgcagatcgacaggctgatcacaggccgcctgcagagcctgcagacctacgtgacacagcagctgatcagggcagcagagatcagagcctccgccaatctggccgccaccaagatgagcgagtgcgtgctgggacagtccaagagggtggacttttgtggcaagggctatcacctgatgtctttcccacagagcgcccctcacggcgtggtgtttctgcacgtgacctacgtgccagcccaggagaagaacttcaccacagcaccagccatctgccacgatggaaaggcacactttcctagggagggcgtgttcgtgtctaacggcacccactggtttgtgacacagcgcaatttctacgagccacagatcatcaccacagacaatacattcgtgagcggcaactgtgatgtggtgatcggcatcgtgaacaataccgtgtatgatccactgcagcccgagctggactcctttaaggaggagctggataagtacttcaagaatcacacctctcccgacgtggatctgggcgacatctccggcatcaatgcctctgtggtgaacatccagaaggagatcgaccggctgaacgaggtggccaagaatctgaacgagagcctgatcgatctgcaggagctgggcaagtatgagcagtacatcaagggctctggcagagagaacctgtatttccagggaggaggaggcagcggatacatccctgaggcaccaagggacggacaggcctacgtgcgcaaggatggcgagtgggtgctgctgtccacctttctgggccatcatcaccaccaccaccaccactga

SEQ ID NO: 5081 - DNA, 3846 bp, Artificial Sequence
  Description of Artificial Sequence: Synthetic polynucleotide
atgggcatcctgccaagcccaggaatgcccgccctgctgtctctggtgagcctgctgtccgtgctgctgatgggatgcgtggcagagacaggcacacagtgcgtgaacctgaccacaaggacccagctgccccctgcctataccaattctttcacacggggcgtgtactatcccgacaaggtgtttagaagctccgtgctgcactccacacaggatctgtttctgcctttcttttctaacgtgacctggttccacgccatccacgtgtccggcaccaatggcacaaagcggttcgacaatcccgtgctgccttttaacgatggcgtgtacttcgccagcaccgagaagtccaacatcatcagaggctggatctttggcaccacactggactctaagacacagagcctgctgatcgtgaacaatgccaccaacgtggtgatcaaggtgtgcgagttccagttttgtaatgatccattcctgggcgtgtactatcacaagaacaataagtcctggatggagtctgagtttcgcgtgtattctagcgccaacaattgcacatttgagtacgtgagccagcccttcctgatggacctggagggcaagcagggcaatttcaagaacctgagggagttcgtgtttaagaatatcgatggctacttcaagatctacagcaagcacaccccaatcaacctggtgcgcgacctgccacagggattctccgccctggagccactggtggatctgcccatcggcatcaacatcacccggtttcagacactgctggccctgcacagatcctacctgacaccaggcgactcctctagcggatggaccgcaggagctgccgcctactatgtgggctatctgcagccccggaccttcctgctgaagtacaacgagaatggcaccatcacagacgcagtggattgcgccctggaccccctgtctgagacaaagtgtacactgaagagctttaccgtggagaagggcatctatcagacaagcaatttcagggtgcagcctaccgagtccatcgtgcgctttcccaatatcacaaacctgtgcccttttggcgaggtgttcaacgccaccagattcgccagcgtgtacgcctggaatcggaagagaatctccaactgcgtggccgactattctatactgtacaactccgcctctttcagcacctttaagtgctatggcgtgtctcccacaaagctgaatgatctgtgctttaccaacgtgtacgccgatagcttcgtgatcaggggagacgaagtgagacagatcgcaccaggacagacaggaaagatcgcagactacaattataagctgcctgacgatttcaccggctgcgtgatcgcctggaactccaacaatctggattctaaagtgggcggcaactacaattatctgtacaggctgtttcgcaagtccaatctgaagccattcgagcgggacatctccacagagatctaccaggccggctctaccccctgcaatggcgtggagggctttaactgttatttccctctgcagtcttacggcttccagccaacaaacggcgtgggctatcagccctacagagtggtggtgctgtcctttgagctgctgcacgcaccagcaacagtgtgcggcccaaagaagtctaccaatctggtgaagaacaagtgcgtgaacttcaacttcaacggactgaccggcacaggcgtgctgaccgagagcaataagaagttcctgccttttcagcagttcggcagggacatcgcagataccacagacgccgtgcgcgaccctcagaccctggagatcctggacatcacaccatgcagcttcggcggcgtgtccgtgatcacaccaggcaccaatacatccaaccaggtggccgtgctgtatcaggacgtgaattgtaccgaggtgcccgtggcaatccacgcagatcagctgacccctacatggcgggtgtactctaccggcagcaacgtgttccagacaagagccggatgcctgatcggagcagagcacgtgaacaatagctatgagtgcgacatccctatcggcgccggcatctgtgccagctaccagacccagacaaactccccatctggagcaggctccgtggccagccagtccatcatcgcctataccatgagcctgggcgccgagaacagcgtggcctactccaacaattctatcgccatccctaccaacttcacaatcagcgtgaccacagagatcctgccagtgtctatgaccaagacaagcgtggactgcacaatgtatatctgtggcgatagcaccgagtgctccaacctgctgctgcagtacggctccttttgtacccagctgaatagagccctgacaggcatcgccgtggagcaggataagaacacacaggaggtgttcgcccaggtgaagcagatctacaagaccccacccatcaaggactttggcggcttcaacttcagccagatcctgcctgatccaagcaagccctccaagaggtcttttatcgaggacctgctgttcaacaaggtgaccctggccgatgccggcttcatcaagcagtatggagattgcctgggagacatcgcagcccgcgacctgatctgtgcccagaagtttaatggcctgaccgtgctgcctccactgctgacagatgagatgatcgcccagtacacatctgccctgctggccggcaccatcacaagcggatggaccttcggcgcaggagccgccctgcagatcccttttgccatgcagatggcctataggttcaacggcatcggcgtgacccagaatgtgctgtacgagaaccagaagctgatcgccaatcagtttaacagcgccatcggcaagatccaggactctctgtcctctacagccagcgccctgggcaagctgcaggatgtggtgaatcagaacgcccaggccctgaataccctggtgaagcagctgagctccaacttcggcgccatctctagcgtgctgaatgacatcctgagccggctggacccccctgaggcagaggtgcagatcgacaggctgatcacaggccgcctgcagagcctgcagacctacgtgacacagcagctgatcagggcagcagagatcagagcctccgccaatctggccgccaccaagatgagcgagtgcgtgctgggacagtccaagagggtggacttttgtggcaagggctatcacctgatgtctttcccacagagcgcccctcacggcgtggtgtttctgcacgtgacctacgtgccagcccaggagaagaacttcaccacagcaccagccatctgccacgatggaaaggcacactttcctagggagggcgtgttcgtgtctaacggcacccactggtttgtgacacagcgcaatttctacgagccacagatcatcaccacagacaatacattcgtgagcggcaactgtgatgtggtgatcggcatcgtgaacaataccgtgtatgatccactgcagcccgagctggactcctttaaggaggagctggataagtacttcaagaatcacacctctcccgacgtggatctgggcgacatctccggcatcaatgcctctgtggtgaacatccagaaggagatcgaccggctgaacgaggtggccaagaatctgaacgagagcctgatcgatctgcaggagctgggcaagtatgagcagtacatcaagggctctggcagagagaacctgtatttccagggaggaggaggcagcggatacatccctgaggcaccaagggacggacaggcctacgtgcgcaaggatggcgagtgggtgctgctgtccacctttctgggccatcatcaccaccaccaccaccactga

SEQ ID NO: 5082 - DNA, 3846 bp, Artificial Sequence
  Description of Artificial Sequence: Synthetic polynucleotide
atgggcatcctgccaagcccaggaatgcccgccctgctgtctctggtgagcctgctgtccgtgctgctgatgggatgcgtggcagagacaggcacacagtgcgtgaacctgaccacaaggacccagctgccccctgcctataccaattctttcacacggggcgtgtactatcccgacaaggtgtttagaagctccgtgctgcactccacacaggatctgtttctgcctttcttttctaacgtgacctggttccacgccatccacgtgtccggcaccaatggcacaaagcggttcgacaatcccgtgctgccttttaacgatggcgtgtacttcgccagcaccgagaagtccaacatcatcagaggctggatctttggcaccacactggactctaagacacagagcctgctgatcgtgaacaatgccaccaacgtggtgatcaaggtgtgcgagttccagttttgtaatgatccattcctgggcgtgtactatcacaagaacaataagtcctggatggagtctgagtttcgcgtgtattctagcgccaacaattgcacatttgagtacgtgagccagcccttcctgatggacctggagggcaagcagggcaatttcaagaacctgagggagttcgtgtttaagaatatcgatggctacttcaagatctacagcaagcacaccccaatcaacctggtgcgcgacctgccacagggattctccgccctggagccactggtggatctgcccatcggcatcaacatcacccggtttcagacactgctggccctgcacagatcctacctgacaccaggcgactcctctagcggatggaccgcaggagctgccgcctactatgtgggctatctgcagccccggaccttcctgctgaagtacaacgagaatggcaccatcacagacgcagtggattgcgccctggaccccctgtctgagacaaagtgtacactgaagagctttaccgtggagaagggcatctatcagacaagcaatttcagggtgcagcctaccgagtccatcgtgcgctttcccaatatcacaaacctgtgcccttttggcgaggtgttcaacgccaccagattcgccagcgtgtacgcctggaatcggaagagaatctccaactgcgtggccgactattctgtgctgtacaactccgcctctttcagcacctttaagtgctatggcgtgtctcccacaaagctgaatgatctgtgctttaccaacgtgtacgccgatagcttcgtgatcaggggagacgaagtgagacagatcgcaccaggacagacaggatgtatcgcagactacaattataagctgcctgacgatttcaccggctgcgtgatcgcctggaactccaacaatctggattctaaagtgggcggcaactacaattatctgtacaggctgtttcgcaagtccaatctgaagccattcgagcgggacatctccacagagatctaccaggccggctctaccccctgcaatggcgtggagggctttaactgttatttccctctgcagtcttacggcttccagccaacaaacggcgtgggctatcagccctacagagtggtggtgctgtcctttgagctgctgcacgcaccagcaacagtgtgcggcccaaagaagtctaccaatctggtgaagaacaagtgcgtgaacttcaacttcaacggactgaccggcacaggcgtgctgaccgagagcaataagaagttcctgccttttcagcagttcggcagggacatcgcagataccacagacgccgtgcgcgaccctcagaccctggagatcctggacatcacaccatgcagcttcggcggcgtgtccgtgatcacaccaggcaccaatacatccaaccaggtggccgtgctgtatcaggacgtgaattgtaccgaggtgcccgtggcaatccacgcagatcagctgacccctacatggcgggtgtactctaccggcagcaacgtgttccagacaagagccggatgcctgatcggagcagagcacgtgaacaatagctatgagtgcgacatccctatcggcgccggcatctgtgccagctaccagacccagacaaactccccatctggagcaggctccgtggccagccagtccatcatcgcctataccatgagcctgggcgccgagaacagcgtggcctactccaacaattctatcgccatccctaccaacttcacaatcagcgtgaccacagagatcctgccagtgtctatgaccaagacaagcgtggactgcacaatgtatatctgtggcgatagcaccgagtgctccaacctgctgctgcagtacggctccttttgtacccagctgaatagagccctgacaggcatcgccgtggagcaggataagaacacacaggaggtgttcgcccaggtgaagcagatctacaagaccccacccatcaaggactttggcggcttcaacttcagccagatcctgcctgatccaagcaagccctccaagaggtcttttatcgaggacctgctgttcaacaaggtgaccctggccgatgccggcttcatcaagcagtatggagattgcctgggagacatcgcagcccgcgacctgatctgtgcccagaagtttaatggcctgaccgtgctgcctccactgctgacagatgagatgatcgcccagtacacatctgccctgctggccggcaccatcacaagcggatggaccttcggcgcaggagccgccctgcagatcccttttgccatgcagatggcctataggttcaacggcatcggcgtgacccagaatgtgctgtacgagaaccagaagctgatcgccaatcagtttaacagcgccatcggcaagatccaggactctctgtcctctacagccagcgccctgggcaagctgcaggatgtggtgaatcagaacgcccaggccctgaataccctggtgaagcagctgagctccaacttcggcgccatctctagcgtgctgaatgacatcctgagccggctggacccccctgaggcagaggtgcagatcgacaggctgatcacaggccgcctgcagagcctgcagacctacgtgacacagcagctgatcagggcagcagagatcagagcctccgccaatctggccgccaccaagatgagcgagtgcgtgctgggacagtccaagagggtggacttttgtggcaagggctatcacctgatgtctttcccacagagcgcccctcacggcgtggtgtttctgcacgtgacctacgtgccagcccaggagaagaacttcaccacagcaccagccatctgccacgatggaaaggcacactttcctagggagggcgtgttcgtgtctaacggcacccactggtttgtgacacagcgcaatttctacgagccacagatcatcaccacagacaatacattcgtgagcggcaactgtgatgtggtgatcggcatcgtgaacaataccgtgtatgatccactgcagcccgagctggactcctttaaggaggagctggataagtacttcaagaatcacacctctcccgacgtggatctgggcgacatctccggcatcaatgcctctgtggtgaacatccagaaggagatcgaccggctgaacgaggtggccaagaatctgaacgagagcctgatcgatctgcaggagctgggcaagtatgagcagtacatcaagggctctggcagagagaacctgtatttccagggaggaggaggcagcggatacatccctgaggcaccaagggacggacaggcctacgtgcgcaaggatggcgagtgggtgctgctgtccacctttctgggccatcatcaccaccaccaccaccactga

SEQ ID NO: 5083 - DNA, 3846 bp, Artificial Sequence
  Description of Artificial Sequence: Synthetic polynucleotide
atgggcatcctgccaagcccaggaatgcccgccctgctgtctctggtgagcctgctgtccgtgctgctgatgggatgcgtggcagagacaggcacacagtgcgtgaacctgaccacaaggacccagctgccccctgcctataccaattctttcacacggggcgtgtactatcccgacaaggtgtttagaagctccgtgctgcactccacacaggatctgtttctgcctttcttttctaacgtgacctggttccacgccatccacgtgtccggcaccaatggcacaaagcggttcgacaatcccgtgctgccttttaacgatggcgtgtacttcgccagcaccgagaagtccaacatcatcagaggctggatctttggcaccacactggactctaagacacagagcctgctgatcgtgaacaatgccaccaacgtggtgatcaaggtgtgcgagttccagttttgtaatgatccattcctgggcgtgtactatcacaagaacaataagtcctggatggagtctgagtttcgcgtgtattctagcgccaacaattgcacatttgagtacgtgagccagcccttcctgatggacctggagggcaagcagggcaatttcaagaacctgagggagttcgtgtttaagaatatcgatggctacttcaagatctacagcaagcacaccccaatcaacctggtgcgcgacctgccacagggattctccgccctggagccactggtggatctgcccatcggcatcaacatcacccggtttcagacactgctggccctgcacagatcctacctgacaccaggcgactcctctagcggatggaccgcaggagctgccgcctactatgtgggctatctgcagccccggaccttcctgctgaagtacaacgagaatggcaccatcacagacgcagtggattgcgccctggaccccctgtctgagacaaagtgtacactgaagagctttaccgtggagaagggcatctatcagacaagcaatttcagggtgcagcctaccgagtccatcgtgcgctttcccaatatcacaaacctgtgcccttttggcgaggtgttcaacgccaccagattcgccagcgtgtacgcctggaatcggaagagaatctccaactgcgtggccgactattctgtgctgtacaactccgcctctttcagcacctttaagtgctatggcgtgtctcccacaaagctgaatgatctgtgctttaccaacgtgtacgccgatttattcgtgatcaggggagacgaagtgagacagatcgcaccaggacagacaggaaagatcgcagactacaattataagctgcctgacgatttcaccggctgcgtgatcgcctggaactccaacaatctggattctaaagtgggcggcaactacaattatctgtacaggctgtttcgcaagtccaatctgaagccattcgagcgggacatctccacagagatctaccaggccggctctaccccctgcaatggcgtggagggctttaactgttatttccctctgcagtcttacggcttccagccaacaaacggcgtgggctatcagccctacagagtggtggtgctgtcctttgagctgctgcacgcaccagcaacagtgtgcggcccaaagaagtctaccaatctggtgaagaacaagtgcgtgaacttcaacttcaacggactgaccggcacaggcgtgctgaccgagagcaataagaagttcctgccttttcagcagttcggcagggacatcgcagataccacagacgccgtgcgcgaccctcagaccctggagatcctggacatcacaccatgcagcttcggcggcgtgtccgtgatcacaccaggcaccaatacatccaaccaggtggccgtgctgtatcaggacgtgaattgtaccgaggtgcccgtggcaatccacgcagatcagctgacccctacatggcgggtgtactctaccggcagcaacgtgttccagacaagagccggatgcctgatcggagcagagcacgtgaacaatagctatgagtgcgacatccctatcggcgccggcatctgtgccagctaccagacccagacaaactccccatctggagcaggctccgtggccagccagtccatcatcgcctataccatgagcctgggcgccgagaacagcgtggcctactccaacaattctatcgccatccctaccaacttcacaatcagcgtgaccacagagatcctgccagtgtctatgaccaagacaagcgtggactgcacaatgtatatctgtggcgatagcaccgagtgctccaacctgctgctgcagtacggctccttttgtacccagctgaatagagccctgacaggcatcgccgtggagcaggataagaacacacaggaggtgttcgcccaggtgaagcagatctacaagaccccacccatcaaggactttggcggcttcaacttcagccagatcctgcctgatccaagcaagccctccaagaggtcttttatcgaggacctgctgttcaacaaggtgaccctggccgatgccggcttcatcaagcagtatggagattgcctgggagacatcgcagcccgcgacctgatctgtgcccagaagtttaatggcctgaccgtgctgcctccactgctgacagatgagatgatcgcccagtacacatctgccctgctggccggcaccatcacaagcggatggaccttcggcgcaggagccgccctgcagatcccttttgccatgcagatggcctataggttcaacggcatcggcgtgacccagaatgtgctgtacgagaaccagaagctgatcgccaatcagtttaacagcgccatcggcaagatccaggactctctgtcctctacagccagcgccctgggcaagctgcaggatgtggtgaatcagaacgcccaggccctgaataccctggtgaagcagctgagctccaacttcggcgccatctctagcgtgctgaatgacatcctgagccggctggacccccctgaggcagaggtgcagatcgacaggctgatcacaggccgcctgcagagcctgcagacctacgtgacacagcagctgatcagggcagcagagatcagagcctccgccaatctggccgccaccaagatgagcgagtgcgtgctgggacagtccaagagggtggacttttgtggcaagggctatcacctgatgtctttcccacagagcgcccctcacggcgtggtgtttctgcacgtgacctacgtgccagcccaggagaagaacttcaccacagcaccagccatctgccacgatggaaaggcacactttcctagggagggcgtgttcgtgtctaacggcacccactggtttgtgacacagcgcaatttctacgagccacagatcatcaccacagacaatacattcgtgagcggcaactgtgatgtggtgatcggcatcgtgaacaataccgtgtatgatccactgcagcccgagctggactcctttaaggaggagctggataagtacttcaagaatcacacctctcccgacgtggatctgggcgacatctccggcatcaatgcctctgtggtgaacatccagaaggagatcgaccggctgaacgaggtggccaagaatctgaacgagagcctgatcgatctgcaggagctgggcaagtatgagcagtacatcaagggctctggcagagagaacctgtatttccagggaggaggaggcagcggatacatccctgaggcaccaagggacggacaggcctacgtgcgcaaggatggcgagtgggtgctgctgtccacctttctgggccatcatcaccaccaccaccaccactga

SEQ ID NO: 5084 - DNA, 3846 bp, Artificial Sequence
  Description of Artificial Sequence: Synthetic polynucleotide
atgggcatcctgccaagcccaggaatgcccgccctgctgtctctggtgagcctgctgtccgtgctgctgatgggatgcgtggcagagacaggcacacagtgcgtgaacctgaccacaaggacccagctgccccctgcctataccaattctttcacacggggcgtgtactatcccgacaaggtgtttagaagctccgtgctgcactccacacaggatctgtttctgcctttcttttctaacgtgacctggttccacgccatccacgtgtccggcaccaatggcacaaagcggttcgacaatcccgtgctgccttttaacgatggcgtgtacttcgccagcaccgagaagtccaacatcatcagaggctggatctttggcaccacactggactctaagacacagagcctgctgatcgtgaacaatgccaccaacgtggtgatcaaggtgtgcgagttccagttttgtaatgatccattcctgggcgtgtactatcacaagaacaataagtcctggatggagtctgagtttcgcgtgtattctagcgccaacaattgcacatttgagtacgtgagccagcccttcctgatggacctggagggcaagcagggcaatttcaagaacctgagggagttcgtgtttaagaatatcgatggctacttcaagatctacagcaagcacaccccaatcaacctggtgcgcgacctgccacagggattctccgccctggagccactggtggatctgcccatcggcatcaacatcacccggtttcagacactgctggccctgcacagatcctacctgacaccaggcgactcctctagcggatggaccgcaggagctgccgcctactatgtgggctatctgcagccccggaccttcctgctgaagtacaacgagaatggcaccatcacagacgcagtggattgcgccctggaccccctgtctgagacaaagtgtacactgaagagctttaccgtggagaagggcatctatcagacaagcaatttcagggtgcagcctaccgagtccatcgtgcgctttactaatatcacaaacctgtgcccttttggcgaggtgttcaacgccaccagattcgccagcgtgtacgcctggaatcggaagagaatctccaactgcgtggccgactattctgtgctgtacaactccgcctctttcagcacctttaagtgctatggcgtgtctcccacaaagctgaatgatctgtgctttaccaacgtgtacgccgatagcttcgtgatcaggggagacgaagtgagacagatcgcaccaggacagacaggaaagatcgcagactacaattataagctgcctgacgatttcaccggctgcgtgatcgcctggaactccaacaatctggattctaaagtgggcggcaactacaattatctgtacaggctgtttcgcaagtccaatctgaagccattcgagcgggacatctccacagagatctaccaggccggctctaccccctgcaatggcgtggagggctttaactgttatttccctctgcagtcttacggcttccagccaacaaacggcgtgggctatcagccctacagagtggtggtgctgtcctttgagctgctgcacgcaccagcaacagtgtgcggcccaaagaagtctaccaatctggtgaagaacaagtgcgtgaacttcaacttcaacggactgaccggcacaggcgtgctgaccgagagcaataagaagttcctgccttttcagcagttcggcagggacatcgcagataccacagacgccgtgcgcgaccctcagaccctggagatcctggacatcacaccatgcagcttcggcggcgtgtccgtgatcacaccaggcaccaatacatccaaccaggtggccgtgctgtatcaggacgtgaattgtaccgaggtgcccgtggcaatccacgcagatcagctgacccctacatggcgggtgtactctaccggcagcaacgtgttccagacaagagccggatgcctgatcggagcagagcacgtgaacaatagctatgagtgcgacatccctatcggcgccggcatctgtgccagctaccagacccagacaaactccccatctggagcaggctccgtggccagccagtccatcatcgcctataccatgagcctgggcgccgagaacagcgtggcctactccaacaattctatcgccatccctaccaacttcacaatcagcgtgaccacagagatcctgccagtgtctatgaccaagacaagcgtggactgcacaatgtatatctgtggcgatagcaccgagtgctccaacctgctgctgcagtacggctccttttgtacccagctgaatagagccctgacaggcatcgccgtggagcaggataagaacacacaggaggtgttcgcccaggtgaagcagatctacaagaccccacccatcaaggactttggcggcttcaacttcagccagatcctgcctgatccaagcaagccctccaagaggtcttttatcgaggacctgctgttcaacaaggtgaccctggccgatgccggcttcatcaagcagtatggagattgcctgggagacatcgcagcccgcgacctgatctgtgcccagaagtttaatggcctgaccgtgctgcctccactgctgacagatgagatgatcgcccagtacacatctgccctgctggccggcaccatcacaagcggatggaccttcggcgcaggagccgccctgcagatcccttttgccatgcagatggcctataggttcaacggcatcggcgtgacccagaatgtgctgtacgagaaccagaagctgatcgccaatcagtttaacagcgccatcggcaagatccaggactctctgtcctctacagccagcgccctgggcaagctgcaggatgtggtgaatcagaacgcccaggccctgaataccctggtgaagcagctgagctccaacttcggcgccatctctagcgtgctgaatgacatcctgagccggctggacccccctgaggcagaggtgcagatcgacaggctgatcacaggccgcctgcagagcctgcagacctacgtgacacagcagctgatcagggcagcagagatcagagcctccgccaatctggccgccaccaagatgagcgagtgcgtgctgggacagtccaagagggtggacttttgtggcaagggctatcacctgatgtctttcccacagagcgcccctcacggcgtggtgtttctgcacgtgacctacgtgccagcccaggagaagaacttcaccacagcaccagccatctgccacgatggaaaggcacactttcctagggagggcgtgttcgtgtctaacggcacccactggtttgtgacacagcgcaatttctacgagccacagatcatcaccacagacaatacattcgtgagcggcaactgtgatgtggtgatcggcatcgtgaacaataccgtgtatgatccactgcagcccgagctggactcctttaaggaggagctggataagtacttcaagaatcacacctctcccgacgtggatctgggcgacatctccggcatcaatgcctctgtggtgaacatccagaaggagatcgaccggctgaacgaggtggccaagaatctgaacgagagcctgatcgatctgcaggagctgggcaagtatgagcagtacatcaagggctctggcagagagaacctgtatttccagggaggaggaggcagcggatacatccctgaggcaccaagggacggacaggcctacgtgcgcaaggatggcgagtgggtgctgctgtccacctttctgggccatcatcaccaccaccaccaccactga

SEQ ID NO: 5085 - DNA, 3846 bp, Artificial Sequence
  Description of Artificial Sequence: Synthetic polynucleotide
atgggcatcctgccaagcccaggaatgcccgccctgctgtctctggtgagcctgctgtccgtgctgctgatgggatgcgtggcagagacaggcacacagtgcgtgaacctgaccacaaggacccagctgccccctgcctataccaattctttcacacggggcgtgtactatcccgacaaggtgtttagaagctccgtgctgcactccacacaggatctgtttctgcctttcttttctaacgtgacctggttccacgccatccacgtgtccggcaccaatggcacaaagcggttcgacaatcccgtgctgccttttaacgatggcgtgtacttcgccagcaccgagaagtccaacatcatcagaggctggatctttggcaccacactggactctaagacacagagcctgctgatcgtgaacaatgccaccaacgtggtgatcaaggtgtgcgagttccagttttgtaatgatccattcctgggcgtgtactatcacaagaacaataagtcctggatggagtctgagtttcgcgtgtattctagcgccaacaattgcacatttgagtacgtgagccagcccttcctgatggacctggagggcaagcagggcaatttcaagaacctgagggagttcgtgtttaagaatatcgatggctacttcaagatctacagcaagcacaccccaatcaacctggtgcgcgacctgccacagggattctccgccctggagccactggtggatctgcccatcggcatcaacatcacccggtttcagacactgctggccctgcacagatcctacctgacaccaggcgactcctctagcggatggaccgcaggagctgccgcctactatgtgggctatctgcagccccggaccttcctgctgaagtacaacgagaatggcaccatcacagacgcagtggattgcgccctggaccccctgtctgagacaaagtgtacactgaagagctttaccgtggagaagggcatctatcagacaagcaatttcagggtgcagcctaccgagtccatcgtgcgctttcccaatatcacaaacctgtgcccttttggcgaggtgttcaacgccaccagattcgccagcgtgtacgcctggaatcggaagagaatctccaactgcgtggccgactattctgtgctgtacaactccgcctctttcagcacctttaagtgctatggcgtgtctcccacaaagctgaatgatctgtgctttaccaacgtgtacgccgatagcttcgtgatcaggggagacgaagtgagacagatcgcaccaggacagacaggacgaatcgcagactacaattataagctgcctgacgatttcaccggctgcgtgatcgcctggaactccaacaatctggattctaaagtgggcggcaactacaattatctgtacaggctgtttcgcaagtccaatctgaagccattcgagcgggacatctccacagagatctaccaggccggctctaccccctgcaatggcgtggagggctttaactgttatttccctctgcagtcttacggcttccagccaacaaacggcgtgggctatcagccctacagagtggtggtgctgtcctttgagctgctgcacgcaccagcaacagtgtgcggcccaaagaagtctaccaatctggtgaagaacaagtgcgtgaacttcaacttcaacggactgaccggcacaggcgtgctgaccgagagcaataagaagttcctgccttttcagcagttcggcagggacatcgcagataccacagacgccgtgcgcgaccctcagaccctggagatcctggacatcacaccatgcagcttcggcggcgtgtccgtgatcacaccaggcaccaatacatccaaccaggtggccgtgctgtatcaggacgtgaattgtaccgaggtgcccgtggcaatccacgcagatcagctgacccctacatggcgggtgtactctaccggcagcaacgtgttccagacaagagccggatgcctgatcggagcagagcacgtgaacaatagctatgagtgcgacatccctatcggcgccggcatctgtgccagctaccagacccagacaaactccccatctggagcaggctccgtggccagccagtccatcatcgcctataccatgagcctgggcgccgagaacagcgtggcctactccaacaattctatcgccatccctaccaacttcacaatcagcgtgaccacagagatcctgccagtgtctatgaccaagacaagcgtggactgcacaatgtatatctgtggcgatagcaccgagtgctccaacctgctgctgcagtacggctccttttgtacccagctgaatagagccctgacaggcatcgccgtggagcaggataagaacacacaggaggtgttcgcccaggtgaagcagatctacaagaccccacccatcaaggactttggcggcttcaacttcagccagatcctgcctgatccaagcaagccctccaagaggtcttttatcgaggacctgctgttcaacaaggtgaccctggccgatgccggcttcatcaagcagtatggagattgcctgggagacatcgcagcccgcgacctgatctgtgcccagaagtttaatggcctgaccgtgctgcctccactgctgacagatgagatgatcgcccagtacacatctgccctgctggccggcaccatcacaagcggatggaccttcggcgcaggagccgccctgcagatcccttttgccatgcagatggcctataggttcaacggcatcggcgtgacccagaatgtgctgtacgagaaccagaagctgatcgccaatcagtttaacagcgccatcggcaagatccaggactctctgtcctctacagccagcgccctgggcaagctgcaggatgtggtgaatcagaacgcccaggccctgaataccctggtgaagcagctgagctccaacttcggcgccatctctagcgtgctgaatgacatcctgagccggctggacccccctgaggcagaggtgcagatcgacaggctgatcacaggccgcctgcagagcctgcagacctacgtgacacagcagctgatcagggcagcagagatcagagcctccgccaatctggccgccaccaagatgagcgagtgcgtgctgggacagtccaagagggtggacttttgtggcaagggctatcacctgatgtctttcccacagagcgcccctcacggcgtggtgtttctgcacgtgacctacgtgccagcccaggagaagaacttcaccacagcaccagccatctgccacgatggaaaggcacactttcctagggagggcgtgttcgtgtctaacggcacccactggtttgtgacacagcgcaatttctacgagccacagatcatcaccacagacaatacattcgtgagcggcaactgtgatgtggtgatcggcatcgtgaacaataccgtgtatgatccactgcagcccgagctggactcctttaaggaggagctggataagtacttcaagaatcacacctctcccgacgtggatctgggcgacatctccggcatcaatgcctctgtggtgaacatccagaaggagatcgaccggctgaacgaggtggccaagaatctgaacgagagcctgatcgatctgcaggagctgggcaagtatgagcagtacatcaagggctctggcagagagaacctgtatttccagggaggaggaggcagcggatacatccctgaggcaccaagggacggacaggcctacgtgcgcaaggatggcgagtgggtgctgctgtccacctttctgggccatcatcaccaccaccaccaccactga

SEQ ID NO: 5086 - DNA, 3846 bp, Artificial Sequence
  Description of Artificial Sequence: Synthetic polynucleotide
atgggcatcctgccaagcccaggaatgcccgccctgctgtctctggtgagcctgctgtccgtgctgctgatgggatgcgtggcagagacaggcacacagtgcgtgaacctgaccacaaggacccagctgccccctgcctataccaattctttcacacggggcgtgtactatcccgacaaggtgtttagaagctccgtgctgcactccacacaggatctgtttctgcctttcttttctaacgtgacctggttccacgccatccacgtgtccggcaccaatggcacaaagcggttcgacaatcccgtgctgccttttaacgatggcgtgtacttcgccagcaccgagaagtccaacatcatcagaggctggatctttggcaccacactggactctaagacacagagcctgctgatcgtgaacaatgccaccaacgtggtgatcaaggtgtgcgagttccagttttgtaatgatccattcctgggcgtgtactatcacaagaacaataagtcctggatggagtctgagtttcgcgtgtattctagcgccaacaattgcacatttgagtacgtgagccagcccttcctgatggacctggagggcaagcagggcaatttcaagaacctgagggagttcgtgtttaagaatatcgatggctacttcaagatctacagcaagcacaccccaatcaacctggtgcgcgacctgccacagggattctccgccctggagccactggtggatctgcccatcggcatcaacatcacccggtttcagacactgctggccctgcacagatcctacctgacaccaggcgactcctctagcggatggaccgcaggagctgccgcctactatgtgggctatctgcagccccggaccttcctgctgaagtacaacgagaatggcaccatcacagacgcagtggattgcgccctggaccccctgtctgagacaaagtgtacactgaagagctttaccgtggagaagggcatctatcagacaagcaatttcagggtgcagcctaccgagtccatcgtgcgctttcccaatatcacaaacctgtgcccttttggcgaggtgttcaacgccaccagattcgccagcgtgtacgcctggaatcggaagagaatctccaactgcgtggccgactattctgtgctgtacaactccgcctctttcagcacctttaagtgctatggcgtgtctcccacaaagctgaatgatctgtgctttaccaacgtgtacgccgatagcttcgtgatcaggggagacgaagtgagacagatcgcaccaggacagacaggaaagatcgcagactacaattataagctgcctgacgatttcaccggctgcgtgatcgcctggaactccaacaatctggattctaaagtgggcggcaactacaattatctgtacaggctgtttcgcaagtccaatctgaagccattcgagcgggacatctccacagagatctaccaggccggctctaccccctgcaatggcgtggagggctttaactgttatttcgcactgcagtcttacggcttccagccaacaaacggcgtgggctatcagccctacagagtggtggtgctgtcctttgagctgctgcacgcaccagcaacagtgtgcggcccaaagaagtctaccaatctggtgaagaacaagtgcgtgaacttcaacttcaacggactgaccggcacaggcgtgctgaccgagagcaataagaagttcctgccttttcagcagttcggcagggacatcgcagataccacagacgccgtgcgcgaccctcagaccctggagatcctggacatcacaccatgcagcttcggcggcgtgtccgtgatcacaccaggcaccaatacatccaaccaggtggccgtgctgtatcaggacgtgaattgtaccgaggtgcccgtggcaatccacgcagatcagctgacccctacatggcgggtgtactctaccggcagcaacgtgttccagacaagagccggatgcctgatcggagcagagcacgtgaacaatagctatgagtgcgacatccctatcggcgccggcatctgtgccagctaccagacccagacaaactccccatctggagcaggctccgtggccagccagtccatcatcgcctataccatgagcctgggcgccgagaacagcgtggcctactccaacaattctatcgccatccctaccaacttcacaatcagcgtgaccacagagatcctgccagtgtctatgaccaagacaagcgtggactgcacaatgtatatctgtggcgatagcaccgagtgctccaacctgctgctgcagtacggctccttttgtacccagctgaatagagccctgacaggcatcgccgtggagcaggataagaacacacaggaggtgttcgcccaggtgaagcagatctacaagaccccacccatcaaggactttggcggcttcaacttcagccagatcctgcctgatccaagcaagccctccaagaggtcttttatcgaggacctgctgttcaacaaggtgaccctggccgatgccggcttcatcaagcagtatggagattgcctgggagacatcgcagcccgcgacctgatctgtgcccagaagtttaatggcctgaccgtgctgcctccactgctgacagatgagatgatcgcccagtacacatctgccctgctggccggcaccatcacaagcggatggaccttcggcgcaggagccgccctgcagatcccttttgccatgcagatggcctataggttcaacggcatcggcgtgacccagaatgtgctgtacgagaaccagaagctgatcgccaatcagtttaacagcgccatcggcaagatccaggactctctgtcctctacagccagcgccctgggcaagctgcaggatgtggtgaatcagaacgcccaggccctgaataccctggtgaagcagctgagctccaacttcggcgccatctctagcgtgctgaatgacatcctgagccggctggacccccctgaggcagaggtgcagatcgacaggctgatcacaggccgcctgcagagcctgcagacctacgtgacacagcagctgatcagggcagcagagatcagagcctccgccaatctggccgccaccaagatgagcgagtgcgtgctgggacagtccaagagggtggacttttgtggcaagggctatcacctgatgtctttcccacagagcgcccctcacggcgtggtgtttctgcacgtgacctacgtgccagcccaggagaagaacttcaccacagcaccagccatctgccacgatggaaaggcacactttcctagggagggcgtgttcgtgtctaacggcacccactggtttgtgacacagcgcaatttctacgagccacagatcatcaccacagacaatacattcgtgagcggcaactgtgatgtggtgatcggcatcgtgaacaataccgtgtatgatccactgcagcccgagctggactcctttaaggaggagctggataagtacttcaagaatcacacctctcccgacgtggatctgggcgacatctccggcatcaatgcctctgtggtgaacatccagaaggagatcgaccggctgaacgaggtggccaagaatctgaacgagagcctgatcgatctgcaggagctgggcaagtatgagcagtacatcaagggctctggcagagagaacctgtatttccagggaggaggaggcagcggatacatccctgaggcaccaagggacggacaggcctacgtgcgcaaggatggcgagtgggtgctgctgtccacctttctgggccatcatcaccaccaccaccaccactga

SEQ ID NO: 5087 - DNA, 3846 bp, Artificial Sequence
  Description of Artificial Sequence: Synthetic polynucleotide
atgggcatcctgccaagcccaggaatgcccgccctgctgtctctggtgagcctgctgtccgtgctgctgatgggatgcgtggcagagacaggcacacagtgcgtgaacctgaccacaaggacccagctgccccctgcctataccaattctttcacacggggcgtgtactatcccgacaaggtgtttagaagctccgtgctgcactccacacaggatctgtttctgcctttcttttctaacgtgacctggttccacgccatccacgtgtccggcaccaatggcacaaagcggttcgacaatcccgtgctgccttttaacgatggcgtgtacttcgccagcaccgagaagtccaacatcatcagaggctggatctttggcaccacactggactctaagacacagagcctgctgatcgtgaacaatgccaccaacgtggtgatcaaggtgtgcgagttccagttttgtaatgatccattcctgggcgtgtactatcacaagaacaataagtcctggatggagtctgagtttcgcgtgtattctagcgccaacaattgcacatttgagtacgtgagccagcccttcctgatggacctggagggcaagcagggcaatttcaagaacctgagggagttcgtgtttaagaatatcgatggctacttcaagatctacagcaagcacaccccaatcaacctggtgcgcgacctgccacagggattctccgccctggagccactggtggatctgcccatcggcatcaacatcacccggtttcagacactgctggccctgcacagatcctacctgacaccaggcgactcctctagcggatggaccgcaggagctgccgcctactatgtgggctatctgcagccccggaccttcctgctgaagtacaacgagaatggcaccatcacagacgcagtggattgcgccctggaccccctgtctgagacaaagtgtacactgaagagctttaccgtggagaagggcatctatcagacaagcaatttcagggtgcagcctaccgagtccatcgtgcgctttcccaatatcacaaacctgtgcccttttggcgaggtgttcaacgccaccagattcgccagcgtgtacgcctggaatcggaagagaatctccaactgcgtggccgactattctgtgctgtacaactccgcctctttcagcacctttaagtgctatggcgtgtctcccacaaagctgaatgatctgtgctttaccaacgtgtacgccgatagcttcgtgatcaggggagacgaagtgagacagatcgcaccaggacagacaggaaagatcgcagactacaattataagctgcctgacgatttcaccggctgcgtgatcgcctggaactccgggaatctggattctaaagtgggcggcaactacaattatctgtacaggctgtttcgcaagtccaatctgaagccattcgagcgggacatctccacagagatctaccaggccggctctaccccctgcaatggcgtggagggctttaactgttatttccctctgcagtcttacggcttccagccaacaaacggcgtgggctatcagccctacagagtggtggtgctgtcctttgagctgctgcacgcaccagcaacagtgtgcggcccaaagaagtctaccaatctggtgaagaacaagtgcgtgaacttcaacttcaacggactgaccggcacaggcgtgctgaccgagagcaataagaagttcctgccttttcagcagttcggcagggacatcgcagataccacagacgccgtgcgcgaccctcagaccctggagatcctggacatcacaccatgcagcttcggcggcgtgtccgtgatcacaccaggcaccaatacatccaaccaggtggccgtgctgtatcaggacgtgaattgtaccgaggtgcccgtggcaatccacgcagatcagctgacccctacatggcgggtgtactctaccggcagcaacgtgttccagacaagagccggatgcctgatcggagcagagcacgtgaacaatagctatgagtgcgacatccctatcggcgccggcatctgtgccagctaccagacccagacaaactccccatctggagcaggctccgtggccagccagtccatcatcgcctataccatgagcctgggcgccgagaacagcgtggcctactccaacaattctatcgccatccctaccaacttcacaatcagcgtgaccacagagatcctgccagtgtctatgaccaagacaagcgtggactgcacaatgtatatctgtggcgatagcaccgagtgctccaacctgctgctgcagtacggctccttttgtacccagctgaatagagccctgacaggcatcgccgtggagcaggataagaacacacaggaggtgttcgcccaggtgaagcagatctacaagaccccacccatcaaggactttggcggcttcaacttcagccagatcctgcctgatccaagcaagccctccaagaggtcttttatcgaggacctgctgttcaacaaggtgaccctggccgatgccggcttcatcaagcagtatggagattgcctgggagacatcgcagcccgcgacctgatctgtgcccagaagtttaatggcctgaccgtgctgcctccactgctgacagatgagatgatcgcccagtacacatctgccctgctggccggcaccatcacaagcggatggaccttcggcgcaggagccgccctgcagatcccttttgccatgcagatggcctataggttcaacggcatcggcgtgacccagaatgtgctgtacgagaaccagaagctgatcgccaatcagtttaacagcgccatcggcaagatccaggactctctgtcctctacagccagcgccctgggcaagctgcaggatgtggtgaatcagaacgcccaggccctgaataccctggtgaagcagctgagctccaacttcggcgccatctctagcgtgctgaatgacatcctgagccggctggacccccctgaggcagaggtgcagatcgacaggctgatcacaggccgcctgcagagcctgcagacctacgtgacacagcagctgatcagggcagcagagatcagagcctccgccaatctggccgccaccaagatgagcgagtgcgtgctgggacagtccaagagggtggacttttgtggcaagggctatcacctgatgtctttcccacagagcgcccctcacggcgtggtgtttctgcacgtgacctacgtgccagcccaggagaagaacttcaccacagcaccagccatctgccacgatggaaaggcacactttcctagggagggcgtgttcgtgtctaacggcacccactggtttgtgacacagcgcaatttctacgagccacagatcatcaccacagacaatacattcgtgagcggcaactgtgatgtggtgatcggcatcgtgaacaataccgtgtatgatccactgcagcccgagctggactcctttaaggaggagctggataagtacttcaagaatcacacctctcccgacgtggatctgggcgacatctccggcatcaatgcctctgtggtgaacatccagaaggagatcgaccggctgaacgaggtggccaagaatctgaacgagagcctgatcgatctgcaggagctgggcaagtatgagcagtacatcaagggctctggcagagagaacctgtatttccagggaggaggaggcagcggatacatccctgaggcaccaagggacggacaggcctacgtgcgcaaggatggcgagtgggtgctgctgtccacctttctgggccatcatcaccaccaccaccaccactga

SEQ ID NO: 5088 - DNA, 3846 bp, Artificial Sequence
  Description of Artificial Sequence: Synthetic polynucleotide
atgggcatcctgccaagcccaggaatgcccgccctgctgtctctggtgagcctgctgtccgtgctgctgatgggatgcgtggcagagacaggcacacagtgcgtgaacctgaccacaaggacccagctgccccctgcctataccaattctttcacacggggcgtgtactatcccgacaaggtgtttagaagctccgtgctgcactccacacaggatctgtttctgcctttcttttctaacgtgacctggttccacgccatccacgtgtccggcaccaatggcacaaagcggttcgacaatcccgtgctgccttttaacgatggcgtgtacttcgccagcaccgagaagtccaacatcatcagaggctggatctttggcaccacactggactctaagacacagagcctgctgatcgtgaacaatgccaccaacgtggtgatcaaggtgtgcgagttccagttttgtaatgatccattcctgggcgtgtactatcacaagaacaataagtcctggatggagtctgagtttcgcgtgtattctagcgccaacaattgcacatttgagtacgtgagccagcccttcctgatggacctggagggcaagcagggcaatttcaagaacctgagggagttcgtgtttaagaatatcgatggctacttcaagatctacagcaagcacaccccaatcaacctggtgcgcgacctgccacagggattctccgccctggagccactggtggatctgcccatcggcatcaacatcacccggtttcagacactgctggccctgcacagatcctacctgacaccaggcgactcctctagcggatggaccgcaggagctgccgcctactatgtgggctatctgcagccccggaccttcctgctgaagtacaacgagaatggcaccatcacagacgcagtggattgcgccctggaccccctgtctgagacaaagtgtacactgaagagctttaccgtggagaagggcatctatcagacaagcaatttcagggtgcagcctaccgagtccatcgtgcgctttcccaatatcacaaacctgtgcccttttggcgaggtgttcaacgccaccagattcgccagcgtgtacgcctggaatcggaagagaatctccaactgcgtggccgactattctgtgctgtacaactccgcctctttcagcacctttaagtgctatggcgtgtctcccacaaagctgaatgatctgtgctttaccaacgtgtacgccgatagcttcgtgatcaggggagacgaagtgagacagatcgcaccaggacagacaggaaagatcgcagactacaattataagctgcctgacgatttcaccggctgcgtgatcgcctggaactccaacaatctggattctaaagtgggcggcaactacaattatctgtacaggctgtttcgcaagtccaatctgaagccattcgagcgggacatctccacagagatctaccaggccggcggtaccccctgcaatggcgtggagggctttaactgttatttccctctgcagtcttacggcttccagccaacaaacggcgtgggctatcagccctacagagtggtggtgctgtcctttgagctgctgcacgcaccagcaacagtgtgcggcccaaagaagtctaccaatctggtgaagaacaagtgcgtgaacttcaacttcaacggactgaccggcacaggcgtgctgaccgagagcaataagaagttcctgccttttcagcagttcggcagggacatcgcagataccacagacgccgtgcgcgaccctcagaccctggagatcctggacatcacaccatgcagcttcggcggcgtgtccgtgatcacaccaggcaccaatacatccaaccaggtggccgtgctgtatcaggacgtgaattgtaccgaggtgcccgtggcaatccacgcagatcagctgacccctacatggcgggtgtactctaccggcagcaacgtgttccagacaagagccggatgcctgatcggagcagagcacgtgaacaatagctatgagtgcgacatccctatcggcgccggcatctgtgccagctaccagacccagacaaactccccatctggagcaggctccgtggccagccagtccatcatcgcctataccatgagcctgggcgccgagaacagcgtggcctactccaacaattctatcgccatccctaccaacttcacaatcagcgtgaccacagagatcctgccagtgtctatgaccaagacaagcgtggactgcacaatgtatatctgtggcgatagcaccgagtgctccaacctgctgctgcagtacggctccttttgtacccagctgaatagagccctgacaggcatcgccgtggagcaggataagaacacacaggaggtgttcgcccaggtgaagcagatctacaagaccccacccatcaaggactttggcggcttcaacttcagccagatcctgcctgatccaagcaagccctccaagaggtcttttatcgaggacctgctgttcaacaaggtgaccctggccgatgccggcttcatcaagcagtatggagattgcctgggagacatcgcagcccgcgacctgatctgtgcccagaagtttaatggcctgaccgtgctgcctccactgctgacagatgagatgatcgcccagtacacatctgccctgctggccggcaccatcacaagcggatggaccttcggcgcaggagccgccctgcagatcccttttgccatgcagatggcctataggttcaacggcatcggcgtgacccagaatgtgctgtacgagaaccagaagctgatcgccaatcagtttaacagcgccatcggcaagatccaggactctctgtcctctacagccagcgccctgggcaagctgcaggatgtggtgaatcagaacgcccaggccctgaataccctggtgaagcagctgagctccaacttcggcgccatctctagcgtgctgaatgacatcctgagccggctggacccccctgaggcagaggtgcagatcgacaggctgatcacaggccgcctgcagagcctgcagacctacgtgacacagcagctgatcagggcagcagagatcagagcctccgccaatctggccgccaccaagatgagcgagtgcgtgctgggacagtccaagagggtggacttttgtggcaagggctatcacctgatgtctttcccacagagcgcccctcacggcgtggtgtttctgcacgtgacctacgtgccagcccaggagaagaacttcaccacagcaccagccatctgccacgatggaaaggcacactttcctagggagggcgtgttcgtgtctaacggcacccactggtttgtgacacagcgcaatttctacgagccacagatcatcaccacagacaatacattcgtgagcggcaactgtgatgtggtgatcggcatcgtgaacaataccgtgtatgatccactgcagcccgagctggactcctttaaggaggagctggataagtacttcaagaatcacacctctcccgacgtggatctgggcgacatctccggcatcaatgcctctgtggtgaacatccagaaggagatcgaccggctgaacgaggtggccaagaatctgaacgagagcctgatcgatctgcaggagctgggcaagtatgagcagtacatcaagggctctggcagagagaacctgtatttccagggaggaggaggcagcggatacatccctgaggcaccaagggacggacaggcctacgtgcgcaaggatggcgagtgggtgctgctgtccacctttctgggccatcatcaccaccaccaccaccactga

SEQ ID NO: 5089 - DNA, 3846 bp, Artificial Sequence
  Description of Artificial Sequence: Synthetic polynucleotide
atgggcatcctgccaagcccaggaatgcccgccctgctgtctctggtgagcctgctgtccgtgctgctgatgggatgcgtggcagagacaggcacacagtgcgtgaacctgaccacaaggacccagctgccccctgcctataccaattctttcacacggggcgtgtactatcccgacaaggtgtttagaagctccgtgctgcactccacacaggatctgtttctgcctttcttttctaacgtgacctggttccacgccatccacgtgtccggcaccaatggcacaaagcggttcgacaatcccgtgctgccttttaacgatggcgtgtacttcgccagcaccgagaagtccaacatcatcagaggctggatctttggcaccacactggactctaagacacagagcctgctgatcgtgaacaatgccaccaacgtggtgatcaaggtgtgcgagttccagttttgtaatgatccattcctgggcgtgtactatcacaagaacaataagtcctggatggagtctgagtttcgcgtgtattctagcgccaacaattgcacatttgagtacgtgagccagcccttcctgatggacctggagggcaagcagggcaatttcaagaacctgagggagttcgtgtttaagaatatcgatggctacttcaagatctacagcaagcacaccccaatcaacctggtgcgcgacctgccacagggattctccgccctggagccactggtggatctgcccatcggcatcaacatcacccggtttcagacactgctggccctgcacagatcctacctgacaccaggcgactcctctagcggatggaccgcaggagctgccgcctactatgtgggctatctgcagccccggaccttcctgctgaagtacaacgagaatggcaccatcacagacgcagtggattgcgccctggaccccctgtctgagacaaagtgtacactgaagagctttaccgtggagaagggcatctatcagacaagcaatttcagggtgcagcctaccgagtccatcgtgcgctttcccaatatcacaaacctgtgcccttttggcgaggtgttcaacgccaccagattcgccagcgtgtacgcctggaatcggaagagaatctccaactgcgtggccgactattctgtgctgtacaactccgcctctttcgaaacctttaagtgctatggcgtgtctcccacaaagctgaatgatctgtgctttaccaacgtgtacgccgatagcttcgtgatcaggggagacgaagtgagacagatcgcaccaggacagacaggaaagatcgcagactacaattataagctgcctgacgatttcaccggctgcgtgatcgcctggaactccaacaatctggattctaaagtgggcggcaactacaattatctgtacaggctgtttcgcaagtccaatctgaagccattcgagcgggacatctccacagagatctaccaggccggctctaccccctgcaatggcgtggagggctttaactgttatttccctctgcagtcttacggcttccagccaacaaacggcgtgggctatcagccctacagagtggtggtgctgtcctttgagctgctgcacgcaccagcaacagtgtgcggcccaaagaagtctaccaatctggtgaagaacaagtgcgtgaacttcaacttcaacggactgaccggcacaggcgtgctgaccgagagcaataagaagttcctgccttttcagcagttcggcagggacatcgcagataccacagacgccgtgcgcgaccctcagaccctggagatcctggacatcacaccatgcagcttcggcggcgtgtccgtgatcacaccaggcaccaatacatccaaccaggtggccgtgctgtatcaggacgtgaattgtaccgaggtgcccgtggcaatccacgcagatcagctgacccctacatggcgggtgtactctaccggcagcaacgtgttccagacaagagccggatgcctgatcggagcagagcacgtgaacaatagctatgagtgcgacatccctatcggcgccggcatctgtgccagctaccagacccagacaaactccccatctggagcaggctccgtggccagccagtccatcatcgcctataccatgagcctgggcgccgagaacagcgtggcctactccaacaattctatcgccatccctaccaacttcacaatcagcgtgaccacagagatcctgccagtgtctatgaccaagacaagcgtggactgcacaatgtatatctgtggcgatagcaccgagtgctccaacctgctgctgcagtacggctccttttgtacccagctgaatagagccctgacaggcatcgccgtggagcaggataagaacacacaggaggtgttcgcccaggtgaagcagatctacaagaccccacccatcaaggactttggcggcttcaacttcagccagatcctgcctgatccaagcaagccctccaagaggtcttttatcgaggacctgctgttcaacaaggtgaccctggccgatgccggcttcatcaagcagtatggagattgcctgggagacatcgcagcccgcgacctgatctgtgcccagaagtttaatggcctgaccgtgctgcctccactgctgacagatgagatgatcgcccagtacacatctgccctgctggccggcaccatcacaagcggatggaccttcggcgcaggagccgccctgcagatcccttttgccatgcagatggcctataggttcaacggcatcggcgtgacccagaatgtgctgtacgagaaccagaagctgatcgccaatcagtttaacagcgccatcggcaagatccaggactctctgtcctctacagccagcgccctgggcaagctgcaggatgtggtgaatcagaacgcccaggccctgaataccctggtgaagcagctgagctccaacttcggcgccatctctagcgtgctgaatgacatcctgagccggctggacccccctgaggcagaggtgcagatcgacaggctgatcacaggccgcctgcagagcctgcagacctacgtgacacagcagctgatcagggcagcagagatcagagcctccgccaatctggccgccaccaagatgagcgagtgcgtgctgggacagtccaagagggtggacttttgtggcaagggctatcacctgatgtctttcccacagagcgcccctcacggcgtggtgtttctgcacgtgacctacgtgccagcccaggagaagaacttcaccacagcaccagccatctgccacgatggaaaggcacactttcctagggagggcgtgttcgtgtctaacggcacccactggtttgtgacacagcgcaatttctacgagccacagatcatcaccacagacaatacattcgtgagcggcaactgtgatgtggtgatcggcatcgtgaacaataccgtgtatgatccactgcagcccgagctggactcctttaaggaggagctggataagtacttcaagaatcacacctctcccgacgtggatctgggcgacatctccggcatcaatgcctctgtggtgaacatccagaaggagatcgaccggctgaacgaggtggccaagaatctgaacgagagcctgatcgatctgcaggagctgggcaagtatgagcagtacatcaagggctctggcagagagaacctgtatttccagggaggaggaggcagcggatacatccctgaggcaccaagggacggacaggcctacgtgcgcaaggatggcgagtgggtgctgctgtccacctttctgggccatcatcaccaccaccaccaccactga

SEQ ID NO: 5090 - DNA, 3846 bp, Artificial Sequence
  Description of Artificial Sequence: Synthetic polynucleotide
atgggcatcctgccaagcccaggaatgcccgccctgctgtctctggtgagcctgctgtccgtgctgctgatgggatgcgtggcagagacaggcacacagtgcgtgaacctgaccacaaggacccagctgccccctgcctataccaattctttcacacggggcgtgtactatcccgacaaggtgtttagaagctccgtgctgcactccacacaggatctgtttctgcctttcttttctaacgtgacctggttccacgccatccacgtgtccggcaccaatggcacaaagcggttcgacaatcccgtgctgccttttaacgatggcgtgtacttcgccagcaccgagaagtccaacatcatcagaggctggatctttggcaccacactggactctaagacacagagcctgctgatcgtgaacaatgccaccaacgtggtgatcaaggtgtgcgagttccagttttgtaatgatccattcctgggcgtgtactatcacaagaacaataagtcctggatggagtctgagtttcgcgtgtattctagcgccaacaattgcacatttgagtacgtgagccagcccttcctgatggacctggagggcaagcagggcaatttcaagaacctgagggagttcgtgtttaagaatatcgatggctacttcaagatctacagcaagcacaccccaatcaacctggtgcgcgacctgccacagggattctccgccctggagccactggtggatctgcccatcggcatcaacatcacccggtttcagacactgctggccctgcacagatcctacctgacaccaggcgactcctctagcggatggaccgcaggagctgccgcctactatgtgggctatctgcagccccggaccttcctgctgaagtacaacgagaatggcaccatcacagacgcagtggattgcgccctggaccccctgtctgagacaaagtgtacactgaagagctttaccgtggagaagggcatctatcagacaagcaatttcagggtgcagcctaccgagtccatcgtgcgctttcccaatatcacaaacctgtgcccttttggcgaggtgttcaacgccaccagattcgccagcgtgtacgcctggaatcggaagagaatctccaactgcgtggccgactattctgtgctgtacaactccgcctctttcagcacctttaagtgctatggcgtgtctcccacaaagctgaatgatctgtgctttaccaacgtgtacgccgatagcttcgtgatcaggggagacgaagtgagacagatcgcaccaggacagacaggaaagatcgcagactacaattatgtactgcctgacgatttcaccggctgcgtgatcgcctggaactccaacaatctggattctaaagtgggcggcaactacaattatctgtacaggctgtttcgcaagtccaatctgaagccattcgagcgggacatctccacagagatctaccaggccggctctaccccctgcaatggcgtggagggctttaactgttatttccctctgcagtcttacggcttccagccaacaaacggcgtgggctatcagccctacagagtggtggtgctgtcctttgagctgctgcacgcaccagcaacagtgtgcggcccaaagaagtctaccaatctggtgaagaacaagtgcgtgaacttcaacttcaacggactgaccggcacaggcgtgctgaccgagagcaataagaagttcctgccttttcagcagttcggcagggacatcgcagataccacagacgccgtgcgcgaccctcagaccctggagatcctggacatcacaccatgcagcttcggcggcgtgtccgtgatcacaccaggcaccaatacatccaaccaggtggccgtgctgtatcaggacgtgaattgtaccgaggtgcccgtggcaatccacgcagatcagctgacccctacatggcgggtgtactctaccggcagcaacgtgttccagacaagagccggatgcctgatcggagcagagcacgtgaacaatagctatgagtgcgacatccctatcggcgccggcatctgtgccagctaccagacccagacaaactccccatctggagcaggctccgtggccagccagtccatcatcgcctataccatgagcctgggcgccgagaacagcgtggcctactccaacaattctatcgccatccctaccaacttcacaatcagcgtgaccacagagatcctgccagtgtctatgaccaagacaagcgtggactgcacaatgtatatctgtggcgatagcaccgagtgctccaacctgctgctgcagtacggctccttttgtacccagctgaatagagccctgacaggcatcgccgtggagcaggataagaacacacaggaggtgttcgcccaggtgaagcagatctacaagaccccacccatcaaggactttggcggcttcaacttcagccagatcctgcctgatccaagcaagccctccaagaggtcttttatcgaggacctgctgttcaacaaggtgaccctggccgatgccggcttcatcaagcagtatggagattgcctgggagacatcgcagcccgcgacctgatctgtgcccagaagtttaatggcctgaccgtgctgcctccactgctgacagatgagatgatcgcccagtacacatctgccctgctggccggcaccatcacaagcggatggaccttcggcgcaggagccgccctgcagatcccttttgccatgcagatggcctataggttcaacggcatcggcgtgacccagaatgtgctgtacgagaaccagaagctgatcgccaatcagtttaacagcgccatcggcaagatccaggactctctgtcctctacagccagcgccctgggcaagctgcaggatgtggtgaatcagaacgcccaggccctgaataccctggtgaagcagctgagctccaacttcggcgccatctctagcgtgctgaatgacatcctgagccggctggacccccctgaggcagaggtgcagatcgacaggctgatcacaggccgcctgcagagcctgcagacctacgtgacacagcagctgatcagggcagcagagatcagagcctccgccaatctggccgccaccaagatgagcgagtgcgtgctgggacagtccaagagggtggacttttgtggcaagggctatcacctgatgtctttcccacagagcgcccctcacggcgtggtgtttctgcacgtgacctacgtgccagcccaggagaagaacttcaccacagcaccagccatctgccacgatggaaaggcacactttcctagggagggcgtgttcgtgtctaacggcacccactggtttgtgacacagcgcaatttctacgagccacagatcatcaccacagacaatacattcgtgagcggcaactgtgatgtggtgatcggcatcgtgaacaataccgtgtatgatccactgcagcccgagctggactcctttaaggaggagctggataagtacttcaagaatcacacctctcccgacgtggatctgggcgacatctccggcatcaatgcctctgtggtgaacatccagaaggagatcgaccggctgaacgaggtggccaagaatctgaacgagagcctgatcgatctgcaggagctgggcaagtatgagcagtacatcaagggctctggcagagagaacctgtatttccagggaggaggaggcagcggatacatccctgaggcaccaagggacggacaggcctacgtgcgcaaggatggcgagtgggtgctgctgtccacctttctgggccatcatcaccaccaccaccaccactga

SEQ ID NO: 5091 - DNA, 3846 bp, Artificial Sequence
  Description of Artificial Sequence: Synthetic polynucleotide
atgggcatcctgccaagcccaggaatgcccgccctgctgtctctggtgagcctgctgtccgtgctgctgatgggatgcgtggcagagacaggcacacagtgcgtgaacctgaccacaaggacccagctgccccctgcctataccaattctttcacacggggcgtgtactatcccgacaaggtgtttagaagctccgtgctgcactccacacaggatctgtttctgcctttcttttctaacgtgacctggttccacgccatccacgtgtccggcaccaatggcacaaagcggttcgacaatcccgtgctgccttttaacgatggcgtgtacttcgccagcaccgagaagtccaacatcatcagaggctggatctttggcaccacactggactctaagacacagagcctgctgatcgtgaacaatgccaccaacgtggtgatcaaggtgtgcgagttccagttttgtaatgatccattcctgggcgtgtactatcacaagaacaataagtcctggatggagtctgagtttcgcgtgtattctagcgccaacaattgcacatttgagtacgtgagccagcccttcctgatggacctggagggcaagcagggcaatttcaagaacctgagggagttcgtgtttaagaatatcgatggctacttcaagatctacagcaagcacaccccaatcaacctggtgcgcgacctgccacagggattctccgccctggagccactggtggatctgcccatcggcatcaacatcacccggtttcagacactgctggccctgcacagatcctacctgacaccaggcgactcctctagcggatggaccgcaggagctgccgcctactatgtgggctatctgcagccccggaccttcctgctgaagtacaacgagaatggcaccatcacagacgcagtggattgcgccctggaccccctgtctgagacaaagtgtacactgaagagctttaccgtggagaagggcatctatcagacaagcaatttcagggtgcagcctaccgagtccatcgtgcgctttcccaatatcacaaacctgtgcccttttggcgaggtgttcaacgccaccagattcgccagcgtgtacgcctggaatcggaagagaatctccaactgcgtggccgactattctgtgctgtacaactccgcctctttcagcacctttaagtgctatggcgtgtctcccacaaagctgaatgatctgtgctttaccaacgtgtacgccgatagcttcgtgatcaggggagacgaagtgagacagatcgcaccaggacagacaggaaagatcgcagactacaattataagctgcctgacgatttcaccggctgcgtgatcgcctggaactccaacaatctggattctaaagtgggcggcaactacaattatctgtacaggctgtttcgcaagtccaatctgaagccattcgagcgggacatctccacagagatctaccaggccggctctaccccctgcaatggcgtggagggctttaactgttatttccctctgcagtcttacggcttccagccaacaaacggcgtgggctatcagccctacagagtggtggtgctgtcctttgagctgctgcacgcaccagcaacagtgtgcggcccaaagaagtctaccaatctggtgaagaacaagtgcgtgaacttcaacttcaacggactgaccggcacaggcgtgctgaccgagagcaataagaagttcctgccttttcagcagttcggcagggacatcgcagataccacagacgccgtgcgcgaccctcagaccctggagatcctggacatcacaccatgcagcttcggcggcgtgtccgtgatcacaccaggcaccaatacatccaaccaggtggccgtgctgtatcaggacgtgaattgtaccgaggtgcccgtggcaatccacgcagatcagctgacccctacatggcgggtgtactctaccggcagcaacgtgttccagacaagagccggatgcctgatcggagcagagcacgtgaacaatagctatgagtgcgacatccctatcggcgccggcatctgtgccagctaccagacccagacaaactccccatctggagcaggctccgtggccagccagtccatcatcgcctataccgaaagcctgggcgccgagaacagcgtggcctactccaacaattctatcgccatccctaccaacttcacaatcagcgtgaccacagagatcctgccagtgtctatgaccaagacaagcgtggactgcacaatgtatatctgtggcgatagcaccgagtgctccaacctgctgctgcagtacggctccttttgtacccagctgaatagagccctgacaggcatcgccgtggagcaggataagaacacacaggaggtgttcgcccaggtgaagcagatctacaagaccccacccatcaaggactttggcggcttcaacttcagccagatcctgcctgatccaagcaagccctccaagaggtcttttatcgaggacctgctgttcaacaaggtgaccctggccgatgccggcttcatcaagcagtatggagattgcctgggagacatcgcagcccgcgacctgatctgtgcccagaagtttaatggcctgaccgtgctgcctccactgctgacagatgagatgatcgcccagtacacatctgccctgctggccggcaccatcacaagcggatggaccttcggcgcaggagccgccctgcagatcccttttgccatgcagatggcctataggttcaacggcatcggcgtgacccagaatgtgctgtacgagaaccagaagctgatcgccaatcagtttaacagcgccatcggcaagatccaggactctctgtcctctacagccagcgccctgggcaagctgcaggatgtggtgaatcagaacgcccaggccctgaataccctggtgaagcagctgagctccaacttcggcgccatctctagcgtgctgaatgacatcctgagccggctggacccccctgaggcagaggtgcagatcgacaggctgatcacaggccgcctgcagagcctgcagacctacgtgacacagcagctgatcagggcagcagagatcagagcctccgccaatctggccgccaccaagatgagcgagtgcgtgctgggacagtccaagagggtggacttttgtggcaagggctatcacctgatgtctttcccacagagcgcccctcacggcgtggtgtttctgcacgtgacctacgtgccagcccaggagaagaacttcaccacagcaccagccatctgccacgatggaaaggcacactttcctagggagggcgtgttcgtgtctaacggcacccactggtttgtgacacagcgcaatttctacgagccacagatcatcaccacagacaatacattcgtgagcggcaactgtgatgtggtgatcggcatcgtgaacaataccgtgtatgatccactgcagcccgagctggactcctttaaggaggagctggataagtacttcaagaatcacacctctcccgacgtggatctgggcgacatctccggcatcaatgcctctgtggtgaacatccagaaggagatcgaccggctgaacgaggtggccaagaatctgaacgagagcctgatcgatctgcaggagctgggcaagtatgagcagtacatcaagggctctggcagagagaacctgtatttccagggaggaggaggcagcggatacatccctgaggcaccaagggacggacaggcctacgtgcgcaaggatggcgagtgggtgctgctgtccacctttctgggccatcatcaccaccaccaccaccactga

SEQ ID NO: 5092 - DNA, 3846 bp, Artificial Sequence
  Description of Artificial Sequence: Synthetic polynucleotide
atgggcatcctgccaagcccaggaatgcccgccctgctgtctctggtgagcctgctgtccgtgctgctgatgggatgcgtggcagagacaggcacacagtgcgtgaacctgaccacaaggacccagctgccccctgcctataccaattctttcacacggggcgtgtactatcccgacaaggtgtttagaagctccgtgctgcactccacacaggatctgtttctgcctttcttttctaacgtgacctggttccacgccatccacgtgtccggcaccaatggcacaaagcggttcgacaatcccgtgctgccttttaacgatggcgtgtacttcgccagcaccgagaagtccaacatcatcagaggctggatctttggcaccacactggactctaagacacagagcctgctgatcgtgaacaatgccaccaacgtggtgatcaaggtgtgcgagttccagttttgtaatgatccattcctgggcgtgtactatcacaagaacaataagtcctggatggagtctgagtttcgcgtgtattctagcgccaacaattgcacatttgagtacgtgagccagcccttcctgatggacctggagggcaagcagggcaatttcaagaacctgagggagttcgtgtttaagaatatcgatggctacttcaagatctacagcaagcacaccccaatcaacctggtgcgcgacctgccacagggattctccgccctggagccactggtggatctgcccatcggcatcaacatcacccggtttcagacactgctggccctgcacagatcctacctgacaccaggcgactcctctagcggatggaccgcaggagctgccgcctactatgtgggctatctgcagccccggaccttcctgctgaagtacaacgagaatggcaccatcacagacgcagtggattgcgccctggaccccctgtctgagacaaagtgtacactgaagagctttaccgtggagaagggcatctatcagacaagcaatttcagggtgcagcctaccgagtccatcgtgcgctttcccaatatcacaaacctgtgcccttttggcgaggtgttcaacgccaccagattcgccagcgtgtacgcctggaatcggaagagaatctccaactgcgtggccgactattctgtgctgtacaaatccgcctctttcagcacctttaagtgctatggcgtgtctcccacaaagctgaatgatctgtgctttaccaacgtgtacgccgatagcttcgtgatcaggggagacgaagtgagacagatcgcaccaggacagacaggaaagatcgcagactacaattataagctgcctgacgatttcaccggctgcgtgatcgcctggaactccaacaatctggattctaaagtgggcggcaactacaattatctgtacaggctgtttcgcaagtccaatctgaagccattcgagcgggacatctccacagagatctaccaggccggctctaccccctgcaatggcgtggagggctttaactgttatttccctctgcagtcttacggcttccagccaacaaacggcgtgggctatcagccctacagagtggtggtgctgtcctttgagctgctgcacgcaccagcaacagtgtgcggcccaaagaagtctaccaatctggtgaagaacaagtgcgtgaacttcaacttcaacggactgaccggcacaggcgtgctgaccgagagcaataagaagttcctgccttttcagcagttcggcagggacatcgcagataccacagacgccgtgcgcgaccctcagaccctggagatcctggacatcacaccatgcagcttcggcggcgtgtccgtgatcacaccaggcaccaatacatccaaccaggtggccgtgctgtatcaggacgtgaattgtaccgaggtgcccgtggcaatccacgcagatcagctgacccctacatggcgggtgtactctaccggcagcaacgtgttccagacaagagccggatgcctgatcggagcagagcacgtgaacaatagctatgagtgcgacatccctatcggcgccggcatctgtgccagctaccagacccagacaaactccccatctggagcaggctccgtggccagccagtccatcatcgcctataccatgagcctgggcgccgagaacagcgtggcctactccaacaattctatcgccatccctaccaacttcacaatcagcgtgaccacagagatcctgccagtgtctatgaccaagacaagcgtggactgcacaatgtatatctgtggcgatagcaccgagtgctccaacctgctgctgcagtacggctccttttgtacccagctgaatagagccctgacaggcatcgccgtggagcaggataagaacacacaggaggtgttcgcccaggtgaagcagatctacaagaccccacccatcaaggactttggcggcttcaacttcagccagatcctgcctgatccaagcaagccctccaagaggtcttttatcgaggacctgctgttcaacaaggtgaccctggccgatgccggcttcatcaagcagtatggagattgcctgggagacatcgcagcccgcgacctgatctgtgcccagaagtttaatggcctgaccgtgctgcctccactgctgacagatgagatgatcgcccagtacacatctgccctgctggccggcaccatcacaagcggatggaccttcggcgcaggagccgccctgcagatcccttttgccatgcagatggcctataggttcaacggcatcggcgtgacccagaatgtgctgtacgagaaccagaagctgatcgccaatcagtttaacagcgccatcggcaagatccaggactctctgtcctctacagccagcgccctgggcaagctgcaggatgtggtgaatcagaacgcccaggccctgaataccctggtgaagcagctgagctccaacttcggcgccatctctagcgtgctgaatgacatcctgagccggctggacccccctgaggcagaggtgcagatcgacaggctgatcacaggccgcctgcagagcctgcagacctacgtgacacagcagctgatcagggcagcagagatcagagcctccgccaatctggccgccaccaagatgagcgagtgcgtgctgggacagtccaagagggtggacttttgtggcaagggctatcacctgatgtctttcccacagagcgcccctcacggcgtggtgtttctgcacgtgacctacgtgccagcccaggagaagaacttcaccacagcaccagccatctgccacgatggaaaggcacactttcctagggagggcgtgttcgtgtctaacggcacccactggtttgtgacacagcgcaatttctacgagccacagatcatcaccacagacaatacattcgtgagcggcaactgtgatgtggtgatcggcatcgtgaacaataccgtgtatgatccactgcagcccgagctggactcctttaaggaggagctggataagtacttcaagaatcacacctctcccgacgtggatctgggcgacatctccggcatcaatgcctctgtggtgaacatccagaaggagatcgaccggctgaacgaggtggccaagaatctgaacgagagcctgatcgatctgcaggagctgggcaagtatgagcagtacatcaagggctctggcagagagaacctgtatttccagggaggaggaggcagcggatacatccctgaggcaccaagggacggacaggcctacgtgcgcaaggatggcgagtgggtgctgctgtccacctttctgggccatcatcaccaccaccaccaccactga

SEQ ID NO: 5093 - DNA, 3846 bp, Artificial Sequence
  Description of Artificial Sequence: Synthetic polynucleotide
atgggcatcctgccaagcccaggaatgcccgccctgctgtctctggtgagcctgctgtccgtgctgctgatgggatgcgtggcagagacaggcacacagtgcgtgaacctgaccacaaggacccagctgccccctgcctataccaattctttcacacggggcgtgtactatcccgacaaggtgtttagaagctccgtgctgcactccacacaggatctgtttctgcctttcttttctaacgtgacctggttccacgccatccacgtgtccggcaccaatggcacaaagcggttcgacaatcccgtgctgccttttaacgatggcgtgtacttcgccagcaccgagaagtccaacatcatcagaggctggatctttggcaccacactggactctaagacacagagcctgctgatcgtgaacaatgccaccaacgtggtgatcaaggtgtgcgagttccagttttgtaatgatccattcctgggcgtgtactatcacaagaacaataagtcctggatggagtctgagtttcgcgtgtattctagcgccaacaattgcacatttgagtacgtgagccagcccttcctgatggacctggagggcaagcagggcaatttcaagaacctgagggagttcgtgtttaagaatatcgatggctacttcaagatctacagcaagcacaccccaatcaacctggtgcgcgacctgccacagggattctccgccctggagccactggtggatctgcccatcggcatcaacatcacccggtttcagacactgctggccctgcacagatcctacctgacaccaggcgactcctctagcggatggaccgcaggagctgccgcctactatgtgggctatctgcagccccggaccttcctgctgaagtacaacgagaatggcaccatcacagacgcagtggattgcgccctggaccccctgtctgagacaaagtgtacactgaagagctttaccgtggagaagggcatctatcagacaagcaatttcagggtgcagcctaccgagtccatcgtgcgctttcccaatatcacaaacctgtgcccttttggcgaggtgttcaacgccaccagattcgccagcgtgtacgcctggaatcggaagagaatctccaactgcgtggccgactattctgtgctgtacaactccacgtctttcagcacctttaagtgctatggcgtgtctcccacaaagctgaatgatctgtgctttaccaacgtgtacgccgatagcttcgtgatcaggggagacgaagtgagacagatcgcaccaggacagacaggaaagatcgcagactacaattataagctgcctgacgatttcaccggctgcgtgatcgcctggaactccaacaatctggattctaaagtgggcggcaactacaattatctgtacaggctgtttcgcaagtccaatctgaagccattcgagcgggacatctccacagagatctaccaggccggctctaccccctgcaatggcgtggagggctttaactgttatttccctctgcagtcttacggcttccagccaacaaacggcgtgggctatcagccctacagagtggtggtgctgtcctttgagctgctgcacgcaccagcaacagtgtgcggcccaaagaagtctaccaatctggtgaagaacaagtgcgtgaacttcaacttcaacggactgaccggcacaggcgtgctgaccgagagcaataagaagttcctgccttttcagcagttcggcagggacatcgcagataccacagacgccgtgcgcgaccctcagaccctggagatcctggacatcacaccatgcagcttcggcggcgtgtccgtgatcacaccaggcaccaatacatccaaccaggtggccgtgctgtatcaggacgtgaattgtaccgaggtgcccgtggcaatccacgcagatcagctgacccctacatggcgggtgtactctaccggcagcaacgtgttccagacaagagccggatgcctgatcggagcagagcacgtgaacaatagctatgagtgcgacatccctatcggcgccggcatctgtgccagctaccagacccagacaaactccccatctggagcaggctccgtggccagccagtccatcatcgcctataccatgagcctgggcgccgagaacagcgtggcctactccaacaattctatcgccatccctaccaacttcacaatcagcgtgaccacagagatcctgccagtgtctatgaccaagacaagcgtggactgcacaatgtatatctgtggcgatagcaccgagtgctccaacctgctgctgcagtacggctccttttgtacccagctgaatagagccctgacaggcatcgccgtggagcaggataagaacacacaggaggtgttcgcccaggtgaagcagatctacaagaccccacccatcaaggactttggcggcttcaacttcagccagatcctgcctgatccaagcaagccctccaagaggtcttttatcgaggacctgctgttcaacaaggtgaccctggccgatgccggcttcatcaagcagtatggagattgcctgggagacatcgcagcccgcgacctgatctgtgcccagaagtttaatggcctgaccgtgctgcctccactgctgacagatgagatgatcgcccagtacacatctgccctgctggccggcaccatcacaagcggatggaccttcggcgcaggagccgccctgcagatcccttttgccatgcagatggcctataggttcaacggcatcggcgtgacccagaatgtgctgtacgagaaccagaagctgatcgccaatcagtttaacagcgccatcggcaagatccaggactctctgtcctctacagccagcgccctgggcaagctgcaggatgtggtgaatcagaacgcccaggccctgaataccctggtgaagcagctgagctccaacttcggcgccatctctagcgtgctgaatgacatcctgagccggctggacccccctgaggcagaggtgcagatcgacaggctgatcacaggccgcctgcagagcctgcagacctacgtgacacagcagctgatcagggcagcagagatcagagcctccgccaatctggccgccaccaagatgagcgagtgcgtgctgggacagtccaagagggtggacttttgtggcaagggctatcacctgatgtctttcccacagagcgcccctcacggcgtggtgtttctgcacgtgacctacgtgccagcccaggagaagaacttcaccacagcaccagccatctgccacgatggaaaggcacactttcctagggagggcgtgttcgtgtctaacggcacccactggtttgtgacacagcgcaatttctacgagccacagatcatcaccacagacaatacattcgtgagcggcaactgtgatgtggtgatcggcatcgtgaacaataccgtgtatgatccactgcagcccgagctggactcctttaaggaggagctggataagtacttcaagaatcacacctctcccgacgtggatctgggcgacatctccggcatcaatgcctctgtggtgaacatccagaaggagatcgaccggctgaacgaggtggccaagaatctgaacgagagcctgatcgatctgcaggagctgggcaagtatgagcagtacatcaagggctctggcagagagaacctgtatttccagggaggaggaggcagcggatacatccctgaggcaccaagggacggacaggcctacgtgcgcaaggatggcgagtgggtgctgctgtccacctttctgggccatcatcaccaccaccaccaccactga

SEQ ID NO: 5094 - DNA, 3846 bp, Artificial Sequence
  Description of Artificial Sequence: Synthetic polynucleotide
atgggcatcctgccaagcccaggaatgcccgccctgctgtctctggtgagcctgctgtccgtgctgctgatgggatgcgtggcagagacaggcacacagtgcgtgaacctgaccacaaggacccagctgccccctgcctataccaattctttcacacggggcgtgtactatcccgacaaggtgtttagaagctccgtgctgcactccacacaggatctgtttctgcctttcttttctaacgtgacctggttccacgccatccacgtgtccggcaccaatggcacaaagcggttcgacaatcccgtgctgccttttaacgatggcgtgtacttcgccagcaccgagaagtccaacatcatcagaggctggatctttggcaccacactggactctaagacacagagcctgctgatcgtgaacaatgccaccaacgtggtgatcaaggtgtgcgagttccagttttgtaatgatccattcctgggcgtgtactatcacaagaacaataagtcctggatggagtctgagtttcgcgtgtattctagcgccaacaattgcacatttgagtacgtgagccagcccttcctgatggacctggagggcaagcagggcaatttcaagaacctgagggagttcgtgtttaagaatatcgatggctacttcaagatctacagcaagcacaccccaatcaacctggtgcgcgacctgccacagggattctccgccctggagccactggtggatctgcccatcggcatcaacatcacccggtttcagacactgctggccctgcacagatcctacctgacaccaggcgactcctctagcggatggaccgcaggagctgccgcctactatgtgggctatctgcagccccggaccttcctgctgaagtacaacgagaatggcaccatcacagacgcagtggattgcgccctggaccccctgtctgagacaaagtgtacactgaagagctttaccgtggagaagggcatctatcagacaagcaatttcagggtgcagcctaccgagtccatcgtgcgctttcccaatatcacaaacctgtgccctctcggcgaggtgttcaacgccaccagattcgccagcgtgtacgcctggaatcggaagagaatctccaactgcgtggccgactattctgtgctgtacaactccgcctctttcagcacctttaagtgctatggcgtgtctcccacaaagctgaatgatctgtgctttaccaacgtgtacgccgatagcttcgtgatcaggggagacgaagtgagacagatcgcaccaggacagacaggaaagatcgcagactacaattataagctgcctgacgatttcaccggctgcgtgatcgcctggaactccaacaatctggattctaaagtgggcggcaactacaattatctgtacaggctgtttcgcaagtccaatctgaagccattcgagcgggacatctccacagagatctaccaggccggctctaccccctgcaatggcgtggagggctttaactgttatttccctctgcagtcttacggcttccagccaacaaacggcgtgggctatcagccctacagagtggtggtgctgtcctttgagctgctgcacgcaccagcaacagtgtgcggcccaaagaagtctaccaatctggtgaagaacaagtgcgtgaacttcaacttcaacggactgaccggcacaggcgtgctgaccgagagcaataagaagttcctgccttttcagcagttcggcagggacatcgcagataccacagacgccgtgcgcgaccctcagaccctggagatcctggacatcacaccatgcagcttcggcggcgtgtccgtgatcacaccaggcaccaatacatccaaccaggtggccgtgctgtatcaggacgtgaattgtaccgaggtgcccgtggcaatccacgcagatcagctgacccctacatggcgggtgtactctaccggcagcaacgtgttccagacaagagccggatgcctgatcggagcagagcacgtgaacaatagctatgagtgcgacatccctatcggcgccggcatctgtgccagctaccagacccagacaaactccccatctggagcaggctccgtggccagccagtccatcatcgcctataccatgagcctgggcgccgagaacagcgtggcctactccaacaattctatcgccatccctaccaacttcacaatcagcgtgaccacagagatcctgccagtgtctatgaccaagacaagcgtggactgcacaatgtatatctgtggcgatagcaccgagtgctccaacctgctgctgcagtacggctccttttgtacccagctgaatagagccctgacaggcatcgccgtggagcaggataagaacacacaggaggtgttcgcccaggtgaagcagatctacaagaccccacccatcaaggactttggcggcttcaacttcagccagatcctgcctgatccaagcaagccctccaagaggtcttttatcgaggacctgctgttcaacaaggtgaccctggccgatgccggcttcatcaagcagtatggagattgcctgggagacatcgcagcccgcgacctgatctgtgcccagaagtttaatggcctgaccgtgctgcctccactgctgacagatgagatgatcgcccagtacacatctgccctgctggccggcaccatcacaagcggatggaccttcggcgcaggagccgccctgcagatcccttttgccatgcagatggcctataggttcaacggcatcggcgtgacccagaatgtgctgtacgagaaccagaagctgatcgccaatcagtttaacagcgccatcggcaagatccaggactctctgtcctctacagccagcgccctgggcaagctgcaggatgtggtgaatcagaacgcccaggccctgaataccctggtgaagcagctgagctccaacttcggcgccatctctagcgtgctgaatgacatcctgagccggctggacccccctgaggcagaggtgcagatcgacaggctgatcacaggccgcctgcagagcctgcagacctacgtgacacagcagctgatcagggcagcagagatcagagcctccgccaatctggccgccaccaagatgagcgagtgcgtgctgggacagtccaagagggtggacttttgtggcaagggctatcacctgatgtctttcccacagagcgcccctcacggcgtggtgtttctgcacgtgacctacgtgccagcccaggagaagaacttcaccacagcaccagccatctgccacgatggaaaggcacactttcctagggagggcgtgttcgtgtctaacggcacccactggtttgtgacacagcgcaatttctacgagccacagatcatcaccacagacaatacattcgtgagcggcaactgtgatgtggtgatcggcatcgtgaacaataccgtgtatgatccactgcagcccgagctggactcctttaaggaggagctggataagtacttcaagaatcacacctctcccgacgtggatctgggcgacatctccggcatcaatgcctctgtggtgaacatccagaaggagatcgaccggctgaacgaggtggccaagaatctgaacgagagcctgatcgatctgcaggagctgggcaagtatgagcagtacatcaagggctctggcagagagaacctgtatttccagggaggaggaggcagcggatacatccctgaggcaccaagggacggacaggcctacgtgcgcaaggatggcgagtgggtgctgctgtccacctttctgggccatcatcaccaccaccaccaccactga

SEQ ID NO: 5095 - DNA, 3846 bp, Artificial Sequence
  Description of Artificial Sequence: Synthetic polynucleotide
atgggcatcctgccaagcccaggaatgcccgccctgctgtctctggtgagcctgctgtccgtgctgctgatgggatgcgtggcagagacaggcacacagtgcgtgaacctgaccacaaggacccagctgccccctgcctataccaattctttcacacggggcgtgtactatcccgacaaggtgtttagaagctccgtgctgcactccacacaggatctgtttctgcctttcttttctaacgtgacctggttccacgccatccacgtgtccggcaccaatggcacaaagcggttcgacaatcccgtgctgccttttaacgatggcgtgtacttcgccagcaccgagaagtccaacatcatcagaggctggatctttggcaccacactggactctaagacacagagcctgctgatcgtgaacaatgccaccaacgtggtgatcaaggtgtgcgagttccagttttgtaatgatccattcctgggcgtgtactatcacaagaacaataagtcctggatggagtctgagtttcgcgtgtattctagcgccaacaattgcacatttgagtacgtgagccagcccttcctgatggacctggagggcaagcagggcaatttcaagaacctgagggagttcgtgtttaagaatatcgatggctacttcaagatctacagcaagcacaccccaatcaacctggtgcgcgacctgccacagggattctccgccctggagccactggtggatctgcccatcggcatcaacatcacccggtttcagacactgctggccctgcacagatcctacctgacaccaggcgactcctctagcggatggaccgcaggagctgccgcctactatgtgggctatctgcagccccggaccttcctgctgaagtacaacgagaatggcaccatcacagacgcagtggattgcgccctggaccccctgtctgagacaaagtgtacactgaagagctttaccgtggagaagggcatctatcagacaagcaatttcagggtgcagcctaccgagtccatcgtgcgctttcccaatatcacaaacctgtgcccttttggcgaggtgttcaacgccaccagattcgccagcgtgtacgcctggaatcggaagagaatctccaactgcgtggccgactattctgtgctgtacaactccgcctctttcagcacctttaagtgctatggcgtgtctcccacaaagctgaatgatctgtgctttaccaacgtgtacgccgatagcttcgtgatcaggggagacgaagtgagacagatcgcaccaggacagacaggaaagatcgcagactacaattataagctgcctgacgatttcaccggctgcgtgatcgcctggaactccaactcactggattctaaagtgggcggcaactacaattatctgtacaggctgtttcgcaagtccaatctgaagccattcgagcgggacatctccacagagatctaccaggccggctctaccccctgcaatggcgtggagggctttaactgttatttccctctgcagtcttacggcttccagccaacaaacggcgtgggctatcagccctacagagtggtggtgctgtcctttgagctgctgcacgcaccagcaacagtgtgcggcccaaagaagtctaccaatctggtgaagaacaagtgcgtgaacttcaacttcaacggactgaccggcacaggcgtgctgaccgagagcaataagaagttcctgccttttcagcagttcggcagggacatcgcagataccacagacgccgtgcgcgaccctcagaccctggagatcctggacatcacaccatgcagcttcggcggcgtgtccgtgatcacaccaggcaccaatacatccaaccaggtggccgtgctgtatcaggacgtgaattgtaccgaggtgcccgtggcaatccacgcagatcagctgacccctacatggcgggtgtactctaccggcagcaacgtgttccagacaagagccggatgcctgatcggagcagagcacgtgaacaatagctatgagtgcgacatccctatcggcgccggcatctgtgccagctaccagacccagacaaactccccatctggagcaggctccgtggccagccagtccatcatcgcctataccatgagcctgggcgccgagaacagcgtggcctactccaacaattctatcgccatccctaccaacttcacaatcagcgtgaccacagagatcctgccagtgtctatgaccaagacaagcgtggactgcacaatgtatatctgtggcgatagcaccgagtgctccaacctgctgctgcagtacggctccttttgtacccagctgaatagagccctgacaggcatcgccgtggagcaggataagaacacacaggaggtgttcgcccaggtgaagcagatctacaagaccccacccatcaaggactttggcggcttcaacttcagccagatcctgcctgatccaagcaagccctccaagaggtcttttatcgaggacctgctgttcaacaaggtgaccctggccgatgccggcttcatcaagcagtatggagattgcctgggagacatcgcagcccgcgacctgatctgtgcccagaagtttaatggcctgaccgtgctgcctccactgctgacagatgagatgatcgcccagtacacatctgccctgctggccggcaccatcacaagcggatggaccttcggcgcaggagccgccctgcagatcccttttgccatgcagatggcctataggttcaacggcatcggcgtgacccagaatgtgctgtacgagaaccagaagctgatcgccaatcagtttaacagcgccatcggcaagatccaggactctctgtcctctacagccagcgccctgggcaagctgcaggatgtggtgaatcagaacgcccaggccctgaataccctggtgaagcagctgagctccaacttcggcgccatctctagcgtgctgaatgacatcctgagccggctggacccccctgaggcagaggtgcagatcgacaggctgatcacaggccgcctgcagagcctgcagacctacgtgacacagcagctgatcagggcagcagagatcagagcctccgccaatctggccgccaccaagatgagcgagtgcgtgctgggacagtccaagagggtggacttttgtggcaagggctatcacctgatgtctttcccacagagcgcccctcacggcgtggtgtttctgcacgtgacctacgtgccagcccaggagaagaacttcaccacagcaccagccatctgccacgatggaaaggcacactttcctagggagggcgtgttcgtgtctaacggcacccactggtttgtgacacagcgcaatttctacgagccacagatcatcaccacagacaatacattcgtgagcggcaactgtgatgtggtgatcggcatcgtgaacaataccgtgtatgatccactgcagcccgagctggactcctttaaggaggagctggataagtacttcaagaatcacacctctcccgacgtggatctgggcgacatctccggcatcaatgcctctgtggtgaacatccagaaggagatcgaccggctgaacgaggtggccaagaatctgaacgagagcctgatcgatctgcaggagctgggcaagtatgagcagtacatcaagggctctggcagagagaacctgtatttccagggaggaggaggcagcggatacatccctgaggcaccaagggacggacaggcctacgtgcgcaaggatggcgagtgggtgctgctgtccacctttctgggccatcatcaccaccaccaccaccactga

SEQ ID NO: 5096 - DNA, 3846 bp, Artificial Sequence
  Description of Artificial Sequence: Synthetic polynucleotide
atgggcatcctgccaagcccaggaatgcccgccctgctgtctctggtgagcctgctgtccgtgctgctgatgggatgcgtggcagagacaggcacacagtgcgtgaacctgaccacaaggacccagctgccccctgcctataccaattctttcacacggggcgtgtactatcccgacaaggtgtttagaagctccgtgctgcactccacacaggatctgtttctgcctttcttttctaacgtgacctggttccacgccatccacgtgtccggcaccaatggcacaaagcggttcgacaatcccgtgctgccttttaacgatggcgtgtacttcgccagcaccgagaagtccaacatcatcagaggctggatctttggcaccacactggactctaagacacagagcctgctgatcgtgaacaatgccaccaacgtggtgatcaaggtgtgcgagttccagttttgtaatgatccattcctgggcgtgtactatcacaagaacaataagtcctggatggagtctgagtttcgcgtgtattctagcgccaacaattgcacatttgagtacgtgagccagcccttcctgatggacctggagggcaagcagggcaatttcaagaacctgagggagttcgtgtttaagaatatcgatggctacttcaagatctacagcaagcacaccccaatcaacctggtgcgcgacctgccacagggattctccgccctggagccactggtggatctgcccatcggcatcaacatcacccggtttcagacactgctggccctgcacagatcctacctgacaccaggcgactcctctagcggatggaccgcaggagctgccgcctactatgtgggctatctgcagccccggaccttcctgctgaagtacaacgagaatggcaccatcacagacgcagtggattgcgccctggaccccctgtctgagacaaagtgtacactgaagagctttaccgtggagaagggcatctatcagacaagcaatttcagggtgcagcctaccgagtccatcgtgcgctttcccaatatcacaaacctgtgcccttttggcgaggtgttcaacgccaccagattcgccagcgtgtacgcctggaatcggaagagaatctccaactgcgtggccgactattctgtgctgtacaactccgcctctttcagcacctttaagtgctatggcgtgtctcccacaaagctgaatgatctgtgctttaccaacgtgtacgccgatagcttcgtgatcaggggagacgaagtgagacagatcgcaccaggacagacaggaaagatcgcagactacaattataagctgcctgacgatttcaccggctgcgtgatcgcctggaactccaacaatctggattctaaagtgggcggcaactacaattatctgtacaggctgtttcgcaagtccaatctggaaccattcgagcgggacatctccacagagatctaccaggccggctctaccccctgcaatggcgtggagggctttaactgttatttccctctgcagtcttacggcttccagccaacaaacggcgtgggctatcagccctacagagtggtggtgctgtcctttgagctgctgcacgcaccagcaacagtgtgcggcccaaagaagtctaccaatctggtgaagaacaagtgcgtgaacttcaacttcaacggactgaccggcacaggcgtgctgaccgagagcaataagaagttcctgccttttcagcagttcggcagggacatcgcagataccacagacgccgtgcgcgaccctcagaccctggagatcctggacatcacaccatgcagcttcggcggcgtgtccgtgatcacaccaggcaccaatacatccaaccaggtggccgtgctgtatcaggacgtgaattgtaccgaggtgcccgtggcaatccacgcagatcagctgacccctacatggcgggtgtactctaccggcagcaacgtgttccagacaagagccggatgcctgatcggagcagagcacgtgaacaatagctatgagtgcgacatccctatcggcgccggcatctgtgccagctaccagacccagacaaactccccatctggagcaggctccgtggccagccagtccatcatcgcctataccatgagcctgggcgccgagaacagcgtggcctactccaacaattctatcgccatccctaccaacttcacaatcagcgtgaccacagagatcctgccagtgtctatgaccaagacaagcgtggactgcacaatgtatatctgtggcgatagcaccgagtgctccaacctgctgctgcagtacggctccttttgtacccagctgaatagagccctgacaggcatcgccgtggagcaggataagaacacacaggaggtgttcgcccaggtgaagcagatctacaagaccccacccatcaaggactttggcggcttcaacttcagccagatcctgcctgatccaagcaagccctccaagaggtcttttatcgaggacctgctgttcaacaaggtgaccctggccgatgccggcttcatcaagcagtatggagattgcctgggagacatcgcagcccgcgacctgatctgtgcccagaagtttaatggcctgaccgtgctgcctccactgctgacagatgagatgatcgcccagtacacatctgccctgctggccggcaccatcacaagcggatggaccttcggcgcaggagccgccctgcagatcccttttgccatgcagatggcctataggttcaacggcatcggcgtgacccagaatgtgctgtacgagaaccagaagctgatcgccaatcagtttaacagcgccatcggcaagatccaggactctctgtcctctacagccagcgccctgggcaagctgcaggatgtggtgaatcagaacgcccaggccctgaataccctggtgaagcagctgagctccaacttcggcgccatctctagcgtgctgaatgacatcctgagccggctggacccccctgaggcagaggtgcagatcgacaggctgatcacaggccgcctgcagagcctgcagacctacgtgacacagcagctgatcagggcagcagagatcagagcctccgccaatctggccgccaccaagatgagcgagtgcgtgctgggacagtccaagagggtggacttttgtggcaagggctatcacctgatgtctttcccacagagcgcccctcacggcgtggtgtttctgcacgtgacctacgtgccagcccaggagaagaacttcaccacagcaccagccatctgccacgatggaaaggcacactttcctagggagggcgtgttcgtgtctaacggcacccactggtttgtgacacagcgcaatttctacgagccacagatcatcaccacagacaatacattcgtgagcggcaactgtgatgtggtgatcggcatcgtgaacaataccgtgtatgatccactgcagcccgagctggactcctttaaggaggagctggataagtacttcaagaatcacacctctcccgacgtggatctgggcgacatctccggcatcaatgcctctgtggtgaacatccagaaggagatcgaccggctgaacgaggtggccaagaatctgaacgagagcctgatcgatctgcaggagctgggcaagtatgagcagtacatcaagggctctggcagagagaacctgtatttccagggaggaggaggcagcggatacatccctgaggcaccaagggacggacaggcctacgtgcgcaaggatggcgagtgggtgctgctgtccacctttctgggccatcatcaccaccaccaccaccactga

SEQ ID NO: 5097 - DNA, 3846 bp, Artificial Sequence
  Description of Artificial Sequence: Synthetic polynucleotide
atgggcatcctgccaagcccaggaatgcccgccctgctgtctctggtgagcctgctgtccgtgctgctgatgggatgcgtggcagagacaggcacacagtgcgtgaacctgaccacaaggacccagctgccccctgcctataccaattctttcacacggggcgtgtactatcccgacaaggtgtttagaagctccgtgctgcactccacacaggatctgtttctgcctttcttttctaacgtgacctggttccacgccatccacgtgtccggcaccaatggcacaaagcggttcgacaatcccgtgctgccttttaacgatggcgtgtacttcgccagcaccgagaagtccaacatcatcagaggctggatctttggcaccacactggactctaagacacagagcctgctgatcgtgaacaatgccaccaacgtggtgatcaaggtgtgcgagttccagttttgtaatgatccattcctgggcgtgtactatcacaagaacaataagtcctggatggagtctgagtttcgcgtgtattctagcgccaacaattgcacatttgagtacgtgagccagcccttcctgatggacctggagggcaagcagggcaatttcaagaacctgagggagttcgtgtttaagaatatcgatggctacttcaagatctacagcaagcacaccccaatcaacctggtgcgcgacctgccacagggattctccgccctggagccactggtggatctgcccatcggcatcaacatcacccggtttcagacactgctggccctgcacagatcctacctgacaccaggcgactcctctagcggatggaccgcaggagctgccgcctactatgtgggctatctgcagccccggaccttcctgctgaagtacaacgagaatggcaccatcacagacgcagtggattgcgccctggaccccctgtctgagacaaagtgtacactgaagagctttaccgtggagaagggcatctatcagacaagcaatttcagggtgcagcctaccgagtccatcgtgcgctttcccaatatcacaaacctgtgcccttttggcgaggtgttcaacgccaccagattcgccagcgtgtacgcctggaatcggaagagaatctccaactgcgtggccgactattctgtgctgtacaactccgcctctttcagcacctttaagtgctatggcgtgtctcccacaaagctgaatgatctgtgctttaccaacgtgtacgccgatagcttcgtgatcaggggagacgaagtgagacagatcgcaccaggacagacaggaaagatcgcagactacaattataagctgcctgacgatttcaccggctgcgtgatcgcctggaactccaacaatctggattctaaagtgggcggcaactacaattatctgtacaggctgtttcgcaagtccaatctgaagccattcgagcgggacatctccacagaggaataccaggccggctctaccccctgcaatggcgtggagggctttaactgttatttccctctgcagtcttacggcttccagccaacaaacggcgtgggctatcagccctacagagtggtggtgctgtcctttgagctgctgcacgcaccagcaacagtgtgcggcccaaagaagtctaccaatctggtgaagaacaagtgcgtgaacttcaacttcaacggactgaccggcacaggcgtgctgaccgagagcaataagaagttcctgccttttcagcagttcggcagggacatcgcagataccacagacgccgtgcgcgaccctcagaccctggagatcctggacatcacaccatgcagcttcggcggcgtgtccgtgatcacaccaggcaccaatacatccaaccaggtggccgtgctgtatcaggacgtgaattgtaccgaggtgcccgtggcaatccacgcagatcagctgacccctacatggcgggtgtactctaccggcagcaacgtgttccagacaagagccggatgcctgatcggagcagagcacgtgaacaatagctatgagtgcgacatccctatcggcgccggcatctgtgccagctaccagacccagacaaactccccatctggagcaggctccgtggccagccagtccatcatcgcctataccatgagcctgggcgccgagaacagcgtggcctactccaacaattctatcgccatccctaccaacttcacaatcagcgtgaccacagagatcctgccagtgtctatgaccaagacaagcgtggactgcacaatgtatatctgtggcgatagcaccgagtgctccaacctgctgctgcagtacggctccttttgtacccagctgaatagagccctgacaggcatcgccgtggagcaggataagaacacacaggaggtgttcgcccaggtgaagcagatctacaagaccccacccatcaaggactttggcggcttcaacttcagccagatcctgcctgatccaagcaagccctccaagaggtcttttatcgaggacctgctgttcaacaaggtgaccctggccgatgccggcttcatcaagcagtatggagattgcctgggagacatcgcagcccgcgacctgatctgtgcccagaagtttaatggcctgaccgtgctgcctccactgctgacagatgagatgatcgcccagtacacatctgccctgctggccggcaccatcacaagcggatggaccttcggcgcaggagccgccctgcagatcccttttgccatgcagatggcctataggttcaacggcatcggcgtgacccagaatgtgctgtacgagaaccagaagctgatcgccaatcagtttaacagcgccatcggcaagatccaggactctctgtcctctacagccagcgccctgggcaagctgcaggatgtggtgaatcagaacgcccaggccctgaataccctggtgaagcagctgagctccaacttcggcgccatctctagcgtgctgaatgacatcctgagccggctggacccccctgaggcagaggtgcagatcgacaggctgatcacaggccgcctgcagagcctgcagacctacgtgacacagcagctgatcagggcagcagagatcagagcctccgccaatctggccgccaccaagatgagcgagtgcgtgctgggacagtccaagagggtggacttttgtggcaagggctatcacctgatgtctttcccacagagcgcccctcacggcgtggtgtttctgcacgtgacctacgtgccagcccaggagaagaacttcaccacagcaccagccatctgccacgatggaaaggcacactttcctagggagggcgtgttcgtgtctaacggcacccactggtttgtgacacagcgcaatttctacgagccacagatcatcaccacagacaatacattcgtgagcggcaactgtgatgtggtgatcggcatcgtgaacaataccgtgtatgatccactgcagcccgagctggactcctttaaggaggagctggataagtacttcaagaatcacacctctcccgacgtggatctgggcgacatctccggcatcaatgcctctgtggtgaacatccagaaggagatcgaccggctgaacgaggtggccaagaatctgaacgagagcctgatcgatctgcaggagctgggcaagtatgagcagtacatcaagggctctggcagagagaacctgtatttccagggaggaggaggcagcggatacatccctgaggcaccaagggacggacaggcctacgtgcgcaaggatggcgagtgggtgctgctgtccacctttctgggccatcatcaccaccaccaccaccactga

SEQ ID NO: 5098 - DNA, 3846 bp, Artificial Sequence
  Description of Artificial Sequence: Synthetic polynucleotide
atgggcatcctgccaagcccaggaatgcccgccctgctgtctctggtgagcctgctgtccgtgctgctgatgggatgcgtggcagagacaggcacacagtgcgtgaacctgaccacaaggacccagctgccccctgcctataccaattctttcacacggggcgtgtactatcccgacaaggtgtttagaagctccgtgctgcactccacacaggatctgtttctgcctttcttttctaacgtgacctggttccacgccatccacgtgtccggcaccaatggcacaaagcggttcgacaatcccgtgctgccttttaacgatggcgtgtacttcgccagcaccgagaagtccaacatcatcagaggctggatctttggcaccacactggactctaagacacagagcctgctgatcgtgaacaatgccaccaacgtggtgatcaaggtgtgcgagttccagttttgtaatgatccattcctgggcgtgtactatcacaagaacaataagtcctggatggagtctgagtttcgcgtgtattctagcgccaacaattgcacatttgagtacgtgagccagcccttcctgatggacctggagggcaagcagggcaatttcaagaacctgagggagttcgtgtttaagaatatcgatggctacttcaagatctacagcaagcacaccccaatcaacctggtgcgcgacctgccacagggattctccgccctggagccactggtggatctgcccatcggcatcaacatcacccggtttcagacactgctggccctgcacagatcctacctgacaccaggcgactcctctagcggatggaccgcaggagctgccgcctactatgtgggctatctgcagccccggaccttcctgctgaagtacaacgagaatggcaccatcacagacgcagtggattgcgccctggaccccctgtctgagacaaagtgtacactgaagagctttaccgtggagaagggcatctatcagacaagcaatttcagggtgcagcctaccgagtccatcgtgcgctttcccaatatcacaaacctgtgcccttttggcgaggtgttcaacgccaccagattcgccagcgtgtacgcctggaatcggaagagaatctccaactgcgtggccgactattctgtgctgtacaactccgcctctttcagcacctttaagtgctatggcgtgtctcccacaaagctgaatgatctgtgctttaccaacgtgtacgccgatagcttcgtgatcaggggagacgaagtgagacagatcgcaccaggacagacaggaaagatcgcagactacaattataagctgcctgacgatttcaccggctgcgtgatcgcctggaactccaacaatctggattctaaagtgggcggcaactacaattatctgtacaggctgtttcgcaagtccaatctgaagccattcgagcgggacatctccacagagatctaccaggccggctctaccccctgcaatggcgtggagggctttaactgttatttccctctgcagtcttacggcttccagccaacaaacggcgtgggctatcagccctacagagtggtggtgctgtcctttgagctgctgggggcaccagcaacagtgtgcggcccaaagaagtctaccaatctggtgaagaacaagtgcgtgaacttcaacttcaacggactgaccggcacaggcgtgctgaccgagagcaataagaagttcctgccttttcagcagttcggcagggacatcgcagataccacagacgccgtgcgcgaccctcagaccctggagatcctggacatcacaccatgcagcttcggcggcgtgtccgtgatcacaccaggcaccaatacatccaaccaggtggccgtgctgtatcaggacgtgaattgtaccgaggtgcccgtggcaatccacgcagatcagctgacccctacatggcgggtgtactctaccggcagcaacgtgttccagacaagagccggatgcctgatcggagcagagcacgtgaacaatagctatgagtgcgacatccctatcggcgccggcatctgtgccagctaccagacccagacaaactccccatctggagcaggctccgtggccagccagtccatcatcgcctataccatgagcctgggcgccgagaacagcgtggcctactccaacaattctatcgccatccctaccaacttcacaatcagcgtgaccacagagatcctgccagtgtctatgaccaagacaagcgtggactgcacaatgtatatctgtggcgatagcaccgagtgctccaacctgctgctgcagtacggctccttttgtacccagctgaatagagccctgacaggcatcgccgtggagcaggataagaacacacaggaggtgttcgcccaggtgaagcagatctacaagaccccacccatcaaggactttggcggcttcaacttcagccagatcctgcctgatccaagcaagccctccaagaggtcttttatcgaggacctgctgttcaacaaggtgaccctggccgatgccggcttcatcaagcagtatggagattgcctgggagacatcgcagcccgcgacctgatctgtgcccagaagtttaatggcctgaccgtgctgcctccactgctgacagatgagatgatcgcccagtacacatctgccctgctggccggcaccatcacaagcggatggaccttcggcgcaggagccgccctgcagatcccttttgccatgcagatggcctataggttcaacggcatcggcgtgacccagaatgtgctgtacgagaaccagaagctgatcgccaatcagtttaacagcgccatcggcaagatccaggactctctgtcctctacagccagcgccctgggcaagctgcaggatgtggtgaatcagaacgcccaggccctgaataccctggtgaagcagctgagctccaacttcggcgccatctctagcgtgctgaatgacatcctgagccggctggacccccctgaggcagaggtgcagatcgacaggctgatcacaggccgcctgcagagcctgcagacctacgtgacacagcagctgatcagggcagcagagatcagagcctccgccaatctggccgccaccaagatgagcgagtgcgtgctgggacagtccaagagggtggacttttgtggcaagggctatcacctgatgtctttcccacagagcgcccctcacggcgtggtgtttctgcacgtgacctacgtgccagcccaggagaagaacttcaccacagcaccagccatctgccacgatggaaaggcacactttcctagggagggcgtgttcgtgtctaacggcacccactggtttgtgacacagcgcaatttctacgagccacagatcatcaccacagacaatacattcgtgagcggcaactgtgatgtggtgatcggcatcgtgaacaataccgtgtatgatccactgcagcccgagctggactcctttaaggaggagctggataagtacttcaagaatcacacctctcccgacgtggatctgggcgacatctccggcatcaatgcctctgtggtgaacatccagaaggagatcgaccggctgaacgaggtggccaagaatctgaacgagagcctgatcgatctgcaggagctgggcaagtatgagcagtacatcaagggctctggcagagagaacctgtatttccagggaggaggaggcagcggatacatccctgaggcaccaagggacggacaggcctacgtgcgcaaggatggcgagtgggtgctgctgtccacctttctgggccatcatcaccaccaccaccaccactga

SEQ ID NO: 5099 - DNA, 3846 bp, Artificial Sequence
  Description of Artificial Sequence: Synthetic polynucleotide
atgggcatcctgccaagcccaggaatgcccgccctgctgtctctggtgagcctgctgtccgtgctgctgatgggatgcgtggcagagacaggcacacagtgcgtgaacctgaccacaaggacccagctgccccctgcctataccaattctttcacacggggcgtgtactatcccgacaaggtgtttagaagctccgtgctgcactccacacaggatctgtttctgcctttcttttctaacgtgacctggttccacgccatccacgtgtccggcaccaatggcacaaagcggttcgacaatcccgtgctgccttttaacgatggcgtgtacttcgccagcaccgagaagtccaacatcatcagaggctggatctttggcaccacactggactctaagacacagagcctgctgatcgtgaacaatgccaccaacgtggtgatcaaggtgtgcgagttccagttttgtaatgatccattcctgggcgtgtactatcacaagaacaataagtcctggatggagtctgagtttcgcgtgtattctagcgccaacaattgcacatttgagtacgtgagccagcccttcctgatggacctggagggcaagcagggcaatttcaagaacctgagggagttcgtgtttaagaatatcgatggctacttcaagatctacagcaagcacaccccaatcaacctggtgcgcgacctgccacagggattctccgccctggagccactggtggatctgcccatcggcatcaacatcacccggtttcagacactgctggccctgcacagatcctacctgacaccaggcgactcctctagcggatggaccgcaggagctgccgcctactatgtgggctatctgcagccccggaccttcctgctgaagtacaacgagaatggcaccatcacagacgcagtggattgcgccctggaccccctgtctgagacaaagtgtacactgaagagctttaccgtggagaagggcatctatcagacaagcaatttcagggtgcagcctaccgagtccatcgtgcgctttcccaatatcacaaacctgtgcccttttggcgaggtgttcaacgccaccagattcgccagcgtgtacgcctggaatcggaagagaatctccaactgcgtggccgactattctgtgctgtacaactccgcctctttcgttacctttaagtgctatggcgtgtctcccacaaagctgaatgatctgtgctttaccaacgtgtacgccgatagcttcgtgatcaggggagacgaagtgagacagatcgcaccaggacagacaggaaagatcgcagactacaattataagctgcctgacgatttcaccggctgcgtgatcgcctggaactccaacaatctggattctaaagtgggcggcaactacaattatctgtacaggctgtttcgcaagtccaatctgaagccattcgagcgggacatctccacagagatctaccaggccggctctaccccctgcaatggcgtggagggctttaactgttatttccctctgcagtcttacggcttccagccaacaaacggcgtgggctatcagccctacagagtggtggtgctgtcctttgagctgctgcacgcaccagcaacagtgtgcggcccaaagaagtctaccaatctggtgaagaacaagtgcgtgaacttcaacttcaacggactgaccggcacaggcgtgctgaccgagagcaataagaagttcctgccttttcagcagttcggcagggacatcgcagataccacagacgccgtgcgcgaccctcagaccctggagatcctggacatcacaccatgcagcttcggcggcgtgtccgtgatcacaccaggcaccaatacatccaaccaggtggccgtgctgtatcaggacgtgaattgtaccgaggtgcccgtggcaatccacgcagatcagctgacccctacatggcgggtgtactctaccggcagcaacgtgttccagacaagagccggatgcctgatcggagcagagcacgtgaacaatagctatgagtgcgacatccctatcggcgccggcatctgtgccagctaccagacccagacaaactccccatctggagcaggctccgtggccagccagtccatcatcgcctataccatgagcctgggcgccgagaacagcgtggcctactccaacaattctatcgccatccctaccaacttcacaatcagcgtgaccacagagatcctgccagtgtctatgaccaagacaagcgtggactgcacaatgtatatctgtggcgatagcaccgagtgctccaacctgctgctgcagtacggctccttttgtacccagctgaatagagccctgacaggcatcgccgtggagcaggataagaacacacaggaggtgttcgcccaggtgaagcagatctacaagaccccacccatcaaggactttggcggcttcaacttcagccagatcctgcctgatccaagcaagccctccaagaggtcttttatcgaggacctgctgttcaacaaggtgaccctggccgatgccggcttcatcaagcagtatggagattgcctgggagacatcgcagcccgcgacctgatctgtgcccagaagtttaatggcctgaccgtgctgcctccactgctgacagatgagatgatcgcccagtacacatctgccctgctggccggcaccatcacaagcggatggaccttcggcgcaggagccgccctgcagatcccttttgccatgcagatggcctataggttcaacggcatcggcgtgacccagaatgtgctgtacgagaaccagaagctgatcgccaatcagtttaacagcgccatcggcaagatccaggactctctgtcctctacagccagcgccctgggcaagctgcaggatgtggtgaatcagaacgcccaggccctgaataccctggtgaagcagctgagctccaacttcggcgccatctctagcgtgctgaatgacatcctgagccggctggacccccctgaggcagaggtgcagatcgacaggctgatcacaggccgcctgcagagcctgcagacctacgtgacacagcagctgatcagggcagcagagatcagagcctccgccaatctggccgccaccaagatgagcgagtgcgtgctgggacagtccaagagggtggacttttgtggcaagggctatcacctgatgtctttcccacagagcgcccctcacggcgtggtgtttctgcacgtgacctacgtgccagcccaggagaagaacttcaccacagcaccagccatctgccacgatggaaaggcacactttcctagggagggcgtgttcgtgtctaacggcacccactggtttgtgacacagcgcaatttctacgagccacagatcatcaccacagacaatacattcgtgagcggcaactgtgatgtggtgatcggcatcgtgaacaataccgtgtatgatccactgcagcccgagctggactcctttaaggaggagctggataagtacttcaagaatcacacctctcccgacgtggatctgggcgacatctccggcatcaatgcctctgtggtgaacatccagaaggagatcgaccggctgaacgaggtggccaagaatctgaacgagagcctgatcgatctgcaggagctgggcaagtatgagcagtacatcaagggctctggcagagagaacctgtatttccagggaggaggaggcagcggatacatccctgaggcaccaagggacggacaggcctacgtgcgcaaggatggcgagtgggtgctgctgtccacctttctgggccatcatcaccaccaccaccaccactga

SEQ ID NO: 5100 - DNA, 3846 bp, Artificial Sequence
  Description of Artificial Sequence: Synthetic polynucleotide
atgggcatcctgccaagcccaggaatgcccgccctgctgtctctggtgagcctgctgtccgtgctgctgatgggatgcgtggcagagacaggcacacagtgcgtgaacctgaccacaaggacccagctgccccctgcctataccaattctttcacacggggcgtgtactatcccgacaaggtgtttagaagctccgtgctgcactccacacaggatctgtttctgcctttcttttctaacgtgacctggttccacgccatccacgtgtccggcaccaatggcacaaagcggttcgacaatcccgtgctgccttttaacgatggcgtgtacttcgccagcaccgagaagtccaacatcatcagaggctggatctttggcaccacactggactctaagacacagagcctgctgatcgtgaacaatgccaccaacgtggtgatcaaggtgtgcgagttccagttttgtaatgatccattcctgggcgtgtactatcacaagaacaataagtcctggatggagtctgagtttcgcgtgtattctagcgccaacaattgcacatttgagtacgtgagccagcccttcctgatggacctggagggcaagcagggcaatttcaagaacctgagggagttcgtgtttaagaatatcgatggctacttcaagatctacagcaagcacaccccaatcaacctggtgcgcgacctgccacagggattctccgccctggagccactggtggatctgcccatcggcatcaacatcacccggtttcagacactgctggccctgcacagatcctacctgacaccaggcgactcctctagcggatggaccgcaggagctgccgcctactatgtgggctatctgcagccccggaccttcctgctgaagtacaacgagaatggcaccatcacagacgcagtggattgcgccctggaccccctgtctgagacaaagtgtacactgaagagctttaccgtggagaagggcatctatcagacaagcaatttcagggtgcagcctaccgagtccatcgtgcgctttcccaatatcacaaacctgtgcccttttggcgaggtgttcaacgccaccagattcgccagcgtgtacgcctggaatcggaagagaatctccaaatgcgtggccgactattctgtgctgtacaactccgcctctttcagcacctttaagtgctatggcgtgtctcccacaaagctgaatgatctgtgctttaccaacgtgtacgccgatagcttcgtgatcaggggagacgaagtgagacagatcgcaccaggacagacaggaaagatcgcagactacaattataagctgcctgacgatttcaccggctgcgtgatcgcctggaactccaacaatctggattctaaagtgggcggcaactacaattatctgtacaggctgtttcgcaagtccaatctgaagccattcgagcgggacatctccacagagatctaccaggccggctctaccccctgcaatggcgtggagggctttaactgttatttccctctgcagtcttacggcttccagccaacaaacggcgtgggctatcagccctacagagtggtggtgctgtcctttgagctgctgcacgcaccagcaacagtgtgcggcccaaagaagtctaccaatctggtgaagaacaagtgcgtgaacttcaacttcaacggactgaccggcacaggcgtgctgaccgagagcaataagaagttcctgccttttcagcagttcggcagggacatcgcagataccacagacgccgtgcgcgaccctcagaccctggagatcctggacatcacaccatgcagcttcggcggcgtgtccgtgatcacaccaggcaccaatacatccaaccaggtggccgtgctgtatcaggacgtgaattgtaccgaggtgcccgtggcaatccacgcagatcagctgacccctacatggcgggtgtactctaccggcagcaacgtgttccagacaagagccggatgcctgatcggagcagagcacgtgaacaatagctatgagtgcgacatccctatcggcgccggcatctgtgccagctaccagacccagacaaactccccatctggagcaggctccgtggccagccagtccatcatcgcctataccatgagcctgggcgccgagaacagcgtggcctactccaacaattctatcgccatccctaccaacttcacaatcagcgtgaccacagagatcctgccagtgtctatgaccaagacaagcgtggactgcacaatgtatatctgtggcgatagcaccgagtgctccaacctgctgctgcagtacggctccttttgtacccagctgaatagagccctgacaggcatcgccgtggagcaggataagaacacacaggaggtgttcgcccaggtgaagcagatctacaagaccccacccatcaaggactttggcggcttcaacttcagccagatcctgcctgatccaagcaagccctccaagaggtcttttatcgaggacctgctgttcaacaaggtgaccctggccgatgccggcttcatcaagcagtatggagattgcctgggagacatcgcagcccgcgacctgatctgtgcccagaagtttaatggcctgaccgtgctgcctccactgctgacagatgagatgatcgcccagtacacatctgccctgctggccggcaccatcacaagcggatggaccttcggcgcaggagccgccctgcagatcccttttgccatgcagatggcctataggttcaacggcatcggcgtgacccagaatgtgctgtacgagaaccagaagctgatcgccaatcagtttaacagcgccatcggcaagatccaggactctctgtcctctacagccagcgccctgggcaagctgcaggatgtggtgaatcagaacgcccaggccctgaataccctggtgaagcagctgagctccaacttcggcgccatctctagcgtgctgaatgacatcctgagccggctggacccccctgaggcagaggtgcagatcgacaggctgatcacaggccgcctgcagagcctgcagacctacgtgacacagcagctgatcagggcagcagagatcagagcctccgccaatctggccgccaccaagatgagcgagtgcgtgctgggacagtccaagagggtggacttttgtggcaagggctatcacctgatgtctttcccacagagcgcccctcacggcgtggtgtttctgcacgtgacctacgtgccagcccaggagaagaacttcaccacagcaccagccatctgccacgatggaaaggcacactttcctagggagggcgtgttcgtgtctaacggcacccactggtttgtgacacagcgcaatttctacgagccacagatcatcaccacagacaatacattcgtgagcggcaactgtgatgtggtgatcggcatcgtgaacaataccgtgtatgatccactgcagcccgagctggactcctttaaggaggagctggataagtacttcaagaatcacacctctcccgacgtggatctgggcgacatctccggcatcaatgcctctgtggtgaacatccagaaggagatcgaccggctgaacgaggtggccaagaatctgaacgagagcctgatcgatctgcaggagctgggcaagtatgagcagtacatcaagggctctggcagagagaacctgtatttccagggaggaggaggcagcggatacatccctgaggcaccaagggacggacaggcctacgtgcgcaaggatggcgagtgggtgctgctgtccacctttctgggccatcatcaccaccaccaccaccactga

SEQ ID NO: 5101 - DNA, 3846 bp, Artificial Sequence
  Description of Artificial Sequence: Synthetic polynucleotide
atgggcatcctgccaagcccaggaatgcccgccctgctgtctctggtgagcctgctgtccgtgctgctgatgggatgcgtggcagagacaggcacacagtgcgtgaacctgaccacaaggacccagctgccccctgcctataccaattctttcacacggggcgtgtactatcccgacaaggtgtttagaagctccgtgctgcactccacacaggatctgtttctgcctttcttttctaacgtgacctggttccacgccatccacgtgtccggcaccaatggcacaaagcggttcgacaatcccgtgctgccttttaacgatggcgtgtacttcgccagcaccgagaagtccaacatcatcagaggctggatctttggcaccacactggactctaagacacagagcctgctgatcgtgaacaatgccaccaacgtggtgatcaaggtgtgcgagttccagttttgtaatgatccattcctgggcgtgtactatcacaagaacaataagtcctggatggagtctgagtttcgcgtgtattctagcgccaacaattgcacatttgagtacgtgagccagcccttcctgatggacctggagggcaagcagggcaatttcaagaacctgagggagttcgtgtttaagaatatcgatggctacttcaagatctacagcaagcacaccccaatcaacctggtgcgcgacctgccacagggattctccgccctggagccactggtggatctgcccatcggcatcaacatcacccggtttcagacactgctggccctgcacagatcctacctgacaccaggcgactcctctagcggatggaccgcaggagctgccgcctactatgtgggctatctgcagccccggaccttcctgctgaagtacaacgagaatggcaccatcacagacgcagtggattgcgccctggaccccctgtctgagacaaagtgtacactgaagagctttaccgtggagaagggcatctatcagacaagcaatttcagggtgcagcctaccgagtccatcgtgcgctttcccaatatcacaaacctgtgcccttttggcgaggtgttcaacgccaccagattcgccagcgtgtacgcctggaatcggaagagaatctccaactgcgtggccgactattctgtgctgtacaactccgcctctttcagcacctttaagtgctatggcgtgtctcccacaaagctgaatgatctgtgctttaccaacgtgtacgccgatagcttcgtgatcaggggagacgaagtgagacagatcgcaccaggacagacaggaaagatcgcagactacaattataagctgcctgacgatttcaccggctgcgtgatcgcctggaactccaacaatctggattctaaagtgggcggcaactacaattatctgtacaggctgtttcgcaagtccaatctgaagccattcgagcgggacatctccacagagatctaccaggccggctctaccccctgcaatggcgtggagggctttaactgttatttccctctgcagtcttacgacttccagccaacaaacggcgtgggctatcagccctacagagtggtggtgctgtcctttgagctgctgcacgcaccagcaacagtgtgcggcccaaagaagtctaccaatctggtgaagaacaagtgcgtgaacttcaacttcaacggactgaccggcacaggcgtgctgaccgagagcaataagaagttcctgccttttcagcagttcggcagggacatcgcagataccacagacgccgtgcgcgaccctcagaccctggagatcctggacatcacaccatgcagcttcggcggcgtgtccgtgatcacaccaggcaccaatacatccaaccaggtggccgtgctgtatcaggacgtgaattgtaccgaggtgcccgtggcaatccacgcagatcagctgacccctacatggcgggtgtactctaccggcagcaacgtgttccagacaagagccggatgcctgatcggagcagagcacgtgaacaatagctatgagtgcgacatccctatcggcgccggcatctgtgccagctaccagacccagacaaactccccatctggagcaggctccgtggccagccagtccatcatcgcctataccatgagcctgggcgccgagaacagcgtggcctactccaacaattctatcgccatccctaccaacttcacaatcagcgtgaccacagagatcctgccagtgtctatgaccaagacaagcgtggactgcacaatgtatatctgtggcgatagcaccgagtgctccaacctgctgctgcagtacggctccttttgtacccagctgaatagagccctgacaggcatcgccgtggagcaggataagaacacacaggaggtgttcgcccaggtgaagcagatctacaagaccccacccatcaaggactttggcggcttcaacttcagccagatcctgcctgatccaagcaagccctccaagaggtcttttatcgaggacctgctgttcaacaaggtgaccctggccgatgccggcttcatcaagcagtatggagattgcctgggagacatcgcagcccgcgacctgatctgtgcccagaagtttaatggcctgaccgtgctgcctccactgctgacagatgagatgatcgcccagtacacatctgccctgctggccggcaccatcacaagcggatggaccttcggcgcaggagccgccctgcagatcccttttgccatgcagatggcctataggttcaacggcatcggcgtgacccagaatgtgctgtacgagaaccagaagctgatcgccaatcagtttaacagcgccatcggcaagatccaggactctctgtcctctacagccagcgccctgggcaagctgcaggatgtggtgaatcagaacgcccaggccctgaataccctggtgaagcagctgagctccaacttcggcgccatctctagcgtgctgaatgacatcctgagccggctggacccccctgaggcagaggtgcagatcgacaggctgatcacaggccgcctgcagagcctgcagacctacgtgacacagcagctgatcagggcagcagagatcagagcctccgccaatctggccgccaccaagatgagcgagtgcgtgctgggacagtccaagagggtggacttttgtggcaagggctatcacctgatgtctttcccacagagcgcccctcacggcgtggtgtttctgcacgtgacctacgtgccagcccaggagaagaacttcaccacagcaccagccatctgccacgatggaaaggcacactttcctagggagggcgtgttcgtgtctaacggcacccactggtttgtgacacagcgcaatttctacgagccacagatcatcaccacagacaatacattcgtgagcggcaactgtgatgtggtgatcggcatcgtgaacaataccgtgtatgatccactgcagcccgagctggactcctttaaggaggagctggataagtacttcaagaatcacacctctcccgacgtggatctgggcgacatctccggcatcaatgcctctgtggtgaacatccagaaggagatcgaccggctgaacgaggtggccaagaatctgaacgagagcctgatcgatctgcaggagctgggcaagtatgagcagtacatcaagggctctggcagagagaacctgtatttccagggaggaggaggcagcggatacatccctgaggcaccaagggacggacaggcctacgtgcgcaaggatggcgagtgggtgctgctgtccacctttctgggccatcatcaccaccaccaccaccactga

SEQ ID NO: 5102 - DNA, 3846 bp, Artificial Sequence
  Description of Artificial Sequence: Synthetic polynucleotide
atgggcatcctgccaagcccaggaatgcccgccctgctgtctctggtgagcctgctgtccgtgctgctgatgggatgcgtggcagagacaggcacacagtgcgtgaacctgaccacaaggacccagctgccccctgcctataccaattctttcacacggggcgtgtactatcccgacaaggtgtttagaagctccgtgctgcactccacacaggatctgtttctgcctttcttttctaacgtgacctggttccacgccatccacgtgtccggcaccaatggcacaaagcggttcgacaatcccgtgctgccttttaacgatggcgtgtacttcgccagcaccgagaagtccaacatcatcagaggctggatctttggcaccacactggactctaagacacagagcctgctgatcgtgaacaatgccaccaacgtggtgatcaaggtgtgcgagttccagttttgtaatgatccattcctgggcgtgtactatcacaagaacaataagtcctggatggagtctgagtttcgcgtgtattctagcgccaacaattgcacatttgagtacgtgagccagcccttcctgatggacctggagggcaagcagggcaatttcaagaacctgagggagttcgtgtttaagaatatcgatggctacttcaagatctacagcaagcacaccccaatcaacctggtgcgcgacctgccacagggattctccgccctggagccactggtggatctgcccatcggcatcaacatcacccggtttcagacactgctggccctgcacagatcctacctgacaccaggcgactcctctagcggatggaccgcaggagctgccgcctactatgtgggctatctgcagccccggaccttcctgctgaagtacaacgagaatggcaccatcacagacgcagtggattgcgccctggaccccctgtctgagacaaagtgtacactgaagagctttaccgtggagaagggcatctatcagacaagcaatttcagggtgcagcctaccgagtccatcgtgcgctttcccaatatcacaaacctgtgcccttttggcgaggtgttcaacgccaccagattcgccagcgtgtacgcctggaatcggaagagaatctccaactgcgtggccgactattctgtgctgtacaactccgcctctttcagcacctttaagtgctatggcgtgtctcccacaaagctgaatgatctgtgctttaccaacgtgtacgccgatagcttcgtgatcaggggagacgaagtgagacagatcgcaccaggacagacaggaaagatcgcagactacaattataagctgcctgacgatttcaccggctgcgtgatcgcctggaactccaacaatctggattctaaagtgggcggcaactacaattatctgtacaggctgtttcgcaagtccaatctgaagccagtcgagcgggacatctccacagagatctaccaggccggctctaccccctgcaatggcgtggagggctttaactgttatttccctctgcagtcttacggcttccagccaacaaacggcgtgggctatcagccctacagagtggtggtgctgtcctttgagctgctgcacgcaccagcaacagtgtgcggcccaaagaagtctaccaatctggtgaagaacaagtgcgtgaacttcaacttcaacggactgaccggcacaggcgtgctgaccgagagcaataagaagttcctgccttttcagcagttcggcagggacatcgcagataccacagacgccgtgcgcgaccctcagaccctggagatcctggacatcacaccatgcagcttcggcggcgtgtccgtgatcacaccaggcaccaatacatccaaccaggtggccgtgctgtatcaggacgtgaattgtaccgaggtgcccgtggcaatccacgcagatcagctgacccctacatggcgggtgtactctaccggcagcaacgtgttccagacaagagccggatgcctgatcggagcagagcacgtgaacaatagctatgagtgcgacatccctatcggcgccggcatctgtgccagctaccagacccagacaaactccccatctggagcaggctccgtggccagccagtccatcatcgcctataccatgagcctgggcgccgagaacagcgtggcctactccaacaattctatcgccatccctaccaacttcacaatcagcgtgaccacagagatcctgccagtgtctatgaccaagacaagcgtggactgcacaatgtatatctgtggcgatagcaccgagtgctccaacctgctgctgcagtacggctccttttgtacccagctgaatagagccctgacaggcatcgccgtggagcaggataagaacacacaggaggtgttcgcccaggtgaagcagatctacaagaccccacccatcaaggactttggcggcttcaacttcagccagatcctgcctgatccaagcaagccctccaagaggtcttttatcgaggacctgctgttcaacaaggtgaccctggccgatgccggcttcatcaagcagtatggagattgcctgggagacatcgcagcccgcgacctgatctgtgcccagaagtttaatggcctgaccgtgctgcctccactgctgacagatgagatgatcgcccagtacacatctgccctgctggccggcaccatcacaagcggatggaccttcggcgcaggagccgccctgcagatcccttttgccatgcagatggcctataggttcaacggcatcggcgtgacccagaatgtgctgtacgagaaccagaagctgatcgccaatcagtttaacagcgccatcggcaagatccaggactctctgtcctctacagccagcgccctgggcaagctgcaggatgtggtgaatcagaacgcccaggccctgaataccctggtgaagcagctgagctccaacttcggcgccatctctagcgtgctgaatgacatcctgagccggctggacccccctgaggcagaggtgcagatcgacaggctgatcacaggccgcctgcagagcctgcagacctacgtgacacagcagctgatcagggcagcagagatcagagcctccgccaatctggccgccaccaagatgagcgagtgcgtgctgggacagtccaagagggtggacttttgtggcaagggctatcacctgatgtctttcccacagagcgcccctcacggcgtggtgtttctgcacgtgacctacgtgccagcccaggagaagaacttcaccacagcaccagccatctgccacgatggaaaggcacactttcctagggagggcgtgttcgtgtctaacggcacccactggtttgtgacacagcgcaatttctacgagccacagatcatcaccacagacaatacattcgtgagcggcaactgtgatgtggtgatcggcatcgtgaacaataccgtgtatgatccactgcagcccgagctggactcctttaaggaggagctggataagtacttcaagaatcacacctctcccgacgtggatctgggcgacatctccggcatcaatgcctctgtggtgaacatccagaaggagatcgaccggctgaacgaggtggccaagaatctgaacgagagcctgatcgatctgcaggagctgggcaagtatgagcagtacatcaagggctctggcagagagaacctgtatttccagggaggaggaggcagcggatacatccctgaggcaccaagggacggacaggcctacgtgcgcaaggatggcgagtgggtgctgctgtccacctttctgggccatcatcaccaccaccaccaccactga

SEQ ID NO: 5103 - DNA, 3846 bp, Artificial Sequence
  Description of Artificial Sequence: Synthetic polynucleotide
atgggcatcctgccaagcccaggaatgcccgccctgctgtctctggtgagcctgctgtccgtgctgctgatgggatgcgtggcagagacaggcacacagtgcgtgaacctgaccacaaggacccagctgccccctgcctataccaattctttcacacggggcgtgtactatcccgacaaggtgtttagaagctccgtgctgcactccacacaggatctgtttctgcctttcttttctaacgtgacctggttccacgccatccacgtgtccggcaccaatggcacaaagcggttcgacaatcccgtgctgccttttaacgatggcgtgtacttcgccagcaccgagaagtccaacatcatcagaggctggatctttggcaccacactggactctaagacacagagcctgctgatcgtgaacaatgccaccaacgtggtgatcaaggtgtgcgagttccagttttgtaatgatccattcctgggcgtgtactatcacaagaacaataagtcctggatggagtctgagtttcgcgtgtattctagcgccaacaattgcacatttgagtacgtgagccagcccttcctgatggacctggagggcaagcagggcaatttcaagaacctgagggagttcgtgtttaagaatatcgatggctacttcaagatctacagcaagcacaccccaatcaacctggtgcgcgacctgccacagggattctccgccctggagccactggtggatctgcccatcggcatcaacatcacccggtttcagacactgctggccctgcacagatcctacctgacaccaggcgactcctctagcggatggaccgcaggagctgccgcctactatgtgggctatctgcagccccggaccttcctgctgaagtacaacgagaatggcaccatcacagacgcagtggattgcgccctggaccccctgtctgagacaaagtgtacactgaagagctttaccgtggagaagggcatctatcagacaagcaatttcagggtgcagcctaccgagtccatcgtgcgctttcccaatatcacaaacctgtgcccttttggcgaggtgttcaacgccaccagattcgccagcgtgtacgcctggaatcggaagagaatctccaactgcgtggccgactattctgtgctgtacaactccgcctctttcagcacctttaagtgctatggcgtgtctcccacaaagctgaatgatctgtgctttaccaacgtgtacgccgatagcttcgtgatcaggggagacgaagtgagacagatcgcaccaggacagacaggaaagatcgcagactacaattataagctgcctgacgatttcaccggctgcgtgatcgcctggaactccaacaatctggattctaaagtgggcggcaactacaattatctgtacaggctgtttcgcaagtccaatcgaaagccattcgagcgggacatctccacagagatctaccaggccggctctaccccctgcaatggcgtggagggctttaactgttatttccctctgcagtcttacggcttccagccaacaaacggcgtgggctatcagccctacagagtggtggtgctgtcctttgagctgctgcacgcaccagcaacagtgtgcggcccaaagaagtctaccaatctggtgaagaacaagtgcgtgaacttcaacttcaacggactgaccggcacaggcgtgctgaccgagagcaataagaagttcctgccttttcagcagttcggcagggacatcgcagataccacagacgccgtgcgcgaccctcagaccctggagatcctggacatcacaccatgcagcttcggcggcgtgtccgtgatcacaccaggcaccaatacatccaaccaggtggccgtgctgtatcaggacgtgaattgtaccgaggtgcccgtggcaatccacgcagatcagctgacccctacatggcgggtgtactctaccggcagcaacgtgttccagacaagagccggatgcctgatcggagcagagcacgtgaacaatagctatgagtgcgacatccctatcggcgccggcatctgtgccagctaccagacccagacaaactccccatctggagcaggctccgtggccagccagtccatcatcgcctataccatgagcctgggcgccgagaacagcgtggcctactccaacaattctatcgccatccctaccaacttcacaatcagcgtgaccacagagatcctgccagtgtctatgaccaagacaagcgtggactgcacaatgtatatctgtggcgatagcaccgagtgctccaacctgctgctgcagtacggctccttttgtacccagctgaatagagccctgacaggcatcgccgtggagcaggataagaacacacaggaggtgttcgcccaggtgaagcagatctacaagaccccacccatcaaggactttggcggcttcaacttcagccagatcctgcctgatccaagcaagccctccaagaggtcttttatcgaggacctgctgttcaacaaggtgaccctggccgatgccggcttcatcaagcagtatggagattgcctgggagacatcgcagcccgcgacctgatctgtgcccagaagtttaatggcctgaccgtgctgcctccactgctgacagatgagatgatcgcccagtacacatctgccctgctggccggcaccatcacaagcggatggaccttcggcgcaggagccgccctgcagatcccttttgccatgcagatggcctataggttcaacggcatcggcgtgacccagaatgtgctgtacgagaaccagaagctgatcgccaatcagtttaacagcgccatcggcaagatccaggactctctgtcctctacagccagcgccctgggcaagctgcaggatgtggtgaatcagaacgcccaggccctgaataccctggtgaagcagctgagctccaacttcggcgccatctctagcgtgctgaatgacatcctgagccggctggacccccctgaggcagaggtgcagatcgacaggctgatcacaggccgcctgcagagcctgcagacctacgtgacacagcagctgatcagggcagcagagatcagagcctccgccaatctggccgccaccaagatgagcgagtgcgtgctgggacagtccaagagggtggacttttgtggcaagggctatcacctgatgtctttcccacagagcgcccctcacggcgtggtgtttctgcacgtgacctacgtgccagcccaggagaagaacttcaccacagcaccagccatctgccacgatggaaaggcacactttcctagggagggcgtgttcgtgtctaacggcacccactggtttgtgacacagcgcaatttctacgagccacagatcatcaccacagacaatacattcgtgagcggcaactgtgatgtggtgatcggcatcgtgaacaataccgtgtatgatccactgcagcccgagctggactcctttaaggaggagctggataagtacttcaagaatcacacctctcccgacgtggatctgggcgacatctccggcatcaatgcctctgtggtgaacatccagaaggagatcgaccggctgaacgaggtggccaagaatctgaacgagagcctgatcgatctgcaggagctgggcaagtatgagcagtacatcaagggctctggcagagagaacctgtatttccagggaggaggaggcagcggatacatccctgaggcaccaagggacggacaggcctacgtgcgcaaggatggcgagtgggtgctgctgtccacctttctgggccatcatcaccaccaccaccaccactga

SEQ ID NO: 5104 - DNA, 3846 bp, Artificial Sequence
  Description of Artificial Sequence: Synthetic polynucleotide
atgggcatcctgccaagcccaggaatgcccgccctgctgtctctggtgagcctgctgtccgtgctgctgatgggatgcgtggcagagacaggcacacagtgcgtgaacctgaccacaaggacccagctgccccctgcctataccaattctttcacacggggcgtgtactatcccgacaaggtgtttagaagctccgtgctgcactccacacaggatctgtttctgcctttcttttctaacgtgacctggttccacgccatccacgtgtccggcaccaatggcacaaagcggttcgacaatcccgtgctgccttttaacgatggcgtgtacttcgccagcaccgagaagtccaacatcatcagaggctggatctttggcaccacactggactctaagacacagagcctgctgatcgtgaacaatgccaccaacgtggtgatcaaggtgtgcgagttccagttttgtaatgatccattcctgggcgtgtactatcacaagaacaataagtcctggatggagtctgagtttcgcgtgtattctagcgccaacaattgcacatttgagtacgtgagccagcccttcctgatggacctggagggcaagcagggcaatttcaagaacctgagggagttcgtgtttaagaatatcgatggctacttcaagatctacagcaagcacaccccaatcaacctggtgcgcgacctgccacagggattctccgccctggagccactggtggatctgcccatcggcatcaacatcacccggtttcagacactgctggccctgcacagatcctacctgacaccaggcgactcctctagcggatggaccgcaggagctgccgcctactatgtgggctatctgcagccccggaccttcctgctgaagtacaacgagaatggcaccatcacagacgcagtggattgcgccctggaccccctgtctgagacaaagtgtacactgaagagctttaccgtggagaagggcatctatcagacaagcaatttcagggtgcagcctaccgagtccatcgtgcgctttcccaatatcacaaacctgtgcccttttggcgaggtgttcaacgccaccagattcgccagcgtgtacgcctggaatcggaagagaatctccaactgcgtggccgactattctgtgctgtacaactccgcctctttcagcacctttaagtgctatggcgtgtctcccacaaagctgacggatctgtgctttaccaacgtgtacgccgatagcttcgtgatcaggggagacgaagtgagacagatcgcaccaggacagacaggaaagatcgcagactacaattataagctgcctgacgatttcaccggctgcgtgatcgcctggaactccaacaatctggattctaaagtgggcggcaactacaattatctgtacaggctgtttcgcaagtccaatctgaagccattcgagcgggacatctccacagagatctaccaggccggctctaccccctgcaatggcgtggagggctttaactgttatttccctctgcagtcttacggcttccagccaacaaacggcgtgggctatcagccctacagagtggtggtgctgtcctttgagctgctgcacgcaccagcaacagtgtgcggcccaaagaagtctaccaatctggtgaagaacaagtgcgtgaacttcaacttcaacggactgaccggcacaggcgtgctgaccgagagcaataagaagttcctgccttttcagcagttcggcagggacatcgcagataccacagacgccgtgcgcgaccctcagaccctggagatcctggacatcacaccatgcagcttcggcggcgtgtccgtgatcacaccaggcaccaatacatccaaccaggtggccgtgctgtatcaggacgtgaattgtaccgaggtgcccgtggcaatccacgcagatcagctgacccctacatggcgggtgtactctaccggcagcaacgtgttccagacaagagccggatgcctgatcggagcagagcacgtgaacaatagctatgagtgcgacatccctatcggcgccggcatctgtgccagctaccagacccagacaaactccccatctggagcaggctccgtggccagccagtccatcatcgcctataccatgagcctgggcgccgagaacagcgtggcctactccaacaattctatcgccatccctaccaacttcacaatcagcgtgaccacagagatcctgccagtgtctatgaccaagacaagcgtggactgcacaatgtatatctgtggcgatagcaccgagtgctccaacctgctgctgcagtacggctccttttgtacccagctgaatagagccctgacaggcatcgccgtggagcaggataagaacacacaggaggtgttcgcccaggtgaagcagatctacaagaccccacccatcaaggactttggcggcttcaacttcagccagatcctgcctgatccaagcaagccctccaagaggtcttttatcgaggacctgctgttcaacaaggtgaccctggccgatgccggcttcatcaagcagtatggagattgcctgggagacatcgcagcccgcgacctgatctgtgcccagaagtttaatggcctgaccgtgctgcctccactgctgacagatgagatgatcgcccagtacacatctgccctgctggccggcaccatcacaagcggatggaccttcggcgcaggagccgccctgcagatcccttttgccatgcagatggcctataggttcaacggcatcggcgtgacccagaatgtgctgtacgagaaccagaagctgatcgccaatcagtttaacagcgccatcggcaagatccaggactctctgtcctctacagccagcgccctgggcaagctgcaggatgtggtgaatcagaacgcccaggccctgaataccctggtgaagcagctgagctccaacttcggcgccatctctagcgtgctgaatgacatcctgagccggctggacccccctgaggcagaggtgcagatcgacaggctgatcacaggccgcctgcagagcctgcagacctacgtgacacagcagctgatcagggcagcagagatcagagcctccgccaatctggccgccaccaagatgagcgagtgcgtgctgggacagtccaagagggtggacttttgtggcaagggctatcacctgatgtctttcccacagagcgcccctcacggcgtggtgtttctgcacgtgacctacgtgccagcccaggagaagaacttcaccacagcaccagccatctgccacgatggaaaggcacactttcctagggagggcgtgttcgtgtctaacggcacccactggtttgtgacacagcgcaatttctacgagccacagatcatcaccacagacaatacattcgtgagcggcaactgtgatgtggtgatcggcatcgtgaacaataccgtgtatgatccactgcagcccgagctggactcctttaaggaggagctggataagtacttcaagaatcacacctctcccgacgtggatctgggcgacatctccggcatcaatgcctctgtggtgaacatccagaaggagatcgaccggctgaacgaggtggccaagaatctgaacgagagcctgatcgatctgcaggagctgggcaagtatgagcagtacatcaagggctctggcagagagaacctgtatttccagggaggaggaggcagcggatacatccctgaggcaccaagggacggacaggcctacgtgcgcaaggatggcgagtgggtgctgctgtccacctttctgggccatcatcaccaccaccaccaccactga

SEQ ID NO: 5105 - DNA, 3846 bp, Artificial Sequence
  Description of Artificial Sequence: Synthetic polynucleotide
atgggcatcctgccaagcccaggaatgcccgccctgctgtctctggtgagcctgctgtccgtgctgctgatgggatgcgtggcagagacaggcacacagtgcgtgaacctgaccacaaggacccagctgccccctgcctataccaattctttcacacggggcgtgtactatcccgacaaggtgtttagaagctccgtgctgcactccacacaggatctgtttctgcctttcttttctaacgtgacctggttccacgccatccacgtgtccggcaccaatggcacaaagcggttcgacaatcccgtgctgccttttaacgatggcgtgtacttcgccagcaccgagaagtccaacatcatcagaggctggatctttggcaccacactggactctaagacacagagcctgctgatcgtgaacaatgccaccaacgtggtgatcaaggtgtgcgagttccagttttgtaatgatccattcctgggcgtgtactatcacaagaacaataagtcctggatggagtctgagtttcgcgtgtattctagcgccaacaattgcacatttgagtacgtgagccagcccttcctgatggacctggagggcaagcagggcaatttcaagaacctgagggagttcgtgtttaagaatatcgatggctacttcaagatctacagcaagcacaccccaatcaacctggtgcgcgacctgccacagggattctccgccctggagccactggtggatctgcccatcggcatcaacatcacccggtttcagacactgctggccctgcacagatcctacctgacaccaggcgactcctctagcggatggaccgcaggagctgccgcctactatgtgggctatctgcagccccggaccttcctgctgaagtacaacgagaatggcaccatcacagacgcagtggattgcgccctggaccccctgtctgagacaaagtgtacactgaagagctttaccgtggagaagggcatctatcagacaagcaatttcagggtgcagcctaccgagtccatcgtgcgctttcccaatatcacaaacctgtgcccttttggcgaggtgttcaacgccaccagattcgccagcgtgtacgcctggaatcggaagagaatctccaactgcgtggccgactattctgtgctgtacaactccgcctctttcagcacctttaagtgctatggcgtgtctcccacaaagctgaatgatctgtgctttaccaacgtgtacgccgatagcttcgtgatcaggggagacgaagtgagacagatcgcaccaggacagacaggaaagatccatgactacaattataagctgcctgacgatttcaccggctgcgtgatcgcctggaactccaacaatctggattctaaagtgggcggcaactacaattatctgtacaggctgtttcgcaagtccaatctgaagccattcgagcgggacatctccacagagatctaccaggccggctctaccccctgcaatggcgtggagggctttaactgttatttccctctgcagtcttacggcttccagccaacaaacggcgtgggctatcagccctacagagtggtggtgctgtcctttgagctgctgcacgcaccagcaacagtgtgcggcccaaagaagtctaccaatctggtgaagaacaagtgcgtgaacttcaacttcaacggactgaccggcacaggcgtgctgaccgagagcaataagaagttcctgccttttcagcagttcggcagggacatcgcagataccacagacgccgtgcgcgaccctcagaccctggagatcctggacatcacaccatgcagcttcggcggcgtgtccgtgatcacaccaggcaccaatacatccaaccaggtggccgtgctgtatcaggacgtgaattgtaccgaggtgcccgtggcaatccacgcagatcagctgacccctacatggcgggtgtactctaccggcagcaacgtgttccagacaagagccggatgcctgatcggagcagagcacgtgaacaatagctatgagtgcgacatccctatcggcgccggcatctgtgccagctaccagacccagacaaactccccatctggagcaggctccgtggccagccagtccatcatcgcctataccatgagcctgggcgccgagaacagcgtggcctactccaacaattctatcgccatccctaccaacttcacaatcagcgtgaccacagagatcctgccagtgtctatgaccaagacaagcgtggactgcacaatgtatatctgtggcgatagcaccgagtgctccaacctgctgctgcagtacggctccttttgtacccagctgaatagagccctgacaggcatcgccgtggagcaggataagaacacacaggaggtgttcgcccaggtgaagcagatctacaagaccccacccatcaaggactttggcggcttcaacttcagccagatcctgcctgatccaagcaagccctccaagaggtcttttatcgaggacctgctgttcaacaaggtgaccctggccgatgccggcttcatcaagcagtatggagattgcctgggagacatcgcagcccgcgacctgatctgtgcccagaagtttaatggcctgaccgtgctgcctccactgctgacagatgagatgatcgcccagtacacatctgccctgctggccggcaccatcacaagcggatggaccttcggcgcaggagccgccctgcagatcccttttgccatgcagatggcctataggttcaacggcatcggcgtgacccagaatgtgctgtacgagaaccagaagctgatcgccaatcagtttaacagcgccatcggcaagatccaggactctctgtcctctacagccagcgccctgggcaagctgcaggatgtggtgaatcagaacgcccaggccctgaataccctggtgaagcagctgagctccaacttcggcgccatctctagcgtgctgaatgacatcctgagccggctggacccccctgaggcagaggtgcagatcgacaggctgatcacaggccgcctgcagagcctgcagacctacgtgacacagcagctgatcagggcagcagagatcagagcctccgccaatctggccgccaccaagatgagcgagtgcgtgctgggacagtccaagagggtggacttttgtggcaagggctatcacctgatgtctttcccacagagcgcccctcacggcgtggtgtttctgcacgtgacctacgtgccagcccaggagaagaacttcaccacagcaccagccatctgccacgatggaaaggcacactttcctagggagggcgtgttcgtgtctaacggcacccactggtttgtgacacagcgcaatttctacgagccacagatcatcaccacagacaatacattcgtgagcggcaactgtgatgtggtgatcggcatcgtgaacaataccgtgtatgatccactgcagcccgagctggactcctttaaggaggagctggataagtacttcaagaatcacacctctcccgacgtggatctgggcgacatctccggcatcaatgcctctgtggtgaacatccagaaggagatcgaccggctgaacgaggtggccaagaatctgaacgagagcctgatcgatctgcaggagctgggcaagtatgagcagtacatcaagggctctggcagagagaacctgtatttccagggaggaggaggcagcggatacatccctgaggcaccaagggacggacaggcctacgtgcgcaaggatggcgagtgggtgctgctgtccacctttctgggccatcatcaccaccaccaccaccactga

SEQ ID NO: 5106 - DNA, 3846 bp, Artificial Sequence
  Description of Artificial Sequence: Synthetic polynucleotide
atgggcatcctgccaagcccaggaatgcccgccctgctgtctctggtgagcctgctgtccgtgctgctgatgggatgcgtggcagagacaggcacacagtgcgtgaacctgaccacaaggacccagctgccccctgcctataccaattctttcacacggggcgtgtactatcccgacaaggtgtttagaagctccgtgctgcactccacacaggatctgtttctgcctttcttttctaacgtgacctggttccacgccatccacgtgtccggcaccaatggcacaaagcggttcgacaatcccgtgctgccttttaacgatggcgtgtacttcgccagcaccgagaagtccaacatcatcagaggctggatctttggcaccacactggactctaagacacagagcctgctgatcgtgaacaatgccaccaacgtggtgatcaaggtgtgcgagttccagttttgtaatgatccattcctgggcgtgtactatcacaagaacaataagtcctggatggagtctgagtttcgcgtgtattctagcgccaacaattgcacatttgagtacgtgagccagcccttcctgatggacctggagggcaagcagggcaatttcaagaacctgagggagttcgtgtttaagaatatcgatggctacttcaagatctacagcaagcacaccccaatcaacctggtgcgcgacctgccacagggattctccgccctggagccactggtggatctgcccatcggcatcaacatcacccggtttcagacactgctggccctgcacagatcctacctgacaccaggcgactcctctagcggatggaccgcaggagctgccgcctactatgtgggctatctgcagccccggaccttcctgctgaagtacaacgagaatggcaccatcacagacgcagtggattgcgccctggaccccctgtctgagacaaagtgtacactgaagagctttaccgtggagaagggcatctatcagacaagcaatttcagggtgcagcctaccgagtccatcgtgcgctttcccaatatcacaaacctgtgcccttttggcgaggtgttcaacgccaccagattcgccagcgtgtacgcctggaatcggaagagaatctccaactgcgtggccgactattctgtgctgtacaactccgcctctttcatgacctttaagtgctatggcgtgtctcccacaaagctgaatgatctgtgctttaccaacgtgtacgccgatagcttcgtgatcaggggagacgaagtgagacagatcgcaccaggacagacaggaaagatcgcagactacaattataagctgcctgacgatttcaccggctgcgtgatcgcctggaactccaacaatctggattctaaagtgggcggcaactacaattatctgtacaggctgtttcgcaagtccaatctgaagccattcgagcgggacatctccacagagatctaccaggccggctctaccccctgcaatggcgtggagggctttaactgttatttccctctgcagtcttacggcttccagccaacaaacggcgtgggctatcagccctacagagtggtggtgctgtcctttgagctgctgcacgcaccagcaacagtgtgcggcccaaagaagtctaccaatctggtgaagaacaagtgcgtgaacttcaacttcaacggactgaccggcacaggcgtgctgaccgagagcaataagaagttcctgccttttcagcagttcggcagggacatcgcagataccacagacgccgtgcgcgaccctcagaccctggagatcctggacatcacaccatgcagcttcggcggcgtgtccgtgatcacaccaggcaccaatacatccaaccaggtggccgtgctgtatcaggacgtgaattgtaccgaggtgcccgtggcaatccacgcagatcagctgacccctacatggcgggtgtactctaccggcagcaacgtgttccagacaagagccggatgcctgatcggagcagagcacgtgaacaatagctatgagtgcgacatccctatcggcgccggcatctgtgccagctaccagacccagacaaactccccatctggagcaggctccgtggccagccagtccatcatcgcctataccatgagcctgggcgccgagaacagcgtggcctactccaacaattctatcgccatccctaccaacttcacaatcagcgtgaccacagagatcctgccagtgtctatgaccaagacaagcgtggactgcacaatgtatatctgtggcgatagcaccgagtgctccaacctgctgctgcagtacggctccttttgtacccagctgaatagagccctgacaggcatcgccgtggagcaggataagaacacacaggaggtgttcgcccaggtgaagcagatctacaagaccccacccatcaaggactttggcggcttcaacttcagccagatcctgcctgatccaagcaagccctccaagaggtcttttatcgaggacctgctgttcaacaaggtgaccctggccgatgccggcttcatcaagcagtatggagattgcctgggagacatcgcagcccgcgacctgatctgtgcccagaagtttaatggcctgaccgtgctgcctccactgctgacagatgagatgatcgcccagtacacatctgccctgctggccggcaccatcacaagcggatggaccttcggcgcaggagccgccctgcagatcccttttgccatgcagatggcctataggttcaacggcatcggcgtgacccagaatgtgctgtacgagaaccagaagctgatcgccaatcagtttaacagcgccatcggcaagatccaggactctctgtcctctacagccagcgccctgggcaagctgcaggatgtggtgaatcagaacgcccaggccctgaataccctggtgaagcagctgagctccaacttcggcgccatctctagcgtgctgaatgacatcctgagccggctggacccccctgaggcagaggtgcagatcgacaggctgatcacaggccgcctgcagagcctgcagacctacgtgacacagcagctgatcagggcagcagagatcagagcctccgccaatctggccgccaccaagatgagcgagtgcgtgctgggacagtccaagagggtggacttttgtggcaagggctatcacctgatgtctttcccacagagcgcccctcacggcgtggtgtttctgcacgtgacctacgtgccagcccaggagaagaacttcaccacagcaccagccatctgccacgatggaaaggcacactttcctagggagggcgtgttcgtgtctaacggcacccactggtttgtgacacagcgcaatttctacgagccacagatcatcaccacagacaatacattcgtgagcggcaactgtgatgtggtgatcggcatcgtgaacaataccgtgtatgatccactgcagcccgagctggactcctttaaggaggagctggataagtacttcaagaatcacacctctcccgacgtggatctgggcgacatctccggcatcaatgcctctgtggtgaacatccagaaggagatcgaccggctgaacgaggtggccaagaatctgaacgagagcctgatcgatctgcaggagctgggcaagtatgagcagtacatcaagggctctggcagagagaacctgtatttccagggaggaggaggcagcggatacatccctgaggcaccaagggacggacaggcctacgtgcgcaaggatggcgagtgggtgctgctgtccacctttctgggccatcatcaccaccaccaccaccactga

SEQ ID NO: 5107 - DNA, 3846 bp, Artificial Sequence
  Description of Artificial Sequence: Synthetic polynucleotide
atgggcatcctgccaagcccaggaatgcccgccctgctgtctctggtgagcctgctgtccgtgctgctgatgggatgcgtggcagagacaggcacacagtgcgtgaacctgaccacaaggacccagctgccccctgcctataccaattctttcacacggggcgtgtactatcccgacaaggtgtttagaagctccgtgctgcactccacacaggatctgtttctgcctttcttttctaacgtgacctggttccacgccatccacgtgtccggcaccaatggcacaaagcggttcgacaatcccgtgctgccttttaacgatggcgtgtacttcgccagcaccgagaagtccaacatcatcagaggctggatctttggcaccacactggactctaagacacagagcctgctgatcgtgaacaatgccaccaacgtggtgatcaaggtgtgcgagttccagttttgtaatgatccattcctgggcgtgtactatcacaagaacaataagtcctggatggagtctgagtttcgcgtgtattctagcgccaacaattgcacatttgagtacgtgagccagcccttcctgatggacctggagggcaagcagggcaatttcaagaacctgagggagttcgtgtttaagaatatcgatggctacttcaagatctacagcaagcacaccccaatcaacctggtgcgcgacctgccacagggattctccgccctggagccactggtggatctgcccatcggcatcaacatcacccggtttcagacactgctggccctgcacagatcctacctgacaccaggcgactcctctagcggatggaccgcaggagctgccgcctactatgtgggctatctgcagccccggaccttcctgctgaagtacaacgagaatggcaccatcacagacgcagtggattgcgccctggaccccctgtctgagacaaagtgtacactgaagagctttaccgtggagaagggcatctatcagacaagcaatttcagggtgcagcctaccgagtccatcgtgcgctttcccaatatcacaaacctgtgcccttttggcgaggtgttcaacgccaccagattcgccagcgtgtacgcctggaatcggaagagaatctccaactgcgtggccgactattctgtgctgtacaactccgcctctttcagcacctttaagtgctatggcgtgtctcccacaaagctgaatgatctgtgctttaccaacgtgtacgccgatagcttcgtgatcaggggagacgaagtgagacagatcgcaccaggacagacaggaaagatcgcagactacaattataagctgcctgacgatttcaccggctgcgtgatcgcctggaactccaacaatctggattctaaagtgggcggcaactacaattatctgtacaggctgtttcgcaagtccaatctgaagccattcgagcgggacatctccacagagatctaccaggccggctctaccccctgcaattcagtggagggctttaactgttatttccctctgcagtcttacggcttccagccaacaaacggcgtgggctatcagccctacagagtggtggtgctgtcctttgagctgctgcacgcaccagcaacagtgtgcggcccaaagaagtctaccaatctggtgaagaacaagtgcgtgaacttcaacttcaacggactgaccggcacaggcgtgctgaccgagagcaataagaagttcctgccttttcagcagttcggcagggacatcgcagataccacagacgccgtgcgcgaccctcagaccctggagatcctggacatcacaccatgcagcttcggcggcgtgtccgtgatcacaccaggcaccaatacatccaaccaggtggccgtgctgtatcaggacgtgaattgtaccgaggtgcccgtggcaatccacgcagatcagctgacccctacatggcgggtgtactctaccggcagcaacgtgttccagacaagagccggatgcctgatcggagcagagcacgtgaacaatagctatgagtgcgacatccctatcggcgccggcatctgtgccagctaccagacccagacaaactccccatctggagcaggctccgtggccagccagtccatcatcgcctataccatgagcctgggcgccgagaacagcgtggcctactccaacaattctatcgccatccctaccaacttcacaatcagcgtgaccacagagatcctgccagtgtctatgaccaagacaagcgtggactgcacaatgtatatctgtggcgatagcaccgagtgctccaacctgctgctgcagtacggctccttttgtacccagctgaatagagccctgacaggcatcgccgtggagcaggataagaacacacaggaggtgttcgcccaggtgaagcagatctacaagaccccacccatcaaggactttggcggcttcaacttcagccagatcctgcctgatccaagcaagccctccaagaggtcttttatcgaggacctgctgttcaacaaggtgaccctggccgatgccggcttcatcaagcagtatggagattgcctgggagacatcgcagcccgcgacctgatctgtgcccagaagtttaatggcctgaccgtgctgcctccactgctgacagatgagatgatcgcccagtacacatctgccctgctggccggcaccatcacaagcggatggaccttcggcgcaggagccgccctgcagatcccttttgccatgcagatggcctataggttcaacggcatcggcgtgacccagaatgtgctgtacgagaaccagaagctgatcgccaatcagtttaacagcgccatcggcaagatccaggactctctgtcctctacagccagcgccctgggcaagctgcaggatgtggtgaatcagaacgcccaggccctgaataccctggtgaagcagctgagctccaacttcggcgccatctctagcgtgctgaatgacatcctgagccggctggacccccctgaggcagaggtgcagatcgacaggctgatcacaggccgcctgcagagcctgcagacctacgtgacacagcagctgatcagggcagcagagatcagagcctccgccaatctggccgccaccaagatgagcgagtgcgtgctgggacagtccaagagggtggacttttgtggcaagggctatcacctgatgtctttcccacagagcgcccctcacggcgtggtgtttctgcacgtgacctacgtgccagcccaggagaagaacttcaccacagcaccagccatctgccacgatggaaaggcacactttcctagggagggcgtgttcgtgtctaacggcacccactggtttgtgacacagcgcaatttctacgagccacagatcatcaccacagacaatacattcgtgagcggcaactgtgatgtggtgatcggcatcgtgaacaataccgtgtatgatccactgcagcccgagctggactcctttaaggaggagctggataagtacttcaagaatcacacctctcccgacgtggatctgggcgacatctccggcatcaatgcctctgtggtgaacatccagaaggagatcgaccggctgaacgaggtggccaagaatctgaacgagagcctgatcgatctgcaggagctgggcaagtatgagcagtacatcaagggctctggcagagagaacctgtatttccagggaggaggaggcagcggatacatccctgaggcaccaagggacggacaggcctacgtgcgcaaggatggcgagtgggtgctgctgtccacctttctgggccatcatcaccaccaccaccaccactga

SEQ ID NO: 5108 - DNA, 3846 bp, Artificial Sequence
  Description of Artificial Sequence: Synthetic polynucleotide
atgggcatcctgccaagcccaggaatgcccgccctgctgtctctggtgagcctgctgtccgtgctgctgatgggatgcgtggcagagacaggcacacagtgcgtgaacctgaccacaaggacccagctgccccctgcctataccaattctttcacacggggcgtgtactatcccgacaaggtgtttagaagctccgtgctgcactccacacaggatctgtttctgcctttcttttctaacgtgacctggttccacgccatccacgtgtccggcaccaatggcacaaagcggttcgacaatcccgtgctgccttttaacgatggcgtgtacttcgccagcaccgagaagtccaacatcatcagaggctggatctttggcaccacactggactctaagacacagagcctgctgatcgtgaacaatgccaccaacgtggtgatcaaggtgtgcgagttccagttttgtaatgatccattcctgggcgtgtactatcacaagaacaataagtcctggatggagtctgagtttcgcgtgtattctagcgccaacaattgcacatttgagtacgtgagccagcccttcctgatggacctggagggcaagcagggcaatttcaagaacctgagggagttcgtgtttaagaatatcgatggctacttcaagatctacagcaagcacaccccaatcaacctggtgcgcgacctgccacagggattctccgccctggagccactggtggatctgcccatcggcatcaacatcacccggtttcagacactgctggccctgcacagatcctacctgacaccaggcgactcctctagcggatggaccgcaggagctgccgcctactatgtgggctatctgcagccccggaccttcctgctgaagtacaacgagaatggcaccatcacagacgcagtggattgcgccctggaccccctgtctgagacaaagtgtacactgaagagctttaccgtggagaagggcatctatcagacaagcaatttcagggtgcagcctaccgagtccatcgtgcgctttcccaatatcacaaacctgtgcccttttggcgaggtgttcaacgccaccagattcgccagcgtgtacgcctggaatcggaagagaatctccaactgcgtggccgactattctgtgctgtacaactccgcctctttcagcacctttaagtgctatggcgtgtctcccacaaagctgaatgatctgtgctttaccaacgtgtacgccgatagcttcgtgatcaggggagacgaagtgagacagatcgcaccaggacagacaggaaagatcgcagactacaattataagctgcctgacgatttcaccggctgcgtgatcgcctggaactccaacaatctggattctaaagtgggcggcaactacaattatctgtacaggctgtttcgcaagtccaatctgaagccattcgagcgggacatctccacagagatctaccaggccggctctaccccctgcaatggcgtggagggctttaactgttatttccctctgcagtcttacggcttccagccaacaaacggcgtgggctatcagccctacagagtggtggtgctgtcctttgagctgctgcacgcaccagcaacagtgtgcggcccaaagaagtctaccaatctggtgaagaacaagtgcgtgaacttcaacttcaacggactgaccggcacaggcgtgctgaccgagagcaataagaagttcctgccttttcagcagttcggcagggacatcgcagataccacagacgccgtgcgcgaccctcagaccctggagatcctggacatcgaaccatgcagcttcggcggcgtgtccgtgatcacaccaggcaccaatacatccaaccaggtggccgtgctgtatcaggacgtgaattgtaccgaggtgcccgtggcaatccacgcagatcagctgacccctacatggcgggtgtactctaccggcagcaacgtgttccagacaagagccggatgcctgatcggagcagagcacgtgaacaatagctatgagtgcgacatccctatcggcgccggcatctgtgccagctaccagacccagacaaactccccatctggagcaggctccgtggccagccagtccatcatcgcctataccatgagcctgggcgccgagaacagcgtggcctactccaacaattctatcgccatccctaccaacttcacaatcagcgtgaccacagagatcctgccagtgtctatgaccaagacaagcgtggactgcacaatgtatatctgtggcgatagcaccgagtgctccaacctgctgctgcagtacggctccttttgtacccagctgaatagagccctgacaggcatcgccgtggagcaggataagaacacacaggaggtgttcgcccaggtgaagcagatctacaagaccccacccatcaaggactttggcggcttcaacttcagccagatcctgcctgatccaagcaagccctccaagaggtcttttatcgaggacctgctgttcaacaaggtgaccctggccgatgccggcttcatcaagcagtatggagattgcctgggagacatcgcagcccgcgacctgatctgtgcccagaagtttaatggcctgaccgtgctgcctccactgctgacagatgagatgatcgcccagtacacatctgccctgctggccggcaccatcacaagcggatggaccttcggcgcaggagccgccctgcagatcccttttgccatgcagatggcctataggttcaacggcatcggcgtgacccagaatgtgctgtacgagaaccagaagctgatcgccaatcagtttaacagcgccatcggcaagatccaggactctctgtcctctacagccagcgccctgggcaagctgcaggatgtggtgaatcagaacgcccaggccctgaataccctggtgaagcagctgagctccaacttcggcgccatctctagcgtgctgaatgacatcctgagccggctggacccccctgaggcagaggtgcagatcgacaggctgatcacaggccgcctgcagagcctgcagacctacgtgacacagcagctgatcagggcagcagagatcagagcctccgccaatctggccgccaccaagatgagcgagtgcgtgctgggacagtccaagagggtggacttttgtggcaagggctatcacctgatgtctttcccacagagcgcccctcacggcgtggtgtttctgcacgtgacctacgtgccagcccaggagaagaacttcaccacagcaccagccatctgccacgatggaaaggcacactttcctagggagggcgtgttcgtgtctaacggcacccactggtttgtgacacagcgcaatttctacgagccacagatcatcaccacagacaatacattcgtgagcggcaactgtgatgtggtgatcggcatcgtgaacaataccgtgtatgatccactgcagcccgagctggactcctttaaggaggagctggataagtacttcaagaatcacacctctcccgacgtggatctgggcgacatctccggcatcaatgcctctgtggtgaacatccagaaggagatcgaccggctgaacgaggtggccaagaatctgaacgagagcctgatcgatctgcaggagctgggcaagtatgagcagtacatcaagggctctggcagagagaacctgtatttccagggaggaggaggcagcggatacatccctgaggcaccaagggacggacaggcctacgtgcgcaaggatggcgagtgggtgctgctgtccacctttctgggccatcatcaccaccaccaccaccactga

SEQ ID NO: 5109 - DNA, 3846 bp, Artificial Sequence
  Description of Artificial Sequence: Synthetic polynucleotide
atgggcatcctgccaagcccaggaatgcccgccctgctgtctctggtgagcctgctgtccgtgctgctgatgggatgcgtggcagagacaggcacacagtgcgtgaacctgaccacaaggacccagctgccccctgcctataccaattctttcacacggggcgtgtactatcccgacaaggtgtttagaagctccgtgctgcactccacacaggatctgtttctgcctttcttttctaacgtgacctggttccacgccatccacgtgtccggcaccaatggcacaaagcggttcgacaatcccgtgctgccttttaacgatggcgtgtacttcgccagcaccgagaagtccaacatcatcagaggctggatctttggcaccacactggactctaagacacagagcctgctgatcgtgaacaatgccaccaacgtggtgatcaaggtgtgcgagttccagttttgtaatgatccattcctgggcgtgtactatcacaagaacaataagtcctggatggagtctgagtttcgcgtgtattctagcgccaacaattgcacatttgagtacgtgagccagcccttcctgatggacctggagggcaagcagggcaatttcaagaacctgagggagttcgtgtttaagaatatcgatggctacttcaagatctacagcaagcacaccccaatcaacctggtgcgcgacctgccacagggattctccgccctggagccactggtggatctgcccatcggcatcaacatcacccggtttcagacactgctggccctgcacagatcctacctgacaccaggcgactcctctagcggatggaccgcaggagctgccgcctactatgtgggctatctgcagccccggaccttcctgctgaagtacaacgagaatggcaccatcacagacgcagtggattgcgccctggaccccctgtctgagacaaagtgtacactgaagagctttaccgtggagaagggcatctatcagacaagcaatttcagggtgcagcctaccgagtccatcgtgcgctttcccaatatcacaaacctgtgcccttttggcgaggtgttcaacgccaccagattcgccagcgtgtacgcctggaatcggaagagaatctccaactgcgtggccgactattctgtgctgtacaactccgcctctttcagcacctttaagtgctatggcgtgtctcccacaaagctgaatgatctgtgctttaccaacgtgtacgccgatagcttcgtgatcaggggagacgaagtgagacagatcgcaccaggacagacaggaaagatcgcagactacaattataagctgcctgacgatttcaccggctgcgtgatcgcctggaactccaacaatctggattctaaagtgggcggcaactacaattatctgtacaggctgtttcgcaagtccaatctgaagccattcgagcgggacatctccacagagatctaccaggccggctctaccccctgcaatggcgtggagggctttaactgttatttccctctgcagtcttacggcttccagccaacaaacggcgtgggctatcagccctacagagtggtggtgctgtcctttgagctgctgcacgcaccagcaacagtgtgcggcccaaagaagtctaccaatctggtgaagaacaagtgcgtgaacttcaacttcaacggactgaccggcacaggcgtgctgaccgagagcaataagaagttcctgccttttcagcagttcggcagggacatcgcagataccacagacgccgtgcgcgaccctcagaccctggagatcctggacatcacaccatgcagcttcggcggcgtgtccgtgatcacaccaggcaccaatacatccaaccaggtggccgtgctgtatcaggacgtgaattgtaccgaggtgcccgtggcaatccacgcagatcagctgacccctacatggcgggtgtactctaccggcagcaacgtgttccagacaagagccggatgcctgatcggagcagagcacgtgaacaatagctatgagtgcgacatccctatcggcgccggcatctgtgccagctaccagacccagacaaactccccatctggagcaggctccgtggccagccagtccatcatcgcctataccatgagcctgggcgccgagaacagcgtggcctactccaacaattctatcgccatccctaccaacttcacaatcagcgtgaccacagagatcctgccagtgtctatgaccaagacaagcgtggactgcacaatgtatatctgtggcgatagcaccgagtgctccaacctgctgctgcagtacggctccttttgtacccagctgaatagagccctgacaggcatcgccgtggagcaggataagaacacacaggaggtgttcgcccaggtgaagcagatctacaagaccccacccatcaaggactttggcggcttcaacttcagccagatcctgcctgatccaagcaagccctccaagaggtcttttatcgaggacctgctgttcaacaaggtgaccctggccgatgccggcttcatcaagcagtatggagattgcctgggagacatcgcagcccgcgacctgatctgtgcccagaagtttaatggcctgaccgtgctgcctccactgctgacagatgagatgatcgcccagtacacatctgccctgctggccggcaccatcacaagcggatggaccttcggcgcaggagccgccctgcagatcccttttgccatgcagatggcctataggttcaacggcatcggcgtgacccagaatgtgctgtacgagaaccagaagctgatcgccaatcagtttaacagcgccatcggcaagatccaggactctctgtcctctacagccagcgccctgggcaagctgcaggatgtggtgaatcagaacgcccaggccctgaataccctggtgaagcagctgagctccaacttcggcgccatctctagcgtgctgaatgacatcctgagccggctggacccccctgaggcagaggtgcagatcgacaggctgatcacaggccgcctgcagagcctgcagacctacgtgacacagcagctgatcagggcagcagagatcagagcctccgccaatctggccgccaccaagatgagcgagtgcgtgctgggacagtccaagagggtggacttttgtggcaagggctatcacctgatgtctttcccacagagcgcccctcacggcgtggtgtttctgcacgtgacctacgtgccagcccagtggaagaacttcaccacagcaccagccatctgccacgatggaaaggcacactttcctagggagggcgtgttcgtgtctaacggcacccactggtttgtgacacagcgcaatttctacgagccacagatcatcaccacagacaatacattcgtgagcggcaactgtgatgtggtgatcggcatcgtgaacaataccgtgtatgatccactgcagcccgagctggactcctttaaggaggagctggataagtacttcaagaatcacacctctcccgacgtggatctgggcgacatctccggcatcaatgcctctgtggtgaacatccagaaggagatcgaccggctgaacgaggtggccaagaatctgaacgagagcctgatcgatctgcaggagctgggcaagtatgagcagtacatcaagggctctggcagagagaacctgtatttccagggaggaggaggcagcggatacatccctgaggcaccaagggacggacaggcctacgtgcgcaaggatggcgagtgggtgctgctgtccacctttctgggccatcatcaccaccaccaccaccactga

SEQ ID NO: 5110 - DNA, 3846 bp, Artificial Sequence
  Description of Artificial Sequence: Synthetic polynucleotide
atgggcatcctgccaagcccaggaatgcccgccctgctgtctctggtgagcctgctgtccgtgctgctgatgggatgcgtggcagagacaggcacacagtgcgtgaacctgaccacaaggacccagctgccccctgcctataccaattctttcacacggggcgtgtactatcccgacaaggtgtttagaagctccgtgctgcactccacacaggatctgtttctgcctttcttttctaacgtgacctggttccacgccatccacgtgtccggcaccaatggcacaaagcggttcgacaatcccgtgctgccttttaacgatggcgtgtacttcgccagcaccgagaagtccaacatcatcagaggctggatctttggcaccacactggactctaagacacagagcctgctgatcgtgaacaatgccaccaacgtggtgatcaaggtgtgcgagttccagttttgtaatgatccattcctgggcgtgtactatcacaagaacaataagtcctggatggagtctgagtttcgcgtgtattctagcgccaacaattgcacatttgagtacgtgagccagcccttcctgatggacctggagggcaagcagggcaatttcaagaacctgagggagttcgtgtttaagaatatcgatggctacttcaagatctacagcaagcacaccccaatcaacctggtgcgcgacctgccacagggattctccgccctggagccactggtggatctgcccatcggcatcaacatcacccggtttcagacactgctggccctgcacagatcctacctgacaccaggcgactcctctagcggatggaccgcaggagctgccgcctactatgtgggctatctgcagccccggaccttcctgctgaagtacaacgagaatggcaccatcacagacgcagtggattgcgccctggaccccctgtctgagacaaagtgtacactgaagagctttaccgtggagaagggcatctatcagacaagcaatttcagggtgcagcctaccgagtccatcgtgcgctttcccaatatcacaaacctgtgcccttttggcgaggtgttcaacgccaccagattcgccagcgtgtacgcctggaatcggaagagaatctccaactgcgtggccgactattctgtgctgtacaactccgcctctttcagcacctttaagtgctatggcgtgtctcccacaaagctgaatgatctgtgctttaccaacgtgtacgccgatagcttcgtgatcaggggagacgaagtgagacagatcgcaccaggacagacaggaaagatcgcagactacaattataagctgcctgacgatttcaccggctgcgtgatcgcctggaactccaacaatctggattctaaagtgggcggcaactacaattatctgtacaggctgtttcgcaagtccaatctgaagccattcgagcgggacatctccacagagatctaccaggccggctctaccccctgcaatggcgtggagggctttaactgttatttccctctgcagtcttacggcttccagccaacaaacggcgtgggctatcagccctacagagtggtggtgctgtcctttgagctgctgcacgcaccagcaacagtgtgcggcccaaagaagtctaccaatctggtgaagaacaagtgcgtgaacttcaacttcaacggactgaccggcacaggcgtgctgaccgagagcaataagaagttcctgccttttcagcagttcggcagggacatcgcagataccacagacgccgtgcgcgaccctcagaccctggagatcctggacatcacaccatgcagcttcggcggcgtgtccgtgatcacaccaggcaccaatacatccaaccaggtggccgtgctgtatcaggacgtgaattgtaccgaggtgcccgtggcaatccacgcagatcagctgacccctacatggcgggtgtactctaccggcagcaacgtgttccagacaagagccggatgcctgatcggagcagagcacgtgaacaatagctatgagtgcgacatccctatcggcgccggcatctgtgccagctaccagacccagacaaactccccatctggagcaggctccgtggccagccagtccatcatcgcctataccatgagcctgggcgccgagaacagcgtggcctactccaacaattctatcgccatccctaccaacttcacaatcagcgtgaccacagagatcctgccagtgtctatgaccaagacaagcgtggactgcacaatgtatatctgtggcgatagcaccgagtgctccaacctgctgctgcagtacggctccttttgtacccagctgaatagagccctgacaggcatcgccgtggagcaggataagaacacacaggaggtgttcgcccaggtgaagcagatctacaagaccccacccatcaaggactttggcggcttcaacttcagccagatcctgcctgatccaagcaagccctccaagaggtcttttatcgaggacctgctgttcaacaaggtgaccctggccgatgccggcttcatcaagcagtatggagattgcctgggagacatcgcagcccgcgacctgatctgtgcccagaagtttaatggcctgaccgtgctgcctccactgctgacagatgagatgatcgcccagtacacatctgccctgctggccggcaccatcacaagcggatggaccttcggcgcaggagccgccctgcagatcccttttgccatgcagatggcctataggttcaacggcatcggcgtgacccagaatgtgctgtacgagaaccagaagctgatcgccaatcagtttaacagcgccatcggcaagatccaggactctctgtcctctacagccagcgccctgggcaagctgcaggatgtggtgaatcagaacgcccaggccctgaataccctggtgaagcagctgagctccaacttcggcgccatctctagcgtgctgaatgacatcctgagccggctggacccccctgaggcagaggtgcagatcgacaggctgatcacaggccgcctgcagagcctgcagacctacgtgacacagcagctgatcagggcagcagagatcagagcctccgccaatctggccgccaccaagatgagcgagtgcgtgctgggacagtccaagagggtggacttttgtggccaaggctatcacctgatgtctttcccacagagcgcccctcacggcgtggtgtttctgcacgtgacctacgtgccagcccaggagaagaacttcaccacagcaccagccatctgccacgatggaaaggcacactttcctagggagggcgtgttcgtgtctaacggcacccactggtttgtgacacagcgcaatttctacgagccacagatcatcaccacagacaatacattcgtgagcggcaactgtgatgtggtgatcggcatcgtgaacaataccgtgtatgatccactgcagcccgagctggactcctttaaggaggagctggataagtacttcaagaatcacacctctcccgacgtggatctgggcgacatctccggcatcaatgcctctgtggtgaacatccagaaggagatcgaccggctgaacgaggtggccaagaatctgaacgagagcctgatcgatctgcaggagctgggcaagtatgagcagtacatcaagggctctggcagagagaacctgtatttccagggaggaggaggcagcggatacatccctgaggcaccaagggacggacaggcctacgtgcgcaaggatggcgagtgggtgctgctgtccacctttctgggccatcatcaccaccaccaccaccactga

SEQ ID NO: 5111 - DNA, 3846 bp, Artificial Sequence
  Description of Artificial Sequence: Synthetic polynucleotide
atgggcatcctgccaagcccaggaatgcccgccctgctgtctctggtgagcctgctgtccgtgctgctgatgggatgcgtggcagagacaggcacacagtgcgtgaacctgaccacaaggacccagctgccccctgcctataccaattctttcacacggggcgtgtactatcccgacaaggtgtttagaagctccgtgctgcactccacacaggatctgtttctgcctttcttttctaacgtgacctggttccacgccatccacgtgtccggcaccaatggcacaaagcggttcgacaatcccgtgctgccttttaacgatggcgtgtacttcgccagcaccgagaagtccaacatcatcagaggctggatctttggcaccacactggactctaagacacagagcctgctgatcgtgaacaatgccaccaacgtggtgatcaaggtgtgcgagttccagttttgtaatgatccattcctgggcgtgtactatcacaagaacaataagtcctggatggagtctgagtttcgcgtgtattctagcgccaacaattgcacatttgagtacgtgagccagcccttcctgatggacctggagggcaagcagggcaatttcaagaacctgagggagttcgtgtttaagaatatcgatggctacttcaagatctacagcaagcacaccccaatcaacctggtgcgcgacctgccacagggattctccgccctggagccactggtggatctgcccatcggcatcaacatcacccggtttcagacactgctggccctgcacagatcctacctgacaccaggcgactcctctagcggatggaccgcaggagctgccgcctactatgtgggctatctgcagccccggaccttcctgctgaagtacaacgagaatggcaccatcacagacgcagtggattgcgccctggaccccctgtctgagacaaagtgtacactgaagagctttaccgtggagaagggcatctatcagacaagcaatttcagggtgcagcctaccgagtccatcgtgcgctttcccaatatcacaaacctgtgcccttttggcgaggtgttcaacgccaccagattcgccagcgtgtacgcctggaatcggaagagaatctccaactgcgtggccgactattctgtgctgtacaactccgcctctttcagcacctttaagtgctatggcgtgtctcccacaaagctgaatgatctgtgctttaccaacgtgtacgccgatagcttcgtgatcaggggagacgaagtgagacagatcgcaccaggacagacaggaaagatcgcagactacaattataagctgcctgacgatttcaccggctgcgtgatcgcctggaactccaacaatctggattctaaagtgggcggcaactacaattatctgtacaggctgtttcgcaagtccaatctgaagccattcgagcgggacatctccacagagatctaccaggccggctctaccccctgcaatggcgtggagggctttaactgttatttccctctgcagtcttacactttccagccaacaaacggcgtgggctatcagccctacagagtggtggtgctgtcctttgagctgctgcacgcaccagcaacagtgtgcggcccaaagaagtctaccaatctggtgaagaacaagtgcgtgaacttcaacttcaacggactgaccggcacaggcgtgctgaccgagagcaataagaagttcctgccttttcagcagttcggcagggacatcgcagataccacagacgccgtgcgcgaccctcagaccctggagatcctggacatcacaccatgcagcttcggcggcgtgtccgtgatcacaccaggcaccaatacatccaaccaggtggccgtgctgtatcaggacgtgaattgtaccgaggtgcccgtggcaatccacgcagatcagctgacccctacatggcgggtgtactctaccggcagcaacgtgttccagacaagagccggatgcctgatcggagcagagcacgtgaacaatagctatgagtgcgacatccctatcggcgccggcatctgtgccagctaccagacccagacaaactccccatctggagcaggctccgtggccagccagtccatcatcgcctataccatgagcctgggcgccgagaacagcgtggcctactccaacaattctatcgccatccctaccaacttcacaatcagcgtgaccacagagatcctgccagtgtctatgaccaagacaagcgtggactgcacaatgtatatctgtggcgatagcaccgagtgctccaacctgctgctgcagtacggctccttttgtacccagctgaatagagccctgacaggcatcgccgtggagcaggataagaacacacaggaggtgttcgcccaggtgaagcagatctacaagaccccacccatcaaggactttggcggcttcaacttcagccagatcctgcctgatccaagcaagccctccaagaggtcttttatcgaggacctgctgttcaacaaggtgaccctggccgatgccggcttcatcaagcagtatggagattgcctgggagacatcgcagcccgcgacctgatctgtgcccagaagtttaatggcctgaccgtgctgcctccactgctgacagatgagatgatcgcccagtacacatctgccctgctggccggcaccatcacaagcggatggaccttcggcgcaggagccgccctgcagatcccttttgccatgcagatggcctataggttcaacggcatcggcgtgacccagaatgtgctgtacgagaaccagaagctgatcgccaatcagtttaacagcgccatcggcaagatccaggactctctgtcctctacagccagcgccctgggcaagctgcaggatgtggtgaatcagaacgcccaggccctgaataccctggtgaagcagctgagctccaacttcggcgccatctctagcgtgctgaatgacatcctgagccggctggacccccctgaggcagaggtgcagatcgacaggctgatcacaggccgcctgcagagcctgcagacctacgtgacacagcagctgatcagggcagcagagatcagagcctccgccaatctggccgccaccaagatgagcgagtgcgtgctgggacagtccaagagggtggacttttgtggcaagggctatcacctgatgtctttcccacagagcgcccctcacggcgtggtgtttctgcacgtgacctacgtgccagcccaggagaagaacttcaccacagcaccagccatctgccacgatggaaaggcacactttcctagggagggcgtgttcgtgtctaacggcacccactggtttgtgacacagcgcaatttctacgagccacagatcatcaccacagacaatacattcgtgagcggcaactgtgatgtggtgatcggcatcgtgaacaataccgtgtatgatccactgcagcccgagctggactcctttaaggaggagctggataagtacttcaagaatcacacctctcccgacgtggatctgggcgacatctccggcatcaatgcctctgtggtgaacatccagaaggagatcgaccggctgaacgaggtggccaagaatctgaacgagagcctgatcgatctgcaggagctgggcaagtatgagcagtacatcaagggctctggcagagagaacctgtatttccagggaggaggaggcagcggatacatccctgaggcaccaagggacggacaggcctacgtgcgcaaggatggcgagtgggtgctgctgtccacctttctgggccatcatcaccaccaccaccaccactga

SEQ ID NO: 5112 - DNA, 3846 bp, Artificial Sequence
  Description of Artificial Sequence: Synthetic polynucleotide
atgggcatcctgccaagcccaggaatgcccgccctgctgtctctggtgagcctgctgtccgtgctgctgatgggatgcgtggcagagacaggcacacagtgcgtgaacctgaccacaaggacccagctgccccctgcctataccaattctttcacacggggcgtgtactatcccgacaaggtgtttagaagctccgtgctgcactccacacaggatctgtttctgcctttcttttctaacgtgacctggttccacgccatccacgtgtccggcaccaatggcacaaagcggttcgacaatcccgtgctgccttttaacgatggcgtgtacttcgccagcaccgagaagtccaacatcatcagaggctggatctttggcaccacactggactctaagacacagagcctgctgatcgtgaacaatgccaccaacgtggtgatcaaggtgtgcgagttccagttttgtaatgatccattcctgggcgtgtactatcacaagaacaataagtcctggatggagtctgagtttcgcgtgtattctagcgccaacaattgcacatttgagtacgtgagccagcccttcctgatggacctggagggcaagcagggcaatttcaagaacctgagggagttcgtgtttaagaatatcgatggctacttcaagatctacagcaagcacaccccaatcaacctggtgcgcgacctgccacagggattctccgccctggagccactggtggatctgcccatcggcatcaacatcacccggtttcagacactgctggccctgcacagatcctacctgacaccaggcgactcctctagcggatggaccgcaggagctgccgcctactatgtgggctatctgcagccccggaccttcctgctgaagtacaacgagaatggcaccatcacagacgcagtggattgcgccctggaccccctgtctgagacaaagtgtacactgaagagctttaccgtggagaagggcatctatcagacaagcaatttcagggtgcagcctaccgagtccatcgtgcgctttcccaatatcacaaacctgtgcccttttggcgaggtgttcaacgccaccagattcgccagcgtgtacgcctggaatcggaagagaatctccaactgcgtggccgactattctgtgctgtacaactccgcctctttcagcacctttaagtgctatggcgtgtctcccacaaagctgaatgatctgtgctttaccaacgtgtacgccgatagcttcgtgatcaggggagacgaagtgagacagatcgcaccaggacagacaggaaagatcgcagactacaattataagctgcctgacgatttcaccggctgcgtgatcgcctggaactccaacaatctggattctaaagtgggcggcaactacaattatctgtacaggctgtttcgcaagtccaatctgaagccattcgagcgggacatccaaacagagatctaccaggccggctctaccccctgcaatggcgtggagggctttaactgttatttccctctgcagtcttacggcttccagccaacaaacggcgtgggctatcagccctacagagtggtggtgctgtcctttgagctgctgcacgcaccagcaacagtgtgcggcccaaagaagtctaccaatctggtgaagaacaagtgcgtgaacttcaacttcaacggactgaccggcacaggcgtgctgaccgagagcaataagaagttcctgccttttcagcagttcggcagggacatcgcagataccacagacgccgtgcgcgaccctcagaccctggagatcctggacatcacaccatgcagcttcggcggcgtgtccgtgatcacaccaggcaccaatacatccaaccaggtggccgtgctgtatcaggacgtgaattgtaccgaggtgcccgtggcaatccacgcagatcagctgacccctacatggcgggtgtactctaccggcagcaacgtgttccagacaagagccggatgcctgatcggagcagagcacgtgaacaatagctatgagtgcgacatccctatcggcgccggcatctgtgccagctaccagacccagacaaactccccatctggagcaggctccgtggccagccagtccatcatcgcctataccatgagcctgggcgccgagaacagcgtggcctactccaacaattctatcgccatccctaccaacttcacaatcagcgtgaccacagagatcctgccagtgtctatgaccaagacaagcgtggactgcacaatgtatatctgtggcgatagcaccgagtgctccaacctgctgctgcagtacggctccttttgtacccagctgaatagagccctgacaggcatcgccgtggagcaggataagaacacacaggaggtgttcgcccaggtgaagcagatctacaagaccccacccatcaaggactttggcggcttcaacttcagccagatcctgcctgatccaagcaagccctccaagaggtcttttatcgaggacctgctgttcaacaaggtgaccctggccgatgccggcttcatcaagcagtatggagattgcctgggagacatcgcagcccgcgacctgatctgtgcccagaagtttaatggcctgaccgtgctgcctccactgctgacagatgagatgatcgcccagtacacatctgccctgctggccggcaccatcacaagcggatggaccttcggcgcaggagccgccctgcagatcccttttgccatgcagatggcctataggttcaacggcatcggcgtgacccagaatgtgctgtacgagaaccagaagctgatcgccaatcagtttaacagcgccatcggcaagatccaggactctctgtcctctacagccagcgccctgggcaagctgcaggatgtggtgaatcagaacgcccaggccctgaataccctggtgaagcagctgagctccaacttcggcgccatctctagcgtgctgaatgacatcctgagccggctggacccccctgaggcagaggtgcagatcgacaggctgatcacaggccgcctgcagagcctgcagacctacgtgacacagcagctgatcagggcagcagagatcagagcctccgccaatctggccgccaccaagatgagcgagtgcgtgctgggacagtccaagagggtggacttttgtggcaagggctatcacctgatgtctttcccacagagcgcccctcacggcgtggtgtttctgcacgtgacctacgtgccagcccaggagaagaacttcaccacagcaccagccatctgccacgatggaaaggcacactttcctagggagggcgtgttcgtgtctaacggcacccactggtttgtgacacagcgcaatttctacgagccacagatcatcaccacagacaatacattcgtgagcggcaactgtgatgtggtgatcggcatcgtgaacaataccgtgtatgatccactgcagcccgagctggactcctttaaggaggagctggataagtacttcaagaatcacacctctcccgacgtggatctgggcgacatctccggcatcaatgcctctgtggtgaacatccagaaggagatcgaccggctgaacgaggtggccaagaatctgaacgagagcctgatcgatctgcaggagctgggcaagtatgagcagtacatcaagggctctggcagagagaacctgtatttccagggaggaggaggcagcggatacatccctgaggcaccaagggacggacaggcctacgtgcgcaaggatggcgagtgggtgctgctgtccacctttctgggccatcatcaccaccaccaccaccactga

SEQ ID NO: 5113 - DNA, 3846 bp, Artificial Sequence
  Description of Artificial Sequence: Synthetic polynucleotide
atgggcatcctgccaagcccaggaatgcccgccctgctgtctctggtgagcctgctgtccgtgctgctgatgggatgcgtggcagagacaggcacacagtgcgtgaacctgaccacaaggacccagctgccccctgcctataccaattctttcacacggggcgtgtactatcccgacaaggtgtttagaagctccgtgctgcactccacacaggatctgtttctgcctttcttttctaacgtgacctggttccacgccatccacgtgtccggcaccaatggcacaaagcggttcgacaatcccgtgctgccttttaacgatggcgtgtacttcgccagcaccgagaagtccaacatcatcagaggctggatctttggcaccacactggactctaagacacagagcctgctgatcgtgaacaatgccaccaacgtggtgatcaaggtgtgcgagttccagttttgtaatgatccattcctgggcgtgtactatcacaagaacaataagtcctggatggagtctgagtttcgcgtgtattctagcgccaacaattgcacatttgagtacgtgagccagcccttcctgatggacctggagggcaagcagggcaatttcaagaacctgagggagttcgtgtttaagaatatcgatggctacttcaagatctacagcaagcacaccccaatcaacctggtgcgcgacctgccacagggattctccgccctggagccactggtggatctgcccatcggcatcaacatcacccggtttcagacactgctggccctgcacagatcctacctgacaccaggcgactcctctagcggatggaccgcaggagctgccgcctactatgtgggctatctgcagccccggaccttcctgctgaagtacaacgagaatggcaccatcacagacgcagtggattgcgccctggaccccctgtctgagacaaagtgtacactgaagagctttaccgtggagaagggcatctatcagacaagcaatttcagggtgcagcctaccgagtccatcgtgcgctttcccaatatcacaaacctgtgcccttttggcgaggtgttcaacgccaccagattcgccagcgtgtacgcctggaatcggaagagaatctccaactgcgtggccgactattctgtgctgtacaactccgcctctttcagcacctttaagtgctatggcgtgtctcccacaaagctgaatgatctgtgctttaccaacgtgtacgccgatagcttcgtgatcaggggagacgaagtgagacagatcgcaccaggacagacaggaaagatcgcagactacaattataagctgcctgacgatttcaccggctgcgtgatcgcctggaactccaacaatctggattctaaagtgggcggcaactacaattatctgtacaggctgtttcgcaagtccaatctgaagccattcgagttcgacatctccacagagatctaccaggccggctctaccccctgcaatggcgtggagggctttaactgttatttccctctgcagtcttacggcttccagccaacaaacggcgtgggctatcagccctacagagtggtggtgctgtcctttgagctgctgcacgcaccagcaacagtgtgcggcccaaagaagtctaccaatctggtgaagaacaagtgcgtgaacttcaacttcaacggactgaccggcacaggcgtgctgaccgagagcaataagaagttcctgccttttcagcagttcggcagggacatcgcagataccacagacgccgtgcgcgaccctcagaccctggagatcctggacatcacaccatgcagcttcggcggcgtgtccgtgatcacaccaggcaccaatacatccaaccaggtggccgtgctgtatcaggacgtgaattgtaccgaggtgcccgtggcaatccacgcagatcagctgacccctacatggcgggtgtactctaccggcagcaacgtgttccagacaagagccggatgcctgatcggagcagagcacgtgaacaatagctatgagtgcgacatccctatcggcgccggcatctgtgccagctaccagacccagacaaactccccatctggagcaggctccgtggccagccagtccatcatcgcctataccatgagcctgggcgccgagaacagcgtggcctactccaacaattctatcgccatccctaccaacttcacaatcagcgtgaccacagagatcctgccagtgtctatgaccaagacaagcgtggactgcacaatgtatatctgtggcgatagcaccgagtgctccaacctgctgctgcagtacggctccttttgtacccagctgaatagagccctgacaggcatcgccgtggagcaggataagaacacacaggaggtgttcgcccaggtgaagcagatctacaagaccccacccatcaaggactttggcggcttcaacttcagccagatcctgcctgatccaagcaagccctccaagaggtcttttatcgaggacctgctgttcaacaaggtgaccctggccgatgccggcttcatcaagcagtatggagattgcctgggagacatcgcagcccgcgacctgatctgtgcccagaagtttaatggcctgaccgtgctgcctccactgctgacagatgagatgatcgcccagtacacatctgccctgctggccggcaccatcacaagcggatggaccttcggcgcaggagccgccctgcagatcccttttgccatgcagatggcctataggttcaacggcatcggcgtgacccagaatgtgctgtacgagaaccagaagctgatcgccaatcagtttaacagcgccatcggcaagatccaggactctctgtcctctacagccagcgccctgggcaagctgcaggatgtggtgaatcagaacgcccaggccctgaataccctggtgaagcagctgagctccaacttcggcgccatctctagcgtgctgaatgacatcctgagccggctggacccccctgaggcagaggtgcagatcgacaggctgatcacaggccgcctgcagagcctgcagacctacgtgacacagcagctgatcagggcagcagagatcagagcctccgccaatctggccgccaccaagatgagcgagtgcgtgctgggacagtccaagagggtggacttttgtggcaagggctatcacctgatgtctttcccacagagcgcccctcacggcgtggtgtttctgcacgtgacctacgtgccagcccaggagaagaacttcaccacagcaccagccatctgccacgatggaaaggcacactttcctagggagggcgtgttcgtgtctaacggcacccactggtttgtgacacagcgcaatttctacgagccacagatcatcaccacagacaatacattcgtgagcggcaactgtgatgtggtgatcggcatcgtgaacaataccgtgtatgatccactgcagcccgagctggactcctttaaggaggagctggataagtacttcaagaatcacacctctcccgacgtggatctgggcgacatctccggcatcaatgcctctgtggtgaacatccagaaggagatcgaccggctgaacgaggtggccaagaatctgaacgagagcctgatcgatctgcaggagctgggcaagtatgagcagtacatcaagggctctggcagagagaacctgtatttccagggaggaggaggcagcggatacatccctgaggcaccaagggacggacaggcctacgtgcgcaaggatggcgagtgggtgctgctgtccacctttctgggccatcatcaccaccaccaccaccactga

SEQ ID NO: 5114 - DNA, 3846 bp, Artificial Sequence
  Description of Artificial Sequence: Synthetic polynucleotide
atgggcatcctgccaagcccaggaatgcccgccctgctgtctctggtgagcctgctgtccgtgctgctgatgggatgcgtggcagagacaggcacacagtgcgtgaacctgaccacaaggacccagctgccccctgcctataccaattctttcacacggggcgtgtactatcccgacaaggtgtttagaagctccgtgctgcactccacacaggatctgtttctgcctttcttttctaacgtgacctggttccacgccatccacgtgtccggcaccaatggcacaaagcggttcgacaatcccgtgctgccttttaacgatggcgtgtacttcgccagcaccgagaagtccaacatcatcagaggctggatctttggcaccacactggactctaagacacagagcctgctgatcgtgaacaatgccaccaacgtggtgatcaaggtgtgcgagttccagttttgtaatgatccattcctgggcgtgtactatcacaagaacaataagtcctggatggagtctgagtttcgcgtgtattctagcgccaacaattgcacatttgagtacgtgagccagcccttcctgatggacctggagggcaagcagggcaatttcaagaacctgagggagttcgtgtttaagaatatcgatggctacttcaagatctacagcaagcacaccccaatcaacctggtgcgcgacctgccacagggattctccgccctggagccagaagtggatctgcccatcggcatcaacatcacccggtttcagacactgctggccctgcacagatcctacctgacaccaggcgactcctctagcggatggaccgcaggagctgccgcctactatgtgggctatctgcagccccggaccttcctgctgaagtacaacgagaatggcaccatcacagacgcagtggattgcgccctggaccccctgtctgagacaaagtgtacactgaagagctttaccgtggagaagggcatctatcagacaagcaatttcagggtgcagcctaccgagtccatcgtgcgctttcccaatatcacaaacctgtgcccttttggcgaggtgttcaacgccaccagattcgccagcgtgtacgcctggaatcggaagagaatctccaactgcgtggccgactattctgtgctgtacaactccgcctctttcagcacctttaagtgctatggcgtgtctcccacaaagctgaatgatctgtgctttaccaacgtgtacgccgatagcttcgtgatcaggggagacgaagtgagacagatcgcaccaggacagacaggaaagatcgcagactacaattataagctgcctgacgatttcaccggctgcgtgatcgcctggaactccaacaatctggattctaaagtgggcggcaactacaattatctgtacaggctgtttcgcaagtccaatctgaagccattcgagcgggacatctccacagagatctaccaggccggctctaccccctgcaatggcgtggagggctttaactgttatttccctctgcagtcttacggcttccagccaacaaacggcgtgggctatcagccctacagagtggtggtgctgtcctttgagctgctgcacgcaccagcaacagtgtgcggcccaaagaagtctaccaatctggtgaagaacaagtgcgtgaacttcaacttcaacggactgaccggcacaggcgtgctgaccgagagcaataagaagttcctgccttttcagcagttcggcagggacatcgcagataccacagacgccgtgcgcgaccctcagaccctggagatcctggacatcacaccatgcagcttcggcggcgtgtccgtgatcacaccaggcaccaatacatccaaccaggtggccgtgctgtatcaggacgtgaattgtaccgaggtgcccgtggcaatccacgcagatcagctgacccctacatggcgggtgtactctaccggcagcaacgtgttccagacaagagccggatgcctgatcggagcagagcacgtgaacaatagctatgagtgcgacatccctatcggcgccggcatctgtgccagctaccagacccagacaaactccccatctggagcaggctccgtggccagccagtccatcatcgcctataccatgagcctgggcgccgagaacagcgtggcctactccaacaattctatcgccatccctaccaacttcacaatcagcgtgaccacagagatcctgccagtgtctatgaccaagacaagcgtggactgcacaatgtatatctgtggcgatagcaccgagtgctccaacctgctgctgcagtacggctccttttgtacccagctgaatagagccctgacaggcatcgccgtggagcaggataagaacacacaggaggtgttcgcccaggtgaagcagatctacaagaccccacccatcaaggactttggcggcttcaacttcagccagatcctgcctgatccaagcaagccctccaagaggtcttttatcgaggacctgctgttcaacaaggtgaccctggccgatgccggcttcatcaagcagtatggagattgcctgggagacatcgcagcccgcgacctgatctgtgcccagaagtttaatggcctgaccgtgctgcctccactgctgacagatgagatgatcgcccagtacacatctgccctgctggccggcaccatcacaagcggatggaccttcggcgcaggagccgccctgcagatcccttttgccatgcagatggcctataggttcaacggcatcggcgtgacccagaatgtgctgtacgagaaccagaagctgatcgccaatcagtttaacagcgccatcggcaagatccaggactctctgtcctctacagccagcgccctgggcaagctgcaggatgtggtgaatcagaacgcccaggccctgaataccctggtgaagcagctgagctccaacttcggcgccatctctagcgtgctgaatgacatcctgagccggctggacccccctgaggcagaggtgcagatcgacaggctgatcacaggccgcctgcagagcctgcagacctacgtgacacagcagctgatcagggcagcagagatcagagcctccgccaatctggccgccaccaagatgagcgagtgcgtgctgggacagtccaagagggtggacttttgtggcaagggctatcacctgatgtctttcccacagagcgcccctcacggcgtggtgtttctgcacgtgacctacgtgccagcccaggagaagaacttcaccacagcaccagccatctgccacgatggaaaggcacactttcctagggagggcgtgttcgtgtctaacggcacccactggtttgtgacacagcgcaatttctacgagccacagatcatcaccacagacaatacattcgtgagcggcaactgtgatgtggtgatcggcatcgtgaacaataccgtgtatgatccactgcagcccgagctggactcctttaaggaggagctggataagtacttcaagaatcacacctctcccgacgtggatctgggcgacatctccggcatcaatgcctctgtggtgaacatccagaaggagatcgaccggctgaacgaggtggccaagaatctgaacgagagcctgatcgatctgcaggagctgggcaagtatgagcagtacatcaagggctctggcagagagaacctgtatttccagggaggaggaggcagcggatacatccctgaggcaccaagggacggacaggcctacgtgcgcaaggatggcgagtgggtgctgctgtccacctttctgggccatcatcaccaccaccaccaccactga

SEQ ID NO: 5115 - DNA, 3846 bp, Artificial Sequence
  Description of Artificial Sequence: Synthetic polynucleotide
atgggcatcctgccaagcccaggaatgcccgccctgctgtctctggtgagcctgctgtccgtgctgctgatgggatgcgtggcagagacaggcacacagtgcgtgaacctgaccacaaggacccagctgccccctgcctataccaattctttcacacggggcgtgtactatcccgacaaggtgtttagaagctccgtgctgcactccacacaggatctgtttctgcctttcttttctaacgtgacctggttccacgccatccacgtgtccggcaccaatggcacaaagcggttcgacaatcccgtgctgccttttaacgatggcgtgtacttcgccagcaccgagaagtccaacatcatcagaggctggatctttggcaccacactggactctaagacacagagcctgctgatcgtgaacaatgccaccaacgtggtgatcaaggtgtgcgagttccagttttgtaatgatccattcctgggcgtgtactatcacaagaacaataagtcctggatggagtctgagtttcgcgtgtattctagcgccaacaattgcacatttgagtacgtgagccagcccttcctgatggacctggagggcaagcagggcaatttcaagaacctgagggagttcgtgtttaagaatatcgatggctacttcaagatctacagcaagcacaccccaatcaacctggtgcgcgacctgccacagggattctccgccctggagccactggtggatctgcccatcggcatcaacatcacccggtttcagacactgctggccctgcacagatcctacctgacaccaggcgactcctctagcggatggaccgcaggagctgccgcctactatgtgggctatctgcagccccggaccttcctgctgaagtacaacgagaatggcaccatcacagacgcagtggattgcgccctggaccccctgtctgagacaaagtgtacactgaagagctttaccgtggagaagggcatctatcagacaagcaatttcagggtgcagcctaccgagtccatcgtgcgctttcccaatatcacaaacctgtgcccttttggcgaggtgttcaacgccaccagattcgccagcgtgtacgcctggaatcggaagagaatctccaactgcgtggccgactattctgtgctgtacaactccgcctctttcagcacctttaagtgctatggcgtgtctcccacaaagctgaatgatctgtgctttaccaacgtgtacgccgatagcttcgtgatcaggggagacgaagtgagacagatcgcaccaggacagacaggaaagatcgcagactacaattataagctgcctgacgatttcaccggctgcgtgatcgcctggaactccaacaatctggattctaaagtgggcggcaactacaattatctgtacaggctgtttcgcaagtccaatctgaagccattcgagcgggacatctcccatgagatctaccaggccggctctaccccctgcaatggcgtggagggctttaactgttatttccctctgcagtcttacggcttccagccaacaaacggcgtgggctatcagccctacagagtggtggtgctgtcctttgagctgctgcacgcaccagcaacagtgtgcggcccaaagaagtctaccaatctggtgaagaacaagtgcgtgaacttcaacttcaacggactgaccggcacaggcgtgctgaccgagagcaataagaagttcctgccttttcagcagttcggcagggacatcgcagataccacagacgccgtgcgcgaccctcagaccctggagatcctggacatcacaccatgcagcttcggcggcgtgtccgtgatcacaccaggcaccaatacatccaaccaggtggccgtgctgtatcaggacgtgaattgtaccgaggtgcccgtggcaatccacgcagatcagctgacccctacatggcgggtgtactctaccggcagcaacgtgttccagacaagagccggatgcctgatcggagcagagcacgtgaacaatagctatgagtgcgacatccctatcggcgccggcatctgtgccagctaccagacccagacaaactccccatctggagcaggctccgtggccagccagtccatcatcgcctataccatgagcctgggcgccgagaacagcgtggcctactccaacaattctatcgccatccctaccaacttcacaatcagcgtgaccacagagatcctgccagtgtctatgaccaagacaagcgtggactgcacaatgtatatctgtggcgatagcaccgagtgctccaacctgctgctgcagtacggctccttttgtacccagctgaatagagccctgacaggcatcgccgtggagcaggataagaacacacaggaggtgttcgcccaggtgaagcagatctacaagaccccacccatcaaggactttggcggcttcaacttcagccagatcctgcctgatccaagcaagccctccaagaggtcttttatcgaggacctgctgttcaacaaggtgaccctggccgatgccggcttcatcaagcagtatggagattgcctgggagacatcgcagcccgcgacctgatctgtgcccagaagtttaatggcctgaccgtgctgcctccactgctgacagatgagatgatcgcccagtacacatctgccctgctggccggcaccatcacaagcggatggaccttcggcgcaggagccgccctgcagatcccttttgccatgcagatggcctataggttcaacggcatcggcgtgacccagaatgtgctgtacgagaaccagaagctgatcgccaatcagtttaacagcgccatcggcaagatccaggactctctgtcctctacagccagcgccctgggcaagctgcaggatgtggtgaatcagaacgcccaggccctgaataccctggtgaagcagctgagctccaacttcggcgccatctctagcgtgctgaatgacatcctgagccggctggacccccctgaggcagaggtgcagatcgacaggctgatcacaggccgcctgcagagcctgcagacctacgtgacacagcagctgatcagggcagcagagatcagagcctccgccaatctggccgccaccaagatgagcgagtgcgtgctgggacagtccaagagggtggacttttgtggcaagggctatcacctgatgtctttcccacagagcgcccctcacggcgtggtgtttctgcacgtgacctacgtgccagcccaggagaagaacttcaccacagcaccagccatctgccacgatggaaaggcacactttcctagggagggcgtgttcgtgtctaacggcacccactggtttgtgacacagcgcaatttctacgagccacagatcatcaccacagacaatacattcgtgagcggcaactgtgatgtggtgatcggcatcgtgaacaataccgtgtatgatccactgcagcccgagctggactcctttaaggaggagctggataagtacttcaagaatcacacctctcccgacgtggatctgggcgacatctccggcatcaatgcctctgtggtgaacatccagaaggagatcgaccggctgaacgaggtggccaagaatctgaacgagagcctgatcgatctgcaggagctgggcaagtatgagcagtacatcaagggctctggcagagagaacctgtatttccagggaggaggaggcagcggatacatccctgaggcaccaagggacggacaggcctacgtgcgcaaggatggcgagtgggtgctgctgtccacctttctgggccatcatcaccaccaccaccaccactga

SEQ ID NO: 5116 - DNA, 3846 bp, Artificial Sequence
  Description of Artificial Sequence: Synthetic polynucleotide
atgggcatcctgccaagcccaggaatgcccgccctgctgtctctggtgagcctgctgtccgtgctgctgatgggatgcgtggcagagacaggcacacagtgcgtgaacctgaccacaaggacccagctgccccctgcctataccaattctttcacacggggcgtgtactatcccgacaaggtgtttagaagctccgtgctgcactccacacaggatctgtttctgcctttcttttctaacgtgacctggttccacgccatccacgtgtccggcaccaatggcacaaagcggttcgacaatcccgtgctgccttttaacgatggcgtgtacttcgccagcaccgagaagtccaacatcatcagaggctggatctttggcaccacactggactctaagacacagagcctgctgatcgtgaacaatgccaccaacgtggtgatcaaggtgtgcgagttccagttttgtaatgatccattcctgggcgtgtactatcacaagaacaataagtcctggatggagtctgagtttcgcgtgtattctagcgccaacaattgcacatttgagtacgtgagccagcccttcctgatggacctggagggcaagcagggcaatttcaagaacctgagggagttcgtgtttaagaatatcgatggctacttcaagatctacagcaagcacaccccaatcaacctggtgcgcgacctgccacagggattctccgccctggagccactggtggatctgcccatcggcatcaacatcacccggtttcagacactgctggccctgcacagatcctacctgacaccaggcgactcctctagcggatggaccgcaggagctgccgcctactatgtgggctatctgcagccccggaccttcctgctgaagtacaacgagaatggcaccatcacagacgcagtggattgcgccctggaccccctgtctgagacaaagtgtacactgaagagctttaccgtggagaagggcatctatcagacaagcaatttcagggtgcagcctaccgagtccatcgtgcgctttcccaatatcacaaacctgtgcccttttggcgaggtgttcaacgccaccagattcgccagcgtgtacgcctggaatcggaagagaatctccaactgcgtggccgactattctgtgctgtacaacactgcctctttcagcacctttaagtgctatggcgtgtctcccacaaagctgaatgatctgtgctttaccaacgtgtacgccgatagcttcgtgatcaggggagacgaagtgagacagatcgcaccaggacagacaggaaagatcgcagactacaattataagctgcctgacgatttcaccggctgcgtgatcgcctggaactccaacaatctggattctaaagtgggcggcaactacaattatctgtacaggctgtttcgcaagtccaatctgaagccattcgagcgggacatctccacagagatctaccaggccggctctaccccctgcaatggcgtggagggctttaactgttatttccctctgcagtcttacggcttccagccaacaaacggcgtgggctatcagccctacagagtggtggtgctgtcctttgagctgctgcacgcaccagcaacagtgtgcggcccaaagaagtctaccaatctggtgaagaacaagtgcgtgaacttcaacttcaacggactgaccggcacaggcgtgctgaccgagagcaataagaagttcctgccttttcagcagttcggcagggacatcgcagataccacagacgccgtgcgcgaccctcagaccctggagatcctggacatcacaccatgcagcttcggcggcgtgtccgtgatcacaccaggcaccaatacatccaaccaggtggccgtgctgtatcaggacgtgaattgtaccgaggtgcccgtggcaatccacgcagatcagctgacccctacatggcgggtgtactctaccggcagcaacgtgttccagacaagagccggatgcctgatcggagcagagcacgtgaacaatagctatgagtgcgacatccctatcggcgccggcatctgtgccagctaccagacccagacaaactccccatctggagcaggctccgtggccagccagtccatcatcgcctataccatgagcctgggcgccgagaacagcgtggcctactccaacaattctatcgccatccctaccaacttcacaatcagcgtgaccacagagatcctgccagtgtctatgaccaagacaagcgtggactgcacaatgtatatctgtggcgatagcaccgagtgctccaacctgctgctgcagtacggctccttttgtacccagctgaatagagccctgacaggcatcgccgtggagcaggataagaacacacaggaggtgttcgcccaggtgaagcagatctacaagaccccacccatcaaggactttggcggcttcaacttcagccagatcctgcctgatccaagcaagccctccaagaggtcttttatcgaggacctgctgttcaacaaggtgaccctggccgatgccggcttcatcaagcagtatggagattgcctgggagacatcgcagcccgcgacctgatctgtgcccagaagtttaatggcctgaccgtgctgcctccactgctgacagatgagatgatcgcccagtacacatctgccctgctggccggcaccatcacaagcggatggaccttcggcgcaggagccgccctgcagatcccttttgccatgcagatggcctataggttcaacggcatcggcgtgacccagaatgtgctgtacgagaaccagaagctgatcgccaatcagtttaacagcgccatcggcaagatccaggactctctgtcctctacagccagcgccctgggcaagctgcaggatgtggtgaatcagaacgcccaggccctgaataccctggtgaagcagctgagctccaacttcggcgccatctctagcgtgctgaatgacatcctgagccggctggacccccctgaggcagaggtgcagatcgacaggctgatcacaggccgcctgcagagcctgcagacctacgtgacacagcagctgatcagggcagcagagatcagagcctccgccaatctggccgccaccaagatgagcgagtgcgtgctgggacagtccaagagggtggacttttgtggcaagggctatcacctgatgtctttcccacagagcgcccctcacggcgtggtgtttctgcacgtgacctacgtgccagcccaggagaagaacttcaccacagcaccagccatctgccacgatggaaaggcacactttcctagggagggcgtgttcgtgtctaacggcacccactggtttgtgacacagcgcaatttctacgagccacagatcatcaccacagacaatacattcgtgagcggcaactgtgatgtggtgatcggcatcgtgaacaataccgtgtatgatccactgcagcccgagctggactcctttaaggaggagctggataagtacttcaagaatcacacctctcccgacgtggatctgggcgacatctccggcatcaatgcctctgtggtgaacatccagaaggagatcgaccggctgaacgaggtggccaagaatctgaacgagagcctgatcgatctgcaggagctgggcaagtatgagcagtacatcaagggctctggcagagagaacctgtatttccagggaggaggaggcagcggatacatccctgaggcaccaagggacggacaggcctacgtgcgcaaggatggcgagtgggtgctgctgtccacctttctgggccatcatcaccaccaccaccaccactga

SEQ ID NO: 5117 - DNA, 3846 bp, Artificial Sequence
  Description of Artificial Sequence: Synthetic polynucleotide
atgggcatcctgccaagcccaggaatgcccgccctgctgtctctggtgagcctgctgtccgtgctgctgatgggatgcgtggcagagacaggcacacagtgcgtgaacctgaccacaaggacccagctgccccctgcctataccaattctttcacacggggcgtgtactatcccgacaaggtgtttagaagctccgtgctgcactccacacaggatctgtttctgcctttcttttctaacgtgacctggttccacgccatccacgtgtccggcaccaatggcacaaagcggttcgacaatcccgtgctgccttttaacgatggcgtgtacttcgccagcaccgagaagtccaacatcatcagaggctggatctttggcaccacactggactctaagacacagagcctgctgatcgtgaacaatgccaccaacgtggtgatcaaggtgtgcgagttccagttttgtaatgatccattcctgggcgtgtactatcacaagaacaataagtcctggatggagtctgagtttcgcgtgtattctagcgccaacaattgcacatttgagtacgtgagccagcccttcctgatggacctggagggcaagcagggcaatttcaagaacctgagggagttcgtgtttaagaatatcgatggctacttcaagatctacagcaagcacaccccaatcaacctggtgcgcgacctgccacagggattctccgccctggagccactggtggatctgcccatcggcatcaacatcacccggtttcagacactgctggccctgcacagatcctacctgacaccaggcgactcctctagcggatggaccgcaggagctgccgcctactatgtgggctatctgcagccccggaccttcctgctgaagtacaacgagaatggcaccatcacagacgcagtggattgcgccctggaccccctgtctgagacaaagtgtacactgaagagctttaccgtggagaagggcatctatcagacaagcaatttcagggtgcagcctaccgagtccatcgtgcgctttcccaatatcacaaacctgtgcccttttggcgaggtgttcaacgccaccagattcgccagcgtgtacgcctggaatcggaagagaatctccaactgcgtggccgactattctgtgctgtacaactccgcctctttcagcacctttaagtgctatggcgtgtctcccacaaagctgaatgatctgtgctttaccaacgtgtacgccgatagcttcgtgatcaggggagacgaagtgagacagatcgcaccaggacagacaggaaagatcgcagactacaattataagctgcctgacgatttcaccggctgcgtgatcgcctggaactccaacaatctggattctaaagtgggcggcaactacaattatctgtacaggctgtttcgcaagtccaatctgaagccattcgagcgggacatctccacagagatctaccaggccggctctaccccctgcaatggcgtggagggctttaactgttatttccctctgcagtcttacggcttccagccaacaaacggcgtgggctatcagccctacagagtggtggtgctgtcctttgagctgctgcacgcaccagcaacagtgtgcggcccaaagaagtctaccaatctggtgaagaacaagtgcgtgaacttcaacttcaacggactgaccggcacaggcgtgctgaccgagagcaataagaagttcctgccttttcagcagttcggcagggacatcgcagataccacagacgccgtgcgcgaccctcagaccctggagatcctggacatcacaccatgcagcttcggcggcgtgtccgtgatcacaccaggcaccaatacatccaaccaggtggccgtgctgtatcaggacgtgaattgtaccgaggtgcccgtggcaatccacgcagatcagctgacccctacatggcgggtgtactctaccggcagcaacgtgttccagacaagagccggatgcctgatcggagcagagcacgtgaacaatagctatgagtgcgacatccctatcggcgccggcatctgtgccagctaccagacccagacaaactccccatctggagcaggctccgtggccagccagtccatcatcgcctataccatgagcctgggcgccgagaacaaagtggcctactccaacaattctatcgccatccctaccaacttcacaatcagcgtgaccacagagatcctgccagtgtctatgaccaagacaagcgtggactgcacaatgtatatctgtggcgatagcaccgagtgctccaacctgctgctgcagtacggctccttttgtacccagctgaatagagccctgacaggcatcgccgtggagcaggataagaacacacaggaggtgttcgcccaggtgaagcagatctacaagaccccacccatcaaggactttggcggcttcaacttcagccagatcctgcctgatccaagcaagccctccaagaggtcttttatcgaggacctgctgttcaacaaggtgaccctggccgatgccggcttcatcaagcagtatggagattgcctgggagacatcgcagcccgcgacctgatctgtgcccagaagtttaatggcctgaccgtgctgcctccactgctgacagatgagatgatcgcccagtacacatctgccctgctggccggcaccatcacaagcggatggaccttcggcgcaggagccgccctgcagatcccttttgccatgcagatggcctataggttcaacggcatcggcgtgacccagaatgtgctgtacgagaaccagaagctgatcgccaatcagtttaacagcgccatcggcaagatccaggactctctgtcctctacagccagcgccctgggcaagctgcaggatgtggtgaatcagaacgcccaggccctgaataccctggtgaagcagctgagctccaacttcggcgccatctctagcgtgctgaatgacatcctgagccggctggacccccctgaggcagaggtgcagatcgacaggctgatcacaggccgcctgcagagcctgcagacctacgtgacacagcagctgatcagggcagcagagatcagagcctccgccaatctggccgccaccaagatgagcgagtgcgtgctgggacagtccaagagggtggacttttgtggcaagggctatcacctgatgtctttcccacagagcgcccctcacggcgtggtgtttctgcacgtgacctacgtgccagcccaggagaagaacttcaccacagcaccagccatctgccacgatggaaaggcacactttcctagggagggcgtgttcgtgtctaacggcacccactggtttgtgacacagcgcaatttctacgagccacagatcatcaccacagacaatacattcgtgagcggcaactgtgatgtggtgatcggcatcgtgaacaataccgtgtatgatccactgcagcccgagctggactcctttaaggaggagctggataagtacttcaagaatcacacctctcccgacgtggatctgggcgacatctccggcatcaatgcctctgtggtgaacatccagaaggagatcgaccggctgaacgaggtggccaagaatctgaacgagagcctgatcgatctgcaggagctgggcaagtatgagcagtacatcaagggctctggcagagagaacctgtatttccagggaggaggaggcagcggatacatccctgaggcaccaagggacggacaggcctacgtgcgcaaggatggcgagtgggtgctgctgtccacctttctgggccatcatcaccaccaccaccaccactga

SEQ ID NO: 5118 - DNA, 3846 bp, Artificial Sequence
  Description of Artificial Sequence: Synthetic polynucleotide
atgggcatcctgccaagcccaggaatgcccgccctgctgtctctggtgagcctgctgtccgtgctgctgatgggatgcgtggcagagacaggcacacagtgcgtgaacctgaccacaaggacccagctgccccctgcctataccaattctttcacacggggcgtgtactatcccgacaaggtgtttagaagctccgtgctgcactccacacaggatctgtttctgcctttcttttctaacgtgacctggttccacgccatccacgtgtccggcaccaatggcacaaagcggttcgacaatcccgtgctgccttttaacgatggcgtgtacttcgccagcaccgagaagtccaacatcatcagaggctggatctttggcaccacactggactctaagacacagagcctgctgatcgtgaacaatgccaccaacgtggtgatcaaggtgtgcgagttccagttttgtaatgatccattcctgggcgtgtactatcacaagaacaataagtcctggatggagtctgagtttcgcgtgtattctagcgccaacaattgcacatttgagtacgtgagccagcccttcctgatggacctggagggcaagcagggcaatttcaagaacctgagggagttcgtgtttaagaatatcgatggctacttcaagatctacagcaagcacaccccaatcaacctggtgcgcgacctgccacagggattctccgccctggagccactggtggatctgcccatcggcatcaacatcacccggtttcagacactgctggccctgcacagatcctacctgacaccaggcgactcctctagcggatggaccgcaggagctgccgcctactatgtgggctatctgcagccccggaccttcctgctgaagtacaacgagaatggcaccatcacagacgcagtggattgcgccctggaccccctgtctgagacaaagtgtacactgaagagctttaccgtggagaagggcatctatcagacaagcaatttcagggtgcagcctaccgagtccatcgtgcgctttcccaatatcacaaacctgtgcccttttggcgaggtgttcaacgccaccagattcgccagcgtgtacgcctggaatcggaagagaatctccaactgcgtggccgactattctaacctgtacaactccgcctctttcagcacctttaagtgctatggcgtgtctcccacaaagctgaatgatctgtgctttaccaacgtgtacgccgatagcttcgtgatcaggggagacgaagtgagacagatcgcaccaggacagacaggaaagatcgcagactacaattataagctgcctgacgatttcaccggctgcgtgatcgcctggaactccaacaatctggattctaaagtgggcggcaactacaattatctgtacaggctgtttcgcaagtccaatctgaagccattcgagcgggacatctccacagagatctaccaggccggctctaccccctgcaatggcgtggagggctttaactgttatttccctctgcagtcttacggcttccagccaacaaacggcgtgggctatcagccctacagagtggtggtgctgtcctttgagctgctgcacgcaccagcaacagtgtgcggcccaaagaagtctaccaatctggtgaagaacaagtgcgtgaacttcaacttcaacggactgaccggcacaggcgtgctgaccgagagcaataagaagttcctgccttttcagcagttcggcagggacatcgcagataccacagacgccgtgcgcgaccctcagaccctggagatcctggacatcacaccatgcagcttcggcggcgtgtccgtgatcacaccaggcaccaatacatccaaccaggtggccgtgctgtatcaggacgtgaattgtaccgaggtgcccgtggcaatccacgcagatcagctgacccctacatggcgggtgtactctaccggcagcaacgtgttccagacaagagccggatgcctgatcggagcagagcacgtgaacaatagctatgagtgcgacatccctatcggcgccggcatctgtgccagctaccagacccagacaaactccccatctggagcaggctccgtggccagccagtccatcatcgcctataccatgagcctgggcgccgagaacagcgtggcctactccaacaattctatcgccatccctaccaacttcacaatcagcgtgaccacagagatcctgccagtgtctatgaccaagacaagcgtggactgcacaatgtatatctgtggcgatagcaccgagtgctccaacctgctgctgcagtacggctccttttgtacccagctgaatagagccctgacaggcatcgccgtggagcaggataagaacacacaggaggtgttcgcccaggtgaagcagatctacaagaccccacccatcaaggactttggcggcttcaacttcagccagatcctgcctgatccaagcaagccctccaagaggtcttttatcgaggacctgctgttcaacaaggtgaccctggccgatgccggcttcatcaagcagtatggagattgcctgggagacatcgcagcccgcgacctgatctgtgcccagaagtttaatggcctgaccgtgctgcctccactgctgacagatgagatgatcgcccagtacacatctgccctgctggccggcaccatcacaagcggatggaccttcggcgcaggagccgccctgcagatcccttttgccatgcagatggcctataggttcaacggcatcggcgtgacccagaatgtgctgtacgagaaccagaagctgatcgccaatcagtttaacagcgccatcggcaagatccaggactctctgtcctctacagccagcgccctgggcaagctgcaggatgtggtgaatcagaacgcccaggccctgaataccctggtgaagcagctgagctccaacttcggcgccatctctagcgtgctgaatgacatcctgagccggctggacccccctgaggcagaggtgcagatcgacaggctgatcacaggccgcctgcagagcctgcagacctacgtgacacagcagctgatcagggcagcagagatcagagcctccgccaatctggccgccaccaagatgagcgagtgcgtgctgggacagtccaagagggtggacttttgtggcaagggctatcacctgatgtctttcccacagagcgcccctcacggcgtggtgtttctgcacgtgacctacgtgccagcccaggagaagaacttcaccacagcaccagccatctgccacgatggaaaggcacactttcctagggagggcgtgttcgtgtctaacggcacccactggtttgtgacacagcgcaatttctacgagccacagatcatcaccacagacaatacattcgtgagcggcaactgtgatgtggtgatcggcatcgtgaacaataccgtgtatgatccactgcagcccgagctggactcctttaaggaggagctggataagtacttcaagaatcacacctctcccgacgtggatctgggcgacatctccggcatcaatgcctctgtggtgaacatccagaaggagatcgaccggctgaacgaggtggccaagaatctgaacgagagcctgatcgatctgcaggagctgggcaagtatgagcagtacatcaagggctctggcagagagaacctgtatttccagggaggaggaggcagcggatacatccctgaggcaccaagggacggacaggcctacgtgcgcaaggatggcgagtgggtgctgctgtccacctttctgggccatcatcaccaccaccaccaccactga

SEQ ID NO: 5119 - DNA, 3846 bp, Artificial Sequence
  Description of Artificial Sequence: Synthetic polynucleotide
atgggcatcctgccaagcccaggaatgcccgccctgctgtctctggtgagcctgctgtccgtgctgctgatgggatgcgtggcagagacaggcacacagtgcgtgaacctgaccacaaggacccagctgccccctgcctataccaattctttcacacggggcgtgtactatcccgacaaggtgtttagaagctccgtgctgcactccacacaggatctgtttctgcctttcttttctaacgtgacctggttccacgccatccacgtgtccggcaccaatggcacaaagcggttcgacaatcccgtgctgccttttaacgatggcgtgtacttcgccagcaccgagaagtccaacatcatcagaggctggatctttggcaccacactggactctaagacacagagcctgctgatcgtgaacaatgccaccaacgtggtgatcaaggtgtgcgagttccagttttgtaatgatccattcctgggcgtgtactatcacaagaacaataagtcctggatggagtctgagtttcgcgtgtattctagcgccaacaattgcacatttgagtacgtgagccagcccttcctgatggacctggagggcaagcagggcaatttcaagaacctgagggagttcgtgtttaagaatatcgatggctacttcaagatctacagcaagcacaccccaatcaacctggtgcgcgacctgccacagggattctccgccctggagccactggtggatctgcccatcggcatcaacatcacccggtttcagacactgctggccctgcacagatcctacctgacaccaggcgactcctctagcggatggaccgcaggagctgccgcctactatgtgggctatctgcagccccggaccttcctgctgaagtacaacgagaatggcaccatcacagacgcagtggattgcgccctggaccccctgtctgagacaaagtgtacactgaagagctttaccgtggagaagggcatctatcagacaagcaatttcagggtgcagcctaccgagtccatcgtgcgctttcccaatatcacaaacctgtgcccttttggcgaggtgttcaacgccaccagattcgccagcgtgtacgcctggaatcggaagagaatctccaactgcgtggccgactattctgtgctgtacaactccgcctctttcagcacctttaagtgctatggcgtgtctcccacaaagctgaatgatctgtgctttaccaacgtgtacgccgatagcttcgtgatcaggggagacgaagtgagacagatcgcaccaggacagacaggaaagatcgcagactacaattataagctgcctgacgatttcaccggctgcgtgatcgcctggaactccaacaatctggattctaaagtgggcggcaactacaattatctgtacaggctgtttcgcaagtccaatctgaagccattcgagcgggacatctccacagagatctaccaggccggctctaccccctgcaatggcgtggagggctttaactgttatttccctctgcagtcttacggcttccagccaacaaacggcgtgggctatcagccctacagagtggtggtgctgtcctttgagctgctgcacgcaccagcaacagtgtgcggcccaaagaagtctaccaatctggtgaagaacaagtgcgtgaacttcaacttcaacggactgaccggcacaggcgtgctgaccgagagcaataagaagttcctgccttttcagcagttcggcagggacatcgcagataccacagacgccgtgcgcgaccctcagaccctggagatcctggacatcacaccatgcagcttcggcggcgtgtccgtgatcacaccaggcaccaatacatccaaccaggtggccgtgctgtatcaggacgtgaattgtaccgaggtgcccgtggcaatccacgcagatcagctgacccctacatggcgggtgtactctaccggcagcaacgtgttccagacaagagccggatgcctgatcggagcagagcacgtgaacaatagctatgagtgcgacatccctatcggcgccggcatctgtgccagctaccagacccagacaaactccccatctggagcaggctccgtggccagccagtccatcatcgcctataccatgagcctgggcgatgagaacagcgtggcctactccaacaattctatcgccatccctaccaacttcacaatcagcgtgaccacagagatcctgccagtgtctatgaccaagacaagcgtggactgcacaatgtatatctgtggcgatagcaccgagtgctccaacctgctgctgcagtacggctccttttgtacccagctgaatagagccctgacaggcatcgccgtggagcaggataagaacacacaggaggtgttcgcccaggtgaagcagatctacaagaccccacccatcaaggactttggcggcttcaacttcagccagatcctgcctgatccaagcaagccctccaagaggtcttttatcgaggacctgctgttcaacaaggtgaccctggccgatgccggcttcatcaagcagtatggagattgcctgggagacatcgcagcccgcgacctgatctgtgcccagaagtttaatggcctgaccgtgctgcctccactgctgacagatgagatgatcgcccagtacacatctgccctgctggccggcaccatcacaagcggatggaccttcggcgcaggagccgccctgcagatcccttttgccatgcagatggcctataggttcaacggcatcggcgtgacccagaatgtgctgtacgagaaccagaagctgatcgccaatcagtttaacagcgccatcggcaagatccaggactctctgtcctctacagccagcgccctgggcaagctgcaggatgtggtgaatcagaacgcccaggccctgaataccctggtgaagcagctgagctccaacttcggcgccatctctagcgtgctgaatgacatcctgagccggctggacccccctgaggcagaggtgcagatcgacaggctgatcacaggccgcctgcagagcctgcagacctacgtgacacagcagctgatcagggcagcagagatcagagcctccgccaatctggccgccaccaagatgagcgagtgcgtgctgggacagtccaagagggtggacttttgtggcaagggctatcacctgatgtctttcccacagagcgcccctcacggcgtggtgtttctgcacgtgacctacgtgccagcccaggagaagaacttcaccacagcaccagccatctgccacgatggaaaggcacactttcctagggagggcgtgttcgtgtctaacggcacccactggtttgtgacacagcgcaatttctacgagccacagatcatcaccacagacaatacattcgtgagcggcaactgtgatgtggtgatcggcatcgtgaacaataccgtgtatgatccactgcagcccgagctggactcctttaaggaggagctggataagtacttcaagaatcacacctctcccgacgtggatctgggcgacatctccggcatcaatgcctctgtggtgaacatccagaaggagatcgaccggctgaacgaggtggccaagaatctgaacgagagcctgatcgatctgcaggagctgggcaagtatgagcagtacatcaagggctctggcagagagaacctgtatttccagggaggaggaggcagcggatacatccctgaggcaccaagggacggacaggcctacgtgcgcaaggatggcgagtgggtgctgctgtccacctttctgggccatcatcaccaccaccaccaccactga

SEQ ID NO: 5120 - DNA, 3846 bp, Artificial Sequence
  Description of Artificial Sequence: Synthetic polynucleotide
atgggcatcctgccaagcccaggaatgcccgccctgctgtctctggtgagcctgctgtccgtgctgctgatgggatgcgtggcagagacaggcacacagtgcgtgaacctgaccacaaggacccagctgccccctgcctataccaattctttcacacggggcgtgtactatcccgacaaggtgtttagaagctccgtgctgcactccacacaggatctgtttctgcctttcttttctaacgtgacctggttccacgccatccacgtgtccggcaccaatggcacaaagcggttcgacaatcccgtgctgccttttaacgatggcgtgtacttcgccagcaccgagaagtccaacatcatcagaggctggatctttggcaccacactggactctaagacacagagcctgctgatcgtgaacaatgccaccaacgtggtgatcaaggtgtgcgagttccagttttgtaatgatccattcctgggcgtgtactatcacaagaacaataagtcctggatggagtctgagtttcgcgtgtattctagcgccaacaattgcacatttgagtacgtgagccagcccttcctgatggacctggagggcaagcagggcaatttcaagaacctgagggagttcgtgtttaagaatatcgatggctacttcaagatctacagcaagcacaccccaatcaacctggtgcgcgacctgccacagggattctccgccctggagccactggtggatctgcccatcggcatcaacatcacccggtttcagacactgctggccctgcacagatcctacctgacaccaggcgactcctctagcggatggaccgcaggagctgccgcctactatgtgggctatctgcagccccggaccttcctgctgaagtacaacgagaatggcaccatcacagacgcagtggattgcgccctggaccccctgtctgagacaaagtgtacactgaagagctttaccgtggagaagggcatctatcagacaagcaatttcagggtgcagcctaccgagtccatcgtgcgctttcccaatatcacaaacctgtgcccttttggcgaggtgttcaacgccaccagattcgccagcgtgtacgcctggaatcggaagagaatctccaactgcgtggccgactattctgtgctgtacaactccgcctctttcagcacctttaagtgctatggcgtgtctcccacaaagctgaatgatctgtgctttaccaacgtgtacgccgatagcttcgtgatcaggggagacgaagtgagacagatcgcaccaggacagacaggaaagatcgcagactacaattataagctgcctgacgatttcaccggctgcgtgatcgcctggaactccaacaatctggattctaaagtgggcggcaactacaattatctgtacaggctgtttcgcaagtccaatctgaagccattcgagcgggacatctccacagagatctaccaggccggctctaccccctgcaatggcgtggagggctttaactgttatttccctctgcagtcttacggcttccagccaacaaacggcgtgggctatcagccctacagagtggtggtgctgtcctttgagctggaccacgcaccagcaacagtgtgcggcccaaagaagtctaccaatctggtgaagaacaagtgcgtgaacttcaacttcaacggactgaccggcacaggcgtgctgaccgagagcaataagaagttcctgccttttcagcagttcggcagggacatcgcagataccacagacgccgtgcgcgaccctcagaccctggagatcctggacatcacaccatgcagcttcggcggcgtgtccgtgatcacaccaggcaccaatacatccaaccaggtggccgtgctgtatcaggacgtgaattgtaccgaggtgcccgtggcaatccacgcagatcagctgacccctacatggcgggtgtactctaccggcagcaacgtgttccagacaagagccggatgcctgatcggagcagagcacgtgaacaatagctatgagtgcgacatccctatcggcgccggcatctgtgccagctaccagacccagacaaactccccatctggagcaggctccgtggccagccagtccatcatcgcctataccatgagcctgggcgccgagaacagcgtggcctactccaacaattctatcgccatccctaccaacttcacaatcagcgtgaccacagagatcctgccagtgtctatgaccaagacaagcgtggactgcacaatgtatatctgtggcgatagcaccgagtgctccaacctgctgctgcagtacggctccttttgtacccagctgaatagagccctgacaggcatcgccgtggagcaggataagaacacacaggaggtgttcgcccaggtgaagcagatctacaagaccccacccatcaaggactttggcggcttcaacttcagccagatcctgcctgatccaagcaagccctccaagaggtcttttatcgaggacctgctgttcaacaaggtgaccctggccgatgccggcttcatcaagcagtatggagattgcctgggagacatcgcagcccgcgacctgatctgtgcccagaagtttaatggcctgaccgtgctgcctccactgctgacagatgagatgatcgcccagtacacatctgccctgctggccggcaccatcacaagcggatggaccttcggcgcaggagccgccctgcagatcccttttgccatgcagatggcctataggttcaacggcatcggcgtgacccagaatgtgctgtacgagaaccagaagctgatcgccaatcagtttaacagcgccatcggcaagatccaggactctctgtcctctacagccagcgccctgggcaagctgcaggatgtggtgaatcagaacgcccaggccctgaataccctggtgaagcagctgagctccaacttcggcgccatctctagcgtgctgaatgacatcctgagccggctggacccccctgaggcagaggtgcagatcgacaggctgatcacaggccgcctgcagagcctgcagacctacgtgacacagcagctgatcagggcagcagagatcagagcctccgccaatctggccgccaccaagatgagcgagtgcgtgctgggacagtccaagagggtggacttttgtggcaagggctatcacctgatgtctttcccacagagcgcccctcacggcgtggtgtttctgcacgtgacctacgtgccagcccaggagaagaacttcaccacagcaccagccatctgccacgatggaaaggcacactttcctagggagggcgtgttcgtgtctaacggcacccactggtttgtgacacagcgcaatttctacgagccacagatcatcaccacagacaatacattcgtgagcggcaactgtgatgtggtgatcggcatcgtgaacaataccgtgtatgatccactgcagcccgagctggactcctttaaggaggagctggataagtacttcaagaatcacacctctcccgacgtggatctgggcgacatctccggcatcaatgcctctgtggtgaacatccagaaggagatcgaccggctgaacgaggtggccaagaatctgaacgagagcctgatcgatctgcaggagctgggcaagtatgagcagtacatcaagggctctggcagagagaacctgtatttccagggaggaggaggcagcggatacatccctgaggcaccaagggacggacaggcctacgtgcgcaaggatggcgagtgggtgctgctgtccacctttctgggccatcatcaccaccaccaccaccactga

SEQ ID NO: 5121 - DNA, 3846 bp, Artificial Sequence
  Description of Artificial Sequence: Synthetic polynucleotide
atgggcatcctgccaagcccaggaatgcccgccctgctgtctctggtgagcctgctgtccgtgctgctgatgggatgcgtggcagagacaggcacacagtgcgtgaacctgaccacaaggacccagctgccccctgcctataccaattctttcacacggggcgtgtactatcccgacaaggtgtttagaagctccgtgctgcactccacacaggatctgtttctgcctttcttttctaacgtgacctggttccacgccatccacgtgtccggcaccaatggcacaaagcggttcgacaatcccgtgctgccttttaacgatggcgtgtacttcgccagcaccgagaagtccaacatcatcagaggctggatctttggcaccacactggactctaagacacagagcctgctgatcgtgaacaatgccaccaacgtggtgatcaaggtgtgcgagttccagttttgtaatgatccattcctgggcgtgtactatcacaagaacaataagtcctggatggagtctgagtttcgcgtgtattctagcgccaacaattgcacatttgagtacgtgagccagcccttcctgatggacctggagggcaagcagggcaatttcaagaacctgagggagttcgtgtttaagaatatcgatggctacttcaagatctacagcaagcacaccccaatcaacctggtgcgcgacctgccacagggattctccgccctggagccactggtggatctgcccatcggcatcaacatcacccggtttcagacactgctggccctgcacagatcctacctgacaccaggcgactcctctagcggatggaccgcaggagctgccgcctactatgtgggctatctgcagccccggaccttcctgctgaagtacaacgagaatggcaccatcacagacgcagtggattgcgccctggaccccctgtctgagacaaagtgtacactgaagagctttaccgtggagaagggcatctatcagacaagcaatttcagggtgcagcctaccgagtccatcgtgcgctttcccaatatcacaaacctgtgcccttttggcgaggtgttcaacgccaccagattcgccagcgtgtacgcctggaatcggaagagaatctccaactgcgtggccgactattctgtgctgtacaactccgcctctttcagcacctttaagtgctatggcgtgtctcccacaaagctgaatgatctgtgctttaccaacgtgtacgccgatagcttcgtgatcaggggagacgaagtgagacagatcgcaccaggacagacaggaaagatcgcagactacaattataagctgcctgacgatttcaccggctgcgtgatcgcctggaactccaacaatctggattctaaagtgggcggcaactacaattatctgtacaggctgtttcgcaagtccaatctgaagccattcgagcgggacatctccacagagatctaccaggccggctctaccccctgcaatggcgtggagggctttaactgttatttccctctgcagtcttacggcttccagccaacaaacggcgtgggctatcagccctacagagtggtgattctgtcctttgagctgctgcacgcaccagcaacagtgtgcggcccaaagaagtctaccaatctggtgaagaacaagtgcgtgaacttcaacttcaacggactgaccggcacaggcgtgctgaccgagagcaataagaagttcctgccttttcagcagttcggcagggacatcgcagataccacagacgccgtgcgcgaccctcagaccctggagatcctggacatcacaccatgcagcttcggcggcgtgtccgtgatcacaccaggcaccaatacatccaaccaggtggccgtgctgtatcaggacgtgaattgtaccgaggtgcccgtggcaatccacgcagatcagctgacccctacatggcgggtgtactctaccggcagcaacgtgttccagacaagagccggatgcctgatcggagcagagcacgtgaacaatagctatgagtgcgacatccctatcggcgccggcatctgtgccagctaccagacccagacaaactccccatctggagcaggctccgtggccagccagtccatcatcgcctataccatgagcctgggcgccgagaacagcgtggcctactccaacaattctatcgccatccctaccaacttcacaatcagcgtgaccacagagatcctgccagtgtctatgaccaagacaagcgtggactgcacaatgtatatctgtggcgatagcaccgagtgctccaacctgctgctgcagtacggctccttttgtacccagctgaatagagccctgacaggcatcgccgtggagcaggataagaacacacaggaggtgttcgcccaggtgaagcagatctacaagaccccacccatcaaggactttggcggcttcaacttcagccagatcctgcctgatccaagcaagccctccaagaggtcttttatcgaggacctgctgttcaacaaggtgaccctggccgatgccggcttcatcaagcagtatggagattgcctgggagacatcgcagcccgcgacctgatctgtgcccagaagtttaatggcctgaccgtgctgcctccactgctgacagatgagatgatcgcccagtacacatctgccctgctggccggcaccatcacaagcggatggaccttcggcgcaggagccgccctgcagatcccttttgccatgcagatggcctataggttcaacggcatcggcgtgacccagaatgtgctgtacgagaaccagaagctgatcgccaatcagtttaacagcgccatcggcaagatccaggactctctgtcctctacagccagcgccctgggcaagctgcaggatgtggtgaatcagaacgcccaggccctgaataccctggtgaagcagctgagctccaacttcggcgccatctctagcgtgctgaatgacatcctgagccggctggacccccctgaggcagaggtgcagatcgacaggctgatcacaggccgcctgcagagcctgcagacctacgtgacacagcagctgatcagggcagcagagatcagagcctccgccaatctggccgccaccaagatgagcgagtgcgtgctgggacagtccaagagggtggacttttgtggcaagggctatcacctgatgtctttcccacagagcgcccctcacggcgtggtgtttctgcacgtgacctacgtgccagcccaggagaagaacttcaccacagcaccagccatctgccacgatggaaaggcacactttcctagggagggcgtgttcgtgtctaacggcacccactggtttgtgacacagcgcaatttctacgagccacagatcatcaccacagacaatacattcgtgagcggcaactgtgatgtggtgatcggcatcgtgaacaataccgtgtatgatccactgcagcccgagctggactcctttaaggaggagctggataagtacttcaagaatcacacctctcccgacgtggatctgggcgacatctccggcatcaatgcctctgtggtgaacatccagaaggagatcgaccggctgaacgaggtggccaagaatctgaacgagagcctgatcgatctgcaggagctgggcaagtatgagcagtacatcaagggctctggcagagagaacctgtatttccagggaggaggaggcagcggatacatccctgaggcaccaagggacggacaggcctacgtgcgcaaggatggcgagtgggtgctgctgtccacctttctgggccatcatcaccaccaccaccaccactga

SEQ ID NO: 5122 - DNA, 3846 bp, Artificial Sequence
  Description of Artificial Sequence: Synthetic polynucleotide
atgggcatcctgccaagcccaggaatgcccgccctgctgtctctggtgagcctgctgtccgtgctgctgatgggatgcgtggcagagacaggcacacagtgcgtgaacctgaccacaaggacccagctgccccctgcctataccaattctttcacacggggcgtgtactatcccgacaaggtgtttagaagctccgtgctgcactccacacaggatctgtttctgcctttcttttctaacgtgacctggttccacgccatccacgtgtccggcaccaatggcacaaagcggttcgacaatcccgtgctgccttttaacgatggcgtgtacttcgccagcaccgagaagtccaacatcatcagaggctggatctttggcaccacactggactctaagacacagagcctgctgatcgtgaacaatgccaccaacgtggtgatcaaggtgtgcgagttccagttttgtaatgatccattcctgggcgtgtactatcacaagaacaataagtcctggatggagtctgagtttcgcgtgtattctagcgccaacaattgcacatttgagtacgtgagccagcccttcctgatggacctggagggcaagcagggcaatttcaagaacctgagggagttcgtgtttaagaatatcgatggctacttcaagatctacagcaagcacaccccaatcaacctggtgcgcgacctgccacagggattctccgccctggagccactggtggatctgcccatcggcatcaacatcacccggtttcagacactgctggccctgcacagatcctacctgacaccaggcgactcctctagcggatggaccgcaggagctgccgcctactatgtgggctatctgcagccccggaccttcctgctgaagtacaacgagaatggcaccatcacagacgcagtggattgcgccctggaccccctgtctgagacaaagtgtacactgaagagctttaccgtggagaagggcatctatcagacaagcaatttcagggtgcagcctaccgagtccatcgtgcgctttcccaatatcacaaacctgtgcccttttggcgaggtgttcaacgccaccagattcgccagcgtgtacgcctggaatcggaagagaatctccaactgcgtggccgactattctgtgctgtacaactccgcctctttcagcacctttaagtgctatggcgtgtctcccacaaagctgaatgatctgtgctttaccaacgtgtacgccgatagcttcgtgatcaggggagacgaagtgagacagatcgcaccaggacagacaggaaagatcgcagactacaattataagctgcctgacgatttcaccggctgcgtgatcgcctggaactccaacaatctggattctaaagtgggcggcaactacaattatctgtacaggctgtttcgcaagtccaatctgaagccattcgagcgggacatctccacagagatctaccaggccggctctaccccctgcaatggcgtggagggctttaactgttatttccctctgcagtcttacggcttccagccaacaaacggcgtgggctatcagccctacagagtggtggtgctggcgtttgagctgctgcacgcaccagcaacagtgtgcggcccaaagaagtctaccaatctggtgaagaacaagtgcgtgaacttcaacttcaacggactgaccggcacaggcgtgctgaccgagagcaataagaagttcctgccttttcagcagttcggcagggacatcgcagataccacagacgccgtgcgcgaccctcagaccctggagatcctggacatcacaccatgcagcttcggcggcgtgtccgtgatcacaccaggcaccaatacatccaaccaggtggccgtgctgtatcaggacgtgaattgtaccgaggtgcccgtggcaatccacgcagatcagctgacccctacatggcgggtgtactctaccggcagcaacgtgttccagacaagagccggatgcctgatcggagcagagcacgtgaacaatagctatgagtgcgacatccctatcggcgccggcatctgtgccagctaccagacccagacaaactccccatctggagcaggctccgtggccagccagtccatcatcgcctataccatgagcctgggcgccgagaacagcgtggcctactccaacaattctatcgccatccctaccaacttcacaatcagcgtgaccacagagatcctgccagtgtctatgaccaagacaagcgtggactgcacaatgtatatctgtggcgatagcaccgagtgctccaacctgctgctgcagtacggctccttttgtacccagctgaatagagccctgacaggcatcgccgtggagcaggataagaacacacaggaggtgttcgcccaggtgaagcagatctacaagaccccacccatcaaggactttggcggcttcaacttcagccagatcctgcctgatccaagcaagccctccaagaggtcttttatcgaggacctgctgttcaacaaggtgaccctggccgatgccggcttcatcaagcagtatggagattgcctgggagacatcgcagcccgcgacctgatctgtgcccagaagtttaatggcctgaccgtgctgcctccactgctgacagatgagatgatcgcccagtacacatctgccctgctggccggcaccatcacaagcggatggaccttcggcgcaggagccgccctgcagatcccttttgccatgcagatggcctataggttcaacggcatcggcgtgacccagaatgtgctgtacgagaaccagaagctgatcgccaatcagtttaacagcgccatcggcaagatccaggactctctgtcctctacagccagcgccctgggcaagctgcaggatgtggtgaatcagaacgcccaggccctgaataccctggtgaagcagctgagctccaacttcggcgccatctctagcgtgctgaatgacatcctgagccggctggacccccctgaggcagaggtgcagatcgacaggctgatcacaggccgcctgcagagcctgcagacctacgtgacacagcagctgatcagggcagcagagatcagagcctccgccaatctggccgccaccaagatgagcgagtgcgtgctgggacagtccaagagggtggacttttgtggcaagggctatcacctgatgtctttcccacagagcgcccctcacggcgtggtgtttctgcacgtgacctacgtgccagcccaggagaagaacttcaccacagcaccagccatctgccacgatggaaaggcacactttcctagggagggcgtgttcgtgtctaacggcacccactggtttgtgacacagcgcaatttctacgagccacagatcatcaccacagacaatacattcgtgagcggcaactgtgatgtggtgatcggcatcgtgaacaataccgtgtatgatccactgcagcccgagctggactcctttaaggaggagctggataagtacttcaagaatcacacctctcccgacgtggatctgggcgacatctccggcatcaatgcctctgtggtgaacatccagaaggagatcgaccggctgaacgaggtggccaagaatctgaacgagagcctgatcgatctgcaggagctgggcaagtatgagcagtacatcaagggctctggcagagagaacctgtatttccagggaggaggaggcagcggatacatccctgaggcaccaagggacggacaggcctacgtgcgcaaggatggcgagtgggtgctgctgtccacctttctgggccatcatcaccaccaccaccaccactga

SEQ ID NO: 5123 - DNA, 3846 bp, Artificial Sequence
  Description of Artificial Sequence: Synthetic polynucleotide
atgggcatcctgccaagcccaggaatgcccgccctgctgtctctggtgagcctgctgtccgtgctgctgatgggatgcgtggcagagacaggcacacagtgcgtgaacctgaccacaaggacccagctgccccctgcctataccaattctttcacacggggcgtgtactatcccgacaaggtgtttagaagctccgtgctgcactccacacaggatctgtttctgcctttcttttctaacgtgacctggttccacgccatccacgtgtccggcaccaatggcacaaagcggttcgacaatcccgtgctgccttttaacgatggcgtgtacttcgccagcaccgagaagtccaacatcatcagaggctggatctttggcaccacactggactctaagacacagagcctgctgatcgtgaacaatgccaccaacgtggtgatcaaggtgtgcgagttccagttttgtaatgatccattcctgggcgtgtactatcacaagaacaataagtcctggatggagtctgagtttcgcgtgtattctagcgccaacaattgcacatttgagtacgtgagccagcccttcctgatggacctggagggcaagcagggcaatttcaagaacctgagggagttcgtgtttaagaatatcgatggctacttcaagatctacagcaagcacaccccaatcaacctggtgcgcgacctgccacagggattctccgccctggagccactggtggatctgcccatcggcatcaacatcacccggtttcagacactgctggccctgcacagatcctacctgacaccaggcgactcctctagcggatggaccgcaggagctgccgcctactatgtgggctatctgcagccccggaccttcctgctgaagtacaacgagaatggcaccatcacagacgcagtggattgcgccctggaccccctgtctgagacaaagtgtacactgaagagctttaccgtggagaagggcatctatcagacaagcaatttcagggtgcagcctaccgagtccatcgtgcgctttcccaatatcacaaacctgtgcccttttggcgaggtgttcaacgccaccagattcgccagcgtgtacgcctggaatcggaagagaatctccaactgcgtggccgactattctgtgctgtacaactccgcctctttcagcacctttaagtgctatggcgtgtctcccacaaagctgaatgatctgtgctttaccaacgtgtacgccgatagcttcgtgatcaggggagacgaagtgagacagatcgcaccaggacagacaggaaagatcgcagactacaattataagctgcctgacgatttcaccggctgcgtgatcgcctggaactccaacaatctggattctaaagtgggcggcaactacaattatctgtacaggctgtttcgcaagtccaatctgaagccattcgagcgggacatctccacagagatctaccaggccggctctaccccctgcaatggcgtggagggctttaactgttatttccctctgcagtcttacggcttccagccaacaaacggcgtgggctatcagccctacagagtggtggtgctgtcctttgagctgctgttggcaccagcaacagtgtgcggcccaaagaagtctaccaatctggtgaagaacaagtgcgtgaacttcaacttcaacggactgaccggcacaggcgtgctgaccgagagcaataagaagttcctgccttttcagcagttcggcagggacatcgcagataccacagacgccgtgcgcgaccctcagaccctggagatcctggacatcacaccatgcagcttcggcggcgtgtccgtgatcacaccaggcaccaatacatccaaccaggtggccgtgctgtatcaggacgtgaattgtaccgaggtgcccgtggcaatccacgcagatcagctgacccctacatggcgggtgtactctaccggcagcaacgtgttccagacaagagccggatgcctgatcggagcagagcacgtgaacaatagctatgagtgcgacatccctatcggcgccggcatctgtgccagctaccagacccagacaaactccccatctggagcaggctccgtggccagccagtccatcatcgcctataccatgagcctgggcgccgagaacagcgtggcctactccaacaattctatcgccatccctaccaacttcacaatcagcgtgaccacagagatcctgccagtgtctatgaccaagacaagcgtggactgcacaatgtatatctgtggcgatagcaccgagtgctccaacctgctgctgcagtacggctccttttgtacccagctgaatagagccctgacaggcatcgccgtggagcaggataagaacacacaggaggtgttcgcccaggtgaagcagatctacaagaccccacccatcaaggactttggcggcttcaacttcagccagatcctgcctgatccaagcaagccctccaagaggtcttttatcgaggacctgctgttcaacaaggtgaccctggccgatgccggcttcatcaagcagtatggagattgcctgggagacatcgcagcccgcgacctgatctgtgcccagaagtttaatggcctgaccgtgctgcctccactgctgacagatgagatgatcgcccagtacacatctgccctgctggccggcaccatcacaagcggatggaccttcggcgcaggagccgccctgcagatcccttttgccatgcagatggcctataggttcaacggcatcggcgtgacccagaatgtgctgtacgagaaccagaagctgatcgccaatcagtttaacagcgccatcggcaagatccaggactctctgtcctctacagccagcgccctgggcaagctgcaggatgtggtgaatcagaacgcccaggccctgaataccctggtgaagcagctgagctccaacttcggcgccatctctagcgtgctgaatgacatcctgagccggctggacccccctgaggcagaggtgcagatcgacaggctgatcacaggccgcctgcagagcctgcagacctacgtgacacagcagctgatcagggcagcagagatcagagcctccgccaatctggccgccaccaagatgagcgagtgcgtgctgggacagtccaagagggtggacttttgtggcaagggctatcacctgatgtctttcccacagagcgcccctcacggcgtggtgtttctgcacgtgacctacgtgccagcccaggagaagaacttcaccacagcaccagccatctgccacgatggaaaggcacactttcctagggagggcgtgttcgtgtctaacggcacccactggtttgtgacacagcgcaatttctacgagccacagatcatcaccacagacaatacattcgtgagcggcaactgtgatgtggtgatcggcatcgtgaacaataccgtgtatgatccactgcagcccgagctggactcctttaaggaggagctggataagtacttcaagaatcacacctctcccgacgtggatctgggcgacatctccggcatcaatgcctctgtggtgaacatccagaaggagatcgaccggctgaacgaggtggccaagaatctgaacgagagcctgatcgatctgcaggagctgggcaagtatgagcagtacatcaagggctctggcagagagaacctgtatttccagggaggaggaggcagcggatacatccctgaggcaccaagggacggacaggcctacgtgcgcaaggatggcgagtgggtgctgctgtccacctttctgggccatcatcaccaccaccaccaccactga

SEQ ID NO: 5124 - DNA, 3846 bp, Artificial Sequence
  Description of Artificial Sequence: Synthetic polynucleotide
atgggcatcctgccaagcccaggaatgcccgccctgctgtctctggtgagcctgctgtccgtgctgctgatgggatgcgtggcagagacaggcacacagtgcgtgaacctgaccacaaggacccagctgccccctgcctataccaattctttcacacggggcgtgtactatcccgacaaggtgtttagaagctccgtgctgcactccacacaggatctgtttctgcctttcttttctaacgtgacctggttccacgccatccacgtgtccggcaccaatggcacaaagcggttcgacaatcccgtgctgccttttaacgatggcgtgtacttcgccagcaccgagaagtccaacatcatcagaggctggatctttggcaccacactggactctaagacacagagcctgctgatcgtgaacaatgccaccaacgtggtgatcaaggtgtgcgagttccagttttgtaatgatccattcctgggcgtgtactatcacaagaacaataagtcctggatggagtctgagtttcgcgtgtattctagcgccaacaattgcacatttgagtacgtgagccagcccttcctgatggacctggagggcaagcagggcaatttcaagaacctgagggagttcgtgtttaagaatatcgatggctacttcaagatctacagcaagcacaccccaatcaacctggtgcgcgacctgccacagggattctccgccctggagccactggtggatctgcccatcggcatcaacatcacccggtttcagacactgctggccctgcacagatcctacctgacaccaggcgactcctctagcggatggaccgcaggagctgccgcctactatgtgggctatctgcagccccggaccttcctgctgaagtacaacgagaatggcaccatcacagacgcagtggattgcgccctggaccccctgtctgagacaaagtgtacactgaagagctttaccgtggagaagggcatctatcagacaagcaatttcagggtgcagcctaccgagtccatcgtgcgctttcccaatatcacaaacctgtgcccttttggcgaggtgttcaacgccaccagattcgccagcgtgtacgcctggaatcggaagagaatctccaactgcgtggccgactattctgtgctgtacaactccgcctctttcagcacctttaagtgctatggcgtgtctcccacaaagctgaatgatctgtgctttaccaacgtgtacgccgatagcttcgtgatcaggggagacgaagtgagacagatcgcaccaggacagacaggaaagatcgcagactacaattataagctgcctgacgatttcaccggctgcgtgatcgcctggaactccaacaatctggattctaaagtgggcggcaactacaattatctgtacaggctgtttcgcaagtccaatctgaagccattcgagcttgacatctccacagagatctaccaggccggctctaccccctgcaatggcgtggagggctttaactgttatttccctctgcagtcttacggcttccagccaacaaacggcgtgggctatcagccctacagagtggtggtgctgtcctttgagctgctgcacgcaccagcaacagtgtgcggcccaaagaagtctaccaatctggtgaagaacaagtgcgtgaacttcaacttcaacggactgaccggcacaggcgtgctgaccgagagcaataagaagttcctgccttttcagcagttcggcagggacatcgcagataccacagacgccgtgcgcgaccctcagaccctggagatcctggacatcacaccatgcagcttcggcggcgtgtccgtgatcacaccaggcaccaatacatccaaccaggtggccgtgctgtatcaggacgtgaattgtaccgaggtgcccgtggcaatccacgcagatcagctgacccctacatggcgggtgtactctaccggcagcaacgtgttccagacaagagccggatgcctgatcggagcagagcacgtgaacaatagctatgagtgcgacatccctatcggcgccggcatctgtgccagctaccagacccagacaaactccccatctggagcaggctccgtggccagccagtccatcatcgcctataccatgagcctgggcgccgagaacagcgtggcctactccaacaattctatcgccatccctaccaacttcacaatcagcgtgaccacagagatcctgccagtgtctatgaccaagacaagcgtggactgcacaatgtatatctgtggcgatagcaccgagtgctccaacctgctgctgcagtacggctccttttgtacccagctgaatagagccctgacaggcatcgccgtggagcaggataagaacacacaggaggtgttcgcccaggtgaagcagatctacaagaccccacccatcaaggactttggcggcttcaacttcagccagatcctgcctgatccaagcaagccctccaagaggtcttttatcgaggacctgctgttcaacaaggtgaccctggccgatgccggcttcatcaagcagtatggagattgcctgggagacatcgcagcccgcgacctgatctgtgcccagaagtttaatggcctgaccgtgctgcctccactgctgacagatgagatgatcgcccagtacacatctgccctgctggccggcaccatcacaagcggatggaccttcggcgcaggagccgccctgcagatcccttttgccatgcagatggcctataggttcaacggcatcggcgtgacccagaatgtgctgtacgagaaccagaagctgatcgccaatcagtttaacagcgccatcggcaagatccaggactctctgtcctctacagccagcgccctgggcaagctgcaggatgtggtgaatcagaacgcccaggccctgaataccctggtgaagcagctgagctccaacttcggcgccatctctagcgtgctgaatgacatcctgagccggctggacccccctgaggcagaggtgcagatcgacaggctgatcacaggccgcctgcagagcctgcagacctacgtgacacagcagctgatcagggcagcagagatcagagcctccgccaatctggccgccaccaagatgagcgagtgcgtgctgggacagtccaagagggtggacttttgtggcaagggctatcacctgatgtctttcccacagagcgcccctcacggcgtggtgtttctgcacgtgacctacgtgccagcccaggagaagaacttcaccacagcaccagccatctgccacgatggaaaggcacactttcctagggagggcgtgttcgtgtctaacggcacccactggtttgtgacacagcgcaatttctacgagccacagatcatcaccacagacaatacattcgtgagcggcaactgtgatgtggtgatcggcatcgtgaacaataccgtgtatgatccactgcagcccgagctggactcctttaaggaggagctggataagtacttcaagaatcacacctctcccgacgtggatctgggcgacatctccggcatcaatgcctctgtggtgaacatccagaaggagatcgaccggctgaacgaggtggccaagaatctgaacgagagcctgatcgatctgcaggagctgggcaagtatgagcagtacatcaagggctctggcagagagaacctgtatttccagggaggaggaggcagcggatacatccctgaggcaccaagggacggacaggcctacgtgcgcaaggatggcgagtgggtgctgctgtccacctttctgggccatcatcaccaccaccaccaccactga

SEQ ID NO: 5125 - DNA, 3846 bp, Artificial Sequence
  Description of Artificial Sequence: Synthetic polynucleotide
atgggcatcctgccaagcccaggaatgcccgccctgctgtctctggtgagcctgctgtccgtgctgctgatgggatgcgtggcagagacaggcacacagtgcgtgaacctgaccacaaggacccagctgccccctgcctataccaattctttcacacggggcgtgtactatcccgacaaggtgtttagaagctccgtgctgcactccacacaggatctgtttctgcctttcttttctaacgtgacctggttccacgccatccacgtgtccggcaccaatggcacaaagcggttcgacaatcccgtgctgccttttaacgatggcgtgtacttcgccagcaccgagaagtccaacatcatcagaggctggatctttggcaccacactggactctaagacacagagcctgctgatcgtgaacaatgccaccaacgtggtgatcaaggtgtgcgagttccagttttgtaatgatccattcctgggcgtgtactatcacaagaacaataagtcctggatggagtctgagtttcgcgtgtattctagcgccaacaattgcacatttgagtacgtgagccagcccttcctgatggacctggagggcaagcagggcaatttcaagaacctgagggagttcgtgtttaagaatatcgatggctacttcaagatctacagcaagcacaccccaatcaacctggtgcgcgacctgccacagggattctccgccctggagccactggtggatctgcccatcggcatcaacatcacccggtttcagacactgctggccctgcacagatcctacctgacaccaggcgactcctctagcggatggaccgcaggagctgccgcctactatgtgggctatctgcagccccggaccttcctgctgaagtacaacgagaatggcaccatcacagacgcagtggattgcgccctggaccccctgtctgagacaaagtgtacactgaagagctttaccgtggagaagggcatctatcagacaagcaatttcagggtgcagcctaccgagtccatcgtgcgctttcccaatatcacaaacctgtgcccttttggcgaggtgttcaacgccaccagattcgccagcgtgtacgcctggaatcggaagagaatctccaactgcgtggccgactattctgtgctgtacaactccgcctctttcagcacctttaagtgctatggcgtgtctcccacaaagctgaatgatctgtgctttaccaacgtgtacgccgatagcttcgtgatcaggggagacgaagtgagacagatcgcaccaggacagacaggaaagatcgcagactacaattataagctgcctgacgatttcaccggctgcgtgatcgcctggaactccaacaatctggattctaaagtgggcggcaactacaattatctgtacaggctgtttcgcaagtccaatctgaagccattcgagcgggacatctccgcggagatctaccaggccggctctaccccctgcaatggcgtggagggctttaactgttatttccctctgcagtcttacggcttccagccaacaaacggcgtgggctatcagccctacagagtggtggtgctgtcctttgagctgctgcacgcaccagcaacagtgtgcggcccaaagaagtctaccaatctggtgaagaacaagtgcgtgaacttcaacttcaacggactgaccggcacaggcgtgctgaccgagagcaataagaagttcctgccttttcagcagttcggcagggacatcgcagataccacagacgccgtgcgcgaccctcagaccctggagatcctggacatcacaccatgcagcttcggcggcgtgtccgtgatcacaccaggcaccaatacatccaaccaggtggccgtgctgtatcaggacgtgaattgtaccgaggtgcccgtggcaatccacgcagatcagctgacccctacatggcgggtgtactctaccggcagcaacgtgttccagacaagagccggatgcctgatcggagcagagcacgtgaacaatagctatgagtgcgacatccctatcggcgccggcatctgtgccagctaccagacccagacaaactccccatctggagcaggctccgtggccagccagtccatcatcgcctataccatgagcctgggcgccgagaacagcgtggcctactccaacaattctatcgccatccctaccaacttcacaatcagcgtgaccacagagatcctgccagtgtctatgaccaagacaagcgtggactgcacaatgtatatctgtggcgatagcaccgagtgctccaacctgctgctgcagtacggctccttttgtacccagctgaatagagccctgacaggcatcgccgtggagcaggataagaacacacaggaggtgttcgcccaggtgaagcagatctacaagaccccacccatcaaggactttggcggcttcaacttcagccagatcctgcctgatccaagcaagccctccaagaggtcttttatcgaggacctgctgttcaacaaggtgaccctggccgatgccggcttcatcaagcagtatggagattgcctgggagacatcgcagcccgcgacctgatctgtgcccagaagtttaatggcctgaccgtgctgcctccactgctgacagatgagatgatcgcccagtacacatctgccctgctggccggcaccatcacaagcggatggaccttcggcgcaggagccgccctgcagatcccttttgccatgcagatggcctataggttcaacggcatcggcgtgacccagaatgtgctgtacgagaaccagaagctgatcgccaatcagtttaacagcgccatcggcaagatccaggactctctgtcctctacagccagcgccctgggcaagctgcaggatgtggtgaatcagaacgcccaggccctgaataccctggtgaagcagctgagctccaacttcggcgccatctctagcgtgctgaatgacatcctgagccggctggacccccctgaggcagaggtgcagatcgacaggctgatcacaggccgcctgcagagcctgcagacctacgtgacacagcagctgatcagggcagcagagatcagagcctccgccaatctggccgccaccaagatgagcgagtgcgtgctgggacagtccaagagggtggacttttgtggcaagggctatcacctgatgtctttcccacagagcgcccctcacggcgtggtgtttctgcacgtgacctacgtgccagcccaggagaagaacttcaccacagcaccagccatctgccacgatggaaaggcacactttcctagggagggcgtgttcgtgtctaacggcacccactggtttgtgacacagcgcaatttctacgagccacagatcatcaccacagacaatacattcgtgagcggcaactgtgatgtggtgatcggcatcgtgaacaataccgtgtatgatccactgcagcccgagctggactcctttaaggaggagctggataagtacttcaagaatcacacctctcccgacgtggatctgggcgacatctccggcatcaatgcctctgtggtgaacatccagaaggagatcgaccggctgaacgaggtggccaagaatctgaacgagagcctgatcgatctgcaggagctgggcaagtatgagcagtacatcaagggctctggcagagagaacctgtatttccagggaggaggaggcagcggatacatccctgaggcaccaagggacggacaggcctacgtgcgcaaggatggcgagtgggtgctgctgtccacctttctgggccatcatcaccaccaccaccaccactga

SEQ ID NO: 5126 - DNA, 3846 bp, Artificial Sequence
  Description of Artificial Sequence: Synthetic polynucleotide
atgggcatcctgccaagcccaggaatgcccgccctgctgtctctggtgagcctgctgtccgtgctgctgatgggatgcgtggcagagacaggcacacagtgcgtgaacctgaccacaaggacccagctgccccctgcctataccaattctttcacacggggcgtgtactatcccgacaaggtgtttagaagctccgtgctgcactccacacaggatctgtttctgcctttcttttctaacgtgacctggttccacgccatccacgtgtccggcaccaatggcacaaagcggttcgacaatcccgtgctgccttttaacgatggcgtgtacttcgccagcaccgagaagtccaacatcatcagaggctggatctttggcaccacactggactctaagacacagagcctgctgatcgtgaacaatgccaccaacgtggtgatcaaggtgtgcgagttccagttttgtaatgatccattcctgggcgtgtactatcacaagaacaataagtcctggatggagtctgagtttcgcgtgtattctagcgccaacaattgcacatttgagtacgtgagccagcccttcctgatggacctggagggcaagcagggcaatttcaagaacctgagggagttcgtgtttaagaatatcgatggctacttcaagatctacagcaagcacaccccaatcaacctggtgcgcgacctgccacagggattctccgccctggagccactggtggatctgcccatcggcatcaacatcacccggtttcagacactgctggccctgcacagatcctacctgacaccaggcgactcctctagcggatggaccgcaggagctgccgcctactatgtgggctatctgcagccccggaccttcctgctgaagtacaacgagaatggcaccatcacagacgcagtggattgcgccctggaccccctgtctgagacaaagtgtacactgaagagctttaccgtggagaagggcatctatcagacaagcaatttcagggtgcagcctaccgagtccatcgtgcgctttcccaatatcacaaacctgtgcccttttggcgaggtgttcaacgccaccagattcgccagcgtgtacgcctataatcggaagagaatctccaactgcgtggccgactattctgtgctgtacaactccgcctctttcagcacctttaagtgctatggcgtgtctcccacaaagctgaatgatctgtgctttaccaacgtgtacgccgatagcttcgtgatcaggggagacgaagtgagacagatcgcaccaggacagacaggaaagatcgcagactacaattataagctgcctgacgatttcaccggctgcgtgatcgcctggaactccaacaatctggattctaaagtgggcggcaactacaattatctgtacaggctgtttcgcaagtccaatctgaagccattcgagcgggacatctccacagagatctaccaggccggctctaccccctgcaatggcgtggagggctttaactgttatttccctctgcagtcttacggcttccagccaacaaacggcgtgggctatcagccctacagagtggtggtgctgtcctttgagctgctgcacgcaccagcaacagtgtgcggcccaaagaagtctaccaatctggtgaagaacaagtgcgtgaacttcaacttcaacggactgaccggcacaggcgtgctgaccgagagcaataagaagttcctgccttttcagcagttcggcagggacatcgcagataccacagacgccgtgcgcgaccctcagaccctggagatcctggacatcacaccatgcagcttcggcggcgtgtccgtgatcacaccaggcaccaatacatccaaccaggtggccgtgctgtatcaggacgtgaattgtaccgaggtgcccgtggcaatccacgcagatcagctgacccctacatggcgggtgtactctaccggcagcaacgtgttccagacaagagccggatgcctgatcggagcagagcacgtgaacaatagctatgagtgcgacatccctatcggcgccggcatctgtgccagctaccagacccagacaaactccccatctggagcaggctccgtggccagccagtccatcatcgcctataccatgagcctgggcgccgagaacagcgtggcctactccaacaattctatcgccatccctaccaacttcacaatcagcgtgaccacagagatcctgccagtgtctatgaccaagacaagcgtggactgcacaatgtatatctgtggcgatagcaccgagtgctccaacctgctgctgcagtacggctccttttgtacccagctgaatagagccctgacaggcatcgccgtggagcaggataagaacacacaggaggtgttcgcccaggtgaagcagatctacaagaccccacccatcaaggactttggcggcttcaacttcagccagatcctgcctgatccaagcaagccctccaagaggtcttttatcgaggacctgctgttcaacaaggtgaccctggccgatgccggcttcatcaagcagtatggagattgcctgggagacatcgcagcccgcgacctgatctgtgcccagaagtttaatggcctgaccgtgctgcctccactgctgacagatgagatgatcgcccagtacacatctgccctgctggccggcaccatcacaagcggatggaccttcggcgcaggagccgccctgcagatcccttttgccatgcagatggcctataggttcaacggcatcggcgtgacccagaatgtgctgtacgagaaccagaagctgatcgccaatcagtttaacagcgccatcggcaagatccaggactctctgtcctctacagccagcgccctgggcaagctgcaggatgtggtgaatcagaacgcccaggccctgaataccctggtgaagcagctgagctccaacttcggcgccatctctagcgtgctgaatgacatcctgagccggctggacccccctgaggcagaggtgcagatcgacaggctgatcacaggccgcctgcagagcctgcagacctacgtgacacagcagctgatcagggcagcagagatcagagcctccgccaatctggccgccaccaagatgagcgagtgcgtgctgggacagtccaagagggtggacttttgtggcaagggctatcacctgatgtctttcccacagagcgcccctcacggcgtggtgtttctgcacgtgacctacgtgccagcccaggagaagaacttcaccacagcaccagccatctgccacgatggaaaggcacactttcctagggagggcgtgttcgtgtctaacggcacccactggtttgtgacacagcgcaatttctacgagccacagatcatcaccacagacaatacattcgtgagcggcaactgtgatgtggtgatcggcatcgtgaacaataccgtgtatgatccactgcagcccgagctggactcctttaaggaggagctggataagtacttcaagaatcacacctctcccgacgtggatctgggcgacatctccggcatcaatgcctctgtggtgaacatccagaaggagatcgaccggctgaacgaggtggccaagaatctgaacgagagcctgatcgatctgcaggagctgggcaagtatgagcagtacatcaagggctctggcagagagaacctgtatttccagggaggaggaggcagcggatacatccctgaggcaccaagggacggacaggcctacgtgcgcaaggatggcgagtgggtgctgctgtccacctttctgggccatcatcaccaccaccaccaccactga

SEQ ID NO: 5127 - DNA, 3846 bp, Artificial Sequence
  Description of Artificial Sequence: Synthetic polynucleotide
atgggcatcctgccaagcccaggaatgcccgccctgctgtctctggtgagcctgctgtccgtgctgctgatgggatgcgtggcagagacaggcacacagtgcgtgaacctgaccacaaggacccagctgccccctgcctataccaattctttcacacggggcgtgtactatcccgacaaggtgtttagaagctccgtgctgcactccacacaggatctgtttctgcctttcttttctaacgtgacctggttccacgccatccacgtgtccggcaccaatggcacaaagcggttcgacaatcccgtgctgccttttaacgatggcgtgtacttcgccagcaccgagaagtccaacatcatcagaggctggatctttggcaccacactggactctaagacacagagcctgctgatcgtgaacaatgccaccaacgtggtgatcaaggtgtgcgagttccagttttgtaatgatccattcctgggcgtgtactatcacaagaacaataagtcctggatggagtctgagtttcgcgtgtattctagcgccaacaattgcacatttgagtacgtgagccagcccttcctgatggacctggagggcaagcagggcaatttcaagaacctgagggagttcgtgtttaagaatatcgatggctacttcaagatctacagcaagcacaccccaatcaacctggtgcgcgacctgccacagggattctccgccctggagccactggtggatctgcccatcggcatcaacatcacccggtttcagacactgctggccctgcacagatcctacctgacaccaggcgactcctctagcggatggaccgcaggagctgccgcctactatgtgggctatctgcagccccggaccttcctgctgaagtacaacgagaatggcaccatcacagacgcagtggattgcgccctggaccccctgtctgagacaaagtgtacactgaagagctttaccgtggagaagggcatctatcagacaagcaatttcagggtgcagcctaccgagtccatcgtgcgctttcccaatatcacaaacctgtgcccttttggcgaggtgttcaacgccaccagattcgccagcgtgtacgcctggaatcggaagagaatctccaactgcgtggccgactattctgtgctgtacaactccgcctctttcagcacctttaagtgctatggcgtgtctcccacaaagctgaatgatctgtgctttaccaacgtgtacgccgatagcttcgtgatcaggggagacgaagtgagacagatcgcaccaggacagacaggaaagatcgcagactacaattataagctgcctgacgatttcaccggctgcgtgatcgcctggaactccaacaatctggattctaaagtgggcggcaactacaattatctgtacaggctgtttcgcaagtccaatctgaagccattcgagcgggacatctccacagagatctaccaggccggctctaccccctgcaatggcgtggagggctttaactgttatttccctctgcagtcttacggcttccagccaacaaacggcgtgggctatcagccctacagagtggtggtgctgtcctttgagctgctgcacgcaccagcaacagtgtgcggcccaaagaagtctaccaatctggtgaagaacaagtgcgtgaacttcaacttcaacggactgaccggcacaggcgtgctgaccgagagcaataagaagttcctgccttttcagcagttcggcagggacatcgcagataccacagacgccgtgcgcgaccctcagaccctggagatcctggacatcacaccatgcagcttcggcggcgtgtccgtgatcacaccaggcaccaatacatccaaccaggtggccgtgctgtatcaggacgtgaattgtaccgaggtgcccgtggcaatccacgcagatcagctgacccctacatggcgggtgtactctaccggcagcaacgtgttccagacaagagccggatgcctgatcggagcagagcacgtgaacaatagctatgagtgcgacatccctatcggcgccggcatctgtgccagctaccagacccagacaaactccccatctggagcaggctccgtggccagccagtccatcatcgcctataccatgagcctgggcgccgagaacagcgtggcctactccaacaattctatcgccatccctaccaacttcacaatcagcgtgaccacagagatcctgccagtgtctatgaccaagacaagcgtggactgcacaatgtatatctgtggcgatagcaccgagtgctccaacctgctgctgcagtacggctccttttgtacccagctgaatagagccctgacaggcatcgccgtggagcaggataagaacacacaggaggtgttcgcccaggtgaagcagatctacaagaccccacccatcaaggactttggcggcttcaacttcagccagatcctgcctgatccaagcaagccctccaagaggtcttttatcgaggacctgctgttcaacaaggtgaccctggccgatgccggcttcatcaagcagtatggagattgcctgggagacatcgcagcccgcgacctgatctgtgcccagaagtttaatggcctgaccgtgctgcctccactgctgacagatgagatgatcgcccagtacacatctgccctgctggccggcaccatcacaagcggatggaccttcggcgcaggagccgccctgcagatcccttttgccatgcagatggcctataggttcaacggcatcggcgtgacccagaatgtgctgtacgagaaccagaagctgatcgccaatcagtttaacagcgccatcggcaagatccaggactctctgtcctctacagccagcgccctgggcaagctgcaggatgtggtgaatcagaacgcccaggccctgaataccctggtgaagcagctgagctccaacttcggcgccatctctagcgtgctgaatgacatcctgagccggctgccgccccctgaggcagaggtgcagatcgacaggctgatcacaggccgcctgcagagcctgcagacctacgtgacacagcagctgatcagggcagcagagatcagagcctccgccaatctggccgccaccaagatgagcgagtgcgtgctgggacagtccaagagggtggacttttgtggcaagggctatcacctgatgtctttcccacagagcgcccctcacggcgtggtgtttctgcacgtgacctacgtgccagcccaggagaagaacttcaccacagcaccagccatctgccacgatggaaaggcacactttcctagggagggcgtgttcgtgtctaacggcacccactggtttgtgacacagcgcaatttctacgagccacagatcatcaccacagacaatacattcgtgagcggcaactgtgatgtggtgatcggcatcgtgaacaataccgtgtatgatccactgcagcccgagctggactcctttaaggaggagctggataagtacttcaagaatcacacctctcccgacgtggatctgggcgacatctccggcatcaatgcctctgtggtgaacatccagaaggagatcgaccggctgaacgaggtggccaagaatctgaacgagagcctgatcgatctgcaggagctgggcaagtatgagcagtacatcaagggctctggcagagagaacctgtatttccagggaggaggaggcagcggatacatccctgaggcaccaagggacggacaggcctacgtgcgcaaggatggcgagtgggtgctgctgtccacctttctgggccatcatcaccaccaccaccaccactga

SEQ ID NO: 5128 - DNA, 3846 bp, Artificial Sequence
  Description of Artificial Sequence: Synthetic polynucleotide
atgggcatcctgccaagcccaggaatgcccgccctgctgtctctggtgagcctgctgtccgtgctgctgatgggatgcgtggcagagacaggcacacagtgcgtgaacctgaccacaaggacccagctgccccctgcctataccaattctttcacacggggcgtgtactatcccgacaaggtgtttagaagctccgtgctgcactccacacaggatctgtttctgcctttcttttctaacgtgacctggttccacgccatccacgtgtccggcaccaatggcacaaagcggttcgacaatcccgtgctgccttttaacgatggcgtgtacttcgccagcaccgagaagtccaacatcatcagaggctggatctttggcaccacactggactctaagacacagagcctgctgatcgtgaacaatgccaccaacgtggtgatcaaggtgtgcgagttccagttttgtaatgatccattcctgggcgtgtactatcacaagaacaataagtcctggatggagtctgagtttcgcgtgtattctagcgccaacaattgcacatttgagtacgtgagccagcccttcctgatggacctggagggcaagcagggcaatttcaagaacctgagggagttcgtgtttaagaatatcgatggctacttcaagatctacagcaagcacaccccaatcaacctggtgcgcgacctgccacagggattctccgccctggagccactggtggatctgcccatcggcatcaacatcacccggtttcagacactgctggccctgcacagatcctacctgacaccaggcgactcctctagcggatggaccgcaggagctgccgcctactatgtgggctatctgcagccccggaccttcctgctgaagtacaacgagaatggcaccatcacagacgcagtggattgcgccctggaccccctgtctgagacaaagtgtacactgaagagctttaccgtggagaagggcatctatcagacaagcaatttcagggtgcagcctaccgagtccatcgtgcgctttcccaatatcacaaacctgtgcccttttggcgaggtgttcaacgccaccagattcgccagcgtgtacgcctggaatcggaagagaatctccaactgcgtggccgactattctgtgctgtacaactccgcctctttcagcacctttaagtgctatggcgtgtctcccacaaagctgaatgatctgtgctttaccaacgtgtacgccgatagcttcgtgatcaggggagacgaagtgagacagatcgcaccaggacagacaggaaagatcgcagactacaattataagctgcctgacgatttcaccggctgcgtgatcgcctggaactccaacaatctggattctaaagtgggcggcaactacaattatctgtacaggctgtttcgcaagtccaatctgaagccattcgagcgggacatctccacagagatctaccaggccggctctaccccctgcaatggcgtggagggctttaactgttatttccctctgcagtcttacggcttccagccaacaaacggcgtgggctatcagccctacagagtggtggtgctgtcctttgagctgctgcacgcaccagcaacagtgtgcggcccaaagaagtctaccaatctggtgaagaacaagtgcgtgaacttcaacttcaacggactgaccggcacaggcgtgctgaccgagagcaataagaagttcctgccttttcagcagttcggcagggacatcgcagataccacagacgccgtgcgcgaccctcagaccctggagatcctggacatcacaccatgcagcttcggcggcgtgtccgtgatcacaccaggcaccaatacatccaaccaggtggccgtgctgtatcaggacgtgaattgtaccgaggtgcccgtggcaatccacgcagatcagctgacccctacatggcgggtgtactctaccggcagcaacgtgttccagacaagagccggatgcctgatcggagcagagcacgtgaacaatagctatgagtgcgacatccctatcggcgccggcatctgtgccagctaccagacccagacaaactccccatctggagcaggctccgtggccagccagtccatcatcgcctataccatgagcctgggcgccgagaacagcgtggcctactccaacaattctatcgccatccctaccaacttcacaatcagcgtgaccacagagatcctgccagtgtctatgaccaagacaagcgtggactgcacaatgtatatctgtggcgatagcaccgagtgctccaacctgctgctgcagtacggctccttttgtacccagctgaatagagccctgacaggcatcgccgtggagcaggataagaacacacaggaggtgttcgcccaggtgaagcagatctacaagaccccacccatcaaggactttggcggcttcaacttcagccagatcctgcctgatccaagcaagccctccaagaggtcttttatcgaggacctgctgttcaacaaggtgaccctggccgatgccggcttcatcaagcagtatggagattgcctgggagacatcgcagcccgcgacctgatctgtgcccagaagtttaatggcctgaccgtgctgcctccactgctgacagatgagatgatcgcccagtacacatctgccctgctggccggcaccatcacaagcggatggaccttcggctttggagccgccctgcagatcccttttgccatgcagatggcctataggttcaacggcatcggcgtgacccagaatgtgctgtacgagaaccagaagctgatcgccaatcagtttaacagcgccatcggcaagatccaggactctctgtcctctacagccagcgccctgggcaagctgcaggatgtggtgaatcagaacgcccaggccctgaataccctggtgaagcagctgagctccaacttcggcgccatctctagcgtgctgaatgacatcctgagccggctggacccccctgaggcagaggtgcagatcgacaggctgatcacaggccgcctgcagagcctgcagacctacgtgacacagcagctgatcagggcagcagagatcagagcctccgccaatctggccgccaccaagatgagcgagtgcgtgctgggacagtccaagagggtggacttttgtggcaagggctatcacctgatgtctttcccacagagcgcccctcacggcgtggtgtttctgcacgtgacctacgtgccagcccaggagaagaacttcaccacagcaccagccatctgccacgatggaaaggcacactttcctagggagggcgtgttcgtgtctaacggcacccactggtttgtgacacagcgcaatttctacgagccacagatcatcaccacagacaatacattcgtgagcggcaactgtgatgtggtgatcggcatcgtgaacaataccgtgtatgatccactgcagcccgagctggactcctttaaggaggagctggataagtacttcaagaatcacacctctcccgacgtggatctgggcgacatctccggcatcaatgcctctgtggtgaacatccagaaggagatcgaccggctgaacgaggtggccaagaatctgaacgagagcctgatcgatctgcaggagctgggcaagtatgagcagtacatcaagggctctggcagagagaacctgtatttccagggaggaggaggcagcggatacatccctgaggcaccaagggacggacaggcctacgtgcgcaaggatggcgagtgggtgctgctgtccacctttctgggccatcatcaccaccaccaccaccactga

SEQ ID NO: 5129 - DNA, 3846 bp, Artificial Sequence
  Description of Artificial Sequence: Synthetic polynucleotide
atgggcatcctgccaagcccaggaatgcccgccctgctgtctctggtgagcctgctgtccgtgctgctgatgggatgcgtggcagagacaggcacacagtgcgtgaacctgaccacaaggacccagctgccccctgcctataccaattctttcacacggggcgtgtactatcccgacaaggtgtttagaagctccgtgctgcactccacacaggatctgtttctgcctttcttttctaacgtgacctggttccacgccatccacgtgtccggcaccaatggcacaaagcggttcgacaatcccgtgctgccttttaacgatggcgtgtacttcgccagcaccgagaagtccaacatcatcagaggctggatctttggcaccacactggactctaagacacagagcctgctgatcgtgaacaatgccaccaacgtggtgatcaaggtgtgcgagttccagttttgtaatgatccattcctgggcgtgtactatcacaagaacaataagtcctggatggagtctgagtttcgcgtgtattctagcgccaacaattgcacatttgagtacgtgagccagcccttcctgatggacctggagggcaagcagggcaatttcaagaacctgagggagttcgtgtttaagaatatcgatggctacttcaagatctacagcaagcacaccccaatcaacctggtgcgcgacctgccacagggattctccgccctggagccactggtggatctgcccatcggcatcaacatcacccggtttcagacactgctggccctgcacagatcctacctgacaccaggcgactcctctagcggatggaccgcaggagctgccgcctactatgtgggctatctgcagccccggaccttcctgctgaagtacaacgagaatggcaccatcacagacgcagtggattgcgccctggaccccctgtctgagacaaagtgtacactgaagagctttaccgtggagaagggcatctatcagacaagcaatttcagggtgcagcctaccgagtccatcgtgcgctttcccaatatcacaaacctgtgcccttttggcgaggtgttcaacgccaccagattcgccagcgtgtacgcctggaatcggaagagaatctccaactgcgtggccgactattctgtgctgtacaactccgcctctttcagcacctttaagtgctatggcgtgtctcccacaaagctgaatgatctgtgctttaccaacgtgtacgccgatagcttccttatcaggggagacgaagtgagacagatcgcaccaggacagacaggaaagatcgcagactacaattataagctgcctgacgatttcaccggctgcgtgatcgcctggaactccaacaatctggattctaaagtgggcggcaactacaattatctgtacaggctgtttcgcaagtccaatctgaagccattcgagcgggacatctccacagagatctaccaggccggctctaccccctgcaatggcgtggagggctttaactgttatttccctctgcagtcttacggcttccagccaacaaacggcgtgggctatcagccctacagagtggtggtgctgtcctttgagctgctgcacgcaccagcaacagtgtgcggcccaaagaagtctaccaatctggtgaagaacaagtgcgtgaacttcaacttcaacggactgaccggcacaggcgtgctgaccgagagcaataagaagttcctgccttttcagcagttcggcagggacatcgcagataccacagacgccgtgcgcgaccctcagaccctggagatcctggacatcacaccatgcagcttcggcggcgtgtccgtgatcacaccaggcaccaatacatccaaccaggtggccgtgctgtatcaggacgtgaattgtaccgaggtgcccgtggcaatccacgcagatcagctgacccctacatggcgggtgtactctaccggcagcaacgtgttccagacaagagccggatgcctgatcggagcagagcacgtgaacaatagctatgagtgcgacatccctatcggcgccggcatctgtgccagctaccagacccagacaaactccccatctggagcaggctccgtggccagccagtccatcatcgcctataccatgagcctgggcgccgagaacagcgtggcctactccaacaattctatcgccatccctaccaacttcacaatcagcgtgaccacagagatcctgccagtgtctatgaccaagacaagcgtggactgcacaatgtatatctgtggcgatagcaccgagtgctccaacctgctgctgcagtacggctccttttgtacccagctgaatagagccctgacaggcatcgccgtggagcaggataagaacacacaggaggtgttcgcccaggtgaagcagatctacaagaccccacccatcaaggactttggcggcttcaacttcagccagatcctgcctgatccaagcaagccctccaagaggtcttttatcgaggacctgctgttcaacaaggtgaccctggccgatgccggcttcatcaagcagtatggagattgcctgggagacatcgcagcccgcgacctgatctgtgcccagaagtttaatggcctgaccgtgctgcctccactgctgacagatgagatgatcgcccagtacacatctgccctgctggccggcaccatcacaagcggatggaccttcggcgcaggagccgccctgcagatcccttttgccatgcagatggcctataggttcaacggcatcggcgtgacccagaatgtgctgtacgagaaccagaagctgatcgccaatcagtttaacagcgccatcggcaagatccaggactctctgtcctctacagccagcgccctgggcaagctgcaggatgtggtgaatcagaacgcccaggccctgaataccctggtgaagcagctgagctccaacttcggcgccatctctagcgtgctgaatgacatcctgagccggctggacccccctgaggcagaggtgcagatcgacaggctgatcacaggccgcctgcagagcctgcagacctacgtgacacagcagctgatcagggcagcagagatcagagcctccgccaatctggccgccaccaagatgagcgagtgcgtgctgggacagtccaagagggtggacttttgtggcaagggctatcacctgatgtctttcccacagagcgcccctcacggcgtggtgtttctgcacgtgacctacgtgccagcccaggagaagaacttcaccacagcaccagccatctgccacgatggaaaggcacactttcctagggagggcgtgttcgtgtctaacggcacccactggtttgtgacacagcgcaatttctacgagccacagatcatcaccacagacaatacattcgtgagcggcaactgtgatgtggtgatcggcatcgtgaacaataccgtgtatgatccactgcagcccgagctggactcctttaaggaggagctggataagtacttcaagaatcacacctctcccgacgtggatctgggcgacatctccggcatcaatgcctctgtggtgaacatccagaaggagatcgaccggctgaacgaggtggccaagaatctgaacgagagcctgatcgatctgcaggagctgggcaagtatgagcagtacatcaagggctctggcagagagaacctgtatttccagggaggaggaggcagcggatacatccctgaggcaccaagggacggacaggcctacgtgcgcaaggatggcgagtgggtgctgctgtccacctttctgggccatcatcaccaccaccaccaccactga

SEQ ID NO: 5130 - DNA, 3846 bp, Artificial Sequence
  Description of Artificial Sequence: Synthetic polynucleotide
atgggcatcctgccaagcccaggaatgcccgccctgctgtctctggtgagcctgctgtccgtgctgctgatgggatgcgtggcagagacaggcacacagtgcgtgaacctgaccacaaggacccagctgccccctgcctataccaattctttcacacggggcgtgtactatcccgacaaggtgtttagaagctccgtgctgcactccacacaggatctgtttctgcctttcttttctaacgtgacctggttccacgccatccacgtgtccggcaccaatggcacaaagcggttcgacaatcccgtgctgccttttaacgatggcgtgtacttcgccagcaccgagaagtccaacatcatcagaggctggatctttggcaccacactggactctaagacacagagcctgctgatcgtgaacaatgccaccaacgtggtgatcaaggtgtgcgagttccagttttgtaatgatccattcctgggcgtgtactatcacaagaacaataagtcctggatggagtctgagtttcgcgtgtattctagcgccaacaattgcacatttgagtacgtgagccagcccttcctgatggacctggagggcaagcagggcaatttcaagaacctgagggagttcgtgtttaagaatatcgatggctacttcaagatctacagcaagcacaccccaatcaacctggtgcgcgacctgccacagggattctccgccctggagccactggtggatctgcccatcggcatcaacatcacccggtttcagacactgctggccctgcacagatcctacctgacaccaggcgactcctctagcggatggaccgcaggagctgccgcctactatgtgggctatctgcagccccggaccttcctgctgaagtacaacgagaatggcaccatcacagacgcagtggattgcgccctggaccccctgtctgagacaaagtgtacactgaagagctttaccgtggagaagggcatctatcagacaagcaatttcagggtgcagcctaccgagtccatcgtgcgctttcccaatatcacaaacctgtgcccttttggcgaggtgttcaacgccaccagattcgccagcgtgtacgcctggaatcggaagagaatctccaactgcgtggccgactattctgtgctgtacaactccgcctctttcagcacctttaagtgctatggcgtgtctcccacaaagctgaatgatctgtgctttaccaacgtgtacgccgatagcttcgtgatcaggggagacgaagtgagacagatcgcaccaggacagacaggaaagatcgcagactacaattataagctgcctgacgatttcaccggctgcgtgatcgcctggaactccaacctcctggattctaaagtgggcggcaactacaattatctgtacaggctgtttcgcaagtccaatctgaagccattcgagcgggacatctccacagagatctaccaggccggctctaccccctgcaatggcgtggagggctttaactgttatttccctctgcagtcttacggcttccagccaacaaacggcgtgggctatcagccctacagagtggtggtgctgtcctttgagctgctgcacgcaccagcaacagtgtgcggcccaaagaagtctaccaatctggtgaagaacaagtgcgtgaacttcaacttcaacggactgaccggcacaggcgtgctgaccgagagcaataagaagttcctgccttttcagcagttcggcagggacatcgcagataccacagacgccgtgcgcgaccctcagaccctggagatcctggacatcacaccatgcagcttcggcggcgtgtccgtgatcacaccaggcaccaatacatccaaccaggtggccgtgctgtatcaggacgtgaattgtaccgaggtgcccgtggcaatccacgcagatcagctgacccctacatggcgggtgtactctaccggcagcaacgtgttccagacaagagccggatgcctgatcggagcagagcacgtgaacaatagctatgagtgcgacatccctatcggcgccggcatctgtgccagctaccagacccagacaaactccccatctggagcaggctccgtggccagccagtccatcatcgcctataccatgagcctgggcgccgagaacagcgtggcctactccaacaattctatcgccatccctaccaacttcacaatcagcgtgaccacagagatcctgccagtgtctatgaccaagacaagcgtggactgcacaatgtatatctgtggcgatagcaccgagtgctccaacctgctgctgcagtacggctccttttgtacccagctgaatagagccctgacaggcatcgccgtggagcaggataagaacacacaggaggtgttcgcccaggtgaagcagatctacaagaccccacccatcaaggactttggcggcttcaacttcagccagatcctgcctgatccaagcaagccctccaagaggtcttttatcgaggacctgctgttcaacaaggtgaccctggccgatgccggcttcatcaagcagtatggagattgcctgggagacatcgcagcccgcgacctgatctgtgcccagaagtttaatggcctgaccgtgctgcctccactgctgacagatgagatgatcgcccagtacacatctgccctgctggccggcaccatcacaagcggatggaccttcggcgcaggagccgccctgcagatcccttttgccatgcagatggcctataggttcaacggcatcggcgtgacccagaatgtgctgtacgagaaccagaagctgatcgccaatcagtttaacagcgccatcggcaagatccaggactctctgtcctctacagccagcgccctgggcaagctgcaggatgtggtgaatcagaacgcccaggccctgaataccctggtgaagcagctgagctccaacttcggcgccatctctagcgtgctgaatgacatcctgagccggctggacccccctgaggcagaggtgcagatcgacaggctgatcacaggccgcctgcagagcctgcagacctacgtgacacagcagctgatcagggcagcagagatcagagcctccgccaatctggccgccaccaagatgagcgagtgcgtgctgggacagtccaagagggtggacttttgtggcaagggctatcacctgatgtctttcccacagagcgcccctcacggcgtggtgtttctgcacgtgacctacgtgccagcccaggagaagaacttcaccacagcaccagccatctgccacgatggaaaggcacactttcctagggagggcgtgttcgtgtctaacggcacccactggtttgtgacacagcgcaatttctacgagccacagatcatcaccacagacaatacattcgtgagcggcaactgtgatgtggtgatcggcatcgtgaacaataccgtgtatgatccactgcagcccgagctggactcctttaaggaggagctggataagtacttcaagaatcacacctctcccgacgtggatctgggcgacatctccggcatcaatgcctctgtggtgaacatccagaaggagatcgaccggctgaacgaggtggccaagaatctgaacgagagcctgatcgatctgcaggagctgggcaagtatgagcagtacatcaagggctctggcagagagaacctgtatttccagggaggaggaggcagcggatacatccctgaggcaccaagggacggacaggcctacgtgcgcaaggatggcgagtgggtgctgctgtccacctttctgggccatcatcaccaccaccaccaccactga

SEQ ID NO: 5131 - DNA, 3846 bp, Artificial Sequence
  Description of Artificial Sequence: Synthetic polynucleotide
atgggcatcctgccaagcccaggaatgcccgccctgctgtctctggtgagcctgctgtccgtgctgctgatgggatgcgtggcagagacaggcacacagtgcgtgaacctgaccacaaggacccagctgccccctgcctataccaattctttcacacggggcgtgtactatcccgacaaggtgtttagaagctccgtgctgcactccacacaggatctgtttctgcctttcttttctaacgtgacctggttccacgccatccacgtgtccggcaccaatggcacaaagcggttcgacaatcccgtgctgccttttaacgatggcgtgtacttcgccagcaccgagaagtccaacatcatcagaggctggatctttggcaccacactggactctaagacacagagcctgctgatcgtgaacaatgccaccaacgtggtgatcaaggtgtgcgagttccagttttgtaatgatccattcctgggcgtgtactatcacaagaacaataagtcctggatggagtctgagtttcgcgtgtattctagcgccaacaattgcacatttgagtacgtgagccagcccttcctgatggacctggagggcaagcagggcaatttcaagaacctgagggagttcgtgtttaagaatatcgatggctacttcaagatctacagcaagcacaccccaatcaacctggtgcgcgacctgccacagggattctccgccctggagccactggtggatctgcccatcggcatcaacatcacccggtttcagacactgctggccctgcacagatcctacctgacaccaggcgactcctctagcggatggaccgcaggagctgccgcctactatgtgggctatctgcagccccggaccttcctgctgaagtacaacgagaatggcaccatcacagacgcagtggattgcgccctggaccccctgtctgagacaaagtgtacactgaagagctttaccgtggagaagggcatctatcagacaagcaatttcagggtgcagcctaccgagtccatcgtgcgctttcccaatatcacaaacctgtgcccttttggcgaggtgttcaacgccaccagattcgccagcgtgtacgcctggaatcggaagagaatctccaactgcgtggccgactattctgtgctgtacaactccgcctctttcagcacctttaagtgctatggcgtgtctcccacaaagctgaatgatctgtgctttaccaacgtgtacgccgatagcttcgtgatcaggggagacgaagtgagacagatcgcaccaggacagacaggaaagatcgcagactacaattataagctgcctgacgatttcaccggctgcgtgatcgcctggaactccaacaatctggattctaaagtgggcggcaactacaattatctgtacaggctgtttcgcaagtccaatctgaagccattcgagcgggacatctccacagagatctaccaggccggctctaccccctgcaatggcgtggagggctttaactgttatttccctctgcagtcttacggcttccagccaacaaacggcgtgggctatcagccctacagagtggtggtgctgtcctttgagctgctgcacgcaccagcaacagtgtgcggcccaaagaagtctaccaatctggtgaagaacaagtgcgtgaacttcaacttcaacggactgaccggcacaggcgtgctgaccgagagcaataagaagttcctgccttttcagcagttcggcagggacatcgcagataccacagacgccgtgcgcgaccctcagaccctggagatcctggacatcacaccatgcagcttcggcggcgtgtccgtgatcacaccaggcaccaatacatccaaccaggtggccgtgctgtatcaggacgtgaattgtaccgaggtgcccgtggcaatccacgcagatcagctgacccctacatggcgggtgtactctaccggcagcaacgtgttccagacaagagccggatgcctgatcggagcagagcacgtgaacaatagctatgagtgcgacatccctatcggcgccggcatctgtgccagctaccagacccagacaaactccccatctggagcaggctccgtggccagccagtccatcatcgcctataccatgagcctgggcgccgagaacagcattgcctactccaacaattctatcgccatccctaccaacttcacaatcagcgtgaccacagagatcctgccagtgtctatgaccaagacaagcgtggactgcacaatgtatatctgtggcgatagcaccgagtgctccaacctgctgctgcagtacggctccttttgtacccagctgaatagagccctgacaggcatcgccgtggagcaggataagaacacacaggaggtgttcgcccaggtgaagcagatctacaagaccccacccatcaaggactttggcggcttcaacttcagccagatcctgcctgatccaagcaagccctccaagaggtcttttatcgaggacctgctgttcaacaaggtgaccctggccgatgccggcttcatcaagcagtatggagattgcctgggagacatcgcagcccgcgacctgatctgtgcccagaagtttaatggcctgaccgtgctgcctccactgctgacagatgagatgatcgcccagtacacatctgccctgctggccggcaccatcacaagcggatggaccttcggcgcaggagccgccctgcagatcccttttgccatgcagatggcctataggttcaacggcatcggcgtgacccagaatgtgctgtacgagaaccagaagctgatcgccaatcagtttaacagcgccatcggcaagatccaggactctctgtcctctacagccagcgccctgggcaagctgcaggatgtggtgaatcagaacgcccaggccctgaataccctggtgaagcagctgagctccaacttcggcgccatctctagcgtgctgaatgacatcctgagccggctggacccccctgaggcagaggtgcagatcgacaggctgatcacaggccgcctgcagagcctgcagacctacgtgacacagcagctgatcagggcagcagagatcagagcctccgccaatctggccgccaccaagatgagcgagtgcgtgctgggacagtccaagagggtggacttttgtggcaagggctatcacctgatgtctttcccacagagcgcccctcacggcgtggtgtttctgcacgtgacctacgtgccagcccaggagaagaacttcaccacagcaccagccatctgccacgatggaaaggcacactttcctagggagggcgtgttcgtgtctaacggcacccactggtttgtgacacagcgcaatttctacgagccacagatcatcaccacagacaatacattcgtgagcggcaactgtgatgtggtgatcggcatcgtgaacaataccgtgtatgatccactgcagcccgagctggactcctttaaggaggagctggataagtacttcaagaatcacacctctcccgacgtggatctgggcgacatctccggcatcaatgcctctgtggtgaacatccagaaggagatcgaccggctgaacgaggtggccaagaatctgaacgagagcctgatcgatctgcaggagctgggcaagtatgagcagtacatcaagggctctggcagagagaacctgtatttccagggaggaggaggcagcggatacatccctgaggcaccaagggacggacaggcctacgtgcgcaaggatggcgagtgggtgctgctgtccacctttctgggccatcatcaccaccaccaccaccactga

SEQ ID NO: 5132 - DNA, 3846 bp, Artificial Sequence
  Description of Artificial Sequence: Synthetic polynucleotide
atgggcatcctgccaagcccaggaatgcccgccctgctgtctctggtgagcctgctgtccgtgctgctgatgggatgcgtggcagagacaggcacacagtgcgtgaacctgaccacaaggacccagctgccccctgcctataccaattctttcacacggggcgtgtactatcccgacaaggtgtttagaagctccgtgctgcactccacacaggatctgtttctgcctttcttttctaacgtgacctggttccacgccatccacgtgtccggcaccaatggcacaaagcggttcgacaatcccgtgctgccttttaacgatggcgtgtacttcgccagcaccgagaagtccaacatcatcagaggctggatctttggcaccacactggactctaagacacagagcctgctgatcgtgaacaatgccaccaacgtggtgatcaaggtgtgcgagttccagttttgtaatgatccattcctgggcgtgtactatcacaagaacaataagtcctggatggagtctgagtttcgcgtgtattctagcgccaacaattgcacatttgagtacgtgagccagcccttcctgatggacctggagggcaagcagggcaatttcaagaacctgagggagttcgtgtttaagaatatcgatggctacttcaagatctacagcaagcacaccccaatcaacctggtgcgcgacctgccacagggattctccgccctggagccactggtggatctgcccatcggcatcaacatcacccggtttcagacactgctggccctgcacagatcctacctgacaccaggcgactcctctagcggatggaccgcaggagctgccgcctactatgtgggctatctgcagccccggaccttcctgctgaagtacaacgagaatggcaccatcacagacgcagtggattgcgccctggaccccctgtctgagacaaagtgtacactgaagagctttaccgtggagaagggcatctatcagacaagcaatttcagggtgcagcctaccgagtccatcgtgcgctttcccaatatcacaaacctgtgcccttttggcgaggtgttcaacgccaccagattcgccagcgtgtacgcctggaatcggaagagaatctccaactgcgtggccgactattctgtgctgtacaactccgcctctttcagcacctttaagtgctatggcgtgtctcccacaaagctgaatgatctgtgctttaccaacgtgtacgccgataatttcgtgatcaggggagacgaagtgagacagatcgcaccaggacagacaggaaagatcgcagactacaattataagctgcctgacgatttcaccggctgcgtgatcgcctggaactccaacaatctggattctaaagtgggcggcaactacaattatctgtacaggctgtttcgcaagtccaatctgaagccattcgagcgggacatctccacagagatctaccaggccggctctaccccctgcaatggcgtggagggctttaactgttatttccctctgcagtcttacggcttccagccaacaaacggcgtgggctatcagccctacagagtggtggtgctgtcctttgagctgctgcacgcaccagcaacagtgtgcggcccaaagaagtctaccaatctggtgaagaacaagtgcgtgaacttcaacttcaacggactgaccggcacaggcgtgctgaccgagagcaataagaagttcctgccttttcagcagttcggcagggacatcgcagataccacagacgccgtgcgcgaccctcagaccctggagatcctggacatcacaccatgcagcttcggcggcgtgtccgtgatcacaccaggcaccaatacatccaaccaggtggccgtgctgtatcaggacgtgaattgtaccgaggtgcccgtggcaatccacgcagatcagctgacccctacatggcgggtgtactctaccggcagcaacgtgttccagacaagagccggatgcctgatcggagcagagcacgtgaacaatagctatgagtgcgacatccctatcggcgccggcatctgtgccagctaccagacccagacaaactccccatctggagcaggctccgtggccagccagtccatcatcgcctataccatgagcctgggcgccgagaacagcgtggcctactccaacaattctatcgccatccctaccaacttcacaatcagcgtgaccacagagatcctgccagtgtctatgaccaagacaagcgtggactgcacaatgtatatctgtggcgatagcaccgagtgctccaacctgctgctgcagtacggctccttttgtacccagctgaatagagccctgacaggcatcgccgtggagcaggataagaacacacaggaggtgttcgcccaggtgaagcagatctacaagaccccacccatcaaggactttggcggcttcaacttcagccagatcctgcctgatccaagcaagccctccaagaggtcttttatcgaggacctgctgttcaacaaggtgaccctggccgatgccggcttcatcaagcagtatggagattgcctgggagacatcgcagcccgcgacctgatctgtgcccagaagtttaatggcctgaccgtgctgcctccactgctgacagatgagatgatcgcccagtacacatctgccctgctggccggcaccatcacaagcggatggaccttcggcgcaggagccgccctgcagatcccttttgccatgcagatggcctataggttcaacggcatcggcgtgacccagaatgtgctgtacgagaaccagaagctgatcgccaatcagtttaacagcgccatcggcaagatccaggactctctgtcctctacagccagcgccctgggcaagctgcaggatgtggtgaatcagaacgcccaggccctgaataccctggtgaagcagctgagctccaacttcggcgccatctctagcgtgctgaatgacatcctgagccggctggacccccctgaggcagaggtgcagatcgacaggctgatcacaggccgcctgcagagcctgcagacctacgtgacacagcagctgatcagggcagcagagatcagagcctccgccaatctggccgccaccaagatgagcgagtgcgtgctgggacagtccaagagggtggacttttgtggcaagggctatcacctgatgtctttcccacagagcgcccctcacggcgtggtgtttctgcacgtgacctacgtgccagcccaggagaagaacttcaccacagcaccagccatctgccacgatggaaaggcacactttcctagggagggcgtgttcgtgtctaacggcacccactggtttgtgacacagcgcaatttctacgagccacagatcatcaccacagacaatacattcgtgagcggcaactgtgatgtggtgatcggcatcgtgaacaataccgtgtatgatccactgcagcccgagctggactcctttaaggaggagctggataagtacttcaagaatcacacctctcccgacgtggatctgggcgacatctccggcatcaatgcctctgtggtgaacatccagaaggagatcgaccggctgaacgaggtggccaagaatctgaacgagagcctgatcgatctgcaggagctgggcaagtatgagcagtacatcaagggctctggcagagagaacctgtatttccagggaggaggaggcagcggatacatccctgaggcaccaagggacggacaggcctacgtgcgcaaggatggcgagtgggtgctgctgtccacctttctgggccatcatcaccaccaccaccaccactga

SEQ ID NO: 5133 - DNA, 3846 bp, Artificial Sequence
  Description of Artificial Sequence: Synthetic polynucleotide
atgggcatcctgccaagcccaggaatgcccgccctgctgtctctggtgagcctgctgtccgtgctgctgatgggatgcgtggcagagacaggcacacagtgcgtgaacctgaccacaaggacccagctgccccctgcctataccaattctttcacacggggcgtgtactatcccgacaaggtgtttagaagctccgtgctgcactccacacaggatctgtttctgcctttcttttctaacgtgacctggttccacgccatccacgtgtccggcaccaatggcacaaagcggttcgacaatcccgtgctgccttttaacgatggcgtgtacttcgccagcaccgagaagtccaacatcatcagaggctggatctttggcaccacactggactctaagacacagagcctgctgatcgtgaacaatgccaccaacgtggtgatcaaggtgtgcgagttccagttttgtaatgatccattcctgggcgtgtactatcacaagaacaataagtcctggatggagtctgagtttcgcgtgtattctagcgccaacaattgcacatttgagtacgtgagccagcccttcctgatggacctggagggcaagcagggcaatttcaagaacctgagggagttcgtgtttaagaatatcgatggctacttcaagatctacagcaagcacaccccaatcaacctggtgcgcgacctgccacagggattctccgccctggagccactggtggatctgcccatcggcatcaacatcacccggtttcagacactgctggccctgcacagatcctacctgacaccaggcgactcctctagcggatggaccgcaggagctgccgcctactatgtgggctatctgcagccccggaccttcctgctgaagtacaacgagaatggcaccatcacagacgcagtggattgcgccctggaccccctgtctgagacaaagtgtacactgaagagctttaccgtggagaagggcatctatcagacaagcaatttcagggtgcagcctaccgagtccatcgtgcgctttcccaatatcacaaacctgtgcccttttggcgaggtgttcaacgccaccagattcgccagcgtgtacgcctggaatcggaagagaatctccaactgcgtggccgactattctgtgctgtacaactccgcctctttcagcacctttaagtgctatggcgtgtctcccacaaagctgaatgatctgtgctttaccaacgtgtacgccgatagcttcgtgatcaggggagacgaagtgagacagatcgcaccaggacagacaggaaagatcgcagactacaattataagctgcctgacgatttcaccggctgcgtgatcgcctggaactccaacaatctggattctaaagtgggcggcaactacaattatctgtacaggctgtttcgcaagtccaatctgaagccattcgagcgggacatctccacagagatctaccaggccggctctaccccctgcaatggcgtggagggctttaactgttatttccctctgcagtcttacggcttccagccaacaaacggcgtgggctatcagccctacagagtggtggtgctgtcctttgagctgctgcacgcaccagcaacagtgtgcggcccaaagaagtctaccaatctggtgaagaacaagtgcgtgaacttcaacttcaacggactgaccggcacaggcgtgctgaccgagagcaataagaagttcctgccttttcagcagttcggcagggacatcgcagataccacagacgccgtgcgcgaccctcagaccctggagatcctggacatcacaccatgcagcttcggcggcgtgtccgtgatcacaccaggcaccaatacatccaaccaggtggccgtgctgtatcaggacgtgaattgtaccgaggtgcccgtggcaatccacgcagatcagctgacccctacatggcgggtgtactctaccggcagcaacgtgttccagacaagagccggatgcctgatcggagcagagcacgtgaacaatagctatgagtgcgacatccctatcggcgccggcatctgtgccagctaccagacccagacaaactccccatctggagcaggctccgtggccagccagtccatcatcgcctataccatgagcctgggcgccgagaacagcgtggcctactccaacaattctatcgccatccctaccaacttcacaatcagcgtgaccacagagatcctgccagtgtctatgaccaagacaagcgtggactgcacaatgtatatctgtggcgatagcaccgagtgctccaacctgctgctgcagtacggctccttttgtacccagctgaatagagccctgacaggcatcgccgtggagcaggataagaacacacaggaggtgttcgcccaggtgaagcagatctacaagaccccacccatcaaggactttggcggcttcaacttcagccagatcctgcctgatccaagcaagccctccaagaggtcttttatcgaggacctgctgttcaacaaggtgaccctggccgatgccggcttcatcaagcagtatggagattgcctgggagacatcgcagcccgcgacctgatctgtgcccagaagtttaatggcctgaccgtgctgcctccactgctgacagatgagatgatcgcccagtacacatctgccctgctggccggcaccatcacaagcggatggaccttcggcgcaggagccgccctgcagatcccttttgccatgcagatggcctataggttcaacggcatcggcgtgacccagaatgtgctgtacgagaaccagaagctgatcgccaatcagtttaacagcgccatcggcaagatccaggactctctgtcctctacagccagcgccctgggcaagctgcaggatgtggtgaatcagaacgcccaggccctgaataccctggtgaagcagctgagctccaacttcggcgccatctctagcgtgctgaatgacatcctgagccggctggacccccctgaggcagaggtgcagatcgacaggctgatcacaggccgcctgcagagcctgcagacctacgtgacacagcagctgatcagggcagcagagatcagagcctccgccaatctggccgccaccaagatgagcgagtgcgtgctgggacagtccaagagggtggacttttgtggcaagggctatcacctgatgtctttcccacagagcgcccctcacggcgtggtgtttctgcacgtgacctacgtgccagcccagcaaaagaacttcaccacagcaccagccatctgccacgatggaaaggcacactttcctagggagggcgtgttcgtgtctaacggcacccactggtttgtgacacagcgcaatttctacgagccacagatcatcaccacagacaatacattcgtgagcggcaactgtgatgtggtgatcggcatcgtgaacaataccgtgtatgatccactgcagcccgagctggactcctttaaggaggagctggataagtacttcaagaatcacacctctcccgacgtggatctgggcgacatctccggcatcaatgcctctgtggtgaacatccagaaggagatcgaccggctgaacgaggtggccaagaatctgaacgagagcctgatcgatctgcaggagctgggcaagtatgagcagtacatcaagggctctggcagagagaacctgtatttccagggaggaggaggcagcggatacatccctgaggcaccaagggacggacaggcctacgtgcgcaaggatggcgagtgggtgctgctgtccacctttctgggccatcatcaccaccaccaccaccactga

SEQ ID NO: 5134 - DNA, 3846 bp, Artificial Sequence
  Description of Artificial Sequence: Synthetic polynucleotide
atgggcatcctgccaagcccaggaatgcccgccctgctgtctctggtgagcctgctgtccgtgctgctgatgggatgcgtggcagagacaggcacacagtgcgtgaacctgaccacaaggacccagctgccccctgcctataccaattctttcacacggggcgtgtactatcccgacaaggtgtttagaagctccgtgctgcactccacacaggatctgtttctgcctttcttttctaacgtgacctggttccacgccatccacgtgtccggcaccaatggcacaaagcggttcgacaatcccgtgctgccttttaacgatggcgtgtacttcgccagcaccgagaagtccaacatcatcagaggctggatctttggcaccacactggactctaagacacagagcctgctgatcgtgaacaatgccaccaacgtggtgatcaaggtgtgcgagttccagttttgtaatgatccattcctgggcgtgtactatcacaagaacaataagtcctggatggagtctgagtttcgcgtgtattctagcgccaacaattgcacatttgagtacgtgagccagcccttcctgatggacctggagggcaagcagggcaatttcaagaacctgagggagttcgtgtttaagaatatcgatggctacttcaagatctacagcaagcacaccccaatcaacctggtgcgcgacctgccacagggattctccgccctggagccactggtggatctgcccatcggcatcaacatcacccggtttcagacactgctggccctgcacagatcctacctgacaccaggcgactcctctagcggatggaccgcaggagctgccgcctactatgtgggctatctgcagccccggaccttcctgctgaagtacaacgagaatggcaccatcacagacgcagtggattgcgccctggaccccctgtctgagacaaagtgtacactgaagagctttaccgtggagaagggcatctatcagacaagcaatttcagggtgcagcctaccgagtccatcgtgcgctttcccaatatcacaaacctgtgcccttttggcgaggtgttcaacgccaccagattcgccagcgtgtacgcctggaatcggaagagaatctccaactgcgtggccgactattctgtgctgtacaactccgcctctttcagcacctttaagtgctatggcgtgtctcccacaaagctgaatgatctgtgctttaccaacgtgtacgccgatagcttcgtgatcaggggagacgaagtgagacagatcgcaccaggacagacaggaaagatcgcagactacaattataagctgcctgacgatttcaccggctgcgtgatcgcctggaactccaacaatctggattctaaagtgggcggcaactacaattatctgtacaggctgtttcgcaagtccaatctgaagccattcgagcgggacatctccacagagatctaccaggccggctctaccccctgcaatggcgtggagggctttaactggtatttccctctgcagtcttacggcttccagccaacaaacggcgtgggctatcagccctacagagtggtggtgctgtcctttgagctgctgcacgcaccagcaacagtgtgcggcccaaagaagtctaccaatctggtgaagaacaagtgcgtgaacttcaacttcaacggactgaccggcacaggcgtgctgaccgagagcaataagaagttcctgccttttcagcagttcggcagggacatcgcagataccacagacgccgtgcgcgaccctcagaccctggagatcctggacatcacaccatgcagcttcggcggcgtgtccgtgatcacaccaggcaccaatacatccaaccaggtggccgtgctgtatcaggacgtgaattgtaccgaggtgcccgtggcaatccacgcagatcagctgacccctacatggcgggtgtactctaccggcagcaacgtgttccagacaagagccggatgcctgatcggagcagagcacgtgaacaatagctatgagtgcgacatccctatcggcgccggcatctgtgccagctaccagacccagacaaactccccatctggagcaggctccgtggccagccagtccatcatcgcctataccatgagcctgggcgccgagaacagcgtggcctactccaacaattctatcgccatccctaccaacttcacaatcagcgtgaccacagagatcctgccagtgtctatgaccaagacaagcgtggactgcacaatgtatatctgtggcgatagcaccgagtgctccaacctgctgctgcagtacggctccttttgtacccagctgaatagagccctgacaggcatcgccgtggagcaggataagaacacacaggaggtgttcgcccaggtgaagcagatctacaagaccccacccatcaaggactttggcggcttcaacttcagccagatcctgcctgatccaagcaagccctccaagaggtcttttatcgaggacctgctgttcaacaaggtgaccctggccgatgccggcttcatcaagcagtatggagattgcctgggagacatcgcagcccgcgacctgatctgtgcccagaagtttaatggcctgaccgtgctgcctccactgctgacagatgagatgatcgcccagtacacatctgccctgctggccggcaccatcacaagcggatggaccttcggcgcaggagccgccctgcagatcccttttgccatgcagatggcctataggttcaacggcatcggcgtgacccagaatgtgctgtacgagaaccagaagctgatcgccaatcagtttaacagcgccatcggcaagatccaggactctctgtcctctacagccagcgccctgggcaagctgcaggatgtggtgaatcagaacgcccaggccctgaataccctggtgaagcagctgagctccaacttcggcgccatctctagcgtgctgaatgacatcctgagccggctggacccccctgaggcagaggtgcagatcgacaggctgatcacaggccgcctgcagagcctgcagacctacgtgacacagcagctgatcagggcagcagagatcagagcctccgccaatctggccgccaccaagatgagcgagtgcgtgctgggacagtccaagagggtggacttttgtggcaagggctatcacctgatgtctttcccacagagcgcccctcacggcgtggtgtttctgcacgtgacctacgtgccagcccaggagaagaacttcaccacagcaccagccatctgccacgatggaaaggcacactttcctagggagggcgtgttcgtgtctaacggcacccactggtttgtgacacagcgcaatttctacgagccacagatcatcaccacagacaatacattcgtgagcggcaactgtgatgtggtgatcggcatcgtgaacaataccgtgtatgatccactgcagcccgagctggactcctttaaggaggagctggataagtacttcaagaatcacacctctcccgacgtggatctgggcgacatctccggcatcaatgcctctgtggtgaacatccagaaggagatcgaccggctgaacgaggtggccaagaatctgaacgagagcctgatcgatctgcaggagctgggcaagtatgagcagtacatcaagggctctggcagagagaacctgtatttccagggaggaggaggcagcggatacatccctgaggcaccaagggacggacaggcctacgtgcgcaaggatggcgagtgggtgctgctgtccacctttctgggccatcatcaccaccaccaccaccactga

SEQ ID NO: 5135 - DNA, 3846 bp, Artificial Sequence
  Description of Artificial Sequence: Synthetic polynucleotide
atgggcatcctgccaagcccaggaatgcccgccctgctgtctctggtgagcctgctgtccgtgctgctgatgggatgcgtggcagagacaggcacacagtgcgtgaacctgaccacaaggacccagctgccccctgcctataccaattctttcacacggggcgtgtactatcccgacaaggtgtttagaagctccgtgctgcactccacacaggatctgtttctgcctttcttttctaacgtgacctggttccacgccatccacgtgtccggcaccaatggcacaaagcggttcgacaatcccgtgctgccttttaacgatggcgtgtacttcgccagcaccgagaagtccaacatcatcagaggctggatctttggcaccacactggactctaagacacagagcctgctgatcgtgaacaatgccaccaacgtggtgatcaaggtgtgcgagttccagttttgtaatgatccattcctgggcgtgtactatcacaagaacaataagtcctggatggagtctgagtttcgcgtgtattctagcgccaacaattgcacatttgagtacgtgagccagcccttcctgatggacctggagggcaagcagggcaatttcaagaacctgagggagttcgtgtttaagaatatcgatggctacttcaagatctacagcaagcacaccccaatcaacctggtgcgcgacctgccacagggattctccgccctggagccactggtggatctgcccatcggcatcaacatcacccggtttcagacactgctggccctgcacagatcctacctgacaccaggcgactcctctagcggatggaccgcaggagctgccgcctactatgtgggctatctgcagccccggaccttcctgctgaagtacaacgagaatggcaccatcacagacgcagtggattgcgccctggaccccctgtctgagacaaagtgtacactgaagagctttaccgtggagaagggcatctatcagacaagcaatttcagggtgcagcctaccgagtccatcgtgcgctttcccaatatcacaaacctgtgcccttttggcgaggtgttcaacgccaccagattcgccagcgtgtacgcctggaatcggaagagaatctccaactgcgtggccgactattctgtgctgtacaactccgcctctttcagcacctttaagtgctatggcgtgtctcccacaaagctgaatgatctgtgctttaccaacgtgtacgccgatagcttcgtgatcaggggagacgaagtgagacagatcgcaccaggacagacaggaaagatcgcagactacaattataagctgcctgacgatttcaccggctgcgtgatcgcctggaactccaacaatctggattctaaagtgggcggcaactacaattatctgtacaggctgtttcgcaagtccaatctgaagccattcgagcgggacatctccacagaggattaccaggccggctctaccccctgcaatggcgtggagggctttaactgttatttccctctgcagtcttacggcttccagccaacaaacggcgtgggctatcagccctacagagtggtggtgctgtcctttgagctgctgcacgcaccagcaacagtgtgcggcccaaagaagtctaccaatctggtgaagaacaagtgcgtgaacttcaacttcaacggactgaccggcacaggcgtgctgaccgagagcaataagaagttcctgccttttcagcagttcggcagggacatcgcagataccacagacgccgtgcgcgaccctcagaccctggagatcctggacatcacaccatgcagcttcggcggcgtgtccgtgatcacaccaggcaccaatacatccaaccaggtggccgtgctgtatcaggacgtgaattgtaccgaggtgcccgtggcaatccacgcagatcagctgacccctacatggcgggtgtactctaccggcagcaacgtgttccagacaagagccggatgcctgatcggagcagagcacgtgaacaatagctatgagtgcgacatccctatcggcgccggcatctgtgccagctaccagacccagacaaactccccatctggagcaggctccgtggccagccagtccatcatcgcctataccatgagcctgggcgccgagaacagcgtggcctactccaacaattctatcgccatccctaccaacttcacaatcagcgtgaccacagagatcctgccagtgtctatgaccaagacaagcgtggactgcacaatgtatatctgtggcgatagcaccgagtgctccaacctgctgctgcagtacggctccttttgtacccagctgaatagagccctgacaggcatcgccgtggagcaggataagaacacacaggaggtgttcgcccaggtgaagcagatctacaagaccccacccatcaaggactttggcggcttcaacttcagccagatcctgcctgatccaagcaagccctccaagaggtcttttatcgaggacctgctgttcaacaaggtgaccctggccgatgccggcttcatcaagcagtatggagattgcctgggagacatcgcagcccgcgacctgatctgtgcccagaagtttaatggcctgaccgtgctgcctccactgctgacagatgagatgatcgcccagtacacatctgccctgctggccggcaccatcacaagcggatggaccttcggcgcaggagccgccctgcagatcccttttgccatgcagatggcctataggttcaacggcatcggcgtgacccagaatgtgctgtacgagaaccagaagctgatcgccaatcagtttaacagcgccatcggcaagatccaggactctctgtcctctacagccagcgccctgggcaagctgcaggatgtggtgaatcagaacgcccaggccctgaataccctggtgaagcagctgagctccaacttcggcgccatctctagcgtgctgaatgacatcctgagccggctggacccccctgaggcagaggtgcagatcgacaggctgatcacaggccgcctgcagagcctgcagacctacgtgacacagcagctgatcagggcagcagagatcagagcctccgccaatctggccgccaccaagatgagcgagtgcgtgctgggacagtccaagagggtggacttttgtggcaagggctatcacctgatgtctttcccacagagcgcccctcacggcgtggtgtttctgcacgtgacctacgtgccagcccaggagaagaacttcaccacagcaccagccatctgccacgatggaaaggcacactttcctagggagggcgtgttcgtgtctaacggcacccactggtttgtgacacagcgcaatttctacgagccacagatcatcaccacagacaatacattcgtgagcggcaactgtgatgtggtgatcggcatcgtgaacaataccgtgtatgatccactgcagcccgagctggactcctttaaggaggagctggataagtacttcaagaatcacacctctcccgacgtggatctgggcgacatctccggcatcaatgcctctgtggtgaacatccagaaggagatcgaccggctgaacgaggtggccaagaatctgaacgagagcctgatcgatctgcaggagctgggcaagtatgagcagtacatcaagggctctggcagagagaacctgtatttccagggaggaggaggcagcggatacatccctgaggcaccaagggacggacaggcctacgtgcgcaaggatggcgagtgggtgctgctgtccacctttctgggccatcatcaccaccaccaccaccactga

SEQ ID NO: 5136 - DNA, 3846 bp, Artificial Sequence
  Description of Artificial Sequence: Synthetic polynucleotide
atgggcatcctgccaagcccaggaatgcccgccctgctgtctctggtgagcctgctgtccgtgctgctgatgggatgcgtggcagagacaggcacacagtgcgtgaacctgaccacaaggacccagctgccccctgcctataccaattctttcacacggggcgtgtactatcccgacaaggtgtttagaagctccgtgctgcactccacacaggatctgtttctgcctttcttttctaacgtgacctggttccacgccatccacgtgtccggcaccaatggcacaaagcggttcgacaatcccgtgctgccttttaacgatggcgtgtacttcgccagcaccgagaagtccaacatcatcagaggctggatctttggcaccacactggactctaagacacagagcctgctgatcgtgaacaatgccaccaacgtggtgatcaaggtgtgcgagttccagttttgtaatgatccattcctgggcgtgtactatcacaagaacaataagtcctggatggagtctgagtttcgcgtgtattctagcgccaacaattgcacatttgagtacgtgagccagcccttcctgatggacctggagggcaagcagggcaatttcaagaacctgagggagttcgtgtttaagaatatcgatggctacttcaagatctacagcaagcacaccccaatcaacctggtgcgcgacctgccacagggattctccgccctggagccactggtggatctgcccatcggcatcaacatcacccggtttcagacactgctggccctgcacagatcctacctgacaccaggcgactcctctagcggatggaccgcaggagctgccgcctactatgtgggctatctgcagccccggaccttcctgctgaagtacaacgagaatggcaccatcacagacgcagtggattgcgccctggaccccctgtctgagacaaagtgtacactgaagagctttaccgtggagaagggcatctatcagacaagcaatttcagggtgcagcctaccgagtccatcgtgcgctttcccaatatcacaaacctgtgcccttttggcgaggtgttcaacgccaccagattcgccagcgtgtacgcctggaatcggaagagaatctccaactgcgtggccgactattctgtgctgtacaactccgcctctttcagcacctttaagtgctatggcgtgtctcccacaaagctgaatgatctgtgctttaccaacgtgtacgccgatagcttcgtgatcaggggagacgaagtgagacagatcgcaccaggacagacaggaaagatcgcagactacaattataagctgcctgacgatttcaccggctgcgtgatcgcctggaactccaacaatctggattctaaagtgggcggcaactacaattatctgtacaggctgtttcgcaagtccaatctgaagccattcgagcgggacatctccacagagatctaccaggccggctctaccccctgcaatggcgtggagggctttaactgttatttccctctgcagtcttacggcttccagccaacaaacggcgtgggctatcagccctacagagtggtggtgctgtcctttgagctgctgcacgcaccagcaacagtgtgcggcccaaagaagtctaccaatctggtgaagaacaagtgcgtgaacttcaacttcaacggactgaccggcacaggcgtgctgaccgagagcaataagaagttcctgccttttcagcagttcggcagggacatcgcagataccacagacgccgtgcgcgaccctcagaccctggagatcctggacatcacaccatgcagcttcggcggcgtgtccgtgatcacaccaggcaccaatacatccaaccaggtggccgtgctgtatcaggacgtgaattgtaccgaggtgcccgtggcaatccacgcagatcagctgacccctacatggcgggtgtactctaccggcagcaacgtgttccagacaagagccggatgcctgatcggagcagagcacgtgaacaatagctatgagtgcgacatccctatcggcgccggcatctgtgccagctaccagacccagacaaactccccatctggagcaggctccgtggccagccagtccatcatcgcctataccatgagcctgggcgccgagaacagcgtggcctactccaacaatgctatcgccatccctaccaacttcacaatcagcgtgaccacagagatcctgccagtgtctatgaccaagacaagcgtggactgcacaatgtatatctgtggcgatagcaccgagtgctccaacctgctgctgcagtacggctccttttgtacccagctgaatagagccctgacaggcatcgccgtggagcaggataagaacacacaggaggtgttcgcccaggtgaagcagatctacaagaccccacccatcaaggactttggcggcttcaacttcagccagatcctgcctgatccaagcaagccctccaagaggtcttttatcgaggacctgctgttcaacaaggtgaccctggccgatgccggcttcatcaagcagtatggagattgcctgggagacatcgcagcccgcgacctgatctgtgcccagaagtttaatggcctgaccgtgctgcctccactgctgacagatgagatgatcgcccagtacacatctgccctgctggccggcaccatcacaagcggatggaccttcggcgcaggagccgccctgcagatcccttttgccatgcagatggcctataggttcaacggcatcggcgtgacccagaatgtgctgtacgagaaccagaagctgatcgccaatcagtttaacagcgccatcggcaagatccaggactctctgtcctctacagccagcgccctgggcaagctgcaggatgtggtgaatcagaacgcccaggccctgaataccctggtgaagcagctgagctccaacttcggcgccatctctagcgtgctgaatgacatcctgagccggctggacccccctgaggcagaggtgcagatcgacaggctgatcacaggccgcctgcagagcctgcagacctacgtgacacagcagctgatcagggcagcagagatcagagcctccgccaatctggccgccaccaagatgagcgagtgcgtgctgggacagtccaagagggtggacttttgtggcaagggctatcacctgatgtctttcccacagagcgcccctcacggcgtggtgtttctgcacgtgacctacgtgccagcccaggagaagaacttcaccacagcaccagccatctgccacgatggaaaggcacactttcctagggagggcgtgttcgtgtctaacggcacccactggtttgtgacacagcgcaatttctacgagccacagatcatcaccacagacaatacattcgtgagcggcaactgtgatgtggtgatcggcatcgtgaacaataccgtgtatgatccactgcagcccgagctggactcctttaaggaggagctggataagtacttcaagaatcacacctctcccgacgtggatctgggcgacatctccggcatcaatgcctctgtggtgaacatccagaaggagatcgaccggctgaacgaggtggccaagaatctgaacgagagcctgatcgatctgcaggagctgggcaagtatgagcagtacatcaagggctctggcagagagaacctgtatttccagggaggaggaggcagcggatacatccctgaggcaccaagggacggacaggcctacgtgcgcaaggatggcgagtgggtgctgctgtccacctttctgggccatcatcaccaccaccaccaccactga

SEQ ID NO: 5137 - DNA, 3846 bp, Artificial Sequence
  Description of Artificial Sequence: Synthetic polynucleotide
atgggcatcctgccaagcccaggaatgcccgccctgctgtctctggtgagcctgctgtccgtgctgctgatgggatgcgtggcagagacaggcacacagtgcgtgaacctgaccacaaggacccagctgccccctgcctataccaattctttcacacggggcgtgtactatcccgacaacgtgtttagaagctccgtgctgcactccacacaggatctgtttctgcctttcttttctaacgtgacctggttccacgccatccacgtgtccggcaccaatggcacaaagcggttcgacaatcccgtgctgccttttaacgatggcgtgtacttcgccagcaccgagaagtccaacatcatcagaggctggatctttggcaccacactggactctaagacacagagcctgctgatcgtgaacaatgccaccaacgtggtgatcaaggtgtgcgagttccagttttgtaatgatccattcctgggcgtgtactatcacaagaacaataagtcctggatggagtctgagtttcgcgtgtattctagcgccaacaattgcacatttgagtacgtgagccagcccttcctgatggacctggagggcaagcagggcaatttcaagaacctgagggagttcgtgtttaagaatatcgatggctacttcaagatctacagcaagcacaccccaatcaacctggtgcgcgacctgccacagggattctccgccctggagccactggtggatctgcccatcggcatcaacatcacccggtttcagacactgctggccctgcacagatcctacctgacaccaggcgactcctctagcggatggaccgcaggagctgccgcctactatgtgggctatctgcagccccggaccttcctgctgaagtacaacgagaatggcaccatcacagacgcagtggattgcgccctggaccccctgtctgagacaaagtgtacactgaagagctttaccgtggagaagggcatctatcagacaagcaatttcagggtgcagcctaccgagtccatcgtgcgctttcccaatatcacaaacctgtgcccttttggcgaggtgttcaacgccaccagattcgccagcgtgtacgcctggaatcggaagagaatctccaactgcgtggccgactattctgtgctgtacaactccgcctctttcagcacctttaagtgctatggcgtgtctcccacaaagctgaatgatctgtgctttaccaacgtgtacgccgatagcttcgtgatcaggggagacgaagtgagacagatcgcaccaggacagacaggaaagatcgcagactacaattataagctgcctgacgatttcaccggctgcgtgatcgcctggaactccaacaatctggattctaaagtgggcggcaactacaattatctgtacaggctgtttcgcaagtccaatctgaagccattcgagcgggacatctccacagagatctaccaggccggctctaccccctgcaatggcgtggagggctttaactgttatttccctctgcagtcttacggcttccagccaacaaacggcgtgggctatcagccctacagagtggtggtgctgtcctttgagctgctgcacgcaccagcaacagtgtgcggcccaaagaagtctaccaatctggtgaagaacaagtgcgtgaacttcaacttcaacggactgaccggcacaggcgtgctgaccgagagcaataagaagttcctgccttttcagcagttcggcagggacatcgcagataccacagacgccgtgcgcgaccctcagaccctggagatcctggacatcacaccatgcagcttcggcggcgtgtccgtgatcacaccaggcaccaatacatccaaccaggtggccgtgctgtatcaggacgtgaattgtaccgaggtgcccgtggcaatccacgcagatcagctgacccctacatggcgggtgtactctaccggcagcaacgtgttccagacaagagccggatgcctgatcggagcagagcacgtgaacaatagctatgagtgcgacatccctatcggcgccggcatctgtgccagctaccagacccagacaaactccccatctggagcaggctccgtggccagccagtccatcatcgcctataccatgagcctgggcgccgagaacagcgtggcctactccaacaattctatcgccatccctaccaacttcacaatcagcgtgaccacagagatcctgccagtgtctatgaccaagacaagcgtggactgcacaatgtatatctgtggcgatagcaccgagtgctccaacctgctgctgcagtacggctccttttgtacccagctgaatagagccctgacaggcatcgccgtggagcaggataagaacacacaggaggtgttcgcccaggtgaagcagatctacaagaccccacccatcaaggactttggcggcttcaacttcagccagatcctgcctgatccaagcaagccctccaagaggtcttttatcgaggacctgctgttcaacaaggtgaccctggccgatgccggcttcatcaagcagtatggagattgcctgggagacatcgcagcccgcgacctgatctgtgcccagaagtttaatggcctgaccgtgctgcctccactgctgacagatgagatgatcgcccagtacacatctgccctgctggccggcaccatcacaagcggatggaccttcggcgcaggagccgccctgcagatcccttttgccatgcagatggcctataggttcaacggcatcggcgtgacccagaatgtgctgtacgagaaccagaagctgatcgccaatcagtttaacagcgccatcggcaagatccaggactctctgtcctctacagccagcgccctgggcaagctgcaggatgtggtgaatcagaacgcccaggccctgaataccctggtgaagcagctgagctccaacttcggcgccatctctagcgtgctgaatgacatcctgagccggctggacccccctgaggcagaggtgcagatcgacaggctgatcacaggccgcctgcagagcctgcagacctacgtgacacagcagctgatcagggcagcagagatcagagcctccgccaatctggccgccaccaagatgagcgagtgcgtgctgggacagtccaagagggtggacttttgtggcaagggctatcacctgatgtctttcccacagagcgcccctcacggcgtggtgtttctgcacgtgacctacgtgccagcccaggagaagaacttcaccacagcaccagccatctgccacgatggaaaggcacactttcctagggagggcgtgttcgtgtctaacggcacccactggtttgtgacacagcgcaatttctacgagccacagatcatcaccacagacaatacattcgtgagcggcaactgtgatgtggtgatcggcatcgtgaacaataccgtgtatgatccactgcagcccgagctggactcctttaaggaggagctggataagtacttcaagaatcacacctctcccgacgtggatctgggcgacatctccggcatcaatgcctctgtggtgaacatccagaaggagatcgaccggctgaacgaggtggccaagaatctgaacgagagcctgatcgatctgcaggagctgggcaagtatgagcagtacatcaagggctctggcagagagaacctgtatttccagggaggaggaggcagcggatacatccctgaggcaccaagggacggacaggcctacgtgcgcaaggatggcgagtgggtgctgctgtccacctttctgggccatcatcaccaccaccaccaccactga

SEQ ID NO: 5138 - DNA, 3846 bp, Artificial Sequence
  Description of Artificial Sequence: Synthetic polynucleotide
atgggcatcctgccaagcccaggaatgcccgccctgctgtctctggtgagcctgctgtccgtgctgctgatgggatgcgtggcagagacaggcacacagtgcgtgaacctgaccacaaggacccagctgccccctgcctataccaattctttcacacggggcgtgtactatcccgacaaggtgtttagaagctccgtgctgcactccacacaggatctgtttctgcctttcttttctaacgtgacctggttccacgccatccacgtgtccggcaccaatggcacaaagcggttcgacaatcccgtgctgccttttaacgatggcgtgtacttcgccagcaccgagaagtccaacatcatcagaggctggatctttggcaccacactggactctaagacacagagcctgctgatcgtgaacaatgccaccaacgtggtgatcaaggtgtgcgagttccagttttgtaatgatccattcctgggcgtgtactatcacaagaacaataagtcctggatggagtctgagtttcgcgtgtattctagcgccaacaattgcacatttgagtacgtgagccagcccttcctgatggacctggagggcaagcagggcaatttcaagaacctgagggagttcgtgtttaagaatatcgatggctacttcaagatctacagcaagcacaccccaatcaacctggtgcgcgacctgccacagggattctccgccctggagccactggtggatctgcccatcggcatcaacatcacccggtttcagacactgctggccctgcacagatcctacctgacaccaggcgactcctctagcggatggaccgcaggagctgccgcctactatgtgggctatctgcagccccggaccttcctgctgaagtacaacgagaatggcaccatcacagacgcagtggattgcgccctggaccccctgtctgagacaaagtgtacactgaagagctttaccgtggagaagggcatctatcagacaagcaatttcagggtgcagcctaccgagtccatcgtgcgctttcccaatatcacaaacctgtgcccttttggcgaggtgttcaacgccaccagattcgccagcgtgtacgcctggaatcggaagagaatctccaactgcgtggccgactattctgtgctgtacaactccgcctctttcagcacctttaagtgctatggcgtgtctcccacaaagctgaatgatctgtgctttaccaacgtgtacgccgatagcttcgtgatcaggggagacgaagtgagacagatcgcaccaggacagacaggaaagatcgcagactacaattataagctgcctgacgatttcaccggctgcgtgatcgcctggaactccaacaatctggattctaaagtgggcggcaactacaattatctgtacaggctgtttcgcaagtccaatctgaagccattcgagcgggacatctccacagagatctaccaggccggctctaccccctgcaatggcgtggagggctttaactgttatttccctctgcagtcttacggcttccagccaacaaacggcgtgggctatcagccctacagagtggtggtgctgtcctttgagctgctgcacgcaccagcaacagtgtgcggcccaaagaagtctaccaatctggtgaagaacaagtgcgtgaacttcaacttcaacggactgaccggcacaggcgtgctgaccgagagcaataagaagttcctgccttttcagcagttcggcagggacatcgcagataccacagacgccgtgcgcgaccctcagaccctggagatcctggacatcacaccatgcagcttcggcggcgtgtccgtgatcacaccaggcaccaatacatccaaccaggtggccgtgctgtatcaggacgtgaattgtaccgaggtgcccgtggcaatccacgcagatcagctgacccctacatggcgggtgtactctaccggcagcaacgtgttccagacaagagccggatgcctgatcggagcagagcacgtgaacaatagctatgagtgcgacatccctatcggcgccggcatctgtgccagctaccagacccagacaaactccccatctggagcaggctccgtggccagccagtccatcatcgcctataccatgagcctgggcgccgagaacagcgtggcctactccaacaattctatcgccatccctaccaacttcacaatcagcgtgaccacagagatcctgccagtgtctatgaccaagacaagcgtggactgcacaatgtatatctgtggcgatagcaccgagtgctccaacctgctgctgcagtacggctccttttgtacccagctgaatagagccctgacaggcatcgccgtggagcaggataagaacacacaggaggtgttcgcccaggtgaagcagatctacaagaccccacccatcaaggactttggcggcttcaacttcagccagatcctgcctgatccaagcaagccctccaagaggtcttttatcgaggacctgctgttcaacaaggtgaccctggccgatgccggcttcatcaagcagtatggagattgcctgggagacatcgcagcccgcgacctgatctgtgcccagaagtttaatggcctgaccgtgctgcctccactgctgacagatgagatgatcgcccagtacacatctgccctgctggccggcaccatcacaagcggatggaccttcggcgcaggagccgccctgcagatcccttttgccatgcagatggcctataggttcaacggcatcggcgtgacccagaatgtgctgtacgagaaccagaagctgatcgccaatcagtttaacagcgccatcggcaagatccaggactctctgtcctctacagccagcgccctgggcaagctgcaggatgtggtgaatcagaacgcccaggccctgaataccctggtgaagcagctgagctccaaattcggcgccatctctagcgtgctgaatgacatcctgagccggctggacccccctgaggcagaggtgcagatcgacaggctgatcacaggccgcctgcagagcctgcagacctacgtgacacagcagctgatcagggcagcagagatcagagcctccgccaatctggccgccaccaagatgagcgagtgcgtgctgggacagtccaagagggtggacttttgtggcaagggctatcacctgatgtctttcccacagagcgcccctcacggcgtggtgtttctgcacgtgacctacgtgccagcccaggagaagaacttcaccacagcaccagccatctgccacgatggaaaggcacactttcctagggagggcgtgttcgtgtctaacggcacccactggtttgtgacacagcgcaatttctacgagccacagatcatcaccacagacaatacattcgtgagcggcaactgtgatgtggtgatcggcatcgtgaacaataccgtgtatgatccactgcagcccgagctggactcctttaaggaggagctggataagtacttcaagaatcacacctctcccgacgtggatctgggcgacatctccggcatcaatgcctctgtggtgaacatccagaaggagatcgaccggctgaacgaggtggccaagaatctgaacgagagcctgatcgatctgcaggagctgggcaagtatgagcagtacatcaagggctctggcagagagaacctgtatttccagggaggaggaggcagcggatacatccctgaggcaccaagggacggacaggcctacgtgcgcaaggatggcgagtgggtgctgctgtccacctttctgggccatcatcaccaccaccaccaccactga

SEQ ID NO: 5139 - DNA, 3846 bp, Artificial Sequence
  Description of Artificial Sequence: Synthetic polynucleotide
atgggcatcctgccaagcccaggaatgcccgccctgctgtctctggtgagcctgctgtccgtgctgctgatgggatgcgtggcagagacaggcacacagtgcgtgaacctgaccacaaggacccagctgccccctgcctataccaattctttcacacggggcgtgtactatcccgacaaggtgtttagaagctccgtgctgcactccacacaggatctgtttctgcctttcttttctaacgtgacctggttccacgccatccacgtgtccggcaccaatggcacaaagcggttcgacaatcccgtgctgccttttaacgatggcgtgtacttcgccagcaccgagaagtccaacatcatcagaggctggatctttggcaccacactggactctaagacacagagcctgctgatcgtgaacaatgccaccaacgtggtgatcaaggtgtgcgagttccagttttgtaatgatccattcctgggcgtgtactatcacaagaacaataagtcctggatggagtctgagtttcgcgtgtattctagcgccaacaattgcacatttgagtacgtgagccagcccttcctgatggacctggagggcaagcagggcaatttcaagaacctgagggagttcgtgtttaagaatatcgatggctacttcaagatctacagcaagcacaccccaatcaacctggtgcgcgacctgccacagggattctccgccctggagccactggtggatctgcccatcggcatcaacatcacccggtttcagacactgctggccctgcacagatcctacctgacaccaggcgactcctctagcggatggaccgcaggagctgccgcctactatgtgggctatctgcagccccggaccttcctgctgaagtacaacgagaatggcaccatcacagacgcagtggattgcgccctggaccccctgtctgagacaaagtgtacactgaagagctttaccgtggagaagggcatctatcagacaagcaatttcagggtgcagcctaccgagtccatcgtgcgctttcccaatatcacaaacctgtgcccttttggcgaggtgttcaacgccaccagattcgccagcgtgtacgcctggaatcggaagagaatctccaactgcgtggccgactattctgtgctgtacaactccgcctctttcagcacctttaagtgctatggcgtgtctcccacaaagctgaatgatctgtgctttaccaacgtgtacgccgatagcttcgtgatcaggggagacgaagtgagacagatcgcaccaggacagacaggaaagatcgcagactacaattataagctgcctgacgatttcaccggctgcgtgatcgcctggaactccaacaatctggattctaaagtgggcggcaactacaattatctgtacaggctgtttcgcaagtccaatctgaagccattcgagcgggacatctccggtgagatctaccaggccggctctaccccctgcaatggcgtggagggctttaactgttatttccctctgcagtcttacggcttccagccaacaaacggcgtgggctatcagccctacagagtggtggtgctgtcctttgagctgctgcacgcaccagcaacagtgtgcggcccaaagaagtctaccaatctggtgaagaacaagtgcgtgaacttcaacttcaacggactgaccggcacaggcgtgctgaccgagagcaataagaagttcctgccttttcagcagttcggcagggacatcgcagataccacagacgccgtgcgcgaccctcagaccctggagatcctggacatcacaccatgcagcttcggcggcgtgtccgtgatcacaccaggcaccaatacatccaaccaggtggccgtgctgtatcaggacgtgaattgtaccgaggtgcccgtggcaatccacgcagatcagctgacccctacatggcgggtgtactctaccggcagcaacgtgttccagacaagagccggatgcctgatcggagcagagcacgtgaacaatagctatgagtgcgacatccctatcggcgccggcatctgtgccagctaccagacccagacaaactccccatctggagcaggctccgtggccagccagtccatcatcgcctataccatgagcctgggcgccgagaacagcgtggcctactccaacaattctatcgccatccctaccaacttcacaatcagcgtgaccacagagatcctgccagtgtctatgaccaagacaagcgtggactgcacaatgtatatctgtggcgatagcaccgagtgctccaacctgctgctgcagtacggctccttttgtacccagctgaatagagccctgacaggcatcgccgtggagcaggataagaacacacaggaggtgttcgcccaggtgaagcagatctacaagaccccacccatcaaggactttggcggcttcaacttcagccagatcctgcctgatccaagcaagccctccaagaggtcttttatcgaggacctgctgttcaacaaggtgaccctggccgatgccggcttcatcaagcagtatggagattgcctgggagacatcgcagcccgcgacctgatctgtgcccagaagtttaatggcctgaccgtgctgcctccactgctgacagatgagatgatcgcccagtacacatctgccctgctggccggcaccatcacaagcggatggaccttcggcgcaggagccgccctgcagatcccttttgccatgcagatggcctataggttcaacggcatcggcgtgacccagaatgtgctgtacgagaaccagaagctgatcgccaatcagtttaacagcgccatcggcaagatccaggactctctgtcctctacagccagcgccctgggcaagctgcaggatgtggtgaatcagaacgcccaggccctgaataccctggtgaagcagctgagctccaacttcggcgccatctctagcgtgctgaatgacatcctgagccggctggacccccctgaggcagaggtgcagatcgacaggctgatcacaggccgcctgcagagcctgcagacctacgtgacacagcagctgatcagggcagcagagatcagagcctccgccaatctggccgccaccaagatgagcgagtgcgtgctgggacagtccaagagggtggacttttgtggcaagggctatcacctgatgtctttcccacagagcgcccctcacggcgtggtgtttctgcacgtgacctacgtgccagcccaggagaagaacttcaccacagcaccagccatctgccacgatggaaaggcacactttcctagggagggcgtgttcgtgtctaacggcacccactggtttgtgacacagcgcaatttctacgagccacagatcatcaccacagacaatacattcgtgagcggcaactgtgatgtggtgatcggcatcgtgaacaataccgtgtatgatccactgcagcccgagctggactcctttaaggaggagctggataagtacttcaagaatcacacctctcccgacgtggatctgggcgacatctccggcatcaatgcctctgtggtgaacatccagaaggagatcgaccggctgaacgaggtggccaagaatctgaacgagagcctgatcgatctgcaggagctgggcaagtatgagcagtacatcaagggctctggcagagagaacctgtatttccagggaggaggaggcagcggatacatccctgaggcaccaagggacggacaggcctacgtgcgcaaggatggcgagtgggtgctgctgtccacctttctgggccatcatcaccaccaccaccaccactga

SEQ ID NO: 5140 - DNA, 3846 bp, Artificial Sequence
  Description of Artificial Sequence: Synthetic polynucleotide
atgggcatcctgccaagcccaggaatgcccgccctgctgtctctggtgagcctgctgtccgtgctgctgatgggatgcgtggcagagacaggcacacagtgcgtgaacctgaccacaaggacccagctgccccctgcctataccaattctttcacacggggcgtgtactatcccgacaaggtgtttagaagctccgtgctgcactccacacaggatctgtttctgcctttcttttctaacgtgacctggttccacgccatccacgtgtccggcaccaatggcacaaagcggttcgacaatcccgtgctgccttttaacgatggcgtgtacttcgccagcaccgagaagtccaacatcatcagaggctggatctttggcaccacactggactctaagacacagagcctgctgatcgtgaacaatgccaccaacgtggtgatcaaggtgtgcgagttccagttttgtaatgatccattcctgggcgtgtactatcacaagaacaataagtcctggatggagtctgagtttcgcgtgtattctagcgccaacaattgcacatttgagtacgtgagccagcccttcctgatggacctggagggcaagcagggcaatttcaagaacctgagggagttcgtgtttaagaatatcgatggctacttcaagatctacagcaagcacaccccaatcaacctggtgcgcgacctgccacagggattctccgccctggagccactggtggatctgcccatcggcatcaacatcacccggtttcagacactgctggccctgcacagatcctacctgacaccaggcgactcctctagcggatggaccgcaggagctgccgcctactatgtgggctatctgcagccccggaccttcctgctgaagtacaacgagaatggcaccatcacagacgcagtggattgcgccctggaccccctgtctgagacaaagtgtacactgaagagctttaccgtggagaagggcatctatcagacaagcaatttcagggtgcagcctaccgagtccatcgtgcgctttcccaatatcacaaacctgtgcccttttggcgaggtgttcaacgccaccagattcgccagcgtgtacgcctggaatcggaagagaatctccaactgcgtggccgactattctgtgctgtacaactccgcctctttcagcacctttaagtgctatggcgtgtctcccacaaagctgaatgatctgtgctttaccaacgtgtacgccgatagcttcgtgatcaggggagacgaagtgagacagatcgcaccaggacagacaggaaagatcgcagactacaattataagctgcctgacgatttcaccggctgcgtgatcgcctggaactccaacaatctggattctaaagtgggcggcaactacaattatctgtacaggctgtttcgcaagtccaatctgaagccattcgagcgggacatctccacagagatctaccaggccggctctaccccctgcaatggcgtggagggctttaactgttatttccctctgcagtcttacggcttccagccaacaaacggcgtgggctatcagccctacagagtggtggtgctgtcctttgagctgctgcacgcaccagcaacagtgtgcggcccaaagaagtctaccaatctggtgaagaacaagtgcgtgaacttcaacttcaacggactgaccggcacaggcgtgctgaccgagagcaataagaagttcctgccttttcagcagttcggcagggacatcgcagataccacagacgccgtgcgcgaccctcagaccctggagatcctggacatcacaccatgcagcttcggcggcgtgtccgtgatcacaccaggcaccaatacatccaaccaggtggccgtgctgtatcaggacgtgaattgtaccgaggtgcccgtggcaatccacgcagatcagctgacccctacatggcgggtgtactctaccggcagcaacgtgttccagacaagagccggatgcctgatcggagcagagcacgtgaacaatagctatgagtgcgacatccctatcggcgccggcatctgtgccagctaccagacccagacaaactccccatctggagcaggctccgtggccagccagtccatcatcgcctataccatgagcctgggcgccgagaacagcgtggcctactccaacaattctatcgccatccctaccaacttcacaatcagcgtgaccacagagatcctgccagtgtctatgaccaagacaagcgtggactgcacaatgtatatctgtggcgatagcaccgagtgctccaacctgctgctgcagtacggctccttttgtacccagctgaatagagccctgacaggcatcgccgtggagcaggataagaacacacaggaggtgttcgcccaggtgaagcagatctacaagaccccacccatcaaggactttggcggcttcaacttcagccagatcctgcctgatccaagcaagccctccaagaggtcttttatcgaggacctgctgttcaacaaggtgaccctggccgatgccggcttcatcaagcagtatggagattgcctgggagacatcgcagcccgcgacctgatctgtgcccagaagtttaatggcctgaccgtgctgcctccactgctgacagatgagatgatcgcccagtacacatctgccctgctggccggcaccatcacaagcggatggaccttcggcgcaggagccgccctgattatcccttttgccatgcagatggcctataggttcaacggcatcggcgtgacccagaatgtgctgtacgagaaccagaagctgatcgccaatcagtttaacagcgccatcggcaagatccaggactctctgtcctctacagccagcgccctgggcaagctgcaggatgtggtgaatcagaacgcccaggccctgaataccctggtgaagcagctgagctccaacttcggcgccatctctagcgtgctgaatgacatcctgagccggctggacccccctgaggcagaggtgcagatcgacaggctgatcacaggccgcctgcagagcctgcagacctacgtgacacagcagctgatcagggcagcagagatcagagcctccgccaatctggccgccaccaagatgagcgagtgcgtgctgggacagtccaagagggtggacttttgtggcaagggctatcacctgatgtctttcccacagagcgcccctcacggcgtggtgtttctgcacgtgacctacgtgccagcccaggagaagaacttcaccacagcaccagccatctgccacgatggaaaggcacactttcctagggagggcgtgttcgtgtctaacggcacccactggtttgtgacacagcgcaatttctacgagccacagatcatcaccacagacaatacattcgtgagcggcaactgtgatgtggtgatcggcatcgtgaacaataccgtgtatgatccactgcagcccgagctggactcctttaaggaggagctggataagtacttcaagaatcacacctctcccgacgtggatctgggcgacatctccggcatcaatgcctctgtggtgaacatccagaaggagatcgaccggctgaacgaggtggccaagaatctgaacgagagcctgatcgatctgcaggagctgggcaagtatgagcagtacatcaagggctctggcagagagaacctgtatttccagggaggaggaggcagcggatacatccctgaggcaccaagggacggacaggcctacgtgcgcaaggatggcgagtgggtgctgctgtccacctttctgggccatcatcaccaccaccaccaccactga

SEQ ID NO: 5141 - DNA, 3846 bp, Artificial Sequence
  Description of Artificial Sequence: Synthetic polynucleotide
atgggcatcctgccaagcccaggaatgcccgccctgctgtctctggtgagcctgctgtccgtgctgctgatgggatgcgtggcagagacaggcacacagtgcgtgaacctgaccacaaggacccagctgccccctgcctataccaattctttcacacggggcgtgtactatcccgacaaggtgtttagaagctccgtgctgcactccacacaggatctgtttctgcctttcttttctaacgtgacctggttccacgccatccacgtgtccggcaccaatggcacaaagcggttcgacaatcccgtgctgccttttaacgatggcgtgtacttcgccagcaccgagaagtccaacatcatcagaggctggatctttggcaccacactggactctaagacacagagcctgctgatcgtgaacaatgccaccaacgtggtgatcaaggtgtgcgagttccagttttgtaatgatccattcctgggcgtgtactatcacaagaacaataagtcctggatggagtctgagtttcgcgtgtattctagcgccaacaattgcacatttgagtacgtgagccagcccttcctgatggacctggagggcaagcagggcaatttcaagaacctgagggagttcgtgtttaagaatatcgatggctacttcaagatctacagcaagcacaccccaatcaacctggtgcgcgacctgccacagggattctccgccctggagccactggtggatctgcccatcggcatcaacatcacccggtttcagacactgctggccctgcacagatcctacctgacaccaggcgactcctctagcggatggaccgcaggagctgccgcctactatgtgggctatctgcagccccggaccttcctgctgaagtacaacgagaatggcaccatcacagacgcagtggattgcgccctggaccccctgtctgagacaaagtgtacactgaagagctttaccgtggagaagggcatctatcagacaagcaatttcagggtgcagcctaccgagtccatcgtgcgctttcccaatatcacaaacctgtgcccttttggcgaggtgttcaacgccaccagattcgccagcgtgtacgcctggaatcggaagagaatctccaactgcgtggccgactattctgtgctgtacaactccgcctctttcagcacctttaagtgctatggcgtgtctcccacaaagctgaatgatctgtgctttaccaacgtgtacgccgatagcttcgtgatcaggggagacgaagtgagacagatcgcaccaggacagacaggaaagatcgcagactacaattataagctgcctgacgatttcaccggctgcgtgatcgcctggaactccaacaatctggattctaaagtgggcggcaactacaattatctgtacaggctgtttcgcaagtccaatctgaagccattcgagcgggacatctccacagagatctaccaggccggctctaccccctgcaatggcgtggagggctttaactgttatttccctctgcagtcttacggcttccagccaacaaacggcgtgggctatcagccctacagagtggtggtgctgtcctttgagctgctgcacgcaccagcaacagtgtgcggcccacgtaagtctaccaatctggtgaagaacaagtgcgtgaacttcaacttcaacggactgaccggcacaggcgtgctgaccgagagcaataagaagttcctgccttttcagcagttcggcagggacatcgcagataccacagacgccgtgcgcgaccctcagaccctggagatcctggacatcacaccatgcagcttcggcggcgtgtccgtgatcacaccaggcaccaatacatccaaccaggtggccgtgctgtatcaggacgtgaattgtaccgaggtgcccgtggcaatccacgcagatcagctgacccctacatggcgggtgtactctaccggcagcaacgtgttccagacaagagccggatgcctgatcggagcagagcacgtgaacaatagctatgagtgcgacatccctatcggcgccggcatctgtgccagctaccagacccagacaaactccccatctggagcaggctccgtggccagccagtccatcatcgcctataccatgagcctgggcgccgagaacagcgtggcctactccaacaattctatcgccatccctaccaacttcacaatcagcgtgaccacagagatcctgccagtgtctatgaccaagacaagcgtggactgcacaatgtatatctgtggcgatagcaccgagtgctccaacctgctgctgcagtacggctccttttgtacccagctgaatagagccctgacaggcatcgccgtggagcaggataagaacacacaggaggtgttcgcccaggtgaagcagatctacaagaccccacccatcaaggactttggcggcttcaacttcagccagatcctgcctgatccaagcaagccctccaagaggtcttttatcgaggacctgctgttcaacaaggtgaccctggccgatgccggcttcatcaagcagtatggagattgcctgggagacatcgcagcccgcgacctgatctgtgcccagaagtttaatggcctgaccgtgctgcctccactgctgacagatgagatgatcgcccagtacacatctgccctgctggccggcaccatcacaagcggatggaccttcggcgcaggagccgccctgcagatcccttttgccatgcagatggcctataggttcaacggcatcggcgtgacccagaatgtgctgtacgagaaccagaagctgatcgccaatcagtttaacagcgccatcggcaagatccaggactctctgtcctctacagccagcgccctgggcaagctgcaggatgtggtgaatcagaacgcccaggccctgaataccctggtgaagcagctgagctccaacttcggcgccatctctagcgtgctgaatgacatcctgagccggctggacccccctgaggcagaggtgcagatcgacaggctgatcacaggccgcctgcagagcctgcagacctacgtgacacagcagctgatcagggcagcagagatcagagcctccgccaatctggccgccaccaagatgagcgagtgcgtgctgggacagtccaagagggtggacttttgtggcaagggctatcacctgatgtctttcccacagagcgcccctcacggcgtggtgtttctgcacgtgacctacgtgccagcccaggagaagaacttcaccacagcaccagccatctgccacgatggaaaggcacactttcctagggagggcgtgttcgtgtctaacggcacccactggtttgtgacacagcgcaatttctacgagccacagatcatcaccacagacaatacattcgtgagcggcaactgtgatgtggtgatcggcatcgtgaacaataccgtgtatgatccactgcagcccgagctggactcctttaaggaggagctggataagtacttcaagaatcacacctctcccgacgtggatctgggcgacatctccggcatcaatgcctctgtggtgaacatccagaaggagatcgaccggctgaacgaggtggccaagaatctgaacgagagcctgatcgatctgcaggagctgggcaagtatgagcagtacatcaagggctctggcagagagaacctgtatttccagggaggaggaggcagcggatacatccctgaggcaccaagggacggacaggcctacgtgcgcaaggatggcgagtgggtgctgctgtccacctttctgggccatcatcaccaccaccaccaccactga

SEQ ID NO: 5142 - DNA, 3846 bp, Artificial Sequence
  Description of Artificial Sequence: Synthetic polynucleotide
atgggcatcctgccaagcccaggaatgcccgccctgctgtctctggtgagcctgctgtccgtgctgctgatgggatgcgtggcagagacaggcacacagtgcgtgaacctgaccacaaggacccagctgccccctgcctataccaattctttcacacggggcgtgtactatcccgacaaggtgtttagaagctccgtgctgcactccacacaggatctgtttctgcctttcttttctaacgtgacctggttccacgccatccacgtgtccggcaccaatggcacaaagcggttcgacaatcccgtgctgccttttaacgatggcgtgtacttcgccagcaccgagaagtccaacatcatcagaggctggatctttggcaccacactggactctaagacacagagcctgctgatcgtgaacaatgccaccaacgtggtgatcaaggtgtgcgagttccagttttgtaatgatccattcctgggcgtgtactatcacaagaacaataagtcctggatggagtctgagtttcgcgtgtattctagcgccaacaattgcacatttgagtacgtgagccagcccttcctgatggacctggagggcaagcagggcaatttcaagaacctgagggagttcgtgtttaagaatatcgatggctacttcaagatctacagcaagcacaccccaatcaacctggtgcgcgacctgccacagggattctccgccctggagccactggtggatctgcccatcggcatcaacatcacccggtttcagacactgctggccctgcacagatcctacctgacaccaggcgactcctctagcggatggaccgcaggagctgccgcctactatgtgggctatctgcagccccggaccttcctgctgaagtacaacgagaatggcaccatcacagacgcagtggattgcgccctggaccccctgtctgagacaaagtgtacactgaagagctttaccgtggagaagggcatctatcagacaagcaatttcagggtgcagcctaccgagtccatcgtgcgctttcccaatatcacaaacctgtgcccttttggcgaggtgttcaacgccaccagattcgccagcgtgtacgcctggaatcggaagagaatctccaactgcgtggccgactattctgtgctgtacaactccgcctctttcagcacctttaagtgctatggcgtgtctcccacaaagctgaatgatctgtgctttaccaacgtgtacgccgatagcttcgtgatcaggggagacgaagtgagacagatcgcaccaggacagacaggaaagatcgcagactacaattataagctgcctgacgatttcaccggctgcgtgatcgcctggaactccaacaatctggattctaaagtgggcggcaactacaattatctgtacaggctgtttcgcaagtccaatctgaatccattcgagcgggacatctccacagagatctaccaggccggctctaccccctgcaatggcgtggagggctttaactgttatttccctctgcagtcttacggcttccagccaacaaacggcgtgggctatcagccctacagagtggtggtgctgtcctttgagctgctgcacgcaccagcaacagtgtgcggcccaaagaagtctaccaatctggtgaagaacaagtgcgtgaacttcaacttcaacggactgaccggcacaggcgtgctgaccgagagcaataagaagttcctgccttttcagcagttcggcagggacatcgcagataccacagacgccgtgcgcgaccctcagaccctggagatcctggacatcacaccatgcagcttcggcggcgtgtccgtgatcacaccaggcaccaatacatccaaccaggtggccgtgctgtatcaggacgtgaattgtaccgaggtgcccgtggcaatccacgcagatcagctgacccctacatggcgggtgtactctaccggcagcaacgtgttccagacaagagccggatgcctgatcggagcagagcacgtgaacaatagctatgagtgcgacatccctatcggcgccggcatctgtgccagctaccagacccagacaaactccccatctggagcaggctccgtggccagccagtccatcatcgcctataccatgagcctgggcgccgagaacagcgtggcctactccaacaattctatcgccatccctaccaacttcacaatcagcgtgaccacagagatcctgccagtgtctatgaccaagacaagcgtggactgcacaatgtatatctgtggcgatagcaccgagtgctccaacctgctgctgcagtacggctccttttgtacccagctgaatagagccctgacaggcatcgccgtggagcaggataagaacacacaggaggtgttcgcccaggtgaagcagatctacaagaccccacccatcaaggactttggcggcttcaacttcagccagatcctgcctgatccaagcaagccctccaagaggtcttttatcgaggacctgctgttcaacaaggtgaccctggccgatgccggcttcatcaagcagtatggagattgcctgggagacatcgcagcccgcgacctgatctgtgcccagaagtttaatggcctgaccgtgctgcctccactgctgacagatgagatgatcgcccagtacacatctgccctgctggccggcaccatcacaagcggatggaccttcggcgcaggagccgccctgcagatcccttttgccatgcagatggcctataggttcaacggcatcggcgtgacccagaatgtgctgtacgagaaccagaagctgatcgccaatcagtttaacagcgccatcggcaagatccaggactctctgtcctctacagccagcgccctgggcaagctgcaggatgtggtgaatcagaacgcccaggccctgaataccctggtgaagcagctgagctccaacttcggcgccatctctagcgtgctgaatgacatcctgagccggctggacccccctgaggcagaggtgcagatcgacaggctgatcacaggccgcctgcagagcctgcagacctacgtgacacagcagctgatcagggcagcagagatcagagcctccgccaatctggccgccaccaagatgagcgagtgcgtgctgggacagtccaagagggtggacttttgtggcaagggctatcacctgatgtctttcccacagagcgcccctcacggcgtggtgtttctgcacgtgacctacgtgccagcccaggagaagaacttcaccacagcaccagccatctgccacgatggaaaggcacactttcctagggagggcgtgttcgtgtctaacggcacccactggtttgtgacacagcgcaatttctacgagccacagatcatcaccacagacaatacattcgtgagcggcaactgtgatgtggtgatcggcatcgtgaacaataccgtgtatgatccactgcagcccgagctggactcctttaaggaggagctggataagtacttcaagaatcacacctctcccgacgtggatctgggcgacatctccggcatcaatgcctctgtggtgaacatccagaaggagatcgaccggctgaacgaggtggccaagaatctgaacgagagcctgatcgatctgcaggagctgggcaagtatgagcagtacatcaagggctctggcagagagaacctgtatttccagggaggaggaggcagcggatacatccctgaggcaccaagggacggacaggcctacgtgcgcaaggatggcgagtgggtgctgctgtccacctttctgggccatcatcaccaccaccaccaccactga

SEQ ID NO: 5143 - DNA, 3846 bp, Artificial Sequence
  Description of Artificial Sequence: Synthetic polynucleotide
atgggcatcctgccaagcccaggaatgcccgccctgctgtctctggtgagcctgctgtccgtgctgctgatgggatgcgtggcagagacaggcacacagtgcgtgaacctgaccacaaggacccagctgccccctgcctataccaattctttcacacggggcgtgtactatcccgacaaggtgtttagaagctccgtgctgcactccacacaggatctgtttctgcctttcttttctaacgtgacctggttccacgccatccacgtgtccggcaccaatggcacaaagcggttcgacaatcccgtgctgccttttaacgatggcgtgtacttcgccagcaccgagaagtccaacatcatcagaggctggatctttggcaccacactggactctaagacacagagcctgctgatcgtgaacaatgccaccaacgtggtgatcaaggtgtgcgagttccagttttgtaatgatccattcctgggcgtgtactatcacaagaacaataagtcctggatggagtctgagtttcgcgtgtattctagcgccaacaattgcacatttgagtacgtgagccagcccttcctgatggacctggagggcaagcagggcaatttcaagaacctgagggagttcgtgtttaagaatatcgatggctacttcaagatctacagcaagcacaccccaatcaacctggtgcgcgacctgccacagggattctccgccctggagccactggtggatctgcccatcggcatcaacatcacccggtttcagacactgctggccctgcacagatcctacctgacaccaggcgactcctctagcggatggaccgcaggagctgccgcctactatgtgggctatctgcagccccggaccttcctgctgaagtacaacgagaatggcaccatcacagacgcagtggattgcgccctggaccccctgtctgagacaaagtgtacactgaagagctttaccgtggagaagggcatctatcagacaagcaatttcagggtgcagcctaccgagtccatcgtgcgctttcccaatatcacaaacctgtgcccttttggcgaggtgttcaacgccaccagattcgccagcgtgtacgcctggaatcggaagagaatctccaactgcgtggccgactattctgtgctgtacaactccgcctctttcagcacctttaagtgctatggcgtgtctcccacaaagctgaatgatctgtgctttaccaacgtgtacgccgatagcttcgtgatcaggggagacgaagtgaaacagatcgcaccaggacagacaggaaagatcgcagactacaattataagctgcctgacgatttcaccggctgcgtgatcgcctggaactccaacaatctggattctaaagtgggcggcaactacaattatctgtacaggctgtttcgcaagtccaatctgaagccattcgagcgggacatctccacagagatctaccaggccggctctaccccctgcaatggcgtggagggctttaactgttatttccctctgcagtcttacggcttccagccaacaaacggcgtgggctatcagccctacagagtggtggtgctgtcctttgagctgctgcacgcaccagcaacagtgtgcggcccaaagaagtctaccaatctggtgaagaacaagtgcgtgaacttcaacttcaacggactgaccggcacaggcgtgctgaccgagagcaataagaagttcctgccttttcagcagttcggcagggacatcgcagataccacagacgccgtgcgcgaccctcagaccctggagatcctggacatcacaccatgcagcttcggcggcgtgtccgtgatcacaccaggcaccaatacatccaaccaggtggccgtgctgtatcaggacgtgaattgtaccgaggtgcccgtggcaatccacgcagatcagctgacccctacatggcgggtgtactctaccggcagcaacgtgttccagacaagagccggatgcctgatcggagcagagcacgtgaacaatagctatgagtgcgacatccctatcggcgccggcatctgtgccagctaccagacccagacaaactccccatctggagcaggctccgtggccagccagtccatcatcgcctataccatgagcctgggcgccgagaacagcgtggcctactccaacaattctatcgccatccctaccaacttcacaatcagcgtgaccacagagatcctgccagtgtctatgaccaagacaagcgtggactgcacaatgtatatctgtggcgatagcaccgagtgctccaacctgctgctgcagtacggctccttttgtacccagctgaatagagccctgacaggcatcgccgtggagcaggataagaacacacaggaggtgttcgcccaggtgaagcagatctacaagaccccacccatcaaggactttggcggcttcaacttcagccagatcctgcctgatccaagcaagccctccaagaggtcttttatcgaggacctgctgttcaacaaggtgaccctggccgatgccggcttcatcaagcagtatggagattgcctgggagacatcgcagcccgcgacctgatctgtgcccagaagtttaatggcctgaccgtgctgcctccactgctgacagatgagatgatcgcccagtacacatctgccctgctggccggcaccatcacaagcggatggaccttcggcgcaggagccgccctgcagatcccttttgccatgcagatggcctataggttcaacggcatcggcgtgacccagaatgtgctgtacgagaaccagaagctgatcgccaatcagtttaacagcgccatcggcaagatccaggactctctgtcctctacagccagcgccctgggcaagctgcaggatgtggtgaatcagaacgcccaggccctgaataccctggtgaagcagctgagctccaacttcggcgccatctctagcgtgctgaatgacatcctgagccggctggacccccctgaggcagaggtgcagatcgacaggctgatcacaggccgcctgcagagcctgcagacctacgtgacacagcagctgatcagggcagcagagatcagagcctccgccaatctggccgccaccaagatgagcgagtgcgtgctgggacagtccaagagggtggacttttgtggcaagggctatcacctgatgtctttcccacagagcgcccctcacggcgtggtgtttctgcacgtgacctacgtgccagcccaggagaagaacttcaccacagcaccagccatctgccacgatggaaaggcacactttcctagggagggcgtgttcgtgtctaacggcacccactggtttgtgacacagcgcaatttctacgagccacagatcatcaccacagacaatacattcgtgagcggcaactgtgatgtggtgatcggcatcgtgaacaataccgtgtatgatccactgcagcccgagctggactcctttaaggaggagctggataagtacttcaagaatcacacctctcccgacgtggatctgggcgacatctccggcatcaatgcctctgtggtgaacatccagaaggagatcgaccggctgaacgaggtggccaagaatctgaacgagagcctgatcgatctgcaggagctgggcaagtatgagcagtacatcaagggctctggcagagagaacctgtatttccagggaggaggaggcagcggatacatccctgaggcaccaagggacggacaggcctacgtgcgcaaggatggcgagtgggtgctgctgtccacctttctgggccatcatcaccaccaccaccaccactga

SEQ ID NO: 5144 - DNA, 3846 bp, Artificial Sequence
  Description of Artificial Sequence: Synthetic polynucleotide
atgggcatcctgccaagcccaggaatgcccgccctgctgtctctggtgagcctgctgtccgtgctgctgatgggatgcgtggcagagacaggcacacagtgcgtgaacctgaccacaaggacccagctgccccctgcctataccaattctttcacacggggcgtgtactatcccgacaaggtgtttagaagctccgtgctgcactccacacaggatctgtttctgcctttcttttctaacgtgacctggttccacgccatccacgtgtccggcaccaatggcacaaagcggttcgacaatcccgtgctgccttttaacgatggcgtgtacttcgccagcaccgagaagtccaacatcatcagaggctggatctttggcaccacactggactctaagacacagagcctgctgatcgtgaacaatgccaccaacgtggtgatcaaggtgtgcgagttccagttttgtaatgatccattcctgggcgtgtactatcacaagaacaataagtcctggatggagtctgagtttcgcgtgtattctagcgccaacaattgcacatttgagtacgtgagccagcccttcctgatggacctggagggcaagcagggcaatttcaagaacctgagggagttcgtgtttaagaatatcgatggctacttcaagatctacagcaagcacaccccaatcaacctggtgcgcgacctgccacagggattctccgccctggagccactggtggatctgcccatcggcatcaacatcacccggtttcagacactgctggccctgcacagatcctacctgacaccaggcgactcctctagcggatggaccgcaggagctgccgcctactatgtgggctatctgcagccccggaccttcctgctgaagtacaacgagaatggcaccatcacagacgcagtggattgcgccctggaccccctgtctgagacaaagtgtacactgaagagctttaccgtggagaagggcatctatcagacaagcaatttcagggtgcagcctaccgagtccatcgtgcgctttcccaatatcacaaacctgtgcccttttggcgaggtgttcaacgccaccagattcgccagcgtgtacgcctggaatcggaagagaatcactaactgcgtggccgactattctgtgctgtacaactccgcctctttcagcacctttaagtgctatggcgtgtctcccacaaagctgaatgatctgtgctttaccaacgtgtacgccgatagcttcgtgatcaggggagacgaagtgagacagatcgcaccaggacagacaggaaagatcgcagactacaattataagctgcctgacgatttcaccggctgcgtgatcgcctggaactccaacaatctggattctaaagtgggcggcaactacaattatctgtacaggctgtttcgcaagtccaatctgaagccattcgagcgggacatctccacagagatctaccaggccggctctaccccctgcaatggcgtggagggctttaactgttatttccctctgcagtcttacggcttccagccaacaaacggcgtgggctatcagccctacagagtggtggtgctgtcctttgagctgctgcacgcaccagcaacagtgtgcggcccaaagaagtctaccaatctggtgaagaacaagtgcgtgaacttcaacttcaacggactgaccggcacaggcgtgctgaccgagagcaataagaagttcctgccttttcagcagttcggcagggacatcgcagataccacagacgccgtgcgcgaccctcagaccctggagatcctggacatcacaccatgcagcttcggcggcgtgtccgtgatcacaccaggcaccaatacatccaaccaggtggccgtgctgtatcaggacgtgaattgtaccgaggtgcccgtggcaatccacgcagatcagctgacccctacatggcgggtgtactctaccggcagcaacgtgttccagacaagagccggatgcctgatcggagcagagcacgtgaacaatagctatgagtgcgacatccctatcggcgccggcatctgtgccagctaccagacccagacaaactccccatctggagcaggctccgtggccagccagtccatcatcgcctataccatgagcctgggcgccgagaacagcgtggcctactccaacaattctatcgccatccctaccaacttcacaatcagcgtgaccacagagatcctgccagtgtctatgaccaagacaagcgtggactgcacaatgtatatctgtggcgatagcaccgagtgctccaacctgctgctgcagtacggctccttttgtacccagctgaatagagccctgacaggcatcgccgtggagcaggataagaacacacaggaggtgttcgcccaggtgaagcagatctacaagaccccacccatcaaggactttggcggcttcaacttcagccagatcctgcctgatccaagcaagccctccaagaggtcttttatcgaggacctgctgttcaacaaggtgaccctggccgatgccggcttcatcaagcagtatggagattgcctgggagacatcgcagcccgcgacctgatctgtgcccagaagtttaatggcctgaccgtgctgcctccactgctgacagatgagatgatcgcccagtacacatctgccctgctggccggcaccatcacaagcggatggaccttcggcgcaggagccgccctgcagatcccttttgccatgcagatggcctataggttcaacggcatcggcgtgacccagaatgtgctgtacgagaaccagaagctgatcgccaatcagtttaacagcgccatcggcaagatccaggactctctgtcctctacagccagcgccctgggcaagctgcaggatgtggtgaatcagaacgcccaggccctgaataccctggtgaagcagctgagctccaacttcggcgccatctctagcgtgctgaatgacatcctgagccggctggacccccctgaggcagaggtgcagatcgacaggctgatcacaggccgcctgcagagcctgcagacctacgtgacacagcagctgatcagggcagcagagatcagagcctccgccaatctggccgccaccaagatgagcgagtgcgtgctgggacagtccaagagggtggacttttgtggcaagggctatcacctgatgtctttcccacagagcgcccctcacggcgtggtgtttctgcacgtgacctacgtgccagcccaggagaagaacttcaccacagcaccagccatctgccacgatggaaaggcacactttcctagggagggcgtgttcgtgtctaacggcacccactggtttgtgacacagcgcaatttctacgagccacagatcatcaccacagacaatacattcgtgagcggcaactgtgatgtggtgatcggcatcgtgaacaataccgtgtatgatccactgcagcccgagctggactcctttaaggaggagctggataagtacttcaagaatcacacctctcccgacgtggatctgggcgacatctccggcatcaatgcctctgtggtgaacatccagaaggagatcgaccggctgaacgaggtggccaagaatctgaacgagagcctgatcgatctgcaggagctgggcaagtatgagcagtacatcaagggctctggcagagagaacctgtatttccagggaggaggaggcagcggatacatccctgaggcaccaagggacggacaggcctacgtgcgcaaggatggcgagtgggtgctgctgtccacctttctgggccatcatcaccaccaccaccaccactga

SEQ ID NO: 5145 - DNA, 3846 bp, Artificial Sequence
  Description of Artificial Sequence: Synthetic polynucleotide
atgggcatcctgccaagcccaggaatgcccgccctgctgtctctggtgagcctgctgtccgtgctgctgatgggatgcgtggcagagacaggcacacagtgcgtgaacctgaccacaaggacccagctgccccctgcctataccaattctttcacacggggcgtgtactatcccgacaaggtgtttagaagctccgtgctgcactccacacaggatctgtttctgcctttcttttctaacgtgacctggttccacgccatccacgtgtccggcaccaatggcacaaagcggttcgacaatcccgtgctgccttttaacgatggcgtgtacttcgccagcaccgagaagtccaacatcatcagaggctggatctttggcaccacactggactctaagacacagagcctgctgatcgtgaacaatgccaccaacgtggtgatcaaggtgtgcgagttccagttttgtaatgatccattcctgggcgtgtactatcacaagaacaataagtcctggatggagtctgagtttcgcgtgtattctagcgccaacaattgcacatttgagtacgtgagccagcccttcctgatggacctggagggcaagcagggcaatttcaagaacctgagggagttcgtgtttaagaatatcgatggctacttcaagatctacagcaagcacaccccaatcaacctggtgcgcgacctgccacagggattctccgccctggagccactggtggatctgcccatcggcatcaacatcacccggtttcagacactgctggccctgcacagatcctacctgacaccaggcgactcctctagcggatggaccgcaggagctgccgcctactatgtgggctatctgcagccccggaccttcctgctgaagtacaacgagaatggcaccatcacagacgcagtggattgcgccctggaccccctgtctgagacaaagtgtacactgaagagctttaccgtggagaagggcatctatcagacaagcaatttcagggtgcagcctaccgagtccatcgtgcgctttcccaatatcacaaacctgtgcccttttggcgaggtgttcaacgccaccagattcgccagcgtgtacgcctggaatcggaagagaatctccaactgcgtggccgactattctgtgctgtacaactccgcctctttcagcacctttaagtgctatggcgtgtctcccacaaagctgaatgatctgtgctttaccaacgtgtacgccgatagcttcgtgatcaggggagacgaagtgagacagatcgcaccaggacagacaggaaagatcgcagactacaattataagctgcctgacgatttcaccggctgcgtgatcgcctggaactccaacaatctggattctaaagtgggcggcaactacaattatctgtacaggctgtttcgcaagtccaatctgaagccattcgagcgggacatcacgacagagatctaccaggccggctctaccccctgcaatggcgtggagggctttaactgttatttccctctgcagtcttacggcttccagccaacaaacggcgtgggctatcagccctacagagtggtggtgctgtcctttgagctgctgcacgcaccagcaacagtgtgcggcccaaagaagtctaccaatctggtgaagaacaagtgcgtgaacttcaacttcaacggactgaccggcacaggcgtgctgaccgagagcaataagaagttcctgccttttcagcagttcggcagggacatcgcagataccacagacgccgtgcgcgaccctcagaccctggagatcctggacatcacaccatgcagcttcggcggcgtgtccgtgatcacaccaggcaccaatacatccaaccaggtggccgtgctgtatcaggacgtgaattgtaccgaggtgcccgtggcaatccacgcagatcagctgacccctacatggcgggtgtactctaccggcagcaacgtgttccagacaagagccggatgcctgatcggagcagagcacgtgaacaatagctatgagtgcgacatccctatcggcgccggcatctgtgccagctaccagacccagacaaactccccatctggagcaggctccgtggccagccagtccatcatcgcctataccatgagcctgggcgccgagaacagcgtggcctactccaacaattctatcgccatccctaccaacttcacaatcagcgtgaccacagagatcctgccagtgtctatgaccaagacaagcgtggactgcacaatgtatatctgtggcgatagcaccgagtgctccaacctgctgctgcagtacggctccttttgtacccagctgaatagagccctgacaggcatcgccgtggagcaggataagaacacacaggaggtgttcgcccaggtgaagcagatctacaagaccccacccatcaaggactttggcggcttcaacttcagccagatcctgcctgatccaagcaagccctccaagaggtcttttatcgaggacctgctgttcaacaaggtgaccctggccgatgccggcttcatcaagcagtatggagattgcctgggagacatcgcagcccgcgacctgatctgtgcccagaagtttaatggcctgaccgtgctgcctccactgctgacagatgagatgatcgcccagtacacatctgccctgctggccggcaccatcacaagcggatggaccttcggcgcaggagccgccctgcagatcccttttgccatgcagatggcctataggttcaacggcatcggcgtgacccagaatgtgctgtacgagaaccagaagctgatcgccaatcagtttaacagcgccatcggcaagatccaggactctctgtcctctacagccagcgccctgggcaagctgcaggatgtggtgaatcagaacgcccaggccctgaataccctggtgaagcagctgagctccaacttcggcgccatctctagcgtgctgaatgacatcctgagccggctggacccccctgaggcagaggtgcagatcgacaggctgatcacaggccgcctgcagagcctgcagacctacgtgacacagcagctgatcagggcagcagagatcagagcctccgccaatctggccgccaccaagatgagcgagtgcgtgctgggacagtccaagagggtggacttttgtggcaagggctatcacctgatgtctttcccacagagcgcccctcacggcgtggtgtttctgcacgtgacctacgtgccagcccaggagaagaacttcaccacagcaccagccatctgccacgatggaaaggcacactttcctagggagggcgtgttcgtgtctaacggcacccactggtttgtgacacagcgcaatttctacgagccacagatcatcaccacagacaatacattcgtgagcggcaactgtgatgtggtgatcggcatcgtgaacaataccgtgtatgatccactgcagcccgagctggactcctttaaggaggagctggataagtacttcaagaatcacacctctcccgacgtggatctgggcgacatctccggcatcaatgcctctgtggtgaacatccagaaggagatcgaccggctgaacgaggtggccaagaatctgaacgagagcctgatcgatctgcaggagctgggcaagtatgagcagtacatcaagggctctggcagagagaacctgtatttccagggaggaggaggcagcggatacatccctgaggcaccaagggacggacaggcctacgtgcgcaaggatggcgagtgggtgctgctgtccacctttctgggccatcatcaccaccaccaccaccactga

SEQ ID NO: 5146 - DNA, 3846 bp, Artificial Sequence
  Description of Artificial Sequence: Synthetic polynucleotide
atgggcatcctgccaagcccaggaatgcccgccctgctgtctctggtgagcctgctgtccgtgctgctgatgggatgcgtggcagagacaggcacacagtgcgtgaacctgaccacaaggacccagctgccccctgcctataccaattctttcacacggggcgtgtactatcccgacaaggtgtttagaagctccgtgctgcactccacacaggatctgtttctgcctttcttttctaacgtgacctggttccacgccatccacgtgtccggcaccaatggcacaaagcggttcgacaatcccgtgctgccttttaacgatggcgtgtacttcgccagcaccgagaagtccaacatcatcagaggctggatctttggcaccacactggactctaagacacagagcctgctgatcgtgaacaatgccaccaacgtggtgatcaaggtgtgcgagttccagttttgtaatgatccattcctgggcgtgtactatcacaagaacaataagtcctggatggagtctgagtttcgcgtgtattctagcgccaacaattgcacatttgagtacgtgagccagcccttcctgatggacctggagggcaagcagggcaatttcaagaacctgagggagttcgtgtttaagaatatcgatggctacttcaagatctacagcaagcacaccccaatcaacctggtgcgcgacctgccacagggattctccgccctggagccactggtggatctgcccatcggcatcaacatcacccggtttcagacactgctggccctgcacagatcctacctgacaccaggcgactcctctagcggatggaccgcaggagctgccgcctactatgtgggctatctgcagccccggaccttcctgctgaagtacaacgagaatggcaccatcacagacgcagtggattgcgccctggaccccctgtctgagacaaagtgtacactgaagagctttaccgtggagaagggcatctatcagacaagcaatttcagggtgcagcctaccgagtccatcgtgcgctttcccaatatcacaaacctgtgcccttttggcgaggtgttcaacgccaccagattcgccagcgtgtacgcctggaatcggaagagaatctccaactgcgtggccgactattctgtgctgtacaactccgcctctttcagcacctttaagtgctatggcgtgtctcccacaaagctgaatgatctgtgctttaccaacgtgtacgccgatagcttcgtgatcaggggagacgaagtgagacagatcgcaccaggacagacaggaaagatcgcagactacaattataagctgcctgacgatttcaccggctgcgtgatcgcctggaactccaacaatctggattctaaagtgggcggcaactacaattatctgtacaggctgtttcgcaagtccaatctgaagccattcgagcgggacatctccacagagatctaccaggccggctctaccccctgcaatggcgtggagggctttaactgttatttccctctgcagtcttacggcttccagccaacaaacggcgtgggctatcagccctacagagtggtggtgctgtcctttgagctgctgcacgcaccagcaacagtgtgcggcccaaagaagtctaccaatctggtgaagaacaagtgcgtgaacttcaacttcaacggactgaccggcacaggcgtgctgaccgagagcaataagaagttcctgccttttcagcagttcggcagggacatcgcagataccacagacgccgtgcgcgaccctcagaccctggagatcctggacatcacaccatgcagcttcggcggcgtgtccgtgatcacaccaggcaccaatacatccaaccaggtggccgtgctgtatcaggacgtgaattgtaccgaggtgcccgtggcaatccacgcagatcagctgacccctacatggcgggtgtactctaccggcagcaacgtgttccagacaagagccggatgcctgatcggagcagagcacgtgaacaatagctatgagtgcgacatccctatcggcgccggcatctgtgccagctaccagacccagacaaactccccatctggagcaggctccgtggccagccagtccatcatcgcctataccatgagcctgggcgccgagaacagcgtggcctactccaacaattctatcgccatccctaccaacttcacaatcagcgtgaccacagagatcctgccagtgtctatgaccaagacaagcgtggactgcacaatgtatatctgtggcgatagcaccgagtgctccaacctgctgctgcagtacggctccttttgtacccagctgaatagagccctgacaggcatcgccgtggagcaggataagaacacacaggaggtgttcgcccaggtgaagcagatctacaagaccccacccatcaaggactttggcggcttcaacttcagccagatcctgcctgatccaagcaagccctccaagaggtcttttatcgaggacctgctgttcaacaaggtgaccctggccgatgccggcttcatcaagcagtatggagattgcctgggagacatcgcagcccgcgacctgatctgtgcccagaagtttaatggcctgaccgtgctgcctccactgctgacagatgagatgatcgcccagtacacatctgccctgctggccggcaccatcacaagcggatggaccttcggcgcaggagccgccctgcagatcccttttgccatgcagatggcctataggttcaacggcatcggcgtgacccagaatgtgctgtacgagaaccagaagctgatcgccaatcagtttaacagcgccatcggcaagatccaggactctctgtcctctacagccagcgccctgggcaagctgcaggatgtggtgaatcagaacgcccaggccctgaataccctggtgaagcagctgagctccaacttcggcgccatctctagcgtgctgaatgacatcctgagccggatagacccccctgaggcagaggtgcagatcgacaggctgatcacaggccgcctgcagagcctgcagacctacgtgacacagcagctgatcagggcagcagagatcagagcctccgccaatctggccgccaccaagatgagcgagtgcgtgctgggacagtccaagagggtggacttttgtggcaagggctatcacctgatgtctttcccacagagcgcccctcacggcgtggtgtttctgcacgtgacctacgtgccagcccaggagaagaacttcaccacagcaccagccatctgccacgatggaaaggcacactttcctagggagggcgtgttcgtgtctaacggcacccactggtttgtgacacagcgcaatttctacgagccacagatcatcaccacagacaatacattcgtgagcggcaactgtgatgtggtgatcggcatcgtgaacaataccgtgtatgatccactgcagcccgagctggactcctttaaggaggagctggataagtacttcaagaatcacacctctcccgacgtggatctgggcgacatctccggcatcaatgcctctgtggtgaacatccagaaggagatcgaccggctgaacgaggtggccaagaatctgaacgagagcctgatcgatctgcaggagctgggcaagtatgagcagtacatcaagggctctggcagagagaacctgtatttccagggaggaggaggcagcggatacatccctgaggcaccaagggacggacaggcctacgtgcgcaaggatggcgagtgggtgctgctgtccacctttctgggccatcatcaccaccaccaccaccactga

SEQ ID NO: 5147 - DNA, 3846 bp, Artificial Sequence
  Description of Artificial Sequence: Synthetic polynucleotide
atgggcatcctgccaagcccaggaatgcccgccctgctgtctctggtgagcctgctgtccgtgctgctgatgggatgcgtggcagagacaggcacacagtgcgtgaacctgaccacaaggacccagctgccccctgcctataccaattctttcacacggggcgtgtactatcccgacaaggtgtttagaagctccgtgctgcactccacacaggatctgtttctgcctttcttttctaacgtgacctggttccacgccatccacgtgtccggcaccaatggcacaaagcggttcgacaatcccgtgctgccttttaacgatggcgtgtacttcgccagcaccgagaagtccaacatcatcagaggctggatctttggcaccacactggactctaagacacagagcctgctgatcgtgaacaatgccaccaacgtggtgatcaaggtgtgcgagttccagttttgtaatgatccattcctgggcgtgtactatcacaagaacaataagtcctggatggagtctgagtttcgcgtgtattctagcgccaacaattgcacatttgagtacgtgagccagcccttcctgatggacctggagggcaagcagggcaatttcaagaacctgagggagttcgtgtttaagaatatcgatggctacttcaagatctacagcaagcacaccccaatcaacctggtgcgcgacctgccacagggattctccgccctggagccactggtggatctgcccatcggcatcaacatcacccggtttcagacactgctggccctgcacagatcctacctgacaccaggcgactcctctagcggatggaccgcaggagctgccgcctactatgtgggctatctgcagccccggaccttcctgctgaagtacaacgagaatggcaccatcacagacgcagtggattgcgccctggaccccctgtctgagacaaagtgtacactgaagagctttaccgtggagaagggcatctatcagacaagcaatttcagggtgcagcctaccgagtccatcgtgcgctttcccaatatcacaaacctgtgcccttttggcgaggtgttcaacgccaccagattcgccagcgtgtacgcctggaatcggaagagaatctccaactgcgtggccgactattcttcactgtacaactccgcctctttcagcacctttaagtgctatggcgtgtctcccacaaagctgaatgatctgtgctttaccaacgtgtacgccgatagcttcgtgatcaggggagacgaagtgagacagatcgcaccaggacagacaggaaagatcgcagactacaattataagctgcctgacgatttcaccggctgcgtgatcgcctggaactccaacaatctggattctaaagtgggcggcaactacaattatctgtacaggctgtttcgcaagtccaatctgaagccattcgagcgggacatctccacagagatctaccaggccggctctaccccctgcaatggcgtggagggctttaactgttatttccctctgcagtcttacggcttccagccaacaaacggcgtgggctatcagccctacagagtggtggtgctgtcctttgagctgctgcacgcaccagcaacagtgtgcggcccaaagaagtctaccaatctggtgaagaacaagtgcgtgaacttcaacttcaacggactgaccggcacaggcgtgctgaccgagagcaataagaagttcctgccttttcagcagttcggcagggacatcgcagataccacagacgccgtgcgcgaccctcagaccctggagatcctggacatcacaccatgcagcttcggcggcgtgtccgtgatcacaccaggcaccaatacatccaaccaggtggccgtgctgtatcaggacgtgaattgtaccgaggtgcccgtggcaatccacgcagatcagctgacccctacatggcgggtgtactctaccggcagcaacgtgttccagacaagagccggatgcctgatcggagcagagcacgtgaacaatagctatgagtgcgacatccctatcggcgccggcatctgtgccagctaccagacccagacaaactccccatctggagcaggctccgtggccagccagtccatcatcgcctataccatgagcctgggcgccgagaacagcgtggcctactccaacaattctatcgccatccctaccaacttcacaatcagcgtgaccacagagatcctgccagtgtctatgaccaagacaagcgtggactgcacaatgtatatctgtggcgatagcaccgagtgctccaacctgctgctgcagtacggctccttttgtacccagctgaatagagccctgacaggcatcgccgtggagcaggataagaacacacaggaggtgttcgcccaggtgaagcagatctacaagaccccacccatcaaggactttggcggcttcaacttcagccagatcctgcctgatccaagcaagccctccaagaggtcttttatcgaggacctgctgttcaacaaggtgaccctggccgatgccggcttcatcaagcagtatggagattgcctgggagacatcgcagcccgcgacctgatctgtgcccagaagtttaatggcctgaccgtgctgcctccactgctgacagatgagatgatcgcccagtacacatctgccctgctggccggcaccatcacaagcggatggaccttcggcgcaggagccgccctgcagatcccttttgccatgcagatggcctataggttcaacggcatcggcgtgacccagaatgtgctgtacgagaaccagaagctgatcgccaatcagtttaacagcgccatcggcaagatccaggactctctgtcctctacagccagcgccctgggcaagctgcaggatgtggtgaatcagaacgcccaggccctgaataccctggtgaagcagctgagctccaacttcggcgccatctctagcgtgctgaatgacatcctgagccggctggacccccctgaggcagaggtgcagatcgacaggctgatcacaggccgcctgcagagcctgcagacctacgtgacacagcagctgatcagggcagcagagatcagagcctccgccaatctggccgccaccaagatgagcgagtgcgtgctgggacagtccaagagggtggacttttgtggcaagggctatcacctgatgtctttcccacagagcgcccctcacggcgtggtgtttctgcacgtgacctacgtgccagcccaggagaagaacttcaccacagcaccagccatctgccacgatggaaaggcacactttcctagggagggcgtgttcgtgtctaacggcacccactggtttgtgacacagcgcaatttctacgagccacagatcatcaccacagacaatacattcgtgagcggcaactgtgatgtggtgatcggcatcgtgaacaataccgtgtatgatccactgcagcccgagctggactcctttaaggaggagctggataagtacttcaagaatcacacctctcccgacgtggatctgggcgacatctccggcatcaatgcctctgtggtgaacatccagaaggagatcgaccggctgaacgaggtggccaagaatctgaacgagagcctgatcgatctgcaggagctgggcaagtatgagcagtacatcaagggctctggcagagagaacctgtatttccagggaggaggaggcagcggatacatccctgaggcaccaagggacggacaggcctacgtgcgcaaggatggcgagtgggtgctgctgtccacctttctgggccatcatcaccaccaccaccaccactga

SEQ ID NO: 5148 - DNA, 3846 bp, Artificial Sequence
  Description of Artificial Sequence: Synthetic polynucleotide
atgggcatcctgccaagcccaggaatgcccgccctgctgtctctggtgagcctgctgtccgtgctgctgatgggatgcgtggcagagacaggcacacagtgcgtgaacctgaccacaaggacccagctgccccctgcctataccaattctttcacacggggcgtgtactatcccgacaaggtgtttagaagctccgtgctgcactccacacaggatctgtttctgcctttcttttctaacgtgacctggttccacgccatccacgtgtccggcaccaatggcacaaagcggttcgacaatcccgtgctgccttttaacgatggcgtgtacttcgccagcaccgagaagtccaacatcatcagaggctggatctttggcaccacactggactctaagacacagagcctgctgatcgtgaacaatgccaccaacgtggtgatcaaggtgtgcgagttccagttttgtaatgatccattcctgggcgtgtactatcacaagaacaataagtcctggatggagtctgagtttcgcgtgtattctagcgccaacaattgcacatttgagtacgtgagccagcccttcctgatggacctggagggcaagcagggcaatttcaagaacctgagggagttcgtgtttaagaatatcgatggctacttcaagatctacagcaagcacaccccaatcaacctggtgcgcgacctgccacagggattctccgccctggagccactggtggatctgcccatcggcatcaacatcacccggtttcagacactgctggccctgcacagatcctacctgacaccaggcgactcctctagcggatggaccgcaggagctgccgcctactatgtgggctatctgcagccccggaccttcctgctgaagtacaacgagaatggcaccatcacagacgcagtggattgcgccctggaccccctgtctgagacaaagtgtacactgaagagctttaccgtggagaagggcatctatcagacaagcaatttcagggtgcagcctaccgagtccatcgtgcgctttcccaatatcacaaacctgtgcccttttggcgaggtgttcaacgccaccagattcgccagcgtgtacgcctggaatcggaagagaatctccaactgcgtggccgactattctgtgctgtacaactccgcctctttcagcacctttaagtgctatggcgtgtctcccacaaagctgaatgatctgtgctttaccaacgtgtacgccgatagcttcgtgatcaggggagacgaagtgagacagatcgcaccaggacagacaggaaagatcgcagactacaattataagctgcctgacgatttcaccggctgcgtgatcgcctggaactccaaccaactggattctaaagtgggcggcaactacaattatctgtacaggctgtttcgcaagtccaatctgaagccattcgagcgggacatctccacagagatctaccaggccggctctaccccctgcaatggcgtggagggctttaactgttatttccctctgcagtcttacggcttccagccaacaaacggcgtgggctatcagccctacagagtggtggtgctgtcctttgagctgctgcacgcaccagcaacagtgtgcggcccaaagaagtctaccaatctggtgaagaacaagtgcgtgaacttcaacttcaacggactgaccggcacaggcgtgctgaccgagagcaataagaagttcctgccttttcagcagttcggcagggacatcgcagataccacagacgccgtgcgcgaccctcagaccctggagatcctggacatcacaccatgcagcttcggcggcgtgtccgtgatcacaccaggcaccaatacatccaaccaggtggccgtgctgtatcaggacgtgaattgtaccgaggtgcccgtggcaatccacgcagatcagctgacccctacatggcgggtgtactctaccggcagcaacgtgttccagacaagagccggatgcctgatcggagcagagcacgtgaacaatagctatgagtgcgacatccctatcggcgccggcatctgtgccagctaccagacccagacaaactccccatctggagcaggctccgtggccagccagtccatcatcgcctataccatgagcctgggcgccgagaacagcgtggcctactccaacaattctatcgccatccctaccaacttcacaatcagcgtgaccacagagatcctgccagtgtctatgaccaagacaagcgtggactgcacaatgtatatctgtggcgatagcaccgagtgctccaacctgctgctgcagtacggctccttttgtacccagctgaatagagccctgacaggcatcgccgtggagcaggataagaacacacaggaggtgttcgcccaggtgaagcagatctacaagaccccacccatcaaggactttggcggcttcaacttcagccagatcctgcctgatccaagcaagccctccaagaggtcttttatcgaggacctgctgttcaacaaggtgaccctggccgatgccggcttcatcaagcagtatggagattgcctgggagacatcgcagcccgcgacctgatctgtgcccagaagtttaatggcctgaccgtgctgcctccactgctgacagatgagatgatcgcccagtacacatctgccctgctggccggcaccatcacaagcggatggaccttcggcgcaggagccgccctgcagatcccttttgccatgcagatggcctataggttcaacggcatcggcgtgacccagaatgtgctgtacgagaaccagaagctgatcgccaatcagtttaacagcgccatcggcaagatccaggactctctgtcctctacagccagcgccctgggcaagctgcaggatgtggtgaatcagaacgcccaggccctgaataccctggtgaagcagctgagctccaacttcggcgccatctctagcgtgctgaatgacatcctgagccggctggacccccctgaggcagaggtgcagatcgacaggctgatcacaggccgcctgcagagcctgcagacctacgtgacacagcagctgatcagggcagcagagatcagagcctccgccaatctggccgccaccaagatgagcgagtgcgtgctgggacagtccaagagggtggacttttgtggcaagggctatcacctgatgtctttcccacagagcgcccctcacggcgtggtgtttctgcacgtgacctacgtgccagcccaggagaagaacttcaccacagcaccagccatctgccacgatggaaaggcacactttcctagggagggcgtgttcgtgtctaacggcacccactggtttgtgacacagcgcaatttctacgagccacagatcatcaccacagacaatacattcgtgagcggcaactgtgatgtggtgatcggcatcgtgaacaataccgtgtatgatccactgcagcccgagctggactcctttaaggaggagctggataagtacttcaagaatcacacctctcccgacgtggatctgggcgacatctccggcatcaatgcctctgtggtgaacatccagaaggagatcgaccggctgaacgaggtggccaagaatctgaacgagagcctgatcgatctgcaggagctgggcaagtatgagcagtacatcaagggctctggcagagagaacctgtatttccagggaggaggaggcagcggatacatccctgaggcaccaagggacggacaggcctacgtgcgcaaggatggcgagtgggtgctgctgtccacctttctgggccatcatcaccaccaccaccaccactga

SEQ ID NO: 5149 - DNA, 3846 bp, Artificial Sequence
  Description of Artificial Sequence: Synthetic polynucleotide
atgggcatcctgccaagcccaggaatgcccgccctgctgtctctggtgagcctgctgtccgtgctgctgatgggatgcgtggcagagacaggcacacagtgcgtgaacctgaccacaaggacccagctgccccctgcctataccaattctttcacacggggcgtgtactatcccgacaaggtgtttagaagctccgtgctgcactccacacaggatctgtttctgcctttcttttctaacgtgacctggttccacgccatccacgtgtccggcaccaatggcacaaagcggttcgacaatcccgtgctgccttttaacgatggcgtgtacttcgccagcaccgagaagtccaacatcatcagaggctggatctttggcaccacactggactctaagacacagagcctgctgatcgtgaacaatgccaccaacgtggtgatcaaggtgtgcgagttccagttttgtaatgatccattcctgggcgtgtactatcacaagaacaataagtcctggatggagtctgagtttcgcgtgtattctagcgccaacaattgcacatttgagtacgtgagccagcccttcctgatggacctggagggcaagcagggcaatttcaagaacctgagggagttcgtgtttaagaatatcgatggctacttcaagatctacagcaagcacaccccaatcaacctggtgcgcgacctgccacagggattctccgccctggagccactggtggatctgcccatcggcatcaacatcacccggtttcagacactgctggccctgcacagatcctacctgacaccaggcgactcctctagcggatggaccgcaggagctgccgcctactatgtgggctatctgcagccccggaccttcctgctgaagtacaacgagaatggcaccatcacagacgcagtggattgcgccctggaccccctgtctgagacaaagtgtacactgaagagctttaccgtggagaagggcatctatcagacaagcaatttcagggtgcagcctaccgagtccatcgtgcgctttcccaatatcacaaacctgtgcccttttggcgaggtgttcaacgccaccagattcgccagcgtgtacgcctggaatcggaagagaatctccaactgcgtggccgactattctgtgctgtacaactccgcctctttcagcacctttaagtgctatggcgtgtctcccacaaagctgaatgatctgtgctttaccaacgtgtacgccgatagcttcgtgatcaggggagacgaagtgagacagatcgcaccaggacagacaggaaagatcgcagactacaattataagctgcctgacgatttcaccggctgcgtgatcgcctggaactccaacaatctggattctaaagtgggcggcaactacaattatctgtacaggctgtttcgcaagtccaatctgaagccattcgagcgggacatctccacagagatctaccaggccggctctaccccctgcaatggcgtggagggctttaactgttatttccctctgcagtcttacggcttccagccaacaaacggcgtgggctatcagccctacagagtggtggtgctgtcctttgagctgctgcacgcaccagcaacagtgtgcggcccaaagaagtctaccaatctggtgaagaacaagtgcgtgaacttcaacttcaacggactgaccggcacaggcgtgctgaccgagagcaataagaagttcctgccttttcagcagttcggcagggacatcgcagataccacagacgccgtgcgcgaccctcagaccctggagatcctggacatcacaccatgcagcttcggcggcgtgtccgtgatcacaccaggcaccaatacatccaaccaggtggccgtgctgtatcaggacgtgaattgtaccgaggtgcccgtggcaatccacgcagatcagctgacccctacatggcgggtgtactctaccggcagcaacgtgttccagacaagagccggatgcctgatcggagcagagcacgtgaacaatagctatgagtgcgacatccctatcggcgccggcatctgtgccagctaccagacccagacaaactccccatctggagcaggctccgtggccagccagtccatcatcgcctataccatgagcctgggcgccgagaacagcgtggcctactccaacaattctatcgccatccctaccaacttcacaatcagcgtgaccacagagatcctgccagtgtctatgaccaagacaagcgtggactgcacaatgtatatctgtggcgatagcaccgagtgctccaacctgctgctgcagtacggctccttttgtacccagctgaatagagccctgacaggcatcgccgtggagcaggataagaacacacaggaggtgttcgcccaggtgaagcagatctacaagaccccacccatcaaggactttggcggcttcaacttcagccagatcctgcctgatccaagcaagccctccaagaggtcttttatcgaggacctgctgttcaacaaggtgaccctggccgatgccggcttcatcaagcagtatggagattgcctgggagacatcgcagcccgcgacctgatctgtgcccagaagtttaatggcctgaccgtgctgcctccactgctgacagatgagatgatcgcccagtacacatctgccctgctggccggcaccatcacaagcggatggaccttcggcgcaggagccgccctgcagatcccttttgccatgcagatggcctataggttcaacggcatcggcgtgacccagaatgtgctgtacgagaaccagaagctgatcgccaatcagtttaacagcgccatcggcaagatccaggactctctgtcctctacagccagcgccctgggcaagctgcaggatgtggtgaatcagaacgcccaggccctgaataccctggtgaagcagctgagctataacttcggcgccatctctagcgtgctgaatgacatcctgagccggctggacccccctgaggcagaggtgcagatcgacaggctgatcacaggccgcctgcagagcctgcagacctacgtgacacagcagctgatcagggcagcagagatcagagcctccgccaatctggccgccaccaagatgagcgagtgcgtgctgggacagtccaagagggtggacttttgtggcaagggctatcacctgatgtctttcccacagagcgcccctcacggcgtggtgtttctgcacgtgacctacgtgccagcccaggagaagaacttcaccacagcaccagccatctgccacgatggaaaggcacactttcctagggagggcgtgttcgtgtctaacggcacccactggtttgtgacacagcgcaatttctacgagccacagatcatcaccacagacaatacattcgtgagcggcaactgtgatgtggtgatcggcatcgtgaacaataccgtgtatgatccactgcagcccgagctggactcctttaaggaggagctggataagtacttcaagaatcacacctctcccgacgtggatctgggcgacatctccggcatcaatgcctctgtggtgaacatccagaaggagatcgaccggctgaacgaggtggccaagaatctgaacgagagcctgatcgatctgcaggagctgggcaagtatgagcagtacatcaagggctctggcagagagaacctgtatttccagggaggaggaggcagcggatacatccctgaggcaccaagggacggacaggcctacgtgcgcaaggatggcgagtgggtgctgctgtccacctttctgggccatcatcaccaccaccaccaccactga

SEQ ID NO: 5150 - DNA, 3846 bp, Artificial Sequence
  Description of Artificial Sequence: Synthetic polynucleotide
atgggcatcctgccaagcccaggaatgcccgccctgctgtctctggtgagcctgctgtccgtgctgctgatgggatgcgtggcagagacaggcacacagtgcgtgaacctgaccacaaggacccagctgccccctgcctataccaattctttcacacggggcgtgtactatcccgacaaggtgtttagaagctccgtgctgcactccacacaggatctgtttctgcctttcttttctaacgtgacctggttccacgccatccacgtgtccggcaccaatggcacaaagcggttcgacaatcccgtgctgccttttaacgatggcgtgtacttcgccagcaccgagaagtccaacatcatcagaggctggatctttggcaccacactggactctaagacacagagcctgctgatcgtgaacaatgccaccaacgtggtgatcaaggtgtgcgagttccagttttgtaatgatccattcctgggcgtgtactatcacaagaacaataagtcctggatggagtctgagtttcgcgtgtattctagcgccaacaattgcacatttgagtacgtgagccagcccttcctgatggacctggagggcaagcagggcaatttcaagaacctgagggagttcgtgtttaagaatatcgatggctacttcaagatctacagcaagcacaccccaatcaacctggtgcgcgacctgccacagggattctccgccctggagccactggtggatctgcccatcggcatcaacatcacccggtttcagacactgctggccctgcacagatcctacctgacaccaggcgactcctctagcggatggaccgcaggagctgccgcctactatgtgggctatctgcagccccggaccttcctgctgaagtacaacgagaatggcaccatcacagacgcagtggattgcgccctggaccccctgtctgagacaaagtgtacactgaagagctttaccgtggagaagggcatctatcagacaagcaatttcagggtgcagcctaccgagtccatcgtgcgctttcccaatatcacaaacctgtgcccttttggcgaggtgttcaacgccaccagattcgccagcgtgtacgcctggaatcggaagagaatctccaactgcgtggccgactattctgtgctgtacaactccgcctctttcagcacctttaagtgctatggcgtgtctcccacaaagctgaatgatctgtgctttaccaacgtgtacgccgatagcttcgtgatcaggggagacgaagtgagacagatcgcaccaggacagacaggaaagatcgcagactacaattataagctgcctgacgatttcaccggctgcgtgatcgcctggaactccaacaatctggattctaaagtgggcggcaactacaattatctgtacaggctgtttcgcaagtccaatctgaagccattcgagcgggacatctcccgtgagatctaccaggccggctctaccccctgcaatggcgtggagggctttaactgttatttccctctgcagtcttacggcttccagccaacaaacggcgtgggctatcagccctacagagtggtggtgctgtcctttgagctgctgcacgcaccagcaacagtgtgcggcccaaagaagtctaccaatctggtgaagaacaagtgcgtgaacttcaacttcaacggactgaccggcacaggcgtgctgaccgagagcaataagaagttcctgccttttcagcagttcggcagggacatcgcagataccacagacgccgtgcgcgaccctcagaccctggagatcctggacatcacaccatgcagcttcggcggcgtgtccgtgatcacaccaggcaccaatacatccaaccaggtggccgtgctgtatcaggacgtgaattgtaccgaggtgcccgtggcaatccacgcagatcagctgacccctacatggcgggtgtactctaccggcagcaacgtgttccagacaagagccggatgcctgatcggagcagagcacgtgaacaatagctatgagtgcgacatccctatcggcgccggcatctgtgccagctaccagacccagacaaactccccatctggagcaggctccgtggccagccagtccatcatcgcctataccatgagcctgggcgccgagaacagcgtggcctactccaacaattctatcgccatccctaccaacttcacaatcagcgtgaccacagagatcctgccagtgtctatgaccaagacaagcgtggactgcacaatgtatatctgtggcgatagcaccgagtgctccaacctgctgctgcagtacggctccttttgtacccagctgaatagagccctgacaggcatcgccgtggagcaggataagaacacacaggaggtgttcgcccaggtgaagcagatctacaagaccccacccatcaaggactttggcggcttcaacttcagccagatcctgcctgatccaagcaagccctccaagaggtcttttatcgaggacctgctgttcaacaaggtgaccctggccgatgccggcttcatcaagcagtatggagattgcctgggagacatcgcagcccgcgacctgatctgtgcccagaagtttaatggcctgaccgtgctgcctccactgctgacagatgagatgatcgcccagtacacatctgccctgctggccggcaccatcacaagcggatggaccttcggcgcaggagccgccctgcagatcccttttgccatgcagatggcctataggttcaacggcatcggcgtgacccagaatgtgctgtacgagaaccagaagctgatcgccaatcagtttaacagcgccatcggcaagatccaggactctctgtcctctacagccagcgccctgggcaagctgcaggatgtggtgaatcagaacgcccaggccctgaataccctggtgaagcagctgagctccaacttcggcgccatctctagcgtgctgaatgacatcctgagccggctggacccccctgaggcagaggtgcagatcgacaggctgatcacaggccgcctgcagagcctgcagacctacgtgacacagcagctgatcagggcagcagagatcagagcctccgccaatctggccgccaccaagatgagcgagtgcgtgctgggacagtccaagagggtggacttttgtggcaagggctatcacctgatgtctttcccacagagcgcccctcacggcgtggtgtttctgcacgtgacctacgtgccagcccaggagaagaacttcaccacagcaccagccatctgccacgatggaaaggcacactttcctagggagggcgtgttcgtgtctaacggcacccactggtttgtgacacagcgcaatttctacgagccacagatcatcaccacagacaatacattcgtgagcggcaactgtgatgtggtgatcggcatcgtgaacaataccgtgtatgatccactgcagcccgagctggactcctttaaggaggagctggataagtacttcaagaatcacacctctcccgacgtggatctgggcgacatctccggcatcaatgcctctgtggtgaacatccagaaggagatcgaccggctgaacgaggtggccaagaatctgaacgagagcctgatcgatctgcaggagctgggcaagtatgagcagtacatcaagggctctggcagagagaacctgtatttccagggaggaggaggcagcggatacatccctgaggcaccaagggacggacaggcctacgtgcgcaaggatggcgagtgggtgctgctgtccacctttctgggccatcatcaccaccaccaccaccactga

SEQ ID NO: 5151 - DNA, 3846 bp, Artificial Sequence
  Description of Artificial Sequence: Synthetic polynucleotide
atgggcatcctgccaagcccaggaatgcccgccctgctgtctctggtgagcctgctgtccgtgctgctgatgggatgcgtggcagagacaggcacacagtgcgtgaacctgaccacaaggacccagctgccccctgcctataccaattctttcacacggggcgtgtactatcccgacaaggtgtttagaagctccgtgctgcactccacacaggatctgtttctgcctttcttttctaacgtgacctggttccacgccatccacgtgtccggcaccaatggcacaaagcggttcgacaatcccgtgctgccttttaacgatggcgtgtacttcgccagcaccgagaagtccaacatcatcagaggctggatctttggcaccacactggactctaagacacagagcctgctgatcgtgaacaatgccaccaacgtggtgatcaaggtgtgcgagttccagttttgtaatgatccattcctgggcgtgtactatcacaagaacaataagtcctggatggagtctgagtttcgcgtgtattctagcgccaacaattgcacatttgagtacgtgagccagcccttcctgatggacctggagggcaagcagggcaatttcaagaacctgagggagttcgtgtttaagaatatcgatggctacttcaagatctacagcaagcacaccccaatcaacctggtgcgcgacctgccacagggattctccgccctggagccactggtggatctgcccatcggcatcaacatcacccggtttcagacactgctggccctgcacagatcctacctgacaccaggcgactcctctagcggatggaccgcaggagctgccgcctactatgtgggctatctgcagccccggaccttcctgctgaagtacaacgagaatggcaccatcacagacgcagtggattgcgccctggaccccctgtctgagacaaagtgtacactgaagagctttaccgtggagaagggcatctatcagacaagcaatttcagggtgcagcctaccgagtccatcgtgcgctttcccaatatcacaaacctgtgcccttttggcgaggtgttcaacgccaccagattcgccagcgtgtacgcctggaatcggaagagaatctccaactgcgtggccgactattctgtgctgtacaactccgcctctttcagcacctttaagtgctatggcgtgtctcccacaaagctgaatgatctgtgctttaccaacgtgtacgccgatagcttcgtgatcaggggagacgaagtgagacagatcgcaccaggacagacaggaaagatcgcagactacaattataagctgcctgacgatttcaccggctgcgtgatcgcctggaactccaacaatctggattctaaagtgggcggcaactacaattatctgtacaggctgtttcgcaagtccaatctgaagccattcgagcgggacatctccacagagatctaccaggccggctctaccccctgcaatggcgtggagggctttaactgttatttccctctgcagtcttacggcttccagccaacaaacggcgtgggctatcagccctacagagtggtggtgctgtcctttgagctgctgcacgcaccagcaacagtgtgcggcccaaagaagtctaccaatctggtgaagaacaagtgcgtgaacttcaacttcaacggactgaccggcacaggcgtgctgaccgagagcaataagaagttcctgccttttcagcagttcggcagggacatcgcagataccacagacgccgtgcgcgaccctcagaccctggagatcctggacatcacaccatgcagcttcggcggcgtgtccgtgatcacaccaggcaccaatacatccaaccaggtggccgtgctgtatcaggacgtgaattgtaccgaggtgcccgtggcaatccacgcagatcagctgacccctacatggcgggtgtactctaccggcagcaacgtgttccagacaagagccggatgcctgatcggagcagagcacgtgaacaatagctatgagtgcgacatccctatcggcgccggcatctgtgccagctaccagacccagacaaactccccatctggagcaggctccgtggccagccagtccatcatcgcctataccatgagcctgggcgccgagaacagcgtggcctactccaacaattctatcgccatccctaccaacttcacaatcagcgtgaccacagagatcctgccagtgtctatgaccaagacaagcgtggactgcacaatgtatatctgtggcgatagcaccgagtgctccaacctgctgctgcagtacggctccttttgtacccagctgaatagagccctgacaggcatcgccgtggagcaggataagaacacacaggaggtgttcgcccaggtgaagcagatctacaagaccccacccatcaaggactttggcggcttcaacttcagccagatcctgcctgatccaagcaagccctccaagaggtcttttatcgaggacctgctgttcaacaaggtgaccctggccgatgccggcttcatcaagcagtatggagattgcctgggagacatcgcagcccgcgacctgatctgtgcccagaagtttaatggcctgaccgtgctgcctccactgctgacagatgagatgatcgcccagtacacatctgccctgctggccggcaccatcacaagcggatggaccttcggcgcaggagccgccctgcagatcccttttgccatgcagatggcctataggttcaacggcatcggcgtgacccagaatgtgctgtacgagaaccagaagctgatcgccaatcagtttaacagcgccatcggcaagatccaggactctctgtcctctacagccagcgccctgggcaagctgcaggatgtggtgaatcagaacgcccaggccctgaataccctggtgaagcagctgagctccaacttcggcgccatctctagcgtgctgtgggacatcctgagccggctggacccccctgaggcagaggtgcagatcgacaggctgatcacaggccgcctgcagagcctgcagacctacgtgacacagcagctgatcagggcagcagagatcagagcctccgccaatctggccgccaccaagatgagcgagtgcgtgctgggacagtccaagagggtggacttttgtggcaagggctatcacctgatgtctttcccacagagcgcccctcacggcgtggtgtttctgcacgtgacctacgtgccagcccaggagaagaacttcaccacagcaccagccatctgccacgatggaaaggcacactttcctagggagggcgtgttcgtgtctaacggcacccactggtttgtgacacagcgcaatttctacgagccacagatcatcaccacagacaatacattcgtgagcggcaactgtgatgtggtgatcggcatcgtgaacaataccgtgtatgatccactgcagcccgagctggactcctttaaggaggagctggataagtacttcaagaatcacacctctcccgacgtggatctgggcgacatctccggcatcaatgcctctgtggtgaacatccagaaggagatcgaccggctgaacgaggtggccaagaatctgaacgagagcctgatcgatctgcaggagctgggcaagtatgagcagtacatcaagggctctggcagagagaacctgtatttccagggaggaggaggcagcggatacatccctgaggcaccaagggacggacaggcctacgtgcgcaaggatggcgagtgggtgctgctgtccacctttctgggccatcatcaccaccaccaccaccactga

SEQ ID NO: 5152 - DNA, 3846 bp, Artificial Sequence
  Description of Artificial Sequence: Synthetic polynucleotide
atgggcatcctgccaagcccaggaatgcccgccctgctgtctctggtgagcctgctgtccgtgctgctgatgggatgcgtggcagagacaggcacacagtgcgtgaacctgaccacaaggacccagctgccccctgcctataccaattctttcacacggggcgtgtactatcccgacaaggtgtttagaagctccgtgctgcactccacacaggatctgtttctgcctttcttttctaacgtgacctggttccacgccatccacgtgtccggcaccaatggcacaaagcggttcgacaatcccgtgctgccttttaacgatggcgtgtacttcgccagcaccgagaagtccaacatcatcagaggctggatctttggcaccacactggactctaagacacagagcctgctgatcgtgaacaatgccaccaacgtggtgatcaaggtgtgcgagttccagttttgtaatgatccattcctgggcgtgtactatcacaagaacaataagtcctggatggagtctgagtttcgcgtgtattctagcgccaacaattgcacatttgagtacgtgagccagcccttcctgatggacctggagggcaagcagggcaatttcaagaacctgagggagttcgtgtttaagaatatcgatggctacttcaagatctacagcaagcacaccccaatcaacctggtgcgcgacctgccacagggattctccgccctggagccactggtggatctgcccatcggcatcaacatcacccggtttcagacactgctggccctgcacagatcctacctgacaccaggcgactcctctagcggatggaccgcaggagctgccgcctactatgtgggctatctgcagccccggaccttcctgctgaagtacaacgagaatggcaccatcacagacgcagtggattgcgccctggaccccctgtctgagacaaagtgtacactgaagagctttaccgtggagaagggcatctatcagacaagcaatttcagggtgcagcctaccgagtccatcgtgcgctttcccaatatcacaaacctgtgcccttttggcgaggtgttcaacgccaccagattcgccagcgtgtacgcctggaatcggaagagaatctccaactgcgtggccgactattctgtgctgtacaactccgcctctttcagcacctttaagtgctatggcgtgtctcccacaaagctgaatgatctgtgctttaccaacgtgtacgccgatagcttcgtgatcaggggagacgaagtgagacagatcgcaccaggacagacaggaaagatcgcagactacaattataagctgcctgacgatttcaccggctgcgtgatcgcctggaactccaacaatctggattctaaagtgggcggcaactacaattatctgtacaggctgtttcgcaagtccaatctgaagccattcgagcgggacatctccacagagatctaccaggccggctctaccccctgcaatggcgtggagggctttaactgttatttccctctgcagtcttacggcttccagccaacaaacggcgtgggctatcagccctacagagtggtggtgctgtcctttgagctgctgcacgcaccagcaacagtgtgcggcccaaagaagtctaccaatctggtgaagaacaagtgcgtgaacttcaacttcaacggactgaccggcacaggcgtgctgaccgagagcaataagaagttcctgccttttcagcagttcggcagggacatcgcagataccacagacgccgtgcgcgaccctcagaccctggagatcctggacatcacaccatgcagcttcggcggcgtgtccgtgatcacaccaggcaccaatacatccaaccaggtggccgtgctgtatcaggacgtgaattgtaccgaggtgcccgtggcaatccacgcagatcagctgacccctacatggcgggtgtactctaccggcagcaacgtgttccagacaagagccggatgcctgatcggagcagagcacgtgaacaatagctatgagtgcgacatccctatcggcgccggcatctgtgccagctaccagacccagacaaactccccatctggagcaggctccgtggccagccagtccatcatcgcctataccatgagcctgggcgccgagaacagcgtggcctactccaacaattctatcgccatccctaccaacttcacaatcagcgtgaccacagagatcctgccagtgtctatgaccaagacaagcgtggactgcacaatgtatatctgtggcgatagcaccgagtgctccaacctgctgctgcagtacggctccttttgtacccagctgaatagagccctgacaggcatcgccgtggagcaggataagaacacacaggaggtgttcgcccaggtgaagcagatctacaagaccccacccatcaaggactttggcggcttcaacttcagccagatcctgcctgatccaagcaagccctccaagaggtcttttatcgaggacctgctgttcaacaaggtgaccctggccgatgccggcttcatcaagcagtatggagattgcctgggagacatcgcagcccgcgacctgatctgtgcccagaagtttaatggcctgaccgtgctgcctccactgctgacagatgagatgatcgcccagtacacatctgccctgctggccggcaccatcacaagcggatggaccttcggcgcaggagccgccctgcagatcccttttgccatgcagatggcctataggttcaacggcatcggcgtgacccagaatgtgctgtacgagaaccagaagctgatcgccaatcagtttaacagcgccatcggcaagatccaggactctctgtcctctacagccagcgccctgggcaagctgcaggatgtggtgaatcagaacgcccaggccctgaataccctggtgaagcagctgagctccaacttcggcgccatctctagcgtgctgaatgacatcctgagccggctggacccccctgaggcagaggtgcagatcgacaggctgatcacaggccgcctgcagagcctgcagacctacgtgacacagcagctgatcagggcagcagagatcagagcctccgccaatctggccgccaccaagatgagcgagtgcgtgctgggacagtccaagagggtggacttttgtggcaagggctatcacctgatgtctttcccacagagcgcccctcacggcgtggtgtttctgcacgtgacctacgtgccagcccaggagaagaacttcaccacagcaccagccatctgccacgatggaaaggcacactttcctagggagggcgtgttcgtgtctaacggcacccactggtttgtgacacagcgcaatttctacgagccacagatcatcaccacagacaatacattcgtgagcggcaactgtgatgtggtgatcggcatcgtgaacaataccgtgtatgatccactgcagccccgactggactcctttaaggaggagctggataagtacttcaagaatcacacctctcccgacgtggatctgggcgacatctccggcatcaatgcctctgtggtgaacatccagaaggagatcgaccggctgaacgaggtggccaagaatctgaacgagagcctgatcgatctgcaggagctgggcaagtatgagcagtacatcaagggctctggcagagagaacctgtatttccagggaggaggaggcagcggatacatccctgaggcaccaagggacggacaggcctacgtgcgcaaggatggcgagtgggtgctgctgtccacctttctgggccatcatcaccaccaccaccaccactga

SEQ ID NO: 5153 - DNA, 3846 bp, Artificial Sequence
  Description of Artificial Sequence: Synthetic polynucleotide
atgggcatcctgccaagcccaggaatgcccgccctgctgtctctggtgagcctgctgtccgtgctgctgatgggatgcgtggcagagacaggcacacagtgcgtgaacctgaccacaaggacccagctgccccctgcctataccaattctttcacacggggcgtgtactatcccgacaaggtgtttagaagctccgtgctgcactccacacaggatctgtttctgcctttcttttctaacgtgacctggttccacgccatccacgtgtccggcaccaatggcacaaagcggttcgacaatcccgtgctgccttttaacgatggcgtgtacttcgccagcaccgagaagtccaacatcatcagaggctggatctttggcaccacactggactctaagacacagagcctgctgatcgtgaacaatgccaccaacgtggtgatcaaggtgtgcgagttccagttttgtaatgatccattcctgggcgtgtactatcacaagaacaataagtcctggatggagtctgagtttcgcgtgtattctagcgccaacaattgcacatttgagtacgtgagccagcccttcctgatggacctggagggcaagcagggcaatttcaagaacctgagggagttcgtgtttaagaatatcgatggctacttcaagatctacagcaagcacaccccaatcaacctggtgcgcgacctgccacagggattctccgccctggagccactggtggatctgcccatcggcatcaacatcacccggtttcagacactgctggccctgcacagatcctacctgacaccaggcgactcctctagcggatggaccgcaggagctgccgcctactatgtgggctatctgcagccccggaccttcctgctgaagtacaacgagaatggcaccatcacagacgcagtggattgcgccctggaccccctgtctgagacaaagtgtacactgaagagctttaccgtggagaagggcatctatcagacaagcaatttcagggtgcagcctaccgagtccatcgtgcgctttcccaatatcacaaacctgtgcccttttggcgaggtgttcaacgccaccagattcgccagcgtgtacgcctggaatcggaagagaatctccaactgcgtggccgactattctgtgctgtacaactccgcctctttcagcacctttaagtgctatggcgtgtctcccacaaagctgaatgatctgtgctttaccaacgtgtacgccgatagcttcgtgatcaggggagacgaagtgagacaggtcgcaccaggacagacaggaaagatcgcagactacaattataagctgcctgacgatttcaccggctgcgtgatcgcctggaactccaacaatctggattctaaagtgggcggcaactacaattatctgtacaggctgtttcgcaagtccaatctgaagccattcgagcgggacatctccacagagatctaccaggccggctctaccccctgcaatggcgtggagggctttaactgttatttccctctgcagtcttacggcttccagccaacaaacggcgtgggctatcagccctacagagtggtggtgctgtcctttgagctgctgcacgcaccagcaacagtgtgcggcccaaagaagtctaccaatctggtgaagaacaagtgcgtgaacttcaacttcaacggactgaccggcacaggcgtgctgaccgagagcaataagaagttcctgccttttcagcagttcggcagggacatcgcagataccacagacgccgtgcgcgaccctcagaccctggagatcctggacatcacaccatgcagcttcggcggcgtgtccgtgatcacaccaggcaccaatacatccaaccaggtggccgtgctgtatcaggacgtgaattgtaccgaggtgcccgtggcaatccacgcagatcagctgacccctacatggcgggtgtactctaccggcagcaacgtgttccagacaagagccggatgcctgatcggagcagagcacgtgaacaatagctatgagtgcgacatccctatcggcgccggcatctgtgccagctaccagacccagacaaactccccatctggagcaggctccgtggccagccagtccatcatcgcctataccatgagcctgggcgccgagaacagcgtggcctactccaacaattctatcgccatccctaccaacttcacaatcagcgtgaccacagagatcctgccagtgtctatgaccaagacaagcgtggactgcacaatgtatatctgtggcgatagcaccgagtgctccaacctgctgctgcagtacggctccttttgtacccagctgaatagagccctgacaggcatcgccgtggagcaggataagaacacacaggaggtgttcgcccaggtgaagcagatctacaagaccccacccatcaaggactttggcggcttcaacttcagccagatcctgcctgatccaagcaagccctccaagaggtcttttatcgaggacctgctgttcaacaaggtgaccctggccgatgccggcttcatcaagcagtatggagattgcctgggagacatcgcagcccgcgacctgatctgtgcccagaagtttaatggcctgaccgtgctgcctccactgctgacagatgagatgatcgcccagtacacatctgccctgctggccggcaccatcacaagcggatggaccttcggcgcaggagccgccctgcagatcccttttgccatgcagatggcctataggttcaacggcatcggcgtgacccagaatgtgctgtacgagaaccagaagctgatcgccaatcagtttaacagcgccatcggcaagatccaggactctctgtcctctacagccagcgccctgggcaagctgcaggatgtggtgaatcagaacgcccaggccctgaataccctggtgaagcagctgagctccaacttcggcgccatctctagcgtgctgaatgacatcctgagccggctggacccccctgaggcagaggtgcagatcgacaggctgatcacaggccgcctgcagagcctgcagacctacgtgacacagcagctgatcagggcagcagagatcagagcctccgccaatctggccgccaccaagatgagcgagtgcgtgctgggacagtccaagagggtggacttttgtggcaagggctatcacctgatgtctttcccacagagcgcccctcacggcgtggtgtttctgcacgtgacctacgtgccagcccaggagaagaacttcaccacagcaccagccatctgccacgatggaaaggcacactttcctagggagggcgtgttcgtgtctaacggcacccactggtttgtgacacagcgcaatttctacgagccacagatcatcaccacagacaatacattcgtgagcggcaactgtgatgtggtgatcggcatcgtgaacaataccgtgtatgatccactgcagcccgagctggactcctttaaggaggagctggataagtacttcaagaatcacacctctcccgacgtggatctgggcgacatctccggcatcaatgcctctgtggtgaacatccagaaggagatcgaccggctgaacgaggtggccaagaatctgaacgagagcctgatcgatctgcaggagctgggcaagtatgagcagtacatcaagggctctggcagagagaacctgtatttccagggaggaggaggcagcggatacatccctgaggcaccaagggacggacaggcctacgtgcgcaaggatggcgagtgggtgctgctgtccacctttctgggccatcatcaccaccaccaccaccactga

SEQ ID NO: 5154 - DNA, 3846 bp, Artificial Sequence
  Description of Artificial Sequence: Synthetic polynucleotide
atgggcatcctgccaagcccaggaatgcccgccctgctgtctctggtgagcctgctgtccgtgctgctgatgggatgcgtggcagagacaggcacacagtgcgtgaacctgaccacaaggacccagctgccccctgcctataccaattctttcacacggggcgtgtactatcccgacaaggtgtttagaagctccgtgctgcactccacacaggatctgtttctgcctttcttttctaacgtgacctggttccacgccatccacgtgtccggcaccaatggcacaaagcggttcgacaatcccgtgctgccttttaacgatggcgtgtacttcgccagcaccgagaagtccaacatcatcagaggctggatctttggcaccacactggactctaagacacagagcctgctgatcgtgaacaatgccaccaacgtggtgatcaaggtgtgcgagttccagttttgtaatgatccattcctgggcgtgtactatcacaagaacaataagtcctggatggagtctgagtttcgcgtgtattctagcgccaacaattgcacatttgagtacgtgagccagcccttcctgatggacctggagggcaagcagggcaatttcaagaacctgagggagttcgtgtttaagaatatcgatggctacttcaagatctacagcaagcacaccccaatcaacctggtgcgcgacctgccacagggattctccgccctggagccactggtggatctgcccatcggcatcaacatcacccggtttcagacactgctggccctgcacagatcctacctgacaccaggcgactcctctagcggatggaccgcaggagctgccgcctactatgtgggctatctgcagccccggaccttcctgctgaagtacaacgagaatggcaccatcacagacgcagtggattgcgccctggaccccctgtctgagacaaagtgtacactgaagagctttaccgtggagaagggcatctatcagacaagcaatttcagggtgcagcctaccgagtccatcgtgcgctttcccaatatcacaaacctgtgcccttttggcgaggtgttcaacgccaccagattcgccagcgtgtacgcctggaatcggaagagaatctccaactgcgtggccgactattctgtgctgtacaactccgcctctttcagcacctttaagtgctatggcgtgtctcccacaaagctgaatgatctgtgctttaccaacgtgtacgccgatagcttcgtgatcaggggagacgaagtgagacagatcgcaccaggacagacaggaaagatcgcagactacaattataagctgcctgacgatttcaccggctgcgtgatcgcctggaactccaacaatctggattctaaagtgggcggcaactacaattatctgtacaggctgtttcgcaagtccaatctgaagccattcgagcgggacatctccacagagatctaccaggccggctctaccccctgcaatggcgtggagggctttaactgttatttccctctgcagtcttacggcttccagccaacaaacggcgtgggctatcagccctacagagtggtggtgctgtcctttgagctgctgcacgcaccagcaacagtgtgcggcccaaagaagtctaccaatctggtgaagaacaagtgcgtgaacttcaacttcaacggactgaccggcacaggcgtgctgaccgagagcaataagaagttcctgccttttcagcagttcggcagggacatcgcagataccacagacgccgtgcgcgaccctcagaccctggagatcctggacatcacaccatgcagcttcggcggcgtgtccgtgatcacaccaggcaccaatacatccaaccaggtggccgtgctgtatcaggacgtgaattgtaccgaggtgcccgtggcaatccacgcagatcagctgacccctacatggcgggtgtactctaccggcagcaacgtgttccagacaagagccggatgcctgatcggagcagagcacgtgaacaatagctatgagtgcgacatccctatcggcgccggcatctgtgccagctaccagacccagacaaactccccatctggagcaggctccgtggccagccagtccatcatcgcctataccatgagcctgggcgccgagaacagcgtggcctactccaacaattctatcgccatccctaccaacttcacaatcagcgtgaccacagagatcctgccagtgtctatgaccaagacaagcgtggactgcacaatgtatatctgtggcgatagcaccgagtgctccaacctgctgctgcagtacggctccttttgtacccagctgaatagagccctgacaggcatcgccgtggagcaggataagaacacacaggaggtgttcgcccaggtgaagcagatctacaagaccccacccatcaaggactttggcggcttcaacttcagccagatcctgcctgatccaagcaagccctccaagaggtcttttatcgaggacctgctgttcaacaaggtgaccctggccgatgccggcttcatcaagcagtatggagattgcctgggagacatcgcagcccgcgacctgatctgtgcccagaagtttaatggcctgaccgtgctgcctccactgctgacagatgagatgatcgcccagtacacatctgccctgctggccggcaccatcacaagcggatggaccttcggcgcaggagccgccctgcagatcccttttgccatgcagatggcctataggttcaacggcatcggcgtgacccagaatgtgctgtacgagaaccagaagctgatcgccaatcagtttaacagcgccatcggcaagatccaggactctctgtcctctacagccagcgccctgggcaagctgcaggatgtggtgaatcagaacgcccaggccctgaataccctggtgaagcagctgagctccaacttcggcgccatctctagcgtgctgaatgacatcctgagccggctggacccccctgaggcagaggtgcagatcgacaggctgatcacaggccgcctgcagagcctgcagacctacgtgacacagcagctgatcagggcagcagagatcagagcctccgccaatctggccgccaccaagatgagcgagtgcgtgctgggacagtccaagagggtggacttttgtggcgaaggctatcacctgatgtctttcccacagagcgcccctcacggcgtggtgtttctgcacgtgacctacgtgccagcccaggagaagaacttcaccacagcaccagccatctgccacgatggaaaggcacactttcctagggagggcgtgttcgtgtctaacggcacccactggtttgtgacacagcgcaatttctacgagccacagatcatcaccacagacaatacattcgtgagcggcaactgtgatgtggtgatcggcatcgtgaacaataccgtgtatgatccactgcagcccgagctggactcctttaaggaggagctggataagtacttcaagaatcacacctctcccgacgtggatctgggcgacatctccggcatcaatgcctctgtggtgaacatccagaaggagatcgaccggctgaacgaggtggccaagaatctgaacgagagcctgatcgatctgcaggagctgggcaagtatgagcagtacatcaagggctctggcagagagaacctgtatttccagggaggaggaggcagcggatacatccctgaggcaccaagggacggacaggcctacgtgcgcaaggatggcgagtgggtgctgctgtccacctttctgggccatcatcaccaccaccaccaccactga

SEQ ID NO: 5155 - DNA, 3846 bp, Artificial Sequence
  Description of Artificial Sequence: Synthetic polynucleotide
atgggcatcctgccaagcccaggaatgcccgccctgctgtctctggtgagcctgctgtccgtgctgctgatgggatgcgtggcagagacaggcacacagtgcgtgaacctgaccacaaggacccagctgccccctgcctataccaattctttcacacggggcgtgtactatcccgacaaggtgtttagaagctccgtgctgcactccacacaggatctgtttctgcctttcttttctaacgtgacctggttccacgccatccacgtgtccggcaccaatggcacaaagcggttcgacaatcccgtgctgccttttaacgatggcgtgtacttcgccagcaccgagaagtccaacatcatcagaggctggatctttggcaccacactggactctaagacacagagcctgctgatcgtgaacaatgccaccaacgtggtgatcaaggtgtgcgagttccagttttgtaatgatccattcctgggcgtgtactatcacaagaacaataagtcctggatggagtctgagtttcgcgtgtattctagcgccaacaattgcacatttgagtacgtgagccagcccttcctgatggacctggagggcaagcagggcaatttcaagaacctgagggagttcgtgtttaagaatatcgatggctacttcaagatctacagcaagcacaccccaatcaacctggtgcgcgacctgccacagggattctccgccctggagccactggtggatctgcccatcggcatcaacatcacccggtttcagacactgctggccctgcacagatcctacctgacaccaggcgactcctctagcggatggaccgcaggagctgccgcctactatgtgggctatctgcagccccggaccttcctgctgaagtacaacgagaatggcaccatcacagacgcagtggattgcgccctggaccccctgtctgagacaaagtgtacactgaagagctttaccgtggagaagggcatctatcagacaagcaatttcagggtgcagcctaccgagtccatcgtgcgctttcccaatatcacaaacctgtgcccttttggcgaggtgttcaacgccaccagattcgccagcgtgtacgcctggaatcggaagagaatctccaactgcgtggccgactattctgtgctgtacaactccgcctctttcagcacctttaagtgctatggcgtgtctcccacaaagctgaatgatctgtgctttaccaacgtgtacgccgatagcttcgtgatcaggggagacgaagtgagacagatcgcaccaggacagacaggaaagatcgcagactacaattataagctgcctgacgatttcaccggctgcgtgatcgcctggaactccaacaatctggattctaaagtgggcggcaactacaattatctgtacaggctgtttcgcaagtccaatctgaagccattcgagcgggacatctccacagagatctaccaggccggctctaccccctgcaatggcgtggagggctttaactgttatttccctctgcagtcttacggcttccagccaacaaacggcgtgggctatcagccctacagagtggtggtgctgacgtttgagctgctgcacgcaccagcaacagtgtgcggcccaaagaagtctaccaatctggtgaagaacaagtgcgtgaacttcaacttcaacggactgaccggcacaggcgtgctgaccgagagcaataagaagttcctgccttttcagcagttcggcagggacatcgcagataccacagacgccgtgcgcgaccctcagaccctggagatcctggacatcacaccatgcagcttcggcggcgtgtccgtgatcacaccaggcaccaatacatccaaccaggtggccgtgctgtatcaggacgtgaattgtaccgaggtgcccgtggcaatccacgcagatcagctgacccctacatggcgggtgtactctaccggcagcaacgtgttccagacaagagccggatgcctgatcggagcagagcacgtgaacaatagctatgagtgcgacatccctatcggcgccggcatctgtgccagctaccagacccagacaaactccccatctggagcaggctccgtggccagccagtccatcatcgcctataccatgagcctgggcgccgagaacagcgtggcctactccaacaattctatcgccatccctaccaacttcacaatcagcgtgaccacagagatcctgccagtgtctatgaccaagacaagcgtggactgcacaatgtatatctgtggcgatagcaccgagtgctccaacctgctgctgcagtacggctccttttgtacccagctgaatagagccctgacaggcatcgccgtggagcaggataagaacacacaggaggtgttcgcccaggtgaagcagatctacaagaccccacccatcaaggactttggcggcttcaacttcagccagatcctgcctgatccaagcaagccctccaagaggtcttttatcgaggacctgctgttcaacaaggtgaccctggccgatgccggcttcatcaagcagtatggagattgcctgggagacatcgcagcccgcgacctgatctgtgcccagaagtttaatggcctgaccgtgctgcctccactgctgacagatgagatgatcgcccagtacacatctgccctgctggccggcaccatcacaagcggatggaccttcggcgcaggagccgccctgcagatcccttttgccatgcagatggcctataggttcaacggcatcggcgtgacccagaatgtgctgtacgagaaccagaagctgatcgccaatcagtttaacagcgccatcggcaagatccaggactctctgtcctctacagccagcgccctgggcaagctgcaggatgtggtgaatcagaacgcccaggccctgaataccctggtgaagcagctgagctccaacttcggcgccatctctagcgtgctgaatgacatcctgagccggctggacccccctgaggcagaggtgcagatcgacaggctgatcacaggccgcctgcagagcctgcagacctacgtgacacagcagctgatcagggcagcagagatcagagcctccgccaatctggccgccaccaagatgagcgagtgcgtgctgggacagtccaagagggtggacttttgtggcaagggctatcacctgatgtctttcccacagagcgcccctcacggcgtggtgtttctgcacgtgacctacgtgccagcccaggagaagaacttcaccacagcaccagccatctgccacgatggaaaggcacactttcctagggagggcgtgttcgtgtctaacggcacccactggtttgtgacacagcgcaatttctacgagccacagatcatcaccacagacaatacattcgtgagcggcaactgtgatgtggtgatcggcatcgtgaacaataccgtgtatgatccactgcagcccgagctggactcctttaaggaggagctggataagtacttcaagaatcacacctctcccgacgtggatctgggcgacatctccggcatcaatgcctctgtggtgaacatccagaaggagatcgaccggctgaacgaggtggccaagaatctgaacgagagcctgatcgatctgcaggagctgggcaagtatgagcagtacatcaagggctctggcagagagaacctgtatttccagggaggaggaggcagcggatacatccctgaggcaccaagggacggacaggcctacgtgcgcaaggatggcgagtgggtgctgctgtccacctttctgggccatcatcaccaccaccaccaccactga

SEQ ID NO: 5156 - DNA, 3846 bp, Artificial Sequence
  Description of Artificial Sequence: Synthetic polynucleotide
atgggcatcctgccaagcccaggaatgcccgccctgctgtctctggtgagcctgctgtccgtgctgctgatgggatgcgtggcagagacaggcacacagtgcgtgaacctgaccacaaggacccagctgccccctgcctataccaattctttcacacggggcgtgtactatcccgacaaggtgtttagaagctccgtgctgcactccacacaggatctgtttctgcctttcttttctaacgtgacctggttccacgccatccacgtgtccggcaccaatggcacaaagcggttcgacaatcccgtgctgccttttaacgatggcgtgtacttcgccagcaccgagaagtccaacatcatcagaggctggatctttggcaccacactggactctaagacacagagcctgctgatcgtgaacaatgccaccaacgtggtgatcaaggtgtgcgagttccagttttgtaatgatccattcctgggcgtgtactatcacaagaacaataagtcctggatggagtctgagtttcgcgtgtattctagcgccaacaattgcacatttgagtacgtgagccagcccttcctgatggacctggagggcaagcagggcaatttcaagaacctgagggagttcgtgtttaagaatatcgatggctacttcaagatctacagcaagcacaccccaatcaacctggtgcgcgacctgccacagggattctccgccctggagccactggtggatctgcccatcggcatcaacatcacccggtttcagacactgctggccctgcacagatcctacctgacaccaggcgactcctctagcggatggaccgcaggagctgccgcctactatgtgggctatctgcagccccggaccttcctgctgaagtacaacgagaatggcaccatcacagacgcagtggattgcgccctggaccccctgtctgagacaaagtgtacactgaagagctttaccgtggagaagggcatctatcagacaagcaatttcagggtgcagcctaccgagtccatcgtgcgctttcccaatatcacaaacctgtgcccttttggcgaggtgttcaacgccaccagattcgccagcgtgtacgcctggaatcggaagagaatctccaactgcgtggccgactattctgtgctgtacaactccgcctctttcagcacctttaagtgctatggcgtgtctcccacaaagctgaatgatctgtgctttaccaacgtgtacgccgatagcttcgtgatcaggggagacgaagtgagacagatcgcaccaggacagacaggaaagatcgcagactacaattataagctgcctgacgatttcaccggctgcgtgatcgcctggaactccaacaatctggatgcaaaagtgggcggcaactacaattatctgtacaggctgtttcgcaagtccaatctgaagccattcgagcgggacatctccacagagatctaccaggccggctctaccccctgcaatggcgtggagggctttaactgttatttccctctgcagtcttacggcttccagccaacaaacggcgtgggctatcagccctacagagtggtggtgctgtcctttgagctgctgcacgcaccagcaacagtgtgcggcccaaagaagtctaccaatctggtgaagaacaagtgcgtgaacttcaacttcaacggactgaccggcacaggcgtgctgaccgagagcaataagaagttcctgccttttcagcagttcggcagggacatcgcagataccacagacgccgtgcgcgaccctcagaccctggagatcctggacatcacaccatgcagcttcggcggcgtgtccgtgatcacaccaggcaccaatacatccaaccaggtggccgtgctgtatcaggacgtgaattgtaccgaggtgcccgtggcaatccacgcagatcagctgacccctacatggcgggtgtactctaccggcagcaacgtgttccagacaagagccggatgcctgatcggagcagagcacgtgaacaatagctatgagtgcgacatccctatcggcgccggcatctgtgccagctaccagacccagacaaactccccatctggagcaggctccgtggccagccagtccatcatcgcctataccatgagcctgggcgccgagaacagcgtggcctactccaacaattctatcgccatccctaccaacttcacaatcagcgtgaccacagagatcctgccagtgtctatgaccaagacaagcgtggactgcacaatgtatatctgtggcgatagcaccgagtgctccaacctgctgctgcagtacggctccttttgtacccagctgaatagagccctgacaggcatcgccgtggagcaggataagaacacacaggaggtgttcgcccaggtgaagcagatctacaagaccccacccatcaaggactttggcggcttcaacttcagccagatcctgcctgatccaagcaagccctccaagaggtcttttatcgaggacctgctgttcaacaaggtgaccctggccgatgccggcttcatcaagcagtatggagattgcctgggagacatcgcagcccgcgacctgatctgtgcccagaagtttaatggcctgaccgtgctgcctccactgctgacagatgagatgatcgcccagtacacatctgccctgctggccggcaccatcacaagcggatggaccttcggcgcaggagccgccctgcagatcccttttgccatgcagatggcctataggttcaacggcatcggcgtgacccagaatgtgctgtacgagaaccagaagctgatcgccaatcagtttaacagcgccatcggcaagatccaggactctctgtcctctacagccagcgccctgggcaagctgcaggatgtggtgaatcagaacgcccaggccctgaataccctggtgaagcagctgagctccaacttcggcgccatctctagcgtgctgaatgacatcctgagccggctggacccccctgaggcagaggtgcagatcgacaggctgatcacaggccgcctgcagagcctgcagacctacgtgacacagcagctgatcagggcagcagagatcagagcctccgccaatctggccgccaccaagatgagcgagtgcgtgctgggacagtccaagagggtggacttttgtggcaagggctatcacctgatgtctttcccacagagcgcccctcacggcgtggtgtttctgcacgtgacctacgtgccagcccaggagaagaacttcaccacagcaccagccatctgccacgatggaaaggcacactttcctagggagggcgtgttcgtgtctaacggcacccactggtttgtgacacagcgcaatttctacgagccacagatcatcaccacagacaatacattcgtgagcggcaactgtgatgtggtgatcggcatcgtgaacaataccgtgtatgatccactgcagcccgagctggactcctttaaggaggagctggataagtacttcaagaatcacacctctcccgacgtggatctgggcgacatctccggcatcaatgcctctgtggtgaacatccagaaggagatcgaccggctgaacgaggtggccaagaatctgaacgagagcctgatcgatctgcaggagctgggcaagtatgagcagtacatcaagggctctggcagagagaacctgtatttccagggaggaggaggcagcggatacatccctgaggcaccaagggacggacaggcctacgtgcgcaaggatggcgagtgggtgctgctgtccacctttctgggccatcatcaccaccaccaccaccactga

SEQ ID NO: 5157 - DNA, 3846 bp, Artificial Sequence
  Description of Artificial Sequence: Synthetic polynucleotide
atgggcatcctgccaagcccaggaatgcccgccctgctgtctctggtgagcctgctgtccgtgctgctgatgggatgcgtggcagagacaggcacacagtgcgtgaacctgaccacaaggacccagctgccccctgcctataccaattctttcacacggggcgtgtactatcccgacaaggtgtttagaagctccgtgctgcactccacacaggatctgtttctgcctttcttttctaacgtgacctggttccacgccatccacgtgtccggcaccaatggcacaaagcggttcgacaatcccgtgctgccttttaacgatggcgtgtacttcgccagcaccgagaagtccaacatcatcagaggctggatctttggcaccacactggactctaagacacagagcctgctgatcgtgaacaatgccaccaacgtggtgatcaaggtgtgcgagttccagttttgtaatgatccattcctgggcgtgtactatcacaagaacaataagtcctggatggagtctgagtttcgcgtgtattctagcgccaacaattgcacatttgagtacgtgagccagcccttcctgatggacctggagggcaagcagggcaatttcaagaacctgagggagttcgtgtttaagaatatcgatggctacttcaagatctacagcaagcacaccccaatcaacctggtgcgcgacctgccacagggattctccgccctggagccactggtggatctgcccatcggcatcaacatcacccggtttcagacactgctggccctgcacagatcctacctgacaccaggcgactcctctagcggatggaccgcaggagctgccgcctactatgtgggctatctgcagccccggaccttcctgctgaagtacaacgagaatggcaccatcacagacgcagtggattgcgccctggaccccctgtctgagacaaagtgtacactgaagagctttaccgtggagaagggcatctatcagacaagcaatttcagggtgcagcctaccgagtccatcgtgcgctttcccaatatcacaaacctgtgcccttttggcgaggtgttcaacgccaccagattcgccagcgtgtacgcctggaatcggaagagaatctccaactgcgtggccgactattctgtgctgtacaactccgcctctttcagcacctttaagtgctatggcgtgtctcccacaaagctgaatgatctgtgctttaccaacgtgtacgccgatagcttcgtgatcaggggagacgaagtgagacagatcgcaccaggacagacaggaaagatcgcagactacaattataagctgcctgacgatttcaccggctgcgtgatcgcctggaactccaacaatctggattctaaagtgggcggcaactacaattatctgtacaggctgtttcgcaagtccaatctgaagccattcgagcgggacatctccacagagatctaccaggccggctctaccccctgcaatggcgtggagggctttaactgttatttccctctgcagtcttacggcttccagccaacaaacggcgtgggctatcagccctacagagtggtggtgctgtcctttgagctgctgcaagcaccagcaacagtgtgcggcccaaagaagtctaccaatctggtgaagaacaagtgcgtgaacttcaacttcaacggactgaccggcacaggcgtgctgaccgagagcaataagaagttcctgccttttcagcagttcggcagggacatcgcagataccacagacgccgtgcgcgaccctcagaccctggagatcctggacatcacaccatgcagcttcggcggcgtgtccgtgatcacaccaggcaccaatacatccaaccaggtggccgtgctgtatcaggacgtgaattgtaccgaggtgcccgtggcaatccacgcagatcagctgacccctacatggcgggtgtactctaccggcagcaacgtgttccagacaagagccggatgcctgatcggagcagagcacgtgaacaatagctatgagtgcgacatccctatcggcgccggcatctgtgccagctaccagacccagacaaactccccatctggagcaggctccgtggccagccagtccatcatcgcctataccatgagcctgggcgccgagaacagcgtggcctactccaacaattctatcgccatccctaccaacttcacaatcagcgtgaccacagagatcctgccagtgtctatgaccaagacaagcgtggactgcacaatgtatatctgtggcgatagcaccgagtgctccaacctgctgctgcagtacggctccttttgtacccagctgaatagagccctgacaggcatcgccgtggagcaggataagaacacacaggaggtgttcgcccaggtgaagcagatctacaagaccccacccatcaaggactttggcggcttcaacttcagccagatcctgcctgatccaagcaagccctccaagaggtcttttatcgaggacctgctgttcaacaaggtgaccctggccgatgccggcttcatcaagcagtatggagattgcctgggagacatcgcagcccgcgacctgatctgtgcccagaagtttaatggcctgaccgtgctgcctccactgctgacagatgagatgatcgcccagtacacatctgccctgctggccggcaccatcacaagcggatggaccttcggcgcaggagccgccctgcagatcccttttgccatgcagatggcctataggttcaacggcatcggcgtgacccagaatgtgctgtacgagaaccagaagctgatcgccaatcagtttaacagcgccatcggcaagatccaggactctctgtcctctacagccagcgccctgggcaagctgcaggatgtggtgaatcagaacgcccaggccctgaataccctggtgaagcagctgagctccaacttcggcgccatctctagcgtgctgaatgacatcctgagccggctggacccccctgaggcagaggtgcagatcgacaggctgatcacaggccgcctgcagagcctgcagacctacgtgacacagcagctgatcagggcagcagagatcagagcctccgccaatctggccgccaccaagatgagcgagtgcgtgctgggacagtccaagagggtggacttttgtggcaagggctatcacctgatgtctttcccacagagcgcccctcacggcgtggtgtttctgcacgtgacctacgtgccagcccaggagaagaacttcaccacagcaccagccatctgccacgatggaaaggcacactttcctagggagggcgtgttcgtgtctaacggcacccactggtttgtgacacagcgcaatttctacgagccacagatcatcaccacagacaatacattcgtgagcggcaactgtgatgtggtgatcggcatcgtgaacaataccgtgtatgatccactgcagcccgagctggactcctttaaggaggagctggataagtacttcaagaatcacacctctcccgacgtggatctgggcgacatctccggcatcaatgcctctgtggtgaacatccagaaggagatcgaccggctgaacgaggtggccaagaatctgaacgagagcctgatcgatctgcaggagctgggcaagtatgagcagtacatcaagggctctggcagagagaacctgtatttccagggaggaggaggcagcggatacatccctgaggcaccaagggacggacaggcctacgtgcgcaaggatggcgagtgggtgctgctgtccacctttctgggccatcatcaccaccaccaccaccactga

SEQ ID NO: 5158 - DNA, 3846 bp, Artificial Sequence
  Description of Artificial Sequence: Synthetic polynucleotide
atgggcatcctgccaagcccaggaatgcccgccctgctgtctctggtgagcctgctgtccgtgctgctgatgggatgcgtggcagagacaggcacacagtgcgtgaacctgaccacaaggacccagctgccccctgcctataccaattctttcacacggggcgtgtactatcccgacaaggtgtttagaagctccgtgctgcactccacacaggatctgtttctgcctttcttttctaacgtgacctggttccacgccatccacgtgtccggcaccaatggcacaaagcggttcgacaatcccgtgctgccttttaacgatggcgtgtacttcgccagcaccgagaagtccaacatcatcagaggctggatctttggcaccacactggactctaagacacagagcctgctgatcgtgaacaatgccaccaacgtggtgatcaaggtgtgcgagttccagttttgtaatgatccattcctgggcgtgtactatcacaagaacaataagtcctggatggagtctgagtttcgcgtgtattctagcgccaacaattgcacatttgagtacgtgagccagcccttcctgatggacctggagggcaagcagggcaatttcaagaacctgagggagttcgtgtttaagaatatcgatggctacttcaagatctacagcaagcacaccccaatcaacctggtgcgcgacctgccacagggattctccgccctggagccactggtggatctgcccatcggcatcaacatcacccggtttcagacactgctggccctgcacagatcctacctgacaccaggcgactcctctagcggatggaccgcaggagctgccgcctactatgtgggctatctgcagccccggaccttcctgctgaagtacaacgagaatggcaccatcacagacgcagtggattgcgccctggaccccctgtctgagacaaagtgtacactgaagagctttaccgtggagaagggcatctatcagacaagcaatttcagggtgcagcctaccgagtccatcgtgcgctttcccaatatcacaaacctgtgcccttttggcgaggtgttcaacgccaccagattcgccagcgtgtacgcctggaatcggaagagaatctccaactgcgtggccgactattctgtgctgtacaactccgcctctttcagcacctttaagtgctatggcgtgtctcccacaaagctgaatgatctgtgctttaccaacgtgtacgccgatagcttcgtgatcaggggagacgaagtgagacagatcgcaccaggacagacaggaaagatcgcagactacaattataagctgcctgacgatttcaccggctgcgtgatcgcctggaactccaacaatctggattctaaagtgggcggcaactacaattatctgtacaggctgtttcgcaagtccaatctgaagccattcgagcaagacatctccacagagatctaccaggccggctctaccccctgcaatggcgtggagggctttaactgttatttccctctgcagtcttacggcttccagccaacaaacggcgtgggctatcagccctacagagtggtggtgctgtcctttgagctgctgcacgcaccagcaacagtgtgcggcccaaagaagtctaccaatctggtgaagaacaagtgcgtgaacttcaacttcaacggactgaccggcacaggcgtgctgaccgagagcaataagaagttcctgccttttcagcagttcggcagggacatcgcagataccacagacgccgtgcgcgaccctcagaccctggagatcctggacatcacaccatgcagcttcggcggcgtgtccgtgatcacaccaggcaccaatacatccaaccaggtggccgtgctgtatcaggacgtgaattgtaccgaggtgcccgtggcaatccacgcagatcagctgacccctacatggcgggtgtactctaccggcagcaacgtgttccagacaagagccggatgcctgatcggagcagagcacgtgaacaatagctatgagtgcgacatccctatcggcgccggcatctgtgccagctaccagacccagacaaactccccatctggagcaggctccgtggccagccagtccatcatcgcctataccatgagcctgggcgccgagaacagcgtggcctactccaacaattctatcgccatccctaccaacttcacaatcagcgtgaccacagagatcctgccagtgtctatgaccaagacaagcgtggactgcacaatgtatatctgtggcgatagcaccgagtgctccaacctgctgctgcagtacggctccttttgtacccagctgaatagagccctgacaggcatcgccgtggagcaggataagaacacacaggaggtgttcgcccaggtgaagcagatctacaagaccccacccatcaaggactttggcggcttcaacttcagccagatcctgcctgatccaagcaagccctccaagaggtcttttatcgaggacctgctgttcaacaaggtgaccctggccgatgccggcttcatcaagcagtatggagattgcctgggagacatcgcagcccgcgacctgatctgtgcccagaagtttaatggcctgaccgtgctgcctccactgctgacagatgagatgatcgcccagtacacatctgccctgctggccggcaccatcacaagcggatggaccttcggcgcaggagccgccctgcagatcccttttgccatgcagatggcctataggttcaacggcatcggcgtgacccagaatgtgctgtacgagaaccagaagctgatcgccaatcagtttaacagcgccatcggcaagatccaggactctctgtcctctacagccagcgccctgggcaagctgcaggatgtggtgaatcagaacgcccaggccctgaataccctggtgaagcagctgagctccaacttcggcgccatctctagcgtgctgaatgacatcctgagccggctggacccccctgaggcagaggtgcagatcgacaggctgatcacaggccgcctgcagagcctgcagacctacgtgacacagcagctgatcagggcagcagagatcagagcctccgccaatctggccgccaccaagatgagcgagtgcgtgctgggacagtccaagagggtggacttttgtggcaagggctatcacctgatgtctttcccacagagcgcccctcacggcgtggtgtttctgcacgtgacctacgtgccagcccaggagaagaacttcaccacagcaccagccatctgccacgatggaaaggcacactttcctagggagggcgtgttcgtgtctaacggcacccactggtttgtgacacagcgcaatttctacgagccacagatcatcaccacagacaatacattcgtgagcggcaactgtgatgtggtgatcggcatcgtgaacaataccgtgtatgatccactgcagcccgagctggactcctttaaggaggagctggataagtacttcaagaatcacacctctcccgacgtggatctgggcgacatctccggcatcaatgcctctgtggtgaacatccagaaggagatcgaccggctgaacgaggtggccaagaatctgaacgagagcctgatcgatctgcaggagctgggcaagtatgagcagtacatcaagggctctggcagagagaacctgtatttccagggaggaggaggcagcggatacatccctgaggcaccaagggacggacaggcctacgtgcgcaaggatggcgagtgggtgctgctgtccacctttctgggccatcatcaccaccaccaccaccactga

SEQ ID NO: 5159 - DNA, 3846 bp, Artificial Sequence
  Description of Artificial Sequence: Synthetic polynucleotide
atgggcatcctgccaagcccaggaatgcccgccctgctgtctctggtgagcctgctgtccgtgctgctgatgggatgcgtggcagagacaggcacacagtgcgtgaacctgaccacaaggacccagctgccccctgcctataccaattctttcacacggggcgtgtactatcccgacaaggtgtttagaagctccgtgctgcactccacacaggatctgtttctgcctttcttttctaacgtgacctggttccacgccatccacgtgtccggcaccaatggcacaaagcggttcgacaatcccgtgctgccttttaacgatggcgtgtacttcgccagcaccgagaagtccaacatcatcagaggctggatctttggcaccacactggactctaagacacagagcctgctgatcgtgaacaatgccaccaacgtggtgatcaaggtgtgcgagttccagttttgtaatgatccattcctgggcgtgtactatcacaagaacaataagtcctggatggagtctgagtttcgcgtgtattctagcgccaacaattgcacatttgagtacgtgagccagcccttcctgatggacctggagggcaagcagggcaatttcaagaacctgagggagttcgtgtttaagaatatcgatggctacttcaagatctacagcaagcacaccccaatcaacctggtgcgcgacctgccacagggattctccgccctggagccactggtggatctgcccatcggcatcaacatcacccggtttcagacactgctggccctgcacagatcctacctgacaccaggcgactcctctagcggatggaccgcaggagctgccgcctactatgtgggctatctgcagccccggaccttcctgctgaagtacaacgagaatggcaccatcacagacgcagtggattgcgccctggaccccctgtctgagacaaagtgtacactgaagagctttaccgtggagaagggcatctatcagacaagcaatttcagggtgcagcctaccgagtccatcgtgcgctttcccaatatcacaaacctgtgcccttttggcgaggtgttcaacgccaccagattcgccagcgtgtacgcctggaatcggaagagaatctccaactgcgtggccgactattctgtgctgtacaactccgcctctttcagcacctttaagtgctatggcgtgtctcccacaaagctgaatgatctgtgctttaccaacgtgtacgccgatagcttcgtgatcaggggagacgaagtgagacagatcgcaccaggacagacaggaaagatcgcagactacaattataagctgcctgacgatttcaccggctgcgtgatcgcctggaactccaacaatctggattctaaagtgggcggcaactacaattatctgtacaggctgtttcgcaagtccaatctgaagccattcgagcgggacatctccacagagatctaccaggccggctctacccccgggaatggcgtggagggctttaactgttatttccctctgcagtcttacggcttccagccaacaaacggcgtgggctatcagccctacagagtggtggtgctgtcctttgagctgctgcacgcaccagcaacagtgtgcggcccaaagaagtctaccaatctggtgaagaacaagtgcgtgaacttcaacttcaacggactgaccggcacaggcgtgctgaccgagagcaataagaagttcctgccttttcagcagttcggcagggacatcgcagataccacagacgccgtgcgcgaccctcagaccctggagatcctggacatcacaccatgcagcttcggcggcgtgtccgtgatcacaccaggcaccaatacatccaaccaggtggccgtgctgtatcaggacgtgaattgtaccgaggtgcccgtggcaatccacgcagatcagctgacccctacatggcgggtgtactctaccggcagcaacgtgttccagacaagagccggatgcctgatcggagcagagcacgtgaacaatagctatgagtgcgacatccctatcggcgccggcatctgtgccagctaccagacccagacaaactccccatctggagcaggctccgtggccagccagtccatcatcgcctataccatgagcctgggcgccgagaacagcgtggcctactccaacaattctatcgccatccctaccaacttcacaatcagcgtgaccacagagatcctgccagtgtctatgaccaagacaagcgtggactgcacaatgtatatctgtggcgatagcaccgagtgctccaacctgctgctgcagtacggctccttttgtacccagctgaatagagccctgacaggcatcgccgtggagcaggataagaacacacaggaggtgttcgcccaggtgaagcagatctacaagaccccacccatcaaggactttggcggcttcaacttcagccagatcctgcctgatccaagcaagccctccaagaggtcttttatcgaggacctgctgttcaacaaggtgaccctggccgatgccggcttcatcaagcagtatggagattgcctgggagacatcgcagcccgcgacctgatctgtgcccagaagtttaatggcctgaccgtgctgcctccactgctgacagatgagatgatcgcccagtacacatctgccctgctggccggcaccatcacaagcggatggaccttcggcgcaggagccgccctgcagatcccttttgccatgcagatggcctataggttcaacggcatcggcgtgacccagaatgtgctgtacgagaaccagaagctgatcgccaatcagtttaacagcgccatcggcaagatccaggactctctgtcctctacagccagcgccctgggcaagctgcaggatgtggtgaatcagaacgcccaggccctgaataccctggtgaagcagctgagctccaacttcggcgccatctctagcgtgctgaatgacatcctgagccggctggacccccctgaggcagaggtgcagatcgacaggctgatcacaggccgcctgcagagcctgcagacctacgtgacacagcagctgatcagggcagcagagatcagagcctccgccaatctggccgccaccaagatgagcgagtgcgtgctgggacagtccaagagggtggacttttgtggcaagggctatcacctgatgtctttcccacagagcgcccctcacggcgtggtgtttctgcacgtgacctacgtgccagcccaggagaagaacttcaccacagcaccagccatctgccacgatggaaaggcacactttcctagggagggcgtgttcgtgtctaacggcacccactggtttgtgacacagcgcaatttctacgagccacagatcatcaccacagacaatacattcgtgagcggcaactgtgatgtggtgatcggcatcgtgaacaataccgtgtatgatccactgcagcccgagctggactcctttaaggaggagctggataagtacttcaagaatcacacctctcccgacgtggatctgggcgacatctccggcatcaatgcctctgtggtgaacatccagaaggagatcgaccggctgaacgaggtggccaagaatctgaacgagagcctgatcgatctgcaggagctgggcaagtatgagcagtacatcaagggctctggcagagagaacctgtatttccagggaggaggaggcagcggatacatccctgaggcaccaagggacggacaggcctacgtgcgcaaggatggcgagtgggtgctgctgtccacctttctgggccatcatcaccaccaccaccaccactga

SEQ ID NO: 5160 - DNA, 3846 bp, Artificial Sequence
  Description of Artificial Sequence: Synthetic polynucleotide
atgggcatcctgccaagcccaggaatgcccgccctgctgtctctggtgagcctgctgtccgtgctgctgatgggatgcgtggcagagacaggcacacagtgcgtgaacctgaccacaaggacccagctgccccctgcctataccaattctttcacacggggcgtgtactatcccgacaaggtgtttagaagctccgtgctgcactccacacaggatctgtttctgcctttcttttctaacgtgacctggttccacgccatccacgtgtccggcaccaatggcacaaagcggttcgacaatcccgtgctgccttttaacgatggcgtgtacttcgccagcaccgagaagtccaacatcatcagaggctggatctttggcaccacactggactctaagacacagagcctgctgatcgtgaacaatgccaccaacgtggtgatcaaggtgtgcgagttccagttttgtaatgatccattcctgggcgtgtactatcacaagaacaataagtcctggatggagtctgagtttcgcgtgtattctagcgccaacaattgcacatttgagtacgtgagccagcccttcctgatggacctggagggcaagcagggcaatttcaagaacctgagggagttcgtgtttaagaatatcgatggctacttcaagatctacagcaagcacaccccaatcaacctggtgcgcgacctgccacagggattctccgccctggagccactggtggatctgcccatcggcatcaacatcacccggtttcagacactgctggccctgcacagatcctacctgacaccaggcgactcctctagcggatggaccgcaggagctgccgcctactatgtgggctatctgcagccccggaccttcctgctgaagtacaacgagaatggcaccatcacagacgcagtggattgcgccctggaccccctgtctgagacaaagtgtacactgaagagctttaccgtggagaagggcatctatcagacaagcaatttcagggtgcagcctaccgagtccatcgtgcgctttcccaatatcacaaacctgtgcccttttggcgaggtgttcaacgccaccagattcgccagcgtgtacgcctggaatcggaagagaatctccaactgcgtggccgactattctgtgctgtacaactccgcctctttcagcacctttaagtgctatggcgtgtctcccacaaagctgaatgatctgtgctttaccaacgtgtacgccgatagcttcgtgatcaggggagacgaagtgagacagatcgcaccaggacagacaggaaagatcgcagactacaattataagctgcctgacgatttcaccggctgcgtgatcgcctggaactccaacaatctggattctaaagtgggcggcaactacaattatctgtacaggctgtttcgcaagtccaatctgaagccattcgagcgggacatctccccggagatctaccaggccggctctaccccctgcaatggcgtggagggctttaactgttatttccctctgcagtcttacggcttccagccaacaaacggcgtgggctatcagccctacagagtggtggtgctgtcctttgagctgctgcacgcaccagcaacagtgtgcggcccaaagaagtctaccaatctggtgaagaacaagtgcgtgaacttcaacttcaacggactgaccggcacaggcgtgctgaccgagagcaataagaagttcctgccttttcagcagttcggcagggacatcgcagataccacagacgccgtgcgcgaccctcagaccctggagatcctggacatcacaccatgcagcttcggcggcgtgtccgtgatcacaccaggcaccaatacatccaaccaggtggccgtgctgtatcaggacgtgaattgtaccgaggtgcccgtggcaatccacgcagatcagctgacccctacatggcgggtgtactctaccggcagcaacgtgttccagacaagagccggatgcctgatcggagcagagcacgtgaacaatagctatgagtgcgacatccctatcggcgccggcatctgtgccagctaccagacccagacaaactccccatctggagcaggctccgtggccagccagtccatcatcgcctataccatgagcctgggcgccgagaacagcgtggcctactccaacaattctatcgccatccctaccaacttcacaatcagcgtgaccacagagatcctgccagtgtctatgaccaagacaagcgtggactgcacaatgtatatctgtggcgatagcaccgagtgctccaacctgctgctgcagtacggctccttttgtacccagctgaatagagccctgacaggcatcgccgtggagcaggataagaacacacaggaggtgttcgcccaggtgaagcagatctacaagaccccacccatcaaggactttggcggcttcaacttcagccagatcctgcctgatccaagcaagccctccaagaggtcttttatcgaggacctgctgttcaacaaggtgaccctggccgatgccggcttcatcaagcagtatggagattgcctgggagacatcgcagcccgcgacctgatctgtgcccagaagtttaatggcctgaccgtgctgcctccactgctgacagatgagatgatcgcccagtacacatctgccctgctggccggcaccatcacaagcggatggaccttcggcgcaggagccgccctgcagatcccttttgccatgcagatggcctataggttcaacggcatcggcgtgacccagaatgtgctgtacgagaaccagaagctgatcgccaatcagtttaacagcgccatcggcaagatccaggactctctgtcctctacagccagcgccctgggcaagctgcaggatgtggtgaatcagaacgcccaggccctgaataccctggtgaagcagctgagctccaacttcggcgccatctctagcgtgctgaatgacatcctgagccggctggacccccctgaggcagaggtgcagatcgacaggctgatcacaggccgcctgcagagcctgcagacctacgtgacacagcagctgatcagggcagcagagatcagagcctccgccaatctggccgccaccaagatgagcgagtgcgtgctgggacagtccaagagggtggacttttgtggcaagggctatcacctgatgtctttcccacagagcgcccctcacggcgtggtgtttctgcacgtgacctacgtgccagcccaggagaagaacttcaccacagcaccagccatctgccacgatggaaaggcacactttcctagggagggcgtgttcgtgtctaacggcacccactggtttgtgacacagcgcaatttctacgagccacagatcatcaccacagacaatacattcgtgagcggcaactgtgatgtggtgatcggcatcgtgaacaataccgtgtatgatccactgcagcccgagctggactcctttaaggaggagctggataagtacttcaagaatcacacctctcccgacgtggatctgggcgacatctccggcatcaatgcctctgtggtgaacatccagaaggagatcgaccggctgaacgaggtggccaagaatctgaacgagagcctgatcgatctgcaggagctgggcaagtatgagcagtacatcaagggctctggcagagagaacctgtatttccagggaggaggaggcagcggatacatccctgaggcaccaagggacggacaggcctacgtgcgcaaggatggcgagtgggtgctgctgtccacctttctgggccatcatcaccaccaccaccaccactga

SEQ ID NO: 5161 - DNA, 3846 bp, Artificial Sequence
  Description of Artificial Sequence: Synthetic polynucleotide
atgggcatcctgccaagcccaggaatgcccgccctgctgtctctggtgagcctgctgtccgtgctgctgatgggatgcgtggcagagacaggcacacagtgcgtgaacctgaccacaaggacccagctgccccctgcctataccaattctttcacacggggcgtgtactatcccgacaaggtgtttagaagctccgtgctgcactccacacaggatctgtttctgcctttcttttctaacgtgacctggttccacgccatccacgtgtccggcaccaatggcacaaagcggttcgacaatcccgtgctgccttttaacgatggcgtgtacttcgccagcaccgagaagtccaacatcatcagaggctggatctttggcaccacactggactctaagacacagagcctgctgatcgtgaacaatgccaccaacgtggtgatcaaggtgtgcgagttccagttttgtaatgatccattcctgggcgtgtactatcacaagaacaataagtcctggatggagtctgagtttcgcgtgtattctagcgccaacaattgcacatttgagtacgtgagccagcccttcctgatggacctggagggcaagcagggcaatttcaagaacctgagggagttcgtgtttaagaatatcgatggctacttcaagatctacagcaagcacaccccaatcaacctggtgcgcgacctgccacagggattctccgccctggagccactggtggatctgcccatcggcatcaacatcacccggtttcagacactgctggccctgcacagatcctacctgacaccaggcgactcctctagcggatggaccgcaggagctgccgcctactatgtgggctatctgcagccccggaccttcctgctgaagtacaacgagaatggcaccatcacagacgcagtggattgcgccctggaccccctgtctgagacaaagtgtacactgaagagctttaccgtggagaagggcatctatcagacaagcaatttcagggtgcagcctaccgagtccatcgtgcgctttcccaatatcacaaacctgtgcccttttggcgaggtgttcaacgccaccagattcgccagcgtgtacgcctggaatcggaagagaatctccaactgcgtggccgactattctgtgctgtacaactccgcctctttcagcacctttaagtgctatggcgtgtctcccacaaagctgaatgatctgtgctttaccaacgtgtacgccgatagcttcgtgatcaggggagacgaagtgagacagatcgcaccaggacagacaggaaagatcgcagactacaattataagctgcctgacgatttcaccggctgcgtgatcgcctggaactccaacaatctggattctaaagtgggcggcaactacaattatctgtacaggctgtttcgcaagtccaatctgaagccattcgaggatgacatctccacagagatctaccaggccggctctaccccctgcaatggcgtggagggctttaactgttatttccctctgcagtcttacggcttccagccaacaaacggcgtgggctatcagccctacagagtggtggtgctgtcctttgagctgctgcacgcaccagcaacagtgtgcggcccaaagaagtctaccaatctggtgaagaacaagtgcgtgaacttcaacttcaacggactgaccggcacaggcgtgctgaccgagagcaataagaagttcctgccttttcagcagttcggcagggacatcgcagataccacagacgccgtgcgcgaccctcagaccctggagatcctggacatcacaccatgcagcttcggcggcgtgtccgtgatcacaccaggcaccaatacatccaaccaggtggccgtgctgtatcaggacgtgaattgtaccgaggtgcccgtggcaatccacgcagatcagctgacccctacatggcgggtgtactctaccggcagcaacgtgttccagacaagagccggatgcctgatcggagcagagcacgtgaacaatagctatgagtgcgacatccctatcggcgccggcatctgtgccagctaccagacccagacaaactccccatctggagcaggctccgtggccagccagtccatcatcgcctataccatgagcctgggcgccgagaacagcgtggcctactccaacaattctatcgccatccctaccaacttcacaatcagcgtgaccacagagatcctgccagtgtctatgaccaagacaagcgtggactgcacaatgtatatctgtggcgatagcaccgagtgctccaacctgctgctgcagtacggctccttttgtacccagctgaatagagccctgacaggcatcgccgtggagcaggataagaacacacaggaggtgttcgcccaggtgaagcagatctacaagaccccacccatcaaggactttggcggcttcaacttcagccagatcctgcctgatccaagcaagccctccaagaggtcttttatcgaggacctgctgttcaacaaggtgaccctggccgatgccggcttcatcaagcagtatggagattgcctgggagacatcgcagcccgcgacctgatctgtgcccagaagtttaatggcctgaccgtgctgcctccactgctgacagatgagatgatcgcccagtacacatctgccctgctggccggcaccatcacaagcggatggaccttcggcgcaggagccgccctgcagatcccttttgccatgcagatggcctataggttcaacggcatcggcgtgacccagaatgtgctgtacgagaaccagaagctgatcgccaatcagtttaacagcgccatcggcaagatccaggactctctgtcctctacagccagcgccctgggcaagctgcaggatgtggtgaatcagaacgcccaggccctgaataccctggtgaagcagctgagctccaacttcggcgccatctctagcgtgctgaatgacatcctgagccggctggacccccctgaggcagaggtgcagatcgacaggctgatcacaggccgcctgcagagcctgcagacctacgtgacacagcagctgatcagggcagcagagatcagagcctccgccaatctggccgccaccaagatgagcgagtgcgtgctgggacagtccaagagggtggacttttgtggcaagggctatcacctgatgtctttcccacagagcgcccctcacggcgtggtgtttctgcacgtgacctacgtgccagcccaggagaagaacttcaccacagcaccagccatctgccacgatggaaaggcacactttcctagggagggcgtgttcgtgtctaacggcacccactggtttgtgacacagcgcaatttctacgagccacagatcatcaccacagacaatacattcgtgagcggcaactgtgatgtggtgatcggcatcgtgaacaataccgtgtatgatccactgcagcccgagctggactcctttaaggaggagctggataagtacttcaagaatcacacctctcccgacgtggatctgggcgacatctccggcatcaatgcctctgtggtgaacatccagaaggagatcgaccggctgaacgaggtggccaagaatctgaacgagagcctgatcgatctgcaggagctgggcaagtatgagcagtacatcaagggctctggcagagagaacctgtatttccagggaggaggaggcagcggatacatccctgaggcaccaagggacggacaggcctacgtgcgcaaggatggcgagtgggtgctgctgtccacctttctgggccatcatcaccaccaccaccaccactga

SEQ ID NO: 5162 - DNA, 3846 bp, Artificial Sequence
  Description of Artificial Sequence: Synthetic polynucleotide
atgggcatcctgccaagcccaggaatgcccgccctgctgtctctggtgagcctgctgtccgtgctgctgatgggatgcgtggcagagacaggcacacagtgcgtgaacctgaccacaaggacccagctgccccctgcctataccaattctttcacacggggcgtgtactatcccgacaaggtgtttagaagctccgtgctgcactccacacaggatctgtttctgcctttcttttctaacgtgacctggttccacgccatccacgtgtccggcaccaatggcacaaagcggttcgacaatcccgtgctgccttttaacgatggcgtgtacttcgccagcaccgagaagtccaacatcatcagaggctggatctttggcaccacactggactctaagacacagagcctgctgatcgtgaacaatgccaccaacgtggtgatcaaggtgtgcgagttccagttttgtaatgatccattcctgggcgtgtactatcacaagaacaataagtcctggatggagtctgagtttcgcgtgtattctagcgccaacaattgcacatttgagtacgtgagccagcccttcctgatggacctggagggcaagcagggcaatttcaagaacctgagggagttcgtgtttaagaatatcgatggctacttcaagatctacagcaagcacaccccaatcaacctggtgcgcgacctgccacagggattctccgccctggagccactggtggatctgcccatcggcatcaacatcacccggtttcagacactgctggccctgcacagatcctacctgacaccaggcgactcctctagcggatggaccgcaggagctgccgcctactatgtgggctatctgcagccccggaccttcctgctgaagtacaacgagaatggcaccatcacagacgcagtggattgcgccctggaccccctgtctgagacaaagtgtacactgaagagctttaccgtggagaagggcatctatcagacaagcaatttcagggtgcagcctaccgagtccatcgtgcgctttcccaatatcacaaacctgtgcccttttggcgaggtgttcaacgccaccagattcgccagcgtgtacgcctggaatcggaagagaatctccaactgcgtggccgactattctgtgctgtacaactccgcctctttcagcacctttaagtgctatggcgtgtctcccacaaagctgaatgatctgtgctttaccaacgtgtacgccgatagcttcgtgatcaggggagacgaagtgagacagatcgcaccaggacagacaggaaagatcgcagactacaattataagctgcctgacgatttcaccggctgcgtgatcgcctggaactccaacaatctggattctaaagtgggcggcaactacaattatctgtacaggctgtttcgcaagtccaatctgaagccattcgagcgggacatctccacagagatctaccaggccggctctaccccctgcaatggcgtggagggctttaactgttatttccctctgcagtcttacggcttccagccaacaaacggcgtgggctatcagccctacagagtggtggtgctgtcctttgagctgctgcacgcaccagcaacagtgtgcggcccaaagaagtctaccaatctggtgaagaacaagtgcgtgaacttcaacttcaacggactgaccggcacaggcgtgctgaccgagagcaataagaagttcctgccttttcagcagttcggcagggacatcgcagataccacagacgccgtgcgcgaccctcagaccctggagatcctggacatcacaccatgcagcttcggcggcgtgtccgtgatcacaccaggcaccaatacatccaaccaggtggccgtgctgtatcaggacgtgaattgtaccgaggtgcccgtggcaatccacgcagatcagctgacccctacatggcgggtgtactctaccggcagcaacgtgttccagacaagagccggatgcctgatcggagcagagcacgtgaacaatagctatgagtgcgacatccctatcggcgccggcatctgtgccagctaccagacccagacaaactccccatctggagcaggctccgtggccagccagtccatcatcgcctataccatgagcctgggcgccgagaacagcgtggcctactccaacaattctatcgccatccctaccaacttcacaatcagcgtgaccacagagatcctgccagtgtctatgaccaagacaagcgtggactgcacaatgtatatctgtggcgatagcaccgagtgctccaacctgctgctgcagtacggctccttttgtacccagctgaatagagccctgacaggcatcgccgtggagcaggataagaacacacaggaggtgttcgcccaggtgaagcagatctacaagaccccacccatcaaggactttggcggcttcaacttcagccagatcctgcctgatccaagcaagccctccaagaggtcttttatcgaggacctgctgttcaacaaggtgaccctggccgatgccggcttcatcaagcagtatggagattgcctgggagacatcgcagcccgcgacctgatctgtgcccagaagtttaatggcctgaccgtgctgcctccactgctgacagatgagatgatcgcccagtacacatctgccctgctggccggcaccatcacaagcggatggaccttcggcgcaggagccgccctgcagatcccttttgccatgcagatggcctataggttcaacggcatcggcgtgacccagaatgtgctgtacgagaaccagaagctgatcgccaatcagtttaacagcgccatcggcaagatccaggactctctgtcctctacagccagcgccctgggcaagctgcaggatgtggtgaatcagaacgcccaggccctgaataccctggtgaagcagctgagctccaacttcggcgccatctctagcgtgctgaatgacatcctgagccggctgtcaccccctgaggcagaggtgcagatcgacaggctgatcacaggccgcctgcagagcctgcagacctacgtgacacagcagctgatcagggcagcagagatcagagcctccgccaatctggccgccaccaagatgagcgagtgcgtgctgggacagtccaagagggtggacttttgtggcaagggctatcacctgatgtctttcccacagagcgcccctcacggcgtggtgtttctgcacgtgacctacgtgccagcccaggagaagaacttcaccacagcaccagccatctgccacgatggaaaggcacactttcctagggagggcgtgttcgtgtctaacggcacccactggtttgtgacacagcgcaatttctacgagccacagatcatcaccacagacaatacattcgtgagcggcaactgtgatgtggtgatcggcatcgtgaacaataccgtgtatgatccactgcagcccgagctggactcctttaaggaggagctggataagtacttcaagaatcacacctctcccgacgtggatctgggcgacatctccggcatcaatgcctctgtggtgaacatccagaaggagatcgaccggctgaacgaggtggccaagaatctgaacgagagcctgatcgatctgcaggagctgggcaagtatgagcagtacatcaagggctctggcagagagaacctgtatttccagggaggaggaggcagcggatacatccctgaggcaccaagggacggacaggcctacgtgcgcaaggatggcgagtgggtgctgctgtccacctttctgggccatcatcaccaccaccaccaccactga

SEQ ID NO: 5163 - DNA, 3846 bp, Artificial Sequence
  Description of Artificial Sequence: Synthetic polynucleotide
atgggcatcctgccaagcccaggaatgcccgccctgctgtctctggtgagcctgctgtccgtgctgctgatgggatgcgtggcagagacaggcacacagtgcgtgaacctgaccacaaggacccagctgccccctgcctataccaattctttcacacggggcgtgtactatcccgacaaggtgtttagaagctccgtgctgcactccacacaggatctgtttctgcctttcttttctaacgtgacctggttccacgccatccacgtgtccggcaccaatggcacaaagcggttcgacaatcccgtgctgccttttaacgatggcgtgtacttcgccagcaccgagaagtccaacatcatcagaggctggatctttggcaccacactggactctaagacacagagcctgctgatcgtgaacaatgccaccaacgtggtgatcaaggtgtgcgagttccagttttgtaatgatccattcctgggcgtgtactatcacaagaacaataagtcctggatggagtctgagtttcgcgtgtattctagcgccaacaattgcacatttgagtacgtgagccagcccttcctgatggacctggagggcaagcagggcaatttcaagaacctgagggagttcgtgtttaagaatatcgatggctacttcaagatctacagcaagcacaccccaatcaacctggtgcgcgacctgccacagggattctccgccctggagccactggtggatctgcccatcggcatcaacatcacccggtttcagacactgctggccctgcacagatcctacctgacaccaggcgactcctctagcggatggaccgcaggagctgccgcctactatgtgggctatctgcagccccggaccttcctgctgaagtacaacgagaatggcaccatcacagacgcagtggattgcgccctggaccccctgtctgagacaaagtgtacactgaagagctttaccgtggagaagggcatctatcagacaagcaatttcagggtgcagcctaccgagtccatcgtgcgctttcccaatatcacaaacctgtgcccttttggcgaggtgttcaacgccaccagattcgccagcgtgtacgcctggaatcggaagagaatctccaactgcgtggccgactattctgtgctgtacaactccgcctctttcagcacctttaagtgctatggcgtgtctcccacaaagctgaatgatctgtgctttaccaacgtgtacgccgatagcttcgtgatcaggggagacgaagtgagacagatcgcaccaggacagacaggaaagatcgcagactacaattataagctgcctgacgatttcaccggctgcgtgatcgcctggaactccaacaatctggattctaaagtgggcggcaactacaattatctgtacaggctgtttcgcaagtccaatctgaagccattcgagcgggacatctccacagagatctaccaggccggctctaccccctgcaatggcgtggagggctttaactgttatttccctctgcagtcttacggcttccagccaacaaacggcgtgggctatcagccctacagagtggtggtgctgtcctttgagctgctgcacgcaccagcaacagtgtgcggcccaaagaagtctaccaatctggtgaagaacaagtgcgtgaacttcaacttcaacggactgaccggcacaggcgtgctgaccgagagcaataagaagttcctgccttttcagcagttcggcagggacatcgcagataccacagacgccgtgcgcgaccctcagaccctggagatcctggacatcacaccatgcagcttcggcggcgtgtccgtgatcacaccaggcaccaatacatccaaccaggtggccgtgctgtatcaggacgtgaattgtaccgaggtgcccgtggcaatccacgcagatcagctgacccctacatggcgggtgtactctaccggcagcaacgtgttccagacaagagccggatgcctgatcggagcagagcacgtgaacaatagctatgagtgcgacatccctatcggcgccggcatctgtgccagctaccagacccagacaaactccccatctggagcaggctccgtggccagccagtccatcatcgcctataccatgagcctgggcgccgagaacagcgtggcctactccaacaattctatcgccatccctaccaacttcacaatcagcgtgaccacagagatcctgccagtgtctatgaccaagacaagcgtggactgcacaatgtatatctgtggcgatagcaccgagtgctccaacctgctgctgcagtacggctccttttgtacccagctgaatagagccctgacaggcatcgccgtggagcaggataagaacacacaggaggtgttcgcccaggtgaagcagatctacaagaccccacccatcaaggactttggcggcttcaacttcagccagatcctgcctgatccaagcaagccctccaagaggtcttttatcgaggacctgctgttcaacaaggtgaccctggccgatgccggcttcatcaagcagtatggagattgcctgggagacatcgcagcccgcgacctgatctgtgcccagaagtttaatggcctgaccgtgctgcctccactgctgacagatgagatgatcgcccagtacacatctgccctgctggccggcaccatcacaagcggatggaccttcggcgcaggagccgccctgcagatcccttttgccatgcagatggcctataggttcaacggcatcggcgtgacccagaatgtgctgtacgagaaccagaagctgatcgccaatcagtttaacagcgccatcggcaagatccaggactctctgtcctctacagccagcgccctgggcaagctgcaggatgtggtgaatcagaacgcccaggccctgaataccctgataaagcagctgagctccaacttcggcgccatctctagcgtgctgaatgacatcctgagccggctggacccccctgaggcagaggtgcagatcgacaggctgatcacaggccgcctgcagagcctgcagacctacgtgacacagcagctgatcagggcagcagagatcagagcctccgccaatctggccgccaccaagatgagcgagtgcgtgctgggacagtccaagagggtggacttttgtggcaagggctatcacctgatgtctttcccacagagcgcccctcacggcgtggtgtttctgcacgtgacctacgtgccagcccaggagaagaacttcaccacagcaccagccatctgccacgatggaaaggcacactttcctagggagggcgtgttcgtgtctaacggcacccactggtttgtgacacagcgcaatttctacgagccacagatcatcaccacagacaatacattcgtgagcggcaactgtgatgtggtgatcggcatcgtgaacaataccgtgtatgatccactgcagcccgagctggactcctttaaggaggagctggataagtacttcaagaatcacacctctcccgacgtggatctgggcgacatctccggcatcaatgcctctgtggtgaacatccagaaggagatcgaccggctgaacgaggtggccaagaatctgaacgagagcctgatcgatctgcaggagctgggcaagtatgagcagtacatcaagggctctggcagagagaacctgtatttccagggaggaggaggcagcggatacatccctgaggcaccaagggacggacaggcctacgtgcgcaaggatggcgagtgggtgctgctgtccacctttctgggccatcatcaccaccaccaccaccactga

SEQ ID NO: 5164 - DNA, 3846 bp, Artificial Sequence
  Description of Artificial Sequence: Synthetic polynucleotide
atgggcatcctgccaagcccaggaatgcccgccctgctgtctctggtgagcctgctgtccgtgctgctgatgggatgcgtggcagagacaggcacacagtgcgtgaacctgaccacaaggacccagctgccccctgcctataccaattctttcacacggggcgtgtactatcccgacaaggtgtttagaagctccgtgctgcactccacacaggatctgtttctgcctttcttttctaacgtgacctggttccacgccatccacgtgtccggcaccaatggcacaaagcggttcgacaatcccgtgctgccttttaacgatggcgtgtacttcgccagcaccgagaagtccaacatcatcagaggctggatctttggcaccacactggactctaagacacagagcctgctgatcgtgaacaatgccaccaacgtggtgatcaaggtgtgcgagttccagttttgtaatgatccattcctgggcgtgtactatcacaagaacaataagtcctggatggagtctgagtttcgcgtgtattctagcgccaacaattgcacatttgagtacgtgagccagcccttcctgatggacctggagggcaagcagggcaatttcaagaacctgagggagttcgtgtttaagaatatcgatggctacttcaagatctacagcaagcacaccccaatcaacctggtgcgcgacctgccacagggattctccgccctggagccactggtggatctgcccatcggcatcaacatcacccggtttcagacactgctggccctgcacagatcctacctgacaccaggcgactcctctagcggatggaccgcaggagctgccgcctactatgtgggctatctgcagccccggaccttcctgctgaagtacaacgagaatggcaccatcacagacgcagtggattgcgccctggaccccctgtctgagacaaagtgtacactgaagagctttaccgtggagaagggcatctatcagacaagcaatttcagggtgcagcctaccgagtccatcgtgcgctttcccaatatcacaaacctgtgcccttttggcgaggtgttcaacgccaccagattcgccagcgtgtacgcctggaatcggaagagaatctccaactgcgtggccgactattctgtgctgtacaactccgcctctttcagcacctttaagtgctatggcgtgtctcccacaaagctgaatgatctgtgctttaccaacgtgtacgccgatagcttcgtgatcaggggagacgaagtgagacagatcgcaccaggacagacaggaaagatcgcagactacaattataagctgcctgacgatttcaccggctgcgtgatcgcctggaactccaacaatctggattctaaagtgggcggcaactacaattatctgtacaggctgtttcgcaagtccaatctgaagccattcgagcgggacatctccacagagatctaccaggccggctctaccccctgcaatggcgtggagggctttaactgttatttccctctgcagtcttacggcttccagccaacaaacggcgtgggctatcagccctacagagtggtggtgctgtcctttgagctgctgcacgcaccagcaacagtgtgcggcccaaagaagtctaccaatctggtgaagaacaagtgcgtgaacttcaacttcaacggactgaccggcacaggcgtgctgaccgagagcaataagaagttcctgccttttcagcagttcggcagggacatcgcagataccacagacgccgtgcgcgaccctcagaccctggagatcctggacatcacaccatgcagcttcggcggcgtgtccgtgatcacaccaggcaccaatacatccaaccaggtggccgtgctgtatcaggacgtgaattgtaccgaggtgcccgtggcaatccacgcagatcagctgacccctacatggcgggtgtactctaccggcagcaacgtgttccagacaagagccggatgcctgatcggagcagagcacgtgaacaatagctatgagtgcgacatccctatcggcgccggcatctgtgccagctaccagacccagacaaactccccatctggagcaggctccgtggccagccagtccatcatcgcctataccatgagcctgggcgccgagaaccgagtggcctactccaacaattctatcgccatccctaccaacttcacaatcagcgtgaccacagagatcctgccagtgtctatgaccaagacaagcgtggactgcacaatgtatatctgtggcgatagcaccgagtgctccaacctgctgctgcagtacggctccttttgtacccagctgaatagagccctgacaggcatcgccgtggagcaggataagaacacacaggaggtgttcgcccaggtgaagcagatctacaagaccccacccatcaaggactttggcggcttcaacttcagccagatcctgcctgatccaagcaagccctccaagaggtcttttatcgaggacctgctgttcaacaaggtgaccctggccgatgccggcttcatcaagcagtatggagattgcctgggagacatcgcagcccgcgacctgatctgtgcccagaagtttaatggcctgaccgtgctgcctccactgctgacagatgagatgatcgcccagtacacatctgccctgctggccggcaccatcacaagcggatggaccttcggcgcaggagccgccctgcagatcccttttgccatgcagatggcctataggttcaacggcatcggcgtgacccagaatgtgctgtacgagaaccagaagctgatcgccaatcagtttaacagcgccatcggcaagatccaggactctctgtcctctacagccagcgccctgggcaagctgcaggatgtggtgaatcagaacgcccaggccctgaataccctggtgaagcagctgagctccaacttcggcgccatctctagcgtgctgaatgacatcctgagccggctggacccccctgaggcagaggtgcagatcgacaggctgatcacaggccgcctgcagagcctgcagacctacgtgacacagcagctgatcagggcagcagagatcagagcctccgccaatctggccgccaccaagatgagcgagtgcgtgctgggacagtccaagagggtggacttttgtggcaagggctatcacctgatgtctttcccacagagcgcccctcacggcgtggtgtttctgcacgtgacctacgtgccagcccaggagaagaacttcaccacagcaccagccatctgccacgatggaaaggcacactttcctagggagggcgtgttcgtgtctaacggcacccactggtttgtgacacagcgcaatttctacgagccacagatcatcaccacagacaatacattcgtgagcggcaactgtgatgtggtgatcggcatcgtgaacaataccgtgtatgatccactgcagcccgagctggactcctttaaggaggagctggataagtacttcaagaatcacacctctcccgacgtggatctgggcgacatctccggcatcaatgcctctgtggtgaacatccagaaggagatcgaccggctgaacgaggtggccaagaatctgaacgagagcctgatcgatctgcaggagctgggcaagtatgagcagtacatcaagggctctggcagagagaacctgtatttccagggaggaggaggcagcggatacatccctgaggcaccaagggacggacaggcctacgtgcgcaaggatggcgagtgggtgctgctgtccacctttctgggccatcatcaccaccaccaccaccactga

SEQ ID NO: 5165 - DNA, 3846 bp, Artificial Sequence
  Description of Artificial Sequence: Synthetic polynucleotide
atgggcatcctgccaagcccaggaatgcccgccctgctgtctctggtgagcctgctgtccgtgctgctgatgggatgcgtggcagagacaggcacacagtgcgtgaacctgaccacaaggacccagctgccccctgcctataccaattctttcacacggggcgtgtactatcccgacaaggtgtttagaagctccgtgctgcactccacacaggatctgtttctgcctttcttttctaacgtgacctggttccacgccatccacgtgtccggcaccaatggcacaaagcggttcgacaatcccgtgctgccttttaacgatggcgtgtacttcgccagcaccgagaagtccaacatcatcagaggctggatctttggcaccacactggactctaagacacagagcctgctgatcgtgaacaatgccaccaacgtggtgatcaaggtgtgcgagttccagttttgtaatgatccattcctgggcgtgtactatcacaagaacaataagtcctggatggagtctgagtttcgcgtgtattctagcgccaacaattgcacatttgagtacgtgagccagcccttcctgatggacctggagggcaagcagggcaatttcaagaacctgagggagttcgtgtttaagaatatcgatggctacttcaagatctacagcaagcacaccccaatcaacctggtgcgcgacctgccacagggattctccgccctggagccactggtggatctgcccatcggcatcaacatcacccggtttcagacactgctggccctgcacagatcctacctgacaccaggcgactcctctagcggatggaccgcaggagctgccgcctactatgtgggctatctgcagccccggaccttcctgctgaagtacaacgagaatggcaccatcacagacgcagtggattgcgccctggaccccctgtctgagacaaagtgtacactgaagagctttaccgtggagaagggcatctatcagacaagcaatttcagggtgcagcctaccgagtccatcgtgcgctttcccaatatcacaaacctgtgcccttttggcgaggtgttcaacgccaccagattcgccagcgtgtacgcctggaatcggaagagaatctccaactgcgtggccgactattctgtgctgtacaactccgcctctttcagcacctttaagtgctatggcgtgtctcccacaaagctgaatgatctgtgctttaccaacgtgtacgccgatagcttcgtgatcaggggagacgaagtgagacagatcgcaccaggacagacaggaaagatcgcagactacaattataagctgcctgacgatttcaccggctgcgtgatcgcctggaactccaacaatctggattctaaagtgggcggcaactacaattatctgtacaggctgtttcgcaagtccaatctgaagccattcgagcggtttatctccacagagatctaccaggccggctctaccccctgcaatggcgtggagggctttaactgttatttccctctgcagtcttacggcttccagccaacaaacggcgtgggctatcagccctacagagtggtggtgctgtcctttgagctgctgcacgcaccagcaacagtgtgcggcccaaagaagtctaccaatctggtgaagaacaagtgcgtgaacttcaacttcaacggactgaccggcacaggcgtgctgaccgagagcaataagaagttcctgccttttcagcagttcggcagggacatcgcagataccacagacgccgtgcgcgaccctcagaccctggagatcctggacatcacaccatgcagcttcggcggcgtgtccgtgatcacaccaggcaccaatacatccaaccaggtggccgtgctgtatcaggacgtgaattgtaccgaggtgcccgtggcaatccacgcagatcagctgacccctacatggcgggtgtactctaccggcagcaacgtgttccagacaagagccggatgcctgatcggagcagagcacgtgaacaatagctatgagtgcgacatccctatcggcgccggcatctgtgccagctaccagacccagacaaactccccatctggagcaggctccgtggccagccagtccatcatcgcctataccatgagcctgggcgccgagaacagcgtggcctactccaacaattctatcgccatccctaccaacttcacaatcagcgtgaccacagagatcctgccagtgtctatgaccaagacaagcgtggactgcacaatgtatatctgtggcgatagcaccgagtgctccaacctgctgctgcagtacggctccttttgtacccagctgaatagagccctgacaggcatcgccgtggagcaggataagaacacacaggaggtgttcgcccaggtgaagcagatctacaagaccccacccatcaaggactttggcggcttcaacttcagccagatcctgcctgatccaagcaagccctccaagaggtcttttatcgaggacctgctgttcaacaaggtgaccctggccgatgccggcttcatcaagcagtatggagattgcctgggagacatcgcagcccgcgacctgatctgtgcccagaagtttaatggcctgaccgtgctgcctccactgctgacagatgagatgatcgcccagtacacatctgccctgctggccggcaccatcacaagcggatggaccttcggcgcaggagccgccctgcagatcccttttgccatgcagatggcctataggttcaacggcatcggcgtgacccagaatgtgctgtacgagaaccagaagctgatcgccaatcagtttaacagcgccatcggcaagatccaggactctctgtcctctacagccagcgccctgggcaagctgcaggatgtggtgaatcagaacgcccaggccctgaataccctggtgaagcagctgagctccaacttcggcgccatctctagcgtgctgaatgacatcctgagccggctggacccccctgaggcagaggtgcagatcgacaggctgatcacaggccgcctgcagagcctgcagacctacgtgacacagcagctgatcagggcagcagagatcagagcctccgccaatctggccgccaccaagatgagcgagtgcgtgctgggacagtccaagagggtggacttttgtggcaagggctatcacctgatgtctttcccacagagcgcccctcacggcgtggtgtttctgcacgtgacctacgtgccagcccaggagaagaacttcaccacagcaccagccatctgccacgatggaaaggcacactttcctagggagggcgtgttcgtgtctaacggcacccactggtttgtgacacagcgcaatttctacgagccacagatcatcaccacagacaatacattcgtgagcggcaactgtgatgtggtgatcggcatcgtgaacaataccgtgtatgatccactgcagcccgagctggactcctttaaggaggagctggataagtacttcaagaatcacacctctcccgacgtggatctgggcgacatctccggcatcaatgcctctgtggtgaacatccagaaggagatcgaccggctgaacgaggtggccaagaatctgaacgagagcctgatcgatctgcaggagctgggcaagtatgagcagtacatcaagggctctggcagagagaacctgtatttccagggaggaggaggcagcggatacatccctgaggcaccaagggacggacaggcctacgtgcgcaaggatggcgagtgggtgctgctgtccacctttctgggccatcatcaccaccaccaccaccactga

SEQ ID NO: 5166 - DNA, 3846 bp, Artificial Sequence
  Description of Artificial Sequence: Synthetic polynucleotide
atgggcatcctgccaagcccaggaatgcccgccctgctgtctctggtgagcctgctgtccgtgctgctgatgggatgcgtggcagagacaggcacacagtgcgtgaacctgaccacaaggacccagctgccccctgcctataccaattctttcacacggggcgtgtactatcccgacaaggtgtttagaagctccgtgctgcactccacacaggatctgtttctgcctttcttttctaacgtgacctggttccacgccatccacgtgtccggcaccaatggcacaaagcggttcgacaatcccgtgctgccttttaacgatggcgtgtacttcgccagcaccgagaagtccaacatcatcagaggctggatctttggcaccacactggactctaagacacagagcctgctgatcgtgaacaatgccaccaacgtggtgatcaaggtgtgcgagttccagttttgtaatgatccattcctgggcgtgtactatcacaagaacaataagtcctggatggagtctgagtttcgcgtgtattctagcgccaacaattgcacatttgagtacgtgagccagcccttcctgatggacctggagggcaagcagggcaatttcaagaacctgagggagttcgtgtttaagaatatcgatggctacttcaagatctacagcaagcacaccccaatcaacctggtgcgcgacctgccacagggattctccgccctggagccactggtggatctgcccatcggcatcaacatcacccggtttcagacactgctggccctgcacagatcctacctgacaccaggcgactcctctagcggatggaccgcaggagctgccgcctactatgtgggctatctgcagccccggaccttcctgctgaagtacaacgagaatggcaccatcacagacgcagtggattgcgccctggaccccctgtctgagacaaagtgtacactgaagagctttaccgtggagaagggcatctatcagacaagcaatttcagggtgcagcctaccgagtccatcgtgcgctttcccaatatcacaaacctgtgcccttttggcgaggtgttcaacgccaccagattcgccagcgtgtacgcctggaatcggaagagaatctccaactgcgtggccgactattctgtgctgtacaactccgcctctttcagcacctttaagtgctatggcgtgtctcccacaaagctgaatgatctgtgctttaccaacgtgtacgccgatagcttcgtgatcaggggagacgaagtgagacagatcgcaccaggacagacaggaaagatcgcagactacaattataagctgcctgacgatttcaccggctgcgtgatcgcctggaactccaacaatctggattctaaagtgggcggcaactacaattatctgtacaggctgtttcgcaagtccaatctgaagccattcgagcgggacatctccacagagatctaccaggccggctctaccccctgcaatggcgtggagggctttaactgttatttccctctgcagtcttacggcttccagccaacaaacggcgtgggctatcagccctacagagtggtggtgctgttgtttgagctgctgcacgcaccagcaacagtgtgcggcccaaagaagtctaccaatctggtgaagaacaagtgcgtgaacttcaacttcaacggactgaccggcacaggcgtgctgaccgagagcaataagaagttcctgccttttcagcagttcggcagggacatcgcagataccacagacgccgtgcgcgaccctcagaccctggagatcctggacatcacaccatgcagcttcggcggcgtgtccgtgatcacaccaggcaccaatacatccaaccaggtggccgtgctgtatcaggacgtgaattgtaccgaggtgcccgtggcaatccacgcagatcagctgacccctacatggcgggtgtactctaccggcagcaacgtgttccagacaagagccggatgcctgatcggagcagagcacgtgaacaatagctatgagtgcgacatccctatcggcgccggcatctgtgccagctaccagacccagacaaactccccatctggagcaggctccgtggccagccagtccatcatcgcctataccatgagcctgggcgccgagaacagcgtggcctactccaacaattctatcgccatccctaccaacttcacaatcagcgtgaccacagagatcctgccagtgtctatgaccaagacaagcgtggactgcacaatgtatatctgtggcgatagcaccgagtgctccaacctgctgctgcagtacggctccttttgtacccagctgaatagagccctgacaggcatcgccgtggagcaggataagaacacacaggaggtgttcgcccaggtgaagcagatctacaagaccccacccatcaaggactttggcggcttcaacttcagccagatcctgcctgatccaagcaagccctccaagaggtcttttatcgaggacctgctgttcaacaaggtgaccctggccgatgccggcttcatcaagcagtatggagattgcctgggagacatcgcagcccgcgacctgatctgtgcccagaagtttaatggcctgaccgtgctgcctccactgctgacagatgagatgatcgcccagtacacatctgccctgctggccggcaccatcacaagcggatggaccttcggcgcaggagccgccctgcagatcccttttgccatgcagatggcctataggttcaacggcatcggcgtgacccagaatgtgctgtacgagaaccagaagctgatcgccaatcagtttaacagcgccatcggcaagatccaggactctctgtcctctacagccagcgccctgggcaagctgcaggatgtggtgaatcagaacgcccaggccctgaataccctggtgaagcagctgagctccaacttcggcgccatctctagcgtgctgaatgacatcctgagccggctggacccccctgaggcagaggtgcagatcgacaggctgatcacaggccgcctgcagagcctgcagacctacgtgacacagcagctgatcagggcagcagagatcagagcctccgccaatctggccgccaccaagatgagcgagtgcgtgctgggacagtccaagagggtggacttttgtggcaagggctatcacctgatgtctttcccacagagcgcccctcacggcgtggtgtttctgcacgtgacctacgtgccagcccaggagaagaacttcaccacagcaccagccatctgccacgatggaaaggcacactttcctagggagggcgtgttcgtgtctaacggcacccactggtttgtgacacagcgcaatttctacgagccacagatcatcaccacagacaatacattcgtgagcggcaactgtgatgtggtgatcggcatcgtgaacaataccgtgtatgatccactgcagcccgagctggactcctttaaggaggagctggataagtacttcaagaatcacacctctcccgacgtggatctgggcgacatctccggcatcaatgcctctgtggtgaacatccagaaggagatcgaccggctgaacgaggtggccaagaatctgaacgagagcctgatcgatctgcaggagctgggcaagtatgagcagtacatcaagggctctggcagagagaacctgtatttccagggaggaggaggcagcggatacatccctgaggcaccaagggacggacaggcctacgtgcgcaaggatggcgagtgggtgctgctgtccacctttctgggccatcatcaccaccaccaccaccactga

SEQ ID NO: 5167 - DNA, 3846 bp, Artificial Sequence
  Description of Artificial Sequence: Synthetic polynucleotide
atgggcatcctgccaagcccaggaatgcccgccctgctgtctctggtgagcctgctgtccgtgctgctgatgggatgcgtggcagagacaggcacacagtgcgtgaacctgaccacaaggacccagctgccccctgcctataccaattctttcacacggggcgtgtactatcccgacaaggtgtttagaagctccgtgctgcactccacacaggatctgtttctgcctttcttttctaacgtgacctggttccacgccatccacgtgtccggcaccaatggcacaaagcggttcgacaatcccgtgctgccttttaacgatggcgtgtacttcgccagcaccgagaagtccaacatcatcagaggctggatctttggcaccacactggactctaagacacagagcctgctgatcgtgaacaatgccaccaacgtggtgatcaaggtgtgcgagttccagttttgtaatgatccattcctgggcgtgtactatcacaagaacaataagtcctggatggagtctgagtttcgcgtgtattctagcgccaacaattgcacatttgagtacgtgagccagcccttcctgatggacctggagggcaagcagggcaatttcaagaacctgagggagttcgtgtttaagaatatcgatggctacttcaagatctacagcaagcacaccccaatcaacctggtgcgcgacctgccacagggattctccgccctggagccactggtggatctgcccatcggcatcaacatcacccggtttcagacactgctggccctgcacagatcctacctgacaccaggcgactcctctagcggatggaccgcaggagctgccgcctactatgtgggctatctgcagccccggaccttcctgctgaagtacaacgagaatggcaccatcacagacgcagtggattgcgccctggaccccctgtctgagacaaagtgtacactgaagagctttaccgtggagaagggcatctatcagacaagcaatttcagggtgcagcctaccgagtccatcgtgcgctttcccaatatcacaaacctgtgcccttttggcgaggtgttcaacgccaccagattcgccagcgtgtacgcctggaatcggaagagaatctccaactgcgtggccgactattctgtgctgtacaactccgcctctttcgatacctttaagtgctatggcgtgtctcccacaaagctgaatgatctgtgctttaccaacgtgtacgccgatagcttcgtgatcaggggagacgaagtgagacagatcgcaccaggacagacaggaaagatcgcagactacaattataagctgcctgacgatttcaccggctgcgtgatcgcctggaactccaacaatctggattctaaagtgggcggcaactacaattatctgtacaggctgtttcgcaagtccaatctgaagccattcgagcgggacatctccacagagatctaccaggccggctctaccccctgcaatggcgtggagggctttaactgttatttccctctgcagtcttacggcttccagccaacaaacggcgtgggctatcagccctacagagtggtggtgctgtcctttgagctgctgcacgcaccagcaacagtgtgcggcccaaagaagtctaccaatctggtgaagaacaagtgcgtgaacttcaacttcaacggactgaccggcacaggcgtgctgaccgagagcaataagaagttcctgccttttcagcagttcggcagggacatcgcagataccacagacgccgtgcgcgaccctcagaccctggagatcctggacatcacaccatgcagcttcggcggcgtgtccgtgatcacaccaggcaccaatacatccaaccaggtggccgtgctgtatcaggacgtgaattgtaccgaggtgcccgtggcaatccacgcagatcagctgacccctacatggcgggtgtactctaccggcagcaacgtgttccagacaagagccggatgcctgatcggagcagagcacgtgaacaatagctatgagtgcgacatccctatcggcgccggcatctgtgccagctaccagacccagacaaactccccatctggagcaggctccgtggccagccagtccatcatcgcctataccatgagcctgggcgccgagaacagcgtggcctactccaacaattctatcgccatccctaccaacttcacaatcagcgtgaccacagagatcctgccagtgtctatgaccaagacaagcgtggactgcacaatgtatatctgtggcgatagcaccgagtgctccaacctgctgctgcagtacggctccttttgtacccagctgaatagagccctgacaggcatcgccgtggagcaggataagaacacacaggaggtgttcgcccaggtgaagcagatctacaagaccccacccatcaaggactttggcggcttcaacttcagccagatcctgcctgatccaagcaagccctccaagaggtcttttatcgaggacctgctgttcaacaaggtgaccctggccgatgccggcttcatcaagcagtatggagattgcctgggagacatcgcagcccgcgacctgatctgtgcccagaagtttaatggcctgaccgtgctgcctccactgctgacagatgagatgatcgcccagtacacatctgccctgctggccggcaccatcacaagcggatggaccttcggcgcaggagccgccctgcagatcccttttgccatgcagatggcctataggttcaacggcatcggcgtgacccagaatgtgctgtacgagaaccagaagctgatcgccaatcagtttaacagcgccatcggcaagatccaggactctctgtcctctacagccagcgccctgggcaagctgcaggatgtggtgaatcagaacgcccaggccctgaataccctggtgaagcagctgagctccaacttcggcgccatctctagcgtgctgaatgacatcctgagccggctggacccccctgaggcagaggtgcagatcgacaggctgatcacaggccgcctgcagagcctgcagacctacgtgacacagcagctgatcagggcagcagagatcagagcctccgccaatctggccgccaccaagatgagcgagtgcgtgctgggacagtccaagagggtggacttttgtggcaagggctatcacctgatgtctttcccacagagcgcccctcacggcgtggtgtttctgcacgtgacctacgtgccagcccaggagaagaacttcaccacagcaccagccatctgccacgatggaaaggcacactttcctagggagggcgtgttcgtgtctaacggcacccactggtttgtgacacagcgcaatttctacgagccacagatcatcaccacagacaatacattcgtgagcggcaactgtgatgtggtgatcggcatcgtgaacaataccgtgtatgatccactgcagcccgagctggactcctttaaggaggagctggataagtacttcaagaatcacacctctcccgacgtggatctgggcgacatctccggcatcaatgcctctgtggtgaacatccagaaggagatcgaccggctgaacgaggtggccaagaatctgaacgagagcctgatcgatctgcaggagctgggcaagtatgagcagtacatcaagggctctggcagagagaacctgtatttccagggaggaggaggcagcggatacatccctgaggcaccaagggacggacaggcctacgtgcgcaaggatggcgagtgggtgctgctgtccacctttctgggccatcatcaccaccaccaccaccactga

SEQ ID NO: 5168 - DNA, 3846 bp, Artificial Sequence
  Description of Artificial Sequence: Synthetic polynucleotide
atgggcatcctgccaagcccaggaatgcccgccctgctgtctctggtgagcctgctgtccgtgctgctgatgggatgcgtggcagagacaggcacacagtgcgtgaacctgaccacaaggacccagctgccccctgcctataccaattctttcacacggggcgtgtactatcccgacaaggtgtttagaagctccgtgctgcactccacacaggatctgtttctgcctttcttttctaacgtgacctggttccacgccatccacgtgtccggcaccaatggcacaaagcggttcgacaatcccgtgctgccttttaacgatggcgtgtacttcgccagcaccgagaagtccaacatcatcagaggctggatctttggcaccacactggactctaagacacagagcctgctgatcgtgaacaatgccaccaacgtggtgatcaaggtgtgcgagttccagttttgtaatgatccattcctgggcgtgtactatcacaagaacaataagtcctggatggagtctgagtttcgcgtgtattctagcgccaacaattgcacatttgagtacgtgagccagcccttcctgatggacctggagggcaagcagggcaatttcaagaacctgagggagttcgtgtttaagaatatcgatggctacttcaagatctacagcaagcacaccccaatcaacctggtgcgcgacctgccacagggattctccgccctggagccactggtggatctgcccatcggcatcaacatcacccggtttcagacactgctggccctgcacagatcctacctgacaccaggcgactcctctagcggatggaccgcaggagctgccgcctactatgtgggctatctgcagccccggaccttcctgctgaagtacaacgagaatggcaccatcacagacgcagtggattgcgccctggaccccctgtctgagacaaagtgtacactgaagagctttaccgtggagaagggcatctatcagacaagcaatttcagggtgcagcctaccgagtccatcgtgcgctttcccaatatcacaaacctgtgcccttttggcgaggtgttcaacgccaccagattcgccagcgtgtacgcctggaatcggaagagaatctccaactgcgtggccgactattctgtgctgtacaactccgcctctttcagcacctttaagtgctatggcgtgtctcccacaaagctgaatgatctgtgctttaccaacgtgtacgccgatagcttcgtgatcaggggagacgaagtgagacagatcgcaccaggacagacaggaaagatcgcagactacaattataagctgcctgacgatttcaccggctgcgtgatcgcctggaactccaacaatctggattctaaagtgggcggcaactacaattatctgtacaggctgtttcgcaagtccaatctgaagccattcgagcgggacatctccacagagatctaccaggccggctctaccccctgcaatggcgtggagggctttaactgttatttccctctgcagtcttacggcttccagccaacaaacggcgtgggctatcagccctacagagtggtggtgctgatatttgagctgctgcacgcaccagcaacagtgtgcggcccaaagaagtctaccaatctggtgaagaacaagtgcgtgaacttcaacttcaacggactgaccggcacaggcgtgctgaccgagagcaataagaagttcctgccttttcagcagttcggcagggacatcgcagataccacagacgccgtgcgcgaccctcagaccctggagatcctggacatcacaccatgcagcttcggcggcgtgtccgtgatcacaccaggcaccaatacatccaaccaggtggccgtgctgtatcaggacgtgaattgtaccgaggtgcccgtggcaatccacgcagatcagctgacccctacatggcgggtgtactctaccggcagcaacgtgttccagacaagagccggatgcctgatcggagcagagcacgtgaacaatagctatgagtgcgacatccctatcggcgccggcatctgtgccagctaccagacccagacaaactccccatctggagcaggctccgtggccagccagtccatcatcgcctataccatgagcctgggcgccgagaacagcgtggcctactccaacaattctatcgccatccctaccaacttcacaatcagcgtgaccacagagatcctgccagtgtctatgaccaagacaagcgtggactgcacaatgtatatctgtggcgatagcaccgagtgctccaacctgctgctgcagtacggctccttttgtacccagctgaatagagccctgacaggcatcgccgtggagcaggataagaacacacaggaggtgttcgcccaggtgaagcagatctacaagaccccacccatcaaggactttggcggcttcaacttcagccagatcctgcctgatccaagcaagccctccaagaggtcttttatcgaggacctgctgttcaacaaggtgaccctggccgatgccggcttcatcaagcagtatggagattgcctgggagacatcgcagcccgcgacctgatctgtgcccagaagtttaatggcctgaccgtgctgcctccactgctgacagatgagatgatcgcccagtacacatctgccctgctggccggcaccatcacaagcggatggaccttcggcgcaggagccgccctgcagatcccttttgccatgcagatggcctataggttcaacggcatcggcgtgacccagaatgtgctgtacgagaaccagaagctgatcgccaatcagtttaacagcgccatcggcaagatccaggactctctgtcctctacagccagcgccctgggcaagctgcaggatgtggtgaatcagaacgcccaggccctgaataccctggtgaagcagctgagctccaacttcggcgccatctctagcgtgctgaatgacatcctgagccggctggacccccctgaggcagaggtgcagatcgacaggctgatcacaggccgcctgcagagcctgcagacctacgtgacacagcagctgatcagggcagcagagatcagagcctccgccaatctggccgccaccaagatgagcgagtgcgtgctgggacagtccaagagggtggacttttgtggcaagggctatcacctgatgtctttcccacagagcgcccctcacggcgtggtgtttctgcacgtgacctacgtgccagcccaggagaagaacttcaccacagcaccagccatctgccacgatggaaaggcacactttcctagggagggcgtgttcgtgtctaacggcacccactggtttgtgacacagcgcaatttctacgagccacagatcatcaccacagacaatacattcgtgagcggcaactgtgatgtggtgatcggcatcgtgaacaataccgtgtatgatccactgcagcccgagctggactcctttaaggaggagctggataagtacttcaagaatcacacctctcccgacgtggatctgggcgacatctccggcatcaatgcctctgtggtgaacatccagaaggagatcgaccggctgaacgaggtggccaagaatctgaacgagagcctgatcgatctgcaggagctgggcaagtatgagcagtacatcaagggctctggcagagagaacctgtatttccagggaggaggaggcagcggatacatccctgaggcaccaagggacggacaggcctacgtgcgcaaggatggcgagtgggtgctgctgtccacctttctgggccatcatcaccaccaccaccaccactga

SEQ ID NO: 5169 - DNA, 3846 bp, Artificial Sequence
  Description of Artificial Sequence: Synthetic polynucleotide
atgggcatcctgccaagcccaggaatgcccgccctgctgtctctggtgagcctgctgtccgtgctgctgatgggatgcgtggcagagacaggcacacagtgcgtgaacctgaccacaaggacccagctgccccctgcctataccaattctttcacacggggcgtgtactatcccgacaaggtgtttagaagctccgtgctgcactccacacaggatctgtttctgcctttcttttctaacgtgacctggttccacgccatccacgtgtccggcaccaatggcacaaagcggttcgacaatcccgtgctgccttttaacgatggcgtgtacttcgccagcaccgagaagtccaacatcatcagaggctggatctttggcaccacactggactctaagacacagagcctgctgatcgtgaacaatgccaccaacgtggtgatcaaggtgtgcgagttccagttttgtaatgatccattcctgggcgtgtactatcacaagaacaataagtcctggatggagtctgagtttcgcgtgtattctagcgccaacaattgcacatttgagtacgtgagccagcccttcctgatggacctggagggcaagcagggcaatttcaagaacctgagggagttcgtgtttaagaatatcgatggctacttcaagatctacagcaagcacaccccaatcaacctggtgcgcgacctgccacagggattctccgccctggagccactggtggatctgcccatcggcatcaacatcacccggtttcagacactgctggccctgcacagatcctacctgacaccaggcgactcctctagcggatggaccgcaggagctgccgcctactatgtgggctatctgcagccccggaccttcctgctgaagtacaacgagaatggcaccatcacagacgcagtggattgcgccctggaccccctgtctgagacaaagtgtacactgaagagctttaccgtggagaagggcatctatcagacaagcaatttcagggtgcagcctaccgagtccatcgtgcgctttcccaatatcacaaacctgtgcccttttggcgaggtgttcaacgccaccagattcgccagcgtgtacgcctggaatcggaagagaatctccaactgcgtggccgactattctgtgctgtacaactccgcctctttcagcacctttaagtgctatggcgtgtctcccacaaagctgaatgatctgtgctttaccaacgtgtacgccgatagcttcgtgatcaggggagacgaagtgagacagatcgcaccaggacagacaggaaagatcgcagactacaattataagctgcctgacgatttcaccggctgcgtgatcgcctggaactccaacaatctggattctaaagtgggcggcaactacaattatctgtacaggctgtttcgcaagtccaatctgaagccattcgagcgggacatctccacagagcgataccaggccggctctaccccctgcaatggcgtggagggctttaactgttatttccctctgcagtcttacggcttccagccaacaaacggcgtgggctatcagccctacagagtggtggtgctgtcctttgagctgctgcacgcaccagcaacagtgtgcggcccaaagaagtctaccaatctggtgaagaacaagtgcgtgaacttcaacttcaacggactgaccggcacaggcgtgctgaccgagagcaataagaagttcctgccttttcagcagttcggcagggacatcgcagataccacagacgccgtgcgcgaccctcagaccctggagatcctggacatcacaccatgcagcttcggcggcgtgtccgtgatcacaccaggcaccaatacatccaaccaggtggccgtgctgtatcaggacgtgaattgtaccgaggtgcccgtggcaatccacgcagatcagctgacccctacatggcgggtgtactctaccggcagcaacgtgttccagacaagagccggatgcctgatcggagcagagcacgtgaacaatagctatgagtgcgacatccctatcggcgccggcatctgtgccagctaccagacccagacaaactccccatctggagcaggctccgtggccagccagtccatcatcgcctataccatgagcctgggcgccgagaacagcgtggcctactccaacaattctatcgccatccctaccaacttcacaatcagcgtgaccacagagatcctgccagtgtctatgaccaagacaagcgtggactgcacaatgtatatctgtggcgatagcaccgagtgctccaacctgctgctgcagtacggctccttttgtacccagctgaatagagccctgacaggcatcgccgtggagcaggataagaacacacaggaggtgttcgcccaggtgaagcagatctacaagaccccacccatcaaggactttggcggcttcaacttcagccagatcctgcctgatccaagcaagccctccaagaggtcttttatcgaggacctgctgttcaacaaggtgaccctggccgatgccggcttcatcaagcagtatggagattgcctgggagacatcgcagcccgcgacctgatctgtgcccagaagtttaatggcctgaccgtgctgcctccactgctgacagatgagatgatcgcccagtacacatctgccctgctggccggcaccatcacaagcggatggaccttcggcgcaggagccgccctgcagatcccttttgccatgcagatggcctataggttcaacggcatcggcgtgacccagaatgtgctgtacgagaaccagaagctgatcgccaatcagtttaacagcgccatcggcaagatccaggactctctgtcctctacagccagcgccctgggcaagctgcaggatgtggtgaatcagaacgcccaggccctgaataccctggtgaagcagctgagctccaacttcggcgccatctctagcgtgctgaatgacatcctgagccggctggacccccctgaggcagaggtgcagatcgacaggctgatcacaggccgcctgcagagcctgcagacctacgtgacacagcagctgatcagggcagcagagatcagagcctccgccaatctggccgccaccaagatgagcgagtgcgtgctgggacagtccaagagggtggacttttgtggcaagggctatcacctgatgtctttcccacagagcgcccctcacggcgtggtgtttctgcacgtgacctacgtgccagcccaggagaagaacttcaccacagcaccagccatctgccacgatggaaaggcacactttcctagggagggcgtgttcgtgtctaacggcacccactggtttgtgacacagcgcaatttctacgagccacagatcatcaccacagacaatacattcgtgagcggcaactgtgatgtggtgatcggcatcgtgaacaataccgtgtatgatccactgcagcccgagctggactcctttaaggaggagctggataagtacttcaagaatcacacctctcccgacgtggatctgggcgacatctccggcatcaatgcctctgtggtgaacatccagaaggagatcgaccggctgaacgaggtggccaagaatctgaacgagagcctgatcgatctgcaggagctgggcaagtatgagcagtacatcaagggctctggcagagagaacctgtatttccagggaggaggaggcagcggatacatccctgaggcaccaagggacggacaggcctacgtgcgcaaggatggcgagtgggtgctgctgtccacctttctgggccatcatcaccaccaccaccaccactga

SEQ ID NO: 5170 - DNA, 3846 bp, Artificial Sequence
  Description of Artificial Sequence: Synthetic polynucleotide
atgggcatcctgccaagcccaggaatgcccgccctgctgtctctggtgagcctgctgtccgtgctgctgatgggatgcgtggcagagacaggcacacagtgcgtgaacctgaccacaaggacccagctgccccctgcctataccaattctttcacacggggcgtgtactatcccgacaaggtgtttagaagctccgtgctgcactccacacaggatctgtttctgcctttcttttctaacgtgacctggttccacgccatccacgtgtccggcaccaatggcacaaagcggttcgacaatcccgtgctgccttttaacgatggcgtgtacttcgccagcaccgagaagtccaacatcatcagaggctggatctttggcaccacactggactctaagacacagagcctgctgatcgtgaacaatgccaccaacgtggtgatcaaggtgtgcgagttccagttttgtaatgatccattcctgggcgtgtactatcacaagaacaataagtcctggatggagtctgagtttcgcgtgtattctagcgccaacaattgcacatttgagtacgtgagccagcccttcctgatggacctggagggcaagcagggcaatttcaagaacctgagggagttcgtgtttaagaatatcgatggctacttcaagatctacagcaagcacaccccaatcaacctggtgcgcgacctgccacagggattctccgccctggagccactggtggatctgcccatcggcatcaacatcacccggtttcagacactgctggccctgcacagatcctacctgacaccaggcgactcctctagcggatggaccgcaggagctgccgcctactatgtgggctatctgcagccccggaccttcctgctgaagtacaacgagaatggcaccatcacagacgcagtggattgcgccctggaccccctgtctgagacaaagtgtacactgaagagctttaccgtggagaagggcatctatcagacaagcaatttcagggtgcagcctaccgagtccatcgtgcgctttcccaatatcacaaacctgtgcccttttggcgaggtgttcaacgccaccagattcgccagcgtgtacgcctggaatcggaagagaatctccaactgcgtggccgactattctgtgctgtacaactccgcctctttcagcacctttaagtgctatggcgtgtctcccacaaagctgaatgatctgtgctttaccaacgtgtacgccgatagcttcgtgatcaggggagacgaagtgagacagatcgcaccaggacagacaggaaagatcgcagactacaattataagctgcctgacgatttcaccggctgcgtgatcgcctggaactccaacaatctggattctaaagtgggcggcaactacaattatctgtacaggctgtttcgcaagtccaatctgaagccattcgagcgggacatctccacagagatctaccaggccggctctaccccctgcaatggcgtggagggctttaactgttatttccctctgcagtcttacggcttccagccaacaaacggcgtgggctatcagccctacagagtggtggtgctgtcctttgagctgactcacgcaccagcaacagtgtgcggcccaaagaagtctaccaatctggtgaagaacaagtgcgtgaacttcaacttcaacggactgaccggcacaggcgtgctgaccgagagcaataagaagttcctgccttttcagcagttcggcagggacatcgcagataccacagacgccgtgcgcgaccctcagaccctggagatcctggacatcacaccatgcagcttcggcggcgtgtccgtgatcacaccaggcaccaatacatccaaccaggtggccgtgctgtatcaggacgtgaattgtaccgaggtgcccgtggcaatccacgcagatcagctgacccctacatggcgggtgtactctaccggcagcaacgtgttccagacaagagccggatgcctgatcggagcagagcacgtgaacaatagctatgagtgcgacatccctatcggcgccggcatctgtgccagctaccagacccagacaaactccccatctggagcaggctccgtggccagccagtccatcatcgcctataccatgagcctgggcgccgagaacagcgtggcctactccaacaattctatcgccatccctaccaacttcacaatcagcgtgaccacagagatcctgccagtgtctatgaccaagacaagcgtggactgcacaatgtatatctgtggcgatagcaccgagtgctccaacctgctgctgcagtacggctccttttgtacccagctgaatagagccctgacaggcatcgccgtggagcaggataagaacacacaggaggtgttcgcccaggtgaagcagatctacaagaccccacccatcaaggactttggcggcttcaacttcagccagatcctgcctgatccaagcaagccctccaagaggtcttttatcgaggacctgctgttcaacaaggtgaccctggccgatgccggcttcatcaagcagtatggagattgcctgggagacatcgcagcccgcgacctgatctgtgcccagaagtttaatggcctgaccgtgctgcctccactgctgacagatgagatgatcgcccagtacacatctgccctgctggccggcaccatcacaagcggatggaccttcggcgcaggagccgccctgcagatcccttttgccatgcagatggcctataggttcaacggcatcggcgtgacccagaatgtgctgtacgagaaccagaagctgatcgccaatcagtttaacagcgccatcggcaagatccaggactctctgtcctctacagccagcgccctgggcaagctgcaggatgtggtgaatcagaacgcccaggccctgaataccctggtgaagcagctgagctccaacttcggcgccatctctagcgtgctgaatgacatcctgagccggctggacccccctgaggcagaggtgcagatcgacaggctgatcacaggccgcctgcagagcctgcagacctacgtgacacagcagctgatcagggcagcagagatcagagcctccgccaatctggccgccaccaagatgagcgagtgcgtgctgggacagtccaagagggtggacttttgtggcaagggctatcacctgatgtctttcccacagagcgcccctcacggcgtggtgtttctgcacgtgacctacgtgccagcccaggagaagaacttcaccacagcaccagccatctgccacgatggaaaggcacactttcctagggagggcgtgttcgtgtctaacggcacccactggtttgtgacacagcgcaatttctacgagccacagatcatcaccacagacaatacattcgtgagcggcaactgtgatgtggtgatcggcatcgtgaacaataccgtgtatgatccactgcagcccgagctggactcctttaaggaggagctggataagtacttcaagaatcacacctctcccgacgtggatctgggcgacatctccggcatcaatgcctctgtggtgaacatccagaaggagatcgaccggctgaacgaggtggccaagaatctgaacgagagcctgatcgatctgcaggagctgggcaagtatgagcagtacatcaagggctctggcagagagaacctgtatttccagggaggaggaggcagcggatacatccctgaggcaccaagggacggacaggcctacgtgcgcaaggatggcgagtgggtgctgctgtccacctttctgggccatcatcaccaccaccaccaccactga

SEQ ID NO: 5171 - DNA, 3846 bp, Artificial Sequence
  Description of Artificial Sequence: Synthetic polynucleotide
atgggcatcctgccaagcccaggaatgcccgccctgctgtctctggtgagcctgctgtccgtgctgctgatgggatgcgtggcagagacaggcacacagtgcgtgaacctgaccacaaggacccagctgccccctgcctataccaattctttcacacggggcgtgtactatcccgacaaggtgtttagaagctccgtgctgcactccacacaggatctgtttctgcctttcttttctaacgtgacctggttccacgccatccacgtgtccggcaccaatggcacaaagcggttcgacaatcccgtgctgccttttaacgatggcgtgtacttcgccagcaccgagaagtccaacatcatcagaggctggatctttggcaccacactggactctaagacacagagcctgctgatcgtgaacaatgccaccaacgtggtgatcaaggtgtgcgagttccagttttgtaatgatccattcctgggcgtgtactatcacaagaacaataagtcctggatggagtctgagtttcgcgtgtattctagcgccaacaattgcacatttgagtacgtgagccagcccttcctgatggacctggagggcaagcagggcaatttcaagaacctgagggagttcgtgtttaagaatatcgatggctacttcaagatctacagcaagcacaccccaatcaacctggtgcgcgacctgccacagggattctccgccctggagccactggtggatctgcccatcggcatcaacatcacccggtttcagacactgctggccctgcacagatcctacctgacaccaggcgactcctctagcggatggaccgcaggagctgccgcctactatgtgggctatctgcagccccggaccttcctgctgaagtacaacgagaatggcaccatcacagacgcagtggattgcgccctggaccccctgtctgagacaaagtgtacactgaagagctttaccgtggagaagggcatctatcagacaagcaatttcagggtgcagcctaccgagtccatcgtgcgctttcccaatatcacaaacctgtgcccttttggcgaggtgttcaacgccaccagattcgccagcgtgtacgcctggaatcggaagagaatctccaactgcgtggccgactattctgtgctgtacaactccgcctctttcagcacctttaagtgctatggcgtgtctcccacaaagctgaatgatctgtgctttaccaacgtgtacgccgatagcttcgtgatcaggggagacgaagtgagacagatcgcaccaggacagacaggaaagatcgcagactacaattataagctgcctgacgatttcaccggctgcgtgatcgcctggaactccaacaatctggattctaaagtgggcggcaactacaattatctgtacaggctgtttcgcaagtccaatctgaagccattcgagcgggacatctccacagagatctaccaggccggctctaccccctgcaatggcgtggagggctttaactgttatttccctctgcagtcttacggcttccagccaacaaacggcgtgggctatcagccctacagagtggtggtgctgtcctttgagctgctgatggcaccagcaacagtgtgcggcccaaagaagtctaccaatctggtgaagaacaagtgcgtgaacttcaacttcaacggactgaccggcacaggcgtgctgaccgagagcaataagaagttcctgccttttcagcagttcggcagggacatcgcagataccacagacgccgtgcgcgaccctcagaccctggagatcctggacatcacaccatgcagcttcggcggcgtgtccgtgatcacaccaggcaccaatacatccaaccaggtggccgtgctgtatcaggacgtgaattgtaccgaggtgcccgtggcaatccacgcagatcagctgacccctacatggcgggtgtactctaccggcagcaacgtgttccagacaagagccggatgcctgatcggagcagagcacgtgaacaatagctatgagtgcgacatccctatcggcgccggcatctgtgccagctaccagacccagacaaactccccatctggagcaggctccgtggccagccagtccatcatcgcctataccatgagcctgggcgccgagaacagcgtggcctactccaacaattctatcgccatccctaccaacttcacaatcagcgtgaccacagagatcctgccagtgtctatgaccaagacaagcgtggactgcacaatgtatatctgtggcgatagcaccgagtgctccaacctgctgctgcagtacggctccttttgtacccagctgaatagagccctgacaggcatcgccgtggagcaggataagaacacacaggaggtgttcgcccaggtgaagcagatctacaagaccccacccatcaaggactttggcggcttcaacttcagccagatcctgcctgatccaagcaagccctccaagaggtcttttatcgaggacctgctgttcaacaaggtgaccctggccgatgccggcttcatcaagcagtatggagattgcctgggagacatcgcagcccgcgacctgatctgtgcccagaagtttaatggcctgaccgtgctgcctccactgctgacagatgagatgatcgcccagtacacatctgccctgctggccggcaccatcacaagcggatggaccttcggcgcaggagccgccctgcagatcccttttgccatgcagatggcctataggttcaacggcatcggcgtgacccagaatgtgctgtacgagaaccagaagctgatcgccaatcagtttaacagcgccatcggcaagatccaggactctctgtcctctacagccagcgccctgggcaagctgcaggatgtggtgaatcagaacgcccaggccctgaataccctggtgaagcagctgagctccaacttcggcgccatctctagcgtgctgaatgacatcctgagccggctggacccccctgaggcagaggtgcagatcgacaggctgatcacaggccgcctgcagagcctgcagacctacgtgacacagcagctgatcagggcagcagagatcagagcctccgccaatctggccgccaccaagatgagcgagtgcgtgctgggacagtccaagagggtggacttttgtggcaagggctatcacctgatgtctttcccacagagcgcccctcacggcgtggtgtttctgcacgtgacctacgtgccagcccaggagaagaacttcaccacagcaccagccatctgccacgatggaaaggcacactttcctagggagggcgtgttcgtgtctaacggcacccactggtttgtgacacagcgcaatttctacgagccacagatcatcaccacagacaatacattcgtgagcggcaactgtgatgtggtgatcggcatcgtgaacaataccgtgtatgatccactgcagcccgagctggactcctttaaggaggagctggataagtacttcaagaatcacacctctcccgacgtggatctgggcgacatctccggcatcaatgcctctgtggtgaacatccagaaggagatcgaccggctgaacgaggtggccaagaatctgaacgagagcctgatcgatctgcaggagctgggcaagtatgagcagtacatcaagggctctggcagagagaacctgtatttccagggaggaggaggcagcggatacatccctgaggcaccaagggacggacaggcctacgtgcgcaaggatggcgagtgggtgctgctgtccacctttctgggccatcatcaccaccaccaccaccactga

SEQ ID NO: 5172 - DNA, 3846 bp, Artificial Sequence
  Description of Artificial Sequence: Synthetic polynucleotide
atgggcatcctgccaagcccaggaatgcccgccctgctgtctctggtgagcctgctgtccgtgctgctgatgggatgcgtggcagagacaggcacacagtgcgtgaacctgaccacaaggacccagctgccccctgcctataccaattctttcacacggggcgtgtactatcccgacaaggtgtttagaagctccgtgctgcactccacacaggatctgtttctgcctttcttttctaacgtgacctggttccacgccatccacgtgtccggcaccaatggcacaaagcggttcgacaatcccgtgctgccttttaacgatggcgtgtacttcgccagcaccgagaagtccaacatcatcagaggctggatctttggcaccacactggactctaagacacagagcctgctgatcgtgaacaatgccaccaacgtggtgatcaaggtgtgcgagttccagttttgtaatgatccattcctgggcgtgtactatcacaagaacaataagtcctggatggagtctgagtttcgcgtgtattctagcgccaacaattgcacatttgagtacgtgagccagcccttcctgatggacctggagggcaagcagggcaatttcaagaacctgagggagttcgtgtttaagaatatcgatggctacttcaagatctacagcaagcacaccccaatcaacctggtgcgcgacctgccacagggattctccgccctggagccactggtggatctgcccatcggcatcaacatcacccggtttcagacactgctggccctgcacagatcctacctgacaccaggcgactcctctagcggatggaccgcaggagctgccgcctactatgtgggctatctgcagccccggaccttcctgctgaagtacaacgagaatggcaccatcacagacgcagtggattgcgccctggaccccctgtctgagacaaagtgtacactgaagagctttaccgtggagaagggcatctatcagacaagcaatttcagggtgcagcctaccgagtccatcgtgcgctttcccaatatcacaaacctgtgcccttttggcgaggtgttcaacgccaccagattcgccagcgtgtacgcctggaatcggaagagaatctccaactgcgtggccgactattctgtgctgtacaactccgcctctttcagcacctttaagtgctatggcgtgtctcccacaaagctgaatgatctgtgctttaccaacgtgtacgccgatagcttcgtgatcaggggagacgaagtgagacagatcgcaccaggacagacaggaaagatcgcagactacaattataagctgcctgacgatttcaccggctgcgtgatcgcctggaactccaacaaactggattctaaagtgggcggcaactacaattatctgtacaggctgtttcgcaagtccaatctgaagccattcgagcgggacatctccacagagatctaccaggccggctctaccccctgcaatggcgtggagggctttaactgttatttccctctgcagtcttacggcttccagccaacaaacggcgtgggctatcagccctacagagtggtggtgctgtcctttgagctgctgcacgcaccagcaacagtgtgcggcccaaagaagtctaccaatctggtgaagaacaagtgcgtgaacttcaacttcaacggactgaccggcacaggcgtgctgaccgagagcaataagaagttcctgccttttcagcagttcggcagggacatcgcagataccacagacgccgtgcgcgaccctcagaccctggagatcctggacatcacaccatgcagcttcggcggcgtgtccgtgatcacaccaggcaccaatacatccaaccaggtggccgtgctgtatcaggacgtgaattgtaccgaggtgcccgtggcaatccacgcagatcagctgacccctacatggcgggtgtactctaccggcagcaacgtgttccagacaagagccggatgcctgatcggagcagagcacgtgaacaatagctatgagtgcgacatccctatcggcgccggcatctgtgccagctaccagacccagacaaactccccatctggagcaggctccgtggccagccagtccatcatcgcctataccatgagcctgggcgccgagaacagcgtggcctactccaacaattctatcgccatccctaccaacttcacaatcagcgtgaccacagagatcctgccagtgtctatgaccaagacaagcgtggactgcacaatgtatatctgtggcgatagcaccgagtgctccaacctgctgctgcagtacggctccttttgtacccagctgaatagagccctgacaggcatcgccgtggagcaggataagaacacacaggaggtgttcgcccaggtgaagcagatctacaagaccccacccatcaaggactttggcggcttcaacttcagccagatcctgcctgatccaagcaagccctccaagaggtcttttatcgaggacctgctgttcaacaaggtgaccctggccgatgccggcttcatcaagcagtatggagattgcctgggagacatcgcagcccgcgacctgatctgtgcccagaagtttaatggcctgaccgtgctgcctccactgctgacagatgagatgatcgcccagtacacatctgccctgctggccggcaccatcacaagcggatggaccttcggcgcaggagccgccctgcagatcccttttgccatgcagatggcctataggttcaacggcatcggcgtgacccagaatgtgctgtacgagaaccagaagctgatcgccaatcagtttaacagcgccatcggcaagatccaggactctctgtcctctacagccagcgccctgggcaagctgcaggatgtggtgaatcagaacgcccaggccctgaataccctggtgaagcagctgagctccaacttcggcgccatctctagcgtgctgaatgacatcctgagccggctggacccccctgaggcagaggtgcagatcgacaggctgatcacaggccgcctgcagagcctgcagacctacgtgacacagcagctgatcagggcagcagagatcagagcctccgccaatctggccgccaccaagatgagcgagtgcgtgctgggacagtccaagagggtggacttttgtggcaagggctatcacctgatgtctttcccacagagcgcccctcacggcgtggtgtttctgcacgtgacctacgtgccagcccaggagaagaacttcaccacagcaccagccatctgccacgatggaaaggcacactttcctagggagggcgtgttcgtgtctaacggcacccactggtttgtgacacagcgcaatttctacgagccacagatcatcaccacagacaatacattcgtgagcggcaactgtgatgtggtgatcggcatcgtgaacaataccgtgtatgatccactgcagcccgagctggactcctttaaggaggagctggataagtacttcaagaatcacacctctcccgacgtggatctgggcgacatctccggcatcaatgcctctgtggtgaacatccagaaggagatcgaccggctgaacgaggtggccaagaatctgaacgagagcctgatcgatctgcaggagctgggcaagtatgagcagtacatcaagggctctggcagagagaacctgtatttccagggaggaggaggcagcggatacatccctgaggcaccaagggacggacaggcctacgtgcgcaaggatggcgagtgggtgctgctgtccacctttctgggccatcatcaccaccaccaccaccactga

SEQ ID NO: 5173 - DNA, 3846 bp, Artificial Sequence
  Description of Artificial Sequence: Synthetic polynucleotide
atgggcatcctgccaagcccaggaatgcccgccctgctgtctctggtgagcctgctgtccgtgctgctgatgggatgcgtggcagagacaggcacacagtgcgtgaacctgaccacaaggacccagctgccccctgcctataccaattctttcacacggggcgtgtactatcccgacaaggtgtttagaagctccgtgctgcactccacacaggatctgtttctgcctttcttttctaacgtgacctggttccacgccatccacgtgtccggcaccaatggcacaaagcggttcgacaatcccgtgctgccttttaacgatggcgtgtacttcgccagcaccgagaagtccaacatcatcagaggctggatctttggcaccacactggactctaagacacagagcctgctgatcgtgaacaatgccaccaacgtggtgatcaaggtgtgcgagttccagttttgtaatgatccattcctgggcgtgtactatcacaagaacaataagtcctggatggagtctgagtttcgcgtgtattctagcgccaacaattgcacatttgagtacgtgagccagcccttcctgatggacctggagggcaagcagggcaatttcaagaacctgagggagttcgtgtttaagaatatcgatggctacttcaagatctacagcaagcacaccccaatcaacctggtgcgcgacctgccacagggattctccgccctggagccactggtggatctgcccatcggcatcaacatcacccggtttcagacactgctggccctgcacagatcctacctgacaccaggcgactcctctagcggatggaccgcaggagctgccgcctactatgtgggctatctgcagccccggaccttcctgctgaagtacaacgagaatggcaccatcacagacgcagtggattgcgccctggaccccctgtctgagacaaagtgtacactgaagagctttaccgtggagaagggcatctatcagacaagcaatttcagggtgcagcctaccgagtccatcgtgcgctttcccaatatcacaaacctgtgcccttttggcgaggtgttcaacgccaccagattcgccagcgtgtacgcctggaatcggaagagaatctccaactgcgtggccgactattctgtgctgtacaactccgcctctttcagcacctttaagtgctatggcgtgtctcccacaaagctgaatgatctgtgctttaccaacgtgtacgccgatagcttcgtgatcaggggagacgaagtgagacagatcgcaccaggacagacaggaaagatcgcagactacaattataagctgcctgacgatttcaccggctgcgtgatcgcctggaactccaacaatctggattctaaagtgggcggcaactacaattatctgtacaggctgtttcgcaagtccaatctgaagccattcgagcgggacatctccacagagatctaccaggccggctctaccccctgcaatggcgtggagggctttaactgttatttccctctgcagtcttacggcttccagccaacaaacggcgtgggctatcagccctacagagtggtggtgctgtcctttgagctgctgcacgcaccagcaacagtgtgcggcccaaagaagtctaccaatctggtgaagaacaagtgcgtgaacttcaacttcaacggacataccggcacaggcgtgctgaccgagagcaataagaagttcctgccttttcagcagttcggcagggacatcgcagataccacagacgccgtgcgcgaccctcagaccctggagatcctggacatcacaccatgcagcttcggcggcgtgtccgtgatcacaccaggcaccaatacatccaaccaggtggccgtgctgtatcaggacgtgaattgtaccgaggtgcccgtggcaatccacgcagatcagctgacccctacatggcgggtgtactctaccggcagcaacgtgttccagacaagagccggatgcctgatcggagcagagcacgtgaacaatagctatgagtgcgacatccctatcggcgccggcatctgtgccagctaccagacccagacaaactccccatctggagcaggctccgtggccagccagtccatcatcgcctataccatgagcctgggcgccgagaacagcgtggcctactccaacaattctatcgccatccctaccaacttcacaatcagcgtgaccacagagatcctgccagtgtctatgaccaagacaagcgtggactgcacaatgtatatctgtggcgatagcaccgagtgctccaacctgctgctgcagtacggctccttttgtacccagctgaatagagccctgacaggcatcgccgtggagcaggataagaacacacaggaggtgttcgcccaggtgaagcagatctacaagaccccacccatcaaggactttggcggcttcaacttcagccagatcctgcctgatccaagcaagccctccaagaggtcttttatcgaggacctgctgttcaacaaggtgaccctggccgatgccggcttcatcaagcagtatggagattgcctgggagacatcgcagcccgcgacctgatctgtgcccagaagtttaatggcctgaccgtgctgcctccactgctgacagatgagatgatcgcccagtacacatctgccctgctggccggcaccatcacaagcggatggaccttcggcgcaggagccgccctgcagatcccttttgccatgcagatggcctataggttcaacggcatcggcgtgacccagaatgtgctgtacgagaaccagaagctgatcgccaatcagtttaacagcgccatcggcaagatccaggactctctgtcctctacagccagcgccctgggcaagctgcaggatgtggtgaatcagaacgcccaggccctgaataccctggtgaagcagctgagctccaacttcggcgccatctctagcgtgctgaatgacatcctgagccggctggacccccctgaggcagaggtgcagatcgacaggctgatcacaggccgcctgcagagcctgcagacctacgtgacacagcagctgatcagggcagcagagatcagagcctccgccaatctggccgccaccaagatgagcgagtgcgtgctgggacagtccaagagggtggacttttgtggcaagggctatcacctgatgtctttcccacagagcgcccctcacggcgtggtgtttctgcacgtgacctacgtgccagcccaggagaagaacttcaccacagcaccagccatctgccacgatggaaaggcacactttcctagggagggcgtgttcgtgtctaacggcacccactggtttgtgacacagcgcaatttctacgagccacagatcatcaccacagacaatacattcgtgagcggcaactgtgatgtggtgatcggcatcgtgaacaataccgtgtatgatccactgcagcccgagctggactcctttaaggaggagctggataagtacttcaagaatcacacctctcccgacgtggatctgggcgacatctccggcatcaatgcctctgtggtgaacatccagaaggagatcgaccggctgaacgaggtggccaagaatctgaacgagagcctgatcgatctgcaggagctgggcaagtatgagcagtacatcaagggctctggcagagagaacctgtatttccagggaggaggaggcagcggatacatccctgaggcaccaagggacggacaggcctacgtgcgcaaggatggcgagtgggtgctgctgtccacctttctgggccatcatcaccaccaccaccaccactga

SEQ ID NO: 5174 - DNA, 3846 bp, Artificial Sequence
  Description of Artificial Sequence: Synthetic polynucleotide
atgggcatcctgccaagcccaggaatgcccgccctgctgtctctggtgagcctgctgtccgtgctgctgatgggatgcgtggcagagacaggcacacagtgcgtgaacctgaccacaaggacccagctgccccctgcctataccaattctttcacacggggcgtgtactatcccgacaaggtgtttagaagctccgtgctgcactccacacaggatctgtttctgcctttcttttctaacgtgacctggttccacgccatccacgtgtccggcaccaatggcacaaagcggttcgacaatcccgtgctgccttttaacgatggcgtgtacttcgccagcaccgagaagtccaacatcatcagaggctggatctttggcaccacactggactctaagacacagagcctgctgatcgtgaacaatgccaccaacgtggtgatcaaggtgtgcgagttccagttttgtaatgatccattcctgggcgtgtactatcacaagaacaataagtcctggatggagtctgagtttcgcgtgtattctagcgccaacaattgcacatttgagtacgtgagccagcccttcctgatggacctggagggcaagcagggcaatttcaagaacctgagggagttcgtgtttaagaatatcgatggctacttcaagatctacagcaagcacaccccaatcaacctggtgcgcgacctgccacagggattctccgccctggagccactggtggatctgcccatcggcatcaacatcacccggtttcagacactgctggccctgcacagatcctacctgacaccaggcgactcctctagcggatggaccgcaggagctgccgcctactatgtgggctatctgcagccccggaccttcctgctgaagtacaacgagaatggcaccatcacagacgcagtggattgcgccctggaccccctgtctgagacaaagtgtacactgaagagctttaccgtggagaagggcatctatcagacaagcaatttcagggtgcagcctaccgagtccatcgtgcgctttcccaatatcacaaacctgtgcccttttggcgaggtgttcaacgccaccagattcgccagcgtgtacgcctggaatcggaagagaatctccaactgcgtggccgactattctgtgctgtacaactccgcctctttcagcacctttaagtgctatggcgtgtctcccacaaagctgaatgatctgtgctttaccaacgtgtacgccgatagcttcgtgatcaggggagacgaagtgagacagatcgcaccaggacagacaggaaagatcgcagactacaattataagctgcctgacgatttcaccggctgcgtgatcgcctggaactccaacaatctggattctaaagtgggcggcaactacaattatctgtacaggctgtttcgcaagtccaatctgaagccattcgagcgggacatctccacagagatctaccaggccggctctaccccctgcaatggcgtggagggctttaactcatatttccctctgcagtcttacggcttccagccaacaaacggcgtgggctatcagccctacagagtggtggtgctgtcctttgagctgctgcacgcaccagcaacagtgtgcggcccaaagaagtctaccaatctggtgaagaacaagtgcgtgaacttcaacttcaacggactgaccggcacaggcgtgctgaccgagagcaataagaagttcctgccttttcagcagttcggcagggacatcgcagataccacagacgccgtgcgcgaccctcagaccctggagatcctggacatcacaccatgcagcttcggcggcgtgtccgtgatcacaccaggcaccaatacatccaaccaggtggccgtgctgtatcaggacgtgaattgtaccgaggtgcccgtggcaatccacgcagatcagctgacccctacatggcgggtgtactctaccggcagcaacgtgttccagacaagagccggatgcctgatcggagcagagcacgtgaacaatagctatgagtgcgacatccctatcggcgccggcatctgtgccagctaccagacccagacaaactccccatctggagcaggctccgtggccagccagtccatcatcgcctataccatgagcctgggcgccgagaacagcgtggcctactccaacaattctatcgccatccctaccaacttcacaatcagcgtgaccacagagatcctgccagtgtctatgaccaagacaagcgtggactgcacaatgtatatctgtggcgatagcaccgagtgctccaacctgctgctgcagtacggctccttttgtacccagctgaatagagccctgacaggcatcgccgtggagcaggataagaacacacaggaggtgttcgcccaggtgaagcagatctacaagaccccacccatcaaggactttggcggcttcaacttcagccagatcctgcctgatccaagcaagccctccaagaggtcttttatcgaggacctgctgttcaacaaggtgaccctggccgatgccggcttcatcaagcagtatggagattgcctgggagacatcgcagcccgcgacctgatctgtgcccagaagtttaatggcctgaccgtgctgcctccactgctgacagatgagatgatcgcccagtacacatctgccctgctggccggcaccatcacaagcggatggaccttcggcgcaggagccgccctgcagatcccttttgccatgcagatggcctataggttcaacggcatcggcgtgacccagaatgtgctgtacgagaaccagaagctgatcgccaatcagtttaacagcgccatcggcaagatccaggactctctgtcctctacagccagcgccctgggcaagctgcaggatgtggtgaatcagaacgcccaggccctgaataccctggtgaagcagctgagctccaacttcggcgccatctctagcgtgctgaatgacatcctgagccggctggacccccctgaggcagaggtgcagatcgacaggctgatcacaggccgcctgcagagcctgcagacctacgtgacacagcagctgatcagggcagcagagatcagagcctccgccaatctggccgccaccaagatgagcgagtgcgtgctgggacagtccaagagggtggacttttgtggcaagggctatcacctgatgtctttcccacagagcgcccctcacggcgtggtgtttctgcacgtgacctacgtgccagcccaggagaagaacttcaccacagcaccagccatctgccacgatggaaaggcacactttcctagggagggcgtgttcgtgtctaacggcacccactggtttgtgacacagcgcaatttctacgagccacagatcatcaccacagacaatacattcgtgagcggcaactgtgatgtggtgatcggcatcgtgaacaataccgtgtatgatccactgcagcccgagctggactcctttaaggaggagctggataagtacttcaagaatcacacctctcccgacgtggatctgggcgacatctccggcatcaatgcctctgtggtgaacatccagaaggagatcgaccggctgaacgaggtggccaagaatctgaacgagagcctgatcgatctgcaggagctgggcaagtatgagcagtacatcaagggctctggcagagagaacctgtatttccagggaggaggaggcagcggatacatccctgaggcaccaagggacggacaggcctacgtgcgcaaggatggcgagtgggtgctgctgtccacctttctgggccatcatcaccaccaccaccaccactga

SEQ ID NO: 5175 - DNA, 3846 bp, Artificial Sequence
  Description of Artificial Sequence: Synthetic polynucleotide
atgggcatcctgccaagcccaggaatgcccgccctgctgtctctggtgagcctgctgtccgtgctgctgatgggatgcgtggcagagacaggcacacagtgcgtgaacctgaccacaaggacccagctgccccctgcctataccaattctttcacacggggcgtgtactatcccgacaaggtgtttagaagctccgtgctgcactccacacaggatctgtttctgcctttcttttctaacgtgacctggttccacgccatccacgtgtccggcaccaatggcacaaagcggttcgacaatcccgtgctgccttttaacgatggcgtgtacttcgccagcaccgagaagtccaacatcatcagaggctggatctttggcaccacactggactctaagacacagagcctgctgatcgtgaacaatgccaccaacgtggtgatcaaggtgtgcgagttccagttttgtaatgatccattcctgggcgtgtactatcacaagaacaataagtcctggatggagtctgagtttcgcgtgtattctagcgccaacaattgcacatttgagtacgtgagccagcccttcctgatggacctggagggcaagcagggcaatttcaagaacctgagggagttcgtgtttaagaatatcgatggctacttcaagatctacagcaagcacaccccaatcaacctggtgcgcgacctgccacagggattctccgccctggagccactggtggatctgcccatcggcatcaacatcacccggtttcagacactgctggccctgcacagatcctacctgacaccaggcgactcctctagcggatggaccgcaggagctgccgcctactatgtgggctatctgcagccccggaccttcctgctgaagtacaacgagaatggcaccatcacagacgcagtggattgcgccctggaccccctgtctgagacaaagtgtacactgaagagctttaccgtggagaagggcatctatcagacaagcaatttcagggtgcagcctaccgagtccatcgtgcgctttcccaatatcacaaacctgtgcccttttggcgaggtgttcaacgccaccagattcgccagcgtgtacgcctggaatcggaagagaatctccaactgcgtggccgactattctgtgctgtacaactccgcctctttcagcacctttaagtgctatggcgtgtctcccacaaagctgaatgatctgtgctttaccaacgtgtacgccgatagcttcgtgatcaggggagacgaagtgagacagatcgcaccaggacagacaggaaagatcgcagactacaattataagctgcctgacgatttcaccggctgcgtgatcgcctggaactccaacaatctggattctaaagtgggcggcaactacaattatctgtacaggctgtttcgcaagtccaatctgaagccattccgccgggacatctccacagagatctaccaggccggctctaccccctgcaatggcgtggagggctttaactgttatttccctctgcagtcttacggcttccagccaacaaacggcgtgggctatcagccctacagagtggtggtgctgtcctttgagctgctgcacgcaccagcaacagtgtgcggcccaaagaagtctaccaatctggtgaagaacaagtgcgtgaacttcaacttcaacggactgaccggcacaggcgtgctgaccgagagcaataagaagttcctgccttttcagcagttcggcagggacatcgcagataccacagacgccgtgcgcgaccctcagaccctggagatcctggacatcacaccatgcagcttcggcggcgtgtccgtgatcacaccaggcaccaatacatccaaccaggtggccgtgctgtatcaggacgtgaattgtaccgaggtgcccgtggcaatccacgcagatcagctgacccctacatggcgggtgtactctaccggcagcaacgtgttccagacaagagccggatgcctgatcggagcagagcacgtgaacaatagctatgagtgcgacatccctatcggcgccggcatctgtgccagctaccagacccagacaaactccccatctggagcaggctccgtggccagccagtccatcatcgcctataccatgagcctgggcgccgagaacagcgtggcctactccaacaattctatcgccatccctaccaacttcacaatcagcgtgaccacagagatcctgccagtgtctatgaccaagacaagcgtggactgcacaatgtatatctgtggcgatagcaccgagtgctccaacctgctgctgcagtacggctccttttgtacccagctgaatagagccctgacaggcatcgccgtggagcaggataagaacacacaggaggtgttcgcccaggtgaagcagatctacaagaccccacccatcaaggactttggcggcttcaacttcagccagatcctgcctgatccaagcaagccctccaagaggtcttttatcgaggacctgctgttcaacaaggtgaccctggccgatgccggcttcatcaagcagtatggagattgcctgggagacatcgcagcccgcgacctgatctgtgcccagaagtttaatggcctgaccgtgctgcctccactgctgacagatgagatgatcgcccagtacacatctgccctgctggccggcaccatcacaagcggatggaccttcggcgcaggagccgccctgcagatcccttttgccatgcagatggcctataggttcaacggcatcggcgtgacccagaatgtgctgtacgagaaccagaagctgatcgccaatcagtttaacagcgccatcggcaagatccaggactctctgtcctctacagccagcgccctgggcaagctgcaggatgtggtgaatcagaacgcccaggccctgaataccctggtgaagcagctgagctccaacttcggcgccatctctagcgtgctgaatgacatcctgagccggctggacccccctgaggcagaggtgcagatcgacaggctgatcacaggccgcctgcagagcctgcagacctacgtgacacagcagctgatcagggcagcagagatcagagcctccgccaatctggccgccaccaagatgagcgagtgcgtgctgggacagtccaagagggtggacttttgtggcaagggctatcacctgatgtctttcccacagagcgcccctcacggcgtggtgtttctgcacgtgacctacgtgccagcccaggagaagaacttcaccacagcaccagccatctgccacgatggaaaggcacactttcctagggagggcgtgttcgtgtctaacggcacccactggtttgtgacacagcgcaatttctacgagccacagatcatcaccacagacaatacattcgtgagcggcaactgtgatgtggtgatcggcatcgtgaacaataccgtgtatgatccactgcagcccgagctggactcctttaaggaggagctggataagtacttcaagaatcacacctctcccgacgtggatctgggcgacatctccggcatcaatgcctctgtggtgaacatccagaaggagatcgaccggctgaacgaggtggccaagaatctgaacgagagcctgatcgatctgcaggagctgggcaagtatgagcagtacatcaagggctctggcagagagaacctgtatttccagggaggaggaggcagcggatacatccctgaggcaccaagggacggacaggcctacgtgcgcaaggatggcgagtgggtgctgctgtccacctttctgggccatcatcaccaccaccaccaccactga

SEQ ID NO: 5176 - DNA, 3846 bp, Artificial Sequence
  Description of Artificial Sequence: Synthetic polynucleotide
atgggcatcctgccaagcccaggaatgcccgccctgctgtctctggtgagcctgctgtccgtgctgctgatgggatgcgtggcagagacaggcacacagtgcgtgaacctgaccacaaggacccagctgccccctgcctataccaattctttcacacggggcgtgtactatcccgacaaggtgtttagaagctccgtgctgcactccacacaggatctgtttctgcctttcttttctaacgtgacctggttccacgccatccacgtgtccggcaccaatggcacaaagcggttcgacaatcccgtgctgccttttaacgatggcgtgtacttcgccagcaccgagaagtccaacatcatcagaggctggatctttggcaccacactggactctaagacacagagcctgctgatcgtgaacaatgccaccaacgtggtgatcaaggtgtgcgagttccagttttgtaatgatccattcctgggcgtgtactatcacaagaacaataagtcctggatggagtctgagtttcgcgtgtattctagcgccaacaattgcacatttgagtacgtgagccagcccttcctgatggacctggagggcaagcagggcaatttcaagaacctgagggagttcgtgtttaagaatatcgatggctacttcaagatctacagcaagcacaccccaatcaacctggtgcgcgacctgccacagggattctccgccctggagccactggtggatctgcccatcggcatcaacatcacccggtttcagacactgctggccctgcacagatcctacctgacaccaggcgactcctctagcggatggaccgcaggagctgccgcctactatgtgggctatctgcagccccggaccttcctgctgaagtacaacgagaatggcaccatcacagacgcagtggattgcgccctggaccccctgtctgagacaaagtgtacactgaagagctttaccgtggagaagggcatctatcagacaagcaatttcagggtgcagcctaccgagtccatcgtgcgctttcccaatatcacaaacctgtgcccttttggcgaggtgttcaacgccaccagattcgccagcgtgtacgcctggaatcggaagagaatctccaactgcgtggccgactattctgtgctgtacaactccgcctctttcagcacctttaagtgctatggcgtgtctcccacaaagctgaatgatctgtgctttaccaacgtgtacgccgatagcttcgtgatcaggggagacgaagtgagacagatcgcaccaggacagacaggaaagatcgcagactacaattataagctgcctgacgatttcaccggctgcgtgatcgcctggaactccaacaatctggattctaaagtgggcggcaactacaattatctgtacaggctgtttcgcaagtccaatctgaagccattcgagcgggacatctccacagagacgtaccaggccggctctaccccctgcaatggcgtggagggctttaactgttatttccctctgcagtcttacggcttccagccaacaaacggcgtgggctatcagccctacagagtggtggtgctgtcctttgagctgctgcacgcaccagcaacagtgtgcggcccaaagaagtctaccaatctggtgaagaacaagtgcgtgaacttcaacttcaacggactgaccggcacaggcgtgctgaccgagagcaataagaagttcctgccttttcagcagttcggcagggacatcgcagataccacagacgccgtgcgcgaccctcagaccctggagatcctggacatcacaccatgcagcttcggcggcgtgtccgtgatcacaccaggcaccaatacatccaaccaggtggccgtgctgtatcaggacgtgaattgtaccgaggtgcccgtggcaatccacgcagatcagctgacccctacatggcgggtgtactctaccggcagcaacgtgttccagacaagagccggatgcctgatcggagcagagcacgtgaacaatagctatgagtgcgacatccctatcggcgccggcatctgtgccagctaccagacccagacaaactccccatctggagcaggctccgtggccagccagtccatcatcgcctataccatgagcctgggcgccgagaacagcgtggcctactccaacaattctatcgccatccctaccaacttcacaatcagcgtgaccacagagatcctgccagtgtctatgaccaagacaagcgtggactgcacaatgtatatctgtggcgatagcaccgagtgctccaacctgctgctgcagtacggctccttttgtacccagctgaatagagccctgacaggcatcgccgtggagcaggataagaacacacaggaggtgttcgcccaggtgaagcagatctacaagaccccacccatcaaggactttggcggcttcaacttcagccagatcctgcctgatccaagcaagccctccaagaggtcttttatcgaggacctgctgttcaacaaggtgaccctggccgatgccggcttcatcaagcagtatggagattgcctgggagacatcgcagcccgcgacctgatctgtgcccagaagtttaatggcctgaccgtgctgcctccactgctgacagatgagatgatcgcccagtacacatctgccctgctggccggcaccatcacaagcggatggaccttcggcgcaggagccgccctgcagatcccttttgccatgcagatggcctataggttcaacggcatcggcgtgacccagaatgtgctgtacgagaaccagaagctgatcgccaatcagtttaacagcgccatcggcaagatccaggactctctgtcctctacagccagcgccctgggcaagctgcaggatgtggtgaatcagaacgcccaggccctgaataccctggtgaagcagctgagctccaacttcggcgccatctctagcgtgctgaatgacatcctgagccggctggacccccctgaggcagaggtgcagatcgacaggctgatcacaggccgcctgcagagcctgcagacctacgtgacacagcagctgatcagggcagcagagatcagagcctccgccaatctggccgccaccaagatgagcgagtgcgtgctgggacagtccaagagggtggacttttgtggcaagggctatcacctgatgtctttcccacagagcgcccctcacggcgtggtgtttctgcacgtgacctacgtgccagcccaggagaagaacttcaccacagcaccagccatctgccacgatggaaaggcacactttcctagggagggcgtgttcgtgtctaacggcacccactggtttgtgacacagcgcaatttctacgagccacagatcatcaccacagacaatacattcgtgagcggcaactgtgatgtggtgatcggcatcgtgaacaataccgtgtatgatccactgcagcccgagctggactcctttaaggaggagctggataagtacttcaagaatcacacctctcccgacgtggatctgggcgacatctccggcatcaatgcctctgtggtgaacatccagaaggagatcgaccggctgaacgaggtggccaagaatctgaacgagagcctgatcgatctgcaggagctgggcaagtatgagcagtacatcaagggctctggcagagagaacctgtatttccagggaggaggaggcagcggatacatccctgaggcaccaagggacggacaggcctacgtgcgcaaggatggcgagtgggtgctgctgtccacctttctgggccatcatcaccaccaccaccaccactga

SEQ ID NO: 5177 - DNA, 3846 bp, Artificial Sequence
  Description of Artificial Sequence: Synthetic polynucleotide
atgggcatcctgccaagcccaggaatgcccgccctgctgtctctggtgagcctgctgtccgtgctgctgatgggatgcgtggcagagacaggcacacagtgcgtgaacctgaccacaaggacccagctgccccctgcctataccaattctttcacacggggcgtgtactatcccgacaaggtgtttagaagctccgtgctgcactccacacaggatctgtttctgcctttcttttctaacgtgacctggttccacgccatccacgtgtccggcaccaatggcacaaagcggttcgacaatcccgtgctgccttttaacgatggcgtgtacttcgccagcaccgagaagtccaacatcatcagaggctggatctttggcaccacactggactctaagacacagagcctgctgatcgtgaacaatgccaccaacgtggtgatcaaggtgtgcgagttccagttttgtaatgatccattcctgggcgtgtactatcacaagaacaataagtcctggatggagtctgagtttcgcgtgtattctagcgccaacaattgcacatttgagtacgtgagccagcccttcctgatggacctggagggcaagcagggcaatttcaagaacctgagggagttcgtgtttaagaatatcgatggctacttcaagatctacagcaagcacaccccaatcaacctggtgcgcgacctgccacagggattctccgccctggagccactggtggatctgcccatcggcatcaacatcacccggtttcagacactgctggccctgcacagatcctacctgacaccaggcgactcctctagcggatggaccgcaggagctgccgcctactatgtgggctatctgcagccccggaccttcctgctgaagtacaacgagaatggcaccatcacagacgcagtggattgcgccctggaccccctgtctgagacaaagtgtacactgaagagctttaccgtggagaagggcatctatcagacaagcaatttcagggtgcagcctaccgagtccatcgtgcgctttcccgcgatcacaaacctgtgcccttttggcgaggtgttcaacgccaccagattcgccagcgtgtacgcctggaatcggaagagaatctccaactgcgtggccgactattctgtgctgtacaactccgcctctttcagcacctttaagtgctatggcgtgtctcccacaaagctgaatgatctgtgctttaccaacgtgtacgccgatagcttcgtgatcaggggagacgaagtgagacagatcgcaccaggacagacaggaaagatcgcagactacaattataagctgcctgacgatttcaccggctgcgtgatcgcctggaactccaacaatctggattctaaagtgggcggcaactacaattatctgtacaggctgtttcgcaagtccaatctgaagccattcgagcgggacatctccacagagatctaccaggccggctctaccccctgcaatggcgtggagggctttaactgttatttccctctgcagtcttacggcttccagccaacaaacggcgtgggctatcagccctacagagtggtggtgctgtcctttgagctgctgcacgcaccagcaacagtgtgcggcccaaagaagtctaccaatctggtgaagaacaagtgcgtgaacttcaacttcaacggactgaccggcacaggcgtgctgaccgagagcaataagaagttcctgccttttcagcagttcggcagggacatcgcagataccacagacgccgtgcgcgaccctcagaccctggagatcctggacatcacaccatgcagcttcggcggcgtgtccgtgatcacaccaggcaccaatacatccaaccaggtggccgtgctgtatcaggacgtgaattgtaccgaggtgcccgtggcaatccacgcagatcagctgacccctacatggcgggtgtactctaccggcagcaacgtgttccagacaagagccggatgcctgatcggagcagagcacgtgaacaatagctatgagtgcgacatccctatcggcgccggcatctgtgccagctaccagacccagacaaactccccatctggagcaggctccgtggccagccagtccatcatcgcctataccatgagcctgggcgccgagaacagcgtggcctactccaacaattctatcgccatccctaccaacttcacaatcagcgtgaccacagagatcctgccagtgtctatgaccaagacaagcgtggactgcacaatgtatatctgtggcgatagcaccgagtgctccaacctgctgctgcagtacggctccttttgtacccagctgaatagagccctgacaggcatcgccgtggagcaggataagaacacacaggaggtgttcgcccaggtgaagcagatctacaagaccccacccatcaaggactttggcggcttcaacttcagccagatcctgcctgatccaagcaagccctccaagaggtcttttatcgaggacctgctgttcaacaaggtgaccctggccgatgccggcttcatcaagcagtatggagattgcctgggagacatcgcagcccgcgacctgatctgtgcccagaagtttaatggcctgaccgtgctgcctccactgctgacagatgagatgatcgcccagtacacatctgccctgctggccggcaccatcacaagcggatggaccttcggcgcaggagccgccctgcagatcccttttgccatgcagatggcctataggttcaacggcatcggcgtgacccagaatgtgctgtacgagaaccagaagctgatcgccaatcagtttaacagcgccatcggcaagatccaggactctctgtcctctacagccagcgccctgggcaagctgcaggatgtggtgaatcagaacgcccaggccctgaataccctggtgaagcagctgagctccaacttcggcgccatctctagcgtgctgaatgacatcctgagccggctggacccccctgaggcagaggtgcagatcgacaggctgatcacaggccgcctgcagagcctgcagacctacgtgacacagcagctgatcagggcagcagagatcagagcctccgccaatctggccgccaccaagatgagcgagtgcgtgctgggacagtccaagagggtggacttttgtggcaagggctatcacctgatgtctttcccacagagcgcccctcacggcgtggtgtttctgcacgtgacctacgtgccagcccaggagaagaacttcaccacagcaccagccatctgccacgatggaaaggcacactttcctagggagggcgtgttcgtgtctaacggcacccactggtttgtgacacagcgcaatttctacgagccacagatcatcaccacagacaatacattcgtgagcggcaactgtgatgtggtgatcggcatcgtgaacaataccgtgtatgatccactgcagcccgagctggactcctttaaggaggagctggataagtacttcaagaatcacacctctcccgacgtggatctgggcgacatctccggcatcaatgcctctgtggtgaacatccagaaggagatcgaccggctgaacgaggtggccaagaatctgaacgagagcctgatcgatctgcaggagctgggcaagtatgagcagtacatcaagggctctggcagagagaacctgtatttccagggaggaggaggcagcggatacatccctgaggcaccaagggacggacaggcctacgtgcgcaaggatggcgagtgggtgctgctgtccacctttctgggccatcatcaccaccaccaccaccactga

SEQ ID NO: 5178 - DNA, 3846 bp, Artificial Sequence
  Description of Artificial Sequence: Synthetic polynucleotide
atgggcatcctgccaagcccaggaatgcccgccctgctgtctctggtgagcctgctgtccgtgctgctgatgggatgcgtggcagagacaggcacacagtgcgtgaacctgaccacaaggacccagctgccccctgcctataccaattctttcacacggggcgtgtactatcccgacaaggtgtttagaagctccgtgctgcactccacacaggatctgtttctgcctttcttttctaacgtgacctggttccacgccatccacgtgtccggcaccaatggcacaaagcggttcgacaatcccgtgctgccttttaacgatggcgtgtacttcgccagcaccgagaagtccaacatcatcagaggctggatctttggcaccacactggactctaagacacagagcctgctgatcgtgaacaatgccaccaacgtggtgatcaaggtgtgcgagttccagttttgtaatgatccattcctgggcgtgtactatcacaagaacaataagtcctggatggagtctgagtttcgcgtgtattctagcgccaacaattgcacatttgagtacgtgagccagcccttcctgatggacctggagggcaagcagggcaatttcaagaacctgagggagttcgtgtttaagaatatcgatggctacttcaagatctacagcaagcacaccccaatcaacctggtgcgcgacctgccacagggattctccgccctggagccactggtggatctgcccatcggcatcaacatcacccggtttcagacactgctggccctgcacagatcctacctgacaccaggcgactcctctagcggatggaccgcaggagctgccgcctactatgtgggctatctgcagccccggaccttcctgctgaagtacaacgagaatggcaccatcacagacgcagtggattgcgccctggaccccctgtctgagacaaagtgtacactgaagagctttaccgtggagaagggcatctatcagacaagcaatttcagggtgcagcctaccgagtccatcgtgcgctttcccaatatcacaaacctgtgcccttttggcgaggtgttcaacgccaccagattcgccagcgtgtacgcctggaatcggaagagaatctccaactgcgtggccgactattctgtgctgtaccaatccgcctctttcagcacctttaagtgctatggcgtgtctcccacaaagctgaatgatctgtgctttaccaacgtgtacgccgatagcttcgtgatcaggggagacgaagtgagacagatcgcaccaggacagacaggaaagatcgcagactacaattataagctgcctgacgatttcaccggctgcgtgatcgcctggaactccaacaatctggattctaaagtgggcggcaactacaattatctgtacaggctgtttcgcaagtccaatctgaagccattcgagcgggacatctccacagagatctaccaggccggctctaccccctgcaatggcgtggagggctttaactgttatttccctctgcagtcttacggcttccagccaacaaacggcgtgggctatcagccctacagagtggtggtgctgtcctttgagctgctgcacgcaccagcaacagtgtgcggcccaaagaagtctaccaatctggtgaagaacaagtgcgtgaacttcaacttcaacggactgaccggcacaggcgtgctgaccgagagcaataagaagttcctgccttttcagcagttcggcagggacatcgcagataccacagacgccgtgcgcgaccctcagaccctggagatcctggacatcacaccatgcagcttcggcggcgtgtccgtgatcacaccaggcaccaatacatccaaccaggtggccgtgctgtatcaggacgtgaattgtaccgaggtgcccgtggcaatccacgcagatcagctgacccctacatggcgggtgtactctaccggcagcaacgtgttccagacaagagccggatgcctgatcggagcagagcacgtgaacaatagctatgagtgcgacatccctatcggcgccggcatctgtgccagctaccagacccagacaaactccccatctggagcaggctccgtggccagccagtccatcatcgcctataccatgagcctgggcgccgagaacagcgtggcctactccaacaattctatcgccatccctaccaacttcacaatcagcgtgaccacagagatcctgccagtgtctatgaccaagacaagcgtggactgcacaatgtatatctgtggcgatagcaccgagtgctccaacctgctgctgcagtacggctccttttgtacccagctgaatagagccctgacaggcatcgccgtggagcaggataagaacacacaggaggtgttcgcccaggtgaagcagatctacaagaccccacccatcaaggactttggcggcttcaacttcagccagatcctgcctgatccaagcaagccctccaagaggtcttttatcgaggacctgctgttcaacaaggtgaccctggccgatgccggcttcatcaagcagtatggagattgcctgggagacatcgcagcccgcgacctgatctgtgcccagaagtttaatggcctgaccgtgctgcctccactgctgacagatgagatgatcgcccagtacacatctgccctgctggccggcaccatcacaagcggatggaccttcggcgcaggagccgccctgcagatcccttttgccatgcagatggcctataggttcaacggcatcggcgtgacccagaatgtgctgtacgagaaccagaagctgatcgccaatcagtttaacagcgccatcggcaagatccaggactctctgtcctctacagccagcgccctgggcaagctgcaggatgtggtgaatcagaacgcccaggccctgaataccctggtgaagcagctgagctccaacttcggcgccatctctagcgtgctgaatgacatcctgagccggctggacccccctgaggcagaggtgcagatcgacaggctgatcacaggccgcctgcagagcctgcagacctacgtgacacagcagctgatcagggcagcagagatcagagcctccgccaatctggccgccaccaagatgagcgagtgcgtgctgggacagtccaagagggtggacttttgtggcaagggctatcacctgatgtctttcccacagagcgcccctcacggcgtggtgtttctgcacgtgacctacgtgccagcccaggagaagaacttcaccacagcaccagccatctgccacgatggaaaggcacactttcctagggagggcgtgttcgtgtctaacggcacccactggtttgtgacacagcgcaatttctacgagccacagatcatcaccacagacaatacattcgtgagcggcaactgtgatgtggtgatcggcatcgtgaacaataccgtgtatgatccactgcagcccgagctggactcctttaaggaggagctggataagtacttcaagaatcacacctctcccgacgtggatctgggcgacatctccggcatcaatgcctctgtggtgaacatccagaaggagatcgaccggctgaacgaggtggccaagaatctgaacgagagcctgatcgatctgcaggagctgggcaagtatgagcagtacatcaagggctctggcagagagaacctgtatttccagggaggaggaggcagcggatacatccctgaggcaccaagggacggacaggcctacgtgcgcaaggatggcgagtgggtgctgctgtccacctttctgggccatcatcaccaccaccaccaccactga

SEQ ID NO: 5179 - DNA, 3846 bp, Artificial Sequence
  Description of Artificial Sequence: Synthetic polynucleotide
atgggcatcctgccaagcccaggaatgcccgccctgctgtctctggtgagcctgctgtccgtgctgctgatgggatgcgtggcagagacaggcacacagtgcgtgaacctgaccacaaggacccagctgccccctgcctataccaattctttcacacggggcgtgtactatcccgacaaggtgtttagaagctccgtgctgcactccacacaggatctgtttctgcctttcttttctaacgtgacctggttccacgccatccacgtgtccggcaccaatggcacaaagcggttcgacaatcccgtgctgccttttaacgatggcgtgtacttcgccagcaccgagaagtccaacatcatcagaggctggatctttggcaccacactggactctaagacacagagcctgctgatcgtgaacaatgccaccaacgtggtgatcaaggtgtgcgagttccagttttgtaatgatccattcctgggcgtgtactatcacaagaacaataagtcctggatggagtctgagtttcgcgtgtattctagcgccaacaattgcacatttgagtacgtgagccagcccttcctgatggacctggagggcaagcagggcaatttcaagaacctgagggagttcgtgtttaagaatatcgatggctacttcaagatctacagcaagcacaccccaatcaacctggtgcgcgacctgccacagggattctccgccctggagccactggtggatctgcccatcggcatcaacatcacccggtttcagacactgctggccctgcacagatcctacctgacaccaggcgactcctctagcggatggaccgcaggagctgccgcctactatgtgggctatctgcagccccggaccttcctgctgaagtacaacgagaatggcaccatcacagacgcagtggattgcgccctggaccccctgtctgagacaaagtgtacactgaagagctttaccgtggagaagggcatctatcagacaagcaatttcagggtgcagcctaccgagtccatcgtgcgctttcccaatatcacaaacctgtgcccttttggcgaggtgttcaacgccaccagattcgccagcgtgtacgcctggaatcggaagagaatctccaactgcgtggccgactattctgtgctgtacaactccgcctctttcagcacctttaagtgctatggcgtgtctcccacaaagctgaatgatctgtgctttaccaacgtgtacgccgatagcttcgtgatcaggggagacgaagtgagacagatcgcaccaggacagacaggaaagatcgcagactacaattataagctgcctgacgatttcaccggctgcgtgatcgcctggaactccaacaatctggattctaaacgaggcggcaactacaattatctgtacaggctgtttcgcaagtccaatctgaagccattcgagcgggacatctccacagagatctaccaggccggctctaccccctgcaatggcgtggagggctttaactgttatttccctctgcagtcttacggcttccagccaacaaacggcgtgggctatcagccctacagagtggtggtgctgtcctttgagctgctgcacgcaccagcaacagtgtgcggcccaaagaagtctaccaatctggtgaagaacaagtgcgtgaacttcaacttcaacggactgaccggcacaggcgtgctgaccgagagcaataagaagttcctgccttttcagcagttcggcagggacatcgcagataccacagacgccgtgcgcgaccctcagaccctggagatcctggacatcacaccatgcagcttcggcggcgtgtccgtgatcacaccaggcaccaatacatccaaccaggtggccgtgctgtatcaggacgtgaattgtaccgaggtgcccgtggcaatccacgcagatcagctgacccctacatggcgggtgtactctaccggcagcaacgtgttccagacaagagccggatgcctgatcggagcagagcacgtgaacaatagctatgagtgcgacatccctatcggcgccggcatctgtgccagctaccagacccagacaaactccccatctggagcaggctccgtggccagccagtccatcatcgcctataccatgagcctgggcgccgagaacagcgtggcctactccaacaattctatcgccatccctaccaacttcacaatcagcgtgaccacagagatcctgccagtgtctatgaccaagacaagcgtggactgcacaatgtatatctgtggcgatagcaccgagtgctccaacctgctgctgcagtacggctccttttgtacccagctgaatagagccctgacaggcatcgccgtggagcaggataagaacacacaggaggtgttcgcccaggtgaagcagatctacaagaccccacccatcaaggactttggcggcttcaacttcagccagatcctgcctgatccaagcaagccctccaagaggtcttttatcgaggacctgctgttcaacaaggtgaccctggccgatgccggcttcatcaagcagtatggagattgcctgggagacatcgcagcccgcgacctgatctgtgcccagaagtttaatggcctgaccgtgctgcctccactgctgacagatgagatgatcgcccagtacacatctgccctgctggccggcaccatcacaagcggatggaccttcggcgcaggagccgccctgcagatcccttttgccatgcagatggcctataggttcaacggcatcggcgtgacccagaatgtgctgtacgagaaccagaagctgatcgccaatcagtttaacagcgccatcggcaagatccaggactctctgtcctctacagccagcgccctgggcaagctgcaggatgtggtgaatcagaacgcccaggccctgaataccctggtgaagcagctgagctccaacttcggcgccatctctagcgtgctgaatgacatcctgagccggctggacccccctgaggcagaggtgcagatcgacaggctgatcacaggccgcctgcagagcctgcagacctacgtgacacagcagctgatcagggcagcagagatcagagcctccgccaatctggccgccaccaagatgagcgagtgcgtgctgggacagtccaagagggtggacttttgtggcaagggctatcacctgatgtctttcccacagagcgcccctcacggcgtggtgtttctgcacgtgacctacgtgccagcccaggagaagaacttcaccacagcaccagccatctgccacgatggaaaggcacactttcctagggagggcgtgttcgtgtctaacggcacccactggtttgtgacacagcgcaatttctacgagccacagatcatcaccacagacaatacattcgtgagcggcaactgtgatgtggtgatcggcatcgtgaacaataccgtgtatgatccactgcagcccgagctggactcctttaaggaggagctggataagtacttcaagaatcacacctctcccgacgtggatctgggcgacatctccggcatcaatgcctctgtggtgaacatccagaaggagatcgaccggctgaacgaggtggccaagaatctgaacgagagcctgatcgatctgcaggagctgggcaagtatgagcagtacatcaagggctctggcagagagaacctgtatttccagggaggaggaggcagcggatacatccctgaggcaccaagggacggacaggcctacgtgcgcaaggatggcgagtgggtgctgctgtccacctttctgggccatcatcaccaccaccaccaccactga

SEQ ID NO: 5180 - DNA, 3846 bp, Artificial Sequence
  Description of Artificial Sequence: Synthetic polynucleotide
atgggcatcctgccaagcccaggaatgcccgccctgctgtctctggtgagcctgctgtccgtgctgctgatgggatgcgtggcagagacaggcacacagtgcgtgaacctgaccacaaggacccagctgccccctgcctataccaattctttcacacggggcgtgtactatcccgacaaggtgtttagaagctccgtgctgcactccacacaggatctgtttctgcctttcttttctaacgtgacctggttccacgccatccacgtgtccggcaccaatggcacaaagcggttcgacaatcccgtgctgccttttaacgatggcgtgtacttcgccagcaccgagaagtccaacatcatcagaggctggatctttggcaccacactggactctaagacacagagcctgctgatcgtgaacaatgccaccaacgtggtgatcaaggtgtgcgagttccagttttgtaatgatccattcctgggcgtgtactatcacaagaacaataagtcctggatggagtctgagtttcgcgtgtattctagcgccaacaattgcacatttgagtacgtgagccagcccttcctgatggacctggagggcaagcagggcaatttcaagaacctgagggagttcgtgtttaagaatatcgatggctacttcaagatctacagcaagcacaccccaatcaacctggtgcgcgacctgccacagggattctccgccctggagccactggtggatctgcccatcggcatcaacatcacccggtttcagacactgctggccctgcacagatcctacctgacaccaggcgactcctctagcggatggaccgcaggagctgccgcctactatgtgggctatctgcagccccggaccttcctgctgaagtacaacgagaatggcaccatcacagacgcagtggattgcgccctggaccccctgtctgagacaaagtgtacactgaagagctttaccgtggagaagggcatctatcagacaagcaatttcagggtgcagcctaccgagtccatcgtgcgctttcccaatatcacaaacctgtgcccttttggcgaggtgttcaacgccaccagattcgccagcgtgtacgcctggaatcggaagagaatctccaactgcgtggccgactattctgtgctgtacaactccgcctctttcagcacctttaagtgctatggcgtgtctcccacaaagctgaatgatctgtgctttaccaacgtgtacgccgatagcttcgtgatcaggggagacgaagtgagacagatcgcaccaggacagacaggaaagatcgcagactacaattataagctgcctgacgatttcaccggctgcgtgatcgcctggaactccaacaatctggattctaaagtgggcggcaactacaattatctgtacaggctgtttcgcaagtccaatctgaagccattcgagcgggacatctccacagagatctaccaggccggctctaccccctgcaatggcgtggagggctttaactgttatttccctctgcagtcttacggcttccagccaacaaacggcgtgggctatcagccctacagagtggtggtgctgtcctttgagctgctggaagcaccagcaacagtgtgcggcccaaagaagtctaccaatctggtgaagaacaagtgcgtgaacttcaacttcaacggactgaccggcacaggcgtgctgaccgagagcaataagaagttcctgccttttcagcagttcggcagggacatcgcagataccacagacgccgtgcgcgaccctcagaccctggagatcctggacatcacaccatgcagcttcggcggcgtgtccgtgatcacaccaggcaccaatacatccaaccaggtggccgtgctgtatcaggacgtgaattgtaccgaggtgcccgtggcaatccacgcagatcagctgacccctacatggcgggtgtactctaccggcagcaacgtgttccagacaagagccggatgcctgatcggagcagagcacgtgaacaatagctatgagtgcgacatccctatcggcgccggcatctgtgccagctaccagacccagacaaactccccatctggagcaggctccgtggccagccagtccatcatcgcctataccatgagcctgggcgccgagaacagcgtggcctactccaacaattctatcgccatccctaccaacttcacaatcagcgtgaccacagagatcctgccagtgtctatgaccaagacaagcgtggactgcacaatgtatatctgtggcgatagcaccgagtgctccaacctgctgctgcagtacggctccttttgtacccagctgaatagagccctgacaggcatcgccgtggagcaggataagaacacacaggaggtgttcgcccaggtgaagcagatctacaagaccccacccatcaaggactttggcggcttcaacttcagccagatcctgcctgatccaagcaagccctccaagaggtcttttatcgaggacctgctgttcaacaaggtgaccctggccgatgccggcttcatcaagcagtatggagattgcctgggagacatcgcagcccgcgacctgatctgtgcccagaagtttaatggcctgaccgtgctgcctccactgctgacagatgagatgatcgcccagtacacatctgccctgctggccggcaccatcacaagcggatggaccttcggcgcaggagccgccctgcagatcccttttgccatgcagatggcctataggttcaacggcatcggcgtgacccagaatgtgctgtacgagaaccagaagctgatcgccaatcagtttaacagcgccatcggcaagatccaggactctctgtcctctacagccagcgccctgggcaagctgcaggatgtggtgaatcagaacgcccaggccctgaataccctggtgaagcagctgagctccaacttcggcgccatctctagcgtgctgaatgacatcctgagccggctggacccccctgaggcagaggtgcagatcgacaggctgatcacaggccgcctgcagagcctgcagacctacgtgacacagcagctgatcagggcagcagagatcagagcctccgccaatctggccgccaccaagatgagcgagtgcgtgctgggacagtccaagagggtggacttttgtggcaagggctatcacctgatgtctttcccacagagcgcccctcacggcgtggtgtttctgcacgtgacctacgtgccagcccaggagaagaacttcaccacagcaccagccatctgccacgatggaaaggcacactttcctagggagggcgtgttcgtgtctaacggcacccactggtttgtgacacagcgcaatttctacgagccacagatcatcaccacagacaatacattcgtgagcggcaactgtgatgtggtgatcggcatcgtgaacaataccgtgtatgatccactgcagcccgagctggactcctttaaggaggagctggataagtacttcaagaatcacacctctcccgacgtggatctgggcgacatctccggcatcaatgcctctgtggtgaacatccagaaggagatcgaccggctgaacgaggtggccaagaatctgaacgagagcctgatcgatctgcaggagctgggcaagtatgagcagtacatcaagggctctggcagagagaacctgtatttccagggaggaggaggcagcggatacatccctgaggcaccaagggacggacaggcctacgtgcgcaaggatggcgagtgggtgctgctgtccacctttctgggccatcatcaccaccaccaccaccactga

SEQ ID NO: 5181 - DNA, 3846 bp, Artificial Sequence
  Description of Artificial Sequence: Synthetic polynucleotide
atgggcatcctgccaagcccaggaatgcccgccctgctgtctctggtgagcctgctgtccgtgctgctgatgggatgcgtggcagagacaggcacacagtgcgtgaacctgaccacaaggacccagctgccccctgcctataccaattctttcacacggggcgtgtactatcccgacaaggtgtttagaagctccgtgctgcactccacacaggatctgtttctgcctttcttttctaacgtgacctggttccacgccatccacgtgtccggcaccaatggcacaaagcggttcgacaatcccgtgctgccttttaacgatggcgtgtacttcgccagcaccgagaagtccaacatcatcagaggctggatctttggcaccacactggactctaagacacagagcctgctgatcgtgaacaatgccaccaacgtggtgatcaaggtgtgcgagttccagttttgtaatgatccattcctgggcgtgtactatcacaagaacaataagtcctggatggagtctgagtttcgcgtgtattctagcgccaacaattgcacatttgagtacgtgagccagcccttcctgatggacctggagggcaagcagggcaatttcaagaacctgagggagttcgtgtttaagaatatcgatggctacttcaagatctacagcaagcacaccccaatcaacctggtgcgcgacctgccacagggattctccgccctggagccactggtggatctgcccatcggcatcaacatcacccggtttcagacactgctggccctgcacagatcctacctgacaccaggcgactcctctagcggatggaccgcaggagctgccgcctactatgtgggctatctgcagccccggaccttcctgctgaagtacaacgagaatggcaccatcacagacgcagtggattgcgccctggaccccctgtctgagacaaagtgtacactgaagagctttaccgtggagaagggcatctatcagacaagcaatttcagggtgcagcctaccgagtccatcgtgcgctttcccaatatcacaaacctgtgcccttttggcgaggtgttcaacgccaccagattcgccagcgtgtacgcctggaatcggaagagaatctccaactgcgtggccgactattctgtgctgtacaactccgcctctttcagcacctttaagtgctatggcgtgtctcccacaaagctgaatgatctgtgctttaccaacgtgtacgccgatagcttcgtgatcaggggagacgaagtgagacagatcgcaccaggacagacaggaaagatcgcagactacaattataagctgcctgacgatttcaccggctgcgtgatcgcctggaactccaacaatctggattctaaagtgggcggcaactacaattatctgtacaggctgtttcgcaagtccaatctgaagccattcgagcgggacatctccacagagatctaccaggccggctctaccccctgcaatggcgtggagggctttaactgttatttccctctgcagtcttacggcttccagccaacaaacggcgtgggctatcagccctacagagtggtggtgctgtcctttgagctgctgcacgcaccagcaacagtgtgcggcccaaagaagtctaccaatctggtgaagaacaagtgcgtgaacttcaacttcaacggactgaccggcacaggcgtgctgaccgagagcaataagaagttcctgccttttcagcagttcggcagggacatcgcagataccacagacgccgtgcgcgaccctcagaccctggagatcctggacatcacaccatgcagcttcggcggcgtgtccgtgatcacaccaggcaccaatacatccaaccaggtggccgtgctgtatcaggacgtgaattgtaccgaggtgcccgtggcaatccacgcagatcagctgacccctacatggcgggtgtactctaccggcagcaacgtgttccagacaagagccggatgcctgatcggagcagagcacgtgaacaatagctatgagtgcgacatccctatcggcgccggcatctgtgccagctaccagacccagacaaactccccatctggagcaggctccgtggccagccagtccatcatcgcctataccatgagcctgggcgccgagaacagcgtggcctactccaacaattctatcgccatccctaccaacttcacaatcagcgtgaccacagagatcctgccagtgtctatgaccaagacaagcgtggactgcacaatgtatatctgtggcgatagcaccgagtgctccaacctgctgctgcagtacggctccttttgtacccagctgaatagagccctgacaggcatcgccgtggagcaggataagaacacacaggaggtgttcgcccaggtgaagcatatctacaagaccccacccatcaaggactttggcggcttcaacttcagccagatcctgcctgatccaagcaagccctccaagaggtcttttatcgaggacctgctgttcaacaaggtgaccctggccgatgccggcttcatcaagcagtatggagattgcctgggagacatcgcagcccgcgacctgatctgtgcccagaagtttaatggcctgaccgtgctgcctccactgctgacagatgagatgatcgcccagtacacatctgccctgctggccggcaccatcacaagcggatggaccttcggcgcaggagccgccctgcagatcccttttgccatgcagatggcctataggttcaacggcatcggcgtgacccagaatgtgctgtacgagaaccagaagctgatcgccaatcagtttaacagcgccatcggcaagatccaggactctctgtcctctacagccagcgccctgggcaagctgcaggatgtggtgaatcagaacgcccaggccctgaataccctggtgaagcagctgagctccaacttcggcgccatctctagcgtgctgaatgacatcctgagccggctggacccccctgaggcagaggtgcagatcgacaggctgatcacaggccgcctgcagagcctgcagacctacgtgacacagcagctgatcagggcagcagagatcagagcctccgccaatctggccgccaccaagatgagcgagtgcgtgctgggacagtccaagagggtggacttttgtggcaagggctatcacctgatgtctttcccacagagcgcccctcacggcgtggtgtttctgcacgtgacctacgtgccagcccaggagaagaacttcaccacagcaccagccatctgccacgatggaaaggcacactttcctagggagggcgtgttcgtgtctaacggcacccactggtttgtgacacagcgcaatttctacgagccacagatcatcaccacagacaatacattcgtgagcggcaactgtgatgtggtgatcggcatcgtgaacaataccgtgtatgatccactgcagcccgagctggactcctttaaggaggagctggataagtacttcaagaatcacacctctcccgacgtggatctgggcgacatctccggcatcaatgcctctgtggtgaacatccagaaggagatcgaccggctgaacgaggtggccaagaatctgaacgagagcctgatcgatctgcaggagctgggcaagtatgagcagtacatcaagggctctggcagagagaacctgtatttccagggaggaggaggcagcggatacatccctgaggcaccaagggacggacaggcctacgtgcgcaaggatggcgagtgggtgctgctgtccacctttctgggccatcatcaccaccaccaccaccactga

SEQ ID NO: 5182 - DNA, 3846 bp, Artificial Sequence
  Description of Artificial Sequence: Synthetic polynucleotide
atgggcatcctgccaagcccaggaatgcccgccctgctgtctctggtgagcctgctgtccgtgctgctgatgggatgcgtggcagagacaggcacacagtgcgtgaacctgaccacaaggacccagctgccccctgcctataccaattctttcacacggggcgtgtactatcccgacaaggtgtttagaagctccgtgctgcactccacacaggatctgtttctgcctttcttttctaacgtgacctggttccacgccatccacgtgtccggcaccaatggcacaaagcggttcgacaatcccgtgctgccttttaacgatggcgtgtacttcgccagcaccgagaagtccaacatcatcagaggctggatctttggcaccacactggactctaagacacagagcctgctgatcgtgaacaatgccaccaacgtggtgatcaaggtgtgcgagttccagttttgtaatgatccattcctgggcgtgtactatcacaagaacaataagtcctggatggagtctgagtttcgcgtgtattctagcgccaacaattgcacatttgagtacgtgagccagcccttcctgatggacctggagggcaagcagggcaatttcaagaacctgagggagttcgtgtttaagaatatcgatggctacttcaagatctacagcaagcacaccccaatcaacctggtgcgcgacctgccacagggattctccgccctggagccactggtggatctgcccatcggcatcaacatcacccggtttcagacactgctggccctgcacagatcctacctgacaccaggcgactcctctagcggatggaccgcaggagctgccgcctactatgtgggctatctgcagccccggaccttcctgctgaagtacaacgagaatggcaccatcacagacgcagtggattgcgccctggaccccctgtctgagacaaagtgtacactgaagagctttaccgtggagaagggcatctatcagacaagcaatttcagggtgcagcctaccgagtccatcgtgcgctttcccaatatcacaaacctgtgcccttttggcgaggtgttcaacgccaccagattcgccagcgtgtacgcctggaatcggaagagaatctccaactgcgtggccgactattctgtgctgtacaactccgcctctttcagcacctttaagtgctatggcgtgtctcccacaaagctgaatgatctgtgctttaccaacgtgtacgccgatagcttcgtgatcaggggagacgaagtgagacagatcgcaccaggacagacaggaaagatcgcagactacaattataagctgcctgacgatttcaccggctgcgtgatcgcctggaactccaacaatctggattctaaagtgggcggcaactacaattatctgtacaggctgtttcgcaagtccaatctgaagccattcgagcgggacatctccacagagatctaccaggccggctctaccccctgcaatggcgtggagggctttaactgttatttccctctgcagtcttacggcttccagccaacaaacggcgtgggctatcagccctacagagtggtggtgctgtcctttgagctgctggatgcaccagcaacagtgtgcggcccaaagaagtctaccaatctggtgaagaacaagtgcgtgaacttcaacttcaacggactgaccggcacaggcgtgctgaccgagagcaataagaagttcctgccttttcagcagttcggcagggacatcgcagataccacagacgccgtgcgcgaccctcagaccctggagatcctggacatcacaccatgcagcttcggcggcgtgtccgtgatcacaccaggcaccaatacatccaaccaggtggccgtgctgtatcaggacgtgaattgtaccgaggtgcccgtggcaatccacgcagatcagctgacccctacatggcgggtgtactctaccggcagcaacgtgttccagacaagagccggatgcctgatcggagcagagcacgtgaacaatagctatgagtgcgacatccctatcggcgccggcatctgtgccagctaccagacccagacaaactccccatctggagcaggctccgtggccagccagtccatcatcgcctataccatgagcctgggcgccgagaacagcgtggcctactccaacaattctatcgccatccctaccaacttcacaatcagcgtgaccacagagatcctgccagtgtctatgaccaagacaagcgtggactgcacaatgtatatctgtggcgatagcaccgagtgctccaacctgctgctgcagtacggctccttttgtacccagctgaatagagccctgacaggcatcgccgtggagcaggataagaacacacaggaggtgttcgcccaggtgaagcagatctacaagaccccacccatcaaggactttggcggcttcaacttcagccagatcctgcctgatccaagcaagccctccaagaggtcttttatcgaggacctgctgttcaacaaggtgaccctggccgatgccggcttcatcaagcagtatggagattgcctgggagacatcgcagcccgcgacctgatctgtgcccagaagtttaatggcctgaccgtgctgcctccactgctgacagatgagatgatcgcccagtacacatctgccctgctggccggcaccatcacaagcggatggaccttcggcgcaggagccgccctgcagatcccttttgccatgcagatggcctataggttcaacggcatcggcgtgacccagaatgtgctgtacgagaaccagaagctgatcgccaatcagtttaacagcgccatcggcaagatccaggactctctgtcctctacagccagcgccctgggcaagctgcaggatgtggtgaatcagaacgcccaggccctgaataccctggtgaagcagctgagctccaacttcggcgccatctctagcgtgctgaatgacatcctgagccggctggacccccctgaggcagaggtgcagatcgacaggctgatcacaggccgcctgcagagcctgcagacctacgtgacacagcagctgatcagggcagcagagatcagagcctccgccaatctggccgccaccaagatgagcgagtgcgtgctgggacagtccaagagggtggacttttgtggcaagggctatcacctgatgtctttcccacagagcgcccctcacggcgtggtgtttctgcacgtgacctacgtgccagcccaggagaagaacttcaccacagcaccagccatctgccacgatggaaaggcacactttcctagggagggcgtgttcgtgtctaacggcacccactggtttgtgacacagcgcaatttctacgagccacagatcatcaccacagacaatacattcgtgagcggcaactgtgatgtggtgatcggcatcgtgaacaataccgtgtatgatccactgcagcccgagctggactcctttaaggaggagctggataagtacttcaagaatcacacctctcccgacgtggatctgggcgacatctccggcatcaatgcctctgtggtgaacatccagaaggagatcgaccggctgaacgaggtggccaagaatctgaacgagagcctgatcgatctgcaggagctgggcaagtatgagcagtacatcaagggctctggcagagagaacctgtatttccagggaggaggaggcagcggatacatccctgaggcaccaagggacggacaggcctacgtgcgcaaggatggcgagtgggtgctgctgtccacctttctgggccatcatcaccaccaccaccaccactga

SEQ ID NO: 5183 - DNA, 3846 bp, Artificial Sequence
  Description of Artificial Sequence: Synthetic polynucleotide
atgggcatcctgccaagcccaggaatgcccgccctgctgtctctggtgagcctgctgtccgtgctgctgatgggatgcgtggcagagacaggcacacagtgcgtgaacctgaccacaaggacccagctgccccctgcctataccaattctttcacacggggcgtgtactatcccgacaaggtgtttagaagctccgtgctgcactccacacaggatctgtttctgcctttcttttctaacgtgacctggttccacgccatccacgtgtccggcaccaatggcacaaagcggttcgacaatcccgtgctgccttttaacgatggcgtgtacttcgccagcaccgagaagtccaacatcatcagaggctggatctttggcaccacactggactctaagacacagagcctgctgatcgtgaacaatgccaccaacgtggtgatcaaggtgtgcgagttccagttttgtaatgatccattcctgggcgtgtactatcacaagaacaataagtcctggatggagtctgagtttcgcgtgtattctagcgccaacaattgcacatttgagtacgtgagccagcccttcctgatggacctggagggcaagcagggcaatttcaagaacctgagggagttcgtgtttaagaatatcgatggctacttcaagatctacagcaagcacaccccaatcaacctggtgcgcgacctgccacagggattctccgccctggagccactggtggatctgcccatcggcatcaacatcacccggtttcagacactgctggccctgcacagatcctacctgacaccaggcgactcctctagcggatggaccgcaggagctgccgcctactatgtgggctatctgcagccccggaccttcctgctgaagtacaacgagaatggcaccatcacagacgcagtggattgcgccctggaccccctgtctgagacaaagtgtacactgaagagctttaccgtggagaagggcatctatcagacaagcaatttcagggtgcagcctaccgagtccatcgtgcgctttcccaatatcacaaacctgtgcccttttggcgaggtgttcaacgccaccagattcgccagcgtgtacgcctggaatcggaagagaatctccaactgcgtggccgactattctgtgctgtacaactccgcctctttcagcacctttaagtgctatggcgtgtctcccacaaagctgaatgatctgtgctttaccaacgtgtacgccgatagcttcgtgatcaggggagacgaagtgagacagatcgcaccaggacagacaggaaagatcgcagactacaattataagctgcctgacgatttcaccggctgcgtgatcgcctggaactccaacaatctggattctaaagtgggcggcaactacaattatctgtacaggctgtttcgcaagtccaatctgaagccattcgagcgggacatctccacaaatatctaccaggccggctctaccccctgcaatggcgtggagggctttaactgttatttccctctgcagtcttacggcttccagccaacaaacggcgtgggctatcagccctacagagtggtggtgctgtcctttgagctgctgcacgcaccagcaacagtgtgcggcccaaagaagtctaccaatctggtgaagaacaagtgcgtgaacttcaacttcaacggactgaccggcacaggcgtgctgaccgagagcaataagaagttcctgccttttcagcagttcggcagggacatcgcagataccacagacgccgtgcgcgaccctcagaccctggagatcctggacatcacaccatgcagcttcggcggcgtgtccgtgatcacaccaggcaccaatacatccaaccaggtggccgtgctgtatcaggacgtgaattgtaccgaggtgcccgtggcaatccacgcagatcagctgacccctacatggcgggtgtactctaccggcagcaacgtgttccagacaagagccggatgcctgatcggagcagagcacgtgaacaatagctatgagtgcgacatccctatcggcgccggcatctgtgccagctaccagacccagacaaactccccatctggagcaggctccgtggccagccagtccatcatcgcctataccatgagcctgggcgccgagaacagcgtggcctactccaacaattctatcgccatccctaccaacttcacaatcagcgtgaccacagagatcctgccagtgtctatgaccaagacaagcgtggactgcacaatgtatatctgtggcgatagcaccgagtgctccaacctgctgctgcagtacggctccttttgtacccagctgaatagagccctgacaggcatcgccgtggagcaggataagaacacacaggaggtgttcgcccaggtgaagcagatctacaagaccccacccatcaaggactttggcggcttcaacttcagccagatcctgcctgatccaagcaagccctccaagaggtcttttatcgaggacctgctgttcaacaaggtgaccctggccgatgccggcttcatcaagcagtatggagattgcctgggagacatcgcagcccgcgacctgatctgtgcccagaagtttaatggcctgaccgtgctgcctccactgctgacagatgagatgatcgcccagtacacatctgccctgctggccggcaccatcacaagcggatggaccttcggcgcaggagccgccctgcagatcccttttgccatgcagatggcctataggttcaacggcatcggcgtgacccagaatgtgctgtacgagaaccagaagctgatcgccaatcagtttaacagcgccatcggcaagatccaggactctctgtcctctacagccagcgccctgggcaagctgcaggatgtggtgaatcagaacgcccaggccctgaataccctggtgaagcagctgagctccaacttcggcgccatctctagcgtgctgaatgacatcctgagccggctggacccccctgaggcagaggtgcagatcgacaggctgatcacaggccgcctgcagagcctgcagacctacgtgacacagcagctgatcagggcagcagagatcagagcctccgccaatctggccgccaccaagatgagcgagtgcgtgctgggacagtccaagagggtggacttttgtggcaagggctatcacctgatgtctttcccacagagcgcccctcacggcgtggtgtttctgcacgtgacctacgtgccagcccaggagaagaacttcaccacagcaccagccatctgccacgatggaaaggcacactttcctagggagggcgtgttcgtgtctaacggcacccactggtttgtgacacagcgcaatttctacgagccacagatcatcaccacagacaatacattcgtgagcggcaactgtgatgtggtgatcggcatcgtgaacaataccgtgtatgatccactgcagcccgagctggactcctttaaggaggagctggataagtacttcaagaatcacacctctcccgacgtggatctgggcgacatctccggcatcaatgcctctgtggtgaacatccagaaggagatcgaccggctgaacgaggtggccaagaatctgaacgagagcctgatcgatctgcaggagctgggcaagtatgagcagtacatcaagggctctggcagagagaacctgtatttccagggaggaggaggcagcggatacatccctgaggcaccaagggacggacaggcctacgtgcgcaaggatggcgagtgggtgctgctgtccacctttctgggccatcatcaccaccaccaccaccactga

SEQ ID NO: 5184 - DNA, 3846 bp, Artificial Sequence
  Description of Artificial Sequence: Synthetic polynucleotide
atgggcatcctgccaagcccaggaatgcccgccctgctgtctctggtgagcctgctgtccgtgctgctgatgggatgcgtggcagagacaggcacacagtgcgtgaacctgaccacaaggacccagctgccccctgcctataccaattctttcacacggggcgtgtactatcccgacaaggtgtttagaagctccgtgctgcactccacacaggatctgtttctgcctttcttttctaacgtgacctggttccacgccatccacgtgtccggcaccaatggcacaaagcggttcgacaatcccgtgctgccttttaacgatggcgtgtacttcgccagcaccgagaagtccaacatcatcagaggctggatctttggcaccacactggactctaagacacagagcctgctgatcgtgaacaatgccaccaacgtggtgatcaaggtgtgcgagttccagttttgtaatgatccattcctgggcgtgtactatcacaagaacaataagtcctggatggagtctgagtttcgcgtgtattctagcgccaacaattgcacatttgagtacgtgagccagcccttcctgatggacctggagggcaagcagggcaatttcaagaacctgagggagttcgtgtttaagaatatcgatggctacttcaagatctacagcaagcacaccccaatcaacctggtgcgcgacctgccacagggattctccgccctggagccactggtggatctgcccatcggcatcaacatcacccggtttcagacactgctggccctgcacagatcctacctgacaccaggcgactcctctagcggatggaccgcaggagctgccgcctactatgtgggctatctgcagccccggaccttcctgctgaagtacaacgagaatggcaccatcacagacgcagtggattgcgccctggaccccctgtctgagacaaagtgtacactgaagagctttaccgtggagaagggcatctatcagacaagcaatttcagggtgcagcctaccgagtccatcgtgcgctttcccaatatcacaaacctgtgcccttttggcgaggtgttcaacgccaccagattcgccagcgtgtacgcctggaatcggaagagaatctccaactgcgtggccgactattctgtgctgtacaactccgcctctttcagcacctttaagtgctatggcgtgtctcccacaaagctgaatgatctgtgctttaccaacgtgtacgccgatacgttcgtgatcaggggagacgaagtgagacagatcgcaccaggacagacaggaaagatcgcagactacaattataagctgcctgacgatttcaccggctgcgtgatcgcctggaactccaacaatctggattctaaagtgggcggcaactacaattatctgtacaggctgtttcgcaagtccaatctgaagccattcgagcgggacatctccacagagatctaccaggccggctctaccccctgcaatggcgtggagggctttaactgttatttccctctgcagtcttacggcttccagccaacaaacggcgtgggctatcagccctacagagtggtggtgctgtcctttgagctgctgcacgcaccagcaacagtgtgcggcccaaagaagtctaccaatctggtgaagaacaagtgcgtgaacttcaacttcaacggactgaccggcacaggcgtgctgaccgagagcaataagaagttcctgccttttcagcagttcggcagggacatcgcagataccacagacgccgtgcgcgaccctcagaccctggagatcctggacatcacaccatgcagcttcggcggcgtgtccgtgatcacaccaggcaccaatacatccaaccaggtggccgtgctgtatcaggacgtgaattgtaccgaggtgcccgtggcaatccacgcagatcagctgacccctacatggcgggtgtactctaccggcagcaacgtgttccagacaagagccggatgcctgatcggagcagagcacgtgaacaatagctatgagtgcgacatccctatcggcgccggcatctgtgccagctaccagacccagacaaactccccatctggagcaggctccgtggccagccagtccatcatcgcctataccatgagcctgggcgccgagaacagcgtggcctactccaacaattctatcgccatccctaccaacttcacaatcagcgtgaccacagagatcctgccagtgtctatgaccaagacaagcgtggactgcacaatgtatatctgtggcgatagcaccgagtgctccaacctgctgctgcagtacggctccttttgtacccagctgaatagagccctgacaggcatcgccgtggagcaggataagaacacacaggaggtgttcgcccaggtgaagcagatctacaagaccccacccatcaaggactttggcggcttcaacttcagccagatcctgcctgatccaagcaagccctccaagaggtcttttatcgaggacctgctgttcaacaaggtgaccctggccgatgccggcttcatcaagcagtatggagattgcctgggagacatcgcagcccgcgacctgatctgtgcccagaagtttaatggcctgaccgtgctgcctccactgctgacagatgagatgatcgcccagtacacatctgccctgctggccggcaccatcacaagcggatggaccttcggcgcaggagccgccctgcagatcccttttgccatgcagatggcctataggttcaacggcatcggcgtgacccagaatgtgctgtacgagaaccagaagctgatcgccaatcagtttaacagcgccatcggcaagatccaggactctctgtcctctacagccagcgccctgggcaagctgcaggatgtggtgaatcagaacgcccaggccctgaataccctggtgaagcagctgagctccaacttcggcgccatctctagcgtgctgaatgacatcctgagccggctggacccccctgaggcagaggtgcagatcgacaggctgatcacaggccgcctgcagagcctgcagacctacgtgacacagcagctgatcagggcagcagagatcagagcctccgccaatctggccgccaccaagatgagcgagtgcgtgctgggacagtccaagagggtggacttttgtggcaagggctatcacctgatgtctttcccacagagcgcccctcacggcgtggtgtttctgcacgtgacctacgtgccagcccaggagaagaacttcaccacagcaccagccatctgccacgatggaaaggcacactttcctagggagggcgtgttcgtgtctaacggcacccactggtttgtgacacagcgcaatttctacgagccacagatcatcaccacagacaatacattcgtgagcggcaactgtgatgtggtgatcggcatcgtgaacaataccgtgtatgatccactgcagcccgagctggactcctttaaggaggagctggataagtacttcaagaatcacacctctcccgacgtggatctgggcgacatctccggcatcaatgcctctgtggtgaacatccagaaggagatcgaccggctgaacgaggtggccaagaatctgaacgagagcctgatcgatctgcaggagctgggcaagtatgagcagtacatcaagggctctggcagagagaacctgtatttccagggaggaggaggcagcggatacatccctgaggcaccaagggacggacaggcctacgtgcgcaaggatggcgagtgggtgctgctgtccacctttctgggccatcatcaccaccaccaccaccactga

SEQ ID NO: 5185 - DNA, 3846 bp, Artificial Sequence
  Description of Artificial Sequence: Synthetic polynucleotide
atgggcatcctgccaagcccaggaatgcccgccctgctgtctctggtgagcctgctgtccgtgctgctgatgggatgcgtggcagagacaggcacacagtgcgtgaacctgaccacaaggacccagctgccccctgcctataccaattctttcacacggggcgtgtactatcccgacaaggtgtttagaagctccgtgctgcactccacacaggatctgtttctgcctttcttttctaacgtgacctggttccacgccatccacgtgtccggcaccaatggcacaaagcggttcgacaatcccgtgctgccttttaacgatggcgtgtacttcgccagcaccgagaagtccaacatcatcagaggctggatctttggcaccacactggactctaagacacagagcctgctgatcgtgaacaatgccaccaacgtggtgatcaaggtgtgcgagttccagttttgtaatgatccattcctgggcgtgtactatcacaagaacaataagtcctggatggagtctgagtttcgcgtgtattctagcgccaacaattgcacatttgagtacgtgagccagcccttcctgatggacctggagggcaagcagggcaatttcaagaacctgagggagttcgtgtttaagaatatcgatggctacttcaagatctacagcaagcacaccccaatcaacctggtgcgcgacctgccacagggattctccgccctggagccactggtggatctgcccatcggcatcaacatcacccggtttcagacactgctggccctgcacagatcctacctgacaccaggcgactcctctagcggatggaccgcaggagctgccgcctactatgtgggctatctgcagccccggaccttcctgctgaagtacaacgagaatggcaccatcacagacgcagtggattgcgccctggaccccctgtctgagacaaagtgtacactgaagagctttaccgtggagaagggcatctatcagacaagcaatttcagggtgcagcctaccgagtccatcgtgcgctttcccaatatcacaaacctgtgcccttttggcgaggtgttcaacgccaccagattcgccagcgtgtacgcctggaatcggaagagaatctccaactgcgtggccgactattctgtgctgtacaactccgcctctttcagcacctttaagtgctatggcgtgtctcccacaaagctgaatgatctgtgctttaccaacgtgtacgccgatagcttcgtgatcaggggagacgaagtgagacagatcgcaccaggacagacaggaaagatcgcagactacaattataagctgcctgacgatttcaccggctgcgtgatcgcctggaactccaacaatctggattctaaagtgggcggcaactacaattatctgtacaggctgtttcgcaagtccaatctgaagccattcgagcgggacatctccacagagatctaccaggccggctctaccccctgcaatggcgtggagggctttaactgttatttccctctgcagtcttacggcttccagccaacaaacggcgtgggctatcagccctacagagtggtggtgctgtcctttgagctgctgcacgcaccagcaacagtgtgcggcccaaagaagtctaccaatctggtgaagaacaagtgcgtgaacttcaacttcaacggactgaccggcacaggcgtgctgaccgagagcaataagaagttcctgccttttcagcagttcggcagggacatcgcagataccacagacgccgtgcgcgaccctcagaccctggagatcctggacatcacaccatgcagcttcggcggcgtgtccgtgatcacaccaggcaccaatacatccaaccaggtggccgtgctgtatcaggacgtgaattgtaccgaggtgcccgtggcaatccacgcagatcagctgacccctacatggcgggtgtactctaccggcagcaacgtgttccagacaagagccggatgcctgatcggagcagagcacgtgaacaatagctatgagtgcgacatccctatcggcgccggcatctgtgccagctaccagacccagacaaactccccatctggagcaggctccgtggccagccagtccatcatcgcctataccatgagcctgggcgccgagaacagcgtggcctactccaacaattctatcgccatccctaccaacttcacaatcagcgtgaccacagagatcctgccagtgtctatgaccaagacaagcgtggactgcacaatgtatatctgtggcgatagcaccgagtgctccaacctgctgctgcagtacggctccttttgtacccagctgaatagagccctgacaggcatcgccgtggagcaggataagaacacacaggaggtgttcgcccaggtgaagcagatctacaagaccccacccatcaaggactttggcggcttcaacttcagccagatcctgcctgatccaagcaagccctccaagaggtcttttatcgaggacctgctgttcaacaaggtgaccctggccgatgccggcttcatcaagcagtatggagattgcctgggagacatcgcagcccgcgacctgatctgtgcccagaagtttaatggcctgaccgtgctgcctccactgctgacagatgagctaatcgcccagtacacatctgccctgctggccggcaccatcacaagcggatggaccttcggcgcaggagccgccctgcagatcccttttgccatgcagatggcctataggttcaacggcatcggcgtgacccagaatgtgctgtacgagaaccagaagctgatcgccaatcagtttaacagcgccatcggcaagatccaggactctctgtcctctacagccagcgccctgggcaagctgcaggatgtggtgaatcagaacgcccaggccctgaataccctggtgaagcagctgagctccaacttcggcgccatctctagcgtgctgaatgacatcctgagccggctggacccccctgaggcagaggtgcagatcgacaggctgatcacaggccgcctgcagagcctgcagacctacgtgacacagcagctgatcagggcagcagagatcagagcctccgccaatctggccgccaccaagatgagcgagtgcgtgctgggacagtccaagagggtggacttttgtggcaagggctatcacctgatgtctttcccacagagcgcccctcacggcgtggtgtttctgcacgtgacctacgtgccagcccaggagaagaacttcaccacagcaccagccatctgccacgatggaaaggcacactttcctagggagggcgtgttcgtgtctaacggcacccactggtttgtgacacagcgcaatttctacgagccacagatcatcaccacagacaatacattcgtgagcggcaactgtgatgtggtgatcggcatcgtgaacaataccgtgtatgatccactgcagcccgagctggactcctttaaggaggagctggataagtacttcaagaatcacacctctcccgacgtggatctgggcgacatctccggcatcaatgcctctgtggtgaacatccagaaggagatcgaccggctgaacgaggtggccaagaatctgaacgagagcctgatcgatctgcaggagctgggcaagtatgagcagtacatcaagggctctggcagagagaacctgtatttccagggaggaggaggcagcggatacatccctgaggcaccaagggacggacaggcctacgtgcgcaaggatggcgagtgggtgctgctgtccacctttctgggccatcatcaccaccaccaccaccactga

SEQ ID NO: 5186 - DNA, 3846 bp, Artificial Sequence
  Description of Artificial Sequence: Synthetic polynucleotide
atgggcatcctgccaagcccaggaatgcccgccctgctgtctctggtgagcctgctgtccgtgctgctgatgggatgcgtggcagagacaggcacacagtgcgtgaacctgaccacaaggacccagctgccccctgcctataccaattctttcacacggggcgtgtactatcccgacaaggtgtttagaagctccgtgctgcactccacacaggatctgtttctgcctttcttttctaacgtgacctggttccacgccatccacgtgtccggcaccaatggcacaaagcggttcgacaatcccgtgctgccttttaacgatggcgtgtacttcgccagcaccgagaagtccaacatcatcagaggctggatctttggcaccacactggactctaagacacagagcctgctgatcgtgaacaatgccaccaacgtggtgatcaaggtgtgcgagttccagttttgtaatgatccattcctgggcgtgtactatcacaagaacaataagtcctggatggagtctgagtttcgcgtgtattctagcgccaacaattgcacatttgagtacgtgagccagcccttcctgatggacctggagggcaagcagggcaatttcaagaacctgagggagttcgtgtttaagaatatcgatggctacttcaagatctacagcaagcacaccccaatcaacctggtgcgcgacctgccacagggattctccgccctggagccactggtggatctgcccatcggcatcaacatcacccggtttcagacactgctggccctgcacagatcctacctgacaccaggcgactcctctagcggatggaccgcaggagctgccgcctactatgtgggctatctgcagccccggaccttcctgctgaagtacaacgagaatggcaccatcacagacgcagtggattgcgccctggaccccctgtctgagacaaagtgtacactgaagagctttaccgtggagaagggcatctatcagacaagcaatttcagggtgcagcctaccgagtccatcgtgcgctttcccaatatcacaaacctgtgcccttttggcgaggtgttcaacgccaccagattcgccagcgtgtacgcctggaatcggaagagaatctccaactgcgtggccgactattctgtgctgtacaactccgcctctttcagcacctttaagtgctatggcgtgtctcccacaaagctgaatgatctgtgctttaccaacgtgtacgccgatagcttcgtgatcaggggagacgaagtgagacagatcgcaccaggacagacaggaaagatcgcagactacaattataagctgcctgacgatttcaccggctgcgtgatcgcctggaactccaacaatctggattctaaacaaggcggcaactacaattatctgtacaggctgtttcgcaagtccaatctgaagccattcgagcgggacatctccacagagatctaccaggccggctctaccccctgcaatggcgtggagggctttaactgttatttccctctgcagtcttacggcttccagccaacaaacggcgtgggctatcagccctacagagtggtggtgctgtcctttgagctgctgcacgcaccagcaacagtgtgcggcccaaagaagtctaccaatctggtgaagaacaagtgcgtgaacttcaacttcaacggactgaccggcacaggcgtgctgaccgagagcaataagaagttcctgccttttcagcagttcggcagggacatcgcagataccacagacgccgtgcgcgaccctcagaccctggagatcctggacatcacaccatgcagcttcggcggcgtgtccgtgatcacaccaggcaccaatacatccaaccaggtggccgtgctgtatcaggacgtgaattgtaccgaggtgcccgtggcaatccacgcagatcagctgacccctacatggcgggtgtactctaccggcagcaacgtgttccagacaagagccggatgcctgatcggagcagagcacgtgaacaatagctatgagtgcgacatccctatcggcgccggcatctgtgccagctaccagacccagacaaactccccatctggagcaggctccgtggccagccagtccatcatcgcctataccatgagcctgggcgccgagaacagcgtggcctactccaacaattctatcgccatccctaccaacttcacaatcagcgtgaccacagagatcctgccagtgtctatgaccaagacaagcgtggactgcacaatgtatatctgtggcgatagcaccgagtgctccaacctgctgctgcagtacggctccttttgtacccagctgaatagagccctgacaggcatcgccgtggagcaggataagaacacacaggaggtgttcgcccaggtgaagcagatctacaagaccccacccatcaaggactttggcggcttcaacttcagccagatcctgcctgatccaagcaagccctccaagaggtcttttatcgaggacctgctgttcaacaaggtgaccctggccgatgccggcttcatcaagcagtatggagattgcctgggagacatcgcagcccgcgacctgatctgtgcccagaagtttaatggcctgaccgtgctgcctccactgctgacagatgagatgatcgcccagtacacatctgccctgctggccggcaccatcacaagcggatggaccttcggcgcaggagccgccctgcagatcccttttgccatgcagatggcctataggttcaacggcatcggcgtgacccagaatgtgctgtacgagaaccagaagctgatcgccaatcagtttaacagcgccatcggcaagatccaggactctctgtcctctacagccagcgccctgggcaagctgcaggatgtggtgaatcagaacgcccaggccctgaataccctggtgaagcagctgagctccaacttcggcgccatctctagcgtgctgaatgacatcctgagccggctggacccccctgaggcagaggtgcagatcgacaggctgatcacaggccgcctgcagagcctgcagacctacgtgacacagcagctgatcagggcagcagagatcagagcctccgccaatctggccgccaccaagatgagcgagtgcgtgctgggacagtccaagagggtggacttttgtggcaagggctatcacctgatgtctttcccacagagcgcccctcacggcgtggtgtttctgcacgtgacctacgtgccagcccaggagaagaacttcaccacagcaccagccatctgccacgatggaaaggcacactttcctagggagggcgtgttcgtgtctaacggcacccactggtttgtgacacagcgcaatttctacgagccacagatcatcaccacagacaatacattcgtgagcggcaactgtgatgtggtgatcggcatcgtgaacaataccgtgtatgatccactgcagcccgagctggactcctttaaggaggagctggataagtacttcaagaatcacacctctcccgacgtggatctgggcgacatctccggcatcaatgcctctgtggtgaacatccagaaggagatcgaccggctgaacgaggtggccaagaatctgaacgagagcctgatcgatctgcaggagctgggcaagtatgagcagtacatcaagggctctggcagagagaacctgtatttccagggaggaggaggcagcggatacatccctgaggcaccaagggacggacaggcctacgtgcgcaaggatggcgagtgggtgctgctgtccacctttctgggccatcatcaccaccaccaccaccactga

SEQ ID NO: 5187 - DNA, 3846 bp, Artificial Sequence
  Description of Artificial Sequence: Synthetic polynucleotide
atgggcatcctgccaagcccaggaatgcccgccctgctgtctctggtgagcctgctgtccgtgctgctgatgggatgcgtggcagagacaggcacacagtgcgtgaacctgaccacaaggacccagctgccccctgcctataccaattctttcacacggggcgtgtactatcccgacaaggtgtttagaagctccgtgctgcactccacacaggatctgtttctgcctttcttttctaacgtgacctggttccacgccatccacgtgtccggcaccaatggcacaaagcggttcgacaatcccgtgctgccttttaacgatggcgtgtacttcgccagcaccgagaagtccaacatcatcagaggctggatctttggcaccacactggactctaagacacagagcctgctgatcgtgaacaatgccaccaacgtggtgatcaaggtgtgcgagttccagttttgtaatgatccattcctgggcgtgtactatcacaagaacaataagtcctggatggagtctgagtttcgcgtgtattctagcgccaacaattgcacatttgagtacgtgagccagcccttcctgatggacctggagggcaagcagggcaatttcaagaacctgagggagttcgtgtttaagaatatcgatggctacttcaagatctacagcaagcacaccccaatcaacctggtgcgcgacctgccacagggattctccgccctggagccactggtggatctgcccatcggcatcaacatcacccggtttcagacactgctggccctgcacagatcctacctgacaccaggcgactcctctagcggatggaccgcaggagctgccgcctactatgtgggctatctgcagccccggaccttcctgctgaagtacaacgagaatggcaccatcacagacgcagtggattgcgccctggaccccctgtctgagacaaagtgtacactgaagagctttaccgtggagaagggcatctatcagacaagcaatttcagggtgcagcctaccgagtccatcgtgcgctttcccaatatcacaaacctgtgcccttttggcgaggtgttcaacgccaccagattcgccagcgtgtacgcctggaatcggaagagaatctccaactgcgtggccgactattctgtgctgtacaactccgcctctttcagcacctttaagtgctatggcgtgtctcccacaaagctgaatgatctgtgctttaccaacgtgtacgccgatagcttcgtgatcaggggagacgaagtgagacagatcgcaccaggacagacaggaaagatcgcagactacaattataagctgcctgacgatttcaccggctgcgtgatcgcctggaactccaacaatctggattctaaagtgggcggcaactacaattatctgtacaggctgtttcgcaagtccaatctgaagccattcgagcgggacatctccacagagatctaccaggccggctctaccccctgcaatggcgtggagggctttaactgttatttccctctgcagtcttacggcttccagccaacaaacggcgtgggctatcagccctacagagtggtggtgctgtcctttgagctgctgtgtgcaccagcaacagtgtgcggcccaaagaagtctaccaatctggtgaagaacaagtgcgtgaacttcaacttcaacggactgaccggcacaggcgtgctgaccgagagcaataagaagttcctgccttttcagcagttcggcagggacatcgcagataccacagacgccgtgcgcgaccctcagaccctggagatcctggacatcacaccatgcagcttcggcggcgtgtccgtgatcacaccaggcaccaatacatccaaccaggtggccgtgctgtatcaggacgtgaattgtaccgaggtgcccgtggcaatccacgcagatcagctgacccctacatggcgggtgtactctaccggcagcaacgtgttccagacaagagccggatgcctgatcggagcagagcacgtgaacaatagctatgagtgcgacatccctatcggcgccggcatctgtgccagctaccagacccagacaaactccccatctggagcaggctccgtggccagccagtccatcatcgcctataccatgagcctgggcgccgagaacagcgtggcctactccaacaattctatcgccatccctaccaacttcacaatcagcgtgaccacagagatcctgccagtgtctatgaccaagacaagcgtggactgcacaatgtatatctgtggcgatagcaccgagtgctccaacctgctgctgcagtacggctccttttgtacccagctgaatagagccctgacaggcatcgccgtggagcaggataagaacacacaggaggtgttcgcccaggtgaagcagatctacaagaccccacccatcaaggactttggcggcttcaacttcagccagatcctgcctgatccaagcaagccctccaagaggtcttttatcgaggacctgctgttcaacaaggtgaccctggccgatgccggcttcatcaagcagtatggagattgcctgggagacatcgcagcccgcgacctgatctgtgcccagaagtttaatggcctgaccgtgctgcctccactgctgacagatgagatgatcgcccagtacacatctgccctgctggccggcaccatcacaagcggatggaccttcggcgcaggagccgccctgcagatcccttttgccatgcagatggcctataggttcaacggcatcggcgtgacccagaatgtgctgtacgagaaccagaagctgatcgccaatcagtttaacagcgccatcggcaagatccaggactctctgtcctctacagccagcgccctgggcaagctgcaggatgtggtgaatcagaacgcccaggccctgaataccctggtgaagcagctgagctccaacttcggcgccatctctagcgtgctgaatgacatcctgagccggctggacccccctgaggcagaggtgcagatcgacaggctgatcacaggccgcctgcagagcctgcagacctacgtgacacagcagctgatcagggcagcagagatcagagcctccgccaatctggccgccaccaagatgagcgagtgcgtgctgggacagtccaagagggtggacttttgtggcaagggctatcacctgatgtctttcccacagagcgcccctcacggcgtggtgtttctgcacgtgacctacgtgccagcccaggagaagaacttcaccacagcaccagccatctgccacgatggaaaggcacactttcctagggagggcgtgttcgtgtctaacggcacccactggtttgtgacacagcgcaatttctacgagccacagatcatcaccacagacaatacattcgtgagcggcaactgtgatgtggtgatcggcatcgtgaacaataccgtgtatgatccactgcagcccgagctggactcctttaaggaggagctggataagtacttcaagaatcacacctctcccgacgtggatctgggcgacatctccggcatcaatgcctctgtggtgaacatccagaaggagatcgaccggctgaacgaggtggccaagaatctgaacgagagcctgatcgatctgcaggagctgggcaagtatgagcagtacatcaagggctctggcagagagaacctgtatttccagggaggaggaggcagcggatacatccctgaggcaccaagggacggacaggcctacgtgcgcaaggatggcgagtgggtgctgctgtccacctttctgggccatcatcaccaccaccaccaccactga

SEQ ID NO: 5188 - DNA, 3846 bp, Artificial Sequence
  Description of Artificial Sequence: Synthetic polynucleotide
atgggcatcctgccaagcccaggaatgcccgccctgctgtctctggtgagcctgctgtccgtgctgctgatgggatgcgtggcagagacaggcacacagtgcgtgaacctgaccacaaggacccagctgccccctgcctataccaattctttcacacggggcgtgtactatcccgacaaggtgtttagaagctccgtgctgcactccacacaggatctgtttctgcctttcttttctaacgtgacctggttccacgccatccacgtgtccggcaccaatggcacaaagcggttcgacaatcccgtgctgccttttaacgatggcgtgtacttcgccagcaccgagaagtccaacatcatcagaggctggatctttggcaccacactggactctaagacacagagcctgctgatcgtgaacaatgccaccaacgtggtgatcaaggtgtgcgagttccagttttgtaatgatccattcctgggcgtgtactatcacaagaacaataagtcctggatggagtctgagtttcgcgtgtattctagcgccaacaattgcacatttgagtacgtgagccagcccttcctgatggacctggagggcaagcagggcaatttcaagaacctgagggagttcgtgtttaagaatatcgatggctacttcaagatctacagcaagcacaccccaatcaacctggtgcgcgacctgccacagggattctccgccctggagccactggtggatctgcccatcggcatcaacatcacccggtttcagacactgctggccctgcacagatcctacctgacaccaggcgactcctctagcggatggaccgcaggagctgccgcctactatgtgggctatctgcagccccggaccttcctgctgaagtacaacgagaatggcaccatcacagacgcagtggattgcgccctggaccccctgtctgagacaaagtgtacactgaagagctttaccgtggagaagggcatctatcagacaagcaatttcagggtgcagcctaccgagtccatcgtgcgctttcccaatatcacaaacctgtgcccttttggcgaggtgttcaacgccaccagattcgccagcgtgtacgcctggaatcggaagagaatctccaactgcgtggccaattattctgtgctgtacaactccgcctctttcagcacctttaagtgctatggcgtgtctcccacaaagctgaatgatctgtgctttaccaacgtgtacgccgatagcttcgtgatcaggggagacgaagtgagacagatcgcaccaggacagacaggaaagatcgcagactacaattataagctgcctgacgatttcaccggctgcgtgatcgcctggaactccaacaatctggattctaaagtgggcggcaactacaattatctgtacaggctgtttcgcaagtccaatctgaagccattcgagcgggacatctccacagagatctaccaggccggctctaccccctgcaatggcgtggagggctttaactgttatttccctctgcagtcttacggcttccagccaacaaacggcgtgggctatcagccctacagagtggtggtgctgtcctttgagctgctgcacgcaccagcaacagtgtgcggcccaaagaagtctaccaatctggtgaagaacaagtgcgtgaacttcaacttcaacggactgaccggcacaggcgtgctgaccgagagcaataagaagttcctgccttttcagcagttcggcagggacatcgcagataccacagacgccgtgcgcgaccctcagaccctggagatcctggacatcacaccatgcagcttcggcggcgtgtccgtgatcacaccaggcaccaatacatccaaccaggtggccgtgctgtatcaggacgtgaattgtaccgaggtgcccgtggcaatccacgcagatcagctgacccctacatggcgggtgtactctaccggcagcaacgtgttccagacaagagccggatgcctgatcggagcagagcacgtgaacaatagctatgagtgcgacatccctatcggcgccggcatctgtgccagctaccagacccagacaaactccccatctggagcaggctccgtggccagccagtccatcatcgcctataccatgagcctgggcgccgagaacagcgtggcctactccaacaattctatcgccatccctaccaacttcacaatcagcgtgaccacagagatcctgccagtgtctatgaccaagacaagcgtggactgcacaatgtatatctgtggcgatagcaccgagtgctccaacctgctgctgcagtacggctccttttgtacccagctgaatagagccctgacaggcatcgccgtggagcaggataagaacacacaggaggtgttcgcccaggtgaagcagatctacaagaccccacccatcaaggactttggcggcttcaacttcagccagatcctgcctgatccaagcaagccctccaagaggtcttttatcgaggacctgctgttcaacaaggtgaccctggccgatgccggcttcatcaagcagtatggagattgcctgggagacatcgcagcccgcgacctgatctgtgcccagaagtttaatggcctgaccgtgctgcctccactgctgacagatgagatgatcgcccagtacacatctgccctgctggccggcaccatcacaagcggatggaccttcggcgcaggagccgccctgcagatcccttttgccatgcagatggcctataggttcaacggcatcggcgtgacccagaatgtgctgtacgagaaccagaagctgatcgccaatcagtttaacagcgccatcggcaagatccaggactctctgtcctctacagccagcgccctgggcaagctgcaggatgtggtgaatcagaacgcccaggccctgaataccctggtgaagcagctgagctccaacttcggcgccatctctagcgtgctgaatgacatcctgagccggctggacccccctgaggcagaggtgcagatcgacaggctgatcacaggccgcctgcagagcctgcagacctacgtgacacagcagctgatcagggcagcagagatcagagcctccgccaatctggccgccaccaagatgagcgagtgcgtgctgggacagtccaagagggtggacttttgtggcaagggctatcacctgatgtctttcccacagagcgcccctcacggcgtggtgtttctgcacgtgacctacgtgccagcccaggagaagaacttcaccacagcaccagccatctgccacgatggaaaggcacactttcctagggagggcgtgttcgtgtctaacggcacccactggtttgtgacacagcgcaatttctacgagccacagatcatcaccacagacaatacattcgtgagcggcaactgtgatgtggtgatcggcatcgtgaacaataccgtgtatgatccactgcagcccgagctggactcctttaaggaggagctggataagtacttcaagaatcacacctctcccgacgtggatctgggcgacatctccggcatcaatgcctctgtggtgaacatccagaaggagatcgaccggctgaacgaggtggccaagaatctgaacgagagcctgatcgatctgcaggagctgggcaagtatgagcagtacatcaagggctctggcagagagaacctgtatttccagggaggaggaggcagcggatacatccctgaggcaccaagggacggacaggcctacgtgcgcaaggatggcgagtgggtgctgctgtccacctttctgggccatcatcaccaccaccaccaccactga

SEQ ID NO: 5189 - DNA, 3846 bp, Artificial Sequence
  Description of Artificial Sequence: Synthetic polynucleotide
atgggcatcctgccaagcccaggaatgcccgccctgctgtctctggtgagcctgctgtccgtgctgctgatgggatgcgtggcagagacaggcacacagtgcgtgaacctgaccacaaggacccagctgccccctgcctataccaattctttcacacggggcgtgtactatcccgacaaggtgtttagaagctccgtgctgcactccacacaggatctgtttctgcctttcttttctaacgtgacctggttccacgccatccacgtgtccggcaccaatggcacaaagcggttcgacaatcccgtgctgccttttaacgatggcgtgtacttcgccagcaccgagaagtccaacatcatcagaggctggatctttggcaccacactggactctaagacacagagcctgctgatcgtgaacaatgccaccaacgtggtgatcaaggtgtgcgagttccagttttgtaatgatccattcctgggcgtgtactatcacaagaacaataagtcctggatggagtctgagtttcgcgtgtattctagcgccaacaattgcacatttgagtacgtgagccagcccttcctgatggacctggagggcaagcagggcaatttcaagaacctgagggagttcgtgtttaagaatatcgatggctacttcaagatctacagcaagcacaccccaatcaacctggtgcgcgacctgccacagggattctccgccctggagccactggtggatctgcccatcggcatcaacatcacccggtttcagacactgctggccctgcacagatcctacctgacaccaggcgactcctctagcggatggaccgcaggagctgccgcctactatgtgggctatctgcagccccggaccttcctgctgaagtacaacgagaatggcaccatcacagacgcagtggattgcgccctggaccccctgtctgagacaaagtgtacactgaagagctttaccgtggagaagggcatctatcagacaagcaatttcagggtgcagcctaccgagtccatcgtgcgctttcccaatatcacaaacctgtgcccttttggcgaggtgttcaacgccaccagattcgccagcgtgtacgcctggaatcggaagagaatctccaactgcgtggccgactattctgtgctgtacaactccgcctctttcagcacctttaagtgctatggcgtgtctcccacaaagctgaatgatctgtgctttaccaacgtgtacgccgatagcttcgtgatcaggggagacgaagtgagacagatcgcaccaggacagacaggaaagatcgcagactacaattataagctgcctgacgatttcaccggctgcgtgatcgcctggaactccaacaatctggattctaaagtgggcggcaactacaattatctgtacaggctgtttcgcaagtccaatctgaagccattcgagcgggacatctccacagagatctaccaggccggctctaccccctgcaatggcgtggagggctttaactgttatttccctctgcagtcttacggcttccagccaacaaacggcgtgggctatcagccctacagagtggtggtgctgtcctttgagctgctgcactacccagcaacagtgtgcggcccaaagaagtctaccaatctggtgaagaacaagtgcgtgaacttcaacttcaacggactgaccggcacaggcgtgctgaccgagagcaataagaagttcctgccttttcagcagttcggcagggacatcgcagataccacagacgccgtgcgcgaccctcagaccctggagatcctggacatcacaccatgcagcttcggcggcgtgtccgtgatcacaccaggcaccaatacatccaaccaggtggccgtgctgtatcaggacgtgaattgtaccgaggtgcccgtggcaatccacgcagatcagctgacccctacatggcgggtgtactctaccggcagcaacgtgttccagacaagagccggatgcctgatcggagcagagcacgtgaacaatagctatgagtgcgacatccctatcggcgccggcatctgtgccagctaccagacccagacaaactccccatctggagcaggctccgtggccagccagtccatcatcgcctataccatgagcctgggcgccgagaacagcgtggcctactccaacaattctatcgccatccctaccaacttcacaatcagcgtgaccacagagatcctgccagtgtctatgaccaagacaagcgtggactgcacaatgtatatctgtggcgatagcaccgagtgctccaacctgctgctgcagtacggctccttttgtacccagctgaatagagccctgacaggcatcgccgtggagcaggataagaacacacaggaggtgttcgcccaggtgaagcagatctacaagaccccacccatcaaggactttggcggcttcaacttcagccagatcctgcctgatccaagcaagccctccaagaggtcttttatcgaggacctgctgttcaacaaggtgaccctggccgatgccggcttcatcaagcagtatggagattgcctgggagacatcgcagcccgcgacctgatctgtgcccagaagtttaatggcctgaccgtgctgcctccactgctgacagatgagatgatcgcccagtacacatctgccctgctggccggcaccatcacaagcggatggaccttcggcgcaggagccgccctgcagatcccttttgccatgcagatggcctataggttcaacggcatcggcgtgacccagaatgtgctgtacgagaaccagaagctgatcgccaatcagtttaacagcgccatcggcaagatccaggactctctgtcctctacagccagcgccctgggcaagctgcaggatgtggtgaatcagaacgcccaggccctgaataccctggtgaagcagctgagctccaacttcggcgccatctctagcgtgctgaatgacatcctgagccggctggacccccctgaggcagaggtgcagatcgacaggctgatcacaggccgcctgcagagcctgcagacctacgtgacacagcagctgatcagggcagcagagatcagagcctccgccaatctggccgccaccaagatgagcgagtgcgtgctgggacagtccaagagggtggacttttgtggcaagggctatcacctgatgtctttcccacagagcgcccctcacggcgtggtgtttctgcacgtgacctacgtgccagcccaggagaagaacttcaccacagcaccagccatctgccacgatggaaaggcacactttcctagggagggcgtgttcgtgtctaacggcacccactggtttgtgacacagcgcaatttctacgagccacagatcatcaccacagacaatacattcgtgagcggcaactgtgatgtggtgatcggcatcgtgaacaataccgtgtatgatccactgcagcccgagctggactcctttaaggaggagctggataagtacttcaagaatcacacctctcccgacgtggatctgggcgacatctccggcatcaatgcctctgtggtgaacatccagaaggagatcgaccggctgaacgaggtggccaagaatctgaacgagagcctgatcgatctgcaggagctgggcaagtatgagcagtacatcaagggctctggcagagagaacctgtatttccagggaggaggaggcagcggatacatccctgaggcaccaagggacggacaggcctacgtgcgcaaggatggcgagtgggtgctgctgtccacctttctgggccatcatcaccaccaccaccaccactga

SEQ ID NO: 5190 - DNA, 3846 bp, Artificial Sequence
  Description of Artificial Sequence: Synthetic polynucleotide
atgggcatcctgccaagcccaggaatgcccgccctgctgtctctggtgagcctgctgtccgtgctgctgatgggatgcgtggcagagacaggcacacagtgcgtgaacctgaccacaaggacccagctgccccctgcctataccaattctttcacacggggcgtgtactatcccgacaaggtgtttagaagctccgtgctgcactccacacaggatctgtttctgcctttcttttctaacgtgacctggttccacgccatccacgtgtccggcaccaatggcacaaagcggttcgacaatcccgtgctgccttttaacgatggcgtgtacttcgccagcaccgagaagtccaacatcatcagaggctggatctttggcaccacactggactctaagacacagagcctgctgatcgtgaacaatgccaccaacgtggtgatcaaggtgtgcgagttccagttttgtaatgatccattcctgggcgtgtactatcacaagaacaataagtcctggatggagtctgagtttcgcgtgtattctagcgccaacaattgcacatttgagtacgtgagccagcccttcctgatggacctggagggcaagcagggcaatttcaagaacctgagggagttcgtgtttaagaatatcgatggctacttcaagatctacagcaagcacaccccaatcaacctggtgcgcgacctgccacagggattctccgccctggagccactggtggatctgcccatcggcatcaacatcacccggtttcagacactgctggccctgcacagatcctacctgacaccaggcgactcctctagcggatggaccgcaggagctgccgcctactatgtgggctatctgcagccccggaccttcctgctgaagtacaacgagaatggcaccatcacagacgcagtggattgcgccctggaccccctgtctgagacaaagtgtacactgaagagctttaccgtggagaagggcatctatcagacaagcaatttcagggtgcagcctaccgagtccatcgtgcgctttcccaatatcacaaacctgtgcccttttggcgaggtgttcaacgccaccagattcgccagcgtgtacgcctggaatcggaagagaatctccaactgcgtggccgactattctgtgctgtacaactccgcctctttcagcacctttaagtgctatggcgtgtctcccacaaagctgaatgatctgtgctttaccaacgtgtacgccgatagcttcgtgatcaggggagacgaagtgagacagatcgcaccaggacagacaggaaagatcgcagactacaattataagctgcctgacgatttcaccggctgcgtgatcgcctggaactccaacaatctggattctaaagtgggcggcaactacaattatctgtacaggctgtttcgcaagtccaatctgaagccattcgagcgggacatcgggacagagatctaccaggccggctctaccccctgcaatggcgtggagggctttaactgttatttccctctgcagtcttacggcttccagccaacaaacggcgtgggctatcagccctacagagtggtggtgctgtcctttgagctgctgcacgcaccagcaacagtgtgcggcccaaagaagtctaccaatctggtgaagaacaagtgcgtgaacttcaacttcaacggactgaccggcacaggcgtgctgaccgagagcaataagaagttcctgccttttcagcagttcggcagggacatcgcagataccacagacgccgtgcgcgaccctcagaccctggagatcctggacatcacaccatgcagcttcggcggcgtgtccgtgatcacaccaggcaccaatacatccaaccaggtggccgtgctgtatcaggacgtgaattgtaccgaggtgcccgtggcaatccacgcagatcagctgacccctacatggcgggtgtactctaccggcagcaacgtgttccagacaagagccggatgcctgatcggagcagagcacgtgaacaatagctatgagtgcgacatccctatcggcgccggcatctgtgccagctaccagacccagacaaactccccatctggagcaggctccgtggccagccagtccatcatcgcctataccatgagcctgggcgccgagaacagcgtggcctactccaacaattctatcgccatccctaccaacttcacaatcagcgtgaccacagagatcctgccagtgtctatgaccaagacaagcgtggactgcacaatgtatatctgtggcgatagcaccgagtgctccaacctgctgctgcagtacggctccttttgtacccagctgaatagagccctgacaggcatcgccgtggagcaggataagaacacacaggaggtgttcgcccaggtgaagcagatctacaagaccccacccatcaaggactttggcggcttcaacttcagccagatcctgcctgatccaagcaagccctccaagaggtcttttatcgaggacctgctgttcaacaaggtgaccctggccgatgccggcttcatcaagcagtatggagattgcctgggagacatcgcagcccgcgacctgatctgtgcccagaagtttaatggcctgaccgtgctgcctccactgctgacagatgagatgatcgcccagtacacatctgccctgctggccggcaccatcacaagcggatggaccttcggcgcaggagccgccctgcagatcccttttgccatgcagatggcctataggttcaacggcatcggcgtgacccagaatgtgctgtacgagaaccagaagctgatcgccaatcagtttaacagcgccatcggcaagatccaggactctctgtcctctacagccagcgccctgggcaagctgcaggatgtggtgaatcagaacgcccaggccctgaataccctggtgaagcagctgagctccaacttcggcgccatctctagcgtgctgaatgacatcctgagccggctggacccccctgaggcagaggtgcagatcgacaggctgatcacaggccgcctgcagagcctgcagacctacgtgacacagcagctgatcagggcagcagagatcagagcctccgccaatctggccgccaccaagatgagcgagtgcgtgctgggacagtccaagagggtggacttttgtggcaagggctatcacctgatgtctttcccacagagcgcccctcacggcgtggtgtttctgcacgtgacctacgtgccagcccaggagaagaacttcaccacagcaccagccatctgccacgatggaaaggcacactttcctagggagggcgtgttcgtgtctaacggcacccactggtttgtgacacagcgcaatttctacgagccacagatcatcaccacagacaatacattcgtgagcggcaactgtgatgtggtgatcggcatcgtgaacaataccgtgtatgatccactgcagcccgagctggactcctttaaggaggagctggataagtacttcaagaatcacacctctcccgacgtggatctgggcgacatctccggcatcaatgcctctgtggtgaacatccagaaggagatcgaccggctgaacgaggtggccaagaatctgaacgagagcctgatcgatctgcaggagctgggcaagtatgagcagtacatcaagggctctggcagagagaacctgtatttccagggaggaggaggcagcggatacatccctgaggcaccaagggacggacaggcctacgtgcgcaaggatggcgagtgggtgctgctgtccacctttctgggccatcatcaccaccaccaccaccactga

SEQ ID NO: 5191 - DNA, 3846 bp, Artificial Sequence
  Description of Artificial Sequence: Synthetic polynucleotide
atgggcatcctgccaagcccaggaatgcccgccctgctgtctctggtgagcctgctgtccgtgctgctgatgggatgcgtggcagagacaggcacacagtgcgtgaacctgaccacaaggacccagctgccccctgcctataccaattctttcacacggggcgtgtactatcccgacaaggtgtttagaagctccgtgctgcactccacacaggatctgtttctgcctttcttttctaacgtgacctggttccacgccatccacgtgtccggcaccaatggcacaaagcggttcgacaatcccgtgctgccttttaacgatggcgtgtacttcgccagcaccgagaagtccaacatcatcagaggctggatctttggcaccacactggactctaagacacagagcctgctgatcgtgaacaatgccaccaacgtggtgatcaaggtgtgcgagttccagttttgtaatgatccattcctgggcgtgtactatcacaagaacaataagtcctggatggagtctgagtttcgcgtgtattctagcgccaacaattgcacatttgagtacgtgagccagcccttcctgatggacctggagggcaagcagggcaatttcaagaacctgagggagttcgtgtttaagaatatcgatggctacttcaagatctacagcaagcacaccccaatcaacctggtgcgcgacctgccacagggattctccgccctggagccactggtggatctgcccatcggcatcaacatcacccggtttcagacactgctggccctgcacagatcctacctgacaccaggcgactcctctagcggatggaccgcaggagctgccgcctactatgtgggctatctgcagccccggaccttcctgctgaagtacaacgagaatggcaccatcacagacgcagtggattgcgccctggaccccctgtctgagacaaagtgtacactgaagagctttaccgtggagaagggcatctatcagacaagcaatttcagggtgcagcctaccgagtccatcgtgcgctttcccaatatcacaaacctgtgcccttttggcgaggtgttcaacgccaccagattcgccagcgtgtacgcctggaatcggaagagaatctccaactgcgtggccgactattctgtgctgtacaactccgcctctttcagcacctttaagtgctatggcgtgtctcccacaaagctgaatgatctgtgctttaccaacgtgtacgccgatagcttcgtgatcaggggagacgaagtgagacagatcgcaccaggacagacaggaaagatcgcagactacaattataagctgcctgacgatttcaccggctgcgtgatcgcctggaactccaacaatctggattctaaagtgggcggcaactacaattatctgtacaggctgtttcgcaagtccaatctgaagccattcgagcgggacatctccacagagatctaccaggccggctctaccccctgcaatggcgtggagggctttaactgttatttccctctgcagtcttacggcttccagccaacaaacggcgtgggctatcagccctacagagtggtggtgctgtcctttgagctgctgcacgcaccagcaacagtgtgcggcccaaagaagtctaccaatctggtgaagaacaagtgcgtgaacttcaacttcaacggactgaccggcacaggcgtgctgaccgagagcaataagaagttcctgccttttcagcagttcggcagggacatcgcagataccacagacgccgtgcgcgaccctcagaccctggagatcctggacatcacaccatgcagcttcggcggcgtgtccgtgatcacaccaggcaccaatacatccaaccaggtggccgtgctgtatcaggacgtgaattgtaccgaggtgcccgtggcaatccacgcagatcagctgacccctacatggcgggtgtactctaccggcagcaacgtgttccagacaagagccggatgcctgatcggagcagagcacgtgaacaatagctatgagtgcgacatccctatcggcgccggcatctgtgccagctaccagacccagacaaactccccatctggagcaggctccgtggccagccagtccatcatcgcctataccatgagcctgggcgccgagaacgaagtggcctactccaacaattctatcgccatccctaccaacttcacaatcagcgtgaccacagagatcctgccagtgtctatgaccaagacaagcgtggactgcacaatgtatatctgtggcgatagcaccgagtgctccaacctgctgctgcagtacggctccttttgtacccagctgaatagagccctgacaggcatcgccgtggagcaggataagaacacacaggaggtgttcgcccaggtgaagcagatctacaagaccccacccatcaaggactttggcggcttcaacttcagccagatcctgcctgatccaagcaagccctccaagaggtcttttatcgaggacctgctgttcaacaaggtgaccctggccgatgccggcttcatcaagcagtatggagattgcctgggagacatcgcagcccgcgacctgatctgtgcccagaagtttaatggcctgaccgtgctgcctccactgctgacagatgagatgatcgcccagtacacatctgccctgctggccggcaccatcacaagcggatggaccttcggcgcaggagccgccctgcagatcccttttgccatgcagatggcctataggttcaacggcatcggcgtgacccagaatgtgctgtacgagaaccagaagctgatcgccaatcagtttaacagcgccatcggcaagatccaggactctctgtcctctacagccagcgccctgggcaagctgcaggatgtggtgaatcagaacgcccaggccctgaataccctggtgaagcagctgagctccaacttcggcgccatctctagcgtgctgaatgacatcctgagccggctggacccccctgaggcagaggtgcagatcgacaggctgatcacaggccgcctgcagagcctgcagacctacgtgacacagcagctgatcagggcagcagagatcagagcctccgccaatctggccgccaccaagatgagcgagtgcgtgctgggacagtccaagagggtggacttttgtggcaagggctatcacctgatgtctttcccacagagcgcccctcacggcgtggtgtttctgcacgtgacctacgtgccagcccaggagaagaacttcaccacagcaccagccatctgccacgatggaaaggcacactttcctagggagggcgtgttcgtgtctaacggcacccactggtttgtgacacagcgcaatttctacgagccacagatcatcaccacagacaatacattcgtgagcggcaactgtgatgtggtgatcggcatcgtgaacaataccgtgtatgatccactgcagcccgagctggactcctttaaggaggagctggataagtacttcaagaatcacacctctcccgacgtggatctgggcgacatctccggcatcaatgcctctgtggtgaacatccagaaggagatcgaccggctgaacgaggtggccaagaatctgaacgagagcctgatcgatctgcaggagctgggcaagtatgagcagtacatcaagggctctggcagagagaacctgtatttccagggaggaggaggcagcggatacatccctgaggcaccaagggacggacaggcctacgtgcgcaaggatggcgagtgggtgctgctgtccacctttctgggccatcatcaccaccaccaccaccactga

SEQ ID NO: 5192 - DNA, 3846 bp, Artificial Sequence
  Description of Artificial Sequence: Synthetic polynucleotide
atgggcatcctgccaagcccaggaatgcccgccctgctgtctctggtgagcctgctgtccgtgctgctgatgggatgcgtggcagagacaggcacacagtgcgtgaacctgaccacaaggacccagctgccccctgcctataccaattctttcacacggggcgtgtactatcccgacaaggtgtttagaagctccgtgctgcactccacacaggatctgtttctgcctttcttttctaacgtgacctggttccacgccatccacgtgtccggcaccaatggcacaaagcggttcgacaatcccgtgctgccttttaacgatggcgtgtacttcgccagcaccgagaagtccaacatcatcagaggctggatctttggcaccacactggactctaagacacagagcctgctgatcgtgaacaatgccaccaacgtggtgatcaaggtgtgcgagttccagttttgtaatgatccattcctgggcgtgtactatcacaagaacaataagtcctggatggagtctgagtttcgcgtgtattctagcgccaacaattgcacatttgagtacgtgagccagcccttcctgatggacctggagggcaagcagggcaatttcaagaacctgagggagttcgtgtttaagaatatcgatggctacttcaagatctacagcaagcacaccccaatcaacctggtgcgcgacctgccacagggattctccgccctggagccactggtggatctgcccatcggcatcaacatcacccggtttcagacactgctggccctgcacagatcctacctgacaccaggcgactcctctagcggatggaccgcaggagctgccgcctactatgtgggctatctgcagccccggaccttcctgctgaagtacaacgagaatggcaccatcacagacgcagtggattgcgccctggaccccctgtctgagacaaagtgtacactgaagagctttaccgtggagaagggcatctatcagacaagcaatttcagggtgcagcctaccgagtccatcgtgcgctttcccaatatcacaaacctgtgcccttttggcgaggtgttcaacgccaccagattcgccagcgtgtacgcctggaatcggaagagaatctccaactgcgtggccgactattctgtgctgtacaactccgcctctttcagcacctttaagtgctatggcgtgtctcccacaaagctgaatgatctgtgctttaccaacgtgtacgccgatagcttcgtgatcaggggagacgaagtgagacagatcgcaccaggacagacaggaaagatcgcagactacaattataagctgcctgacgatttcaccggctgcgtgatcgcctggaactccaacaatctggattctaaagtgggcggcaactacaattatctgtacaggctgtttcgcaagtccaatctgaagccattcgagcgggacatctccacagagatctaccaggccggctctaccccccaaaatggcgtggagggctttaactgttatttccctctgcagtcttacggcttccagccaacaaacggcgtgggctatcagccctacagagtggtggtgctgtcctttgagctgctgcacgcaccagcaacagtgtgcggcccaaagaagtctaccaatctggtgaagaacaagtgcgtgaacttcaacttcaacggactgaccggcacaggcgtgctgaccgagagcaataagaagttcctgccttttcagcagttcggcagggacatcgcagataccacagacgccgtgcgcgaccctcagaccctggagatcctggacatcacaccatgcagcttcggcggcgtgtccgtgatcacaccaggcaccaatacatccaaccaggtggccgtgctgtatcaggacgtgaattgtaccgaggtgcccgtggcaatccacgcagatcagctgacccctacatggcgggtgtactctaccggcagcaacgtgttccagacaagagccggatgcctgatcggagcagagcacgtgaacaatagctatgagtgcgacatccctatcggcgccggcatctgtgccagctaccagacccagacaaactccccatctggagcaggctccgtggccagccagtccatcatcgcctataccatgagcctgggcgccgagaacagcgtggcctactccaacaattctatcgccatccctaccaacttcacaatcagcgtgaccacagagatcctgccagtgtctatgaccaagacaagcgtggactgcacaatgtatatctgtggcgatagcaccgagtgctccaacctgctgctgcagtacggctccttttgtacccagctgaatagagccctgacaggcatcgccgtggagcaggataagaacacacaggaggtgttcgcccaggtgaagcagatctacaagaccccacccatcaaggactttggcggcttcaacttcagccagatcctgcctgatccaagcaagccctccaagaggtcttttatcgaggacctgctgttcaacaaggtgaccctggccgatgccggcttcatcaagcagtatggagattgcctgggagacatcgcagcccgcgacctgatctgtgcccagaagtttaatggcctgaccgtgctgcctccactgctgacagatgagatgatcgcccagtacacatctgccctgctggccggcaccatcacaagcggatggaccttcggcgcaggagccgccctgcagatcccttttgccatgcagatggcctataggttcaacggcatcggcgtgacccagaatgtgctgtacgagaaccagaagctgatcgccaatcagtttaacagcgccatcggcaagatccaggactctctgtcctctacagccagcgccctgggcaagctgcaggatgtggtgaatcagaacgcccaggccctgaataccctggtgaagcagctgagctccaacttcggcgccatctctagcgtgctgaatgacatcctgagccggctggacccccctgaggcagaggtgcagatcgacaggctgatcacaggccgcctgcagagcctgcagacctacgtgacacagcagctgatcagggcagcagagatcagagcctccgccaatctggccgccaccaagatgagcgagtgcgtgctgggacagtccaagagggtggacttttgtggcaagggctatcacctgatgtctttcccacagagcgcccctcacggcgtggtgtttctgcacgtgacctacgtgccagcccaggagaagaacttcaccacagcaccagccatctgccacgatggaaaggcacactttcctagggagggcgtgttcgtgtctaacggcacccactggtttgtgacacagcgcaatttctacgagccacagatcatcaccacagacaatacattcgtgagcggcaactgtgatgtggtgatcggcatcgtgaacaataccgtgtatgatccactgcagcccgagctggactcctttaaggaggagctggataagtacttcaagaatcacacctctcccgacgtggatctgggcgacatctccggcatcaatgcctctgtggtgaacatccagaaggagatcgaccggctgaacgaggtggccaagaatctgaacgagagcctgatcgatctgcaggagctgggcaagtatgagcagtacatcaagggctctggcagagagaacctgtatttccagggaggaggaggcagcggatacatccctgaggcaccaagggacggacaggcctacgtgcgcaaggatggcgagtgggtgctgctgtccacctttctgggccatcatcaccaccaccaccaccactga

SEQ ID NO: 5193 - DNA, 3846 bp, Artificial Sequence
  Description of Artificial Sequence: Synthetic polynucleotide
atgggcatcctgccaagcccaggaatgcccgccctgctgtctctggtgagcctgctgtccgtgctgctgatgggatgcgtggcagagacaggcacacagtgcgtgaacctgaccacaaggacccagctgccccctgcctataccaattctttcacacggggcgtgtactatcccgacaaggtgtttagaagctccgtgctgcactccacacaggatctgtttctgcctttcttttctaacgtgacctggttccacgccatccacgtgtccggcaccaatggcacaaagcggttcgacaatcccgtgctgccttttaacgatggcgtgtacttcgccagcaccgagaagtccaacatcatcagaggctggatctttggcaccacactggactctaagacacagagcctgctgatcgtgaacaatgccaccaacgtggtgatcaaggtgtgcgagttccagttttgtaatgatccattcctgggcgtgtactatcacaagaacaataagtcctggatggagtctgagtttcgcgtgtattctagcgccaacaattgcacatttgagtacgtgagccagcccttcctgatggacctggagggcaagcagggcaatttcaagaacctgagggagttcgtgtttaagaatatcgatggctacttcaagatctacagcaagcacaccccaatcaacctggtgcgcgacctgccacagggattctccgccctggagccactggtggatctgcccatcggcatcaacatcacccggtttcagacactgctggccctgcacagatcctacctgacaccaggcgactcctctagcggatggaccgcaggagctgccgcctactatgtgggctatctgcagccccggaccttcctgctgaagtacaacgagaatggcaccatcacagacgcagtggattgcgccctggaccccctgtctgagacaaagtgtacactgaagagctttaccgtggagaagggcatctatcagacaagcaatttcagggtgcagcctaccgagtccatcgtgcgctttcccaatatcacaaacctgtgcccttttggcgaggtgttcaacgccaccagattcgccagcgtgtacgcctggaatcggaagagaatctccaactgcgtggccgactattctgtgctgtacaactccgcctctttcagcacctttaagtgctatggcgtgtctcccacaaagctgaatgatctgtgctttaccaacgtgtacgccgatagcttcgtgatcaggggagacgaagtgagacagatcgcaccaggacagacaggaaagatcgcagactacaattataagctgcctgacgatttcaccggctgcgtgatcgcctggaactccaacaatctggattctaaagtgggcggcaactacaattatctgtacaggctgtttcgcaagtccaatctgaagccattcgagcgggacatctccacacaaatctaccaggccggctctaccccctgcaatggcgtggagggctttaactgttatttccctctgcagtcttacggcttccagccaacaaacggcgtgggctatcagccctacagagtggtggtgctgtcctttgagctgctgcacgcaccagcaacagtgtgcggcccaaagaagtctaccaatctggtgaagaacaagtgcgtgaacttcaacttcaacggactgaccggcacaggcgtgctgaccgagagcaataagaagttcctgccttttcagcagttcggcagggacatcgcagataccacagacgccgtgcgcgaccctcagaccctggagatcctggacatcacaccatgcagcttcggcggcgtgtccgtgatcacaccaggcaccaatacatccaaccaggtggccgtgctgtatcaggacgtgaattgtaccgaggtgcccgtggcaatccacgcagatcagctgacccctacatggcgggtgtactctaccggcagcaacgtgttccagacaagagccggatgcctgatcggagcagagcacgtgaacaatagctatgagtgcgacatccctatcggcgccggcatctgtgccagctaccagacccagacaaactccccatctggagcaggctccgtggccagccagtccatcatcgcctataccatgagcctgggcgccgagaacagcgtggcctactccaacaattctatcgccatccctaccaacttcacaatcagcgtgaccacagagatcctgccagtgtctatgaccaagacaagcgtggactgcacaatgtatatctgtggcgatagcaccgagtgctccaacctgctgctgcagtacggctccttttgtacccagctgaatagagccctgacaggcatcgccgtggagcaggataagaacacacaggaggtgttcgcccaggtgaagcagatctacaagaccccacccatcaaggactttggcggcttcaacttcagccagatcctgcctgatccaagcaagccctccaagaggtcttttatcgaggacctgctgttcaacaaggtgaccctggccgatgccggcttcatcaagcagtatggagattgcctgggagacatcgcagcccgcgacctgatctgtgcccagaagtttaatggcctgaccgtgctgcctccactgctgacagatgagatgatcgcccagtacacatctgccctgctggccggcaccatcacaagcggatggaccttcggcgcaggagccgccctgcagatcccttttgccatgcagatggcctataggttcaacggcatcggcgtgacccagaatgtgctgtacgagaaccagaagctgatcgccaatcagtttaacagcgccatcggcaagatccaggactctctgtcctctacagccagcgccctgggcaagctgcaggatgtggtgaatcagaacgcccaggccctgaataccctggtgaagcagctgagctccaacttcggcgccatctctagcgtgctgaatgacatcctgagccggctggacccccctgaggcagaggtgcagatcgacaggctgatcacaggccgcctgcagagcctgcagacctacgtgacacagcagctgatcagggcagcagagatcagagcctccgccaatctggccgccaccaagatgagcgagtgcgtgctgggacagtccaagagggtggacttttgtggcaagggctatcacctgatgtctttcccacagagcgcccctcacggcgtggtgtttctgcacgtgacctacgtgccagcccaggagaagaacttcaccacagcaccagccatctgccacgatggaaaggcacactttcctagggagggcgtgttcgtgtctaacggcacccactggtttgtgacacagcgcaatttctacgagccacagatcatcaccacagacaatacattcgtgagcggcaactgtgatgtggtgatcggcatcgtgaacaataccgtgtatgatccactgcagcccgagctggactcctttaaggaggagctggataagtacttcaagaatcacacctctcccgacgtggatctgggcgacatctccggcatcaatgcctctgtggtgaacatccagaaggagatcgaccggctgaacgaggtggccaagaatctgaacgagagcctgatcgatctgcaggagctgggcaagtatgagcagtacatcaagggctctggcagagagaacctgtatttccagggaggaggaggcagcggatacatccctgaggcaccaagggacggacaggcctacgtgcgcaaggatggcgagtgggtgctgctgtccacctttctgggccatcatcaccaccaccaccaccactga

SEQ ID NO: 5194 - DNA, 3846 bp, Artificial Sequence
  Description of Artificial Sequence: Synthetic polynucleotide
atgggcatcctgccaagcccaggaatgcccgccctgctgtctctggtgagcctgctgtccgtgctgctgatgggatgcgtggcagagacaggcacacagtgcgtgaacctgaccacaaggacccagctgccccctgcctataccaattctttcacacggggcgtgtactatcccgacaaggtgtttagaagctccgtgctgcactccacacaggatctgtttctgcctttcttttctaacgtgacctggttccacgccatccacgtgtccggcaccaatggcacaaagcggttcgacaatcccgtgctgccttttaacgatggcgtgtacttcgccagcaccgagaagtccaacatcatcagaggctggatctttggcaccacactggactctaagacacagagcctgctgatcgtgaacaatgccaccaacgtggtgatcaaggtgtgcgagttccagttttgtaatgatccattcctgggcgtgtactatcacaagaacaataagtcctggatggagtctgagtttcgcgtgtattctagcgccaacaattgcacatttgagtacgtgagccagcccttcctgatggacctggagggcaagcagggcaatttcaagaacctgagggagttcgtgtttaagaatatcgatggctacttcaagatctacagcaagcacaccccaatcaacctggtgcgcgacctgccacagggattctccgccctggagccactggtggatctgcccatcggcatcaacatcacccggtttcagacactgctggccctgcacagatcctacctgacaccaggcgactcctctagcggatggaccgcaggagctgccgcctactatgtgggctatctgcagccccggaccttcctgctgaagtacaacgagaatggcaccatcacagacgcagtggattgcgccctggaccccctgtctgagacaaagtgtacactgaagagctttaccgtggagaagggcatctatcagacaagcaatttcagggtgcagcctaccgagtccatcgtgcgctttcccaatatcacaaacctgtgcccttttggcgaggtgttcaacgccaccagattcgccagcgtgtacgcctggaatcggaagagaatctccaactgcgtggccgactattctgtgctgtacctatccgcctctttcagcacctttaagtgctatggcgtgtctcccacaaagctgaatgatctgtgctttaccaacgtgtacgccgatagcttcgtgatcaggggagacgaagtgagacagatcgcaccaggacagacaggaaagatcgcagactacaattataagctgcctgacgatttcaccggctgcgtgatcgcctggaactccaacaatctggattctaaagtgggcggcaactacaattatctgtacaggctgtttcgcaagtccaatctgaagccattcgagcgggacatctccacagagatctaccaggccggctctaccccctgcaatggcgtggagggctttaactgttatttccctctgcagtcttacggcttccagccaacaaacggcgtgggctatcagccctacagagtggtggtgctgtcctttgagctgctgcacgcaccagcaacagtgtgcggcccaaagaagtctaccaatctggtgaagaacaagtgcgtgaacttcaacttcaacggactgaccggcacaggcgtgctgaccgagagcaataagaagttcctgccttttcagcagttcggcagggacatcgcagataccacagacgccgtgcgcgaccctcagaccctggagatcctggacatcacaccatgcagcttcggcggcgtgtccgtgatcacaccaggcaccaatacatccaaccaggtggccgtgctgtatcaggacgtgaattgtaccgaggtgcccgtggcaatccacgcagatcagctgacccctacatggcgggtgtactctaccggcagcaacgtgttccagacaagagccggatgcctgatcggagcagagcacgtgaacaatagctatgagtgcgacatccctatcggcgccggcatctgtgccagctaccagacccagacaaactccccatctggagcaggctccgtggccagccagtccatcatcgcctataccatgagcctgggcgccgagaacagcgtggcctactccaacaattctatcgccatccctaccaacttcacaatcagcgtgaccacagagatcctgccagtgtctatgaccaagacaagcgtggactgcacaatgtatatctgtggcgatagcaccgagtgctccaacctgctgctgcagtacggctccttttgtacccagctgaatagagccctgacaggcatcgccgtggagcaggataagaacacacaggaggtgttcgcccaggtgaagcagatctacaagaccccacccatcaaggactttggcggcttcaacttcagccagatcctgcctgatccaagcaagccctccaagaggtcttttatcgaggacctgctgttcaacaaggtgaccctggccgatgccggcttcatcaagcagtatggagattgcctgggagacatcgcagcccgcgacctgatctgtgcccagaagtttaatggcctgaccgtgctgcctccactgctgacagatgagatgatcgcccagtacacatctgccctgctggccggcaccatcacaagcggatggaccttcggcgcaggagccgccctgcagatcccttttgccatgcagatggcctataggttcaacggcatcggcgtgacccagaatgtgctgtacgagaaccagaagctgatcgccaatcagtttaacagcgccatcggcaagatccaggactctctgtcctctacagccagcgccctgggcaagctgcaggatgtggtgaatcagaacgcccaggccctgaataccctggtgaagcagctgagctccaacttcggcgccatctctagcgtgctgaatgacatcctgagccggctggacccccctgaggcagaggtgcagatcgacaggctgatcacaggccgcctgcagagcctgcagacctacgtgacacagcagctgatcagggcagcagagatcagagcctccgccaatctggccgccaccaagatgagcgagtgcgtgctgggacagtccaagagggtggacttttgtggcaagggctatcacctgatgtctttcccacagagcgcccctcacggcgtggtgtttctgcacgtgacctacgtgccagcccaggagaagaacttcaccacagcaccagccatctgccacgatggaaaggcacactttcctagggagggcgtgttcgtgtctaacggcacccactggtttgtgacacagcgcaatttctacgagccacagatcatcaccacagacaatacattcgtgagcggcaactgtgatgtggtgatcggcatcgtgaacaataccgtgtatgatccactgcagcccgagctggactcctttaaggaggagctggataagtacttcaagaatcacacctctcccgacgtggatctgggcgacatctccggcatcaatgcctctgtggtgaacatccagaaggagatcgaccggctgaacgaggtggccaagaatctgaacgagagcctgatcgatctgcaggagctgggcaagtatgagcagtacatcaagggctctggcagagagaacctgtatttccagggaggaggaggcagcggatacatccctgaggcaccaagggacggacaggcctacgtgcgcaaggatggcgagtgggtgctgctgtccacctttctgggccatcatcaccaccaccaccaccactga

SEQ ID NO: 5195 - DNA, 3846 bp, Artificial Sequence
  Description of Artificial Sequence: Synthetic polynucleotide
atgggcatcctgccaagcccaggaatgcccgccctgctgtctctggtgagcctgctgtccgtgctgctgatgggatgcgtggcagagacaggcacacagtgcgtgaacctgaccacaaggacccagctgccccctgcctataccaattctttcacacggggcgtgtactatcccgacaaggtgtttagaagctccgtgctgcactccacacaggatctgtttctgcctttcttttctaacgtgacctggttccacgccatccacgtgtccggcaccaatggcacaaagcggttcgacaatcccgtgctgccttttaacgatggcgtgtacttcgccagcaccgagaagtccaacatcatcagaggctggatctttggcaccacactggactctaagacacagagcctgctgatcgtgaacaatgccaccaacgtggtgatcaaggtgtgcgagttccagttttgtaatgatccattcctgggcgtgtactatcacaagaacaataagtcctggatggagtctgagtttcgcgtgtattctagcgccaacaattgcacatttgagtacgtgagccagcccttcctgatggacctggagggcaagcagggcaatttcaagaacctgagggagttcgtgtttaagaatatcgatggctacttcaagatctacagcaagcacaccccaatcaacctggtgcgcgacctgccacagggattctccgccctggagccactggtggatctgcccatcggcatcaacatcacccggtttcagacactgctggccctgcacagatcctacctgacaccaggcgactcctctagcggatggaccgcaggagctgccgcctactatgtgggctatctgcagccccggaccttcctgctgaagtacaacgagaatggcaccatcacagacgcagtggattgcgccctggaccccctgtctgagacaaagtgtacactgaagagctttaccgtggagaagggcatctatcagacaagcaatttcagggtgcagcctaccgagtccatcgtgcgctttcccaatatcacaaacctgtgcccttttggcgaggtgttcaacgccaccagattcgccagcgtgtacgcctggaatcggaagagagtatccaactgcgtggccgactattctgtgctgtacaactccgcctctttcagcacctttaagtgctatggcgtgtctcccacaaagctgaatgatctgtgctttaccaacgtgtacgccgatagcttcgtgatcaggggagacgaagtgagacagatcgcaccaggacagacaggaaagatcgcagactacaattataagctgcctgacgatttcaccggctgcgtgatcgcctggaactccaacaatctggattctaaagtgggcggcaactacaattatctgtacaggctgtttcgcaagtccaatctgaagccattcgagcgggacatctccacagagatctaccaggccggctctaccccctgcaatggcgtggagggctttaactgttatttccctctgcagtcttacggcttccagccaacaaacggcgtgggctatcagccctacagagtggtggtgctgtcctttgagctgctgcacgcaccagcaacagtgtgcggcccaaagaagtctaccaatctggtgaagaacaagtgcgtgaacttcaacttcaacggactgaccggcacaggcgtgctgaccgagagcaataagaagttcctgccttttcagcagttcggcagggacatcgcagataccacagacgccgtgcgcgaccctcagaccctggagatcctggacatcacaccatgcagcttcggcggcgtgtccgtgatcacaccaggcaccaatacatccaaccaggtggccgtgctgtatcaggacgtgaattgtaccgaggtgcccgtggcaatccacgcagatcagctgacccctacatggcgggtgtactctaccggcagcaacgtgttccagacaagagccggatgcctgatcggagcagagcacgtgaacaatagctatgagtgcgacatccctatcggcgccggcatctgtgccagctaccagacccagacaaactccccatctggagcaggctccgtggccagccagtccatcatcgcctataccatgagcctgggcgccgagaacagcgtggcctactccaacaattctatcgccatccctaccaacttcacaatcagcgtgaccacagagatcctgccagtgtctatgaccaagacaagcgtggactgcacaatgtatatctgtggcgatagcaccgagtgctccaacctgctgctgcagtacggctccttttgtacccagctgaatagagccctgacaggcatcgccgtggagcaggataagaacacacaggaggtgttcgcccaggtgaagcagatctacaagaccccacccatcaaggactttggcggcttcaacttcagccagatcctgcctgatccaagcaagccctccaagaggtcttttatcgaggacctgctgttcaacaaggtgaccctggccgatgccggcttcatcaagcagtatggagattgcctgggagacatcgcagcccgcgacctgatctgtgcccagaagtttaatggcctgaccgtgctgcctccactgctgacagatgagatgatcgcccagtacacatctgccctgctggccggcaccatcacaagcggatggaccttcggcgcaggagccgccctgcagatcccttttgccatgcagatggcctataggttcaacggcatcggcgtgacccagaatgtgctgtacgagaaccagaagctgatcgccaatcagtttaacagcgccatcggcaagatccaggactctctgtcctctacagccagcgccctgggcaagctgcaggatgtggtgaatcagaacgcccaggccctgaataccctggtgaagcagctgagctccaacttcggcgccatctctagcgtgctgaatgacatcctgagccggctggacccccctgaggcagaggtgcagatcgacaggctgatcacaggccgcctgcagagcctgcagacctacgtgacacagcagctgatcagggcagcagagatcagagcctccgccaatctggccgccaccaagatgagcgagtgcgtgctgggacagtccaagagggtggacttttgtggcaagggctatcacctgatgtctttcccacagagcgcccctcacggcgtggtgtttctgcacgtgacctacgtgccagcccaggagaagaacttcaccacagcaccagccatctgccacgatggaaaggcacactttcctagggagggcgtgttcgtgtctaacggcacccactggtttgtgacacagcgcaatttctacgagccacagatcatcaccacagacaatacattcgtgagcggcaactgtgatgtggtgatcggcatcgtgaacaataccgtgtatgatccactgcagcccgagctggactcctttaaggaggagctggataagtacttcaagaatcacacctctcccgacgtggatctgggcgacatctccggcatcaatgcctctgtggtgaacatccagaaggagatcgaccggctgaacgaggtggccaagaatctgaacgagagcctgatcgatctgcaggagctgggcaagtatgagcagtacatcaagggctctggcagagagaacctgtatttccagggaggaggaggcagcggatacatccctgaggcaccaagggacggacaggcctacgtgcgcaaggatggcgagtgggtgctgctgtccacctttctgggccatcatcaccaccaccaccaccactga

SEQ ID NO: 5196 - DNA, 3846 bp, Artificial Sequence
  Description of Artificial Sequence: Synthetic polynucleotide
atgggcatcctgccaagcccaggaatgcccgccctgctgtctctggtgagcctgctgtccgtgctgctgatgggatgcgtggcagagacaggcacacagtgcgtgaacctgaccacaaggacccagctgccccctgcctataccaattctttcacacggggcgtgtactatcccgacaaggtgtttagaagctccgtgctgcactccacacaggatctgtttctgcctttcttttctaacgtgacctggttccacgccatccacgtgtccggcaccaatggcacaaagcggttcgacaatcccgtgctgccttttaacgatggcgtgtacttcgccagcaccgagaagtccaacatcatcagaggctggatctttggcaccacactggactctaagacacagagcctgctgatcgtgaacaatgccaccaacgtggtgatcaaggtgtgcgagttccagttttgtaatgatccattcctgggcgtgtactatcacaagaacaataagtcctggatggagtctgagtttcgcgtgtattctagcgccaacaattgcacatttgagtacgtgagccagcccttcctgatggacctggagggcaagcagggcaatttcaagaacctgagggagttcgtgtttaagaatatcgatggctacttcaagatctacagcaagcacaccccaatcaacctggtgcgcgacctgccacagggattctccgccctggagccactggtggatctgcccatcggcatcaacatcacccggtttcagacactgctggccctgcacagatcctacctgacaccaggcgactcctctagcggatggaccgcaggagctgccgcctactatgtgggctatctgcagccccggaccttcctgctgaagtacaacgagaatggcaccatcacagacgcagtggattgcgccctggaccccctgtctgagacaaagtgtacactgaagagctttaccgtggagaagggcatctatcagacaagcaatttcagggtgcagcctaccgagtccatcgtgcgctttcccaatatcacaaacctgtgcccttttggcgaggtgttcaacgccaccagattcgccagcgtgtacgcctggaatcggaagagaatctccaactgcgtggccgactattctgtgctgtacaactccgcctctttcagcacctttaagtgctatggcgtgtctcccacaaagctgaatgatctgtgctttaccaacgtgtacgccgatagcttcgtgatcaggggagacgaagtgagacagatcgcaccaggacagacaggaaagatcgcagactacaattataagctgcctgacgatttcaccggctgcgtgatcgcctggaactccgtaaatctggattctaaagtgggcggcaactacaattatctgtacaggctgtttcgcaagtccaatctgaagccattcgagcgggacatctccacagagatctaccaggccggctctaccccctgcaatggcgtggagggctttaactgttatttccctctgcagtcttacggcttccagccaacaaacggcgtgggctatcagccctacagagtggtggtgctgtcctttgagctgctgcacgcaccagcaacagtgtgcggcccaaagaagtctaccaatctggtgaagaacaagtgcgtgaacttcaacttcaacggactgaccggcacaggcgtgctgaccgagagcaataagaagttcctgccttttcagcagttcggcagggacatcgcagataccacagacgccgtgcgcgaccctcagaccctggagatcctggacatcacaccatgcagcttcggcggcgtgtccgtgatcacaccaggcaccaatacatccaaccaggtggccgtgctgtatcaggacgtgaattgtaccgaggtgcccgtggcaatccacgcagatcagctgacccctacatggcgggtgtactctaccggcagcaacgtgttccagacaagagccggatgcctgatcggagcagagcacgtgaacaatagctatgagtgcgacatccctatcggcgccggcatctgtgccagctaccagacccagacaaactccccatctggagcaggctccgtggccagccagtccatcatcgcctataccatgagcctgggcgccgagaacagcgtggcctactccaacaattctatcgccatccctaccaacttcacaatcagcgtgaccacagagatcctgccagtgtctatgaccaagacaagcgtggactgcacaatgtatatctgtggcgatagcaccgagtgctccaacctgctgctgcagtacggctccttttgtacccagctgaatagagccctgacaggcatcgccgtggagcaggataagaacacacaggaggtgttcgcccaggtgaagcagatctacaagaccccacccatcaaggactttggcggcttcaacttcagccagatcctgcctgatccaagcaagccctccaagaggtcttttatcgaggacctgctgttcaacaaggtgaccctggccgatgccggcttcatcaagcagtatggagattgcctgggagacatcgcagcccgcgacctgatctgtgcccagaagtttaatggcctgaccgtgctgcctccactgctgacagatgagatgatcgcccagtacacatctgccctgctggccggcaccatcacaagcggatggaccttcggcgcaggagccgccctgcagatcccttttgccatgcagatggcctataggttcaacggcatcggcgtgacccagaatgtgctgtacgagaaccagaagctgatcgccaatcagtttaacagcgccatcggcaagatccaggactctctgtcctctacagccagcgccctgggcaagctgcaggatgtggtgaatcagaacgcccaggccctgaataccctggtgaagcagctgagctccaacttcggcgccatctctagcgtgctgaatgacatcctgagccggctggacccccctgaggcagaggtgcagatcgacaggctgatcacaggccgcctgcagagcctgcagacctacgtgacacagcagctgatcagggcagcagagatcagagcctccgccaatctggccgccaccaagatgagcgagtgcgtgctgggacagtccaagagggtggacttttgtggcaagggctatcacctgatgtctttcccacagagcgcccctcacggcgtggtgtttctgcacgtgacctacgtgccagcccaggagaagaacttcaccacagcaccagccatctgccacgatggaaaggcacactttcctagggagggcgtgttcgtgtctaacggcacccactggtttgtgacacagcgcaatttctacgagccacagatcatcaccacagacaatacattcgtgagcggcaactgtgatgtggtgatcggcatcgtgaacaataccgtgtatgatccactgcagcccgagctggactcctttaaggaggagctggataagtacttcaagaatcacacctctcccgacgtggatctgggcgacatctccggcatcaatgcctctgtggtgaacatccagaaggagatcgaccggctgaacgaggtggccaagaatctgaacgagagcctgatcgatctgcaggagctgggcaagtatgagcagtacatcaagggctctggcagagagaacctgtatttccagggaggaggaggcagcggatacatccctgaggcaccaagggacggacaggcctacgtgcgcaaggatggcgagtgggtgctgctgtccacctttctgggccatcatcaccaccaccaccaccactga

SEQ ID NO: 5197 - DNA, 3846 bp, Artificial Sequence
  Description of Artificial Sequence: Synthetic polynucleotide
atgggcatcctgccaagcccaggaatgcccgccctgctgtctctggtgagcctgctgtccgtgctgctgatgggatgcgtggcagagacaggcacacagtgcgtgaacctgaccacaaggacccagctgccccctgcctataccaattctttcacacggggcgtgtactatcccgacaaggtgtttagaagctccgtgctgcactccacacaggatctgtttctgcctttcttttctaacgtgacctggttccacgccatccacgtgtccggcaccaatggcacaaagcggttcgacaatcccgtgctgccttttaacgatggcgtgtacttcgccagcaccgagaagtccaacatcatcagaggctggatctttggcaccacactggactctaagacacagagcctgctgatcgtgaacaatgccaccaacgtggtgatcaaggtgtgcgagttccagttttgtaatgatccattcctgggcgtgtactatcacaagaacaataagtcctggatggagtctgagtttcgcgtgtattctagcgccaacaattgcacatttgagtacgtgagccagcccttcctgatggacctggagggcaagcagggcaatttcaagaacctgagggagttcgtgtttaagaatatcgatggctacttcaagatctacagcaagcacaccccaatcaacctggtgcgcgacctgccacagggattctccgccctggagccactggtggatctgcccatcggcatcaacatcacccggtttcagacactgctggccctgcacagatcctacctgacaccaggcgactcctctagcggatggaccgcaggagctgccgcctactatgtgggctatctgcagccccggaccttcctgctgaagtacaacgagaatggcaccatcacagacgcagtggattgcgccctggaccccctgtctgagacaaagtgtacactgaagagctttaccgtggagaagggcatctatcagacaagcaatttcagggtgcagcctaccgagtccatcgtgcgctttcccaatatcacaaacctgtgcccttttggcgaggtgttcaacgccaccagattcgccagcgtgtacgcctggaatcggaagagaatctccaactgcgtggccgactattctgtgctgtacaactccgcctctttcagcacctttaagtgctatggcgtgtctcccacaaagctgaatgatctgtgctttaccaacgtgtacgccgatagcttcgtgatcaggggagacgaagtgagacagatcgcaccaggacagacaggaaagatcgcagactacaattataagctgcctgacgatttcaccggctgcgtgatcgcctggaactccaacaatctggattctaaagtgggcggcaactacaattatctgtacaggctgtttcgcaagtccaatctgaagccattcgagcgggacatctccacaattatctaccaggccggctctaccccctgcaatggcgtggagggctttaactgttatttccctctgcagtcttacggcttccagccaacaaacggcgtgggctatcagccctacagagtggtggtgctgtcctttgagctgctgcacgcaccagcaacagtgtgcggcccaaagaagtctaccaatctggtgaagaacaagtgcgtgaacttcaacttcaacggactgaccggcacaggcgtgctgaccgagagcaataagaagttcctgccttttcagcagttcggcagggacatcgcagataccacagacgccgtgcgcgaccctcagaccctggagatcctggacatcacaccatgcagcttcggcggcgtgtccgtgatcacaccaggcaccaatacatccaaccaggtggccgtgctgtatcaggacgtgaattgtaccgaggtgcccgtggcaatccacgcagatcagctgacccctacatggcgggtgtactctaccggcagcaacgtgttccagacaagagccggatgcctgatcggagcagagcacgtgaacaatagctatgagtgcgacatccctatcggcgccggcatctgtgccagctaccagacccagacaaactccccatctggagcaggctccgtggccagccagtccatcatcgcctataccatgagcctgggcgccgagaacagcgtggcctactccaacaattctatcgccatccctaccaacttcacaatcagcgtgaccacagagatcctgccagtgtctatgaccaagacaagcgtggactgcacaatgtatatctgtggcgatagcaccgagtgctccaacctgctgctgcagtacggctccttttgtacccagctgaatagagccctgacaggcatcgccgtggagcaggataagaacacacaggaggtgttcgcccaggtgaagcagatctacaagaccccacccatcaaggactttggcggcttcaacttcagccagatcctgcctgatccaagcaagccctccaagaggtcttttatcgaggacctgctgttcaacaaggtgaccctggccgatgccggcttcatcaagcagtatggagattgcctgggagacatcgcagcccgcgacctgatctgtgcccagaagtttaatggcctgaccgtgctgcctccactgctgacagatgagatgatcgcccagtacacatctgccctgctggccggcaccatcacaagcggatggaccttcggcgcaggagccgccctgcagatcccttttgccatgcagatggcctataggttcaacggcatcggcgtgacccagaatgtgctgtacgagaaccagaagctgatcgccaatcagtttaacagcgccatcggcaagatccaggactctctgtcctctacagccagcgccctgggcaagctgcaggatgtggtgaatcagaacgcccaggccctgaataccctggtgaagcagctgagctccaacttcggcgccatctctagcgtgctgaatgacatcctgagccggctggacccccctgaggcagaggtgcagatcgacaggctgatcacaggccgcctgcagagcctgcagacctacgtgacacagcagctgatcagggcagcagagatcagagcctccgccaatctggccgccaccaagatgagcgagtgcgtgctgggacagtccaagagggtggacttttgtggcaagggctatcacctgatgtctttcccacagagcgcccctcacggcgtggtgtttctgcacgtgacctacgtgccagcccaggagaagaacttcaccacagcaccagccatctgccacgatggaaaggcacactttcctagggagggcgtgttcgtgtctaacggcacccactggtttgtgacacagcgcaatttctacgagccacagatcatcaccacagacaatacattcgtgagcggcaactgtgatgtggtgatcggcatcgtgaacaataccgtgtatgatccactgcagcccgagctggactcctttaaggaggagctggataagtacttcaagaatcacacctctcccgacgtggatctgggcgacatctccggcatcaatgcctctgtggtgaacatccagaaggagatcgaccggctgaacgaggtggccaagaatctgaacgagagcctgatcgatctgcaggagctgggcaagtatgagcagtacatcaagggctctggcagagagaacctgtatttccagggaggaggaggcagcggatacatccctgaggcaccaagggacggacaggcctacgtgcgcaaggatggcgagtgggtgctgctgtccacctttctgggccatcatcaccaccaccaccaccactga

SEQ ID NO: 5198 - DNA, 3846 bp, Artificial Sequence
  Description of Artificial Sequence: Synthetic polynucleotide
atgggcatcctgccaagcccaggaatgcccgccctgctgtctctggtgagcctgctgtccgtgctgctgatgggatgcgtggcagagacaggcacacagtgcgtgaacctgaccacaaggacccagctgccccctgcctataccaattctttcacacggggcgtgtactatcccgacaaggtgtttagaagctccgtgctgcactccacacaggatctgtttctgcctttcttttctaacgtgacctggttccacgccatccacgtgtccggcaccaatggcacaaagcggttcgacaatcccgtgctgccttttaacgatggcgtgtacttcgccagcaccgagaagtccaacatcatcagaggctggatctttggcaccacactggactctaagacacagagcctgctgatcgtgaacaatgccaccaacgtggtgatcaaggtgtgcgagttccagttttgtaatgatccattcctgggcgtgtactatcacaagaacaataagtcctggatggagtctgagtttcgcgtgtattctagcgccaacaattgcacatttgagtacgtgagccagcccttcctgatggacctggagggcaagcagggcaatttcaagaacctgagggagttcgtgtttaagaatatcgatggctacttcaagatctacagcaagcacaccccaatcaacctggtgcgcgacctgccacagggattctccgccctggagccactggtggatctgcccatcggcatcaacatcacccggtttcagacactgctggccctgcacagatcctacctgacaccaggcgactcctctagcggatggaccgcaggagctgccgcctactatgtgggctatctgcagccccggaccttcctgctgaagtacaacgagaatggcaccatcacagacgcagtggattgcgccctggaccccctgtctgagacaaagtgtacactgaagagctttaccgtggagaagggcatctatcagacaagcaatttcagggtgcagcctaccgagtccatcgtgcgctttcccaatatcacaaacctgtgcccttttggcgaggtgttcaacgccaccagattcgccagcgtgtacgcctggaatcggaagagaatctccaactgcgtggccgactattctgtgctgtacaactccgcctctttcagcacctttaagtgctatggcgtgtctcccacaaagctgaatgatctgtgctttaccaacgtgtacgccgatagcttcgtgatcaggggagacgaagtgagacagatcgcaccaggacagacaggaaagatcgcagactacaattataagctgcctgacgatttcaccggctgcgtgatcgcctggaactccaacaatctggattctaaagtgggcggcaactacaattatctgtacaggctgtttcgcaagtccaatctgaagccattcgagcgggacatctccacagagatgtaccaggccggctctaccccctgcaatggcgtggagggctttaactgttatttccctctgcagtcttacggcttccagccaacaaacggcgtgggctatcagccctacagagtggtggtgctgtcctttgagctgctgcacgcaccagcaacagtgtgcggcccaaagaagtctaccaatctggtgaagaacaagtgcgtgaacttcaacttcaacggactgaccggcacaggcgtgctgaccgagagcaataagaagttcctgccttttcagcagttcggcagggacatcgcagataccacagacgccgtgcgcgaccctcagaccctggagatcctggacatcacaccatgcagcttcggcggcgtgtccgtgatcacaccaggcaccaatacatccaaccaggtggccgtgctgtatcaggacgtgaattgtaccgaggtgcccgtggcaatccacgcagatcagctgacccctacatggcgggtgtactctaccggcagcaacgtgttccagacaagagccggatgcctgatcggagcagagcacgtgaacaatagctatgagtgcgacatccctatcggcgccggcatctgtgccagctaccagacccagacaaactccccatctggagcaggctccgtggccagccagtccatcatcgcctataccatgagcctgggcgccgagaacagcgtggcctactccaacaattctatcgccatccctaccaacttcacaatcagcgtgaccacagagatcctgccagtgtctatgaccaagacaagcgtggactgcacaatgtatatctgtggcgatagcaccgagtgctccaacctgctgctgcagtacggctccttttgtacccagctgaatagagccctgacaggcatcgccgtggagcaggataagaacacacaggaggtgttcgcccaggtgaagcagatctacaagaccccacccatcaaggactttggcggcttcaacttcagccagatcctgcctgatccaagcaagccctccaagaggtcttttatcgaggacctgctgttcaacaaggtgaccctggccgatgccggcttcatcaagcagtatggagattgcctgggagacatcgcagcccgcgacctgatctgtgcccagaagtttaatggcctgaccgtgctgcctccactgctgacagatgagatgatcgcccagtacacatctgccctgctggccggcaccatcacaagcggatggaccttcggcgcaggagccgccctgcagatcccttttgccatgcagatggcctataggttcaacggcatcggcgtgacccagaatgtgctgtacgagaaccagaagctgatcgccaatcagtttaacagcgccatcggcaagatccaggactctctgtcctctacagccagcgccctgggcaagctgcaggatgtggtgaatcagaacgcccaggccctgaataccctggtgaagcagctgagctccaacttcggcgccatctctagcgtgctgaatgacatcctgagccggctggacccccctgaggcagaggtgcagatcgacaggctgatcacaggccgcctgcagagcctgcagacctacgtgacacagcagctgatcagggcagcagagatcagagcctccgccaatctggccgccaccaagatgagcgagtgcgtgctgggacagtccaagagggtggacttttgtggcaagggctatcacctgatgtctttcccacagagcgcccctcacggcgtggtgtttctgcacgtgacctacgtgccagcccaggagaagaacttcaccacagcaccagccatctgccacgatggaaaggcacactttcctagggagggcgtgttcgtgtctaacggcacccactggtttgtgacacagcgcaatttctacgagccacagatcatcaccacagacaatacattcgtgagcggcaactgtgatgtggtgatcggcatcgtgaacaataccgtgtatgatccactgcagcccgagctggactcctttaaggaggagctggataagtacttcaagaatcacacctctcccgacgtggatctgggcgacatctccggcatcaatgcctctgtggtgaacatccagaaggagatcgaccggctgaacgaggtggccaagaatctgaacgagagcctgatcgatctgcaggagctgggcaagtatgagcagtacatcaagggctctggcagagagaacctgtatttccagggaggaggaggcagcggatacatccctgaggcaccaagggacggacaggcctacgtgcgcaaggatggcgagtgggtgctgctgtccacctttctgggccatcatcaccaccaccaccaccactga

SEQ ID NO: 5199 - DNA, 3846 bp, Artificial Sequence
  Description of Artificial Sequence: Synthetic polynucleotide
atgggcatcctgccaagcccaggaatgcccgccctgctgtctctggtgagcctgctgtccgtgctgctgatgggatgcgtggcagagacaggcacacagtgcgtgaacctgaccacaaggacccagctgccccctgcctataccaattctttcacacggggcgtgtactatcccgacaaggtgtttagaagctccgtgctgcactccacacaggatctgtttctgcctttcttttctaacgtgacctggttccacgccatccacgtgtccggcaccaatggcacaaagcggttcgacaatcccgtgctgccttttaacgatggcgtgtacttcgccagcaccgagaagtccaacatcatcagaggctggatctttggcaccacactggactctaagacacagagcctgctgatcgtgaacaatgccaccaacgtggtgatcaaggtgtgcgagttccagttttgtaatgatccattcctgggcgtgtactatcacaagaacaataagtcctggatggagtctgagtttcgcgtgtattctagcgccaacaattgcacatttgagtacgtgagccagcccttcctgatggacctggagggcaagcagggcaatttcaagaacctgagggagttcgtgtttaagaatatcgatggctacttcaagatctacagcaagcacaccccaatcaacctggtgcgcgacctgccacagggattctccgccctggagccactggtggatctgcccatcggcatcaacatcacccggtttcagacactgctggccctgcacagatcctacctgacaccaggcgactcctctagcggatggaccgcaggagctgccgcctactatgtgggctatctgcagccccggaccttcctgctgaagtacaacgagaatggcaccatcacagacgcagtggattgcgccctggaccccctgtctgagacaaagtgtacactgaagagctttaccgtggagaagggcatctatcagacaagcaatttcagggtgcagcctaccgagtccatcgtgcgctttcccaatatcacaaacctgtgcccttttggcgaggtgttcaacgccaccagattcgccagcgtgtacgcctggaatcggaagagaatctccaactgcgtggccgactattctgtgctgtacaactccgaatctttcagcacctttaagtgctatggcgtgtctcccacaaagctgaatgatctgtgctttaccaacgtgtacgccgatagcttcgtgatcaggggagacgaagtgagacagatcgcaccaggacagacaggaaagatcgcagactacaattataagctgcctgacgatttcaccggctgcgtgatcgcctggaactccaacaatctggattctaaagtgggcggcaactacaattatctgtacaggctgtttcgcaagtccaatctgaagccattcgagcgggacatctccacagagatctaccaggccggctctaccccctgcaatggcgtggagggctttaactgttatttccctctgcagtcttacggcttccagccaacaaacggcgtgggctatcagccctacagagtggtggtgctgtcctttgagctgctgcacgcaccagcaacagtgtgcggcccaaagaagtctaccaatctggtgaagaacaagtgcgtgaacttcaacttcaacggactgaccggcacaggcgtgctgaccgagagcaataagaagttcctgccttttcagcagttcggcagggacatcgcagataccacagacgccgtgcgcgaccctcagaccctggagatcctggacatcacaccatgcagcttcggcggcgtgtccgtgatcacaccaggcaccaatacatccaaccaggtggccgtgctgtatcaggacgtgaattgtaccgaggtgcccgtggcaatccacgcagatcagctgacccctacatggcgggtgtactctaccggcagcaacgtgttccagacaagagccggatgcctgatcggagcagagcacgtgaacaatagctatgagtgcgacatccctatcggcgccggcatctgtgccagctaccagacccagacaaactccccatctggagcaggctccgtggccagccagtccatcatcgcctataccatgagcctgggcgccgagaacagcgtggcctactccaacaattctatcgccatccctaccaacttcacaatcagcgtgaccacagagatcctgccagtgtctatgaccaagacaagcgtggactgcacaatgtatatctgtggcgatagcaccgagtgctccaacctgctgctgcagtacggctccttttgtacccagctgaatagagccctgacaggcatcgccgtggagcaggataagaacacacaggaggtgttcgcccaggtgaagcagatctacaagaccccacccatcaaggactttggcggcttcaacttcagccagatcctgcctgatccaagcaagccctccaagaggtcttttatcgaggacctgctgttcaacaaggtgaccctggccgatgccggcttcatcaagcagtatggagattgcctgggagacatcgcagcccgcgacctgatctgtgcccagaagtttaatggcctgaccgtgctgcctccactgctgacagatgagatgatcgcccagtacacatctgccctgctggccggcaccatcacaagcggatggaccttcggcgcaggagccgccctgcagatcccttttgccatgcagatggcctataggttcaacggcatcggcgtgacccagaatgtgctgtacgagaaccagaagctgatcgccaatcagtttaacagcgccatcggcaagatccaggactctctgtcctctacagccagcgccctgggcaagctgcaggatgtggtgaatcagaacgcccaggccctgaataccctggtgaagcagctgagctccaacttcggcgccatctctagcgtgctgaatgacatcctgagccggctggacccccctgaggcagaggtgcagatcgacaggctgatcacaggccgcctgcagagcctgcagacctacgtgacacagcagctgatcagggcagcagagatcagagcctccgccaatctggccgccaccaagatgagcgagtgcgtgctgggacagtccaagagggtggacttttgtggcaagggctatcacctgatgtctttcccacagagcgcccctcacggcgtggtgtttctgcacgtgacctacgtgccagcccaggagaagaacttcaccacagcaccagccatctgccacgatggaaaggcacactttcctagggagggcgtgttcgtgtctaacggcacccactggtttgtgacacagcgcaatttctacgagccacagatcatcaccacagacaatacattcgtgagcggcaactgtgatgtggtgatcggcatcgtgaacaataccgtgtatgatccactgcagcccgagctggactcctttaaggaggagctggataagtacttcaagaatcacacctctcccgacgtggatctgggcgacatctccggcatcaatgcctctgtggtgaacatccagaaggagatcgaccggctgaacgaggtggccaagaatctgaacgagagcctgatcgatctgcaggagctgggcaagtatgagcagtacatcaagggctctggcagagagaacctgtatttccagggaggaggaggcagcggatacatccctgaggcaccaagggacggacaggcctacgtgcgcaaggatggcgagtgggtgctgctgtccacctttctgggccatcatcaccaccaccaccaccactga

SEQ ID NO: 5200 - DNA, 3846 bp, Artificial Sequence
  Description of Artificial Sequence: Synthetic polynucleotide
atgggcatcctgccaagcccaggaatgcccgccctgctgtctctggtgagcctgctgtccgtgctgctgatgggatgcgtggcagagacaggcacacagtgcgtgaacctgaccacaaggacccagctgccccctgcctataccaattctttcacacggggcgtgtactatcccgacaaggtgtttagaagctccgtgctgcactccacacaggatctgtttctgcctttcttttctaacgtgacctggttccacgccatccacgtgtccggcaccaatggcacaaagcggttcgacaatcccgtgctgccttttaacgatggcgtgtacttcgccagcaccgagaagtccaacatcatcagaggctggatctttggcaccacactggactctaagacacagagcctgctgatcgtgaacaatgccaccaacgtggtgatcaaggtgtgcgagttccagttttgtaatgatccattcctgggcgtgtactatcacaagaacaataagtcctggatggagtctgagtttcgcgtgtattctagcgccaacaattgcacatttgagtacgtgagccagcccttcctgatggacctggagggcaagcagggcaatttcaagaacctgagggagttcgtgtttaagaatatcgatggctacttcaagatctacagcaagcacaccccaatcaacctggtgcgcgacctgccacagggattctccgccctggagccactggtggatctgcccatcggcatcaacatcacccggtttcagacactgctggccctgcacagatcctacctgacaccaggcgactcctctagcggatggaccgcaggagctgccgcctactatgtgggctatctgcagccccggaccttcctgctgaagtacaacgagaatggcaccatcacagacgcagtggattgcgccctggaccccctgtctgagacaaagtgtacactgaagagctttaccgtggagaagggcatctatcagacaagcaatttcagggtgcagcctaccgagtccatcgtgcgctttcccaatatcacaaacctgtgcccttttggcgaggtgttcaacgccaccagattcgccagcgtgtacgcctggaatcggaagagaatctccaactgcgtggccgactattctgtgctgtacaactccgcctctttcagcacctttaagtgctatggcgtgtctcccacaaagctgaatgatctgtgctttaccaacgtgtacgccgatagcttcgtgatcaggggagacgaagtgagacagatcgcaccaggacagacaggaaagatcgcagactacaattataagctgcctgacgatttcaccggctgcgtgatcgcctggaactccaacaatctggattctaaagtgggcggcaactacaattatctgtacaggctgtttcgcaagtccaatctgaagccattcgagcgggacatctccacagagaattaccaggccggctctaccccctgcaatggcgtggagggctttaactgttatttccctctgcagtcttacggcttccagccaacaaacggcgtgggctatcagccctacagagtggtggtgctgtcctttgagctgctgcacgcaccagcaacagtgtgcggcccaaagaagtctaccaatctggtgaagaacaagtgcgtgaacttcaacttcaacggactgaccggcacaggcgtgctgaccgagagcaataagaagttcctgccttttcagcagttcggcagggacatcgcagataccacagacgccgtgcgcgaccctcagaccctggagatcctggacatcacaccatgcagcttcggcggcgtgtccgtgatcacaccaggcaccaatacatccaaccaggtggccgtgctgtatcaggacgtgaattgtaccgaggtgcccgtggcaatccacgcagatcagctgacccctacatggcgggtgtactctaccggcagcaacgtgttccagacaagagccggatgcctgatcggagcagagcacgtgaacaatagctatgagtgcgacatccctatcggcgccggcatctgtgccagctaccagacccagacaaactccccatctggagcaggctccgtggccagccagtccatcatcgcctataccatgagcctgggcgccgagaacagcgtggcctactccaacaattctatcgccatccctaccaacttcacaatcagcgtgaccacagagatcctgccagtgtctatgaccaagacaagcgtggactgcacaatgtatatctgtggcgatagcaccgagtgctccaacctgctgctgcagtacggctccttttgtacccagctgaatagagccctgacaggcatcgccgtggagcaggataagaacacacaggaggtgttcgcccaggtgaagcagatctacaagaccccacccatcaaggactttggcggcttcaacttcagccagatcctgcctgatccaagcaagccctccaagaggtcttttatcgaggacctgctgttcaacaaggtgaccctggccgatgccggcttcatcaagcagtatggagattgcctgggagacatcgcagcccgcgacctgatctgtgcccagaagtttaatggcctgaccgtgctgcctccactgctgacagatgagatgatcgcccagtacacatctgccctgctggccggcaccatcacaagcggatggaccttcggcgcaggagccgccctgcagatcccttttgccatgcagatggcctataggttcaacggcatcggcgtgacccagaatgtgctgtacgagaaccagaagctgatcgccaatcagtttaacagcgccatcggcaagatccaggactctctgtcctctacagccagcgccctgggcaagctgcaggatgtggtgaatcagaacgcccaggccctgaataccctggtgaagcagctgagctccaacttcggcgccatctctagcgtgctgaatgacatcctgagccggctggacccccctgaggcagaggtgcagatcgacaggctgatcacaggccgcctgcagagcctgcagacctacgtgacacagcagctgatcagggcagcagagatcagagcctccgccaatctggccgccaccaagatgagcgagtgcgtgctgggacagtccaagagggtggacttttgtggcaagggctatcacctgatgtctttcccacagagcgcccctcacggcgtggtgtttctgcacgtgacctacgtgccagcccaggagaagaacttcaccacagcaccagccatctgccacgatggaaaggcacactttcctagggagggcgtgttcgtgtctaacggcacccactggtttgtgacacagcgcaatttctacgagccacagatcatcaccacagacaatacattcgtgagcggcaactgtgatgtggtgatcggcatcgtgaacaataccgtgtatgatccactgcagcccgagctggactcctttaaggaggagctggataagtacttcaagaatcacacctctcccgacgtggatctgggcgacatctccggcatcaatgcctctgtggtgaacatccagaaggagatcgaccggctgaacgaggtggccaagaatctgaacgagagcctgatcgatctgcaggagctgggcaagtatgagcagtacatcaagggctctggcagagagaacctgtatttccagggaggaggaggcagcggatacatccctgaggcaccaagggacggacaggcctacgtgcgcaaggatggcgagtgggtgctgctgtccacctttctgggccatcatcaccaccaccaccaccactga

SEQ ID NO: 5201 - DNA, 3846 bp, Artificial Sequence
  Description of Artificial Sequence: Synthetic polynucleotide
atgggcatcctgccaagcccaggaatgcccgccctgctgtctctggtgagcctgctgtccgtgctgctgatgggatgcgtggcagagacaggcacacagtgcgtgaacctgaccacaaggacccagctgccccctgcctataccaattctttcacacggggcgtgtactatcccgacaaggtgtttagaagctccgtgctgcactccacacaggatctgtttctgcctttcttttctaacgtgacctggttccacgccatccacgtgtccggcaccaatggcacaaagcggttcgacaatcccgtgctgccttttaacgatggcgtgtacttcgccagcaccgagaagtccaacatcatcagaggctggatctttggcaccacactggactctaagacacagagcctgctgatcgtgaacaatgccaccaacgtggtgatcaaggtgtgcgagttccagttttgtaatgatccattcctgggcgtgtactatcacaagaacaataagtcctggatggagtctgagtttcgcgtgtattctagcgccaacaattgcacatttgagtacgtgagccagcccttcctgatggacctggagggcaagcagggcaatttcaagaacctgagggagttcgtgtttaagaatatcgatggctacttcaagatctacagcaagcacaccccaatcaacctggtgcgcgacctgccacagggattctccgccctggagccactggtggatctgcccatcggcatcaacatcacccggtttcagacactgctggccctgcacagatcctacctgacaccaggcgactcctctagcggatggaccgcaggagctgccgcctactatgtgggctatctgcagccccggaccttcctgctgaagtacaacgagaatggcaccatcacagacgcagtggattgcgccctggaccccctgtctgagacaaagtgtacactgaagagctttaccgtggagaagggcatctatcagacaagcaatttcagggtgcagcctaccgagtccatcgtgcgctttcccaatatcacaaacctgtgcccttttggcgaggtgttcaacgccaccagattcgccagcgtgtacgcctggaatcggaagagaatctccaactgcgtggccgactattctgtgctgtacaactccgcctctttcagcacctttaagtgctatggcgtgtctcccacaaagctgaatgatctgtgctttaccaacgtgtacgccgatagcttcgtgatcaggggagacgaagtgagacagatcgcaccaggacagacaggaaagatcgcagactacaattataagctgcctgacgatttcaccggctgcgtgatcgcctggaactccaacaatctggattctaaagtgggcggcaactacaattatctgtacaggctgtttcgcaagtccaatctgcgtccattcgagcgggacatctccacagagatctaccaggccggctctaccccctgcaatggcgtggagggctttaactgttatttccctctgcagtcttacggcttccagccaacaaacggcgtgggctatcagccctacagagtggtggtgctgtcctttgagctgctgcacgcaccagcaacagtgtgcggcccaaagaagtctaccaatctggtgaagaacaagtgcgtgaacttcaacttcaacggactgaccggcacaggcgtgctgaccgagagcaataagaagttcctgccttttcagcagttcggcagggacatcgcagataccacagacgccgtgcgcgaccctcagaccctggagatcctggacatcacaccatgcagcttcggcggcgtgtccgtgatcacaccaggcaccaatacatccaaccaggtggccgtgctgtatcaggacgtgaattgtaccgaggtgcccgtggcaatccacgcagatcagctgacccctacatggcgggtgtactctaccggcagcaacgtgttccagacaagagccggatgcctgatcggagcagagcacgtgaacaatagctatgagtgcgacatccctatcggcgccggcatctgtgccagctaccagacccagacaaactccccatctggagcaggctccgtggccagccagtccatcatcgcctataccatgagcctgggcgccgagaacagcgtggcctactccaacaattctatcgccatccctaccaacttcacaatcagcgtgaccacagagatcctgccagtgtctatgaccaagacaagcgtggactgcacaatgtatatctgtggcgatagcaccgagtgctccaacctgctgctgcagtacggctccttttgtacccagctgaatagagccctgacaggcatcgccgtggagcaggataagaacacacaggaggtgttcgcccaggtgaagcagatctacaagaccccacccatcaaggactttggcggcttcaacttcagccagatcctgcctgatccaagcaagccctccaagaggtcttttatcgaggacctgctgttcaacaaggtgaccctggccgatgccggcttcatcaagcagtatggagattgcctgggagacatcgcagcccgcgacctgatctgtgcccagaagtttaatggcctgaccgtgctgcctccactgctgacagatgagatgatcgcccagtacacatctgccctgctggccggcaccatcacaagcggatggaccttcggcgcaggagccgccctgcagatcccttttgccatgcagatggcctataggttcaacggcatcggcgtgacccagaatgtgctgtacgagaaccagaagctgatcgccaatcagtttaacagcgccatcggcaagatccaggactctctgtcctctacagccagcgccctgggcaagctgcaggatgtggtgaatcagaacgcccaggccctgaataccctggtgaagcagctgagctccaacttcggcgccatctctagcgtgctgaatgacatcctgagccggctggacccccctgaggcagaggtgcagatcgacaggctgatcacaggccgcctgcagagcctgcagacctacgtgacacagcagctgatcagggcagcagagatcagagcctccgccaatctggccgccaccaagatgagcgagtgcgtgctgggacagtccaagagggtggacttttgtggcaagggctatcacctgatgtctttcccacagagcgcccctcacggcgtggtgtttctgcacgtgacctacgtgccagcccaggagaagaacttcaccacagcaccagccatctgccacgatggaaaggcacactttcctagggagggcgtgttcgtgtctaacggcacccactggtttgtgacacagcgcaatttctacgagccacagatcatcaccacagacaatacattcgtgagcggcaactgtgatgtggtgatcggcatcgtgaacaataccgtgtatgatccactgcagcccgagctggactcctttaaggaggagctggataagtacttcaagaatcacacctctcccgacgtggatctgggcgacatctccggcatcaatgcctctgtggtgaacatccagaaggagatcgaccggctgaacgaggtggccaagaatctgaacgagagcctgatcgatctgcaggagctgggcaagtatgagcagtacatcaagggctctggcagagagaacctgtatttccagggaggaggaggcagcggatacatccctgaggcaccaagggacggacaggcctacgtgcgcaaggatggcgagtgggtgctgctgtccacctttctgggccatcatcaccaccaccaccaccactga

SEQ ID NO: 5202 - DNA, 3846 bp, Artificial Sequence
  Description of Artificial Sequence: Synthetic polynucleotide
atgggcatcctgccaagcccaggaatgcccgccctgctgtctctggtgagcctgctgtccgtgctgctgatgggatgcgtggcagagacaggcacacagtgcgtgaacctgaccacaaggacccagctgccccctgcctataccaattctttcacacggggcgtgtactatcccgacaaggtgtttagaagctccgtgctgcactccacacaggatctgtttctgcctttcttttctaacgtgacctggttccacgccatccacgtgtccggcaccaatggcacaaagcggttcgacaatcccgtgctgccttttaacgatggcgtgtacttcgccagcaccgagaagtccaacatcatcagaggctggatctttggcaccacactggactctaagacacagagcctgctgatcgtgaacaatgccaccaacgtggtgatcaaggtgtgcgagttccagttttgtaatgatccattcctgggcgtgtactatcacaagaacaataagtcctggatggagtctgagtttcgcgtgtattctagcgccaacaattgcacatttgagtacgtgagccagcccttcctgatggacctggagggcaagcagggcaatttcaagaacctgagggagttcgtgtttaagaatatcgatggctacttcaagatctacagcaagcacaccccaatcaacctggtgcgcgacctgccacagggattctccgccctggagccactggtggatctgcccatcggcatcaacatcacccggtttcagacactgctggccctgcacagatcctacctgacaccaggcgactcctctagcggatggaccgcaggagctgccgcctactatgtgggctatctgcagccccggaccttcctgctgaagtacaacgagaatggcaccatcacagacgcagtggattgcgccctggaccccctgtctgagacaaagtgtacactgaagagctttaccgtggagaagggcatctatcagacaagcaatttcagggtgcagcctaccgagtccatcgtgcgctttcccaatatcacaaacctgtgcccttttggcgaggtgttcaacgccaccagattcgccagcgtgtacgcctggaatcggaagagaatctccaactgcgtggccgactattctgtgctgtacaactccgcctctttcagcacctttaagtgctatggcgtgtctcccacaaagctgaatgatctgtgctttaccaacgtgtacgccgatagcttcgtgatcaggggagacgaagtgagacagatcgcaccaggacagacaggaaagatcgcagactacaattataagctgcctgacgatttcaccggctgcgtgatcgcctggaactccaacaatctggattctaaagtgggcggcaactacaattatctgtacaggctgtttcgcaagtccaatctgaagccattcgagcgggacatcgaaacagagatctaccaggccggctctaccccctgcaatggcgtggagggctttaactgttatttccctctgcagtcttacggcttccagccaacaaacggcgtgggctatcagccctacagagtggtggtgctgtcctttgagctgctgcacgcaccagcaacagtgtgcggcccaaagaagtctaccaatctggtgaagaacaagtgcgtgaacttcaacttcaacggactgaccggcacaggcgtgctgaccgagagcaataagaagttcctgccttttcagcagttcggcagggacatcgcagataccacagacgccgtgcgcgaccctcagaccctggagatcctggacatcacaccatgcagcttcggcggcgtgtccgtgatcacaccaggcaccaatacatccaaccaggtggccgtgctgtatcaggacgtgaattgtaccgaggtgcccgtggcaatccacgcagatcagctgacccctacatggcgggtgtactctaccggcagcaacgtgttccagacaagagccggatgcctgatcggagcagagcacgtgaacaatagctatgagtgcgacatccctatcggcgccggcatctgtgccagctaccagacccagacaaactccccatctggagcaggctccgtggccagccagtccatcatcgcctataccatgagcctgggcgccgagaacagcgtggcctactccaacaattctatcgccatccctaccaacttcacaatcagcgtgaccacagagatcctgccagtgtctatgaccaagacaagcgtggactgcacaatgtatatctgtggcgatagcaccgagtgctccaacctgctgctgcagtacggctccttttgtacccagctgaatagagccctgacaggcatcgccgtggagcaggataagaacacacaggaggtgttcgcccaggtgaagcagatctacaagaccccacccatcaaggactttggcggcttcaacttcagccagatcctgcctgatccaagcaagccctccaagaggtcttttatcgaggacctgctgttcaacaaggtgaccctggccgatgccggcttcatcaagcagtatggagattgcctgggagacatcgcagcccgcgacctgatctgtgcccagaagtttaatggcctgaccgtgctgcctccactgctgacagatgagatgatcgcccagtacacatctgccctgctggccggcaccatcacaagcggatggaccttcggcgcaggagccgccctgcagatcccttttgccatgcagatggcctataggttcaacggcatcggcgtgacccagaatgtgctgtacgagaaccagaagctgatcgccaatcagtttaacagcgccatcggcaagatccaggactctctgtcctctacagccagcgccctgggcaagctgcaggatgtggtgaatcagaacgcccaggccctgaataccctggtgaagcagctgagctccaacttcggcgccatctctagcgtgctgaatgacatcctgagccggctggacccccctgaggcagaggtgcagatcgacaggctgatcacaggccgcctgcagagcctgcagacctacgtgacacagcagctgatcagggcagcagagatcagagcctccgccaatctggccgccaccaagatgagcgagtgcgtgctgggacagtccaagagggtggacttttgtggcaagggctatcacctgatgtctttcccacagagcgcccctcacggcgtggtgtttctgcacgtgacctacgtgccagcccaggagaagaacttcaccacagcaccagccatctgccacgatggaaaggcacactttcctagggagggcgtgttcgtgtctaacggcacccactggtttgtgacacagcgcaatttctacgagccacagatcatcaccacagacaatacattcgtgagcggcaactgtgatgtggtgatcggcatcgtgaacaataccgtgtatgatccactgcagcccgagctggactcctttaaggaggagctggataagtacttcaagaatcacacctctcccgacgtggatctgggcgacatctccggcatcaatgcctctgtggtgaacatccagaaggagatcgaccggctgaacgaggtggccaagaatctgaacgagagcctgatcgatctgcaggagctgggcaagtatgagcagtacatcaagggctctggcagagagaacctgtatttccagggaggaggaggcagcggatacatccctgaggcaccaagggacggacaggcctacgtgcgcaaggatggcgagtgggtgctgctgtccacctttctgggccatcatcaccaccaccaccaccactga

SEQ ID NO: 5203 - DNA, 3846 bp, Artificial Sequence
  Description of Artificial Sequence: Synthetic polynucleotide
atgggcatcctgccaagcccaggaatgcccgccctgctgtctctggtgagcctgctgtccgtgctgctgatgggatgcgtggcagagacaggcacacagtgcgtgaacctgaccacaaggacccagctgccccctgcctataccaattctttcacacggggcgtgtactatcccgacaaggtgtttagaagctccgtgctgcactccacacaggatctgtttctgcctttcttttctaacgtgacctggttccacgccatccacgtgtccggcaccaatggcacaaagcggttcgacaatcccgtgctgccttttaacgatggcgtgtacttcgccagcaccgagaagtccaacatcatcagaggctggatctttggcaccacactggactctaagacacagagcctgctgatcgtgaacaatgccaccaacgtggtgatcaaggtgtgcgagttccagttttgtaatgatccattcctgggcgtgtactatcacaagaacaataagtcctggatggagtctgagtttcgcgtgtattctagcgccaacaattgcacatttgagtacgtgagccagcccttcctgatggacctggagggcaagcagggcaatttcaagaacctgagggagttcgtgtttaagaatatcgatggctacttcaagatctacagcaagcacaccccaatcaacctggtgcgcgacctgccacagggattctccgccctggagccactggtggatctgcccatcggcatcaacatcacccggtttcagacactgctggccctgcacagatcctacctgacaccaggcgactcctctagcggatggaccgcaggagctgccgcctactatgtgggctatctgcagccccggaccttcctgctgaagtacaacgagaatggcaccatcacagacgcagtggattgcgccctggaccccctgtctgagacaaagtgtacactgaagagctttaccgtggagaagggcatctatcagacaagcaatttcagggtgcagcctaccgagtccatcgtgcgctttcccaatatcacaaacctgtgcccttttggcgaggtgttcaacgccaccagattcgccagcgtgtacgcctggaatcggaagagaatctccaactgcgtggccgactattctgtgctgtacaactccgcctctttcagcacctttaagtgctatggcgtgtctcccacaaagctgaatgatctgtgctttaccaacgtgtacgccgatagcttcgtgatcaggggagacgaagtgagacagatcgcaccaggacagacaggaaagatcgcagactacaattataagctgcctgacgatttcaccggctgcgtgatcgcctggaactccaacaatctggattctaaagtgggcggcaactacaattatctgtacaggctgtttcgcaagtccaatctgaagccattcgagcgggacatctccacagagatctaccaggccggctctaccccctgcaatggcgtggagggctttaactgttatttccctctgcagtcttacggcttccagccaacaaacggcgtgggctatcagccctacagagtggtggtgctgtcctttgagctgaatcacgcaccagcaacagtgtgcggcccaaagaagtctaccaatctggtgaagaacaagtgcgtgaacttcaacttcaacggactgaccggcacaggcgtgctgaccgagagcaataagaagttcctgccttttcagcagttcggcagggacatcgcagataccacagacgccgtgcgcgaccctcagaccctggagatcctggacatcacaccatgcagcttcggcggcgtgtccgtgatcacaccaggcaccaatacatccaaccaggtggccgtgctgtatcaggacgtgaattgtaccgaggtgcccgtggcaatccacgcagatcagctgacccctacatggcgggtgtactctaccggcagcaacgtgttccagacaagagccggatgcctgatcggagcagagcacgtgaacaatagctatgagtgcgacatccctatcggcgccggcatctgtgccagctaccagacccagacaaactccccatctggagcaggctccgtggccagccagtccatcatcgcctataccatgagcctgggcgccgagaacagcgtggcctactccaacaattctatcgccatccctaccaacttcacaatcagcgtgaccacagagatcctgccagtgtctatgaccaagacaagcgtggactgcacaatgtatatctgtggcgatagcaccgagtgctccaacctgctgctgcagtacggctccttttgtacccagctgaatagagccctgacaggcatcgccgtggagcaggataagaacacacaggaggtgttcgcccaggtgaagcagatctacaagaccccacccatcaaggactttggcggcttcaacttcagccagatcctgcctgatccaagcaagccctccaagaggtcttttatcgaggacctgctgttcaacaaggtgaccctggccgatgccggcttcatcaagcagtatggagattgcctgggagacatcgcagcccgcgacctgatctgtgcccagaagtttaatggcctgaccgtgctgcctccactgctgacagatgagatgatcgcccagtacacatctgccctgctggccggcaccatcacaagcggatggaccttcggcgcaggagccgccctgcagatcccttttgccatgcagatggcctataggttcaacggcatcggcgtgacccagaatgtgctgtacgagaaccagaagctgatcgccaatcagtttaacagcgccatcggcaagatccaggactctctgtcctctacagccagcgccctgggcaagctgcaggatgtggtgaatcagaacgcccaggccctgaataccctggtgaagcagctgagctccaacttcggcgccatctctagcgtgctgaatgacatcctgagccggctggacccccctgaggcagaggtgcagatcgacaggctgatcacaggccgcctgcagagcctgcagacctacgtgacacagcagctgatcagggcagcagagatcagagcctccgccaatctggccgccaccaagatgagcgagtgcgtgctgggacagtccaagagggtggacttttgtggcaagggctatcacctgatgtctttcccacagagcgcccctcacggcgtggtgtttctgcacgtgacctacgtgccagcccaggagaagaacttcaccacagcaccagccatctgccacgatggaaaggcacactttcctagggagggcgtgttcgtgtctaacggcacccactggtttgtgacacagcgcaatttctacgagccacagatcatcaccacagacaatacattcgtgagcggcaactgtgatgtggtgatcggcatcgtgaacaataccgtgtatgatccactgcagcccgagctggactcctttaaggaggagctggataagtacttcaagaatcacacctctcccgacgtggatctgggcgacatctccggcatcaatgcctctgtggtgaacatccagaaggagatcgaccggctgaacgaggtggccaagaatctgaacgagagcctgatcgatctgcaggagctgggcaagtatgagcagtacatcaagggctctggcagagagaacctgtatttccagggaggaggaggcagcggatacatccctgaggcaccaagggacggacaggcctacgtgcgcaaggatggcgagtgggtgctgctgtccacctttctgggccatcatcaccaccaccaccaccactga

SEQ ID NO: 5204 - DNA, 3846 bp, Artificial Sequence
  Description of Artificial Sequence: Synthetic polynucleotide
atgggcatcctgccaagcccaggaatgcccgccctgctgtctctggtgagcctgctgtccgtgctgctgatgggatgcgtggcagagacaggcacacagtgcgtgaacctgaccacaaggacccagctgccccctgcctataccaattctttcacacggggcgtgtactatcccgacaaggtgtttagaagctccgtgctgcactccacacaggatctgtttctgcctttcttttctaacgtgacctggttccacgccatccacgtgtccggcaccaatggcacaaagcggttcgacaatcccgtgctgccttttaacgatggcgtgtacttcgccagcaccgagaagtccaacatcatcagaggctggatctttggcaccacactggactctaagacacagagcctgctgatcgtgaacaatgccaccaacgtggtgatcaaggtgtgcgagttccagttttgtaatgatccattcctgggcgtgtactatcacaagaacaataagtcctggatggagtctgagtttcgcgtgtattctagcgccaacaattgcacatttgagtacgtgagccagcccttcctgatggacctggagggcaagcagggcaatttcaagaacctgagggagttcgtgtttaagaatatcgatggctacttcaagatctacagcaagcacaccccaatcaacctggtgcgcgacctgccacagggattctccgccctggagccactggtggatctgcccatcggcatcaacatcacccggtttcagacactgctggccctgcacagatcctacctgacaccaggcgactcctctagcggatggaccgcaggagctgccgcctactatgtgggctatctgcagccccggaccttcctgctgaagtacaacgagaatggcaccatcacagacgcagtggattgcgccctggaccccctgtctgagacaaagtgtacactgaagagctttaccgtggagaagggcatctatcagacaagcaatttcagggtgcagcctaccgagtccatcgtgcgctttcccaatatcacaaacctgtgcccttttggcgaggtgttcaacgccaccagattcgccagcgtgtacgcctggaatcggaagagaatctccaactgcgtggccgactattctgtgctgtacaactccgcctctttcagcacctttaagtgctatggcgtgtctcccacaaagctgaatgatctgtgctttaccaacgtgtacgccgatagcttcgtgatcaggggagacgaagtgagacagatcgcaccaggacagacaggaaagatcgcagactacaattataagctgcctgacgatttcaccggctgcgtgatcgcctggaactccaacaatctggattctaaagacggcggcaactacaattatctgtacaggctgtttcgcaagtccaatctgaagccattcgagcgggacatctccacagagatctaccaggccggctctaccccctgcaatggcgtggagggctttaactgttatttccctctgcagtcttacggcttccagccaacaaacggcgtgggctatcagccctacagagtggtggtgctgtcctttgagctgctgcacgcaccagcaacagtgtgcggcccaaagaagtctaccaatctggtgaagaacaagtgcgtgaacttcaacttcaacggactgaccggcacaggcgtgctgaccgagagcaataagaagttcctgccttttcagcagttcggcagggacatcgcagataccacagacgccgtgcgcgaccctcagaccctggagatcctggacatcacaccatgcagcttcggcggcgtgtccgtgatcacaccaggcaccaatacatccaaccaggtggccgtgctgtatcaggacgtgaattgtaccgaggtgcccgtggcaatccacgcagatcagctgacccctacatggcgggtgtactctaccggcagcaacgtgttccagacaagagccggatgcctgatcggagcagagcacgtgaacaatagctatgagtgcgacatccctatcggcgccggcatctgtgccagctaccagacccagacaaactccccatctggagcaggctccgtggccagccagtccatcatcgcctataccatgagcctgggcgccgagaacagcgtggcctactccaacaattctatcgccatccctaccaacttcacaatcagcgtgaccacagagatcctgccagtgtctatgaccaagacaagcgtggactgcacaatgtatatctgtggcgatagcaccgagtgctccaacctgctgctgcagtacggctccttttgtacccagctgaatagagccctgacaggcatcgccgtggagcaggataagaacacacaggaggtgttcgcccaggtgaagcagatctacaagaccccacccatcaaggactttggcggcttcaacttcagccagatcctgcctgatccaagcaagccctccaagaggtcttttatcgaggacctgctgttcaacaaggtgaccctggccgatgccggcttcatcaagcagtatggagattgcctgggagacatcgcagcccgcgacctgatctgtgcccagaagtttaatggcctgaccgtgctgcctccactgctgacagatgagatgatcgcccagtacacatctgccctgctggccggcaccatcacaagcggatggaccttcggcgcaggagccgccctgcagatcccttttgccatgcagatggcctataggttcaacggcatcggcgtgacccagaatgtgctgtacgagaaccagaagctgatcgccaatcagtttaacagcgccatcggcaagatccaggactctctgtcctctacagccagcgccctgggcaagctgcaggatgtggtgaatcagaacgcccaggccctgaataccctggtgaagcagctgagctccaacttcggcgccatctctagcgtgctgaatgacatcctgagccggctggacccccctgaggcagaggtgcagatcgacaggctgatcacaggccgcctgcagagcctgcagacctacgtgacacagcagctgatcagggcagcagagatcagagcctccgccaatctggccgccaccaagatgagcgagtgcgtgctgggacagtccaagagggtggacttttgtggcaagggctatcacctgatgtctttcccacagagcgcccctcacggcgtggtgtttctgcacgtgacctacgtgccagcccaggagaagaacttcaccacagcaccagccatctgccacgatggaaaggcacactttcctagggagggcgtgttcgtgtctaacggcacccactggtttgtgacacagcgcaatttctacgagccacagatcatcaccacagacaatacattcgtgagcggcaactgtgatgtggtgatcggcatcgtgaacaataccgtgtatgatccactgcagcccgagctggactcctttaaggaggagctggataagtacttcaagaatcacacctctcccgacgtggatctgggcgacatctccggcatcaatgcctctgtggtgaacatccagaaggagatcgaccggctgaacgaggtggccaagaatctgaacgagagcctgatcgatctgcaggagctgggcaagtatgagcagtacatcaagggctctggcagagagaacctgtatttccagggaggaggaggcagcggatacatccctgaggcaccaagggacggacaggcctacgtgcgcaaggatggcgagtgggtgctgctgtccacctttctgggccatcatcaccaccaccaccaccactga

SEQ ID NO: 5205 - DNA, 3846 bp, Artificial Sequence
  Description of Artificial Sequence: Synthetic polynucleotide
atgggcatcctgccaagcccaggaatgcccgccctgctgtctctggtgagcctgctgtccgtgctgctgatgggatgcgtggcagagacaggcacacagtgcgtgaacctgaccacaaggacccagctgccccctgcctataccaattctttcacacggggcgtgtactatcccgacaaggtgtttagaagctccgtgctgcactccacacaggatctgtttctgcctttcttttctaacgtgacctggttccacgccatccacgtgtccggcaccaatggcacaaagcggttcgacaatcccgtgctgccttttaacgatggcgtgtacttcgccagcaccgagaagtccaacatcatcagaggctggatctttggcaccacactggactctaagacacagagcctgctgatcgtgaacaatgccaccaacgtggtgatcaaggtgtgcgagttccagttttgtaatgatccattcctgggcgtgtactatcacaagaacaataagtcctggatggagtctgagtttcgcgtgtattctagcgccaacaattgcacatttgagtacgtgagccagcccttcctgatggacctggagggcaagcagggcaatttcaagaacctgagggagttcgtgtttaagaatatcgatggctacttcaagatctacagcaagcacaccccaatcaacctggtgcgcgacctgccacagggattctccgccctggagccactggtggatctgcccatcggcatcaacatcacccggtttcagacactgctggccctgcacagatcctacctgacaccaggcgactcctctagcggatggaccgcaggagctgccgcctactatgtgggctatctgcagccccggaccttcctgctgaagtacaacgagaatggcaccatcacagacgcagtggattgcgccctggaccccctgtctgagacaaagtgtacactgaagagctttaccgtggagaagggcatctatcagacaagcaatttcagggtgcagcctaccgagtccatcgtgcgctttcccaatatcacaaacctgtgcccttttggcgaggtgttcaacgccaccagattcgccagcgtgtacgcctggaatcggaagagaatctccaactgcgtggccgactattctgtgctgtacaactccgcctctttcagcacctttaagtgctatggcgtgtctcccacaaagctgaatgatctgtgctttaccaacgtgtacgccgatagcttcgtgatcaggggagacgaagtgagacagatcgcaccaggacagacaggaaagatcgcagactacaattataagctgcctgacgatttcaccggctgcgtgatcgcctggaactccaacaatctggattctaaagtgggcggcaactacaattatctgtacaggctgtttcgcaagtccaatctgaagccattcgagcgggacatctccacagagaaataccaggccggctctaccccctgcaatggcgtggagggctttaactgttatttccctctgcagtcttacggcttccagccaacaaacggcgtgggctatcagccctacagagtggtggtgctgtcctttgagctgctgcacgcaccagcaacagtgtgcggcccaaagaagtctaccaatctggtgaagaacaagtgcgtgaacttcaacttcaacggactgaccggcacaggcgtgctgaccgagagcaataagaagttcctgccttttcagcagttcggcagggacatcgcagataccacagacgccgtgcgcgaccctcagaccctggagatcctggacatcacaccatgcagcttcggcggcgtgtccgtgatcacaccaggcaccaatacatccaaccaggtggccgtgctgtatcaggacgtgaattgtaccgaggtgcccgtggcaatccacgcagatcagctgacccctacatggcgggtgtactctaccggcagcaacgtgttccagacaagagccggatgcctgatcggagcagagcacgtgaacaatagctatgagtgcgacatccctatcggcgccggcatctgtgccagctaccagacccagacaaactccccatctggagcaggctccgtggccagccagtccatcatcgcctataccatgagcctgggcgccgagaacagcgtggcctactccaacaattctatcgccatccctaccaacttcacaatcagcgtgaccacagagatcctgccagtgtctatgaccaagacaagcgtggactgcacaatgtatatctgtggcgatagcaccgagtgctccaacctgctgctgcagtacggctccttttgtacccagctgaatagagccctgacaggcatcgccgtggagcaggataagaacacacaggaggtgttcgcccaggtgaagcagatctacaagaccccacccatcaaggactttggcggcttcaacttcagccagatcctgcctgatccaagcaagccctccaagaggtcttttatcgaggacctgctgttcaacaaggtgaccctggccgatgccggcttcatcaagcagtatggagattgcctgggagacatcgcagcccgcgacctgatctgtgcccagaagtttaatggcctgaccgtgctgcctccactgctgacagatgagatgatcgcccagtacacatctgccctgctggccggcaccatcacaagcggatggaccttcggcgcaggagccgccctgcagatcccttttgccatgcagatggcctataggttcaacggcatcggcgtgacccagaatgtgctgtacgagaaccagaagctgatcgccaatcagtttaacagcgccatcggcaagatccaggactctctgtcctctacagccagcgccctgggcaagctgcaggatgtggtgaatcagaacgcccaggccctgaataccctggtgaagcagctgagctccaacttcggcgccatctctagcgtgctgaatgacatcctgagccggctggacccccctgaggcagaggtgcagatcgacaggctgatcacaggccgcctgcagagcctgcagacctacgtgacacagcagctgatcagggcagcagagatcagagcctccgccaatctggccgccaccaagatgagcgagtgcgtgctgggacagtccaagagggtggacttttgtggcaagggctatcacctgatgtctttcccacagagcgcccctcacggcgtggtgtttctgcacgtgacctacgtgccagcccaggagaagaacttcaccacagcaccagccatctgccacgatggaaaggcacactttcctagggagggcgtgttcgtgtctaacggcacccactggtttgtgacacagcgcaatttctacgagccacagatcatcaccacagacaatacattcgtgagcggcaactgtgatgtggtgatcggcatcgtgaacaataccgtgtatgatccactgcagcccgagctggactcctttaaggaggagctggataagtacttcaagaatcacacctctcccgacgtggatctgggcgacatctccggcatcaatgcctctgtggtgaacatccagaaggagatcgaccggctgaacgaggtggccaagaatctgaacgagagcctgatcgatctgcaggagctgggcaagtatgagcagtacatcaagggctctggcagagagaacctgtatttccagggaggaggaggcagcggatacatccctgaggcaccaagggacggacaggcctacgtgcgcaaggatggcgagtgggtgctgctgtccacctttctgggccatcatcaccaccaccaccaccactga

SEQ ID NO: 5206 - DNA, 3846 bp, Artificial Sequence
  Description of Artificial Sequence: Synthetic polynucleotide
atgggcatcctgccaagcccaggaatgcccgccctgctgtctctggtgagcctgctgtccgtgctgctgatgggatgcgtggcagagacaggcacacagtgcgtgaacctgaccacaaggacccagctgccccctgcctataccaattctttcacacggggcgtgtactatcccgacaaggtgtttagaagctccgtgctgcactccacacaggatctgtttctgcctttcttttctaacgtgacctggttccacgccatccacgtgtccggcaccaatggcacaaagcggttcgacaatcccgtgctgccttttaacgatggcgtgtacttcgccagcaccgagaagtccaacatcatcagaggctggatctttggcaccacactggactctaagacaatgagcctgctgatcgtgaacaatgccaccaacgtggtgatcaaggtgtgcgagttccagttttgtaatgatccattcctgggcgtgtactatcacaagaacaataagtcctggatggagtctgagtttcgcgtgtattctagcgccaacaattgcacatttgagtacgtgagccagcccttcctgatggacctggagggcaagcagggcaatttcaagaacctgagggagttcgtgtttaagaatatcgatggctacttcaagatctacagcaagcacaccccaatcaacctggtgcgcgacctgccacagggattctccgccctggagccactggtggatctgcccatcggcatcaacatcacccggtttcagacactgctggccctgcacagatcctacctgacaccaggcgactcctctagcggatggaccgcaggagctgccgcctactatgtgggctatctgcagccccggaccttcctgctgaagtacaacgagaatggcaccatcacagacgcagtggattgcgccctggaccccctgtctgagacaaagtgtacactgaagagctttaccgtggagaagggcatctatcagacaagcaatttcagggtgcagcctaccgagtccatcgtgcgctttcccaatatcacaaacctgtgcccttttggcgaggtgttcaacgccaccagattcgccagcgtgtacgcctggaatcggaagagaatctccaactgcgtggccgactattctgtgctgtacaactccgcctctttcagcacctttaagtgctatggcgtgtctcccacaaagctgaatgatctgtgctttaccaacgtgtacgccgatagcttcgtgatcaggggagacgaagtgagacagatcgcaccaggacagacaggaaagatcgcagactacaattataagctgcctgacgatttcaccggctgcgtgatcgcctggaactccaacaatctggattctaaagtgggcggcaactacaattatctgtacaggctgtttcgcaagtccaatctgaagccattcgagcgggacatctccacagagatctaccaggccggctctaccccctgcaatggcgtggagggctttaactgttatttccctctgcagtcttacggcttccagccaacaaacggcgtgggctatcagccctacagagtggtggtgctgtcctttgagctgctgcacgcaccagcaacagtgtgcggcccaaagaagtctaccaatctggtgaagaacaagtgcgtgaacttcaacttcaacggactgaccggcacaggcgtgctgaccgagagcaataagaagttcctgccttttcagcagttcggcagggacatcgcagataccacagacgccgtgcgcgaccctcagaccctggagatcctggacatcacaccatgcagcttcggcggcgtgtccgtgatcacaccaggcaccaatacatccaaccaggtggccgtgctgtatcaggacgtgaattgtaccgaggtgcccgtggcaatccacgcagatcagctgacccctacatggcgggtgtactctaccggcagcaacgtgttccagacaagagccggatgcctgatcggagcagagcacgtgaacaatagctatgagtgcgacatccctatcggcgccggcatctgtgccagctaccagacccagacaaactccccatctggagcaggctccgtggccagccagtccatcatcgcctataccatgagcctgggcgccgagaacagcgtggcctactccaacaattctatcgccatccctaccaacttcacaatcagcgtgaccacagagatcctgccagtgtctatgaccaagacaagcgtggactgcacaatgtatatctgtggcgatagcaccgagtgctccaacctgctgctgcagtacggctccttttgtacccagctgaatagagccctgacaggcatcgccgtggagcaggataagaacacacaggaggtgttcgcccaggtgaagcagatctacaagaccccacccatcaaggactttggcggcttcaacttcagccagatcctgcctgatccaagcaagccctccaagaggtcttttatcgaggacctgctgttcaacaaggtgaccctggccgatgccggcttcatcaagcagtatggagattgcctgggagacatcgcagcccgcgacctgatctgtgcccagaagtttaatggcctgaccgtgctgcctccactgctgacagatgagatgatcgcccagtacacatctgccctgctggccggcaccatcacaagcggatggaccttcggcgcaggagccgccctgcagatcccttttgccatgcagatggcctataggttcaacggcatcggcgtgacccagaatgtgctgtacgagaaccagaagctgatcgccaatcagtttaacagcgccatcggcaagatccaggactctctgtcctctacagccagcgccctgggcaagctgcaggatgtggtgaatcagaacgcccaggccctgaataccctggtgaagcagctgagctccaacttcggcgccatctctagcgtgctgaatgacatcctgagccggctggacccccctgaggcagaggtgcagatcgacaggctgatcacaggccgcctgcagagcctgcagacctacgtgacacagcagctgatcagggcagcagagatcagagcctccgccaatctggccgccaccaagatgagcgagtgcgtgctgggacagtccaagagggtggacttttgtggcaagggctatcacctgatgtctttcccacagagcgcccctcacggcgtggtgtttctgcacgtgacctacgtgccagcccaggagaagaacttcaccacagcaccagccatctgccacgatggaaaggcacactttcctagggagggcgtgttcgtgtctaacggcacccactggtttgtgacacagcgcaatttctacgagccacagatcatcaccacagacaatacattcgtgagcggcaactgtgatgtggtgatcggcatcgtgaacaataccgtgtatgatccactgcagcccgagctggactcctttaaggaggagctggataagtacttcaagaatcacacctctcccgacgtggatctgggcgacatctccggcatcaatgcctctgtggtgaacatccagaaggagatcgaccggctgaacgaggtggccaagaatctgaacgagagcctgatcgatctgcaggagctgggcaagtatgagcagtacatcaagggctctggcagagagaacctgtatttccagggaggaggaggcagcggatacatccctgaggcaccaagggacggacaggcctacgtgcgcaaggatggcgagtgggtgctgctgtccacctttctgggccatcatcaccaccaccaccaccactga

SEQ ID NO: 5207 - DNA, 3846 bp, Artificial Sequence
  Description of Artificial Sequence: Synthetic polynucleotide
atgggcatcctgccaagcccaggaatgcccgccctgctgtctctggtgagcctgctgtccgtgctgctgatgggatgcgtggcagagacaggcacacagtgcgtgaacctgaccacaaggacccagctgccccctgcctataccaattctttcacacggggcgtgtactatcccgacaaggtgtttagaagctccgtgctgcactccacacaggatctgtttctgcctttcttttctaacgtgacctggttccacgccatccacgtgtccggcaccaatggcacaaagcggttcgacaatcccgtgctgccttttaacgatggcgtgtacttcgccagcaccgagaagtccaacatcatcagaggctggatctttggcaccacactggactctaagacacagagcctgctgatcgtgaacaatgccaccaacgtggtgatcaaggtgtgcgagttccagttttgtaatgatccattcctgggcgtgtactatcacaagaacaataagtcctggatggagtctgagtttcgcgtgtattctagcgccaacaattgcacatttgagtacgtgagccagcccttcctgatggacctggagggcaagcagggcaatttcaagaacctgagggagttcgtgtttaagaatatcgatggctacttcaagatctacagcaagcacaccccaatcaacctggtgcgcgacctgccacagggattctccgccctggagccactggtggatctgcccatcggcatcaacatcacccggtttcagacactgctggccctgcacagatcctacctgacaccaggcgactcctctagcggatggaccgcaggagctgccgcctactatgtgggctatctgcagccccggaccttcctgctgaagtacaacgagaatggcaccatcacagacgcagtggattgcgccctggaccccctgtctgagacaaagtgtacactgaagagctttaccgtggagaagggcatctatcagacaagcaatttcagggtgcagcctaccgagtccatcgtgcgctttcccaatatcacaaacctgtgcccttttggcgaggtgttcaacgccaccagattcgccagcgtgtacgcctggaatcggaagagaatctccaactgcgtggccgactattctgtgctgtacaactccgcctctttcagcacctttaagtgctatggcgtgtctcccacaaagctgaatgatctgtgctttaccaacgtgtacgccgatagcttcgtgatcaggggagacgaagtgagacagatcgcaccaggacagacaggaaagatcgcagactacaattataagctgcctgacgatttcaccggctgcgtgatcgcctggaactccaacaatctggattctaaagtgggcggcaactacaattatctgtacaggctgtttcgcaagtccaattttaagccattcgagcgggacatctccacagagatctaccaggccggctctaccccctgcaatggcgtggagggctttaactgttatttccctctgcagtcttacggcttccagccaacaaacggcgtgggctatcagccctacagagtggtggtgctgtcctttgagctgctgcacgcaccagcaacagtgtgcggcccaaagaagtctaccaatctggtgaagaacaagtgcgtgaacttcaacttcaacggactgaccggcacaggcgtgctgaccgagagcaataagaagttcctgccttttcagcagttcggcagggacatcgcagataccacagacgccgtgcgcgaccctcagaccctggagatcctggacatcacaccatgcagcttcggcggcgtgtccgtgatcacaccaggcaccaatacatccaaccaggtggccgtgctgtatcaggacgtgaattgtaccgaggtgcccgtggcaatccacgcagatcagctgacccctacatggcgggtgtactctaccggcagcaacgtgttccagacaagagccggatgcctgatcggagcagagcacgtgaacaatagctatgagtgcgacatccctatcggcgccggcatctgtgccagctaccagacccagacaaactccccatctggagcaggctccgtggccagccagtccatcatcgcctataccatgagcctgggcgccgagaacagcgtggcctactccaacaattctatcgccatccctaccaacttcacaatcagcgtgaccacagagatcctgccagtgtctatgaccaagacaagcgtggactgcacaatgtatatctgtggcgatagcaccgagtgctccaacctgctgctgcagtacggctccttttgtacccagctgaatagagccctgacaggcatcgccgtggagcaggataagaacacacaggaggtgttcgcccaggtgaagcagatctacaagaccccacccatcaaggactttggcggcttcaacttcagccagatcctgcctgatccaagcaagccctccaagaggtcttttatcgaggacctgctgttcaacaaggtgaccctggccgatgccggcttcatcaagcagtatggagattgcctgggagacatcgcagcccgcgacctgatctgtgcccagaagtttaatggcctgaccgtgctgcctccactgctgacagatgagatgatcgcccagtacacatctgccctgctggccggcaccatcacaagcggatggaccttcggcgcaggagccgccctgcagatcccttttgccatgcagatggcctataggttcaacggcatcggcgtgacccagaatgtgctgtacgagaaccagaagctgatcgccaatcagtttaacagcgccatcggcaagatccaggactctctgtcctctacagccagcgccctgggcaagctgcaggatgtggtgaatcagaacgcccaggccctgaataccctggtgaagcagctgagctccaacttcggcgccatctctagcgtgctgaatgacatcctgagccggctggacccccctgaggcagaggtgcagatcgacaggctgatcacaggccgcctgcagagcctgcagacctacgtgacacagcagctgatcagggcagcagagatcagagcctccgccaatctggccgccaccaagatgagcgagtgcgtgctgggacagtccaagagggtggacttttgtggcaagggctatcacctgatgtctttcccacagagcgcccctcacggcgtggtgtttctgcacgtgacctacgtgccagcccaggagaagaacttcaccacagcaccagccatctgccacgatggaaaggcacactttcctagggagggcgtgttcgtgtctaacggcacccactggtttgtgacacagcgcaatttctacgagccacagatcatcaccacagacaatacattcgtgagcggcaactgtgatgtggtgatcggcatcgtgaacaataccgtgtatgatccactgcagcccgagctggactcctttaaggaggagctggataagtacttcaagaatcacacctctcccgacgtggatctgggcgacatctccggcatcaatgcctctgtggtgaacatccagaaggagatcgaccggctgaacgaggtggccaagaatctgaacgagagcctgatcgatctgcaggagctgggcaagtatgagcagtacatcaagggctctggcagagagaacctgtatttccagggaggaggaggcagcggatacatccctgaggcaccaagggacggacaggcctacgtgcgcaaggatggcgagtgggtgctgctgtccacctttctgggccatcatcaccaccaccaccaccactga

SEQ ID NO: 5208 - DNA, 3846 bp, Artificial Sequence
  Description of Artificial Sequence: Synthetic polynucleotide
atgggcatcctgccaagcccaggaatgcccgccctgctgtctctggtgagcctgctgtccgtgctgctgatgggatgcgtggcagagacaggcacacagtgcgtgaacctgaccacaaggacccagctgccccctgcctataccaattctttcacacggggcgtgtactatcccgacaaggtgtttagaagctccgtgctgcactccacacaggatctgtttctgcctttcttttctaacgtgacctggttccacgccatccacgtgtccggcaccaatggcacaaagcggttcgacaatcccgtgctgccttttaacgatggcgtgtacttcgccagcaccgagaagtccaacatcatcagaggctggatctttggcaccacactggactctaagacacagagcctgctgatcgtgaacaatgccaccaacgtggtgatcaaggtgtgcgagttccagttttgtaatgatccattcctgggcgtgtactatcacaagaacaataagtcctggatggagtctgagtttcgcgtgtattctagcgccaacaattgcacatttgagtacgtgagccagcccttcctgatggacctggagggcaagcagggcaatttcaagaacctgagggagttcgtgtttaagaatatcgatggctacttcaagatctacagcaagcacaccccaatcaacctggtgcgcgacctgccacagggattctccgccctggagccactggtggatctgcccatcggcatcaacatcacccggtttcagacactgctggccctgcacagatcctacctgacaccaggcgactcctctagcggatggaccgcaggagctgccgcctactatgtgggctatctgcagccccggaccttcctgctgaagtacaacgagaatggcaccatcacagacgcagtggattgcgccctggaccccctgtctgagacaaagtgtacactgaagagctttaccgtggagaagggcatctatcagacaagcaatttcagggtgcagcctaccgagtccatcgtgcgctttcccaatatcacaaacctgtgcccttttggcgaggtgttcaacgccaccagattcgccagcgtgtacgcctggaatcggaagagaatctccaactgcgtggccgactattctgtgctgtacaactccgcctctttcagcacctttaagtgctatggcgtgtctcccacaaagctgaatgatctgtgctttaccaacgtgtacgccgatagcttcgtgatcaggggagacgaagtgagacagatcgcaccaggacagacaggaaagatcgcagactacaattataagctgcctgacgatttcaccggctgcgtgatcgcctggaactccaacaatctggattctaaagtgggcggcaactacaattatctgtacaggctgtttcgcaagtccaatctgaagccattcgagcgggacatctccacagagatctaccaggccggctctaccccctgcaatggcgtggagggctttaactgttatttccctctgcagtcttacggcttccagccaacaaacggcgtgggctatcagccctacagagtggtggtgctgtcctttgagctgctgcacgcaccagcaacagtgtgcggcccaaagaagtctaccaatctggtgaagaacaagtgcgtgaacttcaacttcaacggactgaccggcacaggcgtgctgaccgagagcaataagaagttcctgccttttcagcagttcggcagggacatcgcagataccacagacgccgtgcgcgaccctcagaccctggagatcctggacatcacaccatgcagcttcggcggcgtgtccgtgatcacaccaggcaccaatacatccaaccaggtggccgtgctgtatcaggacgtgaattgtaccgaggtgcccgtggcaatccacgcagatcagctgacccctacatggcgggtgtactctaccggcagcaacgtgttccagacaagagccggatgcctgatcggagcagagcacgtgaacaatagctatgagtgcgacatccctatcggcgccggcatctgtgccagctaccagacccagacaaactccccatctggagcaggctccgtggccagccagtccatcatcgcctataccatgagcctgggcgccgagaacagcgtggcctactccaacaattctatcgccatccctaccaacttcacaatcagcgtgaccacagagatcctgccagtgtctatgaccaagacaagcgtggactgcacaatgtatatctgtggcgatagcaccgagtgctccaacctgctgctgcagtacggctccttttgtacccagctgaatagagccctgacaggcatcgccgtggagcaggataagaacacacaggaggtgttcgcccaggtgaagcagatctacaagaccccacccatcaaggactttggcggcttcaacttcagccagatcctgcctgatccaagcaagccctccaagaggtcttttatcgaggacctgctgttcaacaaggtgaccctggccgatgccggcttcatcaagcagtatggagattgcctgggagacatcgcagcccgcgacctgatctgtgcccagaagtttaatggcctgaccgtgctgcctccactgctgacagatgagatgatcgcccagtacacatctgccctgctggccggcaccatcacaagcggatggaccttcggccgaggagccgccctgcagatcccttttgccatgcagatggcctataggttcaacggcatcggcgtgacccagaatgtgctgtacgagaaccagaagctgatcgccaatcagtttaacagcgccatcggcaagatccaggactctctgtcctctacagccagcgccctgggcaagctgcaggatgtggtgaatcagaacgcccaggccctgaataccctggtgaagcagctgagctccaacttcggcgccatctctagcgtgctgaatgacatcctgagccggctggacccccctgaggcagaggtgcagatcgacaggctgatcacaggccgcctgcagagcctgcagacctacgtgacacagcagctgatcagggcagcagagatcagagcctccgccaatctggccgccaccaagatgagcgagtgcgtgctgggacagtccaagagggtggacttttgtggcaagggctatcacctgatgtctttcccacagagcgcccctcacggcgtggtgtttctgcacgtgacctacgtgccagcccaggagaagaacttcaccacagcaccagccatctgccacgatggaaaggcacactttcctagggagggcgtgttcgtgtctaacggcacccactggtttgtgacacagcgcaatttctacgagccacagatcatcaccacagacaatacattcgtgagcggcaactgtgatgtggtgatcggcatcgtgaacaataccgtgtatgatccactgcagcccgagctggactcctttaaggaggagctggataagtacttcaagaatcacacctctcccgacgtggatctgggcgacatctccggcatcaatgcctctgtggtgaacatccagaaggagatcgaccggctgaacgaggtggccaagaatctgaacgagagcctgatcgatctgcaggagctgggcaagtatgagcagtacatcaagggctctggcagagagaacctgtatttccagggaggaggaggcagcggatacatccctgaggcaccaagggacggacaggcctacgtgcgcaaggatggcgagtgggtgctgctgtccacctttctgggccatcatcaccaccaccaccaccactga

SEQ ID NO: 5209 - DNA, 3846 bp, Artificial Sequence
  Description of Artificial Sequence: Synthetic polynucleotide
atgggcatcctgccaagcccaggaatgcccgccctgctgtctctggtgagcctgctgtccgtgctgctgatgggatgcgtggcagagacaggcacacagtgcgtgaacctgaccacaaggacccagctgccccctgcctataccaattctttcacacggggcgtgtactatcccgacaaggtgtttagaagctccgtgctgcactccacacaggatctgtttctgcctttcttttctaacgtgacctggttccacgccatccacgtgtccggcaccaatggcacaaagcggttcgacaatcccgtgctgccttttaacgatggcgtgtacttcgccagcaccgagaagtccaacatcatcagaggctggatctttggcaccacactggactctaagacacagagcctgctgatcgtgaacaatgccaccaacgtggtgatcaaggtgtgcgagttccagttttgtaatgatccattcctgggcgtgtactatcacaagaacaataagtcctggatggagtctgagtttcgcgtgtattctagcgccaacaattgcacatttgagtacgtgagccagcccttcctgatggacctggagggcaagcagggcaatttcaagaacctgagggagttcgtgtttaagaatatcgatggctacttcaagatctacagcaagcacaccccaatcaacctggtgcgcgacctgccacagggattctccgccctggagccactggtggatctgcccatcggcatcaacatcacccggtttcagacactgctggccctgcacagatcctacctgacaccaggcgactcctctagcggatggaccgcaggagctgccgcctactatgtgggctatctgcagccccggaccttcctgctgaagtacaacgagaatggcaccatcacagacgcagtggattgcgccctggaccccctgtctgagacaaagtgtacactgaagagctttaccgtggagaagggcatctatcagacaagcaatttcagggtgcagcctaccgagtccatcgtgcgctttcccaatatcacaaacctgtgcccttttggcgaggtgttcaacgccaccagattcgccagcgtgtacgcctggaatcggaagagaatctccaactgcgtggccgactattctgtgctgtacaactccgcctctttcagcacctttaagtgctatggcgtgtctcccacaaagctgaatgatctgtgctttaccaacgtgtacgccgatagcttcgtgatcaggggagacgaagtgagacagatcgcaccaggacagacaggaaagatcgcagactacaattataagctgcctgacgatttcaccggctgcgtgatcgcctggaactccaacaatctggattctaaagtgggcggcaactacaattatctgtacaggctgtttcgcaagtccaatctgaagccattcgagcgggacatctccacagagatctaccaggccggctctaccccctgcaatggcgtggagggctttaactgttatttccctctgcagtcttacggcttccagccaacaaacggcgtgggctatcagccctacagagtggtggtgctgtcctttgagctgcaacacgcaccagcaacagtgtgcggcccaaagaagtctaccaatctggtgaagaacaagtgcgtgaacttcaacttcaacggactgaccggcacaggcgtgctgaccgagagcaataagaagttcctgccttttcagcagttcggcagggacatcgcagataccacagacgccgtgcgcgaccctcagaccctggagatcctggacatcacaccatgcagcttcggcggcgtgtccgtgatcacaccaggcaccaatacatccaaccaggtggccgtgctgtatcaggacgtgaattgtaccgaggtgcccgtggcaatccacgcagatcagctgacccctacatggcgggtgtactctaccggcagcaacgtgttccagacaagagccggatgcctgatcggagcagagcacgtgaacaatagctatgagtgcgacatccctatcggcgccggcatctgtgccagctaccagacccagacaaactccccatctggagcaggctccgtggccagccagtccatcatcgcctataccatgagcctgggcgccgagaacagcgtggcctactccaacaattctatcgccatccctaccaacttcacaatcagcgtgaccacagagatcctgccagtgtctatgaccaagacaagcgtggactgcacaatgtatatctgtggcgatagcaccgagtgctccaacctgctgctgcagtacggctccttttgtacccagctgaatagagccctgacaggcatcgccgtggagcaggataagaacacacaggaggtgttcgcccaggtgaagcagatctacaagaccccacccatcaaggactttggcggcttcaacttcagccagatcctgcctgatccaagcaagccctccaagaggtcttttatcgaggacctgctgttcaacaaggtgaccctggccgatgccggcttcatcaagcagtatggagattgcctgggagacatcgcagcccgcgacctgatctgtgcccagaagtttaatggcctgaccgtgctgcctccactgctgacagatgagatgatcgcccagtacacatctgccctgctggccggcaccatcacaagcggatggaccttcggcgcaggagccgccctgcagatcccttttgccatgcagatggcctataggttcaacggcatcggcgtgacccagaatgtgctgtacgagaaccagaagctgatcgccaatcagtttaacagcgccatcggcaagatccaggactctctgtcctctacagccagcgccctgggcaagctgcaggatgtggtgaatcagaacgcccaggccctgaataccctggtgaagcagctgagctccaacttcggcgccatctctagcgtgctgaatgacatcctgagccggctggacccccctgaggcagaggtgcagatcgacaggctgatcacaggccgcctgcagagcctgcagacctacgtgacacagcagctgatcagggcagcagagatcagagcctccgccaatctggccgccaccaagatgagcgagtgcgtgctgggacagtccaagagggtggacttttgtggcaagggctatcacctgatgtctttcccacagagcgcccctcacggcgtggtgtttctgcacgtgacctacgtgccagcccaggagaagaacttcaccacagcaccagccatctgccacgatggaaaggcacactttcctagggagggcgtgttcgtgtctaacggcacccactggtttgtgacacagcgcaatttctacgagccacagatcatcaccacagacaatacattcgtgagcggcaactgtgatgtggtgatcggcatcgtgaacaataccgtgtatgatccactgcagcccgagctggactcctttaaggaggagctggataagtacttcaagaatcacacctctcccgacgtggatctgggcgacatctccggcatcaatgcctctgtggtgaacatccagaaggagatcgaccggctgaacgaggtggccaagaatctgaacgagagcctgatcgatctgcaggagctgggcaagtatgagcagtacatcaagggctctggcagagagaacctgtatttccagggaggaggaggcagcggatacatccctgaggcaccaagggacggacaggcctacgtgcgcaaggatggcgagtgggtgctgctgtccacctttctgggccatcatcaccaccaccaccaccactga

SEQ ID NO: 5210 - DNA, 3846 bp, Artificial Sequence
  Description of Artificial Sequence: Synthetic polynucleotide
atgggcatcctgccaagcccaggaatgcccgccctgctgtctctggtgagcctgctgtccgtgctgctgatgggatgcgtggcagagacaggcacacagtgcgtgaacctgaccacaaggacccagctgccccctgcctataccaattctttcacacggggcgtgtactatcccgacaaggtgtttagaagctccgtgctgcactccacacaggatctgtttctgcctttcttttctaacgtgacctggttccacgccatccacgtgtccggcaccaatggcacaaagcggttcgacaatcccgtgctgccttttaacgatggcgtgtacttcgccagcaccgagaagtccaacatcatcagaggctggatctttggcaccacactggactctaagacacagagcctgctgatcgtgaacaatgccaccaacgtggtgatcaaggtgtgcgagttccagttttgtaatgatccattcctgggcgtgtactatcacaagaacaataagtcctggatggagtctgagtttcgcgtgtattctagcgccaacaattgcacatttgagtacgtgagccagcccttcctgatggacctggagggcaagcagggcaatttcaagaacctgagggagttcgtgtttaagaatatcgatggctacttcaagatctacagcaagcacaccccaatcaacctggtgcgcgacctgccacagggattctccgccctggagccactggtggatctgcccatcggcatcaacatcacccggtttcagacactgctggccctgcacagatcctacctgacaccaggcgactcctctagcggatggaccgcaggagctgccgcctactatgtgggctatctgcagccccggaccttcctgctgaagtacaacgagaatggcaccatcacagacgcagtggattgcgccctggaccccctgtctgagacaaagtgtacactgaagagctttaccgtggagaagggcatctatcagacaagcaatttcagggtgcagcctaccgagtccatcgtgcgctttcccaatatcacaaacctgtgcccttttggcgaggtgttcaacgccaccagattcgccagcgtgtacgcctggaatcggaagagaatctccaactgcgtggccgactattctgtgctgtacaactccgcctctttcagcacctttaagtgctatggcgtgtctcccacaaagctgaatgatctgtgctttaccaacgtgtacgccgatagcttcgtgatcaggggagacgaagtgagacagatcgcaccaggacagacaggaaagatcgcagactacaattataagctgcctgacgatttcaccggctgcgtgatcgcctggaactccaacaatctggattctaaagtgggcggcaactacaattatctgtacaggctgtttcgcaagtccaatctgaagccattcgagcgggacatctccacagagatctaccaggccggctctaccccctgcaatggcgtggagggctttaactgttatttccctctgcagtcttacggcttccagccaacaaacggcgtgggctatcagccctacagagtggtggtgctgtcctttgagctgctgcacgcaccagcaacagtgtgcggcccaaagaagtctaccaatctggtgaagaacaagtgcgtgaacttcaacttcaacggactgaccggcacaggcgtgctgaccgagagcaataagaagttcctgccttttcagcagttcggcagggacatcgcagataccacagacgccgtgcgcgaccctcagaccctggagatcctggacatcacaccatgcagcttcggcggcgtgtccgtgatcacaccaggcaccaatacatccaaccaggtggccgtgctgtatcaggacgtgaattgtaccgaggtgcccgtggcaatccacgcagatcagctgacccctacatggcgggtgtactctaccggcagcaacgtgttccagacaagagccggatgcctgatcggagcagagcacgtgaacaatagctatgagtgcgacatccctatcggcgccggcatctgtgccagctaccagacccagacaaactccccatctggagcaggctccgtggccagccagtccatcatcgcctataccatgagcctgggcgccgagaacagcgtggcctactccaacaattctatcgccatccctaccaacttcacaatcagcgtgaccacagagatcctgccagtgtctatgaccaagacaagcgtggactgcacaatgtatatctgtggcgatagcaccgagtgctccaacctgctgctgcagtacggctccttttgtacccagctgaatagagccctgacaggcatcgccgtggagcaggataagaacacacaggaggtgttcgcccaggtgaagcagatctacaagaccccacccatcaaggactttggcggcttcaacttcagccagatcctgcctgatccaagcaagccctccaagaggtcttttatcgaggacctgctgttcaacaaggtgaccctggccgatgccggcttcatcaagcagtatggagattgcctgggagacatcgcagcccgcgacctgatctgtgcccagaagtttaatggcctgaccgtgctgcctccactgctgacagatgagatgatcgcccagtacacatctgccctgctggccggcaccatcacaagcggatggaccttcggcgcaggagccgccctgcagatcccttttgccatgcagatggcctataggttcaacggcatcggcgtgacccagaatgtgctgtacgagaaccagaagctgatcgccaatcagtttaacagcgccatcggcaagatccaggactctctgtcctctacagccagcgccctgggcaagctgcaggatgtggtgaatcagaacgcccaggccctgaataccctggtgaagcagctgagctccaacttcggcgccatctctagcgtgctgaatgacatcctgagccggagtgacccccctgaggcagaggtgcagatcgacaggctgatcacaggccgcctgcagagcctgcagacctacgtgacacagcagctgatcagggcagcagagatcagagcctccgccaatctggccgccaccaagatgagcgagtgcgtgctgggacagtccaagagggtggacttttgtggcaagggctatcacctgatgtctttcccacagagcgcccctcacggcgtggtgtttctgcacgtgacctacgtgccagcccaggagaagaacttcaccacagcaccagccatctgccacgatggaaaggcacactttcctagggagggcgtgttcgtgtctaacggcacccactggtttgtgacacagcgcaatttctacgagccacagatcatcaccacagacaatacattcgtgagcggcaactgtgatgtggtgatcggcatcgtgaacaataccgtgtatgatccactgcagcccgagctggactcctttaaggaggagctggataagtacttcaagaatcacacctctcccgacgtggatctgggcgacatctccggcatcaatgcctctgtggtgaacatccagaaggagatcgaccggctgaacgaggtggccaagaatctgaacgagagcctgatcgatctgcaggagctgggcaagtatgagcagtacatcaagggctctggcagagagaacctgtatttccagggaggaggaggcagcggatacatccctgaggcaccaagggacggacaggcctacgtgcgcaaggatggcgagtgggtgctgctgtccacctttctgggccatcatcaccaccaccaccaccactga

SEQ ID NO: 5211 - DNA, 3846 bp, Artificial Sequence
  Description of Artificial Sequence: Synthetic polynucleotide
atgggcatcctgccaagcccaggaatgcccgccctgctgtctctggtgagcctgctgtccgtgctgctgatgggatgcgtggcagagacaggcacacagtgcgtgaacctgaccacaaggacccagctgccccctgcctataccaattctttcacacggggcgtgtactatcccgacaaggtgtttagaagctccgtgctgcactccacacaggatctgtttctgcctttcttttctaacgtgacctggttccacgccatccacgtgtccggcaccaatggcacaaagcggttcgacaatcccgtgctgccttttaacgatggcgtgtacttcgccagcaccgagaagtccaacatcatcagaggctggatctttggcaccacactggactctaagacacagagcctgctgatcgtgaacaatgccaccaacgtggtgatcaaggtgtgcgagttccagttttgtaatgatccattcctgggcgtgtactatcacaagaacaataagtcctggatggagtctgagtttcgcgtgtattctagcgccaacaattgcacatttgagtacgtgagccagcccttcctgatggacctggagggcaagcagggcaatttcaagaacctgagggagttcgtgtttaagaatatcgatggctacttcaagatctacagcaagcacaccccaatcaacctggtgcgcgacctgccacagggattctccgccctggagccactggtggatctgcccatcggcatcaacatcacccggtttcagacactgctggccctgcacagatcctacctgacaccaggcgactcctctagcggatggaccgcaggagctgccgcctactatgtgggctatctgcagccccggaccttcctgctgaagtacaacgagaatggcaccatcacagacgcagtggattgcgccctggaccccctgtctgagacaaagtgtacactgaagagctttaccgtggagaagggcatctatcagacaagcaatttcagggtgcagcctaccgagtccatcgtgcgctttcccaatatcacaaacctgtgcccttttggcgaggtgttcaacgccaccagattcgccagcgtgtacgcctggaatcggaagagaatctccaactgcgtggccgactattctgtgctgtacaactccgcctctttcagcacctttaagtgctatggcgtgtctcccacaaagctgaatgatctgtgctttaccaacgtgtacgccgatagcttcgtgatcaggggagacgaagtgagacagatcgcaccaggacagacaggaaagatcgcagactacaattataagctgcctgacgatttcaccggctgcgtgatcgcctggaactccaacaatctggattctaaagtgggcggcaactacaattatctgtacaggctgtttcgcaagtccaatctgaagccattcgaggtagacatctccacagagatctaccaggccggctctaccccctgcaatggcgtggagggctttaactgttatttccctctgcagtcttacggcttccagccaacaaacggcgtgggctatcagccctacagagtggtggtgctgtcctttgagctgctgcacgcaccagcaacagtgtgcggcccaaagaagtctaccaatctggtgaagaacaagtgcgtgaacttcaacttcaacggactgaccggcacaggcgtgctgaccgagagcaataagaagttcctgccttttcagcagttcggcagggacatcgcagataccacagacgccgtgcgcgaccctcagaccctggagatcctggacatcacaccatgcagcttcggcggcgtgtccgtgatcacaccaggcaccaatacatccaaccaggtggccgtgctgtatcaggacgtgaattgtaccgaggtgcccgtggcaatccacgcagatcagctgacccctacatggcgggtgtactctaccggcagcaacgtgttccagacaagagccggatgcctgatcggagcagagcacgtgaacaatagctatgagtgcgacatccctatcggcgccggcatctgtgccagctaccagacccagacaaactccccatctggagcaggctccgtggccagccagtccatcatcgcctataccatgagcctgggcgccgagaacagcgtggcctactccaacaattctatcgccatccctaccaacttcacaatcagcgtgaccacagagatcctgccagtgtctatgaccaagacaagcgtggactgcacaatgtatatctgtggcgatagcaccgagtgctccaacctgctgctgcagtacggctccttttgtacccagctgaatagagccctgacaggcatcgccgtggagcaggataagaacacacaggaggtgttcgcccaggtgaagcagatctacaagaccccacccatcaaggactttggcggcttcaacttcagccagatcctgcctgatccaagcaagccctccaagaggtcttttatcgaggacctgctgttcaacaaggtgaccctggccgatgccggcttcatcaagcagtatggagattgcctgggagacatcgcagcccgcgacctgatctgtgcccagaagtttaatggcctgaccgtgctgcctccactgctgacagatgagatgatcgcccagtacacatctgccctgctggccggcaccatcacaagcggatggaccttcggcgcaggagccgccctgcagatcccttttgccatgcagatggcctataggttcaacggcatcggcgtgacccagaatgtgctgtacgagaaccagaagctgatcgccaatcagtttaacagcgccatcggcaagatccaggactctctgtcctctacagccagcgccctgggcaagctgcaggatgtggtgaatcagaacgcccaggccctgaataccctggtgaagcagctgagctccaacttcggcgccatctctagcgtgctgaatgacatcctgagccggctggacccccctgaggcagaggtgcagatcgacaggctgatcacaggccgcctgcagagcctgcagacctacgtgacacagcagctgatcagggcagcagagatcagagcctccgccaatctggccgccaccaagatgagcgagtgcgtgctgggacagtccaagagggtggacttttgtggcaagggctatcacctgatgtctttcccacagagcgcccctcacggcgtggtgtttctgcacgtgacctacgtgccagcccaggagaagaacttcaccacagcaccagccatctgccacgatggaaaggcacactttcctagggagggcgtgttcgtgtctaacggcacccactggtttgtgacacagcgcaatttctacgagccacagatcatcaccacagacaatacattcgtgagcggcaactgtgatgtggtgatcggcatcgtgaacaataccgtgtatgatccactgcagcccgagctggactcctttaaggaggagctggataagtacttcaagaatcacacctctcccgacgtggatctgggcgacatctccggcatcaatgcctctgtggtgaacatccagaaggagatcgaccggctgaacgaggtggccaagaatctgaacgagagcctgatcgatctgcaggagctgggcaagtatgagcagtacatcaagggctctggcagagagaacctgtatttccagggaggaggaggcagcggatacatccctgaggcaccaagggacggacaggcctacgtgcgcaaggatggcgagtgggtgctgctgtccacctttctgggccatcatcaccaccaccaccaccactga

SEQ ID NO: 5212 - DNA, 3846 bp, Artificial Sequence
  Description of Artificial Sequence: Synthetic polynucleotide
atgggcatcctgccaagcccaggaatgcccgccctgctgtctctggtgagcctgctgtccgtgctgctgatgggatgcgtggcagagacaggcacacagtgcgtgaacctgaccacaaggacccagctgccccctgcctataccaattctttcacacggggcgtgtactatcccgacaaggtgtttagaagctccgtgctgcactccacacaggatctgtttctgcctttcttttctaacgtgacctggttccacgccatccacgtgtccggcaccaatggcacaaagcggttcgacaatcccgtgctgccttttaacgatggcgtgtacttcgccagcaccgagaagtccaacatcatcagaggctggatctttggcaccacactggactctaagacacagagcctgctgatcgtgaacaatgccaccaacgtggtgatcaaggtgtgcgagttccagttttgtaatgatccattcctgggcgtgtactatcacaagaacaataagtcctggatggagtctgagtttcgcgtgtattctagcgccaacaattgcacatttgagtacgtgagccagcccttcctgatggacctggagggcaagcagggcaatttcaagaacctgagggagttcgtgtttaagaatatcgatggctacttcaagatctacagcaagcacaccccaatcaacctggtgcgcgacctgccacagggattctccgccctggagccactggtggatctgcccatcggcatcaacatcacccggtttcagacactgctggccctgcacagatcctacctgacaccaggcgactcctctagcggatggaccgcaggagctgccgcctactatgtgggctatctgcagccccggaccttcctgctgaagtacaacgagaatggcaccatcacagacgcagtggattgcgccctggaccccctgtctgagacaaagtgtacactgaagagctttaccgtggagaagggcatctatcagacaagcaatttcagggtgcagcctaccgagtccatcgtgcgctttcccaatatcacaaacctgtgcccttttggcgaggtgttcaacgccaccagattcgccagcgtgtacgcctggaatcggaagagaatctccaactgcgtggccgactattctgtgctgtacaactccgcctctttcagcacctttaagtgctatggcgtgtctcccacaaagctgaatgatctgtgctttaccaacgtgtacgccgatagcttcgtgatcaggggagacgaagtgagacagatcgcaccaggacagacaggaaagatcgcagactacaattataagctgcctgacgatttcaccggctgcgtgatcgcctggaactccaacaatctggattctaaagtgggcggcaactacaattatctgtacaggctgtttcgcaagtccaatctgaagccattcgagcgggacatctccacagctatctaccaggccggctctaccccctgcaatggcgtggagggctttaactgttatttccctctgcagtcttacggcttccagccaacaaacggcgtgggctatcagccctacagagtggtggtgctgtcctttgagctgctgcacgcaccagcaacagtgtgcggcccaaagaagtctaccaatctggtgaagaacaagtgcgtgaacttcaacttcaacggactgaccggcacaggcgtgctgaccgagagcaataagaagttcctgccttttcagcagttcggcagggacatcgcagataccacagacgccgtgcgcgaccctcagaccctggagatcctggacatcacaccatgcagcttcggcggcgtgtccgtgatcacaccaggcaccaatacatccaaccaggtggccgtgctgtatcaggacgtgaattgtaccgaggtgcccgtggcaatccacgcagatcagctgacccctacatggcgggtgtactctaccggcagcaacgtgttccagacaagagccggatgcctgatcggagcagagcacgtgaacaatagctatgagtgcgacatccctatcggcgccggcatctgtgccagctaccagacccagacaaactccccatctggagcaggctccgtggccagccagtccatcatcgcctataccatgagcctgggcgccgagaacagcgtggcctactccaacaattctatcgccatccctaccaacttcacaatcagcgtgaccacagagatcctgccagtgtctatgaccaagacaagcgtggactgcacaatgtatatctgtggcgatagcaccgagtgctccaacctgctgctgcagtacggctccttttgtacccagctgaatagagccctgacaggcatcgccgtggagcaggataagaacacacaggaggtgttcgcccaggtgaagcagatctacaagaccccacccatcaaggactttggcggcttcaacttcagccagatcctgcctgatccaagcaagccctccaagaggtcttttatcgaggacctgctgttcaacaaggtgaccctggccgatgccggcttcatcaagcagtatggagattgcctgggagacatcgcagcccgcgacctgatctgtgcccagaagtttaatggcctgaccgtgctgcctccactgctgacagatgagatgatcgcccagtacacatctgccctgctggccggcaccatcacaagcggatggaccttcggcgcaggagccgccctgcagatcccttttgccatgcagatggcctataggttcaacggcatcggcgtgacccagaatgtgctgtacgagaaccagaagctgatcgccaatcagtttaacagcgccatcggcaagatccaggactctctgtcctctacagccagcgccctgggcaagctgcaggatgtggtgaatcagaacgcccaggccctgaataccctggtgaagcagctgagctccaacttcggcgccatctctagcgtgctgaatgacatcctgagccggctggacccccctgaggcagaggtgcagatcgacaggctgatcacaggccgcctgcagagcctgcagacctacgtgacacagcagctgatcagggcagcagagatcagagcctccgccaatctggccgccaccaagatgagcgagtgcgtgctgggacagtccaagagggtggacttttgtggcaagggctatcacctgatgtctttcccacagagcgcccctcacggcgtggtgtttctgcacgtgacctacgtgccagcccaggagaagaacttcaccacagcaccagccatctgccacgatggaaaggcacactttcctagggagggcgtgttcgtgtctaacggcacccactggtttgtgacacagcgcaatttctacgagccacagatcatcaccacagacaatacattcgtgagcggcaactgtgatgtggtgatcggcatcgtgaacaataccgtgtatgatccactgcagcccgagctggactcctttaaggaggagctggataagtacttcaagaatcacacctctcccgacgtggatctgggcgacatctccggcatcaatgcctctgtggtgaacatccagaaggagatcgaccggctgaacgaggtggccaagaatctgaacgagagcctgatcgatctgcaggagctgggcaagtatgagcagtacatcaagggctctggcagagagaacctgtatttccagggaggaggaggcagcggatacatccctgaggcaccaagggacggacaggcctacgtgcgcaaggatggcgagtgggtgctgctgtccacctttctgggccatcatcaccaccaccaccaccactga

SEQ ID NO: 5213 - DNA, 3846 bp, Artificial Sequence
  Description of Artificial Sequence: Synthetic polynucleotide
atgggcatcctgccaagcccaggaatgcccgccctgctgtctctggtgagcctgctgtccgtgctgctgatgggatgcgtggcagagacaggcacacagtgcgtgaacctgaccacaaggacccagctgccccctgcctataccaattctttcacacggggcgtgtactatcccgacaaggtgtttagaagctccgtgctgcactccacacaggatctgtttctgcctttcttttctaacgtgacctggttccacgccatccacgtgtccggcaccaatggcacaaagcggttcgacaatcccgtgctgccttttaacgatggcgtgtacttcgccagcaccgagaagtccaacatcatcagaggctggatctttggcaccacactggactctaagacacagagcctgctgatcgtgaacaatgccaccaacgtggtgatcaaggtgtgcgagttccagttttgtaatgatccattcctgggcgtgtactatcacaagaacaataagtcctggatggagtctgagtttcgcgtgtattctagcgccaacaattgcacatttgagtacgtgagccagcccttcctgatggacctggagggcaagcagggcaatttcaagaacctgagggagttcgtgtttaagaatatcgatggctacttcaagatctacagcaagcacaccccaatcaacctggtgcgcgacctgccacagggattctccgccctggagccactggtggatctgcccatcggcatcaacatcacccggtttcagacactgctggccctgcacagatcctacctgacaccaggcgactcctctagcggatggaccgcaggagctgccgcctactatgtgggctatctgcagccccggaccttcctgctgaagtacaacgagaatggcaccatcacagacgcagtggattgcgccctggaccccctgtctgagacaaagtgtacactgaagagctttaccgtggagaagggcatctatcagacaagcaatttcagggtgcagcctaccgagtccatcgtgcgctttcccaatatcacaaacctgtgcccttttggcgaggtgttcaacgccaccagattcgccagcgtgtacgcctggaatcggaagagaatctccaactgcgtggccgactattctgtgctgtacaactccgcctctttcagcacctttaagtgctatggcgtgtctcccacaaagctgaatgatctgtgctttaccaacgtgtacgccgatagcttcgtgatcaggggagacgaagtgagacagatcgcaccaggacagacaggaaagatcgcagactacaattataagctgcctgacgatttcaccggctgcgtgatcgcctggaactccaacaatctggattgtaaagtgggcggcaactacaattatctgtacaggctgtttcgcaagtccaatctgaagccattcgagcgggacatctccacagagatctaccaggccggctctaccccctgcaatggcgtggagggctttaactgttatttccctctgcagtcttacggcttccagccaacaaacggcgtgggctatcagccctacagagtggtggtgctgtcctttgagctgctgcacgcaccagcaacagtgtgcggcccaaagaagtctaccaatctggtgaagaacaagtgcgtgaacttcaacttcaacggactgaccggcacaggcgtgctgaccgagagcaataagaagttcctgccttttcagcagttcggcagggacatcgcagataccacagacgccgtgcgcgaccctcagaccctggagatcctggacatcacaccatgcagcttcggcggcgtgtccgtgatcacaccaggcaccaatacatccaaccaggtggccgtgctgtatcaggacgtgaattgtaccgaggtgcccgtggcaatccacgcagatcagctgacccctacatggcgggtgtactctaccggcagcaacgtgttccagacaagagccggatgcctgatcggagcagagcacgtgaacaatagctatgagtgcgacatccctatcggcgccggcatctgtgccagctaccagacccagacaaactccccatctggagcaggctccgtggccagccagtccatcatcgcctataccatgagcctgggcgccgagaacagcgtggcctactccaacaattctatcgccatccctaccaacttcacaatcagcgtgaccacagagatcctgccagtgtctatgaccaagacaagcgtggactgcacaatgtatatctgtggcgatagcaccgagtgctccaacctgctgctgcagtacggctccttttgtacccagctgaatagagccctgacaggcatcgccgtggagcaggataagaacacacaggaggtgttcgcccaggtgaagcagatctacaagaccccacccatcaaggactttggcggcttcaacttcagccagatcctgcctgatccaagcaagccctccaagaggtcttttatcgaggacctgctgttcaacaaggtgaccctggccgatgccggcttcatcaagcagtatggagattgcctgggagacatcgcagcccgcgacctgatctgtgcccagaagtttaatggcctgaccgtgctgcctccactgctgacagatgagatgatcgcccagtacacatctgccctgctggccggcaccatcacaagcggatggaccttcggcgcaggagccgccctgcagatcccttttgccatgcagatggcctataggttcaacggcatcggcgtgacccagaatgtgctgtacgagaaccagaagctgatcgccaatcagtttaacagcgccatcggcaagatccaggactctctgtcctctacagccagcgccctgggcaagctgcaggatgtggtgaatcagaacgcccaggccctgaataccctggtgaagcagctgagctccaacttcggcgccatctctagcgtgctgaatgacatcctgagccggctggacccccctgaggcagaggtgcagatcgacaggctgatcacaggccgcctgcagagcctgcagacctacgtgacacagcagctgatcagggcagcagagatcagagcctccgccaatctggccgccaccaagatgagcgagtgcgtgctgggacagtccaagagggtggacttttgtggcaagggctatcacctgatgtctttcccacagagcgcccctcacggcgtggtgtttctgcacgtgacctacgtgccagcccaggagaagaacttcaccacagcaccagccatctgccacgatggaaaggcacactttcctagggagggcgtgttcgtgtctaacggcacccactggtttgtgacacagcgcaatttctacgagccacagatcatcaccacagacaatacattcgtgagcggcaactgtgatgtggtgatcggcatcgtgaacaataccgtgtatgatccactgcagcccgagctggactcctttaaggaggagctggataagtacttcaagaatcacacctctcccgacgtggatctgggcgacatctccggcatcaatgcctctgtggtgaacatccagaaggagatcgaccggctgaacgaggtggccaagaatctgaacgagagcctgatcgatctgcaggagctgggcaagtatgagcagtacatcaagggctctggcagagagaacctgtatttccagggaggaggaggcagcggatacatccctgaggcaccaagggacggacaggcctacgtgcgcaaggatggcgagtgggtgctgctgtccacctttctgggccatcatcaccaccaccaccaccactga

SEQ ID NO: 5214 - DNA, 3846 bp, Artificial Sequence
  Description of Artificial Sequence: Synthetic polynucleotide
atgggcatcctgccaagcccaggaatgcccgccctgctgtctctggtgagcctgctgtccgtgctgctgatgggatgcgtggcagagacaggcacacagtgcgtgaacctgaccacaaggacccagctgccccctgcctataccaattctttcacacggggcgtgtactatcccgacaaggtgtttagaagctccgtgctgcactccacacaggatctgtttctgcctttcttttctaacgtgacctggttccacgccatccacgtgtccggcaccaatggcacaaagcggttcgacaatcccgtgctgccttttaacgatggcgtgtacttcgccagcaccgagaagtccaacatcatcagaggctggatctttggcaccacactggactctaagacacagagcctgctgatcgtgaacaatgccaccaacgtggtgatcaaggtgtgcgagttccagttttgtaatgatccattcctgggcgtgtactatcacaagaacaataagtcctggatggagtctgagtttcgcgtgtattctagcgccaacaattgcacatttgagtacgtgagccagcccttcctgatggacctggagggcaagcagggcaatttcaagaacctgagggagttcgtgtttaagaatatcgatggctacttcaagatctacagcaagcacaccccaatcaacctggtgcgcgacctgccacagggattctccgccctggagccactggtggatctgcccatcggcatcaacatcacccggtttcagacactgctggccctgcacagatcctacctgacaccaggcgactcctctagcggatggaccgcaggagctgccgcctactatgtgggctatctgcagccccggaccttcctgctgaagtacaacgagaatggcaccatcacagacgcagtggattgcgccctggaccccctgtctgagacaaagtgtacactgaagagctttaccgtggagaagggcatctatcagacaagcaatttcagggtgcagcctaccgagtccatcgtgcgctttcccaatatcacaaacctgtgcccttttggcgaggtgttcaacgccaccagattcgccagcgtgtacgcctggaatcggaagagaatctccaactgcgtggccgactattctgtgctgtacaactccgcctctttcagcacctttaagtgctatggcgtgtctcccacaaagctgaatgatctgtgctttaccaacgtgtacgccgatagcttcgtgatcaggggagacgaagtgagacagatcgcaccaggacagacaggaaagatcgcagactacaattataagctgcctgacgatttcaccggctgcgtgatcgcctggaactcccaaaatctggattctaaagtgggcggcaactacaattatctgtacaggctgtttcgcaagtccaatctgaagccattcgagcgggacatctccacagagatctaccaggccggctctaccccctgcaatggcgtggagggctttaactgttatttccctctgcagtcttacggcttccagccaacaaacggcgtgggctatcagccctacagagtggtggtgctgtcctttgagctgctgcacgcaccagcaacagtgtgcggcccaaagaagtctaccaatctggtgaagaacaagtgcgtgaacttcaacttcaacggactgaccggcacaggcgtgctgaccgagagcaataagaagttcctgccttttcagcagttcggcagggacatcgcagataccacagacgccgtgcgcgaccctcagaccctggagatcctggacatcacaccatgcagcttcggcggcgtgtccgtgatcacaccaggcaccaatacatccaaccaggtggccgtgctgtatcaggacgtgaattgtaccgaggtgcccgtggcaatccacgcagatcagctgacccctacatggcgggtgtactctaccggcagcaacgtgttccagacaagagccggatgcctgatcggagcagagcacgtgaacaatagctatgagtgcgacatccctatcggcgccggcatctgtgccagctaccagacccagacaaactccccatctggagcaggctccgtggccagccagtccatcatcgcctataccatgagcctgggcgccgagaacagcgtggcctactccaacaattctatcgccatccctaccaacttcacaatcagcgtgaccacagagatcctgccagtgtctatgaccaagacaagcgtggactgcacaatgtatatctgtggcgatagcaccgagtgctccaacctgctgctgcagtacggctccttttgtacccagctgaatagagccctgacaggcatcgccgtggagcaggataagaacacacaggaggtgttcgcccaggtgaagcagatctacaagaccccacccatcaaggactttggcggcttcaacttcagccagatcctgcctgatccaagcaagccctccaagaggtcttttatcgaggacctgctgttcaacaaggtgaccctggccgatgccggcttcatcaagcagtatggagattgcctgggagacatcgcagcccgcgacctgatctgtgcccagaagtttaatggcctgaccgtgctgcctccactgctgacagatgagatgatcgcccagtacacatctgccctgctggccggcaccatcacaagcggatggaccttcggcgcaggagccgccctgcagatcccttttgccatgcagatggcctataggttcaacggcatcggcgtgacccagaatgtgctgtacgagaaccagaagctgatcgccaatcagtttaacagcgccatcggcaagatccaggactctctgtcctctacagccagcgccctgggcaagctgcaggatgtggtgaatcagaacgcccaggccctgaataccctggtgaagcagctgagctccaacttcggcgccatctctagcgtgctgaatgacatcctgagccggctggacccccctgaggcagaggtgcagatcgacaggctgatcacaggccgcctgcagagcctgcagacctacgtgacacagcagctgatcagggcagcagagatcagagcctccgccaatctggccgccaccaagatgagcgagtgcgtgctgggacagtccaagagggtggacttttgtggcaagggctatcacctgatgtctttcccacagagcgcccctcacggcgtggtgtttctgcacgtgacctacgtgccagcccaggagaagaacttcaccacagcaccagccatctgccacgatggaaaggcacactttcctagggagggcgtgttcgtgtctaacggcacccactggtttgtgacacagcgcaatttctacgagccacagatcatcaccacagacaatacattcgtgagcggcaactgtgatgtggtgatcggcatcgtgaacaataccgtgtatgatccactgcagcccgagctggactcctttaaggaggagctggataagtacttcaagaatcacacctctcccgacgtggatctgggcgacatctccggcatcaatgcctctgtggtgaacatccagaaggagatcgaccggctgaacgaggtggccaagaatctgaacgagagcctgatcgatctgcaggagctgggcaagtatgagcagtacatcaagggctctggcagagagaacctgtatttccagggaggaggaggcagcggatacatccctgaggcaccaagggacggacaggcctacgtgcgcaaggatggcgagtgggtgctgctgtccacctttctgggccatcatcaccaccaccaccaccactga

SEQ ID NO: 5215 - DNA, 3846 bp, Artificial Sequence
  Description of Artificial Sequence: Synthetic polynucleotide
atgggcatcctgccaagcccaggaatgcccgccctgctgtctctggtgagcctgctgtccgtgctgctgatgggatgcgtggcagagacaggcacacagtgcgtgaacctgaccacaaggacccagctgccccctgcctataccaattctttcacacggggcgtgtactatcccgacaaggtgtttagaagctccgtgctgcactccacacaggatctgtttctgcctttcttttctaacgtgacctggttccacgccatccacgtgtccggcaccaatggcacaaagcggttcgacaatcccgtgctgccttttaacgatggcgtgtacttcgccagcaccgagaagtccaacatcatcagaggctggatctttggcaccacactggactctaagacacagagcctgctgatcgtgaacaatgccaccaacgtggtgatcaaggtgtgcgagttccagttttgtaatgatccattcctgggcgtgtactatcacaagaacaataagtcctggatggagtctgagtttcgcgtgtattctagcgccaacaattgcacatttgagtacgtgagccagcccttcctgatggacctggagggcaagcagggcaatttcaagaacctgagggagttcgtgtttaagaatatcgatggctacttcaagatctacagcaagcacaccccaatcaacctggtgcgcgacctgccacagggattctccgccctggagccactggtggatctgcccatcggcatcaacatcacccggtttcagacactgctggccctgcacagatcctacctgacaccaggcgactcctctagcggatggaccgcaggagctgccgcctactatgtgggctatctgcagccccggaccttcctgctgaagtacaacgagaatggcaccatcacagacgcagtggattgcgccctggaccccctgtctgagacaaagtgtacactgaagagctttaccgtggagaagggcatctatcagacaagcaatttcagggtgcagcctaccgagtccatcgtgcgctttcccaatatcacaaacctgtgcccttttggcgaggtgttcaacgccaccagattcgccagcgtgtacgcctggaatcggaagagaatctccaactgcgtggccgactattctgtgctgtacaactccgcctctttcagcacctttaagtgctatggcgtgtctcccacaaagctgaatgatctgtgctttaccaacgtgtacgccgatagcttcgtgatcaggggagacgaagtgagacagatcgcaccaggacagacaggaaagatcgcagactacaattataagctgcctgacgatttcaccggctgcgtgatcgcctggaactccaacaatctggattctaaagtgggcggcaactacaattatctgtacaggctgtttcgcaagtccaatctgaagccattcgagcgggacatctccacacgtatctaccaggccggctctaccccctgcaatggcgtggagggctttaactgttatttccctctgcagtcttacggcttccagccaacaaacggcgtgggctatcagccctacagagtggtggtgctgtcctttgagctgctgcacgcaccagcaacagtgtgcggcccaaagaagtctaccaatctggtgaagaacaagtgcgtgaacttcaacttcaacggactgaccggcacaggcgtgctgaccgagagcaataagaagttcctgccttttcagcagttcggcagggacatcgcagataccacagacgccgtgcgcgaccctcagaccctggagatcctggacatcacaccatgcagcttcggcggcgtgtccgtgatcacaccaggcaccaatacatccaaccaggtggccgtgctgtatcaggacgtgaattgtaccgaggtgcccgtggcaatccacgcagatcagctgacccctacatggcgggtgtactctaccggcagcaacgtgttccagacaagagccggatgcctgatcggagcagagcacgtgaacaatagctatgagtgcgacatccctatcggcgccggcatctgtgccagctaccagacccagacaaactccccatctggagcaggctccgtggccagccagtccatcatcgcctataccatgagcctgggcgccgagaacagcgtggcctactccaacaattctatcgccatccctaccaacttcacaatcagcgtgaccacagagatcctgccagtgtctatgaccaagacaagcgtggactgcacaatgtatatctgtggcgatagcaccgagtgctccaacctgctgctgcagtacggctccttttgtacccagctgaatagagccctgacaggcatcgccgtggagcaggataagaacacacaggaggtgttcgcccaggtgaagcagatctacaagaccccacccatcaaggactttggcggcttcaacttcagccagatcctgcctgatccaagcaagccctccaagaggtcttttatcgaggacctgctgttcaacaaggtgaccctggccgatgccggcttcatcaagcagtatggagattgcctgggagacatcgcagcccgcgacctgatctgtgcccagaagtttaatggcctgaccgtgctgcctccactgctgacagatgagatgatcgcccagtacacatctgccctgctggccggcaccatcacaagcggatggaccttcggcgcaggagccgccctgcagatcccttttgccatgcagatggcctataggttcaacggcatcggcgtgacccagaatgtgctgtacgagaaccagaagctgatcgccaatcagtttaacagcgccatcggcaagatccaggactctctgtcctctacagccagcgccctgggcaagctgcaggatgtggtgaatcagaacgcccaggccctgaataccctggtgaagcagctgagctccaacttcggcgccatctctagcgtgctgaatgacatcctgagccggctggacccccctgaggcagaggtgcagatcgacaggctgatcacaggccgcctgcagagcctgcagacctacgtgacacagcagctgatcagggcagcagagatcagagcctccgccaatctggccgccaccaagatgagcgagtgcgtgctgggacagtccaagagggtggacttttgtggcaagggctatcacctgatgtctttcccacagagcgcccctcacggcgtggtgtttctgcacgtgacctacgtgccagcccaggagaagaacttcaccacagcaccagccatctgccacgatggaaaggcacactttcctagggagggcgtgttcgtgtctaacggcacccactggtttgtgacacagcgcaatttctacgagccacagatcatcaccacagacaatacattcgtgagcggcaactgtgatgtggtgatcggcatcgtgaacaataccgtgtatgatccactgcagcccgagctggactcctttaaggaggagctggataagtacttcaagaatcacacctctcccgacgtggatctgggcgacatctccggcatcaatgcctctgtggtgaacatccagaaggagatcgaccggctgaacgaggtggccaagaatctgaacgagagcctgatcgatctgcaggagctgggcaagtatgagcagtacatcaagggctctggcagagagaacctgtatttccagggaggaggaggcagcggatacatccctgaggcaccaagggacggacaggcctacgtgcgcaaggatggcgagtgggtgctgctgtccacctttctgggccatcatcaccaccaccaccaccactga

SEQ ID NO: 5216 - DNA, 3846 bp, Artificial Sequence
  Description of Artificial Sequence: Synthetic polynucleotide
atgggcatcctgccaagcccaggaatgcccgccctgctgtctctggtgagcctgctgtccgtgctgctgatgggatgcgtggcagagacaggcacacagtgcgtgaacctgaccacaaggacccagctgccccctgcctataccaattctttcacacggggcgtgtactatcccgacaaggtgtttagaagctccgtgctgcactccacacaggatctgtttctgcctttcttttctaacgtgacctggttccacgccatccacgtgtccggcaccaatggcacaaagcggttcgacaatcccgtgctgccttttaacgatggcgtgtacttcgccagcaccgagaagtccaacatcatcagaggctggatctttggcaccacactggactctaagacacagagcctgctgatcgtgaacaatgccaccaacgtggtgatcaaggtgtgcgagttccagttttgtaatgatccattcctgggcgtgtactatcacaagaacaataagtcctggatggagtctgagtttcgcgtgtattctagcgccaacaattgcacatttgagtacgtgagccagcccttcctgatggacctggagggcaagcagggcaatttcaagaacctgagggagttcgtgtttaagaatatcgatggctacttcaagatctacagcaagcacaccccaatcaacctggtgcgcgacctgccacagggattctccgccctggagccactggtggatctgcccatcggcatcaacatcacccggtttcagacactgctggccctgcacagatcctacctgacaccaggcgactcctctagcggatggaccgcaggagctgccgcctactatgtgggctatctgcagccccggaccttcctgctgaagtacaacgagaatggcaccatcacagacgcagtggattgcgccctggaccccctgtctgagacaaagtgtacactgaagagctttaccgtggagaagggcatctatcagacaagcaatttcagggtgcagcctaccgagtccatcgtgcgctttcccaatatcacaaacctgtgcccttttggcgaggtgttcaacgccaccagattcgccagcgtgtacgcctggaatcggaagagaatctccaactgcgtggccgactattctgtgctgtacaactccgcctctttcagcacctttaagtgctatggcgtgtctcccacaaagctgaatgatctgtgctttaccaacgtgtacgccgatagcttcgtgatcaggggagacgaagtgagacagatcgcaccaggacagacaggaaagatcgcagactacaattataagctgcctgacgatttcaccggctgcgtgatcgcctggaactccaacaatctggattctaaagtgggcggcaactacaattatctgtacaggctgtttcgcaagtccaatctgaagccattcgagcgggacatctccacagagcattaccaggccggctctaccccctgcaatggcgtggagggctttaactgttatttccctctgcagtcttacggcttccagccaacaaacggcgtgggctatcagccctacagagtggtggtgctgtcctttgagctgctgcacgcaccagcaacagtgtgcggcccaaagaagtctaccaatctggtgaagaacaagtgcgtgaacttcaacttcaacggactgaccggcacaggcgtgctgaccgagagcaataagaagttcctgccttttcagcagttcggcagggacatcgcagataccacagacgccgtgcgcgaccctcagaccctggagatcctggacatcacaccatgcagcttcggcggcgtgtccgtgatcacaccaggcaccaatacatccaaccaggtggccgtgctgtatcaggacgtgaattgtaccgaggtgcccgtggcaatccacgcagatcagctgacccctacatggcgggtgtactctaccggcagcaacgtgttccagacaagagccggatgcctgatcggagcagagcacgtgaacaatagctatgagtgcgacatccctatcggcgccggcatctgtgccagctaccagacccagacaaactccccatctggagcaggctccgtggccagccagtccatcatcgcctataccatgagcctgggcgccgagaacagcgtggcctactccaacaattctatcgccatccctaccaacttcacaatcagcgtgaccacagagatcctgccagtgtctatgaccaagacaagcgtggactgcacaatgtatatctgtggcgatagcaccgagtgctccaacctgctgctgcagtacggctccttttgtacccagctgaatagagccctgacaggcatcgccgtggagcaggataagaacacacaggaggtgttcgcccaggtgaagcagatctacaagaccccacccatcaaggactttggcggcttcaacttcagccagatcctgcctgatccaagcaagccctccaagaggtcttttatcgaggacctgctgttcaacaaggtgaccctggccgatgccggcttcatcaagcagtatggagattgcctgggagacatcgcagcccgcgacctgatctgtgcccagaagtttaatggcctgaccgtgctgcctccactgctgacagatgagatgatcgcccagtacacatctgccctgctggccggcaccatcacaagcggatggaccttcggcgcaggagccgccctgcagatcccttttgccatgcagatggcctataggttcaacggcatcggcgtgacccagaatgtgctgtacgagaaccagaagctgatcgccaatcagtttaacagcgccatcggcaagatccaggactctctgtcctctacagccagcgccctgggcaagctgcaggatgtggtgaatcagaacgcccaggccctgaataccctggtgaagcagctgagctccaacttcggcgccatctctagcgtgctgaatgacatcctgagccggctggacccccctgaggcagaggtgcagatcgacaggctgatcacaggccgcctgcagagcctgcagacctacgtgacacagcagctgatcagggcagcagagatcagagcctccgccaatctggccgccaccaagatgagcgagtgcgtgctgggacagtccaagagggtggacttttgtggcaagggctatcacctgatgtctttcccacagagcgcccctcacggcgtggtgtttctgcacgtgacctacgtgccagcccaggagaagaacttcaccacagcaccagccatctgccacgatggaaaggcacactttcctagggagggcgtgttcgtgtctaacggcacccactggtttgtgacacagcgcaatttctacgagccacagatcatcaccacagacaatacattcgtgagcggcaactgtgatgtggtgatcggcatcgtgaacaataccgtgtatgatccactgcagcccgagctggactcctttaaggaggagctggataagtacttcaagaatcacacctctcccgacgtggatctgggcgacatctccggcatcaatgcctctgtggtgaacatccagaaggagatcgaccggctgaacgaggtggccaagaatctgaacgagagcctgatcgatctgcaggagctgggcaagtatgagcagtacatcaagggctctggcagagagaacctgtatttccagggaggaggaggcagcggatacatccctgaggcaccaagggacggacaggcctacgtgcgcaaggatggcgagtgggtgctgctgtccacctttctgggccatcatcaccaccaccaccaccactga

SEQ ID NO: 5217 - DNA, 3846 bp, Artificial Sequence
  Description of Artificial Sequence: Synthetic polynucleotide
atgggcatcctgccaagcccaggaatgcccgccctgctgtctctggtgagcctgctgtccgtgctgctgatgggatgcgtggcagagacaggcacacagtgcgtgaacctgaccacaaggacccagctgccccctgcctataccaattctttcacacggggcgtgtactatcccgacaaggtgtttagaagctccgtgctgcactccacacaggatctgtttctgcctttcttttctaacgtgacctggttccacgccatccacgtgtccggcaccaatggcacaaagcggttcgacaatcccgtgctgccttttaacgatggcgtgtacttcgccagcaccgagaagtccaacatcatcagaggctggatctttggcaccacactggactctaagacacagagcctgctgatcgtgaacaatgccaccaacgtggtgatcaaggtgtgcgagttccagttttgtaatgatccattcctgggcgtgtactatcacaagaacaataagtcctggatggagtctgagtttcgcgtgtattctagcgccaacaattgcacatttgagtacgtgagccagcccttcctgatggacctggagggcaagcagggcaatttcaagaacctgagggagttcgtgtttaagaatatcgatggctacttcaagatctacagcaagcacaccccaatcaacctggtgcgcgacctgccacagggattctccgccctggagccactggtggatctgcccatcggcatcaacatcacccggtttcagacactgctggccctgcacagatcctacctgacaccaggcgactcctctagcggatggaccgcaggagctgccgcctactatgtgggctatctgcagccccggaccttcctgctgaagtacaacgagaatggcaccatcacagacgcagtggattgcgccctggaccccctgtctgagacaaagtgtacactgaagagctttaccgtggagaagggcatctatcagacaagcaatttcagggtgcagcctaccgagtccatcgtgcgctttcccaatatcacaaacctgtgcccttttggcgaggtgttcaacgccaccagattcgccagcgtgtacgcctggaatcggaagagaatctccaactgcgtggccgactattctgtgctgtacaactccgcctctttcagcacctttaagtgctatggcgtgtctcccacaaagctgaatgatctgtgctttaccaacgtgtacgccgatagcttcgtgatcaggggagacgaagtgagacagatcgcaccaggacagacaggaaagatcgcagactacaattataagctgcctgacgatttcaccggctgcgtgatcgcctggaactccaacaatctggattctaaagtgggcggcaactacaattatctgtacaggctgtttcgcaagtccaatctgaagccattcgagcgggacatctccgacgagatctaccaggccggctctaccccctgcaatggcgtggagggctttaactgttatttccctctgcagtcttacggcttccagccaacaaacggcgtgggctatcagccctacagagtggtggtgctgtcctttgagctgctgcacgcaccagcaacagtgtgcggcccaaagaagtctaccaatctggtgaagaacaagtgcgtgaacttcaacttcaacggactgaccggcacaggcgtgctgaccgagagcaataagaagttcctgccttttcagcagttcggcagggacatcgcagataccacagacgccgtgcgcgaccctcagaccctggagatcctggacatcacaccatgcagcttcggcggcgtgtccgtgatcacaccaggcaccaatacatccaaccaggtggccgtgctgtatcaggacgtgaattgtaccgaggtgcccgtggcaatccacgcagatcagctgacccctacatggcgggtgtactctaccggcagcaacgtgttccagacaagagccggatgcctgatcggagcagagcacgtgaacaatagctatgagtgcgacatccctatcggcgccggcatctgtgccagctaccagacccagacaaactccccatctggagcaggctccgtggccagccagtccatcatcgcctataccatgagcctgggcgccgagaacagcgtggcctactccaacaattctatcgccatccctaccaacttcacaatcagcgtgaccacagagatcctgccagtgtctatgaccaagacaagcgtggactgcacaatgtatatctgtggcgatagcaccgagtgctccaacctgctgctgcagtacggctccttttgtacccagctgaatagagccctgacaggcatcgccgtggagcaggataagaacacacaggaggtgttcgcccaggtgaagcagatctacaagaccccacccatcaaggactttggcggcttcaacttcagccagatcctgcctgatccaagcaagccctccaagaggtcttttatcgaggacctgctgttcaacaaggtgaccctggccgatgccggcttcatcaagcagtatggagattgcctgggagacatcgcagcccgcgacctgatctgtgcccagaagtttaatggcctgaccgtgctgcctccactgctgacagatgagatgatcgcccagtacacatctgccctgctggccggcaccatcacaagcggatggaccttcggcgcaggagccgccctgcagatcccttttgccatgcagatggcctataggttcaacggcatcggcgtgacccagaatgtgctgtacgagaaccagaagctgatcgccaatcagtttaacagcgccatcggcaagatccaggactctctgtcctctacagccagcgccctgggcaagctgcaggatgtggtgaatcagaacgcccaggccctgaataccctggtgaagcagctgagctccaacttcggcgccatctctagcgtgctgaatgacatcctgagccggctggacccccctgaggcagaggtgcagatcgacaggctgatcacaggccgcctgcagagcctgcagacctacgtgacacagcagctgatcagggcagcagagatcagagcctccgccaatctggccgccaccaagatgagcgagtgcgtgctgggacagtccaagagggtggacttttgtggcaagggctatcacctgatgtctttcccacagagcgcccctcacggcgtggtgtttctgcacgtgacctacgtgccagcccaggagaagaacttcaccacagcaccagccatctgccacgatggaaaggcacactttcctagggagggcgtgttcgtgtctaacggcacccactggtttgtgacacagcgcaatttctacgagccacagatcatcaccacagacaatacattcgtgagcggcaactgtgatgtggtgatcggcatcgtgaacaataccgtgtatgatccactgcagcccgagctggactcctttaaggaggagctggataagtacttcaagaatcacacctctcccgacgtggatctgggcgacatctccggcatcaatgcctctgtggtgaacatccagaaggagatcgaccggctgaacgaggtggccaagaatctgaacgagagcctgatcgatctgcaggagctgggcaagtatgagcagtacatcaagggctctggcagagagaacctgtatttccagggaggaggaggcagcggatacatccctgaggcaccaagggacggacaggcctacgtgcgcaaggatggcgagtgggtgctgctgtccacctttctgggccatcatcaccaccaccaccaccactga

SEQ ID NO: 5218 - DNA, 3846 bp, Artificial Sequence
  Description of Artificial Sequence: Synthetic polynucleotide
atgggcatcctgccaagcccaggaatgcccgccctgctgtctctggtgagcctgctgtccgtgctgctgatgggatgcgtggcagagacaggcacacagtgcgtgaacctgaccacaaggacccagctgccccctgcctataccaattctttcacacggggcgtgtactatcccgacaaggtgtttagaagctccgtgctgcactccacacaggatctgtttctgcctttcttttctaacgtgacctggttccacgccatccacgtgtccggcaccaatggcacaaagcggttcgacaatcccgtgctgccttttaacgatggcgtgtacttcgccagcaccgagaagtccaacatcatcagaggctggatctttggcaccacactggactctaagacacagagcctgctgatcgtgaacaatgccaccaacgtggtgatcaaggtgtgcgagttccagttttgtaatgatccattcctgggcgtgtactatcacaagaacaataagtcctggatggagtctgagtttcgcgtgtattctagcgccaacaattgcacatttgagtacgtgagccagcccttcctgatggacctggagggcaagcagggcaatttcaagaacctgagggagttcgtgtttaagaatatcgatggctacttcaagatctacagcaagcacaccccaatcaacctggtgcgcgacctgccacagggattctccgccctggagccactggtggatctgcccatcggcatcaacatcacccggtttcagacactgctggccctgcacagatcctacctgacaccaggcgactcctctagcggatggaccgcaggagctgccgcctactatgtgggctatctgcagccccggaccttcctgctgaagtacaacgagaatggcaccatcacagacgcagtggattgcgccctggaccccctgtctgagacaaagtgtacactgaagagctttaccgtggagaagggcatctatcagacaagcaatttcagggtgcagcctaccgagtccatcgtgcgctttcccaatatcacaaacctgtgcccttttggcgaggtgttcaacgccaccagattcgccagcgtgtacgcctggaatcggaagagaatctccaactgcgtggccgactattctaaactgtacaactccgcctctttcagcacctttaagtgctatggcgtgtctcccacaaagctgaatgatctgtgctttaccaacgtgtacgccgatagcttcgtgatcaggggagacgaagtgagacagatcgcaccaggacagacaggaaagatcgcagactacaattataagctgcctgacgatttcaccggctgcgtgatcgcctggaactccaacaatctggattctaaagtgggcggcaactacaattatctgtacaggctgtttcgcaagtccaatctgaagccattcgagcgggacatctccacagagatctaccaggccggctctaccccctgcaatggcgtggagggctttaactgttatttccctctgcagtcttacggcttccagccaacaaacggcgtgggctatcagccctacagagtggtggtgctgtcctttgagctgctgcacgcaccagcaacagtgtgcggcccaaagaagtctaccaatctggtgaagaacaagtgcgtgaacttcaacttcaacggactgaccggcacaggcgtgctgaccgagagcaataagaagttcctgccttttcagcagttcggcagggacatcgcagataccacagacgccgtgcgcgaccctcagaccctggagatcctggacatcacaccatgcagcttcggcggcgtgtccgtgatcacaccaggcaccaatacatccaaccaggtggccgtgctgtatcaggacgtgaattgtaccgaggtgcccgtggcaatccacgcagatcagctgacccctacatggcgggtgtactctaccggcagcaacgtgttccagacaagagccggatgcctgatcggagcagagcacgtgaacaatagctatgagtgcgacatccctatcggcgccggcatctgtgccagctaccagacccagacaaactccccatctggagcaggctccgtggccagccagtccatcatcgcctataccatgagcctgggcgccgagaacagcgtggcctactccaacaattctatcgccatccctaccaacttcacaatcagcgtgaccacagagatcctgccagtgtctatgaccaagacaagcgtggactgcacaatgtatatctgtggcgatagcaccgagtgctccaacctgctgctgcagtacggctccttttgtacccagctgaatagagccctgacaggcatcgccgtggagcaggataagaacacacaggaggtgttcgcccaggtgaagcagatctacaagaccccacccatcaaggactttggcggcttcaacttcagccagatcctgcctgatccaagcaagccctccaagaggtcttttatcgaggacctgctgttcaacaaggtgaccctggccgatgccggcttcatcaagcagtatggagattgcctgggagacatcgcagcccgcgacctgatctgtgcccagaagtttaatggcctgaccgtgctgcctccactgctgacagatgagatgatcgcccagtacacatctgccctgctggccggcaccatcacaagcggatggaccttcggcgcaggagccgccctgcagatcccttttgccatgcagatggcctataggttcaacggcatcggcgtgacccagaatgtgctgtacgagaaccagaagctgatcgccaatcagtttaacagcgccatcggcaagatccaggactctctgtcctctacagccagcgccctgggcaagctgcaggatgtggtgaatcagaacgcccaggccctgaataccctggtgaagcagctgagctccaacttcggcgccatctctagcgtgctgaatgacatcctgagccggctggacccccctgaggcagaggtgcagatcgacaggctgatcacaggccgcctgcagagcctgcagacctacgtgacacagcagctgatcagggcagcagagatcagagcctccgccaatctggccgccaccaagatgagcgagtgcgtgctgggacagtccaagagggtggacttttgtggcaagggctatcacctgatgtctttcccacagagcgcccctcacggcgtggtgtttctgcacgtgacctacgtgccagcccaggagaagaacttcaccacagcaccagccatctgccacgatggaaaggcacactttcctagggagggcgtgttcgtgtctaacggcacccactggtttgtgacacagcgcaatttctacgagccacagatcatcaccacagacaatacattcgtgagcggcaactgtgatgtggtgatcggcatcgtgaacaataccgtgtatgatccactgcagcccgagctggactcctttaaggaggagctggataagtacttcaagaatcacacctctcccgacgtggatctgggcgacatctccggcatcaatgcctctgtggtgaacatccagaaggagatcgaccggctgaacgaggtggccaagaatctgaacgagagcctgatcgatctgcaggagctgggcaagtatgagcagtacatcaagggctctggcagagagaacctgtatttccagggaggaggaggcagcggatacatccctgaggcaccaagggacggacaggcctacgtgcgcaaggatggcgagtgggtgctgctgtccacctttctgggccatcatcaccaccaccaccaccactga

SEQ ID NO: 5219 - DNA, 3846 bp, Artificial Sequence
  Description of Artificial Sequence: Synthetic polynucleotide
atgggcatcctgccaagcccaggaatgcccgccctgctgtctctggtgagcctgctgtccgtgctgctgatgggatgcgtggcagagacaggcacacagtgcgtgaacctgaccacaaggacccagctgccccctgcctataccaattctttcacacggggcgtgtactatcccgacaaggtgtttagaagctccgtgctgcactccacacaggatctgtttctgcctttcttttctaacgtgacctggttccacgccatccacgtgtccggcaccaatggcacaaagcggttcgacaatcccgtgctgccttttaacgatggcgtgtacttcgccagcaccgagaagtccaacatcatcagaggctggatctttggcaccacactggactctaagacacagagcctgctgatcgtgaacaatgccaccaacgtggtgatcaaggtgtgcgagttccagttttgtaatgatccattcctgggcgtgtactatcacaagaacaataagtcctggatggagtctgagtttcgcgtgtattctagcgccaacaattgcacatttgagtacgtgagccagcccttcctgatggacctggagggcaagcagggcaatttcaagaacctgagggagttcgtgtttaagaatatcgatggctacttcaagatctacagcaagcacaccccaatcaacctggtgcgcgacctgccacagggattctccgccctggagccactggtggatctgcccatcggcatcaacatcacccggtttcagacactgctggccctgcacagatcctacctgacaccaggcgactcctctagcggatggaccgcaggagctgccgcctactatgtgggctatctgcagccccggaccttcctgctgaagtacaacgagaatggcaccatcacagacgcagtggattgcgccctggaccccctgtctgagacaaagtgtacactgaagagctttaccgtggagaagggcatctatcagacaagcaatttcagggtgcagcctaccgagtccatcgtgcgctttcccaatatcacaaacctgtgcccttttggcgaggtgttcaacgccaccagattcgccagcgtgtacgcctggaatcggaagagaatctccaactgcgtggccgactattctactctgtacaactccgcctctttcagcacctttaagtgctatggcgtgtctcccacaaagctgaatgatctgtgctttaccaacgtgtacgccgatagcttcgtgatcaggggagacgaagtgagacagatcgcaccaggacagacaggaaagatcgcagactacaattataagctgcctgacgatttcaccggctgcgtgatcgcctggaactccaacaatctggattctaaagtgggcggcaactacaattatctgtacaggctgtttcgcaagtccaatctgaagccattcgagcgggacatctccacagagatctaccaggccggctctaccccctgcaatggcgtggagggctttaactgttatttccctctgcagtcttacggcttccagccaacaaacggcgtgggctatcagccctacagagtggtggtgctgtcctttgagctgctgcacgcaccagcaacagtgtgcggcccaaagaagtctaccaatctggtgaagaacaagtgcgtgaacttcaacttcaacggactgaccggcacaggcgtgctgaccgagagcaataagaagttcctgccttttcagcagttcggcagggacatcgcagataccacagacgccgtgcgcgaccctcagaccctggagatcctggacatcacaccatgcagcttcggcggcgtgtccgtgatcacaccaggcaccaatacatccaaccaggtggccgtgctgtatcaggacgtgaattgtaccgaggtgcccgtggcaatccacgcagatcagctgacccctacatggcgggtgtactctaccggcagcaacgtgttccagacaagagccggatgcctgatcggagcagagcacgtgaacaatagctatgagtgcgacatccctatcggcgccggcatctgtgccagctaccagacccagacaaactccccatctggagcaggctccgtggccagccagtccatcatcgcctataccatgagcctgggcgccgagaacagcgtggcctactccaacaattctatcgccatccctaccaacttcacaatcagcgtgaccacagagatcctgccagtgtctatgaccaagacaagcgtggactgcacaatgtatatctgtggcgatagcaccgagtgctccaacctgctgctgcagtacggctccttttgtacccagctgaatagagccctgacaggcatcgccgtggagcaggataagaacacacaggaggtgttcgcccaggtgaagcagatctacaagaccccacccatcaaggactttggcggcttcaacttcagccagatcctgcctgatccaagcaagccctccaagaggtcttttatcgaggacctgctgttcaacaaggtgaccctggccgatgccggcttcatcaagcagtatggagattgcctgggagacatcgcagcccgcgacctgatctgtgcccagaagtttaatggcctgaccgtgctgcctccactgctgacagatgagatgatcgcccagtacacatctgccctgctggccggcaccatcacaagcggatggaccttcggcgcaggagccgccctgcagatcccttttgccatgcagatggcctataggttcaacggcatcggcgtgacccagaatgtgctgtacgagaaccagaagctgatcgccaatcagtttaacagcgccatcggcaagatccaggactctctgtcctctacagccagcgccctgggcaagctgcaggatgtggtgaatcagaacgcccaggccctgaataccctggtgaagcagctgagctccaacttcggcgccatctctagcgtgctgaatgacatcctgagccggctggacccccctgaggcagaggtgcagatcgacaggctgatcacaggccgcctgcagagcctgcagacctacgtgacacagcagctgatcagggcagcagagatcagagcctccgccaatctggccgccaccaagatgagcgagtgcgtgctgggacagtccaagagggtggacttttgtggcaagggctatcacctgatgtctttcccacagagcgcccctcacggcgtggtgtttctgcacgtgacctacgtgccagcccaggagaagaacttcaccacagcaccagccatctgccacgatggaaaggcacactttcctagggagggcgtgttcgtgtctaacggcacccactggtttgtgacacagcgcaatttctacgagccacagatcatcaccacagacaatacattcgtgagcggcaactgtgatgtggtgatcggcatcgtgaacaataccgtgtatgatccactgcagcccgagctggactcctttaaggaggagctggataagtacttcaagaatcacacctctcccgacgtggatctgggcgacatctccggcatcaatgcctctgtggtgaacatccagaaggagatcgaccggctgaacgaggtggccaagaatctgaacgagagcctgatcgatctgcaggagctgggcaagtatgagcagtacatcaagggctctggcagagagaacctgtatttccagggaggaggaggcagcggatacatccctgaggcaccaagggacggacaggcctacgtgcgcaaggatggcgagtgggtgctgctgtccacctttctgggccatcatcaccaccaccaccaccactga

SEQ ID NO: 5220 - DNA, 3846 bp, Artificial Sequence
  Description of Artificial Sequence: Synthetic polynucleotide
atgggcatcctgccaagcccaggaatgcccgccctgctgtctctggtgagcctgctgtccgtgctgctgatgggatgcgtggcagagacaggcacacagtgcgtgaacctgaccacaaggacccagctgccccctgcctataccaattctttcacacggggcgtgtactatcccgacaaggtgtttagaagctccgtgctgcactccacacaggatctgtttctgcctttcttttctaacgtgacctggttccacgccatccacgtgtccggcaccaatggcacaaagcggttcgacaatcccgtgctgccttttaacgatggcgtgtacttcgccagcaccgagaagtccaacatcatcagaggctggatctttggcaccacactggactctaagacacagagcctgctgatcgtgaacaatgccaccaacgtggtgatcaaggtgtgcgagttccagttttgtaatgatccattcctgggcgtgtactatcacaagaacaataagtcctggatggagtctgagtttcgcgtgtattctagcgccaacaattgcacatttgagtacgtgagccagcccttcctgatggacctggagggcaagcagggcaatttcaagaacctgagggagttcgtgtttaagaatatcgatggctacttcaagatctacagcaagcacaccccaatcaacctggtgcgcgacctgccacagggattctccgccctggagccactggtggatctgcccatcggcatcaacatcacccggtttcagacactgctggccctgcacagatcctacctgacaccaggcgactcctctagcggatggaccgcaggagctgccgcctactatgtgggctatctgcagccccggaccttcctgctgaagtacaacgagaatggcaccatcacagacgcagtggattgcgccctggaccccctgtctgagacaaagtgtacactgaagagctttaccgtggagaagggcatctatcagacaagcaatttcagggtgcagcctaccgagtccatcgtgcgctttcccaatatcacaaacctgtgcccttttggcgaggtgttcaacgccaccagattcgccagcgtgtacgcctggaatcggaagagaatctccaactgcgtggccgactattctgtgctgtacaactccgcctctttcagcacctttaagtgctatggcgtgtctcccacaaagctgaatgatctgtgctttaccaacgtgtacgccgatagcttcgtgatcaggggagacgaagtgagacagatcgcaccaggacagacaggaaagatcgcagactacaattataagctgcctgacgatttcaccggctgcgtgatcgcctggaactcccgtaatctggattctaaagtgggcggcaactacaattatctgtacaggctgtttcgcaagtccaatctgaagccattcgagcgggacatctccacagagatctaccaggccggctctaccccctgcaatggcgtggagggctttaactgttatttccctctgcagtcttacggcttccagccaacaaacggcgtgggctatcagccctacagagtggtggtgctgtcctttgagctgctgcacgcaccagcaacagtgtgcggcccaaagaagtctaccaatctggtgaagaacaagtgcgtgaacttcaacttcaacggactgaccggcacaggcgtgctgaccgagagcaataagaagttcctgccttttcagcagttcggcagggacatcgcagataccacagacgccgtgcgcgaccctcagaccctggagatcctggacatcacaccatgcagcttcggcggcgtgtccgtgatcacaccaggcaccaatacatccaaccaggtggccgtgctgtatcaggacgtgaattgtaccgaggtgcccgtggcaatccacgcagatcagctgacccctacatggcgggtgtactctaccggcagcaacgtgttccagacaagagccggatgcctgatcggagcagagcacgtgaacaatagctatgagtgcgacatccctatcggcgccggcatctgtgccagctaccagacccagacaaactccccatctggagcaggctccgtggccagccagtccatcatcgcctataccatgagcctgggcgccgagaacagcgtggcctactccaacaattctatcgccatccctaccaacttcacaatcagcgtgaccacagagatcctgccagtgtctatgaccaagacaagcgtggactgcacaatgtatatctgtggcgatagcaccgagtgctccaacctgctgctgcagtacggctccttttgtacccagctgaatagagccctgacaggcatcgccgtggagcaggataagaacacacaggaggtgttcgcccaggtgaagcagatctacaagaccccacccatcaaggactttggcggcttcaacttcagccagatcctgcctgatccaagcaagccctccaagaggtcttttatcgaggacctgctgttcaacaaggtgaccctggccgatgccggcttcatcaagcagtatggagattgcctgggagacatcgcagcccgcgacctgatctgtgcccagaagtttaatggcctgaccgtgctgcctccactgctgacagatgagatgatcgcccagtacacatctgccctgctggccggcaccatcacaagcggatggaccttcggcgcaggagccgccctgcagatcccttttgccatgcagatggcctataggttcaacggcatcggcgtgacccagaatgtgctgtacgagaaccagaagctgatcgccaatcagtttaacagcgccatcggcaagatccaggactctctgtcctctacagccagcgccctgggcaagctgcaggatgtggtgaatcagaacgcccaggccctgaataccctggtgaagcagctgagctccaacttcggcgccatctctagcgtgctgaatgacatcctgagccggctggacccccctgaggcagaggtgcagatcgacaggctgatcacaggccgcctgcagagcctgcagacctacgtgacacagcagctgatcagggcagcagagatcagagcctccgccaatctggccgccaccaagatgagcgagtgcgtgctgggacagtccaagagggtggacttttgtggcaagggctatcacctgatgtctttcccacagagcgcccctcacggcgtggtgtttctgcacgtgacctacgtgccagcccaggagaagaacttcaccacagcaccagccatctgccacgatggaaaggcacactttcctagggagggcgtgttcgtgtctaacggcacccactggtttgtgacacagcgcaatttctacgagccacagatcatcaccacagacaatacattcgtgagcggcaactgtgatgtggtgatcggcatcgtgaacaataccgtgtatgatccactgcagcccgagctggactcctttaaggaggagctggataagtacttcaagaatcacacctctcccgacgtggatctgggcgacatctccggcatcaatgcctctgtggtgaacatccagaaggagatcgaccggctgaacgaggtggccaagaatctgaacgagagcctgatcgatctgcaggagctgggcaagtatgagcagtacatcaagggctctggcagagagaacctgtatttccagggaggaggaggcagcggatacatccctgaggcaccaagggacggacaggcctacgtgcgcaaggatggcgagtgggtgctgctgtccacctttctgggccatcatcaccaccaccaccaccactga

SEQ ID NO: 5221 - DNA, 3846 bp, Artificial Sequence
  Description of Artificial Sequence: Synthetic polynucleotide
atgggcatcctgccaagcccaggaatgcccgccctgctgtctctggtgagcctgctgtccgtgctgctgatgggatgcgtggcagagacaggcacacagtgcgtgaacctgaccacaaggacccagctgccccctgcctataccaattctttcacacggggcgtgtactatcccgacaaggtgtttagaagctccgtgctgcactccacacaggatctgtttctgcctttcttttctaacgtgacctggttccacgccatccacgtgtccggcaccaatggcacaaagcggttcgacaatcccgtgctgccttttaacgatggcgtgtacttcgccagcaccgagaagtccaacatcatcagaggctggatctttggcaccacactggactctaagacacagagcctgctgatcgtgaacaatgccaccaacgtggtgatcaaggtgtgcgagttccagttttgtaatgatccattcctgggcgtgtactatcacaagaacaataagtcctggatggagtctgagtttcgcgtgtattctagcgccaacaattgcacatttgagtacgtgagccagcccttcctgatggacctggagggcaagcagggcaatttcaagaacctgagggagttcgtgtttaagaatatcgatggctacttcaagatctacagcaagcacaccccaatcaacctggtgcgcgacctgccacagggattctccgccctggagccactggtggatctgcccatcggcatcaacatcacccggtttcagacactgctggccctgcacagatcctacctgacaccaggcgactcctctagcggatggaccgcaggagctgccgcctactatgtgggctatctgcagccccggaccttcctgctgaagtacaacgagaatggcaccatcacagacgcagtggattgcgccctggaccccctgtctgagacaaagtgtacactgaagagctttaccgtggagaagggcatctatcagacaagcaatttcagggtgcagcctaccgagtccatcgtgcgctttcccaatatcacaaacctgtgcccttttggcgaggtgttcaacgccaccagattcgccagcgtgtacgcctggaatcggaagagaatctccaactgcgtggccgactattctgtgctgtacaactccgcctctttcagcacctttaagtgctatggcgtgtctcccacaaagctgaatgatctgtgctttaccaacgtgtacgccgatagcttcgtgatcaggggagacgaagtgagacagatcgcaccaggacagacaggaaagatcgcagactacaattataagctgcctgacgatttcaccggctgcgtgatcgcctggaactccaacaatctggattctaaagtgggcggcaactacaattatctgtacaggctgtttcgcaagtccaatctgaagccattcgagcgggacatctccacagagatctaccaggccggctctaccccctgcaatggcgtggagggctttaactgttatttccctctgcagtcttacggcttccagccaacaaacggcgtgggctatcagccctacagagtggtggtgctggaatttgagctgctgcacgcaccagcaacagtgtgcggcccaaagaagtctaccaatctggtgaagaacaagtgcgtgaacttcaacttcaacggactgaccggcacaggcgtgctgaccgagagcaataagaagttcctgccttttcagcagttcggcagggacatcgcagataccacagacgccgtgcgcgaccctcagaccctggagatcctggacatcacaccatgcagcttcggcggcgtgtccgtgatcacaccaggcaccaatacatccaaccaggtggccgtgctgtatcaggacgtgaattgtaccgaggtgcccgtggcaatccacgcagatcagctgacccctacatggcgggtgtactctaccggcagcaacgtgttccagacaagagccggatgcctgatcggagcagagcacgtgaacaatagctatgagtgcgacatccctatcggcgccggcatctgtgccagctaccagacccagacaaactccccatctggagcaggctccgtggccagccagtccatcatcgcctataccatgagcctgggcgccgagaacagcgtggcctactccaacaattctatcgccatccctaccaacttcacaatcagcgtgaccacagagatcctgccagtgtctatgaccaagacaagcgtggactgcacaatgtatatctgtggcgatagcaccgagtgctccaacctgctgctgcagtacggctccttttgtacccagctgaatagagccctgacaggcatcgccgtggagcaggataagaacacacaggaggtgttcgcccaggtgaagcagatctacaagaccccacccatcaaggactttggcggcttcaacttcagccagatcctgcctgatccaagcaagccctccaagaggtcttttatcgaggacctgctgttcaacaaggtgaccctggccgatgccggcttcatcaagcagtatggagattgcctgggagacatcgcagcccgcgacctgatctgtgcccagaagtttaatggcctgaccgtgctgcctccactgctgacagatgagatgatcgcccagtacacatctgccctgctggccggcaccatcacaagcggatggaccttcggcgcaggagccgccctgcagatcccttttgccatgcagatggcctataggttcaacggcatcggcgtgacccagaatgtgctgtacgagaaccagaagctgatcgccaatcagtttaacagcgccatcggcaagatccaggactctctgtcctctacagccagcgccctgggcaagctgcaggatgtggtgaatcagaacgcccaggccctgaataccctggtgaagcagctgagctccaacttcggcgccatctctagcgtgctgaatgacatcctgagccggctggacccccctgaggcagaggtgcagatcgacaggctgatcacaggccgcctgcagagcctgcagacctacgtgacacagcagctgatcagggcagcagagatcagagcctccgccaatctggccgccaccaagatgagcgagtgcgtgctgggacagtccaagagggtggacttttgtggcaagggctatcacctgatgtctttcccacagagcgcccctcacggcgtggtgtttctgcacgtgacctacgtgccagcccaggagaagaacttcaccacagcaccagccatctgccacgatggaaaggcacactttcctagggagggcgtgttcgtgtctaacggcacccactggtttgtgacacagcgcaatttctacgagccacagatcatcaccacagacaatacattcgtgagcggcaactgtgatgtggtgatcggcatcgtgaacaataccgtgtatgatccactgcagcccgagctggactcctttaaggaggagctggataagtacttcaagaatcacacctctcccgacgtggatctgggcgacatctccggcatcaatgcctctgtggtgaacatccagaaggagatcgaccggctgaacgaggtggccaagaatctgaacgagagcctgatcgatctgcaggagctgggcaagtatgagcagtacatcaagggctctggcagagagaacctgtatttccagggaggaggaggcagcggatacatccctgaggcaccaagggacggacaggcctacgtgcgcaaggatggcgagtgggtgctgctgtccacctttctgggccatcatcaccaccaccaccaccactga

SEQ ID NO: 5222 - DNA, 3846 bp, Artificial Sequence
  Description of Artificial Sequence: Synthetic polynucleotide
atgggcatcctgccaagcccaggaatgcccgccctgctgtctctggtgagcctgctgtccgtgctgctgatgggatgcgtggcagagacaggcacacagtgcgtgaacctgaccacaaggacccagctgccccctgcctataccaattctttcacacggggcgtgtactatcccgacaaggtgtttagaagctccgtgctgcactccacacaggatctgtttctgcctttcttttctaacgtgacctggttccacgccatccacgtgtccggcaccaatggcacaaagcggttcgacaatcccgtgctgccttttaacgatggcgtgtacttcgccagcaccgagaagtccaacatcatcagaggctggatctttggcaccacactggactctaagacacagagcctgctgatcgtgaacaatgccaccaacgtggtgatcaaggtgtgcgagttccagttttgtaatgatccattcctgggcgtgtactatcacaagaacaataagtcctggatggagtctgagtttcgcgtgtattctagcgccaacaattgcacatttgagtacgtgagccagcccttcctgatggacctggagggcaagcagggcaatttcaagaacctgagggagttcgtgtttaagaatatcgatggctacttcaagatctacagcaagcacaccccaatcaacctggtgcgcgacctgccacagggattctccgccctggagccactggtggatctgcccatcggcatcaacatcacccggtttcagacactgctggccctgcacagatcctacctgacaccaggcgactcctctagcggatggaccgcaggagctgccgcctactatgtgggctatctgcagccccggaccttcctgctgaagtacaacgagaatggcaccatcacagacgcagtggattgcgccctggaccccctgtctgagacaaagtgtacactgaagagctttaccgtggagaagggcatctatcagacaagcaatttcagggtgcagcctaccgagtccatcgtgcgctttcccaatatcacaaacctgtgcccttttggcgaggtgttcaacgccaccagattcgccagcgtgtacgcctggaatcggaagagaatctccaactgcgtggccgactattctgtgctgtacaactccgcctctttcagcacctttaagtgctatggcgtgtctcccacaaagctgaatgatctgtgctttaccaacgtgtacgccgatagcttcgtgatcaggggagacgaagtgagacagatcgcaccaggacagacaggaaagatcgcagactacaattataagctgcctgacgatttcaccggctgcgtgatcgcctggaactccaacaatctggattctaaagtgggcggcaactacaattatctgtacaggctgtttcgcaagtccaatctgaagccattcgagcgggacatctccacagagatctaccaggccggctctaccccctgcaatggcgtggagggctttaactgttatttccctctgcagtcttacggcttccagccaacaaacggcgtgggctatcagccctacagagtggtggtgctgtcctttgagctgctgtacgcaccagcaacagtgtgcggcccaaagaagtctaccaatctggtgaagaacaagtgcgtgaacttcaacttcaacggactgaccggcacaggcgtgctgaccgagagcaataagaagttcctgccttttcagcagttcggcagggacatcgcagataccacagacgccgtgcgcgaccctcagaccctggagatcctggacatcacaccatgcagcttcggcggcgtgtccgtgatcacaccaggcaccaatacatccaaccaggtggccgtgctgtatcaggacgtgaattgtaccgaggtgcccgtggcaatccacgcagatcagctgacccctacatggcgggtgtactctaccggcagcaacgtgttccagacaagagccggatgcctgatcggagcagagcacgtgaacaatagctatgagtgcgacatccctatcggcgccggcatctgtgccagctaccagacccagacaaactccccatctggagcaggctccgtggccagccagtccatcatcgcctataccatgagcctgggcgccgagaacagcgtggcctactccaacaattctatcgccatccctaccaacttcacaatcagcgtgaccacagagatcctgccagtgtctatgaccaagacaagcgtggactgcacaatgtatatctgtggcgatagcaccgagtgctccaacctgctgctgcagtacggctccttttgtacccagctgaatagagccctgacaggcatcgccgtggagcaggataagaacacacaggaggtgttcgcccaggtgaagcagatctacaagaccccacccatcaaggactttggcggcttcaacttcagccagatcctgcctgatccaagcaagccctccaagaggtcttttatcgaggacctgctgttcaacaaggtgaccctggccgatgccggcttcatcaagcagtatggagattgcctgggagacatcgcagcccgcgacctgatctgtgcccagaagtttaatggcctgaccgtgctgcctccactgctgacagatgagatgatcgcccagtacacatctgccctgctggccggcaccatcacaagcggatggaccttcggcgcaggagccgccctgcagatcccttttgccatgcagatggcctataggttcaacggcatcggcgtgacccagaatgtgctgtacgagaaccagaagctgatcgccaatcagtttaacagcgccatcggcaagatccaggactctctgtcctctacagccagcgccctgggcaagctgcaggatgtggtgaatcagaacgcccaggccctgaataccctggtgaagcagctgagctccaacttcggcgccatctctagcgtgctgaatgacatcctgagccggctggacccccctgaggcagaggtgcagatcgacaggctgatcacaggccgcctgcagagcctgcagacctacgtgacacagcagctgatcagggcagcagagatcagagcctccgccaatctggccgccaccaagatgagcgagtgcgtgctgggacagtccaagagggtggacttttgtggcaagggctatcacctgatgtctttcccacagagcgcccctcacggcgtggtgtttctgcacgtgacctacgtgccagcccaggagaagaacttcaccacagcaccagccatctgccacgatggaaaggcacactttcctagggagggcgtgttcgtgtctaacggcacccactggtttgtgacacagcgcaatttctacgagccacagatcatcaccacagacaatacattcgtgagcggcaactgtgatgtggtgatcggcatcgtgaacaataccgtgtatgatccactgcagcccgagctggactcctttaaggaggagctggataagtacttcaagaatcacacctctcccgacgtggatctgggcgacatctccggcatcaatgcctctgtggtgaacatccagaaggagatcgaccggctgaacgaggtggccaagaatctgaacgagagcctgatcgatctgcaggagctgggcaagtatgagcagtacatcaagggctctggcagagagaacctgtatttccagggaggaggaggcagcggatacatccctgaggcaccaagggacggacaggcctacgtgcgcaaggatggcgagtgggtgctgctgtccacctttctgggccatcatcaccaccaccaccaccactga

SEQ ID NO: 5223 - DNA, 3846 bp, Artificial Sequence
  Description of Artificial Sequence: Synthetic polynucleotide
atgggcatcctgccaagcccaggaatgcccgccctgctgtctctggtgagcctgctgtccgtgctgctgatgggatgcgtggcagagacaggcacacagtgcgtgaacctgaccacaaggacccagctgccccctgcctataccaattctttcacacggggcgtgtactatcccgacaaggtgtttagaagctccgtgctgcactccacacaggatctgtttctgcctttcttttctaacgtgacctggttccacgccatccacgtgtccggcaccaatggcacaaagcggttcgacaatcccgtgctgccttttaacgatggcgtgtacttcgccagcaccgagaagtccaacatcatcagaggctggatctttggcaccacactggactctaagacacagagcctgctgatcgtgaacaatgccaccaacgtggtgatcaaggtgtgcgagttccagttttgtaatgatccattcctgggcgtgtactatcacaagaacaataagtcctggatggagtctgagtttcgcgtgtattctagcgccaacaattgcacatttgagtacgtgagccagcccttcctgatggacctggagggcaagcagggcaatttcaagaacctgagggagttcgtgtttaagaatatcgatggctacttcaagatctacagcaagcacaccccaatcaacctggtgcgcgacctgccacagggattctccgccctggagccactggtggatctgcccatcggcatcaacatcacccggtttcagacactgctggccctgcacagatcctacctgacaccaggcgactcctctagcggatggaccgcaggagctgccgcctactatgtgggctatctgcagccccggaccttcctgctgaagtacaacgagaatggcaccatcacagacgcagtggattgcgccctggaccccctgtctgagacaaagtgtacactgaagagctttaccgtggagaagggcatctatcagacaagcaatttcagggtgcagcctaccgagtccatcgtgcgctttcccaatatcacaaacctgtgcccttttggcgaggtgttcaacgccaccagattcgccagcgtgtacgcctggaatcggaagagaatctccaactgcgtggccgactattctgtgctgtacaactccgcctctttcagcacctttaagtgctatggcgtgtctcccacaaagctgaatgatctgtgctttaccaacgtgtacgccgatagcttcgtgatcaggggagacgaagtgagacagatcgcaccaggacagacaggaaagatcgcagactacaattataagctgcctgacgatttcaccggctgcgtgatcgcctggaactccaacaatctggattctaaagtgggcggcaactacaattatctgtacaggctgtttcgcaagtccaatctgaagccattcgagcgggacatcaaaacagagatctaccaggccggctctaccccctgcaatggcgtggagggctttaactgttatttccctctgcagtcttacggcttccagccaacaaacggcgtgggctatcagccctacagagtggtggtgctgtcctttgagctgctgcacgcaccagcaacagtgtgcggcccaaagaagtctaccaatctggtgaagaacaagtgcgtgaacttcaacttcaacggactgaccggcacaggcgtgctgaccgagagcaataagaagttcctgccttttcagcagttcggcagggacatcgcagataccacagacgccgtgcgcgaccctcagaccctggagatcctggacatcacaccatgcagcttcggcggcgtgtccgtgatcacaccaggcaccaatacatccaaccaggtggccgtgctgtatcaggacgtgaattgtaccgaggtgcccgtggcaatccacgcagatcagctgacccctacatggcgggtgtactctaccggcagcaacgtgttccagacaagagccggatgcctgatcggagcagagcacgtgaacaatagctatgagtgcgacatccctatcggcgccggcatctgtgccagctaccagacccagacaaactccccatctggagcaggctccgtggccagccagtccatcatcgcctataccatgagcctgggcgccgagaacagcgtggcctactccaacaattctatcgccatccctaccaacttcacaatcagcgtgaccacagagatcctgccagtgtctatgaccaagacaagcgtggactgcacaatgtatatctgtggcgatagcaccgagtgctccaacctgctgctgcagtacggctccttttgtacccagctgaatagagccctgacaggcatcgccgtggagcaggataagaacacacaggaggtgttcgcccaggtgaagcagatctacaagaccccacccatcaaggactttggcggcttcaacttcagccagatcctgcctgatccaagcaagccctccaagaggtcttttatcgaggacctgctgttcaacaaggtgaccctggccgatgccggcttcatcaagcagtatggagattgcctgggagacatcgcagcccgcgacctgatctgtgcccagaagtttaatggcctgaccgtgctgcctccactgctgacagatgagatgatcgcccagtacacatctgccctgctggccggcaccatcacaagcggatggaccttcggcgcaggagccgccctgcagatcccttttgccatgcagatggcctataggttcaacggcatcggcgtgacccagaatgtgctgtacgagaaccagaagctgatcgccaatcagtttaacagcgccatcggcaagatccaggactctctgtcctctacagccagcgccctgggcaagctgcaggatgtggtgaatcagaacgcccaggccctgaataccctggtgaagcagctgagctccaacttcggcgccatctctagcgtgctgaatgacatcctgagccggctggacccccctgaggcagaggtgcagatcgacaggctgatcacaggccgcctgcagagcctgcagacctacgtgacacagcagctgatcagggcagcagagatcagagcctccgccaatctggccgccaccaagatgagcgagtgcgtgctgggacagtccaagagggtggacttttgtggcaagggctatcacctgatgtctttcccacagagcgcccctcacggcgtggtgtttctgcacgtgacctacgtgccagcccaggagaagaacttcaccacagcaccagccatctgccacgatggaaaggcacactttcctagggagggcgtgttcgtgtctaacggcacccactggtttgtgacacagcgcaatttctacgagccacagatcatcaccacagacaatacattcgtgagcggcaactgtgatgtggtgatcggcatcgtgaacaataccgtgtatgatccactgcagcccgagctggactcctttaaggaggagctggataagtacttcaagaatcacacctctcccgacgtggatctgggcgacatctccggcatcaatgcctctgtggtgaacatccagaaggagatcgaccggctgaacgaggtggccaagaatctgaacgagagcctgatcgatctgcaggagctgggcaagtatgagcagtacatcaagggctctggcagagagaacctgtatttccagggaggaggaggcagcggatacatccctgaggcaccaagggacggacaggcctacgtgcgcaaggatggcgagtgggtgctgctgtccacctttctgggccatcatcaccaccaccaccaccactga

SEQ ID NO: 5224 - DNA, 3846 bp, Artificial Sequence
  Description of Artificial Sequence: Synthetic polynucleotide
atgggcatcctgccaagcccaggaatgcccgccctgctgtctctggtgagcctgctgtccgtgctgctgatgggatgcgtggcagagacaggcacacagtgcgtgaacctgaccacaaggacccagctgccccctgcctataccaattctttcacacggggcgtgtactatcccgacaaggtgtttagaagctccgtgctgcactccacacaggatctgtttctgcctttcttttctaacgtgacctggttccacgccatccacgtgtccggcaccaatggcacaaagcggttcgacaatcccgtgctgccttttaacgatggcgtgtacttcgccagcaccgagaagtccaacatcatcagaggctggatctttggcaccacactggactctaagacacagagcctgctgatcgtgaacaatgccaccaacgtggtgatcaaggtgtgcgagttccagttttgtaatgatccattcctgggcgtgtactatcacaagaacaataagtcctggatggagtctgagtttcgcgtgtattctagcgccaacaattgcacatttgagtacgtgagccagcccttcctgatggacctggagggcaagcagggcaatttcaagaacctgagggagttcgtgtttaagaatatcgatggctacttcaagatctacagcaagcacaccccaatcaacctggtgcgcgacctgccacagggattctccgccctggagccactggtggatctgcccatcggcatcaacatcacccggtttcagacactgctggccctgcacagatcctacctgacaccaggcgactcctctagcggatggaccgcaggagctgccgcctactatgtgggctatctgcagccccggaccttcctgctgaagtacaacgagaatggcaccatcacagacgcagtggattgcgccctggaccccctgtctgagacaaagtgtacactgaagagctttaccgtggagaagggcatctatcagacaagcaatttcagggtgcagcctaccgagtccatcgtgcgctttcccaatatcacaaacctgtgcccttttggcgaggtgttcaacgccaccagattcgccagcgtgtacgcctggaatcggaagagaatctccaactgcgtggccgactattctgtgctgtacaactccgcctctttcagcacctttaagtgctatggcgtgtctcccacaaagctgaatgatctgtgctttaccaacgtgtacgccgatagcttcgtgatcaggggagacgaagtgagacagatcgcaccaggacagacaggaaagatcgcagactacaattataagctgcctgacgatttcaccggctgcgtgatcgcctggaactccaacaatctggattctaaagtgggcggcaactacaattatctgtacaggctgtttcgcaagtccaatctgaagccattcgagcgggacatctccacagagatctaccaggccggctctaccccctgcaatggcgtggagggctttaactgttatttccctctgcagtcttacggcttccagccaacaaacggcgtgggctatcagccctacagagtggtggtgctgtcctttgagctgattcacgcaccagcaacagtgtgcggcccaaagaagtctaccaatctggtgaagaacaagtgcgtgaacttcaacttcaacggactgaccggcacaggcgtgctgaccgagagcaataagaagttcctgccttttcagcagttcggcagggacatcgcagataccacagacgccgtgcgcgaccctcagaccctggagatcctggacatcacaccatgcagcttcggcggcgtgtccgtgatcacaccaggcaccaatacatccaaccaggtggccgtgctgtatcaggacgtgaattgtaccgaggtgcccgtggcaatccacgcagatcagctgacccctacatggcgggtgtactctaccggcagcaacgtgttccagacaagagccggatgcctgatcggagcagagcacgtgaacaatagctatgagtgcgacatccctatcggcgccggcatctgtgccagctaccagacccagacaaactccccatctggagcaggctccgtggccagccagtccatcatcgcctataccatgagcctgggcgccgagaacagcgtggcctactccaacaattctatcgccatccctaccaacttcacaatcagcgtgaccacagagatcctgccagtgtctatgaccaagacaagcgtggactgcacaatgtatatctgtggcgatagcaccgagtgctccaacctgctgctgcagtacggctccttttgtacccagctgaatagagccctgacaggcatcgccgtggagcaggataagaacacacaggaggtgttcgcccaggtgaagcagatctacaagaccccacccatcaaggactttggcggcttcaacttcagccagatcctgcctgatccaagcaagccctccaagaggtcttttatcgaggacctgctgttcaacaaggtgaccctggccgatgccggcttcatcaagcagtatggagattgcctgggagacatcgcagcccgcgacctgatctgtgcccagaagtttaatggcctgaccgtgctgcctccactgctgacagatgagatgatcgcccagtacacatctgccctgctggccggcaccatcacaagcggatggaccttcggcgcaggagccgccctgcagatcccttttgccatgcagatggcctataggttcaacggcatcggcgtgacccagaatgtgctgtacgagaaccagaagctgatcgccaatcagtttaacagcgccatcggcaagatccaggactctctgtcctctacagccagcgccctgggcaagctgcaggatgtggtgaatcagaacgcccaggccctgaataccctggtgaagcagctgagctccaacttcggcgccatctctagcgtgctgaatgacatcctgagccggctggacccccctgaggcagaggtgcagatcgacaggctgatcacaggccgcctgcagagcctgcagacctacgtgacacagcagctgatcagggcagcagagatcagagcctccgccaatctggccgccaccaagatgagcgagtgcgtgctgggacagtccaagagggtggacttttgtggcaagggctatcacctgatgtctttcccacagagcgcccctcacggcgtggtgtttctgcacgtgacctacgtgccagcccaggagaagaacttcaccacagcaccagccatctgccacgatggaaaggcacactttcctagggagggcgtgttcgtgtctaacggcacccactggtttgtgacacagcgcaatttctacgagccacagatcatcaccacagacaatacattcgtgagcggcaactgtgatgtggtgatcggcatcgtgaacaataccgtgtatgatccactgcagcccgagctggactcctttaaggaggagctggataagtacttcaagaatcacacctctcccgacgtggatctgggcgacatctccggcatcaatgcctctgtggtgaacatccagaaggagatcgaccggctgaacgaggtggccaagaatctgaacgagagcctgatcgatctgcaggagctgggcaagtatgagcagtacatcaagggctctggcagagagaacctgtatttccagggaggaggaggcagcggatacatccctgaggcaccaagggacggacaggcctacgtgcgcaaggatggcgagtgggtgctgctgtccacctttctgggccatcatcaccaccaccaccaccactga

SEQ ID NO: 5225 - DNA, 3846 bp, Artificial Sequence
  Description of Artificial Sequence: Synthetic polynucleotide
atgggcatcctgccaagcccaggaatgcccgccctgctgtctctggtgagcctgctgtccgtgctgctgatgggatgcgtggcagagacaggcacacagtgcgtgaacctgaccacaaggacccagctgccccctgcctataccaattctttcacacggggcgtgtactatcccgacaaggtgtttagaagctccgtgctgcactccacacaggatctgtttctgcctttcttttctaacgtgacctggttccacgccatccacgtgtccggcaccaatggcacaaagcggttcgacaatcccgtgctgccttttaacgatggcgtgtacttcgccagcaccgagaagtccaacatcatcagaggctggatctttggcaccacactggactctaagacacagagcctgctgatcgtgaacaatgccaccaacgtggtgatcaaggtgtgcgagttccagttttgtaatgatccattcctgggcgtgtactatcacaagaacaataagtcctggatggagtctgagtttcgcgtgtattctagcgccaacaattgcacatttgagtacgtgagccagcccttcctgatggacctggagggcaagcagggcaatttcaagaacctgagggagttcgtgtttaagaatatcgatggctacttcaagatctacagcaagcacaccccaatcaacctggtgcgcgacctgccacagggattctccgccctggagccactggtggatctgcccatcggcatcaacatcacccggtttcagacactgctggccctgcacagatcctacctgacaccaggcgactcctctagcggatggaccgcaggagctgccgcctactatgtgggctatctgcagccccggaccttcctgctgaagtacaacgagaatggcaccatcacagacgcagtggattgcgccctggaccccctgtctgagacaaagtgtacactgaagagctttaccgtggagaagggcatctatcagacaagcaatttcagggtgcagcctaccgagtccatcgtgcgctttcccaatatcacaaacctgtgcccttttggcgaggtgttcaacgccaccagattcgccagcgtgtacgcctggaatcggaagagaatctccaactgcgtggccgactattctgtgctgtacaactccgcctctttcagcacctttaagtgctatggcgtgtctcccacaaagctgaatgatctgtgctttaccaacgtgtacgccgatagcttcgtgatcaggggagacgaagtgagacagatcgcaccaggacagacaggaaagatcgcagactacaattataagctgcctgacgatttcaccggctgcgtgatcgcctggaactccaacaatctggattctaaagtgggcggcaactacaattatctgtacaggctgtttcgcaagtccaatctgaagccattcgagcgggacatctccacagagatctaccaggccggctctaccccctgcaatggcgtggagggctttaactgttatttccctctgcagtcttacggcttccagccaacaaacggcgtgggctatcagccctacagagtggtggtgctgtcctttgagctgctgcacgcaccagcaacagtgtgcggcccaaagaagtctaccaatctggtgaagaacaagtgcgtgaacttcaacttcaacggactgaccggcacaggcgtgctgaccgagagcaataagaagttcctgccttttcagcagttcggcagggacatcgcagataccacagacgccgtgcgcgaccctcagaccctggagatcctggacatcacaccatgcagcttcggcggcgtgtccgtgatcacaccaggcaccaatacatccaaccaggtggccgtgctgtatcaggacgtgaattgtaccgaggtgcccgtggcaatccacgcagatcagctgacccctacatggcgggtgtactctaccggcagcaacgtgttccagacaagagccggatgcctgatcggagcagagcacgtgaacaatagctatgagtgcgacatccctatcggcgccggcatctgtgccagctaccagacccagacaaactccccatctggagcaggctccgtggccagccagtccatcatcgcctataccatgagcctgggcgccgagaacagcgtggcctactccaacaattctatcgccatccctaccaacttcacaatcagcgtgaccacagagatcctgccagtgtctatgaccaagacaagcgtggactgcacaatgtatatctgtggcgatagcaccgagtgctccaacctgctgctgcagtacggctccttttgtacccagctgaatagagccctgacaggcatcgccgtggagcaggataagaacacacaggaggtgttcgcccaggtgaagcagatctacaagaccccacccatcaaggactttggcggcttcaacttcagccagatcctgcctgatccaagcaagccctccaagaggtcttttatcgaggacctgctgttcaacaaggtgaccctggccgatgccggcttcatcaagcagtatggagattgcctgggagacatcgcagcccgcgacctgatctgtgcccagaagtttaatggcctgaccgtgctgcctccactgctgacagatgagatgatcgcccagtacacatctgccctgctggccggcaccatcacaagcggatggaccttcggcgcaggagccgccctgcagatcccttttgccatgcagatggcctataggttcaacggcatcggcgtgacccagaatgtgctgtacgagaaccagaagctgatcgccaatcagtttaacagcgccatcggcaagatccaggactctctgtcctctacagccagcgccctgggcaagctgcaggatgtggtgaatcagaacgcccaggccctgaataccctggtgaagcagctgagctccaacttcggcgccatctctagcgtgctgaatgacatcctgagccggctggcgccccctgaggcagaggtgcagatcgacaggctgatcacaggccgcctgcagagcctgcagacctacgtgacacagcagctgatcagggcagcagagatcagagcctccgccaatctggccgccaccaagatgagcgagtgcgtgctgggacagtccaagagggtggacttttgtggcaagggctatcacctgatgtctttcccacagagcgcccctcacggcgtggtgtttctgcacgtgacctacgtgccagcccaggagaagaacttcaccacagcaccagccatctgccacgatggaaaggcacactttcctagggagggcgtgttcgtgtctaacggcacccactggtttgtgacacagcgcaatttctacgagccacagatcatcaccacagacaatacattcgtgagcggcaactgtgatgtggtgatcggcatcgtgaacaataccgtgtatgatccactgcagcccgagctggactcctttaaggaggagctggataagtacttcaagaatcacacctctcccgacgtggatctgggcgacatctccggcatcaatgcctctgtggtgaacatccagaaggagatcgaccggctgaacgaggtggccaagaatctgaacgagagcctgatcgatctgcaggagctgggcaagtatgagcagtacatcaagggctctggcagagagaacctgtatttccagggaggaggaggcagcggatacatccctgaggcaccaagggacggacaggcctacgtgcgcaaggatggcgagtgggtgctgctgtccacctttctgggccatcatcaccaccaccaccaccactga

SEQ ID NO: 5226 - DNA, 3846 bp, Artificial Sequence
  Description of Artificial Sequence: Synthetic polynucleotide
atgggcatcctgccaagcccaggaatgcccgccctgctgtctctggtgagcctgctgtccgtgctgctgatgggatgcgtggcagagacaggcacacagtgcgtgaacctgaccacaaggacccagctgccccctgcctataccaattctttcacacggggcgtgtactatcccgacaaggtgtttagaagctccgtgctgcactccacacaggatctgtttctgcctttcttttctaacgtgacctggttccacgccatccacgtgtccggcaccaatggcacaaagcggttcgacaatcccgtgctgccttttaacgatggcgtgtacttcgccagcaccgagaagtccaacatcatcagaggctggatctttggcaccacactggactctaagacacagagcctgctgatcgtgaacaatgccaccaacgtggtgatcaaggtgtgcgagttccagttttgtaatgatccattcctgggcgtgtactatcacaagaacaataagtcctggatggagtctgagtttcgcgtgtattctagcgccaacaattgcacatttgagtacgtgagccagcccttcctgatggacctggagggcaagcagggcaatttcaagaacctgagggagttcgtgtttaagaatatcgatggctacttcaagatctacagcaagcacaccccaatcaacctggtgcgcgacctgccacagggattctccgccctggagccactggtggatctgcccatcggcatcaacatcacccggtttcagacactgctggccctgcacagatcctacctgacaccaggcgactcctctagcggatggaccgcaggagctgccgcctactatgtgggctatctgcagccccggaccttcctgctgaagtacaacgagaatggcaccatcacagacgcagtggattgcgccctggaccccctgtctgagacaaagtgtacactgaagagctttaccgtggagaagggcatctatcagacaagcaatttcagggtgcagcctaccgagtccatcgtgcgctttcccaatatcacaaacctgtgcccttttggcgaggtgttcaacgccaccagattcgccagcgtgtacgcctggaatcggaagagaatctccaactgcgtggccgactattctgtgctgtacaactccgcctctttcagcacctttaagtgctatggcgtgtctcccacaaagctgaatgatctgtgctttaccaacgtgtacgccgatagcttcgtgatcaggggagacgaagtgagacagatcgcaccaggacagacaggaaagatcgcagactacaattataagctgcctgacgatttcaccggctgcgtgatcgcctggaactccaacaatctggattctaaagtgggcggcaactacaattatctgtacaggctgtttcgcaagtccaatctgaagccattcgagcgggacatctccacagagatctaccaggccggctctaccccctgcaatggcgtggagggctttaactgttatttccctctgcagtcttacggcttccagccaacaaacggcgtgggctatcagccctacagagtggtggtgctgtcctttgagctgctggctgcaccagcaacagtgtgcggcccaaagaagtctaccaatctggtgaagaacaagtgcgtgaacttcaacttcaacggactgaccggcacaggcgtgctgaccgagagcaataagaagttcctgccttttcagcagttcggcagggacatcgcagataccacagacgccgtgcgcgaccctcagaccctggagatcctggacatcacaccatgcagcttcggcggcgtgtccgtgatcacaccaggcaccaatacatccaaccaggtggccgtgctgtatcaggacgtgaattgtaccgaggtgcccgtggcaatccacgcagatcagctgacccctacatggcgggtgtactctaccggcagcaacgtgttccagacaagagccggatgcctgatcggagcagagcacgtgaacaatagctatgagtgcgacatccctatcggcgccggcatctgtgccagctaccagacccagacaaactccccatctggagcaggctccgtggccagccagtccatcatcgcctataccatgagcctgggcgccgagaacagcgtggcctactccaacaattctatcgccatccctaccaacttcacaatcagcgtgaccacagagatcctgccagtgtctatgaccaagacaagcgtggactgcacaatgtatatctgtggcgatagcaccgagtgctccaacctgctgctgcagtacggctccttttgtacccagctgaatagagccctgacaggcatcgccgtggagcaggataagaacacacaggaggtgttcgcccaggtgaagcagatctacaagaccccacccatcaaggactttggcggcttcaacttcagccagatcctgcctgatccaagcaagccctccaagaggtcttttatcgaggacctgctgttcaacaaggtgaccctggccgatgccggcttcatcaagcagtatggagattgcctgggagacatcgcagcccgcgacctgatctgtgcccagaagtttaatggcctgaccgtgctgcctccactgctgacagatgagatgatcgcccagtacacatctgccctgctggccggcaccatcacaagcggatggaccttcggcgcaggagccgccctgcagatcccttttgccatgcagatggcctataggttcaacggcatcggcgtgacccagaatgtgctgtacgagaaccagaagctgatcgccaatcagtttaacagcgccatcggcaagatccaggactctctgtcctctacagccagcgccctgggcaagctgcaggatgtggtgaatcagaacgcccaggccctgaataccctggtgaagcagctgagctccaacttcggcgccatctctagcgtgctgaatgacatcctgagccggctggacccccctgaggcagaggtgcagatcgacaggctgatcacaggccgcctgcagagcctgcagacctacgtgacacagcagctgatcagggcagcagagatcagagcctccgccaatctggccgccaccaagatgagcgagtgcgtgctgggacagtccaagagggtggacttttgtggcaagggctatcacctgatgtctttcccacagagcgcccctcacggcgtggtgtttctgcacgtgacctacgtgccagcccaggagaagaacttcaccacagcaccagccatctgccacgatggaaaggcacactttcctagggagggcgtgttcgtgtctaacggcacccactggtttgtgacacagcgcaatttctacgagccacagatcatcaccacagacaatacattcgtgagcggcaactgtgatgtggtgatcggcatcgtgaacaataccgtgtatgatccactgcagcccgagctggactcctttaaggaggagctggataagtacttcaagaatcacacctctcccgacgtggatctgggcgacatctccggcatcaatgcctctgtggtgaacatccagaaggagatcgaccggctgaacgaggtggccaagaatctgaacgagagcctgatcgatctgcaggagctgggcaagtatgagcagtacatcaagggctctggcagagagaacctgtatttccagggaggaggaggcagcggatacatccctgaggcaccaagggacggacaggcctacgtgcgcaaggatggcgagtgggtgctgctgtccacctttctgggccatcatcaccaccaccaccaccactga

SEQ ID NO: 5227 - DNA, 3846 bp, Artificial Sequence
  Description of Artificial Sequence: Synthetic polynucleotide
atgggcatcctgccaagcccaggaatgcccgccctgctgtctctggtgagcctgctgtccgtgctgctgatgggatgcgtggcagagacaggcacacagtgcgtgaacctgaccacaaggacccagctgccccctgcctataccaattctttcacacggggcgtgtactatcccgacaaggtgtttagaagctccgtgctgcactccacacaggatctgtttctgcctttcttttctaacgtgacctggttccacgccatccacgtgtccggcaccaatggcacaaagcggttcgacaatcccgtgctgccttttaacgatggcgtgtacttcgccagcaccgagaagtccaacatcatcagaggctggatctttggcaccacactggactctaagacacagagcctgctgatcgtgaacaatgccaccaacgtggtgatcaaggtgtgcgagttccagttttgtaatgatccattcctgggcgtgtactatcacaagaacaataagtcctggatggagtctgagtttcgcgtgtattctagcgccaacaattgcacatttgagtacgtgagccagcccttcctgatggacctggagggcaagcagggcaatttcaagaacctgagggagttcgtgtttaagaatatcgatggctacttcaagatctacagcaagcacaccccaatcaacctggtgcgcgacctgccacagggattctccgccctggagccactggtggatctgcccatcggcatcaacatcacccggtttcagacactgctggccctgcacagatcctacctgacaccaggcgactcctctagcggatggaccgcaggagctgccgcctactatgtgggctatctgcagccccggaccttcctgctgaagtacaacgagaatggcaccatcacagacgcagtggattgcgccctggaccccctgtctgagacaaagtgtacactgaagagctttaccgtggagaagggcatctatcagacaagcaatttcagggtgcagcctaccgagtccatcgtgcgctttcccaatatcacaaacctgtgcccttttggcgaggtgttcaacgccaccagattcgccagcgtgtacgcctggaatcggaagagaatctccaactgcgtggccgactattctgtgctgtacaactccgcctctttcagcacctttaagtgctatggcgtgtctcccacaaagctgaatgatctgtgctttaccaacgtgtacgccgatagcttcgtgatcaggggagacgaagtgagacagatcgcaccaggacagacaggaaagatcgcagactacaattataagctgcctgacgatttcaccggctgcgtgatcgcctggaactccaacaatctggattctaaagtgggcggcaactacaattatctgtacaggctgtttcgcaagtccaatctgaagccattcgagcgggacatctccacaaaaatctaccaggccggctctaccccctgcaatggcgtggagggctttaactgttatttccctctgcagtcttacggcttccagccaacaaacggcgtgggctatcagccctacagagtggtggtgctgtcctttgagctgctgcacgcaccagcaacagtgtgcggcccaaagaagtctaccaatctggtgaagaacaagtgcgtgaacttcaacttcaacggactgaccggcacaggcgtgctgaccgagagcaataagaagttcctgccttttcagcagttcggcagggacatcgcagataccacagacgccgtgcgcgaccctcagaccctggagatcctggacatcacaccatgcagcttcggcggcgtgtccgtgatcacaccaggcaccaatacatccaaccaggtggccgtgctgtatcaggacgtgaattgtaccgaggtgcccgtggcaatccacgcagatcagctgacccctacatggcgggtgtactctaccggcagcaacgtgttccagacaagagccggatgcctgatcggagcagagcacgtgaacaatagctatgagtgcgacatccctatcggcgccggcatctgtgccagctaccagacccagacaaactccccatctggagcaggctccgtggccagccagtccatcatcgcctataccatgagcctgggcgccgagaacagcgtggcctactccaacaattctatcgccatccctaccaacttcacaatcagcgtgaccacagagatcctgccagtgtctatgaccaagacaagcgtggactgcacaatgtatatctgtggcgatagcaccgagtgctccaacctgctgctgcagtacggctccttttgtacccagctgaatagagccctgacaggcatcgccgtggagcaggataagaacacacaggaggtgttcgcccaggtgaagcagatctacaagaccccacccatcaaggactttggcggcttcaacttcagccagatcctgcctgatccaagcaagccctccaagaggtcttttatcgaggacctgctgttcaacaaggtgaccctggccgatgccggcttcatcaagcagtatggagattgcctgggagacatcgcagcccgcgacctgatctgtgcccagaagtttaatggcctgaccgtgctgcctccactgctgacagatgagatgatcgcccagtacacatctgccctgctggccggcaccatcacaagcggatggaccttcggcgcaggagccgccctgcagatcccttttgccatgcagatggcctataggttcaacggcatcggcgtgacccagaatgtgctgtacgagaaccagaagctgatcgccaatcagtttaacagcgccatcggcaagatccaggactctctgtcctctacagccagcgccctgggcaagctgcaggatgtggtgaatcagaacgcccaggccctgaataccctggtgaagcagctgagctccaacttcggcgccatctctagcgtgctgaatgacatcctgagccggctggacccccctgaggcagaggtgcagatcgacaggctgatcacaggccgcctgcagagcctgcagacctacgtgacacagcagctgatcagggcagcagagatcagagcctccgccaatctggccgccaccaagatgagcgagtgcgtgctgggacagtccaagagggtggacttttgtggcaagggctatcacctgatgtctttcccacagagcgcccctcacggcgtggtgtttctgcacgtgacctacgtgccagcccaggagaagaacttcaccacagcaccagccatctgccacgatggaaaggcacactttcctagggagggcgtgttcgtgtctaacggcacccactggtttgtgacacagcgcaatttctacgagccacagatcatcaccacagacaatacattcgtgagcggcaactgtgatgtggtgatcggcatcgtgaacaataccgtgtatgatccactgcagcccgagctggactcctttaaggaggagctggataagtacttcaagaatcacacctctcccgacgtggatctgggcgacatctccggcatcaatgcctctgtggtgaacatccagaaggagatcgaccggctgaacgaggtggccaagaatctgaacgagagcctgatcgatctgcaggagctgggcaagtatgagcagtacatcaagggctctggcagagagaacctgtatttccagggaggaggaggcagcggatacatccctgaggcaccaagggacggacaggcctacgtgcgcaaggatggcgagtgggtgctgctgtccacctttctgggccatcatcaccaccaccaccaccactga

SEQ ID NO: 5228 - DNA, 3846 bp, Artificial Sequence
  Description of Artificial Sequence: Synthetic polynucleotide
atgggcatcctgccaagcccaggaatgcccgccctgctgtctctggtgagcctgctgtccgtgctgctgatgggatgcgtggcagagacaggcacacagtgcgtgaacctgaccacaaggacccagctgccccctgcctataccaattctttcacacggggcgtgtactatcccgacaaggtgtttagaagctccgtgctgcactccacacaggatctgtttctgcctttcttttctaacgtgacctggttccacgccatccacgtgtccggcaccaatggcacaaagcggttcgacaatcccgtgctgccttttaacgatggcgtgtacttcgccagcaccgagaagtccaacatcatcagaggctggatctttggcaccacactggactctaagacacagagcctgctgatcgtgaacaatgccaccaacgtggtgatcaaggtgtgcgagttccagttttgtaatgatccattcctgggcgtgtactatcacaagaacaataagtcctggatggagtctgagtttcgcgtgtattctagcgccaacaattgcacatttgagtacgtgagccagcccttcctgatggacctggagggcaagcagggcaatttcaagaacctgagggagttcgtgtttaagaatatcgatggctacttcaagatctacagcaagcacaccccaatcaacctggtgcgcgacctgccacagggattctccgccctggagccactggtggatctgcccatcggcatcaacatcacccggtttcagacactgctggccctgcacagatcctacctgacaccaggcgactcctctagcggatggaccgcaggagctgccgcctactatgtgggctatctgcagccccggaccttcctgctgaagtacaacgagaatggcaccatcacagacgcagtggattgcgccctggaccccctgtctgagacaaagtgtacactgaagagctttaccgtggagaagggcatctatcagacaagcaatttcagggtgcagcctaccgagtccatcgtgcgctttcccaatatcacaaacctgtgcccttttggcgaggtgttcaacgccaccagattcgccagcgtgtacgcctggaatcggaagagaatctccaactgcgtggccgactattctgtgctgtacaactccgcctctttcagcacctttaagtgctatggcgtgtctcccacaaagctgaatgatctgtgctttaccaacgtgtacgccgatagcttcgtgatcaggggagacgaagtgagacagatcgcaccaggacagacaggaaagatcgcagactacaattataagctgcctgacgatttcaccggctgcgtgatcgcctggaactccaacaatctggattctaaagtgggcggcaactacaattatctgtacaggctgtttcgcaagtccaatctgaagccattcgagcgggacatctccacagagatctaccaggccggctctaccccctgcaatggcgtggagggctttaactgttatttccctctgcagtcttacggcttccagccaacaaacggcgtgggctatcagccctacagagtggtggtgctgtcctttgagctgcgacacgcaccagcaacagtgtgcggcccaaagaagtctaccaatctggtgaagaacaagtgcgtgaacttcaacttcaacggactgaccggcacaggcgtgctgaccgagagcaataagaagttcctgccttttcagcagttcggcagggacatcgcagataccacagacgccgtgcgcgaccctcagaccctggagatcctggacatcacaccatgcagcttcggcggcgtgtccgtgatcacaccaggcaccaatacatccaaccaggtggccgtgctgtatcaggacgtgaattgtaccgaggtgcccgtggcaatccacgcagatcagctgacccctacatggcgggtgtactctaccggcagcaacgtgttccagacaagagccggatgcctgatcggagcagagcacgtgaacaatagctatgagtgcgacatccctatcggcgccggcatctgtgccagctaccagacccagacaaactccccatctggagcaggctccgtggccagccagtccatcatcgcctataccatgagcctgggcgccgagaacagcgtggcctactccaacaattctatcgccatccctaccaacttcacaatcagcgtgaccacagagatcctgccagtgtctatgaccaagacaagcgtggactgcacaatgtatatctgtggcgatagcaccgagtgctccaacctgctgctgcagtacggctccttttgtacccagctgaatagagccctgacaggcatcgccgtggagcaggataagaacacacaggaggtgttcgcccaggtgaagcagatctacaagaccccacccatcaaggactttggcggcttcaacttcagccagatcctgcctgatccaagcaagccctccaagaggtcttttatcgaggacctgctgttcaacaaggtgaccctggccgatgccggcttcatcaagcagtatggagattgcctgggagacatcgcagcccgcgacctgatctgtgcccagaagtttaatggcctgaccgtgctgcctccactgctgacagatgagatgatcgcccagtacacatctgccctgctggccggcaccatcacaagcggatggaccttcggcgcaggagccgccctgcagatcccttttgccatgcagatggcctataggttcaacggcatcggcgtgacccagaatgtgctgtacgagaaccagaagctgatcgccaatcagtttaacagcgccatcggcaagatccaggactctctgtcctctacagccagcgccctgggcaagctgcaggatgtggtgaatcagaacgcccaggccctgaataccctggtgaagcagctgagctccaacttcggcgccatctctagcgtgctgaatgacatcctgagccggctggacccccctgaggcagaggtgcagatcgacaggctgatcacaggccgcctgcagagcctgcagacctacgtgacacagcagctgatcagggcagcagagatcagagcctccgccaatctggccgccaccaagatgagcgagtgcgtgctgggacagtccaagagggtggacttttgtggcaagggctatcacctgatgtctttcccacagagcgcccctcacggcgtggtgtttctgcacgtgacctacgtgccagcccaggagaagaacttcaccacagcaccagccatctgccacgatggaaaggcacactttcctagggagggcgtgttcgtgtctaacggcacccactggtttgtgacacagcgcaatttctacgagccacagatcatcaccacagacaatacattcgtgagcggcaactgtgatgtggtgatcggcatcgtgaacaataccgtgtatgatccactgcagcccgagctggactcctttaaggaggagctggataagtacttcaagaatcacacctctcccgacgtggatctgggcgacatctccggcatcaatgcctctgtggtgaacatccagaaggagatcgaccggctgaacgaggtggccaagaatctgaacgagagcctgatcgatctgcaggagctgggcaagtatgagcagtacatcaagggctctggcagagagaacctgtatttccagggaggaggaggcagcggatacatccctgaggcaccaagggacggacaggcctacgtgcgcaaggatggcgagtgggtgctgctgtccacctttctgggccatcatcaccaccaccaccaccactga

SEQ ID NO: 5229 - DNA, 3846 bp, Artificial Sequence
  Description of Artificial Sequence: Synthetic polynucleotide
atgggcatcctgccaagcccaggaatgcccgccctgctgtctctggtgagcctgctgtccgtgctgctgatgggatgcgtggcagagacaggcacacagtgcgtgaacctgaccacaaggacccagctgccccctgcctataccaattctttcacacggggcgtgtactatcccgacaaggtgtttagaagctccgtgctgcactccacacaggatctgtttctgcctttcttttctaacgtgacctggttccacgccatccacgtgtccggcaccaatggcacaaagcggttcgacaatcccgtgctgccttttaacgatggcgtgtacttcgccagcaccgagaagtccaacatcatcagaggctggatctttggcaccacactggactctaagacacagagcctgctgatcgtgaacaatgccaccaacgtggtgatcaaggtgtgcgagttccagttttgtaatgatccattcctgggcgtgtactatcacaagaacaataagtcctggatggagtctgagtttcgcgtgtattctagcgccaacaattgcacatttgagtacgtgagccagcccttcctgatggacctggagggcaagcagggcaatttcaagaacctgagggagttcgtgtttaagaatatcgatggctacttcaagatctacagcaagcacaccccaatcaacctggtgcgcgacctgccacagggattctccgccctggagccactggtggatctgcccatcggcatcaacatcacccggtttcagacactgctggccctgcacagatcctacctgacaccaggcgactcctctagcggatggaccgcaggagctgccgcctactatgtgggctatctgcagccccggaccttcctgctgaagtacaacgagaatggcaccatcacagacgcagtggattgcgccctggaccccctgtctgagacaaagtgtacactgaagagctttaccgtggagaagggcatctatcagacaagcaatttcagggtgcagcctaccgagtccatcgtgcgctttcccaatatcacaaacctgtgcccttttggcgaggtgttcaacgccaccagattcgccagcgtgtacgcctggaatcggaagagaatctccaactgcgtggccgactattctgtgctgtacaactccgcctctttcagcacctttaagtgctatggcgtgtctcccacaaagctgaatgatctgtgctttaccaacgtgtacgccgatagcttcgtgatcaggggagacgaagtgagacagatcgcaccaggacagacaggaaagatcgcagactacaattataagctgcctgacgatttcaccggctgcgtgatcgcctggaactccaacaatctggattctaaagtgggcggcaactacaattatctgtacaggctgtttcgcaagtccaatctgcaaccattcgagcgggacatctccacagagatctaccaggccggctctaccccctgcaatggcgtggagggctttaactgttatttccctctgcagtcttacggcttccagccaacaaacggcgtgggctatcagccctacagagtggtggtgctgtcctttgagctgctgcacgcaccagcaacagtgtgcggcccaaagaagtctaccaatctggtgaagaacaagtgcgtgaacttcaacttcaacggactgaccggcacaggcgtgctgaccgagagcaataagaagttcctgccttttcagcagttcggcagggacatcgcagataccacagacgccgtgcgcgaccctcagaccctggagatcctggacatcacaccatgcagcttcggcggcgtgtccgtgatcacaccaggcaccaatacatccaaccaggtggccgtgctgtatcaggacgtgaattgtaccgaggtgcccgtggcaatccacgcagatcagctgacccctacatggcgggtgtactctaccggcagcaacgtgttccagacaagagccggatgcctgatcggagcagagcacgtgaacaatagctatgagtgcgacatccctatcggcgccggcatctgtgccagctaccagacccagacaaactccccatctggagcaggctccgtggccagccagtccatcatcgcctataccatgagcctgggcgccgagaacagcgtggcctactccaacaattctatcgccatccctaccaacttcacaatcagcgtgaccacagagatcctgccagtgtctatgaccaagacaagcgtggactgcacaatgtatatctgtggcgatagcaccgagtgctccaacctgctgctgcagtacggctccttttgtacccagctgaatagagccctgacaggcatcgccgtggagcaggataagaacacacaggaggtgttcgcccaggtgaagcagatctacaagaccccacccatcaaggactttggcggcttcaacttcagccagatcctgcctgatccaagcaagccctccaagaggtcttttatcgaggacctgctgttcaacaaggtgaccctggccgatgccggcttcatcaagcagtatggagattgcctgggagacatcgcagcccgcgacctgatctgtgcccagaagtttaatggcctgaccgtgctgcctccactgctgacagatgagatgatcgcccagtacacatctgccctgctggccggcaccatcacaagcggatggaccttcggcgcaggagccgccctgcagatcccttttgccatgcagatggcctataggttcaacggcatcggcgtgacccagaatgtgctgtacgagaaccagaagctgatcgccaatcagtttaacagcgccatcggcaagatccaggactctctgtcctctacagccagcgccctgggcaagctgcaggatgtggtgaatcagaacgcccaggccctgaataccctggtgaagcagctgagctccaacttcggcgccatctctagcgtgctgaatgacatcctgagccggctggacccccctgaggcagaggtgcagatcgacaggctgatcacaggccgcctgcagagcctgcagacctacgtgacacagcagctgatcagggcagcagagatcagagcctccgccaatctggccgccaccaagatgagcgagtgcgtgctgggacagtccaagagggtggacttttgtggcaagggctatcacctgatgtctttcccacagagcgcccctcacggcgtggtgtttctgcacgtgacctacgtgccagcccaggagaagaacttcaccacagcaccagccatctgccacgatggaaaggcacactttcctagggagggcgtgttcgtgtctaacggcacccactggtttgtgacacagcgcaatttctacgagccacagatcatcaccacagacaatacattcgtgagcggcaactgtgatgtggtgatcggcatcgtgaacaataccgtgtatgatccactgcagcccgagctggactcctttaaggaggagctggataagtacttcaagaatcacacctctcccgacgtggatctgggcgacatctccggcatcaatgcctctgtggtgaacatccagaaggagatcgaccggctgaacgaggtggccaagaatctgaacgagagcctgatcgatctgcaggagctgggcaagtatgagcagtacatcaagggctctggcagagagaacctgtatttccagggaggaggaggcagcggatacatccctgaggcaccaagggacggacaggcctacgtgcgcaaggatggcgagtgggtgctgctgtccacctttctgggccatcatcaccaccaccaccaccactga

SEQ ID NO: 5230 - DNA, 3846 bp, Artificial Sequence
  Description of Artificial Sequence: Synthetic polynucleotide
atgggcatcctgccaagcccaggaatgcccgccctgctgtctctggtgagcctgctgtccgtgctgctgatgggatgcgtggcagagacaggcacacagtgcgtgaacctgaccacaaggacccagctgccccctgcctataccaattctttcacacggggcgtgtactatcccgacaaggtgtttagaagctccgtgctgcactccacacaggatctgtttctgcctttcttttctaacgtgacctggttccacgccatccacgtgtccggcaccaatggcacaaagcggttcgacaatcccgtgctgccttttaacgatggcgtgtacttcgccagcaccgagaagtccaacatcatcagaggctggatctttggcaccacactggactctaagacacagagcctgctgatcgtgaacaatgccaccaacgtggtgatcaaggtgtgcgagttccagttttgtaatgatccattcctgggcgtgtactatcacaagaacaataagtcctggatggagtctgagtttcgcgtgtattctagcgccaacaattgcacatttgagtacgtgagccagcccttcctgatggacctggagggcaagcagggcaatttcaagaacctgagggagttcgtgtttaagaatatcgatggctacttcaagatctacagcaagcacaccccaatcaacctggtgcgcgacctgccacagggattctccgccctggagccactggtggatctgcccatcggcatcaacatcacccggtttcagacactgctggccctgcacagatcctacctgacaccaggcgactcctctagcggatggaccgcaggagctgccgcctactatgtgggctatctgcagccccggaccttcctgctgaagtacaacgagaatggcaccatcacagacgcagtggattgcgccctggaccccctgtctgagacaaagtgtacactgaagagctttaccgtggagaagggcatctatcagacaagcaatttcagggtgcagcctaccgagtccatcgtgcgctttcccaatatcacaaacctgtgcccttttggcgaggtgttcaacgccaccagattcgccagcgtgtacgcctggaatcggaagagaatctccaactgcgtggccgactattctgtgctgtacaactccgcctctttcagcacctttaagtgctatggcgtgtctcccacaaagctgaatgatctgtgctttaccaacgtgtacgccgatagcttcgtgatcaggggagacgaagtgagacagatcgcaccaggacagacaggaaagatcgcagactacaattataagctgcctgacgatttcaccggctgcgtgatcgcctggaactccaacggtctggattctaaagtgggcggcaactacaattatctgtacaggctgtttcgcaagtccaatctgaagccattcgagcgggacatctccacagagatctaccaggccggctctaccccctgcaatggcgtggagggctttaactgttatttccctctgcagtcttacggcttccagccaacaaacggcgtgggctatcagccctacagagtggtggtgctgtcctttgagctgctgcacgcaccagcaacagtgtgcggcccaaagaagtctaccaatctggtgaagaacaagtgcgtgaacttcaacttcaacggactgaccggcacaggcgtgctgaccgagagcaataagaagttcctgccttttcagcagttcggcagggacatcgcagataccacagacgccgtgcgcgaccctcagaccctggagatcctggacatcacaccatgcagcttcggcggcgtgtccgtgatcacaccaggcaccaatacatccaaccaggtggccgtgctgtatcaggacgtgaattgtaccgaggtgcccgtggcaatccacgcagatcagctgacccctacatggcgggtgtactctaccggcagcaacgtgttccagacaagagccggatgcctgatcggagcagagcacgtgaacaatagctatgagtgcgacatccctatcggcgccggcatctgtgccagctaccagacccagacaaactccccatctggagcaggctccgtggccagccagtccatcatcgcctataccatgagcctgggcgccgagaacagcgtggcctactccaacaattctatcgccatccctaccaacttcacaatcagcgtgaccacagagatcctgccagtgtctatgaccaagacaagcgtggactgcacaatgtatatctgtggcgatagcaccgagtgctccaacctgctgctgcagtacggctccttttgtacccagctgaatagagccctgacaggcatcgccgtggagcaggataagaacacacaggaggtgttcgcccaggtgaagcagatctacaagaccccacccatcaaggactttggcggcttcaacttcagccagatcctgcctgatccaagcaagccctccaagaggtcttttatcgaggacctgctgttcaacaaggtgaccctggccgatgccggcttcatcaagcagtatggagattgcctgggagacatcgcagcccgcgacctgatctgtgcccagaagtttaatggcctgaccgtgctgcctccactgctgacagatgagatgatcgcccagtacacatctgccctgctggccggcaccatcacaagcggatggaccttcggcgcaggagccgccctgcagatcccttttgccatgcagatggcctataggttcaacggcatcggcgtgacccagaatgtgctgtacgagaaccagaagctgatcgccaatcagtttaacagcgccatcggcaagatccaggactctctgtcctctacagccagcgccctgggcaagctgcaggatgtggtgaatcagaacgcccaggccctgaataccctggtgaagcagctgagctccaacttcggcgccatctctagcgtgctgaatgacatcctgagccggctggacccccctgaggcagaggtgcagatcgacaggctgatcacaggccgcctgcagagcctgcagacctacgtgacacagcagctgatcagggcagcagagatcagagcctccgccaatctggccgccaccaagatgagcgagtgcgtgctgggacagtccaagagggtggacttttgtggcaagggctatcacctgatgtctttcccacagagcgcccctcacggcgtggtgtttctgcacgtgacctacgtgccagcccaggagaagaacttcaccacagcaccagccatctgccacgatggaaaggcacactttcctagggagggcgtgttcgtgtctaacggcacccactggtttgtgacacagcgcaatttctacgagccacagatcatcaccacagacaatacattcgtgagcggcaactgtgatgtggtgatcggcatcgtgaacaataccgtgtatgatccactgcagcccgagctggactcctttaaggaggagctggataagtacttcaagaatcacacctctcccgacgtggatctgggcgacatctccggcatcaatgcctctgtggtgaacatccagaaggagatcgaccggctgaacgaggtggccaagaatctgaacgagagcctgatcgatctgcaggagctgggcaagtatgagcagtacatcaagggctctggcagagagaacctgtatttccagggaggaggaggcagcggatacatccctgaggcaccaagggacggacaggcctacgtgcgcaaggatggcgagtgggtgctgctgtccacctttctgggccatcatcaccaccaccaccaccactga

SEQ ID NO: 5231 - DNA, 3846 bp, Artificial Sequence
  Description of Artificial Sequence: Synthetic polynucleotide
atgggcatcctgccaagcccaggaatgcccgccctgctgtctctggtgagcctgctgtccgtgctgctgatgggatgcgtggcagagacaggcacacagtgcgtgaacctgaccacaaggacccagctgccccctgcctataccaattctttcacacggggcgtgtactatcccgacaaggtgtttagaagctccgtgctgcactccacacaggatctgtttctgcctttcttttctaacgtgacctggttccacgccatccacgtgtccggcaccaatggcacaaagcggttcgacaatcccgtgctgccttttaacgatggcgtgtacttcgccagcaccgagaagtccaacatcatcagaggctggatctttggcaccacactggactctaagacacagagcctgctgatcgtgaacaatgccaccaacgtggtgatcaaggtgtgcgagttccagttttgtaatgatccattcctgggcgtgtactatcacaagaacaataagtcctggatggagtctgagtttcgcgtgtattctagcgccaacaattgcacatttgagtacgtgagccagcccttcctgatggacctggagggcaagcagggcaatttcaagaacctgagggagttcgtgtttaagaatatcgatggctacttcaagatctacagcaagcacaccccaatcaacctggtgcgcgacctgccacagggattctccgccctggagccactggtggatctgcccatcggcatcaacatcacccggtttcagacactgctggccctgcacagatcctacctgacaccaggcgactcctctagcggatggaccgcaggagctgccgcctactatgtgggctatctgcagccccggaccttcctgctgaagtacaacgagaatggcaccatcacagacgcagtggattgcgccctggaccccctgtctgagacaaagtgtacactgaagagctttaccgtggagaagggcatctatcagacaagcaatttcagggtgcagcctaccgagtccatcgtgcgctttcccaatatcacaaacctgtgcccttttggcgaggtgttcaacgccaccagattcgccagcgtgtacgcctggaatcggaagagaatctccaactgcgtggccgactattctgtgctgtacaactccgcctctttcagcacctttaagtgctatggcgtgtctcccacaaagctgaatgatctgtgctttaccaacgtgtacgccgatagcttcgtgatcaggggagacgaagtgagacagatcgcaccaggacagacaggaaagatcgcagactacaattataagctgcctgacgatttcaccggctgcgtgatcgcctggaactccaacaatctggattctaaagtgggcggcaactacaattatctgtacaggctgtttcgcaagtccaatctgaagccattcgagcgggacatctccacatcgatctaccaggccggctctaccccctgcaatggcgtggagggctttaactgttatttccctctgcagtcttacggcttccagccaacaaacggcgtgggctatcagccctacagagtggtggtgctgtcctttgagctgctgcacgcaccagcaacagtgtgcggcccaaagaagtctaccaatctggtgaagaacaagtgcgtgaacttcaacttcaacggactgaccggcacaggcgtgctgaccgagagcaataagaagttcctgccttttcagcagttcggcagggacatcgcagataccacagacgccgtgcgcgaccctcagaccctggagatcctggacatcacaccatgcagcttcggcggcgtgtccgtgatcacaccaggcaccaatacatccaaccaggtggccgtgctgtatcaggacgtgaattgtaccgaggtgcccgtggcaatccacgcagatcagctgacccctacatggcgggtgtactctaccggcagcaacgtgttccagacaagagccggatgcctgatcggagcagagcacgtgaacaatagctatgagtgcgacatccctatcggcgccggcatctgtgccagctaccagacccagacaaactccccatctggagcaggctccgtggccagccagtccatcatcgcctataccatgagcctgggcgccgagaacagcgtggcctactccaacaattctatcgccatccctaccaacttcacaatcagcgtgaccacagagatcctgccagtgtctatgaccaagacaagcgtggactgcacaatgtatatctgtggcgatagcaccgagtgctccaacctgctgctgcagtacggctccttttgtacccagctgaatagagccctgacaggcatcgccgtggagcaggataagaacacacaggaggtgttcgcccaggtgaagcagatctacaagaccccacccatcaaggactttggcggcttcaacttcagccagatcctgcctgatccaagcaagccctccaagaggtcttttatcgaggacctgctgttcaacaaggtgaccctggccgatgccggcttcatcaagcagtatggagattgcctgggagacatcgcagcccgcgacctgatctgtgcccagaagtttaatggcctgaccgtgctgcctccactgctgacagatgagatgatcgcccagtacacatctgccctgctggccggcaccatcacaagcggatggaccttcggcgcaggagccgccctgcagatcccttttgccatgcagatggcctataggttcaacggcatcggcgtgacccagaatgtgctgtacgagaaccagaagctgatcgccaatcagtttaacagcgccatcggcaagatccaggactctctgtcctctacagccagcgccctgggcaagctgcaggatgtggtgaatcagaacgcccaggccctgaataccctggtgaagcagctgagctccaacttcggcgccatctctagcgtgctgaatgacatcctgagccggctggacccccctgaggcagaggtgcagatcgacaggctgatcacaggccgcctgcagagcctgcagacctacgtgacacagcagctgatcagggcagcagagatcagagcctccgccaatctggccgccaccaagatgagcgagtgcgtgctgggacagtccaagagggtggacttttgtggcaagggctatcacctgatgtctttcccacagagcgcccctcacggcgtggtgtttctgcacgtgacctacgtgccagcccaggagaagaacttcaccacagcaccagccatctgccacgatggaaaggcacactttcctagggagggcgtgttcgtgtctaacggcacccactggtttgtgacacagcgcaatttctacgagccacagatcatcaccacagacaatacattcgtgagcggcaactgtgatgtggtgatcggcatcgtgaacaataccgtgtatgatccactgcagcccgagctggactcctttaaggaggagctggataagtacttcaagaatcacacctctcccgacgtggatctgggcgacatctccggcatcaatgcctctgtggtgaacatccagaaggagatcgaccggctgaacgaggtggccaagaatctgaacgagagcctgatcgatctgcaggagctgggcaagtatgagcagtacatcaagggctctggcagagagaacctgtatttccagggaggaggaggcagcggatacatccctgaggcaccaagggacggacaggcctacgtgcgcaaggatggcgagtgggtgctgctgtccacctttctgggccatcatcaccaccaccaccaccactga

SEQ ID NO: 5232 - DNA, 3846 bp, Artificial Sequence
  Description of Artificial Sequence: Synthetic polynucleotide
atgggcatcctgccaagcccaggaatgcccgccctgctgtctctggtgagcctgctgtccgtgctgctgatgggatgcgtggcagagacaggcacacagtgcgtgaacctgaccacaaggacccagctgccccctgcctataccaattctttcacacggggcgtgtactatcccgacaaggtgtttagaagctccgtgctgcactccacacaggatctgtttctgcctttcttttctaacgtgacctggttccacgccatccacgtgtccggcaccaatggcacaaagcggttcgacaatcccgtgctgccttttaacgatggcgtgtacttcgccagcaccgagaagtccaacatcatcagaggctggatctttggcaccacactggactctaagacacagagcctgctgatcgtgaacaatgccaccaacgtggtgatcaaggtgtgcgagttccagttttgtaatgatccattcctgggcgtgtactatcacaagaacaataagtcctggatggagtctgagtttcgcgtgtattctagcgccaacaattgcacatttgagtacgtgagccagcccttcctgatggacctggagggcaagcagggcaatttcaagaacctgagggagttcgtgtttaagaatatcgatggctacttcaagatctacagcaagcacaccccaatcaacctggtgcgcgacctgccacagggattctccgccctggagccactggtggatctgcccatcggcatcaacatcacccggtttcagacactgctggccctgcacagatcctacctgacaccaggcgactcctctagcggatggaccgcaggagctgccgcctactatgtgggctatctgcagccccggaccttcctgctgaagtacaacgagaatggcaccatcacagacgcagtggattgcgccctggaccccctgtctgagacaaagtgtacactgaagagctttaccgtggagaagggcatctatcagacaagcaatttcagggtgcagcctaccgagtccatcgtgcgctttcccaatatcacaaacctgtgcccttttggcgaggtgttcaacgccaccagattcgccagcgtgtacgcctggaatcggaagagaatctccaactgcgtggccgactattctgtgctgtacaactccgcctctttcagcacctttaagtgctatggcgtgtctcccacaaagctgaatgatctgtgctttaccaacgtgtacgccgatagcttcgtgatcaggggagacgaagtgagacagatcgcaccaggacagacaggaaagatcgcagactacaattataagctgcctgacgatttcaccggctgcgtgatcgcctggaactccaacaatctggattctaaagtgggcggcaactacaattatctgtacaggctgtttcgcaagtccaatctgaagccattcgagcgggacatctccacagagagttaccaggccggctctaccccctgcaatggcgtggagggctttaactgttatttccctctgcagtcttacggcttccagccaacaaacggcgtgggctatcagccctacagagtggtggtgctgtcctttgagctgctgcacgcaccagcaacagtgtgcggcccaaagaagtctaccaatctggtgaagaacaagtgcgtgaacttcaacttcaacggactgaccggcacaggcgtgctgaccgagagcaataagaagttcctgccttttcagcagttcggcagggacatcgcagataccacagacgccgtgcgcgaccctcagaccctggagatcctggacatcacaccatgcagcttcggcggcgtgtccgtgatcacaccaggcaccaatacatccaaccaggtggccgtgctgtatcaggacgtgaattgtaccgaggtgcccgtggcaatccacgcagatcagctgacccctacatggcgggtgtactctaccggcagcaacgtgttccagacaagagccggatgcctgatcggagcagagcacgtgaacaatagctatgagtgcgacatccctatcggcgccggcatctgtgccagctaccagacccagacaaactccccatctggagcaggctccgtggccagccagtccatcatcgcctataccatgagcctgggcgccgagaacagcgtggcctactccaacaattctatcgccatccctaccaacttcacaatcagcgtgaccacagagatcctgccagtgtctatgaccaagacaagcgtggactgcacaatgtatatctgtggcgatagcaccgagtgctccaacctgctgctgcagtacggctccttttgtacccagctgaatagagccctgacaggcatcgccgtggagcaggataagaacacacaggaggtgttcgcccaggtgaagcagatctacaagaccccacccatcaaggactttggcggcttcaacttcagccagatcctgcctgatccaagcaagccctccaagaggtcttttatcgaggacctgctgttcaacaaggtgaccctggccgatgccggcttcatcaagcagtatggagattgcctgggagacatcgcagcccgcgacctgatctgtgcccagaagtttaatggcctgaccgtgctgcctccactgctgacagatgagatgatcgcccagtacacatctgccctgctggccggcaccatcacaagcggatggaccttcggcgcaggagccgccctgcagatcccttttgccatgcagatggcctataggttcaacggcatcggcgtgacccagaatgtgctgtacgagaaccagaagctgatcgccaatcagtttaacagcgccatcggcaagatccaggactctctgtcctctacagccagcgccctgggcaagctgcaggatgtggtgaatcagaacgcccaggccctgaataccctggtgaagcagctgagctccaacttcggcgccatctctagcgtgctgaatgacatcctgagccggctggacccccctgaggcagaggtgcagatcgacaggctgatcacaggccgcctgcagagcctgcagacctacgtgacacagcagctgatcagggcagcagagatcagagcctccgccaatctggccgccaccaagatgagcgagtgcgtgctgggacagtccaagagggtggacttttgtggcaagggctatcacctgatgtctttcccacagagcgcccctcacggcgtggtgtttctgcacgtgacctacgtgccagcccaggagaagaacttcaccacagcaccagccatctgccacgatggaaaggcacactttcctagggagggcgtgttcgtgtctaacggcacccactggtttgtgacacagcgcaatttctacgagccacagatcatcaccacagacaatacattcgtgagcggcaactgtgatgtggtgatcggcatcgtgaacaataccgtgtatgatccactgcagcccgagctggactcctttaaggaggagctggataagtacttcaagaatcacacctctcccgacgtggatctgggcgacatctccggcatcaatgcctctgtggtgaacatccagaaggagatcgaccggctgaacgaggtggccaagaatctgaacgagagcctgatcgatctgcaggagctgggcaagtatgagcagtacatcaagggctctggcagagagaacctgtatttccagggaggaggaggcagcggatacatccctgaggcaccaagggacggacaggcctacgtgcgcaaggatggcgagtgggtgctgctgtccacctttctgggccatcatcaccaccaccaccaccactga

SEQ ID NO: 5233 - DNA, 3846 bp, Artificial Sequence
  Description of Artificial Sequence: Synthetic polynucleotide
atgggcatcctgccaagcccaggaatgcccgccctgctgtctctggtgagcctgctgtccgtgctgctgatgggatgcgtggcagagacaggcacacagtgcgtgaacctgaccacaaggacccagctgccccctgcctataccaattctttcacacggggcgtgtactatcccgacaaggtgtttagaagctccgtgctgcactccacacaggatctgtttctgcctttcttttctaacgtgacctggttccacgccatccacgtgtccggcaccaatggcacaaagcggttcgacaatcccgtgctgccttttaacgatggcgtgtacttcgccagcaccgagaagtccaacatcatcagaggctggatctttggcaccacactggactctaagacacagagcctgctgatcgtgaacaatgccaccaacgtggtgatcaaggtgtgcgagttccagttttgtaatgatccattcctgggcgtgtactatcacaagaacaataagtcctggatggagtctgagtttcgcgtgtattctagcgccaacaattgcacatttgagtacgtgagccagcccttcctgatggacctggagggcaagcagggcaatttcaagaacctgagggagttcgtgtttaagaatatcgatggctacttcaagatctacagcaagcacaccccaatcaacctggtgcgcgacctgccacagggattctccgccctggagccactggtggatctgcccatcggcatcaacatcacccggtttcagacactgctggccctgcacagatcctacctgacaccaggcgactcctctagcggatggaccgcaggagctgccgcctactatgtgggctatctgcagccccggaccttcctgctgaagtacaacgagaatggcaccatcacagacgcagtggattgcgccctggaccccctgtctgagacaaagtgtacactgaagagctttaccgtggagaagggcatctatcagacaagcaatttcagggtgcagcctaccgagtccatcgtgcgctttcccaatatcacaaacctgtgcccttttggcgaggtgttcaacgccaccagattcgccagcgtgtacgcctggaatcggaagagaatctccaactgcgtggccgactattctgtgctgtacaactccgcctctttcagcacctttaagtgctatggcgtgtctcccacaaagctgaatgatctgtgctttaccaacgtgtacgccgatagcttcgtgatcaggggagacgaagtgagacagatcgcaccaggacagacaggaaagatcgcagactacaattataagctgcctgacgatttcaccggctgcgtgatcgcctggaactccaacaatctggattctaaagtgggcggcaactacaattatctgtacaggctgtttcgcaagtccaatctgaagccattcgagcgggacatctccacagagatctaccaggccggctctaccccctgcaatggcgtggagggctttaactgttatttccctctgcagtcttacggcttccagccaacaaacggcgtgggctatcagccctacagagtggtggtgctgtcctttgagctgctgtgggcaccagcaacagtgtgcggcccaaagaagtctaccaatctggtgaagaacaagtgcgtgaacttcaacttcaacggactgaccggcacaggcgtgctgaccgagagcaataagaagttcctgccttttcagcagttcggcagggacatcgcagataccacagacgccgtgcgcgaccctcagaccctggagatcctggacatcacaccatgcagcttcggcggcgtgtccgtgatcacaccaggcaccaatacatccaaccaggtggccgtgctgtatcaggacgtgaattgtaccgaggtgcccgtggcaatccacgcagatcagctgacccctacatggcgggtgtactctaccggcagcaacgtgttccagacaagagccggatgcctgatcggagcagagcacgtgaacaatagctatgagtgcgacatccctatcggcgccggcatctgtgccagctaccagacccagacaaactccccatctggagcaggctccgtggccagccagtccatcatcgcctataccatgagcctgggcgccgagaacagcgtggcctactccaacaattctatcgccatccctaccaacttcacaatcagcgtgaccacagagatcctgccagtgtctatgaccaagacaagcgtggactgcacaatgtatatctgtggcgatagcaccgagtgctccaacctgctgctgcagtacggctccttttgtacccagctgaatagagccctgacaggcatcgccgtggagcaggataagaacacacaggaggtgttcgcccaggtgaagcagatctacaagaccccacccatcaaggactttggcggcttcaacttcagccagatcctgcctgatccaagcaagccctccaagaggtcttttatcgaggacctgctgttcaacaaggtgaccctggccgatgccggcttcatcaagcagtatggagattgcctgggagacatcgcagcccgcgacctgatctgtgcccagaagtttaatggcctgaccgtgctgcctccactgctgacagatgagatgatcgcccagtacacatctgccctgctggccggcaccatcacaagcggatggaccttcggcgcaggagccgccctgcagatcccttttgccatgcagatggcctataggttcaacggcatcggcgtgacccagaatgtgctgtacgagaaccagaagctgatcgccaatcagtttaacagcgccatcggcaagatccaggactctctgtcctctacagccagcgccctgggcaagctgcaggatgtggtgaatcagaacgcccaggccctgaataccctggtgaagcagctgagctccaacttcggcgccatctctagcgtgctgaatgacatcctgagccggctggacccccctgaggcagaggtgcagatcgacaggctgatcacaggccgcctgcagagcctgcagacctacgtgacacagcagctgatcagggcagcagagatcagagcctccgccaatctggccgccaccaagatgagcgagtgcgtgctgggacagtccaagagggtggacttttgtggcaagggctatcacctgatgtctttcccacagagcgcccctcacggcgtggtgtttctgcacgtgacctacgtgccagcccaggagaagaacttcaccacagcaccagccatctgccacgatggaaaggcacactttcctagggagggcgtgttcgtgtctaacggcacccactggtttgtgacacagcgcaatttctacgagccacagatcatcaccacagacaatacattcgtgagcggcaactgtgatgtggtgatcggcatcgtgaacaataccgtgtatgatccactgcagcccgagctggactcctttaaggaggagctggataagtacttcaagaatcacacctctcccgacgtggatctgggcgacatctccggcatcaatgcctctgtggtgaacatccagaaggagatcgaccggctgaacgaggtggccaagaatctgaacgagagcctgatcgatctgcaggagctgggcaagtatgagcagtacatcaagggctctggcagagagaacctgtatttccagggaggaggaggcagcggatacatccctgaggcaccaagggacggacaggcctacgtgcgcaaggatggcgagtgggtgctgctgtccacctttctgggccatcatcaccaccaccaccaccactga

SEQ ID NO: 5234 - DNA, 3846 bp, Artificial Sequence
  Description of Artificial Sequence: Synthetic polynucleotide
atgggcatcctgccaagcccaggaatgcccgccctgctgtctctggtgagcctgctgtccgtgctgctgatgggatgcgtggcagagacaggcacacagtgcgtgaacctgaccacaaggacccagctgccccctgcctataccaattctttcacacggggcgtgtactatcccgacaaggtgtttagaagctccgtgctgcactccacacaggatctgtttctgcctttcttttctaacgtgacctggttccacgccatccacgtgtccggcaccaatggcacaaagcggttcgacaatcccgtgctgccttttaacgatggcgtgtacttcgccagcaccgagaagtccaacatcatcagaggctggatctttggcaccacactggactctaagacacagagcctgctgatcgtgaacaatgccaccaacgtggtgatcaaggtgtgcgagttccagttttgtaatgatccattcctgggcgtgtactatcacaagaacaataagtcctggatggagtctgagtttcgcgtgtattctagcgccaacaattgcacatttgagtacgtgagccagcccttcctgatggacctggagggcaagcagggcaatttcaagaacctgagggagttcgtgtttaagaatatcgatggctacttcaagatctacagcaagcacaccccaatcaacctggtgcgcgacctgccacagggattctccgccctggagccactggtggatctgcccatcggcatcaacatcacccggtttcagacactgctggccctgcacagatcctacctgacaccaggcgactcctctagcggatggaccgcaggagctgccgcctactatgtgggctatctgcagccccggaccttcctgctgaagtacaacgagaatggcaccatcacagacgcagtggattgcgccctggaccccctgtctgagacaaagtgtacactgaagagctttaccgtggagaagggcatctatcagacaagcaatttcagggtgcagcctaccgagtccatcgtgcgctttcccaatatcacaaacctgtgcccttttggcgaggtgttcaacgccaccagattcgccagcgtgtacgcctggaatcggaagagaatctccaactgcgtggccgactattctgtgctgtacaactccgcctctttcagcacctttaagtgctatggcgtgtctcccacaaagctgaatgatctgtgctttaccaacgtgtacgccgatagcttcgtgatcaggggagacgaagtgagacagatcgcaccaggacagacaggaaagatcgcagactacaattataagctgcctgacgatttcaccggctgcgtgatcgcctggaactccaacaatctggattctaaagtgggcggcaactacaattatctgtacaggctgtttcgcaagtccaatctgaagccattcgagcggtatatctccacagagatctaccaggccggctctaccccctgcaatggcgtggagggctttaactgttatttccctctgcagtcttacggcttccagccaacaaacggcgtgggctatcagccctacagagtggtggtgctgtcctttgagctgctgcacgcaccagcaacagtgtgcggcccaaagaagtctaccaatctggtgaagaacaagtgcgtgaacttcaacttcaacggactgaccggcacaggcgtgctgaccgagagcaataagaagttcctgccttttcagcagttcggcagggacatcgcagataccacagacgccgtgcgcgaccctcagaccctggagatcctggacatcacaccatgcagcttcggcggcgtgtccgtgatcacaccaggcaccaatacatccaaccaggtggccgtgctgtatcaggacgtgaattgtaccgaggtgcccgtggcaatccacgcagatcagctgacccctacatggcgggtgtactctaccggcagcaacgtgttccagacaagagccggatgcctgatcggagcagagcacgtgaacaatagctatgagtgcgacatccctatcggcgccggcatctgtgccagctaccagacccagacaaactccccatctggagcaggctccgtggccagccagtccatcatcgcctataccatgagcctgggcgccgagaacagcgtggcctactccaacaattctatcgccatccctaccaacttcacaatcagcgtgaccacagagatcctgccagtgtctatgaccaagacaagcgtggactgcacaatgtatatctgtggcgatagcaccgagtgctccaacctgctgctgcagtacggctccttttgtacccagctgaatagagccctgacaggcatcgccgtggagcaggataagaacacacaggaggtgttcgcccaggtgaagcagatctacaagaccccacccatcaaggactttggcggcttcaacttcagccagatcctgcctgatccaagcaagccctccaagaggtcttttatcgaggacctgctgttcaacaaggtgaccctggccgatgccggcttcatcaagcagtatggagattgcctgggagacatcgcagcccgcgacctgatctgtgcccagaagtttaatggcctgaccgtgctgcctccactgctgacagatgagatgatcgcccagtacacatctgccctgctggccggcaccatcacaagcggatggaccttcggcgcaggagccgccctgcagatcccttttgccatgcagatggcctataggttcaacggcatcggcgtgacccagaatgtgctgtacgagaaccagaagctgatcgccaatcagtttaacagcgccatcggcaagatccaggactctctgtcctctacagccagcgccctgggcaagctgcaggatgtggtgaatcagaacgcccaggccctgaataccctggtgaagcagctgagctccaacttcggcgccatctctagcgtgctgaatgacatcctgagccggctggacccccctgaggcagaggtgcagatcgacaggctgatcacaggccgcctgcagagcctgcagacctacgtgacacagcagctgatcagggcagcagagatcagagcctccgccaatctggccgccaccaagatgagcgagtgcgtgctgggacagtccaagagggtggacttttgtggcaagggctatcacctgatgtctttcccacagagcgcccctcacggcgtggtgtttctgcacgtgacctacgtgccagcccaggagaagaacttcaccacagcaccagccatctgccacgatggaaaggcacactttcctagggagggcgtgttcgtgtctaacggcacccactggtttgtgacacagcgcaatttctacgagccacagatcatcaccacagacaatacattcgtgagcggcaactgtgatgtggtgatcggcatcgtgaacaataccgtgtatgatccactgcagcccgagctggactcctttaaggaggagctggataagtacttcaagaatcacacctctcccgacgtggatctgggcgacatctccggcatcaatgcctctgtggtgaacatccagaaggagatcgaccggctgaacgaggtggccaagaatctgaacgagagcctgatcgatctgcaggagctgggcaagtatgagcagtacatcaagggctctggcagagagaacctgtatttccagggaggaggaggcagcggatacatccctgaggcaccaagggacggacaggcctacgtgcgcaaggatggcgagtgggtgctgctgtccacctttctgggccatcatcaccaccaccaccaccactga

SEQ ID NO: 5235 - DNA, 3846 bp, Artificial Sequence
  Description of Artificial Sequence: Synthetic polynucleotide
atgggcatcctgccaagcccaggaatgcccgccctgctgtctctggtgagcctgctgtccgtgctgctgatgggatgcgtggcagagacaggcacacagtgcgtgaacctgaccacaaggacccagctgccccctgcctataccaattctttcacacggggcgtgtactatcccgacaaggtgtttagaagctccgtgctgcactccacacaggatctgtttctgcctttcttttctaacgtgacctggttccacgccatccacgtgtccggcaccaatggcacaaagcggttcgacaatcccgtgctgccttttaacgatggcgtgtacttcgccagcaccgagaagtccaacatcatcagaggctggatctttggcaccacactggactctaagacacagagcctgctgatcgtgaacaatgccaccaacgtggtgatcaaggtgtgcgagttccagttttgtaatgatccattcctgggcgtgtactatcacaagaacaataagtcctggatggagtctgagtttcgcgtgtattctagcgccaacaattgcacatttgagtacgtgagccagcccttcctgatggacctggagggcaagcagggcaatttcaagaacctgagggagttcgtgtttaagaatatcgatggctacttcaagatctacagcaagcacaccccaatcaacctggtgcgcgacctgccacagggattctccgccctggagccactggtggatctgcccatcggcatcaacatcacccggtttcagacactgctggccctgcacagatcctacctgacaccaggcgactcctctagcggatggaccgcaggagctgccgcctactatgtgggctatctgcagccccggaccttcctgctgaagtacaacgagaatggcaccatcacagacgcagtggattgcgccctggaccccctgtctgagacaaagtgtacactgaagagctttaccgtggagaagggcatctatcagacaagcaatttcagggtgcagcctaccgagtccatcgtgcgctttcccaatatcacaaacctgtgcccttttggcgaggtgttcaacgccaccagattcgccagcgtgtacgcctggaatcggaagagaatctccaactgcgtggccgactattctgtgctgtacaactccgcctctttcagcacctttaagtgctatggcgtgtctcccacaaagctgaatgatctgtgctttaccaacgtgtacgccgatagcttcgtgatcaggggagacgaagtgagacagatcgcaccaggacagacaggaaagatcgcagactacaattataagctgcctgacgatttcaccggctgcgtgatcgcctggaactccaacaatctggattctaaagtgggcggcaactacaattatctgtacaggctgtttcgcaagtccaatctgaagccattcgagcgggacatctcctacgagatctaccaggccggctctaccccctgcaatggcgtggagggctttaactgttatttccctctgcagtcttacggcttccagccaacaaacggcgtgggctatcagccctacagagtggtggtgctgtcctttgagctgctgcacgcaccagcaacagtgtgcggcccaaagaagtctaccaatctggtgaagaacaagtgcgtgaacttcaacttcaacggactgaccggcacaggcgtgctgaccgagagcaataagaagttcctgccttttcagcagttcggcagggacatcgcagataccacagacgccgtgcgcgaccctcagaccctggagatcctggacatcacaccatgcagcttcggcggcgtgtccgtgatcacaccaggcaccaatacatccaaccaggtggccgtgctgtatcaggacgtgaattgtaccgaggtgcccgtggcaatccacgcagatcagctgacccctacatggcgggtgtactctaccggcagcaacgtgttccagacaagagccggatgcctgatcggagcagagcacgtgaacaatagctatgagtgcgacatccctatcggcgccggcatctgtgccagctaccagacccagacaaactccccatctggagcaggctccgtggccagccagtccatcatcgcctataccatgagcctgggcgccgagaacagcgtggcctactccaacaattctatcgccatccctaccaacttcacaatcagcgtgaccacagagatcctgccagtgtctatgaccaagacaagcgtggactgcacaatgtatatctgtggcgatagcaccgagtgctccaacctgctgctgcagtacggctccttttgtacccagctgaatagagccctgacaggcatcgccgtggagcaggataagaacacacaggaggtgttcgcccaggtgaagcagatctacaagaccccacccatcaaggactttggcggcttcaacttcagccagatcctgcctgatccaagcaagccctccaagaggtcttttatcgaggacctgctgttcaacaaggtgaccctggccgatgccggcttcatcaagcagtatggagattgcctgggagacatcgcagcccgcgacctgatctgtgcccagaagtttaatggcctgaccgtgctgcctccactgctgacagatgagatgatcgcccagtacacatctgccctgctggccggcaccatcacaagcggatggaccttcggcgcaggagccgccctgcagatcccttttgccatgcagatggcctataggttcaacggcatcggcgtgacccagaatgtgctgtacgagaaccagaagctgatcgccaatcagtttaacagcgccatcggcaagatccaggactctctgtcctctacagccagcgccctgggcaagctgcaggatgtggtgaatcagaacgcccaggccctgaataccctggtgaagcagctgagctccaacttcggcgccatctctagcgtgctgaatgacatcctgagccggctggacccccctgaggcagaggtgcagatcgacaggctgatcacaggccgcctgcagagcctgcagacctacgtgacacagcagctgatcagggcagcagagatcagagcctccgccaatctggccgccaccaagatgagcgagtgcgtgctgggacagtccaagagggtggacttttgtggcaagggctatcacctgatgtctttcccacagagcgcccctcacggcgtggtgtttctgcacgtgacctacgtgccagcccaggagaagaacttcaccacagcaccagccatctgccacgatggaaaggcacactttcctagggagggcgtgttcgtgtctaacggcacccactggtttgtgacacagcgcaatttctacgagccacagatcatcaccacagacaatacattcgtgagcggcaactgtgatgtggtgatcggcatcgtgaacaataccgtgtatgatccactgcagcccgagctggactcctttaaggaggagctggataagtacttcaagaatcacacctctcccgacgtggatctgggcgacatctccggcatcaatgcctctgtggtgaacatccagaaggagatcgaccggctgaacgaggtggccaagaatctgaacgagagcctgatcgatctgcaggagctgggcaagtatgagcagtacatcaagggctctggcagagagaacctgtatttccagggaggaggaggcagcggatacatccctgaggcaccaagggacggacaggcctacgtgcgcaaggatggcgagtgggtgctgctgtccacctttctgggccatcatcaccaccaccaccaccactga

SEQ ID NO: 5236 - DNA, 3846 bp, Artificial Sequence
  Description of Artificial Sequence: Synthetic polynucleotide
atgggcatcctgccaagcccaggaatgcccgccctgctgtctctggtgagcctgctgtccgtgctgctgatgggatgcgtggcagagacaggcacacagtgcgtgaacctgaccacaaggacccagctgccccctgcctataccaattctttcacacggggcgtgtactatcccgacaaggtgtttagaagctccgtgctgcactccacacaggatctgtttctgcctttcttttctaacgtgacctggttccacgccatccacgtgtccggcaccaatggcacaaagcggttcgacaatcccgtgctgccttttaacgatggcgtgtacttcgccagcaccgagaagtccaacatcatcagaggctggatctttggcaccacactggactctaagacacagagcctgctgatcgtgaacaatgccaccaacgtggtgatcaaggtgtgcgagttccagttttgtaatgatccattcctgggcgtgtactatcacaagaacaataagtcctggatggagtctgagtttcgcgtgtattctagcgccaacaattgcacatttgagtacgtgagccagcccttcctgatggacctggagggcaagcagggcaatttcaagaacctgagggagttcgtgtttaagaatatcgatggctacttcaagatctacagcaagcacaccccaatcaacctggtgcgcgacctgccacagggattctccgccctggagccactggtggatctgcccatcggcatcaacatcacccggtttcagacactgctggccctgcacagatcctacctgacaccaggcgactcctctagcggatggaccgcaggagctgccgcctactatgtgggctatctgcagccccggaccttcctgctgaagtacaacgagaatggcaccatcacagacgcagtggattgcgccctggaccccctgtctgagacaaagtgtacactgaagagctttaccgtggagaagggcatctatcagacaagcaatttcagggtgcagcctaccgagtccatcgtgcgctttcccaatatcacaaacctgtgcccttttggcgaggtgttcaacgccaccagattcgccagcgtgtacgcctggaatcggaagagaatctccaactgcgtggccgactattctgtgctgtacaactccgcctctttcagcacctttaagtgctatggcgtgtctcccacaaagctgaatgatctgtgctttaccaacgtgtacgccgatagcttcgtgatcaggggagacgaagtgagacagatcgcaccaggacagacaggaaagatcgcagactacaattataagctgcctgacgatttcaccggctgcgtgatcgcctggaactccaacaatctggattctaaagtgggcggcaactacaattatctgtacaggctgtttcgcaagtccaatctgaagccattcgagcgggacatctccacagagatctaccaggccggctctaccccctgcaatggcgtggagggctttaactgttatttccctctgcagtcttacggcttccagccaacaaacggcgtgggctatcagccctacagagtggtggtgctgtcctttgagctggtacacgcaccagcaacagtgtgcggcccaaagaagtctaccaatctggtgaagaacaagtgcgtgaacttcaacttcaacggactgaccggcacaggcgtgctgaccgagagcaataagaagttcctgccttttcagcagttcggcagggacatcgcagataccacagacgccgtgcgcgaccctcagaccctggagatcctggacatcacaccatgcagcttcggcggcgtgtccgtgatcacaccaggcaccaatacatccaaccaggtggccgtgctgtatcaggacgtgaattgtaccgaggtgcccgtggcaatccacgcagatcagctgacccctacatggcgggtgtactctaccggcagcaacgtgttccagacaagagccggatgcctgatcggagcagagcacgtgaacaatagctatgagtgcgacatccctatcggcgccggcatctgtgccagctaccagacccagacaaactccccatctggagcaggctccgtggccagccagtccatcatcgcctataccatgagcctgggcgccgagaacagcgtggcctactccaacaattctatcgccatccctaccaacttcacaatcagcgtgaccacagagatcctgccagtgtctatgaccaagacaagcgtggactgcacaatgtatatctgtggcgatagcaccgagtgctccaacctgctgctgcagtacggctccttttgtacccagctgaatagagccctgacaggcatcgccgtggagcaggataagaacacacaggaggtgttcgcccaggtgaagcagatctacaagaccccacccatcaaggactttggcggcttcaacttcagccagatcctgcctgatccaagcaagccctccaagaggtcttttatcgaggacctgctgttcaacaaggtgaccctggccgatgccggcttcatcaagcagtatggagattgcctgggagacatcgcagcccgcgacctgatctgtgcccagaagtttaatggcctgaccgtgctgcctccactgctgacagatgagatgatcgcccagtacacatctgccctgctggccggcaccatcacaagcggatggaccttcggcgcaggagccgccctgcagatcccttttgccatgcagatggcctataggttcaacggcatcggcgtgacccagaatgtgctgtacgagaaccagaagctgatcgccaatcagtttaacagcgccatcggcaagatccaggactctctgtcctctacagccagcgccctgggcaagctgcaggatgtggtgaatcagaacgcccaggccctgaataccctggtgaagcagctgagctccaacttcggcgccatctctagcgtgctgaatgacatcctgagccggctggacccccctgaggcagaggtgcagatcgacaggctgatcacaggccgcctgcagagcctgcagacctacgtgacacagcagctgatcagggcagcagagatcagagcctccgccaatctggccgccaccaagatgagcgagtgcgtgctgggacagtccaagagggtggacttttgtggcaagggctatcacctgatgtctttcccacagagcgcccctcacggcgtggtgtttctgcacgtgacctacgtgccagcccaggagaagaacttcaccacagcaccagccatctgccacgatggaaaggcacactttcctagggagggcgtgttcgtgtctaacggcacccactggtttgtgacacagcgcaatttctacgagccacagatcatcaccacagacaatacattcgtgagcggcaactgtgatgtggtgatcggcatcgtgaacaataccgtgtatgatccactgcagcccgagctggactcctttaaggaggagctggataagtacttcaagaatcacacctctcccgacgtggatctgggcgacatctccggcatcaatgcctctgtggtgaacatccagaaggagatcgaccggctgaacgaggtggccaagaatctgaacgagagcctgatcgatctgcaggagctgggcaagtatgagcagtacatcaagggctctggcagagagaacctgtatttccagggaggaggaggcagcggatacatccctgaggcaccaagggacggacaggcctacgtgcgcaaggatggcgagtgggtgctgctgtccacctttctgggccatcatcaccaccaccaccaccactga

SEQ ID NO: 5237 - DNA, 3846 bp, Artificial Sequence
  Description of Artificial Sequence: Synthetic polynucleotide
atgggcatcctgccaagcccaggaatgcccgccctgctgtctctggtgagcctgctgtccgtgctgctgatgggatgcgtggcagagacaggcacacagtgcgtgaacctgaccacaaggacccagctgccccctgcctataccaattctttcacacggggcgtgtactatcccgacaaggtgtttagaagctccgtgctgcactccacacaggatctgtttctgcctttcttttctaacgtgacctggttccacgccatccacgtgtccggcaccaatggcacaaagcggttcgacaatcccgtgctgccttttaacgatggcgtgtacttcgccagcaccgagaagtccaacatcatcagaggctggatctttggcaccacactggactctaagacacagagcctgctgatcgtgaacaatgccaccaacgtggtgatcaaggtgtgcgagttccagttttgtaatgatccattcctgggcgtgtactatcacaagaacaataagtcctggatggagtctgagtttcgcgtgtattctagcgccaacaattgcacatttgagtacgtgagccagcccttcctgatggacctggagggcaagcagggcaatttcaagaacctgagggagttcgtgtttaagaatatcgatggctacttcaagatctacagcaagcacaccccaatcaacctggtgcgcgacctgccacagggattctccgccctggagccactggtggatctgcccatcggcatcaacatcacccggtttcagacactgctggccctgcacagatcctacctgacaccaggcgactcctctagcggatggaccgcaggagctgccgcctactatgtgggctatctgcagccccggaccttcctgctgaagtacaacgagaatggcaccatcacagacgcagtggattgcgccctggaccccctgtctgagacaaagtgtacactgaagagctttaccgtggagaagggcatctatcagacaagcaatttcagggtgcagcctaccgagtccatcgtgcgctttcccaatatcacaaacctgtgcccttttggcgaggtgttcaacgccaccagattcgccagcgtgtacgcctggaatcggaagagaatctccaactgcgtggccgactattctgtgctgtacaactccgcctctttcagcacctttaagtgctatggcgtgtctcccacaaagctgaatgatctgtgctttaccaacgtgtacgccgatagcttcgtgatcaggggagacgaagtgagacagatcgcaccaggacagacaggaaagatcgcagactacaattataagctgcctgacgatttcaccggctgcgtgatcgcctggaactccaacaatctggattctaaagtgggcggcaactacaattatctgtacaggctgtttcgcaagtccaatctgaagccattcgagcggaacatctccacagagatctaccaggccggctctaccccctgcaatggcgtggagggctttaactgttatttccctctgcagtcttacggcttccagccaacaaacggcgtgggctatcagccctacagagtggtggtgctgtcctttgagctgctgcacgcaccagcaacagtgtgcggcccaaagaagtctaccaatctggtgaagaacaagtgcgtgaacttcaacttcaacggactgaccggcacaggcgtgctgaccgagagcaataagaagttcctgccttttcagcagttcggcagggacatcgcagataccacagacgccgtgcgcgaccctcagaccctggagatcctggacatcacaccatgcagcttcggcggcgtgtccgtgatcacaccaggcaccaatacatccaaccaggtggccgtgctgtatcaggacgtgaattgtaccgaggtgcccgtggcaatccacgcagatcagctgacccctacatggcgggtgtactctaccggcagcaacgtgttccagacaagagccggatgcctgatcggagcagagcacgtgaacaatagctatgagtgcgacatccctatcggcgccggcatctgtgccagctaccagacccagacaaactccccatctggagcaggctccgtggccagccagtccatcatcgcctataccatgagcctgggcgccgagaacagcgtggcctactccaacaattctatcgccatccctaccaacttcacaatcagcgtgaccacagagatcctgccagtgtctatgaccaagacaagcgtggactgcacaatgtatatctgtggcgatagcaccgagtgctccaacctgctgctgcagtacggctccttttgtacccagctgaatagagccctgacaggcatcgccgtggagcaggataagaacacacaggaggtgttcgcccaggtgaagcagatctacaagaccccacccatcaaggactttggcggcttcaacttcagccagatcctgcctgatccaagcaagccctccaagaggtcttttatcgaggacctgctgttcaacaaggtgaccctggccgatgccggcttcatcaagcagtatggagattgcctgggagacatcgcagcccgcgacctgatctgtgcccagaagtttaatggcctgaccgtgctgcctccactgctgacagatgagatgatcgcccagtacacatctgccctgctggccggcaccatcacaagcggatggaccttcggcgcaggagccgccctgcagatcccttttgccatgcagatggcctataggttcaacggcatcggcgtgacccagaatgtgctgtacgagaaccagaagctgatcgccaatcagtttaacagcgccatcggcaagatccaggactctctgtcctctacagccagcgccctgggcaagctgcaggatgtggtgaatcagaacgcccaggccctgaataccctggtgaagcagctgagctccaacttcggcgccatctctagcgtgctgaatgacatcctgagccggctggacccccctgaggcagaggtgcagatcgacaggctgatcacaggccgcctgcagagcctgcagacctacgtgacacagcagctgatcagggcagcagagatcagagcctccgccaatctggccgccaccaagatgagcgagtgcgtgctgggacagtccaagagggtggacttttgtggcaagggctatcacctgatgtctttcccacagagcgcccctcacggcgtggtgtttctgcacgtgacctacgtgccagcccaggagaagaacttcaccacagcaccagccatctgccacgatggaaaggcacactttcctagggagggcgtgttcgtgtctaacggcacccactggtttgtgacacagcgcaatttctacgagccacagatcatcaccacagacaatacattcgtgagcggcaactgtgatgtggtgatcggcatcgtgaacaataccgtgtatgatccactgcagcccgagctggactcctttaaggaggagctggataagtacttcaagaatcacacctctcccgacgtggatctgggcgacatctccggcatcaatgcctctgtggtgaacatccagaaggagatcgaccggctgaacgaggtggccaagaatctgaacgagagcctgatcgatctgcaggagctgggcaagtatgagcagtacatcaagggctctggcagagagaacctgtatttccagggaggaggaggcagcggatacatccctgaggcaccaagggacggacaggcctacgtgcgcaaggatggcgagtgggtgctgctgtccacctttctgggccatcatcaccaccaccaccaccactga

SEQ ID NO: 5238 - DNA, 3846 bp, Artificial Sequence
  Description of Artificial Sequence: Synthetic polynucleotide
atgggcatcctgccaagcccaggaatgcccgccctgctgtctctggtgagcctgctgtccgtgctgctgatgggatgcgtggcagagacaggcacacagtgcgtgaacctgaccacaaggacccagctgccccctgcctataccaattctttcacacggggcgtgtactatcccgacaaggtgtttagaagctccgtgctgcactccacacaggatctgtttctgcctttcttttctaacgtgacctggttccacgccatccacgtgtccggcaccaatggcacaaagcggttcgacaatcccgtgctgccttttaacgatggcgtgtacttcgccagcaccgagaagtccaacatcatcagaggctggatctttggcaccacactggactctaagacacagagcctgctgatcgtgaacaatgccaccaacgtggtgatcaaggtgtgcgagttccagttttgtaatgatccattcctgggcgtgtactatcacaagaacaataagtcctggatggagtctgagtttcgcgtgtattctagcgccaacaattgcacatttgagtacgtgagccagcccttcctgatggacctggagggcaagcagggcaatttcaagaacctgagggagttcgtgtttaagaatatcgatggctacttcaagatctacagcaagcacaccccaatcaacctggtgcgcgacctgccacagggattctccgccctggagccactggtggatctgcccatcggcatcaacatcacccggtttcagacactgctggccctgcacagatcctacctgacaccaggcgactcctctagcggatggaccgcaggagctgccgcctactatgtgggctatctgcagccccggaccttcctgctgaagtacaacgagaatggcaccatcacagacgcagtggattgcgccctggaccccctgtctgagacaaagtgtacactgaagagctttaccgtggagaagggcatctatcagacaagcaatttcagggtgcagcctaccgagtccatcgtgcgctttcccaatatcacaaacctgtgcccttttggcgaggtgttcaacgccaccagattcgccagcgtgtacgcctggaatcggaagagaatctccaactgcgtggccgactattctgtgctgtacaactccgcctctttcagcacctttaagtgctatggcgtgtctcccacaaagctgaatgatctgtgctttaccaacgtgtacgccgatagcttcgtgatcaggggagacgaagtgagacagatcgcaccaggacagacaggaaagatcgcagactacaattataagctgcctgacgatttcaccggctgcgtgatcgcctggaactccaacaatctggattctaaagtgggcggcaactacaattatctgtacaggctgtttcgcaagtccaatctgaagccattcgagcgggacatctccacaactatctaccaggccggctctaccccctgcaatggcgtggagggctttaactgttatttccctctgcagtcttacggcttccagccaacaaacggcgtgggctatcagccctacagagtggtggtgctgtcctttgagctgctgcacgcaccagcaacagtgtgcggcccaaagaagtctaccaatctggtgaagaacaagtgcgtgaacttcaacttcaacggactgaccggcacaggcgtgctgaccgagagcaataagaagttcctgccttttcagcagttcggcagggacatcgcagataccacagacgccgtgcgcgaccctcagaccctggagatcctggacatcacaccatgcagcttcggcggcgtgtccgtgatcacaccaggcaccaatacatccaaccaggtggccgtgctgtatcaggacgtgaattgtaccgaggtgcccgtggcaatccacgcagatcagctgacccctacatggcgggtgtactctaccggcagcaacgtgttccagacaagagccggatgcctgatcggagcagagcacgtgaacaatagctatgagtgcgacatccctatcggcgccggcatctgtgccagctaccagacccagacaaactccccatctggagcaggctccgtggccagccagtccatcatcgcctataccatgagcctgggcgccgagaacagcgtggcctactccaacaattctatcgccatccctaccaacttcacaatcagcgtgaccacagagatcctgccagtgtctatgaccaagacaagcgtggactgcacaatgtatatctgtggcgatagcaccgagtgctccaacctgctgctgcagtacggctccttttgtacccagctgaatagagccctgacaggcatcgccgtggagcaggataagaacacacaggaggtgttcgcccaggtgaagcagatctacaagaccccacccatcaaggactttggcggcttcaacttcagccagatcctgcctgatccaagcaagccctccaagaggtcttttatcgaggacctgctgttcaacaaggtgaccctggccgatgccggcttcatcaagcagtatggagattgcctgggagacatcgcagcccgcgacctgatctgtgcccagaagtttaatggcctgaccgtgctgcctccactgctgacagatgagatgatcgcccagtacacatctgccctgctggccggcaccatcacaagcggatggaccttcggcgcaggagccgccctgcagatcccttttgccatgcagatggcctataggttcaacggcatcggcgtgacccagaatgtgctgtacgagaaccagaagctgatcgccaatcagtttaacagcgccatcggcaagatccaggactctctgtcctctacagccagcgccctgggcaagctgcaggatgtggtgaatcagaacgcccaggccctgaataccctggtgaagcagctgagctccaacttcggcgccatctctagcgtgctgaatgacatcctgagccggctggacccccctgaggcagaggtgcagatcgacaggctgatcacaggccgcctgcagagcctgcagacctacgtgacacagcagctgatcagggcagcagagatcagagcctccgccaatctggccgccaccaagatgagcgagtgcgtgctgggacagtccaagagggtggacttttgtggcaagggctatcacctgatgtctttcccacagagcgcccctcacggcgtggtgtttctgcacgtgacctacgtgccagcccaggagaagaacttcaccacagcaccagccatctgccacgatggaaaggcacactttcctagggagggcgtgttcgtgtctaacggcacccactggtttgtgacacagcgcaatttctacgagccacagatcatcaccacagacaatacattcgtgagcggcaactgtgatgtggtgatcggcatcgtgaacaataccgtgtatgatccactgcagcccgagctggactcctttaaggaggagctggataagtacttcaagaatcacacctctcccgacgtggatctgggcgacatctccggcatcaatgcctctgtggtgaacatccagaaggagatcgaccggctgaacgaggtggccaagaatctgaacgagagcctgatcgatctgcaggagctgggcaagtatgagcagtacatcaagggctctggcagagagaacctgtatttccagggaggaggaggcagcggatacatccctgaggcaccaagggacggacaggcctacgtgcgcaaggatggcgagtgggtgctgctgtccacctttctgggccatcatcaccaccaccaccaccactga

SEQ ID NO: 5239 - DNA, 3846 bp, Artificial Sequence
  Description of Artificial Sequence: Synthetic polynucleotide
atgggcatcctgccaagcccaggaatgcccgccctgctgtctctggtgagcctgctgtccgtgctgctgatgggatgcgtggcagagacaggcacacagtgcgtgaacctgaccacaaggacccagctgccccctgcctataccaattctttcacacggggcgtgtactatcccgacaaggtgtttagaagctccgtgctgcactccacacaggatctgtttctgcctttcttttctaacgtgacctggttccacgccatccacgtgtccggcaccaatggcacaaagcggttcgacaatcccgtgctgccttttaacgatggcgtgtacttcgccagcaccgagaagtccaacatcatcagaggctggatctttggcaccacactggactctaagacacagagcctgctgatcgtgaacaatgccaccaacgtggtgatcaaggtgtgcgagttccagttttgtaatgatccattcctgggcgtgtactatcacaagaacaataagtcctggatggagtctgagtttcgcgtgtattctagcgccaacaattgcacatttgagtacgtgagccagcccttcctgatggacctggagggcaagcagggcaatttcaagaacctgagggagttcgtgtttaagaatatcgatggctacttcaagatctacagcaagcacaccccaatcaacctggtgcgcgacctgccacagggattctccgccctggagccactggtggatctgcccatcggcatcaacatcacccggtttcagacactgctggccctgcacagatcctacctgacaccaggcgactcctctagcggatggaccgcaggagctgccgcctactatgtgggctatctgcagccccggaccttcctgctgaagtacaacgagaatggcaccatcacagacgcagtggattgcgccctggaccccctgtctgagacaaagtgtacactgaagagctttaccgtggagaagggcatctatcagacaagcaatttcagggtgcagcctaccgagtccatcgtgcgctttcccaatatcacaaacctgtgcccttttggcgaggtgttcaacgccaccagattcgccagcgtgtacgcctggaatcggaagagaatctccaactgcgtggccgactattctgtgctgtacaactccgcctctttcagcacctttaagtgctatggcgtgtctcccacaaagctgaatgatctgtgctttaccaacgtgtacgccgatagcttcgtgatcaggggagacgaagtgagacagatcgcaccaggacagacaggaaagatcgcagactacaattataagctgcctgacgatttcaccggctgcgtgatcgcctggaactccaacaatctggattctaaagtgggcggcaactacaattatctgtacaggctgtttcgcaagtccaatctgaagccattcgagcgggacatctccacagagatctaccaggccggctctaccccctgcaatggcgtggagggctttaactgttatttccctctgcagtcttacggcttccagccaacaaacggcgtgggctatcagccctacagagtggtggtgctgttttttgagctgctgcacgcaccagcaacagtgtgcggcccaaagaagtctaccaatctggtgaagaacaagtgcgtgaacttcaacttcaacggactgaccggcacaggcgtgctgaccgagagcaataagaagttcctgccttttcagcagttcggcagggacatcgcagataccacagacgccgtgcgcgaccctcagaccctggagatcctggacatcacaccatgcagcttcggcggcgtgtccgtgatcacaccaggcaccaatacatccaaccaggtggccgtgctgtatcaggacgtgaattgtaccgaggtgcccgtggcaatccacgcagatcagctgacccctacatggcgggtgtactctaccggcagcaacgtgttccagacaagagccggatgcctgatcggagcagagcacgtgaacaatagctatgagtgcgacatccctatcggcgccggcatctgtgccagctaccagacccagacaaactccccatctggagcaggctccgtggccagccagtccatcatcgcctataccatgagcctgggcgccgagaacagcgtggcctactccaacaattctatcgccatccctaccaacttcacaatcagcgtgaccacagagatcctgccagtgtctatgaccaagacaagcgtggactgcacaatgtatatctgtggcgatagcaccgagtgctccaacctgctgctgcagtacggctccttttgtacccagctgaatagagccctgacaggcatcgccgtggagcaggataagaacacacaggaggtgttcgcccaggtgaagcagatctacaagaccccacccatcaaggactttggcggcttcaacttcagccagatcctgcctgatccaagcaagccctccaagaggtcttttatcgaggacctgctgttcaacaaggtgaccctggccgatgccggcttcatcaagcagtatggagattgcctgggagacatcgcagcccgcgacctgatctgtgcccagaagtttaatggcctgaccgtgctgcctccactgctgacagatgagatgatcgcccagtacacatctgccctgctggccggcaccatcacaagcggatggaccttcggcgcaggagccgccctgcagatcccttttgccatgcagatggcctataggttcaacggcatcggcgtgacccagaatgtgctgtacgagaaccagaagctgatcgccaatcagtttaacagcgccatcggcaagatccaggactctctgtcctctacagccagcgccctgggcaagctgcaggatgtggtgaatcagaacgcccaggccctgaataccctggtgaagcagctgagctccaacttcggcgccatctctagcgtgctgaatgacatcctgagccggctggacccccctgaggcagaggtgcagatcgacaggctgatcacaggccgcctgcagagcctgcagacctacgtgacacagcagctgatcagggcagcagagatcagagcctccgccaatctggccgccaccaagatgagcgagtgcgtgctgggacagtccaagagggtggacttttgtggcaagggctatcacctgatgtctttcccacagagcgcccctcacggcgtggtgtttctgcacgtgacctacgtgccagcccaggagaagaacttcaccacagcaccagccatctgccacgatggaaaggcacactttcctagggagggcgtgttcgtgtctaacggcacccactggtttgtgacacagcgcaatttctacgagccacagatcatcaccacagacaatacattcgtgagcggcaactgtgatgtggtgatcggcatcgtgaacaataccgtgtatgatccactgcagcccgagctggactcctttaaggaggagctggataagtacttcaagaatcacacctctcccgacgtggatctgggcgacatctccggcatcaatgcctctgtggtgaacatccagaaggagatcgaccggctgaacgaggtggccaagaatctgaacgagagcctgatcgatctgcaggagctgggcaagtatgagcagtacatcaagggctctggcagagagaacctgtatttccagggaggaggaggcagcggatacatccctgaggcaccaagggacggacaggcctacgtgcgcaaggatggcgagtgggtgctgctgtccacctttctgggccatcatcaccaccaccaccaccactga

SEQ ID NO: 5240 - DNA, 3846 bp, Artificial Sequence
  Description of Artificial Sequence: Synthetic polynucleotide
atgggcatcctgccaagcccaggaatgcccgccctgctgtctctggtgagcctgctgtccgtgctgctgatgggatgcgtggcagagacaggcacacagtgcgtgaacctgaccacaaggacccagctgccccctgcctataccaattctttcacacggggcgtgtactatcccgacaaggtgtttagaagctccgtgctgcactccacacaggatctgtttctgcctttcttttctaacgtgacctggttccacgccatccacgtgtccggcaccaatggcacaaagcggttcgacaatcccgtgctgccttttaacgatggcgtgtacttcgccagcaccgagaagtccaacatcatcagaggctggatctttggcaccacactggactctaagacacagagcctgctgatcgtgaacaatgccaccaacgtggtgatcaaggtgtgcgagttccagttttgtaatgatccattcctgggcgtgtactatcacaagaacaataagtcctggatggagtctgagtttcgcgtgtattctagcgccaacaattgcacatttgagtacgtgagccagcccttcctgatggacctggagggcaagcagggcaatttcaagaacctgagggagttcgtgtttaagaatatcgatggctacttcaagatctacagcaagcacaccccaatcaacctggtgcgcgacctgccacagggattctccgccctggagccactggtggatctgcccatcggcatcaacatcacccggtttcagacactgctggccctgcacagatcctacctgacaccaggcgactcctctagcggatggaccgcaggagctgccgcctactatgtgggctatctgcagccccggaccttcctgctgaagtacaacgagaatggcaccatcacagacgcagtggattgcgccctggaccccctgtctgagacaaagtgtacactgaagagctttaccgtggagaagggcatctatcagacaagcaatttcagggtgcagcctaccgagtccatcgtgcgctttcccaatatcacaaacctgtgcccttttggcgaggtgttcaacgccaccagattcgccagcgtgtacgcctggaatcggaagagaatctccaactgcgtggccgactattctgtgctgtacaactccgcctctttcagcacctttaagtgctatggcgtgtctcccacaaagctgaatgatctgtgctttaccaacgtgtacgccgatagcttcgtgatcaggggagacgaagtgagacagatcgcaccaggacagacaggaaagatcgcagactacaattataagctgcctgacgatttcaccggctgcgtgatcgcctggaactccaacaatctggattctaaagtgggcggcaactacaattatctgtacaggctgtttcgcaagtccaatctgaagccattcgagcgggacatctccacagagatctaccaggccggctctaccccctgcaatggcgtggagggctttaactgttatttccctctgcagtcttacggcttccagccaacaaacggcgtgggctatcagccctacagagtggtggtgctgtcctttgagctgctgaatgcaccagcaacagtgtgcggcccaaagaagtctaccaatctggtgaagaacaagtgcgtgaacttcaacttcaacggactgaccggcacaggcgtgctgaccgagagcaataagaagttcctgccttttcagcagttcggcagggacatcgcagataccacagacgccgtgcgcgaccctcagaccctggagatcctggacatcacaccatgcagcttcggcggcgtgtccgtgatcacaccaggcaccaatacatccaaccaggtggccgtgctgtatcaggacgtgaattgtaccgaggtgcccgtggcaatccacgcagatcagctgacccctacatggcgggtgtactctaccggcagcaacgtgttccagacaagagccggatgcctgatcggagcagagcacgtgaacaatagctatgagtgcgacatccctatcggcgccggcatctgtgccagctaccagacccagacaaactccccatctggagcaggctccgtggccagccagtccatcatcgcctataccatgagcctgggcgccgagaacagcgtggcctactccaacaattctatcgccatccctaccaacttcacaatcagcgtgaccacagagatcctgccagtgtctatgaccaagacaagcgtggactgcacaatgtatatctgtggcgatagcaccgagtgctccaacctgctgctgcagtacggctccttttgtacccagctgaatagagccctgacaggcatcgccgtggagcaggataagaacacacaggaggtgttcgcccaggtgaagcagatctacaagaccccacccatcaaggactttggcggcttcaacttcagccagatcctgcctgatccaagcaagccctccaagaggtcttttatcgaggacctgctgttcaacaaggtgaccctggccgatgccggcttcatcaagcagtatggagattgcctgggagacatcgcagcccgcgacctgatctgtgcccagaagtttaatggcctgaccgtgctgcctccactgctgacagatgagatgatcgcccagtacacatctgccctgctggccggcaccatcacaagcggatggaccttcggcgcaggagccgccctgcagatcccttttgccatgcagatggcctataggttcaacggcatcggcgtgacccagaatgtgctgtacgagaaccagaagctgatcgccaatcagtttaacagcgccatcggcaagatccaggactctctgtcctctacagccagcgccctgggcaagctgcaggatgtggtgaatcagaacgcccaggccctgaataccctggtgaagcagctgagctccaacttcggcgccatctctagcgtgctgaatgacatcctgagccggctggacccccctgaggcagaggtgcagatcgacaggctgatcacaggccgcctgcagagcctgcagacctacgtgacacagcagctgatcagggcagcagagatcagagcctccgccaatctggccgccaccaagatgagcgagtgcgtgctgggacagtccaagagggtggacttttgtggcaagggctatcacctgatgtctttcccacagagcgcccctcacggcgtggtgtttctgcacgtgacctacgtgccagcccaggagaagaacttcaccacagcaccagccatctgccacgatggaaaggcacactttcctagggagggcgtgttcgtgtctaacggcacccactggtttgtgacacagcgcaatttctacgagccacagatcatcaccacagacaatacattcgtgagcggcaactgtgatgtggtgatcggcatcgtgaacaataccgtgtatgatccactgcagcccgagctggactcctttaaggaggagctggataagtacttcaagaatcacacctctcccgacgtggatctgggcgacatctccggcatcaatgcctctgtggtgaacatccagaaggagatcgaccggctgaacgaggtggccaagaatctgaacgagagcctgatcgatctgcaggagctgggcaagtatgagcagtacatcaagggctctggcagagagaacctgtatttccagggaggaggaggcagcggatacatccctgaggcaccaagggacggacaggcctacgtgcgcaaggatggcgagtgggtgctgctgtccacctttctgggccatcatcaccaccaccaccaccactga

SEQ ID NO: 5241 - DNA, 3846 bp, Artificial Sequence
  Description of Artificial Sequence: Synthetic polynucleotide
atgggcatcctgccaagcccaggaatgcccgccctgctgtctctggtgagcctgctgtccgtgctgctgatgggatgcgtggcagagacaggcacacagtgcgtgaacctgaccacaaggacccagctgccccctgcctataccaattctttcacacggggcgtgtactatcccgacaaggtgtttagaagctccgtgctgcactccacacaggatctgtttctgcctttcttttctaacgtgacctggttccacgccatccacgtgtccggcaccaatggcacaaagcggttcgacaatcccgtgctgccttttaacgatggcgtgtacttcgccagcaccgagaagtccaacatcatcagaggctggatctttggcaccacactggactctaagacacagagcctgctgatcgtgaacaatgccaccaacgtggtgatcaaggtgtgcgagttccagttttgtaatgatccattcctgggcgtgtactatcacaagaacaataagtcctggatggagtctgagtttcgcgtgtattctagcgccaacaattgcacatttgagtacgtgagccagcccttcctgatggacctggagggcaagcagggcaatttcaagaacctgagggagttcgtgtttaagaatatcgatggctacttcaagatctacagcaagcacaccccaatcaacctggtgcgcgacctgccacagggattctccgccctggagccactggtggatctgcccatcggcatcaacatcacccggtttcagacactgctggccctgcacagatcctacctgacaccaggcgactcctctagcggatggaccgcaggagctgccgcctactatgtgggctatctgcagccccggaccttcctgctgaagtacaacgagaatggcaccatcacagacgcagtggattgcgccctggaccccctgtctgagacaaagtgtacactgaagagctttaccgtggagaagggcatctatcagacaagcaatttcagggtgcagcctaccgagtccatcgtgcgctttcccaatatcacaaacctgtgcccttttggcgaggtgttcaacgccaccagattcgccagcgtgtacgcctggaatcggaagagaatctccaactgcgtggccgactattctgtgctgtacaactccgcctctttcagcacctttaagtgctatggcgtgtctcccacaaagctgaatgatctgtgctttaccaacgtgtacgccgatagcttcgtgatcaggggagacgaagtgagacagatcgcaccaggacagacaggaaagatcgcagactacaattataagctgcctgacgatttcaccggctgcgtgatcgcctggaactccaacaatctggattctaaagtgggcggcaactacaattatctgtacaggctgtttcgcaagtccaatctgaagccattcgagtcagacatctccacagagatctaccaggccggctctaccccctgcaatggcgtggagggctttaactgttatttccctctgcagtcttacggcttccagccaacaaacggcgtgggctatcagccctacagagtggtggtgctgtcctttgagctgctgcacgcaccagcaacagtgtgcggcccaaagaagtctaccaatctggtgaagaacaagtgcgtgaacttcaacttcaacggactgaccggcacaggcgtgctgaccgagagcaataagaagttcctgccttttcagcagttcggcagggacatcgcagataccacagacgccgtgcgcgaccctcagaccctggagatcctggacatcacaccatgcagcttcggcggcgtgtccgtgatcacaccaggcaccaatacatccaaccaggtggccgtgctgtatcaggacgtgaattgtaccgaggtgcccgtggcaatccacgcagatcagctgacccctacatggcgggtgtactctaccggcagcaacgtgttccagacaagagccggatgcctgatcggagcagagcacgtgaacaatagctatgagtgcgacatccctatcggcgccggcatctgtgccagctaccagacccagacaaactccccatctggagcaggctccgtggccagccagtccatcatcgcctataccatgagcctgggcgccgagaacagcgtggcctactccaacaattctatcgccatccctaccaacttcacaatcagcgtgaccacagagatcctgccagtgtctatgaccaagacaagcgtggactgcacaatgtatatctgtggcgatagcaccgagtgctccaacctgctgctgcagtacggctccttttgtacccagctgaatagagccctgacaggcatcgccgtggagcaggataagaacacacaggaggtgttcgcccaggtgaagcagatctacaagaccccacccatcaaggactttggcggcttcaacttcagccagatcctgcctgatccaagcaagccctccaagaggtcttttatcgaggacctgctgttcaacaaggtgaccctggccgatgccggcttcatcaagcagtatggagattgcctgggagacatcgcagcccgcgacctgatctgtgcccagaagtttaatggcctgaccgtgctgcctccactgctgacagatgagatgatcgcccagtacacatctgccctgctggccggcaccatcacaagcggatggaccttcggcgcaggagccgccctgcagatcccttttgccatgcagatggcctataggttcaacggcatcggcgtgacccagaatgtgctgtacgagaaccagaagctgatcgccaatcagtttaacagcgccatcggcaagatccaggactctctgtcctctacagccagcgccctgggcaagctgcaggatgtggtgaatcagaacgcccaggccctgaataccctggtgaagcagctgagctccaacttcggcgccatctctagcgtgctgaatgacatcctgagccggctggacccccctgaggcagaggtgcagatcgacaggctgatcacaggccgcctgcagagcctgcagacctacgtgacacagcagctgatcagggcagcagagatcagagcctccgccaatctggccgccaccaagatgagcgagtgcgtgctgggacagtccaagagggtggacttttgtggcaagggctatcacctgatgtctttcccacagagcgcccctcacggcgtggtgtttctgcacgtgacctacgtgccagcccaggagaagaacttcaccacagcaccagccatctgccacgatggaaaggcacactttcctagggagggcgtgttcgtgtctaacggcacccactggtttgtgacacagcgcaatttctacgagccacagatcatcaccacagacaatacattcgtgagcggcaactgtgatgtggtgatcggcatcgtgaacaataccgtgtatgatccactgcagcccgagctggactcctttaaggaggagctggataagtacttcaagaatcacacctctcccgacgtggatctgggcgacatctccggcatcaatgcctctgtggtgaacatccagaaggagatcgaccggctgaacgaggtggccaagaatctgaacgagagcctgatcgatctgcaggagctgggcaagtatgagcagtacatcaagggctctggcagagagaacctgtatttccagggaggaggaggcagcggatacatccctgaggcaccaagggacggacaggcctacgtgcgcaaggatggcgagtgggtgctgctgtccacctttctgggccatcatcaccaccaccaccaccactga

SEQ ID NO: 5242 - DNA, 3846 bp, Artificial Sequence
  Description of Artificial Sequence: Synthetic polynucleotide
atgggcatcctgccaagcccaggaatgcccgccctgctgtctctggtgagcctgctgtccgtgctgctgatgggatgcgtggcagagacaggcacacagtgcgtgaacctgaccacaaggacccagctgccccctgcctataccaattctttcacacggggcgtgtactatcccgacaaggtgtttagaagctccgtgctgcactccacacaggatctgtttctgcctttcttttctaacgtgacctggttccacgccatccacgtgtccggcaccaatggcacaaagcggttcgacaatcccgtgctgccttttaacgatggcgtgtacttcgccagcaccgagaagtccaacatcatcagaggctggatctttggcaccacactggactctaagacacagagcctgctgatcgtgaacaatgccaccaacgtggtgatcaaggtgtgcgagttccagttttgtaatgatccattcctgggcgtgtactatcacaagaacaataagtcctggatggagtctgagtttcgcgtgtattctagcgccaacaattgcacatttgagtacgtgagccagcccttcctgatggacctggagggcaagcagggcaatttcaagaacctgagggagttcgtgtttaagaatatcgatggctacttcaagatctacagcaagcacaccccaatcaacctggtgcgcgacctgccacagggattctccgccctggagccactggtggatctgcccatcggcatcaacatcacccggtttcagacactgctggccctgcacagatcctacctgacaccaggcgactcctctagcggatggaccgcaggagctgccgcctactatgtgggctatctgcagccccggaccttcctgctgaagtacaacgagaatggcaccatcacagacgcagtggattgcgccctggaccccctgtctgagacaaagtgtacactgaagagctttaccgtggagaagggcatctatcagacaagcaatttcagggtgcagcctaccgagtccatcgtgcgctttcccaatatcacaaacctgtgcccttttggcgaggtgttcaacgccaccagattcgccagcgtgtacgcctggaatcggaagagaatctccaactgcgtggccgactattctgtgctgtacaactccgcctctttcagcacctttaagtgctatggcgtgtctcccacaaagctgaatgatctgtgctttaccaacgtgtacgccgatagcttcgtgatcaggggagacgaagtgagacagatcgcaccaggacagacaggaaagatcgcagactacaattataagctgcctgacgatttcaccggctgcgtgatcgcctggaactccaacaatctggattctaaagtgggcggcaactacaattatctgtacaggctgtttcgcaagtccaatctgaagccattcgagcgggacatctccacagagatctaccaggccggctctaccgtctgcaatggcgtggagggctttaactgttatttccctctgcagtcttacggcttccagccaacaaacggcgtgggctatcagccctacagagtggtggtgctgtcctttgagctgctgcacgcaccagcaacagtgtgcggcccaaagaagtctaccaatctggtgaagaacaagtgcgtgaacttcaacttcaacggactgaccggcacaggcgtgctgaccgagagcaataagaagttcctgccttttcagcagttcggcagggacatcgcagataccacagacgccgtgcgcgaccctcagaccctggagatcctggacatcacaccatgcagcttcggcggcgtgtccgtgatcacaccaggcaccaatacatccaaccaggtggccgtgctgtatcaggacgtgaattgtaccgaggtgcccgtggcaatccacgcagatcagctgacccctacatggcgggtgtactctaccggcagcaacgtgttccagacaagagccggatgcctgatcggagcagagcacgtgaacaatagctatgagtgcgacatccctatcggcgccggcatctgtgccagctaccagacccagacaaactccccatctggagcaggctccgtggccagccagtccatcatcgcctataccatgagcctgggcgccgagaacagcgtggcctactccaacaattctatcgccatccctaccaacttcacaatcagcgtgaccacagagatcctgccagtgtctatgaccaagacaagcgtggactgcacaatgtatatctgtggcgatagcaccgagtgctccaacctgctgctgcagtacggctccttttgtacccagctgaatagagccctgacaggcatcgccgtggagcaggataagaacacacaggaggtgttcgcccaggtgaagcagatctacaagaccccacccatcaaggactttggcggcttcaacttcagccagatcctgcctgatccaagcaagccctccaagaggtcttttatcgaggacctgctgttcaacaaggtgaccctggccgatgccggcttcatcaagcagtatggagattgcctgggagacatcgcagcccgcgacctgatctgtgcccagaagtttaatggcctgaccgtgctgcctccactgctgacagatgagatgatcgcccagtacacatctgccctgctggccggcaccatcacaagcggatggaccttcggcgcaggagccgccctgcagatcccttttgccatgcagatggcctataggttcaacggcatcggcgtgacccagaatgtgctgtacgagaaccagaagctgatcgccaatcagtttaacagcgccatcggcaagatccaggactctctgtcctctacagccagcgccctgggcaagctgcaggatgtggtgaatcagaacgcccaggccctgaataccctggtgaagcagctgagctccaacttcggcgccatctctagcgtgctgaatgacatcctgagccggctggacccccctgaggcagaggtgcagatcgacaggctgatcacaggccgcctgcagagcctgcagacctacgtgacacagcagctgatcagggcagcagagatcagagcctccgccaatctggccgccaccaagatgagcgagtgcgtgctgggacagtccaagagggtggacttttgtggcaagggctatcacctgatgtctttcccacagagcgcccctcacggcgtggtgtttctgcacgtgacctacgtgccagcccaggagaagaacttcaccacagcaccagccatctgccacgatggaaaggcacactttcctagggagggcgtgttcgtgtctaacggcacccactggtttgtgacacagcgcaatttctacgagccacagatcatcaccacagacaatacattcgtgagcggcaactgtgatgtggtgatcggcatcgtgaacaataccgtgtatgatccactgcagcccgagctggactcctttaaggaggagctggataagtacttcaagaatcacacctctcccgacgtggatctgggcgacatctccggcatcaatgcctctgtggtgaacatccagaaggagatcgaccggctgaacgaggtggccaagaatctgaacgagagcctgatcgatctgcaggagctgggcaagtatgagcagtacatcaagggctctggcagagagaacctgtatttccagggaggaggaggcagcggatacatccctgaggcaccaagggacggacaggcctacgtgcgcaaggatggcgagtgggtgctgctgtccacctttctgggccatcatcaccaccaccaccaccactga

SEQ ID NO: 5243 - DNA, 3846 bp, Artificial Sequence
  Description of Artificial Sequence: Synthetic polynucleotide
atgggcatcctgccaagcccaggaatgcccgccctgctgtctctggtgagcctgctgtccgtgctgctgatgggatgcgtggcagagacaggcacacagtgcgtgaacctgaccacaaggacccagctgccccctgcctataccaattctttcacacggggcgtgtactatcccgacaaggtgtttagaagctccgtgctgcactccacacaggatctgtttctgcctttcttttctaacgtgacctggttccacgccatccacgtgtccggcaccaatggcacaaagcggttcgacaatcccgtgctgccttttaacgatggcgtgtacttcgccagcaccgagaagtccaacatcatcagaggctggatctttggcaccacactggactctaagacacagagcctgctgatcgtgaacaatgccaccaacgtggtgatcaaggtgtgcgagttccagttttgtaatgatccattcctgggcgtgtactatcacaagaacaataagtcctggatggagtctgagtttcgcgtgtattctagcgccaacaattgcacatttgagtacgtgagccagcccttcctgatggacctggagggcaagcagggcaatttcaagaacctgagggagttcgtgtttaagaatatcgatggctacttcaagatctacagcaagcacaccccaatcaacctggtgcgcgacctgccacagggattctccgccctggagccactggtggatctgcccatcggcatcaacatcacccggtttcagacactgctggccctgcacagatcctacctgacaccaggcgactcctctagcggatggaccgcaggagctgccgcctactatgtgggctatctgcagccccggaccttcctgctgaagtacaacgagaatggcaccatcacagacgcagtggattgcgccctggaccccctgtctgagacaaagtgtacactgaagagctttaccgtggagaagggcatctatcagacaagcaatttcagggtgcagcctaccgagtccatcgtgcgctttcccaatatcacaaacctgtgcccttttggcgaggtgttcaacgccaccagattcgccagcgtgtacgcctggaatcggaagagaatctccaactgcgtggccgactattctgtgctgtacaactccgcctctttcagcacctttaagtgctatggcgtgtctcccacaaagctgaatgatctgtgctttaccaacgtgtacgccgatagcttcgtgatcaggggagacgaagtgagacagatcgcaccaggacagacaggaaagatcgcagactacaattataagctgcctgacgatttcaccggctgcgtgatcgcctggaactccaacaatctggattctaaagtgggcggcaactacaattatctgtacaggctgtttcgcaagtccaatctgaagccattcgagcgggacatctccacatgtatctaccaggccggctctaccccctgcaatggcgtggagggctttaactgttatttccctctgcagtcttacggcttccagccaacaaacggcgtgggctatcagccctacagagtggtggtgctgtcctttgagctgctgcacgcaccagcaacagtgtgcggcccaaagaagtctaccaatctggtgaagaacaagtgcgtgaacttcaacttcaacggactgaccggcacaggcgtgctgaccgagagcaataagaagttcctgccttttcagcagttcggcagggacatcgcagataccacagacgccgtgcgcgaccctcagaccctggagatcctggacatcacaccatgcagcttcggcggcgtgtccgtgatcacaccaggcaccaatacatccaaccaggtggccgtgctgtatcaggacgtgaattgtaccgaggtgcccgtggcaatccacgcagatcagctgacccctacatggcgggtgtactctaccggcagcaacgtgttccagacaagagccggatgcctgatcggagcagagcacgtgaacaatagctatgagtgcgacatccctatcggcgccggcatctgtgccagctaccagacccagacaaactccccatctggagcaggctccgtggccagccagtccatcatcgcctataccatgagcctgggcgccgagaacagcgtggcctactccaacaattctatcgccatccctaccaacttcacaatcagcgtgaccacagagatcctgccagtgtctatgaccaagacaagcgtggactgcacaatgtatatctgtggcgatagcaccgagtgctccaacctgctgctgcagtacggctccttttgtacccagctgaatagagccctgacaggcatcgccgtggagcaggataagaacacacaggaggtgttcgcccaggtgaagcagatctacaagaccccacccatcaaggactttggcggcttcaacttcagccagatcctgcctgatccaagcaagccctccaagaggtcttttatcgaggacctgctgttcaacaaggtgaccctggccgatgccggcttcatcaagcagtatggagattgcctgggagacatcgcagcccgcgacctgatctgtgcccagaagtttaatggcctgaccgtgctgcctccactgctgacagatgagatgatcgcccagtacacatctgccctgctggccggcaccatcacaagcggatggaccttcggcgcaggagccgccctgcagatcccttttgccatgcagatggcctataggttcaacggcatcggcgtgacccagaatgtgctgtacgagaaccagaagctgatcgccaatcagtttaacagcgccatcggcaagatccaggactctctgtcctctacagccagcgccctgggcaagctgcaggatgtggtgaatcagaacgcccaggccctgaataccctggtgaagcagctgagctccaacttcggcgccatctctagcgtgctgaatgacatcctgagccggctggacccccctgaggcagaggtgcagatcgacaggctgatcacaggccgcctgcagagcctgcagacctacgtgacacagcagctgatcagggcagcagagatcagagcctccgccaatctggccgccaccaagatgagcgagtgcgtgctgggacagtccaagagggtggacttttgtggcaagggctatcacctgatgtctttcccacagagcgcccctcacggcgtggtgtttctgcacgtgacctacgtgccagcccaggagaagaacttcaccacagcaccagccatctgccacgatggaaaggcacactttcctagggagggcgtgttcgtgtctaacggcacccactggtttgtgacacagcgcaatttctacgagccacagatcatcaccacagacaatacattcgtgagcggcaactgtgatgtggtgatcggcatcgtgaacaataccgtgtatgatccactgcagcccgagctggactcctttaaggaggagctggataagtacttcaagaatcacacctctcccgacgtggatctgggcgacatctccggcatcaatgcctctgtggtgaacatccagaaggagatcgaccggctgaacgaggtggccaagaatctgaacgagagcctgatcgatctgcaggagctgggcaagtatgagcagtacatcaagggctctggcagagagaacctgtatttccagggaggaggaggcagcggatacatccctgaggcaccaagggacggacaggcctacgtgcgcaaggatggcgagtgggtgctgctgtccacctttctgggccatcatcaccaccaccaccaccactga

SEQ ID NO: 5244 - DNA, 3846 bp, Artificial Sequence
  Description of Artificial Sequence: Synthetic polynucleotide
atgggcatcctgccaagcccaggaatgcccgccctgctgtctctggtgagcctgctgtccgtgctgctgatgggatgcgtggcagagacaggcacacagtgcgtgaacctgaccacaaggacccagctgccccctgcctataccaattctttcacacggggcgtgtactatcccgacaaggtgtttagaagctccgtgctgcactccacacaggatctgtttctgcctttcttttctaacgtgacctggttccacgccatccacgtgtccggcaccaatggcacaaagcggttcgacaatcccgtgctgccttttaacgatggcgtgtacttcgccagcaccgagaagtccaacatcatcagaggctggatctttggcaccacactggactctaagacacagagcctgctgatcgtgaacaatgccaccaacgtggtgatcaaggtgtgcgagttccagttttgtaatgatccattcctgggcgtgtactatcacaagaacaataagtcctggatggagtctgagtttcgcgtgtattctagcgccaacaattgcacatttgagtacgtgagccagcccttcctgatggacctggagggcaagcagggcaatttcaagaacctgagggagttcgtgtttaagaatatcgatggctacttcaagatctacagcaagcacaccccaatcaacctggtgcgcgacctgccacagggattctccgccctggagccactggtggatctgcccatcggcatcaacatcacccggtttcagacactgctggccctgcacagatcctacctgacaccaggcgactcctctagcggatggaccgcaggagctgccgcctactatgtgggctatctgcagccccggaccttcctgctgaagtacaacgagaatggcaccatcacagacgcagtggattgcgccctggaccccctgtctgagacaaagtgtacactgaagagctttaccgtggagaagggcatctatcagacaagcaatttcagggtgcagcctaccgagtccatcgtgcgctttcccaatatcacaaacctgtgcccttttggcgaggtgttcaacgccaccagattcgccagcgtgtacgcctggaatcggaagagaatctccaactgcgtggccgactatcgagtgctgtacaactccgcctctttcagcacctttaagtgctatggcgtgtctcccacaaagctgaatgatctgtgctttaccaacgtgtacgccgatagcttcgtgatcaggggagacgaagtgagacagatcgcaccaggacagacaggaaagatcgcagactacaattataagctgcctgacgatttcaccggctgcgtgatcgcctggaactccaacaatctggattctaaagtgggcggcaactacaattatctgtacaggctgtttcgcaagtccaatctgaagccattcgagcgggacatctccacagagatctaccaggccggctctaccccctgcaatggcgtggagggctttaactgttatttccctctgcagtcttacggcttccagccaacaaacggcgtgggctatcagccctacagagtggtggtgctgtcctttgagctgctgcacgcaccagcaacagtgtgcggcccaaagaagtctaccaatctggtgaagaacaagtgcgtgaacttcaacttcaacggactgaccggcacaggcgtgctgaccgagagcaataagaagttcctgccttttcagcagttcggcagggacatcgcagataccacagacgccgtgcgcgaccctcagaccctggagatcctggacatcacaccatgcagcttcggcggcgtgtccgtgatcacaccaggcaccaatacatccaaccaggtggccgtgctgtatcaggacgtgaattgtaccgaggtgcccgtggcaatccacgcagatcagctgacccctacatggcgggtgtactctaccggcagcaacgtgttccagacaagagccggatgcctgatcggagcagagcacgtgaacaatagctatgagtgcgacatccctatcggcgccggcatctgtgccagctaccagacccagacaaactccccatctggagcaggctccgtggccagccagtccatcatcgcctataccatgagcctgggcgccgagaacagcgtggcctactccaacaattctatcgccatccctaccaacttcacaatcagcgtgaccacagagatcctgccagtgtctatgaccaagacaagcgtggactgcacaatgtatatctgtggcgatagcaccgagtgctccaacctgctgctgcagtacggctccttttgtacccagctgaatagagccctgacaggcatcgccgtggagcaggataagaacacacaggaggtgttcgcccaggtgaagcagatctacaagaccccacccatcaaggactttggcggcttcaacttcagccagatcctgcctgatccaagcaagccctccaagaggtcttttatcgaggacctgctgttcaacaaggtgaccctggccgatgccggcttcatcaagcagtatggagattgcctgggagacatcgcagcccgcgacctgatctgtgcccagaagtttaatggcctgaccgtgctgcctccactgctgacagatgagatgatcgcccagtacacatctgccctgctggccggcaccatcacaagcggatggaccttcggcgcaggagccgccctgcagatcccttttgccatgcagatggcctataggttcaacggcatcggcgtgacccagaatgtgctgtacgagaaccagaagctgatcgccaatcagtttaacagcgccatcggcaagatccaggactctctgtcctctacagccagcgccctgggcaagctgcaggatgtggtgaatcagaacgcccaggccctgaataccctggtgaagcagctgagctccaacttcggcgccatctctagcgtgctgaatgacatcctgagccggctggacccccctgaggcagaggtgcagatcgacaggctgatcacaggccgcctgcagagcctgcagacctacgtgacacagcagctgatcagggcagcagagatcagagcctccgccaatctggccgccaccaagatgagcgagtgcgtgctgggacagtccaagagggtggacttttgtggcaagggctatcacctgatgtctttcccacagagcgcccctcacggcgtggtgtttctgcacgtgacctacgtgccagcccaggagaagaacttcaccacagcaccagccatctgccacgatggaaaggcacactttcctagggagggcgtgttcgtgtctaacggcacccactggtttgtgacacagcgcaatttctacgagccacagatcatcaccacagacaatacattcgtgagcggcaactgtgatgtggtgatcggcatcgtgaacaataccgtgtatgatccactgcagcccgagctggactcctttaaggaggagctggataagtacttcaagaatcacacctctcccgacgtggatctgggcgacatctccggcatcaatgcctctgtggtgaacatccagaaggagatcgaccggctgaacgaggtggccaagaatctgaacgagagcctgatcgatctgcaggagctgggcaagtatgagcagtacatcaagggctctggcagagagaacctgtatttccagggaggaggaggcagcggatacatccctgaggcaccaagggacggacaggcctacgtgcgcaaggatggcgagtgggtgctgctgtccacctttctgggccatcatcaccaccaccaccaccactga

SEQ ID NO: 5245 - DNA, 3846 bp, Artificial Sequence
  Description of Artificial Sequence: Synthetic polynucleotide
atgggcatcctgccaagcccaggaatgcccgccctgctgtctctggtgagcctgctgtccgtgctgctgatgggatgcgtggcagagacaggcacacagtgcgtgaacctgaccacaaggacccagctgccccctgcctataccaattctttcacacggggcgtgtactatcccgacaaggtgtttagaagctccgtgctgcactccacacaggatctgtttctgcctttcttttctaacgtgacctggttccacgccatccacgtgtccggcaccaatggcacaaagcggttcgacaatcccgtgctgccttttaacgatggcgtgtacttcgccagcaccgagaagtccaacatcatcagaggctggatctttggcaccacactggactctaagacacagagcctgctgatcgtgaacaatgccaccaacgtggtgatcaaggtgtgcgagttccagttttgtaatgatccattcctgggcgtgtactatcacaagaacaataagtcctggatggagtctgagtttcgcgtgtattctagcgccaacaattgcacatttgagtacgtgagccagcccttcctgatggacctggagggcaagcagggcaatttcaagaacctgagggagttcgtgtttaagaatatcgatggctacttcaagatctacagcaagcacaccccaatcaacctggtgcgcgacctgccacagggattctccgccctggagccactggtggatctgcccatcggcatcaacatcacccggtttcagacactgctggccctgcacagatcctacctgacaccaggcgactcctctagcggatggaccgcaggagctgccgcctactatgtgggctatctgcagccccggaccttcctgctgaagtacaacgagaatggcaccatcacagacgcagtggattgcgccctggaccccctgtctgagacaaagtgtacactgaagagctttaccgtggagaagggcatctatcagacaagcaatttcagggtgcagcctaccgagtccatcgtgcgctttcccaatatcacaaacctgtgcccttttggcgaggtgttcaacgccaccagattcgccagcgtgtacgcctggaatcggaagagaatctccaactgcgtggccgactattctgtgctgtacaactccgcctctttcagcacctttaagtgctatggcgtgtctcccacaaagctgaatgatctgtgctttaccaacgtgtacgccgatagcttcgtgatcaggggagacgaagtgagacagatcgcaccaggacagacaggaaagatcgcagactacaattataagctgcctgacgatttcaccggctgcgtgatcgcctggaactccaacaatctggattctaaagtgggcggcaactacaattatctgtacaggctgtttcgcaagtccaatctgaagccattctcacgggacatctccacagagatctaccaggccggctctaccccctgcaatggcgtggagggctttaactgttatttccctctgcagtcttacggcttccagccaacaaacggcgtgggctatcagccctacagagtggtggtgctgtcctttgagctgctgcacgcaccagcaacagtgtgcggcccaaagaagtctaccaatctggtgaagaacaagtgcgtgaacttcaacttcaacggactgaccggcacaggcgtgctgaccgagagcaataagaagttcctgccttttcagcagttcggcagggacatcgcagataccacagacgccgtgcgcgaccctcagaccctggagatcctggacatcacaccatgcagcttcggcggcgtgtccgtgatcacaccaggcaccaatacatccaaccaggtggccgtgctgtatcaggacgtgaattgtaccgaggtgcccgtggcaatccacgcagatcagctgacccctacatggcgggtgtactctaccggcagcaacgtgttccagacaagagccggatgcctgatcggagcagagcacgtgaacaatagctatgagtgcgacatccctatcggcgccggcatctgtgccagctaccagacccagacaaactccccatctggagcaggctccgtggccagccagtccatcatcgcctataccatgagcctgggcgccgagaacagcgtggcctactccaacaattctatcgccatccctaccaacttcacaatcagcgtgaccacagagatcctgccagtgtctatgaccaagacaagcgtggactgcacaatgtatatctgtggcgatagcaccgagtgctccaacctgctgctgcagtacggctccttttgtacccagctgaatagagccctgacaggcatcgccgtggagcaggataagaacacacaggaggtgttcgcccaggtgaagcagatctacaagaccccacccatcaaggactttggcggcttcaacttcagccagatcctgcctgatccaagcaagccctccaagaggtcttttatcgaggacctgctgttcaacaaggtgaccctggccgatgccggcttcatcaagcagtatggagattgcctgggagacatcgcagcccgcgacctgatctgtgcccagaagtttaatggcctgaccgtgctgcctccactgctgacagatgagatgatcgcccagtacacatctgccctgctggccggcaccatcacaagcggatggaccttcggcgcaggagccgccctgcagatcccttttgccatgcagatggcctataggttcaacggcatcggcgtgacccagaatgtgctgtacgagaaccagaagctgatcgccaatcagtttaacagcgccatcggcaagatccaggactctctgtcctctacagccagcgccctgggcaagctgcaggatgtggtgaatcagaacgcccaggccctgaataccctggtgaagcagctgagctccaacttcggcgccatctctagcgtgctgaatgacatcctgagccggctggacccccctgaggcagaggtgcagatcgacaggctgatcacaggccgcctgcagagcctgcagacctacgtgacacagcagctgatcagggcagcagagatcagagcctccgccaatctggccgccaccaagatgagcgagtgcgtgctgggacagtccaagagggtggacttttgtggcaagggctatcacctgatgtctttcccacagagcgcccctcacggcgtggtgtttctgcacgtgacctacgtgccagcccaggagaagaacttcaccacagcaccagccatctgccacgatggaaaggcacactttcctagggagggcgtgttcgtgtctaacggcacccactggtttgtgacacagcgcaatttctacgagccacagatcatcaccacagacaatacattcgtgagcggcaactgtgatgtggtgatcggcatcgtgaacaataccgtgtatgatccactgcagcccgagctggactcctttaaggaggagctggataagtacttcaagaatcacacctctcccgacgtggatctgggcgacatctccggcatcaatgcctctgtggtgaacatccagaaggagatcgaccggctgaacgaggtggccaagaatctgaacgagagcctgatcgatctgcaggagctgggcaagtatgagcagtacatcaagggctctggcagagagaacctgtatttccagggaggaggaggcagcggatacatccctgaggcaccaagggacggacaggcctacgtgcgcaaggatggcgagtgggtgctgctgtccacctttctgggccatcatcaccaccaccaccaccactga

SEQ ID NO: 5246 - DNA, 3846 bp, Artificial Sequence
  Description of Artificial Sequence: Synthetic polynucleotide
atgggcatcctgccaagcccaggaatgcccgccctgctgtctctggtgagcctgctgtccgtgctgctgatgggatgcgtggcagagacaggcacacagtgcgtgaacctgaccacaaggacccagctgccccctgcctataccaattctttcacacggggcgtgtactatcccgacaaggtgtttagaagctccgtgctgcactccacacaggatctgtttctgcctttcttttctaacgtgacctggttccacgccatccacgtgtccggcaccaatggcacaaagcggttcgacaatcccgtgctgccttttaacgatggcgtgtacttcgccagcaccgagaagtccaacatcatcagaggctggatctttggcaccacactggactctaagacacagagcctgctgatcgtgaacaatgccaccaacgtggtgatcaaggtgtgcgagttccagttttgtaatgatccattcctgggcgtgtactatcacaagaacaataagtcctggatggagtctgagtttcgcgtgtattctagcgccaacaattgcacatttgagtacgtgagccagcccttcctgatggacctggagggcaagcagggcaatttcaagaacctgagggagttcgtgtttaagaatatcgatggctacttcaagatctacagcaagcacaccccaatcaacctggtgcgcgacctgccacagggattctccgccctggagccactggtggatctgcccatcggcatcaacatcacccggtttcagacactgctggccctgcacagatcctacctgacaccaggcgactcctctagcggatggaccgcaggagctgccgcctactatgtgggctatctgcagccccggaccttcctgctgaagtacaacgagaatggcaccatcacagacgcagtggattgcgccctggaccccctgtctgagacaaagtgtacactgaagagctttaccgtggagaagggcatctatcagacaagcaatttcagggtgcagcctaccgagtccatcgtgcgctttcccaatatcacaaacctgtgcccttttggcgaggtgttcaacgccaccagattcgccagcgtgtacgcctggaatcggaagagaatctccaactgcgtggccgactattctgtgctgtacaactccgcctctttcagcacctttaagtgctatggcgtgtctcccacaaagctgaatgatctgtgctttaccaacgtgtacgccgatagcttcgtgatcaggggagacgaagtgagacagatcgcaccaggacagacaggaaagatcgcagactacaattataagctgcctgacgatttcaccggctgcgtgatcgcctggaactccaacaatctggattctaaagtgggcggcaactacaattatctgtacaggctgtttcgcaagtccaatctgaagccattcgagcgggacatctccacagagatctaccaggccggctctaccccctgcaatggcgtggagggctttaactgttatttccctctgcagtcttacggcttccagccaacaaacggcgtgggctatcagccctacagagtggtggtgctgtcctttgagctgtcacacgcaccagcaacagtgtgcggcccaaagaagtctaccaatctggtgaagaacaagtgcgtgaacttcaacttcaacggactgaccggcacaggcgtgctgaccgagagcaataagaagttcctgccttttcagcagttcggcagggacatcgcagataccacagacgccgtgcgcgaccctcagaccctggagatcctggacatcacaccatgcagcttcggcggcgtgtccgtgatcacaccaggcaccaatacatccaaccaggtggccgtgctgtatcaggacgtgaattgtaccgaggtgcccgtggcaatccacgcagatcagctgacccctacatggcgggtgtactctaccggcagcaacgtgttccagacaagagccggatgcctgatcggagcagagcacgtgaacaatagctatgagtgcgacatccctatcggcgccggcatctgtgccagctaccagacccagacaaactccccatctggagcaggctccgtggccagccagtccatcatcgcctataccatgagcctgggcgccgagaacagcgtggcctactccaacaattctatcgccatccctaccaacttcacaatcagcgtgaccacagagatcctgccagtgtctatgaccaagacaagcgtggactgcacaatgtatatctgtggcgatagcaccgagtgctccaacctgctgctgcagtacggctccttttgtacccagctgaatagagccctgacaggcatcgccgtggagcaggataagaacacacaggaggtgttcgcccaggtgaagcagatctacaagaccccacccatcaaggactttggcggcttcaacttcagccagatcctgcctgatccaagcaagccctccaagaggtcttttatcgaggacctgctgttcaacaaggtgaccctggccgatgccggcttcatcaagcagtatggagattgcctgggagacatcgcagcccgcgacctgatctgtgcccagaagtttaatggcctgaccgtgctgcctccactgctgacagatgagatgatcgcccagtacacatctgccctgctggccggcaccatcacaagcggatggaccttcggcgcaggagccgccctgcagatcccttttgccatgcagatggcctataggttcaacggcatcggcgtgacccagaatgtgctgtacgagaaccagaagctgatcgccaatcagtttaacagcgccatcggcaagatccaggactctctgtcctctacagccagcgccctgggcaagctgcaggatgtggtgaatcagaacgcccaggccctgaataccctggtgaagcagctgagctccaacttcggcgccatctctagcgtgctgaatgacatcctgagccggctggacccccctgaggcagaggtgcagatcgacaggctgatcacaggccgcctgcagagcctgcagacctacgtgacacagcagctgatcagggcagcagagatcagagcctccgccaatctggccgccaccaagatgagcgagtgcgtgctgggacagtccaagagggtggacttttgtggcaagggctatcacctgatgtctttcccacagagcgcccctcacggcgtggtgtttctgcacgtgacctacgtgccagcccaggagaagaacttcaccacagcaccagccatctgccacgatggaaaggcacactttcctagggagggcgtgttcgtgtctaacggcacccactggtttgtgacacagcgcaatttctacgagccacagatcatcaccacagacaatacattcgtgagcggcaactgtgatgtggtgatcggcatcgtgaacaataccgtgtatgatccactgcagcccgagctggactcctttaaggaggagctggataagtacttcaagaatcacacctctcccgacgtggatctgggcgacatctccggcatcaatgcctctgtggtgaacatccagaaggagatcgaccggctgaacgaggtggccaagaatctgaacgagagcctgatcgatctgcaggagctgggcaagtatgagcagtacatcaagggctctggcagagagaacctgtatttccagggaggaggaggcagcggatacatccctgaggcaccaagggacggacaggcctacgtgcgcaaggatggcgagtgggtgctgctgtccacctttctgggccatcatcaccaccaccaccaccactga

SEQ ID NO: 5247 - DNA, 3846 bp, Artificial Sequence
  Description of Artificial Sequence: Synthetic polynucleotide
atgggcatcctgccaagcccaggaatgcccgccctgctgtctctggtgagcctgctgtccgtgctgctgatgggatgcgtggcagagacaggcacacagtgcgtgaacctgaccacaaggacccagctgccccctgcctataccaattctttcacacggggcgtgtactatcccgacaaggtgtttagaagctccgtgctgcactccacacaggatctgtttctgcctttcttttctaacgtgacctggttccacgccatccacgtgtccggcaccaatggcacaaagcggttcgacaatcccgtgctgccttttaacgatggcgtgtacttcgccagcaccgagaagtccaacatcatcagaggctggatctttggcaccacactggactctaagacacagagcctgctgatcgtgaacaatgccaccaacgtggtgatcaaggtgtgcgagttccagttttgtaatgatccattcctgggcgtgtactatcacaagaacaataagtcctggatggagtctgagtttcgcgtgtattctagcgccaacaattgcacatttgagtacgtgagccagcccttcctgatggacctggagggcaagcagggcaatttcaagaacctgagggagttcgtgtttaagaatatcgatggctacttcaagatctacagcaagcacaccccaatcaacctggtgcgcgacctgccacagggattctccgccctggagccactggtggatctgcccatcggcatcaacatcacccggtttcagacactgctggccctgcacagatcctacctgacaccaggcgactcctctagcggatggaccgcaggagctgccgcctactatgtgggctatctgcagccccggaccttcctgctgaagtacaacgagaatggcaccatcacagacgcagtggattgcgccctggaccccctgtctgagacaaagtgtacactgaagagctttaccgtggagaagggcatctatcagacaagcaatttcagggtgcagcctaccgagtccatcgtgcgctttcccaatatcacaaacctgtgcccttttggcgaggtgttcaacgccaccagattcgccagcgtgtacgcctggaatcggaagagaatctccaactgcgtggccgactattctgtgctgtacaactccgcctctttcagcacctttaagtgctatggcgtgtctcccacaaagctgaatgatctgtgctttaccaacgtgtacgccgatagcttcgtgatcaggggagacgaagtgagacagatcgcaccaggacagacaggaaagatcgcagactacaattataagctgcctgacgatttcaccggctgcgtgatcgcctggaactccaacaatctggattctaaagtgggcggcaactacaattatctgtacaggctgtttcgcaagtccaatctgaagccattcgagcgggacatctccacagttatctaccaggccggctctaccccctgcaatggcgtggagggctttaactgttatttccctctgcagtcttacggcttccagccaacaaacggcgtgggctatcagccctacagagtggtggtgctgtcctttgagctgctgcacgcaccagcaacagtgtgcggcccaaagaagtctaccaatctggtgaagaacaagtgcgtgaacttcaacttcaacggactgaccggcacaggcgtgctgaccgagagcaataagaagttcctgccttttcagcagttcggcagggacatcgcagataccacagacgccgtgcgcgaccctcagaccctggagatcctggacatcacaccatgcagcttcggcggcgtgtccgtgatcacaccaggcaccaatacatccaaccaggtggccgtgctgtatcaggacgtgaattgtaccgaggtgcccgtggcaatccacgcagatcagctgacccctacatggcgggtgtactctaccggcagcaacgtgttccagacaagagccggatgcctgatcggagcagagcacgtgaacaatagctatgagtgcgacatccctatcggcgccggcatctgtgccagctaccagacccagacaaactccccatctggagcaggctccgtggccagccagtccatcatcgcctataccatgagcctgggcgccgagaacagcgtggcctactccaacaattctatcgccatccctaccaacttcacaatcagcgtgaccacagagatcctgccagtgtctatgaccaagacaagcgtggactgcacaatgtatatctgtggcgatagcaccgagtgctccaacctgctgctgcagtacggctccttttgtacccagctgaatagagccctgacaggcatcgccgtggagcaggataagaacacacaggaggtgttcgcccaggtgaagcagatctacaagaccccacccatcaaggactttggcggcttcaacttcagccagatcctgcctgatccaagcaagccctccaagaggtcttttatcgaggacctgctgttcaacaaggtgaccctggccgatgccggcttcatcaagcagtatggagattgcctgggagacatcgcagcccgcgacctgatctgtgcccagaagtttaatggcctgaccgtgctgcctccactgctgacagatgagatgatcgcccagtacacatctgccctgctggccggcaccatcacaagcggatggaccttcggcgcaggagccgccctgcagatcccttttgccatgcagatggcctataggttcaacggcatcggcgtgacccagaatgtgctgtacgagaaccagaagctgatcgccaatcagtttaacagcgccatcggcaagatccaggactctctgtcctctacagccagcgccctgggcaagctgcaggatgtggtgaatcagaacgcccaggccctgaataccctggtgaagcagctgagctccaacttcggcgccatctctagcgtgctgaatgacatcctgagccggctggacccccctgaggcagaggtgcagatcgacaggctgatcacaggccgcctgcagagcctgcagacctacgtgacacagcagctgatcagggcagcagagatcagagcctccgccaatctggccgccaccaagatgagcgagtgcgtgctgggacagtccaagagggtggacttttgtggcaagggctatcacctgatgtctttcccacagagcgcccctcacggcgtggtgtttctgcacgtgacctacgtgccagcccaggagaagaacttcaccacagcaccagccatctgccacgatggaaaggcacactttcctagggagggcgtgttcgtgtctaacggcacccactggtttgtgacacagcgcaatttctacgagccacagatcatcaccacagacaatacattcgtgagcggcaactgtgatgtggtgatcggcatcgtgaacaataccgtgtatgatccactgcagcccgagctggactcctttaaggaggagctggataagtacttcaagaatcacacctctcccgacgtggatctgggcgacatctccggcatcaatgcctctgtggtgaacatccagaaggagatcgaccggctgaacgaggtggccaagaatctgaacgagagcctgatcgatctgcaggagctgggcaagtatgagcagtacatcaagggctctggcagagagaacctgtatttccagggaggaggaggcagcggatacatccctgaggcaccaagggacggacaggcctacgtgcgcaaggatggcgagtgggtgctgctgtccacctttctgggccatcatcaccaccaccaccaccactga

SEQ ID NO: 5248 - protein, 1281 aa, Artificial Sequence
  Description of Artificial Sequence: Synthetic polypeptide
MGILPSPGMPALLSLVSLLSVLLMGCVAETGTQCVNLTTRTQLPPAYTNSFTRGVYYPDKVFRSSVLHSTQDLFLPFFSNVTWFHAIHVSGTNGTKRFDNPVLPFNDGVYFASTEKSNIIRGWIFGTTLDSKTQSLLIVNNATNVVIKVCEFQFCNDPFLGVYYHKNNKSWMESEFRVYSSANNCTFEYVSQPFLMDLEGKQGNFKNLREFVFKNIDGYFKIYSKHTPINLVRDLPQGFSALEPLVDLPIGINITRFQTLLALHRSYLTPGDSSSGWTAGAAAYYVGYLQPRTFLLKYNENGTITDAVDCALDPLSETKCTLKSFTVEKGIYQTSNFRVQPTESIVRFPNITNLCPFGEVFNATRFASVYAWNRKRISNCVADYSVLYNSASFSTFKCYGVSPTKLNDLCFTNVYADSFVIRGDEVRQIAPGQTGKIADYVYKLPDDFTGCVIAWNSNNLDSKVGGNYNYLYRLFRKSNLKPFERDISTEIYQAGSTPCNGVEGFNCYFPLQSYGFQPTNGVGYQPYRVVVLSFELLHAPATVCGPKKSTNLVKNKCVNFNFNGLTGTGVLTESNKKFLPFQQFGRDIADTTDAVRDPQTLEILDITPCSFGGVSVITPGTNTSNQVAVLYQDVNCTEVPVAIHADQLTPTWRVYSTGSNVFQTRAGCLIGAEHVNNSYECDIPIGAGICASYQTQTNSPSGAGSVASQSIIAYTMSLGAENSVAYSNNSIAIPTNFTISVTTEILPVSMTKTSVDCTMYICGDSTECSNLLLQYGSFCTQLNRALTGIAVEQDKNTQEVFAQVKQIYKTPPIKDFGGFNFSQILPDPSKPSKRSFIEDLLFNKVTLADAGFIKQYGDCLGDIAARDLICAQKFNGLTVLPPLLTDEMIAQYTSALLAGTITSGWTFGAGAALQIPFAMQMAYRFNGIGVTQNVLYENQKLIANQFNSAIGKIQDSLSSTASALGKLQDVVNQNAQALNTLVKQLSSNFGAISSVLNDILSRLDPPEAEVQIDRLITGRLQSLQTYVTQQLIRAAEIRASANLAATKMSECVLGQSKRVDFCGKGYHLMSFPQSAPHGVVFLHVTYVPAQEKNFTTAPAICHDGKAHFPREGVFVSNGTHWFVTQRNFYEPQIITTDNTFVSGNCDVVIGIVNNTVYDPLQPELDSFKEELDKYFKNHTSPDVDLGDISGINASVVNIQKEIDRLNEVAKNLNESLIDLQELGKYEQYIKGSGRENLYFQGGGGSGYIPEAPRDGQAYVRKDGEWVLLSTFLGHHHHHHHH

SEQ ID NO: 5249 - protein, 1281 aa, Artificial Sequence
  Description of Artificial Sequence: Synthetic polypeptide
MGILPSPGMPALLSLVSLLSVLLMGCVAETGTQCVNLTTRTQLPPAYTNSFTRGVYYPDKVFRSSVLHSTQDLFLPFFSNVTWFHAIHVSGTNGTKRFDNPVLPFNDGVYFASTEKSNIIRGWIFGTTLDSKTQSLLIVNNATNVVIKVCEFQFCNDPFLGVYYHKNNKSWMESEFRVYSSANNCTFEYVSQPFLMDLEGKQGNFKNLREFVFKNIDGYFKIYSKHTPINLVRDLPQGFSALEPLVDLPIGINITRFQTLLALHRSYLTPGDSSSGWTAGAAAYYVGYLQPRTFLLKYNENGTITDAVDCALDPLSETKCTLKSFTVEKGIYQTSNFRVQPTESIVRFPNITNLCPFGEVFNATRFASVYAWNRKRISNCVADYSVLYNSASFSTFKCYGVSPTKLNDLCFTNVYADSFVIRGDEVRQIAPGQTGKIADYNYKLPDDFTGCVIAWNSNNLDSKKGGNYNYLYRLFRKSNLKPFERDISTEIYQAGSTPCNGVEGFNCYFPLQSYGFQPTNGVGYQPYRVVVLSFELLHAPATVCGPKKSTNLVKNKCVNFNFNGLTGTGVLTESNKKFLPFQQFGRDIADTTDAVRDPQTLEILDITPCSFGGVSVITPGTNTSNQVAVLYQDVNCTEVPVAIHADQLTPTWRVYSTGSNVFQTRAGCLIGAEHVNNSYECDIPIGAGICASYQTQTNSPSGAGSVASQSIIAYTMSLGAENSVAYSNNSIAIPTNFTISVTTEILPVSMTKTSVDCTMYICGDSTECSNLLLQYGSFCTQLNRALTGIAVEQDKNTQEVFAQVKQIYKTPPIKDFGGFNFSQILPDPSKPSKRSFIEDLLFNKVTLADAGFIKQYGDCLGDIAARDLICAQKFNGLTVLPPLLTDEMIAQYTSALLAGTITSGWTFGAGAALQIPFAMQMAYRFNGIGVTQNVLYENQKLIANQFNSAIGKIQDSLSSTASALGKLQDVVNQNAQALNTLVKQLSSNFGAISSVLNDILSRLDPPEAEVQIDRLITGRLQSLQTYVTQQLIRAAEIRASANLAATKMSECVLGQSKRVDFCGKGYHLMSFPQSAPHGVVFLHVTYVPAQEKNFTTAPAICHDGKAHFPREGVFVSNGTHWFVTQRNFYEPQIITTDNTFVSGNCDVVIGIVNNTVYDPLQPELDSFKEELDKYFKNHTSPDVDLGDISGINASVVNIQKEIDRLNEVAKNLNESLIDLQELGKYEQYIKGSGRENLYFQGGGGSGYIPEAPRDGQAYVRKDGEWVLLSTFLGHHHHHHHH

SEQ ID NO: 5250 - protein, 1281 aa, Artificial Sequence
  Description of Artificial Sequence: Synthetic polypeptide
MGILPSPGMPALLSLVSLLSVLLMGCVAETGTQCVNLTTRTQLPPAYTNSFTRGVYYPDKVFRSSVLHSTQDLFLPFFSNVTWFHAIHVSGTNGTKRFDNPVLPFNDGVYFASTEKSNIIRGWIFGTTLDSKTQSLLIVNNATNVVIKVCEFQFCNDPFLGVYYHKNNKSWMESEFRVYSSANNCTFEYVSQPFLMDLEGKQGNFKNLREFVFKNIDGYFKIYSKHTPINLVRDLPQGFSALEPLVDLPIGINITRFQTLLALHRSYLTPGDSSSGWTAGAAAYYVGYLQPRTFLLKYNENGTITDAVDCALDPLSETKCTLKSFTVEKGIYQTSNFRVQPTESIVRFPNITNLCPFGEVFNATRFASVYAWNRKRISNCVADYSVLYNSASFSTFKCYGVSPTKLNDLCFTNVYADSFVIRGDEVRQIAPGQTGKIADYNYKLPDDFTGCVIAWNSNNLDSKVGGNYNYLYRLFRKSNLKPFERDISTEIYQAGSTPCNGVEGFNCYFPLQSYGFQPTNGVGYQPYRVVVLSFELLHAPATVCGPKKSTNLVKNKCVNFNFNGLTGTGVLTESNKKFLPFQQFGRDIADTTDAVRDPQTLEILDITPCSFGGVSVITPGTNTSNQVAVLYQDVNCTEVPVAIHADQLTPTWRVYSTGSNVFQTRAGCLIGAEHVNNSYECDIPIGAGICASYQTQTNSPSGAGSVASQSIIAYTRSLGAENSVAYSNNSIAIPTNFTISVTTEILPVSMTKTSVDCTMYICGDSTECSNLLLQYGSFCTQLNRALTGIAVEQDKNTQEVFAQVKQIYKTPPIKDFGGFNFSQILPDPSKPSKRSFIEDLLFNKVTLADAGFIKQYGDCLGDIAARDLICAQKFNGLTVLPPLLTDEMIAQYTSALLAGTITSGWTFGAGAALQIPFAMQMAYRFNGIGVTQNVLYENQKLIANQFNSAIGKIQDSLSSTASALGKLQDVVNQNAQALNTLVKQLSSNFGAISSVLNDILSRLDPPEAEVQIDRLITGRLQSLQTYVTQQLIRAAEIRASANLAATKMSECVLGQSKRVDFCGKGYHLMSFPQSAPHGVVFLHVTYVPAQEKNFTTAPAICHDGKAHFPREGVFVSNGTHWFVTQRNFYEPQIITTDNTFVSGNCDVVIGIVNNTVYDPLQPELDSFKEELDKYFKNHTSPDVDLGDISGINASVVNIQKEIDRLNEVAKNLNESLIDLQELGKYEQYIKGSGRENLYFQGGGGSGYIPEAPRDGQAYVRKDGEWVLLSTFLGHHHHHHHH

SEQ ID NO: 5251 - protein, 1281 aa, Artificial Sequence
  Description of Artificial Sequence: Synthetic polypeptide
MGILPSPGMPALLSLVSLLSVLLMGCVAETGTQCVNLTTRTQLPPAYTNSFTRGVYYPDKVFRSSVLHSTQDLFLPFFSNVTWFHAIHVSGTNGTKRFDNPVLPFNDGVYFASTEKSNIIRGWIFGTTLDSKTQSLLIVNNATNVVIKVCEFQFCNDPFLGVYYHKNNKSWMESEFRVYSSANNCTFEYVSQPFLMDLEGKQGNFKNLREFVFKNIDGYFKIYSKHTPINLVRDLPQGFSALEPLVDLPIGINITRFQTLLALHRSYLTPGDSSSGWTAGAAAYYVGYLQPRTFLLKYNENGTITDAVDCALDPLSETKCTLKSFTVEKGIYQTSNFRVQPTESIVRFPNITNLCPFGEVFNATRFASVYAWNRKRISNCVADYSVLYNSASFSTFKCYGVSPTKLNDLCFTNVYADSFVIRGDEVRQIAPGQTGKIADYNYKLPDDFTGCVIAWNSNNLDSKVGGNYNYLYRLFRKSNLKPFERDISTEIYQAGSTPCNGVEGFNCYFPLQSYGFQPTNGVGYQPYRVVVLSFELLHAPATVCGPKKSTNLVKNKCVNFNFNGLTGTGVLTESNKKFLPFQQFGRDIADTTDAVRDPQTLEILDITPCSFGGVSVITPGTNTSNQVAVLYQDVNCTEVPVAIHADQLTPTWRVYSTGSNVFQTRAGCLIGAEHVNNSYECDIPIGAGICASYQTQTNSPSGAGSVASQSIIAYTMSLGAENSVAYSNNSIAIPTNFTISVTTEILPVSMTKTSVDCTMYICGDSTECSNLLLQYGSFCTQLNRALTGIAVEQDKNTQEVFAQVKQIYKTPPIKDFGGFNFSQILPDPSKPSKRSFIEDLLFNKVTLADAGFIKQYGDCLGDIAARDLICAQKFNGLTVLPPLLTDEMIAQYTSALLAGTITSGWTFGAGAALQIPFAMQMAYRFNGIGVTQNVLYENQKLIANQFNSAIGKIQDSLSSTASALGKLQDVVNQNAQALNTLVKQLSSNFGAISSVLNDILSRLDPPSAEVQIDRLITGRLQSLQTYVTQQLIRAAEIRASANLAATKMSECVLGQSKRVDFCGKGYHLMSFPQSAPHGVVFLHVTYVPAQEKNFTTAPAICHDGKAHFPREGVFVSNGTHWFVTQRNFYEPQIITTDNTFVSGNCDVVIGIVNNTVYDPLQPELDSFKEELDKYFKNHTSPDVDLGDISGINASVVNIQKEIDRLNEVAKNLNESLIDLQELGKYEQYIKGSGRENLYFQGGGGSGYIPEAPRDGQAYVRKDGEWVLLSTFLGHHHHHHHH

SEQ ID NO: 5252 - protein, 1281 aa, Artificial Sequence
  Description of Artificial Sequence: Synthetic polypeptide
MGILPSPGMPALLSLVSLLSVLLMGCVAETGTQCVNLTTRTQLPPAYTNSFTRGVYYPDKVFRSSVLHSTQDLFLPFFSNVTWFHAIHVSGTNGTKRFDNPVLPFNDGVYFASTEKSNIIRGWIFGTTLDSKTQSLLIVNNATNVVIKVCEFQFCNDPFLGVYYHKNNKSWMESEFRVYSSANNCTFEYVSQPFLMDLEGKQGNFKNLREFVFKNIDGYFKIYSKHTPINLVRDLPQGFSALEPLVDLPIGINITRFQTLLALHRSYLTPGDSSSGWTAGAAAYYVGYLQPRTFLLKYNENGTITDAVDCALDPLSETKCTLKSFTVEKGIYQTSNFRVQPTESIVRFPNITNLCPFGEVFNATRFASVYAWNRKRISNCVADYSVLYNSASFSTFKCYGVSPTKLNDLCFTNVYADSFVIRGDEVRQIAPGQTGKVADYNYKLPDDFTGCVIAWNSNNLDSKVGGNYNYLYRLFRKSNLKPFERDISTEIYQAGSTPCNGVEGFNCYFPLQSYGFQPTNGVGYQPYRVVVLSFELLHAPATVCGPKKSTNLVKNKCVNFNFNGLTGTGVLTESNKKFLPFQQFGRDIADTTDAVRDPQTLEILDITPCSFGGVSVITPGTNTSNQVAVLYQDVNCTEVPVAIHADQLTPTWRVYSTGSNVFQTRAGCLIGAEHVNNSYECDIPIGAGICASYQTQTNSPSGAGSVASQSIIAYTMSLGAENSVAYSNNSIAIPTNFTISVTTEILPVSMTKTSVDCTMYICGDSTECSNLLLQYGSFCTQLNRALTGIAVEQDKNTQEVFAQVKQIYKTPPIKDFGGFNFSQILPDPSKPSKRSFIEDLLFNKVTLADAGFIKQYGDCLGDIAARDLICAQKFNGLTVLPPLLTDEMIAQYTSALLAGTITSGWTFGAGAALQIPFAMQMAYRFNGIGVTQNVLYENQKLIANQFNSAIGKIQDSLSSTASALGKLQDVVNQNAQALNTLVKQLSSNFGAISSVLNDILSRLDPPEAEVQIDRLITGRLQSLQTYVTQQLIRAAEIRASANLAATKMSECVLGQSKRVDFCGKGYHLMSFPQSAPHGVVFLHVTYVPAQEKNFTTAPAICHDGKAHFPREGVFVSNGTHWFVTQRNFYEPQIITTDNTFVSGNCDVVIGIVNNTVYDPLQPELDSFKEELDKYFKNHTSPDVDLGDISGINASVVNIQKEIDRLNEVAKNLNESLIDLQELGKYEQYIKGSGRENLYFQGGGGSGYIPEAPRDGQAYVRKDGEWVLLSTFLGHHHHHHHH

SEQ ID NO: 5253 - protein, 1281 aa, Artificial Sequence
  Description of Artificial Sequence: Synthetic polypeptide
MGILPSPGMPALLSLVSLLSVLLMGCVAETGTQCVNLTTRTQLPPAYTNSFTRGVYYPDKVFRSSVLHSTQDLFLPFFSNVTWFHAIHVSGTNGTKRFDNPVLPFNDGVYFASTEKSNIIRGWIFGTTLDSKTQSLLIVNNATNVVIKVCEFQFCNDPFLGVYYHKNNKSWMESEFRVYSSANNCTFEYVSQPFLMDLEGKQGNFKNLREFVFKNIDGYFKIYSKHTPINLVRDLPQGFSALEPLVDLPIGINITRFQTLLALHRSYLTPGDSSSGWTAGAAAYYVGYLQPRTFLLKYNENGTITDAVDCALDPLSETKCTLKSFTVEKGIYQTSNFRVQPTESIVRFPNITNLCPFGEVFNATRFASVYAWNRKRISNCVADYSVLYNSGSFSTFKCYGVSPTKLNDLCFTNVYADSFVIRGDEVRQIAPGQTGKIADYNYKLPDDFTGCVIAWNSNNLDSKVGGNYNYLYRLFRKSNLKPFERDISTEIYQAGSTPCNGVEGFNCYFPLQSYGFQPTNGVGYQPYRVVVLSFELLHAPATVCGPKKSTNLVKNKCVNFNFNGLTGTGVLTESNKKFLPFQQFGRDIADTTDAVRDPQTLEILDITPCSFGGVSVITPGTNTSNQVAVLYQDVNCTEVPVAIHADQLTPTWRVYSTGSNVFQTRAGCLIGAEHVNNSYECDIPIGAGICASYQTQTNSPSGAGSVASQSIIAYTMSLGAENSVAYSNNSIAIPTNFTISVTTEILPVSMTKTSVDCTMYICGDSTECSNLLLQYGSFCTQLNRALTGIAVEQDKNTQEVFAQVKQIYKTPPIKDFGGFNFSQILPDPSKPSKRSFIEDLLFNKVTLADAGFIKQYGDCLGDIAARDLICAQKFNGLTVLPPLLTDEMIAQYTSALLAGTITSGWTFGAGAALQIPFAMQMAYRFNGIGVTQNVLYENQKLIANQFNSAIGKIQDSLSSTASALGKLQDVVNQNAQALNTLVKQLSSNFGAISSVLNDILSRLDPPEAEVQIDRLITGRLQSLQTYVTQQLIRAAEIRASANLAATKMSECVLGQSKRVDFCGKGYHLMSFPQSAPHGVVFLHVTYVPAQEKNFTTAPAICHDGKAHFPREGVFVSNGTHWFVTQRNFYEPQIITTDNTFVSGNCDVVIGIVNNTVYDPLQPELDSFKEELDKYFKNHTSPDVDLGDISGINASVVNIQKEIDRLNEVAKNLNESLIDLQELGKYEQYIKGSGRENLYFQGGGGSGYIPEAPRDGQAYVRKDGEWVLLSTFLGHHHHHHHH

SEQ ID NO: 5254 - protein, 1281 aa, Artificial Sequence
  Description of Artificial Sequence: Synthetic polypeptide
MGILPSPGMPALLSLVSLLSVLLMGCVAETGTQCVNLTTRTQLPPAYTNSFTRGVYYPDKVFRSSVLHSTQDLFLPFFSNVTWFHAIHVSGTNGTKRFDNPVLPFNDGVYFASTEKSNIIRGWIFGTTLDSKTQSLLIVNNATNVVIKVCEFQFCNDPFLGVYYHKNNKSWMESEFRVYSSANNCTFEYVSQPFLMDLEGKQGNFKNLREFVFKNIDGYFKIYSKHTPINLVRDLPQGFSALEPLVDLPIGINITRFQTLLALHRSYLTPGDSSSGWTAGAAAYYVGYLQPRTFLLKYNENGTITDAVDCALDPLSETKCTLKSFTVEKGIYQTSNFRVQPTESIVRFPNITNLCPFGEVFNATRFASVYAWNRKRISNCVADYSVLYNSASFSTFKCYGVSPTKLNDLCFTNVYADSFVIRGDEVRQIAPGQTGKIADYNYKLPDDFTGCVIAWNSNNLDSKVGGNYNYLYRLFRKSNLKPFERDISCEIYQAGSTPCNGVEGFNCYFPLQSYGFQPTNGVGYQPYRVVVLSFELLHAPATVCGPKKSTNLVKNKCVNFNFNGLTGTGVLTESNKKFLPFQQFGRDIADTTDAVRDPQTLEILDITPCSFGGVSVITPGTNTSNQVAVLYQDVNCTEVPVAIHADQLTPTWRVYSTGSNVFQTRAGCLIGAEHVNNSYECDIPIGAGICASYQTQTNSPSGAGSVASQSIIAYTMSLGAENSVAYSNNSIAIPTNFTISVTTEILPVSMTKTSVDCTMYICGDSTECSNLLLQYGSFCTQLNRALTGIAVEQDKNTQEVFAQVKQIYKTPPIKDFGGFNFSQILPDPSKPSKRSFIEDLLFNKVTLADAGFIKQYGDCLGDIAARDLICAQKFNGLTVLPPLLTDEMIAQYTSALLAGTITSGWTFGAGAALQIPFAMQMAYRFNGIGVTQNVLYENQKLIANQFNSAIGKIQDSLSSTASALGKLQDVVNQNAQALNTLVKQLSSNFGAISSVLNDILSRLDPPEAEVQIDRLITGRLQSLQTYVTQQLIRAAEIRASANLAATKMSECVLGQSKRVDFCGKGYHLMSFPQSAPHGVVFLHVTYVPAQEKNFTTAPAICHDGKAHFPREGVFVSNGTHWFVTQRNFYEPQIITTDNTFVSGNCDVVIGIVNNTVYDPLQPELDSFKEELDKYFKNHTSPDVDLGDISGINASVVNIQKEIDRLNEVAKNLNESLIDLQELGKYEQYIKGSGRENLYFQGGGGSGYIPEAPRDGQAYVRKDGEWVLLSTFLGHHHHHHHH

SEQ ID NO: 5255 - protein, 1281 aa, Artificial Sequence
  Description of Artificial Sequence: Synthetic polypeptide
MGILPSPGMPALLSLVSLLSVLLMGCVAETGTQCVNLTTRTQLPPAYTNSFTRGVYYPDKVFRSSVLHSTQDLFLPFFSNVTWFHAIHVSGTNGTKRFDNPVLPFNDGVYFASTEKSNIIRGWIFGTTLDSKTQSLLIVNNATNVVIKVCEFQFCNDPFLGVYYHKNNKSWMESEFRVYSSANNCTFEYVSQPFLMDLEGKQGNFKNLREFVFKNIDGYFKIYSKHTPINLVRDLPQGFSALEPLVDLPIGINITRFQTLLALHRSYLTPGDSSSGWTAGAAAYYVGYLQPRTFLLKYNENGTITDAVDCALDPLSETKCTLKSFTVEKGIYQTSNFRVQPTESIVRFPNITNLCPFGEVFNATRFASVYAWNRKRISNCVADYSVLYNSASFSTFKCYGVSPTKLNDLCFTNVYADSFVIRGDEVRQIAPGQTGSIADYNYKLPDDFTGCVIAWNSNNLDSKVGGNYNYLYRLFRKSNLKPFERDISTEIYQAGSTPCNGVEGFNCYFPLQSYGFQPTNGVGYQPYRVVVLSFELLHAPATVCGPKKSTNLVKNKCVNFNFNGLTGTGVLTESNKKFLPFQQFGRDIADTTDAVRDPQTLEILDITPCSFGGVSVITPGTNTSNQVAVLYQDVNCTEVPVAIHADQLTPTWRVYSTGSNVFQTRAGCLIGAEHVNNSYECDIPIGAGICASYQTQTNSPSGAGSVASQSIIAYTMSLGAENSVAYSNNSIAIPTNFTISVTTEILPVSMTKTSVDCTMYICGDSTECSNLLLQYGSFCTQLNRALTGIAVEQDKNTQEVFAQVKQIYKTPPIKDFGGFNFSQILPDPSKPSKRSFIEDLLFNKVTLADAGFIKQYGDCLGDIAARDLICAQKFNGLTVLPPLLTDEMIAQYTSALLAGTITSGWTFGAGAALQIPFAMQMAYRFNGIGVTQNVLYENQKLIANQFNSAIGKIQDSLSSTASALGKLQDVVNQNAQALNTLVKQLSSNFGAISSVLNDILSRLDPPEAEVQIDRLITGRLQSLQTYVTQQLIRAAEIRASANLAATKMSECVLGQSKRVDFCGKGYHLMSFPQSAPHGVVFLHVTYVPAQEKNFTTAPAICHDGKAHFPREGVFVSNGTHWFVTQRNFYEPQIITTDNTFVSGNCDVVIGIVNNTVYDPLQPELDSFKEELDKYFKNHTSPDVDLGDISGINASVVNIQKEIDRLNEVAKNLNESLIDLQELGKYEQYIKGSGRENLYFQGGGGSGYIPEAPRDGQAYVRKDGEWVLLSTFLGHHHHHHHH

SEQ ID NO: 5256 - protein, 1281 aa, Artificial Sequence
  Description of Artificial Sequence: Synthetic polypeptide
MGILPSPGMPALLSLVSLLSVLLMGCVAETGTQCVNLTTRTQLPPAYTNSFTRGVYYPDKVFRSSVLHSTQDLFLPFFSNVTWFHAIHVSGTNGTKRFDNPVLPFNDGVYFASTEKSNIIRGWIFGTTLDSKTQSLLIVNNATNVVIKVCEFQFCNDPFLGVYYHKNNKSWMESEFRVYSSANNCTFEYVSQPFLMDLEGKQGNFKNLREFVFKNIDGYFKIYSKHTPINLVRDLPQGFSALEPLVDLPIGINITRFQTLLALHRSYLTPGDSSSGWTAGAAAYYVGYLQPRTFLLKYNENGTITDAVDCALDPLSETKCTLKSFTVEKGIYQTSNFRVQPTESIVRFPNITNLCPFGEVFNATRFASVYAWNRKRISNCVADYSVLYNSASFSTFKCYGVSPTKLNDLCFTNVYADSFVIRGDEVRQIAPGQTGKIADYNYKLPDDFTGCVIAWNSNNLDSKVGGNYNYLYRLFRKSNLKPFERDISTEIYQAGSTPCNGVEGFNHYFPLQSYGFQPTNGVGYQPYRVVVLSFELLHAPATVCGPKKSTNLVKNKCVNFNFNGLTGTGVLTESNKKFLPFQQFGRDIADTTDAVRDPQTLEILDITPCSFGGVSVITPGTNTSNQVAVLYQDVNCTEVPVAIHADQLTPTWRVYSTGSNVFQTRAGCLIGAEHVNNSYECDIPIGAGICASYQTQTNSPSGAGSVASQSIIAYTMSLGAENSVAYSNNSIAIPTNFTISVTTEILPVSMTKTSVDCTMYICGDSTECSNLLLQYGSFCTQLNRALTGIAVEQDKNTQEVFAQVKQIYKTPPIKDFGGFNFSQILPDPSKPSKRSFIEDLLFNKVTLADAGFIKQYGDCLGDIAARDLICAQKFNGLTVLPPLLTDEMIAQYTSALLAGTITSGWTFGAGAALQIPFAMQMAYRFNGIGVTQNVLYENQKLIANQFNSAIGKIQDSLSSTASALGKLQDVVNQNAQALNTLVKQLSSNFGAISSVLNDILSRLDPPEAEVQIDRLITGRLQSLQTYVTQQLIRAAEIRASANLAATKMSECVLGQSKRVDFCGKGYHLMSFPQSAPHGVVFLHVTYVPAQEKNFTTAPAICHDGKAHFPREGVFVSNGTHWFVTQRNFYEPQIITTDNTFVSGNCDVVIGIVNNTVYDPLQPELDSFKEELDKYFKNHTSPDVDLGDISGINASVVNIQKEIDRLNEVAKNLNESLIDLQELGKYEQYIKGSGRENLYFQGGGGSGYIPEAPRDGQAYVRKDGEWVLLSTFLGHHHHHHHH

SEQ ID NO: 5257 - protein, 1281 aa, Artificial Sequence
  Description of Artificial Sequence: Synthetic polypeptide
MGILPSPGMPALLSLVSLLSVLLMGCVAETGTQCVNLTTRTQLPPAYTNSFTRGVYYPDKVFRSSVLHSTQDLFLPFFSNVTWFHAIHVSGTNGTKRFDNPVLPFNDGVYFASTEKSNIIRGWIFGTTLDSKTQSLLIVNNATNVVIKVCEFQFCNDPFLGVYYHKNNKSWMESEFRVYSSANNCTFEYVSQPFLMDLEGKQGNFKNLREFVFKNIDGYFKIYSKHTPINLVRDLPQGFSALEPLVDLPIGINITRFQTLLALHRSYLTPGDSSSGWTAGAAAYYVGYLQPRTFLLKYNENGTITDAVDCALDPLSETKCTLKSFTVEKGIYQTSNFRVQPTESIVRFPNITNLCPFGEVFNATRFASVYAWNRKRISNCVADYSVLYNSASFSTFKCYGVSPTKLNDLCFTNVYADSFVIRGDEVRQIAPGQTGKIADYNYKLPDDFTGCVIAWNSNNLDSKVGGNYNYLYRLFRKSNLKPFERDISTEIYQAGSTPCNGVEGFNCYFPLQSYGFQPTNGVGYQPYRVVVLSFELLHAPATVCGPKKSTNLVKNKCVNFNFNGLTGTGVLTESNKKFLPFQQFGRDIADTTDAVRDPQTLEILDITPCSFGGVSVITPGTNTSNQVAVLYQDVNCTEVPVAIHADQLTPTWRVYSTGSNVFQTRAGCLIGAEHVNNSYECDIPIGAGICASYQTQTNSPSGAGSVASQSIIAYTMSLGAENSVAYSNNSIAIPTNFTISVTTEILPVSMTKTSVDCTMYICGDSTECSNLLLQYGSFCTQLNRALTGIAVEQDKNTQEVFAQVKQIYKTPPIKDFGGFNFSQILPDPSKPSKRSFIEDLLFNKVTLADAGFIKQYGDCLGDIAARDLICAQKFNGLTVLPPLLTDEMIAQYTSALLAGTITSGWTFGAGAALQIPFAMQMAWRFNGIGVTQNVLYENQKLIANQFNSAIGKIQDSLSSTASALGKLQDVVNQNAQALNTLVKQLSSNFGAISSVLNDILSRLDPPEAEVQIDRLITGRLQSLQTYVTQQLIRAAEIRASANLAATKMSECVLGQSKRVDFCGKGYHLMSFPQSAPHGVVFLHVTYVPAQEKNFTTAPAICHDGKAHFPREGVFVSNGTHWFVTQRNFYEPQIITTDNTFVSGNCDVVIGIVNNTVYDPLQPELDSFKEELDKYFKNHTSPDVDLGDISGINASVVNIQKEIDRLNEVAKNLNESLIDLQELGKYEQYIKGSGRENLYFQGGGGSGYIPEAPRDGQAYVRKDGEWVLLSTFLGHHHHHHHH

SEQ ID NO: 5258 - protein, 1281 aa, Artificial Sequence
  Description of Artificial Sequence: Synthetic polypeptide
MGILPSPGMPALLSLVSLLSVLLMGCVAETGTQCVNLTTRTQLPPAYTNSFTRGVYYPDKVFRSSVLHSTQDLFLPFFSNVTWFHAIHVSGTNGTKRFDNPVLPFNDGVYFASTEKSNIIRGWIFGTTLDSKTQSLLIVNNATNVVIKVCEFQFCNDPFLGVYYHKNNKSWMESEFRVYSSANNCTFEYVSQPFLMDLEGKQGNFKNLREFVFKNIDGYFKIYSKHTPINLVRDLPQGFSALEPLVDLPIGINITRFQTLLALHRSYLTPGDSSSGWTAGAAAYYVGYLQPRTFLLKYNENGTITDAVDCALDPLSETKCTLKSFTVEKGIYQTSNFRVQPTESIVRFPNITNLCPFGEVFNATRFASVYAWNRKRISNCVADYSVLYNSASFSTFKCYGVSPTKLNDLCFTNVYADSFVIRGDEVRQIAPGQTGKIADYNYKLPDDFTGCVIAWNSNNLDSKVGGNYNYLYRLFRKSNLKPFERDINTEIYQAGSTPCNGVEGFNCYFPLQSYGFQPTNGVGYQPYRVVVLSFELLHAPATVCGPKKSTNLVKNKCVNFNFNGLTGTGVLTESNKKFLPFQQFGRDIADTTDAVRDPQTLEILDITPCSFGGVSVITPGTNTSNQVAVLYQDVNCTEVPVAIHADQLTPTWRVYSTGSNVFQTRAGCLIGAEHVNNSYECDIPIGAGICASYQTQTNSPSGAGSVASQSIIAYTMSLGAENSVAYSNNSIAIPTNFTISVTTEILPVSMTKTSVDCTMYICGDSTECSNLLLQYGSFCTQLNRALTGIAVEQDKNTQEVFAQVKQIYKTPPIKDFGGFNFSQILPDPSKPSKRSFIEDLLFNKVTLADAGFIKQYGDCLGDIAARDLICAQKFNGLTVLPPLLTDEMIAQYTSALLAGTITSGWTFGAGAALQIPFAMQMAYRFNGIGVTQNVLYENQKLIANQFNSAIGKIQDSLSSTASALGKLQDVVNQNAQALNTLVKQLSSNFGAISSVLNDILSRLDPPEAEVQIDRLITGRLQSLQTYVTQQLIRAAEIRASANLAATKMSECVLGQSKRVDFCGKGYHLMSFPQSAPHGVVFLHVTYVPAQEKNFTTAPAICHDGKAHFPREGVFVSNGTHWFVTQRNFYEPQIITTDNTFVSGNCDVVIGIVNNTVYDPLQPELDSFKEELDKYFKNHTSPDVDLGDISGINASVVNIQKEIDRLNEVAKNLNESLIDLQELGKYEQYIKGSGRENLYFQGGGGSGYIPEAPRDGQAYVRKDGEWVLLSTFLGHHHHHHHH

SEQ ID NO: 5259 - protein, 1281 aa, Artificial Sequence
  Description of Artificial Sequence: Synthetic polypeptide
MGILPSPGMPALLSLVSLLSVLLMGCVAETGTQCVNLTTRTQLPPAYTNSFTRGVYYPDKVFRSSVLHSTQDLFLPFFSNVTWFHAIHVSGTNGTKRFDNPVLPFNDGVYFASTEKSNIIRGWIFGTTLDSKTQSLLIVNNATNVVIKVCEFQFCNDPFLGVYYHKNNKSWMESEFRVYSSANNCTFEYVSQPFLMDLEGKQGNFKNLREFVFKNIDGYFKIYSKHTPINLVRDLPQGFSALEPLVDLPIGINITRFQTLLALHRSYLTPGDSSSGWTAGAAAYYVGYLQPRTFLLKYNENGTITDAVDCALDPLSETKCTLKSFTVEKGIYQTSNFRVQPTESIVRFPNITNLCPFGEVFNATRFASVYAWNRKRISNCVADYSVLYNSASFSTFKCYGVSPTKLNDLCFTNVYADSFVIRGDEVRQIAPGQTGKIADYNYKLPDDFTGCVIAWNSNNLDSKVGGNYNYLYRLFRKSNLKPFERDISTEIYQAGSTPCNGVEGFNCYFPLQSYGFQPTNGVGYQPYRVVVLSFELLHAPATVCGPKKSTNLVKNKCVNFNFNGLTGTGVLTESNKKFLPFQQFGRDIADTTDAVRDPQTLEILDITPCSFGGVSVITPGTNTSNQVAVLYQDVNCTEVPVAIHADQLTPTWRVYSTGSNVFQTRAGCLIGAEHVNNSYECDIPIGAGICASYQTQTNSPSGAGSVASQSIIAYTMSLGAENSVAYSNNSIAIPTNFTISVTTEILPVSMTKTSVDCTMYICGDSTECSNLLLQYGSFCTQLNRALTGIAVEQDKNTQEVFAQVKQIYKTPPIKDFGGFNFSQILPDPSKPSKRSFIEDLLFNKVTLADAGFIKQYGDCLGDIAARDLICAQKFNGLTVLPPLLTDEMIAQYTSALLAGTITSGWTFGAGAALQIPFAMQMAYRFNGIGVTQNVLYENQKLIANQFNSAIGKIQDSLSSTASALGKLQDVVNQNAQALNTLVKQLSSNFGAISSVLNDILSRLDPPEAEVQIDRLITGRLQSLQTYVTQQLIRAAEIRASANLAATKMSECVLGQSKRVDFCGKGYHLMSFPQSAPHGVVFLHVTYVPAQYKNFTTAPAICHDGKAHFPREGVFVSNGTHWFVTQRNFYEPQIITTDNTFVSGNCDVVIGIVNNTVYDPLQPELDSFKEELDKYFKNHTSPDVDLGDISGINASVVNIQKEIDRLNEVAKNLNESLIDLQELGKYEQYIKGSGRENLYFQGGGGSGYIPEAPRDGQAYVRKDGEWVLLSTFLGHHHHHHHH

SEQ ID NO: 5260 - protein, 1281 aa, Artificial Sequence
  Description of Artificial Sequence: Synthetic polypeptide
MGILPSPGMPALLSLVSLLSVLLMGCVAETGTQCVNLTTRTQLPPAYTNSFTRGVYYPDKVFRSSVLHSTQDLFLPFFSNVTWFHAIHVSGTNGTKRFDNPVLPFNDGVYFASTEKSNIIRGWIFGTTLDSKTQSLLIVNNATNVVIKVCEFQFCNDPFLGVYYHKNNKSWMESEFRVYSSANNCTFEYVSQPFLMDLEGKQGNFKNLREFVFKNIDGYFKIYSKHTPINLVRDLPQGFSALEPLVDLPIGINITRFQTLLALHRSYLTPGDSSSGWTAGAAAYYVGYLQPRTFLLKYNENGTITDAVDCALDPLSETKCTLKSFTVEKGIYQTSNFRVQPTESIVRFPNITNLCPFGEVFNATRFASVYAWNRKRISNCVADYSVLYNSASFSTFKCYGVSPTKLNDLCFTNVYADSFVIRGDEVRQIAPGQTGKIADYNYKLPDDFTGCVIAWNSNNLDSKVGGNYNYLYRLFRKSNLKPFERDISTEIYQAGSTPCNGVEGFNCYFPLQSYGFQPTNGVGYQPYRVVVLQFELLHAPATVCGPKKSTNLVKNKCVNFNFNGLTGTGVLTESNKKFLPFQQFGRDIADTTDAVRDPQTLEILDITPCSFGGVSVITPGTNTSNQVAVLYQDVNCTEVPVAIHADQLTPTWRVYSTGSNVFQTRAGCLIGAEHVNNSYECDIPIGAGICASYQTQTNSPSGAGSVASQSIIAYTMSLGAENSVAYSNNSIAIPTNFTISVTTEILPVSMTKTSVDCTMYICGDSTECSNLLLQYGSFCTQLNRALTGIAVEQDKNTQEVFAQVKQIYKTPPIKDFGGFNFSQILPDPSKPSKRSFIEDLLFNKVTLADAGFIKQYGDCLGDIAARDLICAQKFNGLTVLPPLLTDEMIAQYTSALLAGTITSGWTFGAGAALQIPFAMQMAYRFNGIGVTQNVLYENQKLIANQFNSAIGKIQDSLSSTASALGKLQDVVNQNAQALNTLVKQLSSNFGAISSVLNDILSRLDPPEAEVQIDRLITGRLQSLQTYVTQQLIRAAEIRASANLAATKMSECVLGQSKRVDFCGKGYHLMSFPQSAPHGVVFLHVTYVPAQEKNFTTAPAICHDGKAHFPREGVFVSNGTHWFVTQRNFYEPQIITTDNTFVSGNCDVVIGIVNNTVYDPLQPELDSFKEELDKYFKNHTSPDVDLGDISGINASVVNIQKEIDRLNEVAKNLNESLIDLQELGKYEQYIKGSGRENLYFQGGGGSGYIPEAPRDGQAYVRKDGEWVLLSTFLGHHHHHHHH

SEQ ID NO: 5261 - protein, 1281 aa, Artificial Sequence
  Description of Artificial Sequence: Synthetic polypeptide
MGILPSPGMPALLSLVSLLSVLLMGCVAETGTQCVNLTTRTQLPPAYTNSFTRGVYYPDKVFRSSVLHSTQDLFLPFFSNVTWFHAIHVSGTNGTKRFDNPVLPFNDGVYFASTEKSNIIRGWIFGTTLDSKTQSLLIVNNATNVVIKVCEFQFCNDPFLGVYYHKNNKSWMESEFRVYSSANNCTFEYVSQPFLMDLEGKQGNFKNLREFVFKNIDGYFKIYSKHTPINLVRDLPQGFSALEPLVDLPIGINITRFQTLLALHRSYLTPGDSSSGWTAGAAAYYVGYLQPRTFLLKYNENGTITDAVDCALDPLSETKCTLKSFTVEKGIYQTSNFRVQPTESIVRFPPITNLCPFGEVFNATRFASVYAWNRKRISNCVADYSVLYNSASFSTFKCYGVSPTKLNDLCFTNVYADSFVIRGDEVRQIAPGQTGKIADYNYKLPDDFTGCVIAWNSNNLDSKVGGNYNYLYRLFRKSNLKPFERDISTEIYQAGSTPCNGVEGFNCYFPLQSYGFQPTNGVGYQPYRVVVLSFELLHAPATVCGPKKSTNLVKNKCVNFNFNGLTGTGVLTESNKKFLPFQQFGRDIADTTDAVRDPQTLEILDITPCSFGGVSVITPGTNTSNQVAVLYQDVNCTEVPVAIHADQLTPTWRVYSTGSNVFQTRAGCLIGAEHVNNSYECDIPIGAGICASYQTQTNSPSGAGSVASQSIIAYTMSLGAENSVAYSNNSIAIPTNFTISVTTEILPVSMTKTSVDCTMYICGDSTECSNLLLQYGSFCTQLNRALTGIAVEQDKNTQEVFAQVKQIYKTPPIKDFGGFNFSQILPDPSKPSKRSFIEDLLFNKVTLADAGFIKQYGDCLGDIAARDLICAQKFNGLTVLPPLLTDEMIAQYTSALLAGTITSGWTFGAGAALQIPFAMQMAYRFNGIGVTQNVLYENQKLIANQFNSAIGKIQDSLSSTASALGKLQDVVNQNAQALNTLVKQLSSNFGAISSVLNDILSRLDPPEAEVQIDRLITGRLQSLQTYVTQQLIRAAEIRASANLAATKMSECVLGQSKRVDFCGKGYHLMSFPQSAPHGVVFLHVTYVPAQEKNFTTAPAICHDGKAHFPREGVFVSNGTHWFVTQRNFYEPQIITTDNTFVSGNCDVVIGIVNNTVYDPLQPELDSFKEELDKYFKNHTSPDVDLGDISGINASVVNIQKEIDRLNEVAKNLNESLIDLQELGKYEQYIKGSGRENLYFQGGGGSGYIPEAPRDGQAYVRKDGEWVLLSTFLGHHHHHHHH

SEQ ID NO: 5262 - protein, 1281 aa, Artificial Sequence
  Description of Artificial Sequence: Synthetic polypeptide
MGILPSPGMPALLSLVSLLSVLLMGCVAETGTQCVNLTTRTQLPPAYTNSFTRGVYYPDKVFRSSVLHSTQDLFLPFFSNVTWFHAIHVSGTNGTKRFDNPVLPFNDGVYFASTEKSNIIRGWIFGTTLDSKTQSLLIVNNATNVVIKVCEFQFCNDPFLGVYYHKNNKSWMESEFRVYSSANNCTFEYVSQPFLMDLEGKQGNFKNLREFVFKNIDGYFKIYSKHTPINLVRDLPQGFSALEPLVDLPIGINITRFQTLLALHRSYLTPGDSSSGWTAGAAAYYVGYLQPRTFLLKYNENGTITDAVDCALDPLSETKCTLKSFTVEKGIYQTSNFRVQPTESIVRFPNITNLCPFGEVFNATRFASVYAWNRKRISNCVADYSVLYNSASFSTFKCYGVSPTKLNDLCFTNVYADSFVIRGDEVRQIAPGQTGKIADYNYKLPDDFTGCVIAWNSNNLDSKVGGNYNYLYRLFRKSNLKPFERDISTEIYQAGSTPCNGVEGFNCYFPLQSYGFQPTNGVGYQPYRVVVLSFELLHAPATVCGPKKSTNLVKNKCVNFNFNGLTGTGVLTESNKKFLPFQQFGRDIADTTDAVRDPQTLEILDITPCSFGGVSVITPGTNTSNQVAVLYQDVNCTEVPVAIHADQLTPTWRVYSTGSNVFQTRAGCLIGAEHVNNSYECDIPIGAGICASYQTQTNSPSGAGSVASQSIIAYTMSLGAENNVAYSNNSIAIPTNFTISVTTEILPVSMTKTSVDCTMYICGDSTECSNLLLQYGSFCTQLNRALTGIAVEQDKNTQEVFAQVKQIYKTPPIKDFGGFNFSQILPDPSKPSKRSFIEDLLFNKVTLADAGFIKQYGDCLGDIAARDLICAQKFNGLTVLPPLLTDEMIAQYTSALLAGTITSGWTFGAGAALQIPFAMQMAYRFNGIGVTQNVLYENQKLIANQFNSAIGKIQDSLSSTASALGKLQDVVNQNAQALNTLVKQLSSNFGAISSVLNDILSRLDPPEAEVQIDRLITGRLQSLQTYVTQQLIRAAEIRASANLAATKMSECVLGQSKRVDFCGKGYHLMSFPQSAPHGVVFLHVTYVPAQEKNFTTAPAICHDGKAHFPREGVFVSNGTHWFVTQRNFYEPQIITTDNTFVSGNCDVVIGIVNNTVYDPLQPELDSFKEELDKYFKNHTSPDVDLGDISGINASVVNIQKEIDRLNEVAKNLNESLIDLQELGKYEQYIKGSGRENLYFQGGGGSGYIPEAPRDGQAYVRKDGEWVLLSTFLGHHHHHHHH

SEQ ID NO: 5263 - protein, 1281 aa, Artificial Sequence
  Description of Artificial Sequence: Synthetic polypeptide
MGILPSPGMPALLSLVSLLSVLLMGCVAETGTQCVNLTTRTQLPPAYTNSFTRGVYYPDKVFRSSVLHSTQDLFLPFFSNVTWFHAIHVSGTNGTKRFDNPVLPFNDGVYFASTEKSNIIRGWIFGTTLDSKTQSLLIVNNATNVVIKVCEFQFCNDPFLGVYYHKNNKSWMESEFRVYSSANNCTFEYVSQPFLMDLEGKQGNFKNLREFVFKNIDGYFKIYSKHTPINLVRDLPQGFSALEPLVDLPIGINITRFQTLLALHRSYLTPGDSSSGWTAGAAAYYVGYLQPRTFLLKYNENGTITDAVDCALDPLSETKCTLKSFTVEKGIYQTSNFRVQPTESIVRFPNITNLCPFGEVFNATRFASVYAWNRKRISNCVADYSVLYNSASFSTFKCYGVSPTKLNDLCFTNVYADSFVIRGDEVRQIAPGQTGKIADYNYKLPDDFTGCVIAWNSNTLDSKVGGNYNYLYRLFRKSNLKPFERDISTEIYQAGSTPCNGVEGFNCYFPLQSYGFQPTNGVGYQPYRVVVLSFELLHAPATVCGPKKSTNLVKNKCVNFNFNGLTGTGVLTESNKKFLPFQQFGRDIADTTDAVRDPQTLEILDITPCSFGGVSVITPGTNTSNQVAVLYQDVNCTEVPVAIHADQLTPTWRVYSTGSNVFQTRAGCLIGAEHVNNSYECDIPIGAGICASYQTQTNSPSGAGSVASQSIIAYTMSLGAENSVAYSNNSIAIPTNFTISVTTEILPVSMTKTSVDCTMYICGDSTECSNLLLQYGSFCTQLNRALTGIAVEQDKNTQEVFAQVKQIYKTPPIKDFGGFNFSQILPDPSKPSKRSFIEDLLFNKVTLADAGFIKQYGDCLGDIAARDLICAQKFNGLTVLPPLLTDEMIAQYTSALLAGTITSGWTFGAGAALQIPFAMQMAYRFNGIGVTQNVLYENQKLIANQFNSAIGKIQDSLSSTASALGKLQDVVNQNAQALNTLVKQLSSNFGAISSVLNDILSRLDPPEAEVQIDRLITGRLQSLQTYVTQQLIRAAEIRASANLAATKMSECVLGQSKRVDFCGKGYHLMSFPQSAPHGVVFLHVTYVPAQEKNFTTAPAICHDGKAHFPREGVFVSNGTHWFVTQRNFYEPQIITTDNTFVSGNCDVVIGIVNNTVYDPLQPELDSFKEELDKYFKNHTSPDVDLGDISGINASVVNIQKEIDRLNEVAKNLNESLIDLQELGKYEQYIKGSGRENLYFQGGGGSGYIPEAPRDGQAYVRKDGEWVLLSTFLGHHHHHHHH

SEQ ID NO: 5264 - protein, 1281 aa, Artificial Sequence
  Description of Artificial Sequence: Synthetic polypeptide
MGILPSPGMPALLSLVSLLSVLLMGCVAETGTQCVNLTTRTQLPPAYTNSFTRGVYYPDKVFRSSVLHSTQDLFLPFFSNVTWFHAIHVSGTNGTKRFDNPVLPFNDGVYFASTEKSNIIRGWIFGTTLDSKTQSLLIVNNATNVVIKVCEFQFCNDPFLGVYYHKNNKSWMESEFRVYSSANNCTFEYVSQPFLMDLEGKQGNFKNLREFVFKNIDGYFKIYSKHTPINLVRDLPQGFSALEPLVDLPIGINITRFQTLLALHRSYLTPGDSSSGWTAGAAAYYVGYLQPRTFLLKYNENGTITDAVDCALDPLSETKCTLKSFTVEKGIYQTSNFRVQPTESIVRFPDITNLCPFGEVFNATRFASVYAWNRKRISNCVADYSVLYNSASFSTFKCYGVSPTKLNDLCFTNVYADSFVIRGDEVRQIAPGQTGKIADYNYKLPDDFTGCVIAWNSNNLDSKVGGNYNYLYRLFRKSNLKPFERDISTEIYQAGSTPCNGVEGFNCYFPLQSYGFQPTNGVGYQPYRVVVLSFELLHAPATVCGPKKSTNLVKNKCVNFNFNGLTGTGVLTESNKKFLPFQQFGRDIADTTDAVRDPQTLEILDITPCSFGGVSVITPGTNTSNQVAVLYQDVNCTEVPVAIHADQLTPTWRVYSTGSNVFQTRAGCLIGAEHVNNSYECDIPIGAGICASYQTQTNSPSGAGSVASQSIIAYTMSLGAENSVAYSNNSIAIPTNFTISVTTEILPVSMTKTSVDCTMYICGDSTECSNLLLQYGSFCTQLNRALTGIAVEQDKNTQEVFAQVKQIYKTPPIKDFGGFNFSQILPDPSKPSKRSFIEDLLFNKVTLADAGFIKQYGDCLGDIAARDLICAQKFNGLTVLPPLLTDEMIAQYTSALLAGTITSGWTFGAGAALQIPFAMQMAYRFNGIGVTQNVLYENQKLIANQFNSAIGKIQDSLSSTASALGKLQDVVNQNAQALNTLVKQLSSNFGAISSVLNDILSRLDPPEAEVQIDRLITGRLQSLQTYVTQQLIRAAEIRASANLAATKMSECVLGQSKRVDFCGKGYHLMSFPQSAPHGVVFLHVTYVPAQEKNFTTAPAICHDGKAHFPREGVFVSNGTHWFVTQRNFYEPQIITTDNTFVSGNCDVVIGIVNNTVYDPLQPELDSFKEELDKYFKNHTSPDVDLGDISGINASVVNIQKEIDRLNEVAKNLNESLIDLQELGKYEQYIKGSGRENLYFQGGGGSGYIPEAPRDGQAYVRKDGEWVLLSTFLGHHHHHHHH

SEQ ID NO: 5265 - protein, 1281 aa, Artificial Sequence
  Description of Artificial Sequence: Synthetic polypeptide
MGILPSPGMPALLSLVSLLSVLLMGCVAETGTQCVNLTTRTQLPPAYTNSFTRGVYYPDKVFRSSVLHSTQDLFLPFFSNVTWFHAIHVSGTNGTKRFDNPVLPFNDGVYFASTEKSNIIRGWIFGTTLDSKTQSLLIVNNATNVVIKVCEFQFCNDPFLGVYYHKNNKSWMESEFRVYSSANNCTFEYVSQPFLMDLEGKQGNFKNLREFVFKNIDGYFKIYSKHTPINLVRDLPQGFSALEPLVDLPIGINITRFQTLLALHRSYLTPGDSSSGWTAGAAAYYVGYLQPRTFLLKYNENGTITDAVDCALDPLSETKCTLKSFTVEKGIYQTSNFRVQPTESIVRFPNITNLCPFGEVFNATRFASVYAWNRKRISNCVADYSVLYNSASFSTFKCYGVSPTKLNDLCFTNVYADSFVIRGDEVRQIAPGQTGKIADYNYKLPDDFTGCVIAWNANNLDSKVGGNYNYLYRLFRKSNLKPFERDISTEIYQAGSTPCNGVEGFNCYFPLQSYGFQPTNGVGYQPYRVVVLSFELLHAPATVCGPKKSTNLVKNKCVNFNFNGLTGTGVLTESNKKFLPFQQFGRDIADTTDAVRDPQTLEILDITPCSFGGVSVITPGTNTSNQVAVLYQDVNCTEVPVAIHADQLTPTWRVYSTGSNVFQTRAGCLIGAEHVNNSYECDIPIGAGICASYQTQTNSPSGAGSVASQSIIAYTMSLGAENSVAYSNNSIAIPTNFTISVTTEILPVSMTKTSVDCTMYICGDSTECSNLLLQYGSFCTQLNRALTGIAVEQDKNTQEVFAQVKQIYKTPPIKDFGGFNFSQILPDPSKPSKRSFIEDLLFNKVTLADAGFIKQYGDCLGDIAARDLICAQKFNGLTVLPPLLTDEMIAQYTSALLAGTITSGWTFGAGAALQIPFAMQMAYRFNGIGVTQNVLYENQKLIANQFNSAIGKIQDSLSSTASALGKLQDVVNQNAQALNTLVKQLSSNFGAISSVLNDILSRLDPPEAEVQIDRLITGRLQSLQTYVTQQLIRAAEIRASANLAATKMSECVLGQSKRVDFCGKGYHLMSFPQSAPHGVVFLHVTYVPAQEKNFTTAPAICHDGKAHFPREGVFVSNGTHWFVTQRNFYEPQIITTDNTFVSGNCDVVIGIVNNTVYDPLQPELDSFKEELDKYFKNHTSPDVDLGDISGINASVVNIQKEIDRLNEVAKNLNESLIDLQELGKYEQYIKGSGRENLYFQGGGGSGYIPEAPRDGQAYVRKDGEWVLLSTFLGHHHHHHHH

SEQ ID NO: 5266 - protein, 1281 aa, Artificial Sequence
  Description of Artificial Sequence: Synthetic polypeptide
MGILPSPGMPALLSLVSLLSVLLMGCVAETGTQCVNLTTRTQLPPAYTNSFTRGVYYPDKVFRSSVLHSTQDLFLPFFSNVTWFHAIHVSGTNGTKRFDNPVLPFNDGVYFASTEKSNIIRGWIFGTTLDSKTQSLLIVNNATNVVIKVCEFQFCNDPFLGVYYHKNNKSWMESEFRVYSSANNCTFEYVSQPFLMDLEGKQGNFKNLREFVFKNIDGYFKIYSKHTPINLVRDLPQGFSALEPLVDLPIGINITRFQTLLALHRSYLTPGDSSSGWTAGAAAYYVGYLQPRTFLLKYNENGTITDAVDCALDPLSETKCTLKSFTVEKGIYQTSNFRVQPTESIVRFPNITNLCPFGEVFNATRFASVYAWNRKRISNCVADYSVLYTSASFSTFKCYGVSPTKLNDLCFTNVYADSFVIRGDEVRQIAPGQTGKIADYNYKLPDDFTGCVIAWNSNNLDSKVGGNYNYLYRLFRKSNLKPFERDISTEIYQAGSTPCNGVEGFNCYFPLQSYGFQPTNGVGYQPYRVVVLSFELLHAPATVCGPKKSTNLVKNKCVNFNFNGLTGTGVLTESNKKFLPFQQFGRDIADTTDAVRDPQTLEILDITPCSFGGVSVITPGTNTSNQVAVLYQDVNCTEVPVAIHADQLTPTWRVYSTGSNVFQTRAGCLIGAEHVNNSYECDIPIGAGICASYQTQTNSPSGAGSVASQSIIAYTMSLGAENSVAYSNNSIAIPTNFTISVTTEILPVSMTKTSVDCTMYICGDSTECSNLLLQYGSFCTQLNRALTGIAVEQDKNTQEVFAQVKQIYKTPPIKDFGGFNFSQILPDPSKPSKRSFIEDLLFNKVTLADAGFIKQYGDCLGDIAARDLICAQKFNGLTVLPPLLTDEMIAQYTSALLAGTITSGWTFGAGAALQIPFAMQMAYRFNGIGVTQNVLYENQKLIANQFNSAIGKIQDSLSSTASALGKLQDVVNQNAQALNTLVKQLSSNFGAISSVLNDILSRLDPPEAEVQIDRLITGRLQSLQTYVTQQLIRAAEIRASANLAATKMSECVLGQSKRVDFCGKGYHLMSFPQSAPHGVVFLHVTYVPAQEKNFTTAPAICHDGKAHFPREGVFVSNGTHWFVTQRNFYEPQIITTDNTFVSGNCDVVIGIVNNTVYDPLQPELDSFKEELDKYFKNHTSPDVDLGDISGINASVVNIQKEIDRLNEVAKNLNESLIDLQELGKYEQYIKGSGRENLYFQGGGGSGYIPEAPRDGQAYVRKDGEWVLLSTFLGHHHHHHHH

SEQ ID NO: 5267 - protein, 1281 aa, Artificial Sequence
  Description of Artificial Sequence: Synthetic polypeptide
MGILPSPGMPALLSLVSLLSVLLMGCVAETGTQCVNLTTRTQLPPAYTNSFTRGVYYPDKVFRSSVLHSTQDLFLPFFSNVTWFHAIHVSGTNGTKRFDNPVLPFNDGVYFASTEKSNIIRGWIFGTTLDSKTQSLLIVNNATNVVIKVCEFQFCNDPFLGVYYHKNNKSWMESEFRVYSSANNCTFEYVSQPFLMDLEGKQGNFKNLREFVFKNIDGYFKIYSKHTPINLVRDLPQGFSALEPLVDLPIGINITRFQTLLALHRSYLTPGDSSSGWTAGAAAYYVGYLQPRTFLLKYNENGTITDAVDCALDPLSETKCTLKSFTVEKGIYQTSNFRVQPTESIVRFPNITNLCPFGEVFNATRFASVYAWNRKRISNCVADYSVLYNSASFSTFKCYGVSPTKLNDLCFTNVYADSFVIRGDEVRQIAPGQTGKIADYNYKLPDDFTGCVIAWNSNNLDSKVGGNYNYLYRLFRKSNLKPFERDISTEIYQAGSTPCNGVEGFNRYFPLQSYGFQPTNGVGYQPYRVVVLSFELLHAPATVCGPKKSTNLVKNKCVNFNFNGLTGTGVLTESNKKFLPFQQFGRDIADTTDAVRDPQTLEILDITPCSFGGVSVITPGTNTSNQVAVLYQDVNCTEVPVAIHADQLTPTWRVYSTGSNVFQTRAGCLIGAEHVNNSYECDIPIGAGICASYQTQTNSPSGAGSVASQSIIAYTMSLGAENSVAYSNNSIAIPTNFTISVTTEILPVSMTKTSVDCTMYICGDSTECSNLLLQYGSFCTQLNRALTGIAVEQDKNTQEVFAQVKQIYKTPPIKDFGGFNFSQILPDPSKPSKRSFIEDLLFNKVTLADAGFIKQYGDCLGDIAARDLICAQKFNGLTVLPPLLTDEMIAQYTSALLAGTITSGWTFGAGAALQIPFAMQMAYRFNGIGVTQNVLYENQKLIANQFNSAIGKIQDSLSSTASALGKLQDVVNQNAQALNTLVKQLSSNFGAISSVLNDILSRLDPPEAEVQIDRLITGRLQSLQTYVTQQLIRAAEIRASANLAATKMSECVLGQSKRVDFCGKGYHLMSFPQSAPHGVVFLHVTYVPAQEKNFTTAPAICHDGKAHFPREGVFVSNGTHWFVTQRNFYEPQIITTDNTFVSGNCDVVIGIVNNTVYDPLQPELDSFKEELDKYFKNHTSPDVDLGDISGINASVVNIQKEIDRLNEVAKNLNESLIDLQELGKYEQYIKGSGRENLYFQGGGGSGYIPEAPRDGQAYVRKDGEWVLLSTFLGHHHHHHHH

SEQ ID NO: 5268 - protein, 1281 aa, Artificial Sequence
  Description of Artificial Sequence: Synthetic polypeptide
MGILPSPGMPALLSLVSLLSVLLMGCVAETGTQCVNLTTRTQLPPAYTNSFTRGVYYPDKVFRSSVLHSTQDLFLPFFSNVTWFHAIHVSGTNGTKRFDNPVLPFNDGVYFASTEKSNIIRGWIFGTTLDSKTQSLLIVNNATNVVIKVCEFQFCNDPFLGVYYHKNNKSWMESEFRVYSSANNCTFEYVSQPFLMDLEGKQGNFKNLREFVFKNIDGYFKIYSKHTPINLVRDLPQGFSALEPLVDLPIGINITRFQTLLALHRSYLTPGDSSSGWTAGAAAYYVGYLQPRTFLLKYNENGTITDAVDCALDPLSETKCTLKSFTVEKGIYQTSNFRVQPTESIVRFPNITNLCPFGEVFNATRFASVYAWNRKRISNCVADYSVLYNSASFSTFKCYGVSPTKLNDLCFTNVYADSFVIRGDEVRQIAPGQTGKIADYNYLLPDDFTGCVIAWNSNNLDSKVGGNYNYLYRLFRKSNLKPFERDISTEIYQAGSTPCNGVEGFNCYFPLQSYGFQPTNGVGYQPYRVVVLSFELLHAPATVCGPKKSTNLVKNKCVNFNFNGLTGTGVLTESNKKFLPFQQFGRDIADTTDAVRDPQTLEILDITPCSFGGVSVITPGTNTSNQVAVLYQDVNCTEVPVAIHADQLTPTWRVYSTGSNVFQTRAGCLIGAEHVNNSYECDIPIGAGICASYQTQTNSPSGAGSVASQSIIAYTMSLGAENSVAYSNNSIAIPTNFTISVTTEILPVSMTKTSVDCTMYICGDSTECSNLLLQYGSFCTQLNRALTGIAVEQDKNTQEVFAQVKQIYKTPPIKDFGGFNFSQILPDPSKPSKRSFIEDLLFNKVTLADAGFIKQYGDCLGDIAARDLICAQKFNGLTVLPPLLTDEMIAQYTSALLAGTITSGWTFGAGAALQIPFAMQMAYRFNGIGVTQNVLYENQKLIANQFNSAIGKIQDSLSSTASALGKLQDVVNQNAQALNTLVKQLSSNFGAISSVLNDILSRLDPPEAEVQIDRLITGRLQSLQTYVTQQLIRAAEIRASANLAATKMSECVLGQSKRVDFCGKGYHLMSFPQSAPHGVVFLHVTYVPAQEKNFTTAPAICHDGKAHFPREGVFVSNGTHWFVTQRNFYEPQIITTDNTFVSGNCDVVIGIVNNTVYDPLQPELDSFKEELDKYFKNHTSPDVDLGDISGINASVVNIQKEIDRLNEVAKNLNESLIDLQELGKYEQYIKGSGRENLYFQGGGGSGYIPEAPRDGQAYVRKDGEWVLLSTFLGHHHHHHHH

SEQ ID NO: 5269 - protein, 1281 aa, Artificial Sequence
  Description of Artificial Sequence: Synthetic polypeptide
MGILPSPGMPALLSLVSLLSVLLMGCVAETGTQCVNLTTRTQLPPAYTNSFTRGVYYPDKVFRSSVLHSTQDLFLPFFSNVTWFHAIHVSGTNGTKRFDNPVLPFNDGVYFASTEKSNIIRGWIFGTTLDSKTQSLLIVNNATNVVIKVCEFQFCNDPFLGVYYHKNNKSWMESEFRVYSSANNCTFEYVSQPFLMDLEGKQGNFKNLREFVFKNIDGYFKIYSKHTPINLVRDLPQGFSALEPLVDLPIGINITRFQTLLALHRSYLTPGDSSSGWTAGAAAYYVGYLQPRTFLLKYNENGTITDAVDCALDPLSETKCTLKSFTVEKGIYQTSNFRVQPTESIVRFPNITNLCPFGEVFNATRFASVYAWNRKRISNCVADYSVLYNSASFSTFKCYGVSPTKLNDLCFTNVYADSFVIRGDEVRQIAPGQTGKIADYNYKLPDDFTGCVIAWNSNNLDSKVGGNYNYLYRLFRKSNLKPFERDISTEIYQAGSTPCNGVEGFNCYFPLQSYGFQPTNGVGYQPYRVVVLNFELLHAPATVCGPKKSTNLVKNKCVNFNFNGLTGTGVLTESNKKFLPFQQFGRDIADTTDAVRDPQTLEILDITPCSFGGVSVITPGTNTSNQVAVLYQDVNCTEVPVAIHADQLTPTWRVYSTGSNVFQTRAGCLIGAEHVNNSYECDIPIGAGICASYQTQTNSPSGAGSVASQSIIAYTMSLGAENSVAYSNNSIAIPTNFTISVTTEILPVSMTKTSVDCTMYICGDSTECSNLLLQYGSFCTQLNRALTGIAVEQDKNTQEVFAQVKQIYKTPPIKDFGGFNFSQILPDPSKPSKRSFIEDLLFNKVTLADAGFIKQYGDCLGDIAARDLICAQKFNGLTVLPPLLTDEMIAQYTSALLAGTITSGWTFGAGAALQIPFAMQMAYRFNGIGVTQNVLYENQKLIANQFNSAIGKIQDSLSSTASALGKLQDVVNQNAQALNTLVKQLSSNFGAISSVLNDILSRLDPPEAEVQIDRLITGRLQSLQTYVTQQLIRAAEIRASANLAATKMSECVLGQSKRVDFCGKGYHLMSFPQSAPHGVVFLHVTYVPAQEKNFTTAPAICHDGKAHFPREGVFVSNGTHWFVTQRNFYEPQIITTDNTFVSGNCDVVIGIVNNTVYDPLQPELDSFKEELDKYFKNHTSPDVDLGDISGINASVVNIQKEIDRLNEVAKNLNESLIDLQELGKYEQYIKGSGRENLYFQGGGGSGYIPEAPRDGQAYVRKDGEWVLLSTFLGHHHHHHHH

SEQ ID NO: 5270 - protein, 1281 aa, Artificial Sequence
  Description of Artificial Sequence: Synthetic polypeptide
MGILPSPGMPALLSLVSLLSVLLMGCVAETGTQCVNLTTRTQLPPAYTNSFTRGVYYPDKVFRSSVLHSTQDLFLPFFSNVTWFHAIHVSGTNGTKRFDNPVLPFNDGVYFASTEKSNIIRGWIFGTTLDSKTQSLLIVNNATNVVIKVCEFQFCNDPFLGVYYHKNNKSWMESEFRVYSSANNCTFEYVSQPFLMDLEGKQGNFKNLREFVFKNIDGYFKIYSKHTPINLVRDLPQGFSALEPLVDLPIGINITRFQTLLALHRSYLTPGDSSSGWTAGAAAYYVGYLQPRTFLLKYNENGTITDAVDCALDPLSETKCTLKSFTVEKGIYQTSNFRVQPTESIVRFPNITNLCPFGEVFNATRFASVYAWNRKRISNCIADYSVLYNSASFSTFKCYGVSPTKLNDLCFTNVYADSFVIRGDEVRQIAPGQTGKIADYNYKLPDDFTGCVIAWNSNNLDSKVGGNYNYLYRLFRKSNLKPFERDISTEIYQAGSTPCNGVEGFNCYFPLQSYGFQPTNGVGYQPYRVVVLSFELLHAPATVCGPKKSTNLVKNKCVNFNFNGLTGTGVLTESNKKFLPFQQFGRDIADTTDAVRDPQTLEILDITPCSFGGVSVITPGTNTSNQVAVLYQDVNCTEVPVAIHADQLTPTWRVYSTGSNVFQTRAGCLIGAEHVNNSYECDIPIGAGICASYQTQTNSPSGAGSVASQSIIAYTMSLGAENSVAYSNNSIAIPTNFTISVTTEILPVSMTKTSVDCTMYICGDSTECSNLLLQYGSFCTQLNRALTGIAVEQDKNTQEVFAQVKQIYKTPPIKDFGGFNFSQILPDPSKPSKRSFIEDLLFNKVTLADAGFIKQYGDCLGDIAARDLICAQKFNGLTVLPPLLTDEMIAQYTSALLAGTITSGWTFGAGAALQIPFAMQMAYRFNGIGVTQNVLYENQKLIANQFNSAIGKIQDSLSSTASALGKLQDVVNQNAQALNTLVKQLSSNFGAISSVLNDILSRLDPPEAEVQIDRLITGRLQSLQTYVTQQLIRAAEIRASANLAATKMSECVLGQSKRVDFCGKGYHLMSFPQSAPHGVVFLHVTYVPAQEKNFTTAPAICHDGKAHFPREGVFVSNGTHWFVTQRNFYEPQIITTDNTFVSGNCDVVIGIVNNTVYDPLQPELDSFKEELDKYFKNHTSPDVDLGDISGINASVVNIQKEIDRLNEVAKNLNESLIDLQELGKYEQYIKGSGRENLYFQGGGGSGYIPEAPRDGQAYVRKDGEWVLLSTFLGHHHHHHHH

SEQ ID NO: 5271 - protein, 1281 aa, Artificial Sequence
  Description of Artificial Sequence: Synthetic polypeptide
MGILPSPGMPALLSLVSLLSVLLMGCVAETGTQCVNLTTRTQLPPAYTNSFTRGVYYPDKVFRSSVLHSTQDLFLPFFSNVTWFHAIHVSGTNGTKRFDNPVLPFNDGVYFASTEKSNIIRGWIFGTTLDSKTQSLLIVNNATNVVIKVCEFQFCNDPFLGVYYHKNNKSWMESEFRVYSSANNCTFEYVSQPFLMDLEGKQGNFKNLREFVFKNIDGYFKIYSKHTPINLVRDLPQGFSALEPLVDLPIGINITRFQTLLALHRSYLTPGDSSSGWTAGAAAYYVGYLQPRTFLLKYNENGTITDAVDCALDPLSETKCTLKSFTVEKGIYQTSNFRVQPTESIVRFPNITNLCPFGEVFNATRFASVYAWNRKRISNCVADYSVLYNSASFSTFKCYGVSPTKLNDLCFTNVYADSFVIRGDEVRQIAPGQTGKIADYNYKLPDDFTGCVIAWNSNNLDSKVGGNYNYLYRLFRKSNLKPFERDISTEIYQAGSTPCNGVEGFNCYFPLQSYGFQPTNGVGYQPYRVVVLSFELLHAPATVCGPKKSTNLVKNKCVNFNFNGLTGTGVLTESNKKFLPFQQFGRDMADTTDAVRDPQTLEILDITPCSFGGVSVITPGTNTSNQVAVLYQDVNCTEVPVAIHADQLTPTWRVYSTGSNVFQTRAGCLIGAEHVNNSYECDIPIGAGICASYQTQTNSPSGAGSVASQSIIAYTMSLGAENSVAYSNNSIAIPTNFTISVTTEILPVSMTKTSVDCTMYICGDSTECSNLLLQYGSFCTQLNRALTGIAVEQDKNTQEVFAQVKQIYKTPPIKDFGGFNFSQILPDPSKPSKRSFIEDLLFNKVTLADAGFIKQYGDCLGDIAARDLICAQKFNGLTVLPPLLTDEMIAQYTSALLAGTITSGWTFGAGAALQIPFAMQMAYRFNGIGVTQNVLYENQKLIANQFNSAIGKIQDSLSSTASALGKLQDVVNQNAQALNTLVKQLSSNFGAISSVLNDILSRLDPPEAEVQIDRLITGRLQSLQTYVTQQLIRAAEIRASANLAATKMSECVLGQSKRVDFCGKGYHLMSFPQSAPHGVVFLHVTYVPAQEKNFTTAPAICHDGKAHFPREGVFVSNGTHWFVTQRNFYEPQIITTDNTFVSGNCDVVIGIVNNTVYDPLQPELDSFKEELDKYFKNHTSPDVDLGDISGINASVVNIQKEIDRLNEVAKNLNESLIDLQELGKYEQYIKGSGRENLYFQGGGGSGYIPEAPRDGQAYVRKDGEWVLLSTFLGHHHHHHHH

SEQ ID NO: 5272 - protein, 1281 aa, Artificial Sequence
  Description of Artificial Sequence: Synthetic polypeptide
MGILPSPGMPALLSLVSLLSVLLMGCVAETGTQCVNLTTRTQLPPAYTNSFTRGVYYPDKVFRSSVLHSTQDLFLPFFSNVTWFHAIHVSGTNGTKRFDNPVLPFNDGVYFASTEKSNIIRGWIFGTTLDSKTQSLLIVNNATNVVIKVCEFQFCNDPFLGVYYHKNNKSWMESEFRVYSSANNCTFEYVSQPFLMDLEGKQGNFKNLREFVFKNIDGYFKIYSKHTPINLVRDLPQGFSALEPLVDLPIGINITRFQTLLALHRSYLTPGDSSSGWTAGAAAYYVGYLQPRTFLLKYNENGTITDAVDCALDPLSETKCTLKSFTVEKGIYQTSNFRVQPTESIVRFPNITNLCPFGEVFNATRFASVYAWNRKRISNCVADYSVLYNSASFSTFKCYGVSPTKLNDLCFTNVYADSFVIRGDEVRQIAPGQTGKIADYNYKLPDDFTGCVIAWNSNNLDSKVGGNYNYLYRLFRKSNLAPFERDISTEIYQAGSTPCNGVEGFNCYFPLQSYGFQPTNGVGYQPYRVVVLSFELLHAPATVCGPKKSTNLVKNKCVNFNFNGLTGTGVLTESNKKFLPFQQFGRDIADTTDAVRDPQTLEILDITPCSFGGVSVITPGTNTSNQVAVLYQDVNCTEVPVAIHADQLTPTWRVYSTGSNVFQTRAGCLIGAEHVNNSYECDIPIGAGICASYQTQTNSPSGAGSVASQSIIAYTMSLGAENSVAYSNNSIAIPTNFTISVTTEILPVSMTKTSVDCTMYICGDSTECSNLLLQYGSFCTQLNRALTGIAVEQDKNTQEVFAQVKQIYKTPPIKDFGGFNFSQILPDPSKPSKRSFIEDLLFNKVTLADAGFIKQYGDCLGDIAARDLICAQKFNGLTVLPPLLTDEMIAQYTSALLAGTITSGWTFGAGAALQIPFAMQMAYRFNGIGVTQNVLYENQKLIANQFNSAIGKIQDSLSSTASALGKLQDVVNQNAQALNTLVKQLSSNFGAISSVLNDILSRLDPPEAEVQIDRLITGRLQSLQTYVTQQLIRAAEIRASANLAATKMSECVLGQSKRVDFCGKGYHLMSFPQSAPHGVVFLHVTYVPAQEKNFTTAPAICHDGKAHFPREGVFVSNGTHWFVTQRNFYEPQIITTDNTFVSGNCDVVIGIVNNTVYDPLQPELDSFKEELDKYFKNHTSPDVDLGDISGINASVVNIQKEIDRLNEVAKNLNESLIDLQELGKYEQYIKGSGRENLYFQGGGGSGYIPEAPRDGQAYVRKDGEWVLLSTFLGHHHHHHHH

SEQ ID NO: 5273 - protein, 1281 aa, Artificial Sequence
  Description of Artificial Sequence: Synthetic polypeptide
MGILPSPGMPALLSLVSLLSVLLMGCVAETGTQCVNLTTRTQLPPAYTNSFTRGVYYPDKVFRSSVLHSTQDLFLPFFSNVTWFHAIHVSGTNGTKRFDNPVLPFNDGVYFASTEKSNIIRGWIFGTTLDSKTQSLLIVNNATNVVIKVCEFQFCNDPFLGVYYHKNNKSWMESEFRVYSSANNCTFEYVSQPFLMDLEGKQGNFKNLREFVFKNIDGYFKIYSKHTPINLVRDLPQGFSALEPLVDLPIGINITRFQTLLALHRSYLTPGDSSSGWTAGAAAYYVGYLQPRTFLLKYNENGTITDAVDCALDPLSETKCTLKSFTVEKGIYQTSNFRVQPTESIVRFPNITNLCPFGEVFNATRFASVYAPNRKRISNCVADYSVLYNSASFSTFKCYGVSPTKLNDLCFTNVYADSFVIRGDEVRQIAPGQTGKIADYNYKLPDDFTGCVIAWNSNNLDSKVGGNYNYLYRLFRKSNLKPFERDISTEIYQAGSTPCNGVEGFNCYFPLQSYGFQPTNGVGYQPYRVVVLSFELLHAPATVCGPKKSTNLVKNKCVNFNFNGLTGTGVLTESNKKFLPFQQFGRDIADTTDAVRDPQTLEILDITPCSFGGVSVITPGTNTSNQVAVLYQDVNCTEVPVAIHADQLTPTWRVYSTGSNVFQTRAGCLIGAEHVNNSYECDIPIGAGICASYQTQTNSPSGAGSVASQSIIAYTMSLGAENSVAYSNNSIAIPTNFTISVTTEILPVSMTKTSVDCTMYICGDSTECSNLLLQYGSFCTQLNRALTGIAVEQDKNTQEVFAQVKQIYKTPPIKDFGGFNFSQILPDPSKPSKRSFIEDLLFNKVTLADAGFIKQYGDCLGDIAARDLICAQKFNGLTVLPPLLTDEMIAQYTSALLAGTITSGWTFGAGAALQIPFAMQMAYRFNGIGVTQNVLYENQKLIANQFNSAIGKIQDSLSSTASALGKLQDVVNQNAQALNTLVKQLSSNFGAISSVLNDILSRLDPPEAEVQIDRLITGRLQSLQTYVTQQLIRAAEIRASANLAATKMSECVLGQSKRVDFCGKGYHLMSFPQSAPHGVVFLHVTYVPAQEKNFTTAPAICHDGKAHFPREGVFVSNGTHWFVTQRNFYEPQIITTDNTFVSGNCDVVIGIVNNTVYDPLQPELDSFKEELDKYFKNHTSPDVDLGDISGINASVVNIQKEIDRLNEVAKNLNESLIDLQELGKYEQYIKGSGRENLYFQGGGGSGYIPEAPRDGQAYVRKDGEWVLLSTFLGHHHHHHHH

SEQ ID NO: 5274 - protein, 1281 aa, Artificial Sequence
  Description of Artificial Sequence: Synthetic polypeptide
MGILPSPGMPALLSLVSLLSVLLMGCVAETGTQCVNLTTRTQLPPAYTNSFTRGVYYPDKVFRSSVLHSTQDLFLPFFSNVTWFHAIHVSGTNGTKRFDNPVLPFNDGVYFASTEKSNIIRGWIFGTTLDSKTQSLLIVNNATNVVIKVCEFQFCNDPFLGVYYHKNNKSWMESEFRVYSSANNCTFEYVSQPFLMDLEGKQGNFKNLREFVFKNIDGYFKIYSKHTPINLVRDLPQGFSALEPLVDLPIGINITRFQTLLALHRSYLTPGDSSSGWTAGAAAYYVGYLQPRTFLLKYNENGTITDAVDCALDPLSETKCTLKSFTVEKGIYQTSNFRVQPTESIVRFPNITNLCPFGEVFNATRFASVYAWNRKRISNCVADYSVLYNSASFSTFKCYGVSPTKLNDLCFTNVYADSFVIRGDEVRQIAPGQTGKIADYNYKLPDDFTGCVIAWNSNNLDSKVGGNYNYLYRLFRKSNLKPFERDISTEIYQAGSTPCNGVEGFNCYFPLQSYGFQPTNGVGYQPYRVVVLSFELLHAPATVCGPKKSTNLVKNKCVNFNFNGLTGTGVLTESNKKFLPFQQFGRDIADTTDAVRDPQTLEILDITPCSFGGVSVITPGTNTSNQVAVLYQDVNCTEVPVAIHADQLTPTWRVYSTGSNVFQTRAGCLIGAEHVNNSYECDIPIGAGICASYQTQTNSPSGAGSVASQSIIAYTMSLGAENSVAYSNNSIAIPTNFTISVTTEILPVSMTKTSVDCTMYICGDSTECSNLLLQYGSFCTQLNRALTGIAVEQDKNTQEVFAQVKQIYKTPPIKDFGGFNFSQILPDPSKPSKRSFIEDLLFNKVTLADAGFIKQYGDCLGDIAARDLICAQKFNGLTVLPPLLTDEMIAQYTSALLAGTITSGWTFGAGAALQIPFAMQMAYRFNGIGVTQNVLYENQKLIANQFNSAIGKIQDSLSSTASALGKLQDVVNQNAQALNTLVKQLSSNFGAISSVLNDILSRLDPPQAEVQIDRLITGRLQSLQTYVTQQLIRAAEIRASANLAATKMSECVLGQSKRVDFCGKGYHLMSFPQSAPHGVVFLHVTYVPAQEKNFTTAPAICHDGKAHFPREGVFVSNGTHWFVTQRNFYEPQIITTDNTFVSGNCDVVIGIVNNTVYDPLQPELDSFKEELDKYFKNHTSPDVDLGDISGINASVVNIQKEIDRLNEVAKNLNESLIDLQELGKYEQYIKGSGRENLYFQGGGGSGYIPEAPRDGQAYVRKDGEWVLLSTFLGHHHHHHHH

SEQ ID NO: 5275 - protein, 1281 aa, Artificial Sequence
  Description of Artificial Sequence: Synthetic polypeptide
MGILPSPGMPALLSLVSLLSVLLMGCVAETGTQCVNLTTRTQLPPAYTNSFTRGVYYPDKVFRSSVLHSTQDLFLPFFSNVTWFHAIHVSGTNGTKRFDNPVLPFNDGVYFASTEKSNIIRGWIFGTTLDSKTQSLLIVNNATNVVIKVCEFQFCNDPFLGVYYHKNNKSWMESEFRVYSSANNCTFEYVSQPFLMDLEGKQGNFKNLREFVFKNIDGYFKIYSKHTPINLVRDLPQGFSALEPLVDLPIGINITRFQTLLALHRSYLTPGDSSSGWTAGAAAYYVGYLQPRTFLLKYNENGTITDAVDCALDPLSETKCTLKSFTVEKGIYQTSNFRVQPTESIVRFPNITNLCPFGEVFNATRFAPVYAWNRKRISNCVADYSVLYNSASFSTFKCYGVSPTKLNDLCFTNVYADSFVIRGDEVRQIAPGQTGKIADYNYKLPDDFTGCVIAWNSNNLDSKVGGNYNYLYRLFRKSNLKPFERDISTEIYQAGSTPCNGVEGFNCYFPLQSYGFQPTNGVGYQPYRVVVLSFELLHAPATVCGPKKSTNLVKNKCVNFNFNGLTGTGVLTESNKKFLPFQQFGRDIADTTDAVRDPQTLEILDITPCSFGGVSVITPGTNTSNQVAVLYQDVNCTEVPVAIHADQLTPTWRVYSTGSNVFQTRAGCLIGAEHVNNSYECDIPIGAGICASYQTQTNSPSGAGSVASQSIIAYTMSLGAENSVAYSNNSIAIPTNFTISVTTEILPVSMTKTSVDCTMYICGDSTECSNLLLQYGSFCTQLNRALTGIAVEQDKNTQEVFAQVKQIYKTPPIKDFGGFNFSQILPDPSKPSKRSFIEDLLFNKVTLADAGFIKQYGDCLGDIAARDLICAQKFNGLTVLPPLLTDEMIAQYTSALLAGTITSGWTFGAGAALQIPFAMQMAYRFNGIGVTQNVLYENQKLIANQFNSAIGKIQDSLSSTASALGKLQDVVNQNAQALNTLVKQLSSNFGAISSVLNDILSRLDPPEAEVQIDRLITGRLQSLQTYVTQQLIRAAEIRASANLAATKMSECVLGQSKRVDFCGKGYHLMSFPQSAPHGVVFLHVTYVPAQEKNFTTAPAICHDGKAHFPREGVFVSNGTHWFVTQRNFYEPQIITTDNTFVSGNCDVVIGIVNNTVYDPLQPELDSFKEELDKYFKNHTSPDVDLGDISGINASVVNIQKEIDRLNEVAKNLNESLIDLQELGKYEQYIKGSGRENLYFQGGGGSGYIPEAPRDGQAYVRKDGEWVLLSTFLGHHHHHHHH

SEQ ID NO: 5276 - protein, 1281 aa, Artificial Sequence
  Description of Artificial Sequence: Synthetic polypeptide
MGILPSPGMPALLSLVSLLSVLLMGCVAETGTQCVNLTTRTQLPPAYTNSFTRGVYYPDKVFRSSVLHSTQDLFLPFFSNVTWFHAIHVSGTNGTKRFDNPVLPFNDGVYFASTEKSNIIRGWIFGTTLDSKTQSLLIVNNATNVVIKVCEFQFCNDPFLGVYYHKNNKSWMESEFRVYSSANNCTFEYVSQPFLMDLEGKQGNFKNLREFVFKNIDGYFKIYSKHTPINLVRDLPQGFSALEPLVDLPIGINITRFQTLLALHRSYLTPGDSSSGWTAGAAAYYVGYLQPRTFLLKYNENGTITDAVDCALDPLSETKCTLKSFTVEKGIYQTSNFRVQPTESIVRFPNITNLCPFGEVFNATRFASVYAWNRKRISNCVADYSVLYNSASFSTFKCYGVSPTKLNDLCFTNVYADSFVIRGDEVRQIAPGQTGKIADYNYKLPDDFTGCVIAWNSNNLDSKVGGNYNYLYRLFRKSNLKPFERDISKEIYQAGSTPCNGVEGFNCYFPLQSYGFQPTNGVGYQPYRVVVLSFELLHAPATVCGPKKSTNLVKNKCVNFNFNGLTGTGVLTESNKKFLPFQQFGRDIADTTDAVRDPQTLEILDITPCSFGGVSVITPGTNTSNQVAVLYQDVNCTEVPVAIHADQLTPTWRVYSTGSNVFQTRAGCLIGAEHVNNSYECDIPIGAGICASYQTQTNSPSGAGSVASQSIIAYTMSLGAENSVAYSNNSIAIPTNFTISVTTEILPVSMTKTSVDCTMYICGDSTECSNLLLQYGSFCTQLNRALTGIAVEQDKNTQEVFAQVKQIYKTPPIKDFGGFNFSQILPDPSKPSKRSFIEDLLFNKVTLADAGFIKQYGDCLGDIAARDLICAQKFNGLTVLPPLLTDEMIAQYTSALLAGTITSGWTFGAGAALQIPFAMQMAYRFNGIGVTQNVLYENQKLIANQFNSAIGKIQDSLSSTASALGKLQDVVNQNAQALNTLVKQLSSNFGAISSVLNDILSRLDPPEAEVQIDRLITGRLQSLQTYVTQQLIRAAEIRASANLAATKMSECVLGQSKRVDFCGKGYHLMSFPQSAPHGVVFLHVTYVPAQEKNFTTAPAICHDGKAHFPREGVFVSNGTHWFVTQRNFYEPQIITTDNTFVSGNCDVVIGIVNNTVYDPLQPELDSFKEELDKYFKNHTSPDVDLGDISGINASVVNIQKEIDRLNEVAKNLNESLIDLQELGKYEQYIKGSGRENLYFQGGGGSGYIPEAPRDGQAYVRKDGEWVLLSTFLGHHHHHHHH

SEQ ID NO: 5277 - protein, 1281 aa, Artificial Sequence
  Description of Artificial Sequence: Synthetic polypeptide
MGILPSPGMPALLSLVSLLSVLLMGCVAETGTQCVNLTTRTQLPPAYTNSFTRGVYYPDKVFRSSVLHSTQDLFLPFFSNVTWFHAIHVSGTNGTKRFDNPVLPFNDGVYFASTEKSNIIRGWIFGTTLDSKTQSLLIVNNATNVVIKVCEFQFCNDPFLGVYYHKNNKSWMESEFRVYSSANNCTFEYVSQPFLMDLEGKQGNFKNLREFVFKNIDGYFKIYSKHTPINLVRDLPQGFSALEPLVDLPIGINITRFQTLLALHRSYLTPGDSSSGWTAGAAAYYVGYLQPRTFLLKYNENGTITDAVDCALDPLSETKCTLKSFTVEKGIYQTSNFRVQPTESIVRFPNITNLCPFGEVFNATRFASVYAWNRKRISNCVADYSVLYNSASFSTFKCYGVSPTKLNDLCFTNVYADSFVIRGDEVRQIAPGQTGKIADYNYKLPDDFTGCVIAWNSNNLDSKVGGNYNYLYRLFRKSNLKPFERDISTEIYQAGSTPANGVEGFNCYFPLQSYGFQPTNGVGYQPYRVVVLSFELLHAPATVCGPKKSTNLVKNKCVNFNFNGLTGTGVLTESNKKFLPFQQFGRDIADTTDAVRDPQTLEILDITPCSFGGVSVITPGTNTSNQVAVLYQDVNCTEVPVAIHADQLTPTWRVYSTGSNVFQTRAGCLIGAEHVNNSYECDIPIGAGICASYQTQTNSPSGAGSVASQSIIAYTMSLGAENSVAYSNNSIAIPTNFTISVTTEILPVSMTKTSVDCTMYICGDSTECSNLLLQYGSFCTQLNRALTGIAVEQDKNTQEVFAQVKQIYKTPPIKDFGGFNFSQILPDPSKPSKRSFIEDLLFNKVTLADAGFIKQYGDCLGDIAARDLICAQKFNGLTVLPPLLTDEMIAQYTSALLAGTITSGWTFGAGAALQIPFAMQMAYRFNGIGVTQNVLYENQKLIANQFNSAIGKIQDSLSSTASALGKLQDVVNQNAQALNTLVKQLSSNFGAISSVLNDILSRLDPPEAEVQIDRLITGRLQSLQTYVTQQLIRAAEIRASANLAATKMSECVLGQSKRVDFCGKGYHLMSFPQSAPHGVVFLHVTYVPAQEKNFTTAPAICHDGKAHFPREGVFVSNGTHWFVTQRNFYEPQIITTDNTFVSGNCDVVIGIVNNTVYDPLQPELDSFKEELDKYFKNHTSPDVDLGDISGINASVVNIQKEIDRLNEVAKNLNESLIDLQELGKYEQYIKGSGRENLYFQGGGGSGYIPEAPRDGQAYVRKDGEWVLLSTFLGHHHHHHHH

SEQ ID NO: 5278 - protein, 1281 aa, Artificial Sequence
  Description of Artificial Sequence: Synthetic polypeptide
MGILPSPGMPALLSLVSLLSVLLMGCVAETGTQCVNLTTRTQLPPAYTNSFTRGVYYPDKVFRSSVLHSTQDLFLPFFSNVTWFHAIHVSGTNGTKRFDNPVLPFNDGVYFASTEKSNIIRGWIFGTTLDSKTQSLLIVNNATNVVIKVCEFQFCNDPFLGVYYHKNNKSWMESEFRVYSSANNCTFEYVSQPFLMDLEGKQGNFKNLREFVFKNIDGYFKIYSKHTPINLVRDLPQGFSALEPLVDLPIGINITRFQTLLALHRSYLTPGDSSSGWTAGAAAYYVGYLQPRTFLLKYNENGTITDAVDCALDPLSETKCTLKSFTVEKGIYQTSNFRVQPTESIVRFPNITNLCPFGEVFNATRFASVYAWNRKRISNCVADYSVLYNSASFSTFKCYGVSPTKLNDLCFTNVYADSFVIRGDEVRQIAPGQTGKIADYNYKLPDDFTGCVIAWNSDNLDSKVGGNYNYLYRLFRKSNLKPFERDISTEIYQAGSTPCNGVEGFNCYFPLQSYGFQPTNGVGYQPYRVVVLSFELLHAPATVCGPKKSTNLVKNKCVNFNFNGLTGTGVLTESNKKFLPFQQFGRDIADTTDAVRDPQTLEILDITPCSFGGVSVITPGTNTSNQVAVLYQDVNCTEVPVAIHADQLTPTWRVYSTGSNVFQTRAGCLIGAEHVNNSYECDIPIGAGICASYQTQTNSPSGAGSVASQSIIAYTMSLGAENSVAYSNNSIAIPTNFTISVTTEILPVSMTKTSVDCTMYICGDSTECSNLLLQYGSFCTQLNRALTGIAVEQDKNTQEVFAQVKQIYKTPPIKDFGGFNFSQILPDPSKPSKRSFIEDLLFNKVTLADAGFIKQYGDCLGDIAARDLICAQKFNGLTVLPPLLTDEMIAQYTSALLAGTITSGWTFGAGAALQIPFAMQMAYRFNGIGVTQNVLYENQKLIANQFNSAIGKIQDSLSSTASALGKLQDVVNQNAQALNTLVKQLSSNFGAISSVLNDILSRLDPPEAEVQIDRLITGRLQSLQTYVTQQLIRAAEIRASANLAATKMSECVLGQSKRVDFCGKGYHLMSFPQSAPHGVVFLHVTYVPAQEKNFTTAPAICHDGKAHFPREGVFVSNGTHWFVTQRNFYEPQIITTDNTFVSGNCDVVIGIVNNTVYDPLQPELDSFKEELDKYFKNHTSPDVDLGDISGINASVVNIQKEIDRLNEVAKNLNESLIDLQELGKYEQYIKGSGRENLYFQGGGGSGYIPEAPRDGQAYVRKDGEWVLLSTFLGHHHHHHHH

SEQ ID NO: 5279 - protein, 1281 aa, Artificial Sequence
  Description of Artificial Sequence: Synthetic polypeptide
MGILPSPGMPALLSLVSLLSVLLMGCVAETGTQCVNLTTRTQLPPAYTNSFTRGVYYPDKVFRSSVLHSTQDLFLPFFSNVTWFHAIHVSGTNGTKRFDNPVLPFNDGVYFASTEKSNIIRGWIFGTTLDSKTQSLLIVNNATNVVIKVCEFQFCNDPFLGVYYHKNNKSWMESEFRVYSSANNCTFEYVSQPFLMDLEGKQGNFKNLREFVFKNIDGYFKIYSKHTPINLVRDLPQGFSALEPLVDLPIGINITRFQTLLALHRSYLTPGDSSSGWTAGAAAYYVGYLQPRTFLLKYNENGTITDAVDCALDPLSETKCTLKSFTVEKGIYQTSNFRVQPTESIVRFPNITNLCPFGEVFNATRFASVYAWNRKRISNCVADYSVLYNSASFSTFKCYGVSPTKLNDLCFTNVYADSFVIRGDEVRQIAPGQTGKIADYNYKLPDDFTGCVIAWNSNNLDSKVGGNYNYLYRLFRKSNLKPFERDISTEIYQAGSTPCNGVEGFNCYFPLQSYGFQPTNGVGYQPYRVVVLSFELLHAPATVCGPKKSTNLVKNKCVNFNFNGLTGTGVLTESNKKFLPFQQFGRDIADTTDAVRDPQTLEILDITPCSFGGVSVITPGTNTSNQVAVLYQDVNCTEVPVAIHADQLTPTWRVYSTGSNVFQTRAGCLIGAEHVNNSYECDIPIGAGICASYQTQTNSPSGAGSVASQSIIAYTMSLGAENSVAYSNNSIAIPTNFTISVTTEILPVSMTKTSVDCTMYICGDSTECSNLLLQYGSFCTQLNRALTGIAVEQDKNTQEVFAQVKQIYKTPPIKDFGGFNFSQILPDPSKPSKRSFIEDLLFNKVTLADAGFIKQYGDCLGDIAARDLICAQKFNGLTVLPPLLTDEMIAQYTSALLAGTITSGWTFGAGAALQIPFAMQMAYRFNGIGVTQNVLYENQKLIANQFNSAIGKIQDSLSSTASALGKLQDVVNQNAQALNTLVKQLSSNFGAISSVLNDILSRLDPPEAEVQIDRLITGRLQSLQTYVTQQLIRAAEIRASANLAATKMSECVLGQSKRVDFCGKGYHLMSFPQSAPHGVVFLHVTYVPAQHKNFTTAPAICHDGKAHFPREGVFVSNGTHWFVTQRNFYEPQIITTDNTFVSGNCDVVIGIVNNTVYDPLQPELDSFKEELDKYFKNHTSPDVDLGDISGINASVVNIQKEIDRLNEVAKNLNESLIDLQELGKYEQYIKGSGRENLYFQGGGGSGYIPEAPRDGQAYVRKDGEWVLLSTFLGHHHHHHHH

SEQ ID NO: 5280 - protein, 1281 aa, Artificial Sequence
  Description of Artificial Sequence: Synthetic polypeptide
MGILPSPGMPALLSLVSLLSVLLMGCVAETGTQCVNLTTRTQLPPAYTNSFTRGVYYPDKVFRSSVLHSTQDLFLPFFSNVTWFHAIHVSGTNGTKRFDNPVLPFNDGVYFASTEKSNIIRGWIFGTTLDSKTQSLLIVNNATNVVIKVCEFQFCNDPFLGVYYHKNNKSWMESEFRVYSSANNCTFEYVSQPFLMDLEGKQGNFKNLREFVFKNIDGYFKIYSKHTPINLVRDLPQGFSALEPLVDLPIGINITRFQTLLALHRSYLTPGDSSSGWTAGAAAYYVGYLQPRTFLLKYNENGTITDAVDCALDPLSETKCTLKSFTVEKGIYQTSNFRVQPTESIVRFPNITNLCPFGEVFNATRFASVYAWNRKRISNCVADYSVLYNSASFSTFKCYGVSPTKLNDLCFTNVYADSFVIRGDEVRQIAPGQTGKIADYNYKLPDDFTGCVIAWNSNNLDSKVGGNYNYLYRLFRKSNLKPFERDISTEIYQAGSTPCNGVEGFNCYFPLQSYGFQPTNGVGYQPYRVVVLSFELLHAPATVCGPKKSTNLVKNKCVNFNFNGLTGTGVLTESNKKFLPFQQFGRDIADTTDAVRDPQTLEILDITPCSFGGVSVITPGTNTSNQVAVLYQDVNCTEVPVAIHADQLTPTWRVYSTGSNVFQTRAGCLIGAEHVNNSYECDIPIGAGICASYQTQTNSPSGAGSVASQSIIAYTMSLGAENQVAYSNNSIAIPTNFTISVTTEILPVSMTKTSVDCTMYICGDSTECSNLLLQYGSFCTQLNRALTGIAVEQDKNTQEVFAQVKQIYKTPPIKDFGGFNFSQILPDPSKPSKRSFIEDLLFNKVTLADAGFIKQYGDCLGDIAARDLICAQKFNGLTVLPPLLTDEMIAQYTSALLAGTITSGWTFGAGAALQIPFAMQMAYRFNGIGVTQNVLYENQKLIANQFNSAIGKIQDSLSSTASALGKLQDVVNQNAQALNTLVKQLSSNFGAISSVLNDILSRLDPPEAEVQIDRLITGRLQSLQTYVTQQLIRAAEIRASANLAATKMSECVLGQSKRVDFCGKGYHLMSFPQSAPHGVVFLHVTYVPAQEKNFTTAPAICHDGKAHFPREGVFVSNGTHWFVTQRNFYEPQIITTDNTFVSGNCDVVIGIVNNTVYDPLQPELDSFKEELDKYFKNHTSPDVDLGDISGINASVVNIQKEIDRLNEVAKNLNESLIDLQELGKYEQYIKGSGRENLYFQGGGGSGYIPEAPRDGQAYVRKDGEWVLLSTFLGHHHHHHHH

SEQ ID NO: 5281 - protein, 1281 aa, Artificial Sequence
  Description of Artificial Sequence: Synthetic polypeptide
MGILPSPGMPALLSLVSLLSVLLMGCVAETGTQCVNLTTRTQLPPAYTNSFTRGVYYPDKVFRSSVLHSTQDLFLPFFSNVTWFHAIHVSGTNGTKRFDNPVLPFNDGVYFASTEKSNIIRGWIFGTTLDSKTQSLLIVNNATNVVIKVCEFQFCNDPFLGVYYHKNNKSWMESEFRVYSSANNCTFEYVSQPFLMDLEGKQGNFKNLREFVFKNIDGYFKIYSKHTPINLVRDLPQGFSALEPLVDLPIGINITRFQTLLALHRSYLTPGDSSSGWTAGAAAYYVGYLQPRTFLLKYNENGTITDAVDCALDPLSETKCTLKSFTVEKGIYQTSNFRVQPTESIVRFPNITNLCPFGEVFNATRFASVAAWNRKRISNCVADYSVLYNSASFSTFKCYGVSPTKLNDLCFTNVYADSFVIRGDEVRQIAPGQTGKIADYNYKLPDDFTGCVIAWNSNNLDSKVGGNYNYLYRLFRKSNLKPFERDISTEIYQAGSTPCNGVEGFNCYFPLQSYGFQPTNGVGYQPYRVVVLSFELLHAPATVCGPKKSTNLVKNKCVNFNFNGLTGTGVLTESNKKFLPFQQFGRDIADTTDAVRDPQTLEILDITPCSFGGVSVITPGTNTSNQVAVLYQDVNCTEVPVAIHADQLTPTWRVYSTGSNVFQTRAGCLIGAEHVNNSYECDIPIGAGICASYQTQTNSPSGAGSVASQSIIAYTMSLGAENSVAYSNNSIAIPTNFTISVTTEILPVSMTKTSVDCTMYICGDSTECSNLLLQYGSFCTQLNRALTGIAVEQDKNTQEVFAQVKQIYKTPPIKDFGGFNFSQILPDPSKPSKRSFIEDLLFNKVTLADAGFIKQYGDCLGDIAARDLICAQKFNGLTVLPPLLTDEMIAQYTSALLAGTITSGWTFGAGAALQIPFAMQMAYRFNGIGVTQNVLYENQKLIANQFNSAIGKIQDSLSSTASALGKLQDVVNQNAQALNTLVKQLSSNFGAISSVLNDILSRLDPPEAEVQIDRLITGRLQSLQTYVTQQLIRAAEIRASANLAATKMSECVLGQSKRVDFCGKGYHLMSFPQSAPHGVVFLHVTYVPAQEKNFTTAPAICHDGKAHFPREGVFVSNGTHWFVTQRNFYEPQIITTDNTFVSGNCDVVIGIVNNTVYDPLQPELDSFKEELDKYFKNHTSPDVDLGDISGINASVVNIQKEIDRLNEVAKNLNESLIDLQELGKYEQYIKGSGRENLYFQGGGGSGYIPEAPRDGQAYVRKDGEWVLLSTFLGHHHHHHHH

SEQ ID NO: 5282 - protein, 1281 aa, Artificial Sequence
  Description of Artificial Sequence: Synthetic polypeptide
MGILPSPGMPALLSLVSLLSVLLMGCVAETGTQCVNLTTRTQLPPAYTNSFTRGVYYPDKVFRSSVLHSTQDLFLPFFSNVTWFHAIHVSGTNGTKRFDNPVLPFNDGVYFASTEKSNIIRGWIFGTTLDSKTQSLLIVNNATNVVIKVCEFQFCNDPFLGVYYHKNNKSWMESEFRVYSSANNCTFEYVSQPFLMDLEGKQGNFKNLREFVFKNIDGYFKIYSKHTPINLVRDLPQGFSALEPLVDLPIGINITRFQTLLALHRSYLTPGDSSSGWTAGAAAYYVGYLQPRTFLLKYNENGTITDAVDCALDPLSETKCTLKSFTVEKGIYQTSNFRVQPTESIVRFPNITNLCPFGEVFNATRFASVYAWNRKRISNCVADYSVLYNSASFSTFKCYGVSPTKLNDLCFTNVYADSFVIRGDEVRQIAPGQTGKIADYNYKLPDDFTGCVIAWNSNNLDSKVGGNYNYLYRLFRKSNLKPFERDISTEIYQAGSTPCNGVEGFNCYFPLQSYGFQPTNGVGYQPYRVVVLSFELLHAPATVCGPKKSTNLVKNKCVNFNFNGLTGTGVLTESNKKFLPFQQFGRDIADTTDAVRDPQTLEILDITPCSFGGVSVITPGTNTSNQVAVLYQDVNCTEVPVAIHADQLTPTWRVYSTGSNVFQTRAGCLIGAEHVNNSYECDIPIGAGICASYQTQTNSPSGAGSVASQSIIAYTMSLGAENIVAYSNNSIAIPTNFTISVTTEILPVSMTKTSVDCTMYICGDSTECSNLLLQYGSFCTQLNRALTGIAVEQDKNTQEVFAQVKQIYKTPPIKDFGGFNFSQILPDPSKPSKRSFIEDLLFNKVTLADAGFIKQYGDCLGDIAARDLICAQKFNGLTVLPPLLTDEMIAQYTSALLAGTITSGWTFGAGAALQIPFAMQMAYRFNGIGVTQNVLYENQKLIANQFNSAIGKIQDSLSSTASALGKLQDVVNQNAQALNTLVKQLSSNFGAISSVLNDILSRLDPPEAEVQIDRLITGRLQSLQTYVTQQLIRAAEIRASANLAATKMSECVLGQSKRVDFCGKGYHLMSFPQSAPHGVVFLHVTYVPAQEKNFTTAPAICHDGKAHFPREGVFVSNGTHWFVTQRNFYEPQIITTDNTFVSGNCDVVIGIVNNTVYDPLQPELDSFKEELDKYFKNHTSPDVDLGDISGINASVVNIQKEIDRLNEVAKNLNESLIDLQELGKYEQYIKGSGRENLYFQGGGGSGYIPEAPRDGQAYVRKDGEWVLLSTFLGHHHHHHHH

SEQ ID NO: 5283 - protein, 1281 aa, Artificial Sequence
  Description of Artificial Sequence: Synthetic polypeptide
MGILPSPGMPALLSLVSLLSVLLMGCVAETGTQCVNLTTRTQLPPAYTNSFTRGVYYPDKVFRSSVLHSTQDLFLPFFSNVTWFHAIHVSGTNGTKRFDNPVLPFNDGVYFASTEKSNIIRGWIFGTTLDSKTQSLLIVNNATNVVIKVCEFQFCNDPFLGVYYHKNNKSWMESEFRVYSSANNCTFEYVSQPFLMDLEGKQGNFKNLREFVFKNIDGYFKIYSKHTPINLVRDLPQGFSALEPLVDLPIGINITRFQTLLALHRSYLTPGDSSSGWTAGAAAYYVGYLQPRTFLLKYNENGTITDAVDCALDPLSETKCTLKSFTVEKGIYQTSNFRVQPTESIVRFPNITNLCPFGEVFNATRFASVYQWNRKRISNCVADYSVLYNSASFSTFKCYGVSPTKLNDLCFTNVYADSFVIRGDEVRQIAPGQTGKIADYNYKLPDDFTGCVIAWNSNNLDSKVGGNYNYLYRLFRKSNLKPFERDISTEIYQAGSTPCNGVEGFNCYFPLQSYGFQPTNGVGYQPYRVVVLSFELLHAPATVCGPKKSTNLVKNKCVNFNFNGLTGTGVLTESNKKFLPFQQFGRDIADTTDAVRDPQTLEILDITPCSFGGVSVITPGTNTSNQVAVLYQDVNCTEVPVAIHADQLTPTWRVYSTGSNVFQTRAGCLIGAEHVNNSYECDIPIGAGICASYQTQTNSPSGAGSVASQSIIAYTMSLGAENSVAYSNNSIAIPTNFTISVTTEILPVSMTKTSVDCTMYICGDSTECSNLLLQYGSFCTQLNRALTGIAVEQDKNTQEVFAQVKQIYKTPPIKDFGGFNFSQILPDPSKPSKRSFIEDLLFNKVTLADAGFIKQYGDCLGDIAARDLICAQKFNGLTVLPPLLTDEMIAQYTSALLAGTITSGWTFGAGAALQIPFAMQMAYRFNGIGVTQNVLYENQKLIANQFNSAIGKIQDSLSSTASALGKLQDVVNQNAQALNTLVKQLSSNFGAISSVLNDILSRLDPPEAEVQIDRLITGRLQSLQTYVTQQLIRAAEIRASANLAATKMSECVLGQSKRVDFCGKGYHLMSFPQSAPHGVVFLHVTYVPAQEKNFTTAPAICHDGKAHFPREGVFVSNGTHWFVTQRNFYEPQIITTDNTFVSGNCDVVIGIVNNTVYDPLQPELDSFKEELDKYFKNHTSPDVDLGDISGINASVVNIQKEIDRLNEVAKNLNESLIDLQELGKYEQYIKGSGRENLYFQGGGGSGYIPEAPRDGQAYVRKDGEWVLLSTFLGHHHHHHHH

SEQ ID NO: 5284 - protein, 1281 aa, Artificial Sequence
  Description of Artificial Sequence: Synthetic polypeptide
MGILPSPGMPALLSLVSLLSVLLMGCVAETGTQCVNLTTRTQLPPAYTNSFTRGVYYPDKVFRSSVLHSTQDLFLPFFSNVTWFHAIHVSGTNGTKRFDNPVLPFNDGVYFASTEKSNIIRGWIFGTTLDSKTQSLLIVNNATNVVIKVCEFQFCNDPFLGVYYHKNNKSWMESEFRVYSSANNCTFEYVSQPFLMDLEGKQGNFKNLREFVFKNIDGYFKIYSKHTPINLVRDLPQGFSALEPLVDLPIGINITRFQTLLALHRSYLTPGDSSSGWTAGAAAYYVGYLQPRTFLLKYNENGTITDAVDCALDPLSETKCTLKSFTVEKGIYQTSNFRVQPTESIVRFPNITNLCPFGEVFNATRFASVYAWNRKRISNCVADYSVLYNSASFSTFKCYGVSPTKLNDLCFTNVYADSFVIRGDEVRQIAPGQTGKIADYNYRLPDDFTGCVIAWNSNNLDSKVGGNYNYLYRLFRKSNLKPFERDISTEIYQAGSTPCNGVEGFNCYFPLQSYGFQPTNGVGYQPYRVVVLSFELLHAPATVCGPKKSTNLVKNKCVNFNFNGLTGTGVLTESNKKFLPFQQFGRDIADTTDAVRDPQTLEILDITPCSFGGVSVITPGTNTSNQVAVLYQDVNCTEVPVAIHADQLTPTWRVYSTGSNVFQTRAGCLIGAEHVNNSYECDIPIGAGICASYQTQTNSPSGAGSVASQSIIAYTMSLGAENSVAYSNNSIAIPTNFTISVTTEILPVSMTKTSVDCTMYICGDSTECSNLLLQYGSFCTQLNRALTGIAVEQDKNTQEVFAQVKQIYKTPPIKDFGGFNFSQILPDPSKPSKRSFIEDLLFNKVTLADAGFIKQYGDCLGDIAARDLICAQKFNGLTVLPPLLTDEMIAQYTSALLAGTITSGWTFGAGAALQIPFAMQMAYRFNGIGVTQNVLYENQKLIANQFNSAIGKIQDSLSSTASALGKLQDVVNQNAQALNTLVKQLSSNFGAISSVLNDILSRLDPPEAEVQIDRLITGRLQSLQTYVTQQLIRAAEIRASANLAATKMSECVLGQSKRVDFCGKGYHLMSFPQSAPHGVVFLHVTYVPAQEKNFTTAPAICHDGKAHFPREGVFVSNGTHWFVTQRNFYEPQIITTDNTFVSGNCDVVIGIVNNTVYDPLQPELDSFKEELDKYFKNHTSPDVDLGDISGINASVVNIQKEIDRLNEVAKNLNESLIDLQELGKYEQYIKGSGRENLYFQGGGGSGYIPEAPRDGQAYVRKDGEWVLLSTFLGHHHHHHHH

SEQ ID NO: 5285 - protein, 1281 aa, Artificial Sequence
  Description of Artificial Sequence: Synthetic polypeptide
MGILPSPGMPALLSLVSLLSVLLMGCVAETGTQCVNLTTRTQLPPAYTNSFTRGVYYPDKVFRSSVLHSTQDLFLPFFSNVTWFHAIHVSGTNGTKRFDNPVLPFNDGVYFASTEKSNIIRGWIFGTTLDSKTQSLLIVNNATNVVIKVCEFQFCNDPFLGVYYHKNNKSWMESEFRVYSSANNCTFEYVSQPFLMDLEGKQGNFKNLREFVFKNIDGYFKIYSKHTPINLVRDLPQGFSALEPLVDLPIGINITRFQTLLALHRSYLTPGDSSSGWTAGAAAYYVGYLQPRTFLLKYNENGTITDAVDCALDPLSETKCTLKSFTVEKGIYQTSNFRVQPTESIVRFPNITNLCPFGEVFNATRFASVYAWNRKRISNCVADYSVLYNSASFSTFKCYGVSPTKLNDLCFTNVYADSFVIRGDEVRQIAPGQTGKIADYNYKLPDDFTGCVIAWNSNNLDSKVGGNYNYLYRLFRKSNLKPFKRDISTEIYQAGSTPCNGVEGFNCYFPLQSYGFQPTNGVGYQPYRVVVLSFELLHAPATVCGPKKSTNLVKNKCVNFNFNGLTGTGVLTESNKKFLPFQQFGRDIADTTDAVRDPQTLEILDITPCSFGGVSVITPGTNTSNQVAVLYQDVNCTEVPVAIHADQLTPTWRVYSTGSNVFQTRAGCLIGAEHVNNSYECDIPIGAGICASYQTQTNSPSGAGSVASQSIIAYTMSLGAENSVAYSNNSIAIPTNFTISVTTEILPVSMTKTSVDCTMYICGDSTECSNLLLQYGSFCTQLNRALTGIAVEQDKNTQEVFAQVKQIYKTPPIKDFGGFNFSQILPDPSKPSKRSFIEDLLFNKVTLADAGFIKQYGDCLGDIAARDLICAQKFNGLTVLPPLLTDEMIAQYTSALLAGTITSGWTFGAGAALQIPFAMQMAYRFNGIGVTQNVLYENQKLIANQFNSAIGKIQDSLSSTASALGKLQDVVNQNAQALNTLVKQLSSNFGAISSVLNDILSRLDPPEAEVQIDRLITGRLQSLQTYVTQQLIRAAEIRASANLAATKMSECVLGQSKRVDFCGKGYHLMSFPQSAPHGVVFLHVTYVPAQEKNFTTAPAICHDGKAHFPREGVFVSNGTHWFVTQRNFYEPQIITTDNTFVSGNCDVVIGIVNNTVYDPLQPELDSFKEELDKYFKNHTSPDVDLGDISGINASVVNIQKEIDRLNEVAKNLNESLIDLQELGKYEQYIKGSGRENLYFQGGGGSGYIPEAPRDGQAYVRKDGEWVLLSTFLGHHHHHHHH

SEQ ID NO: 5286 - protein, 1281 aa, Artificial Sequence
  Description of Artificial Sequence: Synthetic polypeptide
MGILPSPGMPALLSLVSLLSVLLMGCVAETGTQCVNLTTRTQLPPAYTNSFTRGVYYPDKVFRSSVLHSTQDLFLPFFSNVTWFHAIHVSGTNGTKRFDNPVLPFNDGVYFASTEKSNIIRGWIFGTTLDSKTQSLLIVNNATNVVIKVCEFQFCNDPFLGVYYHKNNKSWMESEFRVYSSANNCTFEYVSQPFLMDLEGKQGNFKNLREFVFKNIDGYFKIYSKHTPINLVRDLPQGFSALEPLVDLPIGINITRFQTLLALHRSYLTPGDSSSGWTAGAAAYYVGYLQPRTFLLKYNENGTITDAVDCALDPLSETKCTLKSFTVEKGIYQTSNFRVQPTESIVRFPNITNLCPFGEVFNATRFASVYAWNRKRISNCVADYSVLYNSASFSTFKCYGVSPTKLNDLCFTNVYADSFVIRGDEVRQIAPGQTGKIADYNYKLPDDFTGCVIAWNSNNLDSKVGGNYNYLYRLFRKSNLKPFERDISTEIYQAGSTPCNGVEGFNCYFPLQSYGFQPTNGVGYQPYRVVVLSFELLHAPATVCGPKKSTNLVKNKCVNFNFNGLTGTGVLTESNKKFLPFQQFGRDIADTTDAVRDPQTLEILDITPCSFGGVSVITPGTNTSNQVAVLYQDVNCTEVPVAIHADQLTPTWRVYSTGSNVFQTRAGCLIGAEHVNNSYECDIPIGAGICASYQTQTNSPSGAGSVASQSIIAYTMSLGAENSVAYSNNSIAIPTNFTISVTTEILPVSMTKTSVDCTMYICGDSTECSNLLLQYGSFCTQLNRALTGIAVEQDKNTQEVFAQVKQIYKTPPIKDFGGFNFSQILPDPSKPSKRSFIEDLLFNKVTLADAGFIKQYGDCLGDIAARDLICAQKFNGLTVLPPLLTDEMIAQYTSALLAGTITSGWTFGAGAALQIPFAMQMAYRFNGIGVTQNVLYENQKLIANQFNSAIGKIQDSLSSTASALGKLQDVVNQNAQALNTLVKQLSSNFGAISSVLNDILSRLDPPEAEVQIDRLITGRLQSLQTYVTQQLIRAAEIRASANLAATKMSECVLGQSKRVDFCGPGYHLMSFPQSAPHGVVFLHVTYVPAQEKNFTTAPAICHDGKAHFPREGVFVSNGTHWFVTQRNFYEPQIITTDNTFVSGNCDVVIGIVNNTVYDPLQPELDSFKEELDKYFKNHTSPDVDLGDISGINASVVNIQKEIDRLNEVAKNLNESLIDLQELGKYEQYIKGSGRENLYFQGGGGSGYIPEAPRDGQAYVRKDGEWVLLSTFLGHHHHHHHH

SEQ ID NO: 5287 - protein, 1281 aa, Artificial Sequence
  Description of Artificial Sequence: Synthetic polypeptide
MGILPSPGMPALLSLVSLLSVLLMGCVAETGTQCVNLTTRTQLPPAYTNSFTRGVYYPDKVFRSSVLHSTQDLFLPFFSNVTWFHAIHVSGTNGTKRFDNPVLPFNDGVYFASTEKSNIIRGWIFGTTLDSKTQSLLIVNNATNVVIKVCEFQFCNDPFLGVYYHKNNKSWMESEFRVYSSANNCTFEYVSQPFLMDLEGKQGNFKNLREFVFKNIDGYFKIYSKHTPINLVRDLPQGFSALEPLVDLPIGINITRFQTLLALHRSYLTPGDSSSGWTAGAAAYYVGYLQPRTFLLKYNENGTITDAVDCALDPLSETKCTLKSFTVEKGIYQTSNFRVQPTESIVRFPNITNLCPFGEVFNATRFASVYAWNRKRISNCVADYSVLYNSASFSTFKCYGVSPTKLNDLCFTNVYADSFVIRGDEVRQIAPGQTGKIADYNYKLPDDFTGCVIAWNSNNLDSKVGGNYNYLYRLFRKSNLCPFERDISTEIYQAGSTPCNGVEGFNCYFPLQSYGFQPTNGVGYQPYRVVVLSFELLHAPATVCGPKKSTNLVKNKCVNFNFNGLTGTGVLTESNKKFLPFQQFGRDIADTTDAVRDPQTLEILDITPCSFGGVSVITPGTNTSNQVAVLYQDVNCTEVPVAIHADQLTPTWRVYSTGSNVFQTRAGCLIGAEHVNNSYECDIPIGAGICASYQTQTNSPSGAGSVASQSIIAYTMSLGAENSVAYSNNSIAIPTNFTISVTTEILPVSMTKTSVDCTMYICGDSTECSNLLLQYGSFCTQLNRALTGIAVEQDKNTQEVFAQVKQIYKTPPIKDFGGFNFSQILPDPSKPSKRSFIEDLLFNKVTLADAGFIKQYGDCLGDIAARDLICAQKFNGLTVLPPLLTDEMIAQYTSALLAGTITSGWTFGAGAALQIPFAMQMAYRFNGIGVTQNVLYENQKLIANQFNSAIGKIQDSLSSTASALGKLQDVVNQNAQALNTLVKQLSSNFGAISSVLNDILSRLDPPEAEVQIDRLITGRLQSLQTYVTQQLIRAAEIRASANLAATKMSECVLGQSKRVDFCGKGYHLMSFPQSAPHGVVFLHVTYVPAQEKNFTTAPAICHDGKAHFPREGVFVSNGTHWFVTQRNFYEPQIITTDNTFVSGNCDVVIGIVNNTVYDPLQPELDSFKEELDKYFKNHTSPDVDLGDISGINASVVNIQKEIDRLNEVAKNLNESLIDLQELGKYEQYIKGSGRENLYFQGGGGSGYIPEAPRDGQAYVRKDGEWVLLSTFLGHHHHHHHH

SEQ ID NO: 5288 - protein, 1281 aa, Artificial Sequence
  Description of Artificial Sequence: Synthetic polypeptide
MGILPSPGMPALLSLVSLLSVLLMGCVAETGTQCVNLTTRTQLPPAYTNSFTRGVYYPDKVFRSSVLHSTQDLFLPFFSNVTWFHAIHVSGTNGTKRFDNPVLPFNDGVYFASTEKSNIIRGWIFGTTLDSKTQSLLIVNNATNVVIKVCEFQFCNDPFLGVYYHKNNKSWMESEFRVYSSANNCTFEYVSQPFLMDLEGKQGNFKNLREFVFKNIDGYFKIYSKHTPINLVRDLPQGFSALEPLVDLPIGINITRFQTLLALHRSYLTPGDSSSGWTAGAAAYYVGYLQPRTFLLKYNENGTITDAVDCALDPLSETKCTLKSFTVEKGIYQTSNFRVQPTESIVRFPNITNLCPFGEVFNATRFASVYAWNRKRISNCVADYSVLYNSASFSTFKCYGVSPTKLNDLCFTNVYADSFVIRGDEVRQIAPGQTGKIADYNYKLPDDFTGCVIAWNSNNLDSKVGGNYNYLYRLFRKSNLKPFGRDISTEIYQAGSTPCNGVEGFNCYFPLQSYGFQPTNGVGYQPYRVVVLSFELLHAPATVCGPKKSTNLVKNKCVNFNFNGLTGTGVLTESNKKFLPFQQFGRDIADTTDAVRDPQTLEILDITPCSFGGVSVITPGTNTSNQVAVLYQDVNCTEVPVAIHADQLTPTWRVYSTGSNVFQTRAGCLIGAEHVNNSYECDIPIGAGICASYQTQTNSPSGAGSVASQSIIAYTMSLGAENSVAYSNNSIAIPTNFTISVTTEILPVSMTKTSVDCTMYICGDSTECSNLLLQYGSFCTQLNRALTGIAVEQDKNTQEVFAQVKQIYKTPPIKDFGGFNFSQILPDPSKPSKRSFIEDLLFNKVTLADAGFIKQYGDCLGDIAARDLICAQKFNGLTVLPPLLTDEMIAQYTSALLAGTITSGWTFGAGAALQIPFAMQMAYRFNGIGVTQNVLYENQKLIANQFNSAIGKIQDSLSSTASALGKLQDVVNQNAQALNTLVKQLSSNFGAISSVLNDILSRLDPPEAEVQIDRLITGRLQSLQTYVTQQLIRAAEIRASANLAATKMSECVLGQSKRVDFCGKGYHLMSFPQSAPHGVVFLHVTYVPAQEKNFTTAPAICHDGKAHFPREGVFVSNGTHWFVTQRNFYEPQIITTDNTFVSGNCDVVIGIVNNTVYDPLQPELDSFKEELDKYFKNHTSPDVDLGDISGINASVVNIQKEIDRLNEVAKNLNESLIDLQELGKYEQYIKGSGRENLYFQGGGGSGYIPEAPRDGQAYVRKDGEWVLLSTFLGHHHHHHHH

SEQ ID NO: 5289 - protein, 1281 aa, Artificial Sequence
  Description of Artificial Sequence: Synthetic polypeptide
MGILPSPGMPALLSLVSLLSVLLMGCVAETGTQCVNLTTRTQLPPAYTNSFTRGVYYPDKVFRSSVLHSTQDLFLPFFSNVTWFHAIHVSGTNGTKRFDNPVLPFNDGVYFASTEKSNIIRGWIFGTTLDSKTQSLLIVNNATNVVIKVCEFQFCNDPFLGVYYHKNNKSWMESEFRVYSSANNCTFEYVSQPFLMDLEGKQGNFKNLREFVFKNIDGYFKIYSKHTPINLVRDLPQGFSALEPLVDLPIGINITRFQTLLALHRSYLTPGDSSSGWTAGAAAYYVGYLQPRTFLLKYNENGTITDAVDCALDPLSETKCTLKSFTVEKGIYQTSNFRVQPTESIVRFPNITNLCPFGEVFNATRFASVYAWNRKRISNCVADYSVLYNSASFSTFKCYGVSPTKLNDLCFTNVYADSFVIRGDEVRQIAPGQTGKIADYNYKLPDDFTGCVIAWNSSNLDSKVGGNYNYLYRLFRKSNLKPFERDISTEIYQAGSTPCNGVEGFNCYFPLQSYGFQPTNGVGYQPYRVVVLSFELLHAPATVCGPKKSTNLVKNKCVNFNFNGLTGTGVLTESNKKFLPFQQFGRDIADTTDAVRDPQTLEILDITPCSFGGVSVITPGTNTSNQVAVLYQDVNCTEVPVAIHADQLTPTWRVYSTGSNVFQTRAGCLIGAEHVNNSYECDIPIGAGICASYQTQTNSPSGAGSVASQSIIAYTMSLGAENSVAYSNNSIAIPTNFTISVTTEILPVSMTKTSVDCTMYICGDSTECSNLLLQYGSFCTQLNRALTGIAVEQDKNTQEVFAQVKQIYKTPPIKDFGGFNFSQILPDPSKPSKRSFIEDLLFNKVTLADAGFIKQYGDCLGDIAARDLICAQKFNGLTVLPPLLTDEMIAQYTSALLAGTITSGWTFGAGAALQIPFAMQMAYRFNGIGVTQNVLYENQKLIANQFNSAIGKIQDSLSSTASALGKLQDVVNQNAQALNTLVKQLSSNFGAISSVLNDILSRLDPPEAEVQIDRLITGRLQSLQTYVTQQLIRAAEIRASANLAATKMSECVLGQSKRVDFCGKGYHLMSFPQSAPHGVVFLHVTYVPAQEKNFTTAPAICHDGKAHFPREGVFVSNGTHWFVTQRNFYEPQIITTDNTFVSGNCDVVIGIVNNTVYDPLQPELDSFKEELDKYFKNHTSPDVDLGDISGINASVVNIQKEIDRLNEVAKNLNESLIDLQELGKYEQYIKGSGRENLYFQGGGGSGYIPEAPRDGQAYVRKDGEWVLLSTFLGHHHHHHHH

SEQ ID NO: 5290 - protein, 1281 aa, Artificial Sequence
  Description of Artificial Sequence: Synthetic polypeptide
MGILPSPGMPALLSLVSLLSVLLMGCVAETGTQCVNLTTRTQLPPAYTNSFTRGVYYPDKVFRSSVLHSTQDLFLPFFSNVTWFHAIHVSGTNGTKRFDNPVLPFNDGVYFASTEKSNIIRGWIFGTTLDSKTQSLLIVNNATNVVIKVCEFQFCNDPFLGVYYHKNNKSWMESEFRVYSSANNCTFEYVSQPFLMDLEGKQGNFKNLREFVFKNIDGYFKIYSKHTPINLVRDLPQGFSALEPLVDLPIGINITRFQTLLALHRSYLTPGDSSSGWTAGAAAYYVGYLQPRTFLLKYNENGTITDAVDCALDPLSETKCTLKSFTVEKGIYQTSNFRVQPTESIVRFPNITNLCPFGEVFNATRFASVYAWNRKRISNCVADYSVLYNSASFSTFKCYGVSPTKLNDLCFTNVYADSFVIRGDEVRQIAPGQTGKIADYNYKLPDDFTGCVIAWNSNNLDSKVGGNYNYLYRLFRKSNLKPFERDISTEIYQAGSTPCNGVEGFNCYFPLQSYGFQPTNGVGYQPYRVVVLSFELLHAPATVCGPKKSTNLVKNKCVNFNFNGLTGTGVLTESNKKFLPFQQFGRDIADTTDAVRDPQTLEILDITPCSFGGVSVITPGTNTSNQVAVLYQDVNCTEVPVAIHADQLTPTWRVYSTGSNVFQTRAGCLIGAEHVNNSYECDIPIGAGICASYQTQTNSPSGAGSVASQSIIAYTMSLGAENSVAYSNNSIAIPTNFTISVTTEILPVSMTKTSVDCTMYICGDSTECSNLLLQYGSFCTQLNRALTGIAVEQDKNTQEVFAQVKQIYKTPPIKDFGGFNFSQILPDPSKPSKRSFIEDLLFNKVTLADAGFIKQYGDCLGDIAARDLICAQKFNGLTVLPPLLTDEMIAQYTSALLAGTITSGWTFGAGAALQIPFAMQMAYRFNGIGVTQNVLYENQKLIANQFNSAIGKIQDSLSSTASALGKLQDVVNQNAQALNTLVKQLSSSFGAISSVLNDILSRLDPPEAEVQIDRLITGRLQSLQTYVTQQLIRAAEIRASANLAATKMSECVLGQSKRVDFCGKGYHLMSFPQSAPHGVVFLHVTYVPAQEKNFTTAPAICHDGKAHFPREGVFVSNGTHWFVTQRNFYEPQIITTDNTFVSGNCDVVIGIVNNTVYDPLQPELDSFKEELDKYFKNHTSPDVDLGDISGINASVVNIQKEIDRLNEVAKNLNESLIDLQELGKYEQYIKGSGRENLYFQGGGGSGYIPEAPRDGQAYVRKDGEWVLLSTFLGHHHHHHHH

SEQ ID NO: 5291 - protein, 1281 aa, Artificial Sequence
  Description of Artificial Sequence: Synthetic polypeptide
MGILPSPGMPALLSLVSLLSVLLMGCVAETGTQCVNLTTRTQLPPAYTNSFTRGVYYPDKVFRSSVLHSTQDLFLPFFSNVTWFHAIHVSGTNGTKRFDNPVLPFNDGVYFASTEKSNIIRGWIFGTTLDSKTQSLLIVNNATNVVIKVCEFQFCNDPFLGVYYHKNNKSWMESEFRVYSSANNCTFEYVSQPFLMDLEGKQGNFKNLREFVFKNIDGYFKIYSKHTPINLVRDLPQGFSALEPLVDLPIGINITRFQTLLALHRSYLTPGDSSSGWTAGAAAYYVGYLQPRTFLLKYNENGTITDAVDCALDPLSETKCTLKSFTVEKGIYQTSNFRVQPTESIVRFPNITNLCPFGEVFNATRFASVYAWNRKRISNCVADYSVLYNSASFSTFKCYGVSPTKLNDLCFTNVYADSFVIRGDEVRQIAPGQTGKIADYNYKLPDDFTGCVIAWNSNNLDSKVGGNYNYLYRLFRKSNLKPFERDISMEIYQAGSTPCNGVEGFNCYFPLQSYGFQPTNGVGYQPYRVVVLSFELLHAPATVCGPKKSTNLVKNKCVNFNFNGLTGTGVLTESNKKFLPFQQFGRDIADTTDAVRDPQTLEILDITPCSFGGVSVITPGTNTSNQVAVLYQDVNCTEVPVAIHADQLTPTWRVYSTGSNVFQTRAGCLIGAEHVNNSYECDIPIGAGICASYQTQTNSPSGAGSVASQSIIAYTMSLGAENSVAYSNNSIAIPTNFTISVTTEILPVSMTKTSVDCTMYICGDSTECSNLLLQYGSFCTQLNRALTGIAVEQDKNTQEVFAQVKQIYKTPPIKDFGGFNFSQILPDPSKPSKRSFIEDLLFNKVTLADAGFIKQYGDCLGDIAARDLICAQKFNGLTVLPPLLTDEMIAQYTSALLAGTITSGWTFGAGAALQIPFAMQMAYRFNGIGVTQNVLYENQKLIANQFNSAIGKIQDSLSSTASALGKLQDVVNQNAQALNTLVKQLSSNFGAISSVLNDILSRLDPPEAEVQIDRLITGRLQSLQTYVTQQLIRAAEIRASANLAATKMSECVLGQSKRVDFCGKGYHLMSFPQSAPHGVVFLHVTYVPAQEKNFTTAPAICHDGKAHFPREGVFVSNGTHWFVTQRNFYEPQIITTDNTFVSGNCDVVIGIVNNTVYDPLQPELDSFKEELDKYFKNHTSPDVDLGDISGINASVVNIQKEIDRLNEVAKNLNESLIDLQELGKYEQYIKGSGRENLYFQGGGGSGYIPEAPRDGQAYVRKDGEWVLLSTFLGHHHHHHHH

SEQ ID NO: 5292 - protein, 1281 aa, Artificial Sequence
  Description of Artificial Sequence: Synthetic polypeptide
MGILPSPGMPALLSLVSLLSVLLMGCVAETGTQCVNLTTRTQLPPAYTNSFTRGVYYPDKVFRSSVLHSTQDLFLPFFSNVTWFHAIHVSGTNGTKRFDNPVLPFNDGVYFASTEKSNIIRGWIFGTTLDSKTQSLLIVNNATNVVIKVCEFQFCNDPFLGVYYHKNNKSWMESEFRVYSSANNCTFEYVSQPFLMDLEGKQGNFKNLREFVFKNIDGYFKIYSKHTPINLVRDLPQGFSALEPLVDLPIGINITRFQTLLALHRSYLTPGDSSSGWTAGAAAYYVGYLQPRTFLLKYNENGTITDAVDCALDPLSETKCTLKSFTVEKGIYQTSNFRVQPTESIVRFPNITNLCPFGEVFNATRFASVYAWNRKRISNCVADYSVLYNSASFSTFKCYGVSPTKLNDLCFTNVYADSFVIRGDEVRQIAPGQTGKIADYNYKLPDDFTGCVIAWNSNNLDSKVGGNYNYLYRLFRKSNLKPFERDISTEIYQAGSTPCNGVEGFNCYFPLQSYGFQPTNGVGYQPYRVVVLSFELLHAPATVCGPKKSTNLVKNKCVNFNFNGLTGTGVLTESNKKFLPFQQFGRDIADTTDAVRDPQTLEILDITPCSFGGVSVITPGTNTSNQVAVLYQDVNCTEVPVAIHADQLTPTWRVYSTGSNVFQTRAGCLIGAEHVNNSYECDIPIGAGICASYQTQTNSPSGAGSVASQSIIAYTMSLGAENSVAYSNNSIAIPTNFTISVTTEILPVSMTKTSVDCTMYICGDSTECSNLLLQYGSFCTQLNRALTGIAVEQDKNTQEVFAQVKQIYKTPPIKDFGGFNFSQILPDPSKPSKRSFIEDLLFNKVTLADAGFIKQYGDCLGDIAARDLICAQKFNGLTVLPPLLTDEMIAQYTSALLAGTITSGWTFGAGAALQIPFAMQMAYRFNGIGVTQNVLYENQKLIANQFNSAIGKIQDSLSSTASALGKLQDVVNQNAQALNTLVKQLSSNFGAISSVLNDILSRLDPPEAEVQIDRLITGRLQSLQTYVTQQLIRAAEIRASANLAATKMSECVLGQSKRVDFCGKGYHLMSFPQSAPHGVVFLHVTYVPAQGKNFTTAPAICHDGKAHFPREGVFVSNGTHWFVTQRNFYEPQIITTDNTFVSGNCDVVIGIVNNTVYDPLQPELDSFKEELDKYFKNHTSPDVDLGDISGINASVVNIQKEIDRLNEVAKNLNESLIDLQELGKYEQYIKGSGRENLYFQGGGGSGYIPEAPRDGQAYVRKDGEWVLLSTFLGHHHHHHHH

SEQ ID NO: 5293 - protein, 1281 aa, Artificial Sequence
  Description of Artificial Sequence: Synthetic polypeptide
MGILPSPGMPALLSLVSLLSVLLMGCVAETGTQCVNLTTRTQLPPAYTNSFTRGVYYPDKVFRSSVLHSTQDLFLPFFSNVTWFHAIHVSGTNGTKRFDNPVLPFNDGVYFASTEKSNIIRGWIFGTTLDSKTQSLLIVNNATNVVIKVCEFQFCNDPFLGVYYHKNNKSWMESEFRVYSSANNCTFEYVSQPFLMDLEGKQGNFKNLREFVFKNIDGYFKIYSKHTPINLVRDLPQGFSALEPLVDLPIGINITRFQTLLALHRSYLTPGDSSSGWTAGAAAYYVGYLQPRTFLLKYNENGTITDAVDCALDPLSETKCTLKSFTVEKGIYQTSNFRVQPTESIVRFPNITNLCPFGEVFNATRFASVYAWNRKRISNCVADYSVLYNSASFSTFKCYGVSPTKLNDLCFTNVYADSFVIRGDEVRQIAPGQTGKIADYNYKLPDDFTGCVIAWNSNNLDSKVGGNYNYLYRLFRKSNLKPFERDISTEWYQAGSTPCNGVEGFNCYFPLQSYGFQPTNGVGYQPYRVVVLSFELLHAPATVCGPKKSTNLVKNKCVNFNFNGLTGTGVLTESNKKFLPFQQFGRDIADTTDAVRDPQTLEILDITPCSFGGVSVITPGTNTSNQVAVLYQDVNCTEVPVAIHADQLTPTWRVYSTGSNVFQTRAGCLIGAEHVNNSYECDIPIGAGICASYQTQTNSPSGAGSVASQSIIAYTMSLGAENSVAYSNNSIAIPTNFTISVTTEILPVSMTKTSVDCTMYICGDSTECSNLLLQYGSFCTQLNRALTGIAVEQDKNTQEVFAQVKQIYKTPPIKDFGGFNFSQILPDPSKPSKRSFIEDLLFNKVTLADAGFIKQYGDCLGDIAARDLICAQKFNGLTVLPPLLTDEMIAQYTSALLAGTITSGWTFGAGAALQIPFAMQMAYRFNGIGVTQNVLYENQKLIANQFNSAIGKIQDSLSSTASALGKLQDVVNQNAQALNTLVKQLSSNFGAISSVLNDILSRLDPPEAEVQIDRLITGRLQSLQTYVTQQLIRAAEIRASANLAATKMSECVLGQSKRVDFCGKGYHLMSFPQSAPHGVVFLHVTYVPAQEKNFTTAPAICHDGKAHFPREGVFVSNGTHWFVTQRNFYEPQIITTDNTFVSGNCDVVIGIVNNTVYDPLQPELDSFKEELDKYFKNHTSPDVDLGDISGINASVVNIQKEIDRLNEVAKNLNESLIDLQELGKYEQYIKGSGRENLYFQGGGGSGYIPEAPRDGQAYVRKDGEWVLLSTFLGHHHHHHHH

SEQ ID NO: 5294 - protein, 1281 aa, Artificial Sequence
  Description of Artificial Sequence: Synthetic polypeptide
MGILPSPGMPALLSLVSLLSVLLMGCVAETGTQCVNLTTRTQLPPAYTNSFTRGVYYPDKVFRSSVLHSTQDLFLPFFSNVTWFHAIHVSGTNGTKRFDNPVLPFNDGVYFASTEKSNIIRGWIFGTTLDSKTQSLLIVNNATNVVIKVCEFQFCNDPFLGVYYHKNNKSWMESEFRVYSSANNCTFEYVSQPFLMDLEGKQGNFKNLREFVFKNIDGYFKIYSKHTPINLVRDLPQGFSALEPLVDLPIGINITRFQTLLALHRSYLTPGDSSSGWTAGAAAYYVGYLQPRTFLLKYNENGTITDAVDCALDPLSETKCTLKSFTVEKGIYQTSNFRVQPTESIVRFPNITNLCPFGEVFNATRFASVYAWNRKRISNCVADYSVLYNSKSFSTFKCYGVSPTKLNDLCFTNVYADSFVIRGDEVRQIAPGQTGKIADYNYKLPDDFTGCVIAWNSNNLDSKVGGNYNYLYRLFRKSNLKPFERDISTEIYQAGSTPCNGVEGFNCYFPLQSYGFQPTNGVGYQPYRVVVLSFELLHAPATVCGPKKSTNLVKNKCVNFNFNGLTGTGVLTESNKKFLPFQQFGRDIADTTDAVRDPQTLEILDITPCSFGGVSVITPGTNTSNQVAVLYQDVNCTEVPVAIHADQLTPTWRVYSTGSNVFQTRAGCLIGAEHVNNSYECDIPIGAGICASYQTQTNSPSGAGSVASQSIIAYTMSLGAENSVAYSNNSIAIPTNFTISVTTEILPVSMTKTSVDCTMYICGDSTECSNLLLQYGSFCTQLNRALTGIAVEQDKNTQEVFAQVKQIYKTPPIKDFGGFNFSQILPDPSKPSKRSFIEDLLFNKVTLADAGFIKQYGDCLGDIAARDLICAQKFNGLTVLPPLLTDEMIAQYTSALLAGTITSGWTFGAGAALQIPFAMQMAYRFNGIGVTQNVLYENQKLIANQFNSAIGKIQDSLSSTASALGKLQDVVNQNAQALNTLVKQLSSNFGAISSVLNDILSRLDPPEAEVQIDRLITGRLQSLQTYVTQQLIRAAEIRASANLAATKMSECVLGQSKRVDFCGKGYHLMSFPQSAPHGVVFLHVTYVPAQEKNFTTAPAICHDGKAHFPREGVFVSNGTHWFVTQRNFYEPQIITTDNTFVSGNCDVVIGIVNNTVYDPLQPELDSFKEELDKYFKNHTSPDVDLGDISGINASVVNIQKEIDRLNEVAKNLNESLIDLQELGKYEQYIKGSGRENLYFQGGGGSGYIPEAPRDGQAYVRKDGEWVLLSTFLGHHHHHHHH

SEQ ID NO: 5295 - protein, 1281 aa, Artificial Sequence
  Description of Artificial Sequence: Synthetic polypeptide
MGILPSPGMPALLSLVSLLSVLLMGCVAETGTQCVNLTTRTQLPPAYTNSFTRGVYYPDKVFRSSVLHSTQDLFLPFFSNVTWFHAIHVSGTNGTKRFDNPVLPFNDGVYFASTEKSNIIRGWIFGTTLDSKTQSLLIVNNATNVVIKVCEFQFCNDPFLGVYYHKNNKSWMESEFRVYSSANNCTFEYVSQPFLMDLEGKQGNFKNLREFVFKNIDGYFKIYSKHTPINLVRDLPQGFSALEPLVDLPIGINITRFQTLLALHRSYLTPGDSSSGWTAGAAAYYVGYLQPRTFLLKYNENGTITDAVDCALDPLSETKCTLKSFTVEKGIYQTSNFRVQPTESIVRFPNITNLCPFGEVFNATRFVSVYAWNRKRISNCVADYSVLYNSASFSTFKCYGVSPTKLNDLCFTNVYADSFVIRGDEVRQIAPGQTGKIADYNYKLPDDFTGCVIAWNSNNLDSKVGGNYNYLYRLFRKSNLKPFERDISTEIYQAGSTPCNGVEGFNCYFPLQSYGFQPTNGVGYQPYRVVVLSFELLHAPATVCGPKKSTNLVKNKCVNFNFNGLTGTGVLTESNKKFLPFQQFGRDIADTTDAVRDPQTLEILDITPCSFGGVSVITPGTNTSNQVAVLYQDVNCTEVPVAIHADQLTPTWRVYSTGSNVFQTRAGCLIGAEHVNNSYECDIPIGAGICASYQTQTNSPSGAGSVASQSIIAYTMSLGAENSVAYSNNSIAIPTNFTISVTTEILPVSMTKTSVDCTMYICGDSTECSNLLLQYGSFCTQLNRALTGIAVEQDKNTQEVFAQVKQIYKTPPIKDFGGFNFSQILPDPSKPSKRSFIEDLLFNKVTLADAGFIKQYGDCLGDIAARDLICAQKFNGLTVLPPLLTDEMIAQYTSALLAGTITSGWTFGAGAALQIPFAMQMAYRFNGIGVTQNVLYENQKLIANQFNSAIGKIQDSLSSTASALGKLQDVVNQNAQALNTLVKQLSSNFGAISSVLNDILSRLDPPEAEVQIDRLITGRLQSLQTYVTQQLIRAAEIRASANLAATKMSECVLGQSKRVDFCGKGYHLMSFPQSAPHGVVFLHVTYVPAQEKNFTTAPAICHDGKAHFPREGVFVSNGTHWFVTQRNFYEPQIITTDNTFVSGNCDVVIGIVNNTVYDPLQPELDSFKEELDKYFKNHTSPDVDLGDISGINASVVNIQKEIDRLNEVAKNLNESLIDLQELGKYEQYIKGSGRENLYFQGGGGSGYIPEAPRDGQAYVRKDGEWVLLSTFLGHHHHHHHH

SEQ ID NO: 5296 - protein, 1281 aa, Artificial Sequence
  Description of Artificial Sequence: Synthetic polypeptide
MGILPSPGMPALLSLVSLLSVLLMGCVAETGTQCVNLTTRTQLPPAYTNSFTRGVYYPDKVFRSSVLHSTQDLFLPFFSNVTWFHAIHVSGTNGTKRFDNPVLPFNDGVYFASTEKSNIIRGWIFGTTLDSKTQSLLIVNNATNVVIKVCEFQFCNDPFLGVYYHKNNKSWMESEFRVYSSANNCTFEYVSQPFLMDLEGKQGNFKNLREFVFKNIDGYFKIYSKHTPINLVRDLPQGFSALEPLVDLPIGINITRFQTLLALHRSYLTPGDSSSGWTAGAAAYYVGYLQPRTFLLKYNENGTITDAVDCALDPLSETKCTLKSFTVEKGIYQTSNFRVQPTESIVRFPNITNLCPFGEVFNATRFASVYAWNRKRISNCVADYSVLYNSASFSTFKCYGVSPTKLNDLCFTNVYADSFVIRGDEVRQIAPGQTGKIADYNYKLPDDFTGCVIAWNSNNLDSKVGGNYNYLYRLFRKSNLKPFERDISTEIYQAGSTPCNGVEGFNCYFPLQSYGFQPTNGVGYQPYRVVVLSFELLHAPATVCGPKKSTNLVKNKCVNFNFNGLTGTGVLTESNKKFLPFQQFGRDIADTTDAVRDPQTLEILDITPCSFGGVSVITPGTNTSNQVAVLYQDVNCTEVPVAIHADQLTPTWRVYSTGSNVFQTRAGCLIGAEHVNNSYECDIPIGAGICASYQTQTNSPSGAGSVASQSIIAYTMSLGAENSVAYSNNSIAIPTNFTISVTTEILPVSMTKTSVDCTMYICGDSTECSNLLLQYGSFCTQLNRALTGIAVEQDKNTQEVFAQVKQIYKTPPIKDFGGFNFSQILPDPSKPSKRSFIEDLLFNKVTLADAGFIKQYGDCLGDIAARDLICAQKFNGLTVLPPLLTDEMIAQYTSALLAGTITSGWTFGAGAALQIPFAMQMAYRFNGIGVTQNVLYENQKLIANQFNSAIGKIQDSLSSTASALGKLQDVVNQNAQALNTLVKQLSSNFGAISSVLNDILSRLDPPEAEVQIDRLITGRLQSLQTYVTQQLIRAAEIRASANLAATKMSECVLGQSKRVDFCGKGYHLMSFPQSAPHGVVFLHVTYVPAQCKNFTTAPAICHDGKAHFPREGVFVSNGTHWFVTQRNFYEPQIITTDNTFVSGNCDVVIGIVNNTVYDPLQPELDSFKEELDKYFKNHTSPDVDLGDISGINASVVNIQKEIDRLNEVAKNLNESLIDLQELGKYEQYIKGSGRENLYFQGGGGSGYIPEAPRDGQAYVRKDGEWVLLSTFLGHHHHHHHH

SEQ ID NO: 5297 - protein, 1281 aa, Artificial Sequence
  Description of Artificial Sequence: Synthetic polypeptide
MGILPSPGMPALLSLVSLLSVLLMGCVAETGTQCVNLTTRTQLPPAYTNSFTRGVYYPDKVFRSSVLHSTQDLFLPFFSNVTWFHAIHVSGTNGTKRFDNPVLPFNDGVYFASTEKSNIIRGWIFGTTLDSKTQSLLIVNNATNVVIKVCEFQFCNDPFLGVYYHKNNKSWMESEFRVYSSANNCTFEYVSQPFLMDLEGKQGNFKNLREFVFKNIDGYFKIYSKHTPINLVRDLPQGFSALEPLVDLPIGINITRFQTLLALHRSYLTPGDSSSGWTAGAAAYYVGYLQPRTFLLKYNENGTITDAVDCALDPLSETKCTLKSFTVEKGIYQTSNFRVQPTESIVRFPNITNLCPFGEVFNATRFASVYAWNRKRISNCVADYSVLYNSASFSTFKCYGVSPTKLNDLCFTNVYADSFVIRGDEIRQIAPGQTGKIADYNYKLPDDFTGCVIAWNSNNLDSKVGGNYNYLYRLFRKSNLKPFERDISTEIYQAGSTPCNGVEGFNCYFPLQSYGFQPTNGVGYQPYRVVVLSFELLHAPATVCGPKKSTNLVKNKCVNFNFNGLTGTGVLTESNKKFLPFQQFGRDIADTTDAVRDPQTLEILDITPCSFGGVSVITPGTNTSNQVAVLYQDVNCTEVPVAIHADQLTPTWRVYSTGSNVFQTRAGCLIGAEHVNNSYECDIPIGAGICASYQTQTNSPSGAGSVASQSIIAYTMSLGAENSVAYSNNSIAIPTNFTISVTTEILPVSMTKTSVDCTMYICGDSTECSNLLLQYGSFCTQLNRALTGIAVEQDKNTQEVFAQVKQIYKTPPIKDFGGFNFSQILPDPSKPSKRSFIEDLLFNKVTLADAGFIKQYGDCLGDIAARDLICAQKFNGLTVLPPLLTDEMIAQYTSALLAGTITSGWTFGAGAALQIPFAMQMAYRFNGIGVTQNVLYENQKLIANQFNSAIGKIQDSLSSTASALGKLQDVVNQNAQALNTLVKQLSSNFGAISSVLNDILSRLDPPEAEVQIDRLITGRLQSLQTYVTQQLIRAAEIRASANLAATKMSECVLGQSKRVDFCGKGYHLMSFPQSAPHGVVFLHVTYVPAQEKNFTTAPAICHDGKAHFPREGVFVSNGTHWFVTQRNFYEPQIITTDNTFVSGNCDVVIGIVNNTVYDPLQPELDSFKEELDKYFKNHTSPDVDLGDISGINASVVNIQKEIDRLNEVAKNLNESLIDLQELGKYEQYIKGSGRENLYFQGGGGSGYIPEAPRDGQAYVRKDGEWVLLSTFLGHHHHHHHH

SEQ ID NO: 5298 - protein, 1281 aa, Artificial Sequence
  Description of Artificial Sequence: Synthetic polypeptide
MGILPSPGMPALLSLVSLLSVLLMGCVAETGTQCVNLTTRTQLPPAYTNSFTRGVYYPDKVFRSSVLHSTQDLFLPFFSNVTWFHAIHVSGTNGTKRFDNPVLPFNDGVYFASTEKSNIIRGWIFGTTLDSKTQSLLIVNNATNVVIKVCEFQFCNDPFLGVYYHKNNKSWMESEFRVYSSANNCTFEYVSQPFLMDLEGKQGNFKNLREFVFKNIDGYFKIYSKHTPINLVRDLPQGFSALEPLVDLPIGINITRFQTLLALHRSYLTPGDSSSGWTAGAAAYYVGYLQPRTFLLKYNENGTITDAVDCALDPLSETKCTLKSFTVEKGIYQTSNFRVQPTESIVRFPNITNLCPFGEVFNATRFASVYAWNRKRISNCVADYSVLYNSASFSTFKCYGVSPTKLNDLCFTNVYADSFVIRGDEVRQIAPGQTGKIADYNYKLPDDFTGCVIAWNSNNLDSKVGGNYNYLYRLFRKSNLKPFERDISTEYYQAGSTPCNGVEGFNCYFPLQSYGFQPTNGVGYQPYRVVVLSFELLHAPATVCGPKKSTNLVKNKCVNFNFNGLTGTGVLTESNKKFLPFQQFGRDIADTTDAVRDPQTLEILDITPCSFGGVSVITPGTNTSNQVAVLYQDVNCTEVPVAIHADQLTPTWRVYSTGSNVFQTRAGCLIGAEHVNNSYECDIPIGAGICASYQTQTNSPSGAGSVASQSIIAYTMSLGAENSVAYSNNSIAIPTNFTISVTTEILPVSMTKTSVDCTMYICGDSTECSNLLLQYGSFCTQLNRALTGIAVEQDKNTQEVFAQVKQIYKTPPIKDFGGFNFSQILPDPSKPSKRSFIEDLLFNKVTLADAGFIKQYGDCLGDIAARDLICAQKFNGLTVLPPLLTDEMIAQYTSALLAGTITSGWTFGAGAALQIPFAMQMAYRFNGIGVTQNVLYENQKLIANQFNSAIGKIQDSLSSTASALGKLQDVVNQNAQALNTLVKQLSSNFGAISSVLNDILSRLDPPEAEVQIDRLITGRLQSLQTYVTQQLIRAAEIRASANLAATKMSECVLGQSKRVDFCGKGYHLMSFPQSAPHGVVFLHVTYVPAQEKNFTTAPAICHDGKAHFPREGVFVSNGTHWFVTQRNFYEPQIITTDNTFVSGNCDVVIGIVNNTVYDPLQPELDSFKEELDKYFKNHTSPDVDLGDISGINASVVNIQKEIDRLNEVAKNLNESLIDLQELGKYEQYIKGSGRENLYFQGGGGSGYIPEAPRDGQAYVRKDGEWVLLSTFLGHHHHHHHH

SEQ ID NO: 5299 - protein, 1281 aa, Artificial Sequence
  Description of Artificial Sequence: Synthetic polypeptide
MGILPSPGMPALLSLVSLLSVLLMGCVAETGTQCVNLTTRTQLPPAYTNSFTRGVYYPDKVFRSSVLHSTQDLFLPFFSNVTWFHAIHVSGTNGTKRFDNPVLPFNDGVYFASTEKSNIIRGWIFGTTLDSKTQSLLIVNNATNVVIKVCEFQFCNDPFLGVYYHKNNKSWMESEFRVYSSANNCTFEYVSQPFLMDLEGKQGNFKNLREFVFKNIDGYFKIYSKHTPINLVRDLPQGFSALEPLVDLPIGINITRFQTLLALHRSYLTPGDSSSGWTAGAAAYYVGYLQPRTFLLKYNENGTITDAVDCALDPLSETKCTLKSFTVEKGIYQTSNFRVQPTESIVRFPNITNLCPFGEVFNATRFASVYAWNRKRISNCVADYSVLYNSASFSTFKCYGVSPTKLNDLCFTNVYADSFVIRGDEVRQIAPGQTGKIADYNYKLPDDFTGCVIAWNSNNLDSKVGGNYNYLYRLFRKSNLKPFERDISTEIYQAGSTPCNGVEGFNCYFPLQSYGFQPTNGVGYQPYRVVVLSFELLHAPATVCGPKKSTNLVKNKCVNFNFNGLTGTGVLTESNKKFLPFQQFGRDIADTTDAVRDPQTLEILDITPCSFGGVSVITPGTNTSNQVAVLYQDVNCTEVPVAIHADQLTPTWRVYSTGSNVFQTRAGCLIGAEHVNNSYECDIPIGAGICASYQTQTNSPSGAGSVASQSIIAYTMSLGAENSVAYSNNSIAIPTNFTISVTTEILPVSMTKTSVDCTMYICGDSTECSNLLLQYGSFCTQLNRALTGIAVEQDKNTQEVFAQVKQIYKTPPIKDFGGFNFSQILPDPSKPSKRSFIEDLLFNKVTLADAGFIKQYGDCLGDIAARDLICAQKFNGLTVLPPLLTDEMIAQYTSALLAGTITSGWTFGAGAALQIPFAMQMAYRFNGIGVTQNVLYENQKLIANQFNSAIGKIQDSLSSTASALGKLQDVVNQNAQALNTLVKQLSSNFGAISSVLNDILSRLDPPEAEVQIDRLITGRLQSLQTYVTQQLIRAAEIRASANLAATKMSECVLGQSKRVDFCGRGYHLMSFPQSAPHGVVFLHVTYVPAQEKNFTTAPAICHDGKAHFPREGVFVSNGTHWFVTQRNFYEPQIITTDNTFVSGNCDVVIGIVNNTVYDPLQPELDSFKEELDKYFKNHTSPDVDLGDISGINASVVNIQKEIDRLNEVAKNLNESLIDLQELGKYEQYIKGSGRENLYFQGGGGSGYIPEAPRDGQAYVRKDGEWVLLSTFLGHHHHHHHH

SEQ ID NO: 5300 - protein, 1281 aa, Artificial Sequence
  Description of Artificial Sequence: Synthetic polypeptide
MGILPSPGMPALLSLVSLLSVLLMGCVAETGTQCVNLTTRTQLPPAYTNSFTRGVYYPDKVFRSSVLHSTQDLFLPFFSNVTWFHAIHVSGTNGTKRFDNPVLPFNDGVYFASTEKSNIIRGWIFGTTLDSKTQSLLIVNNATNVVIKVCEFQFCNDPFLGVYYHKNNKSWMESEFRVYSSANNCTFEYVSQPFLMDLEGKQGNFKNLREFVFKNIDGYFKIYSKHTPINLVRDLPQGFSALEPLVDLPIGINITRFQTLLALHRSYLTPGDSSSGWTAGAAAYYVGYLQPRTFLLKYNENGTITDAVDCALDPLSETKCTLKSFTVEKGIYQTSNFRVQPTESIVRFPNITNLCPFGEVFNATRFCSVYAWNRKRISNCVADYSVLYNSASFSTFKCYGVSPTKLNDLCFTNVYADSFVIRGDEVRQIAPGQTGKIADYNYKLPDDFTGCVIAWNSNNLDSKVGGNYNYLYRLFRKSNLKPFERDISTEIYQAGSTPCNGVEGFNCYFPLQSYGFQPTNGVGYQPYRVVVLSFELLHAPATVCGPKKSTNLVKNKCVNFNFNGLTGTGVLTESNKKFLPFQQFGRDIADTTDAVRDPQTLEILDITPCSFGGVSVITPGTNTSNQVAVLYQDVNCTEVPVAIHADQLTPTWRVYSTGSNVFQTRAGCLIGAEHVNNSYECDIPIGAGICASYQTQTNSPSGAGSVASQSIIAYTMSLGAENSVAYSNNSIAIPTNFTISVTTEILPVSMTKTSVDCTMYICGDSTECSNLLLQYGSFCTQLNRALTGIAVEQDKNTQEVFAQVKQIYKTPPIKDFGGFNFSQILPDPSKPSKRSFIEDLLFNKVTLADAGFIKQYGDCLGDIAARDLICAQKFNGLTVLPPLLTDEMIAQYTSALLAGTITSGWTFGAGAALQIPFAMQMAYRFNGIGVTQNVLYENQKLIANQFNSAIGKIQDSLSSTASALGKLQDVVNQNAQALNTLVKQLSSNFGAISSVLNDILSRLDPPEAEVQIDRLITGRLQSLQTYVTQQLIRAAEIRASANLAATKMSECVLGQSKRVDFCGKGYHLMSFPQSAPHGVVFLHVTYVPAQEKNFTTAPAICHDGKAHFPREGVFVSNGTHWFVTQRNFYEPQIITTDNTFVSGNCDVVIGIVNNTVYDPLQPELDSFKEELDKYFKNHTSPDVDLGDISGINASVVNIQKEIDRLNEVAKNLNESLIDLQELGKYEQYIKGSGRENLYFQGGGGSGYIPEAPRDGQAYVRKDGEWVLLSTFLGHHHHHHHH

SEQ ID NO: 5301 - protein, 1281 aa, Artificial Sequence
  Description of Artificial Sequence: Synthetic polypeptide
MGILPSPGMPALLSLVSLLSVLLMGCVAETGTQCVNLTTRTQLPPAYTNSFTRGVYYPDKVFRSSVLHSTQDLFLPFFSNVTWFHAIHVSGTNGTKRFDNPVLPFNDGVYFASTEKSNIIRGWIFGTTLDSKTQSLLIVNNATNVVIKVCEFQFCNDPFLGVYYHKNNKSWMESEFRVYSSANNCTFEYVSQPFLMDLEGKQGNFKNLREFVFKNIDGYFKIYSKHTPINLVRDLPQGFSALEPLVDLPIGINITRFQTLLALHRSYLTPGDSSSGWTAGAAAYYVGYLQPRTFLLKYNENGTITDAVDCALDPLSETKCTLKSFTVEKGIYQTSNFRVQPTESIVRFPNITNLCPYGEVFNATRFASVYAWNRKRISNCVADYSVLYNSASFSTFKCYGVSPTKLNDLCFTNVYADSFVIRGDEVRQIAPGQTGKIADYNYKLPDDFTGCVIAWNSNNLDSKVGGNYNYLYRLFRKSNLKPFERDISTEIYQAGSTPCNGVEGFNCYFPLQSYGFQPTNGVGYQPYRVVVLSFELLHAPATVCGPKKSTNLVKNKCVNFNFNGLTGTGVLTESNKKFLPFQQFGRDIADTTDAVRDPQTLEILDITPCSFGGVSVITPGTNTSNQVAVLYQDVNCTEVPVAIHADQLTPTWRVYSTGSNVFQTRAGCLIGAEHVNNSYECDIPIGAGICASYQTQTNSPSGAGSVASQSIIAYTMSLGAENSVAYSNNSIAIPTNFTISVTTEILPVSMTKTSVDCTMYICGDSTECSNLLLQYGSFCTQLNRALTGIAVEQDKNTQEVFAQVKQIYKTPPIKDFGGFNFSQILPDPSKPSKRSFIEDLLFNKVTLADAGFIKQYGDCLGDIAARDLICAQKFNGLTVLPPLLTDEMIAQYTSALLAGTITSGWTFGAGAALQIPFAMQMAYRFNGIGVTQNVLYENQKLIANQFNSAIGKIQDSLSSTASALGKLQDVVNQNAQALNTLVKQLSSNFGAISSVLNDILSRLDPPEAEVQIDRLITGRLQSLQTYVTQQLIRAAEIRASANLAATKMSECVLGQSKRVDFCGKGYHLMSFPQSAPHGVVFLHVTYVPAQEKNFTTAPAICHDGKAHFPREGVFVSNGTHWFVTQRNFYEPQIITTDNTFVSGNCDVVIGIVNNTVYDPLQPELDSFKEELDKYFKNHTSPDVDLGDISGINASVVNIQKEIDRLNEVAKNLNESLIDLQELGKYEQYIKGSGRENLYFQGGGGSGYIPEAPRDGQAYVRKDGEWVLLSTFLGHHHHHHHH

SEQ ID NO: 5302 - protein, 1281 aa, Artificial Sequence
  Description of Artificial Sequence: Synthetic polypeptide
MGILPSPGMPALLSLVSLLSVLLMGCVAETGTQCVNLTTRTQLPPAYTNSFTRGVYYPDKVFRSSVLHSTQDLFLPFFSNVTWFHAIHVSGTNGTKRFDNPVLPFNDGVYFASTEKSNIIRGWIFGTTLDSKTQSLLIVNNATNVVIKVCEFQFCNDPFLGVYYHKNNKSWMESEFRVYSSANNCTFEYVSQPFLMDLEGKQGNFKNLREFVFKNIDGYFKIYSKHTPINLVRDLPQGFSALEPLVDLPIGINITRFQTLLALHRSYLTPGDSSSGWTAGAAAYYVGYLQPRTFLLKYNENGTITDAVDCALDPLSETKCTLKSFTVEKGIYQTSNFRVQPTESIVRFPNITNLCPFGEVFNATRFASVYAWNRKRISNCVADYSVLYNSASFSTFKCYGVSPTKLNDLCFTNVYADSFVIRGDEVRQIAPGQTGKIADYNYKLPDDFTGCVIAWNSNNLDSKVGGNYNYLYRLFRKSNLKPFERDISTEVYQAGSTPCNGVEGFNCYFPLQSYGFQPTNGVGYQPYRVVVLSFELLHAPATVCGPKKSTNLVKNKCVNFNFNGLTGTGVLTESNKKFLPFQQFGRDIADTTDAVRDPQTLEILDITPCSFGGVSVITPGTNTSNQVAVLYQDVNCTEVPVAIHADQLTPTWRVYSTGSNVFQTRAGCLIGAEHVNNSYECDIPIGAGICASYQTQTNSPSGAGSVASQSIIAYTMSLGAENSVAYSNNSIAIPTNFTISVTTEILPVSMTKTSVDCTMYICGDSTECSNLLLQYGSFCTQLNRALTGIAVEQDKNTQEVFAQVKQIYKTPPIKDFGGFNFSQILPDPSKPSKRSFIEDLLFNKVTLADAGFIKQYGDCLGDIAARDLICAQKFNGLTVLPPLLTDEMIAQYTSALLAGTITSGWTFGAGAALQIPFAMQMAYRFNGIGVTQNVLYENQKLIANQFNSAIGKIQDSLSSTASALGKLQDVVNQNAQALNTLVKQLSSNFGAISSVLNDILSRLDPPEAEVQIDRLITGRLQSLQTYVTQQLIRAAEIRASANLAATKMSECVLGQSKRVDFCGKGYHLMSFPQSAPHGVVFLHVTYVPAQEKNFTTAPAICHDGKAHFPREGVFVSNGTHWFVTQRNFYEPQIITTDNTFVSGNCDVVIGIVNNTVYDPLQPELDSFKEELDKYFKNHTSPDVDLGDISGINASVVNIQKEIDRLNEVAKNLNESLIDLQELGKYEQYIKGSGRENLYFQGGGGSGYIPEAPRDGQAYVRKDGEWVLLSTFLGHHHHHHHH

SEQ ID NO: 5303 - protein, 1281 aa, Artificial Sequence
  Description of Artificial Sequence: Synthetic polypeptide
MGILPSPGMPALLSLVSLLSVLLMGCVAETGTQCVNLTTRTQLPPAYTNSFTRGVYYPDKVFRSSVLHSTQDLFLPFFSNVTWFHAIHVSGTNGTKRFDNPVLPFNDGVYFASTEKSNIIRGWIFGTTLDSKTQSLLIVNNATNVVIKVCEFQFCNDPFLGVYYHKNNKSWMESEFRVYSSANNCTFEYVSQPFLMDLEGKQGNFKNLREFVFKNIDGYFKIYSKHTPINLVRDLPQGFSALEPLVDLPIGINITRFQTLLALHRSYLTPGDSSSGWTAGAAAYYVGYLQPRTFLLKYNENGTITDAVDCALDPLSETKCTLKSFTVEKGIYQTSNFRVQPTESIVRFPNITNLCPIGEVFNATRFASVYAWNRKRISNCVADYSVLYNSASFSTFKCYGVSPTKLNDLCFTNVYADSFVIRGDEVRQIAPGQTGKIADYNYKLPDDFTGCVIAWNSNNLDSKVGGNYNYLYRLFRKSNLKPFERDISTEIYQAGSTPCNGVEGFNCYFPLQSYGFQPTNGVGYQPYRVVVLSFELLHAPATVCGPKKSTNLVKNKCVNFNFNGLTGTGVLTESNKKFLPFQQFGRDIADTTDAVRDPQTLEILDITPCSFGGVSVITPGTNTSNQVAVLYQDVNCTEVPVAIHADQLTPTWRVYSTGSNVFQTRAGCLIGAEHVNNSYECDIPIGAGICASYQTQTNSPSGAGSVASQSIIAYTMSLGAENSVAYSNNSIAIPTNFTISVTTEILPVSMTKTSVDCTMYICGDSTECSNLLLQYGSFCTQLNRALTGIAVEQDKNTQEVFAQVKQIYKTPPIKDFGGFNFSQILPDPSKPSKRSFIEDLLFNKVTLADAGFIKQYGDCLGDIAARDLICAQKFNGLTVLPPLLTDEMIAQYTSALLAGTITSGWTFGAGAALQIPFAMQMAYRFNGIGVTQNVLYENQKLIANQFNSAIGKIQDSLSSTASALGKLQDVVNQNAQALNTLVKQLSSNFGAISSVLNDILSRLDPPEAEVQIDRLITGRLQSLQTYVTQQLIRAAEIRASANLAATKMSECVLGQSKRVDFCGKGYHLMSFPQSAPHGVVFLHVTYVPAQEKNFTTAPAICHDGKAHFPREGVFVSNGTHWFVTQRNFYEPQIITTDNTFVSGNCDVVIGIVNNTVYDPLQPELDSFKEELDKYFKNHTSPDVDLGDISGINASVVNIQKEIDRLNEVAKNLNESLIDLQELGKYEQYIKGSGRENLYFQGGGGSGYIPEAPRDGQAYVRKDGEWVLLSTFLGHHHHHHHH

SEQ ID NO: 5304 - protein, 1281 aa, Artificial Sequence
  Description of Artificial Sequence: Synthetic polypeptide
MGILPSPGMPALLSLVSLLSVLLMGCVAETGTQCVNLTTRTQLPPAYTNSFTRGVYYPDKVFRSSVLHSTQDLFLPFFSNVTWFHAIHVSGTNGTKRFDNPVLPFNDGVYFASTEKSNIIRGWIFGTTLDSKTQSLLIVNNATNVVIKVCEFQFCNDPFLGVYYHKNNKSWMESEFRVYSSANNCTFEYVSQPFLMDLEGKQGNFKNLREFVFKNIDGYFKIYSKHTPINLVRDLPQGFSALEPLVDLPIGINITRFQTLLALHRSYLTPGDSSSGWTAGAAAYYVGYLQPRTFLLKYNENGTITDAVDCALDPLSETKCTLKSFTVEKGIYQTSNFRVQPTESIVRFPNITNLCPFGEVFNATRFASVYAWNRKRISNCVFDYSVLYNSASFSTFKCYGVSPTKLNDLCFTNVYADSFVIRGDEVRQIAPGQTGKIADYNYKLPDDFTGCVIAWNSNNLDSKVGGNYNYLYRLFRKSNLKPFERDISTEIYQAGSTPCNGVEGFNCYFPLQSYGFQPTNGVGYQPYRVVVLSFELLHAPATVCGPKKSTNLVKNKCVNFNFNGLTGTGVLTESNKKFLPFQQFGRDIADTTDAVRDPQTLEILDITPCSFGGVSVITPGTNTSNQVAVLYQDVNCTEVPVAIHADQLTPTWRVYSTGSNVFQTRAGCLIGAEHVNNSYECDIPIGAGICASYQTQTNSPSGAGSVASQSIIAYTMSLGAENSVAYSNNSIAIPTNFTISVTTEILPVSMTKTSVDCTMYICGDSTECSNLLLQYGSFCTQLNRALTGIAVEQDKNTQEVFAQVKQIYKTPPIKDFGGFNFSQILPDPSKPSKRSFIEDLLFNKVTLADAGFIKQYGDCLGDIAARDLICAQKFNGLTVLPPLLTDEMIAQYTSALLAGTITSGWTFGAGAALQIPFAMQMAYRFNGIGVTQNVLYENQKLIANQFNSAIGKIQDSLSSTASALGKLQDVVNQNAQALNTLVKQLSSNFGAISSVLNDILSRLDPPEAEVQIDRLITGRLQSLQTYVTQQLIRAAEIRASANLAATKMSECVLGQSKRVDFCGKGYHLMSFPQSAPHGVVFLHVTYVPAQEKNFTTAPAICHDGKAHFPREGVFVSNGTHWFVTQRNFYEPQIITTDNTFVSGNCDVVIGIVNNTVYDPLQPELDSFKEELDKYFKNHTSPDVDLGDISGINASVVNIQKEIDRLNEVAKNLNESLIDLQELGKYEQYIKGSGRENLYFQGGGGSGYIPEAPRDGQAYVRKDGEWVLLSTFLGHHHHHHHH

SEQ ID NO: 5305 - protein, 1281 aa, Artificial Sequence
  Description of Artificial Sequence: Synthetic polypeptide
MGILPSPGMPALLSLVSLLSVLLMGCVAETGTQCVNLTTRTQLPPAYTNSFTRGVYYPDKVFRSSVLHSTQDLFLPFFSNVTWFHAIHVSGTNGTKRFDNPVLPFNDGVYFASTEKSNIIRGWIFGTTLDSKTQSLLIVNNATNVVIKVCEFQFCNDPFLGVYYHKNNKSWMESEFRVYSSANNCTFEYVSQPFLMDLEGKQGNFKNLREFVFKNIDGYFKIYSKHTPINLVRDLPQGFSALEPLVDLPIGINITRFQTLLALHRSYLTPGDSSSGWTAGAAAYYVGYLQPRTFLLKYNENGTITDAVDCALDPLSETKCTLKSFTVEKGIYQTSNFRVQPTESIVRFPNITNLCPFGEVFNATRFASVYAWNRKRISNCVADYSVLYNSASFSTFKCYGVSPTKLNDLCFTNVYADSFVIRGDEVRQIAPGQTGKIADYNYKLPDDFTGCVIAWNSNNLDSKVGGNYNYLYRLFRKSNLSPFERDISTEIYQAGSTPCNGVEGFNCYFPLQSYGFQPTNGVGYQPYRVVVLSFELLHAPATVCGPKKSTNLVKNKCVNFNFNGLTGTGVLTESNKKFLPFQQFGRDIADTTDAVRDPQTLEILDITPCSFGGVSVITPGTNTSNQVAVLYQDVNCTEVPVAIHADQLTPTWRVYSTGSNVFQTRAGCLIGAEHVNNSYECDIPIGAGICASYQTQTNSPSGAGSVASQSIIAYTMSLGAENSVAYSNNSIAIPTNFTISVTTEILPVSMTKTSVDCTMYICGDSTECSNLLLQYGSFCTQLNRALTGIAVEQDKNTQEVFAQVKQIYKTPPIKDFGGFNFSQILPDPSKPSKRSFIEDLLFNKVTLADAGFIKQYGDCLGDIAARDLICAQKFNGLTVLPPLLTDEMIAQYTSALLAGTITSGWTFGAGAALQIPFAMQMAYRFNGIGVTQNVLYENQKLIANQFNSAIGKIQDSLSSTASALGKLQDVVNQNAQALNTLVKQLSSNFGAISSVLNDILSRLDPPEAEVQIDRLITGRLQSLQTYVTQQLIRAAEIRASANLAATKMSECVLGQSKRVDFCGKGYHLMSFPQSAPHGVVFLHVTYVPAQEKNFTTAPAICHDGKAHFPREGVFVSNGTHWFVTQRNFYEPQIITTDNTFVSGNCDVVIGIVNNTVYDPLQPELDSFKEELDKYFKNHTSPDVDLGDISGINASVVNIQKEIDRLNEVAKNLNESLIDLQELGKYEQYIKGSGRENLYFQGGGGSGYIPEAPRDGQAYVRKDGEWVLLSTFLGHHHHHHHH

SEQ ID NO: 5306 - protein, 1281 aa, Artificial Sequence
  Description of Artificial Sequence: Synthetic polypeptide
MGILPSPGMPALLSLVSLLSVLLMGCVAETGTQCVNLTTRTQLPPAYTNSFTRGVYYPDKVFRSSVLHSTQDLFLPFFSNVTWFHAIHVSGTNGTKRFDNPVLPFNDGVYFASTEKSNIIRGWIFGTTLDSKTQSLLIVNNATNVVIKVCEFQFCNDPFLGVYYHKNNKSWMESEFRVYSSANNCTFEYVSQPFLMDLEGKQGNFKNLREFVFKNIDGYFKIYSKHTPINLVRDLPQGFSALEPLVDLPIGINITRFQTLLALHRSYLTPGDSSSGWTAGAAAYYVGYLQPRTFLLKYNENGTITDAVDCALDPLSETKCTLKSFTVEKGIYQTSNFRVQPTESIVRFPNITNLCPFGEVFNATRFASVYAWNRKRISNCVADYSVLYNSASFSTFKCYGVSPTKLNDLCFTNVYADSFVIRGDEVRQIAPGQTGKIADYNYKLPDDFTGCVIAWNSNNLDSKVGGNYNYLYRLFRKSNLKPFERDISTEIYQAGSTPCNGVEGFNCYFPLQSYGFQPTNGVGYQPYRVVVLSFELLKAPATVCGPKKSTNLVKNKCVNFNFNGLTGTGVLTESNKKFLPFQQFGRDIADTTDAVRDPQTLEILDITPCSFGGVSVITPGTNTSNQVAVLYQDVNCTEVPVAIHADQLTPTWRVYSTGSNVFQTRAGCLIGAEHVNNSYECDIPIGAGICASYQTQTNSPSGAGSVASQSIIAYTMSLGAENSVAYSNNSIAIPTNFTISVTTEILPVSMTKTSVDCTMYICGDSTECSNLLLQYGSFCTQLNRALTGIAVEQDKNTQEVFAQVKQIYKTPPIKDFGGFNFSQILPDPSKPSKRSFIEDLLFNKVTLADAGFIKQYGDCLGDIAARDLICAQKFNGLTVLPPLLTDEMIAQYTSALLAGTITSGWTFGAGAALQIPFAMQMAYRFNGIGVTQNVLYENQKLIANQFNSAIGKIQDSLSSTASALGKLQDVVNQNAQALNTLVKQLSSNFGAISSVLNDILSRLDPPEAEVQIDRLITGRLQSLQTYVTQQLIRAAEIRASANLAATKMSECVLGQSKRVDFCGKGYHLMSFPQSAPHGVVFLHVTYVPAQEKNFTTAPAICHDGKAHFPREGVFVSNGTHWFVTQRNFYEPQIITTDNTFVSGNCDVVIGIVNNTVYDPLQPELDSFKEELDKYFKNHTSPDVDLGDISGINASVVNIQKEIDRLNEVAKNLNESLIDLQELGKYEQYIKGSGRENLYFQGGGGSGYIPEAPRDGQAYVRKDGEWVLLSTFLGHHHHHHHH

SEQ ID NO: 5307 - protein, 1281 aa, Artificial Sequence
  Description of Artificial Sequence: Synthetic polypeptide
MGILPSPGMPALLSLVSLLSVLLMGCVAETGTQCVNLTTRTQLPPAYTNSFTRGVYYPDKVFRSSVLHSTQDLFLPFFSNVTWFHAIHVSGTNGTKRFDNPVLPFNDGVYFASTEKSNIIRGWIFGTTLDSKTQSLLIVNNATNVVIKVCEFQFCNDPFLGVYYHKNNKSWMESEFRVYSSANNCTFEYVSQPFLMDLEGKQGNFKNLREFVFKNIDGYFKIYSKHTPINLVRDLPQGFSALEPLVDLPIGINITRFQTLLALHRSYLTPGDSSSGWTAGAAAYYVGYLQPRTFLLKYNENGTITDAVDCALDPLSETKCTLKSFTVEKGIYQTSNFRVQPTESIVRFPNITNLCPFGEVFNATRFASVYAWNRKRISNCVADYSVLYNSASFSTFKCYGVSPTKLNDLCFTNVYADSFVIRGDEVRQIAPGQTGKIADYNYKLPDDFTGCVIAWNSNNLDSKVGGNYNYLYRLFRKSNLKPFERDISTEIYQAGSTPCNGVEGFNCYFPLQSYGFQPTNGVGYQPYRVVVLSFELLHAPATVCGPKKSTNLVKNKCVNFNFNGETGTGVLTESNKKFLPFQQFGRDIADTTDAVRDPQTLEILDITPCSFGGVSVITPGTNTSNQVAVLYQDVNCTEVPVAIHADQLTPTWRVYSTGSNVFQTRAGCLIGAEHVNNSYECDIPIGAGICASYQTQTNSPSGAGSVASQSIIAYTMSLGAENSVAYSNNSIAIPTNFTISVTTEILPVSMTKTSVDCTMYICGDSTECSNLLLQYGSFCTQLNRALTGIAVEQDKNTQEVFAQVKQIYKTPPIKDFGGFNFSQILPDPSKPSKRSFIEDLLFNKVTLADAGFIKQYGDCLGDIAARDLICAQKFNGLTVLPPLLTDEMIAQYTSALLAGTITSGWTFGAGAALQIPFAMQMAYRFNGIGVTQNVLYENQKLIANQFNSAIGKIQDSLSSTASALGKLQDVVNQNAQALNTLVKQLSSNFGAISSVLNDILSRLDPPEAEVQIDRLITGRLQSLQTYVTQQLIRAAEIRASANLAATKMSECVLGQSKRVDFCGKGYHLMSFPQSAPHGVVFLHVTYVPAQEKNFTTAPAICHDGKAHFPREGVFVSNGTHWFVTQRNFYEPQIITTDNTFVSGNCDVVIGIVNNTVYDPLQPELDSFKEELDKYFKNHTSPDVDLGDISGINASVVNIQKEIDRLNEVAKNLNESLIDLQELGKYEQYIKGSGRENLYFQGGGGSGYIPEAPRDGQAYVRKDGEWVLLSTFLGHHHHHHHH

SEQ ID NO: 5308 - protein, 1281 aa, Artificial Sequence
  Description of Artificial Sequence: Synthetic polypeptide
MGILPSPGMPALLSLVSLLSVLLMGCVAETGTQCVNLTTRTQLPPAYTNSFTRGVYYPDKVFRSSVLHSTQDLFLPFFSNVTWFHAIHVSGTNGTKRFDNPVLPFNDGVYFASTEKSNIIRGWIFGTTLDSKTQSLLIVNNATNVVIKVCEFQFCNDPFLGVYYHKNNKSWMESEFRVYSSANNCTFEYVSQPFLMDLEGKQGNFKNLREFVFKNIDGYFKIYSKHTPINLVRDLPQGFSALEPLVDLPIGINITRFQTLLALHRSYLTPGDSSSGWTAGAAAYYVGYLQPRTFLLKYNENGTITDAVDCALDPLSETKCTLKSFTVEKGIYQTSNFRVQPTESIVRFPNITNLCPFGEVFNATRFASVYAWNRKRISNCVADYSVLYNSCSFSTFKCYGVSPTKLNDLCFTNVYADSFVIRGDEVRQIAPGQTGKIADYNYKLPDDFTGCVIAWNSNNLDSKVGGNYNYLYRLFRKSNLKPFERDISTEIYQAGSTPCNGVEGFNCYFPLQSYGFQPTNGVGYQPYRVVVLSFELLHAPATVCGPKKSTNLVKNKCVNFNFNGLTGTGVLTESNKKFLPFQQFGRDIADTTDAVRDPQTLEILDITPCSFGGVSVITPGTNTSNQVAVLYQDVNCTEVPVAIHADQLTPTWRVYSTGSNVFQTRAGCLIGAEHVNNSYECDIPIGAGICASYQTQTNSPSGAGSVASQSIIAYTMSLGAENSVAYSNNSIAIPTNFTISVTTEILPVSMTKTSVDCTMYICGDSTECSNLLLQYGSFCTQLNRALTGIAVEQDKNTQEVFAQVKQIYKTPPIKDFGGFNFSQILPDPSKPSKRSFIEDLLFNKVTLADAGFIKQYGDCLGDIAARDLICAQKFNGLTVLPPLLTDEMIAQYTSALLAGTITSGWTFGAGAALQIPFAMQMAYRFNGIGVTQNVLYENQKLIANQFNSAIGKIQDSLSSTASALGKLQDVVNQNAQALNTLVKQLSSNFGAISSVLNDILSRLDPPEAEVQIDRLITGRLQSLQTYVTQQLIRAAEIRASANLAATKMSECVLGQSKRVDFCGKGYHLMSFPQSAPHGVVFLHVTYVPAQEKNFTTAPAICHDGKAHFPREGVFVSNGTHWFVTQRNFYEPQIITTDNTFVSGNCDVVIGIVNNTVYDPLQPELDSFKEELDKYFKNHTSPDVDLGDISGINASVVNIQKEIDRLNEVAKNLNESLIDLQELGKYEQYIKGSGRENLYFQGGGGSGYIPEAPRDGQAYVRKDGEWVLLSTFLGHHHHHHHH

SEQ ID NO: 5309 - protein, 1281 aa, Artificial Sequence
  Description of Artificial Sequence: Synthetic polypeptide
MGILPSPGMPALLSLVSLLSVLLMGCVAETGTQCVNLTTRTQLPPAYTNSFTRGVYYPDKVFRSSVLHSTQDLFLPFFSNVTWFHAIHVSGTNGTKRFDNPVLPFNDGVYFASTEKSNIIRGWIFGTTLDSKTQSLLIVNNATNVVIKVCEFQFCNDPFLGVYYHKNNKSWMESEFRVYSSANNCTFEYVSQPFLMDLEGKQGNFKNLREFVFKNIDGYFKIYSKHTPINLVRDLPQGFSALEPLVDLPIGINITRFQTLLALHRSYLTPGDSSSGWTAGAAAYYVGYLQPRTFLLKYNENGTITDAVDCALDPLSETKCTLKSFTVEKGIYQTSNFRVQPTESIVRFPNITNLCPFGEVFNATRFASVYAWNRKRISNCVADYSVLYNSASFSTFKCYGVSPTKLNDLCFTNVYADSFVIRGDEVRQIAPGQTGKIADYNYKLPDDFTGCVIAWNSNNLDSKVGGNYNYLYRLFRKSNLKPFERDISTEIYQAGSTPCNGVEGFNCYFPLQSYGFQPTNGVGYQPYRVVVLSFELKHAPATVCGPKKSTNLVKNKCVNFNFNGLTGTGVLTESNKKFLPFQQFGRDIADTTDAVRDPQTLEILDITPCSFGGVSVITPGTNTSNQVAVLYQDVNCTEVPVAIHADQLTPTWRVYSTGSNVFQTRAGCLIGAEHVNNSYECDIPIGAGICASYQTQTNSPSGAGSVASQSIIAYTMSLGAENSVAYSNNSIAIPTNFTISVTTEILPVSMTKTSVDCTMYICGDSTECSNLLLQYGSFCTQLNRALTGIAVEQDKNTQEVFAQVKQIYKTPPIKDFGGFNFSQILPDPSKPSKRSFIEDLLFNKVTLADAGFIKQYGDCLGDIAARDLICAQKFNGLTVLPPLLTDEMIAQYTSALLAGTITSGWTFGAGAALQIPFAMQMAYRFNGIGVTQNVLYENQKLIANQFNSAIGKIQDSLSSTASALGKLQDVVNQNAQALNTLVKQLSSNFGAISSVLNDILSRLDPPEAEVQIDRLITGRLQSLQTYVTQQLIRAAEIRASANLAATKMSECVLGQSKRVDFCGKGYHLMSFPQSAPHGVVFLHVTYVPAQEKNFTTAPAICHDGKAHFPREGVFVSNGTHWFVTQRNFYEPQIITTDNTFVSGNCDVVIGIVNNTVYDPLQPELDSFKEELDKYFKNHTSPDVDLGDISGINASVVNIQKEIDRLNEVAKNLNESLIDLQELGKYEQYIKGSGRENLYFQGGGGSGYIPEAPRDGQAYVRKDGEWVLLSTFLGHHHHHHHH

SEQ ID NO: 5310 - protein, 1281 aa, Artificial Sequence
  Description of Artificial Sequence: Synthetic polypeptide
MGILPSPGMPALLSLVSLLSVLLMGCVAETGTQCVNLTTRTQLPPAYTNSFTRGVYYPDKVFRSSVLHSTQDLFLPFFSNVTWFHAIHVSGTNGTKRFDNPVLPFNDGVYFASTEKSNIIRGWIFGTTLDSKTQSLLIVNNATNVVIKVCEFQFCNDPFLGVYYHKNNKSWMESEFRVYSSANNCTFEYVSQPFLMDLEGKQGNFKNLREFVFKNIDGYFKIYSKHTPINLVRDLPQGFSALEPLVDLPIGINITRFQTLLALHRSYLTPGDSSSGWTAGAAAYYVGYLQPRTFLLKYNENGTITDAVDCALDPLSETKCTLKSFTVEKGIYQTSNFRVQPTESIVRFPNITNLCPFGEVFNATRFASVSAWNRKRISNCVADYSVLYNSASFSTFKCYGVSPTKLNDLCFTNVYADSFVIRGDEVRQIAPGQTGKIADYNYKLPDDFTGCVIAWNSNNLDSKVGGNYNYLYRLFRKSNLKPFERDISTEIYQAGSTPCNGVEGFNCYFPLQSYGFQPTNGVGYQPYRVVVLSFELLHAPATVCGPKKSTNLVKNKCVNFNFNGLTGTGVLTESNKKFLPFQQFGRDIADTTDAVRDPQTLEILDITPCSFGGVSVITPGTNTSNQVAVLYQDVNCTEVPVAIHADQLTPTWRVYSTGSNVFQTRAGCLIGAEHVNNSYECDIPIGAGICASYQTQTNSPSGAGSVASQSIIAYTMSLGAENSVAYSNNSIAIPTNFTISVTTEILPVSMTKTSVDCTMYICGDSTECSNLLLQYGSFCTQLNRALTGIAVEQDKNTQEVFAQVKQIYKTPPIKDFGGFNFSQILPDPSKPSKRSFIEDLLFNKVTLADAGFIKQYGDCLGDIAARDLICAQKFNGLTVLPPLLTDEMIAQYTSALLAGTITSGWTFGAGAALQIPFAMQMAYRFNGIGVTQNVLYENQKLIANQFNSAIGKIQDSLSSTASALGKLQDVVNQNAQALNTLVKQLSSNFGAISSVLNDILSRLDPPEAEVQIDRLITGRLQSLQTYVTQQLIRAAEIRASANLAATKMSECVLGQSKRVDFCGKGYHLMSFPQSAPHGVVFLHVTYVPAQEKNFTTAPAICHDGKAHFPREGVFVSNGTHWFVTQRNFYEPQIITTDNTFVSGNCDVVIGIVNNTVYDPLQPELDSFKEELDKYFKNHTSPDVDLGDISGINASVVNIQKEIDRLNEVAKNLNESLIDLQELGKYEQYIKGSGRENLYFQGGGGSGYIPEAPRDGQAYVRKDGEWVLLSTFLGHHHHHHHH

SEQ ID NO: 5311 - protein, 1281 aa, Artificial Sequence
  Description of Artificial Sequence: Synthetic polypeptide
MGILPSPGMPALLSLVSLLSVLLMGCVAETGTQCVNLTTRTQLPPAYTNSFTRGVYYPDKVFRSSVLHSTQDLFLPFFSNVTWFHAIHVSGTNGTKRFDNPVLPFNDGVYFASTEKSNIIRGWIFGTTLDSKTQSLLIVNNATNVVIKVCEFQFCNDPFLGVYYHKNNKSWMESEFRVYSSANNCTFEYVSQPFLMDLEGKQGNFKNLREFVFKNIDGYFKIYSKHTPINLVRDLPQGFSALEPLVDLPIGINITRFQTLLALHRSYLTPGDSSSGWTAGAAAYYVGYLQPRTFLLKYNENGTITDAVDCALDPLSETKCTLKSFTVEKGIYQTSNFRVQPTESIVRFPNITNLCPFGEVFNATRFASVYAWNRKRISNCVADYSVLYNSASFSTFKCYGVSPTKLNDLCFTNVYADSFVIRGDEVRQIAPGQTGKIADYNYKLPDDFTGCVIAWNSNNLDSKVGGNYNYLYRLFRKSNLKPFERDISTLIYQAGSTPCNGVEGFNCYFPLQSYGFQPTNGVGYQPYRVVVLSFELLHAPATVCGPKKSTNLVKNKCVNFNFNGLTGTGVLTESNKKFLPFQQFGRDIADTTDAVRDPQTLEILDITPCSFGGVSVITPGTNTSNQVAVLYQDVNCTEVPVAIHADQLTPTWRVYSTGSNVFQTRAGCLIGAEHVNNSYECDIPIGAGICASYQTQTNSPSGAGSVASQSIIAYTMSLGAENSVAYSNNSIAIPTNFTISVTTEILPVSMTKTSVDCTMYICGDSTECSNLLLQYGSFCTQLNRALTGIAVEQDKNTQEVFAQVKQIYKTPPIKDFGGFNFSQILPDPSKPSKRSFIEDLLFNKVTLADAGFIKQYGDCLGDIAARDLICAQKFNGLTVLPPLLTDEMIAQYTSALLAGTITSGWTFGAGAALQIPFAMQMAYRFNGIGVTQNVLYENQKLIANQFNSAIGKIQDSLSSTASALGKLQDVVNQNAQALNTLVKQLSSNFGAISSVLNDILSRLDPPEAEVQIDRLITGRLQSLQTYVTQQLIRAAEIRASANLAATKMSECVLGQSKRVDFCGKGYHLMSFPQSAPHGVVFLHVTYVPAQEKNFTTAPAICHDGKAHFPREGVFVSNGTHWFVTQRNFYEPQIITTDNTFVSGNCDVVIGIVNNTVYDPLQPELDSFKEELDKYFKNHTSPDVDLGDISGINASVVNIQKEIDRLNEVAKNLNESLIDLQELGKYEQYIKGSGRENLYFQGGGGSGYIPEAPRDGQAYVRKDGEWVLLSTFLGHHHHHHHH

SEQ ID NO: 5312 - protein, 1281 aa, Artificial Sequence
  Description of Artificial Sequence: Synthetic polypeptide
MGILPSPGMPALLSLVSLLSVLLMGCVAETGTQCVNLTTRTQLPPAYTNSFTRGVYYPDKVFRSSVLHSTQDLFLPFFSNVTWFHAIHVSGTNGTKRFDNPVLPFNDGVYFASTEKSNIIRGWIFGTTLDSKTQSLLIVNNATNVVIKVCEFQFCNDPFLGVYYHKNNKSWMESEFRVYSSANNCTFEYVSQPFLMDLEGKQGNFKNLREFVFKNIDGYFKIYSKHTPINLVRDLPQGFSALEPLVDLPIGINITRFQTLLALHRSYLTPGDSSSGWTAGAAAYYVGYLQPRTFLLKYNENGTITDAVDCALDPLSETKCTLKSFTVEKGIYQTSNFRVQPTESIVRFPNITNLCPFGEVFNATRFASVYAWNRKRISNCVADYSVLYNSASFSTFKCYGVSPTKLNDLCFTNVYADSFVIRGDEVRQIAPGQTGKIADYNYKLPDDFTGCVIAWNSNNLDSKVGGNYNYLYRLFRKSNLKPFERDISTEIYQAGATPCNGVEGFNCYFPLQSYGFQPTNGVGYQPYRVVVLSFELLHAPATVCGPKKSTNLVKNKCVNFNFNGLTGTGVLTESNKKFLPFQQFGRDIADTTDAVRDPQTLEILDITPCSFGGVSVITPGTNTSNQVAVLYQDVNCTEVPVAIHADQLTPTWRVYSTGSNVFQTRAGCLIGAEHVNNSYECDIPIGAGICASYQTQTNSPSGAGSVASQSIIAYTMSLGAENSVAYSNNSIAIPTNFTISVTTEILPVSMTKTSVDCTMYICGDSTECSNLLLQYGSFCTQLNRALTGIAVEQDKNTQEVFAQVKQIYKTPPIKDFGGFNFSQILPDPSKPSKRSFIEDLLFNKVTLADAGFIKQYGDCLGDIAARDLICAQKFNGLTVLPPLLTDEMIAQYTSALLAGTITSGWTFGAGAALQIPFAMQMAYRFNGIGVTQNVLYENQKLIANQFNSAIGKIQDSLSSTASALGKLQDVVNQNAQALNTLVKQLSSNFGAISSVLNDILSRLDPPEAEVQIDRLITGRLQSLQTYVTQQLIRAAEIRASANLAATKMSECVLGQSKRVDFCGKGYHLMSFPQSAPHGVVFLHVTYVPAQEKNFTTAPAICHDGKAHFPREGVFVSNGTHWFVTQRNFYEPQIITTDNTFVSGNCDVVIGIVNNTVYDPLQPELDSFKEELDKYFKNHTSPDVDLGDISGINASVVNIQKEIDRLNEVAKNLNESLIDLQELGKYEQYIKGSGRENLYFQGGGGSGYIPEAPRDGQAYVRKDGEWVLLSTFLGHHHHHHHH

SEQ ID NO: 5313 - protein, 1281 aa, Artificial Sequence
  Description of Artificial Sequence: Synthetic polypeptide
MGILPSPGMPALLSLVSLLSVLLMGCVAETGTQCVNLTTRTQLPPAYTNSFTRGVYYPDKVFRSSVLHSTQDLFLPFFSNVTWFHAIHVSGTNGTKRFDNPVLPFNDGVYFASTEKSNIIRGWIFGTTLDSKTQSLLIVNNATNVVIKVCEFQFCNDPFLGVYYHKNNKSWMESEFRVYSSANNCTFEYVSQPFLMDLEGKQGNFKNLREFVFKNIDGYFKIYSKHTPINLVRDLPQGFSALEPLVDLPIGINITRFQTLLALHRSYLTPGDSSSGWTAGAAAYYVGYLQPRTFLLKYNENGTITDAVDCALDPLSETKCTLKSFTVEKGIYQTSNFRVQPTESIVRFPNITNLCPFGEVFNATRFASVYAWNRKRISNCVADYSLLYNSASFSTFKCYGVSPTKLNDLCFTNVYADSFVIRGDEVRQIAPGQTGKIADYNYKLPDDFTGCVIAWNSNNLDSKVGGNYNYLYRLFRKSNLKPFERDISTEIYQAGSTPCNGVEGFNCYFPLQSYGFQPTNGVGYQPYRVVVLSFELLHAPATVCGPKKSTNLVKNKCVNFNFNGLTGTGVLTESNKKFLPFQQFGRDIADTTDAVRDPQTLEILDITPCSFGGVSVITPGTNTSNQVAVLYQDVNCTEVPVAIHADQLTPTWRVYSTGSNVFQTRAGCLIGAEHVNNSYECDIPIGAGICASYQTQTNSPSGAGSVASQSIIAYTMSLGAENSVAYSNNSIAIPTNFTISVTTEILPVSMTKTSVDCTMYICGDSTECSNLLLQYGSFCTQLNRALTGIAVEQDKNTQEVFAQVKQIYKTPPIKDFGGFNFSQILPDPSKPSKRSFIEDLLFNKVTLADAGFIKQYGDCLGDIAARDLICAQKFNGLTVLPPLLTDEMIAQYTSALLAGTITSGWTFGAGAALQIPFAMQMAYRFNGIGVTQNVLYENQKLIANQFNSAIGKIQDSLSSTASALGKLQDVVNQNAQALNTLVKQLSSNFGAISSVLNDILSRLDPPEAEVQIDRLITGRLQSLQTYVTQQLIRAAEIRASANLAATKMSECVLGQSKRVDFCGKGYHLMSFPQSAPHGVVFLHVTYVPAQEKNFTTAPAICHDGKAHFPREGVFVSNGTHWFVTQRNFYEPQIITTDNTFVSGNCDVVIGIVNNTVYDPLQPELDSFKEELDKYFKNHTSPDVDLGDISGINASVVNIQKEIDRLNEVAKNLNESLIDLQELGKYEQYIKGSGRENLYFQGGGGSGYIPEAPRDGQAYVRKDGEWVLLSTFLGHHHHHHHH

SEQ ID NO: 5314 - protein, 1281 aa, Artificial Sequence
  Description of Artificial Sequence: Synthetic polypeptide
MGILPSPGMPALLSLVSLLSVLLMGCVAETGTQCVNLTTRTQLPPAYTNSFTRGVYYPDKVFRSSVLHSTQDLFLPFFSNVTWFHAIHVSGTNGTKRFDNPVLPFNDGVYFASTEKSNIIRGWIFGTTLDSKTQSLLIVNNATNVVIKVCEFQFCNDPFLGVYYHKNNKSWMESEFRVYSSANNCTFEYVSQPFLMDLEGKQGNFKNLREFVFKNIDGYFKIYSKHTPINLVRDLPQGFSALEPLVDLPIGINITRFQTLLALHRSYLTPGDSSSGWTAGAAAYYVGYLQPRTFLLKYNENGTITDAVDCALDPLSETKCTLKSFTVEKGIYQTSNFRVQPTESIVRFPNITNLCPFGEVFNATRFASVYAWNRKRISNCVADYSELYNSASFSTFKCYGVSPTKLNDLCFTNVYADSFVIRGDEVRQIAPGQTGKIADYNYKLPDDFTGCVIAWNSNNLDSKVGGNYNYLYRLFRKSNLKPFERDISTEIYQAGSTPCNGVEGFNCYFPLQSYGFQPTNGVGYQPYRVVVLSFELLHAPATVCGPKKSTNLVKNKCVNFNFNGLTGTGVLTESNKKFLPFQQFGRDIADTTDAVRDPQTLEILDITPCSFGGVSVITPGTNTSNQVAVLYQDVNCTEVPVAIHADQLTPTWRVYSTGSNVFQTRAGCLIGAEHVNNSYECDIPIGAGICASYQTQTNSPSGAGSVASQSIIAYTMSLGAENSVAYSNNSIAIPTNFTISVTTEILPVSMTKTSVDCTMYICGDSTECSNLLLQYGSFCTQLNRALTGIAVEQDKNTQEVFAQVKQIYKTPPIKDFGGFNFSQILPDPSKPSKRSFIEDLLFNKVTLADAGFIKQYGDCLGDIAARDLICAQKFNGLTVLPPLLTDEMIAQYTSALLAGTITSGWTFGAGAALQIPFAMQMAYRFNGIGVTQNVLYENQKLIANQFNSAIGKIQDSLSSTASALGKLQDVVNQNAQALNTLVKQLSSNFGAISSVLNDILSRLDPPEAEVQIDRLITGRLQSLQTYVTQQLIRAAEIRASANLAATKMSECVLGQSKRVDFCGKGYHLMSFPQSAPHGVVFLHVTYVPAQEKNFTTAPAICHDGKAHFPREGVFVSNGTHWFVTQRNFYEPQIITTDNTFVSGNCDVVIGIVNNTVYDPLQPELDSFKEELDKYFKNHTSPDVDLGDISGINASVVNIQKEIDRLNEVAKNLNESLIDLQELGKYEQYIKGSGRENLYFQGGGGSGYIPEAPRDGQAYVRKDGEWVLLSTFLGHHHHHHHH

SEQ ID NO: 5315 - protein, 1281 aa, Artificial Sequence
  Description of Artificial Sequence: Synthetic polypeptide
MGILPSPGMPALLSLVSLLSVLLMGCVAETGTQCVNLTTRTQLPPAYTNSFTRGVYYPDKVFRSSVLHSTQDLFLPFFSNVTWFHAIHVSGTNGTKRFDNPVLPFNDGVYFASTEKSNIIRGWIFGTTLDSKTQSLLIVNNATNVVIKVCEFQFCNDPFLGVYYHKNNKSWMESEFRVYSSANNCTFEYVSQPFLMDLEGKQGNFKNLREFVFKNIDGYFKIYSKHTPINLVRDLPQGFSALEPLVDLPIGINITRFQTLLALHRSYLTPGDSSSGWTAGAAAYYVGYLQPRTFLLKYNENGTITDAVDCALDPLSETKCTLKSFTVEKGIYQTSNFRVQPTESIVRFPNITNLCPFGEVFNATRFASVYAWNRKRISNCVADYSVLYNSASFSTFKCYGVSPTKLNDLCFTNVYADSFVIRGDEVRQIAPGQTGKIADYNYKLPDDFTGCVIAWNSNNLDSKVGGNYNYLYRLFRKSNLKPFERDISTDIYQAGSTPCNGVEGFNCYFPLQSYGFQPTNGVGYQPYRVVVLSFELLHAPATVCGPKKSTNLVKNKCVNFNFNGLTGTGVLTESNKKFLPFQQFGRDIADTTDAVRDPQTLEILDITPCSFGGVSVITPGTNTSNQVAVLYQDVNCTEVPVAIHADQLTPTWRVYSTGSNVFQTRAGCLIGAEHVNNSYECDIPIGAGICASYQTQTNSPSGAGSVASQSIIAYTMSLGAENSVAYSNNSIAIPTNFTISVTTEILPVSMTKTSVDCTMYICGDSTECSNLLLQYGSFCTQLNRALTGIAVEQDKNTQEVFAQVKQIYKTPPIKDFGGFNFSQILPDPSKPSKRSFIEDLLFNKVTLADAGFIKQYGDCLGDIAARDLICAQKFNGLTVLPPLLTDEMIAQYTSALLAGTITSGWTFGAGAALQIPFAMQMAYRFNGIGVTQNVLYENQKLIANQFNSAIGKIQDSLSSTASALGKLQDVVNQNAQALNTLVKQLSSNFGAISSVLNDILSRLDPPEAEVQIDRLITGRLQSLQTYVTQQLIRAAEIRASANLAATKMSECVLGQSKRVDFCGKGYHLMSFPQSAPHGVVFLHVTYVPAQEKNFTTAPAICHDGKAHFPREGVFVSNGTHWFVTQRNFYEPQIITTDNTFVSGNCDVVIGIVNNTVYDPLQPELDSFKEELDKYFKNHTSPDVDLGDISGINASVVNIQKEIDRLNEVAKNLNESLIDLQELGKYEQYIKGSGRENLYFQGGGGSGYIPEAPRDGQAYVRKDGEWVLLSTFLGHHHHHHHH

SEQ ID NO: 5316 - protein, 1281 aa, Artificial Sequence
  Description of Artificial Sequence: Synthetic polypeptide
MGILPSPGMPALLSLVSLLSVLLMGCVAETGTQCVNLTTRTQLPPAYTNSFTRGVYYPDKVFRSSVLHSTQDLFLPFFSNVTWFHAIHVSGTNGTKRFDNPVLPFNDGVYFASTEKSNIIRGWIFGTTLDSKTQSLLIVNNATNVVIKVCEFQFCNDPFLGVYYHKNNKSWMESEFRVYSSANNCTFEYVSQPFLMDLEGKQGNFKNLREFVFKNIDGYFKIYSKHTPINLVRDLPQGFSALEPLVDLPIGINITRFQTLLALHRSYLTPGDSSSGWTAGAAAYYVGYLQPRTFLLKYNENGTITDAVDCALDPLSETKCTLKSFTVEKGIYQTSNFRVQPTESIVRFPNITNLCPFGEVFNATRFASVYAWNRKRISNCVADYSVLYNSASFSTFKCYGVSPTKLNDLCFTNVYADSFVIRGDEVRQIAPGQTGKIADYNYKLPDDFTGCVIAWNSENLDSKVGGNYNYLYRLFRKSNLKPFERDISTEIYQAGSTPCNGVEGFNCYFPLQSYGFQPTNGVGYQPYRVVVLSFELLHAPATVCGPKKSTNLVKNKCVNFNFNGLTGTGVLTESNKKFLPFQQFGRDIADTTDAVRDPQTLEILDITPCSFGGVSVITPGTNTSNQVAVLYQDVNCTEVPVAIHADQLTPTWRVYSTGSNVFQTRAGCLIGAEHVNNSYECDIPIGAGICASYQTQTNSPSGAGSVASQSIIAYTMSLGAENSVAYSNNSIAIPTNFTISVTTEILPVSMTKTSVDCTMYICGDSTECSNLLLQYGSFCTQLNRALTGIAVEQDKNTQEVFAQVKQIYKTPPIKDFGGFNFSQILPDPSKPSKRSFIEDLLFNKVTLADAGFIKQYGDCLGDIAARDLICAQKFNGLTVLPPLLTDEMIAQYTSALLAGTITSGWTFGAGAALQIPFAMQMAYRFNGIGVTQNVLYENQKLIANQFNSAIGKIQDSLSSTASALGKLQDVVNQNAQALNTLVKQLSSNFGAISSVLNDILSRLDPPEAEVQIDRLITGRLQSLQTYVTQQLIRAAEIRASANLAATKMSECVLGQSKRVDFCGKGYHLMSFPQSAPHGVVFLHVTYVPAQEKNFTTAPAICHDGKAHFPREGVFVSNGTHWFVTQRNFYEPQIITTDNTFVSGNCDVVIGIVNNTVYDPLQPELDSFKEELDKYFKNHTSPDVDLGDISGINASVVNIQKEIDRLNEVAKNLNESLIDLQELGKYEQYIKGSGRENLYFQGGGGSGYIPEAPRDGQAYVRKDGEWVLLSTFLGHHHHHHHH

SEQ ID NO: 5317 - protein, 1281 aa, Artificial Sequence
  Description of Artificial Sequence: Synthetic polypeptide
MGILPSPGMPALLSLVSLLSVLLMGCVAETGTQCVNLTTRTQLPPAYTNSFTRGVYYPDKVFRSSVLHSTQDLFLPFFSNVTWFHAIHVSGTNGTKRFDNPVLPFNDGVYFASTEKSNIIRGWIFGTTLDSKTQSLLIVNNATNVVIKVCEFQFCNDPFLGVYYHKNNKSWMESEFRVYSSANNCTFEYVSQPFLMDLEGKQGNFKNLREFVFKNIDGYFKIYSKHTPINLVRDLPQGFSALEPLVDLPIGINITRFQTLLALHRSYLTPGDSSSGWTAGAAAYYVGYLQPRTFLLKYNENGTITDAVDCALDPLSETKCTLKSFTVEKGIYQTSNFRVQPTESIVRFPNITNLCPFGEVFNATRFASVYAWNRKRISNCVADYSVLYNSASFSTFKCYGVSPTKLNDLCFTNVYADSFVIRGDEVRQIAPGQTGKIADYNYQLPDDFTGCVIAWNSNNLDSKVGGNYNYLYRLFRKSNLKPFERDISTEIYQAGSTPCNGVEGFNCYFPLQSYGFQPTNGVGYQPYRVVVLSFELLHAPATVCGPKKSTNLVKNKCVNFNFNGLTGTGVLTESNKKFLPFQQFGRDIADTTDAVRDPQTLEILDITPCSFGGVSVITPGTNTSNQVAVLYQDVNCTEVPVAIHADQLTPTWRVYSTGSNVFQTRAGCLIGAEHVNNSYECDIPIGAGICASYQTQTNSPSGAGSVASQSIIAYTMSLGAENSVAYSNNSIAIPTNFTISVTTEILPVSMTKTSVDCTMYICGDSTECSNLLLQYGSFCTQLNRALTGIAVEQDKNTQEVFAQVKQIYKTPPIKDFGGFNFSQILPDPSKPSKRSFIEDLLFNKVTLADAGFIKQYGDCLGDIAARDLICAQKFNGLTVLPPLLTDEMIAQYTSALLAGTITSGWTFGAGAALQIPFAMQMAYRFNGIGVTQNVLYENQKLIANQFNSAIGKIQDSLSSTASALGKLQDVVNQNAQALNTLVKQLSSNFGAISSVLNDILSRLDPPEAEVQIDRLITGRLQSLQTYVTQQLIRAAEIRASANLAATKMSECVLGQSKRVDFCGKGYHLMSFPQSAPHGVVFLHVTYVPAQEKNFTTAPAICHDGKAHFPREGVFVSNGTHWFVTQRNFYEPQIITTDNTFVSGNCDVVIGIVNNTVYDPLQPELDSFKEELDKYFKNHTSPDVDLGDISGINASVVNIQKEIDRLNEVAKNLNESLIDLQELGKYEQYIKGSGRENLYFQGGGGSGYIPEAPRDGQAYVRKDGEWVLLSTFLGHHHHHHHH

SEQ ID NO: 5318 - protein, 1281 aa, Artificial Sequence
  Description of Artificial Sequence: Synthetic polypeptide
MGILPSPGMPALLSLVSLLSVLLMGCVAETGTQCVNLTTRTQLPPAYTNSFTRGVYYPDKVFRSSVLHSTQDLFLPFFSNVTWFHAIHVSGTNGTKRFDNPVLPFNDGVYFASTEKSNIIRGWIFGTTLDSKTQSLLIVNNATNVVIKVCEFQFCNDPFLGVYYHKNNKSWMESEFRVYSSANNCTFEYVSQPFLMDLEGKQGNFKNLREFVFKNIDGYFKIYSKHTPINLVRDLPQGFSALEPLVDLPIGINITRFQTLLALHRSYLTPGDSSSGWTAGAAAYYVGYLQPRTFLLKYNENGTITDAVDCALDPLSETKCTLKSFTVEKGIYQTSNFRVQPTESIVRFPNITNLCPFGEVFNATRFASVYAWNRKRISNCVADYSVLYNSASFSTFKCYGVSPSKLNDLCFTNVYADSFVIRGDEVRQIAPGQTGKIADYNYKLPDDFTGCVIAWNSNNLDSKVGGNYNYLYRLFRKSNLKPFERDISTEIYQAGSTPCNGVEGFNCYFPLQSYGFQPTNGVGYQPYRVVVLSFELLHAPATVCGPKKSTNLVKNKCVNFNFNGLTGTGVLTESNKKFLPFQQFGRDIADTTDAVRDPQTLEILDITPCSFGGVSVITPGTNTSNQVAVLYQDVNCTEVPVAIHADQLTPTWRVYSTGSNVFQTRAGCLIGAEHVNNSYECDIPIGAGICASYQTQTNSPSGAGSVASQSIIAYTMSLGAENSVAYSNNSIAIPTNFTISVTTEILPVSMTKTSVDCTMYICGDSTECSNLLLQYGSFCTQLNRALTGIAVEQDKNTQEVFAQVKQIYKTPPIKDFGGFNFSQILPDPSKPSKRSFIEDLLFNKVTLADAGFIKQYGDCLGDIAARDLICAQKFNGLTVLPPLLTDEMIAQYTSALLAGTITSGWTFGAGAALQIPFAMQMAYRFNGIGVTQNVLYENQKLIANQFNSAIGKIQDSLSSTASALGKLQDVVNQNAQALNTLVKQLSSNFGAISSVLNDILSRLDPPEAEVQIDRLITGRLQSLQTYVTQQLIRAAEIRASANLAATKMSECVLGQSKRVDFCGKGYHLMSFPQSAPHGVVFLHVTYVPAQEKNFTTAPAICHDGKAHFPREGVFVSNGTHWFVTQRNFYEPQIITTDNTFVSGNCDVVIGIVNNTVYDPLQPELDSFKEELDKYFKNHTSPDVDLGDISGINASVVNIQKEIDRLNEVAKNLNESLIDLQELGKYEQYIKGSGRENLYFQGGGGSGYIPEAPRDGQAYVRKDGEWVLLSTFLGHHHHHHHH

SEQ ID NO: 5319 - protein, 1281 aa, Artificial Sequence
  Description of Artificial Sequence: Synthetic polypeptide
MGILPSPGMPALLSLVSLLSVLLMGCVAETGTQCVNLTTRTQLPPAYTNSFTRGVYYPDKVFRSSVLHSTQDLFLPFFSNVTWFHAIHVSGTNGTKRFDNPVLPFNDGVYFASTEKSNIIRGWIFGTTLDSKTQSLLIVNNATNVVIKVCEFQFCNDPFLGVYYHKNNKSWMESEFRVYSSANNCTFEYVSQPFLMDLEGKQGNFKNLREFVFKNIDGYFKIYSKHTPINLVRDLPQGFSALEPLVDLPIGINITRFQTLLALHRSYLTPGDSSSGWTAGAAAYYVGYLQPRTFLLKYNENGTITDAVDCALDPLSETKCTLKSFTVEKGIYQTSNFRVQPTESIVRFPNITNLCPFGEVFNATRFASVYAWNRKRISNCVADYSVLYNSASFSTFKCYGVSPTKLNDLCFTNVYADSFVIRGDEVRQIAPGQTGKIADYNYKLPDDFTGCVIAWNSNNLDSKVGGNYNYLYRLFRKSNLKPFERDISTEIYQAGSTPCNGVEGFNCYFPLQSYGFQPTNGVGYQPYRVVVLSFELLHAPATVCGPKKSTNLVKNKCVNFNFNGLTGTGVLTESNKKFLPFQQFGRDIADTTDAVRDPQTLEILDITPCSFGGVSVITPGTNTSNQVAVLYQDVNCTEVPVAIHADQLTPTWRVYSTGSNVFQTRAGCLIGAEHVNNSYECDIPIGAGICASYQTQTNSPSGAGSVASQSIIAYTMSLGAENVVAYSNNSIAIPTNFTISVTTEILPVSMTKTSVDCTMYICGDSTECSNLLLQYGSFCTQLNRALTGIAVEQDKNTQEVFAQVKQIYKTPPIKDFGGFNFSQILPDPSKPSKRSFIEDLLFNKVTLADAGFIKQYGDCLGDIAARDLICAQKFNGLTVLPPLLTDEMIAQYTSALLAGTITSGWTFGAGAALQIPFAMQMAYRFNGIGVTQNVLYENQKLIANQFNSAIGKIQDSLSSTASALGKLQDVVNQNAQALNTLVKQLSSNFGAISSVLNDILSRLDPPEAEVQIDRLITGRLQSLQTYVTQQLIRAAEIRASANLAATKMSECVLGQSKRVDFCGKGYHLMSFPQSAPHGVVFLHVTYVPAQEKNFTTAPAICHDGKAHFPREGVFVSNGTHWFVTQRNFYEPQIITTDNTFVSGNCDVVIGIVNNTVYDPLQPELDSFKEELDKYFKNHTSPDVDLGDISGINASVVNIQKEIDRLNEVAKNLNESLIDLQELGKYEQYIKGSGRENLYFQGGGGSGYIPEAPRDGQAYVRKDGEWVLLSTFLGHHHHHHHH

SEQ ID NO: 5320 - protein, 1281 aa, Artificial Sequence
  Description of Artificial Sequence: Synthetic polypeptide
MGILPSPGMPALLSLVSLLSVLLMGCVAETGTQCVNLTTRTQLPPAYTNSFTRGVYYPDKVFRSSVLHSTQDLFLPFFSNVTWFHAIHVSGTNGTKRFDNPVLPFNDGVYFASTEKSNIIRGWIFGTTLDSKTQSLLIVNNATNVVIKVCEFQFCNDPFLGVYYHKNNKSWMESEFRVYSSANNCTFEYVSQPFLMDLEGKQGNFKNLREFVFKNIDGYFKIYSKHTPINLVRDLPQGFSALEPLVDLPIGINITRFQTLLALHRSYLTPGDSSSGWTAGAAAYYVGYLQPRTFLLKYNENGTITDAVDCALDPLSETKCTLKSFTVEKGIYQTSNFRVQPTESIVRFPNITNLCPFGEVFNATRFASVYAWNRKRISNCVADYSVLYNSASFSTFKCYGVSPTKLDDLCFTNVYADSFVIRGDEVRQIAPGQTGKIADYNYKLPDDFTGCVIAWNSNNLDSKVGGNYNYLYRLFRKSNLKPFERDISTEIYQAGSTPCNGVEGFNCYFPLQSYGFQPTNGVGYQPYRVVVLSFELLHAPATVCGPKKSTNLVKNKCVNFNFNGLTGTGVLTESNKKFLPFQQFGRDIADTTDAVRDPQTLEILDITPCSFGGVSVITPGTNTSNQVAVLYQDVNCTEVPVAIHADQLTPTWRVYSTGSNVFQTRAGCLIGAEHVNNSYECDIPIGAGICASYQTQTNSPSGAGSVASQSIIAYTMSLGAENSVAYSNNSIAIPTNFTISVTTEILPVSMTKTSVDCTMYICGDSTECSNLLLQYGSFCTQLNRALTGIAVEQDKNTQEVFAQVKQIYKTPPIKDFGGFNFSQILPDPSKPSKRSFIEDLLFNKVTLADAGFIKQYGDCLGDIAARDLICAQKFNGLTVLPPLLTDEMIAQYTSALLAGTITSGWTFGAGAALQIPFAMQMAYRFNGIGVTQNVLYENQKLIANQFNSAIGKIQDSLSSTASALGKLQDVVNQNAQALNTLVKQLSSNFGAISSVLNDILSRLDPPEAEVQIDRLITGRLQSLQTYVTQQLIRAAEIRASANLAATKMSECVLGQSKRVDFCGKGYHLMSFPQSAPHGVVFLHVTYVPAQEKNFTTAPAICHDGKAHFPREGVFVSNGTHWFVTQRNFYEPQIITTDNTFVSGNCDVVIGIVNNTVYDPLQPELDSFKEELDKYFKNHTSPDVDLGDISGINASVVNIQKEIDRLNEVAKNLNESLIDLQELGKYEQYIKGSGRENLYFQGGGGSGYIPEAPRDGQAYVRKDGEWVLLSTFLGHHHHHHHH

SEQ ID NO: 5321 - protein, 1281 aa, Artificial Sequence
  Description of Artificial Sequence: Synthetic polypeptide
MGILPSPGMPALLSLVSLLSVLLMGCVAETGTQCVNLTTRTQLPPAYTNSFTRGVYYPDKVFRSSVLHSTQDLFLPFFSNVTWFHAIHVSGTNGTKRFDNPVLPFNDGVYFASTEKSNIIRGWIFGTTLDSKTQSLLIVNNATNVVIKVCEFQFCNDPFLGVYYHKNNKSWMESEFRVYSSANNCTFEYVSQPFLMDLEGKQGNFKNLREFVFKNIDGYFKIYSKHTPINLVRDLPQGFSALEPLVDLPIGINITRFQTLLALHRSYLTPGDSSSGWTAGAAAYYVGYLQPRTFLLKYNENGTITDAVDCALDPLSETKCTLKSFTVEKGIYQTSNFRVQPTESIVRFPNITNLCPFGEVFNATRFASVYAWNRKRISNCVADYSVLYNSATFSTFKCYGVSPTKLNDLCFTNVYADSFVIRGDEVRQIAPGQTGKIADYNYKLPDDFTGCVIAWNSNNLDSKVGGNYNYLYRLFRKSNLKPFERDISTEIYQAGSTPCNGVEGFNCYFPLQSYGFQPTNGVGYQPYRVVVLSFELLHAPATVCGPKKSTNLVKNKCVNFNFNGLTGTGVLTESNKKFLPFQQFGRDIADTTDAVRDPQTLEILDITPCSFGGVSVITPGTNTSNQVAVLYQDVNCTEVPVAIHADQLTPTWRVYSTGSNVFQTRAGCLIGAEHVNNSYECDIPIGAGICASYQTQTNSPSGAGSVASQSIIAYTMSLGAENSVAYSNNSIAIPTNFTISVTTEILPVSMTKTSVDCTMYICGDSTECSNLLLQYGSFCTQLNRALTGIAVEQDKNTQEVFAQVKQIYKTPPIKDFGGFNFSQILPDPSKPSKRSFIEDLLFNKVTLADAGFIKQYGDCLGDIAARDLICAQKFNGLTVLPPLLTDEMIAQYTSALLAGTITSGWTFGAGAALQIPFAMQMAYRFNGIGVTQNVLYENQKLIANQFNSAIGKIQDSLSSTASALGKLQDVVNQNAQALNTLVKQLSSNFGAISSVLNDILSRLDPPEAEVQIDRLITGRLQSLQTYVTQQLIRAAEIRASANLAATKMSECVLGQSKRVDFCGKGYHLMSFPQSAPHGVVFLHVTYVPAQEKNFTTAPAICHDGKAHFPREGVFVSNGTHWFVTQRNFYEPQIITTDNTFVSGNCDVVIGIVNNTVYDPLQPELDSFKEELDKYFKNHTSPDVDLGDISGINASVVNIQKEIDRLNEVAKNLNESLIDLQELGKYEQYIKGSGRENLYFQGGGGSGYIPEAPRDGQAYVRKDGEWVLLSTFLGHHHHHHHH

SEQ ID NO: 5322 - protein, 1281 aa, Artificial Sequence
  Description of Artificial Sequence: Synthetic polypeptide
MGILPSPGMPALLSLVSLLSVLLMGCVAETGTQCVNLTTRTQLPPAYTNSFTRGVYYPDKVFRSSVLHSTQDLFLPFFSNVTWFHAIHVSGTNGTKRFDNPVLPFNDGVYFASTEKSNIIRGWIFGTTLDSKTQSLLIVNNATNVVIKVCEFQFCNDPFLGVYYHKNNKSWMESEFRVYSSANNCTFEYVSQPFLMDLEGKQGNFKNLREFVFKNIDGYFKIYSKHTPINLVRDLPQGFSALEPLVDLPIGINITRFQTLLALHRSYLTPGDSSSGWTAGAAAYYVGYLQPRTFLLKYNENGTITDAVDCALDPLSETKCTLKSFTVEKGIYQTSNFRVQPTESIVRFPNITNLCPFGEVFNATRFASVYAWNRKRISNCVADYSVLYNSASFSTFKCYGVSPTKLNDLCFTNVYADSFVIRGDEVRQIAPGQTGKIADYNYKLPDDFTGCVIAWNSNNLDSKVGGNYNYLYRLFRKSNLKPFERDISTEIYQAGSTPCNGVEGFNCYFPLQSYGFQPTNGVGYQPYRVVVLSFELLHAPATVCGPKKSTNLVKNKCVNFNFNGLTGTGVLTESNKKFLPFQQFGRDIADTTDAVRDPQTLEILDITPCSFGGVSVITPGTNTSNQVAVLYQDVNCTEVPVAIHADQLTPTWRVYSTGSNVFQTRAGCLIGAEHVNNSYECDIPIGAGICASYQTQTNSPSGAGSVASQSIIAYTMSLGAENSVAYSNNSIAIPTNFTISVTTEILPVSMTKTSVDCTMYICGDSTECSNLLLQYGSFCTQLNRALTGIAVEQDKNTQEVFAQVKQIYKTPPIKDFGGFNFSQILPDPSKPSKRSFIEDLLFNKVTLADAGFIKQYGDCLGDIAARDLICAQKFNGLTVLPPLLTDEMIAQYTSALLAGTITSGWTFGAGAALQIPFAMQMAYRFNGIGVTQNVLYENQKLIANQFNSAIGKIQDSLSSTASALGKLQDVVNQNAQALNTLVAQLSSNFGAISSVLNDILSRLDPPEAEVQIDRLITGRLQSLQTYVTQQLIRAAEIRASANLAATKMSECVLGQSKRVDFCGKGYHLMSFPQSAPHGVVFLHVTYVPAQEKNFTTAPAICHDGKAHFPREGVFVSNGTHWFVTQRNFYEPQIITTDNTFVSGNCDVVIGIVNNTVYDPLQPELDSFKEELDKYFKNHTSPDVDLGDISGINASVVNIQKEIDRLNEVAKNLNESLIDLQELGKYEQYIKGSGRENLYFQGGGGSGYIPEAPRDGQAYVRKDGEWVLLSTFLGHHHHHHHH

SEQ ID NO: 5323 - protein, 1281 aa, Artificial Sequence
  Description of Artificial Sequence: Synthetic polypeptide
MGILPSPGMPALLSLVSLLSVLLMGCVAETGTQCVNLTTRTQLPPAYTNSFTRGVYYPDKVFRSSVLHSTQDLFLPFFSNVTWFHAIHVSGTNGTKRFDNPVLPFNDGVYFASTEKSNIIRGWIFGTTLDSKTQSLLIVNNATNVVIKVCEFQFCNDPFLGVYYHKNNKSWMESEFRVYSSANNCTFEYVSQPFLMDLEGKQGNFKNLREFVFKNIDGYFKIYSKHTPINLVRDLPQGFSALEPLVDLPIGINITRFQTLLALHRSYLTPGDSSSGWTAGAAAYYVGYLQPRTFLLKYNENGTITDAVDCALDPLSETKCTLKSFTVEKGIYQTSNFRVQPTESIVRFPNITNLCPFGEVFNATRFASVYAWNRKRISNCVADYSVLYNSASFSTFKCYGVSPTKLNDLCFTNVYADSFVIRGDEVRQIAPGQTGKIADYNYKLPDDFTGCVIAWNSNNLDSKCGGNYNYLYRLFRKSNLKPFERDISTEIYQAGSTPCNGVEGFNCYFPLQSYGFQPTNGVGYQPYRVVVLSFELLHAPATVCGPKKSTNLVKNKCVNFNFNGLTGTGVLTESNKKFLPFQQFGRDIADTTDAVRDPQTLEILDITPCSFGGVSVITPGTNTSNQVAVLYQDVNCTEVPVAIHADQLTPTWRVYSTGSNVFQTRAGCLIGAEHVNNSYECDIPIGAGICASYQTQTNSPSGAGSVASQSIIAYTMSLGAENSVAYSNNSIAIPTNFTISVTTEILPVSMTKTSVDCTMYICGDSTECSNLLLQYGSFCTQLNRALTGIAVEQDKNTQEVFAQVKQIYKTPPIKDFGGFNFSQILPDPSKPSKRSFIEDLLFNKVTLADAGFIKQYGDCLGDIAARDLICAQKFNGLTVLPPLLTDEMIAQYTSALLAGTITSGWTFGAGAALQIPFAMQMAYRFNGIGVTQNVLYENQKLIANQFNSAIGKIQDSLSSTASALGKLQDVVNQNAQALNTLVKQLSSNFGAISSVLNDILSRLDPPEAEVQIDRLITGRLQSLQTYVTQQLIRAAEIRASANLAATKMSECVLGQSKRVDFCGKGYHLMSFPQSAPHGVVFLHVTYVPAQEKNFTTAPAICHDGKAHFPREGVFVSNGTHWFVTQRNFYEPQIITTDNTFVSGNCDVVIGIVNNTVYDPLQPELDSFKEELDKYFKNHTSPDVDLGDISGINASVVNIQKEIDRLNEVAKNLNESLIDLQELGKYEQYIKGSGRENLYFQGGGGSGYIPEAPRDGQAYVRKDGEWVLLSTFLGHHHHHHHH

SEQ ID NO: 5324 - protein, 1281 aa, Artificial Sequence
  Description of Artificial Sequence: Synthetic polypeptide
MGILPSPGMPALLSLVSLLSVLLMGCVAETGTQCVNLTTRTQLPPAYTNSFTRGVYYPDKVFRSSVLHSTQDLFLPFFSNVTWFHAIHVSGTNGTKRFDNPVLPFNDGVYFASTEKSNIIRGWIFGTTLDSKTQSLLIVNNATNVVIKVCEFQFCNDPFLGVYYHKNNKSWMESEFRVYSSANNCTFEYVSQPFLMDLEGKQGNFKNLREFVFKNIDGYFKIYSKHTPINLVRDLPQGFSALEPLVDLPIGINITRFQTLLALHRSYLTPGDSSSGWTAGAAAYYVGYLQPRTFLLKYNENGTITDAVDCALDPLSETKCTLKSFTVEKGIYQTSNFRVQPTESIVRFPNITNLCPFGEVFNATRFASVYAWNRKRISNCVADYSVLYNSASFSTFKCYGVSPTKLNDLCFTNVYADSFVIRGDEVRQIAPGQTGKIADYNYKLPDDFTGCVIAWNSNNLDSKVGGNYNYLYRLFRKSNLKPFERDISTEIYQAGSTPCNGVEGFNCYFPLQSYGFQPTNGVGYQPYRVVVLSFELLHAPHTVCGPKKSTNLVKNKCVNFNFNGLTGTGVLTESNKKFLPFQQFGRDIADTTDAVRDPQTLEILDITPCSFGGVSVITPGTNTSNQVAVLYQDVNCTEVPVAIHADQLTPTWRVYSTGSNVFQTRAGCLIGAEHVNNSYECDIPIGAGICASYQTQTNSPSGAGSVASQSIIAYTMSLGAENSVAYSNNSIAIPTNFTISVTTEILPVSMTKTSVDCTMYICGDSTECSNLLLQYGSFCTQLNRALTGIAVEQDKNTQEVFAQVKQIYKTPPIKDFGGFNFSQILPDPSKPSKRSFIEDLLFNKVTLADAGFIKQYGDCLGDIAARDLICAQKFNGLTVLPPLLTDEMIAQYTSALLAGTITSGWTFGAGAALQIPFAMQMAYRFNGIGVTQNVLYENQKLIANQFNSAIGKIQDSLSSTASALGKLQDVVNQNAQALNTLVKQLSSNFGAISSVLNDILSRLDPPEAEVQIDRLITGRLQSLQTYVTQQLIRAAEIRASANLAATKMSECVLGQSKRVDFCGKGYHLMSFPQSAPHGVVFLHVTYVPAQEKNFTTAPAICHDGKAHFPREGVFVSNGTHWFVTQRNFYEPQIITTDNTFVSGNCDVVIGIVNNTVYDPLQPELDSFKEELDKYFKNHTSPDVDLGDISGINASVVNIQKEIDRLNEVAKNLNESLIDLQELGKYEQYIKGSGRENLYFQGGGGSGYIPEAPRDGQAYVRKDGEWVLLSTFLGHHHHHHHH

SEQ ID NO: 5325 - protein, 1281 aa, Artificial Sequence
  Description of Artificial Sequence: Synthetic polypeptide
MGILPSPGMPALLSLVSLLSVLLMGCVAETGTQCVNLTTRTQLPPAYTNSFTRGVYYPDKVFRSSVLHSTQDLFLPFFSNVTWFHAIHVSGTNGTKRFDNPVLPFNDGVYFASTEKSNIIRGWIFGTTLDSKTQSLLIVNNATNVVIKVCEFQFCNDPFLGVYYHKNNKSWMESEFRVYSSANNCTFEYVSQPFLMDLEGKQGNFKNLREFVFKNIDGYFKIYSKHTPINLVRDLPQGFSALEPLVDLPIGINITRFQTLLALHRSYLTPGDSSSGWTAGAAAYYVGYLQPRTFLLKYNENGTITDAVDCALDPLSETKCTLKSFTVEKGIYQTSNFRVQPTESIVRFPNITNLCPFGEVFNATRFASVYAWNRKRISNCVADYSVLYNSASFSTFKCYGVSPTKLNDLCFTNVYADSFVIRGDEVRQIAPGQTGKIADYNYKLPDDFTGCVIAWNSNNLDSKVGGNYNYLYRLFRKSNLKPFERDILTEIYQAGSTPCNGVEGFNCYFPLQSYGFQPTNGVGYQPYRVVVLSFELLHAPATVCGPKKSTNLVKNKCVNFNFNGLTGTGVLTESNKKFLPFQQFGRDIADTTDAVRDPQTLEILDITPCSFGGVSVITPGTNTSNQVAVLYQDVNCTEVPVAIHADQLTPTWRVYSTGSNVFQTRAGCLIGAEHVNNSYECDIPIGAGICASYQTQTNSPSGAGSVASQSIIAYTMSLGAENSVAYSNNSIAIPTNFTISVTTEILPVSMTKTSVDCTMYICGDSTECSNLLLQYGSFCTQLNRALTGIAVEQDKNTQEVFAQVKQIYKTPPIKDFGGFNFSQILPDPSKPSKRSFIEDLLFNKVTLADAGFIKQYGDCLGDIAARDLICAQKFNGLTVLPPLLTDEMIAQYTSALLAGTITSGWTFGAGAALQIPFAMQMAYRFNGIGVTQNVLYENQKLIANQFNSAIGKIQDSLSSTASALGKLQDVVNQNAQALNTLVKQLSSNFGAISSVLNDILSRLDPPEAEVQIDRLITGRLQSLQTYVTQQLIRAAEIRASANLAATKMSECVLGQSKRVDFCGKGYHLMSFPQSAPHGVVFLHVTYVPAQEKNFTTAPAICHDGKAHFPREGVFVSNGTHWFVTQRNFYEPQIITTDNTFVSGNCDVVIGIVNNTVYDPLQPELDSFKEELDKYFKNHTSPDVDLGDISGINASVVNIQKEIDRLNEVAKNLNESLIDLQELGKYEQYIKGSGRENLYFQGGGGSGYIPEAPRDGQAYVRKDGEWVLLSTFLGHHHHHHHH

SEQ ID NO: 5326 - protein, 1281 aa, Artificial Sequence
  Description of Artificial Sequence: Synthetic polypeptide
MGILPSPGMPALLSLVSLLSVLLMGCVAETGTQCVNLTTRTQLPPAYTNSFTRGVYYPDKVFRSSVLHSTQDLFLPFFSNVTWFHAIHVSGTNGTKRFDNPVLPFNDGVYFASTEKSNIIRGWIFGTTLDSKTQSLLIVNNATNVVIKVCEFQFCNDPFLGVYYHKNNKSWMESEFRVYSSANNCTFEYVSQPFLMDLEGKQGNFKNLREFVFKNIDGYFKIYSKHTPINLVRDLPQGFSALEPLVDLPIGINITRFQTLLALHRSYLTPGDSSSGWTAGAAAYYVGYLQPRTFLLKYNENGTITDAVDCALDPLSETKCTLKSFTVEKGIYQTSNFRVQPTESIVRFPNITNLCPFGEVFNATRFASVYAWNRKRISNCVADYSVLYNSASFCTFKCYGVSPTKLNDLCFTNVYADSFVIRGDEVRQIAPGQTGKIADYNYKLPDDFTGCVIAWNSNNLDSKVGGNYNYLYRLFRKSNLKPFERDISTEIYQAGSTPCNGVEGFNCYFPLQSYGFQPTNGVGYQPYRVVVLSFELLHAPATVCGPKKSTNLVKNKCVNFNFNGLTGTGVLTESNKKFLPFQQFGRDIADTTDAVRDPQTLEILDITPCSFGGVSVITPGTNTSNQVAVLYQDVNCTEVPVAIHADQLTPTWRVYSTGSNVFQTRAGCLIGAEHVNNSYECDIPIGAGICASYQTQTNSPSGAGSVASQSIIAYTMSLGAENSVAYSNNSIAIPTNFTISVTTEILPVSMTKTSVDCTMYICGDSTECSNLLLQYGSFCTQLNRALTGIAVEQDKNTQEVFAQVKQIYKTPPIKDFGGFNFSQILPDPSKPSKRSFIEDLLFNKVTLADAGFIKQYGDCLGDIAARDLICAQKFNGLTVLPPLLTDEMIAQYTSALLAGTITSGWTFGAGAALQIPFAMQMAYRFNGIGVTQNVLYENQKLIANQFNSAIGKIQDSLSSTASALGKLQDVVNQNAQALNTLVKQLSSNFGAISSVLNDILSRLDPPEAEVQIDRLITGRLQSLQTYVTQQLIRAAEIRASANLAATKMSECVLGQSKRVDFCGKGYHLMSFPQSAPHGVVFLHVTYVPAQEKNFTTAPAICHDGKAHFPREGVFVSNGTHWFVTQRNFYEPQIITTDNTFVSGNCDVVIGIVNNTVYDPLQPELDSFKEELDKYFKNHTSPDVDLGDISGINASVVNIQKEIDRLNEVAKNLNESLIDLQELGKYEQYIKGSGRENLYFQGGGGSGYIPEAPRDGQAYVRKDGEWVLLSTFLGHHHHHHHH

SEQ ID NO: 5327 - protein, 1281 aa, Artificial Sequence
  Description of Artificial Sequence: Synthetic polypeptide
MGILPSPGMPALLSLVSLLSVLLMGCVAETGTQCVNLTTRTQLPPAYTNSFTRGVYYPDKVFRSSVLHSTQDLFLPFFSNVTWFHAIHVSGTNGTKRFDNPVLPFNDGVYFASTEKSNIIRGWIFGTTLDSKTQSLLIVNNATNVVIKVCEFQFCNDPFLGVYYHKNNKSWMESEFRVYSSANNCTFEYVSQPFLMDLEGKQGNFKNLREFVFKNIDGYFKIYSKHTPINLVRDLPQGFSALEPLVDLPIGINITRFQTLLALHRSYLTPGDSSSGWTAGAAAYYVGYLQPRTFLLKYNENGTITDAVDCALDPLSETKCTLKSFTVEKGIYQTSNFRVQPTESIVRFPNITNLCPFGEVFNATRFASVYAWNRKRISGCVADYSVLYNSASFSTFKCYGVSPTKLNDLCFTNVYADSFVIRGDEVRQIAPGQTGKIADYNYKLPDDFTGCVIAWNSNNLDSKVGGNYNYLYRLFRKSNLKPFERDISTEIYQAGSTPCNGVEGFNCYFPLQSYGFQPTNGVGYQPYRVVVLSFELLHAPATVCGPKKSTNLVKNKCVNFNFNGLTGTGVLTESNKKFLPFQQFGRDIADTTDAVRDPQTLEILDITPCSFGGVSVITPGTNTSNQVAVLYQDVNCTEVPVAIHADQLTPTWRVYSTGSNVFQTRAGCLIGAEHVNNSYECDIPIGAGICASYQTQTNSPSGAGSVASQSIIAYTMSLGAENSVAYSNNSIAIPTNFTISVTTEILPVSMTKTSVDCTMYICGDSTECSNLLLQYGSFCTQLNRALTGIAVEQDKNTQEVFAQVKQIYKTPPIKDFGGFNFSQILPDPSKPSKRSFIEDLLFNKVTLADAGFIKQYGDCLGDIAARDLICAQKFNGLTVLPPLLTDEMIAQYTSALLAGTITSGWTFGAGAALQIPFAMQMAYRFNGIGVTQNVLYENQKLIANQFNSAIGKIQDSLSSTASALGKLQDVVNQNAQALNTLVKQLSSNFGAISSVLNDILSRLDPPEAEVQIDRLITGRLQSLQTYVTQQLIRAAEIRASANLAATKMSECVLGQSKRVDFCGKGYHLMSFPQSAPHGVVFLHVTYVPAQEKNFTTAPAICHDGKAHFPREGVFVSNGTHWFVTQRNFYEPQIITTDNTFVSGNCDVVIGIVNNTVYDPLQPELDSFKEELDKYFKNHTSPDVDLGDISGINASVVNIQKEIDRLNEVAKNLNESLIDLQELGKYEQYIKGSGRENLYFQGGGGSGYIPEAPRDGQAYVRKDGEWVLLSTFLGHHHHHHHH

SEQ ID NO: 5328 - protein, 1281 aa, Artificial Sequence
  Description of Artificial Sequence: Synthetic polypeptide
MGILPSPGMPALLSLVSLLSVLLMGCVAETGTQCVNLTTRTQLPPAYTNSFTRGVYYPDKVFRSSVLHSTQDLFLPFFSNVTWFHAIHVSGTNGTKRFDNPVLPFNDGVYFASTEKSNIIRGWIFGTTLDSKTQSLLIVNNATNVVIKVCEFQFCNDPFLGVYYHKNNKSWMESEFRVYSSANNCTFEYVSQPFLMDLEGKQGNFKNLREFVFKNIDGYFKIYSKHTPINLVRDLPQGFSALEPLVDLPIGINITRFQTLLALHRSYLTPGDSSSGWTAGAAAYYVGYLQPRTFLLKYNENGTITDAVDCALDPLSETKCTLKSFTVEKGIYQTSNFQVQPTESIVRFPNITNLCPFGEVFNATRFASVYAWNRKRISNCVADYSVLYNSASFSTFKCYGVSPTKLNDLCFTNVYADSFVIRGDEVRQIAPGQTGKIADYNYKLPDDFTGCVIAWNSNNLDSKVGGNYNYLYRLFRKSNLKPFERDISTEIYQAGSTPCNGVEGFNCYFPLQSYGFQPTNGVGYQPYRVVVLSFELLHAPATVCGPKKSTNLVKNKCVNFNFNGLTGTGVLTESNKKFLPFQQFGRDIADTTDAVRDPQTLEILDITPCSFGGVSVITPGTNTSNQVAVLYQDVNCTEVPVAIHADQLTPTWRVYSTGSNVFQTRAGCLIGAEHVNNSYECDIPIGAGICASYQTQTNSPSGAGSVASQSIIAYTMSLGAENSVAYSNNSIAIPTNFTISVTTEILPVSMTKTSVDCTMYICGDSTECSNLLLQYGSFCTQLNRALTGIAVEQDKNTQEVFAQVKQIYKTPPIKDFGGFNFSQILPDPSKPSKRSFIEDLLFNKVTLADAGFIKQYGDCLGDIAARDLICAQKFNGLTVLPPLLTDEMIAQYTSALLAGTITSGWTFGAGAALQIPFAMQMAYRFNGIGVTQNVLYENQKLIANQFNSAIGKIQDSLSSTASALGKLQDVVNQNAQALNTLVKQLSSNFGAISSVLNDILSRLDPPEAEVQIDRLITGRLQSLQTYVTQQLIRAAEIRASANLAATKMSECVLGQSKRVDFCGKGYHLMSFPQSAPHGVVFLHVTYVPAQEKNFTTAPAICHDGKAHFPREGVFVSNGTHWFVTQRNFYEPQIITTDNTFVSGNCDVVIGIVNNTVYDPLQPELDSFKEELDKYFKNHTSPDVDLGDISGINASVVNIQKEIDRLNEVAKNLNESLIDLQELGKYEQYIKGSGRENLYFQGGGGSGYIPEAPRDGQAYVRKDGEWVLLSTFLGHHHHHHHH

SEQ ID NO: 5329 - protein, 1281 aa, Artificial Sequence
  Description of Artificial Sequence: Synthetic polypeptide
MGILPSPGMPALLSLVSLLSVLLMGCVAETGTQCVNLTTRTQLPPAYTNSFTRGVYYPDKVFRSSVLHSTQDLFLPFFSNVTWFHAIHVSGTNGTKRFDNPVLPFNDGVYFASTEKSNIIRGWIFGTTLDSKTQSLLIVNNATNVVIKVCEFQFCNDPFLGVYYHKNNKSWMESEFRVYSSANNCTFEYVSQPFLMDLEGKQGNFKNLREFVFKNIDGYFKIYSKHTPINLVRDLPQGFSALEPLVDLPIGINITRFQTLLALHRSYLTPGDSSSGWTAGAAAYYVGYLQPRTFLLKYNENGTITDAVDCALDPLSETKCTLKSFTVEKGIYQTSNFRVQPTESIVRFPNITNLCPFGEVFNATRFASVYAWNRKRISNCVADYSVLYNSASFSTFKCYGVSPTKLNDLCFTNVYADSFVIRGDEVRQIAPGQTGKIADYNYKLPDDFTGCVIAWNSNNLDSKVGGNYNYLYRLFRKSNLKPFERDISTEIYQAGSTPCNGVEGFNCYFPLQSYGFQPTNGVGYQPYRVVVLSFELLHAPATVCGPKKSTNLVKNKCVNFNFNGLTGTGVLTESNKKFLPFQQFGRDIADTTDAVRDPQTLEILDITPCSFGGVSVITPGTNTSNQVAVLYQDVNCTEVPVAIHADQLTPTWRVYSTGSNVFQTRAGCLIGAEHVNNSYECDIPIGAGICASYQTQTNSPSGAGSVASQSIIAYTMSLGAENMVAYSNNSIAIPTNFTISVTTEILPVSMTKTSVDCTMYICGDSTECSNLLLQYGSFCTQLNRALTGIAVEQDKNTQEVFAQVKQIYKTPPIKDFGGFNFSQILPDPSKPSKRSFIEDLLFNKVTLADAGFIKQYGDCLGDIAARDLICAQKFNGLTVLPPLLTDEMIAQYTSALLAGTITSGWTFGAGAALQIPFAMQMAYRFNGIGVTQNVLYENQKLIANQFNSAIGKIQDSLSSTASALGKLQDVVNQNAQALNTLVKQLSSNFGAISSVLNDILSRLDPPEAEVQIDRLITGRLQSLQTYVTQQLIRAAEIRASANLAATKMSECVLGQSKRVDFCGKGYHLMSFPQSAPHGVVFLHVTYVPAQEKNFTTAPAICHDGKAHFPREGVFVSNGTHWFVTQRNFYEPQIITTDNTFVSGNCDVVIGIVNNTVYDPLQPELDSFKEELDKYFKNHTSPDVDLGDISGINASVVNIQKEIDRLNEVAKNLNESLIDLQELGKYEQYIKGSGRENLYFQGGGGSGYIPEAPRDGQAYVRKDGEWVLLSTFLGHHHHHHHH

SEQ ID NO: 5330 - protein, 1281 aa, Artificial Sequence
  Description of Artificial Sequence: Synthetic polypeptide
MGILPSPGMPALLSLVSLLSVLLMGCVAETGTQCVNLTTRTQLPPAYTNSFTRGVYYPDKVFRSSVLHSTQDLFLPFFSNVTWFHAIHVSGTNGTKRFDNPVLPFNDGVYFASTEKSNIIRGWIFGTTLDSKTQSLLIVNNATNVVIKVCEFQFCNDPFLGVYYHKNNKSWMESEFRVYSSANNCTFEYVSQPFLMDLEGKQGNFKNLREFVFKNIDGYFKIYSKHTPINLVRDLPQGFSALEPLVDLPIGINITRFQTLLALHRSYLTPGDSSSGWTAGAAAYYVGYLQPRTFLLKYNENGTITDAVDCALDPLSETKCTLKSFTVEKGIYQTSNFRVQPTESIVRFPNITNLCPFGEVFNATRFASVYAWNRKRISNCVADYSVLYNSASFSTFKCYGVSPTKLNDLCFTNVYADSFVIRGDEVRQIAPGQTGKIADYNYKLPDDFTGCVIAWNSNDLDSKVGGNYNYLYRLFRKSNLKPFERDISTEIYQAGSTPCNGVEGFNCYFPLQSYGFQPTNGVGYQPYRVVVLSFELLHAPATVCGPKKSTNLVKNKCVNFNFNGLTGTGVLTESNKKFLPFQQFGRDIADTTDAVRDPQTLEILDITPCSFGGVSVITPGTNTSNQVAVLYQDVNCTEVPVAIHADQLTPTWRVYSTGSNVFQTRAGCLIGAEHVNNSYECDIPIGAGICASYQTQTNSPSGAGSVASQSIIAYTMSLGAENSVAYSNNSIAIPTNFTISVTTEILPVSMTKTSVDCTMYICGDSTECSNLLLQYGSFCTQLNRALTGIAVEQDKNTQEVFAQVKQIYKTPPIKDFGGFNFSQILPDPSKPSKRSFIEDLLFNKVTLADAGFIKQYGDCLGDIAARDLICAQKFNGLTVLPPLLTDEMIAQYTSALLAGTITSGWTFGAGAALQIPFAMQMAYRFNGIGVTQNVLYENQKLIANQFNSAIGKIQDSLSSTASALGKLQDVVNQNAQALNTLVKQLSSNFGAISSVLNDILSRLDPPEAEVQIDRLITGRLQSLQTYVTQQLIRAAEIRASANLAATKMSECVLGQSKRVDFCGKGYHLMSFPQSAPHGVVFLHVTYVPAQEKNFTTAPAICHDGKAHFPREGVFVSNGTHWFVTQRNFYEPQIITTDNTFVSGNCDVVIGIVNNTVYDPLQPELDSFKEELDKYFKNHTSPDVDLGDISGINASVVNIQKEIDRLNEVAKNLNESLIDLQELGKYEQYIKGSGRENLYFQGGGGSGYIPEAPRDGQAYVRKDGEWVLLSTFLGHHHHHHHH

SEQ ID NO: 5331 - protein, 1281 aa, Artificial Sequence
  Description of Artificial Sequence: Synthetic polypeptide
MGILPSPGMPALLSLVSLLSVLLMGCVAETGTQCVNLTTRTQLPPAYTNSFTRGVYYPDKVFRSSVLHSTQDLFLPFFSNVTWFHAIHVSGTNGTKRFDNPVLPFNDGVYFASTEKSNIIRGWIFGTTLDSKTQSLLIVNNATNVVIKVCEFQFCNDPFLGVYYHKNNKSWMESEFRVYSSANNCTFEYVSQPFLMDLEGKQGNFKNLREFVFKNIDGYFKIYSKHTPINLVRDLPQGFSALEPLVDLPIGINITRFQTLLALHRSYLTPGDSSSGWTAGAAAYYVGYLQPRTFLLKYNENGTITDAVDCALDPLSETKCTLKSFTVEKGIYQTSNFRVQPTESIVRFPNITNLCPFGEVFNATRFASVYAWNRKRISNCVADYSVLYNSASFSTFKCYGVSPTKLNDLCFTNVYADSFVIRGDEVRQIAPGQTGKIADYNYKLPDDFTGCVIAWNSNNLDSKVGGNYNYLYRLFRKSNLKPFERDISTEIYQAGSTPCNGVEGFNCYFPLQSYGFQPTNGVGYQPYRVVVLSFELLHAPATVCGPKKSTNLVKNKCVNFNFNGLTGTGVLTESNKKFLPFQQFGRDIADTTDAVRDPQTLEILDITPCSFGGVSVITPGTNTSNQVAVLYQDVNCTEVPVAIHADQLTPTWRVYSTGSNVFQTRAGCLIGAEHVNNSYECDIPIGAGICASYQTQTNSPSGAGSVASQSIIAYTMSLGAVNSVAYSNNSIAIPTNFTISVTTEILPVSMTKTSVDCTMYICGDSTECSNLLLQYGSFCTQLNRALTGIAVEQDKNTQEVFAQVKQIYKTPPIKDFGGFNFSQILPDPSKPSKRSFIEDLLFNKVTLADAGFIKQYGDCLGDIAARDLICAQKFNGLTVLPPLLTDEMIAQYTSALLAGTITSGWTFGAGAALQIPFAMQMAYRFNGIGVTQNVLYENQKLIANQFNSAIGKIQDSLSSTASALGKLQDVVNQNAQALNTLVKQLSSNFGAISSVLNDILSRLDPPEAEVQIDRLITGRLQSLQTYVTQQLIRAAEIRASANLAATKMSECVLGQSKRVDFCGKGYHLMSFPQSAPHGVVFLHVTYVPAQEKNFTTAPAICHDGKAHFPREGVFVSNGTHWFVTQRNFYEPQIITTDNTFVSGNCDVVIGIVNNTVYDPLQPELDSFKEELDKYFKNHTSPDVDLGDISGINASVVNIQKEIDRLNEVAKNLNESLIDLQELGKYEQYIKGSGRENLYFQGGGGSGYIPEAPRDGQAYVRKDGEWVLLSTFLGHHHHHHHH

SEQ ID NO: 5332 - protein, 1281 aa, Artificial Sequence
  Description of Artificial Sequence: Synthetic polypeptide
MGILPSPGMPALLSLVSLLSVLLMGCVAETGTQCVNLTTRTQLPPAYTNSFTRGVYYPDKVFRSSVLHSTQDLFLPFFSNVTWFHAIHVSGTNGTKRFDNPVLPFNDGVYFASTEKSNIIRGWIFGTTLDSKTQSLLIVNNATNVVIKVCEFQFCNDPFLGVYYHKNNKSWMESEFRVYSSANNCTFEYVSQPFLMDLEGKQGNFKNLREFVFKNIDGYFKIYSKHTPINLVRDLPQGFSALEPLVDLPIGINITRFQTLLALHRSYLTPGDSSSGWTAGAAAYYVGYLQPRTFLLKYNENGTITDAVDCALDPLSETKCTLKSFTVEKGIYQTSNFRVQPTESIVRFPNITNLCPFGEVFNATRFASVYAWNRKRISNCVADYSVLYNSASFSTFKCYGVSPTKLNDLCFTNVYADSFVIRGDEVRQIAPGQTGKIADYNYKLPDDFTGCVIAWNSNNLDSKVGGNYNYLYRLFRKSNLKPFERDISTEIYQAGSTPCNGVEGFNCYFPLQSYGFQPTNGVGYQPYRVVVLSFELLHAPCTVCGPKKSTNLVKNKCVNFNFNGLTGTGVLTESNKKFLPFQQFGRDIADTTDAVRDPQTLEILDITPCSFGGVSVITPGTNTSNQVAVLYQDVNCTEVPVAIHADQLTPTWRVYSTGSNVFQTRAGCLIGAEHVNNSYECDIPIGAGICASYQTQTNSPSGAGSVASQSIIAYTMSLGAENSVAYSNNSIAIPTNFTISVTTEILPVSMTKTSVDCTMYICGDSTECSNLLLQYGSFCTQLNRALTGIAVEQDKNTQEVFAQVKQIYKTPPIKDFGGFNFSQILPDPSKPSKRSFIEDLLFNKVTLADAGFIKQYGDCLGDIAARDLICAQKFNGLTVLPPLLTDEMIAQYTSALLAGTITSGWTFGAGAALQIPFAMQMAYRFNGIGVTQNVLYENQKLIANQFNSAIGKIQDSLSSTASALGKLQDVVNQNAQALNTLVKQLSSNFGAISSVLNDILSRLDPPEAEVQIDRLITGRLQSLQTYVTQQLIRAAEIRASANLAATKMSECVLGQSKRVDFCGKGYHLMSFPQSAPHGVVFLHVTYVPAQEKNFTTAPAICHDGKAHFPREGVFVSNGTHWFVTQRNFYEPQIITTDNTFVSGNCDVVIGIVNNTVYDPLQPELDSFKEELDKYFKNHTSPDVDLGDISGINASVVNIQKEIDRLNEVAKNLNESLIDLQELGKYEQYIKGSGRENLYFQGGGGSGYIPEAPRDGQAYVRKDGEWVLLSTFLGHHHHHHHH

SEQ ID NO: 5333 - protein, 1281 aa, Artificial Sequence
  Description of Artificial Sequence: Synthetic polypeptide
MGILPSPGMPALLSLVSLLSVLLMGCVAETGTQCVNLTTRTQLPPAYTNSFTRGVYYPDKVFRSSVLHSTQDLFLPFFSNVTWFHAIHVSGTNGTKRFDNPVLPFNDGVYFASTEKSNIIRGWIFGTTLDSKTQSLLIVNNATNVVIKVCEFQFCNDPFLGVYYHKNNKSWMESEFRVYSSANNCTFEYVSQPFLMDLEGKQGNFKNLREFVFKNIDGYFKIYSKHTPINLVRDLPQGFSALEPLVDLPIGINITRFQTLLALHRSYLTPGDSSSGWTAGAAAYYVGYLQPRTFLLKYNENGTITDAVDCALDPLSETKCTLKSFTVEKGIYQTSNFRVQPTESIVRFPNITNLCPFGEVFNATRFASVYAWNRKRISNCVADYSVLYNSASFSTFKCYGVSPTKLNDLCFTNVYADSFVIRGDEVRQIAPGQTGKIADYNYKLPDDFTGCVIAWNSNNLDSKVGGNYNYLYRLFRKSNLKPFERDISTEIYQAGSTPCNGVEGFNCYFPLQSYGFQPTNGVGYQPYRVVVLSFELLHAPATVCGPKKSTNLVKNKCVNFNFNGLTGTGVLTESNKKFLPFQQFGRDIADTTDAVRDPQTLEILDITPCSFGGVSVITPGTNTSNQVAVLYQDVNCTEVPVAIHADQLTPTWRVYSTGSNVFQTRAGCLIGAEHVNNSYECDIPIGAGICASYQTQTNSPSGAGSVASQSIIAYTMSLGAENSVAYSNNSIAIPTNFTISVTTEILPVSMTKTSVDCTMYICGDSTECSNLLLQYGSFCTQLNRALTGIAVEQDKNTQEVFAQVKQIYKTPPIKDFGGFNFSQILPDPSKPSKRSFIEDLLFNKVTLADAGFIKQYGDCLGDIAARDLICAQKFNGLTVLPPLLTDEMIAQYTSALLAGTITSGWTFGAGAALQIPFAMQMAYRFNGIGVTQNVLYENQKLIANQFNSAIGKIQDSLSSTASALGKLQDVVNQNAQALNTLVKQLSSNFGAISSVLNDILSRLDPPEAEVQIDRLITGRLQSLQTYVTQQLIRAAEIRASANLAATKMSECVLGQSKRVDFCGKGYHLMSFPQSAPHGVVFLHVTYVPAQDKNFTTAPAICHDGKAHFPREGVFVSNGTHWFVTQRNFYEPQIITTDNTFVSGNCDVVIGIVNNTVYDPLQPELDSFKEELDKYFKNHTSPDVDLGDISGINASVVNIQKEIDRLNEVAKNLNESLIDLQELGKYEQYIKGSGRENLYFQGGGGSGYIPEAPRDGQAYVRKDGEWVLLSTFLGHHHHHHHH

SEQ ID NO: 5334 - protein, 1281 aa, Artificial Sequence
  Description of Artificial Sequence: Synthetic polypeptide
MGILPSPGMPALLSLVSLLSVLLMGCVAETGTQCVNLTTRTQLPPAYTNSFTRGVYYPDKVFRSSVLHSTQDLFLPFFSNVTWFHAIHVSGTNGTKRFDNPVLPFNDGVYFASTEKSNIIRGWIFGTTLDSKTQSLLIVNNATNVVIKVCEFQFCNDPFLGVYYHKNNKSWMESEFRVYSSANNCTFEYVSQPFLMDLEGKQGNFKNLREFVFKNIDGYFKIYSKHTPINLVRDLPQGFSALEPLVDLPIGINITRFQTLLALHRSYLTPGDSSSGWTAGAAAYYVGYLQPRTFLLKYNENGTITDAVDCALDPLSETKCTLKSFTVEKGIYQTSNFRVQPTESIVRFPNITNLCPFGEVFNATRFASVYAWNRKRISNCVADYSVLYNSASFSTFKCYGVSPTKLNDLCFTNVYADSFVIRGDEVRQIAPGQTGKIADYNYKLPDDFTGCVIAWNSNNLDSKVGGNYNYLYRLFRKSNLKPFERDISTEIYQAGSTPCNGVEGFNCYFPLQSYGFQPTNGVGYQPYRVVVLSFELLHAPATVCGPKKSTNLVKNKCVNFNFNGLTGTGVLTESNKKFLPFQQFGRDIADTTDAVRDPQTLEILDITPCSFGGVSVITPGTNTSNQVAVLYQDVNCTEVPVAIHADQLTPTWRVYSTGSNVFQTRAGCLIGAEHVNNSYECDIPIGAGICASYQTQTNSPSGAGSVASQSIIAYTMSLGAENSVAYSNNSIAIPTNFTISVTTEILPVSMTKTSVDCTMYICGDSTECSNLLLQYGSFCTQLNRALTGIAVEQDKNTQEVFAQVKQIYKTPPIKDFGGFNFSQILPDPSKPSKRSFIEDLLFNKVTLADAGFIKQYGDCLGDIAARDLICAQKFNGLTVLPPLLTDEMIAQYTSALLAGTITSGWTFGYGAALQIPFAMQMAYRFNGIGVTQNVLYENQKLIANQFNSAIGKIQDSLSSTASALGKLQDVVNQNAQALNTLVKQLSSNFGAISSVLNDILSRLDPPEAEVQIDRLITGRLQSLQTYVTQQLIRAAEIRASANLAATKMSECVLGQSKRVDFCGKGYHLMSFPQSAPHGVVFLHVTYVPAQEKNFTTAPAICHDGKAHFPREGVFVSNGTHWFVTQRNFYEPQIITTDNTFVSGNCDVVIGIVNNTVYDPLQPELDSFKEELDKYFKNHTSPDVDLGDISGINASVVNIQKEIDRLNEVAKNLNESLIDLQELGKYEQYIKGSGRENLYFQGGGGSGYIPEAPRDGQAYVRKDGEWVLLSTFLGHHHHHHHH

SEQ ID NO: 5335 - protein, 1281 aa, Artificial Sequence
  Description of Artificial Sequence: Synthetic polypeptide
MGILPSPGMPALLSLVSLLSVLLMGCVAETGTQCVNLTTRTQLPPAYTNSFTRGVYYPDKVFRSSVLHSTQDLFLPFFSNVTWFHAIHVSGTNGTKRFDNPVLPFNDGVYFASTEKSNIIRGWIFGTTLDSKTQSLLIVNNATNVVIKVCEFQFCNDPFLGVYYHKNNKSWMESEFRVYSSANNCTFEYVSQPFLMDLEGKQGNFKNLREFVFKNIDGYFKIYSKHTPINLVRDLPQGFSALEPLVDLPIGINITRFQTLLALHRSYLTPGDSSSGWTAGAAAYYVGYLQPRTFLLKYNENGTITDAVDCALDPLSETKCTLKSFTVEKGIYQTSNFRVQPTESIVRFPNITNLCPFGEVFNATRFASVYAWNRKRISNCVADYSVLYNSASFSTFKCYGVSPTKLNDLCFTNVYADSFVIRGDEVRQIAPGQTGKIADYNYKLPDDFTGCVIAWNSNNLDSKVGGNYNYLYRLFRKSNLKPFERDISTEIYQAGSTPCNGVEGFNCYFPLQSYGFQPTNGVGYQPYRVVVLSFELLHAPATVCGPKKSTNLVKNKCVNFNFNGLTGTGVLTESNKKFLPFQQFGRDIADTTDAVRDPQTLEILDITPCSFGGVSVITPGTNTSNQVAVLYQDVNCTEVPVAIHADQLTPTWRVYSTGSNVFQTRAGCLIGAEHVNNSYECDIPIGAGICASYQTQTNSPSGAGSVASQSIIAYTQSLGAENSVAYSNNSIAIPTNFTISVTTEILPVSMTKTSVDCTMYICGDSTECSNLLLQYGSFCTQLNRALTGIAVEQDKNTQEVFAQVKQIYKTPPIKDFGGFNFSQILPDPSKPSKRSFIEDLLFNKVTLADAGFIKQYGDCLGDIAARDLICAQKFNGLTVLPPLLTDEMIAQYTSALLAGTITSGWTFGAGAALQIPFAMQMAYRFNGIGVTQNVLYENQKLIANQFNSAIGKIQDSLSSTASALGKLQDVVNQNAQALNTLVKQLSSNFGAISSVLNDILSRLDPPEAEVQIDRLITGRLQSLQTYVTQQLIRAAEIRASANLAATKMSECVLGQSKRVDFCGKGYHLMSFPQSAPHGVVFLHVTYVPAQEKNFTTAPAICHDGKAHFPREGVFVSNGTHWFVTQRNFYEPQIITTDNTFVSGNCDVVIGIVNNTVYDPLQPELDSFKEELDKYFKNHTSPDVDLGDISGINASVVNIQKEIDRLNEVAKNLNESLIDLQELGKYEQYIKGSGRENLYFQGGGGSGYIPEAPRDGQAYVRKDGEWVLLSTFLGHHHHHHHH

SEQ ID NO: 5336 - protein, 1281 aa, Artificial Sequence
  Description of Artificial Sequence: Synthetic polypeptide
MGILPSPGMPALLSLVSLLSVLLMGCVAETGTQCVNLTTRTQLPPAYTNSFTRGVYYPDKVFRSSVLHSTQDLFLPFFSNVTWFHAIHVSGTNGTKRFDNPVLPFNDGVYFASTEKSNIIRGWIFGTTLDSKTQSLLIVNNATNVVIKVCEFQFCNDPFLGVYYHKNNKSWMESEFRVYSSANNCTFEYVSQPFLMDLEGKQGNFKNLREFVFKNIDGYFKIYSKHTPINLVRDLPQGFSALEPLVDLPIGINITRFQTLLALHRSYLTPGDSSSGWTAGAAAYYVGYLQPRTFLLKYNENGTITDAVDCALDPLSETKCTLKSFTVEKGIYQTSNFRVQPTESIVRFPNITNLCPFGEVFNATRFASVYAWNRKRISNCVADYSVLYNSPSFSTFKCYGVSPTKLNDLCFTNVYADSFVIRGDEVRQIAPGQTGKIADYNYKLPDDFTGCVIAWNSNNLDSKVGGNYNYLYRLFRKSNLKPFERDISTEIYQAGSTPCNGVEGFNCYFPLQSYGFQPTNGVGYQPYRVVVLSFELLHAPATVCGPKKSTNLVKNKCVNFNFNGLTGTGVLTESNKKFLPFQQFGRDIADTTDAVRDPQTLEILDITPCSFGGVSVITPGTNTSNQVAVLYQDVNCTEVPVAIHADQLTPTWRVYSTGSNVFQTRAGCLIGAEHVNNSYECDIPIGAGICASYQTQTNSPSGAGSVASQSIIAYTMSLGAENSVAYSNNSIAIPTNFTISVTTEILPVSMTKTSVDCTMYICGDSTECSNLLLQYGSFCTQLNRALTGIAVEQDKNTQEVFAQVKQIYKTPPIKDFGGFNFSQILPDPSKPSKRSFIEDLLFNKVTLADAGFIKQYGDCLGDIAARDLICAQKFNGLTVLPPLLTDEMIAQYTSALLAGTITSGWTFGAGAALQIPFAMQMAYRFNGIGVTQNVLYENQKLIANQFNSAIGKIQDSLSSTASALGKLQDVVNQNAQALNTLVKQLSSNFGAISSVLNDILSRLDPPEAEVQIDRLITGRLQSLQTYVTQQLIRAAEIRASANLAATKMSECVLGQSKRVDFCGKGYHLMSFPQSAPHGVVFLHVTYVPAQEKNFTTAPAICHDGKAHFPREGVFVSNGTHWFVTQRNFYEPQIITTDNTFVSGNCDVVIGIVNNTVYDPLQPELDSFKEELDKYFKNHTSPDVDLGDISGINASVVNIQKEIDRLNEVAKNLNESLIDLQELGKYEQYIKGSGRENLYFQGGGGSGYIPEAPRDGQAYVRKDGEWVLLSTFLGHHHHHHHH

SEQ ID NO: 5337 - protein, 1281 aa, Artificial Sequence
  Description of Artificial Sequence: Synthetic polypeptide
MGILPSPGMPALLSLVSLLSVLLMGCVAETGTQCVNLTTRTQLPPAYTNSFTRGVYYPDKVFRSSVLHSTQDLFLPFFSNVTWFHAIHVSGTNGTKRFDNPVLPFNDGVYFASTEKSNIIRGWIFGTTLDSKTQSLLIVNNATNVVIKVCEFQFCNDPFLGVYYHKNNKSWMESEFRVYSSANNCTFEYVSQPFLMDLEGKQGNFKNLREFVFKNIDGYFKIYSKHTPINLVRDLPQGFSALEPLVDLPIGINITRFQTLLALHRSYLTPGDSSSGWTAGAAAYYVGYLQPRTFLLKYNENGTITDAVDCALDPLSETKCTLKSFTVEKGIYQTSNFRVQPTESIVRFPNITNLCPFGEVFNATRFASVYAWNRKRISNCVADYSVLYNSASFSTFKCYGVSPTKLNDLCFTNVYADSFVIRGDEVRQIAPGQTGKIADYNYKLPDDFTGCVIAWNSNNLDSKVGGNYNYLYRLFRKSNLKPFERDISTEIYQAGSTPCNGVEGFNCYFPLQSYGFQPTNGVGYQPYRVVVLSFELLFAPATVCGPKKSTNLVKNKCVNFNFNGLTGTGVLTESNKKFLPFQQFGRDIADTTDAVRDPQTLEILDITPCSFGGVSVITPGTNTSNQVAVLYQDVNCTEVPVAIHADQLTPTWRVYSTGSNVFQTRAGCLIGAEHVNNSYECDIPIGAGICASYQTQTNSPSGAGSVASQSIIAYTMSLGAENSVAYSNNSIAIPTNFTISVTTEILPVSMTKTSVDCTMYICGDSTECSNLLLQYGSFCTQLNRALTGIAVEQDKNTQEVFAQVKQIYKTPPIKDFGGFNFSQILPDPSKPSKRSFIEDLLFNKVTLADAGFIKQYGDCLGDIAARDLICAQKFNGLTVLPPLLTDEMIAQYTSALLAGTITSGWTFGAGAALQIPFAMQMAYRFNGIGVTQNVLYENQKLIANQFNSAIGKIQDSLSSTASALGKLQDVVNQNAQALNTLVKQLSSNFGAISSVLNDILSRLDPPEAEVQIDRLITGRLQSLQTYVTQQLIRAAEIRASANLAATKMSECVLGQSKRVDFCGKGYHLMSFPQSAPHGVVFLHVTYVPAQEKNFTTAPAICHDGKAHFPREGVFVSNGTHWFVTQRNFYEPQIITTDNTFVSGNCDVVIGIVNNTVYDPLQPELDSFKEELDKYFKNHTSPDVDLGDISGINASVVNIQKEIDRLNEVAKNLNESLIDLQELGKYEQYIKGSGRENLYFQGGGGSGYIPEAPRDGQAYVRKDGEWVLLSTFLGHHHHHHHH

SEQ ID NO: 5338 - protein, 1281 aa, Artificial Sequence
  Description of Artificial Sequence: Synthetic polypeptide
MGILPSPGMPALLSLVSLLSVLLMGCVAETGTQCVNLTTRTQLPPAYTNSFTRGVYYPDKVFRSSVLHSTQDLFLPFFSNVTWFHAIHVSGTNGTKRFDNPVLPFNDGVYFASTEKSNIIRGWIFGTTLDSKTQSLLIVNNATNVVIKVCEFQFCNDPFLGVYYHKNNKSWMESEFRVYSSANNCTFEYVSQPFLMDLEGKQGNFKNLREFVFKNIDGYFKIYSKHTPINLVRDLPQGFSALEPLVDLPIGINITRFQTLLALHRSYLTPGDSSSGWTAGAAAYYVGYLQPRTFLLKYNENGTITDAVDCALDPLSETKCTLKSFTVEKGIYQTSNFRVQPTESIVRFPNITNLCPFGEVFNATRFASVYAWNRKRISNCVADYSVLYNSASFSTFKCYGVSPTKLNDLCFTNVYADSFVIRGDEVRQIAPGQTGKIADYNYKLPDDFTGCVIAWNSNNLDSKVGGNYNYLYRLFRKSNLKPFERDISTEIYQAGSTPCNGVEGFNCYFPLQSYGFQPTNGVGYQPYRVVVLSFELLHAPATVCGPKKSTNLVKNKCVNFNFNGLTGTGVLTESNKKFLPFQQFGRDIADTTDAVRDPQTLEILDITPCSFGGVSVITPGTNTSNQVAVLYQDVNCTEVPVAIHADQLTPTWRVYSTGSNVFQTRAGCLIGAEHVNNSYECDIPIGAGICASYQTQTNSPSGAGSVASQSIIAYTMSLGAENSVAYSNNHIAIPTNFTISVTTEILPVSMTKTSVDCTMYICGDSTECSNLLLQYGSFCTQLNRALTGIAVEQDKNTQEVFAQVKQIYKTPPIKDFGGFNFSQILPDPSKPSKRSFIEDLLFNKVTLADAGFIKQYGDCLGDIAARDLICAQKFNGLTVLPPLLTDEMIAQYTSALLAGTITSGWTFGAGAALQIPFAMQMAYRFNGIGVTQNVLYENQKLIANQFNSAIGKIQDSLSSTASALGKLQDVVNQNAQALNTLVKQLSSNFGAISSVLNDILSRLDPPEAEVQIDRLITGRLQSLQTYVTQQLIRAAEIRASANLAATKMSECVLGQSKRVDFCGKGYHLMSFPQSAPHGVVFLHVTYVPAQEKNFTTAPAICHDGKAHFPREGVFVSNGTHWFVTQRNFYEPQIITTDNTFVSGNCDVVIGIVNNTVYDPLQPELDSFKEELDKYFKNHTSPDVDLGDISGINASVVNIQKEIDRLNEVAKNLNESLIDLQELGKYEQYIKGSGRENLYFQGGGGSGYIPEAPRDGQAYVRKDGEWVLLSTFLGHHHHHHHH

SEQ ID NO: 5339 - protein, 1281 aa, Artificial Sequence
  Description of Artificial Sequence: Synthetic polypeptide
MGILPSPGMPALLSLVSLLSVLLMGCVAETGTQCVNLTTRTQLPPAYTNSFTRGVYYPDKVFRSSVLHSTQDLFLPFFSNVTWFHAIHVSGTNGTKRFDNPVLPFNDGVYFASTEKSNIIRGWIFGTTLDSKTQSLLIVNNATNVVIKVCEFQFCNDPFLGVYYHKNNKSWMESEFRVYSSANNCTFEYVSQPFLMDLEGKQGNFKNLREFVFKNIDGYFKIYSKHTPINLVRDLPQGFSALEPLVDLPIGINITRFQTLLALHRSYLTPGDSSSGWTAGAAAYYVGYLQPRTFLLKYNENGTITDAVDCALDPLSETKCTLKSFTVEKGIYQTSNFRVQPTESIVRFPNITNLCPFGEVFNATRFASVYAWNRKRISNCVADYSVLYNSASFSTFKCYGVSPTKLNDLCFTNVYADSFVIRGDEVRQIAPGQTGKIADYNYKLPDDFTGCVIAWNSNNLDSKVGGNYNYLYRLFRKSNLKPFERDISTEIYQAGSTPCNGVEGFNCYFPLQSYGFQPTNGVGYQPYRVVVLSFELLHAPATVCGPKKSTNLVKNKCVNFNFNGLTGTGVLTESNKKFLPFQQFGRDIADTTDAVRDPQTLEILDITPCSFGGVSVITPGTNTSNQVAVLYQDVNCTEVPVAIHADQLTPTWRVYSTGSNVFQTRAGCLIGAEHVNNSYECDIPIGAGICASYQTQTNSPSGAGSVASQSIIAYTMSLGAENSVAYSNNSIAIPTNFTISVTTEILPVSMTKTSVDCTMYICGDSTECSNLLLQYGSFCTQLNRALTGIAVEQDKNTQEVFAQVKQIYKTPPIKDFGGFNFSQILPDPSKPSKRSFIEDLLFNKVTLADAGFIKQYGDCLGDIAARDLICAQKFNGLTVLPPLLTDEMIAQYTSALLAGTITSGWTFGAGAALQIPFAMQMAYRFNGIGVTQNVLYENQKLIANQFNSAIGKIQDSLSSTASALGKLQDVVNQNAQALNTLVKQLSSNFGAISSVLNNILSRLDPPEAEVQIDRLITGRLQSLQTYVTQQLIRAAEIRASANLAATKMSECVLGQSKRVDFCGKGYHLMSFPQSAPHGVVFLHVTYVPAQEKNFTTAPAICHDGKAHFPREGVFVSNGTHWFVTQRNFYEPQIITTDNTFVSGNCDVVIGIVNNTVYDPLQPELDSFKEELDKYFKNHTSPDVDLGDISGINASVVNIQKEIDRLNEVAKNLNESLIDLQELGKYEQYIKGSGRENLYFQGGGGSGYIPEAPRDGQAYVRKDGEWVLLSTFLGHHHHHHHH

SEQ ID NO: 5340 - protein, 1281 aa, Artificial Sequence
  Description of Artificial Sequence: Synthetic polypeptide
MGILPSPGMPALLSLVSLLSVLLMGCVAETGTQCVNLTTRTQLPPAYTNSFTRGVYYPDKVFRSSVLHSTQDLFLPFFSNVTWFHAIHVSGTNGTKRFDNPVLPFNDGVYFASTEKSNIIRGWIFGTTLDSKTQSLLIVNNATNVVIKVCEFQFCNDPFLGVYYHKNNKSWMESEFRVYSSANNCTFEYVSQPFLMDLEGKQGNFKNLREFVFKNIDGYFKIYSKHTPINLVRDLPQGFSALEPLVDLPIGINITRFQTLLALHRSYLTPGDSSSGWTAGAAAYYVGYLQPRTFLLKYNETGTITDAVDCALDPLSETKCTLKSFTVEKGIYQTSNFRVQPTESIVRFPNITNLCPFGEVFNATRFASVYAWNRKRISNCVADYSVLYNSASFSTFKCYGVSPTKLNDLCFTNVYADSFVIRGDEVRQIAPGQTGKIADYNYKLPDDFTGCVIAWNSNNLDSKVGGNYNYLYRLFRKSNLKPFERDISTEIYQAGSTPCNGVEGFNCYFPLQSYGFQPTNGVGYQPYRVVVLSFELLHAPATVCGPKKSTNLVKNKCVNFNFNGLTGTGVLTESNKKFLPFQQFGRDIADTTDAVRDPQTLEILDITPCSFGGVSVITPGTNTSNQVAVLYQDVNCTEVPVAIHADQLTPTWRVYSTGSNVFQTRAGCLIGAEHVNNSYECDIPIGAGICASYQTQTNSPSGAGSVASQSIIAYTMSLGAENSVAYSNNSIAIPTNFTISVTTEILPVSMTKTSVDCTMYICGDSTECSNLLLQYGSFCTQLNRALTGIAVEQDKNTQEVFAQVKQIYKTPPIKDFGGFNFSQILPDPSKPSKRSFIEDLLFNKVTLADAGFIKQYGDCLGDIAARDLICAQKFNGLTVLPPLLTDEMIAQYTSALLAGTITSGWTFGAGAALQIPFAMQMAYRFNGIGVTQNVLYENQKLIANQFNSAIGKIQDSLSSTASALGKLQDVVNQNAQALNTLVKQLSSNFGAISSVLNDILSRLDPPEAEVQIDRLITGRLQSLQTYVTQQLIRAAEIRASANLAATKMSECVLGQSKRVDFCGKGYHLMSFPQSAPHGVVFLHVTYVPAQEKNFTTAPAICHDGKAHFPREGVFVSNGTHWFVTQRNFYEPQIITTDNTFVSGNCDVVIGIVNNTVYDPLQPELDSFKEELDKYFKNHTSPDVDLGDISGINASVVNIQKEIDRLNEVAKNLNESLIDLQELGKYEQYIKGSGRENLYFQGGGGSGYIPEAPRDGQAYVRKDGEWVLLSTFLGHHHHHHHH

SEQ ID NO: 5341 - protein, 1281 aa, Artificial Sequence
  Description of Artificial Sequence: Synthetic polypeptide
MGILPSPGMPALLSLVSLLSVLLMGCVAETGTQCVNLTTRTQLPPAYTNSFTRGVYYPDKVFRSSVLHSTQDLFLPFFSNVTWFHAIHVSGTNGTKRFDNPVLPFNDGVYFASTEKSNIIRGWIFGTTLDSKTQSLLIVNNATNVVIKVCEFQFCNDPFLGVYYHKNNKSWMESEFRVYSSANNCTFEYVSQPFLMDLEGKQGNFKNLREFVFKNIDGYFKIYSKHTPINLVRDLPQGFSALEPLVDLPIGINITRFQTLLALHRSYLTPGDSSSGWTAGAAAYYVGYLQPRTFLLKYNENGTITDAVDCALDPLSETKCTLKSFTVEKGIYQTSNFRVQPTESIVRFPNITNLCPFGEVFNATRFASVYAWNRKRISNCVADYSVLYASASFSTFKCYGVSPTKLNDLCFTNVYADSFVIRGDEVRQIAPGQTGKIADYNYKLPDDFTGCVIAWNSNNLDSKVGGNYNYLYRLFRKSNLKPFERDISTEIYQAGSTPCNGVEGFNCYFPLQSYGFQPTNGVGYQPYRVVVLSFELLHAPATVCGPKKSTNLVKNKCVNFNFNGLTGTGVLTESNKKFLPFQQFGRDIADTTDAVRDPQTLEILDITPCSFGGVSVITPGTNTSNQVAVLYQDVNCTEVPVAIHADQLTPTWRVYSTGSNVFQTRAGCLIGAEHVNNSYECDIPIGAGICASYQTQTNSPSGAGSVASQSIIAYTMSLGAENSVAYSNNSIAIPTNFTISVTTEILPVSMTKTSVDCTMYICGDSTECSNLLLQYGSFCTQLNRALTGIAVEQDKNTQEVFAQVKQIYKTPPIKDFGGFNFSQILPDPSKPSKRSFIEDLLFNKVTLADAGFIKQYGDCLGDIAARDLICAQKFNGLTVLPPLLTDEMIAQYTSALLAGTITSGWTFGAGAALQIPFAMQMAYRFNGIGVTQNVLYENQKLIANQFNSAIGKIQDSLSSTASALGKLQDVVNQNAQALNTLVKQLSSNFGAISSVLNDILSRLDPPEAEVQIDRLITGRLQSLQTYVTQQLIRAAEIRASANLAATKMSECVLGQSKRVDFCGKGYHLMSFPQSAPHGVVFLHVTYVPAQEKNFTTAPAICHDGKAHFPREGVFVSNGTHWFVTQRNFYEPQIITTDNTFVSGNCDVVIGIVNNTVYDPLQPELDSFKEELDKYFKNHTSPDVDLGDISGINASVVNIQKEIDRLNEVAKNLNESLIDLQELGKYEQYIKGSGRENLYFQGGGGSGYIPEAPRDGQAYVRKDGEWVLLSTFLGHHHHHHHH

SEQ ID NO: 5342 - protein, 1281 aa, Artificial Sequence
  Description of Artificial Sequence: Synthetic polypeptide
MGILPSPGMPALLSLVSLLSVLLMGCVAETGTQCVNLTTRTQLPPAYTNSFTRGVYYPDKVFRSSVLHSTQDLFLPFFSNVTWFHAIHVSGTNGTKRFDNPVLPFNDGVYFASTEKSNIIRGWIFGTTLDSKTQSLLIVNNATNVVIKVCEFQFCNDPFLGVYYHKNNKSWMESEFRVYSSANNCTFEYVSQPFLMDLEGKQGNFKNLREFVFKNIDGYFKIYSKHTPINLVRDLPQGFSALEPLVDLPIGINITRFQTLLALHRSYLTPGDSSSGWTAGAAAYYVGYLQPRTFLLKYNENGTITDAVDCALDPLSETKCTLKSFTVEKGIYQTSNFRVQPTESIVRFPNITNLCPFGEVFNATRFASVYAWNRKRISNCVADYSVLYESASFSTFKCYGVSPTKLNDLCFTNVYADSFVIRGDEVRQIAPGQTGKIADYNYKLPDDFTGCVIAWNSNNLDSKVGGNYNYLYRLFRKSNLKPFERDISTEIYQAGSTPCNGVEGFNCYFPLQSYGFQPTNGVGYQPYRVVVLSFELLHAPATVCGPKKSTNLVKNKCVNFNFNGLTGTGVLTESNKKFLPFQQFGRDIADTTDAVRDPQTLEILDITPCSFGGVSVITPGTNTSNQVAVLYQDVNCTEVPVAIHADQLTPTWRVYSTGSNVFQTRAGCLIGAEHVNNSYECDIPIGAGICASYQTQTNSPSGAGSVASQSIIAYTMSLGAENSVAYSNNSIAIPTNFTISVTTEILPVSMTKTSVDCTMYICGDSTECSNLLLQYGSFCTQLNRALTGIAVEQDKNTQEVFAQVKQIYKTPPIKDFGGFNFSQILPDPSKPSKRSFIEDLLFNKVTLADAGFIKQYGDCLGDIAARDLICAQKFNGLTVLPPLLTDEMIAQYTSALLAGTITSGWTFGAGAALQIPFAMQMAYRFNGIGVTQNVLYENQKLIANQFNSAIGKIQDSLSSTASALGKLQDVVNQNAQALNTLVKQLSSNFGAISSVLNDILSRLDPPEAEVQIDRLITGRLQSLQTYVTQQLIRAAEIRASANLAATKMSECVLGQSKRVDFCGKGYHLMSFPQSAPHGVVFLHVTYVPAQEKNFTTAPAICHDGKAHFPREGVFVSNGTHWFVTQRNFYEPQIITTDNTFVSGNCDVVIGIVNNTVYDPLQPELDSFKEELDKYFKNHTSPDVDLGDISGINASVVNIQKEIDRLNEVAKNLNESLIDLQELGKYEQYIKGSGRENLYFQGGGGSGYIPEAPRDGQAYVRKDGEWVLLSTFLGHHHHHHHH

SEQ ID NO: 5343 - protein, 1281 aa, Artificial Sequence
  Description of Artificial Sequence: Synthetic polypeptide
MGILPSPGMPALLSLVSLLSVLLMGCVAETGTQCVNLTTRTQLPPAYTNSFTRGVYYPDKVFRSSVLHSTQDLFLPFFSNVTWFHAIHVSGTNGTKRFDNPVLPFNDGVYFASTEKSNIIRGWIFGTTLDSKTQSLLIVNNATNVVIKVCEFQFCNDPFLGVYYHKNNKSWMESEFRVYSSANNCTFEYVSQPFLMDLEGKQGNFKNLREFVFKNIDGYFKIYSKHTPINLVRDLPQGFSALEPLVDLPIGINITRFQTLLALHRSYLTPGDSSSGWTAGAAAYYVGYLQPRTFLLKYNENGTITDAVDCALDPLSETKCTLKSFTVEKGIYQTSNFRVQPTESIVRFPNITNLCPFGEVFNATRFASVYAWNRKRISNCVADYSVLYNSASFSTFKCYGVSPTKLNDLCFTNVYADSFVIRGDEVRQIAPGQTGKIADYNYKLPDDFTGCVIAWNSNNLDSKVGGNYNYLYRLFRKSNLKPFERDISTEIYQAGSTPCNGVEGFNCYFPLQSYGFQPTNGVGYQPYRVVVLSFELLHAPATVCGPKKSTNLVKNKCVNFNFNGLTGTGVLTESNKKFLPFQQFGRDIADTTDAVRDPQTLEILDITPCSFGGVSVITPGTNTSNQVAVLYQDVNCTEVPVAIHADQLTPTWRVYSTGSNVFQTRAGCLIGAEHVNNSYECDIPIGAGICASYQTQTNSPSGAGSVASQSIIAYTMSLGAENSVAYSNNSIAIPTNFTISVTTEILPVSMTKTSVDCTMYICGDSTECSNLLLQYGSFCTQLNRALTGIAVEQDKNTQEVFAQVKQIYKTPPIKDFGGFNFSQILPDPSKPSKRSFIEDLLFNKVTLADAGFIKQYGDCLGDIAARDLICAQKFNGLTVLPPLLTDEMIAQYTSALLAGTITSGWTFGAGAALQIPFAMQMAYRFNGIGVTQNVLYENQKLIANQFNSAIGKIQDSLSSTASALGKLQDVVNQNAQALNTLVKQLSSNFGAISSVLNDILSRLDPPEAEVQIDRLITGRLQSLQTYVTQQLIRAAEIRASANLAATKMSECVLGQSKRVDFCGKGFHLMSFPQSAPHGVVFLHVTYVPAQEKNFTTAPAICHDGKAHFPREGVFVSNGTHWFVTQRNFYEPQIITTDNTFVSGNCDVVIGIVNNTVYDPLQPELDSFKEELDKYFKNHTSPDVDLGDISGINASVVNIQKEIDRLNEVAKNLNESLIDLQELGKYEQYIKGSGRENLYFQGGGGSGYIPEAPRDGQAYVRKDGEWVLLSTFLGHHHHHHHH

SEQ ID NO: 5344 - protein, 1281 aa, Artificial Sequence
  Description of Artificial Sequence: Synthetic polypeptide
MGILPSPGMPALLSLVSLLSVLLMGCVAETGTQCVNLTTRTQLPPAYTNSFTRGVYYPDKVFRSSVLHSTQDLFLPFFSNVTWFHAIHVSGTNGTKRFDNPVLPFNDGVYFASTEKSNIIRGWIFGTTLDSKTQSLLIVNNATNVVIKVCEFQFCNDPFLGVYYHKNNKSWMESEFRVYSSANNCTFEYVSQPFLMDLEGKQGNFKNLREFVFKNIDGYFKIYSKHTPINLVRDLPQGFSALEPLVDLPIGINITRFQTLLALHRSYLTPGDSSSGWTAGAAAYYVGYLQPRTFLLKYNENGTITDAVDCALDPLSETKCTLKSFTVEKGIYQTSNFRVQPTESIVRFPNITNLCPFGEVFNATRFASVYAWNRKRISNCVADYSVLYNSASFSTFKCYGVSPTKLNDLCFTNVYADSFVIRGDEVRQIAPGQTGKIADYNYKLPDDFTGCVIAWNSNNLDSKVGGNYNYLYRLFRKSNLKPFERDISEEIYQAGSTPCNGVEGFNCYFPLQSYGFQPTNGVGYQPYRVVVLSFELLHAPATVCGPKKSTNLVKNKCVNFNFNGLTGTGVLTESNKKFLPFQQFGRDIADTTDAVRDPQTLEILDITPCSFGGVSVITPGTNTSNQVAVLYQDVNCTEVPVAIHADQLTPTWRVYSTGSNVFQTRAGCLIGAEHVNNSYECDIPIGAGICASYQTQTNSPSGAGSVASQSIIAYTMSLGAENSVAYSNNSIAIPTNFTISVTTEILPVSMTKTSVDCTMYICGDSTECSNLLLQYGSFCTQLNRALTGIAVEQDKNTQEVFAQVKQIYKTPPIKDFGGFNFSQILPDPSKPSKRSFIEDLLFNKVTLADAGFIKQYGDCLGDIAARDLICAQKFNGLTVLPPLLTDEMIAQYTSALLAGTITSGWTFGAGAALQIPFAMQMAYRFNGIGVTQNVLYENQKLIANQFNSAIGKIQDSLSSTASALGKLQDVVNQNAQALNTLVKQLSSNFGAISSVLNDILSRLDPPEAEVQIDRLITGRLQSLQTYVTQQLIRAAEIRASANLAATKMSECVLGQSKRVDFCGKGYHLMSFPQSAPHGVVFLHVTYVPAQEKNFTTAPAICHDGKAHFPREGVFVSNGTHWFVTQRNFYEPQIITTDNTFVSGNCDVVIGIVNNTVYDPLQPELDSFKEELDKYFKNHTSPDVDLGDISGINASVVNIQKEIDRLNEVAKNLNESLIDLQELGKYEQYIKGSGRENLYFQGGGGSGYIPEAPRDGQAYVRKDGEWVLLSTFLGHHHHHHHH

SEQ ID NO: 5345 - protein, 1281 aa, Artificial Sequence
  Description of Artificial Sequence: Synthetic polypeptide
MGILPSPGMPALLSLVSLLSVLLMGCVAETGTQCVNLTTRTQLPPAYTNSFTRGVYYPDKVFRSSVLHSTQDLFLPFFSNVTWFHAIHVSGTNGTKRFDNPVLPFNDGVYFASTEKSNIIRGWIFGTTLDSKTQSLLIVNNATNVVIKVCEFQFCNDPFLGVYYHKNNKSWMESEFRVYSSANNCTFEYVSQPFLMDLEGKQGNFKNLREFVFKNIDGYFKIYSKHTPINLVRDLPQGFSALEPLVDLPIGINITRFQTLLALHRSYLTPGDSSSGWTAGAAAYYVGYLQPRTFLLKYNENGTITDAVDCALDPLSETKCTLKSFTVEKGIYQTSNFRVQPTESIVRFPNITNLCPFGEVFNATRFASVYAWNRKRISNCVADYSVLYNSASFSTFKCYGVSPTKLNDLCFTNVYADSFVIRGDEVRQIAPGQTGKIADYNYTLPDDFTGCVIAWNSNNLDSKVGGNYNYLYRLFRKSNLKPFERDISTEIYQAGSTPCNGVEGFNCYFPLQSYGFQPTNGVGYQPYRVVVLSFELLHAPATVCGPKKSTNLVKNKCVNFNFNGLTGTGVLTESNKKFLPFQQFGRDIADTTDAVRDPQTLEILDITPCSFGGVSVITPGTNTSNQVAVLYQDVNCTEVPVAIHADQLTPTWRVYSTGSNVFQTRAGCLIGAEHVNNSYECDIPIGAGICASYQTQTNSPSGAGSVASQSIIAYTMSLGAENSVAYSNNSIAIPTNFTISVTTEILPVSMTKTSVDCTMYICGDSTECSNLLLQYGSFCTQLNRALTGIAVEQDKNTQEVFAQVKQIYKTPPIKDFGGFNFSQILPDPSKPSKRSFIEDLLFNKVTLADAGFIKQYGDCLGDIAARDLICAQKFNGLTVLPPLLTDEMIAQYTSALLAGTITSGWTFGAGAALQIPFAMQMAYRFNGIGVTQNVLYENQKLIANQFNSAIGKIQDSLSSTASALGKLQDVVNQNAQALNTLVKQLSSNFGAISSVLNDILSRLDPPEAEVQIDRLITGRLQSLQTYVTQQLIRAAEIRASANLAATKMSECVLGQSKRVDFCGKGYHLMSFPQSAPHGVVFLHVTYVPAQEKNFTTAPAICHDGKAHFPREGVFVSNGTHWFVTQRNFYEPQIITTDNTFVSGNCDVVIGIVNNTVYDPLQPELDSFKEELDKYFKNHTSPDVDLGDISGINASVVNIQKEIDRLNEVAKNLNESLIDLQELGKYEQYIKGSGRENLYFQGGGGSGYIPEAPRDGQAYVRKDGEWVLLSTFLGHHHHHHHH

SEQ ID NO: 5346 - protein, 1281 aa, Artificial Sequence
  Description of Artificial Sequence: Synthetic polypeptide
MGILPSPGMPALLSLVSLLSVLLMGCVAETGTQCVNLTTRTQLPPAYTNSFTRGVYYPDKVFRSSVLHSTQDLFLPFFSNVTWFHAIHVSGTNGTKRFDNPVLPFNDGVYFASTEKSNIIRGWIFGTTLDSKTQSLLIVNNATNVVIKVCEFQFCNDPFLGVYYHKNNKSWMESEFRVYSSANNCTFEYVSQPFLMDLEGKQGNFKNLREFVFKNIDGYFKIYSKHTPINLVRDLPQGFSALEPLVDLPIGINITRFQTLLALHRSYLTPGDSSSGWTAGAAAYYVGYLQPRTFLLKYNENGTITDAVDCALDPLSETKCTLKSFTVEKGIYQTSNFRVQPTESIVRFPNITNLCPFGEVFNATRFASVYDWNRKRISNCVADYSVLYNSASFSTFKCYGVSPTKLNDLCFTNVYADSFVIRGDEVRQIAPGQTGKIADYNYKLPDDFTGCVIAWNSNNLDSKVGGNYNYLYRLFRKSNLKPFERDISTEIYQAGSTPCNGVEGFNCYFPLQSYGFQPTNGVGYQPYRVVVLSFELLHAPATVCGPKKSTNLVKNKCVNFNFNGLTGTGVLTESNKKFLPFQQFGRDIADTTDAVRDPQTLEILDITPCSFGGVSVITPGTNTSNQVAVLYQDVNCTEVPVAIHADQLTPTWRVYSTGSNVFQTRAGCLIGAEHVNNSYECDIPIGAGICASYQTQTNSPSGAGSVASQSIIAYTMSLGAENSVAYSNNSIAIPTNFTISVTTEILPVSMTKTSVDCTMYICGDSTECSNLLLQYGSFCTQLNRALTGIAVEQDKNTQEVFAQVKQIYKTPPIKDFGGFNFSQILPDPSKPSKRSFIEDLLFNKVTLADAGFIKQYGDCLGDIAARDLICAQKFNGLTVLPPLLTDEMIAQYTSALLAGTITSGWTFGAGAALQIPFAMQMAYRFNGIGVTQNVLYENQKLIANQFNSAIGKIQDSLSSTASALGKLQDVVNQNAQALNTLVKQLSSNFGAISSVLNDILSRLDPPEAEVQIDRLITGRLQSLQTYVTQQLIRAAEIRASANLAATKMSECVLGQSKRVDFCGKGYHLMSFPQSAPHGVVFLHVTYVPAQEKNFTTAPAICHDGKAHFPREGVFVSNGTHWFVTQRNFYEPQIITTDNTFVSGNCDVVIGIVNNTVYDPLQPELDSFKEELDKYFKNHTSPDVDLGDISGINASVVNIQKEIDRLNEVAKNLNESLIDLQELGKYEQYIKGSGRENLYFQGGGGSGYIPEAPRDGQAYVRKDGEWVLLSTFLGHHHHHHHH

SEQ ID NO: 5347 - protein, 1281 aa, Artificial Sequence
  Description of Artificial Sequence: Synthetic polypeptide
MGILPSPGMPALLSLVSLLSVLLMGCVAETGTQCVNLTTRTQLPPAYTNSFTRGVYYPDKVFRSSVLHSTQDLFLPFFSNVTWFHAIHVSGTNGTKRFDNPVLPFNDGVYFASTEKSNIIRGWIFGTTLDSKTQSLLIVNNATNVVIKVCEFQFCNDPFLGVYYHKNNKSWMESEFRVYSSANNCTFEYVSQPFLMDLEGKQGNFKNLREFVFKNIDGYFKIYSKHTPINLVRDLPQGFSALEPLVDLPIGINITRFQTLLALHRSYLTPGDSSSGWTAGAAAYYVGYLQPRTFLLKYNENGTITDAVDCALDPLSETKCTLKSFTVEKGIYQTSNFRVQPTESIVRFPNITNLCPFGEVFNATRFASVYAWNRKRISNCVADYSVLYNSASFSTFKCYGVSPTKLNDLCFTNVYADSFVIRGDEVRQIAPGQTGKIADYNYKLPDDFTGCVIAWNSNNLDSKVGGNYNYLYRLFRKSNLKPFEIDISTEIYQAGSTPCNGVEGFNCYFPLQSYGFQPTNGVGYQPYRVVVLSFELLHAPATVCGPKKSTNLVKNKCVNFNFNGLTGTGVLTESNKKFLPFQQFGRDIADTTDAVRDPQTLEILDITPCSFGGVSVITPGTNTSNQVAVLYQDVNCTEVPVAIHADQLTPTWRVYSTGSNVFQTRAGCLIGAEHVNNSYECDIPIGAGICASYQTQTNSPSGAGSVASQSIIAYTMSLGAENSVAYSNNSIAIPTNFTISVTTEILPVSMTKTSVDCTMYICGDSTECSNLLLQYGSFCTQLNRALTGIAVEQDKNTQEVFAQVKQIYKTPPIKDFGGFNFSQILPDPSKPSKRSFIEDLLFNKVTLADAGFIKQYGDCLGDIAARDLICAQKFNGLTVLPPLLTDEMIAQYTSALLAGTITSGWTFGAGAALQIPFAMQMAYRFNGIGVTQNVLYENQKLIANQFNSAIGKIQDSLSSTASALGKLQDVVNQNAQALNTLVKQLSSNFGAISSVLNDILSRLDPPEAEVQIDRLITGRLQSLQTYVTQQLIRAAEIRASANLAATKMSECVLGQSKRVDFCGKGYHLMSFPQSAPHGVVFLHVTYVPAQEKNFTTAPAICHDGKAHFPREGVFVSNGTHWFVTQRNFYEPQIITTDNTFVSGNCDVVIGIVNNTVYDPLQPELDSFKEELDKYFKNHTSPDVDLGDISGINASVVNIQKEIDRLNEVAKNLNESLIDLQELGKYEQYIKGSGRENLYFQGGGGSGYIPEAPRDGQAYVRKDGEWVLLSTFLGHHHHHHHH

SEQ ID NO: 5348 - protein, 1281 aa, Artificial Sequence
  Description of Artificial Sequence: Synthetic polypeptide
MGILPSPGMPALLSLVSLLSVLLMGCVAETGTQCVNLTTRTQLPPAYTNSFTRGVYYPDKVFRSSVLHSTQDLFLPFFSNVTWFHAIHVSGTNGTKRFDNPVLPFNDGVYFASTEKSNIIRGWIFGTTLDSKTQSLLIVNNATNVVIKVCEFQFCNDPFLGVYYHKNNKSWMESEFRVYSSANNCTFEYVSQPFLMDLEGKQGNFKNLREFVFKNIDGYFKIYSKHTPINLVRDLPQGFSALEPLVDLPIGINITRFQTLLALHRSYLTPGDSSSGWTAGAAAYYVGYLQPRTFLLKYNENGTITDAVDCALDPLSETKCTLKSFTVEKGIYQTSNFRVQPTESIVRFPNITNLCPFGEVFNATRFASVYAWNRKRISNCVADYSVLYNSASFSTFKCYGVSPTKLNDLCFTNVYADSFVIRGDEVRQIAPGQTGKIADYNYKLPDDFTGCVIAWNSNNLDSKVGGNYNYLYRLFRKSNLKPFERDISTEIYQAGSTPCNGVEGFNCYFPLQSYGFQPTNGVGYQPYRVVVLSFELLHAPATVCGPKKSTNLVKNKCVNFNFNGLTGTGVLTESNKKFLPFQQFGRDIADTTDAVRDPQTLEILDITPCSFGGVSVITPGTNTSNQVAVLYQDVNCTEVPVAIHADQLTPTWRVYSTGSNVFQTRAGCLIGAEHVNNSYECDIPIGAGICASYQTQTNSPSGAGSVASQSIIAYTMSLGAENSVAYSNNSIAIPTNFTISVTTEILPVSMTKTSVDCTMYICGDSTECSNLLLQYGSFCTQLNRALTGIAVEQDKNTQEVFAQVKQIYKTPPIKDFGGFNFSQILPDPSKPSKRSFIEDLLFNKVTLADAGFIKQYGDCLGDIAARDLICAQKFNGLTVLPPLLTDEMIAQYTSALLAGTITSGWTFGAGAALQIPFAMQMAYRFNGIGVTQNVLYENQKLIANQFNSAIGKIQDSLSSTASALGKLQDVVNQNAQALNTLVKQLSSNFGAISSVLNDILSRLDPPEAEVQIDRLITGRLQSLQTYVTQQLIRAAEIRASANLAATKMSECVLGQSKRVDFCGKGYHLMSFPQSAPHGVVFLHVTYVPAQSKNFTTAPAICHDGKAHFPREGVFVSNGTHWFVTQRNFYEPQIITTDNTFVSGNCDVVIGIVNNTVYDPLQPELDSFKEELDKYFKNHTSPDVDLGDISGINASVVNIQKEIDRLNEVAKNLNESLIDLQELGKYEQYIKGSGRENLYFQGGGGSGYIPEAPRDGQAYVRKDGEWVLLSTFLGHHHHHHHH

SEQ ID NO: 5349 - protein, 1281 aa, Artificial Sequence
  Description of Artificial Sequence: Synthetic polypeptide
MGILPSPGMPALLSLVSLLSVLLMGCVAETGTQCVNLTTRTQLPPAYTNSFTRGVYYPDKVFRSSVLHSTQDLFLPFFSNVTWFHAIHVSGTNGTKRFDNPVLPFNDGVYFASTEKSNIIRGWIFGTTLDSKTQSLLIVNNATNVVIKVCEFQFCNDPFLGVYYHKNNKSWMESEFRVYSSANNCTFEYVSQPFLMDLEGKQGNFKNLREFVFKNIDGYFKIYSKHTPINLVRDLPQGFSALEPLVDLPIGINITRFQTLLALHRSYLTPGDSSSGWTAGAAAYYVGYLQPRTFLLKYNENGTITDAVDCALDPLSETKCTLKSFTVEKGIYQTSNFRVQPTESIVRFPNITNLCPFGEVFNATRFASVYAWNRKRISNCVADYSVLYNSASFSTFKCYGVSPTKLNDLCFTNVYADSFVIRGDEVRQIAPGQTGKIRDYNYKLPDDFTGCVIAWNSNNLDSKVGGNYNYLYRLFRKSNLKPFERDISTEIYQAGSTPCNGVEGFNCYFPLQSYGFQPTNGVGYQPYRVVVLSFELLHAPATVCGPKKSTNLVKNKCVNFNFNGLTGTGVLTESNKKFLPFQQFGRDIADTTDAVRDPQTLEILDITPCSFGGVSVITPGTNTSNQVAVLYQDVNCTEVPVAIHADQLTPTWRVYSTGSNVFQTRAGCLIGAEHVNNSYECDIPIGAGICASYQTQTNSPSGAGSVASQSIIAYTMSLGAENSVAYSNNSIAIPTNFTISVTTEILPVSMTKTSVDCTMYICGDSTECSNLLLQYGSFCTQLNRALTGIAVEQDKNTQEVFAQVKQIYKTPPIKDFGGFNFSQILPDPSKPSKRSFIEDLLFNKVTLADAGFIKQYGDCLGDIAARDLICAQKFNGLTVLPPLLTDEMIAQYTSALLAGTITSGWTFGAGAALQIPFAMQMAYRFNGIGVTQNVLYENQKLIANQFNSAIGKIQDSLSSTASALGKLQDVVNQNAQALNTLVKQLSSNFGAISSVLNDILSRLDPPEAEVQIDRLITGRLQSLQTYVTQQLIRAAEIRASANLAATKMSECVLGQSKRVDFCGKGYHLMSFPQSAPHGVVFLHVTYVPAQEKNFTTAPAICHDGKAHFPREGVFVSNGTHWFVTQRNFYEPQIITTDNTFVSGNCDVVIGIVNNTVYDPLQPELDSFKEELDKYFKNHTSPDVDLGDISGINASVVNIQKEIDRLNEVAKNLNESLIDLQELGKYEQYIKGSGRENLYFQGGGGSGYIPEAPRDGQAYVRKDGEWVLLSTFLGHHHHHHHH

SEQ ID NO: 5350 - protein, 1281 aa, Artificial Sequence
  Description of Artificial Sequence: Synthetic polypeptide
MGILPSPGMPALLSLVSLLSVLLMGCVAETGTQCVNLTTRTQLPPAYTNSFTRGVYYPDKVFRSSVLHSTQDLFLPFFSNVTWFHAIHVSGTNGTKRFDNPVLPFNDGVYFASTEKSNIIRGWIFGTTLDSKTQSLLIVNNATNVVIKVCEFQFCNDPFLGVYYHKNNKSWMESEFRVYSSANNCTFEYVSQPFLMDLEGKQGNFKNLREFVFKNIDGYFKIYSKHTPINLVRDLPQGFSALEPLVDLPIGINITRFQTLLALHRSYLTPGDSSSGWTAGAAAYYVGYLQPRTFLLKYNENGTITDAVDCALDPLSETKCTLKSFTVEKGIYQTSNFRVQPTESIVRFPNITNLCPFGEVFNATRFASVYAWNRKRISNCVADYSVLYNSASFSTFKCYGVSPTKLNDLCFTNVYADSFVIRGDEVRQIAPGQTGKIADYNYKLPDDFTGCVIAWNSNNLDSKVGGNYNYLYRLFRKSNLKPFERDISTEIYQAGSTPCNGVEGFNCYFPLQSYGFQPTNGVGYQPYRVVVLSFELLHAPATVCGPKKSTNLVKNKCVNFNFNGLTGTGVLTESNKKFLPFQQFGRDIADTTDAVRDPQTLEILDITPCSFGGVSVITPGTNTSNQVAVLYQDVNCTEVPVAIHADQLTPTWRVYSTGSNVFQTRAGCLIGAEHVNNSYECDIPIGAGICASYQTQTNSPSGAGSVASQSIIAYTMSLGAENSVAYSNNSIAIPTNFTISVTTEILPVSMTKTSVDCTMYICGDSTECSNLLLQYGSFCTQLNRALTGIAVEQDKNTQEVFAQVKQIYKTPPIKDFGGFNFSQILPDPSKPSKRSFIEDLLFNKVTLADAGFIKQYGDCLGDIAARDLICAQKFNGLTVLPPLLTDEMIAQYTSALLAGTITSGWTFGAGAALQIPFAMQMAYRFNGIGVTQNVLYENQKLIANQFNSAIGKIQDSLSSTASALGKLQDVVNQNAQALNTLVKQLSSNFGAISSVLNDILSRADPPEAEVQIDRLITGRLQSLQTYVTQQLIRAAEIRASANLAATKMSECVLGQSKRVDFCGKGYHLMSFPQSAPHGVVFLHVTYVPAQEKNFTTAPAICHDGKAHFPREGVFVSNGTHWFVTQRNFYEPQIITTDNTFVSGNCDVVIGIVNNTVYDPLQPELDSFKEELDKYFKNHTSPDVDLGDISGINASVVNIQKEIDRLNEVAKNLNESLIDLQELGKYEQYIKGSGRENLYFQGGGGSGYIPEAPRDGQAYVRKDGEWVLLSTFLGHHHHHHHH

SEQ ID NO: 5351 - protein, 1281 aa, Artificial Sequence
  Description of Artificial Sequence: Synthetic polypeptide
MGILPSPGMPALLSLVSLLSVLLMGCVAETGTQCVNLTTRTQLPPAYTNSFTRGVYYPDKVFRSSVLHSTQDLFLPFFSNVTWFHAIHVSGTNGTKRFDNPVLPFNDGVYFASTEKSNIIRGWIFGTTLDSKTQSLLIVNNATNVVIKVCEFQFCNDPFLGVYYHKNNKSWMESEFRVYSSANNCTFEYVSQPFLMDLEGKQGNFKNLREFVFKNIDGYFKIYSKHTPINLVRDLPQGFSALEPLVDLPIGINITRFQTLLALHRSYLTPGDSSSGWTAGAAAYYVGYLQPRTFLLKYNENGTITDAVDCALDPLSETKCTLKSFTVEKGIYQTSNFRVQPTESIVRFPNITNLCPFGEVFNATRFASVYAWNRKRISNCVADYSVLYNSASFSTFKCYGVSPTKLNDLCFTNVYADSFVIRGDEVRQIAPGQTGAIADYNYKLPDDFTGCVIAWNSNNLDSKVGGNYNYLYRLFRKSNLKPFERDISTEIYQAGSTPCNGVEGFNCYFPLQSYGFQPTNGVGYQPYRVVVLSFELLHAPATVCGPKKSTNLVKNKCVNFNFNGLTGTGVLTESNKKFLPFQQFGRDIADTTDAVRDPQTLEILDITPCSFGGVSVITPGTNTSNQVAVLYQDVNCTEVPVAIHADQLTPTWRVYSTGSNVFQTRAGCLIGAEHVNNSYECDIPIGAGICASYQTQTNSPSGAGSVASQSIIAYTMSLGAENSVAYSNNSIAIPTNFTISVTTEILPVSMTKTSVDCTMYICGDSTECSNLLLQYGSFCTQLNRALTGIAVEQDKNTQEVFAQVKQIYKTPPIKDFGGFNFSQILPDPSKPSKRSFIEDLLFNKVTLADAGFIKQYGDCLGDIAARDLICAQKFNGLTVLPPLLTDEMIAQYTSALLAGTITSGWTFGAGAALQIPFAMQMAYRFNGIGVTQNVLYENQKLIANQFNSAIGKIQDSLSSTASALGKLQDVVNQNAQALNTLVKQLSSNFGAISSVLNDILSRLDPPEAEVQIDRLITGRLQSLQTYVTQQLIRAAEIRASANLAATKMSECVLGQSKRVDFCGKGYHLMSFPQSAPHGVVFLHVTYVPAQEKNFTTAPAICHDGKAHFPREGVFVSNGTHWFVTQRNFYEPQIITTDNTFVSGNCDVVIGIVNNTVYDPLQPELDSFKEELDKYFKNHTSPDVDLGDISGINASVVNIQKEIDRLNEVAKNLNESLIDLQELGKYEQYIKGSGRENLYFQGGGGSGYIPEAPRDGQAYVRKDGEWVLLSTFLGHHHHHHHH

SEQ ID NO: 5352 - protein, 1281 aa, Artificial Sequence
  Description of Artificial Sequence: Synthetic polypeptide
MGILPSPGMPALLSLVSLLSVLLMGCVAETGTQCVNLTTRTQLPPAYTNSFTRGVYYPDKVFRSSVLHSTQDLFLPFFSNVTWFHAIHVSGTNGTKRFDNPVLPFNDGVYFASTEKSNIIRGWIFGTTLDSKTQSLLIVNNATNVVIKVCEFQFCNDPFLGVYYHKNNKSWMESEFRVYSSANNCTFEYVSQPFLMDLEGKQGNFKNLREFVFKNIDGYFKIYSKHTPINLVRDLPQGFSALEPLVDLPIGINITRFQTLLALHRSYLTPGDSSSGWTAGAAAYYVGYLQPRTFLLKYNENGTITDAVDCALDPLSETKCTLKSFTVEKGIYQTSNFRVQPTESIVRFPNITNLCPFGEVFNATRFASVYAWNRKRISNCVADYSVLYNSASFSTFKCYGVSPTKLNDLCFTNVYADSFVIRGDEVRQIAPGQTGKIADYNYKLPDDFTGCVIAWNSNNLDSKVGGNYNYLYRLFRKSNLKPFERDISQEIYQAGSTPCNGVEGFNCYFPLQSYGFQPTNGVGYQPYRVVVLSFELLHAPATVCGPKKSTNLVKNKCVNFNFNGLTGTGVLTESNKKFLPFQQFGRDIADTTDAVRDPQTLEILDITPCSFGGVSVITPGTNTSNQVAVLYQDVNCTEVPVAIHADQLTPTWRVYSTGSNVFQTRAGCLIGAEHVNNSYECDIPIGAGICASYQTQTNSPSGAGSVASQSIIAYTMSLGAENSVAYSNNSIAIPTNFTISVTTEILPVSMTKTSVDCTMYICGDSTECSNLLLQYGSFCTQLNRALTGIAVEQDKNTQEVFAQVKQIYKTPPIKDFGGFNFSQILPDPSKPSKRSFIEDLLFNKVTLADAGFIKQYGDCLGDIAARDLICAQKFNGLTVLPPLLTDEMIAQYTSALLAGTITSGWTFGAGAALQIPFAMQMAYRFNGIGVTQNVLYENQKLIANQFNSAIGKIQDSLSSTASALGKLQDVVNQNAQALNTLVKQLSSNFGAISSVLNDILSRLDPPEAEVQIDRLITGRLQSLQTYVTQQLIRAAEIRASANLAATKMSECVLGQSKRVDFCGKGYHLMSFPQSAPHGVVFLHVTYVPAQEKNFTTAPAICHDGKAHFPREGVFVSNGTHWFVTQRNFYEPQIITTDNTFVSGNCDVVIGIVNNTVYDPLQPELDSFKEELDKYFKNHTSPDVDLGDISGINASVVNIQKEIDRLNEVAKNLNESLIDLQELGKYEQYIKGSGRENLYFQGGGGSGYIPEAPRDGQAYVRKDGEWVLLSTFLGHHHHHHHH

SEQ ID NO: 5353 - protein, 1281 aa, Artificial Sequence
  Description of Artificial Sequence: Synthetic polypeptide
MGILPSPGMPALLSLVSLLSVLLMGCVAETGTQCVNLTTRTQLPPAYTNSFTRGVYYPDKVFRSSVLHSTQDLFLPFFSNVTWFHAIHVSGTNGTKRFDNPVLPFNDGVYFASTEKSNIIRGWIFGTTLDSKTQSLLIVNNATNVVIKVCEFQFCNDPFLGVYYHKNNKSWMESEFRVYSSANNCTFEYVSQPFLMDLEGKQGNFKNLREFVFKNIDGYFKIYSKHTPINLVRDLPQGFSALEPLVDLPIGINITRFQTLLALHRSYLTPGDSSSGWTAGAAAYYVGYLQPRTFLLKYNENGTITDAVDCALDPLSETKCTLKSFTVEKGIYQTSNFRVQPTESIVRFPNITNLCPFGEVFNATRFASVYAWNRKRISNCVADYSVLYNSASFSTFKCYGVSPTKLNDLCFTNVYADSFVIRGDEVRQIAPGQTGKIADYNYKLPDDFTGCVIAWNSHNLDSKVGGNYNYLYRLFRKSNLKPFERDISTEIYQAGSTPCNGVEGFNCYFPLQSYGFQPTNGVGYQPYRVVVLSFELLHAPATVCGPKKSTNLVKNKCVNFNFNGLTGTGVLTESNKKFLPFQQFGRDIADTTDAVRDPQTLEILDITPCSFGGVSVITPGTNTSNQVAVLYQDVNCTEVPVAIHADQLTPTWRVYSTGSNVFQTRAGCLIGAEHVNNSYECDIPIGAGICASYQTQTNSPSGAGSVASQSIIAYTMSLGAENSVAYSNNSIAIPTNFTISVTTEILPVSMTKTSVDCTMYICGDSTECSNLLLQYGSFCTQLNRALTGIAVEQDKNTQEVFAQVKQIYKTPPIKDFGGFNFSQILPDPSKPSKRSFIEDLLFNKVTLADAGFIKQYGDCLGDIAARDLICAQKFNGLTVLPPLLTDEMIAQYTSALLAGTITSGWTFGAGAALQIPFAMQMAYRFNGIGVTQNVLYENQKLIANQFNSAIGKIQDSLSSTASALGKLQDVVNQNAQALNTLVKQLSSNFGAISSVLNDILSRLDPPEAEVQIDRLITGRLQSLQTYVTQQLIRAAEIRASANLAATKMSECVLGQSKRVDFCGKGYHLMSFPQSAPHGVVFLHVTYVPAQEKNFTTAPAICHDGKAHFPREGVFVSNGTHWFVTQRNFYEPQIITTDNTFVSGNCDVVIGIVNNTVYDPLQPELDSFKEELDKYFKNHTSPDVDLGDISGINASVVNIQKEIDRLNEVAKNLNESLIDLQELGKYEQYIKGSGRENLYFQGGGGSGYIPEAPRDGQAYVRKDGEWVLLSTFLGHHHHHHHH

SEQ ID NO: 5354 - protein, 1281 aa, Artificial Sequence
  Description of Artificial Sequence: Synthetic polypeptide
MGILPSPGMPALLSLVSLLSVLLMGCVAETGTQCVNLTTRTQLPPAYTNSFTRGVYYPDKVFRSSVLHSTQDLFLPFFSNVTWFHAIHVSGTNGTKRFDNPVLPFNDGVYFASTEKSNIIRGWIFGTTLDSKTQSLLIVNNATNVVIKVCEFQFCNDPFLGVYYHKNNKSWMESEFRVYSSANNCTFEYVSQPFLMDLEGKQGNFKNLREFVFKNIDGYFKIYSKHTPINLVRDLPQGFSALEPLVDLPIGINITRFQTLLALHRSYLTPGDSSSGWTAGAAAYYVGYLQPRTFLLKYNENGTITDAVDCALDPLSETKCTLKSFTVEKGIYQTSNFRVQPTESIVRFPNITNLCPFGEVFNATRFASVYAWNRKRISNCVADYSVLYNSASFSTFKCYGVSPTKLNDLCFTNVYADSFVIRGDEVRQIAPGQTGKIADYNYKLPDDFTGCVIAWNSNNLDSKEGGNYNYLYRLFRKSNLKPFERDISTEIYQAGSTPCNGVEGFNCYFPLQSYGFQPTNGVGYQPYRVVVLSFELLHAPATVCGPKKSTNLVKNKCVNFNFNGLTGTGVLTESNKKFLPFQQFGRDIADTTDAVRDPQTLEILDITPCSFGGVSVITPGTNTSNQVAVLYQDVNCTEVPVAIHADQLTPTWRVYSTGSNVFQTRAGCLIGAEHVNNSYECDIPIGAGICASYQTQTNSPSGAGSVASQSIIAYTMSLGAENSVAYSNNSIAIPTNFTISVTTEILPVSMTKTSVDCTMYICGDSTECSNLLLQYGSFCTQLNRALTGIAVEQDKNTQEVFAQVKQIYKTPPIKDFGGFNFSQILPDPSKPSKRSFIEDLLFNKVTLADAGFIKQYGDCLGDIAARDLICAQKFNGLTVLPPLLTDEMIAQYTSALLAGTITSGWTFGAGAALQIPFAMQMAYRFNGIGVTQNVLYENQKLIANQFNSAIGKIQDSLSSTASALGKLQDVVNQNAQALNTLVKQLSSNFGAISSVLNDILSRLDPPEAEVQIDRLITGRLQSLQTYVTQQLIRAAEIRASANLAATKMSECVLGQSKRVDFCGKGYHLMSFPQSAPHGVVFLHVTYVPAQEKNFTTAPAICHDGKAHFPREGVFVSNGTHWFVTQRNFYEPQIITTDNTFVSGNCDVVIGIVNNTVYDPLQPELDSFKEELDKYFKNHTSPDVDLGDISGINASVVNIQKEIDRLNEVAKNLNESLIDLQELGKYEQYIKGSGRENLYFQGGGGSGYIPEAPRDGQAYVRKDGEWVLLSTFLGHHHHHHHH

SEQ ID NO: 5355 - protein, 1281 aa, Artificial Sequence
  Description of Artificial Sequence: Synthetic polypeptide
MGILPSPGMPALLSLVSLLSVLLMGCVAETGTQCVNLTTRTQLPPAYTNSFTRGVYYPDKVFRSSVLHSTQDLFLPFFSNVTWFHAIHVSGTNGTKRFDNPVLPFNDGVYFASTEKSNIIRGWIFGTTLDSKTQSLLIVNNATNVVIKVCEFQFCNDPFLGVYYHKNNKSWMESEFRVYSSANNCTFEYVSQPFLMDLEGKQGNFKNLREFVFKNIDGYFKIYSKHTPINLVRDLPQGFSALEPLVDLPIGINITRFQTLLALHRSYLTPGDSSSGWTAGAAAYYVGYLQPRTFLLKYNENGTITDAVDCALDPLSETKCTLKSFTVEKGIYQTSNFRVQPTESIVRFPNITNLCPFGEVFNATRFASVYAWNRKRISNCVADYSVLYNSASFSTFKCYGVSPTKLNDLCFTNVYADSFVIRGDEVRQIAPGQTGKIADYNYKLPDDFTGCVIAWNSNNLDSKVGGNYNYLYRLFRKSNLKPFERDISTEIYQAGSTPCNGVEGFNCYFPLQSYGFQPTNGVGYQPYRVVVLSFELLHAPATVCGPKKSTNLVKNKCVNFNFNGLTGTGVLTESNKKFLPFQQFGRDIADTTDAVRDPQTLEILDITPCSFGGVSVITPGTNTSNQVAVLYQDVNCTEVPVAIHADQLTPTWRVYSTGSNVFQTRAGCLIGAEHVNNSYECDIPIGAGICASYQTQTNSPSGAGSVASQSIIAYTCSLGAENSVAYSNNSIAIPTNFTISVTTEILPVSMTKTSVDCTMYICGDSTECSNLLLQYGSFCTQLNRALTGIAVEQDKNTQEVFAQVKQIYKTPPIKDFGGFNFSQILPDPSKPSKRSFIEDLLFNKVTLADAGFIKQYGDCLGDIAARDLICAQKFNGLTVLPPLLTDEMIAQYTSALLAGTITSGWTFGAGAALQIPFAMQMAYRFNGIGVTQNVLYENQKLIANQFNSAIGKIQDSLSSTASALGKLQDVVNQNAQALNTLVKQLSSNFGAISSVLNDILSRLDPPEAEVQIDRLITGRLQSLQTYVTQQLIRAAEIRASANLAATKMSECVLGQSKRVDFCGKGYHLMSFPQSAPHGVVFLHVTYVPAQEKNFTTAPAICHDGKAHFPREGVFVSNGTHWFVTQRNFYEPQIITTDNTFVSGNCDVVIGIVNNTVYDPLQPELDSFKEELDKYFKNHTSPDVDLGDISGINASVVNIQKEIDRLNEVAKNLNESLIDLQELGKYEQYIKGSGRENLYFQGGGGSGYIPEAPRDGQAYVRKDGEWVLLSTFLGHHHHHHHH

SEQ ID NO: 5356 - protein, 1281 aa, Artificial Sequence
  Description of Artificial Sequence: Synthetic polypeptide
MGILPSPGMPALLSLVSLLSVLLMGCVAETGTQCVNLTTRTQLPPAYTNSFTRGVYYPDKVFRSSVLHSTQDLFLPFFSNVTWFHAIHVSGTNGTKRFDNPVLPFNDGVYFASTEKSNIIRGWIFGTTLDSKTQSLLIVNNATNVVIKVCEFQFCNDPFLGVYYHKNNKSWMESEFRVYSSANNCTFEYVSQPFLMDLEGKQGNFKNLREFVFKNIDGYFKIYSKHTPINLVRDLPQGFSALEPLVDLPIGINITRFQTLLALHRSYLTPGDSSSGWTAGAAAYYVGYLQPRTFLLKYNENGTITDAVDCALDPLSETKCTLKSFTVEKGIYQTSNFRVQPTESIVRFPNITNLCPFGEVFNATRFASVYAWNRKRISNCVADYSVLYNSASFSTFKCYGVSPTKLNDQCFTNVYADSFVIRGDEVRQIAPGQTGKIADYNYKLPDDFTGCVIAWNSNNLDSKVGGNYNYLYRLFRKSNLKPFERDISTEIYQAGSTPCNGVEGFNCYFPLQSYGFQPTNGVGYQPYRVVVLSFELLHAPATVCGPKKSTNLVKNKCVNFNFNGLTGTGVLTESNKKFLPFQQFGRDIADTTDAVRDPQTLEILDITPCSFGGVSVITPGTNTSNQVAVLYQDVNCTEVPVAIHADQLTPTWRVYSTGSNVFQTRAGCLIGAEHVNNSYECDIPIGAGICASYQTQTNSPSGAGSVASQSIIAYTMSLGAENSVAYSNNSIAIPTNFTISVTTEILPVSMTKTSVDCTMYICGDSTECSNLLLQYGSFCTQLNRALTGIAVEQDKNTQEVFAQVKQIYKTPPIKDFGGFNFSQILPDPSKPSKRSFIEDLLFNKVTLADAGFIKQYGDCLGDIAARDLICAQKFNGLTVLPPLLTDEMIAQYTSALLAGTITSGWTFGAGAALQIPFAMQMAYRFNGIGVTQNVLYENQKLIANQFNSAIGKIQDSLSSTASALGKLQDVVNQNAQALNTLVKQLSSNFGAISSVLNDILSRLDPPEAEVQIDRLITGRLQSLQTYVTQQLIRAAEIRASANLAATKMSECVLGQSKRVDFCGKGYHLMSFPQSAPHGVVFLHVTYVPAQEKNFTTAPAICHDGKAHFPREGVFVSNGTHWFVTQRNFYEPQIITTDNTFVSGNCDVVIGIVNNTVYDPLQPELDSFKEELDKYFKNHTSPDVDLGDISGINASVVNIQKEIDRLNEVAKNLNESLIDLQELGKYEQYIKGSGRENLYFQGGGGSGYIPEAPRDGQAYVRKDGEWVLLSTFLGHHHHHHHH

SEQ ID NO: 5357 - protein, 1281 aa, Artificial Sequence
  Description of Artificial Sequence: Synthetic polypeptide
MGILPSPGMPALLSLVSLLSVLLMGCVAETGTQCVNLTTRTQLPPAYTNSFTRGVYYPDKVFRSSVLHSTQDLFLPFFSNVTWFHAIHVSGTNGTKRFDNPVLPFNDGVYFASTEKSNIIRGWIFGTTLDSKTQSLLIVNNATNVVIKVCEFQFCNDPFLGVYYHKNNKSWMESEFRVYSSANNCTFEYVSQPFLMDLEGKQGNFKNLREFVFKNIDGYFKIYSKHTPINLVRDLPQGFSALEPLVDLPIGINITRFQTLLALHRSYLTPGDSSSGWTAGAAAYYVGYLQPRTFLLKYNENGTITDAVDCALDPLSETKCTLKSFTVEKGIYQTSNFRVQPTESIVRFPNITNLCPFGEVFNATRFASVYAWNRKRISNCVADYSVLYNSASFSTFKCYGVSPTKLNDLCFTNVYADSFVIRGDEVRQIAPGQTGKIADYNYKLPDDFTGCVIAWNSNNLDSKVGGNYNYLYRLFRKSNLKPFERDISTEIYQAGSTPCNGVEGFNCYFPLQSYGFQPTNGVGYQPYRVVVLSFELAHAPATVCGPKKSTNLVKNKCVNFNFNGLTGTGVLTESNKKFLPFQQFGRDIADTTDAVRDPQTLEILDITPCSFGGVSVITPGTNTSNQVAVLYQDVNCTEVPVAIHADQLTPTWRVYSTGSNVFQTRAGCLIGAEHVNNSYECDIPIGAGICASYQTQTNSPSGAGSVASQSIIAYTMSLGAENSVAYSNNSIAIPTNFTISVTTEILPVSMTKTSVDCTMYICGDSTECSNLLLQYGSFCTQLNRALTGIAVEQDKNTQEVFAQVKQIYKTPPIKDFGGFNFSQILPDPSKPSKRSFIEDLLFNKVTLADAGFIKQYGDCLGDIAARDLICAQKFNGLTVLPPLLTDEMIAQYTSALLAGTITSGWTFGAGAALQIPFAMQMAYRFNGIGVTQNVLYENQKLIANQFNSAIGKIQDSLSSTASALGKLQDVVNQNAQALNTLVKQLSSNFGAISSVLNDILSRLDPPEAEVQIDRLITGRLQSLQTYVTQQLIRAAEIRASANLAATKMSECVLGQSKRVDFCGKGYHLMSFPQSAPHGVVFLHVTYVPAQEKNFTTAPAICHDGKAHFPREGVFVSNGTHWFVTQRNFYEPQIITTDNTFVSGNCDVVIGIVNNTVYDPLQPELDSFKEELDKYFKNHTSPDVDLGDISGINASVVNIQKEIDRLNEVAKNLNESLIDLQELGKYEQYIKGSGRENLYFQGGGGSGYIPEAPRDGQAYVRKDGEWVLLSTFLGHHHHHHHH

SEQ ID NO: 5358 - protein, 1281 aa, Artificial Sequence
  Description of Artificial Sequence: Synthetic polypeptide
MGILPSPGMPALLSLVSLLSVLLMGCVAETGTQCVNLTTRTQLPPAYTNSFTRGVYYPDKVFRSSVLHSTQDLFLPFFSNVTWFHAIHVSGTNGTKRFDNPVLPFNDGVYFASTEKSNIIRGWIFGTTLDSKTQSLLIVNNATNVVIKVCEFQFCNDPFLGVYYHKNNKSWMESEFRVYSSANNCTFEYVSQPFLMDLEGKQGNFKNLREFVFKNIDGYFKIYSKHTPINLVRDLPQGFSALEPLVDLPIGINITRFQTLLALHRSYLTPGDSSSGWTAGAAAYYVGYLQPRTFLLKYNENGTITDAVDCALDPLSETKCTLKSFTVEKGIYQTSNFRVQPTESIVRFPNITNLCPFGEVFNATRFASVYAWNRKRISNCVADYSRLYNSASFSTFKCYGVSPTKLNDLCFTNVYADSFVIRGDEVRQIAPGQTGKIADYNYKLPDDFTGCVIAWNSNNLDSKVGGNYNYLYRLFRKSNLKPFERDISTEIYQAGSTPCNGVEGFNCYFPLQSYGFQPTNGVGYQPYRVVVLSFELLHAPATVCGPKKSTNLVKNKCVNFNFNGLTGTGVLTESNKKFLPFQQFGRDIADTTDAVRDPQTLEILDITPCSFGGVSVITPGTNTSNQVAVLYQDVNCTEVPVAIHADQLTPTWRVYSTGSNVFQTRAGCLIGAEHVNNSYECDIPIGAGICASYQTQTNSPSGAGSVASQSIIAYTMSLGAENSVAYSNNSIAIPTNFTISVTTEILPVSMTKTSVDCTMYICGDSTECSNLLLQYGSFCTQLNRALTGIAVEQDKNTQEVFAQVKQIYKTPPIKDFGGFNFSQILPDPSKPSKRSFIEDLLFNKVTLADAGFIKQYGDCLGDIAARDLICAQKFNGLTVLPPLLTDEMIAQYTSALLAGTITSGWTFGAGAALQIPFAMQMAYRFNGIGVTQNVLYENQKLIANQFNSAIGKIQDSLSSTASALGKLQDVVNQNAQALNTLVKQLSSNFGAISSVLNDILSRLDPPEAEVQIDRLITGRLQSLQTYVTQQLIRAAEIRASANLAATKMSECVLGQSKRVDFCGKGYHLMSFPQSAPHGVVFLHVTYVPAQEKNFTTAPAICHDGKAHFPREGVFVSNGTHWFVTQRNFYEPQIITTDNTFVSGNCDVVIGIVNNTVYDPLQPELDSFKEELDKYFKNHTSPDVDLGDISGINASVVNIQKEIDRLNEVAKNLNESLIDLQELGKYEQYIKGSGRENLYFQGGGGSGYIPEAPRDGQAYVRKDGEWVLLSTFLGHHHHHHHH

SEQ ID NO: 5359 - protein, 1281 aa, Artificial Sequence
  Description of Artificial Sequence: Synthetic polypeptide
MGILPSPGMPALLSLVSLLSVLLMGCVAETGTQCVNLTTRTQLPPAYTNSFTRGVYYPDKVFRSSVLHSTQDLFLPFFSNVTWFHAIHVSGTNGTKRFDNPVLPFNDGVYFASTEKSNIIRGWIFGTTLDSKTQSLLIVNNATNVVIKVCEFQFCNDPFLGVYYHKNNKSWMESEFRVYSSANNCTFEYVSQPFLMDLEGKQGNFKNLREFVFKNIDGYFKIYSKHTPINLVRDLPQGFSALEPLVDLPIGINITRFQTLLALHRSYLTPGDSSSGWTAGAAAYYVGYLQPRTFLLKYNENGTITDAVDCALDPLSETKCTLKSFTVEKGIYQTSNFRVQPTESIVRFPNITNLCPFGEVFNATRFASVYAWNRKRISNCVADYSVLYNSASFSTFKCYGVSPTKLNDLCFTNVYADSFVIRGDEVRQIAPGQTGKIADYNYKLPDDFTGCVIAWNSNNLDSKVGGNYNYLYRLFRKSNLKPFERDISTEIYQAGSTPYNGVEGFNCYFPLQSYGFQPTNGVGYQPYRVVVLSFELLHAPATVCGPKKSTNLVKNKCVNFNFNGLTGTGVLTESNKKFLPFQQFGRDIADTTDAVRDPQTLEILDITPCSFGGVSVITPGTNTSNQVAVLYQDVNCTEVPVAIHADQLTPTWRVYSTGSNVFQTRAGCLIGAEHVNNSYECDIPIGAGICASYQTQTNSPSGAGSVASQSIIAYTMSLGAENSVAYSNNSIAIPTNFTISVTTEILPVSMTKTSVDCTMYICGDSTECSNLLLQYGSFCTQLNRALTGIAVEQDKNTQEVFAQVKQIYKTPPIKDFGGFNFSQILPDPSKPSKRSFIEDLLFNKVTLADAGFIKQYGDCLGDIAARDLICAQKFNGLTVLPPLLTDEMIAQYTSALLAGTITSGWTFGAGAALQIPFAMQMAYRFNGIGVTQNVLYENQKLIANQFNSAIGKIQDSLSSTASALGKLQDVVNQNAQALNTLVKQLSSNFGAISSVLNDILSRLDPPEAEVQIDRLITGRLQSLQTYVTQQLIRAAEIRASANLAATKMSECVLGQSKRVDFCGKGYHLMSFPQSAPHGVVFLHVTYVPAQEKNFTTAPAICHDGKAHFPREGVFVSNGTHWFVTQRNFYEPQIITTDNTFVSGNCDVVIGIVNNTVYDPLQPELDSFKEELDKYFKNHTSPDVDLGDISGINASVVNIQKEIDRLNEVAKNLNESLIDLQELGKYEQYIKGSGRENLYFQGGGGSGYIPEAPRDGQAYVRKDGEWVLLSTFLGHHHHHHHH

SEQ ID NO: 5360 - protein, 1281 aa, Artificial Sequence
  Description of Artificial Sequence: Synthetic polypeptide
MGILPSPGMPALLSLVSLLSVLLMGCVAETGTQCVNLTTRTQLPPAYTNSFTRGVYYPDKVFRSSVLHSTQDLFLPFFSNVTWFHAIHVSGTNGTKRFDNPVLPFNDGVYFASTEKSNIIRGWIFGTTLDSKTQSLLIVNNATNVVIKVCEFQFCNDPFLGVYYHKNNKSWMESEFRVYSSANNCTFEYVSQPFLMDLEGKQGNFKNLREFVFKNIDGYFKIYSKHTPINLVRDLPQGFSALEPLVDLPIGINITRFQTLLALHRSYLTPGDSSSGWTAGAAAYYVGYLQPRTFLLKYNENGTITDAVDCALDPLSETKCTLKSFTVEKGIYQTSNFRVQPTESIVRFPNITNLCPFGEVFNATRFASVYAWNRKRISNCVADYSVLYNSASFSTFKCYGVSPTKLNDLCFTNVYADSFVIRGDEVRQIAPGQTGKIADYNYKLPDDFTGCVIAWNSNNLDSKVGGNYNYLYRLFRKSNLKPFERDISTEIYQAGSTPCNGVEGFNCYFPLQSYGFQPTNGVGYQPYRVVVLSFELLHAPATVCGPKKSTNLVKNKCVNFNFNGLTGTGVLTESNKKFLPFQQFGRDIADTTDAVRDPQTLEILDITPCPFGGVSVITPGTNTSNQVAVLYQDVNCTEVPVAIHADQLTPTWRVYSTGSNVFQTRAGCLIGAEHVNNSYECDIPIGAGICASYQTQTNSPSGAGSVASQSIIAYTMSLGAENSVAYSNNSIAIPTNFTISVTTEILPVSMTKTSVDCTMYICGDSTECSNLLLQYGSFCTQLNRALTGIAVEQDKNTQEVFAQVKQIYKTPPIKDFGGFNFSQILPDPSKPSKRSFIEDLLFNKVTLADAGFIKQYGDCLGDIAARDLICAQKFNGLTVLPPLLTDEMIAQYTSALLAGTITSGWTFGAGAALQIPFAMQMAYRFNGIGVTQNVLYENQKLIANQFNSAIGKIQDSLSSTASALGKLQDVVNQNAQALNTLVKQLSSNFGAISSVLNDILSRLDPPEAEVQIDRLITGRLQSLQTYVTQQLIRAAEIRASANLAATKMSECVLGQSKRVDFCGKGYHLMSFPQSAPHGVVFLHVTYVPAQEKNFTTAPAICHDGKAHFPREGVFVSNGTHWFVTQRNFYEPQIITTDNTFVSGNCDVVIGIVNNTVYDPLQPELDSFKEELDKYFKNHTSPDVDLGDISGINASVVNIQKEIDRLNEVAKNLNESLIDLQELGKYEQYIKGSGRENLYFQGGGGSGYIPEAPRDGQAYVRKDGEWVLLSTFLGHHHHHHHH

SEQ ID NO: 5361 - protein, 1281 aa, Artificial Sequence
  Description of Artificial Sequence: Synthetic polypeptide
MGILPSPGMPALLSLVSLLSVLLMGCVAETGTQCVNLTTRTQLPPAYTNSFTRGVYYPDKVFRSSVLHSTQDLFLPFFSNVTWFHAIHVSGTNGTKRFDNPVLPFNDGVYFASTEKSNIIRGWIFGTTLDSKTQSLLIVNNATNVVIKVCEFQFCNDPFLGVYYHKNNKSWMESEFRVYSSANNCTFEYVSQPFLMDLEGKQGNFKNLREFVFKNIDGYFKIYSKHTPINLVRDLPQGFSALEPLVDLPIGINITRFQTLLALHRSYLTPGDSSSGWTAGAAAYYVGYLQPRTFLLKYNENGTITDAVDCALDPLSETKCTLKSFTVEKGIYQTSNFRVQPTESIVRFPNITNLCPFGEVFNATRFASVYAWNRKRISNCVADYSVLYNSASFSTFKCYGVSPTKLNDLCFTNVYADSFVIRGDEVRQIAPGQTGKIADYNYKLPDDFTGCVIAWNSNNLDSKVGGNYNYLYRLFRKSNLKPFERDISTEIYQAGSTPCNGVEGFNCYFPLQSYGFQPTNGVGYQPYRVVVLSFELLHAPATVCGPKKSTNLVKNKCVNFNFNGLTGTGVLTESNKKFLPFQQFGRDIADTTDAVRDPQTLEILDITPCSFGGVSVITPGTNTSNQVAVLYQDVNCTEVPVAIHADQLTPTWRVYSTGSNVFQTRAGCLIGAEHVNNSYECDIPIGAGICASYQTQTNSPSGAGSVASQSIIAYTMSLGAENSVAYSNNSIAIPTNFTISVTTEILPVSMTKTSVDCTMYICGDSTECSNLLLQYGSFCTQLNRALTGIAVEQDKNTQEVFAQVKQIYKTPPIKDFGGFNFSQILPDPSKPSKRSFIEDLLFNKVTLADAGFIKQYGDCLGDIAARDLICAQKFNGLTVLPPLLTDEMIAQYTSALLAGTITSGWTFGAGAALQIPFAMQMAYRFNGIGVTQNVLYENQKLIANQFNSAIGKIQDSLSSTASALGKLQDVVNQNAQALNTLVKQLSSNFGAISSVLNAILSRLDPPEAEVQIDRLITGRLQSLQTYVTQQLIRAAEIRASANLAATKMSECVLGQSKRVDFCGKGYHLMSFPQSAPHGVVFLHVTYVPAQEKNFTTAPAICHDGKAHFPREGVFVSNGTHWFVTQRNFYEPQIITTDNTFVSGNCDVVIGIVNNTVYDPLQPELDSFKEELDKYFKNHTSPDVDLGDISGINASVVNIQKEIDRLNEVAKNLNESLIDLQELGKYEQYIKGSGRENLYFQGGGGSGYIPEAPRDGQAYVRKDGEWVLLSTFLGHHHHHHHH

SEQ ID NO: 5362 - protein, 1281 aa, Artificial Sequence
  Description of Artificial Sequence: Synthetic polypeptide
MGILPSPGMPALLSLVSLLSVLLMGCVAETGTQCVNLTTRTQLPPAYTNSFTRGVYYPDKVFRSSVLHSTQDLFLPFFSNVTWFHAIHVSGTNGTKRFDNPVLPFNDGVYFASTEKSNIIRGWIFGTTLDSKTQSLLIVNNATNVVIKVCEFQFCNDPFLGVYYHKNNKSWMESEFRVYSSANNCTFEYVSQPFLMDLEGKQGNFKNLREFVFKNIDGYFKIYSKHTPINLVRDLPQGFSALEPLVDLPIGINITRFQTLLALHRSYLTPGDSSSGWTAGAAAYYVGYLQPRTFLLKYNENGTITDAVDCALDPLSETKCTLKSFTVEKGIYQTSNFRVQPTESIVRFPNITNLCPFGEVFNATRFASVYAWNRKRISNCVADYSVLYNSASFSTFKCYGVSPTKLNDLCFTNVYADSFVIRGDEVRQIAPGQTGNIADYNYKLPDDFTGCVIAWNSNNLDSKVGGNYNYLYRLFRKSNLKPFERDISTEIYQAGSTPCNGVEGFNCYFPLQSYGFQPTNGVGYQPYRVVVLSFELLHAPATVCGPKKSTNLVKNKCVNFNFNGLTGTGVLTESNKKFLPFQQFGRDIADTTDAVRDPQTLEILDITPCSFGGVSVITPGTNTSNQVAVLYQDVNCTEVPVAIHADQLTPTWRVYSTGSNVFQTRAGCLIGAEHVNNSYECDIPIGAGICASYQTQTNSPSGAGSVASQSIIAYTMSLGAENSVAYSNNSIAIPTNFTISVTTEILPVSMTKTSVDCTMYICGDSTECSNLLLQYGSFCTQLNRALTGIAVEQDKNTQEVFAQVKQIYKTPPIKDFGGFNFSQILPDPSKPSKRSFIEDLLFNKVTLADAGFIKQYGDCLGDIAARDLICAQKFNGLTVLPPLLTDEMIAQYTSALLAGTITSGWTFGAGAALQIPFAMQMAYRFNGIGVTQNVLYENQKLIANQFNSAIGKIQDSLSSTASALGKLQDVVNQNAQALNTLVKQLSSNFGAISSVLNDILSRLDPPEAEVQIDRLITGRLQSLQTYVTQQLIRAAEIRASANLAATKMSECVLGQSKRVDFCGKGYHLMSFPQSAPHGVVFLHVTYVPAQEKNFTTAPAICHDGKAHFPREGVFVSNGTHWFVTQRNFYEPQIITTDNTFVSGNCDVVIGIVNNTVYDPLQPELDSFKEELDKYFKNHTSPDVDLGDISGINASVVNIQKEIDRLNEVAKNLNESLIDLQELGKYEQYIKGSGRENLYFQGGGGSGYIPEAPRDGQAYVRKDGEWVLLSTFLGHHHHHHHH

SEQ ID NO: 5363 - protein, 1281 aa, Artificial Sequence
  Description of Artificial Sequence: Synthetic polypeptide
MGILPSPGMPALLSLVSLLSVLLMGCVAETGTQCVNLTTRTQLPPAYTNSFTRGVYYPDKVFRSSVLHSTQDLFLPFFSNVTWFHAIHVSGTNGTKRFDNPVLPFNDGVYFASTEKSNIIRGWIFGTTLDSKTQSLLIVNNATNVVIKVCEFQFCNDPFLGVYYHKNNKSWMESEFRVYSSANNCTFEYVSQPFLMDLEGKQGNFKNLREFVFKNIDGYFKIYSKHTPINLVRDLPQGFSALEPLVDLPIGINITRFQTLLALHRSYLTPGDSSSGWTAGAAAYYVGYLQPRTFLLKYNENGTITDAVDCALDPLSETKCTLKSFTVEKGIYQTSNFRVQPTESIVRFPNITNLCPFGEVFNATRFASVYAWNRKRISNCVADYSVLYNSASFSTFKCYGVSPTKLNDLCFTNVYADSFVIRGDEVRQIAPGQTGKIADYNYKLPDDFTGCVIAWNSNNLDSKVGGNYNYLYRLFRKSNLKPFERDISTEIYQAGSTPCNGVEGFNQYFPLQSYGFQPTNGVGYQPYRVVVLSFELLHAPATVCGPKKSTNLVKNKCVNFNFNGLTGTGVLTESNKKFLPFQQFGRDIADTTDAVRDPQTLEILDITPCSFGGVSVITPGTNTSNQVAVLYQDVNCTEVPVAIHADQLTPTWRVYSTGSNVFQTRAGCLIGAEHVNNSYECDIPIGAGICASYQTQTNSPSGAGSVASQSIIAYTMSLGAENSVAYSNNSIAIPTNFTISVTTEILPVSMTKTSVDCTMYICGDSTECSNLLLQYGSFCTQLNRALTGIAVEQDKNTQEVFAQVKQIYKTPPIKDFGGFNFSQILPDPSKPSKRSFIEDLLFNKVTLADAGFIKQYGDCLGDIAARDLICAQKFNGLTVLPPLLTDEMIAQYTSALLAGTITSGWTFGAGAALQIPFAMQMAYRFNGIGVTQNVLYENQKLIANQFNSAIGKIQDSLSSTASALGKLQDVVNQNAQALNTLVKQLSSNFGAISSVLNDILSRLDPPEAEVQIDRLITGRLQSLQTYVTQQLIRAAEIRASANLAATKMSECVLGQSKRVDFCGKGYHLMSFPQSAPHGVVFLHVTYVPAQEKNFTTAPAICHDGKAHFPREGVFVSNGTHWFVTQRNFYEPQIITTDNTFVSGNCDVVIGIVNNTVYDPLQPELDSFKEELDKYFKNHTSPDVDLGDISGINASVVNIQKEIDRLNEVAKNLNESLIDLQELGKYEQYIKGSGRENLYFQGGGGSGYIPEAPRDGQAYVRKDGEWVLLSTFLGHHHHHHHH

SEQ ID NO: 5364 - protein, 1281 aa, Artificial Sequence
  Description of Artificial Sequence: Synthetic polypeptide
MGILPSPGMPALLSLVSLLSVLLMGCVAETGTQCVNLTTRTQLPPAYTNSFTRGVYYPDKVFRSSVLHSTQDLFLPFFSNVTWFHAIHVSGTNGTKRFDNPVLPFNDGVYFASTEKSNIIRGWIFGTTLDSKTQSLLIVNNATNVVIKVCEFQFCNDPFLGVYYHKNNKSWMESEFRVYSSANNCTFEYVSQPFLMDLEGKQGNFKNLREFVFKNIDGYFKIYSKHTPINLVRDLPQGFSALEPLVDLPIGINITRFQTLLALHRSYLTPGDSSSGWTAGAAAYYVGYLQPRTFLLKYNENGTITDAVDCALDPLSETKCTLKSFTVEKGIYQTSNFRVQPTESIVRFPNITNLCPFGEVFNATRFASVYAWNRKRISNCVADYSVLYNSASFSTFKCYGVSPTKLNDLCFTNVYADSFVIRGDEVRQIAPGQTGKIADYNYKLPDDFTGCVIAWNSNNLDSKVGGNYNYLYRLFRKSNLKPFERDISTEIYQAGSTPCNGVEGFNCYFPLQSYVFQPTNGVGYQPYRVVVLSFELLHAPATVCGPKKSTNLVKNKCVNFNFNGLTGTGVLTESNKKFLPFQQFGRDIADTTDAVRDPQTLEILDITPCSFGGVSVITPGTNTSNQVAVLYQDVNCTEVPVAIHADQLTPTWRVYSTGSNVFQTRAGCLIGAEHVNNSYECDIPIGAGICASYQTQTNSPSGAGSVASQSIIAYTMSLGAENSVAYSNNSIAIPTNFTISVTTEILPVSMTKTSVDCTMYICGDSTECSNLLLQYGSFCTQLNRALTGIAVEQDKNTQEVFAQVKQIYKTPPIKDFGGFNFSQILPDPSKPSKRSFIEDLLFNKVTLADAGFIKQYGDCLGDIAARDLICAQKFNGLTVLPPLLTDEMIAQYTSALLAGTITSGWTFGAGAALQIPFAMQMAYRFNGIGVTQNVLYENQKLIANQFNSAIGKIQDSLSSTASALGKLQDVVNQNAQALNTLVKQLSSNFGAISSVLNDILSRLDPPEAEVQIDRLITGRLQSLQTYVTQQLIRAAEIRASANLAATKMSECVLGQSKRVDFCGKGYHLMSFPQSAPHGVVFLHVTYVPAQEKNFTTAPAICHDGKAHFPREGVFVSNGTHWFVTQRNFYEPQIITTDNTFVSGNCDVVIGIVNNTVYDPLQPELDSFKEELDKYFKNHTSPDVDLGDISGINASVVNIQKEIDRLNEVAKNLNESLIDLQELGKYEQYIKGSGRENLYFQGGGGSGYIPEAPRDGQAYVRKDGEWVLLSTFLGHHHHHHHH

SEQ ID NO: 5365 - protein, 1281 aa, Artificial Sequence
  Description of Artificial Sequence: Synthetic polypeptide
MGILPSPGMPALLSLVSLLSVLLMGCVAETGTQCVNLTTRTQLPPAYTNSFTRGVYYPDKVFRSSVLHSTQDLFLPFFSNVTWFHAIHVSGTNGTKRFDNPVLPFNDGVYFASTEKSNIIRGWIFGTTLDSKTQSLLIVNNATNVVIKVCEFQFCNDPFLGVYYHKNNKSWMESEFRVYSSANNCTFEYVSQPFLMDLEGKQGNFKNLREFVFKNIDGYFKIYSKHTPINLVRDLPQGFSALEPLVDLPIGINITRFQTLLALHRSYLTPGDSSSGWTAGAAAYYVGYLQPRTFLLKYNENGTITDAVDCALDPLSETKCTLKSFTVEKGIYQTSNFRVQPTESIVRFPNITNLCPFGEVFNATRFASVYAWNRKRISNCVADYSVLYNSASFSTFKCYGVSPTKLNDLCFTNVYADSFVIRGDEVRQIAPGQTGKIADYNYKLPDDFTGCVIAWNSNNLDSKVGGNYNYLYRLFRKSNLKPFERDISTEIYQAGSTPCNGVEGFNEYFPLQSYGFQPTNGVGYQPYRVVVLSFELLHAPATVCGPKKSTNLVKNKCVNFNFNGLTGTGVLTESNKKFLPFQQFGRDIADTTDAVRDPQTLEILDITPCSFGGVSVITPGTNTSNQVAVLYQDVNCTEVPVAIHADQLTPTWRVYSTGSNVFQTRAGCLIGAEHVNNSYECDIPIGAGICASYQTQTNSPSGAGSVASQSIIAYTMSLGAENSVAYSNNSIAIPTNFTISVTTEILPVSMTKTSVDCTMYICGDSTECSNLLLQYGSFCTQLNRALTGIAVEQDKNTQEVFAQVKQIYKTPPIKDFGGFNFSQILPDPSKPSKRSFIEDLLFNKVTLADAGFIKQYGDCLGDIAARDLICAQKFNGLTVLPPLLTDEMIAQYTSALLAGTITSGWTFGAGAALQIPFAMQMAYRFNGIGVTQNVLYENQKLIANQFNSAIGKIQDSLSSTASALGKLQDVVNQNAQALNTLVKQLSSNFGAISSVLNDILSRLDPPEAEVQIDRLITGRLQSLQTYVTQQLIRAAEIRASANLAATKMSECVLGQSKRVDFCGKGYHLMSFPQSAPHGVVFLHVTYVPAQEKNFTTAPAICHDGKAHFPREGVFVSNGTHWFVTQRNFYEPQIITTDNTFVSGNCDVVIGIVNNTVYDPLQPELDSFKEELDKYFKNHTSPDVDLGDISGINASVVNIQKEIDRLNEVAKNLNESLIDLQELGKYEQYIKGSGRENLYFQGGGGSGYIPEAPRDGQAYVRKDGEWVLLSTFLGHHHHHHHH

SEQ ID NO: 5366 - protein, 1281 aa, Artificial Sequence
  Description of Artificial Sequence: Synthetic polypeptide
MGILPSPGMPALLSLVSLLSVLLMGCVAETGTQCVNLTTRTQLPPAYTNSFTRGVYYPDKVFRSSVLHSTQDLFLPFFSNVTWFHAIHVSGTNGTKRFDNPVLPFNDGVYFASTEKSNIIRGWIFGTTLDSKTQSLLIVNNATNVVIKVCEFQFCNDPFLGVYYHKNNKSWMESEFRVYSSANNCTFEYVSQPFLMDLEGKQGNFKNLREFVFKNIDGYFKIYSKHTPINLVRDLPQGFSALEPLVDLPIGINITRFQTLLALHRSYLTPGDSSSGWTAGAAAYYVGYLQPRTFLLKYNENGTITDAVDCALDPLSETKCTLKSFTVEKGIYQTSNFRVQPTESIVRFPNITNLCPFGEVFNATRFASVYAWNRKRISNCVADYSVLYNSASFSTFKCYGVSPTKLNDLCFTNVYADSFVIRGDEVRQIAPGQTGKIADYNYKLPDDFTGCVIAWNSNNLDSKVGGNYNYLYRLFRKSNLKPFERDISTEIYQAGSTPCNGVEGFNCYFPLQSYGFQPTNGVGYQPYRVVVLSFELLHAPATVCGPKKSTNLVKNKCVNFNFNGLTGTGVLTESNKKFLPFQQFGRDIADTTDAVRDPQTLEILDITPCSFGGVSVITPGTNTSNQVAVLYQDVNCTEVPVAIHADQLTPTWRVYSTGSNVFQTRAGCLIGAEHVNNSYECDIPIGAGICASYQTQTNSPSGAGSVASQSIIAYTMSLGAENSVAYSNNSIAIPTNFTISVTTEILPVSMTKTSVDCTMYICGDSTECSNLLLQYGSFCTQLNRALTGIAVEQDKNTQEVFAQVKQIYKTPPIKDFGGFNFSQILPDPSKPSKRSFIEDLLFNKVTLADAGFIKQYGDCLGDIAARDLICAQKFNGLTVLPPLLTDEMIAQYTSALLAGTITSGWTFGAGAALQIPFAMQMAYRFNGIGVTQNVLYENQKLIANQFNSAIGKIQDSLSSTASALGKLQDVVNQNAQALNTLVKQLSSNFGAISSVLNDILSRLDPPEAEVQIDRLITGRLQSLQTYVTQQLIRAAEIRASANLAATKMSECVLGQSKRVDFCGKGYHLMSFPQSAPHGVVFLHVTYVPAQRKNFTTAPAICHDGKAHFPREGVFVSNGTHWFVTQRNFYEPQIITTDNTFVSGNCDVVIGIVNNTVYDPLQPELDSFKEELDKYFKNHTSPDVDLGDISGINASVVNIQKEIDRLNEVAKNLNESLIDLQELGKYEQYIKGSGRENLYFQGGGGSGYIPEAPRDGQAYVRKDGEWVLLSTFLGHHHHHHHH

SEQ ID NO: 5367 - protein, 1281 aa, Artificial Sequence
  Description of Artificial Sequence: Synthetic polypeptide
MGILPSPGMPALLSLVSLLSVLLMGCVAETGTQCVNLTTRTQLPPAYTNSFTRGVYYPDKVFRSSVLHSTQDLFLPFFSNVTWFHAIHVSGTNGTKRFDNPVLPFNDGVYFASTEKSNIIRGWIFGTTLDSKTQSLLIVNNATNVVIKVCEFQFCNDPFLGVYYHKNNKSWMESEFRVYSSANNCTFEYVSQPFLMDLEGKQGNFKNLREFVFKNIDGYFKIYSKHTPINLVRDLPQGFSALEPLVDLPIGINITRFQTLLALHRSYLTPGDSSSGWTAGAAAYYVGYLQPRTFLLKYNENGTITDAVDCALDPLSETKCTLKSFTVEKGIYQTSNFRVQPTESIVRFPNITNLCPFGEVFNATRFASVYAWNRKRISNCVADYSVLYNSASFSTFKCYGVSPTKLNDLCFTNVYADSFVIRGDEVRQIAPGQTGKIADYNYNLPDDFTGCVIAWNSNNLDSKVGGNYNYLYRLFRKSNLKPFERDISTEIYQAGSTPCNGVEGFNCYFPLQSYGFQPTNGVGYQPYRVVVLSFELLHAPATVCGPKKSTNLVKNKCVNFNFNGLTGTGVLTESNKKFLPFQQFGRDIADTTDAVRDPQTLEILDITPCSFGGVSVITPGTNTSNQVAVLYQDVNCTEVPVAIHADQLTPTWRVYSTGSNVFQTRAGCLIGAEHVNNSYECDIPIGAGICASYQTQTNSPSGAGSVASQSIIAYTMSLGAENSVAYSNNSIAIPTNFTISVTTEILPVSMTKTSVDCTMYICGDSTECSNLLLQYGSFCTQLNRALTGIAVEQDKNTQEVFAQVKQIYKTPPIKDFGGFNFSQILPDPSKPSKRSFIEDLLFNKVTLADAGFIKQYGDCLGDIAARDLICAQKFNGLTVLPPLLTDEMIAQYTSALLAGTITSGWTFGAGAALQIPFAMQMAYRFNGIGVTQNVLYENQKLIANQFNSAIGKIQDSLSSTASALGKLQDVVNQNAQALNTLVKQLSSNFGAISSVLNDILSRLDPPEAEVQIDRLITGRLQSLQTYVTQQLIRAAEIRASANLAATKMSECVLGQSKRVDFCGKGYHLMSFPQSAPHGVVFLHVTYVPAQEKNFTTAPAICHDGKAHFPREGVFVSNGTHWFVTQRNFYEPQIITTDNTFVSGNCDVVIGIVNNTVYDPLQPELDSFKEELDKYFKNHTSPDVDLGDISGINASVVNIQKEIDRLNEVAKNLNESLIDLQELGKYEQYIKGSGRENLYFQGGGGSGYIPEAPRDGQAYVRKDGEWVLLSTFLGHHHHHHHH

SEQ ID NO: 5368 - protein, 1281 aa, Artificial Sequence
  Description of Artificial Sequence: Synthetic polypeptide
MGILPSPGMPALLSLVSLLSVLLMGCVAETGTQCVNLTTRTQLPPAYTNSFTRGVYYPDKVFRSSVLHSTQDLFLPFFSNVTWFHAIHVSGTNGTKRFDNPVLPFNDGVYFASTEKSNIIRGWIFGTTLDSKTQSLLIVNNATNVVIKVCEFQFCNDPFLGVYYHKNNKSWMESEFRVYSSANNCTFEYVSQPFLMDLEGKQGNFKNLREFVFKNIDGYFKIYSKHTPINLVRDLPQGFSALEPLVDLPIGINITRFQTLLALHRSYLTPGDSSSGWTAGAAAYYVGYLQPRTFLLKYNENGTITDAVDCALDPLSETKCTLKSFTVEKGIYQTSNFRVQPTESIVRFPNITNLCPFGEVFNATRFASVYAWNRKRISNCVADYSVLYNSASFSTFKCYGVSPTKLNDLCFTNVYADSFVIRGDEVRQIAPGQTGKIADYNYKLPDDFTGCVIAWNSNNLDSKVGGNYNYLYRLFRKSNLKPFERDISSEIYQAGSTPCNGVEGFNCYFPLQSYGFQPTNGVGYQPYRVVVLSFELLHAPATVCGPKKSTNLVKNKCVNFNFNGLTGTGVLTESNKKFLPFQQFGRDIADTTDAVRDPQTLEILDITPCSFGGVSVITPGTNTSNQVAVLYQDVNCTEVPVAIHADQLTPTWRVYSTGSNVFQTRAGCLIGAEHVNNSYECDIPIGAGICASYQTQTNSPSGAGSVASQSIIAYTMSLGAENSVAYSNNSIAIPTNFTISVTTEILPVSMTKTSVDCTMYICGDSTECSNLLLQYGSFCTQLNRALTGIAVEQDKNTQEVFAQVKQIYKTPPIKDFGGFNFSQILPDPSKPSKRSFIEDLLFNKVTLADAGFIKQYGDCLGDIAARDLICAQKFNGLTVLPPLLTDEMIAQYTSALLAGTITSGWTFGAGAALQIPFAMQMAYRFNGIGVTQNVLYENQKLIANQFNSAIGKIQDSLSSTASALGKLQDVVNQNAQALNTLVKQLSSNFGAISSVLNDILSRLDPPEAEVQIDRLITGRLQSLQTYVTQQLIRAAEIRASANLAATKMSECVLGQSKRVDFCGKGYHLMSFPQSAPHGVVFLHVTYVPAQEKNFTTAPAICHDGKAHFPREGVFVSNGTHWFVTQRNFYEPQIITTDNTFVSGNCDVVIGIVNNTVYDPLQPELDSFKEELDKYFKNHTSPDVDLGDISGINASVVNIQKEIDRLNEVAKNLNESLIDLQELGKYEQYIKGSGRENLYFQGGGGSGYIPEAPRDGQAYVRKDGEWVLLSTFLGHHHHHHHH

SEQ ID NO: 5369 - protein, 1281 aa, Artificial Sequence
  Description of Artificial Sequence: Synthetic polypeptide
MGILPSPGMPALLSLVSLLSVLLMGCVAETGTQCVNLTTRTQLPPAYTNSFTRGVYYPDKVFRSSVLHSTQDLFLPFFSNVTWFHAIHVSGTNGTKRFDNPVLPFNDGVYFASTEKSNIIRGWIFGTTLDSKTQSLLIVNNATNVVIKVCEFQFCNDPFLGVYYHKNNKSWMESEFRVYSSANNCTFEYVSQPFLMDLEGKQGNFKNLREFVFKNIDGYFKIYSKHTPINLVRDLPQGFSALEPLVDLPIGINITRFQTLLALHRSYLTPGDSSSGWTAGAAAYYVGYLQPRTFLLKYNENGTITDAVDCALDPLSETKCTLKSFTVEKGIYQTSNFRVQPTESIVRFPNITNLCPFGEVFNATRFASVYAWNRKRISNCVADYSVLYNSASFSTFKCYGVSPTKLNDLCFTNVYADSFVIRGDEVRQIAPGQTGKIADYNYKLPDDFTGCVIAWNSNNLDSKVGGNYNYLYRLFRKSNLKPFERDISTEIYQAGSTPCNGVEGFNCYFPLQSYGFQPTNGVGYQPYRVVVLSFELLHAPATVCGPKKSTNLVKNKCVNFNFNGLTGTGVLTESNKKFLPFQQFGRDIADTTDAVRDPQTLEILDITPCSFGGVSVITPGTNTSNQVAVLYQDVNCTEVPVAIHADQLTPTWRVYSTGSNVFQTRAGCLIGAEHVNNSYECDIPIGAGICASYQTQTNSPSGAGSVASQSIIAYTMSLGAENSVAYSNNSIAIPTNFTISVTTEILPVSMTKTSVDCTMYICGDSTECSNLLLQYGSFCTQLNRALTGIAVEQDKNTQEVFAQVKQIYKTPPIKDFGGFNFSQILPDPSKPSKRSFIEDLLFNKVTLADAGFIKQYGDCLGDIAARDLICAQKFNGLTVLPPLLTDEMIAQYTSALLAGTITSGWTFGAGAALTIPFAMQMAYRFNGIGVTQNVLYENQKLIANQFNSAIGKIQDSLSSTASALGKLQDVVNQNAQALNTLVKQLSSNFGAISSVLNDILSRLDPPEAEVQIDRLITGRLQSLQTYVTQQLIRAAEIRASANLAATKMSECVLGQSKRVDFCGKGYHLMSFPQSAPHGVVFLHVTYVPAQEKNFTTAPAICHDGKAHFPREGVFVSNGTHWFVTQRNFYEPQIITTDNTFVSGNCDVVIGIVNNTVYDPLQPELDSFKEELDKYFKNHTSPDVDLGDISGINASVVNIQKEIDRLNEVAKNLNESLIDLQELGKYEQYIKGSGRENLYFQGGGGSGYIPEAPRDGQAYVRKDGEWVLLSTFLGHHHHHHHH

SEQ ID NO: 5370 - protein, 1281 aa, Artificial Sequence
  Description of Artificial Sequence: Synthetic polypeptide
MGILPSPGMPALLSLVSLLSVLLMGCVAETGTQCVNLTTRTQLPPAYTNSFTRGVYYPDKVFRSSVLHSTQDLFLPFFSNVTWFHAIHVSGTNGTKRFDNPVLPFNDGVYFASTEKSNIIRGWIFGTTLDSKTQSLLIVNNATNVVIKVCEFQFCNDPFLGVYYHKNNKSWMESEFRVYSSANNCTFEYVSQPFLMDLEGKQGNFKNLREFVFKNIDGYFKIYSKHTPINLVRDLPQGFSALEPLVDLPIGINITRFQTLLALHRSYLTPGDSSSGWTAGAAAYYVGYLQPRTFLLKYNENGTITDAVDCALDPLSETKCTLKSFTVEKGIYQTSNFRVQPTESIVRFPNITNLCPFGEVFNATRFASVYAWNRKRISNCVADYSVLYNSASFSTFKCYGVSPTKLNHLCFTNVYADSFVIRGDEVRQIAPGQTGKIADYNYKLPDDFTGCVIAWNSNNLDSKVGGNYNYLYRLFRKSNLKPFERDISTEIYQAGSTPCNGVEGFNCYFPLQSYGFQPTNGVGYQPYRVVVLSFELLHAPATVCGPKKSTNLVKNKCVNFNFNGLTGTGVLTESNKKFLPFQQFGRDIADTTDAVRDPQTLEILDITPCSFGGVSVITPGTNTSNQVAVLYQDVNCTEVPVAIHADQLTPTWRVYSTGSNVFQTRAGCLIGAEHVNNSYECDIPIGAGICASYQTQTNSPSGAGSVASQSIIAYTMSLGAENSVAYSNNSIAIPTNFTISVTTEILPVSMTKTSVDCTMYICGDSTECSNLLLQYGSFCTQLNRALTGIAVEQDKNTQEVFAQVKQIYKTPPIKDFGGFNFSQILPDPSKPSKRSFIEDLLFNKVTLADAGFIKQYGDCLGDIAARDLICAQKFNGLTVLPPLLTDEMIAQYTSALLAGTITSGWTFGAGAALQIPFAMQMAYRFNGIGVTQNVLYENQKLIANQFNSAIGKIQDSLSSTASALGKLQDVVNQNAQALNTLVKQLSSNFGAISSVLNDILSRLDPPEAEVQIDRLITGRLQSLQTYVTQQLIRAAEIRASANLAATKMSECVLGQSKRVDFCGKGYHLMSFPQSAPHGVVFLHVTYVPAQEKNFTTAPAICHDGKAHFPREGVFVSNGTHWFVTQRNFYEPQIITTDNTFVSGNCDVVIGIVNNTVYDPLQPELDSFKEELDKYFKNHTSPDVDLGDISGINASVVNIQKEIDRLNEVAKNLNESLIDLQELGKYEQYIKGSGRENLYFQGGGGSGYIPEAPRDGQAYVRKDGEWVLLSTFLGHHHHHHHH

SEQ ID NO: 5371 - protein, 1281 aa, Artificial Sequence
  Description of Artificial Sequence: Synthetic polypeptide
MGILPSPGMPALLSLVSLLSVLLMGCVAETGTQCVNLTTRTQLPPAYTNSFTRGVYYPDKVFRSSVLHSTQDLFLPFFSNVTWFHAIHVSGTNGTKRFDNPVLPFNDGVYFASTEKSNIIRGWIFGTTLDSKTQSLLIVNNATNVVIKVCEFQFCNDPFLGVYYHKNNKSWMESEFRVYSSANNCTFEYVSQPFLMDLEGKQGNFKNLREFVFKNIDGYFKIYSKHTPINLVRDLPQGFSALEPLVDLPIGINITRFQTLLALHRSYLTPGDSSSGWTAGAAAYYVGYLQPRTFLLKYNENGTITDAVDCALDPLSETKCTLKSFTVEKGIYQTSNFRVQPTESIVRFPNITNLCPFGEVFNATRFASVYAWNRKRISNCVADYSVLYNSASFSTFKCYGVSPTKLNDLCFTNVYADSFVIRGDEVRQIAPGQTGKIADYNYKLPDDFTGCVIAWNSNNLDSKLGGNYNYLYRLFRKSNLKPFERDISTEIYQAGSTPCNGVEGFNCYFPLQSYGFQPTNGVGYQPYRVVVLSFELLHAPATVCGPKKSTNLVKNKCVNFNFNGLTGTGVLTESNKKFLPFQQFGRDIADTTDAVRDPQTLEILDITPCSFGGVSVITPGTNTSNQVAVLYQDVNCTEVPVAIHADQLTPTWRVYSTGSNVFQTRAGCLIGAEHVNNSYECDIPIGAGICASYQTQTNSPSGAGSVASQSIIAYTMSLGAENSVAYSNNSIAIPTNFTISVTTEILPVSMTKTSVDCTMYICGDSTECSNLLLQYGSFCTQLNRALTGIAVEQDKNTQEVFAQVKQIYKTPPIKDFGGFNFSQILPDPSKPSKRSFIEDLLFNKVTLADAGFIKQYGDCLGDIAARDLICAQKFNGLTVLPPLLTDEMIAQYTSALLAGTITSGWTFGAGAALQIPFAMQMAYRFNGIGVTQNVLYENQKLIANQFNSAIGKIQDSLSSTASALGKLQDVVNQNAQALNTLVKQLSSNFGAISSVLNDILSRLDPPEAEVQIDRLITGRLQSLQTYVTQQLIRAAEIRASANLAATKMSECVLGQSKRVDFCGKGYHLMSFPQSAPHGVVFLHVTYVPAQEKNFTTAPAICHDGKAHFPREGVFVSNGTHWFVTQRNFYEPQIITTDNTFVSGNCDVVIGIVNNTVYDPLQPELDSFKEELDKYFKNHTSPDVDLGDISGINASVVNIQKEIDRLNEVAKNLNESLIDLQELGKYEQYIKGSGRENLYFQGGGGSGYIPEAPRDGQAYVRKDGEWVLLSTFLGHHHHHHHH

SEQ ID NO: 5372 - protein, 1281 aa, Artificial Sequence
  Description of Artificial Sequence: Synthetic polypeptide
MGILPSPGMPALLSLVSLLSVLLMGCVAETGTQCVNLTTRTQLPPAYTNSFTRGVYYPDKVFRSSVLHSTQDLFLPFFSNVTWFHAIHVSGTNGTKRFDNPVLPFNDGVYFASTEKSNIIRGWIFGTTLDSKTQSLLIVNNATNVVIKVCEFQFCNDPFLGVYYHKNNKSWMESEFRVYSSANNCTFEYVSQPFLMDLEGKQGNFKNLREFVFKNIDGYFKIYSKHTPINLVRDLPQGFSALEPLVDLPIGINITRFQTLLALHRSYLTPGDSSSGWTAGAAAYYVGYLQPRTFLLKYNENGTITDAVDCALDPLSETKCTLKSFTVEKGIYQTSNFRVQPTESIVRFPNITNLCPFGEVFNATRFASVYAWNRKRISNCVADYSVLYNSASFSTFKCYGVSPTKLNDLCFTNVYADSFVIRGDEVRQIAPGQTGKIADYNYKLPDDFTGCVIAWNSNNLDSKVGGNYNYLYRLFRKSNLKPFERDISNEIYQAGSTPCNGVEGFNCYFPLQSYGFQPTNGVGYQPYRVVVLSFELLHAPATVCGPKKSTNLVKNKCVNFNFNGLTGTGVLTESNKKFLPFQQFGRDIADTTDAVRDPQTLEILDITPCSFGGVSVITPGTNTSNQVAVLYQDVNCTEVPVAIHADQLTPTWRVYSTGSNVFQTRAGCLIGAEHVNNSYECDIPIGAGICASYQTQTNSPSGAGSVASQSIIAYTMSLGAENSVAYSNNSIAIPTNFTISVTTEILPVSMTKTSVDCTMYICGDSTECSNLLLQYGSFCTQLNRALTGIAVEQDKNTQEVFAQVKQIYKTPPIKDFGGFNFSQILPDPSKPSKRSFIEDLLFNKVTLADAGFIKQYGDCLGDIAARDLICAQKFNGLTVLPPLLTDEMIAQYTSALLAGTITSGWTFGAGAALQIPFAMQMAYRFNGIGVTQNVLYENQKLIANQFNSAIGKIQDSLSSTASALGKLQDVVNQNAQALNTLVKQLSSNFGAISSVLNDILSRLDPPEAEVQIDRLITGRLQSLQTYVTQQLIRAAEIRASANLAATKMSECVLGQSKRVDFCGKGYHLMSFPQSAPHGVVFLHVTYVPAQEKNFTTAPAICHDGKAHFPREGVFVSNGTHWFVTQRNFYEPQIITTDNTFVSGNCDVVIGIVNNTVYDPLQPELDSFKEELDKYFKNHTSPDVDLGDISGINASVVNIQKEIDRLNEVAKNLNESLIDLQELGKYEQYIKGSGRENLYFQGGGGSGYIPEAPRDGQAYVRKDGEWVLLSTFLGHHHHHHHH

SEQ ID NO: 5373 - protein, 1281 aa, Artificial Sequence
  Description of Artificial Sequence: Synthetic polypeptide
MGILPSPGMPALLSLVSLLSVLLMGCVAETGTQCVNLTTRTQLPPAYTNSFTRGVYYPDKVFRSSVLHSTQDLFLPFFSNVTWFHAIHVSGTNGTKRFDNPVLPFNDGVYFASTEKSNIIRGWIFGTTLDSKTQSLLIVNNATNVVIKVCEFQFCNDPFLGVYYHKNNKSWMESEFRVYSSANNCTFEYVSQPFLMDLEGKQGNFKNLREFVFKNIDGYFKIYSKHTPINLVRDLPQGFSALEPLVDLPIGINITRFQTLLALHRSYLTPGDSSSGWTAGAAAYYVGYLQPRTFLLKYNENGTITDAVDCALDPLSETKCTLKSFTVEKGIYQTSNFRVQPTESIVRFPNITNLCPFGEVFNATRFASVYAWNRKRISNCVADYSVLYNSASFSTFKCYGVSPTKLNDLCFTNVYADSFVIRGDEVRQIAPGQTGKIADYNYKLPDDFTGCVIAWNSNNLDSKVGGNYNYLYRLFRKSNLKPFERDISTMIYQAGSTPCNGVEGFNCYFPLQSYGFQPTNGVGYQPYRVVVLSFELLHAPATVCGPKKSTNLVKNKCVNFNFNGLTGTGVLTESNKKFLPFQQFGRDIADTTDAVRDPQTLEILDITPCSFGGVSVITPGTNTSNQVAVLYQDVNCTEVPVAIHADQLTPTWRVYSTGSNVFQTRAGCLIGAEHVNNSYECDIPIGAGICASYQTQTNSPSGAGSVASQSIIAYTMSLGAENSVAYSNNSIAIPTNFTISVTTEILPVSMTKTSVDCTMYICGDSTECSNLLLQYGSFCTQLNRALTGIAVEQDKNTQEVFAQVKQIYKTPPIKDFGGFNFSQILPDPSKPSKRSFIEDLLFNKVTLADAGFIKQYGDCLGDIAARDLICAQKFNGLTVLPPLLTDEMIAQYTSALLAGTITSGWTFGAGAALQIPFAMQMAYRFNGIGVTQNVLYENQKLIANQFNSAIGKIQDSLSSTASALGKLQDVVNQNAQALNTLVKQLSSNFGAISSVLNDILSRLDPPEAEVQIDRLITGRLQSLQTYVTQQLIRAAEIRASANLAATKMSECVLGQSKRVDFCGKGYHLMSFPQSAPHGVVFLHVTYVPAQEKNFTTAPAICHDGKAHFPREGVFVSNGTHWFVTQRNFYEPQIITTDNTFVSGNCDVVIGIVNNTVYDPLQPELDSFKEELDKYFKNHTSPDVDLGDISGINASVVNIQKEIDRLNEVAKNLNESLIDLQELGKYEQYIKGSGRENLYFQGGGGSGYIPEAPRDGQAYVRKDGEWVLLSTFLGHHHHHHHH

SEQ ID NO: 5374 - protein, 1281 aa, Artificial Sequence
  Description of Artificial Sequence: Synthetic polypeptide
MGILPSPGMPALLSLVSLLSVLLMGCVAETGTQCVNLTTRTQLPPAYTNSFTRGVYYPDKVFRSSVLHSTQDLFLPFFSNVTWFHAIHVSGTNGTKRFDNPVLPFNDGVYFASTEKSNIIRGWIFGTTLDSKTQSLLIVNNATNVVIKVCEFQFCNDPFLGVYYHKNNKSWMESEFRVYSSANNCTFEYVSQPFLMDLEGKQGNFKNLREFVFKNIDGYFKIYSKHTPINLVRDLPQGFSALEPLVDLPIGINITRFQTLLALHRSYLTPGDSSSGWTAGAAAYYVGYLQPRTFLLKYNENGTITDAVDCALDPLSETKCTLKSFTVEKGIYQTSNFRVQPTESIVRFPNITNLCPFGEVFNATRFASVYAWNRKRISNCVADYSVLYNSASFSTFKCYGVSPTKLNDLCFTNVYADSFVIRGDEVRQIAPGQTGKIADYNYKLPDDFTGCVIAWNSNNLDSKVGGNYNYLYRLFRKSNLKPFERDISTEIYQAGSSPCNGVEGFNCYFPLQSYGFQPTNGVGYQPYRVVVLSFELLHAPATVCGPKKSTNLVKNKCVNFNFNGLTGTGVLTESNKKFLPFQQFGRDIADTTDAVRDPQTLEILDITPCSFGGVSVITPGTNTSNQVAVLYQDVNCTEVPVAIHADQLTPTWRVYSTGSNVFQTRAGCLIGAEHVNNSYECDIPIGAGICASYQTQTNSPSGAGSVASQSIIAYTMSLGAENSVAYSNNSIAIPTNFTISVTTEILPVSMTKTSVDCTMYICGDSTECSNLLLQYGSFCTQLNRALTGIAVEQDKNTQEVFAQVKQIYKTPPIKDFGGFNFSQILPDPSKPSKRSFIEDLLFNKVTLADAGFIKQYGDCLGDIAARDLICAQKFNGLTVLPPLLTDEMIAQYTSALLAGTITSGWTFGAGAALQIPFAMQMAYRFNGIGVTQNVLYENQKLIANQFNSAIGKIQDSLSSTASALGKLQDVVNQNAQALNTLVKQLSSNFGAISSVLNDILSRLDPPEAEVQIDRLITGRLQSLQTYVTQQLIRAAEIRASANLAATKMSECVLGQSKRVDFCGKGYHLMSFPQSAPHGVVFLHVTYVPAQEKNFTTAPAICHDGKAHFPREGVFVSNGTHWFVTQRNFYEPQIITTDNTFVSGNCDVVIGIVNNTVYDPLQPELDSFKEELDKYFKNHTSPDVDLGDISGINASVVNIQKEIDRLNEVAKNLNESLIDLQELGKYEQYIKGSGRENLYFQGGGGSGYIPEAPRDGQAYVRKDGEWVLLSTFLGHHHHHHHH

SEQ ID NO: 5375 - protein, 1281 aa, Artificial Sequence
  Description of Artificial Sequence: Synthetic polypeptide
MGILPSPGMPALLSLVSLLSVLLMGCVAETGTQCVNLTTRTQLPPAYTNSFTRGVYYPDKVFRSSVLHSTQDLFLPFFSNVTWFHAIHVSGTNGTKRFDNPVLPFNDGVYFASTEKSNIIRGWIFGTTLDSKTQSLLIVNNATNVVIKVCEFQFCNDPFLGVYYHKNNKSWMESEFRVYSSANNCTFEYVSQPFLMDLEGKQGNFKNLREFVFKNIDGYFKIYSKHTPINLVRDLPQGFSALEPLVDLPIGINITRFQTLLALHRSYLTPGDSSSGWTAGAAAYYVGYLQPRTFLLKYNENGTITDAVDCALDPLSETKCTLKSFTVEKGIYQTSNFRVQPTESIVRFPNITNLCPFGEVFNATRFASVYAWNRKRISNCVADYSVLYNSASFSTFKCYGVSPTKLNDLCFTNVYADSFVIRGDEVRQIAPGQTGKIADYTYKLPDDFTGCVIAWNSNNLDSKVGGNYNYLYRLFRKSNLKPFERDISTEIYQAGSTPCNGVEGFNCYFPLQSYGFQPTNGVGYQPYRVVVLSFELLHAPATVCGPKKSTNLVKNKCVNFNFNGLTGTGVLTESNKKFLPFQQFGRDIADTTDAVRDPQTLEILDITPCSFGGVSVITPGTNTSNQVAVLYQDVNCTEVPVAIHADQLTPTWRVYSTGSNVFQTRAGCLIGAEHVNNSYECDIPIGAGICASYQTQTNSPSGAGSVASQSIIAYTMSLGAENSVAYSNNSIAIPTNFTISVTTEILPVSMTKTSVDCTMYICGDSTECSNLLLQYGSFCTQLNRALTGIAVEQDKNTQEVFAQVKQIYKTPPIKDFGGFNFSQILPDPSKPSKRSFIEDLLFNKVTLADAGFIKQYGDCLGDIAARDLICAQKFNGLTVLPPLLTDEMIAQYTSALLAGTITSGWTFGAGAALQIPFAMQMAYRFNGIGVTQNVLYENQKLIANQFNSAIGKIQDSLSSTASALGKLQDVVNQNAQALNTLVKQLSSNFGAISSVLNDILSRLDPPEAEVQIDRLITGRLQSLQTYVTQQLIRAAEIRASANLAATKMSECVLGQSKRVDFCGKGYHLMSFPQSAPHGVVFLHVTYVPAQEKNFTTAPAICHDGKAHFPREGVFVSNGTHWFVTQRNFYEPQIITTDNTFVSGNCDVVIGIVNNTVYDPLQPELDSFKEELDKYFKNHTSPDVDLGDISGINASVVNIQKEIDRLNEVAKNLNESLIDLQELGKYEQYIKGSGRENLYFQGGGGSGYIPEAPRDGQAYVRKDGEWVLLSTFLGHHHHHHHH

SEQ ID NO: 5376 - protein, 1281 aa, Artificial Sequence
  Description of Artificial Sequence: Synthetic polypeptide
MGILPSPGMPALLSLVSLLSVLLMGCVAETGTQCVNLTTRTQLPPAYTNSFTRGVYYPDKVFRSSVLHSTQDLFLPFFSNVTWFHAIHVSGTNGTKRFDNPVLPFNDGVYFASTEKSNIIRGWIFGTTLDSKTQSLLIVNNATNVVIKVCEFQFCNDPFLGVYYHKNNKSWMESEFRVYSSANNCTFEYVSQPFLMDLEGKQGNFKNLREFVFKNIDGYFKIYSKHTPINLVRDLPQGFSALEPLVDLPIGINITRFQTLLALHRSYLTPGDSSSGWTAGAAAYYVGYLQPRTFLLKYNENGTITDAVDCALDPLSETKCTLKSFTVEKGIYQTSNFRVQPTESIVRFPNITNLCPFGEVFNATRFASVYAWNRKRISNCVADYSVLYNSASFSTFKCYGVSPTKLNDLCFTNVYADSFVIRGDEVRQIAPGQTGKIADYNYKLPDDFTGCVIAWNSNNLDSKVGGNYNYLYRLFRKSNLKPFERDISTECYQAGSTPCNGVEGFNCYFPLQSYGFQPTNGVGYQPYRVVVLSFELLHAPATVCGPKKSTNLVKNKCVNFNFNGLTGTGVLTESNKKFLPFQQFGRDIADTTDAVRDPQTLEILDITPCSFGGVSVITPGTNTSNQVAVLYQDVNCTEVPVAIHADQLTPTWRVYSTGSNVFQTRAGCLIGAEHVNNSYECDIPIGAGICASYQTQTNSPSGAGSVASQSIIAYTMSLGAENSVAYSNNSIAIPTNFTISVTTEILPVSMTKTSVDCTMYICGDSTECSNLLLQYGSFCTQLNRALTGIAVEQDKNTQEVFAQVKQIYKTPPIKDFGGFNFSQILPDPSKPSKRSFIEDLLFNKVTLADAGFIKQYGDCLGDIAARDLICAQKFNGLTVLPPLLTDEMIAQYTSALLAGTITSGWTFGAGAALQIPFAMQMAYRFNGIGVTQNVLYENQKLIANQFNSAIGKIQDSLSSTASALGKLQDVVNQNAQALNTLVKQLSSNFGAISSVLNDILSRLDPPEAEVQIDRLITGRLQSLQTYVTQQLIRAAEIRASANLAATKMSECVLGQSKRVDFCGKGYHLMSFPQSAPHGVVFLHVTYVPAQEKNFTTAPAICHDGKAHFPREGVFVSNGTHWFVTQRNFYEPQIITTDNTFVSGNCDVVIGIVNNTVYDPLQPELDSFKEELDKYFKNHTSPDVDLGDISGINASVVNIQKEIDRLNEVAKNLNESLIDLQELGKYEQYIKGSGRENLYFQGGGGSGYIPEAPRDGQAYVRKDGEWVLLSTFLGHHHHHHHH

SEQ ID NO: 5377 - protein, 1281 aa, Artificial Sequence
  Description of Artificial Sequence: Synthetic polypeptide
MGILPSPGMPALLSLVSLLSVLLMGCVAETGTQCVNLTTRTQLPPAYTNSFTRGVYYPDKVFRSSVLHSTQDLFLPFFSNVTWFHAIHVSGTNGTKRFDNPVLPFNDGVYFASTEKSNIIRGWIFGTTLDSKTQSLLIVNNATNVVIKVCEFQFCNDPFLGVYYHKNNKSWMESEFRVYSSANNCTFEYVSQPFLMDLEGKQGNFKNLREFVFKNIDGYFKIYSKHTPINLVRDLPQGFSALEPLVDLPIGINITRFQTLLALHRSYLTPGDSSSGWTAGAAAYYVGYLQPRTFLLKYNENGTITDAVDCALDPLSETKCTLKSFTVEKGIYQTSNFRVQPTESIVRFPNITNLCPFGEVFNATRFASVYAWNRKRISNCVADYSALYNSASFSTFKCYGVSPTKLNDLCFTNVYADSFVIRGDEVRQIAPGQTGKIADYNYKLPDDFTGCVIAWNSNNLDSKVGGNYNYLYRLFRKSNLKPFERDISTEIYQAGSTPCNGVEGFNCYFPLQSYGFQPTNGVGYQPYRVVVLSFELLHAPATVCGPKKSTNLVKNKCVNFNFNGLTGTGVLTESNKKFLPFQQFGRDIADTTDAVRDPQTLEILDITPCSFGGVSVITPGTNTSNQVAVLYQDVNCTEVPVAIHADQLTPTWRVYSTGSNVFQTRAGCLIGAEHVNNSYECDIPIGAGICASYQTQTNSPSGAGSVASQSIIAYTMSLGAENSVAYSNNSIAIPTNFTISVTTEILPVSMTKTSVDCTMYICGDSTECSNLLLQYGSFCTQLNRALTGIAVEQDKNTQEVFAQVKQIYKTPPIKDFGGFNFSQILPDPSKPSKRSFIEDLLFNKVTLADAGFIKQYGDCLGDIAARDLICAQKFNGLTVLPPLLTDEMIAQYTSALLAGTITSGWTFGAGAALQIPFAMQMAYRFNGIGVTQNVLYENQKLIANQFNSAIGKIQDSLSSTASALGKLQDVVNQNAQALNTLVKQLSSNFGAISSVLNDILSRLDPPEAEVQIDRLITGRLQSLQTYVTQQLIRAAEIRASANLAATKMSECVLGQSKRVDFCGKGYHLMSFPQSAPHGVVFLHVTYVPAQEKNFTTAPAICHDGKAHFPREGVFVSNGTHWFVTQRNFYEPQIITTDNTFVSGNCDVVIGIVNNTVYDPLQPELDSFKEELDKYFKNHTSPDVDLGDISGINASVVNIQKEIDRLNEVAKNLNESLIDLQELGKYEQYIKGSGRENLYFQGGGGSGYIPEAPRDGQAYVRKDGEWVLLSTFLGHHHHHHHH

SEQ ID NO: 5378 - protein, 1281 aa, Artificial Sequence
  Description of Artificial Sequence: Synthetic polypeptide
MGILPSPGMPALLSLVSLLSVLLMGCVAETGTQCVNLTTRTQLPPAYTNSFTRGVYYPDKVFRSSVLHSTQDLFLPFFSNVTWFHAIHVSGTNGTKRFDNPVLPFNDGVYFASTEKSNIIRGWIFGTTLDSKTQSLLIVNNATNVVIKVCEFQFCNDPFLGVYYHKNNKSWMESEFRVYSSANNCTFEYVSQPFLMDLEGKQGNFKNLREFVFKNIDGYFKIYSKHTPINLVRDLPQGFSALEPLVDLPIGINITRFQTLLALHRSYLTPGDSSSGWTAGAAAYYVGYLQPRTFLLKYNENGTITDAVDCALDPLSETKCTLKSFTVEKGIYQTSNFRVQPTESIVRFPNITNLCPFGEVFNATRFASVYAWNRKRISNCVADYSVLYNSASFSTFKCYGVSPTKLNDLCFTNVYADQFVIRGDEVRQIAPGQTGKIADYNYKLPDDFTGCVIAWNSNNLDSKVGGNYNYLYRLFRKSNLKPFERDISTEIYQAGSTPCNGVEGFNCYFPLQSYGFQPTNGVGYQPYRVVVLSFELLHAPATVCGPKKSTNLVKNKCVNFNFNGLTGTGVLTESNKKFLPFQQFGRDIADTTDAVRDPQTLEILDITPCSFGGVSVITPGTNTSNQVAVLYQDVNCTEVPVAIHADQLTPTWRVYSTGSNVFQTRAGCLIGAEHVNNSYECDIPIGAGICASYQTQTNSPSGAGSVASQSIIAYTMSLGAENSVAYSNNSIAIPTNFTISVTTEILPVSMTKTSVDCTMYICGDSTECSNLLLQYGSFCTQLNRALTGIAVEQDKNTQEVFAQVKQIYKTPPIKDFGGFNFSQILPDPSKPSKRSFIEDLLFNKVTLADAGFIKQYGDCLGDIAARDLICAQKFNGLTVLPPLLTDEMIAQYTSALLAGTITSGWTFGAGAALQIPFAMQMAYRFNGIGVTQNVLYENQKLIANQFNSAIGKIQDSLSSTASALGKLQDVVNQNAQALNTLVKQLSSNFGAISSVLNDILSRLDPPEAEVQIDRLITGRLQSLQTYVTQQLIRAAEIRASANLAATKMSECVLGQSKRVDFCGKGYHLMSFPQSAPHGVVFLHVTYVPAQEKNFTTAPAICHDGKAHFPREGVFVSNGTHWFVTQRNFYEPQIITTDNTFVSGNCDVVIGIVNNTVYDPLQPELDSFKEELDKYFKNHTSPDVDLGDISGINASVVNIQKEIDRLNEVAKNLNESLIDLQELGKYEQYIKGSGRENLYFQGGGGSGYIPEAPRDGQAYVRKDGEWVLLSTFLGHHHHHHHH

SEQ ID NO: 5379 - protein, 1281 aa, Artificial Sequence
  Description of Artificial Sequence: Synthetic polypeptide
MGILPSPGMPALLSLVSLLSVLLMGCVAETGTQCVNLTTRTQLPPAYTNSFTRGVYYPDKVFRSSVLHSTQDLFLPFFSNVTWFHAIHVSGTNGTKRFDNPVLPFNDGVYFASTEKSNIIRGWIFGTTLDSKTQSLLIVNNATNVVIKVCEFQFCNDPFLGVYYHKNNKSWMESEFRVYSSANNCTFEYVSQPFLMDLEGKQGNFKNLREFVFKNIDGYFKIYSKHTPINLVRDLPQGFSALEPLVDLPIGINITRFQTLLALHRSYLTPGDSSSGWTAGAAAYYVGYLQPRTFLLKYNENGTITDAVDCALDPLSETKCTLKSFTVEKGIYQTSNFRVQPTESIVRFPNITNLCPFGEVFNATRFASVYAWNRKRISNCVADYSVLYNSASFSTFKCYGVSPTKLNDLCFTNVYADSFVIRGDEVRQIAPGQTGKIADYNYKLPDDFTGCVIAWNSCNLDSKVGGNYNYLYRLFRKSNLKPFERDISTEIYQAGSTPCNGVEGFNCYFPLQSYGFQPTNGVGYQPYRVVVLSFELLHAPATVCGPKKSTNLVKNKCVNFNFNGLTGTGVLTESNKKFLPFQQFGRDIADTTDAVRDPQTLEILDITPCSFGGVSVITPGTNTSNQVAVLYQDVNCTEVPVAIHADQLTPTWRVYSTGSNVFQTRAGCLIGAEHVNNSYECDIPIGAGICASYQTQTNSPSGAGSVASQSIIAYTMSLGAENSVAYSNNSIAIPTNFTISVTTEILPVSMTKTSVDCTMYICGDSTECSNLLLQYGSFCTQLNRALTGIAVEQDKNTQEVFAQVKQIYKTPPIKDFGGFNFSQILPDPSKPSKRSFIEDLLFNKVTLADAGFIKQYGDCLGDIAARDLICAQKFNGLTVLPPLLTDEMIAQYTSALLAGTITSGWTFGAGAALQIPFAMQMAYRFNGIGVTQNVLYENQKLIANQFNSAIGKIQDSLSSTASALGKLQDVVNQNAQALNTLVKQLSSNFGAISSVLNDILSRLDPPEAEVQIDRLITGRLQSLQTYVTQQLIRAAEIRASANLAATKMSECVLGQSKRVDFCGKGYHLMSFPQSAPHGVVFLHVTYVPAQEKNFTTAPAICHDGKAHFPREGVFVSNGTHWFVTQRNFYEPQIITTDNTFVSGNCDVVIGIVNNTVYDPLQPELDSFKEELDKYFKNHTSPDVDLGDISGINASVVNIQKEIDRLNEVAKNLNESLIDLQELGKYEQYIKGSGRENLYFQGGGGSGYIPEAPRDGQAYVRKDGEWVLLSTFLGHHHHHHHH

SEQ ID NO: 5380 - protein, 1281 aa, Artificial Sequence
  Description of Artificial Sequence: Synthetic polypeptide
MGILPSPGMPALLSLVSLLSVLLMGCVAETGTQCVNLTTRTQLPPAYTNSFTRGVYYPDKVFRSSVLHSTQDLFLPFFSNVTWFHAIHVSGTNGTKRFDNPVLPFNDGVYFASTEKSNIIRGWIFGTTLDSKTQSLLIVNNATNVVIKVCEFQFCNDPFLGVYYHKNNKSWMESEFRVYSSANNCTFEYVSQPFLMDLEGKQGNFKNLREFVFKNIDGYFKIYSKHTPINLVRDLPQGFSALEPLVDLPIGINITRFQTLLALHRSYLTPGDSSSGWTAGAAAYYVGYLQPRTFLLKYNENGTITDAVDCALDPLSETKCTLKSFTVEKGIYQTSNFRVQPTESIVRFPNITNLCPFGEVFNATRFASVYAWNRKRISNCVADYSVLYNSQSFSTFKCYGVSPTKLNDLCFTNVYADSFVIRGDEVRQIAPGQTGKIADYNYKLPDDFTGCVIAWNSNNLDSKVGGNYNYLYRLFRKSNLKPFERDISTEIYQAGSTPCNGVEGFNCYFPLQSYGFQPTNGVGYQPYRVVVLSFELLHAPATVCGPKKSTNLVKNKCVNFNFNGLTGTGVLTESNKKFLPFQQFGRDIADTTDAVRDPQTLEILDITPCSFGGVSVITPGTNTSNQVAVLYQDVNCTEVPVAIHADQLTPTWRVYSTGSNVFQTRAGCLIGAEHVNNSYECDIPIGAGICASYQTQTNSPSGAGSVASQSIIAYTMSLGAENSVAYSNNSIAIPTNFTISVTTEILPVSMTKTSVDCTMYICGDSTECSNLLLQYGSFCTQLNRALTGIAVEQDKNTQEVFAQVKQIYKTPPIKDFGGFNFSQILPDPSKPSKRSFIEDLLFNKVTLADAGFIKQYGDCLGDIAARDLICAQKFNGLTVLPPLLTDEMIAQYTSALLAGTITSGWTFGAGAALQIPFAMQMAYRFNGIGVTQNVLYENQKLIANQFNSAIGKIQDSLSSTASALGKLQDVVNQNAQALNTLVKQLSSNFGAISSVLNDILSRLDPPEAEVQIDRLITGRLQSLQTYVTQQLIRAAEIRASANLAATKMSECVLGQSKRVDFCGKGYHLMSFPQSAPHGVVFLHVTYVPAQEKNFTTAPAICHDGKAHFPREGVFVSNGTHWFVTQRNFYEPQIITTDNTFVSGNCDVVIGIVNNTVYDPLQPELDSFKEELDKYFKNHTSPDVDLGDISGINASVVNIQKEIDRLNEVAKNLNESLIDLQELGKYEQYIKGSGRENLYFQGGGGSGYIPEAPRDGQAYVRKDGEWVLLSTFLGHHHHHHHH

SEQ ID NO: 5381 - protein, 1281 aa, Artificial Sequence
  Description of Artificial Sequence: Synthetic polypeptide
MGILPSPGMPALLSLVSLLSVLLMGCVAETGTQCVNLTTRTQLPPAYTNSFTRGVYYPDKVFRSSVLHSTQDLFLPFFSNVTWFHAIHVSGTNGTKRFDNPVLPFNDGVYFASTEKSNIIRGWIFGTTLDSKTQSLLIVNNATNVVIKVCEFQFCNDPFLGVYYHKNNKSWMESEFRVYSSANNCTFEYVSQPFLMDLEGKQGNFKNLREFVFKNIDGYFKIYSKHTPINLVRDLPQGFSALEPAVDLPIGINITRFQTLLALHRSYLTPGDSSSGWTAGAAAYYVGYLQPRTFLLKYNENGTITDAVDCALDPLSETKCTLKSFTVEKGIYQTSNFRVQPTESIVRFPNITNLCPFGEVFNATRFASVYAWNRKRISNCVADYSVLYNSASFSTFKCYGVSPTKLNDLCFTNVYADSFVIRGDEVRQIAPGQTGKIADYNYKLPDDFTGCVIAWNSNNLDSKVGGNYNYLYRLFRKSNLKPFERDISTEIYQAGSTPCNGVEGFNCYFPLQSYGFQPTNGVGYQPYRVVVLSFELLHAPATVCGPKKSTNLVKNKCVNFNFNGLTGTGVLTESNKKFLPFQQFGRDIADTTDAVRDPQTLEILDITPCSFGGVSVITPGTNTSNQVAVLYQDVNCTEVPVAIHADQLTPTWRVYSTGSNVFQTRAGCLIGAEHVNNSYECDIPIGAGICASYQTQTNSPSGAGSVASQSIIAYTMSLGAENSVAYSNNSIAIPTNFTISVTTEILPVSMTKTSVDCTMYICGDSTECSNLLLQYGSFCTQLNRALTGIAVEQDKNTQEVFAQVKQIYKTPPIKDFGGFNFSQILPDPSKPSKRSFIEDLLFNKVTLADAGFIKQYGDCLGDIAARDLICAQKFNGLTVLPPLLTDEMIAQYTSALLAGTITSGWTFGAGAALQIPFAMQMAYRFNGIGVTQNVLYENQKLIANQFNSAIGKIQDSLSSTASALGKLQDVVNQNAQALNTLVKQLSSNFGAISSVLNDILSRLDPPEAEVQIDRLITGRLQSLQTYVTQQLIRAAEIRASANLAATKMSECVLGQSKRVDFCGKGYHLMSFPQSAPHGVVFLHVTYVPAQEKNFTTAPAICHDGKAHFPREGVFVSNGTHWFVTQRNFYEPQIITTDNTFVSGNCDVVIGIVNNTVYDPLQPELDSFKEELDKYFKNHTSPDVDLGDISGINASVVNIQKEIDRLNEVAKNLNESLIDLQELGKYEQYIKGSGRENLYFQGGGGSGYIPEAPRDGQAYVRKDGEWVLLSTFLGHHHHHHHH

SEQ ID NO: 5382 - protein, 1281 aa, Artificial Sequence
  Description of Artificial Sequence: Synthetic polypeptide
MGILPSPGMPALLSLVSLLSVLLMGCVAETGTQCVNLTTRTQLPPAYTNSFTRGVYYPDKVFRSSVLHSTQDLFLPFFSNVTWFHAIHVSGTNGTKRFDNPVLPFNDGVYFASTEKSNIIRGWIFGTTLDSKTQSLLIVNNATNVVIKVCEFQFCNDPFLGVYYHKNNKSWMESEFRVYSSANNCTFEYVSQPFLMDLEGKQGNFKNLREFVFKNIDGYFKIYSKHTPINLVRDLPQGFSALEPLVDLPIGINITRFQTLLALHRSYLTPGDSSSGWTAGAAAYYVGYLQPRTFLLKYNENGTITDAVDCALDPLSETKCTLKSFTVEKGIYQTSNFRVQPTESIVRFPNITNLCPFGEVFNATRFASVYAWNRKRISNCVADYSVLYNSASFSTFKCYGVSPTKLNDLCFTNVYADSFVIRGDEVRQIAPGQTGKIADYNYKLPDDFTGCVIAWNSNNLDSKVGGNYNYLYRLFRKSNLGPFERDISTEIYQAGSTPCNGVEGFNCYFPLQSYGFQPTNGVGYQPYRVVVLSFELLHAPATVCGPKKSTNLVKNKCVNFNFNGLTGTGVLTESNKKFLPFQQFGRDIADTTDAVRDPQTLEILDITPCSFGGVSVITPGTNTSNQVAVLYQDVNCTEVPVAIHADQLTPTWRVYSTGSNVFQTRAGCLIGAEHVNNSYECDIPIGAGICASYQTQTNSPSGAGSVASQSIIAYTMSLGAENSVAYSNNSIAIPTNFTISVTTEILPVSMTKTSVDCTMYICGDSTECSNLLLQYGSFCTQLNRALTGIAVEQDKNTQEVFAQVKQIYKTPPIKDFGGFNFSQILPDPSKPSKRSFIEDLLFNKVTLADAGFIKQYGDCLGDIAARDLICAQKFNGLTVLPPLLTDEMIAQYTSALLAGTITSGWTFGAGAALQIPFAMQMAYRFNGIGVTQNVLYENQKLIANQFNSAIGKIQDSLSSTASALGKLQDVVNQNAQALNTLVKQLSSNFGAISSVLNDILSRLDPPEAEVQIDRLITGRLQSLQTYVTQQLIRAAEIRASANLAATKMSECVLGQSKRVDFCGKGYHLMSFPQSAPHGVVFLHVTYVPAQEKNFTTAPAICHDGKAHFPREGVFVSNGTHWFVTQRNFYEPQIITTDNTFVSGNCDVVIGIVNNTVYDPLQPELDSFKEELDKYFKNHTSPDVDLGDISGINASVVNIQKEIDRLNEVAKNLNESLIDLQELGKYEQYIKGSGRENLYFQGGGGSGYIPEAPRDGQAYVRKDGEWVLLSTFLGHHHHHHHH

SEQ ID NO: 5383 - protein, 1281 aa, Artificial Sequence
  Description of Artificial Sequence: Synthetic polypeptide
MGILPSPGMPALLSLVSLLSVLLMGCVAETGTQCVNLTTRTQLPPAYTNSFTRGVYYPDKVFRSSVLHSTQDLFLPFFSNVTWFHAIHVSGTNGTKRFDNPVLPFNDGVYFASTEKSNIIRGWIFGTTLDSKTQSLLIVNNATNVVIKVCEFQFCNDPFLGVYYHKNNKSWMESEFRVYSSANNCTFEYVSQPFLMDLEGKQGNFKNLREFVFKNIDGYFKIYSKHTPINLVRDLPQGFSALEPLVDLPIGINITRFQTLLALHRSYLTPGDSSSGWTAGAAAYYVGYLQPRTFLLKYNENGTITDAVDCALDPLSETKCTLKSFTVEKGIYQTSNFRVQPTESIVRFPNITNLCPFGEVFNATRFASVYAWNRKRISNCVADYSVLYNSASFSTFKCYGVSPTKLNDLCFTNVYADSFVIRGDEVRQIAPGQTGKIADYNYKLPDDFTGCVIAWNSNNLDSKVGGNYNYLYRLFRKSNLKPFERDISTEFYQAGSTPCNGVEGFNCYFPLQSYGFQPTNGVGYQPYRVVVLSFELLHAPATVCGPKKSTNLVKNKCVNFNFNGLTGTGVLTESNKKFLPFQQFGRDIADTTDAVRDPQTLEILDITPCSFGGVSVITPGTNTSNQVAVLYQDVNCTEVPVAIHADQLTPTWRVYSTGSNVFQTRAGCLIGAEHVNNSYECDIPIGAGICASYQTQTNSPSGAGSVASQSIIAYTMSLGAENSVAYSNNSIAIPTNFTISVTTEILPVSMTKTSVDCTMYICGDSTECSNLLLQYGSFCTQLNRALTGIAVEQDKNTQEVFAQVKQIYKTPPIKDFGGFNFSQILPDPSKPSKRSFIEDLLFNKVTLADAGFIKQYGDCLGDIAARDLICAQKFNGLTVLPPLLTDEMIAQYTSALLAGTITSGWTFGAGAALQIPFAMQMAYRFNGIGVTQNVLYENQKLIANQFNSAIGKIQDSLSSTASALGKLQDVVNQNAQALNTLVKQLSSNFGAISSVLNDILSRLDPPEAEVQIDRLITGRLQSLQTYVTQQLIRAAEIRASANLAATKMSECVLGQSKRVDFCGKGYHLMSFPQSAPHGVVFLHVTYVPAQEKNFTTAPAICHDGKAHFPREGVFVSNGTHWFVTQRNFYEPQIITTDNTFVSGNCDVVIGIVNNTVYDPLQPELDSFKEELDKYFKNHTSPDVDLGDISGINASVVNIQKEIDRLNEVAKNLNESLIDLQELGKYEQYIKGSGRENLYFQGGGGSGYIPEAPRDGQAYVRKDGEWVLLSTFLGHHHHHHHH

SEQ ID NO: 5384 - protein, 1281 aa, Artificial Sequence
  Description of Artificial Sequence: Synthetic polypeptide
MGILPSPGMPALLSLVSLLSVLLMGCVAETGTQCVNLTTRTQLPPAYTNSFTRGVYYPDKVFRSSVLHSTQDLFLPFFSNVTWFHAIHVSGTNGTKRFDNPVLPFNDGVYFASTEKSNIIRGWIFGTTLDSKTQSLLIVNNATNVVIKVCEFQFCNDPFLGVYYHKNNKSWMESEFRVYSSANNCTFEYVSQPFLMDLEGKQGNFKNLREFVFKNIDGYFKIYSKHTPINLVRDLPQGFSALEPLVDLPIGINITRFQTLLALHRSYLTPGDSSSGWTAGAAAYYVGYLQPRTFLLKYNENGTITDAVDCALDPLSETKCTLKSFTVEKGIYQTSNFRVQPTESIVRFPNITNLCPFGEVFNATRFASVYAWNRKRISNCVADYSVLYNSASFSTFKCYGVSPTKLNDLCFTNVYADSFVIRGDEVRQIAPGQTGKIADYNYKLPDDFTGCVIAWNSNNLDSKVGGNYNYLYRLFRKSNLKPFERDISTEIYQAGSTPCNGVEGFNCYFPLQSYGFQPTNGVGYQPYRVVVLSFELLHAPATVCGPKKSTNLVKNKCVNFNFNGLTGTGVLTESNKKFLPFQQFGRDIADTTDAVRDPQTLEILDITPCSFGGVSVITPGTNTSNQVAVLYQDVNCTEVPVAIHADQLTPTWRVYSTGSNVFQTRAGCLIGAEHVNNSYECDIPIGAGICASYQTQTNSPSGAGSVASQSIIAYTVSLGAENSVAYSNNSIAIPTNFTISVTTEILPVSMTKTSVDCTMYICGDSTECSNLLLQYGSFCTQLNRALTGIAVEQDKNTQEVFAQVKQIYKTPPIKDFGGFNFSQILPDPSKPSKRSFIEDLLFNKVTLADAGFIKQYGDCLGDIAARDLICAQKFNGLTVLPPLLTDEMIAQYTSALLAGTITSGWTFGAGAALQIPFAMQMAYRFNGIGVTQNVLYENQKLIANQFNSAIGKIQDSLSSTASALGKLQDVVNQNAQALNTLVKQLSSNFGAISSVLNDILSRLDPPEAEVQIDRLITGRLQSLQTYVTQQLIRAAEIRASANLAATKMSECVLGQSKRVDFCGKGYHLMSFPQSAPHGVVFLHVTYVPAQEKNFTTAPAICHDGKAHFPREGVFVSNGTHWFVTQRNFYEPQIITTDNTFVSGNCDVVIGIVNNTVYDPLQPELDSFKEELDKYFKNHTSPDVDLGDISGINASVVNIQKEIDRLNEVAKNLNESLIDLQELGKYEQYIKGSGRENLYFQGGGGSGYIPEAPRDGQAYVRKDGEWVLLSTFLGHHHHHHHH

SEQ ID NO: 5385 - protein, 1281 aa, Artificial Sequence
  Description of Artificial Sequence: Synthetic polypeptide
MGILPSPGMPALLSLVSLLSVLLMGCVAETGTQCVNLTTRTQLPPAYTNSFTRGVYYPDKVFRSSVLHSTQDLFLPFFSNVTWFHAIHVSGTNGTKRFDNPVLPFNDGVYFASTEKSNIIRGWIFGTTLDSKTQSLLIVNNATNVVIKVCEFQFCNDPFLGVYYHKNNKSWMESEFRVYSSANNCTFEYVSQPFLMDLEGKQGNFKNLREFVFKNIDGYFKIYSKHTPINLVRDLPQGFSALEPLVDLPIGINITRFQTLLALHRSYLTPGDSSSGWTAGAAAYYVGYLQPRTFLLKYNENGTITDAVDCALDPLSETKCTLKSFTVEKGIYQTSNFRVQPTESIVRFPNITNLCPFGEVFNATRFASVYAWNRKRISNCVADYSVLYNSASFSTFKCYGVSPTKLNDLCFTNVYADSFVIRGDEVRQIAPGQTGKIADYNYKLPDDFTGCVIAWNSNNLDSKVGGNYNYLYRLFRKSNLKPFERDISTEIYQAGSTPCNGVEGFNCYFPLQSYGFQPTNGVGYQPYRVVVLSFELLHAPATVCGPKKSTNLVKNKCVNFNFNGLTGTGVLTESNKKFLPFQQFGRDIADTTDAVRDPQTLEILDITPCSFGGVSVITPGTNTSNQVAVLYQDVNCTEVPVAIHADQLTPTWRVYSTGSNVFQTRAGCLIGAEHVNNSYECDIPIGAGICASYQTQTNSPSGAGSVASQSIIAYTMSLGAENSVAYSNNSIAIPTNFTISVTTEILPVSMTKTSVDCTMYICGDSTECSNLLLQYGSFCTQLNRALTGIAVEQDKNTQEVFAQVKQIYKTPPIKDFGGFNFSQILPDPSKPSKRSFIEDLLFNKVTLADAGFIKQYGDCLGDIAARDLICAQKFNGLTVLPPLLTDEMIAQYTSALLAGTITSGWTFGAGAALQIPFAMQMAYRFNGIGVTQNVLYENQKLIANQFNSAIGKIQDSLSSTASALGKLQDVVNQNAQALNTLVKQLSSNFGAISSVLNEILSRLDPPEAEVQIDRLITGRLQSLQTYVTQQLIRAAEIRASANLAATKMSECVLGQSKRVDFCGKGYHLMSFPQSAPHGVVFLHVTYVPAQEKNFTTAPAICHDGKAHFPREGVFVSNGTHWFVTQRNFYEPQIITTDNTFVSGNCDVVIGIVNNTVYDPLQPELDSFKEELDKYFKNHTSPDVDLGDISGINASVVNIQKEIDRLNEVAKNLNESLIDLQELGKYEQYIKGSGRENLYFQGGGGSGYIPEAPRDGQAYVRKDGEWVLLSTFLGHHHHHHHH

SEQ ID NO: 5386 - protein, 1281 aa, Artificial Sequence
  Description of Artificial Sequence: Synthetic polypeptide
MGILPSPGMPALLSLVSLLSVLLMGCVAETGTQCVNLTTRTQLPPAYTNSFTRGVYYPDKVFRSSVLHSTQDLFLPFFSNVTWFHAIHVSGTNGTKRFDNPVLPFNDGVYFASTEKSNIIRGWIFGTTLDSKTASLLIVNNATNVVIKVCEFQFCNDPFLGVYYHKNNKSWMESEFRVYSSANNCTFEYVSQPFLMDLEGKQGNFKNLREFVFKNIDGYFKIYSKHTPINLVRDLPQGFSALEPLVDLPIGINITRFQTLLALHRSYLTPGDSSSGWTAGAAAYYVGYLQPRTFLLKYNENGTITDAVDCALDPLSETKCTLKSFTVEKGIYQTSNFRVQPTESIVRFPNITNLCPFGEVFNATRFASVYAWNRKRISNCVADYSVLYNSASFSTFKCYGVSPTKLNDLCFTNVYADSFVIRGDEVRQIAPGQTGKIADYNYKLPDDFTGCVIAWNSNNLDSKVGGNYNYLYRLFRKSNLKPFERDISTEIYQAGSTPCNGVEGFNCYFPLQSYGFQPTNGVGYQPYRVVVLSFELLHAPATVCGPKKSTNLVKNKCVNFNFNGLTGTGVLTESNKKFLPFQQFGRDIADTTDAVRDPQTLEILDITPCSFGGVSVITPGTNTSNQVAVLYQDVNCTEVPVAIHADQLTPTWRVYSTGSNVFQTRAGCLIGAEHVNNSYECDIPIGAGICASYQTQTNSPSGAGSVASQSIIAYTMSLGAENSVAYSNNSIAIPTNFTISVTTEILPVSMTKTSVDCTMYICGDSTECSNLLLQYGSFCTQLNRALTGIAVEQDKNTQEVFAQVKQIYKTPPIKDFGGFNFSQILPDPSKPSKRSFIEDLLFNKVTLADAGFIKQYGDCLGDIAARDLICAQKFNGLTVLPPLLTDEMIAQYTSALLAGTITSGWTFGAGAALQIPFAMQMAYRFNGIGVTQNVLYENQKLIANQFNSAIGKIQDSLSSTASALGKLQDVVNQNAQALNTLVKQLSSNFGAISSVLNDILSRLDPPEAEVQIDRLITGRLQSLQTYVTQQLIRAAEIRASANLAATKMSECVLGQSKRVDFCGKGYHLMSFPQSAPHGVVFLHVTYVPAQEKNFTTAPAICHDGKAHFPREGVFVSNGTHWFVTQRNFYEPQIITTDNTFVSGNCDVVIGIVNNTVYDPLQPELDSFKEELDKYFKNHTSPDVDLGDISGINASVVNIQKEIDRLNEVAKNLNESLIDLQELGKYEQYIKGSGRENLYFQGGGGSGYIPEAPRDGQAYVRKDGEWVLLSTFLGHHHHHHHH

SEQ ID NO: 5387 - protein, 1281 aa, Artificial Sequence
  Description of Artificial Sequence: Synthetic polypeptide
MGILPSPGMPALLSLVSLLSVLLMGCVAETGTQCVNLTTRTQLPPAYTNSFTRGVYYPDKVFRSSVLHSTQDLFLPFFSNVTWFHAIHVSGTNGTKRFDNPVLPFNDGVYFASTEKSNIIRGWIFGTTLDSKTQSLLIVNNATNVVIKVCEFQFCNDPFLGVYYHKNNKSWMESEFRVYSSANNCTFEYVSQPFLMDLEGKQGNFKNLREFVFKNIDGYFKIYSKHTPINLVRDLPQGFSALEPLVDLPIGINITRFQTLLALHRSYLTPGDSSSGWTAGAAAYYVGYLQPRTFLLKYNENGTITDAVDCALDPLSETKCTLKSFTVEKGIYQTSNFRVQPTESIVRFPNITNLCPFGEVFNATRFASVYAFNRKRISNCVADYSVLYNSASFSTFKCYGVSPTKLNDLCFTNVYADSFVIRGDEVRQIAPGQTGKIADYNYKLPDDFTGCVIAWNSNNLDSKVGGNYNYLYRLFRKSNLKPFERDISTEIYQAGSTPCNGVEGFNCYFPLQSYGFQPTNGVGYQPYRVVVLSFELLHAPATVCGPKKSTNLVKNKCVNFNFNGLTGTGVLTESNKKFLPFQQFGRDIADTTDAVRDPQTLEILDITPCSFGGVSVITPGTNTSNQVAVLYQDVNCTEVPVAIHADQLTPTWRVYSTGSNVFQTRAGCLIGAEHVNNSYECDIPIGAGICASYQTQTNSPSGAGSVASQSIIAYTMSLGAENSVAYSNNSIAIPTNFTISVTTEILPVSMTKTSVDCTMYICGDSTECSNLLLQYGSFCTQLNRALTGIAVEQDKNTQEVFAQVKQIYKTPPIKDFGGFNFSQILPDPSKPSKRSFIEDLLFNKVTLADAGFIKQYGDCLGDIAARDLICAQKFNGLTVLPPLLTDEMIAQYTSALLAGTITSGWTFGAGAALQIPFAMQMAYRFNGIGVTQNVLYENQKLIANQFNSAIGKIQDSLSSTASALGKLQDVVNQNAQALNTLVKQLSSNFGAISSVLNDILSRLDPPEAEVQIDRLITGRLQSLQTYVTQQLIRAAEIRASANLAATKMSECVLGQSKRVDFCGKGYHLMSFPQSAPHGVVFLHVTYVPAQEKNFTTAPAICHDGKAHFPREGVFVSNGTHWFVTQRNFYEPQIITTDNTFVSGNCDVVIGIVNNTVYDPLQPELDSFKEELDKYFKNHTSPDVDLGDISGINASVVNIQKEIDRLNEVAKNLNESLIDLQELGKYEQYIKGSGRENLYFQGGGGSGYIPEAPRDGQAYVRKDGEWVLLSTFLGHHHHHHHH

SEQ ID NO: 5388 - protein, 1281 aa, Artificial Sequence
  Description of Artificial Sequence: Synthetic polypeptide
MGILPSPGMPALLSLVSLLSVLLMGCVAETGTQCVNLTTRTQLPPAYTNSFTRGVYYPDKVFRSSVLHSTQDLFLPFFSNVTWFHAIHVSGTNGTKRFDNPVLPFNDGVYFASTEKSNIIRGWIFGTTLDSKTQSLLIVNNATNVVIKVCEFQFCNDPFLGVYYHKNNKSWMESEFRVYSSANNCTFEYVSQPFLMDLEGKQGNFKNLREFVFKNIDGYFKIYSKHTPINLVRDLPQGFSALEPLVDLPIGINITRFQTLLALHRSYLTPGDSSSGWTAGAAAYYVGYLQPRTFLLKYNENGTITDAVDCALDPLSETKCTLKSFTVEKGIYQTSNFRVQPTESIVRFPNITNLCPFGEYFNATRFASVYAWNRKRISNCVADYSVLYNSASFSTFKCYGVSPTKLNDLCFTNVYADSFVIRGDEVRQIAPGQTGKIADYNYKLPDDFTGCVIAWNSNNLDSKVGGNYNYLYRLFRKSNLKPFERDISTEIYQAGSTPCNGVEGFNCYFPLQSYGFQPTNGVGYQPYRVVVLSFELLHAPATVCGPKKSTNLVKNKCVNFNFNGLTGTGVLTESNKKFLPFQQFGRDIADTTDAVRDPQTLEILDITPCSFGGVSVITPGTNTSNQVAVLYQDVNCTEVPVAIHADQLTPTWRVYSTGSNVFQTRAGCLIGAEHVNNSYECDIPIGAGICASYQTQTNSPSGAGSVASQSIIAYTMSLGAENSVAYSNNSIAIPTNFTISVTTEILPVSMTKTSVDCTMYICGDSTECSNLLLQYGSFCTQLNRALTGIAVEQDKNTQEVFAQVKQIYKTPPIKDFGGFNFSQILPDPSKPSKRSFIEDLLFNKVTLADAGFIKQYGDCLGDIAARDLICAQKFNGLTVLPPLLTDEMIAQYTSALLAGTITSGWTFGAGAALQIPFAMQMAYRFNGIGVTQNVLYENQKLIANQFNSAIGKIQDSLSSTASALGKLQDVVNQNAQALNTLVKQLSSNFGAISSVLNDILSRLDPPEAEVQIDRLITGRLQSLQTYVTQQLIRAAEIRASANLAATKMSECVLGQSKRVDFCGKGYHLMSFPQSAPHGVVFLHVTYVPAQEKNFTTAPAICHDGKAHFPREGVFVSNGTHWFVTQRNFYEPQIITTDNTFVSGNCDVVIGIVNNTVYDPLQPELDSFKEELDKYFKNHTSPDVDLGDISGINASVVNIQKEIDRLNEVAKNLNESLIDLQELGKYEQYIKGSGRENLYFQGGGGSGYIPEAPRDGQAYVRKDGEWVLLSTFLGHHHHHHHH

SEQ ID NO: 5389 - protein, 1281 aa, Artificial Sequence
  Description of Artificial Sequence: Synthetic polypeptide
MGILPSPGMPALLSLVSLLSVLLMGCVAETGTQCVNLTTRTQLPPAYTNSFTRGVYYPDKVFRSSVLHSTQDLFLPFFSNVTWFHAIHVSGTNGTKRFDNPVLPFNDGVYFASTEKSNIIRGWIFGTTLDSKTQSLLIVNNATNVVIKVCEFQFCNDPFLGVYYHKNNKSWMESEFRVYSSANNCTFEYVSQPFLMDLEGKQGNFKNLREFVFKNIDGYFKIYSKHTPINLVRDLPQGFSALEPLVDLPIGINITRFQTLLALHRSYLTPGDSSSGWTAGAAAYYVGYLQPRTFLLKYNENGTITDAVDCALDPLSETKCTLKSFTVEKGIYQTSNFRVQPTESIVRFPNITNLCPFGEVFNATRFASVYAWNRKRISNCVADYSVLYNSASFSTFKCYGVSPTKLNDLCFTNVYADSFVIRGDEVRQIAPGQTGKIADYNYKLPDDFTGCVIAWNSNNLDSKPGGNYNYLYRLFRKSNLKPFERDISTEIYQAGSTPCNGVEGFNCYFPLQSYGFQPTNGVGYQPYRVVVLSFELLHAPATVCGPKKSTNLVKNKCVNFNFNGLTGTGVLTESNKKFLPFQQFGRDIADTTDAVRDPQTLEILDITPCSFGGVSVITPGTNTSNQVAVLYQDVNCTEVPVAIHADQLTPTWRVYSTGSNVFQTRAGCLIGAEHVNNSYECDIPIGAGICASYQTQTNSPSGAGSVASQSIIAYTMSLGAENSVAYSNNSIAIPTNFTISVTTEILPVSMTKTSVDCTMYICGDSTECSNLLLQYGSFCTQLNRALTGIAVEQDKNTQEVFAQVKQIYKTPPIKDFGGFNFSQILPDPSKPSKRSFIEDLLFNKVTLADAGFIKQYGDCLGDIAARDLICAQKFNGLTVLPPLLTDEMIAQYTSALLAGTITSGWTFGAGAALQIPFAMQMAYRFNGIGVTQNVLYENQKLIANQFNSAIGKIQDSLSSTASALGKLQDVVNQNAQALNTLVKQLSSNFGAISSVLNDILSRLDPPEAEVQIDRLITGRLQSLQTYVTQQLIRAAEIRASANLAATKMSECVLGQSKRVDFCGKGYHLMSFPQSAPHGVVFLHVTYVPAQEKNFTTAPAICHDGKAHFPREGVFVSNGTHWFVTQRNFYEPQIITTDNTFVSGNCDVVIGIVNNTVYDPLQPELDSFKEELDKYFKNHTSPDVDLGDISGINASVVNIQKEIDRLNEVAKNLNESLIDLQELGKYEQYIKGSGRENLYFQGGGGSGYIPEAPRDGQAYVRKDGEWVLLSTFLGHHHHHHHH

SEQ ID NO: 5390 - protein, 1281 aa, Artificial Sequence
  Description of Artificial Sequence: Synthetic polypeptide
MGILPSPGMPALLSLVSLLSVLLMGCVAETGTQCVNLTTRTQLPPAYTNSFTRGVYYPDKVFRSSVLHSTQDLFLPFFSNVTWFHAIHVSGTNGTKRFDNPVLPFNDGVYFASTEKSNIIRGWIFGTTLDSKTQSLLIVNNATNVVIKVCEFQFCNDPFLGVYYHKNNKSWMESEFRVYSSANNCTFEYVSQPFLMDLEGKQGNFKNLREFVFKNIDGYFKIYSKHTPINLVRDLPQGFSALEPLVDLPIGINITRFQTLLALHRSYLTPGDSSSGWTAGAAAYYVGYLQPRTFLLKYNENGTITDAVDCALDPLSETKCTLKSFTVEKGIYQTSNFRVQPTESIVRFPNITNLCPFGEVFNATRFASVYAWNRKRISNCVADYSVLYNSASFSTFKCYGVSPTKLNDLCFTNVYADSFVIRGDELRQIAPGQTGKIADYNYKLPDDFTGCVIAWNSNNLDSKVGGNYNYLYRLFRKSNLKPFERDISTEIYQAGSTPCNGVEGFNCYFPLQSYGFQPTNGVGYQPYRVVVLSFELLHAPATVCGPKKSTNLVKNKCVNFNFNGLTGTGVLTESNKKFLPFQQFGRDIADTTDAVRDPQTLEILDITPCSFGGVSVITPGTNTSNQVAVLYQDVNCTEVPVAIHADQLTPTWRVYSTGSNVFQTRAGCLIGAEHVNNSYECDIPIGAGICASYQTQTNSPSGAGSVASQSIIAYTMSLGAENSVAYSNNSIAIPTNFTISVTTEILPVSMTKTSVDCTMYICGDSTECSNLLLQYGSFCTQLNRALTGIAVEQDKNTQEVFAQVKQIYKTPPIKDFGGFNFSQILPDPSKPSKRSFIEDLLFNKVTLADAGFIKQYGDCLGDIAARDLICAQKFNGLTVLPPLLTDEMIAQYTSALLAGTITSGWTFGAGAALQIPFAMQMAYRFNGIGVTQNVLYENQKLIANQFNSAIGKIQDSLSSTASALGKLQDVVNQNAQALNTLVKQLSSNFGAISSVLNDILSRLDPPEAEVQIDRLITGRLQSLQTYVTQQLIRAAEIRASANLAATKMSECVLGQSKRVDFCGKGYHLMSFPQSAPHGVVFLHVTYVPAQEKNFTTAPAICHDGKAHFPREGVFVSNGTHWFVTQRNFYEPQIITTDNTFVSGNCDVVIGIVNNTVYDPLQPELDSFKEELDKYFKNHTSPDVDLGDISGINASVVNIQKEIDRLNEVAKNLNESLIDLQELGKYEQYIKGSGRENLYFQGGGGSGYIPEAPRDGQAYVRKDGEWVLLSTFLGHHHHHHHH

SEQ ID NO: 5391 - protein, 1281 aa, Artificial Sequence
  Description of Artificial Sequence: Synthetic polypeptide
MGILPSPGMPALLSLVSLLSVLLMGCVAETGTQCVNLTTRTQLPPAYTNSFTRGVYYPDKVFRSSVLHSTQDLFLPFFSNVTWFHAIHVSGTNGTKRFDNPVLPFNDGVYFASTEKSNIIRGWIFGTTLDSKTQSLLIVNNATNVVIKVCEFQFCNDPFLGVYYHKNNKSWMESEFRVYSSANNCTFEYVSQPFLMDLEGKQGNFKNLREFVFKNIDGYFKIYSKHTPINLVRDLPQGFSALEPLVDLPIGINITRFQTLLALHRSYLTPGDSSSGWTAGAAAYYVGYLQPRTFLLKYNENGTITDAVDCALDPLSETKCTLKSFTVEKGIYQTSNFRVQPTESIVRFPNITNLCPFGEVFNATRFASVYAWNRKRISNCVADYSVLYNSASFSTFKCYGVSPTKLNDLCFTNVYADSFVIRGDEVRQIAPGQTGKIADYNYKLPDDFTGCVIAWNSNNLDSKVGGNYNYLYRLFRKSNLKPFERDISTEIYQAGSTPCNGVEGFNCYFPLQSYGFQPTNGVGYQPYRVVVLSFELLHAPATVCGPKKSTNLVKNKCVNFNFNGLTGTGVLTESNKKFLPFQQFGRDIADTTDAVRDPQTLEILDITPCSFGGVSVITPGTNTSNQVAVLYQDVNCTEVPVAIHADQLTPTWRVYSTGSNVFQTRAGCLIGAEHVNNSYECDIPIGAGICASYQTQTNSPSGAGSVASQSIIAYTMSLGAENSVAYSNNSIAIPTNFTISVTTEILPVSMTKTSVDCTMYICGDSTECSNLLLQYGSFCTQLNRALTGIAVEQDKNTQEVFAQVKQIYKTPPIKDFGGFNFSQILPDPSKPSKRSFIEDLLFNKVTLADAGFIKQYGDCLGDIAARDLICAQKFNGLTVLPPLLTDEMIAQYTSALLAGTITSGWTFGAGAALQIPFAMQMAYRFNGIGVTQNVLYENQKLIANQFNSAIGKIQDSLSSTASALGKLQDVVNQNAQALNTLVKQLSSNFGAISSVLNDILSRVDPPEAEVQIDRLITGRLQSLQTYVTQQLIRAAEIRASANLAATKMSECVLGQSKRVDFCGKGYHLMSFPQSAPHGVVFLHVTYVPAQEKNFTTAPAICHDGKAHFPREGVFVSNGTHWFVTQRNFYEPQIITTDNTFVSGNCDVVIGIVNNTVYDPLQPELDSFKEELDKYFKNHTSPDVDLGDISGINASVVNIQKEIDRLNEVAKNLNESLIDLQELGKYEQYIKGSGRENLYFQGGGGSGYIPEAPRDGQAYVRKDGEWVLLSTFLGHHHHHHHH

SEQ ID NO: 5392 - protein, 1281 aa, Artificial Sequence
  Description of Artificial Sequence: Synthetic polypeptide
MGILPSPGMPALLSLVSLLSVLLMGCVAETGTQCVNLTTRTQLPPAYTNSFTRGVYYPDKVFRSSVLHSTQDLFLPFFSNVTWFHAIHVSGTNGTKRFDNPVLPFNDGVYFASTEKSNIIRGWIFGTTLDSKTQSLLIVNNATNVVIKVCEFQFCNDPFLGVYYHKNNKSWMESEFRVYSSANNCTFEYVSQPFLMDLEGKQGNFKNLREFVFKNIDGYFKIYSKHTPINLVRDLPQGFSALEPLVDLPIGINITRFQTLLALHRSYLTPGDSSSGWTAGAAAYYVGYLQPRTFLLKYNENGTITDAVDCALDPLSETKCTLKSFTVEKGIYQTSNFRVQPTESIVRFPNITNLCPFGEVFNATRFASVYAWNRKRISNCVADYSVLYNSASFSTFKCYGVSPTKLNDLCFPNVYADSFVIRGDEVRQIAPGQTGKIADYNYKLPDDFTGCVIAWNSNNLDSKVGGNYNYLYRLFRKSNLKPFERDISTEIYQAGSTPCNGVEGFNCYFPLQSYGFQPTNGVGYQPYRVVVLSFELLHAPATVCGPKKSTNLVKNKCVNFNFNGLTGTGVLTESNKKFLPFQQFGRDIADTTDAVRDPQTLEILDITPCSFGGVSVITPGTNTSNQVAVLYQDVNCTEVPVAIHADQLTPTWRVYSTGSNVFQTRAGCLIGAEHVNNSYECDIPIGAGICASYQTQTNSPSGAGSVASQSIIAYTMSLGAENSVAYSNNSIAIPTNFTISVTTEILPVSMTKTSVDCTMYICGDSTECSNLLLQYGSFCTQLNRALTGIAVEQDKNTQEVFAQVKQIYKTPPIKDFGGFNFSQILPDPSKPSKRSFIEDLLFNKVTLADAGFIKQYGDCLGDIAARDLICAQKFNGLTVLPPLLTDEMIAQYTSALLAGTITSGWTFGAGAALQIPFAMQMAYRFNGIGVTQNVLYENQKLIANQFNSAIGKIQDSLSSTASALGKLQDVVNQNAQALNTLVKQLSSNFGAISSVLNDILSRLDPPEAEVQIDRLITGRLQSLQTYVTQQLIRAAEIRASANLAATKMSECVLGQSKRVDFCGKGYHLMSFPQSAPHGVVFLHVTYVPAQEKNFTTAPAICHDGKAHFPREGVFVSNGTHWFVTQRNFYEPQIITTDNTFVSGNCDVVIGIVNNTVYDPLQPELDSFKEELDKYFKNHTSPDVDLGDISGINASVVNIQKEIDRLNEVAKNLNESLIDLQELGKYEQYIKGSGRENLYFQGGGGSGYIPEAPRDGQAYVRKDGEWVLLSTFLGHHHHHHHH

SEQ ID NO: 5393 - protein, 1281 aa, Artificial Sequence
  Description of Artificial Sequence: Synthetic polypeptide
MGILPSPGMPALLSLVSLLSVLLMGCVAETGTQCVNLTTRTQLPPAYTNSFTRGVYYPDKVFRSSVLHSTQDLFLPFFSNVTWFHAIHVSGTNGTKRFDNPVLPFNDGVYFASTEKSNIIRGWIFGTTLDSKTQSLLIVNNATNVVIKVCEFQFCNDPFLGVYYHKNNKSWMESEFRVYSSANNCTFEYVSQPFLMDLEGKQGNFKNLREFVFKNIDGYFKIYSKHTPINLVRDLPQGFSALEPLVDLPIGINITRFQTLLALHRSYLTPGDSSSGWTAGAAAYYVGYLQPRTFLLKYNENGTITDAVDCALDPLSETKCTLKSFTVEKGIYQTSNFRVQPTESIVRFPNITNLCPFGEVFNATRFASVYAWNRKRISNCVADYSVLYNSASFSTFKCYGVSPTKLNDLCFTNVYADSFVIRGDEVRQIAPGQTGKIADYNYKLPDDFTGCVIAWNSNNLDSKVGGNYNYLYRLFRKSNLKPFARDISTEIYQAGSTPCNGVEGFNCYFPLQSYGFQPTNGVGYQPYRVVVLSFELLHAPATVCGPKKSTNLVKNKCVNFNFNGLTGTGVLTESNKKFLPFQQFGRDIADTTDAVRDPQTLEILDITPCSFGGVSVITPGTNTSNQVAVLYQDVNCTEVPVAIHADQLTPTWRVYSTGSNVFQTRAGCLIGAEHVNNSYECDIPIGAGICASYQTQTNSPSGAGSVASQSIIAYTMSLGAENSVAYSNNSIAIPTNFTISVTTEILPVSMTKTSVDCTMYICGDSTECSNLLLQYGSFCTQLNRALTGIAVEQDKNTQEVFAQVKQIYKTPPIKDFGGFNFSQILPDPSKPSKRSFIEDLLFNKVTLADAGFIKQYGDCLGDIAARDLICAQKFNGLTVLPPLLTDEMIAQYTSALLAGTITSGWTFGAGAALQIPFAMQMAYRFNGIGVTQNVLYENQKLIANQFNSAIGKIQDSLSSTASALGKLQDVVNQNAQALNTLVKQLSSNFGAISSVLNDILSRLDPPEAEVQIDRLITGRLQSLQTYVTQQLIRAAEIRASANLAATKMSECVLGQSKRVDFCGKGYHLMSFPQSAPHGVVFLHVTYVPAQEKNFTTAPAICHDGKAHFPREGVFVSNGTHWFVTQRNFYEPQIITTDNTFVSGNCDVVIGIVNNTVYDPLQPELDSFKEELDKYFKNHTSPDVDLGDISGINASVVNIQKEIDRLNEVAKNLNESLIDLQELGKYEQYIKGSGRENLYFQGGGGSGYIPEAPRDGQAYVRKDGEWVLLSTFLGHHHHHHHH

SEQ ID NO: 5394 - protein, 1281 aa, Artificial Sequence
  Description of Artificial Sequence: Synthetic polypeptide
MGILPSPGMPALLSLVSLLSVLLMGCVAETGTQCVNLTTRTQLPPAYTNSFTRGVYYPDKVFRSSVLHSTQDLFLPFFSNVTWFHAIHVSGTNGTKRFDNPVLPFNDGVYFASTEKSNIIRGWIFGTTLDSKTQSLLIVNNATNVVIKVCEFQFCNDPFLGVYYHKNNKSWMESEFRVYSSANNCTFEYVSQPFLMDLEGKQGNFKNLREFVFKNIDGYFKIYSKHTPINLVRDLPQGFSALEPLVDLPIGINITRFQTLLALHRSYLTPGDSSSGWTAGAAAYYVGYLQPRTFLLKYNENGTITDAVDCALDPLSETKCTLKSFTVEKGIYQTSNFRVQPTESIVRFPNITNLCPFGEVFNATRFASVYAWNRKRISNCVADYSVLYNSASFSTFKCYGVSPTKLNDLCFTNVYADSFVIRGDEVRQIAPGQTGKIADYNYKLPDDFTGCVIAWNSNNLDSKVGGNYNYLYRLFRKSNLDPFERDISTEIYQAGSTPCNGVEGFNCYFPLQSYGFQPTNGVGYQPYRVVVLSFELLHAPATVCGPKKSTNLVKNKCVNFNFNGLTGTGVLTESNKKFLPFQQFGRDIADTTDAVRDPQTLEILDITPCSFGGVSVITPGTNTSNQVAVLYQDVNCTEVPVAIHADQLTPTWRVYSTGSNVFQTRAGCLIGAEHVNNSYECDIPIGAGICASYQTQTNSPSGAGSVASQSIIAYTMSLGAENSVAYSNNSIAIPTNFTISVTTEILPVSMTKTSVDCTMYICGDSTECSNLLLQYGSFCTQLNRALTGIAVEQDKNTQEVFAQVKQIYKTPPIKDFGGFNFSQILPDPSKPSKRSFIEDLLFNKVTLADAGFIKQYGDCLGDIAARDLICAQKFNGLTVLPPLLTDEMIAQYTSALLAGTITSGWTFGAGAALQIPFAMQMAYRFNGIGVTQNVLYENQKLIANQFNSAIGKIQDSLSSTASALGKLQDVVNQNAQALNTLVKQLSSNFGAISSVLNDILSRLDPPEAEVQIDRLITGRLQSLQTYVTQQLIRAAEIRASANLAATKMSECVLGQSKRVDFCGKGYHLMSFPQSAPHGVVFLHVTYVPAQEKNFTTAPAICHDGKAHFPREGVFVSNGTHWFVTQRNFYEPQIITTDNTFVSGNCDVVIGIVNNTVYDPLQPELDSFKEELDKYFKNHTSPDVDLGDISGINASVVNIQKEIDRLNEVAKNLNESLIDLQELGKYEQYIKGSGRENLYFQGGGGSGYIPEAPRDGQAYVRKDGEWVLLSTFLGHHHHHHHH

SEQ ID NO: 5395 - protein, 1281 aa, Artificial Sequence
  Description of Artificial Sequence: Synthetic polypeptide
MGILPSPGMPALLSLVSLLSVLLMGCVAETGTQCVNLTTRTQLPPAYTNSFTRGVYYPDKVFRSSVLHSTQDLFLPFFSNVTWFHAIHVSGTNGTKRFDNPVLPFNDGVYFASTEKSNIIRGWIFGTTLDSKTQSLLIVNNATNVVIKVCEFQFCNDPFLGVYYHKNNKSWMESEFRVYSSANNCTFEYVSQPFLMDLEGKQGNFKNLREFVFKNIDGYFKIYSKHTPINLVRDLPQGFSALEPLVDLPIGINITRFQTLLALHRSYLTPGDSSSGWTAGAAAYYVGYLQPRTFLLKYNENGTITDAVDCALDPLSETKCTLKSFTVEKGIYQTSNFRVQPTESIVRFPNITNLCPFGEVFNATRFASVYAWNRKRISNCVADYSVLYNSASFSTFKCYGVSPTKLNDLCFTNVYADSFVIRGDEVRQIAPGQTGKIADYNYKLPDDFTGCVIAWNSNNLDSKVGGNYNYLYRLFRKSNLKPFERDISTEIYQAGSTPCNGVEGFNCYFPLQSYGFQPTNGVGYQPYRVVVLSFELLPAPATVCGPKKSTNLVKNKCVNFNFNGLTGTGVLTESNKKFLPFQQFGRDIADTTDAVRDPQTLEILDITPCSFGGVSVITPGTNTSNQVAVLYQDVNCTEVPVAIHADQLTPTWRVYSTGSNVFQTRAGCLIGAEHVNNSYECDIPIGAGICASYQTQTNSPSGAGSVASQSIIAYTMSLGAENSVAYSNNSIAIPTNFTISVTTEILPVSMTKTSVDCTMYICGDSTECSNLLLQYGSFCTQLNRALTGIAVEQDKNTQEVFAQVKQIYKTPPIKDFGGFNFSQILPDPSKPSKRSFIEDLLFNKVTLADAGFIKQYGDCLGDIAARDLICAQKFNGLTVLPPLLTDEMIAQYTSALLAGTITSGWTFGAGAALQIPFAMQMAYRFNGIGVTQNVLYENQKLIANQFNSAIGKIQDSLSSTASALGKLQDVVNQNAQALNTLVKQLSSNFGAISSVLNDILSRLDPPEAEVQIDRLITGRLQSLQTYVTQQLIRAAEIRASANLAATKMSECVLGQSKRVDFCGKGYHLMSFPQSAPHGVVFLHVTYVPAQEKNFTTAPAICHDGKAHFPREGVFVSNGTHWFVTQRNFYEPQIITTDNTFVSGNCDVVIGIVNNTVYDPLQPELDSFKEELDKYFKNHTSPDVDLGDISGINASVVNIQKEIDRLNEVAKNLNESLIDLQELGKYEQYIKGSGRENLYFQGGGGSGYIPEAPRDGQAYVRKDGEWVLLSTFLGHHHHHHHH

SEQ ID NO: 5396 - protein, 1281 aa, Artificial Sequence
  Description of Artificial Sequence: Synthetic polypeptide
MGILPSPGMPALLSLVSLLSVLLMGCVAETGTQCVNLTTRTQLPPAYTNSFTRGVYYPDKVFRSSVLHSTQDLFLPFFSNVTWFHAIHVSGTNGTKRFDNPVLPFNDGVYFASTEKSNIIRGWIFGTTLDSKTQSLLIVNNATNVVIKVCEFQFCNDPFLGVYYHKNNKSWMESEFRVYSSANNCTFEYVSQPFLMDLEGKQGNFKNLREFVFKNIDGYFKIYSKHTPINLVRDLPQGFSALEPLVDLPIGINITRFQTLLALHRSYLTPGDSSSGWTAGAAAYYVGYLQPRTFLLKYNENGTITDAVDCALDPLSETKCTLKSFTVEKGIYQTSNFRVQPTESIVRFPNITNLCPFGEVFNATRFASVYAWNRKRISNCVADYSVLYNSASFSTFKCYGVSPTKLNDLCFTNVYADSFVIRGDEVRQIAPGQTGKIADYNYKLPDDFTGCVIAWNSNNLDSKVGGNYNYLYRLFRKSNLKPFERDISTEIYQAGSTPCNGVEGFNCYFPLQSYGFQPTNGVGYQPYRVVVLSFELLHAPATVCGPKKSTNLVKNKCVNFNFNGLTGTGVLTESNKKFLPFQQFGRDIADTTDAVRDPQTLEILDITPCSFGGVSVITPGTNTSNQVAVLYQDVNCTEVPVAIHADQLTPTWRVYSTGSNVFQTRAGCLIGAEHVNNSYECDIPIGAGICASYQTQTNSPSGAGSVASQSIIAYTMSLGAENSVAYSNNSIAIPTNFTISVTTEILPVSMTKTSVDCTMYICGDSTECSNLLLQYGSFCTQLNRALTGIAVEQDKNTQEVFAQVKQIYKTPPIKDFGGFNFSQILPDPSKPSKRSFIEDLLFNKVTLADAGFIKQYGDCLGDIAARDLICAQKFNGLTVLPPLLTDEMIAQYTSALLAGTITSGWTFGAGAALQIPFAMQMAYRFNGIGVTQNVLYENQKLIANQFNSAIGKIQDSLSSTASALGKLQDVVNQNAQALNTLVKQLSSNFGAISSVLNDILSRLDPPEAEVQIDRLITGRLQSLQTYVTQQLIRAAEIRASANLAATKMSECVLGQSKRVDFCGTGYHLMSFPQSAPHGVVFLHVTYVPAQEKNFTTAPAICHDGKAHFPREGVFVSNGTHWFVTQRNFYEPQIITTDNTFVSGNCDVVIGIVNNTVYDPLQPELDSFKEELDKYFKNHTSPDVDLGDISGINASVVNIQKEIDRLNEVAKNLNESLIDLQELGKYEQYIKGSGRENLYFQGGGGSGYIPEAPRDGQAYVRKDGEWVLLSTFLGHHHHHHHH

SEQ ID NO: 5397 - protein, 1281 aa, Artificial Sequence
  Description of Artificial Sequence: Synthetic polypeptide
MGILPSPGMPALLSLVSLLSVLLMGCVAETGTQCVNLTTRTQLPPAYTNSFTRGVYYPDKVFRSSVLHSTQDLFLPFFSNVTWFHAIHVSGTNGTKRFDNPVLPFNDGVYFASTEKSNIIRGWIFGTTLDSKTQSLLIVNNATNVVIKVCEFQFCNDPFLGVYYHKNNKSWMESEFRVYSSANNCTFEYVSQPFLMDLEGKQGNFKNLREFVFKNIDGYFKIYSKHTPINLVRDLPQGFSALEPWVDLPIGINITRFQTLLALHRSYLTPGDSSSGWTAGAAAYYVGYLQPRTFLLKYNENGTITDAVDCALDPLSETKCTLKSFTVEKGIYQTSNFRVQPTESIVRFPNITNLCPFGEVFNATRFASVYAWNRKRISNCVADYSVLYNSASFSTFKCYGVSPTKLNDLCFTNVYADSFVIRGDEVRQIAPGQTGKIADYNYKLPDDFTGCVIAWNSNNLDSKVGGNYNYLYRLFRKSNLKPFERDISTEIYQAGSTPCNGVEGFNCYFPLQSYGFQPTNGVGYQPYRVVVLSFELLHAPATVCGPKKSTNLVKNKCVNFNFNGLTGTGVLTESNKKFLPFQQFGRDIADTTDAVRDPQTLEILDITPCSFGGVSVITPGTNTSNQVAVLYQDVNCTEVPVAIHADQLTPTWRVYSTGSNVFQTRAGCLIGAEHVNNSYECDIPIGAGICASYQTQTNSPSGAGSVASQSIIAYTMSLGAENSVAYSNNSIAIPTNFTISVTTEILPVSMTKTSVDCTMYICGDSTECSNLLLQYGSFCTQLNRALTGIAVEQDKNTQEVFAQVKQIYKTPPIKDFGGFNFSQILPDPSKPSKRSFIEDLLFNKVTLADAGFIKQYGDCLGDIAARDLICAQKFNGLTVLPPLLTDEMIAQYTSALLAGTITSGWTFGAGAALQIPFAMQMAYRFNGIGVTQNVLYENQKLIANQFNSAIGKIQDSLSSTASALGKLQDVVNQNAQALNTLVKQLSSNFGAISSVLNDILSRLDPPEAEVQIDRLITGRLQSLQTYVTQQLIRAAEIRASANLAATKMSECVLGQSKRVDFCGKGYHLMSFPQSAPHGVVFLHVTYVPAQEKNFTTAPAICHDGKAHFPREGVFVSNGTHWFVTQRNFYEPQIITTDNTFVSGNCDVVIGIVNNTVYDPLQPELDSFKEELDKYFKNHTSPDVDLGDISGINASVVNIQKEIDRLNEVAKNLNESLIDLQELGKYEQYIKGSGRENLYFQGGGGSGYIPEAPRDGQAYVRKDGEWVLLSTFLGHHHHHHHH

SEQ ID NO: 5398 - protein, 1281 aa, Artificial Sequence
  Description of Artificial Sequence: Synthetic polypeptide
MGILPSPGMPALLSLVSLLSVLLMGCVAETGTQCVNLTTRTQLPPAYTNSFTRGVYYPDKVFRSSVLHSTQDLFLPFFSNVTWFHAIHVSGTNGTKRFDNPVLPFNDGVYFASTEKSNIIRGWIFGTTLDSKTQSLLIVNNATNVVIKVCEFQFCNDPFLGVYYHKNNKSWMESEFRVYSSANNCTFEYVSQPFLMDLEGKQGNFKNLREFVFKNIDGYFKIYSKHTPINLVRDLPQGFSALEPLVDLPIGINITRFQTLLALHRSYLTPGDSSSGWTAGAAAYYVGYLQPRTFLLKYNENGTITDAVDCALDPLSETKCTLKSFTVEKGIYQTSNFRVQPTESIVRFPNITNLCPFGEVFNATRFASVYAWNRKRISNCVADYSVLYNSASFSTFKCYGVSPTKLNDLCFTNVYADSFVIRGDEVRQIAPGQTGKIADYNYKLPDDFTGCVIAWNSANLDSKVGGNYNYLYRLFRKSNLKPFERDISTEIYQAGSTPCNGVEGFNCYFPLQSYGFQPTNGVGYQPYRVVVLSFELLHAPATVCGPKKSTNLVKNKCVNFNFNGLTGTGVLTESNKKFLPFQQFGRDIADTTDAVRDPQTLEILDITPCSFGGVSVITPGTNTSNQVAVLYQDVNCTEVPVAIHADQLTPTWRVYSTGSNVFQTRAGCLIGAEHVNNSYECDIPIGAGICASYQTQTNSPSGAGSVASQSIIAYTMSLGAENSVAYSNNSIAIPTNFTISVTTEILPVSMTKTSVDCTMYICGDSTECSNLLLQYGSFCTQLNRALTGIAVEQDKNTQEVFAQVKQIYKTPPIKDFGGFNFSQILPDPSKPSKRSFIEDLLFNKVTLADAGFIKQYGDCLGDIAARDLICAQKFNGLTVLPPLLTDEMIAQYTSALLAGTITSGWTFGAGAALQIPFAMQMAYRFNGIGVTQNVLYENQKLIANQFNSAIGKIQDSLSSTASALGKLQDVVNQNAQALNTLVKQLSSNFGAISSVLNDILSRLDPPEAEVQIDRLITGRLQSLQTYVTQQLIRAAEIRASANLAATKMSECVLGQSKRVDFCGKGYHLMSFPQSAPHGVVFLHVTYVPAQEKNFTTAPAICHDGKAHFPREGVFVSNGTHWFVTQRNFYEPQIITTDNTFVSGNCDVVIGIVNNTVYDPLQPELDSFKEELDKYFKNHTSPDVDLGDISGINASVVNIQKEIDRLNEVAKNLNESLIDLQELGKYEQYIKGSGRENLYFQGGGGSGYIPEAPRDGQAYVRKDGEWVLLSTFLGHHHHHHHH

SEQ ID NO: 5399 - protein, 1281 aa, Artificial Sequence
  Description of Artificial Sequence: Synthetic polypeptide
MGILPSPGMPALLSLVSLLSVLLMGCVAETGTQCVNLTTRTQLPPAYTNSFTRGVYYPDKVFRSSVLHSTQDLFLPFFSNVTWFHAIHVSGTNGTKRFDNPVLPFNDGVYFASTEKSNIIRGWIFGTTLDSKTQSLLIVNNATNVVIKVCEFQFCNDPFLGVYYHKNNKSWMESEFRVYSSANNCTFEYVSQPFLMDLEGKQGNFKNLREFVFKNIDGYFKIYSKHTPINLVRDLPQGFSALEPLVDLPIGINITRFQTLLALHRSYLTPGDSSSGWTAGAAAYYVGYLQPRTFLLKYNENGTITDAVDCALDPLSETKCTLKSFTVEKGIYQTSNFRVQPTESIVRFPNITNLCPFGEVFNATRFASVYAWNRKRISNCVADYSVLYNSASFSTFKCYGVSPTKLNDLCFTNVYADSFVIRGDEVRQIAPGQTGKIADYNYKLPDDFTGCVIAWNSNNLDSKVGGNYNYLYRLFRKSNLKPFERDISTEIYQAGSTPSNGVEGFNCYFPLQSYGFQPTNGVGYQPYRVVVLSFELLHAPATVCGPKKSTNLVKNKCVNFNFNGLTGTGVLTESNKKFLPFQQFGRDIADTTDAVRDPQTLEILDITPCSFGGVSVITPGTNTSNQVAVLYQDVNCTEVPVAIHADQLTPTWRVYSTGSNVFQTRAGCLIGAEHVNNSYECDIPIGAGICASYQTQTNSPSGAGSVASQSIIAYTMSLGAENSVAYSNNSIAIPTNFTISVTTEILPVSMTKTSVDCTMYICGDSTECSNLLLQYGSFCTQLNRALTGIAVEQDKNTQEVFAQVKQIYKTPPIKDFGGFNFSQILPDPSKPSKRSFIEDLLFNKVTLADAGFIKQYGDCLGDIAARDLICAQKFNGLTVLPPLLTDEMIAQYTSALLAGTITSGWTFGAGAALQIPFAMQMAYRFNGIGVTQNVLYENQKLIANQFNSAIGKIQDSLSSTASALGKLQDVVNQNAQALNTLVKQLSSNFGAISSVLNDILSRLDPPEAEVQIDRLITGRLQSLQTYVTQQLIRAAEIRASANLAATKMSECVLGQSKRVDFCGKGYHLMSFPQSAPHGVVFLHVTYVPAQEKNFTTAPAICHDGKAHFPREGVFVSNGTHWFVTQRNFYEPQIITTDNTFVSGNCDVVIGIVNNTVYDPLQPELDSFKEELDKYFKNHTSPDVDLGDISGINASVVNIQKEIDRLNEVAKNLNESLIDLQELGKYEQYIKGSGRENLYFQGGGGSGYIPEAPRDGQAYVRKDGEWVLLSTFLGHHHHHHHH

SEQ ID NO: 5400 - protein, 1281 aa, Artificial Sequence
  Description of Artificial Sequence: Synthetic polypeptide
MGILPSPGMPALLSLVSLLSVLLMGCVAETGTQCVNLTTRTQLPPAYTNSFTRGVYYPDKVFRSSVLHSTQDLFLPFFSNVTWFHAIHVSGTNGTKRFDNPVLPFNDGVYFASTEKSNIIRGWIFGTTLDSKTQSLLIVNNATNVVIKVCEFQFCNDPFLGVYYHKNNKSWMESEFRVYSSANNCTFEYVSQPFLMDLEGKQGNFKNLREFVFKNIDGYFKIYSKHTPINLVRDLPQGFSALEPLVDLPIGINITRFQTLLALHRSYLTPGDSSSGWTAGAAAYYVGYLQPRTFLLKYNENGTITDAVDCALDPLSETKCTLKSFTVEKGIYQTSNFRVQPTESIVRFPNITNLCPFGEVFNATRFASVYAWNRKVISNCVADYSVLYNSASFSTFKCYGVSPTKLNDLCFTNVYADSFVIRGDEVRQIAPGQTGKIADYNYKLPDDFTGCVIAWNSNNLDSKVGGNYNYLYRLFRKSNLKPFERDISTEIYQAGSTPCNGVEGFNCYFPLQSYGFQPTNGVGYQPYRVVVLSFELLHAPATVCGPKKSTNLVKNKCVNFNFNGLTGTGVLTESNKKFLPFQQFGRDIADTTDAVRDPQTLEILDITPCSFGGVSVITPGTNTSNQVAVLYQDVNCTEVPVAIHADQLTPTWRVYSTGSNVFQTRAGCLIGAEHVNNSYECDIPIGAGICASYQTQTNSPSGAGSVASQSIIAYTMSLGAENSVAYSNNSIAIPTNFTISVTTEILPVSMTKTSVDCTMYICGDSTECSNLLLQYGSFCTQLNRALTGIAVEQDKNTQEVFAQVKQIYKTPPIKDFGGFNFSQILPDPSKPSKRSFIEDLLFNKVTLADAGFIKQYGDCLGDIAARDLICAQKFNGLTVLPPLLTDEMIAQYTSALLAGTITSGWTFGAGAALQIPFAMQMAYRFNGIGVTQNVLYENQKLIANQFNSAIGKIQDSLSSTASALGKLQDVVNQNAQALNTLVKQLSSNFGAISSVLNDILSRLDPPEAEVQIDRLITGRLQSLQTYVTQQLIRAAEIRASANLAATKMSECVLGQSKRVDFCGKGYHLMSFPQSAPHGVVFLHVTYVPAQEKNFTTAPAICHDGKAHFPREGVFVSNGTHWFVTQRNFYEPQIITTDNTFVSGNCDVVIGIVNNTVYDPLQPELDSFKEELDKYFKNHTSPDVDLGDISGINASVVNIQKEIDRLNEVAKNLNESLIDLQELGKYEQYIKGSGRENLYFQGGGGSGYIPEAPRDGQAYVRKDGEWVLLSTFLGHHHHHHHH

SEQ ID NO: 5401 - protein, 1281 aa, Artificial Sequence
  Description of Artificial Sequence: Synthetic polypeptide
MGILPSPGMPALLSLVSLLSVLLMGCVAETGTQCVNLTTRTQLPPAYTNSFTRGVYYPDKVFRSSVLHSTQDLFLPFFSNVTWFHAIHVSGTNGTKRFDNPVLPFNDGVYFASTEKSNIIRGWIFGTTLDSKTQSLLIVNNATNVVIKVCEFQFCNDPFLGVYYHKNNKSWMESEFRVYSSANNCTFEYVSQPFLMDLEGKQGNFKNLREFVFKNIDGYFKIYSKHTPINLVRDLPQGFSALEPLVDLPIGINITRFQTLLALHRSYLTPGDSSSGWTAGAAAYYVGYLQPRTFLLKYNENGTITDAVDCALDPLSETKCTLKSFTVEKGIYQTSNFRVQPTESIVRFPNITNLCPFGEVFNATRFASVYAWNRKRISNCVADYSVLYNSASFSTFKCYGVSPTKLNDLCFTNVYADSFVIRGDEVRQIAPGQTGIIADYNYKLPDDFTGCVIAWNSNNLDSKVGGNYNYLYRLFRKSNLKPFERDISTEIYQAGSTPCNGVEGFNCYFPLQSYGFQPTNGVGYQPYRVVVLSFELLHAPATVCGPKKSTNLVKNKCVNFNFNGLTGTGVLTESNKKFLPFQQFGRDIADTTDAVRDPQTLEILDITPCSFGGVSVITPGTNTSNQVAVLYQDVNCTEVPVAIHADQLTPTWRVYSTGSNVFQTRAGCLIGAEHVNNSYECDIPIGAGICASYQTQTNSPSGAGSVASQSIIAYTMSLGAENSVAYSNNSIAIPTNFTISVTTEILPVSMTKTSVDCTMYICGDSTECSNLLLQYGSFCTQLNRALTGIAVEQDKNTQEVFAQVKQIYKTPPIKDFGGFNFSQILPDPSKPSKRSFIEDLLFNKVTLADAGFIKQYGDCLGDIAARDLICAQKFNGLTVLPPLLTDEMIAQYTSALLAGTITSGWTFGAGAALQIPFAMQMAYRFNGIGVTQNVLYENQKLIANQFNSAIGKIQDSLSSTASALGKLQDVVNQNAQALNTLVKQLSSNFGAISSVLNDILSRLDPPEAEVQIDRLITGRLQSLQTYVTQQLIRAAEIRASANLAATKMSECVLGQSKRVDFCGKGYHLMSFPQSAPHGVVFLHVTYVPAQEKNFTTAPAICHDGKAHFPREGVFVSNGTHWFVTQRNFYEPQIITTDNTFVSGNCDVVIGIVNNTVYDPLQPELDSFKEELDKYFKNHTSPDVDLGDISGINASVVNIQKEIDRLNEVAKNLNESLIDLQELGKYEQYIKGSGRENLYFQGGGGSGYIPEAPRDGQAYVRKDGEWVLLSTFLGHHHHHHHH

SEQ ID NO: 5402 - protein, 1281 aa, Artificial Sequence
  Description of Artificial Sequence: Synthetic polypeptide
MGILPSPGMPALLSLVSLLSVLLMGCVAETGTQCVNLTTRTQLPPAYTNSFTRGVYYPDKVFRSSVLHSTQDLFLPFFSNVTWFHAIHVSGTNGTKRFDNPVLPFNDGVYFASTEKSNIIRGWIFGTTLDSKTQSLLIVNNATNVVIKVCEFQFCNDPFLGVYYHKNNKSWMESEFRVYSSANNCTFEYVSQPFLMDLEGKQGNFKNLREFVFKNIDGYFKIYSKHTPINLVRDLPQGFSALEPLVDLPIGINITRFQTLLALHRSYLTPGDSSSGWTAGAAAYYVGYLQPRTFLLKYNENGTITDAVDCALDPLSETKCTLKSFTVEKGIYQTSNFRVQPTESIVRFPNITNLCPFGEVFNATRFASVYAWNRKRISNCVADYSVLYNSASFSTFKCYGVSPTKLNDLCFTNVYADSFVIRGDEVRQIAPGQTGKIADYNYKLPDDFTGCVIAWNSNNLDSKVGGNYNYLYRLFRKSNLKPFERDISTEIYQAGSTPCNGVEGFNCYFPLQSYGFQPTNGVGYQPYRVVVLSFELLHAPATVCGPKKSTNLVKNKCVNFNFNGLTGTGVLTESNKKFLPFQQFGRDIADTTDAVRDPQTLEILDITPCSFGGVSVITPGTNTSNQVAVLYQDVNCTEVPVAIHADQLTPTWRVYSTGSNVFQTRAGCLIGAEHVNNSYECDIPIGAGICASYQTQTNSPSGAGSVASQSIIAYTMSLGAENSVAYSNNSIAIPTNFTISVTTEILPVSMTKTSVDCTMYICGDSTECSNLLLQYGSFCTQLNRALTGIAVEQDKNTQEVFAQVKQIYKTPPIKDFGGFNFSQILPDPSKPSKRSFIEDLLFNKVTLADAGFIKQYGDCLGDIAARDLICAQKFNGLTVLPPLLTDEMIAQYTSALLAGTITSGWTFGAGAALQIPFAMQMAYRFNGIGVTQNVLYENQKLIANQFNSAIGKIQDSLSSTASALGKLQDVVNQNAQALNTLVKQLSSTFGAISSVLNDILSRLDPPEAEVQIDRLITGRLQSLQTYVTQQLIRAAEIRASANLAATKMSECVLGQSKRVDFCGKGYHLMSFPQSAPHGVVFLHVTYVPAQEKNFTTAPAICHDGKAHFPREGVFVSNGTHWFVTQRNFYEPQIITTDNTFVSGNCDVVIGIVNNTVYDPLQPELDSFKEELDKYFKNHTSPDVDLGDISGINASVVNIQKEIDRLNEVAKNLNESLIDLQELGKYEQYIKGSGRENLYFQGGGGSGYIPEAPRDGQAYVRKDGEWVLLSTFLGHHHHHHHH

SEQ ID NO: 5403 - protein, 1281 aa, Artificial Sequence
  Description of Artificial Sequence: Synthetic polypeptide
MGILPSPGMPALLSLVSLLSVLLMGCVAETGTQCVNLTTRTQLPPAYTNSFTRGVYYPDKVFRSSVLHSTQDLFLPFFSNVTWFHAIHVSGTNGTKRFDNPVLPFNDGVYFASTEKSNIIRGWIFGTTLDSKTQSLLIVNNATNVVIKVCEFQFCNDPFLGVYYHKNNKSWMESEFRVYSSANNCTFEYVSQPFLMDLEGKQGNFKNLREFVFKNIDGYFKIYSKHTPINLVRDLPQGFSALEPLVDLPIGINITRFQTLLALHRSYLTPGDSSSGWTAGAAAYYVGYLQPRTFLLKYNENGTITDAVDCALDPLSETKCTLKSFTVEKGIYQTSNFRVQPTESIVRFPNITNLCPFGEVFNATRFASVYAWNRKRISNCVADYSVLYNSASFSTFKCYGVSPTKLNDLCFTNVYADSFVIRGDEVRQIAPGQTGKIADYNYKLPDDFTGCVIAWNSNNLDSKVGGNYNYLYRLFRKSNLKPFERDISTEIYQAGSTPCNGVEGFNCYFPLQSYGFQPTNGVGYQPYRVVVLSFELLSAPATVCGPKKSTNLVKNKCVNFNFNGLTGTGVLTESNKKFLPFQQFGRDIADTTDAVRDPQTLEILDITPCSFGGVSVITPGTNTSNQVAVLYQDVNCTEVPVAIHADQLTPTWRVYSTGSNVFQTRAGCLIGAEHVNNSYECDIPIGAGICASYQTQTNSPSGAGSVASQSIIAYTMSLGAENSVAYSNNSIAIPTNFTISVTTEILPVSMTKTSVDCTMYICGDSTECSNLLLQYGSFCTQLNRALTGIAVEQDKNTQEVFAQVKQIYKTPPIKDFGGFNFSQILPDPSKPSKRSFIEDLLFNKVTLADAGFIKQYGDCLGDIAARDLICAQKFNGLTVLPPLLTDEMIAQYTSALLAGTITSGWTFGAGAALQIPFAMQMAYRFNGIGVTQNVLYENQKLIANQFNSAIGKIQDSLSSTASALGKLQDVVNQNAQALNTLVKQLSSNFGAISSVLNDILSRLDPPEAEVQIDRLITGRLQSLQTYVTQQLIRAAEIRASANLAATKMSECVLGQSKRVDFCGKGYHLMSFPQSAPHGVVFLHVTYVPAQEKNFTTAPAICHDGKAHFPREGVFVSNGTHWFVTQRNFYEPQIITTDNTFVSGNCDVVIGIVNNTVYDPLQPELDSFKEELDKYFKNHTSPDVDLGDISGINASVVNIQKEIDRLNEVAKNLNESLIDLQELGKYEQYIKGSGRENLYFQGGGGSGYIPEAPRDGQAYVRKDGEWVLLSTFLGHHHHHHHH

SEQ ID NO: 5404 - protein, 1281 aa, Artificial Sequence
  Description of Artificial Sequence: Synthetic polypeptide
MGILPSPGMPALLSLVSLLSVLLMGCVAETGTQCVNLTTRTQLPPAYTNSFTRGVYYPDKVFRSSVLHSTQDLFLPFFSNVTWFHAIHVSGTNGTKRFDNPVLPFNDGVYFASTEKSNIIRGWIFGTTLDSKTQSLLIVNNATNVVIKVCEFQFCNDPFLGVYYHKNNKSWMESEFRVYSSANNCTFEYVSQPFLMDLEGKQGNFKNLREFVFKNIDGYFKIYSKHTPINLVRDLPQGFSALEPLVDLPIGINITRFQTLLALHRSYLTPGDSSSGWTAGAAAYYVGYLQPRTFLLKYNENGTITDAVDCALDPLSETKCTLKSFTVEKGIYQTSNFRVQPTESIVRFPNITNLCPFGEVFNATRFASVYAWNRKRISNCVADYSVLYNSASFSTFKCYGVSPTKLNDLCFTNVYADSFVIRGDEVRQIAPGQTGKIADYNYKLPDDFTGCVIAWNSNNLDSKVGGNYNYLYRLFRKSNLKPFERDISTEGYQAGSTPCNGVEGFNCYFPLQSYGFQPTNGVGYQPYRVVVLSFELLHAPATVCGPKKSTNLVKNKCVNFNFNGLTGTGVLTESNKKFLPFQQFGRDIADTTDAVRDPQTLEILDITPCSFGGVSVITPGTNTSNQVAVLYQDVNCTEVPVAIHADQLTPTWRVYSTGSNVFQTRAGCLIGAEHVNNSYECDIPIGAGICASYQTQTNSPSGAGSVASQSIIAYTMSLGAENSVAYSNNSIAIPTNFTISVTTEILPVSMTKTSVDCTMYICGDSTECSNLLLQYGSFCTQLNRALTGIAVEQDKNTQEVFAQVKQIYKTPPIKDFGGFNFSQILPDPSKPSKRSFIEDLLFNKVTLADAGFIKQYGDCLGDIAARDLICAQKFNGLTVLPPLLTDEMIAQYTSALLAGTITSGWTFGAGAALQIPFAMQMAYRFNGIGVTQNVLYENQKLIANQFNSAIGKIQDSLSSTASALGKLQDVVNQNAQALNTLVKQLSSNFGAISSVLNDILSRLDPPEAEVQIDRLITGRLQSLQTYVTQQLIRAAEIRASANLAATKMSECVLGQSKRVDFCGKGYHLMSFPQSAPHGVVFLHVTYVPAQEKNFTTAPAICHDGKAHFPREGVFVSNGTHWFVTQRNFYEPQIITTDNTFVSGNCDVVIGIVNNTVYDPLQPELDSFKEELDKYFKNHTSPDVDLGDISGINASVVNIQKEIDRLNEVAKNLNESLIDLQELGKYEQYIKGSGRENLYFQGGGGSGYIPEAPRDGQAYVRKDGEWVLLSTFLGHHHHHHHH

SEQ ID NO: 5405 - protein, 1281 aa, Artificial Sequence
  Description of Artificial Sequence: Synthetic polypeptide
MGILPSPGMPALLSLVSLLSVLLMGCVAETGTQCVNLTTRTQLPPAYTNSFTRGVYYPDKVFRSSVLHSTQDLFLPFFSNVTWFHAIHVSGTNGTKRFDNPVLPFNDGVYFASTEKSNIIRGWIFGTTLDSKTQSLLIVNNATNVVIKVCEFQFCNDPFLGVYYHKNNKSWMESEFRVYSSANNCTFEYVSQPFLMDLEGKQGNFKNLREFVFKNIDGYFKIYSKHTPINLVRDLPQGFSALEPLVDLPIGINITRFQTLLALHRSYLTPGDSSSGWTAGAAAYYVGYLQPRTFLLKYNENGTITDAVDCALDPLSETKCTLKSFTVEKGIYQTSNFRVQPTESIVRFPNITNLCPFGEVFNATRFASVYAWNRKRISNCVADYSVLYNSASFSTFKCYGVSPTKLNDLCFTNVYADSFVIRGDEVRQIAPGQTGKIADYNYKLPDDFTGCVIAWNSINLDSKVGGNYNYLYRLFRKSNLKPFERDISTEIYQAGSTPCNGVEGFNCYFPLQSYGFQPTNGVGYQPYRVVVLSFELLHAPATVCGPKKSTNLVKNKCVNFNFNGLTGTGVLTESNKKFLPFQQFGRDIADTTDAVRDPQTLEILDITPCSFGGVSVITPGTNTSNQVAVLYQDVNCTEVPVAIHADQLTPTWRVYSTGSNVFQTRAGCLIGAEHVNNSYECDIPIGAGICASYQTQTNSPSGAGSVASQSIIAYTMSLGAENSVAYSNNSIAIPTNFTISVTTEILPVSMTKTSVDCTMYICGDSTECSNLLLQYGSFCTQLNRALTGIAVEQDKNTQEVFAQVKQIYKTPPIKDFGGFNFSQILPDPSKPSKRSFIEDLLFNKVTLADAGFIKQYGDCLGDIAARDLICAQKFNGLTVLPPLLTDEMIAQYTSALLAGTITSGWTFGAGAALQIPFAMQMAYRFNGIGVTQNVLYENQKLIANQFNSAIGKIQDSLSSTASALGKLQDVVNQNAQALNTLVKQLSSNFGAISSVLNDILSRLDPPEAEVQIDRLITGRLQSLQTYVTQQLIRAAEIRASANLAATKMSECVLGQSKRVDFCGKGYHLMSFPQSAPHGVVFLHVTYVPAQEKNFTTAPAICHDGKAHFPREGVFVSNGTHWFVTQRNFYEPQIITTDNTFVSGNCDVVIGIVNNTVYDPLQPELDSFKEELDKYFKNHTSPDVDLGDISGINASVVNIQKEIDRLNEVAKNLNESLIDLQELGKYEQYIKGSGRENLYFQGGGGSGYIPEAPRDGQAYVRKDGEWVLLSTFLGHHHHHHHH

SEQ ID NO: 5406 - protein, 1281 aa, Artificial Sequence
  Description of Artificial Sequence: Synthetic polypeptide
MGILPSPGMPALLSLVSLLSVLLMGCVAETGTQCVNLTTRTQLPPAYTNSFTRGVYYPDKVFRSSVLHSTQDLFLPFFSNVTWFHAIHVSGTNGTKRFDNPVLPFNDGVYFASTEKSNIIRGWIFGTTLDSKTQSLLIVNNATNVVIKVCEFQFCNDPFLGVYYHKNNKSWMESEFRVYSSANNCTFEYVSQPFLMDLEGKQGNFKNLREFVFKNIDGYFKIYSKHTPINLVRDLPQGFSALEPLVDLPIGINITRFQTLLALHRSYLTPGDSSSGWTAGAAAYYVGYLQPRTFLLKYNENGTITDAVDCALDPLSETKCTLKSFTVEKGIYQTSNFRVQPTESIVRFPNITNLCPFGEVFNATRFASVYAWNRKRISNCVADYSVLYNSASFSTFKCYGVSPTKLNDLCFTNVYADSFVIRGDEVRQIAPGQTGKIADYNYKLPDDFTGCVIAWNSNELDSKVGGNYNYLYRLFRKSNLKPFERDISTEIYQAGSTPCNGVEGFNCYFPLQSYGFQPTNGVGYQPYRVVVLSFELLHAPATVCGPKKSTNLVKNKCVNFNFNGLTGTGVLTESNKKFLPFQQFGRDIADTTDAVRDPQTLEILDITPCSFGGVSVITPGTNTSNQVAVLYQDVNCTEVPVAIHADQLTPTWRVYSTGSNVFQTRAGCLIGAEHVNNSYECDIPIGAGICASYQTQTNSPSGAGSVASQSIIAYTMSLGAENSVAYSNNSIAIPTNFTISVTTEILPVSMTKTSVDCTMYICGDSTECSNLLLQYGSFCTQLNRALTGIAVEQDKNTQEVFAQVKQIYKTPPIKDFGGFNFSQILPDPSKPSKRSFIEDLLFNKVTLADAGFIKQYGDCLGDIAARDLICAQKFNGLTVLPPLLTDEMIAQYTSALLAGTITSGWTFGAGAALQIPFAMQMAYRFNGIGVTQNVLYENQKLIANQFNSAIGKIQDSLSSTASALGKLQDVVNQNAQALNTLVKQLSSNFGAISSVLNDILSRLDPPEAEVQIDRLITGRLQSLQTYVTQQLIRAAEIRASANLAATKMSECVLGQSKRVDFCGKGYHLMSFPQSAPHGVVFLHVTYVPAQEKNFTTAPAICHDGKAHFPREGVFVSNGTHWFVTQRNFYEPQIITTDNTFVSGNCDVVIGIVNNTVYDPLQPELDSFKEELDKYFKNHTSPDVDLGDISGINASVVNIQKEIDRLNEVAKNLNESLIDLQELGKYEQYIKGSGRENLYFQGGGGSGYIPEAPRDGQAYVRKDGEWVLLSTFLGHHHHHHHH

SEQ ID NO: 5407 - protein, 1281 aa, Artificial Sequence
  Description of Artificial Sequence: Synthetic polypeptide
MGILPSPGMPALLSLVSLLSVLLMGCVAETGTQCVNLTTRTQLPPAYTNSFTRGVYYPDKVFRSSVLHSTQDLFLPFFSNVTWFHAIHVSGTNGTKRFDNPVLPFNDGVYFASTEKSNIIRGWIFGTTLDSKTQSLLIVNNATNVVIKVCEFQFCNDPFLGVYYHKNNKSWMESEFRVYSSANNCTFEYVSQPFLMDLEGKQGNFKNLREFVFKNIDGYFKIYSKHTPINLVRDLPQGFSALEPLVDLPIGINITRFQTLLALHRSYLTPGDSSSGWTAGAAAYYVGYLQPRTFLLKYNENGTITDAVDCALDPLSETKCTLKSFTVEKGIYQTSNFRVQPTESIVRFPNITNLCPFGEVFNATRFASVYAWNRKRISNCVADYSVLYNSASFSTFKCYGVSPTKLNDLCFTNVYADSFVIRGDEVRQIAPGQTGKIADYNYKLPDDFTGCVIAWNSNNLDSKVGGNYNYLYRLFRKSNLKPFERDISTEIYQAGSTPCNGVEGFNCYFPLQSYGFQPTNGVGYQPYRVVVLSFELLHAPATVCGPKKSTNLVKNKCVNFNFNGLTGTGVLTESNKKFLPFQQFGRDIADTTDAVRDPQTLEILDITPCSFGGVSVITPGTNTSNQVAVLYQDVNCTEVPVAIHADQLTPTWRVYSTGSNVFQTRAGCLIGAEHVNNSYECDIPIGAGICASYQTQTNSPSGAGSVASQSIIAYTMSLGAENSVAYSNNSIAIPTNFTISVTTEILPVSMTKTSVDCTMYICGDSTECSNLLLQYGSFCTQLNRALTGIAVEQDKNTQEVFAQVKQIYKTPPIKDFGGFNFSQILPDPSKPSKRSFIEDLLFNKVTLADAGFIKQYGDCLGDIAARDLICAQKFNGLTVLPPLLTDEMIAQYTSALLAGTITSGWTFGAGAALQIPFAMQMAYRFNGIGVTQNVLYENQKLIANQFNSAIGKIQDSLSSTASALGKLQDVVNQNAQALNTLVKQLSSNFGAISSVLNDILSRLDPPEAEVQIDRLITGRLQSLQTYVTQQLIRAAEIRASANLAATKMSECVLGQSKRVHFCGKGYHLMSFPQSAPHGVVFLHVTYVPAQEKNFTTAPAICHDGKAHFPREGVFVSNGTHWFVTQRNFYEPQIITTDNTFVSGNCDVVIGIVNNTVYDPLQPELDSFKEELDKYFKNHTSPDVDLGDISGINASVVNIQKEIDRLNEVAKNLNESLIDLQELGKYEQYIKGSGRENLYFQGGGGSGYIPEAPRDGQAYVRKDGEWVLLSTFLGHHHHHHHH

SEQ ID NO: 5408 - protein, 1281 aa, Artificial Sequence
  Description of Artificial Sequence: Synthetic polypeptide
MGILPSPGMPALLSLVSLLSVLLMGCVAETGTQCVNLTTRTQLPPAYTNSFTRGVYYPDKVFRSSVLHSTQDLFLPFFSNVTWFHAIHVSGTNGTKRFDNPVLPFNDGVYFASTEKSNIIRGWIFGTTLDSKTQSLLIVNNATNVVIKVCEFQFCNDPFLGVYYHKNNKSWMESEFRVYSSANNCTFEYVSQPFLMDLEGKQGNFKNLREFVFKNIDGYFKIYSKHTPINLVRDLPQGFSALEPLVDLPIGINITRFQTLLALHRSYLTPGDSSSGWTAGAAAYYVGYLQPRTFLLKYNENGTITDAVDCALDPLSETKCTLKSFTVEKGIYQTSNFRVQPTESIVRFPNITNLCPFGEVFNATRFASVYAWNRKRISNCVADYSVLYNSASFSTFKCYGVSPTKLNDLCFTNVYADSFVIRGDEVRQIAPGQTGKIADYNYKLPDDFTGCVIAWNSNNLDSKVGGNYNYLYRLFRKSNLKPFERDISFEIYQAGSTPCNGVEGFNCYFPLQSYGFQPTNGVGYQPYRVVVLSFELLHAPATVCGPKKSTNLVKNKCVNFNFNGLTGTGVLTESNKKFLPFQQFGRDIADTTDAVRDPQTLEILDITPCSFGGVSVITPGTNTSNQVAVLYQDVNCTEVPVAIHADQLTPTWRVYSTGSNVFQTRAGCLIGAEHVNNSYECDIPIGAGICASYQTQTNSPSGAGSVASQSIIAYTMSLGAENSVAYSNNSIAIPTNFTISVTTEILPVSMTKTSVDCTMYICGDSTECSNLLLQYGSFCTQLNRALTGIAVEQDKNTQEVFAQVKQIYKTPPIKDFGGFNFSQILPDPSKPSKRSFIEDLLFNKVTLADAGFIKQYGDCLGDIAARDLICAQKFNGLTVLPPLLTDEMIAQYTSALLAGTITSGWTFGAGAALQIPFAMQMAYRFNGIGVTQNVLYENQKLIANQFNSAIGKIQDSLSSTASALGKLQDVVNQNAQALNTLVKQLSSNFGAISSVLNDILSRLDPPEAEVQIDRLITGRLQSLQTYVTQQLIRAAEIRASANLAATKMSECVLGQSKRVDFCGKGYHLMSFPQSAPHGVVFLHVTYVPAQEKNFTTAPAICHDGKAHFPREGVFVSNGTHWFVTQRNFYEPQIITTDNTFVSGNCDVVIGIVNNTVYDPLQPELDSFKEELDKYFKNHTSPDVDLGDISGINASVVNIQKEIDRLNEVAKNLNESLIDLQELGKYEQYIKGSGRENLYFQGGGGSGYIPEAPRDGQAYVRKDGEWVLLSTFLGHHHHHHHH

SEQ ID NO: 5409 - protein, 1281 aa, Artificial Sequence
  Description of Artificial Sequence: Synthetic polypeptide
MGILPSPGMPALLSLVSLLSVLLMGCVAETGTQCVNLTTRTQLPPAYTNSFTRGVYYPDKVFRSSVLHSTQDLFLPFFSNVTWFHAIHVSGTNGTKRFDNPVLPFNDGVYFASTEKSNIIRGWIFGTTLDSKTQSLLIVNNATNVVIKVCEFQFCNDPFLGVYYHKNNKSWMESEFRVYSSANNCTFEYVSQPFLMDLEGKQGNFKNLREFVFKNIDGYFKIYSKHTPINLVRDLPQGFSALEPLVDLPIGINITRFQTLLALHRSYLTPGDSSSGWTAGAAAYYVGYLQPRTFLLKYNENGTITDAVDCALDPLSETKCTLKSFTVEKGIYQTSNFRVQPTESIVRFPNITNLCPFGEVFNATRFASVYAWNRKRISNCVADYSVLFNSASFSTFKCYGVSPTKLNDLCFTNVYADSFVIRGDEVRQIAPGQTGKIADYNYKLPDDFTGCVIAWNSNNLDSKVGGNYNYLYRLFRKSNLKPFERDISTEIYQAGSTPCNGVEGFNCYFPLQSYGFQPTNGVGYQPYRVVVLSFELLHAPATVCGPKKSTNLVKNKCVNFNFNGLTGTGVLTESNKKFLPFQQFGRDIADTTDAVRDPQTLEILDITPCSFGGVSVITPGTNTSNQVAVLYQDVNCTEVPVAIHADQLTPTWRVYSTGSNVFQTRAGCLIGAEHVNNSYECDIPIGAGICASYQTQTNSPSGAGSVASQSIIAYTMSLGAENSVAYSNNSIAIPTNFTISVTTEILPVSMTKTSVDCTMYICGDSTECSNLLLQYGSFCTQLNRALTGIAVEQDKNTQEVFAQVKQIYKTPPIKDFGGFNFSQILPDPSKPSKRSFIEDLLFNKVTLADAGFIKQYGDCLGDIAARDLICAQKFNGLTVLPPLLTDEMIAQYTSALLAGTITSGWTFGAGAALQIPFAMQMAYRFNGIGVTQNVLYENQKLIANQFNSAIGKIQDSLSSTASALGKLQDVVNQNAQALNTLVKQLSSNFGAISSVLNDILSRLDPPEAEVQIDRLITGRLQSLQTYVTQQLIRAAEIRASANLAATKMSECVLGQSKRVDFCGKGYHLMSFPQSAPHGVVFLHVTYVPAQEKNFTTAPAICHDGKAHFPREGVFVSNGTHWFVTQRNFYEPQIITTDNTFVSGNCDVVIGIVNNTVYDPLQPELDSFKEELDKYFKNHTSPDVDLGDISGINASVVNIQKEIDRLNEVAKNLNESLIDLQELGKYEQYIKGSGRENLYFQGGGGSGYIPEAPRDGQAYVRKDGEWVLLSTFLGHHHHHHHH

SEQ ID NO: 5410 - protein, 1281 aa, Artificial Sequence
  Description of Artificial Sequence: Synthetic polypeptide
MGILPSPGMPALLSLVSLLSVLLMGCVAETGTQCVNLTTRTQLPPAYTNSFTRGVYYPDKVFRSSVLHSTQDLFLPFFSNVTWFHAIHVSGTNGTKRFDNPVLPFNDGVYFASTEKSNIIRGWIFGTTLDSKTQSLLIVNNATNVVIKVCEFQFCNDPFLGVYYHKNNKSWMESEFRVYSSANNCTFEYVSQPFLMDLEGKQGNFKNLREFVFKNIDGYFKIYSKHTPINLVRDLPQGFSALEPLVDLPIGINITRFQTLLALHRSYLTPGDSSSGWTAGAAAYYVGYLQPRTFLLKYNENGTITDAVDCALDPLSETKCTLKSFTVEKGIYQTSNFRVQPTESIVRFPNITNLCPFGEVFNATRFASVYAWNRKRISNCVADYSVLYNSASFSTFKCYGVSPTKLNDLCFTNVYADSFVIRGDEVRQIAPGQTGKIADYNYKLPDDFTGCVIAWNSNNLDSKVGGNYNYLYRLFRKSNLKPFERDISTEIYQAGSTPCNGVEGFNCYFPLQSYGFQPTNGVGYQPYRVVVLSFELLHAPATVCGPKKSTNLVKNKCVNFNFNGLTGTGVLTESNKQFLPFQQFGRDIADTTDAVRDPQTLEILDITPCSFGGVSVITPGTNTSNQVAVLYQDVNCTEVPVAIHADQLTPTWRVYSTGSNVFQTRAGCLIGAEHVNNSYECDIPIGAGICASYQTQTNSPSGAGSVASQSIIAYTMSLGAENSVAYSNNSIAIPTNFTISVTTEILPVSMTKTSVDCTMYICGDSTECSNLLLQYGSFCTQLNRALTGIAVEQDKNTQEVFAQVKQIYKTPPIKDFGGFNFSQILPDPSKPSKRSFIEDLLFNKVTLADAGFIKQYGDCLGDIAARDLICAQKFNGLTVLPPLLTDEMIAQYTSALLAGTITSGWTFGAGAALQIPFAMQMAYRFNGIGVTQNVLYENQKLIANQFNSAIGKIQDSLSSTASALGKLQDVVNQNAQALNTLVKQLSSNFGAISSVLNDILSRLDPPEAEVQIDRLITGRLQSLQTYVTQQLIRAAEIRASANLAATKMSECVLGQSKRVDFCGKGYHLMSFPQSAPHGVVFLHVTYVPAQEKNFTTAPAICHDGKAHFPREGVFVSNGTHWFVTQRNFYEPQIITTDNTFVSGNCDVVIGIVNNTVYDPLQPELDSFKEELDKYFKNHTSPDVDLGDISGINASVVNIQKEIDRLNEVAKNLNESLIDLQELGKYEQYIKGSGRENLYFQGGGGSGYIPEAPRDGQAYVRKDGEWVLLSTFLGHHHHHHHH

SEQ ID NO: 5411 - protein, 1281 aa, Artificial Sequence
  Description of Artificial Sequence: Synthetic polypeptide
MGILPSPGMPALLSLVSLLSVLLMGCVAETGTQCVNLTTRTQLPPAYTNSFTRGVYYPDKVFRSSVLHSTQDLFLPFFSNVTWFHAIHVSGTNGTKRFDNPVLPFNDGVYFASTEKSNIIRGWIFGTTLDSKTQSLLIVNNATNVVIKVCEFQFCNDPFLGVYYHKNNKSWMESEFRVYSSANNCTFEYVSQPFLMDLEGKQGNFKNLREFVFKNIDGYFKIYSKHTPINLVRDLPQGFSALEPLVDLPIGINITRFQTLLALHRSYLTPGDSSSGWTAGAAAYYVGYLQPRTFLLKYNENGTITDAVDCALDPLSETKCTLKSFTVEKGIYQTSNFRVQPTESIVRFPNITNLCPFGEVFNATRFASVYAWNRKRISNCVADYSVLYNSASFTTFKCYGVSPTKLNDLCFTNVYADSFVIRGDEVRQIAPGQTGKIADYNYKLPDDFTGCVIAWNSNNLDSKVGGNYNYLYRLFRKSNLKPFERDISTEIYQAGSTPCNGVEGFNCYFPLQSYGFQPTNGVGYQPYRVVVLSFELLHAPATVCGPKKSTNLVKNKCVNFNFNGLTGTGVLTESNKKFLPFQQFGRDIADTTDAVRDPQTLEILDITPCSFGGVSVITPGTNTSNQVAVLYQDVNCTEVPVAIHADQLTPTWRVYSTGSNVFQTRAGCLIGAEHVNNSYECDIPIGAGICASYQTQTNSPSGAGSVASQSIIAYTMSLGAENSVAYSNNSIAIPTNFTISVTTEILPVSMTKTSVDCTMYICGDSTECSNLLLQYGSFCTQLNRALTGIAVEQDKNTQEVFAQVKQIYKTPPIKDFGGFNFSQILPDPSKPSKRSFIEDLLFNKVTLADAGFIKQYGDCLGDIAARDLICAQKFNGLTVLPPLLTDEMIAQYTSALLAGTITSGWTFGAGAALQIPFAMQMAYRFNGIGVTQNVLYENQKLIANQFNSAIGKIQDSLSSTASALGKLQDVVNQNAQALNTLVKQLSSNFGAISSVLNDILSRLDPPEAEVQIDRLITGRLQSLQTYVTQQLIRAAEIRASANLAATKMSECVLGQSKRVDFCGKGYHLMSFPQSAPHGVVFLHVTYVPAQEKNFTTAPAICHDGKAHFPREGVFVSNGTHWFVTQRNFYEPQIITTDNTFVSGNCDVVIGIVNNTVYDPLQPELDSFKEELDKYFKNHTSPDVDLGDISGINASVVNIQKEIDRLNEVAKNLNESLIDLQELGKYEQYIKGSGRENLYFQGGGGSGYIPEAPRDGQAYVRKDGEWVLLSTFLGHHHHHHHH

SEQ ID NO: 5412 - protein, 1281 aa, Artificial Sequence
  Description of Artificial Sequence: Synthetic polypeptide
MGILPSPGMPALLSLVSLLSVLLMGCVAETGTQCVNLTTRTQLPPAYTNSFTRGVYYPDKVFRSSVLHSTQDLFLPFFSNVTWFHAIHVSGTNGTKRFDNPVLPFNDGVYFASTEKSNIIRGWIFGTTLDSKTQSLLIVNNATNVVIKVCEFQFCNDPFLGVYYHKNNKSWMESEFRVYSSANNCTFEYVSQPFLMDLEGKQGNFKNLREFVFKNIDGYFKIYSKHTPINLVRDLPQGFSALEPLVDLPIGINITRFQTLLALHRSYLTPGDSSSGWTAGAAAYYVGYLQPRTFLLKYNENGTITDAVDCALDPLSETKCTLKSFTVEKGIYQTSNFRVQPTESIVRFPNITNLCPFGEVFNATRFASVYAWNRKRISNCVADYSVLYNSASFSTFKCYGVSPTKLNDLCFTNVYADKFVIRGDEVRQIAPGQTGKIADYNYKLPDDFTGCVIAWNSNNLDSKVGGNYNYLYRLFRKSNLKPFERDISTEIYQAGSTPCNGVEGFNCYFPLQSYGFQPTNGVGYQPYRVVVLSFELLHAPATVCGPKKSTNLVKNKCVNFNFNGLTGTGVLTESNKKFLPFQQFGRDIADTTDAVRDPQTLEILDITPCSFGGVSVITPGTNTSNQVAVLYQDVNCTEVPVAIHADQLTPTWRVYSTGSNVFQTRAGCLIGAEHVNNSYECDIPIGAGICASYQTQTNSPSGAGSVASQSIIAYTMSLGAENSVAYSNNSIAIPTNFTISVTTEILPVSMTKTSVDCTMYICGDSTECSNLLLQYGSFCTQLNRALTGIAVEQDKNTQEVFAQVKQIYKTPPIKDFGGFNFSQILPDPSKPSKRSFIEDLLFNKVTLADAGFIKQYGDCLGDIAARDLICAQKFNGLTVLPPLLTDEMIAQYTSALLAGTITSGWTFGAGAALQIPFAMQMAYRFNGIGVTQNVLYENQKLIANQFNSAIGKIQDSLSSTASALGKLQDVVNQNAQALNTLVKQLSSNFGAISSVLNDILSRLDPPEAEVQIDRLITGRLQSLQTYVTQQLIRAAEIRASANLAATKMSECVLGQSKRVDFCGKGYHLMSFPQSAPHGVVFLHVTYVPAQEKNFTTAPAICHDGKAHFPREGVFVSNGTHWFVTQRNFYEPQIITTDNTFVSGNCDVVIGIVNNTVYDPLQPELDSFKEELDKYFKNHTSPDVDLGDISGINASVVNIQKEIDRLNEVAKNLNESLIDLQELGKYEQYIKGSGRENLYFQGGGGSGYIPEAPRDGQAYVRKDGEWVLLSTFLGHHHHHHHH

SEQ ID NO: 5413 - protein, 1281 aa, Artificial Sequence
  Description of Artificial Sequence: Synthetic polypeptide
MGILPSPGMPALLSLVSLLSVLLMGCVAETGTQCVNLTTRTQLPPAYTNSFTRGVYYPDKVFRSSVLHSTQDLFLPFFSNVTWFHAIHVSGTNGTKRFDNPVLPFNDGVYFASTEKSNIIRGWIFGTTLDSKTQSLLIVNNATNVVIKVCEFQFCNDPFLGVYYHKNNKSWMESEFRVYSSANNCTFEYVSQPFLMDLEGKQGNFKNLREFVFKNIDGYFKIYSKHTPINLVRDLPQGFSALEPLVDLPIGINITRFQTLLALHRSYLTPGDSSSGWTAGAAAYYVGYLQPRTFLLKYNENGTITDAVDCALDPLSETKCTLKSFTVEKGIYQTSNFRVQPTESIVRFPNITNLCPFGEVFNATRFASVYAWNRKRISNCVADYSVLYNSASFSTFKCYGVSPTKLNDLCFTNVYADSFVIRGDEVRQIAPGQTGKIADYNYKLPDDFTGCVIAWNSNNLDSKVGGNYNYLYRLFRKSNLKPFERDIDTEIYQAGSTPCNGVEGFNCYFPLQSYGFQPTNGVGYQPYRVVVLSFELLHAPATVCGPKKSTNLVKNKCVNFNFNGLTGTGVLTESNKKFLPFQQFGRDIADTTDAVRDPQTLEILDITPCSFGGVSVITPGTNTSNQVAVLYQDVNCTEVPVAIHADQLTPTWRVYSTGSNVFQTRAGCLIGAEHVNNSYECDIPIGAGICASYQTQTNSPSGAGSVASQSIIAYTMSLGAENSVAYSNNSIAIPTNFTISVTTEILPVSMTKTSVDCTMYICGDSTECSNLLLQYGSFCTQLNRALTGIAVEQDKNTQEVFAQVKQIYKTPPIKDFGGFNFSQILPDPSKPSKRSFIEDLLFNKVTLADAGFIKQYGDCLGDIAARDLICAQKFNGLTVLPPLLTDEMIAQYTSALLAGTITSGWTFGAGAALQIPFAMQMAYRFNGIGVTQNVLYENQKLIANQFNSAIGKIQDSLSSTASALGKLQDVVNQNAQALNTLVKQLSSNFGAISSVLNDILSRLDPPEAEVQIDRLITGRLQSLQTYVTQQLIRAAEIRASANLAATKMSECVLGQSKRVDFCGKGYHLMSFPQSAPHGVVFLHVTYVPAQEKNFTTAPAICHDGKAHFPREGVFVSNGTHWFVTQRNFYEPQIITTDNTFVSGNCDVVIGIVNNTVYDPLQPELDSFKEELDKYFKNHTSPDVDLGDISGINASVVNIQKEIDRLNEVAKNLNESLIDLQELGKYEQYIKGSGRENLYFQGGGGSGYIPEAPRDGQAYVRKDGEWVLLSTFLGHHHHHHHH

SEQ ID NO: 5414 - protein, 1281 aa, Artificial Sequence
  Description of Artificial Sequence: Synthetic polypeptide
MGILPSPGMPALLSLVSLLSVLLMGCVAETGTQCVNLTTRTQLPPAYTNSFTRGVYYPDKVFRSSVLHSTQDLFLPFFSNVTWFHAIHVSGTNGTKRFDNPVLPFNDGVYFASTEKSNIIRGWIFGTTLDSKTQSLLIVNNATNVVIKVCEFQFCNDPFLGVYYHKNNKSWMESEFRVYSSANNCTFEYVSQPFLMDLEGKQGNFKNLREFVFKNIDGYFKIYSKHTPINLVRDLPQGFSALEPLVDLPIGINITRFQTLLALHRSYLTPGDSSSGWTAGAAAYYVGYLQPRTFLLKYNENGTITDAVDCALDPLSETKCTLKSFTVEKGIYQTSNFRVQPTESIVRFPNITNLCPFGEVFNATRFASVYAWNRKRISNCVADYSVLYNSASFSTFKCYGVSPTKLNDLCFTNVYADSFVIRGDEVRQIAPGQTGKIADYNYKLPDDFTGCVIAWNSNNLDSKVGGNYNYLYRLFRKSNLKPFERDISTEIYQAGSTPCNGVEGFNCYFPLQSYGFQPTNGVGYQPYRVVVLSFELLHAPATVCGPKKSTNLVKNKCVNFNFNGLTGTGVLTESNKKFLPFQQFGRDIADTTDAVRDPQTLEILDITPCSFGGVSVITPGTNTSNQVAVLYQDVNCTEVPVAIHADQLTPTWRVYSTGSNVFQTRAGCLIGAEHVNNSYECDIPIGAGICASYQTQTNSPSGAGSVASQSIIAYTMSLGAENCVAYSNNSIAIPTNFTISVTTEILPVSMTKTSVDCTMYICGDSTECSNLLLQYGSFCTQLNRALTGIAVEQDKNTQEVFAQVKQIYKTPPIKDFGGFNFSQILPDPSKPSKRSFIEDLLFNKVTLADAGFIKQYGDCLGDIAARDLICAQKFNGLTVLPPLLTDEMIAQYTSALLAGTITSGWTFGAGAALQIPFAMQMAYRFNGIGVTQNVLYENQKLIANQFNSAIGKIQDSLSSTASALGKLQDVVNQNAQALNTLVKQLSSNFGAISSVLNDILSRLDPPEAEVQIDRLITGRLQSLQTYVTQQLIRAAEIRASANLAATKMSECVLGQSKRVDFCGKGYHLMSFPQSAPHGVVFLHVTYVPAQEKNFTTAPAICHDGKAHFPREGVFVSNGTHWFVTQRNFYEPQIITTDNTFVSGNCDVVIGIVNNTVYDPLQPELDSFKEELDKYFKNHTSPDVDLGDISGINASVVNIQKEIDRLNEVAKNLNESLIDLQELGKYEQYIKGSGRENLYFQGGGGSGYIPEAPRDGQAYVRKDGEWVLLSTFLGHHHHHHHH

SEQ ID NO: 5415 - protein, 1281 aa, Artificial Sequence
  Description of Artificial Sequence: Synthetic polypeptide
MGILPSPGMPALLSLVSLLSVLLMGCVAETGTQCVNLTTRTQLPPAYTNSFTRGVYYPDKVFRSSVLHSTQDLFLPFFSNVTWFHAIHVSGTNGTKRFDNPVLPFNDGVYFASTEKSNIIRGWIFGTTLDSKTQSLLIVNNATNVVIKVCEFQFCNDPFLGVYYHKNNKSWMESEFRVYSSANNCTFEYVSQPFLMDLEGKQGNFKNLREFVFKNIDGYFKIYSKHTPINLVRDLPQGFSALEPLVDLPIGINITRFQTLLALHRSYLTPGDSSSGWTAGAAAYYVGYLQPRTFLLKYNENGTITDAVDCALDPLSETKCTLKSFTVEKGIYQTSNFRVQPTESIVRFPNITNLCPFGEVFNATRFASVYAWNRKRISNCVADYSVLYNSASFSTFKCYGVSPTKLNDLCFTNVYADSFVIRGDEVRQIAPGQTGKIADYNYKLPDDFTGCVIAWNSNNLDSKVGGNYNYLYRLFRKSNLKPFERDISTEIYQAGSTPCNGVEGFNCYFPLQSYGFQPTNGVGYQPYRVVVLSFELLHAPATVCGPKKSTNLVKNKCVNFNFNGLTGTGVLTESNKKFLPFQQFGRDIADTTDAVRDPQTLEILDITPCSFGGVSVITPGTNTSNQVAVLYQDVNCTEVPVAIHADQLTPTWRVYSTGSNVFQTRAGCLIGAEHVNNSYECDIPIGAGICASYQTQTNSPSGAGSVASQSIIAYTMSLGAENSVAYSNNSIAIPTNFTISVTTEILPVSMTKTSVDCTMYICGDSTECSNLLLQYGSFCTQLNRALTGIAVEQDKNTQEVFAQVKQIYKTPPIKDFGGFNFSQILPDPSKPSKRSFIEDLLFNKVTLADAGFIKQYGDCLGDIAARDLICAQKFNGLTVLPPLLTDEMIAQYTSALLAGTITSGWTFGAGAALQIPFAMQMAYRFNGIGVTQNVLYENQKLIANQFNSAIGKIQDSLSSTASALGKLQDVVNQNAQALNTLVKQLSSNFGAISSVLNDILSRLDPPDAEVQIDRLITGRLQSLQTYVTQQLIRAAEIRASANLAATKMSECVLGQSKRVDFCGKGYHLMSFPQSAPHGVVFLHVTYVPAQEKNFTTAPAICHDGKAHFPREGVFVSNGTHWFVTQRNFYEPQIITTDNTFVSGNCDVVIGIVNNTVYDPLQPELDSFKEELDKYFKNHTSPDVDLGDISGINASVVNIQKEIDRLNEVAKNLNESLIDLQELGKYEQYIKGSGRENLYFQGGGGSGYIPEAPRDGQAYVRKDGEWVLLSTFLGHHHHHHHH

SEQ ID NO: 5416 - protein, 1281 aa, Artificial Sequence
  Description of Artificial Sequence: Synthetic polypeptide
MGILPSPGMPALLSLVSLLSVLLMGCVAETGTQCVNLTTRTQLPPAYTNSFTRGVYYPDKVFRSSVLHSTQDLFLPFFSNVTWFHAIHVSGTNGTKRFDNPVLPFNDGVYFASTEKSNIIRGWIFGTTLDSKTQSLLIVNNATNVVIKVCEFQFCNDPFLGVYYHKNNKSWMESEFRVYSSANNCTFEYVSQPFLMDLEGKQGNFKNLREFVFKNIDGYFKIYSKHTPINLVRDLPQGFSALEPLVDLPIGINITRFQTLLALHRSYLTPGDSSSGWTAGAAAYYVGYLQPRTFLLKYNENGTITDAVDCALDPLSETKCTLKSFTVEKGIYQTSNFRVQPTESIVRFPNITNLCPFGEVFNATRFASVYAWNRKRISNCVADYSVLYNSASFSTFKCYGVSPTKLNDLCFTNVYADSFVIRGDEVRQIAPGQTGKIADYNYKLPDDFTGCVIAWNSNNLDSKVGGNYNYLYRLFRKSNLKPFEKDISTEIYQAGSTPCNGVEGFNCYFPLQSYGFQPTNGVGYQPYRVVVLSFELLHAPATVCGPKKSTNLVKNKCVNFNFNGLTGTGVLTESNKKFLPFQQFGRDIADTTDAVRDPQTLEILDITPCSFGGVSVITPGTNTSNQVAVLYQDVNCTEVPVAIHADQLTPTWRVYSTGSNVFQTRAGCLIGAEHVNNSYECDIPIGAGICASYQTQTNSPSGAGSVASQSIIAYTMSLGAENSVAYSNNSIAIPTNFTISVTTEILPVSMTKTSVDCTMYICGDSTECSNLLLQYGSFCTQLNRALTGIAVEQDKNTQEVFAQVKQIYKTPPIKDFGGFNFSQILPDPSKPSKRSFIEDLLFNKVTLADAGFIKQYGDCLGDIAARDLICAQKFNGLTVLPPLLTDEMIAQYTSALLAGTITSGWTFGAGAALQIPFAMQMAYRFNGIGVTQNVLYENQKLIANQFNSAIGKIQDSLSSTASALGKLQDVVNQNAQALNTLVKQLSSNFGAISSVLNDILSRLDPPEAEVQIDRLITGRLQSLQTYVTQQLIRAAEIRASANLAATKMSECVLGQSKRVDFCGKGYHLMSFPQSAPHGVVFLHVTYVPAQEKNFTTAPAICHDGKAHFPREGVFVSNGTHWFVTQRNFYEPQIITTDNTFVSGNCDVVIGIVNNTVYDPLQPELDSFKEELDKYFKNHTSPDVDLGDISGINASVVNIQKEIDRLNEVAKNLNESLIDLQELGKYEQYIKGSGRENLYFQGGGGSGYIPEAPRDGQAYVRKDGEWVLLSTFLGHHHHHHHH

SEQ ID NO: 5417 - protein, 1281 aa, Artificial Sequence
  Description of Artificial Sequence: Synthetic polypeptide
MGILPSPGMPALLSLVSLLSVLLMGCVAETGTQCVNLTTRTQLPPAYTNSFTRGVYYPDKVFRSSVLHSTQDLFLPFFSNVTWFHAIHVSGTNGTKRFDNPVLPFNDGVYFASTEKSNIIRGWIFGTTLDSKTQSLLIVNNATNVVIKVCEFQFCNDPFLGVYYHKNNKSWMESEFRVYSSANNCTFEYVSQPFLMDLEGKQGNFKNLREFVFKNIDGYFKIYSKHTPINLVRDLPQGFSALEPLVDLPIGINITRFQTLLALHRSYLTPGDSSSGWTAGAAAYYVGYLQPRTFLLKYNENGTITDAVDCALDPLSETKCTLKSFTVEKGIYQTSNFRVQPTESIVRFPNITNLCPFGEVFNATRFASVYAWNRKRISNCVADYSVLYNSASFSTFKCYGVSPTKLNDLCFTNVYADSFVIRGDEVRQIAPGQTGKIADYNYKLPDDFTGCVIAWNSNNLDSKVGGNYNYLYRLFRKSNLKPFERDISTEIYQAGSTPCTGVEGFNCYFPLQSYGFQPTNGVGYQPYRVVVLSFELLHAPATVCGPKKSTNLVKNKCVNFNFNGLTGTGVLTESNKKFLPFQQFGRDIADTTDAVRDPQTLEILDITPCSFGGVSVITPGTNTSNQVAVLYQDVNCTEVPVAIHADQLTPTWRVYSTGSNVFQTRAGCLIGAEHVNNSYECDIPIGAGICASYQTQTNSPSGAGSVASQSIIAYTMSLGAENSVAYSNNSIAIPTNFTISVTTEILPVSMTKTSVDCTMYICGDSTECSNLLLQYGSFCTQLNRALTGIAVEQDKNTQEVFAQVKQIYKTPPIKDFGGFNFSQILPDPSKPSKRSFIEDLLFNKVTLADAGFIKQYGDCLGDIAARDLICAQKFNGLTVLPPLLTDEMIAQYTSALLAGTITSGWTFGAGAALQIPFAMQMAYRFNGIGVTQNVLYENQKLIANQFNSAIGKIQDSLSSTASALGKLQDVVNQNAQALNTLVKQLSSNFGAISSVLNDILSRLDPPEAEVQIDRLITGRLQSLQTYVTQQLIRAAEIRASANLAATKMSECVLGQSKRVDFCGKGYHLMSFPQSAPHGVVFLHVTYVPAQEKNFTTAPAICHDGKAHFPREGVFVSNGTHWFVTQRNFYEPQIITTDNTFVSGNCDVVIGIVNNTVYDPLQPELDSFKEELDKYFKNHTSPDVDLGDISGINASVVNIQKEIDRLNEVAKNLNESLIDLQELGKYEQYIKGSGRENLYFQGGGGSGYIPEAPRDGQAYVRKDGEWVLLSTFLGHHHHHHHH

SEQ ID NO: 5418 - protein, 1281 aa, Artificial Sequence
  Description of Artificial Sequence: Synthetic polypeptide
MGILPSPGMPALLSLVSLLSVLLMGCVAETGTQCVNLTTRTQLPPAYTNSFTRGVYYPDKVFRSSVLHSTQDLFLPFFSNVTWFHAIHVSGTNGTKRFDNPVLPFNDGVYFASTEKSNIIRGWIFGTTLDSKTQSLLIVNNATNVVIKVCEFQFCNDPFLGVYYHKNNKSWMESEFRVYSSANNCTFEYVSQPFLMDLEGKQGNFKNLREFVFKNIDGYFKIYSKHTPINLVRDLPQGFSALEPLVDLPIGINITRFQTLLALHRSYLTPGDSSSGWTAGAAAYYVGYLQPRTFLLKYNENGTITDAVDCALDPLSETKCTLKSFTVEKGIYQTSNFRVQPTESIVRFPNITNLCPFGEVFNATRFPSVYAWNRKRISNCVADYSVLYNSASFSTFKCYGVSPTKLNDLCFTNVYADSFVIRGDEVRQIAPGQTGKIADYNYKLPDDFTGCVIAWNSNNLDSKVGGNYNYLYRLFRKSNLKPFERDISTEIYQAGSTPCNGVEGFNCYFPLQSYGFQPTNGVGYQPYRVVVLSFELLHAPATVCGPKKSTNLVKNKCVNFNFNGLTGTGVLTESNKKFLPFQQFGRDIADTTDAVRDPQTLEILDITPCSFGGVSVITPGTNTSNQVAVLYQDVNCTEVPVAIHADQLTPTWRVYSTGSNVFQTRAGCLIGAEHVNNSYECDIPIGAGICASYQTQTNSPSGAGSVASQSIIAYTMSLGAENSVAYSNNSIAIPTNFTISVTTEILPVSMTKTSVDCTMYICGDSTECSNLLLQYGSFCTQLNRALTGIAVEQDKNTQEVFAQVKQIYKTPPIKDFGGFNFSQILPDPSKPSKRSFIEDLLFNKVTLADAGFIKQYGDCLGDIAARDLICAQKFNGLTVLPPLLTDEMIAQYTSALLAGTITSGWTFGAGAALQIPFAMQMAYRFNGIGVTQNVLYENQKLIANQFNSAIGKIQDSLSSTASALGKLQDVVNQNAQALNTLVKQLSSNFGAISSVLNDILSRLDPPEAEVQIDRLITGRLQSLQTYVTQQLIRAAEIRASANLAATKMSECVLGQSKRVDFCGKGYHLMSFPQSAPHGVVFLHVTYVPAQEKNFTTAPAICHDGKAHFPREGVFVSNGTHWFVTQRNFYEPQIITTDNTFVSGNCDVVIGIVNNTVYDPLQPELDSFKEELDKYFKNHTSPDVDLGDISGINASVVNIQKEIDRLNEVAKNLNESLIDLQELGKYEQYIKGSGRENLYFQGGGGSGYIPEAPRDGQAYVRKDGEWVLLSTFLGHHHHHHHH

SEQ ID NO: 5419 - protein, 1281 aa, Artificial Sequence
  Description of Artificial Sequence: Synthetic polypeptide
MGILPSPGMPALLSLVSLLSVLLMGCVAETGTQCVNLTTRTQLPPAYTNSFTRGVYYPDKVFRSSVLHSTQDLFLPFFSNVTWFHAIHVSGTNGTKRFDNPVLPFNDGVYFASTEKSNIIRGWIFGTTLDSKTQSLLIVNNATNVVIKVCEFQFCNDPFLGVYYHKNNKSWMESEFRVYSSANNCTFEYVSQPFLMDLEGKQGNFKNLREFVFKNIDGYFKIYSKHTPINLVRDLPQGFSALEPLVDLPIGINITRFQTLLALHRSYLTPGDSSSGWTAGAAAYYVGYLQPRTFLLKYNENGTITDAVDCALDPLSETKCTLKSFTVEKGIYQTSNFRVQPTESIVRFPRITNLCPFGEVFNATRFASVYAWNRKRISNCVADYSVLYNSASFSTFKCYGVSPTKLNDLCFTNVYADSFVIRGDEVRQIAPGQTGKIADYNYKLPDDFTGCVIAWNSNNLDSKVGGNYNYLYRLFRKSNLKPFERDISTEIYQAGSTPCNGVEGFNCYFPLQSYGFQPTNGVGYQPYRVVVLSFELLHAPATVCGPKKSTNLVKNKCVNFNFNGLTGTGVLTESNKKFLPFQQFGRDIADTTDAVRDPQTLEILDITPCSFGGVSVITPGTNTSNQVAVLYQDVNCTEVPVAIHADQLTPTWRVYSTGSNVFQTRAGCLIGAEHVNNSYECDIPIGAGICASYQTQTNSPSGAGSVASQSIIAYTMSLGAENSVAYSNNSIAIPTNFTISVTTEILPVSMTKTSVDCTMYICGDSTECSNLLLQYGSFCTQLNRALTGIAVEQDKNTQEVFAQVKQIYKTPPIKDFGGFNFSQILPDPSKPSKRSFIEDLLFNKVTLADAGFIKQYGDCLGDIAARDLICAQKFNGLTVLPPLLTDEMIAQYTSALLAGTITSGWTFGAGAALQIPFAMQMAYRFNGIGVTQNVLYENQKLIANQFNSAIGKIQDSLSSTASALGKLQDVVNQNAQALNTLVKQLSSNFGAISSVLNDILSRLDPPEAEVQIDRLITGRLQSLQTYVTQQLIRAAEIRASANLAATKMSECVLGQSKRVDFCGKGYHLMSFPQSAPHGVVFLHVTYVPAQEKNFTTAPAICHDGKAHFPREGVFVSNGTHWFVTQRNFYEPQIITTDNTFVSGNCDVVIGIVNNTVYDPLQPELDSFKEELDKYFKNHTSPDVDLGDISGINASVVNIQKEIDRLNEVAKNLNESLIDLQELGKYEQYIKGSGRENLYFQGGGGSGYIPEAPRDGQAYVRKDGEWVLLSTFLGHHHHHHHH

SEQ ID NO: 5420 - protein, 1281 aa, Artificial Sequence
  Description of Artificial Sequence: Synthetic polypeptide
MGILPSPGMPALLSLVSLLSVLLMGCVAETGTQCVNLTTRTQLPPAYTNSFTRGVYYPDKVFRSSVLHSTQDLFLPFFSNVTWFHAIHVSGTNGTKRFDNPVLPFNDGVYFASTEKSNIIRGWIFGTTLDSKTQSLLIVNNATNVVIKVCEFQFCNDPFLGVYYHKNNKSWMESEFRVYSSANNCTFEYVSQPFLMDLEGKQGNFKNLREFVFKNIDGYFKIYSKHTPINLVRDLPQGFSALEPLVDLPIGINITRFQTLLALHRSYLTPGDSSSGWTAGAAAYYVGYLQPRTFLLKYNENGTITDAVDCALDPLSETKCTLKSFTVEKGIYQTSNFRVQPTESIVRFPNITNLCPFGEVFNATRFASVYAWNRKRISNCVADYSVLYNSASFSTFKCYGVSPTKLNDLCFTNVYADSFVIRGDEVRQIAPGQTGKIADYNYKLPDDFTGCVIAWNSNNLDSKVGGNYNYLYRLFRKSNLKPFERDISWEIYQAGSTPCNGVEGFNCYFPLQSYGFQPTNGVGYQPYRVVVLSFELLHAPATVCGPKKSTNLVKNKCVNFNFNGLTGTGVLTESNKKFLPFQQFGRDIADTTDAVRDPQTLEILDITPCSFGGVSVITPGTNTSNQVAVLYQDVNCTEVPVAIHADQLTPTWRVYSTGSNVFQTRAGCLIGAEHVNNSYECDIPIGAGICASYQTQTNSPSGAGSVASQSIIAYTMSLGAENSVAYSNNSIAIPTNFTISVTTEILPVSMTKTSVDCTMYICGDSTECSNLLLQYGSFCTQLNRALTGIAVEQDKNTQEVFAQVKQIYKTPPIKDFGGFNFSQILPDPSKPSKRSFIEDLLFNKVTLADAGFIKQYGDCLGDIAARDLICAQKFNGLTVLPPLLTDEMIAQYTSALLAGTITSGWTFGAGAALQIPFAMQMAYRFNGIGVTQNVLYENQKLIANQFNSAIGKIQDSLSSTASALGKLQDVVNQNAQALNTLVKQLSSNFGAISSVLNDILSRLDPPEAEVQIDRLITGRLQSLQTYVTQQLIRAAEIRASANLAATKMSECVLGQSKRVDFCGKGYHLMSFPQSAPHGVVFLHVTYVPAQEKNFTTAPAICHDGKAHFPREGVFVSNGTHWFVTQRNFYEPQIITTDNTFVSGNCDVVIGIVNNTVYDPLQPELDSFKEELDKYFKNHTSPDVDLGDISGINASVVNIQKEIDRLNEVAKNLNESLIDLQELGKYEQYIKGSGRENLYFQGGGGSGYIPEAPRDGQAYVRKDGEWVLLSTFLGHHHHHHHH

SEQ ID NO: 5421 - protein, 1281 aa, Artificial Sequence
  Description of Artificial Sequence: Synthetic polypeptide
MGILPSPGMPALLSLVSLLSVLLMGCVAETGTQCVNLTTRTQLPPAYTNSFTRGVYYPDKVFRSSVLHSTQDLFLPFFSNVTWFHAIHVSGTNGTKRFDNPVLPFNDGVYFASTEKSNIIRGWIFGTTLDSKTQSLLIVNNATNVVIKVCEFQFCNDPFLGVYYHKNNKSWMESEFRVYSSANNCTFEYVSQPFLMDLEGKQGNFKNLREFVFKNIDGYFKIYSKHTPINLVRDLPQGFSALEPLVDLPIGINITRFQTLLALHRSYLTPGDSSSGWTAGAAAYYVGYLQPRTFLLKYNENGTITDAVDCALDPLSETKCTLKSFTVEKGIYQTSNFRVQPTESIVRFPNITNLCPFGEVFNATRFASVYAWNRKRISNCVADYSVLYNSDSFSTFKCYGVSPTKLNDLCFTNVYADSFVIRGDEVRQIAPGQTGKIADYNYKLPDDFTGCVIAWNSNNLDSKVGGNYNYLYRLFRKSNLKPFERDISTEIYQAGSTPCNGVEGFNCYFPLQSYGFQPTNGVGYQPYRVVVLSFELLHAPATVCGPKKSTNLVKNKCVNFNFNGLTGTGVLTESNKKFLPFQQFGRDIADTTDAVRDPQTLEILDITPCSFGGVSVITPGTNTSNQVAVLYQDVNCTEVPVAIHADQLTPTWRVYSTGSNVFQTRAGCLIGAEHVNNSYECDIPIGAGICASYQTQTNSPSGAGSVASQSIIAYTMSLGAENSVAYSNNSIAIPTNFTISVTTEILPVSMTKTSVDCTMYICGDSTECSNLLLQYGSFCTQLNRALTGIAVEQDKNTQEVFAQVKQIYKTPPIKDFGGFNFSQILPDPSKPSKRSFIEDLLFNKVTLADAGFIKQYGDCLGDIAARDLICAQKFNGLTVLPPLLTDEMIAQYTSALLAGTITSGWTFGAGAALQIPFAMQMAYRFNGIGVTQNVLYENQKLIANQFNSAIGKIQDSLSSTASALGKLQDVVNQNAQALNTLVKQLSSNFGAISSVLNDILSRLDPPEAEVQIDRLITGRLQSLQTYVTQQLIRAAEIRASANLAATKMSECVLGQSKRVDFCGKGYHLMSFPQSAPHGVVFLHVTYVPAQEKNFTTAPAICHDGKAHFPREGVFVSNGTHWFVTQRNFYEPQIITTDNTFVSGNCDVVIGIVNNTVYDPLQPELDSFKEELDKYFKNHTSPDVDLGDISGINASVVNIQKEIDRLNEVAKNLNESLIDLQELGKYEQYIKGSGRENLYFQGGGGSGYIPEAPRDGQAYVRKDGEWVLLSTFLGHHHHHHHH

SEQ ID NO: 5422 - protein, 1281 aa, Artificial Sequence
  Description of Artificial Sequence: Synthetic polypeptide
MGILPSPGMPALLSLVSLLSVLLMGCVAETGTQCVNLTTRTQLPPAYTNSFTRGVYYPDKVFRSSVLHSTQDLFLPFFSNVTWFHAIHVSGTNGTKRFDNPVLPFNDGVYFASTEKSNIIRGWIFGTTLDSKTQSLLIVNNATNVVIKVCEFQFCNDPFLGVYYHKNNKSWMESEFRVYSSANNCTFEYVSQPFLMDLEGKQGNFKNLREFVFKNIDGYFKIYSKHTPINLVRDLPQGFSALEPLVDLPIGINITRFQTLLALHRSYLTPGDSSSGWTAGAAAYYVGYLQPRTFLLKYNENGTITDAVDCALDPLSETKCTLKSFTVEKGIYQTSNFRVQPTESIVRFPNITNLCPFGEVFNATRFASVYAWNRKRISNCVADYSVLYNSASFSTFKCYGVSPTKLNDLCFTNVYADSFVIRGDEVRQIAPGQTGKIADYNYKLPDDFTGCVIAWNSNNLDSKVGGNYNYLYRLFRKSNLKPFERDISTEIYQAGSTPTNGVEGFNCYFPLQSYGFQPTNGVGYQPYRVVVLSFELLHAPATVCGPKKSTNLVKNKCVNFNFNGLTGTGVLTESNKKFLPFQQFGRDIADTTDAVRDPQTLEILDITPCSFGGVSVITPGTNTSNQVAVLYQDVNCTEVPVAIHADQLTPTWRVYSTGSNVFQTRAGCLIGAEHVNNSYECDIPIGAGICASYQTQTNSPSGAGSVASQSIIAYTMSLGAENSVAYSNNSIAIPTNFTISVTTEILPVSMTKTSVDCTMYICGDSTECSNLLLQYGSFCTQLNRALTGIAVEQDKNTQEVFAQVKQIYKTPPIKDFGGFNFSQILPDPSKPSKRSFIEDLLFNKVTLADAGFIKQYGDCLGDIAARDLICAQKFNGLTVLPPLLTDEMIAQYTSALLAGTITSGWTFGAGAALQIPFAMQMAYRFNGIGVTQNVLYENQKLIANQFNSAIGKIQDSLSSTASALGKLQDVVNQNAQALNTLVKQLSSNFGAISSVLNDILSRLDPPEAEVQIDRLITGRLQSLQTYVTQQLIRAAEIRASANLAATKMSECVLGQSKRVDFCGKGYHLMSFPQSAPHGVVFLHVTYVPAQEKNFTTAPAICHDGKAHFPREGVFVSNGTHWFVTQRNFYEPQIITTDNTFVSGNCDVVIGIVNNTVYDPLQPELDSFKEELDKYFKNHTSPDVDLGDISGINASVVNIQKEIDRLNEVAKNLNESLIDLQELGKYEQYIKGSGRENLYFQGGGGSGYIPEAPRDGQAYVRKDGEWVLLSTFLGHHHHHHHH

SEQ ID NO: 5423 - protein, 1281 aa, Artificial Sequence
  Description of Artificial Sequence: Synthetic polypeptide
MGILPSPGMPALLSLVSLLSVLLMGCVAETGTQCVNLTTRTQLPPAYTNSFTRGVYYPDKVFRSSVLHSTQDLFLPFFSNVTWFHAIHVSGTNGTKRFDNPVLPFNDGVYFASTEKSNIIRGWIFGTTLDSKTQSLLIVNNATNVVIKVCEFQFCNDPFLGVYYHKNNKSWMESEFRVYSSANNCTFEYVSQPFLMDLEGKQGNFKNLREFVFKNIDGYFKIYSKHTPINLVRDLPQGFSALEPLVDLPIGINITRFQTLLALHRSYLTPGDSSSGWTAGAAAYYVGYLQPRTFLLKYNENGTITDAVDCALDPLSETKCTLKSFTVEKGIYQTSNFRVQPTESIVRFPNITNLCPFGEVFNATRFASVYAWNRKRISNCVADYSVLYNSASFSTFKCYGVSPTKLNDLCFTNVYADSFVIRGDEVRQIAPGQTGKIADYNYKLPDDFTGCVIAWNSNNLDSKVGGNYNYLYRLFRKSNLKPFERDIATEIYQAGSTPCNGVEGFNCYFPLQSYGFQPTNGVGYQPYRVVVLSFELLHAPATVCGPKKSTNLVKNKCVNFNFNGLTGTGVLTESNKKFLPFQQFGRDIADTTDAVRDPQTLEILDITPCSFGGVSVITPGTNTSNQVAVLYQDVNCTEVPVAIHADQLTPTWRVYSTGSNVFQTRAGCLIGAEHVNNSYECDIPIGAGICASYQTQTNSPSGAGSVASQSIIAYTMSLGAENSVAYSNNSIAIPTNFTISVTTEILPVSMTKTSVDCTMYICGDSTECSNLLLQYGSFCTQLNRALTGIAVEQDKNTQEVFAQVKQIYKTPPIKDFGGFNFSQILPDPSKPSKRSFIEDLLFNKVTLADAGFIKQYGDCLGDIAARDLICAQKFNGLTVLPPLLTDEMIAQYTSALLAGTITSGWTFGAGAALQIPFAMQMAYRFNGIGVTQNVLYENQKLIANQFNSAIGKIQDSLSSTASALGKLQDVVNQNAQALNTLVKQLSSNFGAISSVLNDILSRLDPPEAEVQIDRLITGRLQSLQTYVTQQLIRAAEIRASANLAATKMSECVLGQSKRVDFCGKGYHLMSFPQSAPHGVVFLHVTYVPAQEKNFTTAPAICHDGKAHFPREGVFVSNGTHWFVTQRNFYEPQIITTDNTFVSGNCDVVIGIVNNTVYDPLQPELDSFKEELDKYFKNHTSPDVDLGDISGINASVVNIQKEIDRLNEVAKNLNESLIDLQELGKYEQYIKGSGRENLYFQGGGGSGYIPEAPRDGQAYVRKDGEWVLLSTFLGHHHHHHHH

SEQ ID NO: 5424 - protein, 1281 aa, Artificial Sequence
  Description of Artificial Sequence: Synthetic polypeptide
MGILPSPGMPALLSLVSLLSVLLMGCVAETGTQCVNLTTRTQLPPAYTNSFTRGVYYPDKVFRSSVLHSTQDLFLPFFSNVTWFHAIHVSGTNGTKRFDNPVLPFNDGVYFASTEKSNIIRGWIFGTTLDSKTQSLLIVNNATNVVIKVCEFQFCNDPFLGVYYHKNNKSWMESEFRVYSSANNCTFEYVSQPFLMDLEGKQGNFKNLREFVFKNIDGYFKIYSKHTPINLVRDLPQGFSALEPLVDLPIGINITRFQTLLALHRSYLTPGDSSSGWTAGAAAYYVGYLQPRTFLLKYNENGTITDAVDCALDPLSETKCTLKSFTVEKGIYQTSNFRVQPTESIVRFPNITNLCPFGEVFNATRFASVYAWNRKRISNCVADYSVLYNSASFSTFKCYGVSPTKLNDLCFTNVYADSFVIRGDEVRQIAPGQTGVIADYNYKLPDDFTGCVIAWNSNNLDSKVGGNYNYLYRLFRKSNLKPFERDISTEIYQAGSTPCNGVEGFNCYFPLQSYGFQPTNGVGYQPYRVVVLSFELLHAPATVCGPKKSTNLVKNKCVNFNFNGLTGTGVLTESNKKFLPFQQFGRDIADTTDAVRDPQTLEILDITPCSFGGVSVITPGTNTSNQVAVLYQDVNCTEVPVAIHADQLTPTWRVYSTGSNVFQTRAGCLIGAEHVNNSYECDIPIGAGICASYQTQTNSPSGAGSVASQSIIAYTMSLGAENSVAYSNNSIAIPTNFTISVTTEILPVSMTKTSVDCTMYICGDSTECSNLLLQYGSFCTQLNRALTGIAVEQDKNTQEVFAQVKQIYKTPPIKDFGGFNFSQILPDPSKPSKRSFIEDLLFNKVTLADAGFIKQYGDCLGDIAARDLICAQKFNGLTVLPPLLTDEMIAQYTSALLAGTITSGWTFGAGAALQIPFAMQMAYRFNGIGVTQNVLYENQKLIANQFNSAIGKIQDSLSSTASALGKLQDVVNQNAQALNTLVKQLSSNFGAISSVLNDILSRLDPPEAEVQIDRLITGRLQSLQTYVTQQLIRAAEIRASANLAATKMSECVLGQSKRVDFCGKGYHLMSFPQSAPHGVVFLHVTYVPAQEKNFTTAPAICHDGKAHFPREGVFVSNGTHWFVTQRNFYEPQIITTDNTFVSGNCDVVIGIVNNTVYDPLQPELDSFKEELDKYFKNHTSPDVDLGDISGINASVVNIQKEIDRLNEVAKNLNESLIDLQELGKYEQYIKGSGRENLYFQGGGGSGYIPEAPRDGQAYVRKDGEWVLLSTFLGHHHHHHHH

SEQ ID NO: 5425 - protein, 1281 aa, Artificial Sequence
  Description of Artificial Sequence: Synthetic polypeptide
MGILPSPGMPALLSLVSLLSVLLMGCVAETGTQCVNLTTRTQLPPAYTNSFTRGVYYPDKVFRSSVLHSTQDLFLPFFSNVTWFHAIHVSGTNGTKRFDNPVLPFNDGVYFASTEKSNIIRGWIFGTTLDSKTQSLLIVNNATNVVIKVCEFQFCNDPFLGVYYHKNNKSWMESEFRVYSSANNCTFEYVSQPFLMDLEGKQGNFKNLREFVFKNIDGYFKIYSKHTPINLVRDLPQGFSALEPLVDLPIGINITRFQTLLALHRSYLTPGDSSSGWTAGAAAYYVGYLQPRTFLLKYNENGTITDAVDCALDPLSETKCTLKSFTVEKGIYQTSNFRVQPTESIVRFPNITNLCPFGEVFNATRFGSVYAWNRKRISNCVADYSVLYNSASFSTFKCYGVSPTKLNDLCFTNVYADSFVIRGDEVRQIAPGQTGKIADYNYKLPDDFTGCVIAWNSNNLDSKVGGNYNYLYRLFRKSNLKPFERDISTEIYQAGSTPCNGVEGFNCYFPLQSYGFQPTNGVGYQPYRVVVLSFELLHAPATVCGPKKSTNLVKNKCVNFNFNGLTGTGVLTESNKKFLPFQQFGRDIADTTDAVRDPQTLEILDITPCSFGGVSVITPGTNTSNQVAVLYQDVNCTEVPVAIHADQLTPTWRVYSTGSNVFQTRAGCLIGAEHVNNSYECDIPIGAGICASYQTQTNSPSGAGSVASQSIIAYTMSLGAENSVAYSNNSIAIPTNFTISVTTEILPVSMTKTSVDCTMYICGDSTECSNLLLQYGSFCTQLNRALTGIAVEQDKNTQEVFAQVKQIYKTPPIKDFGGFNFSQILPDPSKPSKRSFIEDLLFNKVTLADAGFIKQYGDCLGDIAARDLICAQKFNGLTVLPPLLTDEMIAQYTSALLAGTITSGWTFGAGAALQIPFAMQMAYRFNGIGVTQNVLYENQKLIANQFNSAIGKIQDSLSSTASALGKLQDVVNQNAQALNTLVKQLSSNFGAISSVLNDILSRLDPPEAEVQIDRLITGRLQSLQTYVTQQLIRAAEIRASANLAATKMSECVLGQSKRVDFCGKGYHLMSFPQSAPHGVVFLHVTYVPAQEKNFTTAPAICHDGKAHFPREGVFVSNGTHWFVTQRNFYEPQIITTDNTFVSGNCDVVIGIVNNTVYDPLQPELDSFKEELDKYFKNHTSPDVDLGDISGINASVVNIQKEIDRLNEVAKNLNESLIDLQELGKYEQYIKGSGRENLYFQGGGGSGYIPEAPRDGQAYVRKDGEWVLLSTFLGHHHHHHHH

SEQ ID NO: 5426 - protein, 1281 aa, Artificial Sequence
  Description of Artificial Sequence: Synthetic polypeptide
MGILPSPGMPALLSLVSLLSVLLMGCVAETGTQCVNLTTRTQLPPAYTNSFTRGVYYPDKVFRSSVLHSTQDLFLPFFSNVTWFHAIHVSGTNGTKRFDNPVLPFNDGVYFASTEKSNIIRGWIFGTTLDSKTQSLLIVNNATNVVIKVCEFQFCNDPFLGVYYHKNNKSWMESEFRVYSSANNCTFEYVSQPFLMDLEGKQGNFKNLREFVFKNIDGYFKIYSKHTPINLVRDLPQGFSALEPLVDLPIGINITRFQTLLALHRSYLTPGDSSSGWTAGAAAYYVGYLQPRTFLLKYNENGTITDAVDCALDPLSETKCTLKSFTVEKGIYQTSNFRVQPTESIVRFPNITNLCPFGEVFNATRFASVYAWNRKRISNCVADYSQLYNSASFSTFKCYGVSPTKLNDLCFTNVYADSFVIRGDEVRQIAPGQTGKIADYNYKLPDDFTGCVIAWNSNNLDSKVGGNYNYLYRLFRKSNLKPFERDISTEIYQAGSTPCNGVEGFNCYFPLQSYGFQPTNGVGYQPYRVVVLSFELLHAPATVCGPKKSTNLVKNKCVNFNFNGLTGTGVLTESNKKFLPFQQFGRDIADTTDAVRDPQTLEILDITPCSFGGVSVITPGTNTSNQVAVLYQDVNCTEVPVAIHADQLTPTWRVYSTGSNVFQTRAGCLIGAEHVNNSYECDIPIGAGICASYQTQTNSPSGAGSVASQSIIAYTMSLGAENSVAYSNNSIAIPTNFTISVTTEILPVSMTKTSVDCTMYICGDSTECSNLLLQYGSFCTQLNRALTGIAVEQDKNTQEVFAQVKQIYKTPPIKDFGGFNFSQILPDPSKPSKRSFIEDLLFNKVTLADAGFIKQYGDCLGDIAARDLICAQKFNGLTVLPPLLTDEMIAQYTSALLAGTITSGWTFGAGAALQIPFAMQMAYRFNGIGVTQNVLYENQKLIANQFNSAIGKIQDSLSSTASALGKLQDVVNQNAQALNTLVKQLSSNFGAISSVLNDILSRLDPPEAEVQIDRLITGRLQSLQTYVTQQLIRAAEIRASANLAATKMSECVLGQSKRVDFCGKGYHLMSFPQSAPHGVVFLHVTYVPAQEKNFTTAPAICHDGKAHFPREGVFVSNGTHWFVTQRNFYEPQIITTDNTFVSGNCDVVIGIVNNTVYDPLQPELDSFKEELDKYFKNHTSPDVDLGDISGINASVVNIQKEIDRLNEVAKNLNESLIDLQELGKYEQYIKGSGRENLYFQGGGGSGYIPEAPRDGQAYVRKDGEWVLLSTFLGHHHHHHHH

SEQ ID NO: 5427 - protein, 1281 aa, Artificial Sequence
  Description of Artificial Sequence: Synthetic polypeptide
MGILPSPGMPALLSLVSLLSVLLMGCVAETGTQCVNLTTRTQLPPAYTNSFTRGVYYPDKVFRSSVLHSTQDLFLPFFSNVTWFHAIHVSGTNGTKRFDNPVLPFNDGVYFASTEKSNIIRGWIFGTTLDSKTQSLLIVNNATNVVIKVCEFQFCNDPFLGVYYHKNNKSWMESEFRVYSSANNCTFEYVSQPFLMDLEGKQGNFKNLREFVFKNIDGYFKIYSKHTPINLVRDLPQGFSALEPLVDLPIGINITRFQTLLALHRSYLTPGDSSSGWTAGAAAYYVGYLQPRTFLLKYNENGTITDAVDCALDPLSETKCTLKSFTVEKGIYQTSNFRVQPTESIVRFPNITNLCPFGEVFNATRFASVYAWNRKRISNCVADYSVLYNSASFSTFKCYGVSPTKLNDLCFTNVYADSFVIRGDEVRQIAPGQTGKIADYNYKLPDDFTGCVIAWNSNNLDSKVGGNYNYLYRLFRKSNLKPFERDISTEIYQAGSTPCNGVEGFNCYFPLQSYGFQPTNGVGYQPYRVVVLSFELLHAPATVCGPKKSTNLVKNKCVNFNFNGLTGTGVLTESNKKFLPFQQFGRDIADTTDAVRDPQTLEILDITPCSFGGVSVITPGTNTSNQVAVLYQDVNCTEVPVAIHADQLTPTWRVYSTGSNVFQTRAGCLIGAEHVNNSYECDIPIGAGICASYQTQTNSPSGAGSVASQSIIAYTMSLGAENSVAYSNNSIAIPTNFTISVTTEILPVSMTKTSVDCTMYICGDSTECSNLLLQYGSFCTQLNRALTGIAVEQDKNTQEVFAQVKQIYKTPPIKDFGGFNFSQILPDPSKPSKRSFIEDLLFNKVTLADAGFIKQYGDCLGDIAARDLICAQKFNGLTVLPPLLTDEMIAQYTSALLAGTITSGWTFGAGAALQIPFDMQMAYRFNGIGVTQNVLYENQKLIANQFNSAIGKIQDSLSSTASALGKLQDVVNQNAQALNTLVKQLSSNFGAISSVLNDILSRLDPPEAEVQIDRLITGRLQSLQTYVTQQLIRAAEIRASANLAATKMSECVLGQSKRVDFCGKGYHLMSFPQSAPHGVVFLHVTYVPAQEKNFTTAPAICHDGKAHFPREGVFVSNGTHWFVTQRNFYEPQIITTDNTFVSGNCDVVIGIVNNTVYDPLQPELDSFKEELDKYFKNHTSPDVDLGDISGINASVVNIQKEIDRLNEVAKNLNESLIDLQELGKYEQYIKGSGRENLYFQGGGGSGYIPEAPRDGQAYVRKDGEWVLLSTFLGHHHHHHHH

SEQ ID NO: 5428 - protein, 1281 aa, Artificial Sequence
  Description of Artificial Sequence: Synthetic polypeptide
MGILPSPGMPALLSLVSLLSVLLMGCVAETGTQCVNLTTRTQLPPAYTNSFTRGVYYPDKVFRSSVLHSTQDLFLPFFSNVTWFHAIHVSGTNGTKRFDNPVLPFNDGVYFASTEKSNIIRGWIFGTTLDSKTQSLLIVNNATNVVIKVCEFQFCNDPFLGVYYHKNNKSWMESEFRVYSSANNCTFEYVSQPFLMDLEGKQGNFKNLREFVFKNIDGYFKIYSKHTPINLVRDLPQGFSALEPLVDLPIGINITRFQTLLALHRSYLTPGDSSSGWTAGAAAYYVGYLQPRTFLLKYNENGTITDAVDCALDPLSETKCTLKSFTVEKGIYQTSNFRVQPTESIVRFPNITNLCPFGEVFNATRFASVYAWNRKRISNCVADYSVLYNSASFATFKCYGVSPTKLNDLCFTNVYADSFVIRGDEVRQIAPGQTGKIADYNYKLPDDFTGCVIAWNSNNLDSKVGGNYNYLYRLFRKSNLKPFERDISTEIYQAGSTPCNGVEGFNCYFPLQSYGFQPTNGVGYQPYRVVVLSFELLHAPATVCGPKKSTNLVKNKCVNFNFNGLTGTGVLTESNKKFLPFQQFGRDIADTTDAVRDPQTLEILDITPCSFGGVSVITPGTNTSNQVAVLYQDVNCTEVPVAIHADQLTPTWRVYSTGSNVFQTRAGCLIGAEHVNNSYECDIPIGAGICASYQTQTNSPSGAGSVASQSIIAYTMSLGAENSVAYSNNSIAIPTNFTISVTTEILPVSMTKTSVDCTMYICGDSTECSNLLLQYGSFCTQLNRALTGIAVEQDKNTQEVFAQVKQIYKTPPIKDFGGFNFSQILPDPSKPSKRSFIEDLLFNKVTLADAGFIKQYGDCLGDIAARDLICAQKFNGLTVLPPLLTDEMIAQYTSALLAGTITSGWTFGAGAALQIPFAMQMAYRFNGIGVTQNVLYENQKLIANQFNSAIGKIQDSLSSTASALGKLQDVVNQNAQALNTLVKQLSSNFGAISSVLNDILSRLDPPEAEVQIDRLITGRLQSLQTYVTQQLIRAAEIRASANLAATKMSECVLGQSKRVDFCGKGYHLMSFPQSAPHGVVFLHVTYVPAQEKNFTTAPAICHDGKAHFPREGVFVSNGTHWFVTQRNFYEPQIITTDNTFVSGNCDVVIGIVNNTVYDPLQPELDSFKEELDKYFKNHTSPDVDLGDISGINASVVNIQKEIDRLNEVAKNLNESLIDLQELGKYEQYIKGSGRENLYFQGGGGSGYIPEAPRDGQAYVRKDGEWVLLSTFLGHHHHHHHH

SEQ ID NO: 5429 - protein, 1281 aa, Artificial Sequence
  Description of Artificial Sequence: Synthetic polypeptide
MGILPSPGMPALLSLVSLLSVLLMGCVAETGTQCVNLTTRTQLPPAYTNSFTRGVYYPDKVFRSSVLHSTQDLFLPFFSNVTWFHAIHVSGTNGTKRFDNPVLPFNDGVYFASTEKSNIIRGWIFGTTLDSKTQSLLIVNNATNVVIKVCEFQFCNDPFLGVYYHKNNKSWMESEFRVYSSANNCTFEYVSQPFLMDLEGKQGNFKNLREFVFKNIDGYFKIYSKHTPINLVRDLPQGFSALEPLVDLPIGINITRFQTLLALHRSYLTPGDSSSGWTAGAAAYYVGYLQPRTFLLKYNENGTITDAVDCALDPLSETKCTLKSFTVEKGIYQTSNFRVQPTESIVRFPNITNLCPFGEVFNATRFASVYSWNRKRISNCVADYSVLYNSASFSTFKCYGVSPTKLNDLCFTNVYADSFVIRGDEVRQIAPGQTGKIADYNYKLPDDFTGCVIAWNSNNLDSKVGGNYNYLYRLFRKSNLKPFERDISTEIYQAGSTPCNGVEGFNCYFPLQSYGFQPTNGVGYQPYRVVVLSFELLHAPATVCGPKKSTNLVKNKCVNFNFNGLTGTGVLTESNKKFLPFQQFGRDIADTTDAVRDPQTLEILDITPCSFGGVSVITPGTNTSNQVAVLYQDVNCTEVPVAIHADQLTPTWRVYSTGSNVFQTRAGCLIGAEHVNNSYECDIPIGAGICASYQTQTNSPSGAGSVASQSIIAYTMSLGAENSVAYSNNSIAIPTNFTISVTTEILPVSMTKTSVDCTMYICGDSTECSNLLLQYGSFCTQLNRALTGIAVEQDKNTQEVFAQVKQIYKTPPIKDFGGFNFSQILPDPSKPSKRSFIEDLLFNKVTLADAGFIKQYGDCLGDIAARDLICAQKFNGLTVLPPLLTDEMIAQYTSALLAGTITSGWTFGAGAALQIPFAMQMAYRFNGIGVTQNVLYENQKLIANQFNSAIGKIQDSLSSTASALGKLQDVVNQNAQALNTLVKQLSSNFGAISSVLNDILSRLDPPEAEVQIDRLITGRLQSLQTYVTQQLIRAAEIRASANLAATKMSECVLGQSKRVDFCGKGYHLMSFPQSAPHGVVFLHVTYVPAQEKNFTTAPAICHDGKAHFPREGVFVSNGTHWFVTQRNFYEPQIITTDNTFVSGNCDVVIGIVNNTVYDPLQPELDSFKEELDKYFKNHTSPDVDLGDISGINASVVNIQKEIDRLNEVAKNLNESLIDLQELGKYEQYIKGSGRENLYFQGGGGSGYIPEAPRDGQAYVRKDGEWVLLSTFLGHHHHHHHH

SEQ ID NO: 5430 - protein, 1281 aa, Artificial Sequence
  Description of Artificial Sequence: Synthetic polypeptide
MGILPSPGMPALLSLVSLLSVLLMGCVAETGTQCVNLTTRTQLPPAYTNSFTRGVYYPDKVFRSSVLHSTQDLFLPFFSNVTWFHAIHVSGTNGTKRFDNPVLPFNDGVYFASTEKSNIIRGWIFGTTLDSKTQSLLIVNNATNVVIKVCEFQFCNDPFLGVYYHKNNKSWMESEFRVYSSANNCTFEYVSQPFLMDLEGKQGNFKNLREFVFKNIDGYFKIYSKHTPINLVRDLPQGFSALEPLVDLPIGINITRFQTLLALHRSYLTPGDSSSGWTAGAAAYYVGYLQPRTFLLKYNENGTITDAVDCALDPLSETKCTLKSFTVEKGIYQTSNFRVQPTESIVRFPNITNLCPFGEVFNATRFASVYAWNRKRISNCVADYSVLYNSASFSTFKCYGVSPTKLNDLCFTNVYADSFVIRGDEVRQIAPGQTGKIADYNYKLPDDFTGCVIAWNSNNLDSKVGGNYNYLYRLFRKSNLKPFERDISLEIYQAGSTPCNGVEGFNCYFPLQSYGFQPTNGVGYQPYRVVVLSFELLHAPATVCGPKKSTNLVKNKCVNFNFNGLTGTGVLTESNKKFLPFQQFGRDIADTTDAVRDPQTLEILDITPCSFGGVSVITPGTNTSNQVAVLYQDVNCTEVPVAIHADQLTPTWRVYSTGSNVFQTRAGCLIGAEHVNNSYECDIPIGAGICASYQTQTNSPSGAGSVASQSIIAYTMSLGAENSVAYSNNSIAIPTNFTISVTTEILPVSMTKTSVDCTMYICGDSTECSNLLLQYGSFCTQLNRALTGIAVEQDKNTQEVFAQVKQIYKTPPIKDFGGFNFSQILPDPSKPSKRSFIEDLLFNKVTLADAGFIKQYGDCLGDIAARDLICAQKFNGLTVLPPLLTDEMIAQYTSALLAGTITSGWTFGAGAALQIPFAMQMAYRFNGIGVTQNVLYENQKLIANQFNSAIGKIQDSLSSTASALGKLQDVVNQNAQALNTLVKQLSSNFGAISSVLNDILSRLDPPEAEVQIDRLITGRLQSLQTYVTQQLIRAAEIRASANLAATKMSECVLGQSKRVDFCGKGYHLMSFPQSAPHGVVFLHVTYVPAQEKNFTTAPAICHDGKAHFPREGVFVSNGTHWFVTQRNFYEPQIITTDNTFVSGNCDVVIGIVNNTVYDPLQPELDSFKEELDKYFKNHTSPDVDLGDISGINASVVNIQKEIDRLNEVAKNLNESLIDLQELGKYEQYIKGSGRENLYFQGGGGSGYIPEAPRDGQAYVRKDGEWVLLSTFLGHHHHHHHH

SEQ ID NO: 5431 - protein, 1281 aa, Artificial Sequence
  Description of Artificial Sequence: Synthetic polypeptide
MGILPSPGMPALLSLVSLLSVLLMGCVAETGTQCVNLTTRTQLPPAYTNSFTRGVYYPDKVFRSSVLHSTQDLFLPFFSNVTWFHAIHVSGTNGTKRFDNPVLPFNDGVYFASTEKSNIIRGWIFGTTLDSKTQSLLIVNNATNVVIKVCEFQFCNDPFLGVYYHKNNKSWMESEFRVYSSANNCTFEYVSQPFLMDLEGKQGNFKNLREFVFKNIDGYFKIYSKHTPINLVRDLPQGFSALEPLVDLPIGINITRFQTLLALHRSYLTPGDSSSGWTAGAAAYYVGYLQPRTFLLKYNENGTITDAVDCALDPLSETKCTLKSFTVEKGIYQTSNFRVQPTESIVRFPNITNLCPFGEVFNATRFASVYAWNRKRISNCVADFSVLYNSASFSTFKCYGVSPTKLNDLCFTNVYADSFVIRGDEVRQIAPGQTGKIADYNYKLPDDFTGCVIAWNSNNLDSKVGGNYNYLYRLFRKSNLKPFERDISTEIYQAGSTPCNGVEGFNCYFPLQSYGFQPTNGVGYQPYRVVVLSFELLHAPATVCGPKKSTNLVKNKCVNFNFNGLTGTGVLTESNKKFLPFQQFGRDIADTTDAVRDPQTLEILDITPCSFGGVSVITPGTNTSNQVAVLYQDVNCTEVPVAIHADQLTPTWRVYSTGSNVFQTRAGCLIGAEHVNNSYECDIPIGAGICASYQTQTNSPSGAGSVASQSIIAYTMSLGAENSVAYSNNSIAIPTNFTISVTTEILPVSMTKTSVDCTMYICGDSTECSNLLLQYGSFCTQLNRALTGIAVEQDKNTQEVFAQVKQIYKTPPIKDFGGFNFSQILPDPSKPSKRSFIEDLLFNKVTLADAGFIKQYGDCLGDIAARDLICAQKFNGLTVLPPLLTDEMIAQYTSALLAGTITSGWTFGAGAALQIPFAMQMAYRFNGIGVTQNVLYENQKLIANQFNSAIGKIQDSLSSTASALGKLQDVVNQNAQALNTLVKQLSSNFGAISSVLNDILSRLDPPEAEVQIDRLITGRLQSLQTYVTQQLIRAAEIRASANLAATKMSECVLGQSKRVDFCGKGYHLMSFPQSAPHGVVFLHVTYVPAQEKNFTTAPAICHDGKAHFPREGVFVSNGTHWFVTQRNFYEPQIITTDNTFVSGNCDVVIGIVNNTVYDPLQPELDSFKEELDKYFKNHTSPDVDLGDISGINASVVNIQKEIDRLNEVAKNLNESLIDLQELGKYEQYIKGSGRENLYFQGGGGSGYIPEAPRDGQAYVRKDGEWVLLSTFLGHHHHHHHH

SEQ ID NO: 5432 - protein, 1281 aa, Artificial Sequence
  Description of Artificial Sequence: Synthetic polypeptide
MGILPSPGMPALLSLVSLLSVLLMGCVAETGTQCVNLTTRTQLPPAYTNSFTRGVYYPDKVFRSSVLHSTQDLFLPFFSNVTWFHAIHVSGTNGTKRFDNPVLPFNDGVYFASTEKSNIIRGWIFGTTLDSKTQSLLIVNNATNVVIKVCEFQFCNDPFLGVYYHKNNKSWMESEFRVYSSANNCTFEYVSQPFLMDLEGKQGNFKNLREFVFKNIDGYFKIYSKHTPINLVRDLPQGFSALEPLVDLPIGINITRFQTLLALHRSYLTPGDSSSGWTAGAAAYYVGYLQPRTFLLKYNENGTITDAVDCALDPLSETKCTLKSFTVEKGIYQTSNFRVQPTESIVRFPNITNLCPFGEVFNATRFASVYAWNRKRISNCVADYSVLYNSASFSTFKCYGVSPTKLNDLCFTNVYADSFVIRGDEVRQIAPGQTGKIADYNYKLPDDFTGCVIAWNSNNLDSKVGGNYNYLYRLFRKSNLKPFERDISTEIYQAGSTPCNGVEGFNCYFPLQSYGFQPTNGVGYQPYRVVVLSFELLHAPATVCGPKKSTNLVKNKCVNFNFNGLTGTGVLTESNKKFLPFQQFGRDIADTTDAVRDPQTLEILDIKPCSFGGVSVITPGTNTSNQVAVLYQDVNCTEVPVAIHADQLTPTWRVYSTGSNVFQTRAGCLIGAEHVNNSYECDIPIGAGICASYQTQTNSPSGAGSVASQSIIAYTMSLGAENSVAYSNNSIAIPTNFTISVTTEILPVSMTKTSVDCTMYICGDSTECSNLLLQYGSFCTQLNRALTGIAVEQDKNTQEVFAQVKQIYKTPPIKDFGGFNFSQILPDPSKPSKRSFIEDLLFNKVTLADAGFIKQYGDCLGDIAARDLICAQKFNGLTVLPPLLTDEMIAQYTSALLAGTITSGWTFGAGAALQIPFAMQMAYRFNGIGVTQNVLYENQKLIANQFNSAIGKIQDSLSSTASALGKLQDVVNQNAQALNTLVKQLSSNFGAISSVLNDILSRLDPPEAEVQIDRLITGRLQSLQTYVTQQLIRAAEIRASANLAATKMSECVLGQSKRVDFCGKGYHLMSFPQSAPHGVVFLHVTYVPAQEKNFTTAPAICHDGKAHFPREGVFVSNGTHWFVTQRNFYEPQIITTDNTFVSGNCDVVIGIVNNTVYDPLQPELDSFKEELDKYFKNHTSPDVDLGDISGINASVVNIQKEIDRLNEVAKNLNESLIDLQELGKYEQYIKGSGRENLYFQGGGGSGYIPEAPRDGQAYVRKDGEWVLLSTFLGHHHHHHHH

SEQ ID NO: 5433 - protein, 1281 aa, Artificial Sequence
  Description of Artificial Sequence: Synthetic polypeptide
MGILPSPGMPALLSLVSLLSVLLMGCVAETGTQCVNLTTRTQLPPAYTNSFTRGVYYPDKVFRSSVLHSTQDLFLPFFSNVTWFHAIHVSGTNGTKRFDNPVLPFNDGVYFASTEKSNIIRGWIFGTTLDSKTQSLLIVNNATNVVIKVCEFQFCNDPFLGVYYHKNNKSWMESEFRVYSSANNCTFEYVSQPFLMDLEGKQGNFKNLREFVFKNIDGYFKIYSKHTPINLVRDLPQGFSALEPLVDLPIGINITRFQTLLALHRSYLTPGDSSSGWTAGAAAYYVGYLQPRTFLLKYNENGTITDAVDCALDPLSETKCTLKSFTVEKGIYQTSNFRVQPTESIVRFPNITNLCPFGEVFNATRFASVYAWNRKRISNCVADYSVLYNSASFSTFKCYGVSPTKLNDLCFTNVYADSFVIRGDEVRQIAPGQTGKIADYNYKLPDDFTGCVIAWNSNNLDSKVGGNYNYLYRLFRKSNLKPFERDISTEIYQAGSTPCNAVEGFNCYFPLQSYGFQPTNGVGYQPYRVVVLSFELLHAPATVCGPKKSTNLVKNKCVNFNFNGLTGTGVLTESNKKFLPFQQFGRDIADTTDAVRDPQTLEILDITPCSFGGVSVITPGTNTSNQVAVLYQDVNCTEVPVAIHADQLTPTWRVYSTGSNVFQTRAGCLIGAEHVNNSYECDIPIGAGICASYQTQTNSPSGAGSVASQSIIAYTMSLGAENSVAYSNNSIAIPTNFTISVTTEILPVSMTKTSVDCTMYICGDSTECSNLLLQYGSFCTQLNRALTGIAVEQDKNTQEVFAQVKQIYKTPPIKDFGGFNFSQILPDPSKPSKRSFIEDLLFNKVTLADAGFIKQYGDCLGDIAARDLICAQKFNGLTVLPPLLTDEMIAQYTSALLAGTITSGWTFGAGAALQIPFAMQMAYRFNGIGVTQNVLYENQKLIANQFNSAIGKIQDSLSSTASALGKLQDVVNQNAQALNTLVKQLSSNFGAISSVLNDILSRLDPPEAEVQIDRLITGRLQSLQTYVTQQLIRAAEIRASANLAATKMSECVLGQSKRVDFCGKGYHLMSFPQSAPHGVVFLHVTYVPAQEKNFTTAPAICHDGKAHFPREGVFVSNGTHWFVTQRNFYEPQIITTDNTFVSGNCDVVIGIVNNTVYDPLQPELDSFKEELDKYFKNHTSPDVDLGDISGINASVVNIQKEIDRLNEVAKNLNESLIDLQELGKYEQYIKGSGRENLYFQGGGGSGYIPEAPRDGQAYVRKDGEWVLLSTFLGHHHHHHHH

SEQ ID NO: 5434 - protein, 1281 aa, Artificial Sequence
  Description of Artificial Sequence: Synthetic polypeptide
MGILPSPGMPALLSLVSLLSVLLMGCVAETGTQCVNLTTRTQLPPAYTNSFTRGVYYPDKVFRSSVLHSTQDLFLPFFSNVTWFHAIHVSGTNGTKRFDNPVLPFNDGVYFASTEKSNIIRGWIFGTTLDSKTQSLLIVNNATNVVIKVCEFQFCNDPFLGVYYHKNNKSWMESEFRVYSSANNCTFEYVSQPFLMDLEGKQGNFKNLREFVFKNIDGYFKIYSKHTPINLVRDLPQGFSALEPLVDLPIGINITRFQTLLALHRSYLTPGDSSSGWTAGAAAYYVGYLQPRTFLLKYNENGTITDAVDCALDPLSETKCTLKSFTVEKGIYQTSNFRVQPTESIVRFPNITNLCPFGEVFNATRFASVYAWNRKRISNCVADYSVLYNSASFSTFKCYGVSPTKLNDLCFTNVYADSFVIRGDEVRQIAPGQTGKIADYNYKLPDDFTGCVIAWNSNNLDSKVGGNYNYLYRLFRKSNLKPFERDISTEIYQAGSTPCNGVEGFNCYFPLQSYGFQPTNGVGYQPYRVVVLSFELLHAPATVCGPKKSTNLVKNKCVNFNFNGLTGTGVLTESNKKFLPFQQFGRDIADTTDAVRDPQTLEILDITPCSFGGVSVITPGTNTSNQVAVLYQDVNCTEVPVAIHADQLTPTWRVYSTGSNVFQTRAGCLIGAEHVNNSYECDIPIGAGICASYQTQTNSPSGAGSVASQSIIAYTMSLGAENSVAYSNNSIAIPTNFTISVTTEILPVSMTKTSVDCTMYICGDSTECSNLLLQYGSFCTQLNRALTGIAVEQDKNTQEVFAQVKQIYKTPPIKDFGGFNFSQILPDPSKPSKRSFIEDLLFNKVTLADAGFIKQYGDCLGDIAARDLICAQKFNGLTVLPPLLTDEMIAQYTSALLAGTITSGWTFGAGAALQIPFAMQMAYRFNGIGVTQNVLYENQKLIANQFNSAIGKIQDSLSSTASALGKLQDVVNQNAQALNTLVKQLSSNFGAISSVLNDILSRLDPPEAEVQIDRLITGRLQSLQTYVTQQLIRAAEIRASANLAATKMSECVLGQSKRVDFCGKGYHLMSFPQSAPHGVVFLHVTYVPAQNKNFTTAPAICHDGKAHFPREGVFVSNGTHWFVTQRNFYEPQIITTDNTFVSGNCDVVIGIVNNTVYDPLQPELDSFKEELDKYFKNHTSPDVDLGDISGINASVVNIQKEIDRLNEVAKNLNESLIDLQELGKYEQYIKGSGRENLYFQGGGGSGYIPEAPRDGQAYVRKDGEWVLLSTFLGHHHHHHHH

SEQ ID NO: 5435 - protein, 1281 aa, Artificial Sequence
  Description of Artificial Sequence: Synthetic polypeptide
MGILPSPGMPALLSLVSLLSVLLMGCVAETGTQCVNLTTRTQLPPAYTNSFTRGVYYPDKVFRSSVLHSTQDLFLPFFSNVTWFHAIHVSGTNGTKRFDNPVLPFNDGVYFASTEKSNIIRGWIFGTTLDSKTQSLLIVNNATNVVIKVCEFQFCNDPFLGVYYHKNNKSWMESEFRVYSSANNCTFEYVSQPFLMDLEGKQGNFKNLREFVFKNIDGYFKIYSKHTPINLVRDLPQGFSALEPLVDLPIGINITRFQTLLALHRSYLTPGDSSSGWTAGAAAYYVGYLQPRTFLLKYNENGTITDAVDCALDPLSETKCTLKSFTVEKGIYQTSNFRVQPTESIVRFPNITNLCPFGEVFNATRFASVYAWNRKRISNCVADYSVLYNSASFSTFKCYGVSPTKLNDLCFTNVYADSFVIRGDEVRQIAPGQTGKIADYNYKLPDDFTGCVIAWNSNNLDSKVGGNYNYLYRLFRKSNLKPFERDISTEIYQAGSTPCNGVEGFNAYFPLQSYGFQPTNGVGYQPYRVVVLSFELLHAPATVCGPKKSTNLVKNKCVNFNFNGLTGTGVLTESNKKFLPFQQFGRDIADTTDAVRDPQTLEILDITPCSFGGVSVITPGTNTSNQVAVLYQDVNCTEVPVAIHADQLTPTWRVYSTGSNVFQTRAGCLIGAEHVNNSYECDIPIGAGICASYQTQTNSPSGAGSVASQSIIAYTMSLGAENSVAYSNNSIAIPTNFTISVTTEILPVSMTKTSVDCTMYICGDSTECSNLLLQYGSFCTQLNRALTGIAVEQDKNTQEVFAQVKQIYKTPPIKDFGGFNFSQILPDPSKPSKRSFIEDLLFNKVTLADAGFIKQYGDCLGDIAARDLICAQKFNGLTVLPPLLTDEMIAQYTSALLAGTITSGWTFGAGAALQIPFAMQMAYRFNGIGVTQNVLYENQKLIANQFNSAIGKIQDSLSSTASALGKLQDVVNQNAQALNTLVKQLSSNFGAISSVLNDILSRLDPPEAEVQIDRLITGRLQSLQTYVTQQLIRAAEIRASANLAATKMSECVLGQSKRVDFCGKGYHLMSFPQSAPHGVVFLHVTYVPAQEKNFTTAPAICHDGKAHFPREGVFVSNGTHWFVTQRNFYEPQIITTDNTFVSGNCDVVIGIVNNTVYDPLQPELDSFKEELDKYFKNHTSPDVDLGDISGINASVVNIQKEIDRLNEVAKNLNESLIDLQELGKYEQYIKGSGRENLYFQGGGGSGYIPEAPRDGQAYVRKDGEWVLLSTFLGHHHHHHHH

SEQ ID NO: 5436 - protein, 1281 aa, Artificial Sequence
  Description of Artificial Sequence: Synthetic polypeptide
MGILPSPGMPALLSLVSLLSVLLMGCVAETGTQCVNLTTRTQLPPAYTNSFTRGVYYPDKVFRSSVLHSTQDLFLPFFSNVTWFHAIHVSGTNGTKRFDNPVLPFNDGVYFASTEKSNIIRGWIFGTTLDSKTQSLLIVNNATNVVIKVCEFQFCNDPFLGVYYHKNNKSWMESEFRVYSSANNCTFEYVSQPFLMDLEGKQGNFKNLREFVFKNIDGYFKIYSKHTPINLVRDLPQGFSALEPLVDLPIGINITRFQTLLALHRSYLTPGDSSSGWTAGAAAYYVGYLQPRTFLLKYNENGTITDAVDCALDPLSETKCTLKSFTVEKGIYQTSNFRVQPTESIVRFPNITNLCPFGEVFNATRFASVYAWNRKRISNCVADYSVLYNSASFSTFKCYGVSPTKLNDLCFTNVYADSFVIRGDEVRQIAPGQTGKIADYNYKLPDDFTGCVIAWNSNNLDSKMGGNYNYLYRLFRKSNLKPFERDISTEIYQAGSTPCNGVEGFNCYFPLQSYGFQPTNGVGYQPYRVVVLSFELLHAPATVCGPKKSTNLVKNKCVNFNFNGLTGTGVLTESNKKFLPFQQFGRDIADTTDAVRDPQTLEILDITPCSFGGVSVITPGTNTSNQVAVLYQDVNCTEVPVAIHADQLTPTWRVYSTGSNVFQTRAGCLIGAEHVNNSYECDIPIGAGICASYQTQTNSPSGAGSVASQSIIAYTMSLGAENSVAYSNNSIAIPTNFTISVTTEILPVSMTKTSVDCTMYICGDSTECSNLLLQYGSFCTQLNRALTGIAVEQDKNTQEVFAQVKQIYKTPPIKDFGGFNFSQILPDPSKPSKRSFIEDLLFNKVTLADAGFIKQYGDCLGDIAARDLICAQKFNGLTVLPPLLTDEMIAQYTSALLAGTITSGWTFGAGAALQIPFAMQMAYRFNGIGVTQNVLYENQKLIANQFNSAIGKIQDSLSSTASALGKLQDVVNQNAQALNTLVKQLSSNFGAISSVLNDILSRLDPPEAEVQIDRLITGRLQSLQTYVTQQLIRAAEIRASANLAATKMSECVLGQSKRVDFCGKGYHLMSFPQSAPHGVVFLHVTYVPAQEKNFTTAPAICHDGKAHFPREGVFVSNGTHWFVTQRNFYEPQIITTDNTFVSGNCDVVIGIVNNTVYDPLQPELDSFKEELDKYFKNHTSPDVDLGDISGINASVVNIQKEIDRLNEVAKNLNESLIDLQELGKYEQYIKGSGRENLYFQGGGGSGYIPEAPRDGQAYVRKDGEWVLLSTFLGHHHHHHHH

SEQ ID NO: 5437 - protein, 1281 aa, Artificial Sequence
  Description of Artificial Sequence: Synthetic polypeptide
MGILPSPGMPALLSLVSLLSVLLMGCVAETGTQCVNLTTRTQLPPAYTNSFTRGVYYPDKVFRSSVLHSTQDLFLPFFSNVTWFHAIHVSGTNGTKRFDNPVLPFNDGVYFASTEKSNIIRGWIFGTTLDSKTQSLLIVNNATNVVIKVCEFQFCNDPFLGVYYHKNNKSWMESEFRVYSSANNCTFEYVSQPFLMDLEGKQGNFKNLREFVFKNIDGYFKIYSKHTPINLVRDLPQGFSALEPLVDLPIGINITRFQTLLALHRSYLTPGDSSSGWTAGAAAYYVGYLQPRTFLLKYNENGTITDAVDCALDPLSETKCTLKSFTVEKGIYQTSNFRVQPTESIVRFPNITNLCPFGEIFNATRFASVYAWNRKRISNCVADYSVLYNSASFSTFKCYGVSPTKLNDLCFTNVYADSFVIRGDEVRQIAPGQTGKIADYNYKLPDDFTGCVIAWNSNNLDSKVGGNYNYLYRLFRKSNLKPFERDISTEIYQAGSTPCNGVEGFNCYFPLQSYGFQPTNGVGYQPYRVVVLSFELLHAPATVCGPKKSTNLVKNKCVNFNFNGLTGTGVLTESNKKFLPFQQFGRDIADTTDAVRDPQTLEILDITPCSFGGVSVITPGTNTSNQVAVLYQDVNCTEVPVAIHADQLTPTWRVYSTGSNVFQTRAGCLIGAEHVNNSYECDIPIGAGICASYQTQTNSPSGAGSVASQSIIAYTMSLGAENSVAYSNNSIAIPTNFTISVTTEILPVSMTKTSVDCTMYICGDSTECSNLLLQYGSFCTQLNRALTGIAVEQDKNTQEVFAQVKQIYKTPPIKDFGGFNFSQILPDPSKPSKRSFIEDLLFNKVTLADAGFIKQYGDCLGDIAARDLICAQKFNGLTVLPPLLTDEMIAQYTSALLAGTITSGWTFGAGAALQIPFAMQMAYRFNGIGVTQNVLYENQKLIANQFNSAIGKIQDSLSSTASALGKLQDVVNQNAQALNTLVKQLSSNFGAISSVLNDILSRLDPPEAEVQIDRLITGRLQSLQTYVTQQLIRAAEIRASANLAATKMSECVLGQSKRVDFCGKGYHLMSFPQSAPHGVVFLHVTYVPAQEKNFTTAPAICHDGKAHFPREGVFVSNGTHWFVTQRNFYEPQIITTDNTFVSGNCDVVIGIVNNTVYDPLQPELDSFKEELDKYFKNHTSPDVDLGDISGINASVVNIQKEIDRLNEVAKNLNESLIDLQELGKYEQYIKGSGRENLYFQGGGGSGYIPEAPRDGQAYVRKDGEWVLLSTFLGHHHHHHHH

SEQ ID NO: 5438 - protein, 1281 aa, Artificial Sequence
  Description of Artificial Sequence: Synthetic polypeptide
MGILPSPGMPALLSLVSLLSVLLMGCVAETGTQCVNLTTRTQLPPAYTNSFTRGVYYPDKVFRSSVLHSTQDLFLPFFSNVTWFHAIHVSGTNGTKRFDNPVLPFNDGVYFASTEKSNIIRGWIFGTTLDSKTQSLLIVNNATNVVIKVCEFQFCNDPFLGVYYHKNNKSWMESEFRVYSSANNCTFEYVSQPFLMDLEGKQGNFKNLREFVFKNIDGYFKIYSKHTPINLVRDLPQGFSALEPLVDLPIGINITRFQTLLALHRSYLTPGDSSSGWTAGAAAYYVGYLQPRTFLLKYNENGTITDAVDCALDPLSETKCTLKSFTVEKGIYQTSNFRVQPTESIVRFPNITNLCPFGEVFNATRFASVYAWNRKRISNCVADYSVLYDSASFSTFKCYGVSPTKLNDLCFTNVYADSFVIRGDEVRQIAPGQTGKIADYNYKLPDDFTGCVIAWNSNNLDSKVGGNYNYLYRLFRKSNLKPFERDISTEIYQAGSTPCNGVEGFNCYFPLQSYGFQPTNGVGYQPYRVVVLSFELLHAPATVCGPKKSTNLVKNKCVNFNFNGLTGTGVLTESNKKFLPFQQFGRDIADTTDAVRDPQTLEILDITPCSFGGVSVITPGTNTSNQVAVLYQDVNCTEVPVAIHADQLTPTWRVYSTGSNVFQTRAGCLIGAEHVNNSYECDIPIGAGICASYQTQTNSPSGAGSVASQSIIAYTMSLGAENSVAYSNNSIAIPTNFTISVTTEILPVSMTKTSVDCTMYICGDSTECSNLLLQYGSFCTQLNRALTGIAVEQDKNTQEVFAQVKQIYKTPPIKDFGGFNFSQILPDPSKPSKRSFIEDLLFNKVTLADAGFIKQYGDCLGDIAARDLICAQKFNGLTVLPPLLTDEMIAQYTSALLAGTITSGWTFGAGAALQIPFAMQMAYRFNGIGVTQNVLYENQKLIANQFNSAIGKIQDSLSSTASALGKLQDVVNQNAQALNTLVKQLSSNFGAISSVLNDILSRLDPPEAEVQIDRLITGRLQSLQTYVTQQLIRAAEIRASANLAATKMSECVLGQSKRVDFCGKGYHLMSFPQSAPHGVVFLHVTYVPAQEKNFTTAPAICHDGKAHFPREGVFVSNGTHWFVTQRNFYEPQIITTDNTFVSGNCDVVIGIVNNTVYDPLQPELDSFKEELDKYFKNHTSPDVDLGDISGINASVVNIQKEIDRLNEVAKNLNESLIDLQELGKYEQYIKGSGRENLYFQGGGGSGYIPEAPRDGQAYVRKDGEWVLLSTFLGHHHHHHHH

SEQ ID NO: 5439 - protein, 1281 aa, Artificial Sequence
  Description of Artificial Sequence: Synthetic polypeptide
MGILPSPGMPALLSLVSLLSVLLMGCVAETGTQCVNLTTRTQLPPAYTNSFTRGVYYPDKVFRSSVLHSTQDLFLPFFSNVTWFHAIHVSGTNGTKRFDNPVLPFNDGVYFASTEKSNIIRGWIFGTTLDSKTQSLLIVNNATNVVIKVCEFQFCNDPFLGVYYHKNNKSWMESEFRVYSSANNCTFEYVSQPFLMDLEGKQGNFKNLREFVFKNIDGYFKIYSKHTPINLVRDLPQGFSALEPLVDLPIGINITRFQTLLALHRSYLTPGDSSSGWTAGAAAYYVGYLQPRTFLLKYNENGTITDAVDCALDPLSETKCTLKSFTVEKGIYQTSNFRVQPTESIVRFPNITNLCPFGEVFNATRFASVYAWNRKRISNCVADYSVLYNSASFSTFKCYGVSPTKLNDLCFTNVYADSFVIRGDEVRQIAPGQTGKIADYNYKLPDDFTGCVIAWNSNNLDSKVGGNYNYLYRLFRKSNLKPFERDISTEIYQAGSTPCNGVEGFNCYFPLQSYGFQPTNGVGYQPYRVVVLSFELLHAPATVCGPKKSTNLVKNKCVNFNFNGLTGTGVLTESNKKFLPFQQFGRDIADTTDAVRDPQTLEILDITPCSFGGVSVITPGTNTSNQVAVLYQDVNCTEVPVAIHADQLTPTWRVYSTGSNVFQTRAGCLIGAEHVNNSYECDIPIGAGICASYQTQTNSPSGAGSVASQSIIAYTMSLGATNSVAYSNNSIAIPTNFTISVTTEILPVSMTKTSVDCTMYICGDSTECSNLLLQYGSFCTQLNRALTGIAVEQDKNTQEVFAQVKQIYKTPPIKDFGGFNFSQILPDPSKPSKRSFIEDLLFNKVTLADAGFIKQYGDCLGDIAARDLICAQKFNGLTVLPPLLTDEMIAQYTSALLAGTITSGWTFGAGAALQIPFAMQMAYRFNGIGVTQNVLYENQKLIANQFNSAIGKIQDSLSSTASALGKLQDVVNQNAQALNTLVKQLSSNFGAISSVLNDILSRLDPPEAEVQIDRLITGRLQSLQTYVTQQLIRAAEIRASANLAATKMSECVLGQSKRVDFCGKGYHLMSFPQSAPHGVVFLHVTYVPAQEKNFTTAPAICHDGKAHFPREGVFVSNGTHWFVTQRNFYEPQIITTDNTFVSGNCDVVIGIVNNTVYDPLQPELDSFKEELDKYFKNHTSPDVDLGDISGINASVVNIQKEIDRLNEVAKNLNESLIDLQELGKYEQYIKGSGRENLYFQGGGGSGYIPEAPRDGQAYVRKDGEWVLLSTFLGHHHHHHHH

SEQ ID NO: 5440 - protein, 1281 aa, Artificial Sequence
  Description of Artificial Sequence: Synthetic polypeptide
MGILPSPGMPALLSLVSLLSVLLMGCVAETGTQCVNLTTRTQLPPAYTNSFTRGVYYPDKVFRSSVLHSTQDLFLPFFSNVTWFHAIHVSGTNGTKRFDNPVLPFNDGVYFASTEKSNIIRGWIFGTTLDSKTQSLLIVNNATNVVIKVCEFQFCNDPFLGVYYHKNNKSWMESEFRVYSSANNCTFEYVSQPFLMDLEGKQGNFKNLREFVFKNIDGYFKIYSKHTPINLVRDLPQGFSALEPLVDLPIGINITRFQTLLALHRSYLTPGDSSSGWTAGAAAYYVGYLQPRTFLLKYNENGTITDAVDCALDPLSETKCTLKSFTVEKGIYQTSNFRVQPTESIVRFPNITNLCPFGEVFNATRFASVYAWNRKRISNCVADYSVLYNSASFSTFKCYGVSPTKLNDLCFTNVYADSFVIRGDEVRQIAPGQTGKIADYNYKLPDDFTGCVIAWNSNNLDSKVGGNYNYLYRLFRKSNLKPFERDISTEIYQAGSTPCNGVEGFNCYFPLQSYGFQPTNGVGYQPYRVVVLSFELLHAPATVCGPKKSTNLVKNKCVNFNFNGLTGTGVLTESNKKFLPFQQFGRDIADTTDAVRDPQTLEILDITPCSFGGVSVITPGTNTSNQVAVLYQDVNCTEVPVAIHADQLTPTWRVYSTGSNVFQTRAGCLIGAEHVNNSYECDIPIGAGICASYQTQTNSPSGAGSVASQSIIAYTMSLGAENSVAYSNNSIAIPTNFTISVTTEILPVSMTKTSVDCTMYICGDSTECSNLLLQYGSFCTQLNRALTGIAVEQDKNTQEVFAQVKQIYKTPPIKDFGGFNFSQILPDPSKPSKRSFIEDLLFNKVTLADAGFIKQYGDCLGDIAARDLICAQKFNGLTVLPPLLTDEMIAQYTSALLAGTITSGWTFGAGAALQIPFAMQMAYRFNGIGVTQNVLYENQKLIANQFNSAIGKIQDSLSSTASALGKLQDVVNQNAQALNTLVKQLSSNFGAISSVLNDILSRLEPPEAEVQIDRLITGRLQSLQTYVTQQLIRAAEIRASANLAATKMSECVLGQSKRVDFCGKGYHLMSFPQSAPHGVVFLHVTYVPAQEKNFTTAPAICHDGKAHFPREGVFVSNGTHWFVTQRNFYEPQIITTDNTFVSGNCDVVIGIVNNTVYDPLQPELDSFKEELDKYFKNHTSPDVDLGDISGINASVVNIQKEIDRLNEVAKNLNESLIDLQELGKYEQYIKGSGRENLYFQGGGGSGYIPEAPRDGQAYVRKDGEWVLLSTFLGHHHHHHHH

SEQ ID NO: 5441 - protein, 1281 aa, Artificial Sequence
  Description of Artificial Sequence: Synthetic polypeptide
MGILPSPGMPALLSLVSLLSVLLMGCVAETGTQCVNLTTRTQLPPAYTNSFTRGVYYPDKVFRSSVLHSTQDLFLPFFSNVTWFHAIHVSGTNGTKRFDNPVLPFNDGVYFASTEKSNIIRGWIFGTTLDSKTESLLIVNNATNVVIKVCEFQFCNDPFLGVYYHKNNKSWMESEFRVYSSANNCTFEYVSQPFLMDLEGKQGNFKNLREFVFKNIDGYFKIYSKHTPINLVRDLPQGFSALEPLVDLPIGINITRFQTLLALHRSYLTPGDSSSGWTAGAAAYYVGYLQPRTFLLKYNENGTITDAVDCALDPLSETKCTLKSFTVEKGIYQTSNFRVQPTESIVRFPNITNLCPFGEVFNATRFASVYAWNRKRISNCVADYSVLYNSASFSTFKCYGVSPTKLNDLCFTNVYADSFVIRGDEVRQIAPGQTGKIADYNYKLPDDFTGCVIAWNSNNLDSKVGGNYNYLYRLFRKSNLKPFERDISTEIYQAGSTPCNGVEGFNCYFPLQSYGFQPTNGVGYQPYRVVVLSFELLHAPATVCGPKKSTNLVKNKCVNFNFNGLTGTGVLTESNKKFLPFQQFGRDIADTTDAVRDPQTLEILDITPCSFGGVSVITPGTNTSNQVAVLYQDVNCTEVPVAIHADQLTPTWRVYSTGSNVFQTRAGCLIGAEHVNNSYECDIPIGAGICASYQTQTNSPSGAGSVASQSIIAYTMSLGAENSVAYSNNSIAIPTNFTISVTTEILPVSMTKTSVDCTMYICGDSTECSNLLLQYGSFCTQLNRALTGIAVEQDKNTQEVFAQVKQIYKTPPIKDFGGFNFSQILPDPSKPSKRSFIEDLLFNKVTLADAGFIKQYGDCLGDIAARDLICAQKFNGLTVLPPLLTDEMIAQYTSALLAGTITSGWTFGAGAALQIPFAMQMAYRFNGIGVTQNVLYENQKLIANQFNSAIGKIQDSLSSTASALGKLQDVVNQNAQALNTLVKQLSSNFGAISSVLNDILSRLDPPEAEVQIDRLITGRLQSLQTYVTQQLIRAAEIRASANLAATKMSECVLGQSKRVDFCGKGYHLMSFPQSAPHGVVFLHVTYVPAQEKNFTTAPAICHDGKAHFPREGVFVSNGTHWFVTQRNFYEPQIITTDNTFVSGNCDVVIGIVNNTVYDPLQPELDSFKEELDKYFKNHTSPDVDLGDISGINASVVNIQKEIDRLNEVAKNLNESLIDLQELGKYEQYIKGSGRENLYFQGGGGSGYIPEAPRDGQAYVRKDGEWVLLSTFLGHHHHHHHH

SEQ ID NO: 5442 - protein, 1281 aa, Artificial Sequence
  Description of Artificial Sequence: Synthetic polypeptide
MGILPSPGMPALLSLVSLLSVLLMGCVAETGTQCVNLTTRTQLPPAYTNSFTRGVYYPDKVFRSSVLHSTQDLFLPFFSNVTWFHAIHVSGTNGTKRFDNPVLPFNDGVYFASTEKSNIIRGWIFGTTLDSKTQSLLIVNNATNVVIKVCEFQFCNDPFLGVYYHKNNKSWMESEFRVYSSANNCTFEYVSQPFLMDLEGKQGNFKNLREFVFKNIDGYFKIYSKHTPINLVRDLPQGFSALEPLVDLPIGINITRFQTLLALHRSYLTPGDSSSGWTAGAAAYYVGYLQPRTFLLKYNENGTITDAVDCALDPLSETKCTLKSFTVEKGIYQTSNFRVQPTESIVRFPNITNLCPFGEVFNATRFASVYAWNRKRISNCVADYSVLYNSASFSTFKCYGVSPTKLNDLCFTNVYADSFVIRGDEVREIAPGQTGKIADYNYKLPDDFTGCVIAWNSNNLDSKVGGNYNYLYRLFRKSNLKPFERDISTEIYQAGSTPCNGVEGFNCYFPLQSYGFQPTNGVGYQPYRVVVLSFELLHAPATVCGPKKSTNLVKNKCVNFNFNGLTGTGVLTESNKKFLPFQQFGRDIADTTDAVRDPQTLEILDITPCSFGGVSVITPGTNTSNQVAVLYQDVNCTEVPVAIHADQLTPTWRVYSTGSNVFQTRAGCLIGAEHVNNSYECDIPIGAGICASYQTQTNSPSGAGSVASQSIIAYTMSLGAENSVAYSNNSIAIPTNFTISVTTEILPVSMTKTSVDCTMYICGDSTECSNLLLQYGSFCTQLNRALTGIAVEQDKNTQEVFAQVKQIYKTPPIKDFGGFNFSQILPDPSKPSKRSFIEDLLFNKVTLADAGFIKQYGDCLGDIAARDLICAQKFNGLTVLPPLLTDEMIAQYTSALLAGTITSGWTFGAGAALQIPFAMQMAYRFNGIGVTQNVLYENQKLIANQFNSAIGKIQDSLSSTASALGKLQDVVNQNAQALNTLVKQLSSNFGAISSVLNDILSRLDPPEAEVQIDRLITGRLQSLQTYVTQQLIRAAEIRASANLAATKMSECVLGQSKRVDFCGKGYHLMSFPQSAPHGVVFLHVTYVPAQEKNFTTAPAICHDGKAHFPREGVFVSNGTHWFVTQRNFYEPQIITTDNTFVSGNCDVVIGIVNNTVYDPLQPELDSFKEELDKYFKNHTSPDVDLGDISGINASVVNIQKEIDRLNEVAKNLNESLIDLQELGKYEQYIKGSGRENLYFQGGGGSGYIPEAPRDGQAYVRKDGEWVLLSTFLGHHHHHHHH

SEQ ID NO: 5443 - protein, 1281 aa, Artificial Sequence
  Description of Artificial Sequence: Synthetic polypeptide
MGILPSPGMPALLSLVSLLSVLLMGCVAETGTQCVNLTTRTQLPPAYTNSFTRGVYYPDKVFRSSVLHSTQDLFLPFFSNVTWFHAIHVSGTNGTKRFDNPVLPFNDGVYFASTEKSNIIRGWIFGTTLDSKTQSLLIVNNATNVVIKVCEFQFCNDPFLGVYYHKNNKSWMESEFRVYSSANNCTFEYVSQPFLMDLEGKQGNFKNLREFVFKNIDGYFKIYSKHTPINLVRDLPQGFSALEPLVDLPIGINITRFQTLLALHRSYLTPGDSSSGWTAGAAAYYVGYLQPRTFLLKYNENGTITDAVDCALDPLSETKCTLKSFTVEKGIYQTSNFRVQPTESIVRFPNITNLCPFGEVFNATRFASVYAWNRKRISNCVADYSVLYNSASFSTFKCYGVSPTKLNDLCFTNVYADSFVIRGDEVRQIAPGQTGKIADYNYKLPDDFTGCVIAWNSKNLDSKVGGNYNYLYRLFRKSNLKPFERDISTEIYQAGSTPCNGVEGFNCYFPLQSYGFQPTNGVGYQPYRVVVLSFELLHAPATVCGPKKSTNLVKNKCVNFNFNGLTGTGVLTESNKKFLPFQQFGRDIADTTDAVRDPQTLEILDITPCSFGGVSVITPGTNTSNQVAVLYQDVNCTEVPVAIHADQLTPTWRVYSTGSNVFQTRAGCLIGAEHVNNSYECDIPIGAGICASYQTQTNSPSGAGSVASQSIIAYTMSLGAENSVAYSNNSIAIPTNFTISVTTEILPVSMTKTSVDCTMYICGDSTECSNLLLQYGSFCTQLNRALTGIAVEQDKNTQEVFAQVKQIYKTPPIKDFGGFNFSQILPDPSKPSKRSFIEDLLFNKVTLADAGFIKQYGDCLGDIAARDLICAQKFNGLTVLPPLLTDEMIAQYTSALLAGTITSGWTFGAGAALQIPFAMQMAYRFNGIGVTQNVLYENQKLIANQFNSAIGKIQDSLSSTASALGKLQDVVNQNAQALNTLVKQLSSNFGAISSVLNDILSRLDPPEAEVQIDRLITGRLQSLQTYVTQQLIRAAEIRASANLAATKMSECVLGQSKRVDFCGKGYHLMSFPQSAPHGVVFLHVTYVPAQEKNFTTAPAICHDGKAHFPREGVFVSNGTHWFVTQRNFYEPQIITTDNTFVSGNCDVVIGIVNNTVYDPLQPELDSFKEELDKYFKNHTSPDVDLGDISGINASVVNIQKEIDRLNEVAKNLNESLIDLQELGKYEQYIKGSGRENLYFQGGGGSGYIPEAPRDGQAYVRKDGEWVLLSTFLGHHHHHHHH

SEQ ID NO: 5444 - protein, 1281 aa, Artificial Sequence
  Description of Artificial Sequence: Synthetic polypeptide
MGILPSPGMPALLSLVSLLSVLLMGCVAETGTQCVNLTTRTQLPPAYTNSFTRGVYYPDKVFRSSVLHSTQDLFLPFFSNVTWFHAIHVSGTNGTKRFDNPVLPFNDGVYFASTEKSNIIRGWIFGTTLDSKTQSLLIVNNATNVVIKVCEFQFCNDPFLGVYYHKNNKSWMESEFRVYSSANNCTFEYVSQPFLMDLEGKQGNFKNLREFVFKNIDGYFKIYSKHTPINLVRDLPQGFSALEPLVDLPIGINITRFQTLLALHRSYLTPGDSSSGWTAGAAAYYVGYLQPRTFLLKYNENGTITDAVDCALDPLSETKCTLKSFTVEKGIYQTSNFRVQPTESIVRFPNITNLCPFGEVFNATRFASVYAWNRKRISNCVADYSVLYNSASFSTFKCYGVSPTKLNDLCFTNVYADSFVIRGDEVRQIAPGQTGKIADYNYKLPDDFTGCVIAWNSNNLDSKVGGNYNYLYRLFRKSNLKPFERDISTEIYQAGSTPCNGVEGFNCYFPLQSYGFQPTNGVGYQPYRVVVLSFELLHAPATVCGPKKSTNLVKNKCVNFNFNGLTGTGVLTESNKKFLPFQQFGRDIADTTDAVRDPQTLEILDITPCSFGGVSVITPGTNTSNQVAVLYQDVNCTEVPVAIHADQLTPTWRVYSTGSNVFQTRAGCLIGAEHVNNSYECDIPIGAGICASYQTQTNSPSGAGSVASQSIIAYTMSLGAENSVAYSNNSIAIPTNFTISVTTEILPVSMTKTSVDCTMYICGDSTECSNLLLQYGSFCTQLNRALTGIAVEQDKNTQEVFAQVKQIYKTPPIKDFGGFNFSQILPDPSKPSKRSFIEDLLFNKVTLADAGFIKQYGDCLGDIAARDLICAQKFNGLTVLPPLLTDEMIAQYTSALLAGTITSGWTFGAGAALQIPFAMQMAYRFNGIGVTQNVLYENQKLIANQFNSAIGKIQDSLSSTASALGKLQDVVNQNAQALNTLVKQLSSNFGAISSVLNDILSRLNPPEAEVQIDRLITGRLQSLQTYVTQQLIRAAEIRASANLAATKMSECVLGQSKRVDFCGKGYHLMSFPQSAPHGVVFLHVTYVPAQEKNFTTAPAICHDGKAHFPREGVFVSNGTHWFVTQRNFYEPQIITTDNTFVSGNCDVVIGIVNNTVYDPLQPELDSFKEELDKYFKNHTSPDVDLGDISGINASVVNIQKEIDRLNEVAKNLNESLIDLQELGKYEQYIKGSGRENLYFQGGGGSGYIPEAPRDGQAYVRKDGEWVLLSTFLGHHHHHHHH

SEQ ID NO: 5445 - protein, 1281 aa, Artificial Sequence
  Description of Artificial Sequence: Synthetic polypeptide
MGILPSPGMPALLSLVSLLSVLLMGCVAETGTQCVNLTTRTQLPPAYTNSFTRGVYYPDKVFRSSVLHSTQDLFLPFFSNVTWFHAIHVSGTNGTKRFDNPVLPFNDGVYFASTEKSNIIRGWIFGTTLDSKTQSLLIVNNATNVVIKVCEFQFCNDPFLGVYYHKNNKSWMESEFRVYSSANNCTFEYVSQPFLMDLEGKQGNFKNLREFVFKNIDGYFKIYSKHTPINLVRDLPQGFSALEPLVDLPIGINITRFQTLLALHRSYLTPGDSSSGWTAGAAAYYVGYLQPRTFLLKYNENGTITDAVDCALDPLSETKCTLKSFTVEKGIYQTSNFRVQPTESIVRFPNITNLCPFGEVFNATRFASVYAWNRKRISNCVADYSVLYNSASFSTFKCYGVSPTKLNDLCFTNVYADSFVIRGDEVRQIAPGQTGKIADYNYKLPDDFTGCVIAWNSNNLDSKVGGNYNYLYRLFRKSNLKPFERDISTEIYQAGKTPCNGVEGFNCYFPLQSYGFQPTNGVGYQPYRVVVLSFELLHAPATVCGPKKSTNLVKNKCVNFNFNGLTGTGVLTESNKKFLPFQQFGRDIADTTDAVRDPQTLEILDITPCSFGGVSVITPGTNTSNQVAVLYQDVNCTEVPVAIHADQLTPTWRVYSTGSNVFQTRAGCLIGAEHVNNSYECDIPIGAGICASYQTQTNSPSGAGSVASQSIIAYTMSLGAENSVAYSNNSIAIPTNFTISVTTEILPVSMTKTSVDCTMYICGDSTECSNLLLQYGSFCTQLNRALTGIAVEQDKNTQEVFAQVKQIYKTPPIKDFGGFNFSQILPDPSKPSKRSFIEDLLFNKVTLADAGFIKQYGDCLGDIAARDLICAQKFNGLTVLPPLLTDEMIAQYTSALLAGTITSGWTFGAGAALQIPFAMQMAYRFNGIGVTQNVLYENQKLIANQFNSAIGKIQDSLSSTASALGKLQDVVNQNAQALNTLVKQLSSNFGAISSVLNDILSRLDPPEAEVQIDRLITGRLQSLQTYVTQQLIRAAEIRASANLAATKMSECVLGQSKRVDFCGKGYHLMSFPQSAPHGVVFLHVTYVPAQEKNFTTAPAICHDGKAHFPREGVFVSNGTHWFVTQRNFYEPQIITTDNTFVSGNCDVVIGIVNNTVYDPLQPELDSFKEELDKYFKNHTSPDVDLGDISGINASVVNIQKEIDRLNEVAKNLNESLIDLQELGKYEQYIKGSGRENLYFQGGGGSGYIPEAPRDGQAYVRKDGEWVLLSTFLGHHHHHHHH

SEQ ID NO: 5446 - protein, 1281 aa, Artificial Sequence
  Description of Artificial Sequence: Synthetic polypeptide
MGILPSPGMPALLSLVSLLSVLLMGCVAETGTQCVNLTTRTQLPPAYTNSFTRGVYYPDKVFRSSVLHSTQDLFLPFFSNVTWFHAIHVSGTNGTKRFDNPVLPFNDGVYFASTEKSNIIRGWIFGTTLDSKTQSLLIVNNATNVVIKVCEFQFCNDPFLGVYYHKNNKSWMESEFRVYSSANNCTFEYVSQPFLMDLEGKQGNFKNLREFVFKNIDGYFKIYSKHTPINLVRDLPQGFSALEPLVDLPIGINITRFQTLLALHRSYLTPGDSSSGWTAGAAAYYVGYLQPRTFLLKYNENGTITDAVDCALDPLSETKCTLKSFTVEKGIYQTSNFRVQPTESIVRFPNITNLCPFGEVFNATRFASVYAWNRKRISNCVADYSVLYNSASFSTFKCYGVSPTKLNDLCFTNVYADSFVIRGDEVRQIAPGQTGKIADYNYKLPDDFTGCVIAWNSNNLDSKVGGNYNYLYRLFRKSNLKPFERDISTGIYQAGSTPCNGVEGFNCYFPLQSYGFQPTNGVGYQPYRVVVLSFELLHAPATVCGPKKSTNLVKNKCVNFNFNGLTGTGVLTESNKKFLPFQQFGRDIADTTDAVRDPQTLEILDITPCSFGGVSVITPGTNTSNQVAVLYQDVNCTEVPVAIHADQLTPTWRVYSTGSNVFQTRAGCLIGAEHVNNSYECDIPIGAGICASYQTQTNSPSGAGSVASQSIIAYTMSLGAENSVAYSNNSIAIPTNFTISVTTEILPVSMTKTSVDCTMYICGDSTECSNLLLQYGSFCTQLNRALTGIAVEQDKNTQEVFAQVKQIYKTPPIKDFGGFNFSQILPDPSKPSKRSFIEDLLFNKVTLADAGFIKQYGDCLGDIAARDLICAQKFNGLTVLPPLLTDEMIAQYTSALLAGTITSGWTFGAGAALQIPFAMQMAYRFNGIGVTQNVLYENQKLIANQFNSAIGKIQDSLSSTASALGKLQDVVNQNAQALNTLVKQLSSNFGAISSVLNDILSRLDPPEAEVQIDRLITGRLQSLQTYVTQQLIRAAEIRASANLAATKMSECVLGQSKRVDFCGKGYHLMSFPQSAPHGVVFLHVTYVPAQEKNFTTAPAICHDGKAHFPREGVFVSNGTHWFVTQRNFYEPQIITTDNTFVSGNCDVVIGIVNNTVYDPLQPELDSFKEELDKYFKNHTSPDVDLGDISGINASVVNIQKEIDRLNEVAKNLNESLIDLQELGKYEQYIKGSGRENLYFQGGGGSGYIPEAPRDGQAYVRKDGEWVLLSTFLGHHHHHHHH

SEQ ID NO: 5447 - protein, 1281 aa, Artificial Sequence
  Description of Artificial Sequence: Synthetic polypeptide
MGILPSPGMPALLSLVSLLSVLLMGCVAETGTQCVNLTTRTQLPPAYTNSFTRGVYYPDKVFRSSVLHSTQDLFLPFFSNVTWFHAIHVSGTNGTKRFDNPVLPFNDGVYFASTEKSNIIRGWIFGTTLDSKTQSLLIVNNATNVVIKVCEFQFCNDPFLGVYYHKNNKSWMESEFRVYSSANNCTFEYVSQPFLMDLEGKQGNFKNLREFVFKNIDGYFKIYSKHTPINLVRDLPQGFSALEPLVDLPIGINITRFQTLLALHRSYLTPGDSSSGWTAGAAAYYVGYLQPRTFLLKYNENGTITDAVDCALDPLSETKCTLKSFTVEKGIYQTSNFRVQPTESIVRFPNITNLCPFGEVFNATRFASVYAWNRKRISNCVADYSVLYNSASFSTFKCYGVSPTKLNDLCFTNVYADSFVIRGDEVRQIAPGQTGKIADYNYKLPDDFTGCVIAWNSNNLDSKVGGNYNYLYRLFRKSNLKPFERDISTEIYQAGSTPCNGVEGFNCYFPLQSYGFQPTNGVGYQPYRVVVLSFELLHAPATVCGPKKSTNLVKNKCVNFNFNGLTGTGVLTESNKKFLPFQQFGRDIADTTDAVRDPQTLEILDITPCSFGGVSVITPGTNTSNQVAVLYQDVNCTEVPVAIHADQLTPTWRVYSTGSNVFQTRAGCLIGAEHVNNSYECDIPIGAGICASYQTQTNSPSGAGSVASQSIIAYTMSLGAENSVAYSNNSIAIPTNFTISVTTEILPVSMTKTSVDCTMYICGDSTECSNLLLQYGSFCTQLNRALTGIAVEQDKNTQEVFAQVKQIYKTPPIKDFGGFNFSQILPDPSKPSKRSFIEDLLFNKVTLADAGFIKQYGDCLGDIAARDLICAQKFNGLTVLPPLLTDEQIAQYTSALLAGTITSGWTFGAGAALQIPFAMQMAYRFNGIGVTQNVLYENQKLIANQFNSAIGKIQDSLSSTASALGKLQDVVNQNAQALNTLVKQLSSNFGAISSVLNDILSRLDPPEAEVQIDRLITGRLQSLQTYVTQQLIRAAEIRASANLAATKMSECVLGQSKRVDFCGKGYHLMSFPQSAPHGVVFLHVTYVPAQEKNFTTAPAICHDGKAHFPREGVFVSNGTHWFVTQRNFYEPQIITTDNTFVSGNCDVVIGIVNNTVYDPLQPELDSFKEELDKYFKNHTSPDVDLGDISGINASVVNIQKEIDRLNEVAKNLNESLIDLQELGKYEQYIKGSGRENLYFQGGGGSGYIPEAPRDGQAYVRKDGEWVLLSTFLGHHHHHHHH

SEQ ID NO: 5448 - protein, 1281 aa, Artificial Sequence
  Description of Artificial Sequence: Synthetic polypeptide
MGILPSPGMPALLSLVSLLSVLLMGCVAETGTQCVNLTTRTQLPPAYTNSFTRGVYYPDKVFRSSVLHSTQDLFLPFFSNVTWFHAIHVSGTNGTKRFDNPVLPFNDGVYFASTEKSNIIRGWIFGTTLDSKTQSLLIVNNATNVVIKVCEFQFCNDPFLGVYYHKNNKSWMESEFRVYSSANNCTFEYVSQPFLMDLEGKQGNFKNLREFVFKNIDGYFKIYSKHTPINLVRDLPQGFSALEPLVDLPIGINITRFQTLLALHRSYLTPGDSSSGWTAGAAAYYVGYLQPRTFLLKYNENGTITDAVDCALDPLSETKCTLKSFTVEKGIYQTSNFRVQPTESIVRFPNITNLCPFGEVFNATRFASVYAWNRKRISNCVADYSVLYNSASFSTFKCYGVSPTKLNDLCFTNVYADSFVIRGDEVRQIAPGQTGKIADYNYKLPDDFTGCVIAWNSNNLDSKVGGNYNYLYRLFRKSNLKPFERDISTEIYQAGSTPCNGVEGFNCYFPLQSYGFQPTNGVGYQPYRVVVLSFELLHAPATVCGPKKSTNLVKNKCVNFNFNGLTGTGVLTESNKKFLPFQQFGRDIADTTDAVRDPQTLEILDITPCSFGGVSVITPGTNTSNQVAVLYQDVNCTEVPVAIHADQLTPTWRVYSTGSNVFQTRAGCLIGAEHVNNSYECDIPIGAGICASYQTQTNSPSGAGSVASQSIIAYTMSLGAENSVAYSNNSIAIPTNFTISVTTEILPVSMTKTSVDCTMYICGDSTECSNLLLQYGSFCTQLNRALTGIAVEQDKNTQEVFAQVKQIYKTPPIKDFGGFNFSQILPDPSKPSKRSFIEDLLFNKVTLADAGFIKQYGDCLGDIAARDLICAQKFNGLTVLPPLLTDEMIAQYTSALLAGTITSGWTFGAGAALQIPFAMQMAYRFNGIGVTQNVLYENQKLIANQFNSAIGKIQDSLSSTASALGKLQDVVNQNAQALNTLVKQLSSNFGAISSVLNDILSRLDPPEAEVQIDRLITGRLQSLQTYVTQQLIRAAEIRASANLAATKMSECVLGQSKRQDFCGKGYHLMSFPQSAPHGVVFLHVTYVPAQEKNFTTAPAICHDGKAHFPREGVFVSNGTHWFVTQRNFYEPQIITTDNTFVSGNCDVVIGIVNNTVYDPLQPELDSFKEELDKYFKNHTSPDVDLGDISGINASVVNIQKEIDRLNEVAKNLNESLIDLQELGKYEQYIKGSGRENLYFQGGGGSGYIPEAPRDGQAYVRKDGEWVLLSTFLGHHHHHHHH

SEQ ID NO: 5449 - protein, 1281 aa, Artificial Sequence
  Description of Artificial Sequence: Synthetic polypeptide
MGILPSPGMPALLSLVSLLSVLLMGCVAETGTQCVNLTTRTQLPPAYTNSFTRGVYYPDKVFRSSVLHSTQDLFLPFFSNVTWFHAIHVSGTNGTKRFDNPVLPFNDGVYFASTEKSNIIRGWIFGTTLDSKTQSLLIVNNATNVVIKVCEFQFCNDPFLGVYYHKNNKSWMESEFRVYSSANNCTFEYVSQPFLMDLEGKQGNFKNLREFVFKNIDGYFKIYSKHTPINLVRDLPQGFSALEPLVDLPIGINITRFQTLLALHRSYLTPGDSSSGWTAGAAAYYVGYLQPRTFLLKYNENGTITDAVDCALDPLSETKCTLKSFTVEKGIYQTSNFRVQPTESIVRFPNITNLCPFGEVFNATRFASVYAWNRKRISNCVADYSVLYNSSSFSTFKCYGVSPTKLNDLCFTNVYADSFVIRGDEVRQIAPGQTGKIADYNYKLPDDFTGCVIAWNSNNLDSKVGGNYNYLYRLFRKSNLKPFERDISTEIYQAGSTPCNGVEGFNCYFPLQSYGFQPTNGVGYQPYRVVVLSFELLHAPATVCGPKKSTNLVKNKCVNFNFNGLTGTGVLTESNKKFLPFQQFGRDIADTTDAVRDPQTLEILDITPCSFGGVSVITPGTNTSNQVAVLYQDVNCTEVPVAIHADQLTPTWRVYSTGSNVFQTRAGCLIGAEHVNNSYECDIPIGAGICASYQTQTNSPSGAGSVASQSIIAYTMSLGAENSVAYSNNSIAIPTNFTISVTTEILPVSMTKTSVDCTMYICGDSTECSNLLLQYGSFCTQLNRALTGIAVEQDKNTQEVFAQVKQIYKTPPIKDFGGFNFSQILPDPSKPSKRSFIEDLLFNKVTLADAGFIKQYGDCLGDIAARDLICAQKFNGLTVLPPLLTDEMIAQYTSALLAGTITSGWTFGAGAALQIPFAMQMAYRFNGIGVTQNVLYENQKLIANQFNSAIGKIQDSLSSTASALGKLQDVVNQNAQALNTLVKQLSSNFGAISSVLNDILSRLDPPEAEVQIDRLITGRLQSLQTYVTQQLIRAAEIRASANLAATKMSECVLGQSKRVDFCGKGYHLMSFPQSAPHGVVFLHVTYVPAQEKNFTTAPAICHDGKAHFPREGVFVSNGTHWFVTQRNFYEPQIITTDNTFVSGNCDVVIGIVNNTVYDPLQPELDSFKEELDKYFKNHTSPDVDLGDISGINASVVNIQKEIDRLNEVAKNLNESLIDLQELGKYEQYIKGSGRENLYFQGGGGSGYIPEAPRDGQAYVRKDGEWVLLSTFLGHHHHHHHH

SEQ ID NO: 5450 - protein, 1281 aa, Artificial Sequence
  Description of Artificial Sequence: Synthetic polypeptide
MGILPSPGMPALLSLVSLLSVLLMGCVAETGTQCVNLTTRTQLPPAYTNSFTRGVYYPDKVFRSSVLHSTQDLFLPFFSNVTWFHAIHVSGTNGTKRFDNPVLPFNDGVYFASTEKSNIIRGWIFGTTLDSKTQSLLIVNNATNVVIKVCEFQFCNDPFLGVYYHKNNKSWMESEFRVYSSANNCTFEYVSQPFLMDLEGKQGNFKNLREFVFKNIDGYFKIYSKHTPINLVRDLPQGFSALEPLVDLPIGINITRFQTLLALHRSYLTPGDSSSGWTAGAAAYYVGYLQPRTFLLKYNENGTITDAVDCALDPLSETKCTLKSFTVEKGIYQTSNFRVQPTESIVRFPNITNLCPFGEVFNATRFASVYAWNRKRISNCVADYSVLYNSASFSTFKCYGVSPTKLNDLCFTNVYADSFVIRGDEVRQIAPGQTGKIADYNYKLPDDFTGCVIAWNSNNLDSKAGGNYNYLYRLFRKSNLKPFERDISTEIYQAGSTPCNGVEGFNCYFPLQSYGFQPTNGVGYQPYRVVVLSFELLHAPATVCGPKKSTNLVKNKCVNFNFNGLTGTGVLTESNKKFLPFQQFGRDIADTTDAVRDPQTLEILDITPCSFGGVSVITPGTNTSNQVAVLYQDVNCTEVPVAIHADQLTPTWRVYSTGSNVFQTRAGCLIGAEHVNNSYECDIPIGAGICASYQTQTNSPSGAGSVASQSIIAYTMSLGAENSVAYSNNSIAIPTNFTISVTTEILPVSMTKTSVDCTMYICGDSTECSNLLLQYGSFCTQLNRALTGIAVEQDKNTQEVFAQVKQIYKTPPIKDFGGFNFSQILPDPSKPSKRSFIEDLLFNKVTLADAGFIKQYGDCLGDIAARDLICAQKFNGLTVLPPLLTDEMIAQYTSALLAGTITSGWTFGAGAALQIPFAMQMAYRFNGIGVTQNVLYENQKLIANQFNSAIGKIQDSLSSTASALGKLQDVVNQNAQALNTLVKQLSSNFGAISSVLNDILSRLDPPEAEVQIDRLITGRLQSLQTYVTQQLIRAAEIRASANLAATKMSECVLGQSKRVDFCGKGYHLMSFPQSAPHGVVFLHVTYVPAQEKNFTTAPAICHDGKAHFPREGVFVSNGTHWFVTQRNFYEPQIITTDNTFVSGNCDVVIGIVNNTVYDPLQPELDSFKEELDKYFKNHTSPDVDLGDISGINASVVNIQKEIDRLNEVAKNLNESLIDLQELGKYEQYIKGSGRENLYFQGGGGSGYIPEAPRDGQAYVRKDGEWVLLSTFLGHHHHHHHH

SEQ ID NO: 5451 - protein, 1281 aa, Artificial Sequence
  Description of Artificial Sequence: Synthetic polypeptide
MGILPSPGMPALLSLVSLLSVLLMGCVAETGTQCVNLTTRTQLPPAYTNSFTRGVYYPDKVFRSSVLHSTQDLFLPFFSNVTWFHAIHVSGTNGTKRFDNPVLPFNDGVYFASTEKSNIIRGWIFGTTLDSKTQSLLIVNNATNVVIKVCEFQFCNDPFLGVYYHKNNKSWMESEFRVYSSANNCTFEYVSQPFLMDLEGKQGNFKNLREFVFKNIDGYFKIYSKHTPINLVRDLPQGFSALEPLVDLPIGINITRFQTLLALHRSYLTPGDSSSGWTAGAAAYYVGYLQPRTFLLKYNENGTITDAVDCALDPLSETKCTLKSFTVEKGIYQTSNFRVQPTESIVRFPNITNLCPFGEVFNATRFASVYAWNRKRISNCVADYSVLYNSASFSTFKCYGVSPTKLNDLCFTNVYADSFVIRGDEVRQIAPGQTGHIADYNYKLPDDFTGCVIAWNSNNLDSKVGGNYNYLYRLFRKSNLKPFERDISTEIYQAGSTPCNGVEGFNCYFPLQSYGFQPTNGVGYQPYRVVVLSFELLHAPATVCGPKKSTNLVKNKCVNFNFNGLTGTGVLTESNKKFLPFQQFGRDIADTTDAVRDPQTLEILDITPCSFGGVSVITPGTNTSNQVAVLYQDVNCTEVPVAIHADQLTPTWRVYSTGSNVFQTRAGCLIGAEHVNNSYECDIPIGAGICASYQTQTNSPSGAGSVASQSIIAYTMSLGAENSVAYSNNSIAIPTNFTISVTTEILPVSMTKTSVDCTMYICGDSTECSNLLLQYGSFCTQLNRALTGIAVEQDKNTQEVFAQVKQIYKTPPIKDFGGFNFSQILPDPSKPSKRSFIEDLLFNKVTLADAGFIKQYGDCLGDIAARDLICAQKFNGLTVLPPLLTDEMIAQYTSALLAGTITSGWTFGAGAALQIPFAMQMAYRFNGIGVTQNVLYENQKLIANQFNSAIGKIQDSLSSTASALGKLQDVVNQNAQALNTLVKQLSSNFGAISSVLNDILSRLDPPEAEVQIDRLITGRLQSLQTYVTQQLIRAAEIRASANLAATKMSECVLGQSKRVDFCGKGYHLMSFPQSAPHGVVFLHVTYVPAQEKNFTTAPAICHDGKAHFPREGVFVSNGTHWFVTQRNFYEPQIITTDNTFVSGNCDVVIGIVNNTVYDPLQPELDSFKEELDKYFKNHTSPDVDLGDISGINASVVNIQKEIDRLNEVAKNLNESLIDLQELGKYEQYIKGSGRENLYFQGGGGSGYIPEAPRDGQAYVRKDGEWVLLSTFLGHHHHHHHH

SEQ ID NO: 5452 - protein, 1281 aa, Artificial Sequence
  Description of Artificial Sequence: Synthetic polypeptide
MGILPSPGMPALLSLVSLLSVLLMGCVAETGTQCVNLTTRTQLPPAYTNSFTRGVYYPDKVFRSSVLHSTQDLFLPFFSNVTWFHAIHVSGTNGTKRFDNPVLPFNDGVYFASTEKSNIIRGWIFGTTLDSKTQSLLIVNNATNVVIKVCEFQFCNDPFLGVYYHKNNKSWMESEFRVYSSANNCTFEYVSQPFLMDLEGKQGNFKNLREFVFKNIDGYFKIYSKHTPINLVRDLPQGFSALEPLVDLPIGINITRFQTLLALHRSYLTPGDSSSGWTAGAAAYYVGYLQPRTFLLKYNENGTITDAVDCALDPLSETKCTLKSFTVEKGIYQTSNFRVQPTESIVRFPNITNLCPFGEVFNATRFASVYAWNRKRISNCVADYSVLYNSASFSTFKCYGVSPTKLNDLCFTNVYADSFVIRGDEVRQIAPGQTGKIADYNYKLPDDFTGCVIAWNSNNLDSKVGGNYNYLYRLFRKSNLKPFERDISVEIYQAGSTPCNGVEGFNCYFPLQSYGFQPTNGVGYQPYRVVVLSFELLHAPATVCGPKKSTNLVKNKCVNFNFNGLTGTGVLTESNKKFLPFQQFGRDIADTTDAVRDPQTLEILDITPCSFGGVSVITPGTNTSNQVAVLYQDVNCTEVPVAIHADQLTPTWRVYSTGSNVFQTRAGCLIGAEHVNNSYECDIPIGAGICASYQTQTNSPSGAGSVASQSIIAYTMSLGAENSVAYSNNSIAIPTNFTISVTTEILPVSMTKTSVDCTMYICGDSTECSNLLLQYGSFCTQLNRALTGIAVEQDKNTQEVFAQVKQIYKTPPIKDFGGFNFSQILPDPSKPSKRSFIEDLLFNKVTLADAGFIKQYGDCLGDIAARDLICAQKFNGLTVLPPLLTDEMIAQYTSALLAGTITSGWTFGAGAALQIPFAMQMAYRFNGIGVTQNVLYENQKLIANQFNSAIGKIQDSLSSTASALGKLQDVVNQNAQALNTLVKQLSSNFGAISSVLNDILSRLDPPEAEVQIDRLITGRLQSLQTYVTQQLIRAAEIRASANLAATKMSECVLGQSKRVDFCGKGYHLMSFPQSAPHGVVFLHVTYVPAQEKNFTTAPAICHDGKAHFPREGVFVSNGTHWFVTQRNFYEPQIITTDNTFVSGNCDVVIGIVNNTVYDPLQPELDSFKEELDKYFKNHTSPDVDLGDISGINASVVNIQKEIDRLNEVAKNLNESLIDLQELGKYEQYIKGSGRENLYFQGGGGSGYIPEAPRDGQAYVRKDGEWVLLSTFLGHHHHHHHH

SEQ ID NO: 5453 - protein, 1281 aa, Artificial Sequence
  Description of Artificial Sequence: Synthetic polypeptide
MGILPSPGMPALLSLVSLLSVLLMGCVAETGTQCVNLTTRTQLPPAYTNSFTRGVYYPDKVFRSSVLHSTQDLFLPFFSNVTWFHAIHVSGTNGTKRFDNPVLPFNDGVYFASTEKSNIIRGWIFGTTLDSKTQSLLIVNNATNVVIKVCEFQFCNDPFLGVYYHKNNKSWMESEFRVYSSANNCTFEYVSQPFLMDLEGKQGNFKNLREFVFKNIDGYFKIYSKHTPINLVRDLPQGFSALEPLVDLPIGINITRFQTLLALHRSYLTPGDSSSGWTAGAAAYYVGYLQPRTFLLKYNENGTITDAVDCALDPLSETKCTLKSFTVEKGIYQTSNFRVQPTESIVRFPNITNLCPFGEVFNATRFASVYAWNRKRISNCVADYSVLYNSASFSTFKCYGVSPTKLNDLCFTNVYADSFVIRGDEVRQIAPGQTGKIADYNYKLPDDFTGCVIAWNSNNLDSKVGGNYNYLYRLFRKSNLKPFERDISTEIYQAGSTPCNGVEGFNCYFPLQSYGFQPTNGVGYQPYRVVVLSFELLHAPATVCGPKKSTNLVKNKCVNFNFNGLTGTGVLTESNKKFLPFQQFGRDIADTTDAVRDPQTLEILDITPCSFGGVSVITPGTNTSNQVAVLYQDVNCTEVPVAIHADQLTPTWRVYSTGSNVFQTRAGCLIGAEHVNNSYECDIPIGAGICASYQTQTNSPSGAGSVASQSIIAYTMSLGAENSVAYSNNSIAIPTNFTISVTTEILPVSMTKTSVDCTMYICGDSTECSNLLLQYGSFCTQLNRALTGIAVEQDKNTQEVFAQVKQIYKTPPIKDFGGFNFSQILPDPSKPSKRSFIEDLLFNKVTLADAGFIKQYGDCLGDIAARDLICAQKFNGLTVLPPLLTDEMIAQYTSALLAGTITSGWTFGAGAALQIPFAMQMAYRFNGIGVTQNVLYENQKLIANQFNSAIGKIQDSLSSTASALGKLQDVVNQNAQALNTLVKQLSSNFGAISSVLNDILSRLDPPEAEVQIDRLITGRLQSLQTYVTQQLIRAAEIRASANLAATKMSECVLGQSKRVDFCGKGYHLMSFPQSAPHGVVFLHVTYVPAQEKNFTTAPAICHDGKAHFPREGVFVSNGTHWFVTQRNFYEPQIITTDNTFVSGNCDVVIGIVNNTVYDPLQPERDSFKEELDKYFKNHTSPDVDLGDISGINASVVNIQKEIDRLNEVAKNLNESLIDLQELGKYEQYIKGSGRENLYFQGGGGSGYIPEAPRDGQAYVRKDGEWVLLSTFLGHHHHHHHH

SEQ ID NO: 5454 - protein, 1281 aa, Artificial Sequence
  Description of Artificial Sequence: Synthetic polypeptide
MGILPSPGMPALLSLVSLLSVLLMGCVAETGTQCVNLTTRTQLPPAYTNSFTRGVYYPDKVFRSSVLHSTQDLFLPFFSNVTWFHAIHVSGTNGTKRFDNPVLPFNDGVYFASTEKSNIIRGWIFGTTLDSKTQSLLIVNNATNVVIKVCEFQFCNDPFLGVYYHKNNKSWMESEFRVYSSANNCTFEYVSQPFLMDLEGKQGNFKNLREFVFKNIDGYFKIYSKHTPINLVRDLPQGFSALEPLVDLPIGINITRFQTLLALHRSYLTPGDSSSGWTAGAAAYYVGYLQPRTFLLKYNENGTITDAVDCALDPLSETKCTLKSFTVEKGIYQTSNFRVQPTESIVRFPNITNLCPFGEVFNATRFASVYAWNRKRISNCVADYSVLYNSASFSTFKCYGVSPTKLNDLCFTNVYADSFVIRGDEVRQIAPGQTGKIADYNYKLPDDFTGCVIAWNSNNLDSKVGGNYNYLYRLFRKSNLKPFERDISTEIYQAGSTPCNGVEGFNCYFPLQSYGFQPTNGVGYQPYRVVVLSFELLHAPATVCGPKKSTNLVKNKCVNFNFNGLTGTGVLTESNKKFLPFQQFGRDIADTTDAVRDPQTLEILDITPCSFGGVSVITPGTNTSNQVAVLYQDVNCTEVPVAIHADQLTPTWRVYSTGSNVFQTRAGCLIGAEHVNNSYECDIPIGAGICASYQTQTNSPSGAGSVASQSIIAYTMSLGAENSVAYSNNSIAIPTNFTISVTTEILPVSMTKTSVDCTMYICGDSTECSNLLLQYGSFCTQLNRALTGIAVEQDKNTQEVFAQVKQIYKTPPIKDFGGFNFSQILPDPSKPSKRSFIEDLLFNKVTLADAGFIKQYGDCLGDIAARDLICAQKFNGLTVLPPLLTDEMIAQYTSALLAGTITSGWTFGAGAALQIPFAMQMAYRFNGIGVTQNVLYENQKLIANQFNSAIGKIQDSLSSTASALGKLQDVVNQNAQALNTLVKQLSSNFGAISSVLNDILSRLDPPEAEVQIDRLITGRLQSLQTYVTQQLIRAAEIRASANLAATKMQECVLGQSKRVDFCGKGYHLMSFPQSAPHGVVFLHVTYVPAQEKNFTTAPAICHDGKAHFPREGVFVSNGTHWFVTQRNFYEPQIITTDNTFVSGNCDVVIGIVNNTVYDPLQPELDSFKEELDKYFKNHTSPDVDLGDISGINASVVNIQKEIDRLNEVAKNLNESLIDLQELGKYEQYIKGSGRENLYFQGGGGSGYIPEAPRDGQAYVRKDGEWVLLSTFLGHHHHHHHH

SEQ ID NO: 5455 - protein, 1281 aa, Artificial Sequence
  Description of Artificial Sequence: Synthetic polypeptide
MGILPSPGMPALLSLVSLLSVLLMGCVAETGTQCVNLTTRTQLPPAYTNSFTRGVYYPDKVFRSSVLHSTQDLFLPFFSNVTWFHAIHVSGTNGTKRFDNPVLPFNDGVYFASTEKSNIIRGWIFGTTLDSKTPSLLIVNNATNVVIKVCEFQFCNDPFLGVYYHKNNKSWMESEFRVYSSANNCTFEYVSQPFLMDLEGKQGNFKNLREFVFKNIDGYFKIYSKHTPINLVRDLPQGFSALEPLVDLPIGINITRFQTLLALHRSYLTPGDSSSGWTAGAAAYYVGYLQPRTFLLKYNENGTITDAVDCALDPLSETKCTLKSFTVEKGIYQTSNFRVQPTESIVRFPNITNLCPFGEVFNATRFASVYAWNRKRISNCVADYSVLYNSASFSTFKCYGVSPTKLNDLCFTNVYADSFVIRGDEVRQIAPGQTGKIADYNYKLPDDFTGCVIAWNSNNLDSKVGGNYNYLYRLFRKSNLKPFERDISTEIYQAGSTPCNGVEGFNCYFPLQSYGFQPTNGVGYQPYRVVVLSFELLHAPATVCGPKKSTNLVKNKCVNFNFNGLTGTGVLTESNKKFLPFQQFGRDIADTTDAVRDPQTLEILDITPCSFGGVSVITPGTNTSNQVAVLYQDVNCTEVPVAIHADQLTPTWRVYSTGSNVFQTRAGCLIGAEHVNNSYECDIPIGAGICASYQTQTNSPSGAGSVASQSIIAYTMSLGAENSVAYSNNSIAIPTNFTISVTTEILPVSMTKTSVDCTMYICGDSTECSNLLLQYGSFCTQLNRALTGIAVEQDKNTQEVFAQVKQIYKTPPIKDFGGFNFSQILPDPSKPSKRSFIEDLLFNKVTLADAGFIKQYGDCLGDIAARDLICAQKFNGLTVLPPLLTDEMIAQYTSALLAGTITSGWTFGAGAALQIPFAMQMAYRFNGIGVTQNVLYENQKLIANQFNSAIGKIQDSLSSTASALGKLQDVVNQNAQALNTLVKQLSSNFGAISSVLNDILSRLDPPEAEVQIDRLITGRLQSLQTYVTQQLIRAAEIRASANLAATKMSECVLGQSKRVDFCGKGYHLMSFPQSAPHGVVFLHVTYVPAQEKNFTTAPAICHDGKAHFPREGVFVSNGTHWFVTQRNFYEPQIITTDNTFVSGNCDVVIGIVNNTVYDPLQPELDSFKEELDKYFKNHTSPDVDLGDISGINASVVNIQKEIDRLNEVAKNLNESLIDLQELGKYEQYIKGSGRENLYFQGGGGSGYIPEAPRDGQAYVRKDGEWVLLSTFLGHHHHHHHH

SEQ ID NO: 5456 - protein, 1281 aa, Artificial Sequence
  Description of Artificial Sequence: Synthetic polypeptide
MGILPSPGMPALLSLVSLLSVLLMGCVAETGTQCVNLTTRTQLPPAYTNSFTRGVYYPDKVFRSSVLHSTQDLFLPFFSNVTWFHAIHVSGTNGTKRFDNPVLPFNDGVYFASTEKSNIIRGWIFGTTLDSKTQSLLIVNNATNVVIKVCEFQFCNDPFLGVYYHKNNKSWMESEFRVYSSANNCTFEYVSQPFLMDLEGKQGNFKNLREFVFKNIDGYFKIYSKHTPINLVRDLPQGFSALEPLVDLPIGINITRFQTLLALHRSYLTPGDSSSGWTAGAAAYYVGYLQPRTFLLKYNENGTITDAVDCALDPLSETKCTLKSFTVEKGIYQTSNFRVQPTESIVRFPNITNLCPFGEVFNATRFASVYAWNRKRISNCVADYSVLYNSASFSTFKCYGVSPTKLNDLCFTNVYADSFVIRGDEVRQIAPGQTGKIADYNYKLPDDFTGCVIAWNSNNLDSKVGGNYNYLYRLFRKSNLKPFERDISTEIYQAGSTPCNGVEGFNCYFPLQSYGFQPTNGVGYQPYRVVVLSFELLRAPATVCGPKKSTNLVKNKCVNFNFNGLTGTGVLTESNKKFLPFQQFGRDIADTTDAVRDPQTLEILDITPCSFGGVSVITPGTNTSNQVAVLYQDVNCTEVPVAIHADQLTPTWRVYSTGSNVFQTRAGCLIGAEHVNNSYECDIPIGAGICASYQTQTNSPSGAGSVASQSIIAYTMSLGAENSVAYSNNSIAIPTNFTISVTTEILPVSMTKTSVDCTMYICGDSTECSNLLLQYGSFCTQLNRALTGIAVEQDKNTQEVFAQVKQIYKTPPIKDFGGFNFSQILPDPSKPSKRSFIEDLLFNKVTLADAGFIKQYGDCLGDIAARDLICAQKFNGLTVLPPLLTDEMIAQYTSALLAGTITSGWTFGAGAALQIPFAMQMAYRFNGIGVTQNVLYENQKLIANQFNSAIGKIQDSLSSTASALGKLQDVVNQNAQALNTLVKQLSSNFGAISSVLNDILSRLDPPEAEVQIDRLITGRLQSLQTYVTQQLIRAAEIRASANLAATKMSECVLGQSKRVDFCGKGYHLMSFPQSAPHGVVFLHVTYVPAQEKNFTTAPAICHDGKAHFPREGVFVSNGTHWFVTQRNFYEPQIITTDNTFVSGNCDVVIGIVNNTVYDPLQPELDSFKEELDKYFKNHTSPDVDLGDISGINASVVNIQKEIDRLNEVAKNLNESLIDLQELGKYEQYIKGSGRENLYFQGGGGSGYIPEAPRDGQAYVRKDGEWVLLSTFLGHHHHHHHH

SEQ ID NO: 5457 - protein, 1281 aa, Artificial Sequence
  Description of Artificial Sequence: Synthetic polypeptide
MGILPSPGMPALLSLVSLLSVLLMGCVAETGTQCVNLTTRTQLPPAYTNSFTRGVYYPDKVFRSSVLHSTQDLFLPFFSNVTWFHAIHVSGTNGTKRFDNPVLPFNDGVYFASTEKSNIIRGWIFGTTLDSKTQSLLIVNNATNVVIKVCEFQFCNDPFLGVYYHKNNKSWMESEFRVYSSANNCTFEYVSQPFLMDLEGKQGNFKNLREFVFKNIDGYFKIYSKHTPINLVRDLPQGFSALEPLVDLPIGINITRFQTLLALHRSYLTPGDSSSGWTAGAAAYYVGYLQPRTFLLKYNENGTITDAVDCALDPLSETKCTLKSFTVEKGIYQTSNFRVQPTESIVRFPNITNLCPFGEVFNATRFASVYAWNRKRISNCVADYSVLYNSASFSTFKCYGVSPTKLNDLCFTNVYADSFVIRGDEVRQIAPGQTGQIADYNYKLPDDFTGCVIAWNSNNLDSKVGGNYNYLYRLFRKSNLKPFERDISTEIYQAGSTPCNGVEGFNCYFPLQSYGFQPTNGVGYQPYRVVVLSFELLHAPATVCGPKKSTNLVKNKCVNFNFNGLTGTGVLTESNKKFLPFQQFGRDIADTTDAVRDPQTLEILDITPCSFGGVSVITPGTNTSNQVAVLYQDVNCTEVPVAIHADQLTPTWRVYSTGSNVFQTRAGCLIGAEHVNNSYECDIPIGAGICASYQTQTNSPSGAGSVASQSIIAYTMSLGAENSVAYSNNSIAIPTNFTISVTTEILPVSMTKTSVDCTMYICGDSTECSNLLLQYGSFCTQLNRALTGIAVEQDKNTQEVFAQVKQIYKTPPIKDFGGFNFSQILPDPSKPSKRSFIEDLLFNKVTLADAGFIKQYGDCLGDIAARDLICAQKFNGLTVLPPLLTDEMIAQYTSALLAGTITSGWTFGAGAALQIPFAMQMAYRFNGIGVTQNVLYENQKLIANQFNSAIGKIQDSLSSTASALGKLQDVVNQNAQALNTLVKQLSSNFGAISSVLNDILSRLDPPEAEVQIDRLITGRLQSLQTYVTQQLIRAAEIRASANLAATKMSECVLGQSKRVDFCGKGYHLMSFPQSAPHGVVFLHVTYVPAQEKNFTTAPAICHDGKAHFPREGVFVSNGTHWFVTQRNFYEPQIITTDNTFVSGNCDVVIGIVNNTVYDPLQPELDSFKEELDKYFKNHTSPDVDLGDISGINASVVNIQKEIDRLNEVAKNLNESLIDLQELGKYEQYIKGSGRENLYFQGGGGSGYIPEAPRDGQAYVRKDGEWVLLSTFLGHHHHHHHH

SEQ ID NO: 5458 - protein, 1281 aa, Artificial Sequence
  Description of Artificial Sequence: Synthetic polypeptide
MGILPSPGMPALLSLVSLLSVLLMGCVAETGTQCVNLTTRTQLPPAYTNSFTRGVYYPDKVFRSSVLHSTQDLFLPFFSNVTWFHAIHVSGTNGTKRFDNPVLPFNDGVYFASTEKSNIIRGWIFGTTLDSKTQSLLIVNNATNVVIKVCEFQFCNDPFLGVYYHKNNKSWMESEFRVYSSANNCTFEYVSQPFLMDLEGKQGNFKNLREFVFKNIDGYFKIYSKHTPINLVRDLPQGFSALEPLVDLPIGINITRFQTLLALHRSYLTPGDSSSGWTAGAAAYYVGYLQPRTFLLKYNENGTITDAVDCALDPLSETKCTLKSFTVEKGIYQTSNFRVQPTESIVRFPNITNLCPFGEVFNATRFASVYAWNRKRISNCVADYSVLYNSASFSTFKCYGVSPTKLNDLCFTNVYADSFVIRGDEVRQIAPGQTGKIADYNYKLPDDFTGCVIAWNSNNLDSKIGGNYNYLYRLFRKSNLKPFERDISTEIYQAGSTPCNGVEGFNCYFPLQSYGFQPTNGVGYQPYRVVVLSFELLHAPATVCGPKKSTNLVKNKCVNFNFNGLTGTGVLTESNKKFLPFQQFGRDIADTTDAVRDPQTLEILDITPCSFGGVSVITPGTNTSNQVAVLYQDVNCTEVPVAIHADQLTPTWRVYSTGSNVFQTRAGCLIGAEHVNNSYECDIPIGAGICASYQTQTNSPSGAGSVASQSIIAYTMSLGAENSVAYSNNSIAIPTNFTISVTTEILPVSMTKTSVDCTMYICGDSTECSNLLLQYGSFCTQLNRALTGIAVEQDKNTQEVFAQVKQIYKTPPIKDFGGFNFSQILPDPSKPSKRSFIEDLLFNKVTLADAGFIKQYGDCLGDIAARDLICAQKFNGLTVLPPLLTDEMIAQYTSALLAGTITSGWTFGAGAALQIPFAMQMAYRFNGIGVTQNVLYENQKLIANQFNSAIGKIQDSLSSTASALGKLQDVVNQNAQALNTLVKQLSSNFGAISSVLNDILSRLDPPEAEVQIDRLITGRLQSLQTYVTQQLIRAAEIRASANLAATKMSECVLGQSKRVDFCGKGYHLMSFPQSAPHGVVFLHVTYVPAQEKNFTTAPAICHDGKAHFPREGVFVSNGTHWFVTQRNFYEPQIITTDNTFVSGNCDVVIGIVNNTVYDPLQPELDSFKEELDKYFKNHTSPDVDLGDISGINASVVNIQKEIDRLNEVAKNLNESLIDLQELGKYEQYIKGSGRENLYFQGGGGSGYIPEAPRDGQAYVRKDGEWVLLSTFLGHHHHHHHH

SEQ ID NO: 5459 - protein, 1281 aa, Artificial Sequence
  Description of Artificial Sequence: Synthetic polypeptide
MGILPSPGMPALLSLVSLLSVLLMGCVAETGTQCVNLTTRTQLPPAYTNSFTRGVYYPDKVFRSSVLHSTQDLFLPFFSNVTWFHAIHVSGTNGTKRFDNPVLPFNDGVYFASTEKSNIIRGWIFGTTLDSKTQSLLIVNNATNVVIKVCEFQFCNDPFLGVYYHKNNKSWMESEFRVYSSANNCTFEYVSQPFLMDLEGKQGNFKNLREFVFKNIDGYFKIYSKHTPINLVRDLPQGFSALEPLVDLPIGINITRFQTLLALHRSYLTPGDSSSGWTAGAAAYYVGYLQPRTFLLKYNENGTITDAVDCALDPLSETKCTLKSFTVEKGIYQTSNFRVQPTESIVRFPNITNLCPFGEVFNATRFASVYAWNRKRISNCVADYSVLYNSASFSTFKCYGVSPTKLNDLCFTNVYADRFVIRGDEVRQIAPGQTGKIADYNYKLPDDFTGCVIAWNSNNLDSKVGGNYNYLYRLFRKSNLKPFERDISTEIYQAGSTPCNGVEGFNCYFPLQSYGFQPTNGVGYQPYRVVVLSFELLHAPATVCGPKKSTNLVKNKCVNFNFNGLTGTGVLTESNKKFLPFQQFGRDIADTTDAVRDPQTLEILDITPCSFGGVSVITPGTNTSNQVAVLYQDVNCTEVPVAIHADQLTPTWRVYSTGSNVFQTRAGCLIGAEHVNNSYECDIPIGAGICASYQTQTNSPSGAGSVASQSIIAYTMSLGAENSVAYSNNSIAIPTNFTISVTTEILPVSMTKTSVDCTMYICGDSTECSNLLLQYGSFCTQLNRALTGIAVEQDKNTQEVFAQVKQIYKTPPIKDFGGFNFSQILPDPSKPSKRSFIEDLLFNKVTLADAGFIKQYGDCLGDIAARDLICAQKFNGLTVLPPLLTDEMIAQYTSALLAGTITSGWTFGAGAALQIPFAMQMAYRFNGIGVTQNVLYENQKLIANQFNSAIGKIQDSLSSTASALGKLQDVVNQNAQALNTLVKQLSSNFGAISSVLNDILSRLDPPEAEVQIDRLITGRLQSLQTYVTQQLIRAAEIRASANLAATKMSECVLGQSKRVDFCGKGYHLMSFPQSAPHGVVFLHVTYVPAQEKNFTTAPAICHDGKAHFPREGVFVSNGTHWFVTQRNFYEPQIITTDNTFVSGNCDVVIGIVNNTVYDPLQPELDSFKEELDKYFKNHTSPDVDLGDISGINASVVNIQKEIDRLNEVAKNLNESLIDLQELGKYEQYIKGSGRENLYFQGGGGSGYIPEAPRDGQAYVRKDGEWVLLSTFLGHHHHHHHH

SEQ ID NO: 5460 - protein, 1281 aa, Artificial Sequence
  Description of Artificial Sequence: Synthetic polypeptide
MGILPSPGMPALLSLVSLLSVLLMGCVAETGTQCVNLTTRTQLPPAYTNSFTRGVYYPDKVFRSSVLHSTQDLFLPFFSNVTWFHAIHVSGTNGTKRFDNPVLPFNDGVYFASTEKSNIIRGWIFGTTLDSKTQSLLIVNNATNVVIKVCEFQFCNDPFLGVYYHKNNKSWMESEFRVYSSANNCTFEYVSQPFLMDLEGKQGNFKNLREFVFKNIDGYFKIYSKHTPINLVRDLPQGFSALEPLVDLPIGINITRFQTLLALHRSYLTPGDSSSGWTAGAAAYYVGYLQPRTFLLKYNENGTITDAVDCALDPLSETKCTLKSFTVEKGIYQTSNFRVQPTESIVRFPNITNLCPFGEVFNATRFASVYAWNRKRISNCVADYSVLYNSASFSSFKCYGVSPTKLNDLCFTNVYADSFVIRGDEVRQIAPGQTGKIADYNYKLPDDFTGCVIAWNSNNLDSKVGGNYNYLYRLFRKSNLKPFERDISTEIYQAGSTPCNGVEGFNCYFPLQSYGFQPTNGVGYQPYRVVVLSFELLHAPATVCGPKKSTNLVKNKCVNFNFNGLTGTGVLTESNKKFLPFQQFGRDIADTTDAVRDPQTLEILDITPCSFGGVSVITPGTNTSNQVAVLYQDVNCTEVPVAIHADQLTPTWRVYSTGSNVFQTRAGCLIGAEHVNNSYECDIPIGAGICASYQTQTNSPSGAGSVASQSIIAYTMSLGAENSVAYSNNSIAIPTNFTISVTTEILPVSMTKTSVDCTMYICGDSTECSNLLLQYGSFCTQLNRALTGIAVEQDKNTQEVFAQVKQIYKTPPIKDFGGFNFSQILPDPSKPSKRSFIEDLLFNKVTLADAGFIKQYGDCLGDIAARDLICAQKFNGLTVLPPLLTDEMIAQYTSALLAGTITSGWTFGAGAALQIPFAMQMAYRFNGIGVTQNVLYENQKLIANQFNSAIGKIQDSLSSTASALGKLQDVVNQNAQALNTLVKQLSSNFGAISSVLNDILSRLDPPEAEVQIDRLITGRLQSLQTYVTQQLIRAAEIRASANLAATKMSECVLGQSKRVDFCGKGYHLMSFPQSAPHGVVFLHVTYVPAQEKNFTTAPAICHDGKAHFPREGVFVSNGTHWFVTQRNFYEPQIITTDNTFVSGNCDVVIGIVNNTVYDPLQPELDSFKEELDKYFKNHTSPDVDLGDISGINASVVNIQKEIDRLNEVAKNLNESLIDLQELGKYEQYIKGSGRENLYFQGGGGSGYIPEAPRDGQAYVRKDGEWVLLSTFLGHHHHHHHH

SEQ ID NO: 5461 - protein, 1281 aa, Artificial Sequence
  Description of Artificial Sequence: Synthetic polypeptide
MGILPSPGMPALLSLVSLLSVLLMGCVAETGTQCVNLTTRTQLPPAYTNSFTRGVYYPDKVFRSSVLHSTQDLFLPFFSNVTWFHAIHVSGTNGTKRFDNPVLPFNDGVYFASTEKSNIIRGWIFGTTLDSKTTSLLIVNNATNVVIKVCEFQFCNDPFLGVYYHKNNKSWMESEFRVYSSANNCTFEYVSQPFLMDLEGKQGNFKNLREFVFKNIDGYFKIYSKHTPINLVRDLPQGFSALEPLVDLPIGINITRFQTLLALHRSYLTPGDSSSGWTAGAAAYYVGYLQPRTFLLKYNENGTITDAVDCALDPLSETKCTLKSFTVEKGIYQTSNFRVQPTESIVRFPNITNLCPFGEVFNATRFASVYAWNRKRISNCVADYSVLYNSASFSTFKCYGVSPTKLNDLCFTNVYADSFVIRGDEVRQIAPGQTGKIADYNYKLPDDFTGCVIAWNSNNLDSKVGGNYNYLYRLFRKSNLKPFERDISTEIYQAGSTPCNGVEGFNCYFPLQSYGFQPTNGVGYQPYRVVVLSFELLHAPATVCGPKKSTNLVKNKCVNFNFNGLTGTGVLTESNKKFLPFQQFGRDIADTTDAVRDPQTLEILDITPCSFGGVSVITPGTNTSNQVAVLYQDVNCTEVPVAIHADQLTPTWRVYSTGSNVFQTRAGCLIGAEHVNNSYECDIPIGAGICASYQTQTNSPSGAGSVASQSIIAYTMSLGAENSVAYSNNSIAIPTNFTISVTTEILPVSMTKTSVDCTMYICGDSTECSNLLLQYGSFCTQLNRALTGIAVEQDKNTQEVFAQVKQIYKTPPIKDFGGFNFSQILPDPSKPSKRSFIEDLLFNKVTLADAGFIKQYGDCLGDIAARDLICAQKFNGLTVLPPLLTDEMIAQYTSALLAGTITSGWTFGAGAALQIPFAMQMAYRFNGIGVTQNVLYENQKLIANQFNSAIGKIQDSLSSTASALGKLQDVVNQNAQALNTLVKQLSSNFGAISSVLNDILSRLDPPEAEVQIDRLITGRLQSLQTYVTQQLIRAAEIRASANLAATKMSECVLGQSKRVDFCGKGYHLMSFPQSAPHGVVFLHVTYVPAQEKNFTTAPAICHDGKAHFPREGVFVSNGTHWFVTQRNFYEPQIITTDNTFVSGNCDVVIGIVNNTVYDPLQPELDSFKEELDKYFKNHTSPDVDLGDISGINASVVNIQKEIDRLNEVAKNLNESLIDLQELGKYEQYIKGSGRENLYFQGGGGSGYIPEAPRDGQAYVRKDGEWVLLSTFLGHHHHHHHH

SEQ ID NO: 5462 - protein, 1281 aa, Artificial Sequence
  Description of Artificial Sequence: Synthetic polypeptide
MGILPSPGMPALLSLVSLLSVLLMGCVAETGTQCVNLTTRTQLPPAYTNSFTRGVYYPDKVFRSSVLHSTQDLFLPFFSNVTWFHAIHVSGTNGTKRFDNPVLPFNDGVYFASTEKSNIIRGWIFGTTLDSKTQSLLIVNNATNVVIKVCEFQFCNDPFLGVYYHKNNKSWMESEFRVYSSANNCTFEYVSQPFLMDLEGKQGNFKNLREFVFKNIDGYFKIYSKHTPINLVRDLPQGFSALEPLVDLPIGINITRFQTLLALHRSYLTPGDSSSGWTAGAAAYYVGYLQPRTFLLKYNENGTITDAVDCALDPLSETKCTLKSFTVEKGIYQTSNFRVQPTESIVRFPNITNLCPFGEVFNATRFASVYAWNRKRISNCVADYSVLYNSASFSTFKCYGVSPTKLNDLCFTNVYADSFVIRGDEVRQIAPGQTGKIADYNYKLPDDFTGCVIAWNSNNLDSKVGGNYNYLYRLFRKSNLKPFERDISTEIYQAGSTPCNGVEGFNYYFPLQSYGFQPTNGVGYQPYRVVVLSFELLHAPATVCGPKKSTNLVKNKCVNFNFNGLTGTGVLTESNKKFLPFQQFGRDIADTTDAVRDPQTLEILDITPCSFGGVSVITPGTNTSNQVAVLYQDVNCTEVPVAIHADQLTPTWRVYSTGSNVFQTRAGCLIGAEHVNNSYECDIPIGAGICASYQTQTNSPSGAGSVASQSIIAYTMSLGAENSVAYSNNSIAIPTNFTISVTTEILPVSMTKTSVDCTMYICGDSTECSNLLLQYGSFCTQLNRALTGIAVEQDKNTQEVFAQVKQIYKTPPIKDFGGFNFSQILPDPSKPSKRSFIEDLLFNKVTLADAGFIKQYGDCLGDIAARDLICAQKFNGLTVLPPLLTDEMIAQYTSALLAGTITSGWTFGAGAALQIPFAMQMAYRFNGIGVTQNVLYENQKLIANQFNSAIGKIQDSLSSTASALGKLQDVVNQNAQALNTLVKQLSSNFGAISSVLNDILSRLDPPEAEVQIDRLITGRLQSLQTYVTQQLIRAAEIRASANLAATKMSECVLGQSKRVDFCGKGYHLMSFPQSAPHGVVFLHVTYVPAQEKNFTTAPAICHDGKAHFPREGVFVSNGTHWFVTQRNFYEPQIITTDNTFVSGNCDVVIGIVNNTVYDPLQPELDSFKEELDKYFKNHTSPDVDLGDISGINASVVNIQKEIDRLNEVAKNLNESLIDLQELGKYEQYIKGSGRENLYFQGGGGSGYIPEAPRDGQAYVRKDGEWVLLSTFLGHHHHHHHH

SEQ ID NO: 5463 - protein, 1281 aa, Artificial Sequence
  Description of Artificial Sequence: Synthetic polypeptide
MGILPSPGMPALLSLVSLLSVLLMGCVAETGTQCVNLTTRTQLPPAYTNSFTRGVYYPDKVFRSSVLHSTQDLFLPFFSNVTWFHAIHVSGTNGTKRFDNPVLPFNDGVYFASTEKSNIIRGWIFGTTLDSKTQSLLIVNNATNVVIKVCEFQFCNDPFLGVYYHKNNKSWMESEFRVYSSANNCTFEYVSQPFLMDLEGKQGNFKNLREFVFKNIDGYFKIYSKHTPINLVRDLPQGFSALEPLVDLPIGINITRFQTLLALHRSYLTPGDSSSGWTAGAAAYYVGYLQPRTFLLKYNENGTITDAVDCALDPLSETKCTLKSFTVEKGIYQTSNFRVQPTESIVRFPNITNLCPFGEVFNATRFASVYAWNRKRISNCVADYSVLYNSASFKTFKCYGVSPTKLNDLCFTNVYADSFVIRGDEVRQIAPGQTGKIADYNYKLPDDFTGCVIAWNSNNLDSKVGGNYNYLYRLFRKSNLKPFERDISTEIYQAGSTPCNGVEGFNCYFPLQSYGFQPTNGVGYQPYRVVVLSFELLHAPATVCGPKKSTNLVKNKCVNFNFNGLTGTGVLTESNKKFLPFQQFGRDIADTTDAVRDPQTLEILDITPCSFGGVSVITPGTNTSNQVAVLYQDVNCTEVPVAIHADQLTPTWRVYSTGSNVFQTRAGCLIGAEHVNNSYECDIPIGAGICASYQTQTNSPSGAGSVASQSIIAYTMSLGAENSVAYSNNSIAIPTNFTISVTTEILPVSMTKTSVDCTMYICGDSTECSNLLLQYGSFCTQLNRALTGIAVEQDKNTQEVFAQVKQIYKTPPIKDFGGFNFSQILPDPSKPSKRSFIEDLLFNKVTLADAGFIKQYGDCLGDIAARDLICAQKFNGLTVLPPLLTDEMIAQYTSALLAGTITSGWTFGAGAALQIPFAMQMAYRFNGIGVTQNVLYENQKLIANQFNSAIGKIQDSLSSTASALGKLQDVVNQNAQALNTLVKQLSSNFGAISSVLNDILSRLDPPEAEVQIDRLITGRLQSLQTYVTQQLIRAAEIRASANLAATKMSECVLGQSKRVDFCGKGYHLMSFPQSAPHGVVFLHVTYVPAQEKNFTTAPAICHDGKAHFPREGVFVSNGTHWFVTQRNFYEPQIITTDNTFVSGNCDVVIGIVNNTVYDPLQPELDSFKEELDKYFKNHTSPDVDLGDISGINASVVNIQKEIDRLNEVAKNLNESLIDLQELGKYEQYIKGSGRENLYFQGGGGSGYIPEAPRDGQAYVRKDGEWVLLSTFLGHHHHHHHH

SEQ ID NO: 5464 - protein, 1281 aa, Artificial Sequence
  Description of Artificial Sequence: Synthetic polypeptide
MGILPSPGMPALLSLVSLLSVLLMGCVAETGTQCVNLTTRTQLPPAYTNSFTRGVYYPDKVFRSSVLHSTQDLFLPFFSNVTWFHAIHVSGTNGTKRFDNPVLPFNDGVYFASTEKSNIIRGWIFGTTLDSKTQSLLIVNNATNVVIKVCEFQFCNDPFLGVYYHKNNKSWMESEFRVYSSANNCTFEYVSQPFLMDLEGKQGNFKNLREFVFKNIDGYFKIYSKHTPINLVRDLPQGFSALEPLVDLPIGINITRFQTLLALHRSYLTPGDSSSGWTAGAAAYYVGYLQPRTFLLKYNENGTITDAVDCALDPLSETKCTLKSFTVEKGIYQTSNFRVQPTESIVRFPNITNLCPFGEVFNATRFASVYAWNRKRISNCVADYSVLYNSASFSTFKCYGVSPTKLNDLCFTNVYADSFVIRGDEVRQIAPGQTGKIADYNYKLPDDFTGCVIAWNSNNLDSKVGGNYNYLYRLFRKSNLKPYERDISTEIYQAGSTPCNGVEGFNCYFPLQSYGFQPTNGVGYQPYRVVVLSFELLHAPATVCGPKKSTNLVKNKCVNFNFNGLTGTGVLTESNKKFLPFQQFGRDIADTTDAVRDPQTLEILDITPCSFGGVSVITPGTNTSNQVAVLYQDVNCTEVPVAIHADQLTPTWRVYSTGSNVFQTRAGCLIGAEHVNNSYECDIPIGAGICASYQTQTNSPSGAGSVASQSIIAYTMSLGAENSVAYSNNSIAIPTNFTISVTTEILPVSMTKTSVDCTMYICGDSTECSNLLLQYGSFCTQLNRALTGIAVEQDKNTQEVFAQVKQIYKTPPIKDFGGFNFSQILPDPSKPSKRSFIEDLLFNKVTLADAGFIKQYGDCLGDIAARDLICAQKFNGLTVLPPLLTDEMIAQYTSALLAGTITSGWTFGAGAALQIPFAMQMAYRFNGIGVTQNVLYENQKLIANQFNSAIGKIQDSLSSTASALGKLQDVVNQNAQALNTLVKQLSSNFGAISSVLNDILSRLDPPEAEVQIDRLITGRLQSLQTYVTQQLIRAAEIRASANLAATKMSECVLGQSKRVDFCGKGYHLMSFPQSAPHGVVFLHVTYVPAQEKNFTTAPAICHDGKAHFPREGVFVSNGTHWFVTQRNFYEPQIITTDNTFVSGNCDVVIGIVNNTVYDPLQPELDSFKEELDKYFKNHTSPDVDLGDISGINASVVNIQKEIDRLNEVAKNLNESLIDLQELGKYEQYIKGSGRENLYFQGGGGSGYIPEAPRDGQAYVRKDGEWVLLSTFLGHHHHHHHH

SEQ ID NO: 5465 - protein, 1281 aa, Artificial Sequence
  Description of Artificial Sequence: Synthetic polypeptide
MGILPSPGMPALLSLVSLLSVLLMGCVAETGTQCVNLTTRTQLPPAYTNSFTRGVYYPDKVFRSSVLHSTQDLFLPFFSNVTWFHAIHVSGTNGTKRFDNPVLPFNDGVYFASTEKSNIIRGWIFGTTLDSKTQSLLIVNNATNVVIKVCEFQFCNDPFLGVYYHKNNKSWMESEFRVYSSANNCTFEYVSQPFLMDLEGKQGNFKNLREFVFKNIDGYFKIYSKHTPINLVRDLPQGFSALEPLVDLPIGINITRFQTLLALHRSYLTPGDSSSGWTAGAAAYYVGYLQPRTFLLKYNENGTITDAVDCALDPLSETKCTLKSFTVEKGIYQTSNFRVQPTESIVRFPNITNLCPFGEVFNATRFASVYAWNRKRISNCVADYSVLYNSASFSTFKCYGVSPTKLNDLCFTNVYADSFVIRGDEVRQIAPGQTGKIADYNYKLPDDFTGCVIAWNSNNLDSKVGGNYNYLYRLFRKSNLKPFERDISTEIYQAGSTPCNGVEGFNCYFPLQSYGFQPTNGVGYQPYRVVVLSFELLHAPATVCGPKKSTNLVKNKCVNFNFNGLTGTGVLTESNKKFLPFQQFGRDIADTTDAVRDPQTLEILDIIPCSFGGVSVITPGTNTSNQVAVLYQDVNCTEVPVAIHADQLTPTWRVYSTGSNVFQTRAGCLIGAEHVNNSYECDIPIGAGICASYQTQTNSPSGAGSVASQSIIAYTMSLGAENSVAYSNNSIAIPTNFTISVTTEILPVSMTKTSVDCTMYICGDSTECSNLLLQYGSFCTQLNRALTGIAVEQDKNTQEVFAQVKQIYKTPPIKDFGGFNFSQILPDPSKPSKRSFIEDLLFNKVTLADAGFIKQYGDCLGDIAARDLICAQKFNGLTVLPPLLTDEMIAQYTSALLAGTITSGWTFGAGAALQIPFAMQMAYRFNGIGVTQNVLYENQKLIANQFNSAIGKIQDSLSSTASALGKLQDVVNQNAQALNTLVKQLSSNFGAISSVLNDILSRLDPPEAEVQIDRLITGRLQSLQTYVTQQLIRAAEIRASANLAATKMSECVLGQSKRVDFCGKGYHLMSFPQSAPHGVVFLHVTYVPAQEKNFTTAPAICHDGKAHFPREGVFVSNGTHWFVTQRNFYEPQIITTDNTFVSGNCDVVIGIVNNTVYDPLQPELDSFKEELDKYFKNHTSPDVDLGDISGINASVVNIQKEIDRLNEVAKNLNESLIDLQELGKYEQYIKGSGRENLYFQGGGGSGYIPEAPRDGQAYVRKDGEWVLLSTFLGHHHHHHHH

SEQ ID NO: 5466 - protein, 1281 aa, Artificial Sequence
  Description of Artificial Sequence: Synthetic polypeptide
MGILPSPGMPALLSLVSLLSVLLMGCVAETGTQCVNLTTRTQLPPAYTNSFTRGVYYPDKVFRSSVLHSTQDLFLPFFSNVTWFHAIHVSGTNGTKRFDNPVLPFNDGVYFASTEKSNIIRGWIFGTTLDSKTQSLLIVNNATNVVIKVCEFQFCNDPFLGVYYHKNNKSWMESEFRVYSSANNCTFEYVSQPFLMDLEGKQGNFKNLREFVFKNIDGYFKIYSKHTPINLVRDLPQGFSALEPLVDLPIGINITRFQTLLALHRSYLTPGDSSSGWTAGAAAYYVGYLQPRTFLLKYNENGTITDAVDCALDPLSETKCTLKSFTVEKGIYQTSNFRVQPTESIVRFPNITNLCPFGEVFNATRFASVYAWNRKRISNCVADYSVLYNSASFSTFKCYGVSPTKLNDLCFTNVYADSFVIRGDEVRQIAPGQTGKIADYNYKLPDDFTGCVIAWNSNNLDSKVGGNYNYLYRLFRKSNLKPFENDISTEIYQAGSTPCNGVEGFNCYFPLQSYGFQPTNGVGYQPYRVVVLSFELLHAPATVCGPKKSTNLVKNKCVNFNFNGLTGTGVLTESNKKFLPFQQFGRDIADTTDAVRDPQTLEILDITPCSFGGVSVITPGTNTSNQVAVLYQDVNCTEVPVAIHADQLTPTWRVYSTGSNVFQTRAGCLIGAEHVNNSYECDIPIGAGICASYQTQTNSPSGAGSVASQSIIAYTMSLGAENSVAYSNNSIAIPTNFTISVTTEILPVSMTKTSVDCTMYICGDSTECSNLLLQYGSFCTQLNRALTGIAVEQDKNTQEVFAQVKQIYKTPPIKDFGGFNFSQILPDPSKPSKRSFIEDLLFNKVTLADAGFIKQYGDCLGDIAARDLICAQKFNGLTVLPPLLTDEMIAQYTSALLAGTITSGWTFGAGAALQIPFAMQMAYRFNGIGVTQNVLYENQKLIANQFNSAIGKIQDSLSSTASALGKLQDVVNQNAQALNTLVKQLSSNFGAISSVLNDILSRLDPPEAEVQIDRLITGRLQSLQTYVTQQLIRAAEIRASANLAATKMSECVLGQSKRVDFCGKGYHLMSFPQSAPHGVVFLHVTYVPAQEKNFTTAPAICHDGKAHFPREGVFVSNGTHWFVTQRNFYEPQIITTDNTFVSGNCDVVIGIVNNTVYDPLQPELDSFKEELDKYFKNHTSPDVDLGDISGINASVVNIQKEIDRLNEVAKNLNESLIDLQELGKYEQYIKGSGRENLYFQGGGGSGYIPEAPRDGQAYVRKDGEWVLLSTFLGHHHHHHHH

SEQ ID NO: 5467 - protein, 1281 aa, Artificial Sequence
  Description of Artificial Sequence: Synthetic polypeptide
MGILPSPGMPALLSLVSLLSVLLMGCVAETGTQCVNLTTRTQLPPAYTNSFTRGVYYPDKVFRSSVLHSTQDLFLPFFSNVTWFHAIHVSGTNGTKRFDNPVLPFNDGVYFASTEKSNIIRGWIFGTTLDSKTQSLLIVNNATNVVIKVCEFQFCNDPFLGVYYHKNNKSWMESEFRVYSSANNCTFEYVSQPFLMDLEGKQGNFKNLREFVFKNIDGYFKIYSKHTPINLVRDLPQGFSALEPLVDLPIGINITRFQTLLALHRSYLTPGDSSSGWTAGAAAYYVGYLQPRTFLLKYNENGTITDAVDCALDPLSETKCTLKSFTVEKGIYQTSNFRVQPTESIVRFPNITNLCPFGEVFNATRFASVYAWNRKRISNCVADYSVLYNSASFSTFKCYGVSPTKLNDLCFTNVYADSFVIRGDEVRQIAPGQTGDIADYNYKLPDDFTGCVIAWNSNNLDSKVGGNYNYLYRLFRKSNLKPFERDISTEIYQAGSTPCNGVEGFNCYFPLQSYGFQPTNGVGYQPYRVVVLSFELLHAPATVCGPKKSTNLVKNKCVNFNFNGLTGTGVLTESNKKFLPFQQFGRDIADTTDAVRDPQTLEILDITPCSFGGVSVITPGTNTSNQVAVLYQDVNCTEVPVAIHADQLTPTWRVYSTGSNVFQTRAGCLIGAEHVNNSYECDIPIGAGICASYQTQTNSPSGAGSVASQSIIAYTMSLGAENSVAYSNNSIAIPTNFTISVTTEILPVSMTKTSVDCTMYICGDSTECSNLLLQYGSFCTQLNRALTGIAVEQDKNTQEVFAQVKQIYKTPPIKDFGGFNFSQILPDPSKPSKRSFIEDLLFNKVTLADAGFIKQYGDCLGDIAARDLICAQKFNGLTVLPPLLTDEMIAQYTSALLAGTITSGWTFGAGAALQIPFAMQMAYRFNGIGVTQNVLYENQKLIANQFNSAIGKIQDSLSSTASALGKLQDVVNQNAQALNTLVKQLSSNFGAISSVLNDILSRLDPPEAEVQIDRLITGRLQSLQTYVTQQLIRAAEIRASANLAATKMSECVLGQSKRVDFCGKGYHLMSFPQSAPHGVVFLHVTYVPAQEKNFTTAPAICHDGKAHFPREGVFVSNGTHWFVTQRNFYEPQIITTDNTFVSGNCDVVIGIVNNTVYDPLQPELDSFKEELDKYFKNHTSPDVDLGDISGINASVVNIQKEIDRLNEVAKNLNESLIDLQELGKYEQYIKGSGRENLYFQGGGGSGYIPEAPRDGQAYVRKDGEWVLLSTFLGHHHHHHHH

SEQ ID NO: 5468 - protein, 1281 aa, Artificial Sequence
  Description of Artificial Sequence: Synthetic polypeptide
MGILPSPGMPALLSLVSLLSVLLMGCVAETGTQCVNLTTRTQLPPAYTNSFTRGVYYPDKVFRSSVLHSTQDLFLPFFSNVTWFHAIHVSGTNGTKRFDNPVLPFNDGVYFASTEKSNIIRGWIFGTTLDSKTQSLLIVNNATNVVIKVCEFQFCNDPFLGVYYHKNNKSWMESEFRVYSSANNCTFEYVSQPFLMDLEGKQGNFKNLREFVFKNIDGYFKIYSKHTPINLVRDLPQGFSALEPLVDLPIGINITRFQTLLALHRSYLTPGDSSSGWTAGAAAYYVGYLQPRTFLLKYNENGTITDAVDCALDPLSETKCTLKSFTVEKGIYQTSNFRVQPTESIVRFPNITNLCPFGEVFNATRFASVYAWNRKRISNCVADYSVLYNSASFSTFKCYGVSPTKLNDLCFTNVYADSFVIRGDEVRQIAPGQTGKIADYNYKLPDDFTGCVIAWNSNNLDSKVGGNYNYLYRLFRKSNLKPFERDISTEIYQAGSTPCNGVEGFNCYFPLQSYGFQPTNGVGYQPYRVVVLVFELLHAPATVCGPKKSTNLVKNKCVNFNFNGLTGTGVLTESNKKFLPFQQFGRDIADTTDAVRDPQTLEILDITPCSFGGVSVITPGTNTSNQVAVLYQDVNCTEVPVAIHADQLTPTWRVYSTGSNVFQTRAGCLIGAEHVNNSYECDIPIGAGICASYQTQTNSPSGAGSVASQSIIAYTMSLGAENSVAYSNNSIAIPTNFTISVTTEILPVSMTKTSVDCTMYICGDSTECSNLLLQYGSFCTQLNRALTGIAVEQDKNTQEVFAQVKQIYKTPPIKDFGGFNFSQILPDPSKPSKRSFIEDLLFNKVTLADAGFIKQYGDCLGDIAARDLICAQKFNGLTVLPPLLTDEMIAQYTSALLAGTITSGWTFGAGAALQIPFAMQMAYRFNGIGVTQNVLYENQKLIANQFNSAIGKIQDSLSSTASALGKLQDVVNQNAQALNTLVKQLSSNFGAISSVLNDILSRLDPPEAEVQIDRLITGRLQSLQTYVTQQLIRAAEIRASANLAATKMSECVLGQSKRVDFCGKGYHLMSFPQSAPHGVVFLHVTYVPAQEKNFTTAPAICHDGKAHFPREGVFVSNGTHWFVTQRNFYEPQIITTDNTFVSGNCDVVIGIVNNTVYDPLQPELDSFKEELDKYFKNHTSPDVDLGDISGINASVVNIQKEIDRLNEVAKNLNESLIDLQELGKYEQYIKGSGRENLYFQGGGGSGYIPEAPRDGQAYVRKDGEWVLLSTFLGHHHHHHHH

SEQ ID NO: 5469 - protein, 1281 aa, Artificial Sequence
  Description of Artificial Sequence: Synthetic polypeptide
MGILPSPGMPALLSLVSLLSVLLMGCVAETGTQCVNLTTRTQLPPAYTNSFTRGVYYPDKVFRSSVLHSTQDLFLPFFSNVTWFHAIHVSGTNGTKRFDNPVLPFNDGVYFASTEKSNIIRGWIFGTTLDSKTQSLLIVNNATNVVIKVCEFQFCNDPFLGVYYHKNNKSWMESEFRVYSSANNCTFEYVSQPFLMDLEGKQGNFKNLREFVFKNIDGYFKIYSKHTPINLVRDLPQGFSALEPLVDLPIGINITRFQTLLALHRSYLTPGDSSSGWTAGAAAYYVGYLQPRTFLLKYNENGTITDAVDCALDPLSETKCTLKSFTVEKGIYQTSNFRVQPTESIVRFPNITNLCPFGEVFNATRFASVYAWNRKRISNCVADYSVLYNSASFSTFKCYGVSPTKLNDLCFVNVYADSFVIRGDEVRQIAPGQTGKIADYNYKLPDDFTGCVIAWNSNNLDSKVGGNYNYLYRLFRKSNLKPFERDISTEIYQAGSTPCNGVEGFNCYFPLQSYGFQPTNGVGYQPYRVVVLSFELLHAPATVCGPKKSTNLVKNKCVNFNFNGLTGTGVLTESNKKFLPFQQFGRDIADTTDAVRDPQTLEILDITPCSFGGVSVITPGTNTSNQVAVLYQDVNCTEVPVAIHADQLTPTWRVYSTGSNVFQTRAGCLIGAEHVNNSYECDIPIGAGICASYQTQTNSPSGAGSVASQSIIAYTMSLGAENSVAYSNNSIAIPTNFTISVTTEILPVSMTKTSVDCTMYICGDSTECSNLLLQYGSFCTQLNRALTGIAVEQDKNTQEVFAQVKQIYKTPPIKDFGGFNFSQILPDPSKPSKRSFIEDLLFNKVTLADAGFIKQYGDCLGDIAARDLICAQKFNGLTVLPPLLTDEMIAQYTSALLAGTITSGWTFGAGAALQIPFAMQMAYRFNGIGVTQNVLYENQKLIANQFNSAIGKIQDSLSSTASALGKLQDVVNQNAQALNTLVKQLSSNFGAISSVLNDILSRLDPPEAEVQIDRLITGRLQSLQTYVTQQLIRAAEIRASANLAATKMSECVLGQSKRVDFCGKGYHLMSFPQSAPHGVVFLHVTYVPAQEKNFTTAPAICHDGKAHFPREGVFVSNGTHWFVTQRNFYEPQIITTDNTFVSGNCDVVIGIVNNTVYDPLQPELDSFKEELDKYFKNHTSPDVDLGDISGINASVVNIQKEIDRLNEVAKNLNESLIDLQELGKYEQYIKGSGRENLYFQGGGGSGYIPEAPRDGQAYVRKDGEWVLLSTFLGHHHHHHHH

SEQ ID NO: 5470 - protein, 1281 aa, Artificial Sequence
  Description of Artificial Sequence: Synthetic polypeptide
MGILPSPGMPALLSLVSLLSVLLMGCVAETGTQCVNLTTRTQLPPAYTNSFTRGVYYPDKVFRSSVLHSTQDLFLPFFSNVTWFHAIHVSGTNGTKRFDNPVLPFNDGVYFASTEKSNIIRGWIFGTTLDSKTQSLLIVNNATNVVIKVCEFQFCNDPFLGVYYHKNNKSWMESEFRVYSSANNCTFEYVSQPFLMDLEGKQGNFKNLREFVFKNIDGYFKIYSKHTPINLVRDLPQGFSALEPLVDLPIGINITRFQTLLALHRSYLTPGDSSSGWTAGAAAYYVGYLQPRTFLLKYNENGTITDAVDCALDPLSETKCTLKSFTVEKGIYQTSNFRVQPTESIVRFPNITNLCPFGEVFNATRFASVYAWNRKRISNCVADYSGLYNSASFSTFKCYGVSPTKLNDLCFTNVYADSFVIRGDEVRQIAPGQTGKIADYNYKLPDDFTGCVIAWNSNNLDSKVGGNYNYLYRLFRKSNLKPFERDISTEIYQAGSTPCNGVEGFNCYFPLQSYGFQPTNGVGYQPYRVVVLSFELLHAPATVCGPKKSTNLVKNKCVNFNFNGLTGTGVLTESNKKFLPFQQFGRDIADTTDAVRDPQTLEILDITPCSFGGVSVITPGTNTSNQVAVLYQDVNCTEVPVAIHADQLTPTWRVYSTGSNVFQTRAGCLIGAEHVNNSYECDIPIGAGICASYQTQTNSPSGAGSVASQSIIAYTMSLGAENSVAYSNNSIAIPTNFTISVTTEILPVSMTKTSVDCTMYICGDSTECSNLLLQYGSFCTQLNRALTGIAVEQDKNTQEVFAQVKQIYKTPPIKDFGGFNFSQILPDPSKPSKRSFIEDLLFNKVTLADAGFIKQYGDCLGDIAARDLICAQKFNGLTVLPPLLTDEMIAQYTSALLAGTITSGWTFGAGAALQIPFAMQMAYRFNGIGVTQNVLYENQKLIANQFNSAIGKIQDSLSSTASALGKLQDVVNQNAQALNTLVKQLSSNFGAISSVLNDILSRLDPPEAEVQIDRLITGRLQSLQTYVTQQLIRAAEIRASANLAATKMSECVLGQSKRVDFCGKGYHLMSFPQSAPHGVVFLHVTYVPAQEKNFTTAPAICHDGKAHFPREGVFVSNGTHWFVTQRNFYEPQIITTDNTFVSGNCDVVIGIVNNTVYDPLQPELDSFKEELDKYFKNHTSPDVDLGDISGINASVVNIQKEIDRLNEVAKNLNESLIDLQELGKYEQYIKGSGRENLYFQGGGGSGYIPEAPRDGQAYVRKDGEWVLLSTFLGHHHHHHHH

SEQ ID NO: 5471 - protein, 1281 aa, Artificial Sequence
  Description of Artificial Sequence: Synthetic polypeptide
MGILPSPGMPALLSLVSLLSVLLMGCVAETGTQCVNLTTRTQLPPAYTNSFTRGVYYPDKVFRSSVLHSTQDLFLPFFSNVTWFHAIHVSGTNGTKRFDNPVLPFNDGVYFASTEKSNIIRGWIFGTTLDSKTQSLLIVNNATNVVIKVCEFQFCNDPFLGVYYHKNNKSWMESEFRVYSSANNCTFEYVSQPFLMDLEGKQGNFKNLREFVFKNIDGYFKIYSKHTPINLVRDLPQGFSALEPLVDLPIGINITRFQTLLALHRSYLTPGDSSSGWTAGAAAYYVGYLQPRTFLLKYNENGTITDAVDCALDPLSETKCTLKSFTVEKGIYQTSNFRVQPTESIVRFPNITNLCPFGEVFNATRFASVYAWNRKRISNCVADYSVLYNSASFSTFKCYGVSPTKLNDLCFTNVYADSFVIRGDEVRQIAPGQTGKIADYNYKLPDDFTGCVIAWNSNNLDSKVGGNYNYLYRLFRKSNLKPFERDISTEIYQAGSTPCNGVEGFNCYFPLQSYGFQPTNGVGYQPYRVVVLSFELLHAPATVCGPKKSTNLVKNKCVNFNFNGLTGTGVLTESNKKFLPFQQFGRDIADTTDAVRDPQTLEILDITPCSFGGVSVITPGTNTSNQVAVLYQDVNCTEVPVAIHADQLTPTWRVYSTGSNVFQTRAGCLIGAEHVNNSYECDIPIGAGICASYQTQTNSPSGAGSVASQSIIAYTMSLGAENSVAYSNNSIAIPTNFTISVTTEILPVSMTKTSVDCTMYICGDSTECSNLLLQYGSFCTQLNRALTGIAVEQDKNTQEVFAQVKQIYKTPPIKDFGGFNFSQILPDPSKPSKRSFIEDLLFNKVTLADAGFIKQYGDCLGDIAARDLICAQKFNGLTVLPPLLTDEMIAQYTSALLAGTITSGWTFGAGAALQIPFAMQMAYRFNGIGVTQNVLYENQKLIANQFNSAIGKIQDSLSSTASALGKLQDVVNQNAQALNTLVKQLSSNFGAISSVLNSILSRLDPPEAEVQIDRLITGRLQSLQTYVTQQLIRAAEIRASANLAATKMSECVLGQSKRVDFCGKGYHLMSFPQSAPHGVVFLHVTYVPAQEKNFTTAPAICHDGKAHFPREGVFVSNGTHWFVTQRNFYEPQIITTDNTFVSGNCDVVIGIVNNTVYDPLQPELDSFKEELDKYFKNHTSPDVDLGDISGINASVVNIQKEIDRLNEVAKNLNESLIDLQELGKYEQYIKGSGRENLYFQGGGGSGYIPEAPRDGQAYVRKDGEWVLLSTFLGHHHHHHHH

SEQ ID NO: 5472 - protein, 1281 aa, Artificial Sequence
  Description of Artificial Sequence: Synthetic polypeptide
MGILPSPGMPALLSLVSLLSVLLMGCVAETGTQCVNLTTRTQLPPAYTNSFTRGVYYPDKVFRSSVLHSTQDLFLPFFSNVTWFHAIHVSGTNGTKRFDNPVLPFNDGVYFASTEKSNIIRGWIFGTTLDSKTQSLLIVNNATNVVIKVCEFQFCNDPFLGVYYHKNNKSWMESEFRVYSSANNCTFEYVSQPFLMDLEGKQGNFKNLREFVFKNIDGYFKIYSKHTPINLVRDLPQGFSALEPLVDLPIGINITRFQTLLALHRSYLTPGDSSSGWTAGAAAYYVGYLQPRTFLLKYNENGTITDAVDCALDPLSETKCTLKSFTVEKGIYQTSNFRVQPTESIVRFPNITNLCPFGEVFNATRFASVYAWNRKRISNCVADYSVLYNSASFSTFKCYGVSPTKLNDLCFTNVYADSFVIRGDEVRQIAPGQTGKIADYNYKLPDDFTGCVIAWNSNNLDSKVGGNYNYLYRLFRKSNLKPFERDISTEIYQAGSTPCNGVEGFNCYFPLQSYGFQPTNGVGYQPYRVVVLSFELLHAPATVCGPKKSTNLVKNKCVNFNFNGLTGTGVLTESNKKFLPFQQFGRDIADTTDAVRDPQTLEILDITPCSFGGVSVITPGTNTSNQVAVLYQDVNCTEVPVAIHADQLTPTWRVYSTGSNVFQTRAGCLIGAEHVNNSYECDIPIGAGICASYQTQTNSPSGAGSVASQSIIAYTSSLGAENSVAYSNNSIAIPTNFTISVTTEILPVSMTKTSVDCTMYICGDSTECSNLLLQYGSFCTQLNRALTGIAVEQDKNTQEVFAQVKQIYKTPPIKDFGGFNFSQILPDPSKPSKRSFIEDLLFNKVTLADAGFIKQYGDCLGDIAARDLICAQKFNGLTVLPPLLTDEMIAQYTSALLAGTITSGWTFGAGAALQIPFAMQMAYRFNGIGVTQNVLYENQKLIANQFNSAIGKIQDSLSSTASALGKLQDVVNQNAQALNTLVKQLSSNFGAISSVLNDILSRLDPPEAEVQIDRLITGRLQSLQTYVTQQLIRAAEIRASANLAATKMSECVLGQSKRVDFCGKGYHLMSFPQSAPHGVVFLHVTYVPAQEKNFTTAPAICHDGKAHFPREGVFVSNGTHWFVTQRNFYEPQIITTDNTFVSGNCDVVIGIVNNTVYDPLQPELDSFKEELDKYFKNHTSPDVDLGDISGINASVVNIQKEIDRLNEVAKNLNESLIDLQELGKYEQYIKGSGRENLYFQGGGGSGYIPEAPRDGQAYVRKDGEWVLLSTFLGHHHHHHHH

SEQ ID NO: 5473 - protein, 1281 aa, Artificial Sequence
  Description of Artificial Sequence: Synthetic polypeptide
MGILPSPGMPALLSLVSLLSVLLMGCVAETGTQCVNLTTRTQLPPAYTNSFTRGVYYPDKVFRSSVLHSTQDLFLPFFSNVTWFHAIHVSGTNGTKRFDNPVLPFNDGVYFASTEKSNIIRGWIFGTTLDSKTQSLLIVNNATNVVIKVCEFQFCNDPFLGVYYHKNNKSWMESEFRVYSSANNCTFEYVSQPFLMDLEGKQGNFKNLREFVFKNIDGYFKIYSKHTPINLVRDLPQGFSALEPLVDLPIGINITRFQTLLALHRSYLTPGDSSSGWTAGAAAYYVGYLQPRTFLLKYNENGTITDAVDCALDPLSETKCTLKSFTVEKGIYQTSNFRVQPTESIVRFPNITNLCPFGEVFNATRFASVYAWNRKRISNCVADYSVLYNSASFSTFKCYGVSPTKLNDLCFTNVYADSFVIRGDEVRQIAPGQTGKIADYNYKLPDDFTGCVIAWNSNNLDSKVGGNYNYLYRLFRKSNLKPFERDICTEIYQAGSTPCNGVEGFNCYFPLQSYGFQPTNGVGYQPYRVVVLSFELLHAPATVCGPKKSTNLVKNKCVNFNFNGLTGTGVLTESNKKFLPFQQFGRDIADTTDAVRDPQTLEILDITPCSFGGVSVITPGTNTSNQVAVLYQDVNCTEVPVAIHADQLTPTWRVYSTGSNVFQTRAGCLIGAEHVNNSYECDIPIGAGICASYQTQTNSPSGAGSVASQSIIAYTMSLGAENSVAYSNNSIAIPTNFTISVTTEILPVSMTKTSVDCTMYICGDSTECSNLLLQYGSFCTQLNRALTGIAVEQDKNTQEVFAQVKQIYKTPPIKDFGGFNFSQILPDPSKPSKRSFIEDLLFNKVTLADAGFIKQYGDCLGDIAARDLICAQKFNGLTVLPPLLTDEMIAQYTSALLAGTITSGWTFGAGAALQIPFAMQMAYRFNGIGVTQNVLYENQKLIANQFNSAIGKIQDSLSSTASALGKLQDVVNQNAQALNTLVKQLSSNFGAISSVLNDILSRLDPPEAEVQIDRLITGRLQSLQTYVTQQLIRAAEIRASANLAATKMSECVLGQSKRVDFCGKGYHLMSFPQSAPHGVVFLHVTYVPAQEKNFTTAPAICHDGKAHFPREGVFVSNGTHWFVTQRNFYEPQIITTDNTFVSGNCDVVIGIVNNTVYDPLQPELDSFKEELDKYFKNHTSPDVDLGDISGINASVVNIQKEIDRLNEVAKNLNESLIDLQELGKYEQYIKGSGRENLYFQGGGGSGYIPEAPRDGQAYVRKDGEWVLLSTFLGHHHHHHHH

SEQ ID NO: 5474 - protein, 1281 aa, Artificial Sequence
  Description of Artificial Sequence: Synthetic polypeptide
MGILPSPGMPALLSLVSLLSVLLMGCVAETGTQCVNLTTRTQLPPAYTNSFTRGVYYPDKVFRSSVLHSTQDLFLPFFSNVTWFHAIHVSGTNGTKRFDNPVLPFNDGVYFASTEKSNIIRGWIFGTTLDSKTQSLLIVNNATNVVIKVCEFQFCNDPFLGVYYHKNNKSWMESEFRVYSSANNCTFEYVSQPFLMDLEGKQGNFKNLREFVFKNIDGYFKIYSKHTPINLVRDLPQGFSALEPLVDLPIGINITRFQTLLALHRSYLTPGDSSSGWTAGAAAYYVGYLQPRTFLLKYNENGTITDAVDCALDPLSETKCTLKSFTVEKGIYQTSNFRVQPTESIVRFPNITNLCPFGEVFNATRFASVYAWNRKRISNCVADYSVLYNSASFSTFKCYGVSPTKLNDLCFTNVYADSFVIRGDEVRQIAPGQTGKIADYNYKLPDDFTGCVIAWNSNNLDSKVGGNYNYLYRLFRKSNLKPFERDISTEIYQAGSTPCNGVEGFNCYFPLQSYGFQPTNGVGYQPYRVVVLSFELLHAPATVCGPKKSTNLVKNKCVNFNFNGLTGTGVLTESNKKFLPFQQFGRDIADTTDAVRDPQTLEILDITPCSFGGVSVITPGTNTSNQVAVLYQDVNCTEVPVAIHADQLTPTWRVYSTGSNVFQTRAGCLIGAEHVNNSYECDIPIGAGICASYQTQTNSPSGAGSVASQSIIAYTMSLGAENSVAYSNNSIAIPTNFTISVTTEILPVSMTKTSVDCTMYICGDSTECSNLLLQYGSFCTQLNRALTGIAVEQDKNTQEVFAQVKQIYKTPPIKDFGGFNFSQILPDPSKPSKRSFIEDLLFNKVTLADAGFIKQYGDCLGDIAARDLICAQKFNGLTVLPPLLTDEMIAQYTSALLAGTITSGWTFGAGAALQIPFAMQMAYRFNGIGVTQNVLYENQKLIANQFNSAIGKIQDSLSSTASALGKLQDVVNQNAQALNTLVKQLSSNFGAISSVLNDILSRLDPPEAEVQIDRLITGRLQSLQTYVTQQLIRAAEIRASANLAATKMSECVLGQSKRVDFCGKGYHLMSFPQSAPHGVVFLHVTYVPAQTKNFTTAPAICHDGKAHFPREGVFVSNGTHWFVTQRNFYEPQIITTDNTFVSGNCDVVIGIVNNTVYDPLQPELDSFKEELDKYFKNHTSPDVDLGDISGINASVVNIQKEIDRLNEVAKNLNESLIDLQELGKYEQYIKGSGRENLYFQGGGGSGYIPEAPRDGQAYVRKDGEWVLLSTFLGHHHHHHHH

SEQ ID NO: 5475 - protein, 1281 aa, Artificial Sequence
  Description of Artificial Sequence: Synthetic polypeptide
MGILPSPGMPALLSLVSLLSVLLMGCVAETGTQCVNLTTRTQLPPAYTNSFTRGVYYPDKVFRSSVLHSTQDLFLPFFSNVTWFHAIHVSGTNGTKRFDNPVLPFNDGVYFASTEKSNIIRGWIFGTTLDSKTQSLLIVNNATNVVIKVCEFQFCNDPFLGVYYHKNNKSWMESEFRVYSSANNCTFEYVSQPFLMDLEGKQGNFKNLREFVFKNIDGYFKIYSKHTPINLVRDLPQGFSALEPLVDLPIGINITRFQTLLALHRSYLTPGDSSSGWTAGAAAYYVGYLQPRTFLLKYNENGTITDAVDCALDPLSETKCTLKSFTVEKGIYQTSNFRVQPTESIVRFPNITNLCPFGEVFNATRFASVYAWNRKRISNCVADYSVLYNSASFSTFKCYGVSPTKLNDLCFTNVYADSFVIRGDEVRQIAPGQTGKIADYNYKLPDDFTGCVIAWNSNNLDSKVGGNYNYLYRLFRKSNLKPFERDISTEIYQAGSTPCNGVEGFNCYFPLQSYGFQPTNGVGYQPYRVVVLSFELLHAPATVCGPKKSTNLVKNKCVNFNFNGLTGTGVLTESNKKFLPFQQFGRDIADTTDAVRDPQTLEILDITPCSFGGVSVITPGTNTSNQVAVLYQDVNCTEVPVAIHADQLTPTWRVYSTGSNVFQTRAGCLIGAEHVNNSYECDIPIGAGICASYQTQTNSPSGAGSVASQSIIAYTMSLGAENSVAYSNNSIAIPTNFTISVTTEILPVSMTKTSVDCTMYICGDSTECSNLLLQYGSFCTQLNRALTGIAVEQDKNTQEVFAQVKQIYKTPPIKDFGGFNFSQILPDPSKPSKRSFIEDLLFNKVTLADAGFIKQYGDCLGDIAARDLICAQKFNGLTVLPPLLTDEMIAQYTSALLAGTITSGWTFGAGAALQIPFAMQMAYRFNGIGVTQNVLYENQKLIANQFNSAIGKIQDSLSSTASALGKLQDVVNQNAQALNTLVKQLSSNFGAISSVLNDILSRLDPPEAEVQIDRLITGRLQSLQTYVTQQLIRAAEIRASANLAATKMSECVLGQSKRVDFCGKGYHLMSFPQSAPHGVVFLHVTYVPAQAKNFTTAPAICHDGKAHFPREGVFVSNGTHWFVTQRNFYEPQIITTDNTFVSGNCDVVIGIVNNTVYDPLQPELDSFKEELDKYFKNHTSPDVDLGDISGINASVVNIQKEIDRLNEVAKNLNESLIDLQELGKYEQYIKGSGRENLYFQGGGGSGYIPEAPRDGQAYVRKDGEWVLLSTFLGHHHHHHHH

SEQ ID NO: 5476 - protein, 1281 aa, Artificial Sequence
  Description of Artificial Sequence: Synthetic polypeptide
MGILPSPGMPALLSLVSLLSVLLMGCVAETGTQCVNLTTRTQLPPAYTNSFTRGVYYPDKVFRSSVLHSTQDLFLPFFSNVTWFHAIHVSGTNGTKRFDNPVLPFNDGVYFASTEKSNIIRGWIFGTTLDSKTQSLLIVNNATNVVIKVCEFQFCNDPFLGVYYHKNNKSWMESEFRVYSSANNCTFEYVSQPFLMDLEGKQGNFKNLREFVFKNIDGYFKIYSKHTPINLVRDLPQGFSALEPLVDLPIGINITRFQTLLALHRSYLTPGDSSSGWTAGAAAYYVGYLQPRTFLLKYNENGTITDAVDCALDPLSETKCTLKSFTVEKGIYQTSNFRVQPTESIVRFPNITNLCPFGEVFNATRFASVYAWNRKRISNCVADYSVLYNSASFSTFKCYGVSPTKLNDLCFTNVYADSFVIRGDEVRQIAPGQTGKIADYNYKLPDDFTGCVIAWNSNNLDSKVGGNYNYLYRLFRKSNLKPFERDISTEIYQAGSTPCNGVEGFNCYFPLQSYGFQPTNGVGYQPYRVVVLSFELLHAPATVCGPKKSTNLVKNKCVNFNFNGLTGTGVLTESNKKFLPFQQFGRDIADTTDAVRDPQTLEILDITPCSFGGVSVITPGTNTSNQVAVLYQDVNCTEVPVAIHADQLTPTWRVYSTGSNVFQTRAGCLIGAEHVNNSYECDIPIGAGICASYQTQTNSPSGAGSVASQSIIAYTASLGAENSVAYSNNSIAIPTNFTISVTTEILPVSMTKTSVDCTMYICGDSTECSNLLLQYGSFCTQLNRALTGIAVEQDKNTQEVFAQVKQIYKTPPIKDFGGFNFSQILPDPSKPSKRSFIEDLLFNKVTLADAGFIKQYGDCLGDIAARDLICAQKFNGLTVLPPLLTDEMIAQYTSALLAGTITSGWTFGAGAALQIPFAMQMAYRFNGIGVTQNVLYENQKLIANQFNSAIGKIQDSLSSTASALGKLQDVVNQNAQALNTLVKQLSSNFGAISSVLNDILSRLDPPEAEVQIDRLITGRLQSLQTYVTQQLIRAAEIRASANLAATKMSECVLGQSKRVDFCGKGYHLMSFPQSAPHGVVFLHVTYVPAQEKNFTTAPAICHDGKAHFPREGVFVSNGTHWFVTQRNFYEPQIITTDNTFVSGNCDVVIGIVNNTVYDPLQPELDSFKEELDKYFKNHTSPDVDLGDISGINASVVNIQKEIDRLNEVAKNLNESLIDLQELGKYEQYIKGSGRENLYFQGGGGSGYIPEAPRDGQAYVRKDGEWVLLSTFLGHHHHHHHH

SEQ ID NO: 5477 - protein, 1281 aa, Artificial Sequence
  Description of Artificial Sequence: Synthetic polypeptide
MGILPSPGMPALLSLVSLLSVLLMGCVAETGTQCVNLTTRTQLPPAYTNSFTRGVYYPDKVFRSSVLHSTQDLFLPFFSNVTWFHAIHVSGTNGTKRFDNPVLPFNDGVYFASTEKSNIIRGWIFGTTLDSKTQSLLIVNNATNVVIKVCEFQFCNDPFLGVYYHKNNKSWMESEFRVYSSANNCTFEYVSQPFLMDLEGKQGNFKNLREFVFKNIDGYFKIYSKHTPINLVRDLPQGFSALEPLVDLPIGINITRFQTLLALHRSYLTPGDSSSGWTAGAAAYYVGYLQPRTFLLKYNENGTITDAVDCALDPLSETKCTLKSFTVEKGIYQTSNFRVQPTESIVRFPNITNLCPFGEVFNATRFASVYAWNRKRISNCVADYSVLYNSASFSTFKCYGVSPTKLNDLCFTNVYADSFVIRGDEVRQIAPGQTGKIADYNYKLPDDFTGCVIAWNSNNLDSKVGGNYNYLYRLFRKSNLKPFERDISTEIYQAGSTPCNGVEGFNCYFPLQSYGFQPTNGVGYQPYRVVVLSFELLHAPATVCGPKKSTNLVKNKCVNFNFNGVTGTGVLTESNKKFLPFQQFGRDIADTTDAVRDPQTLEILDITPCSFGGVSVITPGTNTSNQVAVLYQDVNCTEVPVAIHADQLTPTWRVYSTGSNVFQTRAGCLIGAEHVNNSYECDIPIGAGICASYQTQTNSPSGAGSVASQSIIAYTMSLGAENSVAYSNNSIAIPTNFTISVTTEILPVSMTKTSVDCTMYICGDSTECSNLLLQYGSFCTQLNRALTGIAVEQDKNTQEVFAQVKQIYKTPPIKDFGGFNFSQILPDPSKPSKRSFIEDLLFNKVTLADAGFIKQYGDCLGDIAARDLICAQKFNGLTVLPPLLTDEMIAQYTSALLAGTITSGWTFGAGAALQIPFAMQMAYRFNGIGVTQNVLYENQKLIANQFNSAIGKIQDSLSSTASALGKLQDVVNQNAQALNTLVKQLSSNFGAISSVLNDILSRLDPPEAEVQIDRLITGRLQSLQTYVTQQLIRAAEIRASANLAATKMSECVLGQSKRVDFCGKGYHLMSFPQSAPHGVVFLHVTYVPAQEKNFTTAPAICHDGKAHFPREGVFVSNGTHWFVTQRNFYEPQIITTDNTFVSGNCDVVIGIVNNTVYDPLQPELDSFKEELDKYFKNHTSPDVDLGDISGINASVVNIQKEIDRLNEVAKNLNESLIDLQELGKYEQYIKGSGRENLYFQGGGGSGYIPEAPRDGQAYVRKDGEWVLLSTFLGHHHHHHHH

SEQ ID NO: 5478 - protein, 1281 aa, Artificial Sequence
  Description of Artificial Sequence: Synthetic polypeptide
MGILPSPGMPALLSLVSLLSVLLMGCVAETGTQCVNLTTRTQLPPAYTNSFTRGVYYPDKVFRSSVLHSTQDLFLPFFSNVTWFHAIHVSGTNGTKRFDNPVLPFNDGVYFASTEKSNIIRGWIFGTTLDSKTQSLLIVNNATNVVIKVCEFQFCNDPFLGVYYHKNNKSWMESEFRVYSSANNCTFEYVSQPFLMDLEGKQGNFKNLREFVFKNIDGYFKIYSKHTPINLVRDLPQGFSALEPLVDLPIGINITRFQTLLALHRSYLTPGDSSSGWTAGAAAYYVGYLQPRTFLLKYNENGTITDAVDCALDPLSETKCTLKSFTVEKGIYQTSNFRVQPTESIVRFPNITNLCPFGEVFNATRFSSVYAWNRKRISNCVADYSVLYNSASFSTFKCYGVSPTKLNDLCFTNVYADSFVIRGDEVRQIAPGQTGKIADYNYKLPDDFTGCVIAWNSNNLDSKVGGNYNYLYRLFRKSNLKPFERDISTEIYQAGSTPCNGVEGFNCYFPLQSYGFQPTNGVGYQPYRVVVLSFELLHAPATVCGPKKSTNLVKNKCVNFNFNGLTGTGVLTESNKKFLPFQQFGRDIADTTDAVRDPQTLEILDITPCSFGGVSVITPGTNTSNQVAVLYQDVNCTEVPVAIHADQLTPTWRVYSTGSNVFQTRAGCLIGAEHVNNSYECDIPIGAGICASYQTQTNSPSGAGSVASQSIIAYTMSLGAENSVAYSNNSIAIPTNFTISVTTEILPVSMTKTSVDCTMYICGDSTECSNLLLQYGSFCTQLNRALTGIAVEQDKNTQEVFAQVKQIYKTPPIKDFGGFNFSQILPDPSKPSKRSFIEDLLFNKVTLADAGFIKQYGDCLGDIAARDLICAQKFNGLTVLPPLLTDEMIAQYTSALLAGTITSGWTFGAGAALQIPFAMQMAYRFNGIGVTQNVLYENQKLIANQFNSAIGKIQDSLSSTASALGKLQDVVNQNAQALNTLVKQLSSNFGAISSVLNDILSRLDPPEAEVQIDRLITGRLQSLQTYVTQQLIRAAEIRASANLAATKMSECVLGQSKRVDFCGKGYHLMSFPQSAPHGVVFLHVTYVPAQEKNFTTAPAICHDGKAHFPREGVFVSNGTHWFVTQRNFYEPQIITTDNTFVSGNCDVVIGIVNNTVYDPLQPELDSFKEELDKYFKNHTSPDVDLGDISGINASVVNIQKEIDRLNEVAKNLNESLIDLQELGKYEQYIKGSGRENLYFQGGGGSGYIPEAPRDGQAYVRKDGEWVLLSTFLGHHHHHHHH

SEQ ID NO: 5479 - protein, 1281 aa, Artificial Sequence
  Description of Artificial Sequence: Synthetic polypeptide
MGILPSPGMPALLSLVSLLSVLLMGCVAETGTQCVNLTTRTQLPPAYTNSFTRGVYYPDKVFRSSVLHSTQDLFLPFFSNVTWFHAIHVSGTNGTKRFDNPVLPFNDGVYFASTEKSNIIRGWIFGTTLDSKTQSLLIVNNATNVVIKVCEFQFCNDPFLGVYYHKNNKSWMESEFRVYSSANNCTFEYVSQPFLMDLEGKQGNFKNLREFVFKNIDGYFKIYSKHTPINLVRDLPQGFSALEPLVDLPIGINITRFQTLLALHRSYLTPGDSSSGWTAGAAAYYVGYLQPRTFLLKYNENGTITDAVDCALDPLSETKCTLKSFTVEKGIYQTSNFRVQPTESIVRFPNVTNLCPFGEVFNATRFASVYAWNRKRISNCVADYSVLYNSASFSTFKCYGVSPTKLNDLCFTNVYADSFVIRGDEVRQIAPGQTGKIADYNYKLPDDFTGCVIAWNSNNLDSKVGGNYNYLYRLFRKSNLKPFERDISTEIYQAGSTPCNGVEGFNCYFPLQSYGFQPTNGVGYQPYRVVVLSFELLHAPATVCGPKKSTNLVKNKCVNFNFNGLTGTGVLTESNKKFLPFQQFGRDIADTTDAVRDPQTLEILDITPCSFGGVSVITPGTNTSNQVAVLYQDVNCTEVPVAIHADQLTPTWRVYSTGSNVFQTRAGCLIGAEHVNNSYECDIPIGAGICASYQTQTNSPSGAGSVASQSIIAYTMSLGAENSVAYSNNSIAIPTNFTISVTTEILPVSMTKTSVDCTMYICGDSTECSNLLLQYGSFCTQLNRALTGIAVEQDKNTQEVFAQVKQIYKTPPIKDFGGFNFSQILPDPSKPSKRSFIEDLLFNKVTLADAGFIKQYGDCLGDIAARDLICAQKFNGLTVLPPLLTDEMIAQYTSALLAGTITSGWTFGAGAALQIPFAMQMAYRFNGIGVTQNVLYENQKLIANQFNSAIGKIQDSLSSTASALGKLQDVVNQNAQALNTLVKQLSSNFGAISSVLNDILSRLDPPEAEVQIDRLITGRLQSLQTYVTQQLIRAAEIRASANLAATKMSECVLGQSKRVDFCGKGYHLMSFPQSAPHGVVFLHVTYVPAQEKNFTTAPAICHDGKAHFPREGVFVSNGTHWFVTQRNFYEPQIITTDNTFVSGNCDVVIGIVNNTVYDPLQPELDSFKEELDKYFKNHTSPDVDLGDISGINASVVNIQKEIDRLNEVAKNLNESLIDLQELGKYEQYIKGSGRENLYFQGGGGSGYIPEAPRDGQAYVRKDGEWVLLSTFLGHHHHHHHH

SEQ ID NO: 5480 - protein, 1281 aa, Artificial Sequence
  Description of Artificial Sequence: Synthetic polypeptide
MGILPSPGMPALLSLVSLLSVLLMGCVAETGTQCVNLTTRTQLPPAYTNSFTRGVYYPDKVFRSSVLHSTQDLFLPFFSNVTWFHAIHVSGTNGTKRFDNPVLPFNDGVYFASTEKSNIIRGWIFGTTLDSKTQSLLIVNNATNVVIKVCEFQFCNDPFLGVYYHKNNKSWMESEFRVYSSANNCTFEYVSQPFLMDLEGKQGNFKNLREFVFKNIDGYFKIYSKHTPINLVRDLPQGFSALEPQVDLPIGINITRFQTLLALHRSYLTPGDSSSGWTAGAAAYYVGYLQPRTFLLKYNENGTITDAVDCALDPLSETKCTLKSFTVEKGIYQTSNFRVQPTESIVRFPNITNLCPFGEVFNATRFASVYAWNRKRISNCVADYSVLYNSASFSTFKCYGVSPTKLNDLCFTNVYADSFVIRGDEVRQIAPGQTGKIADYNYKLPDDFTGCVIAWNSNNLDSKVGGNYNYLYRLFRKSNLKPFERDISTEIYQAGSTPCNGVEGFNCYFPLQSYGFQPTNGVGYQPYRVVVLSFELLHAPATVCGPKKSTNLVKNKCVNFNFNGLTGTGVLTESNKKFLPFQQFGRDIADTTDAVRDPQTLEILDITPCSFGGVSVITPGTNTSNQVAVLYQDVNCTEVPVAIHADQLTPTWRVYSTGSNVFQTRAGCLIGAEHVNNSYECDIPIGAGICASYQTQTNSPSGAGSVASQSIIAYTMSLGAENSVAYSNNSIAIPTNFTISVTTEILPVSMTKTSVDCTMYICGDSTECSNLLLQYGSFCTQLNRALTGIAVEQDKNTQEVFAQVKQIYKTPPIKDFGGFNFSQILPDPSKPSKRSFIEDLLFNKVTLADAGFIKQYGDCLGDIAARDLICAQKFNGLTVLPPLLTDEMIAQYTSALLAGTITSGWTFGAGAALQIPFAMQMAYRFNGIGVTQNVLYENQKLIANQFNSAIGKIQDSLSSTASALGKLQDVVNQNAQALNTLVKQLSSNFGAISSVLNDILSRLDPPEAEVQIDRLITGRLQSLQTYVTQQLIRAAEIRASANLAATKMSECVLGQSKRVDFCGKGYHLMSFPQSAPHGVVFLHVTYVPAQEKNFTTAPAICHDGKAHFPREGVFVSNGTHWFVTQRNFYEPQIITTDNTFVSGNCDVVIGIVNNTVYDPLQPELDSFKEELDKYFKNHTSPDVDLGDISGINASVVNIQKEIDRLNEVAKNLNESLIDLQELGKYEQYIKGSGRENLYFQGGGGSGYIPEAPRDGQAYVRKDGEWVLLSTFLGHHHHHHHH

SEQ ID NO: 5481 - protein, 1281 aa, Artificial Sequence
  Description of Artificial Sequence: Synthetic polypeptide
MGILPSPGMPALLSLVSLLSVLLMGCVAETGTQCVNLTTRTQLPPAYTNSFTRGVYYPDKVFRSSVLHSTQDLFLPFFSNVTWFHAIHVSGTNGTKRFDNPVLPFNDGVYFASTEKSNIIRGWIFGTTLDSKTQSLLIVNNATNVVIKVCEFQFCNDPFLGVYYHKNNKSWMESEFRVYSSANNCTFEYVSQPFLMDLEGKQGNFKNLREFVFKNIDGYFKIYSKHTPINLVRDLPQGFSALEPLVDLPIGINITRFQTLLALHRSYLTPGDSSSGWTAGAAAYYVGYLQPRTFLLKYNENGTITDAVDCALDPLSETKCTLKSFTVEKGIYQTSNFRVQPTESIVRFPNITNLCPFGEVFNATRFASVYAWNRKRISNCVADYSVLYNSASFSTFKCYGVSPTKLNDLCFTNVYADSFVIRGDEVRQIAPGQTGKIADYNYKLPDDFTGCVIAWNSNNLDSKVGGNYNYLYRLFRKSNLKPFERDISTEIYQAGSTPCNGVEGFNCYFPLQSYGFQPTNGVGYQPYRVVVLSFELLHAPATVCGPKKSTNLVKNKCVNFNFNGLTGTGVLTESNKKFLPFQQFGRDIADTTDAVRDPQTLEILDITPCSFGGVSVITPGTNTSNQVAVLYQDVNCTEVPVAIHADQLTPTWRVYSTGSNVFQTRAGCLIGAEHVNNSYECDIPIGAGICASYQTQTNSPSGAGSVASQSIIAYTMSLGAENSVAYSNNSIAIPTNFTISVTTEILPVSMTKTSVDCTMYICGDSTECSNLLLQYGSFCTQLNRALTGIAVEQDKNTQEVFAQVKQIYKTPPIKDFGGFNFSQILPDPSKPSKRSFIEDLLFNKVTLADAGFIKQYGDCLGDIAARDLICAQKFNGLTVLPPLLTDEMIAQYTSALLAGTITSGWTFGAGAALQIPFAMQMAYRFNGIGVTQNVLYENQKLIANQFNSAIGKIQDSLSSTASALGKLQDVVNQNAQALNTLVKQLSSNFGAISSVLNDILSRLDPPAAEVQIDRLITGRLQSLQTYVTQQLIRAAEIRASANLAATKMSECVLGQSKRVDFCGKGYHLMSFPQSAPHGVVFLHVTYVPAQEKNFTTAPAICHDGKAHFPREGVFVSNGTHWFVTQRNFYEPQIITTDNTFVSGNCDVVIGIVNNTVYDPLQPELDSFKEELDKYFKNHTSPDVDLGDISGINASVVNIQKEIDRLNEVAKNLNESLIDLQELGKYEQYIKGSGRENLYFQGGGGSGYIPEAPRDGQAYVRKDGEWVLLSTFLGHHHHHHHH

SEQ ID NO: 5482 - protein, 1281 aa, Artificial Sequence
  Description of Artificial Sequence: Synthetic polypeptide
MGILPSPGMPALLSLVSLLSVLLMGCVAETGTQCVNLTTRTQLPPAYTNSFTRGVYYPDKVFRSSVLHSTQDLFLPFFSNVTWFHAIHVSGTNGTKRFDNPVLPFNDGVYFASTEKSNIIRGWIFGTTLDSKTQSLLIVNNATNVVIKVCEFQFCNDPFLGVYYHKNNKSWMESEFRVYSSANNCTFEYVSQPFLMDLEGKQGNFKNLREFVFKNIDGYFKIYSKHTPINLVRDLPQGFSALEPLVDLPIGINITRFQTLLALHRSYLTPGDSSSGWTAGAAAYYVGYLQPRTFLLKYNEYGTITDAVDCALDPLSETKCTLKSFTVEKGIYQTSNFRVQPTESIVRFPNITNLCPFGEVFNATRFASVYAWNRKRISNCVADYSVLYNSASFSTFKCYGVSPTKLNDLCFTNVYADSFVIRGDEVRQIAPGQTGKIADYNYKLPDDFTGCVIAWNSNNLDSKVGGNYNYLYRLFRKSNLKPFERDISTEIYQAGSTPCNGVEGFNCYFPLQSYGFQPTNGVGYQPYRVVVLSFELLHAPATVCGPKKSTNLVKNKCVNFNFNGLTGTGVLTESNKKFLPFQQFGRDIADTTDAVRDPQTLEILDITPCSFGGVSVITPGTNTSNQVAVLYQDVNCTEVPVAIHADQLTPTWRVYSTGSNVFQTRAGCLIGAEHVNNSYECDIPIGAGICASYQTQTNSPSGAGSVASQSIIAYTMSLGAENSVAYSNNSIAIPTNFTISVTTEILPVSMTKTSVDCTMYICGDSTECSNLLLQYGSFCTQLNRALTGIAVEQDKNTQEVFAQVKQIYKTPPIKDFGGFNFSQILPDPSKPSKRSFIEDLLFNKVTLADAGFIKQYGDCLGDIAARDLICAQKFNGLTVLPPLLTDEMIAQYTSALLAGTITSGWTFGAGAALQIPFAMQMAYRFNGIGVTQNVLYENQKLIANQFNSAIGKIQDSLSSTASALGKLQDVVNQNAQALNTLVKQLSSNFGAISSVLNDILSRLDPPEAEVQIDRLITGRLQSLQTYVTQQLIRAAEIRASANLAATKMSECVLGQSKRVDFCGKGYHLMSFPQSAPHGVVFLHVTYVPAQEKNFTTAPAICHDGKAHFPREGVFVSNGTHWFVTQRNFYEPQIITTDNTFVSGNCDVVIGIVNNTVYDPLQPELDSFKEELDKYFKNHTSPDVDLGDISGINASVVNIQKEIDRLNEVAKNLNESLIDLQELGKYEQYIKGSGRENLYFQGGGGSGYIPEAPRDGQAYVRKDGEWVLLSTFLGHHHHHHHH

SEQ ID NO: 5483 - protein, 1281 aa, Artificial Sequence
  Description of Artificial Sequence: Synthetic polypeptide
MGILPSPGMPALLSLVSLLSVLLMGCVAETGTQCVNLTTRTQLPPAYTNSFTRGVYYPDKVFRSSVLHSTQDLFLPFFSNVTWFHAIHVSGTNGTKRFDNPVLPFNDGVYFASTEKSNIIRGWIFGTTLDSKTQSLLIVNNATNVVIKVCEFQFCNDPFLGVYYHKNNKSWMESEFRVYSSANNCTFEYVSQPFLMDLEGKQGNFKNLREFVFKNIDGYFKIYSKHTPINLVRDLPQGFSALEPLVDLPIGINITRFQTLLALHRSYLTPGDSSSGWTAGAAAYYVGYLQPRTFLLKYNENGTITDAVDCALDPLSETKCTLKSFTVEKGIYQTSNFRVQPTESIVRFPNITNLCPMGEVFNATRFASVYAWNRKRISNCVADYSVLYNSASFSTFKCYGVSPTKLNDLCFTNVYADSFVIRGDEVRQIAPGQTGKIADYNYKLPDDFTGCVIAWNSNNLDSKVGGNYNYLYRLFRKSNLKPFERDISTEIYQAGSTPCNGVEGFNCYFPLQSYGFQPTNGVGYQPYRVVVLSFELLHAPATVCGPKKSTNLVKNKCVNFNFNGLTGTGVLTESNKKFLPFQQFGRDIADTTDAVRDPQTLEILDITPCSFGGVSVITPGTNTSNQVAVLYQDVNCTEVPVAIHADQLTPTWRVYSTGSNVFQTRAGCLIGAEHVNNSYECDIPIGAGICASYQTQTNSPSGAGSVASQSIIAYTMSLGAENSVAYSNNSIAIPTNFTISVTTEILPVSMTKTSVDCTMYICGDSTECSNLLLQYGSFCTQLNRALTGIAVEQDKNTQEVFAQVKQIYKTPPIKDFGGFNFSQILPDPSKPSKRSFIEDLLFNKVTLADAGFIKQYGDCLGDIAARDLICAQKFNGLTVLPPLLTDEMIAQYTSALLAGTITSGWTFGAGAALQIPFAMQMAYRFNGIGVTQNVLYENQKLIANQFNSAIGKIQDSLSSTASALGKLQDVVNQNAQALNTLVKQLSSNFGAISSVLNDILSRLDPPEAEVQIDRLITGRLQSLQTYVTQQLIRAAEIRASANLAATKMSECVLGQSKRVDFCGKGYHLMSFPQSAPHGVVFLHVTYVPAQEKNFTTAPAICHDGKAHFPREGVFVSNGTHWFVTQRNFYEPQIITTDNTFVSGNCDVVIGIVNNTVYDPLQPELDSFKEELDKYFKNHTSPDVDLGDISGINASVVNIQKEIDRLNEVAKNLNESLIDLQELGKYEQYIKGSGRENLYFQGGGGSGYIPEAPRDGQAYVRKDGEWVLLSTFLGHHHHHHHH

SEQ ID NO: 5484 - protein, 1281 aa, Artificial Sequence
  Description of Artificial Sequence: Synthetic polypeptide
MGILPSPGMPALLSLVSLLSVLLMGCVAETGTQCVNLTTRTQLPPAYTNSFTRGVYYPDKVFRSSVLHSTQDLFLPFFSNVTWFHAIHVSGTNGTKRFDNPVLPFNDGVYFASTEKSNIIRGWIFGTTLDSKTQSLLIVNNATNVVIKVCEFQFCNDPFLGVYYHKNNKSWMESEFRVYSSANNCTFEYVSQPFLMDLEGKQGNFKNLREFVFKNIDGYFKIYSKHTPINLVRDLPQGFSALEPLVDLPIGINITRFQTLLALHRSYLTPGDSSSGWTAGAAAYYVGYLQPRTFLLKYNENGTITDAVDCALDPLSETKCTLKSFTVEKGIYQTSNFRVQPTESIVRFPVITNLCPFGEVFNATRFASVYAWNRKRISNCVADYSVLYNSASFSTFKCYGVSPTKLNDLCFTNVYADSFVIRGDEVRQIAPGQTGKIADYNYKLPDDFTGCVIAWNSNNLDSKVGGNYNYLYRLFRKSNLKPFERDISTEIYQAGSTPCNGVEGFNCYFPLQSYGFQPTNGVGYQPYRVVVLSFELLHAPATVCGPKKSTNLVKNKCVNFNFNGLTGTGVLTESNKKFLPFQQFGRDIADTTDAVRDPQTLEILDITPCSFGGVSVITPGTNTSNQVAVLYQDVNCTEVPVAIHADQLTPTWRVYSTGSNVFQTRAGCLIGAEHVNNSYECDIPIGAGICASYQTQTNSPSGAGSVASQSIIAYTMSLGAENSVAYSNNSIAIPTNFTISVTTEILPVSMTKTSVDCTMYICGDSTECSNLLLQYGSFCTQLNRALTGIAVEQDKNTQEVFAQVKQIYKTPPIKDFGGFNFSQILPDPSKPSKRSFIEDLLFNKVTLADAGFIKQYGDCLGDIAARDLICAQKFNGLTVLPPLLTDEMIAQYTSALLAGTITSGWTFGAGAALQIPFAMQMAYRFNGIGVTQNVLYENQKLIANQFNSAIGKIQDSLSSTASALGKLQDVVNQNAQALNTLVKQLSSNFGAISSVLNDILSRLDPPEAEVQIDRLITGRLQSLQTYVTQQLIRAAEIRASANLAATKMSECVLGQSKRVDFCGKGYHLMSFPQSAPHGVVFLHVTYVPAQEKNFTTAPAICHDGKAHFPREGVFVSNGTHWFVTQRNFYEPQIITTDNTFVSGNCDVVIGIVNNTVYDPLQPELDSFKEELDKYFKNHTSPDVDLGDISGINASVVNIQKEIDRLNEVAKNLNESLIDLQELGKYEQYIKGSGRENLYFQGGGGSGYIPEAPRDGQAYVRKDGEWVLLSTFLGHHHHHHHH

SEQ ID NO: 5485 - protein, 1281 aa, Artificial Sequence
  Description of Artificial Sequence: Synthetic polypeptide
MGILPSPGMPALLSLVSLLSVLLMGCVAETGTQCVNLTTRTQLPPAYTNSFTRGVYYPDKVFRSSVLHSTQDLFLPFFSNVTWFHAIHVSGTNGTKRFDNPVLPFNDGVYFASTEKSNIIRGWIFGTTLDSKTQSLLIVNNATNVVIKVCEFQFCNDPFLGVYYHKNNKSWMESEFRVYSSANNCTFEYVSQPFLMDLEGKQGNFKNLREFVFKNIDGYFKIYSKHTPINLVRDLPQGFSALEPLVDLPIGINITRFQTLLALHRSYLTPGDSSSGWTAGAAAYYVGYLQPRTFLLKYNENGTITDAVDCALDPLSETKCTLKSFTVEKGIYQTSNFRVQPTESIVRFPNITNLCPFGEVFNATRFASVYAWNRKRISNCVADYSVLYNSASFSTFKCYGVSPTKLNDLCFTNVYADSFVIRGDEVRQIAPGQTGKIADYNYKLPDDFTGCVIAWNSNNLDSKVGGNYNYLYRLFRKSNLKPFERDISTEIYQAGSTPCNGVEGFNCYFPLQSYGFQPTNGVGYQPYRVVVLSFELLHAPATVCGPKKSTNLVKNKCVNFNFNGLTGTGVLTESNKKFLPFQQFGRDIADTTDAVRDPQTLEILDITPCSFGGVSVITPGTNTSNQVAVLYQDVNCTEVPVAIHADQLTPTWRVYSTGSNVFQTRAGCLIGAEHVNNSYECDIPIGAGICASYQTQTNSPSGAGSVASQSIIAYTMSLGAENSVAYSNNSIAIPTNFTISVTTEILPVSMTKTSVDCTMYICGDSTECSNLLLQYGSFCTQLNRALTGIAVEQDKNTQEVFAQVKQIYKTPPIKDFGGFNFSQILPDPSKPSKRSFIEDLLFNKVTLADAGFIKQYGDCLGDIAARDLICAQKFNGLTVLPPLLTDEMIAQYTSALLAGTITSGWTFGAGAALQIPFAMQMAYRFNGIGVTQNVLYENQKLIANQFNSAIGKIQDSLSSTASALGKLQDVVNQNAQALNTLVKQLSSRFGAISSVLNDILSRLDPPEAEVQIDRLITGRLQSLQTYVTQQLIRAAEIRASANLAATKMSECVLGQSKRVDFCGKGYHLMSFPQSAPHGVVFLHVTYVPAQEKNFTTAPAICHDGKAHFPREGVFVSNGTHWFVTQRNFYEPQIITTDNTFVSGNCDVVIGIVNNTVYDPLQPELDSFKEELDKYFKNHTSPDVDLGDISGINASVVNIQKEIDRLNEVAKNLNESLIDLQELGKYEQYIKGSGRENLYFQGGGGSGYIPEAPRDGQAYVRKDGEWVLLSTFLGHHHHHHHH

SEQ ID NO: 5486 - protein, 1281 aa, Artificial Sequence
  Description of Artificial Sequence: Synthetic polypeptide
MGILPSPGMPALLSLVSLLSVLLMGCVAETGTQCVNLTTRTQLPPAYTNSFTRGVYYPDKVFRSSVLHSTQDLFLPFFSNVTWFHAIHVSGTNGTKRFDNPVLPFNDGVYFASTEKSNIIRGWIFGTTLDSKTQSLLIVNNATNVVIKVCEFQFCNDPFLGVYYHKNNKSWMESEFRVYSSANNCTFEYVSQPFLMDLEGKQGNFKNLREFVFKNIDGYFKIYSKHTPINLVRDLPQGFSALEPLVDLPIGINITRFQTLLALHRSYLTPGDSSSGWTAGAAAYYVGYLQPRTFLLKYNENGTITDAVDCALDPLSETKCTLKSFTVEKGIYQTSNFRVQPTESIVRFPNITNLCPFGEVFNATRFASVYAWNRKRISNCVADYSVLYNSASFQTFKCYGVSPTKLNDLCFTNVYADSFVIRGDEVRQIAPGQTGKIADYNYKLPDDFTGCVIAWNSNNLDSKVGGNYNYLYRLFRKSNLKPFERDISTEIYQAGSTPCNGVEGFNCYFPLQSYGFQPTNGVGYQPYRVVVLSFELLHAPATVCGPKKSTNLVKNKCVNFNFNGLTGTGVLTESNKKFLPFQQFGRDIADTTDAVRDPQTLEILDITPCSFGGVSVITPGTNTSNQVAVLYQDVNCTEVPVAIHADQLTPTWRVYSTGSNVFQTRAGCLIGAEHVNNSYECDIPIGAGICASYQTQTNSPSGAGSVASQSIIAYTMSLGAENSVAYSNNSIAIPTNFTISVTTEILPVSMTKTSVDCTMYICGDSTECSNLLLQYGSFCTQLNRALTGIAVEQDKNTQEVFAQVKQIYKTPPIKDFGGFNFSQILPDPSKPSKRSFIEDLLFNKVTLADAGFIKQYGDCLGDIAARDLICAQKFNGLTVLPPLLTDEMIAQYTSALLAGTITSGWTFGAGAALQIPFAMQMAYRFNGIGVTQNVLYENQKLIANQFNSAIGKIQDSLSSTASALGKLQDVVNQNAQALNTLVKQLSSNFGAISSVLNDILSRLDPPEAEVQIDRLITGRLQSLQTYVTQQLIRAAEIRASANLAATKMSECVLGQSKRVDFCGKGYHLMSFPQSAPHGVVFLHVTYVPAQEKNFTTAPAICHDGKAHFPREGVFVSNGTHWFVTQRNFYEPQIITTDNTFVSGNCDVVIGIVNNTVYDPLQPELDSFKEELDKYFKNHTSPDVDLGDISGINASVVNIQKEIDRLNEVAKNLNESLIDLQELGKYEQYIKGSGRENLYFQGGGGSGYIPEAPRDGQAYVRKDGEWVLLSTFLGHHHHHHHH

SEQ ID NO: 5487 - protein, 1281 aa, Artificial Sequence
  Description of Artificial Sequence: Synthetic polypeptide
MGILPSPGMPALLSLVSLLSVLLMGCVAETGTQCVNLTTRTQLPPAYTNSFTRGVYYPDKVFRSSVLHSTQDLFLPFFSNVTWFHAIHVSGTNGTKRFDNPVLPFNDGVYFASTEKSNIIRGWIFGTTLDSKTQSLLIVNNATNVVIKVCEFQFCNDPFLGVYYHKNNKSWMESEFRVYSSANNCTFEYVSQPFLMDLEGKQGNFKNLREFVFKNIDGYFKIYSKHTPINLVRDLPQGFSALEPLVDLPIGINITRFQTLLALHRSYLTPGDSSSGWTAGAAAYYVGYLQPRTFLLKYNENGTITDAVDCALDPLSETKCTLKSFTVEKGIYQTSNFRVQPTESIVRFPNITNLCPFGEVFNATRFASVYAWNRKRISNCVADYSVLYSSASFSTFKCYGVSPTKLNDLCFTNVYADSFVIRGDEVRQIAPGQTGKIADYNYKLPDDFTGCVIAWNSNNLDSKVGGNYNYLYRLFRKSNLKPFERDISTEIYQAGSTPCNGVEGFNCYFPLQSYGFQPTNGVGYQPYRVVVLSFELLHAPATVCGPKKSTNLVKNKCVNFNFNGLTGTGVLTESNKKFLPFQQFGRDIADTTDAVRDPQTLEILDITPCSFGGVSVITPGTNTSNQVAVLYQDVNCTEVPVAIHADQLTPTWRVYSTGSNVFQTRAGCLIGAEHVNNSYECDIPIGAGICASYQTQTNSPSGAGSVASQSIIAYTMSLGAENSVAYSNNSIAIPTNFTISVTTEILPVSMTKTSVDCTMYICGDSTECSNLLLQYGSFCTQLNRALTGIAVEQDKNTQEVFAQVKQIYKTPPIKDFGGFNFSQILPDPSKPSKRSFIEDLLFNKVTLADAGFIKQYGDCLGDIAARDLICAQKFNGLTVLPPLLTDEMIAQYTSALLAGTITSGWTFGAGAALQIPFAMQMAYRFNGIGVTQNVLYENQKLIANQFNSAIGKIQDSLSSTASALGKLQDVVNQNAQALNTLVKQLSSNFGAISSVLNDILSRLDPPEAEVQIDRLITGRLQSLQTYVTQQLIRAAEIRASANLAATKMSECVLGQSKRVDFCGKGYHLMSFPQSAPHGVVFLHVTYVPAQEKNFTTAPAICHDGKAHFPREGVFVSNGTHWFVTQRNFYEPQIITTDNTFVSGNCDVVIGIVNNTVYDPLQPELDSFKEELDKYFKNHTSPDVDLGDISGINASVVNIQKEIDRLNEVAKNLNESLIDLQELGKYEQYIKGSGRENLYFQGGGGSGYIPEAPRDGQAYVRKDGEWVLLSTFLGHHHHHHHH

SEQ ID NO: 5488 - protein, 1281 aa, Artificial Sequence
  Description of Artificial Sequence: Synthetic polypeptide
MGILPSPGMPALLSLVSLLSVLLMGCVAETGTQCVNLTTRTQLPPAYTNSFTRGVYYPDKVFRSSVLHSTQDLFLPFFSNVTWFHAIHVSGTNGTKRFDNPVLPFNDGVYFASTEKSNIIRGWIFGTTLDSKTQSLLIVNNATNVVIKVCEFQFCNDPFLGVYYHKNNKSWMESEFRVYSSANNCTFEYVSQPFLMDLEGKQGNFKNLREFVFKNIDGYFKIYSKHTPINLVRDLPQGFSALEPLVDLPIGINITRFQTLLALHRSYLTPGDSSSGWTAGAAAYYVGYLQPRTFLLKYNENGTITDAVDCALDPLSETKCTLKSFTVEKGIYQTSNFRVQPTESIVRFPNITNLCPFGEVFNATRFASVYAWNRKRISNCVADYSVLYNSASFSTFKCYGVSPTKLNDLCFTNVYADSFVIRGDEVRQIAPGQTGKIADYNYKLPDDFTGCVIAWNSNNLDSKVGGNYNYLYRLFRKSNLKPFERDISTEIYQAGSTPCNGVEGFNCYFPLQSYGFQPTNGVGYQPYRVVVLSFELLHAPATVCGPKKSTNLVKNKCVNFNFNGLTGTGVLTESNKKFLPFQQFGRDIADTTDAVRDPQTLEILDITPCSFGGVSVITPGTNTSNQVAVLYQDVNCTEVPVAIHADQLTPTWRVYSTGSNVFQTRAGCLIGAEHVNNSYECDIPIGAGICASYQTQTNSPSGAGSVASQSIIAYTMSLGAENSVAYSNNSIAIPTNFTISVTTEILPVSMTKTSVDCTMYICGDSTECSNLLLQYGSFCTQLNRALTGIAVEQDKNTQEVFAQVKQIYKTPPIKDFGGFNFSQILPDPSKPSKRSFIEDLLFNKVTLADAGFIKQYGDCLGDIAARDLICAQKFNGLTVLPPLLTDEMIAQYTSALLAGTITSGWTFGAGAALQIPFAMQMAYRFNGIGVTQNVLYENQKLIANQFNSAIGKIQDSLSSTASALGKLQDVVNQNAQALNTLVKQLSSNFGAISSVLNDILSRLDPPEAEVQIDRLITGRLQSLQTYVTQQLIRAAEIRASANLAATKMSECVLGQSKRVDFCGKGYHLMSFPQSAPHGVVFLHVTYVPAQMKNFTTAPAICHDGKAHFPREGVFVSNGTHWFVTQRNFYEPQIITTDNTFVSGNCDVVIGIVNNTVYDPLQPELDSFKEELDKYFKNHTSPDVDLGDISGINASVVNIQKEIDRLNEVAKNLNESLIDLQELGKYEQYIKGSGRENLYFQGGGGSGYIPEAPRDGQAYVRKDGEWVLLSTFLGHHHHHHHH

SEQ ID NO: 5489 - protein, 1281 aa, Artificial Sequence
  Description of Artificial Sequence: Synthetic polypeptide
MGILPSPGMPALLSLVSLLSVLLMGCVAETGTQCVNLTTRTQLPPAYTNSFTRGVYYPDKVFRSSVLHSTQDLFLPFFSNVTWFHAIHVSGTNGTKRFDNPVLPFNDGVYFASTEKSNIIRGWIFGTTLDSKTQSLLIVNNATNVVIKVCEFQFCNDPFLGVYYHKNNKSWMESEFRVYSSANNCTFEYVSQPFLMDLEGKQGNFKNLREFVFKNIDGYFKIYSKHTPINLVRDLPQGFSALEPLVDLPIGINITRFQTLLALHRSYLTPGDSSSGWTAGAAAYYVGYLQPRTFLLKYNENGTITDAVDCALDPLSETKCTLKSFTVEKGIYQTSNFRVQPTESIVRFPNITNLCPFGEVFNATRFASVYAWNRKRISNCVADYSVLYNSASFSTFKCYGVSPTKLNDLCFTNVYADSFVIRGDEVRQIAPGQTGKIADYNYKLPDDFTGCVIAWNSNNLDSKNGGNYNYLYRLFRKSNLKPFERDISTEIYQAGSTPCNGVEGFNCYFPLQSYGFQPTNGVGYQPYRVVVLSFELLHAPATVCGPKKSTNLVKNKCVNFNFNGLTGTGVLTESNKKFLPFQQFGRDIADTTDAVRDPQTLEILDITPCSFGGVSVITPGTNTSNQVAVLYQDVNCTEVPVAIHADQLTPTWRVYSTGSNVFQTRAGCLIGAEHVNNSYECDIPIGAGICASYQTQTNSPSGAGSVASQSIIAYTMSLGAENSVAYSNNSIAIPTNFTISVTTEILPVSMTKTSVDCTMYICGDSTECSNLLLQYGSFCTQLNRALTGIAVEQDKNTQEVFAQVKQIYKTPPIKDFGGFNFSQILPDPSKPSKRSFIEDLLFNKVTLADAGFIKQYGDCLGDIAARDLICAQKFNGLTVLPPLLTDEMIAQYTSALLAGTITSGWTFGAGAALQIPFAMQMAYRFNGIGVTQNVLYENQKLIANQFNSAIGKIQDSLSSTASALGKLQDVVNQNAQALNTLVKQLSSNFGAISSVLNDILSRLDPPEAEVQIDRLITGRLQSLQTYVTQQLIRAAEIRASANLAATKMSECVLGQSKRVDFCGKGYHLMSFPQSAPHGVVFLHVTYVPAQEKNFTTAPAICHDGKAHFPREGVFVSNGTHWFVTQRNFYEPQIITTDNTFVSGNCDVVIGIVNNTVYDPLQPELDSFKEELDKYFKNHTSPDVDLGDISGINASVVNIQKEIDRLNEVAKNLNESLIDLQELGKYEQYIKGSGRENLYFQGGGGSGYIPEAPRDGQAYVRKDGEWVLLSTFLGHHHHHHHH

SEQ ID NO: 5490 - protein, 1281 aa, Artificial Sequence
  Description of Artificial Sequence: Synthetic polypeptide
MGILPSPGMPALLSLVSLLSVLLMGCVAETGTQCVNLTTRTQLPPAYTNSFTRGVYYPDKVFRSSVLHSTQDLFLPFFSNVTWFHAIHVSGTNGTKRFDNPVLPFNDGVYFASTEKSNIIRGWIFGTTLDSKTQSLLIVNNATNVVIKVCEFQFCNDPFLGVYYHKNNKSWMESEFRVYSSANNCTFEYVSQPFLMDLEGKQGNFKNLREFVFKNIDGYFKIYSKHTPINLVRDLPQGFSALEPLVDLPIGINITRFQTLLALHRSYLTPGDSSSGWTAGAAAYYVGYLQPRTFLLKYNENGTITDAVDCALDPLSETKCTLKSFTVEKGIYQTSNFRVQPTESIVRFPNITNLCPFGEVFNATRFASVYAWNRKRISNCVADYSILYNSASFSTFKCYGVSPTKLNDLCFTNVYADSFVIRGDEVRQIAPGQTGKIADYNYKLPDDFTGCVIAWNSNNLDSKVGGNYNYLYRLFRKSNLKPFERDISTEIYQAGSTPCNGVEGFNCYFPLQSYGFQPTNGVGYQPYRVVVLSFELLHAPATVCGPKKSTNLVKNKCVNFNFNGLTGTGVLTESNKKFLPFQQFGRDIADTTDAVRDPQTLEILDITPCSFGGVSVITPGTNTSNQVAVLYQDVNCTEVPVAIHADQLTPTWRVYSTGSNVFQTRAGCLIGAEHVNNSYECDIPIGAGICASYQTQTNSPSGAGSVASQSIIAYTMSLGAENSVAYSNNSIAIPTNFTISVTTEILPVSMTKTSVDCTMYICGDSTECSNLLLQYGSFCTQLNRALTGIAVEQDKNTQEVFAQVKQIYKTPPIKDFGGFNFSQILPDPSKPSKRSFIEDLLFNKVTLADAGFIKQYGDCLGDIAARDLICAQKFNGLTVLPPLLTDEMIAQYTSALLAGTITSGWTFGAGAALQIPFAMQMAYRFNGIGVTQNVLYENQKLIANQFNSAIGKIQDSLSSTASALGKLQDVVNQNAQALNTLVKQLSSNFGAISSVLNDILSRLDPPEAEVQIDRLITGRLQSLQTYVTQQLIRAAEIRASANLAATKMSECVLGQSKRVDFCGKGYHLMSFPQSAPHGVVFLHVTYVPAQEKNFTTAPAICHDGKAHFPREGVFVSNGTHWFVTQRNFYEPQIITTDNTFVSGNCDVVIGIVNNTVYDPLQPELDSFKEELDKYFKNHTSPDVDLGDISGINASVVNIQKEIDRLNEVAKNLNESLIDLQELGKYEQYIKGSGRENLYFQGGGGSGYIPEAPRDGQAYVRKDGEWVLLSTFLGHHHHHHHH

SEQ ID NO: 5491 - protein, 1281 aa, Artificial Sequence
  Description of Artificial Sequence: Synthetic polypeptide
MGILPSPGMPALLSLVSLLSVLLMGCVAETGTQCVNLTTRTQLPPAYTNSFTRGVYYPDKVFRSSVLHSTQDLFLPFFSNVTWFHAIHVSGTNGTKRFDNPVLPFNDGVYFASTEKSNIIRGWIFGTTLDSKTQSLLIVNNATNVVIKVCEFQFCNDPFLGVYYHKNNKSWMESEFRVYSSANNCTFEYVSQPFLMDLEGKQGNFKNLREFVFKNIDGYFKIYSKHTPINLVRDLPQGFSALEPLVDLPIGINITRFQTLLALHRSYLTPGDSSSGWTAGAAAYYVGYLQPRTFLLKYNENGTITDAVDCALDPLSETKCTLKSFTVEKGIYQTSNFRVQPTESIVRFPNITNLCPFGEVFNATRFASVYAWNRKRISNCVADYSVLYNSASFSTFKCYGVSPTKLNDLCFTNVYADSFVIRGDEVRQIAPGQTGCIADYNYKLPDDFTGCVIAWNSNNLDSKVGGNYNYLYRLFRKSNLKPFERDISTEIYQAGSTPCNGVEGFNCYFPLQSYGFQPTNGVGYQPYRVVVLSFELLHAPATVCGPKKSTNLVKNKCVNFNFNGLTGTGVLTESNKKFLPFQQFGRDIADTTDAVRDPQTLEILDITPCSFGGVSVITPGTNTSNQVAVLYQDVNCTEVPVAIHADQLTPTWRVYSTGSNVFQTRAGCLIGAEHVNNSYECDIPIGAGICASYQTQTNSPSGAGSVASQSIIAYTMSLGAENSVAYSNNSIAIPTNFTISVTTEILPVSMTKTSVDCTMYICGDSTECSNLLLQYGSFCTQLNRALTGIAVEQDKNTQEVFAQVKQIYKTPPIKDFGGFNFSQILPDPSKPSKRSFIEDLLFNKVTLADAGFIKQYGDCLGDIAARDLICAQKFNGLTVLPPLLTDEMIAQYTSALLAGTITSGWTFGAGAALQIPFAMQMAYRFNGIGVTQNVLYENQKLIANQFNSAIGKIQDSLSSTASALGKLQDVVNQNAQALNTLVKQLSSNFGAISSVLNDILSRLDPPEAEVQIDRLITGRLQSLQTYVTQQLIRAAEIRASANLAATKMSECVLGQSKRVDFCGKGYHLMSFPQSAPHGVVFLHVTYVPAQEKNFTTAPAICHDGKAHFPREGVFVSNGTHWFVTQRNFYEPQIITTDNTFVSGNCDVVIGIVNNTVYDPLQPELDSFKEELDKYFKNHTSPDVDLGDISGINASVVNIQKEIDRLNEVAKNLNESLIDLQELGKYEQYIKGSGRENLYFQGGGGSGYIPEAPRDGQAYVRKDGEWVLLSTFLGHHHHHHHH

SEQ ID NO: 5492 - protein, 1281 aa, Artificial Sequence
  Description of Artificial Sequence: Synthetic polypeptide
MGILPSPGMPALLSLVSLLSVLLMGCVAETGTQCVNLTTRTQLPPAYTNSFTRGVYYPDKVFRSSVLHSTQDLFLPFFSNVTWFHAIHVSGTNGTKRFDNPVLPFNDGVYFASTEKSNIIRGWIFGTTLDSKTQSLLIVNNATNVVIKVCEFQFCNDPFLGVYYHKNNKSWMESEFRVYSSANNCTFEYVSQPFLMDLEGKQGNFKNLREFVFKNIDGYFKIYSKHTPINLVRDLPQGFSALEPLVDLPIGINITRFQTLLALHRSYLTPGDSSSGWTAGAAAYYVGYLQPRTFLLKYNENGTITDAVDCALDPLSETKCTLKSFTVEKGIYQTSNFRVQPTESIVRFPNITNLCPFGEVFNATRFASVYAWNRKRISNCVADYSVLYNSASFSTFKCYGVSPTKLNDLCFTNVYADLFVIRGDEVRQIAPGQTGKIADYNYKLPDDFTGCVIAWNSNNLDSKVGGNYNYLYRLFRKSNLKPFERDISTEIYQAGSTPCNGVEGFNCYFPLQSYGFQPTNGVGYQPYRVVVLSFELLHAPATVCGPKKSTNLVKNKCVNFNFNGLTGTGVLTESNKKFLPFQQFGRDIADTTDAVRDPQTLEILDITPCSFGGVSVITPGTNTSNQVAVLYQDVNCTEVPVAIHADQLTPTWRVYSTGSNVFQTRAGCLIGAEHVNNSYECDIPIGAGICASYQTQTNSPSGAGSVASQSIIAYTMSLGAENSVAYSNNSIAIPTNFTISVTTEILPVSMTKTSVDCTMYICGDSTECSNLLLQYGSFCTQLNRALTGIAVEQDKNTQEVFAQVKQIYKTPPIKDFGGFNFSQILPDPSKPSKRSFIEDLLFNKVTLADAGFIKQYGDCLGDIAARDLICAQKFNGLTVLPPLLTDEMIAQYTSALLAGTITSGWTFGAGAALQIPFAMQMAYRFNGIGVTQNVLYENQKLIANQFNSAIGKIQDSLSSTASALGKLQDVVNQNAQALNTLVKQLSSNFGAISSVLNDILSRLDPPEAEVQIDRLITGRLQSLQTYVTQQLIRAAEIRASANLAATKMSECVLGQSKRVDFCGKGYHLMSFPQSAPHGVVFLHVTYVPAQEKNFTTAPAICHDGKAHFPREGVFVSNGTHWFVTQRNFYEPQIITTDNTFVSGNCDVVIGIVNNTVYDPLQPELDSFKEELDKYFKNHTSPDVDLGDISGINASVVNIQKEIDRLNEVAKNLNESLIDLQELGKYEQYIKGSGRENLYFQGGGGSGYIPEAPRDGQAYVRKDGEWVLLSTFLGHHHHHHHH

SEQ ID NO: 5493 - protein, 1281 aa, Artificial Sequence
  Description of Artificial Sequence: Synthetic polypeptide
MGILPSPGMPALLSLVSLLSVLLMGCVAETGTQCVNLTTRTQLPPAYTNSFTRGVYYPDKVFRSSVLHSTQDLFLPFFSNVTWFHAIHVSGTNGTKRFDNPVLPFNDGVYFASTEKSNIIRGWIFGTTLDSKTQSLLIVNNATNVVIKVCEFQFCNDPFLGVYYHKNNKSWMESEFRVYSSANNCTFEYVSQPFLMDLEGKQGNFKNLREFVFKNIDGYFKIYSKHTPINLVRDLPQGFSALEPLVDLPIGINITRFQTLLALHRSYLTPGDSSSGWTAGAAAYYVGYLQPRTFLLKYNENGTITDAVDCALDPLSETKCTLKSFTVEKGIYQTSNFRVQPTESIVRFTNITNLCPFGEVFNATRFASVYAWNRKRISNCVADYSVLYNSASFSTFKCYGVSPTKLNDLCFTNVYADSFVIRGDEVRQIAPGQTGKIADYNYKLPDDFTGCVIAWNSNNLDSKVGGNYNYLYRLFRKSNLKPFERDISTEIYQAGSTPCNGVEGFNCYFPLQSYGFQPTNGVGYQPYRVVVLSFELLHAPATVCGPKKSTNLVKNKCVNFNFNGLTGTGVLTESNKKFLPFQQFGRDIADTTDAVRDPQTLEILDITPCSFGGVSVITPGTNTSNQVAVLYQDVNCTEVPVAIHADQLTPTWRVYSTGSNVFQTRAGCLIGAEHVNNSYECDIPIGAGICASYQTQTNSPSGAGSVASQSIIAYTMSLGAENSVAYSNNSIAIPTNFTISVTTEILPVSMTKTSVDCTMYICGDSTECSNLLLQYGSFCTQLNRALTGIAVEQDKNTQEVFAQVKQIYKTPPIKDFGGFNFSQILPDPSKPSKRSFIEDLLFNKVTLADAGFIKQYGDCLGDIAARDLICAQKFNGLTVLPPLLTDEMIAQYTSALLAGTITSGWTFGAGAALQIPFAMQMAYRFNGIGVTQNVLYENQKLIANQFNSAIGKIQDSLSSTASALGKLQDVVNQNAQALNTLVKQLSSNFGAISSVLNDILSRLDPPEAEVQIDRLITGRLQSLQTYVTQQLIRAAEIRASANLAATKMSECVLGQSKRVDFCGKGYHLMSFPQSAPHGVVFLHVTYVPAQEKNFTTAPAICHDGKAHFPREGVFVSNGTHWFVTQRNFYEPQIITTDNTFVSGNCDVVIGIVNNTVYDPLQPELDSFKEELDKYFKNHTSPDVDLGDISGINASVVNIQKEIDRLNEVAKNLNESLIDLQELGKYEQYIKGSGRENLYFQGGGGSGYIPEAPRDGQAYVRKDGEWVLLSTFLGHHHHHHHH

SEQ ID NO: 5494 - protein, 1281 aa, Artificial Sequence
  Description of Artificial Sequence: Synthetic polypeptide
MGILPSPGMPALLSLVSLLSVLLMGCVAETGTQCVNLTTRTQLPPAYTNSFTRGVYYPDKVFRSSVLHSTQDLFLPFFSNVTWFHAIHVSGTNGTKRFDNPVLPFNDGVYFASTEKSNIIRGWIFGTTLDSKTQSLLIVNNATNVVIKVCEFQFCNDPFLGVYYHKNNKSWMESEFRVYSSANNCTFEYVSQPFLMDLEGKQGNFKNLREFVFKNIDGYFKIYSKHTPINLVRDLPQGFSALEPLVDLPIGINITRFQTLLALHRSYLTPGDSSSGWTAGAAAYYVGYLQPRTFLLKYNENGTITDAVDCALDPLSETKCTLKSFTVEKGIYQTSNFRVQPTESIVRFPNITNLCPFGEVFNATRFASVYAWNRKRISNCVADYSVLYNSASFSTFKCYGVSPTKLNDLCFTNVYADSFVIRGDEVRQIAPGQTGRIADYNYKLPDDFTGCVIAWNSNNLDSKVGGNYNYLYRLFRKSNLKPFERDISTEIYQAGSTPCNGVEGFNCYFPLQSYGFQPTNGVGYQPYRVVVLSFELLHAPATVCGPKKSTNLVKNKCVNFNFNGLTGTGVLTESNKKFLPFQQFGRDIADTTDAVRDPQTLEILDITPCSFGGVSVITPGTNTSNQVAVLYQDVNCTEVPVAIHADQLTPTWRVYSTGSNVFQTRAGCLIGAEHVNNSYECDIPIGAGICASYQTQTNSPSGAGSVASQSIIAYTMSLGAENSVAYSNNSIAIPTNFTISVTTEILPVSMTKTSVDCTMYICGDSTECSNLLLQYGSFCTQLNRALTGIAVEQDKNTQEVFAQVKQIYKTPPIKDFGGFNFSQILPDPSKPSKRSFIEDLLFNKVTLADAGFIKQYGDCLGDIAARDLICAQKFNGLTVLPPLLTDEMIAQYTSALLAGTITSGWTFGAGAALQIPFAMQMAYRFNGIGVTQNVLYENQKLIANQFNSAIGKIQDSLSSTASALGKLQDVVNQNAQALNTLVKQLSSNFGAISSVLNDILSRLDPPEAEVQIDRLITGRLQSLQTYVTQQLIRAAEIRASANLAATKMSECVLGQSKRVDFCGKGYHLMSFPQSAPHGVVFLHVTYVPAQEKNFTTAPAICHDGKAHFPREGVFVSNGTHWFVTQRNFYEPQIITTDNTFVSGNCDVVIGIVNNTVYDPLQPELDSFKEELDKYFKNHTSPDVDLGDISGINASVVNIQKEIDRLNEVAKNLNESLIDLQELGKYEQYIKGSGRENLYFQGGGGSGYIPEAPRDGQAYVRKDGEWVLLSTFLGHHHHHHHH

SEQ ID NO: 5495 - protein, 1281 aa, Artificial Sequence
  Description of Artificial Sequence: Synthetic polypeptide
MGILPSPGMPALLSLVSLLSVLLMGCVAETGTQCVNLTTRTQLPPAYTNSFTRGVYYPDKVFRSSVLHSTQDLFLPFFSNVTWFHAIHVSGTNGTKRFDNPVLPFNDGVYFASTEKSNIIRGWIFGTTLDSKTQSLLIVNNATNVVIKVCEFQFCNDPFLGVYYHKNNKSWMESEFRVYSSANNCTFEYVSQPFLMDLEGKQGNFKNLREFVFKNIDGYFKIYSKHTPINLVRDLPQGFSALEPLVDLPIGINITRFQTLLALHRSYLTPGDSSSGWTAGAAAYYVGYLQPRTFLLKYNENGTITDAVDCALDPLSETKCTLKSFTVEKGIYQTSNFRVQPTESIVRFPNITNLCPFGEVFNATRFASVYAWNRKRISNCVADYSVLYNSASFSTFKCYGVSPTKLNDLCFTNVYADSFVIRGDEVRQIAPGQTGKIADYNYKLPDDFTGCVIAWNSNNLDSKVGGNYNYLYRLFRKSNLKPFERDISTEIYQAGSTPCNGVEGFNCYFALQSYGFQPTNGVGYQPYRVVVLSFELLHAPATVCGPKKSTNLVKNKCVNFNFNGLTGTGVLTESNKKFLPFQQFGRDIADTTDAVRDPQTLEILDITPCSFGGVSVITPGTNTSNQVAVLYQDVNCTEVPVAIHADQLTPTWRVYSTGSNVFQTRAGCLIGAEHVNNSYECDIPIGAGICASYQTQTNSPSGAGSVASQSIIAYTMSLGAENSVAYSNNSIAIPTNFTISVTTEILPVSMTKTSVDCTMYICGDSTECSNLLLQYGSFCTQLNRALTGIAVEQDKNTQEVFAQVKQIYKTPPIKDFGGFNFSQILPDPSKPSKRSFIEDLLFNKVTLADAGFIKQYGDCLGDIAARDLICAQKFNGLTVLPPLLTDEMIAQYTSALLAGTITSGWTFGAGAALQIPFAMQMAYRFNGIGVTQNVLYENQKLIANQFNSAIGKIQDSLSSTASALGKLQDVVNQNAQALNTLVKQLSSNFGAISSVLNDILSRLDPPEAEVQIDRLITGRLQSLQTYVTQQLIRAAEIRASANLAATKMSECVLGQSKRVDFCGKGYHLMSFPQSAPHGVVFLHVTYVPAQEKNFTTAPAICHDGKAHFPREGVFVSNGTHWFVTQRNFYEPQIITTDNTFVSGNCDVVIGIVNNTVYDPLQPELDSFKEELDKYFKNHTSPDVDLGDISGINASVVNIQKEIDRLNEVAKNLNESLIDLQELGKYEQYIKGSGRENLYFQGGGGSGYIPEAPRDGQAYVRKDGEWVLLSTFLGHHHHHHHH

SEQ ID NO: 5496 - protein, 1281 aa, Artificial Sequence
  Description of Artificial Sequence: Synthetic polypeptide
MGILPSPGMPALLSLVSLLSVLLMGCVAETGTQCVNLTTRTQLPPAYTNSFTRGVYYPDKVFRSSVLHSTQDLFLPFFSNVTWFHAIHVSGTNGTKRFDNPVLPFNDGVYFASTEKSNIIRGWIFGTTLDSKTQSLLIVNNATNVVIKVCEFQFCNDPFLGVYYHKNNKSWMESEFRVYSSANNCTFEYVSQPFLMDLEGKQGNFKNLREFVFKNIDGYFKIYSKHTPINLVRDLPQGFSALEPLVDLPIGINITRFQTLLALHRSYLTPGDSSSGWTAGAAAYYVGYLQPRTFLLKYNENGTITDAVDCALDPLSETKCTLKSFTVEKGIYQTSNFRVQPTESIVRFPNITNLCPFGEVFNATRFASVYAWNRKRISNCVADYSVLYNSASFSTFKCYGVSPTKLNDLCFTNVYADSFVIRGDEVRQIAPGQTGKIADYNYKLPDDFTGCVIAWNSGNLDSKVGGNYNYLYRLFRKSNLKPFERDISTEIYQAGSTPCNGVEGFNCYFPLQSYGFQPTNGVGYQPYRVVVLSFELLHAPATVCGPKKSTNLVKNKCVNFNFNGLTGTGVLTESNKKFLPFQQFGRDIADTTDAVRDPQTLEILDITPCSFGGVSVITPGTNTSNQVAVLYQDVNCTEVPVAIHADQLTPTWRVYSTGSNVFQTRAGCLIGAEHVNNSYECDIPIGAGICASYQTQTNSPSGAGSVASQSIIAYTMSLGAENSVAYSNNSIAIPTNFTISVTTEILPVSMTKTSVDCTMYICGDSTECSNLLLQYGSFCTQLNRALTGIAVEQDKNTQEVFAQVKQIYKTPPIKDFGGFNFSQILPDPSKPSKRSFIEDLLFNKVTLADAGFIKQYGDCLGDIAARDLICAQKFNGLTVLPPLLTDEMIAQYTSALLAGTITSGWTFGAGAALQIPFAMQMAYRFNGIGVTQNVLYENQKLIANQFNSAIGKIQDSLSSTASALGKLQDVVNQNAQALNTLVKQLSSNFGAISSVLNDILSRLDPPEAEVQIDRLITGRLQSLQTYVTQQLIRAAEIRASANLAATKMSECVLGQSKRVDFCGKGYHLMSFPQSAPHGVVFLHVTYVPAQEKNFTTAPAICHDGKAHFPREGVFVSNGTHWFVTQRNFYEPQIITTDNTFVSGNCDVVIGIVNNTVYDPLQPELDSFKEELDKYFKNHTSPDVDLGDISGINASVVNIQKEIDRLNEVAKNLNESLIDLQELGKYEQYIKGSGRENLYFQGGGGSGYIPEAPRDGQAYVRKDGEWVLLSTFLGHHHHHHHH

SEQ ID NO: 5497 - protein, 1281 aa, Artificial Sequence
  Description of Artificial Sequence: Synthetic polypeptide
MGILPSPGMPALLSLVSLLSVLLMGCVAETGTQCVNLTTRTQLPPAYTNSFTRGVYYPDKVFRSSVLHSTQDLFLPFFSNVTWFHAIHVSGTNGTKRFDNPVLPFNDGVYFASTEKSNIIRGWIFGTTLDSKTQSLLIVNNATNVVIKVCEFQFCNDPFLGVYYHKNNKSWMESEFRVYSSANNCTFEYVSQPFLMDLEGKQGNFKNLREFVFKNIDGYFKIYSKHTPINLVRDLPQGFSALEPLVDLPIGINITRFQTLLALHRSYLTPGDSSSGWTAGAAAYYVGYLQPRTFLLKYNENGTITDAVDCALDPLSETKCTLKSFTVEKGIYQTSNFRVQPTESIVRFPNITNLCPFGEVFNATRFASVYAWNRKRISNCVADYSVLYNSASFSTFKCYGVSPTKLNDLCFTNVYADSFVIRGDEVRQIAPGQTGKIADYNYKLPDDFTGCVIAWNSNNLDSKVGGNYNYLYRLFRKSNLKPFERDISTEIYQAGGTPCNGVEGFNCYFPLQSYGFQPTNGVGYQPYRVVVLSFELLHAPATVCGPKKSTNLVKNKCVNFNFNGLTGTGVLTESNKKFLPFQQFGRDIADTTDAVRDPQTLEILDITPCSFGGVSVITPGTNTSNQVAVLYQDVNCTEVPVAIHADQLTPTWRVYSTGSNVFQTRAGCLIGAEHVNNSYECDIPIGAGICASYQTQTNSPSGAGSVASQSIIAYTMSLGAENSVAYSNNSIAIPTNFTISVTTEILPVSMTKTSVDCTMYICGDSTECSNLLLQYGSFCTQLNRALTGIAVEQDKNTQEVFAQVKQIYKTPPIKDFGGFNFSQILPDPSKPSKRSFIEDLLFNKVTLADAGFIKQYGDCLGDIAARDLICAQKFNGLTVLPPLLTDEMIAQYTSALLAGTITSGWTFGAGAALQIPFAMQMAYRFNGIGVTQNVLYENQKLIANQFNSAIGKIQDSLSSTASALGKLQDVVNQNAQALNTLVKQLSSNFGAISSVLNDILSRLDPPEAEVQIDRLITGRLQSLQTYVTQQLIRAAEIRASANLAATKMSECVLGQSKRVDFCGKGYHLMSFPQSAPHGVVFLHVTYVPAQEKNFTTAPAICHDGKAHFPREGVFVSNGTHWFVTQRNFYEPQIITTDNTFVSGNCDVVIGIVNNTVYDPLQPELDSFKEELDKYFKNHTSPDVDLGDISGINASVVNIQKEIDRLNEVAKNLNESLIDLQELGKYEQYIKGSGRENLYFQGGGGSGYIPEAPRDGQAYVRKDGEWVLLSTFLGHHHHHHHH

SEQ ID NO: 5498 - protein, 1281 aa, Artificial Sequence
  Description of Artificial Sequence: Synthetic polypeptide
MGILPSPGMPALLSLVSLLSVLLMGCVAETGTQCVNLTTRTQLPPAYTNSFTRGVYYPDKVFRSSVLHSTQDLFLPFFSNVTWFHAIHVSGTNGTKRFDNPVLPFNDGVYFASTEKSNIIRGWIFGTTLDSKTQSLLIVNNATNVVIKVCEFQFCNDPFLGVYYHKNNKSWMESEFRVYSSANNCTFEYVSQPFLMDLEGKQGNFKNLREFVFKNIDGYFKIYSKHTPINLVRDLPQGFSALEPLVDLPIGINITRFQTLLALHRSYLTPGDSSSGWTAGAAAYYVGYLQPRTFLLKYNENGTITDAVDCALDPLSETKCTLKSFTVEKGIYQTSNFRVQPTESIVRFPNITNLCPFGEVFNATRFASVYAWNRKRISNCVADYSVLYNSASFETFKCYGVSPTKLNDLCFTNVYADSFVIRGDEVRQIAPGQTGKIADYNYKLPDDFTGCVIAWNSNNLDSKVGGNYNYLYRLFRKSNLKPFERDISTEIYQAGSTPCNGVEGFNCYFPLQSYGFQPTNGVGYQPYRVVVLSFELLHAPATVCGPKKSTNLVKNKCVNFNFNGLTGTGVLTESNKKFLPFQQFGRDIADTTDAVRDPQTLEILDITPCSFGGVSVITPGTNTSNQVAVLYQDVNCTEVPVAIHADQLTPTWRVYSTGSNVFQTRAGCLIGAEHVNNSYECDIPIGAGICASYQTQTNSPSGAGSVASQSIIAYTMSLGAENSVAYSNNSIAIPTNFTISVTTEILPVSMTKTSVDCTMYICGDSTECSNLLLQYGSFCTQLNRALTGIAVEQDKNTQEVFAQVKQIYKTPPIKDFGGFNFSQILPDPSKPSKRSFIEDLLFNKVTLADAGFIKQYGDCLGDIAARDLICAQKFNGLTVLPPLLTDEMIAQYTSALLAGTITSGWTFGAGAALQIPFAMQMAYRFNGIGVTQNVLYENQKLIANQFNSAIGKIQDSLSSTASALGKLQDVVNQNAQALNTLVKQLSSNFGAISSVLNDILSRLDPPEAEVQIDRLITGRLQSLQTYVTQQLIRAAEIRASANLAATKMSECVLGQSKRVDFCGKGYHLMSFPQSAPHGVVFLHVTYVPAQEKNFTTAPAICHDGKAHFPREGVFVSNGTHWFVTQRNFYEPQIITTDNTFVSGNCDVVIGIVNNTVYDPLQPELDSFKEELDKYFKNHTSPDVDLGDISGINASVVNIQKEIDRLNEVAKNLNESLIDLQELGKYEQYIKGSGRENLYFQGGGGSGYIPEAPRDGQAYVRKDGEWVLLSTFLGHHHHHHHH

SEQ ID NO: 5499 - protein, 1281 aa, Artificial Sequence
  Description of Artificial Sequence: Synthetic polypeptide
MGILPSPGMPALLSLVSLLSVLLMGCVAETGTQCVNLTTRTQLPPAYTNSFTRGVYYPDKVFRSSVLHSTQDLFLPFFSNVTWFHAIHVSGTNGTKRFDNPVLPFNDGVYFASTEKSNIIRGWIFGTTLDSKTQSLLIVNNATNVVIKVCEFQFCNDPFLGVYYHKNNKSWMESEFRVYSSANNCTFEYVSQPFLMDLEGKQGNFKNLREFVFKNIDGYFKIYSKHTPINLVRDLPQGFSALEPLVDLPIGINITRFQTLLALHRSYLTPGDSSSGWTAGAAAYYVGYLQPRTFLLKYNENGTITDAVDCALDPLSETKCTLKSFTVEKGIYQTSNFRVQPTESIVRFPNITNLCPFGEVFNATRFASVYAWNRKRISNCVADYSVLYNSASFSTFKCYGVSPTKLNDLCFTNVYADSFVIRGDEVRQIAPGQTGKIADYNYVLPDDFTGCVIAWNSNNLDSKVGGNYNYLYRLFRKSNLKPFERDISTEIYQAGSTPCNGVEGFNCYFPLQSYGFQPTNGVGYQPYRVVVLSFELLHAPATVCGPKKSTNLVKNKCVNFNFNGLTGTGVLTESNKKFLPFQQFGRDIADTTDAVRDPQTLEILDITPCSFGGVSVITPGTNTSNQVAVLYQDVNCTEVPVAIHADQLTPTWRVYSTGSNVFQTRAGCLIGAEHVNNSYECDIPIGAGICASYQTQTNSPSGAGSVASQSIIAYTMSLGAENSVAYSNNSIAIPTNFTISVTTEILPVSMTKTSVDCTMYICGDSTECSNLLLQYGSFCTQLNRALTGIAVEQDKNTQEVFAQVKQIYKTPPIKDFGGFNFSQILPDPSKPSKRSFIEDLLFNKVTLADAGFIKQYGDCLGDIAARDLICAQKFNGLTVLPPLLTDEMIAQYTSALLAGTITSGWTFGAGAALQIPFAMQMAYRFNGIGVTQNVLYENQKLIANQFNSAIGKIQDSLSSTASALGKLQDVVNQNAQALNTLVKQLSSNFGAISSVLNDILSRLDPPEAEVQIDRLITGRLQSLQTYVTQQLIRAAEIRASANLAATKMSECVLGQSKRVDFCGKGYHLMSFPQSAPHGVVFLHVTYVPAQEKNFTTAPAICHDGKAHFPREGVFVSNGTHWFVTQRNFYEPQIITTDNTFVSGNCDVVIGIVNNTVYDPLQPELDSFKEELDKYFKNHTSPDVDLGDISGINASVVNIQKEIDRLNEVAKNLNESLIDLQELGKYEQYIKGSGRENLYFQGGGGSGYIPEAPRDGQAYVRKDGEWVLLSTFLGHHHHHHHH

SEQ ID NO: 5500 - protein, 1281 aa, Artificial Sequence
  Description of Artificial Sequence: Synthetic polypeptide
MGILPSPGMPALLSLVSLLSVLLMGCVAETGTQCVNLTTRTQLPPAYTNSFTRGVYYPDKVFRSSVLHSTQDLFLPFFSNVTWFHAIHVSGTNGTKRFDNPVLPFNDGVYFASTEKSNIIRGWIFGTTLDSKTQSLLIVNNATNVVIKVCEFQFCNDPFLGVYYHKNNKSWMESEFRVYSSANNCTFEYVSQPFLMDLEGKQGNFKNLREFVFKNIDGYFKIYSKHTPINLVRDLPQGFSALEPLVDLPIGINITRFQTLLALHRSYLTPGDSSSGWTAGAAAYYVGYLQPRTFLLKYNENGTITDAVDCALDPLSETKCTLKSFTVEKGIYQTSNFRVQPTESIVRFPNITNLCPFGEVFNATRFASVYAWNRKRISNCVADYSVLYNSASFSTFKCYGVSPTKLNDLCFTNVYADSFVIRGDEVRQIAPGQTGKIADYNYKLPDDFTGCVIAWNSNNLDSKVGGNYNYLYRLFRKSNLKPFERDISTEIYQAGSTPCNGVEGFNCYFPLQSYGFQPTNGVGYQPYRVVVLSFELLHAPATVCGPKKSTNLVKNKCVNFNFNGLTGTGVLTESNKKFLPFQQFGRDIADTTDAVRDPQTLEILDITPCSFGGVSVITPGTNTSNQVAVLYQDVNCTEVPVAIHADQLTPTWRVYSTGSNVFQTRAGCLIGAEHVNNSYECDIPIGAGICASYQTQTNSPSGAGSVASQSIIAYTESLGAENSVAYSNNSIAIPTNFTISVTTEILPVSMTKTSVDCTMYICGDSTECSNLLLQYGSFCTQLNRALTGIAVEQDKNTQEVFAQVKQIYKTPPIKDFGGFNFSQILPDPSKPSKRSFIEDLLFNKVTLADAGFIKQYGDCLGDIAARDLICAQKFNGLTVLPPLLTDEMIAQYTSALLAGTITSGWTFGAGAALQIPFAMQMAYRFNGIGVTQNVLYENQKLIANQFNSAIGKIQDSLSSTASALGKLQDVVNQNAQALNTLVKQLSSNFGAISSVLNDILSRLDPPEAEVQIDRLITGRLQSLQTYVTQQLIRAAEIRASANLAATKMSECVLGQSKRVDFCGKGYHLMSFPQSAPHGVVFLHVTYVPAQEKNFTTAPAICHDGKAHFPREGVFVSNGTHWFVTQRNFYEPQIITTDNTFVSGNCDVVIGIVNNTVYDPLQPELDSFKEELDKYFKNHTSPDVDLGDISGINASVVNIQKEIDRLNEVAKNLNESLIDLQELGKYEQYIKGSGRENLYFQGGGGSGYIPEAPRDGQAYVRKDGEWVLLSTFLGHHHHHHHH

SEQ ID NO: 5501 - protein, 1281 aa, Artificial Sequence
  Description of Artificial Sequence: Synthetic polypeptide
MGILPSPGMPALLSLVSLLSVLLMGCVAETGTQCVNLTTRTQLPPAYTNSFTRGVYYPDKVFRSSVLHSTQDLFLPFFSNVTWFHAIHVSGTNGTKRFDNPVLPFNDGVYFASTEKSNIIRGWIFGTTLDSKTQSLLIVNNATNVVIKVCEFQFCNDPFLGVYYHKNNKSWMESEFRVYSSANNCTFEYVSQPFLMDLEGKQGNFKNLREFVFKNIDGYFKIYSKHTPINLVRDLPQGFSALEPLVDLPIGINITRFQTLLALHRSYLTPGDSSSGWTAGAAAYYVGYLQPRTFLLKYNENGTITDAVDCALDPLSETKCTLKSFTVEKGIYQTSNFRVQPTESIVRFPNITNLCPFGEVFNATRFASVYAWNRKRISNCVADYSVLYKSASFSTFKCYGVSPTKLNDLCFTNVYADSFVIRGDEVRQIAPGQTGKIADYNYKLPDDFTGCVIAWNSNNLDSKVGGNYNYLYRLFRKSNLKPFERDISTEIYQAGSTPCNGVEGFNCYFPLQSYGFQPTNGVGYQPYRVVVLSFELLHAPATVCGPKKSTNLVKNKCVNFNFNGLTGTGVLTESNKKFLPFQQFGRDIADTTDAVRDPQTLEILDITPCSFGGVSVITPGTNTSNQVAVLYQDVNCTEVPVAIHADQLTPTWRVYSTGSNVFQTRAGCLIGAEHVNNSYECDIPIGAGICASYQTQTNSPSGAGSVASQSIIAYTMSLGAENSVAYSNNSIAIPTNFTISVTTEILPVSMTKTSVDCTMYICGDSTECSNLLLQYGSFCTQLNRALTGIAVEQDKNTQEVFAQVKQIYKTPPIKDFGGFNFSQILPDPSKPSKRSFIEDLLFNKVTLADAGFIKQYGDCLGDIAARDLICAQKFNGLTVLPPLLTDEMIAQYTSALLAGTITSGWTFGAGAALQIPFAMQMAYRFNGIGVTQNVLYENQKLIANQFNSAIGKIQDSLSSTASALGKLQDVVNQNAQALNTLVKQLSSNFGAISSVLNDILSRLDPPEAEVQIDRLITGRLQSLQTYVTQQLIRAAEIRASANLAATKMSECVLGQSKRVDFCGKGYHLMSFPQSAPHGVVFLHVTYVPAQEKNFTTAPAICHDGKAHFPREGVFVSNGTHWFVTQRNFYEPQIITTDNTFVSGNCDVVIGIVNNTVYDPLQPELDSFKEELDKYFKNHTSPDVDLGDISGINASVVNIQKEIDRLNEVAKNLNESLIDLQELGKYEQYIKGSGRENLYFQGGGGSGYIPEAPRDGQAYVRKDGEWVLLSTFLGHHHHHHHH

SEQ ID NO: 5502 - protein, 1281 aa, Artificial Sequence
  Description of Artificial Sequence: Synthetic polypeptide
MGILPSPGMPALLSLVSLLSVLLMGCVAETGTQCVNLTTRTQLPPAYTNSFTRGVYYPDKVFRSSVLHSTQDLFLPFFSNVTWFHAIHVSGTNGTKRFDNPVLPFNDGVYFASTEKSNIIRGWIFGTTLDSKTQSLLIVNNATNVVIKVCEFQFCNDPFLGVYYHKNNKSWMESEFRVYSSANNCTFEYVSQPFLMDLEGKQGNFKNLREFVFKNIDGYFKIYSKHTPINLVRDLPQGFSALEPLVDLPIGINITRFQTLLALHRSYLTPGDSSSGWTAGAAAYYVGYLQPRTFLLKYNENGTITDAVDCALDPLSETKCTLKSFTVEKGIYQTSNFRVQPTESIVRFPNITNLCPFGEVFNATRFASVYAWNRKRISNCVADYSVLYNSTSFSTFKCYGVSPTKLNDLCFTNVYADSFVIRGDEVRQIAPGQTGKIADYNYKLPDDFTGCVIAWNSNNLDSKVGGNYNYLYRLFRKSNLKPFERDISTEIYQAGSTPCNGVEGFNCYFPLQSYGFQPTNGVGYQPYRVVVLSFELLHAPATVCGPKKSTNLVKNKCVNFNFNGLTGTGVLTESNKKFLPFQQFGRDIADTTDAVRDPQTLEILDITPCSFGGVSVITPGTNTSNQVAVLYQDVNCTEVPVAIHADQLTPTWRVYSTGSNVFQTRAGCLIGAEHVNNSYECDIPIGAGICASYQTQTNSPSGAGSVASQSIIAYTMSLGAENSVAYSNNSIAIPTNFTISVTTEILPVSMTKTSVDCTMYICGDSTECSNLLLQYGSFCTQLNRALTGIAVEQDKNTQEVFAQVKQIYKTPPIKDFGGFNFSQILPDPSKPSKRSFIEDLLFNKVTLADAGFIKQYGDCLGDIAARDLICAQKFNGLTVLPPLLTDEMIAQYTSALLAGTITSGWTFGAGAALQIPFAMQMAYRFNGIGVTQNVLYENQKLIANQFNSAIGKIQDSLSSTASALGKLQDVVNQNAQALNTLVKQLSSNFGAISSVLNDILSRLDPPEAEVQIDRLITGRLQSLQTYVTQQLIRAAEIRASANLAATKMSECVLGQSKRVDFCGKGYHLMSFPQSAPHGVVFLHVTYVPAQEKNFTTAPAICHDGKAHFPREGVFVSNGTHWFVTQRNFYEPQIITTDNTFVSGNCDVVIGIVNNTVYDPLQPELDSFKEELDKYFKNHTSPDVDLGDISGINASVVNIQKEIDRLNEVAKNLNESLIDLQELGKYEQYIKGSGRENLYFQGGGGSGYIPEAPRDGQAYVRKDGEWVLLSTFLGHHHHHHHH

SEQ ID NO: 5503 - protein, 1281 aa, Artificial Sequence
  Description of Artificial Sequence: Synthetic polypeptide
MGILPSPGMPALLSLVSLLSVLLMGCVAETGTQCVNLTTRTQLPPAYTNSFTRGVYYPDKVFRSSVLHSTQDLFLPFFSNVTWFHAIHVSGTNGTKRFDNPVLPFNDGVYFASTEKSNIIRGWIFGTTLDSKTQSLLIVNNATNVVIKVCEFQFCNDPFLGVYYHKNNKSWMESEFRVYSSANNCTFEYVSQPFLMDLEGKQGNFKNLREFVFKNIDGYFKIYSKHTPINLVRDLPQGFSALEPLVDLPIGINITRFQTLLALHRSYLTPGDSSSGWTAGAAAYYVGYLQPRTFLLKYNENGTITDAVDCALDPLSETKCTLKSFTVEKGIYQTSNFRVQPTESIVRFPNITNLCPLGEVFNATRFASVYAWNRKRISNCVADYSVLYNSASFSTFKCYGVSPTKLNDLCFTNVYADSFVIRGDEVRQIAPGQTGKIADYNYKLPDDFTGCVIAWNSNNLDSKVGGNYNYLYRLFRKSNLKPFERDISTEIYQAGSTPCNGVEGFNCYFPLQSYGFQPTNGVGYQPYRVVVLSFELLHAPATVCGPKKSTNLVKNKCVNFNFNGLTGTGVLTESNKKFLPFQQFGRDIADTTDAVRDPQTLEILDITPCSFGGVSVITPGTNTSNQVAVLYQDVNCTEVPVAIHADQLTPTWRVYSTGSNVFQTRAGCLIGAEHVNNSYECDIPIGAGICASYQTQTNSPSGAGSVASQSIIAYTMSLGAENSVAYSNNSIAIPTNFTISVTTEILPVSMTKTSVDCTMYICGDSTECSNLLLQYGSFCTQLNRALTGIAVEQDKNTQEVFAQVKQIYKTPPIKDFGGFNFSQILPDPSKPSKRSFIEDLLFNKVTLADAGFIKQYGDCLGDIAARDLICAQKFNGLTVLPPLLTDEMIAQYTSALLAGTITSGWTFGAGAALQIPFAMQMAYRFNGIGVTQNVLYENQKLIANQFNSAIGKIQDSLSSTASALGKLQDVVNQNAQALNTLVKQLSSNFGAISSVLNDILSRLDPPEAEVQIDRLITGRLQSLQTYVTQQLIRAAEIRASANLAATKMSECVLGQSKRVDFCGKGYHLMSFPQSAPHGVVFLHVTYVPAQEKNFTTAPAICHDGKAHFPREGVFVSNGTHWFVTQRNFYEPQIITTDNTFVSGNCDVVIGIVNNTVYDPLQPELDSFKEELDKYFKNHTSPDVDLGDISGINASVVNIQKEIDRLNEVAKNLNESLIDLQELGKYEQYIKGSGRENLYFQGGGGSGYIPEAPRDGQAYVRKDGEWVLLSTFLGHHHHHHHH

SEQ ID NO: 5504 - protein, 1281 aa, Artificial Sequence
  Description of Artificial Sequence: Synthetic polypeptide
MGILPSPGMPALLSLVSLLSVLLMGCVAETGTQCVNLTTRTQLPPAYTNSFTRGVYYPDKVFRSSVLHSTQDLFLPFFSNVTWFHAIHVSGTNGTKRFDNPVLPFNDGVYFASTEKSNIIRGWIFGTTLDSKTQSLLIVNNATNVVIKVCEFQFCNDPFLGVYYHKNNKSWMESEFRVYSSANNCTFEYVSQPFLMDLEGKQGNFKNLREFVFKNIDGYFKIYSKHTPINLVRDLPQGFSALEPLVDLPIGINITRFQTLLALHRSYLTPGDSSSGWTAGAAAYYVGYLQPRTFLLKYNENGTITDAVDCALDPLSETKCTLKSFTVEKGIYQTSNFRVQPTESIVRFPNITNLCPFGEVFNATRFASVYAWNRKRISNCVADYSVLYNSASFSTFKCYGVSPTKLNDLCFTNVYADSFVIRGDEVRQIAPGQTGKIADYNYKLPDDFTGCVIAWNSNSLDSKVGGNYNYLYRLFRKSNLKPFERDISTEIYQAGSTPCNGVEGFNCYFPLQSYGFQPTNGVGYQPYRVVVLSFELLHAPATVCGPKKSTNLVKNKCVNFNFNGLTGTGVLTESNKKFLPFQQFGRDIADTTDAVRDPQTLEILDITPCSFGGVSVITPGTNTSNQVAVLYQDVNCTEVPVAIHADQLTPTWRVYSTGSNVFQTRAGCLIGAEHVNNSYECDIPIGAGICASYQTQTNSPSGAGSVASQSIIAYTMSLGAENSVAYSNNSIAIPTNFTISVTTEILPVSMTKTSVDCTMYICGDSTECSNLLLQYGSFCTQLNRALTGIAVEQDKNTQEVFAQVKQIYKTPPIKDFGGFNFSQILPDPSKPSKRSFIEDLLFNKVTLADAGFIKQYGDCLGDIAARDLICAQKFNGLTVLPPLLTDEMIAQYTSALLAGTITSGWTFGAGAALQIPFAMQMAYRFNGIGVTQNVLYENQKLIANQFNSAIGKIQDSLSSTASALGKLQDVVNQNAQALNTLVKQLSSNFGAISSVLNDILSRLDPPEAEVQIDRLITGRLQSLQTYVTQQLIRAAEIRASANLAATKMSECVLGQSKRVDFCGKGYHLMSFPQSAPHGVVFLHVTYVPAQEKNFTTAPAICHDGKAHFPREGVFVSNGTHWFVTQRNFYEPQIITTDNTFVSGNCDVVIGIVNNTVYDPLQPELDSFKEELDKYFKNHTSPDVDLGDISGINASVVNIQKEIDRLNEVAKNLNESLIDLQELGKYEQYIKGSGRENLYFQGGGGSGYIPEAPRDGQAYVRKDGEWVLLSTFLGHHHHHHHH

SEQ ID NO: 5505 - protein, 1281 aa, Artificial Sequence
  Description of Artificial Sequence: Synthetic polypeptide
MGILPSPGMPALLSLVSLLSVLLMGCVAETGTQCVNLTTRTQLPPAYTNSFTRGVYYPDKVFRSSVLHSTQDLFLPFFSNVTWFHAIHVSGTNGTKRFDNPVLPFNDGVYFASTEKSNIIRGWIFGTTLDSKTQSLLIVNNATNVVIKVCEFQFCNDPFLGVYYHKNNKSWMESEFRVYSSANNCTFEYVSQPFLMDLEGKQGNFKNLREFVFKNIDGYFKIYSKHTPINLVRDLPQGFSALEPLVDLPIGINITRFQTLLALHRSYLTPGDSSSGWTAGAAAYYVGYLQPRTFLLKYNENGTITDAVDCALDPLSETKCTLKSFTVEKGIYQTSNFRVQPTESIVRFPNITNLCPFGEVFNATRFASVYAWNRKRISNCVADYSVLYNSASFSTFKCYGVSPTKLNDLCFTNVYADSFVIRGDEVRQIAPGQTGKIADYNYKLPDDFTGCVIAWNSNNLDSKVGGNYNYLYRLFRKSNLEPFERDISTEIYQAGSTPCNGVEGFNCYFPLQSYGFQPTNGVGYQPYRVVVLSFELLHAPATVCGPKKSTNLVKNKCVNFNFNGLTGTGVLTESNKKFLPFQQFGRDIADTTDAVRDPQTLEILDITPCSFGGVSVITPGTNTSNQVAVLYQDVNCTEVPVAIHADQLTPTWRVYSTGSNVFQTRAGCLIGAEHVNNSYECDIPIGAGICASYQTQTNSPSGAGSVASQSIIAYTMSLGAENSVAYSNNSIAIPTNFTISVTTEILPVSMTKTSVDCTMYICGDSTECSNLLLQYGSFCTQLNRALTGIAVEQDKNTQEVFAQVKQIYKTPPIKDFGGFNFSQILPDPSKPSKRSFIEDLLFNKVTLADAGFIKQYGDCLGDIAARDLICAQKFNGLTVLPPLLTDEMIAQYTSALLAGTITSGWTFGAGAALQIPFAMQMAYRFNGIGVTQNVLYENQKLIANQFNSAIGKIQDSLSSTASALGKLQDVVNQNAQALNTLVKQLSSNFGAISSVLNDILSRLDPPEAEVQIDRLITGRLQSLQTYVTQQLIRAAEIRASANLAATKMSECVLGQSKRVDFCGKGYHLMSFPQSAPHGVVFLHVTYVPAQEKNFTTAPAICHDGKAHFPREGVFVSNGTHWFVTQRNFYEPQIITTDNTFVSGNCDVVIGIVNNTVYDPLQPELDSFKEELDKYFKNHTSPDVDLGDISGINASVVNIQKEIDRLNEVAKNLNESLIDLQELGKYEQYIKGSGRENLYFQGGGGSGYIPEAPRDGQAYVRKDGEWVLLSTFLGHHHHHHHH

SEQ ID NO: 5506 - protein, 1281 aa, Artificial Sequence
  Description of Artificial Sequence: Synthetic polypeptide
MGILPSPGMPALLSLVSLLSVLLMGCVAETGTQCVNLTTRTQLPPAYTNSFTRGVYYPDKVFRSSVLHSTQDLFLPFFSNVTWFHAIHVSGTNGTKRFDNPVLPFNDGVYFASTEKSNIIRGWIFGTTLDSKTQSLLIVNNATNVVIKVCEFQFCNDPFLGVYYHKNNKSWMESEFRVYSSANNCTFEYVSQPFLMDLEGKQGNFKNLREFVFKNIDGYFKIYSKHTPINLVRDLPQGFSALEPLVDLPIGINITRFQTLLALHRSYLTPGDSSSGWTAGAAAYYVGYLQPRTFLLKYNENGTITDAVDCALDPLSETKCTLKSFTVEKGIYQTSNFRVQPTESIVRFPNITNLCPFGEVFNATRFASVYAWNRKRISNCVADYSVLYNSASFSTFKCYGVSPTKLNDLCFTNVYADSFVIRGDEVRQIAPGQTGKIADYNYKLPDDFTGCVIAWNSNNLDSKVGGNYNYLYRLFRKSNLKPFERDISTEEYQAGSTPCNGVEGFNCYFPLQSYGFQPTNGVGYQPYRVVVLSFELLHAPATVCGPKKSTNLVKNKCVNFNFNGLTGTGVLTESNKKFLPFQQFGRDIADTTDAVRDPQTLEILDITPCSFGGVSVITPGTNTSNQVAVLYQDVNCTEVPVAIHADQLTPTWRVYSTGSNVFQTRAGCLIGAEHVNNSYECDIPIGAGICASYQTQTNSPSGAGSVASQSIIAYTMSLGAENSVAYSNNSIAIPTNFTISVTTEILPVSMTKTSVDCTMYICGDSTECSNLLLQYGSFCTQLNRALTGIAVEQDKNTQEVFAQVKQIYKTPPIKDFGGFNFSQILPDPSKPSKRSFIEDLLFNKVTLADAGFIKQYGDCLGDIAARDLICAQKFNGLTVLPPLLTDEMIAQYTSALLAGTITSGWTFGAGAALQIPFAMQMAYRFNGIGVTQNVLYENQKLIANQFNSAIGKIQDSLSSTASALGKLQDVVNQNAQALNTLVKQLSSNFGAISSVLNDILSRLDPPEAEVQIDRLITGRLQSLQTYVTQQLIRAAEIRASANLAATKMSECVLGQSKRVDFCGKGYHLMSFPQSAPHGVVFLHVTYVPAQEKNFTTAPAICHDGKAHFPREGVFVSNGTHWFVTQRNFYEPQIITTDNTFVSGNCDVVIGIVNNTVYDPLQPELDSFKEELDKYFKNHTSPDVDLGDISGINASVVNIQKEIDRLNEVAKNLNESLIDLQELGKYEQYIKGSGRENLYFQGGGGSGYIPEAPRDGQAYVRKDGEWVLLSTFLGHHHHHHHH

SEQ ID NO: 5507 - protein, 1281 aa, Artificial Sequence
  Description of Artificial Sequence: Synthetic polypeptide
MGILPSPGMPALLSLVSLLSVLLMGCVAETGTQCVNLTTRTQLPPAYTNSFTRGVYYPDKVFRSSVLHSTQDLFLPFFSNVTWFHAIHVSGTNGTKRFDNPVLPFNDGVYFASTEKSNIIRGWIFGTTLDSKTQSLLIVNNATNVVIKVCEFQFCNDPFLGVYYHKNNKSWMESEFRVYSSANNCTFEYVSQPFLMDLEGKQGNFKNLREFVFKNIDGYFKIYSKHTPINLVRDLPQGFSALEPLVDLPIGINITRFQTLLALHRSYLTPGDSSSGWTAGAAAYYVGYLQPRTFLLKYNENGTITDAVDCALDPLSETKCTLKSFTVEKGIYQTSNFRVQPTESIVRFPNITNLCPFGEVFNATRFASVYAWNRKRISNCVADYSVLYNSASFSTFKCYGVSPTKLNDLCFTNVYADSFVIRGDEVRQIAPGQTGKIADYNYKLPDDFTGCVIAWNSNNLDSKVGGNYNYLYRLFRKSNLKPFERDISTEIYQAGSTPCNGVEGFNCYFPLQSYGFQPTNGVGYQPYRVVVLSFELLGAPATVCGPKKSTNLVKNKCVNFNFNGLTGTGVLTESNKKFLPFQQFGRDIADTTDAVRDPQTLEILDITPCSFGGVSVITPGTNTSNQVAVLYQDVNCTEVPVAIHADQLTPTWRVYSTGSNVFQTRAGCLIGAEHVNNSYECDIPIGAGICASYQTQTNSPSGAGSVASQSIIAYTMSLGAENSVAYSNNSIAIPTNFTISVTTEILPVSMTKTSVDCTMYICGDSTECSNLLLQYGSFCTQLNRALTGIAVEQDKNTQEVFAQVKQIYKTPPIKDFGGFNFSQILPDPSKPSKRSFIEDLLFNKVTLADAGFIKQYGDCLGDIAARDLICAQKFNGLTVLPPLLTDEMIAQYTSALLAGTITSGWTFGAGAALQIPFAMQMAYRFNGIGVTQNVLYENQKLIANQFNSAIGKIQDSLSSTASALGKLQDVVNQNAQALNTLVKQLSSNFGAISSVLNDILSRLDPPEAEVQIDRLITGRLQSLQTYVTQQLIRAAEIRASANLAATKMSECVLGQSKRVDFCGKGYHLMSFPQSAPHGVVFLHVTYVPAQEKNFTTAPAICHDGKAHFPREGVFVSNGTHWFVTQRNFYEPQIITTDNTFVSGNCDVVIGIVNNTVYDPLQPELDSFKEELDKYFKNHTSPDVDLGDISGINASVVNIQKEIDRLNEVAKNLNESLIDLQELGKYEQYIKGSGRENLYFQGGGGSGYIPEAPRDGQAYVRKDGEWVLLSTFLGHHHHHHHH

SEQ ID NO: 5508 - protein, 1281 aa, Artificial Sequence
  Description of Artificial Sequence: Synthetic polypeptide
MGILPSPGMPALLSLVSLLSVLLMGCVAETGTQCVNLTTRTQLPPAYTNSFTRGVYYPDKVFRSSVLHSTQDLFLPFFSNVTWFHAIHVSGTNGTKRFDNPVLPFNDGVYFASTEKSNIIRGWIFGTTLDSKTQSLLIVNNATNVVIKVCEFQFCNDPFLGVYYHKNNKSWMESEFRVYSSANNCTFEYVSQPFLMDLEGKQGNFKNLREFVFKNIDGYFKIYSKHTPINLVRDLPQGFSALEPLVDLPIGINITRFQTLLALHRSYLTPGDSSSGWTAGAAAYYVGYLQPRTFLLKYNENGTITDAVDCALDPLSETKCTLKSFTVEKGIYQTSNFRVQPTESIVRFPNITNLCPFGEVFNATRFASVYAWNRKRISNCVADYSVLYNSASFVTFKCYGVSPTKLNDLCFTNVYADSFVIRGDEVRQIAPGQTGKIADYNYKLPDDFTGCVIAWNSNNLDSKVGGNYNYLYRLFRKSNLKPFERDISTEIYQAGSTPCNGVEGFNCYFPLQSYGFQPTNGVGYQPYRVVVLSFELLHAPATVCGPKKSTNLVKNKCVNFNFNGLTGTGVLTESNKKFLPFQQFGRDIADTTDAVRDPQTLEILDITPCSFGGVSVITPGTNTSNQVAVLYQDVNCTEVPVAIHADQLTPTWRVYSTGSNVFQTRAGCLIGAEHVNNSYECDIPIGAGICASYQTQTNSPSGAGSVASQSIIAYTMSLGAENSVAYSNNSIAIPTNFTISVTTEILPVSMTKTSVDCTMYICGDSTECSNLLLQYGSFCTQLNRALTGIAVEQDKNTQEVFAQVKQIYKTPPIKDFGGFNFSQILPDPSKPSKRSFIEDLLFNKVTLADAGFIKQYGDCLGDIAARDLICAQKFNGLTVLPPLLTDEMIAQYTSALLAGTITSGWTFGAGAALQIPFAMQMAYRFNGIGVTQNVLYENQKLIANQFNSAIGKIQDSLSSTASALGKLQDVVNQNAQALNTLVKQLSSNFGAISSVLNDILSRLDPPEAEVQIDRLITGRLQSLQTYVTQQLIRAAEIRASANLAATKMSECVLGQSKRVDFCGKGYHLMSFPQSAPHGVVFLHVTYVPAQEKNFTTAPAICHDGKAHFPREGVFVSNGTHWFVTQRNFYEPQIITTDNTFVSGNCDVVIGIVNNTVYDPLQPELDSFKEELDKYFKNHTSPDVDLGDISGINASVVNIQKEIDRLNEVAKNLNESLIDLQELGKYEQYIKGSGRENLYFQGGGGSGYIPEAPRDGQAYVRKDGEWVLLSTFLGHHHHHHHH

SEQ ID NO: 5509 - protein, 1281 aa, Artificial Sequence
  Description of Artificial Sequence: Synthetic polypeptide
MGILPSPGMPALLSLVSLLSVLLMGCVAETGTQCVNLTTRTQLPPAYTNSFTRGVYYPDKVFRSSVLHSTQDLFLPFFSNVTWFHAIHVSGTNGTKRFDNPVLPFNDGVYFASTEKSNIIRGWIFGTTLDSKTQSLLIVNNATNVVIKVCEFQFCNDPFLGVYYHKNNKSWMESEFRVYSSANNCTFEYVSQPFLMDLEGKQGNFKNLREFVFKNIDGYFKIYSKHTPINLVRDLPQGFSALEPLVDLPIGINITRFQTLLALHRSYLTPGDSSSGWTAGAAAYYVGYLQPRTFLLKYNENGTITDAVDCALDPLSETKCTLKSFTVEKGIYQTSNFRVQPTESIVRFPNITNLCPFGEVFNATRFASVYAWNRKRISKCVADYSVLYNSASFSTFKCYGVSPTKLNDLCFTNVYADSFVIRGDEVRQIAPGQTGKIADYNYKLPDDFTGCVIAWNSNNLDSKVGGNYNYLYRLFRKSNLKPFERDISTEIYQAGSTPCNGVEGFNCYFPLQSYGFQPTNGVGYQPYRVVVLSFELLHAPATVCGPKKSTNLVKNKCVNFNFNGLTGTGVLTESNKKFLPFQQFGRDIADTTDAVRDPQTLEILDITPCSFGGVSVITPGTNTSNQVAVLYQDVNCTEVPVAIHADQLTPTWRVYSTGSNVFQTRAGCLIGAEHVNNSYECDIPIGAGICASYQTQTNSPSGAGSVASQSIIAYTMSLGAENSVAYSNNSIAIPTNFTISVTTEILPVSMTKTSVDCTMYICGDSTECSNLLLQYGSFCTQLNRALTGIAVEQDKNTQEVFAQVKQIYKTPPIKDFGGFNFSQILPDPSKPSKRSFIEDLLFNKVTLADAGFIKQYGDCLGDIAARDLICAQKFNGLTVLPPLLTDEMIAQYTSALLAGTITSGWTFGAGAALQIPFAMQMAYRFNGIGVTQNVLYENQKLIANQFNSAIGKIQDSLSSTASALGKLQDVVNQNAQALNTLVKQLSSNFGAISSVLNDILSRLDPPEAEVQIDRLITGRLQSLQTYVTQQLIRAAEIRASANLAATKMSECVLGQSKRVDFCGKGYHLMSFPQSAPHGVVFLHVTYVPAQEKNFTTAPAICHDGKAHFPREGVFVSNGTHWFVTQRNFYEPQIITTDNTFVSGNCDVVIGIVNNTVYDPLQPELDSFKEELDKYFKNHTSPDVDLGDISGINASVVNIQKEIDRLNEVAKNLNESLIDLQELGKYEQYIKGSGRENLYFQGGGGSGYIPEAPRDGQAYVRKDGEWVLLSTFLGHHHHHHHH

SEQ ID NO: 5510 - protein, 1281 aa, Artificial Sequence
  Description of Artificial Sequence: Synthetic polypeptide
MGILPSPGMPALLSLVSLLSVLLMGCVAETGTQCVNLTTRTQLPPAYTNSFTRGVYYPDKVFRSSVLHSTQDLFLPFFSNVTWFHAIHVSGTNGTKRFDNPVLPFNDGVYFASTEKSNIIRGWIFGTTLDSKTQSLLIVNNATNVVIKVCEFQFCNDPFLGVYYHKNNKSWMESEFRVYSSANNCTFEYVSQPFLMDLEGKQGNFKNLREFVFKNIDGYFKIYSKHTPINLVRDLPQGFSALEPLVDLPIGINITRFQTLLALHRSYLTPGDSSSGWTAGAAAYYVGYLQPRTFLLKYNENGTITDAVDCALDPLSETKCTLKSFTVEKGIYQTSNFRVQPTESIVRFPNITNLCPFGEVFNATRFASVYAWNRKRISNCVADYSVLYNSASFSTFKCYGVSPTKLNDLCFTNVYADSFVIRGDEVRQIAPGQTGKIADYNYKLPDDFTGCVIAWNSNNLDSKVGGNYNYLYRLFRKSNLKPFERDISTEIYQAGSTPCNGVEGFNCYFPLQSYDFQPTNGVGYQPYRVVVLSFELLHAPATVCGPKKSTNLVKNKCVNFNFNGLTGTGVLTESNKKFLPFQQFGRDIADTTDAVRDPQTLEILDITPCSFGGVSVITPGTNTSNQVAVLYQDVNCTEVPVAIHADQLTPTWRVYSTGSNVFQTRAGCLIGAEHVNNSYECDIPIGAGICASYQTQTNSPSGAGSVASQSIIAYTMSLGAENSVAYSNNSIAIPTNFTISVTTEILPVSMTKTSVDCTMYICGDSTECSNLLLQYGSFCTQLNRALTGIAVEQDKNTQEVFAQVKQIYKTPPIKDFGGFNFSQILPDPSKPSKRSFIEDLLFNKVTLADAGFIKQYGDCLGDIAARDLICAQKFNGLTVLPPLLTDEMIAQYTSALLAGTITSGWTFGAGAALQIPFAMQMAYRFNGIGVTQNVLYENQKLIANQFNSAIGKIQDSLSSTASALGKLQDVVNQNAQALNTLVKQLSSNFGAISSVLNDILSRLDPPEAEVQIDRLITGRLQSLQTYVTQQLIRAAEIRASANLAATKMSECVLGQSKRVDFCGKGYHLMSFPQSAPHGVVFLHVTYVPAQEKNFTTAPAICHDGKAHFPREGVFVSNGTHWFVTQRNFYEPQIITTDNTFVSGNCDVVIGIVNNTVYDPLQPELDSFKEELDKYFKNHTSPDVDLGDISGINASVVNIQKEIDRLNEVAKNLNESLIDLQELGKYEQYIKGSGRENLYFQGGGGSGYIPEAPRDGQAYVRKDGEWVLLSTFLGHHHHHHHH

SEQ ID NO: 5511 - protein, 1281 aa, Artificial Sequence
  Description of Artificial Sequence: Synthetic polypeptide
MGILPSPGMPALLSLVSLLSVLLMGCVAETGTQCVNLTTRTQLPPAYTNSFTRGVYYPDKVFRSSVLHSTQDLFLPFFSNVTWFHAIHVSGTNGTKRFDNPVLPFNDGVYFASTEKSNIIRGWIFGTTLDSKTQSLLIVNNATNVVIKVCEFQFCNDPFLGVYYHKNNKSWMESEFRVYSSANNCTFEYVSQPFLMDLEGKQGNFKNLREFVFKNIDGYFKIYSKHTPINLVRDLPQGFSALEPLVDLPIGINITRFQTLLALHRSYLTPGDSSSGWTAGAAAYYVGYLQPRTFLLKYNENGTITDAVDCALDPLSETKCTLKSFTVEKGIYQTSNFRVQPTESIVRFPNITNLCPFGEVFNATRFASVYAWNRKRISNCVADYSVLYNSASFSTFKCYGVSPTKLNDLCFTNVYADSFVIRGDEVRQIAPGQTGKIADYNYKLPDDFTGCVIAWNSNNLDSKVGGNYNYLYRLFRKSNLKPVERDISTEIYQAGSTPCNGVEGFNCYFPLQSYGFQPTNGVGYQPYRVVVLSFELLHAPATVCGPKKSTNLVKNKCVNFNFNGLTGTGVLTESNKKFLPFQQFGRDIADTTDAVRDPQTLEILDITPCSFGGVSVITPGTNTSNQVAVLYQDVNCTEVPVAIHADQLTPTWRVYSTGSNVFQTRAGCLIGAEHVNNSYECDIPIGAGICASYQTQTNSPSGAGSVASQSIIAYTMSLGAENSVAYSNNSIAIPTNFTISVTTEILPVSMTKTSVDCTMYICGDSTECSNLLLQYGSFCTQLNRALTGIAVEQDKNTQEVFAQVKQIYKTPPIKDFGGFNFSQILPDPSKPSKRSFIEDLLFNKVTLADAGFIKQYGDCLGDIAARDLICAQKFNGLTVLPPLLTDEMIAQYTSALLAGTITSGWTFGAGAALQIPFAMQMAYRFNGIGVTQNVLYENQKLIANQFNSAIGKIQDSLSSTASALGKLQDVVNQNAQALNTLVKQLSSNFGAISSVLNDILSRLDPPEAEVQIDRLITGRLQSLQTYVTQQLIRAAEIRASANLAATKMSECVLGQSKRVDFCGKGYHLMSFPQSAPHGVVFLHVTYVPAQEKNFTTAPAICHDGKAHFPREGVFVSNGTHWFVTQRNFYEPQIITTDNTFVSGNCDVVIGIVNNTVYDPLQPELDSFKEELDKYFKNHTSPDVDLGDISGINASVVNIQKEIDRLNEVAKNLNESLIDLQELGKYEQYIKGSGRENLYFQGGGGSGYIPEAPRDGQAYVRKDGEWVLLSTFLGHHHHHHHH

SEQ ID NO: 5512 - protein, 1281 aa, Artificial Sequence
  Description of Artificial Sequence: Synthetic polypeptide
MGILPSPGMPALLSLVSLLSVLLMGCVAETGTQCVNLTTRTQLPPAYTNSFTRGVYYPDKVFRSSVLHSTQDLFLPFFSNVTWFHAIHVSGTNGTKRFDNPVLPFNDGVYFASTEKSNIIRGWIFGTTLDSKTQSLLIVNNATNVVIKVCEFQFCNDPFLGVYYHKNNKSWMESEFRVYSSANNCTFEYVSQPFLMDLEGKQGNFKNLREFVFKNIDGYFKIYSKHTPINLVRDLPQGFSALEPLVDLPIGINITRFQTLLALHRSYLTPGDSSSGWTAGAAAYYVGYLQPRTFLLKYNENGTITDAVDCALDPLSETKCTLKSFTVEKGIYQTSNFRVQPTESIVRFPNITNLCPFGEVFNATRFASVYAWNRKRISNCVADYSVLYNSASFSTFKCYGVSPTKLNDLCFTNVYADSFVIRGDEVRQIAPGQTGKIADYNYKLPDDFTGCVIAWNSNNLDSKVGGNYNYLYRLFRKSNRKPFERDISTEIYQAGSTPCNGVEGFNCYFPLQSYGFQPTNGVGYQPYRVVVLSFELLHAPATVCGPKKSTNLVKNKCVNFNFNGLTGTGVLTESNKKFLPFQQFGRDIADTTDAVRDPQTLEILDITPCSFGGVSVITPGTNTSNQVAVLYQDVNCTEVPVAIHADQLTPTWRVYSTGSNVFQTRAGCLIGAEHVNNSYECDIPIGAGICASYQTQTNSPSGAGSVASQSIIAYTMSLGAENSVAYSNNSIAIPTNFTISVTTEILPVSMTKTSVDCTMYICGDSTECSNLLLQYGSFCTQLNRALTGIAVEQDKNTQEVFAQVKQIYKTPPIKDFGGFNFSQILPDPSKPSKRSFIEDLLFNKVTLADAGFIKQYGDCLGDIAARDLICAQKFNGLTVLPPLLTDEMIAQYTSALLAGTITSGWTFGAGAALQIPFAMQMAYRFNGIGVTQNVLYENQKLIANQFNSAIGKIQDSLSSTASALGKLQDVVNQNAQALNTLVKQLSSNFGAISSVLNDILSRLDPPEAEVQIDRLITGRLQSLQTYVTQQLIRAAEIRASANLAATKMSECVLGQSKRVDFCGKGYHLMSFPQSAPHGVVFLHVTYVPAQEKNFTTAPAICHDGKAHFPREGVFVSNGTHWFVTQRNFYEPQIITTDNTFVSGNCDVVIGIVNNTVYDPLQPELDSFKEELDKYFKNHTSPDVDLGDISGINASVVNIQKEIDRLNEVAKNLNESLIDLQELGKYEQYIKGSGRENLYFQGGGGSGYIPEAPRDGQAYVRKDGEWVLLSTFLGHHHHHHHH

SEQ ID NO: 5513 - protein, 1281 aa, Artificial Sequence
  Description of Artificial Sequence: Synthetic polypeptide
MGILPSPGMPALLSLVSLLSVLLMGCVAETGTQCVNLTTRTQLPPAYTNSFTRGVYYPDKVFRSSVLHSTQDLFLPFFSNVTWFHAIHVSGTNGTKRFDNPVLPFNDGVYFASTEKSNIIRGWIFGTTLDSKTQSLLIVNNATNVVIKVCEFQFCNDPFLGVYYHKNNKSWMESEFRVYSSANNCTFEYVSQPFLMDLEGKQGNFKNLREFVFKNIDGYFKIYSKHTPINLVRDLPQGFSALEPLVDLPIGINITRFQTLLALHRSYLTPGDSSSGWTAGAAAYYVGYLQPRTFLLKYNENGTITDAVDCALDPLSETKCTLKSFTVEKGIYQTSNFRVQPTESIVRFPNITNLCPFGEVFNATRFASVYAWNRKRISNCVADYSVLYNSASFSTFKCYGVSPTKLTDLCFTNVYADSFVIRGDEVRQIAPGQTGKIADYNYKLPDDFTGCVIAWNSNNLDSKVGGNYNYLYRLFRKSNLKPFERDISTEIYQAGSTPCNGVEGFNCYFPLQSYGFQPTNGVGYQPYRVVVLSFELLHAPATVCGPKKSTNLVKNKCVNFNFNGLTGTGVLTESNKKFLPFQQFGRDIADTTDAVRDPQTLEILDITPCSFGGVSVITPGTNTSNQVAVLYQDVNCTEVPVAIHADQLTPTWRVYSTGSNVFQTRAGCLIGAEHVNNSYECDIPIGAGICASYQTQTNSPSGAGSVASQSIIAYTMSLGAENSVAYSNNSIAIPTNFTISVTTEILPVSMTKTSVDCTMYICGDSTECSNLLLQYGSFCTQLNRALTGIAVEQDKNTQEVFAQVKQIYKTPPIKDFGGFNFSQILPDPSKPSKRSFIEDLLFNKVTLADAGFIKQYGDCLGDIAARDLICAQKFNGLTVLPPLLTDEMIAQYTSALLAGTITSGWTFGAGAALQIPFAMQMAYRFNGIGVTQNVLYENQKLIANQFNSAIGKIQDSLSSTASALGKLQDVVNQNAQALNTLVKQLSSNFGAISSVLNDILSRLDPPEAEVQIDRLITGRLQSLQTYVTQQLIRAAEIRASANLAATKMSECVLGQSKRVDFCGKGYHLMSFPQSAPHGVVFLHVTYVPAQEKNFTTAPAICHDGKAHFPREGVFVSNGTHWFVTQRNFYEPQIITTDNTFVSGNCDVVIGIVNNTVYDPLQPELDSFKEELDKYFKNHTSPDVDLGDISGINASVVNIQKEIDRLNEVAKNLNESLIDLQELGKYEQYIKGSGRENLYFQGGGGSGYIPEAPRDGQAYVRKDGEWVLLSTFLGHHHHHHHH

SEQ ID NO: 5514 - protein, 1281 aa, Artificial Sequence
  Description of Artificial Sequence: Synthetic polypeptide
MGILPSPGMPALLSLVSLLSVLLMGCVAETGTQCVNLTTRTQLPPAYTNSFTRGVYYPDKVFRSSVLHSTQDLFLPFFSNVTWFHAIHVSGTNGTKRFDNPVLPFNDGVYFASTEKSNIIRGWIFGTTLDSKTQSLLIVNNATNVVIKVCEFQFCNDPFLGVYYHKNNKSWMESEFRVYSSANNCTFEYVSQPFLMDLEGKQGNFKNLREFVFKNIDGYFKIYSKHTPINLVRDLPQGFSALEPLVDLPIGINITRFQTLLALHRSYLTPGDSSSGWTAGAAAYYVGYLQPRTFLLKYNENGTITDAVDCALDPLSETKCTLKSFTVEKGIYQTSNFRVQPTESIVRFPNITNLCPFGEVFNATRFASVYAWNRKRISNCVADYSVLYNSASFSTFKCYGVSPTKLNDLCFTNVYADSFVIRGDEVRQIAPGQTGKIHDYNYKLPDDFTGCVIAWNSNNLDSKVGGNYNYLYRLFRKSNLKPFERDISTEIYQAGSTPCNGVEGFNCYFPLQSYGFQPTNGVGYQPYRVVVLSFELLHAPATVCGPKKSTNLVKNKCVNFNFNGLTGTGVLTESNKKFLPFQQFGRDIADTTDAVRDPQTLEILDITPCSFGGVSVITPGTNTSNQVAVLYQDVNCTEVPVAIHADQLTPTWRVYSTGSNVFQTRAGCLIGAEHVNNSYECDIPIGAGICASYQTQTNSPSGAGSVASQSIIAYTMSLGAENSVAYSNNSIAIPTNFTISVTTEILPVSMTKTSVDCTMYICGDSTECSNLLLQYGSFCTQLNRALTGIAVEQDKNTQEVFAQVKQIYKTPPIKDFGGFNFSQILPDPSKPSKRSFIEDLLFNKVTLADAGFIKQYGDCLGDIAARDLICAQKFNGLTVLPPLLTDEMIAQYTSALLAGTITSGWTFGAGAALQIPFAMQMAYRFNGIGVTQNVLYENQKLIANQFNSAIGKIQDSLSSTASALGKLQDVVNQNAQALNTLVKQLSSNFGAISSVLNDILSRLDPPEAEVQIDRLITGRLQSLQTYVTQQLIRAAEIRASANLAATKMSECVLGQSKRVDFCGKGYHLMSFPQSAPHGVVFLHVTYVPAQEKNFTTAPAICHDGKAHFPREGVFVSNGTHWFVTQRNFYEPQIITTDNTFVSGNCDVVIGIVNNTVYDPLQPELDSFKEELDKYFKNHTSPDVDLGDISGINASVVNIQKEIDRLNEVAKNLNESLIDLQELGKYEQYIKGSGRENLYFQGGGGSGYIPEAPRDGQAYVRKDGEWVLLSTFLGHHHHHHHH

SEQ ID NO: 5515 - protein, 1281 aa, Artificial Sequence
  Description of Artificial Sequence: Synthetic polypeptide
MGILPSPGMPALLSLVSLLSVLLMGCVAETGTQCVNLTTRTQLPPAYTNSFTRGVYYPDKVFRSSVLHSTQDLFLPFFSNVTWFHAIHVSGTNGTKRFDNPVLPFNDGVYFASTEKSNIIRGWIFGTTLDSKTQSLLIVNNATNVVIKVCEFQFCNDPFLGVYYHKNNKSWMESEFRVYSSANNCTFEYVSQPFLMDLEGKQGNFKNLREFVFKNIDGYFKIYSKHTPINLVRDLPQGFSALEPLVDLPIGINITRFQTLLALHRSYLTPGDSSSGWTAGAAAYYVGYLQPRTFLLKYNENGTITDAVDCALDPLSETKCTLKSFTVEKGIYQTSNFRVQPTESIVRFPNITNLCPFGEVFNATRFASVYAWNRKRISNCVADYSVLYNSASFMTFKCYGVSPTKLNDLCFTNVYADSFVIRGDEVRQIAPGQTGKIADYNYKLPDDFTGCVIAWNSNNLDSKVGGNYNYLYRLFRKSNLKPFERDISTEIYQAGSTPCNGVEGFNCYFPLQSYGFQPTNGVGYQPYRVVVLSFELLHAPATVCGPKKSTNLVKNKCVNFNFNGLTGTGVLTESNKKFLPFQQFGRDIADTTDAVRDPQTLEILDITPCSFGGVSVITPGTNTSNQVAVLYQDVNCTEVPVAIHADQLTPTWRVYSTGSNVFQTRAGCLIGAEHVNNSYECDIPIGAGICASYQTQTNSPSGAGSVASQSIIAYTMSLGAENSVAYSNNSIAIPTNFTISVTTEILPVSMTKTSVDCTMYICGDSTECSNLLLQYGSFCTQLNRALTGIAVEQDKNTQEVFAQVKQIYKTPPIKDFGGFNFSQILPDPSKPSKRSFIEDLLFNKVTLADAGFIKQYGDCLGDIAARDLICAQKFNGLTVLPPLLTDEMIAQYTSALLAGTITSGWTFGAGAALQIPFAMQMAYRFNGIGVTQNVLYENQKLIANQFNSAIGKIQDSLSSTASALGKLQDVVNQNAQALNTLVKQLSSNFGAISSVLNDILSRLDPPEAEVQIDRLITGRLQSLQTYVTQQLIRAAEIRASANLAATKMSECVLGQSKRVDFCGKGYHLMSFPQSAPHGVVFLHVTYVPAQEKNFTTAPAICHDGKAHFPREGVFVSNGTHWFVTQRNFYEPQIITTDNTFVSGNCDVVIGIVNNTVYDPLQPELDSFKEELDKYFKNHTSPDVDLGDISGINASVVNIQKEIDRLNEVAKNLNESLIDLQELGKYEQYIKGSGRENLYFQGGGGSGYIPEAPRDGQAYVRKDGEWVLLSTFLGHHHHHHHH

SEQ ID NO: 5516 - protein, 1281 aa, Artificial Sequence
  Description of Artificial Sequence: Synthetic polypeptide
MGILPSPGMPALLSLVSLLSVLLMGCVAETGTQCVNLTTRTQLPPAYTNSFTRGVYYPDKVFRSSVLHSTQDLFLPFFSNVTWFHAIHVSGTNGTKRFDNPVLPFNDGVYFASTEKSNIIRGWIFGTTLDSKTQSLLIVNNATNVVIKVCEFQFCNDPFLGVYYHKNNKSWMESEFRVYSSANNCTFEYVSQPFLMDLEGKQGNFKNLREFVFKNIDGYFKIYSKHTPINLVRDLPQGFSALEPLVDLPIGINITRFQTLLALHRSYLTPGDSSSGWTAGAAAYYVGYLQPRTFLLKYNENGTITDAVDCALDPLSETKCTLKSFTVEKGIYQTSNFRVQPTESIVRFPNITNLCPFGEVFNATRFASVYAWNRKRISNCVADYSVLYNSASFSTFKCYGVSPTKLNDLCFTNVYADSFVIRGDEVRQIAPGQTGKIADYNYKLPDDFTGCVIAWNSNNLDSKVGGNYNYLYRLFRKSNLKPFERDISTEIYQAGSTPCNSVEGFNCYFPLQSYGFQPTNGVGYQPYRVVVLSFELLHAPATVCGPKKSTNLVKNKCVNFNFNGLTGTGVLTESNKKFLPFQQFGRDIADTTDAVRDPQTLEILDITPCSFGGVSVITPGTNTSNQVAVLYQDVNCTEVPVAIHADQLTPTWRVYSTGSNVFQTRAGCLIGAEHVNNSYECDIPIGAGICASYQTQTNSPSGAGSVASQSIIAYTMSLGAENSVAYSNNSIAIPTNFTISVTTEILPVSMTKTSVDCTMYICGDSTECSNLLLQYGSFCTQLNRALTGIAVEQDKNTQEVFAQVKQIYKTPPIKDFGGFNFSQILPDPSKPSKRSFIEDLLFNKVTLADAGFIKQYGDCLGDIAARDLICAQKFNGLTVLPPLLTDEMIAQYTSALLAGTITSGWTFGAGAALQIPFAMQMAYRFNGIGVTQNVLYENQKLIANQFNSAIGKIQDSLSSTASALGKLQDVVNQNAQALNTLVKQLSSNFGAISSVLNDILSRLDPPEAEVQIDRLITGRLQSLQTYVTQQLIRAAEIRASANLAATKMSECVLGQSKRVDFCGKGYHLMSFPQSAPHGVVFLHVTYVPAQEKNFTTAPAICHDGKAHFPREGVFVSNGTHWFVTQRNFYEPQIITTDNTFVSGNCDVVIGIVNNTVYDPLQPELDSFKEELDKYFKNHTSPDVDLGDISGINASVVNIQKEIDRLNEVAKNLNESLIDLQELGKYEQYIKGSGRENLYFQGGGGSGYIPEAPRDGQAYVRKDGEWVLLSTFLGHHHHHHHH

SEQ ID NO: 5517 - protein, 1281 aa, Artificial Sequence
  Description of Artificial Sequence: Synthetic polypeptide
MGILPSPGMPALLSLVSLLSVLLMGCVAETGTQCVNLTTRTQLPPAYTNSFTRGVYYPDKVFRSSVLHSTQDLFLPFFSNVTWFHAIHVSGTNGTKRFDNPVLPFNDGVYFASTEKSNIIRGWIFGTTLDSKTQSLLIVNNATNVVIKVCEFQFCNDPFLGVYYHKNNKSWMESEFRVYSSANNCTFEYVSQPFLMDLEGKQGNFKNLREFVFKNIDGYFKIYSKHTPINLVRDLPQGFSALEPLVDLPIGINITRFQTLLALHRSYLTPGDSSSGWTAGAAAYYVGYLQPRTFLLKYNENGTITDAVDCALDPLSETKCTLKSFTVEKGIYQTSNFRVQPTESIVRFPNITNLCPFGEVFNATRFASVYAWNRKRISNCVADYSVLYNSASFSTFKCYGVSPTKLNDLCFTNVYADSFVIRGDEVRQIAPGQTGKIADYNYKLPDDFTGCVIAWNSNNLDSKVGGNYNYLYRLFRKSNLKPFERDISTEIYQAGSTPCNGVEGFNCYFPLQSYGFQPTNGVGYQPYRVVVLSFELLHAPATVCGPKKSTNLVKNKCVNFNFNGLTGTGVLTESNKKFLPFQQFGRDIADTTDAVRDPQTLEILDIEPCSFGGVSVITPGTNTSNQVAVLYQDVNCTEVPVAIHADQLTPTWRVYSTGSNVFQTRAGCLIGAEHVNNSYECDIPIGAGICASYQTQTNSPSGAGSVASQSIIAYTMSLGAENSVAYSNNSIAIPTNFTISVTTEILPVSMTKTSVDCTMYICGDSTECSNLLLQYGSFCTQLNRALTGIAVEQDKNTQEVFAQVKQIYKTPPIKDFGGFNFSQILPDPSKPSKRSFIEDLLFNKVTLADAGFIKQYGDCLGDIAARDLICAQKFNGLTVLPPLLTDEMIAQYTSALLAGTITSGWTFGAGAALQIPFAMQMAYRFNGIGVTQNVLYENQKLIANQFNSAIGKIQDSLSSTASALGKLQDVVNQNAQALNTLVKQLSSNFGAISSVLNDILSRLDPPEAEVQIDRLITGRLQSLQTYVTQQLIRAAEIRASANLAATKMSECVLGQSKRVDFCGKGYHLMSFPQSAPHGVVFLHVTYVPAQEKNFTTAPAICHDGKAHFPREGVFVSNGTHWFVTQRNFYEPQIITTDNTFVSGNCDVVIGIVNNTVYDPLQPELDSFKEELDKYFKNHTSPDVDLGDISGINASVVNIQKEIDRLNEVAKNLNESLIDLQELGKYEQYIKGSGRENLYFQGGGGSGYIPEAPRDGQAYVRKDGEWVLLSTFLGHHHHHHHH

SEQ ID NO: 5518 - protein, 1281 aa, Artificial Sequence
  Description of Artificial Sequence: Synthetic polypeptide
MGILPSPGMPALLSLVSLLSVLLMGCVAETGTQCVNLTTRTQLPPAYTNSFTRGVYYPDKVFRSSVLHSTQDLFLPFFSNVTWFHAIHVSGTNGTKRFDNPVLPFNDGVYFASTEKSNIIRGWIFGTTLDSKTQSLLIVNNATNVVIKVCEFQFCNDPFLGVYYHKNNKSWMESEFRVYSSANNCTFEYVSQPFLMDLEGKQGNFKNLREFVFKNIDGYFKIYSKHTPINLVRDLPQGFSALEPLVDLPIGINITRFQTLLALHRSYLTPGDSSSGWTAGAAAYYVGYLQPRTFLLKYNENGTITDAVDCALDPLSETKCTLKSFTVEKGIYQTSNFRVQPTESIVRFPNITNLCPFGEVFNATRFASVYAWNRKRISNCVADYSVLYNSASFSTFKCYGVSPTKLNDLCFTNVYADSFVIRGDEVRQIAPGQTGKIADYNYKLPDDFTGCVIAWNSNNLDSKVGGNYNYLYRLFRKSNLKPFERDISTEIYQAGSTPCNGVEGFNCYFPLQSYGFQPTNGVGYQPYRVVVLSFELLHAPATVCGPKKSTNLVKNKCVNFNFNGLTGTGVLTESNKKFLPFQQFGRDIADTTDAVRDPQTLEILDITPCSFGGVSVITPGTNTSNQVAVLYQDVNCTEVPVAIHADQLTPTWRVYSTGSNVFQTRAGCLIGAEHVNNSYECDIPIGAGICASYQTQTNSPSGAGSVASQSIIAYTMSLGAENSVAYSNNSIAIPTNFTISVTTEILPVSMTKTSVDCTMYICGDSTECSNLLLQYGSFCTQLNRALTGIAVEQDKNTQEVFAQVKQIYKTPPIKDFGGFNFSQILPDPSKPSKRSFIEDLLFNKVTLADAGFIKQYGDCLGDIAARDLICAQKFNGLTVLPPLLTDEMIAQYTSALLAGTITSGWTFGAGAALQIPFAMQMAYRFNGIGVTQNVLYENQKLIANQFNSAIGKIQDSLSSTASALGKLQDVVNQNAQALNTLVKQLSSNFGAISSVLNDILSRLDPPEAEVQIDRLITGRLQSLQTYVTQQLIRAAEIRASANLAATKMSECVLGQSKRVDFCGKGYHLMSFPQSAPHGVVFLHVTYVPAQWKNFTTAPAICHDGKAHFPREGVFVSNGTHWFVTQRNFYEPQIITTDNTFVSGNCDVVIGIVNNTVYDPLQPELDSFKEELDKYFKNHTSPDVDLGDISGINASVVNIQKEIDRLNEVAKNLNESLIDLQELGKYEQYIKGSGRENLYFQGGGGSGYIPEAPRDGQAYVRKDGEWVLLSTFLGHHHHHHHH

SEQ ID NO: 5519 - protein, 1281 aa, Artificial Sequence
  Description of Artificial Sequence: Synthetic polypeptide
MGILPSPGMPALLSLVSLLSVLLMGCVAETGTQCVNLTTRTQLPPAYTNSFTRGVYYPDKVFRSSVLHSTQDLFLPFFSNVTWFHAIHVSGTNGTKRFDNPVLPFNDGVYFASTEKSNIIRGWIFGTTLDSKTQSLLIVNNATNVVIKVCEFQFCNDPFLGVYYHKNNKSWMESEFRVYSSANNCTFEYVSQPFLMDLEGKQGNFKNLREFVFKNIDGYFKIYSKHTPINLVRDLPQGFSALEPLVDLPIGINITRFQTLLALHRSYLTPGDSSSGWTAGAAAYYVGYLQPRTFLLKYNENGTITDAVDCALDPLSETKCTLKSFTVEKGIYQTSNFRVQPTESIVRFPNITNLCPFGEVFNATRFASVYAWNRKRISNCVADYSVLYNSASFSTFKCYGVSPTKLNDLCFTNVYADSFVIRGDEVRQIAPGQTGKIADYNYKLPDDFTGCVIAWNSNNLDSKVGGNYNYLYRLFRKSNLKPFERDISTEIYQAGSTPCNGVEGFNCYFPLQSYGFQPTNGVGYQPYRVVVLSFELLHAPATVCGPKKSTNLVKNKCVNFNFNGLTGTGVLTESNKKFLPFQQFGRDIADTTDAVRDPQTLEILDITPCSFGGVSVITPGTNTSNQVAVLYQDVNCTEVPVAIHADQLTPTWRVYSTGSNVFQTRAGCLIGAEHVNNSYECDIPIGAGICASYQTQTNSPSGAGSVASQSIIAYTMSLGAENSVAYSNNSIAIPTNFTISVTTEILPVSMTKTSVDCTMYICGDSTECSNLLLQYGSFCTQLNRALTGIAVEQDKNTQEVFAQVKQIYKTPPIKDFGGFNFSQILPDPSKPSKRSFIEDLLFNKVTLADAGFIKQYGDCLGDIAARDLICAQKFNGLTVLPPLLTDEMIAQYTSALLAGTITSGWTFGAGAALQIPFAMQMAYRFNGIGVTQNVLYENQKLIANQFNSAIGKIQDSLSSTASALGKLQDVVNQNAQALNTLVKQLSSNFGAISSVLNDILSRLDPPEAEVQIDRLITGRLQSLQTYVTQQLIRAAEIRASANLAATKMSECVLGQSKRVDFCGQGYHLMSFPQSAPHGVVFLHVTYVPAQEKNFTTAPAICHDGKAHFPREGVFVSNGTHWFVTQRNFYEPQIITTDNTFVSGNCDVVIGIVNNTVYDPLQPELDSFKEELDKYFKNHTSPDVDLGDISGINASVVNIQKEIDRLNEVAKNLNESLIDLQELGKYEQYIKGSGRENLYFQGGGGSGYIPEAPRDGQAYVRKDGEWVLLSTFLGHHHHHHHH

SEQ ID NO: 5520 - protein, 1281 aa, Artificial Sequence
  Description of Artificial Sequence: Synthetic polypeptide
MGILPSPGMPALLSLVSLLSVLLMGCVAETGTQCVNLTTRTQLPPAYTNSFTRGVYYPDKVFRSSVLHSTQDLFLPFFSNVTWFHAIHVSGTNGTKRFDNPVLPFNDGVYFASTEKSNIIRGWIFGTTLDSKTQSLLIVNNATNVVIKVCEFQFCNDPFLGVYYHKNNKSWMESEFRVYSSANNCTFEYVSQPFLMDLEGKQGNFKNLREFVFKNIDGYFKIYSKHTPINLVRDLPQGFSALEPLVDLPIGINITRFQTLLALHRSYLTPGDSSSGWTAGAAAYYVGYLQPRTFLLKYNENGTITDAVDCALDPLSETKCTLKSFTVEKGIYQTSNFRVQPTESIVRFPNITNLCPFGEVFNATRFASVYAWNRKRISNCVADYSVLYNSASFSTFKCYGVSPTKLNDLCFTNVYADSFVIRGDEVRQIAPGQTGKIADYNYKLPDDFTGCVIAWNSNNLDSKVGGNYNYLYRLFRKSNLKPFERDISTEIYQAGSTPCNGVEGFNCYFPLQSYTFQPTNGVGYQPYRVVVLSFELLHAPATVCGPKKSTNLVKNKCVNFNFNGLTGTGVLTESNKKFLPFQQFGRDIADTTDAVRDPQTLEILDITPCSFGGVSVITPGTNTSNQVAVLYQDVNCTEVPVAIHADQLTPTWRVYSTGSNVFQTRAGCLIGAEHVNNSYECDIPIGAGICASYQTQTNSPSGAGSVASQSIIAYTMSLGAENSVAYSNNSIAIPTNFTISVTTEILPVSMTKTSVDCTMYICGDSTECSNLLLQYGSFCTQLNRALTGIAVEQDKNTQEVFAQVKQIYKTPPIKDFGGFNFSQILPDPSKPSKRSFIEDLLFNKVTLADAGFIKQYGDCLGDIAARDLICAQKFNGLTVLPPLLTDEMIAQYTSALLAGTITSGWTFGAGAALQIPFAMQMAYRFNGIGVTQNVLYENQKLIANQFNSAIGKIQDSLSSTASALGKLQDVVNQNAQALNTLVKQLSSNFGAISSVLNDILSRLDPPEAEVQIDRLITGRLQSLQTYVTQQLIRAAEIRASANLAATKMSECVLGQSKRVDFCGKGYHLMSFPQSAPHGVVFLHVTYVPAQEKNFTTAPAICHDGKAHFPREGVFVSNGTHWFVTQRNFYEPQIITTDNTFVSGNCDVVIGIVNNTVYDPLQPELDSFKEELDKYFKNHTSPDVDLGDISGINASVVNIQKEIDRLNEVAKNLNESLIDLQELGKYEQYIKGSGRENLYFQGGGGSGYIPEAPRDGQAYVRKDGEWVLLSTFLGHHHHHHHH

SEQ ID NO: 5521 - protein, 1281 aa, Artificial Sequence
  Description of Artificial Sequence: Synthetic polypeptide
MGILPSPGMPALLSLVSLLSVLLMGCVAETGTQCVNLTTRTQLPPAYTNSFTRGVYYPDKVFRSSVLHSTQDLFLPFFSNVTWFHAIHVSGTNGTKRFDNPVLPFNDGVYFASTEKSNIIRGWIFGTTLDSKTQSLLIVNNATNVVIKVCEFQFCNDPFLGVYYHKNNKSWMESEFRVYSSANNCTFEYVSQPFLMDLEGKQGNFKNLREFVFKNIDGYFKIYSKHTPINLVRDLPQGFSALEPLVDLPIGINITRFQTLLALHRSYLTPGDSSSGWTAGAAAYYVGYLQPRTFLLKYNENGTITDAVDCALDPLSETKCTLKSFTVEKGIYQTSNFRVQPTESIVRFPNITNLCPFGEVFNATRFASVYAWNRKRISNCVADYSVLYNSASFSTFKCYGVSPTKLNDLCFTNVYADSFVIRGDEVRQIAPGQTGKIADYNYKLPDDFTGCVIAWNSNNLDSKVGGNYNYLYRLFRKSNLKPFERDIQTEIYQAGSTPCNGVEGFNCYFPLQSYGFQPTNGVGYQPYRVVVLSFELLHAPATVCGPKKSTNLVKNKCVNFNFNGLTGTGVLTESNKKFLPFQQFGRDIADTTDAVRDPQTLEILDITPCSFGGVSVITPGTNTSNQVAVLYQDVNCTEVPVAIHADQLTPTWRVYSTGSNVFQTRAGCLIGAEHVNNSYECDIPIGAGICASYQTQTNSPSGAGSVASQSIIAYTMSLGAENSVAYSNNSIAIPTNFTISVTTEILPVSMTKTSVDCTMYICGDSTECSNLLLQYGSFCTQLNRALTGIAVEQDKNTQEVFAQVKQIYKTPPIKDFGGFNFSQILPDPSKPSKRSFIEDLLFNKVTLADAGFIKQYGDCLGDIAARDLICAQKFNGLTVLPPLLTDEMIAQYTSALLAGTITSGWTFGAGAALQIPFAMQMAYRFNGIGVTQNVLYENQKLIANQFNSAIGKIQDSLSSTASALGKLQDVVNQNAQALNTLVKQLSSNFGAISSVLNDILSRLDPPEAEVQIDRLITGRLQSLQTYVTQQLIRAAEIRASANLAATKMSECVLGQSKRVDFCGKGYHLMSFPQSAPHGVVFLHVTYVPAQEKNFTTAPAICHDGKAHFPREGVFVSNGTHWFVTQRNFYEPQIITTDNTFVSGNCDVVIGIVNNTVYDPLQPELDSFKEELDKYFKNHTSPDVDLGDISGINASVVNIQKEIDRLNEVAKNLNESLIDLQELGKYEQYIKGSGRENLYFQGGGGSGYIPEAPRDGQAYVRKDGEWVLLSTFLGHHHHHHHH

SEQ ID NO: 5522 - protein, 1281 aa, Artificial Sequence
  Description of Artificial Sequence: Synthetic polypeptide
MGILPSPGMPALLSLVSLLSVLLMGCVAETGTQCVNLTTRTQLPPAYTNSFTRGVYYPDKVFRSSVLHSTQDLFLPFFSNVTWFHAIHVSGTNGTKRFDNPVLPFNDGVYFASTEKSNIIRGWIFGTTLDSKTQSLLIVNNATNVVIKVCEFQFCNDPFLGVYYHKNNKSWMESEFRVYSSANNCTFEYVSQPFLMDLEGKQGNFKNLREFVFKNIDGYFKIYSKHTPINLVRDLPQGFSALEPLVDLPIGINITRFQTLLALHRSYLTPGDSSSGWTAGAAAYYVGYLQPRTFLLKYNENGTITDAVDCALDPLSETKCTLKSFTVEKGIYQTSNFRVQPTESIVRFPNITNLCPFGEVFNATRFASVYAWNRKRISNCVADYSVLYNSASFSTFKCYGVSPTKLNDLCFTNVYADSFVIRGDEVRQIAPGQTGKIADYNYKLPDDFTGCVIAWNSNNLDSKVGGNYNYLYRLFRKSNLKPFEFDISTEIYQAGSTPCNGVEGFNCYFPLQSYGFQPTNGVGYQPYRVVVLSFELLHAPATVCGPKKSTNLVKNKCVNFNFNGLTGTGVLTESNKKFLPFQQFGRDIADTTDAVRDPQTLEILDITPCSFGGVSVITPGTNTSNQVAVLYQDVNCTEVPVAIHADQLTPTWRVYSTGSNVFQTRAGCLIGAEHVNNSYECDIPIGAGICASYQTQTNSPSGAGSVASQSIIAYTMSLGAENSVAYSNNSIAIPTNFTISVTTEILPVSMTKTSVDCTMYICGDSTECSNLLLQYGSFCTQLNRALTGIAVEQDKNTQEVFAQVKQIYKTPPIKDFGGFNFSQILPDPSKPSKRSFIEDLLFNKVTLADAGFIKQYGDCLGDIAARDLICAQKFNGLTVLPPLLTDEMIAQYTSALLAGTITSGWTFGAGAALQIPFAMQMAYRFNGIGVTQNVLYENQKLIANQFNSAIGKIQDSLSSTASALGKLQDVVNQNAQALNTLVKQLSSNFGAISSVLNDILSRLDPPEAEVQIDRLITGRLQSLQTYVTQQLIRAAEIRASANLAATKMSECVLGQSKRVDFCGKGYHLMSFPQSAPHGVVFLHVTYVPAQEKNFTTAPAICHDGKAHFPREGVFVSNGTHWFVTQRNFYEPQIITTDNTFVSGNCDVVIGIVNNTVYDPLQPELDSFKEELDKYFKNHTSPDVDLGDISGINASVVNIQKEIDRLNEVAKNLNESLIDLQELGKYEQYIKGSGRENLYFQGGGGSGYIPEAPRDGQAYVRKDGEWVLLSTFLGHHHHHHHH

SEQ ID NO: 5523 - protein, 1281 aa, Artificial Sequence
  Description of Artificial Sequence: Synthetic polypeptide
MGILPSPGMPALLSLVSLLSVLLMGCVAETGTQCVNLTTRTQLPPAYTNSFTRGVYYPDKVFRSSVLHSTQDLFLPFFSNVTWFHAIHVSGTNGTKRFDNPVLPFNDGVYFASTEKSNIIRGWIFGTTLDSKTQSLLIVNNATNVVIKVCEFQFCNDPFLGVYYHKNNKSWMESEFRVYSSANNCTFEYVSQPFLMDLEGKQGNFKNLREFVFKNIDGYFKIYSKHTPINLVRDLPQGFSALEPEVDLPIGINITRFQTLLALHRSYLTPGDSSSGWTAGAAAYYVGYLQPRTFLLKYNENGTITDAVDCALDPLSETKCTLKSFTVEKGIYQTSNFRVQPTESIVRFPNITNLCPFGEVFNATRFASVYAWNRKRISNCVADYSVLYNSASFSTFKCYGVSPTKLNDLCFTNVYADSFVIRGDEVRQIAPGQTGKIADYNYKLPDDFTGCVIAWNSNNLDSKVGGNYNYLYRLFRKSNLKPFERDISTEIYQAGSTPCNGVEGFNCYFPLQSYGFQPTNGVGYQPYRVVVLSFELLHAPATVCGPKKSTNLVKNKCVNFNFNGLTGTGVLTESNKKFLPFQQFGRDIADTTDAVRDPQTLEILDITPCSFGGVSVITPGTNTSNQVAVLYQDVNCTEVPVAIHADQLTPTWRVYSTGSNVFQTRAGCLIGAEHVNNSYECDIPIGAGICASYQTQTNSPSGAGSVASQSIIAYTMSLGAENSVAYSNNSIAIPTNFTISVTTEILPVSMTKTSVDCTMYICGDSTECSNLLLQYGSFCTQLNRALTGIAVEQDKNTQEVFAQVKQIYKTPPIKDFGGFNFSQILPDPSKPSKRSFIEDLLFNKVTLADAGFIKQYGDCLGDIAARDLICAQKFNGLTVLPPLLTDEMIAQYTSALLAGTITSGWTFGAGAALQIPFAMQMAYRFNGIGVTQNVLYENQKLIANQFNSAIGKIQDSLSSTASALGKLQDVVNQNAQALNTLVKQLSSNFGAISSVLNDILSRLDPPEAEVQIDRLITGRLQSLQTYVTQQLIRAAEIRASANLAATKMSECVLGQSKRVDFCGKGYHLMSFPQSAPHGVVFLHVTYVPAQEKNFTTAPAICHDGKAHFPREGVFVSNGTHWFVTQRNFYEPQIITTDNTFVSGNCDVVIGIVNNTVYDPLQPELDSFKEELDKYFKNHTSPDVDLGDISGINASVVNIQKEIDRLNEVAKNLNESLIDLQELGKYEQYIKGSGRENLYFQGGGGSGYIPEAPRDGQAYVRKDGEWVLLSTFLGHHHHHHHH

SEQ ID NO: 5524 - protein, 1281 aa, Artificial Sequence
  Description of Artificial Sequence: Synthetic polypeptide
MGILPSPGMPALLSLVSLLSVLLMGCVAETGTQCVNLTTRTQLPPAYTNSFTRGVYYPDKVFRSSVLHSTQDLFLPFFSNVTWFHAIHVSGTNGTKRFDNPVLPFNDGVYFASTEKSNIIRGWIFGTTLDSKTQSLLIVNNATNVVIKVCEFQFCNDPFLGVYYHKNNKSWMESEFRVYSSANNCTFEYVSQPFLMDLEGKQGNFKNLREFVFKNIDGYFKIYSKHTPINLVRDLPQGFSALEPLVDLPIGINITRFQTLLALHRSYLTPGDSSSGWTAGAAAYYVGYLQPRTFLLKYNENGTITDAVDCALDPLSETKCTLKSFTVEKGIYQTSNFRVQPTESIVRFPNITNLCPFGEVFNATRFASVYAWNRKRISNCVADYSVLYNSASFSTFKCYGVSPTKLNDLCFTNVYADSFVIRGDEVRQIAPGQTGKIADYNYKLPDDFTGCVIAWNSNNLDSKVGGNYNYLYRLFRKSNLKPFERDISHEIYQAGSTPCNGVEGFNCYFPLQSYGFQPTNGVGYQPYRVVVLSFELLHAPATVCGPKKSTNLVKNKCVNFNFNGLTGTGVLTESNKKFLPFQQFGRDIADTTDAVRDPQTLEILDITPCSFGGVSVITPGTNTSNQVAVLYQDVNCTEVPVAIHADQLTPTWRVYSTGSNVFQTRAGCLIGAEHVNNSYECDIPIGAGICASYQTQTNSPSGAGSVASQSIIAYTMSLGAENSVAYSNNSIAIPTNFTISVTTEILPVSMTKTSVDCTMYICGDSTECSNLLLQYGSFCTQLNRALTGIAVEQDKNTQEVFAQVKQIYKTPPIKDFGGFNFSQILPDPSKPSKRSFIEDLLFNKVTLADAGFIKQYGDCLGDIAARDLICAQKFNGLTVLPPLLTDEMIAQYTSALLAGTITSGWTFGAGAALQIPFAMQMAYRFNGIGVTQNVLYENQKLIANQFNSAIGKIQDSLSSTASALGKLQDVVNQNAQALNTLVKQLSSNFGAISSVLNDILSRLDPPEAEVQIDRLITGRLQSLQTYVTQQLIRAAEIRASANLAATKMSECVLGQSKRVDFCGKGYHLMSFPQSAPHGVVFLHVTYVPAQEKNFTTAPAICHDGKAHFPREGVFVSNGTHWFVTQRNFYEPQIITTDNTFVSGNCDVVIGIVNNTVYDPLQPELDSFKEELDKYFKNHTSPDVDLGDISGINASVVNIQKEIDRLNEVAKNLNESLIDLQELGKYEQYIKGSGRENLYFQGGGGSGYIPEAPRDGQAYVRKDGEWVLLSTFLGHHHHHHHH

SEQ ID NO: 5525 - protein, 1281 aa, Artificial Sequence
  Description of Artificial Sequence: Synthetic polypeptide
MGILPSPGMPALLSLVSLLSVLLMGCVAETGTQCVNLTTRTQLPPAYTNSFTRGVYYPDKVFRSSVLHSTQDLFLPFFSNVTWFHAIHVSGTNGTKRFDNPVLPFNDGVYFASTEKSNIIRGWIFGTTLDSKTQSLLIVNNATNVVIKVCEFQFCNDPFLGVYYHKNNKSWMESEFRVYSSANNCTFEYVSQPFLMDLEGKQGNFKNLREFVFKNIDGYFKIYSKHTPINLVRDLPQGFSALEPLVDLPIGINITRFQTLLALHRSYLTPGDSSSGWTAGAAAYYVGYLQPRTFLLKYNENGTITDAVDCALDPLSETKCTLKSFTVEKGIYQTSNFRVQPTESIVRFPNITNLCPFGEVFNATRFASVYAWNRKRISNCVADYSVLYNTASFSTFKCYGVSPTKLNDLCFTNVYADSFVIRGDEVRQIAPGQTGKIADYNYKLPDDFTGCVIAWNSNNLDSKVGGNYNYLYRLFRKSNLKPFERDISTEIYQAGSTPCNGVEGFNCYFPLQSYGFQPTNGVGYQPYRVVVLSFELLHAPATVCGPKKSTNLVKNKCVNFNFNGLTGTGVLTESNKKFLPFQQFGRDIADTTDAVRDPQTLEILDITPCSFGGVSVITPGTNTSNQVAVLYQDVNCTEVPVAIHADQLTPTWRVYSTGSNVFQTRAGCLIGAEHVNNSYECDIPIGAGICASYQTQTNSPSGAGSVASQSIIAYTMSLGAENSVAYSNNSIAIPTNFTISVTTEILPVSMTKTSVDCTMYICGDSTECSNLLLQYGSFCTQLNRALTGIAVEQDKNTQEVFAQVKQIYKTPPIKDFGGFNFSQILPDPSKPSKRSFIEDLLFNKVTLADAGFIKQYGDCLGDIAARDLICAQKFNGLTVLPPLLTDEMIAQYTSALLAGTITSGWTFGAGAALQIPFAMQMAYRFNGIGVTQNVLYENQKLIANQFNSAIGKIQDSLSSTASALGKLQDVVNQNAQALNTLVKQLSSNFGAISSVLNDILSRLDPPEAEVQIDRLITGRLQSLQTYVTQQLIRAAEIRASANLAATKMSECVLGQSKRVDFCGKGYHLMSFPQSAPHGVVFLHVTYVPAQEKNFTTAPAICHDGKAHFPREGVFVSNGTHWFVTQRNFYEPQIITTDNTFVSGNCDVVIGIVNNTVYDPLQPELDSFKEELDKYFKNHTSPDVDLGDISGINASVVNIQKEIDRLNEVAKNLNESLIDLQELGKYEQYIKGSGRENLYFQGGGGSGYIPEAPRDGQAYVRKDGEWVLLSTFLGHHHHHHHH

SEQ ID NO: 5526 - protein, 1281 aa, Artificial Sequence
  Description of Artificial Sequence: Synthetic polypeptide
MGILPSPGMPALLSLVSLLSVLLMGCVAETGTQCVNLTTRTQLPPAYTNSFTRGVYYPDKVFRSSVLHSTQDLFLPFFSNVTWFHAIHVSGTNGTKRFDNPVLPFNDGVYFASTEKSNIIRGWIFGTTLDSKTQSLLIVNNATNVVIKVCEFQFCNDPFLGVYYHKNNKSWMESEFRVYSSANNCTFEYVSQPFLMDLEGKQGNFKNLREFVFKNIDGYFKIYSKHTPINLVRDLPQGFSALEPLVDLPIGINITRFQTLLALHRSYLTPGDSSSGWTAGAAAYYVGYLQPRTFLLKYNENGTITDAVDCALDPLSETKCTLKSFTVEKGIYQTSNFRVQPTESIVRFPNITNLCPFGEVFNATRFASVYAWNRKRISNCVADYSVLYNSASFSTFKCYGVSPTKLNDLCFTNVYADSFVIRGDEVRQIAPGQTGKIADYNYKLPDDFTGCVIAWNSNNLDSKVGGNYNYLYRLFRKSNLKPFERDISTEIYQAGSTPCNGVEGFNCYFPLQSYGFQPTNGVGYQPYRVVVLSFELLHAPATVCGPKKSTNLVKNKCVNFNFNGLTGTGVLTESNKKFLPFQQFGRDIADTTDAVRDPQTLEILDITPCSFGGVSVITPGTNTSNQVAVLYQDVNCTEVPVAIHADQLTPTWRVYSTGSNVFQTRAGCLIGAEHVNNSYECDIPIGAGICASYQTQTNSPSGAGSVASQSIIAYTMSLGAENKVAYSNNSIAIPTNFTISVTTEILPVSMTKTSVDCTMYICGDSTECSNLLLQYGSFCTQLNRALTGIAVEQDKNTQEVFAQVKQIYKTPPIKDFGGFNFSQILPDPSKPSKRSFIEDLLFNKVTLADAGFIKQYGDCLGDIAARDLICAQKFNGLTVLPPLLTDEMIAQYTSALLAGTITSGWTFGAGAALQIPFAMQMAYRFNGIGVTQNVLYENQKLIANQFNSAIGKIQDSLSSTASALGKLQDVVNQNAQALNTLVKQLSSNFGAISSVLNDILSRLDPPEAEVQIDRLITGRLQSLQTYVTQQLIRAAEIRASANLAATKMSECVLGQSKRVDFCGKGYHLMSFPQSAPHGVVFLHVTYVPAQEKNFTTAPAICHDGKAHFPREGVFVSNGTHWFVTQRNFYEPQIITTDNTFVSGNCDVVIGIVNNTVYDPLQPELDSFKEELDKYFKNHTSPDVDLGDISGINASVVNIQKEIDRLNEVAKNLNESLIDLQELGKYEQYIKGSGRENLYFQGGGGSGYIPEAPRDGQAYVRKDGEWVLLSTFLGHHHHHHHH

SEQ ID NO: 5527 - protein, 1281 aa, Artificial Sequence
  Description of Artificial Sequence: Synthetic polypeptide
MGILPSPGMPALLSLVSLLSVLLMGCVAETGTQCVNLTTRTQLPPAYTNSFTRGVYYPDKVFRSSVLHSTQDLFLPFFSNVTWFHAIHVSGTNGTKRFDNPVLPFNDGVYFASTEKSNIIRGWIFGTTLDSKTQSLLIVNNATNVVIKVCEFQFCNDPFLGVYYHKNNKSWMESEFRVYSSANNCTFEYVSQPFLMDLEGKQGNFKNLREFVFKNIDGYFKIYSKHTPINLVRDLPQGFSALEPLVDLPIGINITRFQTLLALHRSYLTPGDSSSGWTAGAAAYYVGYLQPRTFLLKYNENGTITDAVDCALDPLSETKCTLKSFTVEKGIYQTSNFRVQPTESIVRFPNITNLCPFGEVFNATRFASVYAWNRKRISNCVADYSNLYNSASFSTFKCYGVSPTKLNDLCFTNVYADSFVIRGDEVRQIAPGQTGKIADYNYKLPDDFTGCVIAWNSNNLDSKVGGNYNYLYRLFRKSNLKPFERDISTEIYQAGSTPCNGVEGFNCYFPLQSYGFQPTNGVGYQPYRVVVLSFELLHAPATVCGPKKSTNLVKNKCVNFNFNGLTGTGVLTESNKKFLPFQQFGRDIADTTDAVRDPQTLEILDITPCSFGGVSVITPGTNTSNQVAVLYQDVNCTEVPVAIHADQLTPTWRVYSTGSNVFQTRAGCLIGAEHVNNSYECDIPIGAGICASYQTQTNSPSGAGSVASQSIIAYTMSLGAENSVAYSNNSIAIPTNFTISVTTEILPVSMTKTSVDCTMYICGDSTECSNLLLQYGSFCTQLNRALTGIAVEQDKNTQEVFAQVKQIYKTPPIKDFGGFNFSQILPDPSKPSKRSFIEDLLFNKVTLADAGFIKQYGDCLGDIAARDLICAQKFNGLTVLPPLLTDEMIAQYTSALLAGTITSGWTFGAGAALQIPFAMQMAYRFNGIGVTQNVLYENQKLIANQFNSAIGKIQDSLSSTASALGKLQDVVNQNAQALNTLVKQLSSNFGAISSVLNDILSRLDPPEAEVQIDRLITGRLQSLQTYVTQQLIRAAEIRASANLAATKMSECVLGQSKRVDFCGKGYHLMSFPQSAPHGVVFLHVTYVPAQEKNFTTAPAICHDGKAHFPREGVFVSNGTHWFVTQRNFYEPQIITTDNTFVSGNCDVVIGIVNNTVYDPLQPELDSFKEELDKYFKNHTSPDVDLGDISGINASVVNIQKEIDRLNEVAKNLNESLIDLQELGKYEQYIKGSGRENLYFQGGGGSGYIPEAPRDGQAYVRKDGEWVLLSTFLGHHHHHHHH

SEQ ID NO: 5528 - protein, 1281 aa, Artificial Sequence
  Description of Artificial Sequence: Synthetic polypeptide
MGILPSPGMPALLSLVSLLSVLLMGCVAETGTQCVNLTTRTQLPPAYTNSFTRGVYYPDKVFRSSVLHSTQDLFLPFFSNVTWFHAIHVSGTNGTKRFDNPVLPFNDGVYFASTEKSNIIRGWIFGTTLDSKTQSLLIVNNATNVVIKVCEFQFCNDPFLGVYYHKNNKSWMESEFRVYSSANNCTFEYVSQPFLMDLEGKQGNFKNLREFVFKNIDGYFKIYSKHTPINLVRDLPQGFSALEPLVDLPIGINITRFQTLLALHRSYLTPGDSSSGWTAGAAAYYVGYLQPRTFLLKYNENGTITDAVDCALDPLSETKCTLKSFTVEKGIYQTSNFRVQPTESIVRFPNITNLCPFGEVFNATRFASVYAWNRKRISNCVADYSVLYNSASFSTFKCYGVSPTKLNDLCFTNVYADSFVIRGDEVRQIAPGQTGKIADYNYKLPDDFTGCVIAWNSNNLDSKVGGNYNYLYRLFRKSNLKPFERDISTEIYQAGSTPCNGVEGFNCYFPLQSYGFQPTNGVGYQPYRVVVLSFELLHAPATVCGPKKSTNLVKNKCVNFNFNGLTGTGVLTESNKKFLPFQQFGRDIADTTDAVRDPQTLEILDITPCSFGGVSVITPGTNTSNQVAVLYQDVNCTEVPVAIHADQLTPTWRVYSTGSNVFQTRAGCLIGAEHVNNSYECDIPIGAGICASYQTQTNSPSGAGSVASQSIIAYTMSLGDENSVAYSNNSIAIPTNFTISVTTEILPVSMTKTSVDCTMYICGDSTECSNLLLQYGSFCTQLNRALTGIAVEQDKNTQEVFAQVKQIYKTPPIKDFGGFNFSQILPDPSKPSKRSFIEDLLFNKVTLADAGFIKQYGDCLGDIAARDLICAQKFNGLTVLPPLLTDEMIAQYTSALLAGTITSGWTFGAGAALQIPFAMQMAYRFNGIGVTQNVLYENQKLIANQFNSAIGKIQDSLSSTASALGKLQDVVNQNAQALNTLVKQLSSNFGAISSVLNDILSRLDPPEAEVQIDRLITGRLQSLQTYVTQQLIRAAEIRASANLAATKMSECVLGQSKRVDFCGKGYHLMSFPQSAPHGVVFLHVTYVPAQEKNFTTAPAICHDGKAHFPREGVFVSNGTHWFVTQRNFYEPQIITTDNTFVSGNCDVVIGIVNNTVYDPLQPELDSFKEELDKYFKNHTSPDVDLGDISGINASVVNIQKEIDRLNEVAKNLNESLIDLQELGKYEQYIKGSGRENLYFQGGGGSGYIPEAPRDGQAYVRKDGEWVLLSTFLGHHHHHHHH

SEQ ID NO: 5529 - protein, 1281 aa, Artificial Sequence
  Description of Artificial Sequence: Synthetic polypeptide
MGILPSPGMPALLSLVSLLSVLLMGCVAETGTQCVNLTTRTQLPPAYTNSFTRGVYYPDKVFRSSVLHSTQDLFLPFFSNVTWFHAIHVSGTNGTKRFDNPVLPFNDGVYFASTEKSNIIRGWIFGTTLDSKTQSLLIVNNATNVVIKVCEFQFCNDPFLGVYYHKNNKSWMESEFRVYSSANNCTFEYVSQPFLMDLEGKQGNFKNLREFVFKNIDGYFKIYSKHTPINLVRDLPQGFSALEPLVDLPIGINITRFQTLLALHRSYLTPGDSSSGWTAGAAAYYVGYLQPRTFLLKYNENGTITDAVDCALDPLSETKCTLKSFTVEKGIYQTSNFRVQPTESIVRFPNITNLCPFGEVFNATRFASVYAWNRKRISNCVADYSVLYNSASFSTFKCYGVSPTKLNDLCFTNVYADSFVIRGDEVRQIAPGQTGKIADYNYKLPDDFTGCVIAWNSNNLDSKVGGNYNYLYRLFRKSNLKPFERDISTEIYQAGSTPCNGVEGFNCYFPLQSYGFQPTNGVGYQPYRVVVLSFELDHAPATVCGPKKSTNLVKNKCVNFNFNGLTGTGVLTESNKKFLPFQQFGRDIADTTDAVRDPQTLEILDITPCSFGGVSVITPGTNTSNQVAVLYQDVNCTEVPVAIHADQLTPTWRVYSTGSNVFQTRAGCLIGAEHVNNSYECDIPIGAGICASYQTQTNSPSGAGSVASQSIIAYTMSLGAENSVAYSNNSIAIPTNFTISVTTEILPVSMTKTSVDCTMYICGDSTECSNLLLQYGSFCTQLNRALTGIAVEQDKNTQEVFAQVKQIYKTPPIKDFGGFNFSQILPDPSKPSKRSFIEDLLFNKVTLADAGFIKQYGDCLGDIAARDLICAQKFNGLTVLPPLLTDEMIAQYTSALLAGTITSGWTFGAGAALQIPFAMQMAYRFNGIGVTQNVLYENQKLIANQFNSAIGKIQDSLSSTASALGKLQDVVNQNAQALNTLVKQLSSNFGAISSVLNDILSRLDPPEAEVQIDRLITGRLQSLQTYVTQQLIRAAEIRASANLAATKMSECVLGQSKRVDFCGKGYHLMSFPQSAPHGVVFLHVTYVPAQEKNFTTAPAICHDGKAHFPREGVFVSNGTHWFVTQRNFYEPQIITTDNTFVSGNCDVVIGIVNNTVYDPLQPELDSFKEELDKYFKNHTSPDVDLGDISGINASVVNIQKEIDRLNEVAKNLNESLIDLQELGKYEQYIKGSGRENLYFQGGGGSGYIPEAPRDGQAYVRKDGEWVLLSTFLGHHHHHHHH

SEQ ID NO: 5530 - protein, 1281 aa, Artificial Sequence
  Description of Artificial Sequence: Synthetic polypeptide
MGILPSPGMPALLSLVSLLSVLLMGCVAETGTQCVNLTTRTQLPPAYTNSFTRGVYYPDKVFRSSVLHSTQDLFLPFFSNVTWFHAIHVSGTNGTKRFDNPVLPFNDGVYFASTEKSNIIRGWIFGTTLDSKTQSLLIVNNATNVVIKVCEFQFCNDPFLGVYYHKNNKSWMESEFRVYSSANNCTFEYVSQPFLMDLEGKQGNFKNLREFVFKNIDGYFKIYSKHTPINLVRDLPQGFSALEPLVDLPIGINITRFQTLLALHRSYLTPGDSSSGWTAGAAAYYVGYLQPRTFLLKYNENGTITDAVDCALDPLSETKCTLKSFTVEKGIYQTSNFRVQPTESIVRFPNITNLCPFGEVFNATRFASVYAWNRKRISNCVADYSVLYNSASFSTFKCYGVSPTKLNDLCFTNVYADSFVIRGDEVRQIAPGQTGKIADYNYKLPDDFTGCVIAWNSNNLDSKVGGNYNYLYRLFRKSNLKPFERDISTEIYQAGSTPCNGVEGFNCYFPLQSYGFQPTNGVGYQPYRVVILSFELLHAPATVCGPKKSTNLVKNKCVNFNFNGLTGTGVLTESNKKFLPFQQFGRDIADTTDAVRDPQTLEILDITPCSFGGVSVITPGTNTSNQVAVLYQDVNCTEVPVAIHADQLTPTWRVYSTGSNVFQTRAGCLIGAEHVNNSYECDIPIGAGICASYQTQTNSPSGAGSVASQSIIAYTMSLGAENSVAYSNNSIAIPTNFTISVTTEILPVSMTKTSVDCTMYICGDSTECSNLLLQYGSFCTQLNRALTGIAVEQDKNTQEVFAQVKQIYKTPPIKDFGGFNFSQILPDPSKPSKRSFIEDLLFNKVTLADAGFIKQYGDCLGDIAARDLICAQKFNGLTVLPPLLTDEMIAQYTSALLAGTITSGWTFGAGAALQIPFAMQMAYRFNGIGVTQNVLYENQKLIANQFNSAIGKIQDSLSSTASALGKLQDVVNQNAQALNTLVKQLSSNFGAISSVLNDILSRLDPPEAEVQIDRLITGRLQSLQTYVTQQLIRAAEIRASANLAATKMSECVLGQSKRVDFCGKGYHLMSFPQSAPHGVVFLHVTYVPAQEKNFTTAPAICHDGKAHFPREGVFVSNGTHWFVTQRNFYEPQIITTDNTFVSGNCDVVIGIVNNTVYDPLQPELDSFKEELDKYFKNHTSPDVDLGDISGINASVVNIQKEIDRLNEVAKNLNESLIDLQELGKYEQYIKGSGRENLYFQGGGGSGYIPEAPRDGQAYVRKDGEWVLLSTFLGHHHHHHHH

SEQ ID NO: 5531 - protein, 1281 aa, Artificial Sequence
  Description of Artificial Sequence: Synthetic polypeptide
MGILPSPGMPALLSLVSLLSVLLMGCVAETGTQCVNLTTRTQLPPAYTNSFTRGVYYPDKVFRSSVLHSTQDLFLPFFSNVTWFHAIHVSGTNGTKRFDNPVLPFNDGVYFASTEKSNIIRGWIFGTTLDSKTQSLLIVNNATNVVIKVCEFQFCNDPFLGVYYHKNNKSWMESEFRVYSSANNCTFEYVSQPFLMDLEGKQGNFKNLREFVFKNIDGYFKIYSKHTPINLVRDLPQGFSALEPLVDLPIGINITRFQTLLALHRSYLTPGDSSSGWTAGAAAYYVGYLQPRTFLLKYNENGTITDAVDCALDPLSETKCTLKSFTVEKGIYQTSNFRVQPTESIVRFPNITNLCPFGEVFNATRFASVYAWNRKRISNCVADYSVLYNSASFSTFKCYGVSPTKLNDLCFTNVYADSFVIRGDEVRQIAPGQTGKIADYNYKLPDDFTGCVIAWNSNNLDSKVGGNYNYLYRLFRKSNLKPFERDISTEIYQAGSTPCNGVEGFNCYFPLQSYGFQPTNGVGYQPYRVVVLAFELLHAPATVCGPKKSTNLVKNKCVNFNFNGLTGTGVLTESNKKFLPFQQFGRDIADTTDAVRDPQTLEILDITPCSFGGVSVITPGTNTSNQVAVLYQDVNCTEVPVAIHADQLTPTWRVYSTGSNVFQTRAGCLIGAEHVNNSYECDIPIGAGICASYQTQTNSPSGAGSVASQSIIAYTMSLGAENSVAYSNNSIAIPTNFTISVTTEILPVSMTKTSVDCTMYICGDSTECSNLLLQYGSFCTQLNRALTGIAVEQDKNTQEVFAQVKQIYKTPPIKDFGGFNFSQILPDPSKPSKRSFIEDLLFNKVTLADAGFIKQYGDCLGDIAARDLICAQKFNGLTVLPPLLTDEMIAQYTSALLAGTITSGWTFGAGAALQIPFAMQMAYRFNGIGVTQNVLYENQKLIANQFNSAIGKIQDSLSSTASALGKLQDVVNQNAQALNTLVKQLSSNFGAISSVLNDILSRLDPPEAEVQIDRLITGRLQSLQTYVTQQLIRAAEIRASANLAATKMSECVLGQSKRVDFCGKGYHLMSFPQSAPHGVVFLHVTYVPAQEKNFTTAPAICHDGKAHFPREGVFVSNGTHWFVTQRNFYEPQIITTDNTFVSGNCDVVIGIVNNTVYDPLQPELDSFKEELDKYFKNHTSPDVDLGDISGINASVVNIQKEIDRLNEVAKNLNESLIDLQELGKYEQYIKGSGRENLYFQGGGGSGYIPEAPRDGQAYVRKDGEWVLLSTFLGHHHHHHHH

SEQ ID NO: 5532 - protein, 1281 aa, Artificial Sequence
  Description of Artificial Sequence: Synthetic polypeptide
MGILPSPGMPALLSLVSLLSVLLMGCVAETGTQCVNLTTRTQLPPAYTNSFTRGVYYPDKVFRSSVLHSTQDLFLPFFSNVTWFHAIHVSGTNGTKRFDNPVLPFNDGVYFASTEKSNIIRGWIFGTTLDSKTQSLLIVNNATNVVIKVCEFQFCNDPFLGVYYHKNNKSWMESEFRVYSSANNCTFEYVSQPFLMDLEGKQGNFKNLREFVFKNIDGYFKIYSKHTPINLVRDLPQGFSALEPLVDLPIGINITRFQTLLALHRSYLTPGDSSSGWTAGAAAYYVGYLQPRTFLLKYNENGTITDAVDCALDPLSETKCTLKSFTVEKGIYQTSNFRVQPTESIVRFPNITNLCPFGEVFNATRFASVYAWNRKRISNCVADYSVLYNSASFSTFKCYGVSPTKLNDLCFTNVYADSFVIRGDEVRQIAPGQTGKIADYNYKLPDDFTGCVIAWNSNNLDSKVGGNYNYLYRLFRKSNLKPFERDISTEIYQAGSTPCNGVEGFNCYFPLQSYGFQPTNGVGYQPYRVVVLSFELLLAPATVCGPKKSTNLVKNKCVNFNFNGLTGTGVLTESNKKFLPFQQFGRDIADTTDAVRDPQTLEILDITPCSFGGVSVITPGTNTSNQVAVLYQDVNCTEVPVAIHADQLTPTWRVYSTGSNVFQTRAGCLIGAEHVNNSYECDIPIGAGICASYQTQTNSPSGAGSVASQSIIAYTMSLGAENSVAYSNNSIAIPTNFTISVTTEILPVSMTKTSVDCTMYICGDSTECSNLLLQYGSFCTQLNRALTGIAVEQDKNTQEVFAQVKQIYKTPPIKDFGGFNFSQILPDPSKPSKRSFIEDLLFNKVTLADAGFIKQYGDCLGDIAARDLICAQKFNGLTVLPPLLTDEMIAQYTSALLAGTITSGWTFGAGAALQIPFAMQMAYRFNGIGVTQNVLYENQKLIANQFNSAIGKIQDSLSSTASALGKLQDVVNQNAQALNTLVKQLSSNFGAISSVLNDILSRLDPPEAEVQIDRLITGRLQSLQTYVTQQLIRAAEIRASANLAATKMSECVLGQSKRVDFCGKGYHLMSFPQSAPHGVVFLHVTYVPAQEKNFTTAPAICHDGKAHFPREGVFVSNGTHWFVTQRNFYEPQIITTDNTFVSGNCDVVIGIVNNTVYDPLQPELDSFKEELDKYFKNHTSPDVDLGDISGINASVVNIQKEIDRLNEVAKNLNESLIDLQELGKYEQYIKGSGRENLYFQGGGGSGYIPEAPRDGQAYVRKDGEWVLLSTFLGHHHHHHHH

SEQ ID NO: 5533 - protein, 1281 aa, Artificial Sequence
  Description of Artificial Sequence: Synthetic polypeptide
MGILPSPGMPALLSLVSLLSVLLMGCVAETGTQCVNLTTRTQLPPAYTNSFTRGVYYPDKVFRSSVLHSTQDLFLPFFSNVTWFHAIHVSGTNGTKRFDNPVLPFNDGVYFASTEKSNIIRGWIFGTTLDSKTQSLLIVNNATNVVIKVCEFQFCNDPFLGVYYHKNNKSWMESEFRVYSSANNCTFEYVSQPFLMDLEGKQGNFKNLREFVFKNIDGYFKIYSKHTPINLVRDLPQGFSALEPLVDLPIGINITRFQTLLALHRSYLTPGDSSSGWTAGAAAYYVGYLQPRTFLLKYNENGTITDAVDCALDPLSETKCTLKSFTVEKGIYQTSNFRVQPTESIVRFPNITNLCPFGEVFNATRFASVYAWNRKRISNCVADYSVLYNSASFSTFKCYGVSPTKLNDLCFTNVYADSFVIRGDEVRQIAPGQTGKIADYNYKLPDDFTGCVIAWNSNNLDSKVGGNYNYLYRLFRKSNLKPFELDISTEIYQAGSTPCNGVEGFNCYFPLQSYGFQPTNGVGYQPYRVVVLSFELLHAPATVCGPKKSTNLVKNKCVNFNFNGLTGTGVLTESNKKFLPFQQFGRDIADTTDAVRDPQTLEILDITPCSFGGVSVITPGTNTSNQVAVLYQDVNCTEVPVAIHADQLTPTWRVYSTGSNVFQTRAGCLIGAEHVNNSYECDIPIGAGICASYQTQTNSPSGAGSVASQSIIAYTMSLGAENSVAYSNNSIAIPTNFTISVTTEILPVSMTKTSVDCTMYICGDSTECSNLLLQYGSFCTQLNRALTGIAVEQDKNTQEVFAQVKQIYKTPPIKDFGGFNFSQILPDPSKPSKRSFIEDLLFNKVTLADAGFIKQYGDCLGDIAARDLICAQKFNGLTVLPPLLTDEMIAQYTSALLAGTITSGWTFGAGAALQIPFAMQMAYRFNGIGVTQNVLYENQKLIANQFNSAIGKIQDSLSSTASALGKLQDVVNQNAQALNTLVKQLSSNFGAISSVLNDILSRLDPPEAEVQIDRLITGRLQSLQTYVTQQLIRAAEIRASANLAATKMSECVLGQSKRVDFCGKGYHLMSFPQSAPHGVVFLHVTYVPAQEKNFTTAPAICHDGKAHFPREGVFVSNGTHWFVTQRNFYEPQIITTDNTFVSGNCDVVIGIVNNTVYDPLQPELDSFKEELDKYFKNHTSPDVDLGDISGINASVVNIQKEIDRLNEVAKNLNESLIDLQELGKYEQYIKGSGRENLYFQGGGGSGYIPEAPRDGQAYVRKDGEWVLLSTFLGHHHHHHHH

SEQ ID NO: 5534 - protein, 1281 aa, Artificial Sequence
  Description of Artificial Sequence: Synthetic polypeptide
MGILPSPGMPALLSLVSLLSVLLMGCVAETGTQCVNLTTRTQLPPAYTNSFTRGVYYPDKVFRSSVLHSTQDLFLPFFSNVTWFHAIHVSGTNGTKRFDNPVLPFNDGVYFASTEKSNIIRGWIFGTTLDSKTQSLLIVNNATNVVIKVCEFQFCNDPFLGVYYHKNNKSWMESEFRVYSSANNCTFEYVSQPFLMDLEGKQGNFKNLREFVFKNIDGYFKIYSKHTPINLVRDLPQGFSALEPLVDLPIGINITRFQTLLALHRSYLTPGDSSSGWTAGAAAYYVGYLQPRTFLLKYNENGTITDAVDCALDPLSETKCTLKSFTVEKGIYQTSNFRVQPTESIVRFPNITNLCPFGEVFNATRFASVYAWNRKRISNCVADYSVLYNSASFSTFKCYGVSPTKLNDLCFTNVYADSFVIRGDEVRQIAPGQTGKIADYNYKLPDDFTGCVIAWNSNNLDSKVGGNYNYLYRLFRKSNLKPFERDISAEIYQAGSTPCNGVEGFNCYFPLQSYGFQPTNGVGYQPYRVVVLSFELLHAPATVCGPKKSTNLVKNKCVNFNFNGLTGTGVLTESNKKFLPFQQFGRDIADTTDAVRDPQTLEILDITPCSFGGVSVITPGTNTSNQVAVLYQDVNCTEVPVAIHADQLTPTWRVYSTGSNVFQTRAGCLIGAEHVNNSYECDIPIGAGICASYQTQTNSPSGAGSVASQSIIAYTMSLGAENSVAYSNNSIAIPTNFTISVTTEILPVSMTKTSVDCTMYICGDSTECSNLLLQYGSFCTQLNRALTGIAVEQDKNTQEVFAQVKQIYKTPPIKDFGGFNFSQILPDPSKPSKRSFIEDLLFNKVTLADAGFIKQYGDCLGDIAARDLICAQKFNGLTVLPPLLTDEMIAQYTSALLAGTITSGWTFGAGAALQIPFAMQMAYRFNGIGVTQNVLYENQKLIANQFNSAIGKIQDSLSSTASALGKLQDVVNQNAQALNTLVKQLSSNFGAISSVLNDILSRLDPPEAEVQIDRLITGRLQSLQTYVTQQLIRAAEIRASANLAATKMSECVLGQSKRVDFCGKGYHLMSFPQSAPHGVVFLHVTYVPAQEKNFTTAPAICHDGKAHFPREGVFVSNGTHWFVTQRNFYEPQIITTDNTFVSGNCDVVIGIVNNTVYDPLQPELDSFKEELDKYFKNHTSPDVDLGDISGINASVVNIQKEIDRLNEVAKNLNESLIDLQELGKYEQYIKGSGRENLYFQGGGGSGYIPEAPRDGQAYVRKDGEWVLLSTFLGHHHHHHHH

SEQ ID NO: 5535 - protein, 1281 aa, Artificial Sequence
  Description of Artificial Sequence: Synthetic polypeptide
MGILPSPGMPALLSLVSLLSVLLMGCVAETGTQCVNLTTRTQLPPAYTNSFTRGVYYPDKVFRSSVLHSTQDLFLPFFSNVTWFHAIHVSGTNGTKRFDNPVLPFNDGVYFASTEKSNIIRGWIFGTTLDSKTQSLLIVNNATNVVIKVCEFQFCNDPFLGVYYHKNNKSWMESEFRVYSSANNCTFEYVSQPFLMDLEGKQGNFKNLREFVFKNIDGYFKIYSKHTPINLVRDLPQGFSALEPLVDLPIGINITRFQTLLALHRSYLTPGDSSSGWTAGAAAYYVGYLQPRTFLLKYNENGTITDAVDCALDPLSETKCTLKSFTVEKGIYQTSNFRVQPTESIVRFPNITNLCPFGEVFNATRFASVYAYNRKRISNCVADYSVLYNSASFSTFKCYGVSPTKLNDLCFTNVYADSFVIRGDEVRQIAPGQTGKIADYNYKLPDDFTGCVIAWNSNNLDSKVGGNYNYLYRLFRKSNLKPFERDISTEIYQAGSTPCNGVEGFNCYFPLQSYGFQPTNGVGYQPYRVVVLSFELLHAPATVCGPKKSTNLVKNKCVNFNFNGLTGTGVLTESNKKFLPFQQFGRDIADTTDAVRDPQTLEILDITPCSFGGVSVITPGTNTSNQVAVLYQDVNCTEVPVAIHADQLTPTWRVYSTGSNVFQTRAGCLIGAEHVNNSYECDIPIGAGICASYQTQTNSPSGAGSVASQSIIAYTMSLGAENSVAYSNNSIAIPTNFTISVTTEILPVSMTKTSVDCTMYICGDSTECSNLLLQYGSFCTQLNRALTGIAVEQDKNTQEVFAQVKQIYKTPPIKDFGGFNFSQILPDPSKPSKRSFIEDLLFNKVTLADAGFIKQYGDCLGDIAARDLICAQKFNGLTVLPPLLTDEMIAQYTSALLAGTITSGWTFGAGAALQIPFAMQMAYRFNGIGVTQNVLYENQKLIANQFNSAIGKIQDSLSSTASALGKLQDVVNQNAQALNTLVKQLSSNFGAISSVLNDILSRLDPPEAEVQIDRLITGRLQSLQTYVTQQLIRAAEIRASANLAATKMSECVLGQSKRVDFCGKGYHLMSFPQSAPHGVVFLHVTYVPAQEKNFTTAPAICHDGKAHFPREGVFVSNGTHWFVTQRNFYEPQIITTDNTFVSGNCDVVIGIVNNTVYDPLQPELDSFKEELDKYFKNHTSPDVDLGDISGINASVVNIQKEIDRLNEVAKNLNESLIDLQELGKYEQYIKGSGRENLYFQGGGGSGYIPEAPRDGQAYVRKDGEWVLLSTFLGHHHHHHHH

SEQ ID NO: 5536 - protein, 1281 aa, Artificial Sequence
  Description of Artificial Sequence: Synthetic polypeptide
MGILPSPGMPALLSLVSLLSVLLMGCVAETGTQCVNLTTRTQLPPAYTNSFTRGVYYPDKVFRSSVLHSTQDLFLPFFSNVTWFHAIHVSGTNGTKRFDNPVLPFNDGVYFASTEKSNIIRGWIFGTTLDSKTQSLLIVNNATNVVIKVCEFQFCNDPFLGVYYHKNNKSWMESEFRVYSSANNCTFEYVSQPFLMDLEGKQGNFKNLREFVFKNIDGYFKIYSKHTPINLVRDLPQGFSALEPLVDLPIGINITRFQTLLALHRSYLTPGDSSSGWTAGAAAYYVGYLQPRTFLLKYNENGTITDAVDCALDPLSETKCTLKSFTVEKGIYQTSNFRVQPTESIVRFPNITNLCPFGEVFNATRFASVYAWNRKRISNCVADYSVLYNSASFSTFKCYGVSPTKLNDLCFTNVYADSFVIRGDEVRQIAPGQTGKIADYNYKLPDDFTGCVIAWNSNNLDSKVGGNYNYLYRLFRKSNLKPFERDISTEIYQAGSTPCNGVEGFNCYFPLQSYGFQPTNGVGYQPYRVVVLSFELLHAPATVCGPKKSTNLVKNKCVNFNFNGLTGTGVLTESNKKFLPFQQFGRDIADTTDAVRDPQTLEILDITPCSFGGVSVITPGTNTSNQVAVLYQDVNCTEVPVAIHADQLTPTWRVYSTGSNVFQTRAGCLIGAEHVNNSYECDIPIGAGICASYQTQTNSPSGAGSVASQSIIAYTMSLGAENSVAYSNNSIAIPTNFTISVTTEILPVSMTKTSVDCTMYICGDSTECSNLLLQYGSFCTQLNRALTGIAVEQDKNTQEVFAQVKQIYKTPPIKDFGGFNFSQILPDPSKPSKRSFIEDLLFNKVTLADAGFIKQYGDCLGDIAARDLICAQKFNGLTVLPPLLTDEMIAQYTSALLAGTITSGWTFGAGAALQIPFAMQMAYRFNGIGVTQNVLYENQKLIANQFNSAIGKIQDSLSSTASALGKLQDVVNQNAQALNTLVKQLSSNFGAISSVLNDILSRLPPPEAEVQIDRLITGRLQSLQTYVTQQLIRAAEIRASANLAATKMSECVLGQSKRVDFCGKGYHLMSFPQSAPHGVVFLHVTYVPAQEKNFTTAPAICHDGKAHFPREGVFVSNGTHWFVTQRNFYEPQIITTDNTFVSGNCDVVIGIVNNTVYDPLQPELDSFKEELDKYFKNHTSPDVDLGDISGINASVVNIQKEIDRLNEVAKNLNESLIDLQELGKYEQYIKGSGRENLYFQGGGGSGYIPEAPRDGQAYVRKDGEWVLLSTFLGHHHHHHHH

SEQ ID NO: 5537 - protein, 1281 aa, Artificial Sequence
  Description of Artificial Sequence: Synthetic polypeptide
MGILPSPGMPALLSLVSLLSVLLMGCVAETGTQCVNLTTRTQLPPAYTNSFTRGVYYPDKVFRSSVLHSTQDLFLPFFSNVTWFHAIHVSGTNGTKRFDNPVLPFNDGVYFASTEKSNIIRGWIFGTTLDSKTQSLLIVNNATNVVIKVCEFQFCNDPFLGVYYHKNNKSWMESEFRVYSSANNCTFEYVSQPFLMDLEGKQGNFKNLREFVFKNIDGYFKIYSKHTPINLVRDLPQGFSALEPLVDLPIGINITRFQTLLALHRSYLTPGDSSSGWTAGAAAYYVGYLQPRTFLLKYNENGTITDAVDCALDPLSETKCTLKSFTVEKGIYQTSNFRVQPTESIVRFPNITNLCPFGEVFNATRFASVYAWNRKRISNCVADYSVLYNSASFSTFKCYGVSPTKLNDLCFTNVYADSFVIRGDEVRQIAPGQTGKIADYNYKLPDDFTGCVIAWNSNNLDSKVGGNYNYLYRLFRKSNLKPFERDISTEIYQAGSTPCNGVEGFNCYFPLQSYGFQPTNGVGYQPYRVVVLSFELLHAPATVCGPKKSTNLVKNKCVNFNFNGLTGTGVLTESNKKFLPFQQFGRDIADTTDAVRDPQTLEILDITPCSFGGVSVITPGTNTSNQVAVLYQDVNCTEVPVAIHADQLTPTWRVYSTGSNVFQTRAGCLIGAEHVNNSYECDIPIGAGICASYQTQTNSPSGAGSVASQSIIAYTMSLGAENSVAYSNNSIAIPTNFTISVTTEILPVSMTKTSVDCTMYICGDSTECSNLLLQYGSFCTQLNRALTGIAVEQDKNTQEVFAQVKQIYKTPPIKDFGGFNFSQILPDPSKPSKRSFIEDLLFNKVTLADAGFIKQYGDCLGDIAARDLICAQKFNGLTVLPPLLTDEMIAQYTSALLAGTITSGWTFGFGAALQIPFAMQMAYRFNGIGVTQNVLYENQKLIANQFNSAIGKIQDSLSSTASALGKLQDVVNQNAQALNTLVKQLSSNFGAISSVLNDILSRLDPPEAEVQIDRLITGRLQSLQTYVTQQLIRAAEIRASANLAATKMSECVLGQSKRVDFCGKGYHLMSFPQSAPHGVVFLHVTYVPAQEKNFTTAPAICHDGKAHFPREGVFVSNGTHWFVTQRNFYEPQIITTDNTFVSGNCDVVIGIVNNTVYDPLQPELDSFKEELDKYFKNHTSPDVDLGDISGINASVVNIQKEIDRLNEVAKNLNESLIDLQELGKYEQYIKGSGRENLYFQGGGGSGYIPEAPRDGQAYVRKDGEWVLLSTFLGHHHHHHHH

SEQ ID NO: 5538 - protein, 1281 aa, Artificial Sequence
  Description of Artificial Sequence: Synthetic polypeptide
MGILPSPGMPALLSLVSLLSVLLMGCVAETGTQCVNLTTRTQLPPAYTNSFTRGVYYPDKVFRSSVLHSTQDLFLPFFSNVTWFHAIHVSGTNGTKRFDNPVLPFNDGVYFASTEKSNIIRGWIFGTTLDSKTQSLLIVNNATNVVIKVCEFQFCNDPFLGVYYHKNNKSWMESEFRVYSSANNCTFEYVSQPFLMDLEGKQGNFKNLREFVFKNIDGYFKIYSKHTPINLVRDLPQGFSALEPLVDLPIGINITRFQTLLALHRSYLTPGDSSSGWTAGAAAYYVGYLQPRTFLLKYNENGTITDAVDCALDPLSETKCTLKSFTVEKGIYQTSNFRVQPTESIVRFPNITNLCPFGEVFNATRFASVYAWNRKRISNCVADYSVLYNSASFSTFKCYGVSPTKLNDLCFTNVYADSFLIRGDEVRQIAPGQTGKIADYNYKLPDDFTGCVIAWNSNNLDSKVGGNYNYLYRLFRKSNLKPFERDISTEIYQAGSTPCNGVEGFNCYFPLQSYGFQPTNGVGYQPYRVVVLSFELLHAPATVCGPKKSTNLVKNKCVNFNFNGLTGTGVLTESNKKFLPFQQFGRDIADTTDAVRDPQTLEILDITPCSFGGVSVITPGTNTSNQVAVLYQDVNCTEVPVAIHADQLTPTWRVYSTGSNVFQTRAGCLIGAEHVNNSYECDIPIGAGICASYQTQTNSPSGAGSVASQSIIAYTMSLGAENSVAYSNNSIAIPTNFTISVTTEILPVSMTKTSVDCTMYICGDSTECSNLLLQYGSFCTQLNRALTGIAVEQDKNTQEVFAQVKQIYKTPPIKDFGGFNFSQILPDPSKPSKRSFIEDLLFNKVTLADAGFIKQYGDCLGDIAARDLICAQKFNGLTVLPPLLTDEMIAQYTSALLAGTITSGWTFGAGAALQIPFAMQMAYRFNGIGVTQNVLYENQKLIANQFNSAIGKIQDSLSSTASALGKLQDVVNQNAQALNTLVKQLSSNFGAISSVLNDILSRLDPPEAEVQIDRLITGRLQSLQTYVTQQLIRAAEIRASANLAATKMSECVLGQSKRVDFCGKGYHLMSFPQSAPHGVVFLHVTYVPAQEKNFTTAPAICHDGKAHFPREGVFVSNGTHWFVTQRNFYEPQIITTDNTFVSGNCDVVIGIVNNTVYDPLQPELDSFKEELDKYFKNHTSPDVDLGDISGINASVVNIQKEIDRLNEVAKNLNESLIDLQELGKYEQYIKGSGRENLYFQGGGGSGYIPEAPRDGQAYVRKDGEWVLLSTFLGHHHHHHHH

SEQ ID NO: 5539 - protein, 1281 aa, Artificial Sequence
  Description of Artificial Sequence: Synthetic polypeptide
MGILPSPGMPALLSLVSLLSVLLMGCVAETGTQCVNLTTRTQLPPAYTNSFTRGVYYPDKVFRSSVLHSTQDLFLPFFSNVTWFHAIHVSGTNGTKRFDNPVLPFNDGVYFASTEKSNIIRGWIFGTTLDSKTQSLLIVNNATNVVIKVCEFQFCNDPFLGVYYHKNNKSWMESEFRVYSSANNCTFEYVSQPFLMDLEGKQGNFKNLREFVFKNIDGYFKIYSKHTPINLVRDLPQGFSALEPLVDLPIGINITRFQTLLALHRSYLTPGDSSSGWTAGAAAYYVGYLQPRTFLLKYNENGTITDAVDCALDPLSETKCTLKSFTVEKGIYQTSNFRVQPTESIVRFPNITNLCPFGEVFNATRFASVYAWNRKRISNCVADYSVLYNSASFSTFKCYGVSPTKLNDLCFTNVYADSFVIRGDEVRQIAPGQTGKIADYNYKLPDDFTGCVIAWNSNLLDSKVGGNYNYLYRLFRKSNLKPFERDISTEIYQAGSTPCNGVEGFNCYFPLQSYGFQPTNGVGYQPYRVVVLSFELLHAPATVCGPKKSTNLVKNKCVNFNFNGLTGTGVLTESNKKFLPFQQFGRDIADTTDAVRDPQTLEILDITPCSFGGVSVITPGTNTSNQVAVLYQDVNCTEVPVAIHADQLTPTWRVYSTGSNVFQTRAGCLIGAEHVNNSYECDIPIGAGICASYQTQTNSPSGAGSVASQSIIAYTMSLGAENSVAYSNNSIAIPTNFTISVTTEILPVSMTKTSVDCTMYICGDSTECSNLLLQYGSFCTQLNRALTGIAVEQDKNTQEVFAQVKQIYKTPPIKDFGGFNFSQILPDPSKPSKRSFIEDLLFNKVTLADAGFIKQYGDCLGDIAARDLICAQKFNGLTVLPPLLTDEMIAQYTSALLAGTITSGWTFGAGAALQIPFAMQMAYRFNGIGVTQNVLYENQKLIANQFNSAIGKIQDSLSSTASALGKLQDVVNQNAQALNTLVKQLSSNFGAISSVLNDILSRLDPPEAEVQIDRLITGRLQSLQTYVTQQLIRAAEIRASANLAATKMSECVLGQSKRVDFCGKGYHLMSFPQSAPHGVVFLHVTYVPAQEKNFTTAPAICHDGKAHFPREGVFVSNGTHWFVTQRNFYEPQIITTDNTFVSGNCDVVIGIVNNTVYDPLQPELDSFKEELDKYFKNHTSPDVDLGDISGINASVVNIQKEIDRLNEVAKNLNESLIDLQELGKYEQYIKGSGRENLYFQGGGGSGYIPEAPRDGQAYVRKDGEWVLLSTFLGHHHHHHHH

SEQ ID NO: 5540 - protein, 1281 aa, Artificial Sequence
  Description of Artificial Sequence: Synthetic polypeptide
MGILPSPGMPALLSLVSLLSVLLMGCVAETGTQCVNLTTRTQLPPAYTNSFTRGVYYPDKVFRSSVLHSTQDLFLPFFSNVTWFHAIHVSGTNGTKRFDNPVLPFNDGVYFASTEKSNIIRGWIFGTTLDSKTQSLLIVNNATNVVIKVCEFQFCNDPFLGVYYHKNNKSWMESEFRVYSSANNCTFEYVSQPFLMDLEGKQGNFKNLREFVFKNIDGYFKIYSKHTPINLVRDLPQGFSALEPLVDLPIGINITRFQTLLALHRSYLTPGDSSSGWTAGAAAYYVGYLQPRTFLLKYNENGTITDAVDCALDPLSETKCTLKSFTVEKGIYQTSNFRVQPTESIVRFPNITNLCPFGEVFNATRFASVYAWNRKRISNCVADYSVLYNSASFSTFKCYGVSPTKLNDLCFTNVYADSFVIRGDEVRQIAPGQTGKIADYNYKLPDDFTGCVIAWNSNNLDSKVGGNYNYLYRLFRKSNLKPFERDISTEIYQAGSTPCNGVEGFNCYFPLQSYGFQPTNGVGYQPYRVVVLSFELLHAPATVCGPKKSTNLVKNKCVNFNFNGLTGTGVLTESNKKFLPFQQFGRDIADTTDAVRDPQTLEILDITPCSFGGVSVITPGTNTSNQVAVLYQDVNCTEVPVAIHADQLTPTWRVYSTGSNVFQTRAGCLIGAEHVNNSYECDIPIGAGICASYQTQTNSPSGAGSVASQSIIAYTMSLGAENSIAYSNNSIAIPTNFTISVTTEILPVSMTKTSVDCTMYICGDSTECSNLLLQYGSFCTQLNRALTGIAVEQDKNTQEVFAQVKQIYKTPPIKDFGGFNFSQILPDPSKPSKRSFIEDLLFNKVTLADAGFIKQYGDCLGDIAARDLICAQKFNGLTVLPPLLTDEMIAQYTSALLAGTITSGWTFGAGAALQIPFAMQMAYRFNGIGVTQNVLYENQKLIANQFNSAIGKIQDSLSSTASALGKLQDVVNQNAQALNTLVKQLSSNFGAISSVLNDILSRLDPPEAEVQIDRLITGRLQSLQTYVTQQLIRAAEIRASANLAATKMSECVLGQSKRVDFCGKGYHLMSFPQSAPHGVVFLHVTYVPAQEKNFTTAPAICHDGKAHFPREGVFVSNGTHWFVTQRNFYEPQIITTDNTFVSGNCDVVIGIVNNTVYDPLQPELDSFKEELDKYFKNHTSPDVDLGDISGINASVVNIQKEIDRLNEVAKNLNESLIDLQELGKYEQYIKGSGRENLYFQGGGGSGYIPEAPRDGQAYVRKDGEWVLLSTFLGHHHHHHHH

SEQ ID NO: 5541 - protein, 1281 aa, Artificial Sequence
  Description of Artificial Sequence: Synthetic polypeptide
MGILPSPGMPALLSLVSLLSVLLMGCVAETGTQCVNLTTRTQLPPAYTNSFTRGVYYPDKVFRSSVLHSTQDLFLPFFSNVTWFHAIHVSGTNGTKRFDNPVLPFNDGVYFASTEKSNIIRGWIFGTTLDSKTQSLLIVNNATNVVIKVCEFQFCNDPFLGVYYHKNNKSWMESEFRVYSSANNCTFEYVSQPFLMDLEGKQGNFKNLREFVFKNIDGYFKIYSKHTPINLVRDLPQGFSALEPLVDLPIGINITRFQTLLALHRSYLTPGDSSSGWTAGAAAYYVGYLQPRTFLLKYNENGTITDAVDCALDPLSETKCTLKSFTVEKGIYQTSNFRVQPTESIVRFPNITNLCPFGEVFNATRFASVYAWNRKRISNCVADYSVLYNSASFSTFKCYGVSPTKLNDLCFTNVYADNFVIRGDEVRQIAPGQTGKIADYNYKLPDDFTGCVIAWNSNNLDSKVGGNYNYLYRLFRKSNLKPFERDISTEIYQAGSTPCNGVEGFNCYFPLQSYGFQPTNGVGYQPYRVVVLSFELLHAPATVCGPKKSTNLVKNKCVNFNFNGLTGTGVLTESNKKFLPFQQFGRDIADTTDAVRDPQTLEILDITPCSFGGVSVITPGTNTSNQVAVLYQDVNCTEVPVAIHADQLTPTWRVYSTGSNVFQTRAGCLIGAEHVNNSYECDIPIGAGICASYQTQTNSPSGAGSVASQSIIAYTMSLGAENSVAYSNNSIAIPTNFTISVTTEILPVSMTKTSVDCTMYICGDSTECSNLLLQYGSFCTQLNRALTGIAVEQDKNTQEVFAQVKQIYKTPPIKDFGGFNFSQILPDPSKPSKRSFIEDLLFNKVTLADAGFIKQYGDCLGDIAARDLICAQKFNGLTVLPPLLTDEMIAQYTSALLAGTITSGWTFGAGAALQIPFAMQMAYRFNGIGVTQNVLYENQKLIANQFNSAIGKIQDSLSSTASALGKLQDVVNQNAQALNTLVKQLSSNFGAISSVLNDILSRLDPPEAEVQIDRLITGRLQSLQTYVTQQLIRAAEIRASANLAATKMSECVLGQSKRVDFCGKGYHLMSFPQSAPHGVVFLHVTYVPAQEKNFTTAPAICHDGKAHFPREGVFVSNGTHWFVTQRNFYEPQIITTDNTFVSGNCDVVIGIVNNTVYDPLQPELDSFKEELDKYFKNHTSPDVDLGDISGINASVVNIQKEIDRLNEVAKNLNESLIDLQELGKYEQYIKGSGRENLYFQGGGGSGYIPEAPRDGQAYVRKDGEWVLLSTFLGHHHHHHHH

SEQ ID NO: 5542 - protein, 1281 aa, Artificial Sequence
  Description of Artificial Sequence: Synthetic polypeptide
MGILPSPGMPALLSLVSLLSVLLMGCVAETGTQCVNLTTRTQLPPAYTNSFTRGVYYPDKVFRSSVLHSTQDLFLPFFSNVTWFHAIHVSGTNGTKRFDNPVLPFNDGVYFASTEKSNIIRGWIFGTTLDSKTQSLLIVNNATNVVIKVCEFQFCNDPFLGVYYHKNNKSWMESEFRVYSSANNCTFEYVSQPFLMDLEGKQGNFKNLREFVFKNIDGYFKIYSKHTPINLVRDLPQGFSALEPLVDLPIGINITRFQTLLALHRSYLTPGDSSSGWTAGAAAYYVGYLQPRTFLLKYNENGTITDAVDCALDPLSETKCTLKSFTVEKGIYQTSNFRVQPTESIVRFPNITNLCPFGEVFNATRFASVYAWNRKRISNCVADYSVLYNSASFSTFKCYGVSPTKLNDLCFTNVYADSFVIRGDEVRQIAPGQTGKIADYNYKLPDDFTGCVIAWNSNNLDSKVGGNYNYLYRLFRKSNLKPFERDISTEIYQAGSTPCNGVEGFNCYFPLQSYGFQPTNGVGYQPYRVVVLSFELLHAPATVCGPKKSTNLVKNKCVNFNFNGLTGTGVLTESNKKFLPFQQFGRDIADTTDAVRDPQTLEILDITPCSFGGVSVITPGTNTSNQVAVLYQDVNCTEVPVAIHADQLTPTWRVYSTGSNVFQTRAGCLIGAEHVNNSYECDIPIGAGICASYQTQTNSPSGAGSVASQSIIAYTMSLGAENSVAYSNNSIAIPTNFTISVTTEILPVSMTKTSVDCTMYICGDSTECSNLLLQYGSFCTQLNRALTGIAVEQDKNTQEVFAQVKQIYKTPPIKDFGGFNFSQILPDPSKPSKRSFIEDLLFNKVTLADAGFIKQYGDCLGDIAARDLICAQKFNGLTVLPPLLTDEMIAQYTSALLAGTITSGWTFGAGAALQIPFAMQMAYRFNGIGVTQNVLYENQKLIANQFNSAIGKIQDSLSSTASALGKLQDVVNQNAQALNTLVKQLSSNFGAISSVLNDILSRLDPPEAEVQIDRLITGRLQSLQTYVTQQLIRAAEIRASANLAATKMSECVLGQSKRVDFCGKGYHLMSFPQSAPHGVVFLHVTYVPAQQKNFTTAPAICHDGKAHFPREGVFVSNGTHWFVTQRNFYEPQIITTDNTFVSGNCDVVIGIVNNTVYDPLQPELDSFKEELDKYFKNHTSPDVDLGDISGINASVVNIQKEIDRLNEVAKNLNESLIDLQELGKYEQYIKGSGRENLYFQGGGGSGYIPEAPRDGQAYVRKDGEWVLLSTFLGHHHHHHHH

SEQ ID NO: 5543 - protein, 1281 aa, Artificial Sequence
  Description of Artificial Sequence: Synthetic polypeptide
MGILPSPGMPALLSLVSLLSVLLMGCVAETGTQCVNLTTRTQLPPAYTNSFTRGVYYPDKVFRSSVLHSTQDLFLPFFSNVTWFHAIHVSGTNGTKRFDNPVLPFNDGVYFASTEKSNIIRGWIFGTTLDSKTQSLLIVNNATNVVIKVCEFQFCNDPFLGVYYHKNNKSWMESEFRVYSSANNCTFEYVSQPFLMDLEGKQGNFKNLREFVFKNIDGYFKIYSKHTPINLVRDLPQGFSALEPLVDLPIGINITRFQTLLALHRSYLTPGDSSSGWTAGAAAYYVGYLQPRTFLLKYNENGTITDAVDCALDPLSETKCTLKSFTVEKGIYQTSNFRVQPTESIVRFPNITNLCPFGEVFNATRFASVYAWNRKRISNCVADYSVLYNSASFSTFKCYGVSPTKLNDLCFTNVYADSFVIRGDEVRQIAPGQTGKIADYNYKLPDDFTGCVIAWNSNNLDSKVGGNYNYLYRLFRKSNLKPFERDISTEIYQAGSTPCNGVEGFNWYFPLQSYGFQPTNGVGYQPYRVVVLSFELLHAPATVCGPKKSTNLVKNKCVNFNFNGLTGTGVLTESNKKFLPFQQFGRDIADTTDAVRDPQTLEILDITPCSFGGVSVITPGTNTSNQVAVLYQDVNCTEVPVAIHADQLTPTWRVYSTGSNVFQTRAGCLIGAEHVNNSYECDIPIGAGICASYQTQTNSPSGAGSVASQSIIAYTMSLGAENSVAYSNNSIAIPTNFTISVTTEILPVSMTKTSVDCTMYICGDSTECSNLLLQYGSFCTQLNRALTGIAVEQDKNTQEVFAQVKQIYKTPPIKDFGGFNFSQILPDPSKPSKRSFIEDLLFNKVTLADAGFIKQYGDCLGDIAARDLICAQKFNGLTVLPPLLTDEMIAQYTSALLAGTITSGWTFGAGAALQIPFAMQMAYRFNGIGVTQNVLYENQKLIANQFNSAIGKIQDSLSSTASALGKLQDVVNQNAQALNTLVKQLSSNFGAISSVLNDILSRLDPPEAEVQIDRLITGRLQSLQTYVTQQLIRAAEIRASANLAATKMSECVLGQSKRVDFCGKGYHLMSFPQSAPHGVVFLHVTYVPAQEKNFTTAPAICHDGKAHFPREGVFVSNGTHWFVTQRNFYEPQIITTDNTFVSGNCDVVIGIVNNTVYDPLQPELDSFKEELDKYFKNHTSPDVDLGDISGINASVVNIQKEIDRLNEVAKNLNESLIDLQELGKYEQYIKGSGRENLYFQGGGGSGYIPEAPRDGQAYVRKDGEWVLLSTFLGHHHHHHHH
